United States Patent Application Publication US 2007/0042381 A1 - sequence listing, part 65

SEQ ID NO: 2957698 - RNA, 21 nt, Human
ucagagacuccugcaggcagc

SEQ ID NO: 2957699 - RNA, 20 nt, Human
ucagagacuccugcaggcag

SEQ ID NO: 2957700 - RNA, 17 nt, Human
ucagagacuccugcagg

SEQ ID NO: 2957701 - RNA, 12 nt, Human
ucagagccugca

SEQ ID NO: 2957702 - RNA, 23 nt, Human
ucagagagggugggagugggccc

SEQ ID NO: 2957703 - RNA, 21 nt, Human
ucagagagggugggagugggc

SEQ ID NO: 2957704 - RNA, 16 nt, Human
ucagagagggugggag

SEQ ID NO: 2957705 - RNA, 13 nt, Human
ucagagccugcag

SEQ ID NO: 2957706 - RNA, 14 nt, Human
ucagagccugcagu

SEQ ID NO: 2957707 - RNA, 15 nt, Human
ucagagccugcaguu

SEQ ID NO: 2957708 - RNA, 18 nt, Human
ucagagccugcaguuauu

SEQ ID NO: 2957709 - RNA, 14 nt, Human
ucagaagacacuga

SEQ ID NO: 2957710 - RNA, 22 nt, Human
ucagaaguuucugccgcagccc

SEQ ID NO: 2957711 - RNA, 19 nt, Human
ucagaaguuucugccgcag

SEQ ID NO: 2957712 - RNA, 16 nt, Human
accauuggggcuccca

SEQ ID NO: 2957713 - RNA, 17 nt, Human
accauuggggcucccag

SEQ ID NO: 2957714 - RNA, 18 nt, Human
accauuggggcucccagc

SEQ ID NO: 2957715 - RNA, 21 nt, Human
ucacucuuauugcccacgcug

SEQ ID NO: 2957716 - RNA, 23 nt, Human
ucacucuuauugcccacgcugga

SEQ ID NO: 2957717 - RNA, 22 nt, Human
accauggucggaaaacaugcua

SEQ ID NO: 2957718 - RNA, 13 nt, Human
acccacugcucug

SEQ ID NO: 2957719 - RNA, 14 nt, Human
acccacugcucugg

SEQ ID NO: 2957720 - RNA, 15 nt, Human
acccacugcucuggu

SEQ ID NO: 2957721 - RNA, 11 nt, Human
acccacugcuu

SEQ ID NO: 2957722 - RNA, 10 nt, Human
acccacugcu

SEQ ID NO: 2957723 - RNA, 11 nt, Human
acccacugcuc

SEQ ID NO: 2957724 - RNA, 23 nt, Human
accauuucuugagguaaaagcau

SEQ ID NO: 2957725 - RNA, 17 nt, Human
acuacucccccaggugg

SEQ ID NO: 2957726 - RNA, 12 nt, Human
acucaccccagc

SEQ ID NO: 2957727 - RNA, 21 nt, Human
acucacauuuauucugcucac

SEQ ID NO: 2957728 - RNA, 20 nt, Human
ucccgaauagcugggacuac

SEQ ID NO: 2957729 - RNA, 15 nt, Human
ucccgaguagcuggg

SEQ ID NO: 2957730 - RNA, 18 nt, Human
ucccgaguagcugggacu

SEQ ID NO: 2957731 - RNA, 16 nt, Human
ucccgaguagcuggga

SEQ ID NO: 2957732 - RNA, 17 nt, Human
ucccgaguagcugggac

SEQ ID NO: 2957733 - RNA, 16 nt, Human
uccccucggagaagag

SEQ ID NO: 2957734 - RNA, 17 nt, Human
uccccucggagaagagc

SEQ ID NO: 2957735 - RNA, 14 nt, Human
uccccucuccucca

SEQ ID NO: 2957736 - RNA, 13 nt, Human
ucccugauuuaau

SEQ ID NO: 2957737 - RNA, 16 nt, Human
ucccugaaggccccgc

SEQ ID NO: 2957738 - RNA, 11 nt, Human
ucccugagcag

SEQ ID NO: 2957739 - RNA, 21 nt, Human
ucccuccaccucccugcaaua

SEQ ID NO: 2957740 - RNA, 23 nt, Human
ucccuccaccucccugcaauaaa

SEQ ID NO: 2957741 - RNA, 16 nt, Human
ucccggcuuuggugcg

SEQ ID NO: 2957742 - RNA, 13 nt, Human
ucccucccuccac

SEQ ID NO: 2957743 - RNA, 14 nt, Human
ucccucccuccacc

SEQ ID NO: 2957744 - RNA, 15 nt, Human
ucccucccuccaccu

SEQ ID NO: 2957745 - RNA, 16 nt, Human
ucccucccuccaccuc

SEQ ID NO: 2957746 - RNA, 14 nt, Human
ucccucuuucccuc

SEQ ID NO: 2957747 - RNA, 18 nt, Human
ucccucuuucccucccuu

SEQ ID NO: 2957748 - RNA, 20 nt, Human
ucccucuuucccucccuucc

SEQ ID NO: 2957749 - RNA, 15 nt, Human
ucccugaaggccccg

SEQ ID NO: 2957750 - RNA, 11 nt, Human
ucccugaaggc

SEQ ID NO: 2957751 - RNA, 21 nt, Human
ucccucuuucccucccuuccu

SEQ ID NO: 2957752 - RNA, 15 nt, Human
acucauucuucugua

SEQ ID NO: 2957753 - RNA, 14 nt, Human
acucauugaccuga

SEQ ID NO: 2957754 - RNA, 18 nt, Human
acuccagaaagugacaag

SEQ ID NO: 2957755 - RNA, 21 nt, Human
acuccaaagaaauguaaggga

SEQ ID NO: 2957756 - RNA, 17 nt, Human
acuccagaauuucccaa

SEQ ID NO: 2957757 - RNA, 15 nt, Human
acuccagaauuuccc

SEQ ID NO: 2957758 - RNA, 14 nt, Human
acuccaaagaaaug

SEQ ID NO: 2957759 - RNA, 15 nt, Human
acucauugaccugag

SEQ ID NO: 2957760 - RNA, 18 nt, Human
acuccaaagaaauguaag

SEQ ID NO: 2957761 - RNA, 15 nt, Human
acuccaaagaaaugu

SEQ ID NO: 2957762 - RNA, 17 nt, Human
acuccugcaggcagcca

SEQ ID NO: 2957763 - RNA, 19 nt, Human
acuccugcaggcagccagg

SEQ ID NO: 2957764 - RNA, 18 nt, Human
acuccugcaggcagccag

SEQ ID NO: 2957765 - RNA, 23 nt, Human
acuccagaauuucccaaagcagu

SEQ ID NO: 2957766 - RNA, 12 nt, Human
acuccagccugg

SEQ ID NO: 2957767 - RNA, 13 nt, Human
acuccagccuggg

SEQ ID NO: 2957768 - RNA, 12 nt, Human
ucccuuuuccuu

SEQ ID NO: 2957769 - RNA, 11 nt, Human
uccuaaauagc

SEQ ID NO: 2957770 - RNA, 17 nt, Human
uccggucccugucccag

SEQ ID NO: 2957771 - RNA, 16 nt, Human
uccuagaaauucccca

SEQ ID NO: 2957772 - RNA, 17 nt, Human
ucccugugucauuucaa

SEQ ID NO: 2957773 - RNA, 16 nt, Human
ucccugugucauuuca

SEQ ID NO: 2957774 - RNA, 17 nt, Human
ucccuuacgugaguccu

SEQ ID NO: 2957775 - RNA, 15 nt, Human
ucccugguggcagcu

SEQ ID NO: 2957776 - RNA, 12 nt, Human
ucccugucccag

SEQ ID NO: 2957777 - RNA, 21 nt, Human
acuccugcaggcagccaggcc

SEQ ID NO: 2957778 - RNA, 11 nt, Human
acuacaggcac

SEQ ID NO: 2957779 - RNA, 15 nt, Human
acuacaggcacccac

SEQ ID NO: 2957780 - RNA, 17 nt, Human
acuacaguccucccauc

SEQ ID NO: 2957781 - RNA, 13 nt, Human
acuacaguuuguu

SEQ ID NO: 2957782 - RNA, 14 nt, Human
acuacaguuuguua

SEQ ID NO: 2957783 - RNA, 12 nt, Human
acuaaccacgcu

SEQ ID NO: 2957784 - RNA, 18 nt, Human
acuaacauuuauuugagu

SEQ ID NO: 2957785 - RNA, 12 nt, Human
acuaacaggcuu

SEQ ID NO: 2957786 - RNA, 17 nt, Human
acuaacaggcuuaguga

SEQ ID NO: 2957787 - RNA, 18 nt, Human
acuaacaggcuuagugau

SEQ ID NO: 2957788 - RNA, 13 nt, Human
ucccagcacuuug

SEQ ID NO: 2957789 - RNA, 22 nt, Human
ucccagcacuuugggaggcuga

SEQ ID NO: 2957790 - RNA, 14 nt, Human
acuacauucuguua

SEQ ID NO: 2957791 - RNA, 15 nt, Human
acuacaguuuguuag

SEQ ID NO: 2957792 - RNA, 11 nt, Human
acuacauucug

SEQ ID NO: 2957793 - RNA, 12 nt, Human
acuacauucugu

SEQ ID NO: 2957794 - RNA, 13 nt, Human
acuacauucuguu

SEQ ID NO: 2957795 - RNA, 12 nt, Human
ucccagccccaa

SEQ ID NO: 2957796 - RNA, 13 nt, Human
ucccagccaggcc

SEQ ID NO: 2957797 - RNA, 14 nt, Human
ucccagccaggccc

SEQ ID NO: 2957798 - RNA, 15 nt, Human
ucccagccaggcccu

SEQ ID NO: 2957799 - RNA, 17 nt, Human
ucccagcugugcucugg

SEQ ID NO: 2957800 - RNA, 23 nt, Human
ucccagcacuuugggaggcugag

SEQ ID NO: 2957801 - RNA, 17 nt, Human
ucccagccagcaguuca

SEQ ID NO: 2957802 - RNA, 18 nt, Human
ucccagccagcaguucag

SEQ ID NO: 2957803 - RNA, 15 nt, Human
acuacauucuguuaa

SEQ ID NO: 2957804 - RNA, 17 nt, Human
uccccaccgcagacagg

SEQ ID NO: 2957805 - RNA, 21 nt, Human
uccccaccgcagacaggacca

SEQ ID NO: 2957806 - RNA, 18 nt, Human
uccccaccgcagacagga

SEQ ID NO: 2957807 - RNA, 22 nt, Human
uccccaccgcagacaggaccag

SEQ ID NO: 2957808 - RNA, 22 nt, Human
ucccauaugccugggcagaagg

SEQ ID NO: 2957809 - RNA, 16 nt, Human
ucccauaugccugggc

SEQ ID NO: 2957810 - RNA, 15 nt, Human
ucccaucacccgcua

SEQ ID NO: 2957811 - RNA, 22 nt, Human
ucccagucauuuaauaaaugug

SEQ ID NO: 2957812 - RNA, 14 nt, Human
ucccagucauuuaa

SEQ ID NO: 2957813 - RNA, 20 nt, Human
acgggaggguaaggcugugg

SEQ ID NO: 2957814 - RNA, 12 nt, Human
ucccaagugcca

SEQ ID NO: 2957815 - RNA, 13 nt, Human
ucccaagugccaa

SEQ ID NO: 2957816 - RNA, 15 nt, Human
ucccaagugccaaag

SEQ ID NO: 2957817 - RNA, 23 nt, Human
ucccaagugccaaagaagcagac

SEQ ID NO: 2957818 - RNA, 16 nt, Human
ucccacaaaggagagc

SEQ ID NO: 2957819 - RNA, 20 nt, Human
ucccaccccacacacgccag

SEQ ID NO: 2957820 - RNA, 15 nt, Human
ucccaccccacacac

SEQ ID NO: 2957821 - RNA, 17 nt, Human
acgugggcauucaaaug

SEQ ID NO: 2957822 - RNA, 20 nt, Human
acgugggcauucaaauguau

SEQ ID NO: 2957823 - RNA, 23 nt, Human
acguggcugcuucaaggauccug

SEQ ID NO: 2957824 - RNA, 17 nt, Human
acgguuuuacugcagcu

SEQ ID NO: 2957825 - RNA, 15 nt, Human
acgguuuuacugcag

SEQ ID NO: 2957826 - RNA, 22 nt, Human
uccauuuacuuaagacuuaaug

SEQ ID NO: 2957827 - RNA, 16 nt, Human
ucccaaagcagugcau

SEQ ID NO: 2957828 - RNA, 18 nt, Human
ucccaaacccuucagugc

SEQ ID NO: 2957829 - RNA, 13 nt, Human
ucccaaagugcug

SEQ ID NO: 2957830 - RNA, 14 nt, Human
ucccaaagugcugg

SEQ ID NO: 2957831 - RNA, 18 nt, Human
ucccaaagcagugcaugc

SEQ ID NO: 2957832 - RNA, 17 nt, Human
ucccaaagcagugcaug

SEQ ID NO: 2957833 - RNA, 21 nt, Human
ucccaaagcagugcaugcugu

SEQ ID NO: 2957834 - RNA, 17 nt, Human
uccauuuacuuaagacu

SEQ ID NO: 2957835 - RNA, 19 nt, Human
uccauuuacuuaagacuua

SEQ ID NO: 2957836 - RNA, 20 nt, Human
uccauuuacuuaagacuuaa

SEQ ID NO: 2957837 - RNA, 13 nt, Human
uccaugaagaugu

SEQ ID NO: 2957838 - RNA, 21 nt, Human
uccaugaagauguagaggaga

SEQ ID NO: 2957839 - RNA, 19 nt, Human
uccauccugaggcuccacu

SEQ ID NO: 2957840 - RNA, 20 nt, Human
uccauccugaggcuccacuu

SEQ ID NO: 2957841 - RNA, 21 nt, Human
uccauccugaggcuccacuug

SEQ ID NO: 2957842 - RNA, 23 nt, Human
acgccagauucuuuccugaggcu

SEQ ID NO: 2957843 - RNA, 22 nt, Human
acgccagauucuuuccugaggc

SEQ ID NO: 2957844 - RNA, 22 nt, Human
accgccuugcccagccuggaug

SEQ ID NO: 2957845 - RNA, 16 nt, Human
accgccuugcccagcc

SEQ ID NO: 2957846 - RNA, 17 nt, Human
accgccuugcccagccu

SEQ ID NO: 2957847 - RNA, 15 nt, Human
accgccuugcccagc

SEQ ID NO: 2957848 - RNA, 15 nt, Human
ucaggaagcucaggg

SEQ ID NO: 2957849 - RNA, 14 nt, Human
ucaggaagcucagg

SEQ ID NO: 2957850 - RNA, 13 nt, Human
ucaggaagcucag

SEQ ID NO: 2957851 - RNA, 12 nt, Human
ucaggaagcuca

SEQ ID NO: 2957852 - RNA, 23 nt, Human
ucaggaaaucaaauaugcaaagc

SEQ ID NO: 2957853 - RNA, 22 nt, Human
ucaggaaaucaaauaugcaaag

SEQ ID NO: 2957854 - RNA, 16 nt, Human
accuagggugauauua

SEQ ID NO: 2957855 - RNA, 21 nt, Human
accuagggugauauuaaccag

SEQ ID NO: 2957856 - RNA, 23 nt, Human
accuccugccucgaacuggcugc

SEQ ID NO: 2957857 - RNA, 15 nt, Human
ucauccuaagcuauu

SEQ ID NO: 2957858 - RNA, 13 nt, Human
accuccugccucg

SEQ ID NO: 2957859 - RNA, 12 nt, Human
accuccugccuc

SEQ ID NO: 2957860 - RNA, 12 nt, Human
accucccugcaa

SEQ ID NO: 2957861 - RNA, 13 nt, Human
accucccugcaau

SEQ ID NO: 2957862 - RNA, 14 nt, Human
ucauccuucuggaa

SEQ ID NO: 2957863 - RNA, 18 nt, Human
ucauccucauacccaccc

SEQ ID NO: 2957864 - RNA, 19 nt, Human
ucauccuccucagaucuuc

SEQ ID NO: 2957865 - RNA, 13 nt, Human
ucauccuccucag

SEQ ID NO: 2957866 - RNA, 22 nt, Human
ucauccuucuggaauaaggaga

SEQ ID NO: 2957867 - RNA, 16 nt, Human
ucaugaauuaguuuua

SEQ ID NO: 2957868 - RNA, 12 nt, Human
ucauuacuaaaa

SEQ ID NO: 2957869 - RNA, 21 nt, Human
ucauucuuuuugaaaugucaa

SEQ ID NO: 2957870 - RNA, 12 nt, Human
ucauucuucugu

SEQ ID NO: 2957871 - RNA, 13 nt, Human
ucauugaaaucuu

SEQ ID NO: 2957872 - RNA, 12 nt, Human
ucauugaaaucu

SEQ ID NO: 2957873 - RNA, 15 nt, Human
ucauugaccugaggc

SEQ ID NO: 2957874 - RNA, 14 nt, Human
ucauugaccugagg

SEQ ID NO: 2957875 - RNA, 12 nt, Human
ucauugaccuga

SEQ ID NO: 2957876 - RNA, 22 nt, Human
ucauugaaaucuuuuugcuuug

SEQ ID NO: 2957877 - RNA, 13 nt, Human
accuccugggcua

SEQ ID NO: 2957878 - RNA, 19 nt, Human
accucggugccuuccucuu

SEQ ID NO: 2957879 - RNA, 14 nt, Human
accugauugugucu

SEQ ID NO: 2957880 - RNA, 18 nt, Human
accugauugugucucuug

SEQ ID NO: 2957881 - RNA, 17 nt, Human
accugauugugucucuu

SEQ ID NO: 2957882 - RNA, 15 nt, Human
accugauugugucuc

SEQ ID NO: 2957883 - RNA, 22 nt, Human
accugaggcccuucucuccagc

SEQ ID NO: 2957884 - RNA, 21 nt, Human
accugaggcccuucucuccag

SEQ ID NO: 2957885 - RNA, 20 nt, Human
accugaggcccuucucucca

SEQ ID NO: 2957886 - RNA, 16 nt, Human
accugaggcccuucuc

SEQ ID NO: 2957887 - RNA, 15 nt, Human
accugaggcccuucu

SEQ ID NO: 2957888 - RNA, 14 nt, Human
accucuaaauucuu

SEQ ID NO: 2957889 - RNA, 14 nt, Human
accugaggcccuuc

SEQ ID NO: 2957890 - RNA, 14 nt, Human
accuggccucugca

SEQ ID NO: 2957891 - RNA, 17 nt, Human
accuggccucugcacuc

SEQ ID NO: 2957892 - RNA, 16 nt, Human
accuggccucugcacu

SEQ ID NO: 2957893 - RNA, 22 nt, Human
accuggauugugccuaaugugu

SEQ ID NO: 2957894 - RNA, 17 nt, Human
uccacccaccucagccu

SEQ ID NO: 2957895 - RNA, 22 nt, Human
uccaaucugugaugacauuccc

SEQ ID NO: 2957896 - RNA, 18 nt, Human
uccacccaccucagccuc

SEQ ID NO: 2957897 - RNA, 19 nt, Human
uccacccaccucagccucc

SEQ ID NO: 2957898 - RNA, 12 nt, Human
uccacccaggag

SEQ ID NO: 2957899 - RNA, 14 nt, Human
uccacccaggagcc

SEQ ID NO: 2957900 - RNA, 15 nt, Human
uccacccaggagccc

SEQ ID NO: 2957901 - RNA, 20 nt, Human
accuggccucugcacucccc

SEQ ID NO: 2957902 - RNA, 18 nt, Human
accuggccucugcacucc

SEQ ID NO: 2957903 - RNA, 23 nt, Human
accuggccucugcacuccccugc

SEQ ID NO: 2957904 - RNA, 14 nt, Human
accuggcucugugg

SEQ ID NO: 2957905 - RNA, 23 nt, Human
accuggcucuguggcgagccauu

SEQ ID NO: 2957906 - RNA, 19 nt, Human
accuguuucugcagccacu

SEQ ID NO: 2957907 - RNA, 18 nt, Human
accuuagacagucccugc

SEQ ID NO: 2957908 - RNA, 20 nt, Human
accuuagacagucccugcca

SEQ ID NO: 2957909 - RNA, 19 nt, Human
accuuagacagucccugcc

SEQ ID NO: 2957910 - RNA, 14 nt, Human
accugccaggaagc

SEQ ID NO: 2957911 - RNA, 12 nt, Human
accugccaggaa

SEQ ID NO: 2957912 - RNA, 15 nt, Human
accugccaggaagcc

SEQ ID NO: 2957913 - RNA, 14 nt, Human
uccaacccucauca

SEQ ID NO: 2957914 - RNA, 17 nt, Human
uccaacccucaucacca

SEQ ID NO: 2957915 - RNA, 16 nt, Human
uccaacccucaucacc

SEQ ID NO: 2957916 - RNA, 23 nt, Human
uccaacccucaucaccaacgucu

SEQ ID NO: 2957917 - RNA, 21 nt, Human
uccaagcuggucccacucagu

SEQ ID NO: 2957918 - RNA, 18 nt, Human
uccaaggguacuaaggaa

SEQ ID NO: 2957919 - RNA, 12 nt, Human
uccaagaagccc

SEQ ID NO: 2957920 - RNA, 16 nt, Human
uccaagcuggucccac

SEQ ID NO: 2957921 - RNA, 20 nt, Human
uccaagcuggucccacucag

SEQ ID NO: 2957922 - RNA, 21 nt, Human
uccaacuaucucauuuccaag

SEQ ID NO: 2957923 - RNA, 19 nt, Human
uccagacccggcugcgugg

SEQ ID NO: 2957924 - RNA, 15 nt, Human
uccagacccggcugc

SEQ ID NO: 2957925 - RNA, 18 nt, Human
uccagacccggcugcgug

SEQ ID NO: 2957926 - RNA, 14 nt, Human
uccagacccggcug

SEQ ID NO: 2957927 - RNA, 22 nt, Human
uccagaauuucccaaagcagug

SEQ ID NO: 2957928 - RNA, 20 nt, Human
uccagaauuucccaaagcag

SEQ ID NO: 2957929 - RNA, 16 nt, Human
uccagaauuucccaaa

SEQ ID NO: 2957930 - RNA, 14 nt, Human
accuuuugagugcc

SEQ ID NO: 2957931 - RNA, 20 nt, Human
accuuuugagugccuuacac

SEQ ID NO: 2957932 - RNA, 17 nt, Human
accuuuugagugccuua

SEQ ID NO: 2957933 - RNA, 13 nt, Human
uccagccccugga

SEQ ID NO: 2957934 - RNA, 12 nt, Human
uccagccccugg

SEQ ID NO: 2957935 - RNA, 18 nt, Human
uccaggcagcagacacau

SEQ ID NO: 2957936 - RNA, 17 nt, Human
uccaggcagcagacaca

SEQ ID NO: 2957937 - RNA, 14 nt, Human
uccaggcuguaucc

SEQ ID NO: 2957938 - RNA, 16 nt, Human
acgagcaggcuucuuc

SEQ ID NO: 2957939 - RNA, 17 nt, Human
acgccagauucuuuccu

SEQ ID NO: 2957940 - RNA, 19 nt, Human
acgccagauucuuuccuga

SEQ ID NO: 2957941 - RNA, 20 nt, Human
acgagcaggcuacugucagc

SEQ ID NO: 2957942 - RNA, 19 nt, Human
acgagcaggcuacugucag

SEQ ID NO: 2957943 - RNA, 21 nt, Human
uccaggcuguaucccaugagc

SEQ ID NO: 2957944 - RNA, 19 nt, Human
accuuuuuuauacauaaac

SEQ ID NO: 2957945 - RNA, 20 nt, Human
accuuuuuuauacauaaaca

SEQ ID NO: 2957946 - RNA, 22 nt, Human
accuuuuuuauacauaaacaag

SEQ ID NO: 2957947 - RNA, 21 nt, Human
accuuuuuuauacauaaacaa

SEQ ID NO: 2957948 - RNA, 14 nt, Human
acgagaaaacaaua

SEQ ID NO: 2957949 - RNA, 21 nt, Human
acugucagcuccccucggaga

SEQ ID NO: 2957950 - RNA, 18 nt, Human
acugggacaggggagaac

SEQ ID NO: 2957951 - RNA, 18 nt, Human
acuguccuacccacccuc

SEQ ID NO: 2957952 - RNA, 17 nt, Human
acuguccuacccacccu

SEQ ID NO: 2957953 - RNA, 13 nt, Human
acuguggguagac

SEQ ID NO: 2957954 - RNA, 18 nt, Human
acuguggguagacacaca

SEQ ID NO: 2957955 - RNA, 17 nt, Human
ucgggaggucgaggcag

SEQ ID NO: 2957956 - RNA, 21 nt, Human
ucgggaggucgaggcaggagg

SEQ ID NO: 2957957 - RNA, 19 nt, Human
ucgggaggucgaggcagga

SEQ ID NO: 2957958 - RNA, 12 nt, Human
ucgggcaugaca

SEQ ID NO: 2957959 - RNA, 11 nt, Human
ucgggcaugac

SEQ ID NO: 2957960 - RNA, 22 nt, Human
ucggguuuuauuguuuaaaauc

SEQ ID NO: 2957961 - RNA, 13 nt, Human
acuuaaucuaaau

SEQ ID NO: 2957962 - RNA, 15 nt, Human
acuuaaucuaaaugg

SEQ ID NO: 2957963 - RNA, 16 nt, Human
acuuaaucuaaaugga

SEQ ID NO: 2957964 - RNA, 17 nt, Human
acuguugcccaggcugg

SEQ ID NO: 2957965 - RNA, 18 nt, Human
acuguugcccaggcuggc

SEQ ID NO: 2957966 - RNA, 12 nt, Human
acuguugcccag

SEQ ID NO: 2957967 - RNA, 13 nt, Human
acuguugcccagg

SEQ ID NO: 2957968 - RNA, 14 nt, Human
acuguugcccaggc

SEQ ID NO: 2957969 - RNA, 17 nt, Human
acuuaaauaaugugaaa

SEQ ID NO: 2957970 - RNA, 18 nt, Human
acuuaaauaaugugaaac

SEQ ID NO: 2957971 - RNA, 16 nt, Human
acuuaaauaaugugaa

SEQ ID NO: 2957972 - RNA, 15 nt, Human
acuuaaauaauguga

SEQ ID NO: 2957973 - RNA, 19 nt, Human
acuguucucugcccuccaa

SEQ ID NO: 2957974 - RNA, 21 nt, Human
acuguucucugcccuccaaga

SEQ ID NO: 2957975 - RNA, 20 nt, Human
acuguucucugcccuccaag

SEQ ID NO: 2957976 - RNA, 15 nt, Human
acuguucucugcccu

SEQ ID NO: 2957977 - RNA, 14 nt, Human
acuguucucugccc

SEQ ID NO: 2957978 - RNA, 23 nt, Human
ucuaaguaaaaccacagcaguug

SEQ ID NO: 2957979 - RNA, 16 nt, Human
ucuacauacuauggaa

SEQ ID NO: 2957980 - RNA, 20 nt, Human
ucuaaguaaaaccacagcag

SEQ ID NO: 2957981 - RNA, 22 nt, Human
ucuaaguaaaaccacagcaguu

SEQ ID NO: 2957982 - RNA, 21 nt, Human
ucuaaguaaaaccacagcagu

SEQ ID NO: 2957983 - RNA, 16 nt, Human
ucuaaagcugccagcc

SEQ ID NO: 2957984 - RNA, 15 nt, Human
ucuaaagcugccagc

SEQ ID NO: 2957985 - RNA, 20 nt, Human
ucuaaagccauuguaguccu

SEQ ID NO: 2957986 - RNA, 14 nt, Human
ucuaaagcugccag

SEQ ID NO: 2957987 - RNA, 13 nt, Human
ucuaaagcugcca

SEQ ID NO: 2957988 - RNA, 15 nt, Human
uccuucagugccuua

SEQ ID NO: 2957989 - RNA, 14 nt, Human
uccuucagugccuu

SEQ ID NO: 2957990 - RNA, 17 nt, Human
uccuucagugccuuaug

SEQ ID NO: 2957991 - RNA, 16 nt, Human
uccuucagugccuuau

SEQ ID NO: 2957992 - RNA, 15 nt, Human
uccuuuagcgcccag

SEQ ID NO: 2957993 - RNA, 19 nt, Human
uccuuuagcgcccaguugg

SEQ ID NO: 2957994 - RNA, 14 nt, Human
uccuuguguuacua

SEQ ID NO: 2957995 - RNA, 23 nt, Human
uccuuguguuacuaaguuuuuau

SEQ ID NO: 2957996 - RNA, 22 nt, Human
uccuuuagcgcccaguugggug

SEQ ID NO: 2957997 - RNA, 23 nt, Human
uccuuuagcgcccaguugggugg

SEQ ID NO: 2957998 - RNA, 15 nt, Human
ucgagcaugccugga

SEQ ID NO: 2957999 - RNA, 18 nt, Human
ucgagcaugccuggaugg

SEQ ID NO: 2958000 - RNA, 16 nt, Human
ucgagcaugccuggau

SEQ ID NO: 2958001 - RNA, 19 nt, Human
ucgcgacaaugcaaaccau

SEQ ID NO: 2958002 - RNA, 16 nt, Human
ucgcgacaaugcaaac

SEQ ID NO: 2958003 - RNA, 18 nt, Human
ucgcuccaccuugcagcu

SEQ ID NO: 2958004 - RNA, 20 nt, Human
acugcuuaacuucacauauu

SEQ ID NO: 2958005 - RNA, 17 nt, Human
acugcuuccagugaggc

SEQ ID NO: 2958006 - RNA, 21 nt, Human
acugcuugugaaaggaaagag

SEQ ID NO: 2958007 - RNA, 15 nt, Human
acuggauuaaacuua

SEQ ID NO: 2958008 - RNA, 13 nt, Human
acuggcacaguuu

SEQ ID NO: 2958009 - RNA, 20 nt, Human
acuggcacaguuuucugaga

SEQ ID NO: 2958010 - RNA, 19 nt, Human
acuggcacaguuuucugag

SEQ ID NO: 2958011 - RNA, 18 nt, Human
acugcuuaacuucacaua

SEQ ID NO: 2958012 - RNA, 13 nt, Human
acugccuucucaa

SEQ ID NO: 2958013 - RNA, 19 nt, Human
acugccuucucaacuccaa

SEQ ID NO: 2958014 - RNA, 22 nt, Human
acugcaucaagaugugacaugu

SEQ ID NO: 2958015 - RNA, 20 nt, Human
acugcaucaagaugugacau

SEQ ID NO: 2958016 - RNA, 15 nt, Human
acugcauguuuguga

SEQ ID NO: 2958017 - RNA, 16 nt, Human
acugcauguuugugau

SEQ ID NO: 2958018 - RNA, 22 nt, Human
uccuagaaauuccccacccuga

SEQ ID NO: 2958019 - RNA, 21 nt, Human
uccuagaaauuccccacccug

SEQ ID NO: 2958020 - RNA, 16 nt, Human
acugcauaugaaagga

SEQ ID NO: 2958021 - RNA, 15 nt, Human
acugcauuauauuua

SEQ ID NO: 2958022 - RNA, 14 nt, Human
acugcauuauauuu

SEQ ID NO: 2958023 - RNA, 12 nt, Human
ucugaagaagau

SEQ ID NO: 2958024 - RNA, 20 nt, Human
agaaauaucugaaaauguau

SEQ ID NO: 2958025 - RNA, 14 nt, Human
agaaauauaauuga

SEQ ID NO: 2958026 - RNA, 19 nt, Human
agaaauaucugaaaaugua

SEQ ID NO: 2958027 - RNA, 13 nt, Human
ucugauacagaaa

SEQ ID NO: 2958028 - RNA, 19 nt, Human
ucugcacuccccugcuggg

SEQ ID NO: 2958029 - RNA, 18 nt, Human
ucugcacuccccugcugg

SEQ ID NO: 2958030 - RNA, 12 nt, Human
ucugacuauaac

SEQ ID NO: 2958031 - RNA, 23 nt, Human
ucugagacucgcgacaaugcaaa

SEQ ID NO: 2958032 - RNA, 22 nt, Human
ucugagacucgcgacaaugcaa

SEQ ID NO: 2958033 - RNA, 18 nt, Human
ucugcagcaauaaagcag

SEQ ID NO: 2958034 - RNA, 20 nt, Human
ucugcacuccccugcugggu

SEQ ID NO: 2958035 - RNA, 17 nt, Human
ucucucacuuguuuuau

SEQ ID NO: 2958036 - RNA, 21 nt, Human
ucucucaggccaaacucaccu

SEQ ID NO: 2958037 - RNA, 15 nt, Human
ucucucacuccuuga

SEQ ID NO: 2958038 - RNA, 13 nt, Human
ucucucacuccuu

SEQ ID NO: 2958039 - RNA, 18 nt, Human
acuuugaccucugcagca

SEQ ID NO: 2958040 - RNA, 15 nt, Human
acuuugaccucugca

SEQ ID NO: 2958041 - RNA, 16 nt, Human
acuuugaccucugcag

SEQ ID NO: 2958042 - RNA, 18 nt, Human
ucucucaucuguuacaca

SEQ ID NO: 2958043 - RNA, 19 nt, Human
ucucuccagccccuggaug

SEQ ID NO: 2958044 - RNA, 18 nt, Human
ucucuccagccccuggau

SEQ ID NO: 2958045 - RNA, 16 nt, Human
ucucuccagccccugg

SEQ ID NO: 2958046 - RNA, 17 nt, Human
ucucuccagccccugga

SEQ ID NO: 2958047 - RNA, 16 nt, Human
ucucuccuguaccucu

SEQ ID NO: 2958048 - RNA, 14 nt, Human
ucucuccuguaccu

SEQ ID NO: 2958049 - RNA, 17 nt, Human
ucucugcccuccaagac

SEQ ID NO: 2958050 - RNA, 16 nt, Human
ucucugcccuccaaga

SEQ ID NO: 2958051 - RNA, 15 nt, Human
ucucugcccuccaag

SEQ ID NO: 2958052 - RNA, 11 nt, Human
ucucugcccuc

SEQ ID NO: 2958053 - RNA, 12 nt, Human
ucucuggccuuc

SEQ ID NO: 2958054 - RNA, 13 nt, Human
agaaaaagaaaaa

SEQ ID NO: 2958055 - RNA, 20 nt, Human
ucucuuuaaugucacaggca

SEQ ID NO: 2958056 - RNA, 21 nt, Human
ucucuuuaaugucacaggcag

SEQ ID NO: 2958057 - RNA, 18 nt, Human
ucucuugagccugggagg

SEQ ID NO: 2958058 - RNA, 16 nt, Human
ucucuugauucauaau

SEQ ID NO: 2958059 - RNA, 14 nt, Human
ucucuugauucaua

SEQ ID NO: 2958060 - RNA, 21 nt, Human
ucucuggccuucggccuccau

SEQ ID NO: 2958061 - RNA, 22 nt, Human
ucucuggccuucggccuccauc

SEQ ID NO: 2958062 - RNA, 17 nt, Human
ucucuugagccugggag

SEQ ID NO: 2958063 - RNA, 17 nt, Human
agaaaaaggaugcacag

SEQ ID NO: 2958064 - RNA, 23 nt, Human
agaaacuuaagguuaccuuuguu

SEQ ID NO: 2958065 - RNA, 11 nt, Human
acuuuaaacua

SEQ ID NO: 2958066 - RNA, 16 nt, Human
acuuguguuuugcaag

SEQ ID NO: 2958067 - RNA, 21 nt, Human
ucuccuccuuuucacaguucu

SEQ ID NO: 2958068 - RNA, 14 nt, Human
acuuugaccucugc

SEQ ID NO: 2958069 - RNA, 17 nt, Human
acuuucuagccagagga

SEQ ID NO: 2958070 - RNA, 16 nt, Human
acuuucuagccagagg

SEQ ID NO: 2958071 - RNA, 16 nt, Human
ucuccauguuugaugu

SEQ ID NO: 2958072 - RNA, 13 nt, Human
ucucagggccugg

SEQ ID NO: 2958073 - RNA, 12 nt, Human
ucucagggccug

SEQ ID NO: 2958074 - RNA, 15 nt, Human
acuuguggacacagc

SEQ ID NO: 2958075 - RNA, 19 nt, Human
ucucagggccuggucguuu

SEQ ID NO: 2958076 - RNA, 15 nt, Human
ucucagggccugguc

SEQ ID NO: 2958077 - RNA, 14 nt, Human
ucucagggccuggu

SEQ ID NO: 2958078 - RNA, 11 nt, Human
ucuccaggcug

SEQ ID NO: 2958079 - RNA, 17 nt, Human
ucuccaaaauaaaacuu

SEQ ID NO: 2958080 - RNA, 19 nt, Human
ucuccaaaauaaaacuuuu

SEQ ID NO: 2958081 - RNA, 22 nt, Human
ucuccaaaauaaaacuuuuuaa

SEQ ID NO: 2958082 - RNA, 13 nt, Human
ucuccaaaauaaa

SEQ ID NO: 2958083 - RNA, 16 nt, Human
ucuccaggcuguaucc

SEQ ID NO: 2958084 - RNA, 16 nt, Human
acuucagcugacuuuu

SEQ ID NO: 2958085 - RNA, 11 nt, Human
acuucagcuga

SEQ ID NO: 2958086 - RNA, 23 nt, Human
ucucacacaugagcaucaggcca

SEQ ID NO: 2958087 - RNA, 21 nt, Human
ucuauuucuggaugaaugccc

SEQ ID NO: 2958088 - RNA, 11 nt, Human
ucucacuccuu

SEQ ID NO: 2958089 - RNA, 22 nt, Human
acuucgggaggucgaggcagga

SEQ ID NO: 2958090 - RNA, 13 nt, Human
ucucacuccuuga

SEQ ID NO: 2958091 - RNA, 12 nt, Human
ucucacucuguc

SEQ ID NO: 2958092 - RNA, 21 nt, Human
acuucuaaguaaaaccacagc

SEQ ID NO: 2958093 - RNA, 14 nt, Human
acuucuccacccug

SEQ ID NO: 2958094 - RNA, 23 nt, Human
acuucuaaguaaaaccacagcag

SEQ ID NO: 2958095 - RNA, 16 nt, Human
acuuguggacacagcu

SEQ ID NO: 2958096 - RNA, 17 nt, Human
acuuguggacacagcuc

SEQ ID NO: 2958097 - RNA, 18 nt, Human
acuuguggacacagcucu

SEQ ID NO: 2958098 - RNA, 16 nt, Human
acuugucaauaaaauc

SEQ ID NO: 2958099 - RNA, 19 nt, Human
acuugagcccagagugaac

SEQ ID NO: 2958100 - RNA, 15 nt, Human
acuucuccacccugc

SEQ ID NO: 2958101 - RNA, 16 nt, Human
acuucuccacccugcu

SEQ ID NO: 2958102 - RNA, 21 nt, Human
acuugaacccauauuuguaca

SEQ ID NO: 2958103 - RNA, 19 nt, Human
acuugaacccgggaggcag

SEQ ID NO: 2958104 - RNA, 20 nt, Human
acuugaacccgggaggcaga

SEQ ID NO: 2958105 - RNA, 15 nt, Human
ucuuacaucugaaau

SEQ ID NO: 2958106 - RNA, 18 nt, Human
ucuuaugggcuggguucu

SEQ ID NO: 2958107 - RNA, 22 nt, Human
ucuuagaugcaguucugaagaa

SEQ ID NO: 2958108 - RNA, 23 nt, Human
ucuuagaugcaguucugaagaag

SEQ ID NO: 2958109 - RNA, 12 nt, Human
ucuuagauguau

SEQ ID NO: 2958110 - RNA, 14 nt, Human
agacaguuggguuu

SEQ ID NO: 2958111 - RNA, 19 nt, Human
agacagucccugccaaugg

SEQ ID NO: 2958112 - RNA, 13 nt, Human
agacagucccugc

SEQ ID NO: 2958113 - RNA, 16 nt, Human
agacagcugccuggga

SEQ ID NO: 2958114 - RNA, 15 nt, Human
agacagcugccuggg

SEQ ID NO: 2958115 - RNA, 12 nt, Human
agacagucccug

SEQ ID NO: 2958116 - RNA, 22 nt, Human
agacaccuugacagggcacacc

SEQ ID NO: 2958117 - RNA, 19 nt, Human
agacaccuugacagggcac

SEQ ID NO: 2958118 - RNA, 24 nt, Human
agacacauguccaagaagcccagg

SEQ ID NO: 2958119 - RNA, 23 nt, Human
agacacaggcccggcuccaggcu

SEQ ID NO: 2958120 - RNA, 22 nt, Human
agacacauguccaagaagccca

SEQ ID NO: 2958121 - RNA, 21 nt, Human
agacacauguccaagaagccc

SEQ ID NO: 2958122 - RNA, 14 nt, Human
agacagcugccugg

SEQ ID NO: 2958123 - RNA, 13 nt, Human
agacagcugccug

SEQ ID NO: 2958124 - RNA, 17 nt, Human
agaauucucuuauccaa

SEQ ID NO: 2958125 - RNA, 18 nt, Human
agaauucucuaguuugau

SEQ ID NO: 2958126 - RNA, 19 nt, Human
agaauucucuaguuugauu

SEQ ID NO: 2958127 - RNA, 13 nt, Human
agacacaagccuu

SEQ ID NO: 2958128 - RNA, 15 nt, Human
agacacacaugaagu

SEQ ID NO: 2958129 - RNA, 14 nt, Human
agacacaagccuuc

SEQ ID NO: 2958130 - RNA, 19 nt, Human
agacacaggcccggcucca

SEQ ID NO: 2958131 - RNA, 20 nt, Human
agacacaggcccggcuccag

SEQ ID NO: 2958132 - RNA, 21 nt, Human
agacacaggcccggcuccagg

SEQ ID NO: 2958133 - RNA, 22 nt, Human
agacacaggcccggcuccaggc

SEQ ID NO: 2958134 - RNA, 17 nt, Human
agacacaggcccggcuc

SEQ ID NO: 2958135 - RNA, 17 nt, Human
agacacacugaagaagc

SEQ ID NO: 2958136 - RNA, 16 nt, Human
agacacacugaagaag

SEQ ID NO: 2958137 - RNA, 23 nt, Human
ucuguuuagauaauacaccacua

SEQ ID NO: 2958138 - RNA, 16 nt, Human
ucuguuuagauaauac

SEQ ID NO: 2958139 - RNA, 19 nt, Human
ucuguuuagauaauacacc

SEQ ID NO: 2958140 - RNA, 20 nt, Human
ucugugaugacauucccugc

SEQ ID NO: 2958141 - RNA, 12 nt, Human
ucuguauguguu

SEQ ID NO: 2958142 - RNA, 15 nt, Human
ucuguauguguucua

SEQ ID NO: 2958143 - RNA, 18 nt, Human
ucuguacgucugacaggc

SEQ ID NO: 2958144 - RNA, 20 nt, Human
agaauucucagaaucucaaa

SEQ ID NO: 2958145 - RNA, 20 nt, Human
agaauuauaauuaguuccuc

SEQ ID NO: 2958146 - RNA, 14 nt, Human
agaauucucuaguu

SEQ ID NO: 2958147 - RNA, 23 nt, Human
agaaccccaggguccuguagccc

SEQ ID NO: 2958148 - RNA, 21 nt, Human
agaauguguuuaaacuugguu

SEQ ID NO: 2958149 - RNA, 19 nt, Human
agaauuaguggcacuugcu

SEQ ID NO: 2958150 - RNA, 23 nt, Human
agaauuaacacaugauccugcaa

SEQ ID NO: 2958151 - RNA, 12 nt, Human
agaauguuuuca

SEQ ID NO: 2958152 - RNA, 18 nt, Human
ucuugagccuugaacuuu

SEQ ID NO: 2958153 - RNA, 19 nt, Human
ucuugagccuugaacuuug

SEQ ID NO: 2958154 - RNA, 15 nt, Human
agacucauucuucug

SEQ ID NO: 2958155 - RNA, 17 nt, Human
ucuugagccuugaacuu

SEQ ID NO: 2958156 - RNA, 22 nt, Human
agaccugcccucaagagcaaag

SEQ ID NO: 2958157 - RNA, 23 nt, Human
agacuauucaaacagucucagga

SEQ ID NO: 2958158 - RNA, 14 nt, Human
agacccggcugcgu

SEQ ID NO: 2958159 - RNA, 17 nt, Human
agacccucaugcugcca

SEQ ID NO: 2958160 - RNA, 20 nt, Human
ucuucuguacgucugacagg

SEQ ID NO: 2958161 - RNA, 23 nt, Human
agacauacuaaccagcagaaaug

SEQ ID NO: 2958162 - RNA, 22 nt, Human
ucuucugcuucagccucccgag

SEQ ID NO: 2958163 - RNA, 19 nt, Human
ucuucugcuucagccuccc

SEQ ID NO: 2958164 - RNA, 21 nt, Human
ucuucuguacgucugacaggc

SEQ ID NO: 2958165 - RNA, 22 nt, Human
ucuucuguacgucugacaggca

SEQ ID NO: 2958166 - RNA, 16 nt, Human
ucuuauuucauuucuu

SEQ ID NO: 2958167 - RNA, 15 nt, Human
ucuuauuucauuucu

SEQ ID NO: 2958168 - RNA, 17 nt, Human
ucuuauuuaaugaaaga

SEQ ID NO: 2958169 - RNA, 14 nt, Human
ucuugguuuguaaa

SEQ ID NO: 2958170 - RNA, 22 nt, Human
ucuuuaaugucacaggcagguc

SEQ ID NO: 2958171 - RNA, 16 nt, Human
ucuugguuuguaaauu

SEQ ID NO: 2958172 - RNA, 20 nt, Human
ucuuuaaugucacaggcagg

SEQ ID NO: 2958173 - RNA, 19 nt, Human
agacucgcgacaaugcaaa

SEQ ID NO: 2958174 - RNA, 18 nt, Human
agacucgcgacaaugcaa

SEQ ID NO: 2958175 - RNA, 17 nt, Human
agacucgcgacaaugca

SEQ ID NO: 2958176 - RNA, 15 nt, Human
agacucgcgacaaug

SEQ ID NO: 2958177 - RNA, 18 nt, Human
ucuuucuggcuaugcauu

SEQ ID NO: 2958178 - RNA, 13 nt, Human
ucuuucugcuuug

SEQ ID NO: 2958179 - RNA, 20 nt, Human
ucuuuauaauucuacuuuga

SEQ ID NO: 2958180 - RNA, 20 nt, Human
agacuuaaugagacuuuaaa

SEQ ID NO: 2958181 - RNA, 21 nt, Human
agacuuaaugagacuuuaaaa

SEQ ID NO: 2958182 - RNA, 20 nt, Human
agacucgcgacaaugcaaac

SEQ ID NO: 2958183 - RNA, 14 nt, Human
agacuguacaaagu

SEQ ID NO: 2958184 - RNA, 15 nt, Human
agacuguacaaagua

SEQ ID NO: 2958185 - RNA, 16 nt, Human
agacuguacaaaguag

SEQ ID NO: 2958186 - RNA, 14 nt, Human
agacuuuaaaagca

SEQ ID NO: 2958187 - RNA, 22 nt, Human
agacuucucuacccaucuuaaa

SEQ ID NO: 2958188 - RNA, 22 nt, Human
agagaaaaaauauuuuccugcc

SEQ ID NO: 2958189 - RNA, 19 nt, Human
agacuuuucuuucagccaa

SEQ ID NO: 2958190 - RNA, 24 nt, Human
agagacagaaagcagaacagugau

SEQ ID NO: 2958191 - RNA, 15 nt, Human
agagacagaaagcag

SEQ ID NO: 2958192 - RNA, 20 nt, Human
ugacacacagcucuguccug

SEQ ID NO: 2958193 - RNA, 16 nt, Human
ugaauuuuacauggcu

SEQ ID NO: 2958194 - RNA, 15 nt, Human
ugaauuucuuuugcc

SEQ ID NO: 2958195 - RNA, 17 nt, Human
agaucacgccacugcac

SEQ ID NO: 2958196 - RNA, 18 nt, Human
agaucacgccacugcacu

SEQ ID NO: 2958197 - RNA, 15 nt, Human
agaguuuagcccuga

SEQ ID NO: 2958198 - RNA, 12 nt, Human
agauaaaugugc

SEQ ID NO: 2958199 - RNA, 12 nt, Human
agauacugaaau

SEQ ID NO: 2958200 - RNA, 13 nt, Human
agauacugaaaua

SEQ ID NO: 2958201 - RNA, 15 nt, Human
agauacugaaauaaa

SEQ ID NO: 2958202 - RNA, 14 nt, Human
agaucacgccacug

SEQ ID NO: 2958203 - RNA, 15 nt, Human
agaucacgccacugc

SEQ ID NO: 2958204 - RNA, 16 nt, Human
agaucacgccacugca

SEQ ID NO: 2958205 - RNA, 12 nt, Human
ugaagcagagug

SEQ ID NO: 2958206 - RNA, 13 nt, Human
ugaagcagagugg

SEQ ID NO: 2958207 - RNA, 16 nt, Human
ugaagcagaguggcag

SEQ ID NO: 2958208 - RNA, 20 nt, Human
ugaaugguuuucaaaauaaa

SEQ ID NO: 2958209 - RNA, 15 nt, Human
ugaaugucaguuguu

SEQ ID NO: 2958210 - RNA, 19 nt, Human
ugaaugucagugugacuga

SEQ ID NO: 2958211 - RNA, 22 nt, Human
agagucagaaguuucugccgca

SEQ ID NO: 2958212 - RNA, 17 nt, Human
agaguugauacuacagu

SEQ ID NO: 2958213 - RNA, 20 nt, Human
agaguugauacuacaguuug

SEQ ID NO: 2958214 - RNA, 22 nt, Human
agaguugauacuacaguuuguu

SEQ ID NO: 2958215 - RNA, 12 nt, Human
agaguuguuaca

SEQ ID NO: 2958216 - RNA, 21 nt, Human
agaguuguuacauuuuuaagu

SEQ ID NO: 2958217 - RNA, 16 nt, Human
agaguuuagcuggaaa

SEQ ID NO: 2958218 - RNA, 17 nt, Human
agaguuuagcuggaaaa

SEQ ID NO: 2958219 - RNA, 11 nt, Human
ugacagggcac

SEQ ID NO: 2958220 - RNA, 16 nt, Human
ugacagggcacaccgg

SEQ ID NO: 2958221 - RNA, 20 nt, Human
ugacagggcacaccgggcac

SEQ ID NO: 2958222 - RNA, 20 nt, Human
ugacaggcaaugcuggcugu

SEQ ID NO: 2958223 - RNA, 21 nt, Human
ugacacacagcucuguccugg

SEQ ID NO: 2958224 - RNA, 14 nt, Human
agaucaugcauaga

SEQ ID NO: 2958225 - RNA, 15 nt, Human
agaucagccugggca

SEQ ID NO: 2958226 - RNA, 13 nt, Human
agaucagccuggg

SEQ ID NO: 2958227 - RNA, 20 nt, Human
ugacauuguuggccaaagcc

SEQ ID NO: 2958228 - RNA, 21 nt, Human
ugacauuguuggccaaagcca

SEQ ID NO: 2958229 - RNA, 18 nt, Human
ugaccaaugauggucacc

SEQ ID NO: 2958230 - RNA, 15 nt, Human
agaugcuucucacug

SEQ ID NO: 2958231 - RNA, 12 nt, Human
ugacccacugcu

SEQ ID NO: 2958232 - RNA, 13 nt, Human
ugacccacugcuu

SEQ ID NO: 2958233 - RNA, 17 nt, Human
ugacccacaagaaauga

SEQ ID NO: 2958234 - RNA, 23 nt, Human
ugaccauucuccaccugccaggg

SEQ ID NO: 2958235 - RNA, 14 nt, Human
agaugcaccagccc

SEQ ID NO: 2958236 - RNA, 15 nt, Human
agaugcaccagcccu

SEQ ID NO: 2958237 - RNA, 17 nt, Human
agaugcaguucugaaga

SEQ ID NO: 2958238 - RNA, 18 nt, Human
agaugcaguucugaagaa

SEQ ID NO: 2958239 - RNA, 19 nt, Human
agaugcaguucugaagaag

SEQ ID NO: 2958240 - RNA, 14 nt, Human
agaugcuagaacuc

SEQ ID NO: 2958241 - RNA, 14 nt, Human
ugaaauaaggaaug

SEQ ID NO: 2958242 - RNA, 18 nt, Human
ugaaauaaggaaugauau

SEQ ID NO: 2958243 - RNA, 15 nt, Human
ugaaauuguauuaca

SEQ ID NO: 2958244 - RNA, 23 nt, Human
ugaaauuuccugggagcuuuugu

SEQ ID NO: 2958245 - RNA, 18 nt, Human
agagcugccaccugccug

SEQ ID NO: 2958246 - RNA, 13 nt, Human
agagcugcccucu

SEQ ID NO: 2958247 - RNA, 14 nt, Human
agagcugcccucuc

SEQ ID NO: 2958248 - RNA, 14 nt, Human
ugaaauaagccaga

SEQ ID NO: 2958249 - RNA, 17 nt, Human
ugaaauaagccagacau

SEQ ID NO: 2958250 - RNA, 18 nt, Human
ugaaauaagccagacauc

SEQ ID NO: 2958251 - RNA, 20 nt, Human
ugaaauaagccagacaucaa

SEQ ID NO: 2958252 - RNA, 23 nt, Human
ugaaauaagccagacaucaacag

SEQ ID NO: 2958253 - RNA, 11 nt, Human
agagccuugcg

SEQ ID NO: 2958254 - RNA, 21 nt, Human
agagccuugcggaagguucua

SEQ ID NO: 2958255 - RNA, 13 nt, Human
agagcaggccagg

SEQ ID NO: 2958256 - RNA, 15 nt, Human
agagcaggccaggcg

SEQ ID NO: 2958257 - RNA, 21 nt, Human
agagcaggccaggcgcggugg

SEQ ID NO: 2958258 - RNA, 20 nt, Human
agagcagagaccaucccuga

SEQ ID NO: 2958259 - RNA, 18 nt, Human
agagcagagaccaucccu

SEQ ID NO: 2958260 - RNA, 17 nt, Human
agagcagagaccauccc

SEQ ID NO: 2958261 - RNA, 12 nt, Human
agagcagagacc

SEQ ID NO: 2958262 - RNA, 21 nt, Human
ucuuuggacccugaggcccag

SEQ ID NO: 2958263 - RNA, 17 nt, Human
ucuuuggacccugaggc

SEQ ID NO: 2958264 - RNA, 22 nt, Human
ugaaccgaugagaaauaaaguu

SEQ ID NO: 2958265 - RNA, 19 nt, Human
ugaacaaauuuacagagac

SEQ ID NO: 2958266 - RNA, 20 nt, Human
ugaacaaauuuacagagaca

SEQ ID NO: 2958267 - RNA, 18 nt, Human
ugaacaaauuuacagaga

SEQ ID NO: 2958268 - RNA, 15 nt, Human
ugaaauuuuuauuaa

SEQ ID NO: 2958269 - RNA, 14 nt, Human
ugaacuccuggccu

SEQ ID NO: 2958270 - RNA, 15 nt, Human
ugaacuccuggccuc

SEQ ID NO: 2958271 - RNA, 11 nt, Human
ugaacuccugg

SEQ ID NO: 2958272 - RNA, 12 nt, Human
ugaacuccuggc

SEQ ID NO: 2958273 - RNA, 23 nt, Human
ugaacuagaguuuagcuggaaaa

SEQ ID NO: 2958274 - RNA, 22 nt, Human
agagcugcccucuccugggcag

SEQ ID NO: 2958275 - RNA, 19 nt, Human
ugaacuuugaccucugcag

SEQ ID NO: 2958276 - RNA, 20 nt, Human
ugaacuuugaccucugcagc

SEQ ID NO: 2958277 - RNA, 17 nt, Human
ugaacuuugaccucugc

SEQ ID NO: 2958278 - RNA, 22 nt, Human
ugaacuuugaccucugcagcaa

SEQ ID NO: 2958279 - RNA, 19 nt, Human
agagcuguucacagccaga

SEQ ID NO: 2958280 - RNA, 21 nt, Human
agagcuguucacagccagacu

SEQ ID NO: 2958281 - RNA, 24 nt, Human
agaggcagccccauucugccugcc

SEQ ID NO: 2958282 - RNA, 13 nt, Human
agaggcagcccca

SEQ ID NO: 2958283 - RNA, 19 nt, Human
agaggcagccccauucugc

SEQ ID NO: 2958284 - RNA, 19 nt, Human
agaggccaugggccuccug

SEQ ID NO: 2958285 - RNA, 17 nt, Human
agaggcuaugugagcac

SEQ ID NO: 2958286 - RNA, 10 nt, Human
agaggcaggg

SEQ ID NO: 2958287 - RNA, 13 nt, Human
agaggcagggucu

SEQ ID NO: 2958288 - RNA, 12 nt, Human
agagguuuuaaa

SEQ ID NO: 2958289 - RNA, 22 nt, Human
ugaagcacagugaucaaguuau

SEQ ID NO: 2958290 - RNA, 15 nt, Human
agagguugcagugag

SEQ ID NO: 2958291 - RNA, 22 nt, Human
agcauuuagauguauagguuga

SEQ ID NO: 2958292 - RNA, 19 nt, Human
agcauggcugccaauggga

SEQ ID NO: 2958293 - RNA, 20 nt, Human
agcauuuuaaacaaaauaga

SEQ ID NO: 2958294 - RNA, 17 nt, Human
agcauuuguguugaaga

SEQ ID NO: 2958295 - RNA, 18 nt, Human
agcauuuguguugaagag

SEQ ID NO: 2958296 - RNA, 13 nt, Human
agcauuuuaaaca

SEQ ID NO: 2958297 - RNA, 15 nt, Human
agcauuuuaaacaaa

SEQ ID NO: 2958298 - RNA, 17 nt, Human
agcauuuuaaacaaaau

SEQ ID NO: 2958299 - RNA, 19 nt, Human
agcauuuuaaacaaaauag

SEQ ID NO: 2958300 - RNA, 15 nt, Human
agcauuuuuuaaccu

SEQ ID NO: 2958301 - RNA, 15 nt, Human
agccaaaacugagca

SEQ ID NO: 2958302 - RNA, 22 nt, Human
agcauuuugcuaaaugugaaug

SEQ ID NO: 2958303 - RNA, 15 nt, Human
agcauuuugcuaaau

SEQ ID NO: 2958304 - RNA, 23 nt, Human
agcaucaggccaggcccucugcc

SEQ ID NO: 2958305 - RNA, 21 nt, Human
agcaucaggccaggcccucug

SEQ ID NO: 2958306 - RNA, 22 nt, Human
agcaucaggccaggcccucugc

SEQ ID NO: 2958307 - RNA, 16 nt, Human
agcauauucaggaagc

SEQ ID NO: 2958308 - RNA, 13 nt, Human
agcauccuggaau

SEQ ID NO: 2958309 - RNA, 14 nt, Human
agcauccuggaaua

SEQ ID NO: 2958310 - RNA, 15 nt, Human
agcauccuggaauau

SEQ ID NO: 2958311 - RNA, 13 nt, Human
agcauggcugcca

SEQ ID NO: 2958312 - RNA, 21 nt, Human
ugauacagaaaaguugaauuu

SEQ ID NO: 2958313 - RNA, 15 nt, Human
ugaucacggcucacu

SEQ ID NO: 2958314 - RNA, 13 nt, Human
ugaucacggcuca

SEQ ID NO: 2958315 - RNA, 14 nt, Human
ugaucacggcucac

SEQ ID NO: 2958316 - RNA, 20 nt, Human
agcaucacaugaacuuguaa

SEQ ID NO: 2958317 - RNA, 21 nt, Human
agcauauucaggaagcucagg

SEQ ID NO: 2958318 - RNA, 19 nt, Human
agcauauucaggaagcuca

SEQ ID NO: 2958319 - RNA, 17 nt, Human
agcauauucaggaagcu

SEQ ID NO: 2958320 - RNA, 13 nt, Human
ugaucuaggaaga

SEQ ID NO: 2958321 - RNA, 19 nt, Human
ugauccucccaccucagcc

SEQ ID NO: 2958322 - RNA, 20 nt, Human
ugauccucccaccucagccu

SEQ ID NO: 2958323 - RNA, 18 nt, Human
ugauccucccaccucagc

SEQ ID NO: 2958324 - RNA, 21 nt, Human
ugaugggcaacccccagccug

SEQ ID NO: 2958325 - RNA, 22 nt, Human
ugaugggcaacccccagccugc

SEQ ID NO: 2958326 - RNA, 13 nt, Human
ugauggggcccug

SEQ ID NO: 2958327 - RNA, 21 nt, Human
ugaugaucuuugcagacaggc

SEQ ID NO: 2958328 - RNA, 22 nt, Human
ugaugaaaugaggucagagccu

SEQ ID NO: 2958329 - RNA, 15 nt, Human
ugaucuaggaagacu

SEQ ID NO: 2958330 - RNA, 14 nt, Human
ugaucuaggaagac

SEQ ID NO: 2958331 - RNA, 23 nt, Human
ugaugaaaugaggucagagccug

SEQ ID NO: 2958332 - RNA, 19 nt, Human
ugaugaucuuugcagacag

SEQ ID NO: 2958333 - RNA, 20 nt, Human
ugaugaucuuugcagacagg

SEQ ID NO: 2958334 - RNA, 22 nt, Human
ugauggggcccugccuccuuug

SEQ ID NO: 2958335 - RNA, 19 nt, Human
ugauguuuuccaugagucc

SEQ ID NO: 2958336 - RNA, 17 nt, Human
ugauguuuuccaugagu

SEQ ID NO: 2958337 - RNA, 21 nt, Human
ugauguuuuaaggaugcuugu

SEQ ID NO: 2958338 - RNA, 20 nt, Human
ugauuaaccacuucagcuga

SEQ ID NO: 2958339 - RNA, 17 nt, Human
ugauuaaauucuugcaa

SEQ ID NO: 2958340 - RNA, 13 nt, Human
ugauuaaauucuu

SEQ ID NO: 2958341 - RNA, 16 nt, Human
ugauuaaauucuugca

SEQ ID NO: 2958342 - RNA, 15 nt, Human
ugauuaaguaaugau

SEQ ID NO: 2958343 - RNA, 16 nt, Human
agccacggccaggcca

SEQ ID NO: 2958344 - RNA, 16 nt, Human
ugauuaaguaaugaua

SEQ ID NO: 2958345 - RNA, 14 nt, Human
agcaggcuacuguc

SEQ ID NO: 2958346 - RNA, 20 nt, Human
agcaggcuacugucagcucc

SEQ ID NO: 2958347 - RNA, 19 nt, Human
agcaggcuacugucagcuc

SEQ ID NO: 2958348 - RNA, 17 nt, Human
agcaggcuacugucagc

SEQ ID NO: 2958349 - RNA, 16 nt, Human
agcaggcuacugucag

SEQ ID NO: 2958350 - RNA, 17 nt, Human
ugacccaugcugcccug

SEQ ID NO: 2958351 - RNA, 19 nt, Human
ugacccaugcugcccugug

SEQ ID NO: 2958352 - RNA, 18 nt, Human
ugacccaugcugcccugu

SEQ ID NO: 2958353 - RNA, 20 nt, Human
ugacccaugcugcccuguga

SEQ ID NO: 2958354 - RNA, 16 nt, Human
agcagcagggagggcu

SEQ ID NO: 2958355 - RNA, 20 nt, Human
agcaggaagcugugagagca

SEQ ID NO: 2958356 - RNA, 13 nt, Human
agcaggacaugga

SEQ ID NO: 2958357 - RNA, 11 nt, Human
agcagccacau

SEQ ID NO: 2958358 - RNA, 15 nt, Human
agcagccacauuccu

SEQ ID NO: 2958359 - RNA, 13 nt, Human
agcagggaaacag

SEQ ID NO: 2958360 - RNA, 14 nt, Human
agcagggaaacagc

SEQ ID NO: 2958361 - RNA, 15 nt, Human
agcagggaaacagcu

SEQ ID NO: 2958362 - RNA, 13 nt, Human
agcaggcugccag

SEQ ID NO: 2958363 - RNA, 14 nt, Human
agcaggcugccagu

SEQ ID NO: 2958364 - RNA, 17 nt, Human
agcaggcugccagugcc

SEQ ID NO: 2958365 - RNA, 18 nt, Human
agcaggcugccagugccu

SEQ ID NO: 2958366 - RNA, 20 nt, Human
agcaggcugccagugccugg

SEQ ID NO: 2958367 - RNA, 22 nt, Human
agcaggcugccagugccugggu

SEQ ID NO: 2958368 - RNA, 23 nt, Human
agcaggcucucaggccagcugcu

SEQ ID NO: 2958369 - RNA, 22 nt, Human
agcaggcucucaggccagcugc

SEQ ID NO: 2958370 - RNA, 21 nt, Human
agcaggcucucaggccagcug

SEQ ID NO: 2958371 - RNA, 19 nt, Human
agcaggcucucaggccagc

SEQ ID NO: 2958372 - RNA, 18 nt, Human
agcaggcucucaggccag

SEQ ID NO: 2958373 - RNA, 17 nt, Human
agcaggcucucaggcca

SEQ ID NO: 2958374 - RNA, 16 nt, Human
agcaggcucucaggcc

SEQ ID NO: 2958375 - RNA, 15 nt, Human
agcaggcucucaggc

SEQ ID NO: 2958376 - RNA, 14 nt, Human
agcaggcucucagg

SEQ ID NO: 2958377 - RNA, 13 nt, Human
agcaggcucucag

SEQ ID NO: 2958378 - RNA, 17 nt, Human
agcaggcucgggcuccc

SEQ ID NO: 2958379 - RNA, 22 nt, Human
agcagggcucagcggggacagc

SEQ ID NO: 2958380 - RNA, 13 nt, Human
agcagggcucagc

SEQ ID NO: 2958381 - RNA, 14 nt, Human
agcagggcucagcg

SEQ ID NO: 2958382 - RNA, 15 nt, Human
agcagggcucagcgg

SEQ ID NO: 2958383 - RNA, 20 nt, Human
agcagggagggcuucugcca

SEQ ID NO: 2958384 - RNA, 19 nt, Human
agcagggcauggcugggaa

SEQ ID NO: 2958385 - RNA, 17 nt, Human
agcagucaggaaagaga

SEQ ID NO: 2958386 - RNA, 18 nt, Human
agcagucaggaaagagaa

SEQ ID NO: 2958387 - RNA, 20 nt, Human
agcaguuugguuucuagcau

SEQ ID NO: 2958388 - RNA, 23 nt, Human
agcaguuugguuucuagcaugaa

SEQ ID NO: 2958389 - RNA, 22 nt, Human
agcaguuugguuucuagcauga

SEQ ID NO: 2958390 - RNA, 19 nt, Human
agcauaaaaauuagccaag

SEQ ID NO: 2958391 - RNA, 19 nt, Human
agcagucaggaaagagaac

SEQ ID NO: 2958392 - RNA, 16 nt, Human
ugaguacguugugcau

SEQ ID NO: 2958393 - RNA, 17 nt, Human
ugaguacguugugcauu

SEQ ID NO: 2958394 - RNA, 18 nt, Human
ugaguacguugugcauuu

SEQ ID NO: 2958395 - RNA, 19 nt, Human
ugaguacguugugcauuug

SEQ ID NO: 2958396 - RNA, 23 nt, Human
agcauaaaaauuagccaagugug

SEQ ID NO: 2958397 - RNA, 13 nt, Human
agcauaccaacac

SEQ ID NO: 2958398 - RNA, 22 nt, Human
agcauaccaacacgagcaggcu

SEQ ID NO: 2958399 - RNA, 19 nt, Human
agcauaccaacacgagcag

SEQ ID NO: 2958400 - RNA, 14 nt, Human
ugagugccuuacac

SEQ ID NO: 2958401 - RNA, 13 nt, Human
ugagugccuuaca

SEQ ID NO: 2958402 - RNA, 17 nt, Human
ugagugcagcucuggag

SEQ ID NO: 2958403 - RNA, 18 nt, Human
ugagugcaaacuucagag

SEQ ID NO: 2958404 - RNA, 20 nt, Human
ugagugcaaacuucagaguu

SEQ ID NO: 2958405 - RNA, 22 nt, Human
ugagugcaaacuucagaguucu

SEQ ID NO: 2958406 - RNA, 18 nt, Human
ugagucaccaagcccagu

SEQ ID NO: 2958407 - RNA, 20 nt, Human
ugaguacguugugcauuugg

SEQ ID NO: 2958408 - RNA, 14 nt, Human
ugauacaaugcugu

SEQ ID NO: 2958409 - RNA, 15 nt, Human
ugauacaaugcugug

SEQ ID NO: 2958410 - RNA, 18 nt, Human
ugaguucauacccuguua

SEQ ID NO: 2958411 - RNA, 18 nt, Human
ugagugucuuaauuaaaa

SEQ ID NO: 2958412 - RNA, 21 nt, Human
ugagugggggaucacagccuc

SEQ ID NO: 2958413 - RNA, 19 nt, Human
agccuugaccauucuccac

SEQ ID NO: 2958414 - RNA, 18 nt, Human
agccuugaccauucucca

SEQ ID NO: 2958415 - RNA, 21 nt, Human
agccuugaccauucuccaccu

SEQ ID NO: 2958416 - RNA, 19 nt, Human
agccuugcggaagguucua

SEQ ID NO: 2958417 - RNA, 20 nt, Human
agccuuagaagucacacagu

SEQ ID NO: 2958418 - RNA, 23 nt, Human
agccuugaacuuugaccucugca

SEQ ID NO: 2958419 - RNA, 17 nt, Human
agccugugccucuggga

SEQ ID NO: 2958420 - RNA, 18 nt, Human
agccugugccucugggac

SEQ ID NO: 2958421 - RNA, 19 nt, Human
agccugugccucugggacu

SEQ ID NO: 2958422 - RNA, 19 nt, Human
agccugagcgacagugaga

SEQ ID NO: 2958423 - RNA, 17 nt, Human
ugccaaugcuacaguaa

SEQ ID NO: 2958424 - RNA, 22 nt, Human
ugccaaugcuacaguaauaaau

SEQ ID NO: 2958425 - RNA, 14 nt, Human
ugccaaugggagcu

SEQ ID NO: 2958426 - RNA, 13 nt, Human
ugccaauggacua

SEQ ID NO: 2958427 - RNA, 16 nt, Human
ugcauuuaaaagauac

SEQ ID NO: 2958428 - RNA, 22 nt, Human
ugccagccgagauagccaaggc

SEQ ID NO: 2958429 - RNA, 17 nt, Human
ugccagccgagauagcc

SEQ ID NO: 2958430 - RNA, 17 nt, Human
ugccaguuauggcuaua

SEQ ID NO: 2958431 - RNA, 13 nt, Human
ugccauaauuacu

SEQ ID NO: 2958432 - RNA, 18 nt, Human
ugcaucuagccucaagcu

SEQ ID NO: 2958433 - RNA, 17 nt, Human
ugcaucguuucaucuuc

SEQ ID NO: 2958434 - RNA, 18 nt, Human
ugcaugcugucccuuacg

SEQ ID NO: 2958435 - RNA, 21 nt, Human
ugcaugcugucccuuacguga

SEQ ID NO: 2958436 - RNA, 19 nt, Human
ugcaugcugucccuuacgu

SEQ ID NO: 2958437 - RNA, 14 nt, Human
ugcaguauagaaua

SEQ ID NO: 2958438 - RNA, 13 nt, Human
ugcaguauagaau

SEQ ID NO: 2958439 - RNA, 16 nt, Human
ugcauaccacuuuugu

SEQ ID NO: 2958440 - RNA, 18 nt, Human
ugcauaccacuuuuguuc

SEQ ID NO: 2958441 - RNA, 20 nt, Human
ugcauaccacuuuuguucuu

SEQ ID NO: 2958442 - RNA, 20 nt, Human
ugcauagauucccugagcag

SEQ ID NO: 2958443 - RNA, 19 nt, Human
ugcauacucauuaggaugg

SEQ ID NO: 2958444 - RNA, 13 nt, Human
ugcauacucauua

SEQ ID NO: 2958445 - RNA, 14 nt, Human
ugcauaccacuuuu

SEQ ID NO: 2958446 - RNA, 13 nt, Human
agccuccugcccu

SEQ ID NO: 2958447 - RNA, 18 nt, Human
agccuccugcccuuaccu

SEQ ID NO: 2958448 - RNA, 14 nt, Human
agccuccugcccuu

SEQ ID NO: 2958449 - RNA, 12 nt, Human
ugcagacaggca

SEQ ID NO: 2958450 - RNA, 13 nt, Human
ugcagacaggcaa

SEQ ID NO: 2958451 - RNA, 21 nt, Human
ugcagacaggcaagcaccucc

SEQ ID NO: 2958452 - RNA, 17 nt, Human
agccucuguuuugauau

SEQ ID NO: 2958453 - RNA, 14 nt, Human
agccucuguuuuga

SEQ ID NO: 2958454 - RNA, 18 nt, Human
ugcagccucacaguccuu

SEQ ID NO: 2958455 - RNA, 21 nt, Human
ugcagccucacaguccuuacc

SEQ ID NO: 2958456 - RNA, 17 nt, Human
ugcagccucacaguccu

SEQ ID NO: 2958457 - RNA, 17 nt, Human
ugcaauaaaauggguuu

SEQ ID NO: 2958458 - RNA, 21 nt, Human
ugcaauaaaauggguuuuacu

SEQ ID NO: 2958459 - RNA, 12 nt, Human
agcccaggccuc

SEQ ID NO: 2958460 - RNA, 14 nt, Human
ugcaaggcaaaugu

SEQ ID NO: 2958461 - RNA, 15 nt, Human
ugcaaggucauuuuu

SEQ ID NO: 2958462 - RNA, 21 nt, Human
ugcaaauaaguguauuuugaa

SEQ ID NO: 2958463 - RNA, 23 nt, Human
ugcaaauaaguguauuuugaaau

SEQ ID NO: 2958464 - RNA, 15 nt, Human
ugcaaauaaguguau

SEQ ID NO: 2958465 - RNA, 18 nt, Human
ugcaaauaaguguauuuu

SEQ ID NO: 2958466 - RNA, 13 nt, Human
ugcaacaggcugg

SEQ ID NO: 2958467 - RNA, 15 nt, Human
ugcaagccagauuuu

SEQ ID NO: 2958468 - RNA, 21 nt, Human
ugcaagccagauuuuccugaa

SEQ ID NO: 2958469 - RNA, 13 nt, Human
ugcaaaccaucau

SEQ ID NO: 2958470 - RNA, 12 nt, Human
ugcaaaccauca

SEQ ID NO: 2958471 - RNA, 17 nt, Human
agccacggccaggccag

SEQ ID NO: 2958472 - RNA, 18 nt, Human
agccacggccaggccaga

SEQ ID NO: 2958473 - RNA, 13 nt, Human
ugauuucauucaa

SEQ ID NO: 2958474 - RNA, 16 nt, Human
ugauuucacagugugu

SEQ ID NO: 2958475 - RNA, 14 nt, Human
ugauuucacagugu

SEQ ID NO: 2958476 - RNA, 21 nt, Human
ugcaaaggguaucaggugcug

SEQ ID NO: 2958477 - RNA, 20 nt, Human
ugcaaaguaucccuacugua

SEQ ID NO: 2958478 - RNA, 16 nt, Human
ugcaaacuucagaguu

SEQ ID NO: 2958479 - RNA, 20 nt, Human
ugcaaaccaucauugaaauc

SEQ ID NO: 2958480 - RNA, 18 nt, Human
ugcaaaccaucauugaaa

SEQ ID NO: 2958481 - RNA, 18 nt, Human
ugcaaagcacugacuucu

SEQ ID NO: 2958482 - RNA, 23 nt, Human
ugcaaagaugaaggucuguuuug

SEQ ID NO: 2958483 - RNA, 12 nt, Human
ugcaaagaugaa

SEQ ID NO: 2958484 - RNA, 22 nt, Human
ugcaaagcacugacuucuaagu

SEQ ID NO: 2958485 - RNA, 20 nt, Human
ugcaaagcacugacuucuaa

SEQ ID NO: 2958486 - RNA, 13 nt, Human
ugcaccagcccuu

SEQ ID NO: 2958487 - RNA, 21 nt, Human
ugcaccacugcacuccagccu

SEQ ID NO: 2958488 - RNA, 15 nt, Human
ugcacauuaaaugac

SEQ ID NO: 2958489 - RNA, 18 nt, Human
ugcacauuaaaugacucu

SEQ ID NO: 2958490 - RNA, 15 nt, Human
ugcaccacugcacuc

SEQ ID NO: 2958491 - RNA, 13 nt, Human
ugcacauuaaaug

SEQ ID NO: 2958492 - RNA, 15 nt, Human
ugcaccggcuggccu

SEQ ID NO: 2958493 - RNA, 14 nt, Human
ugcaccggcuggcc

SEQ ID NO: 2958494 - RNA, 16 nt, Human
ugcaccggcuggccug

SEQ ID NO: 2958495 - RNA, 14 nt, Human
ugcacuccagccug

SEQ ID NO: 2958496 - RNA, 15 nt, Human
ugcacuccagccuga

SEQ ID NO: 2958497 - RNA, 16 nt, Human
ugcacuccagccuggg

SEQ ID NO: 2958498 - RNA, 15 nt, Human
ugcacuccagccugg

SEQ ID NO: 2958499 - RNA, 17 nt, Human
ugcacuccagccugagc

SEQ ID NO: 2958500 - RNA, 22 nt, Human
ugcagaagacaguauggcagcu

SEQ ID NO: 2958501 - RNA, 22 nt, Human
agccccuggaugcagccucaca

SEQ ID NO: 2958502 - RNA, 14 nt, Human
agccccgaggccuu

SEQ ID NO: 2958503 - RNA, 19 nt, Human
agcccaggccuccuacagc

SEQ ID NO: 2958504 - RNA, 14 nt, Human
agcccaggccuccu

SEQ ID NO: 2958505 - RNA, 16 nt, Human
agcccgggcucugccu

SEQ ID NO: 2958506 - RNA, 19 nt, Human
agcccugcagagggcacag

SEQ ID NO: 2958507 - RNA, 16 nt, Human
agcccugcagagggca

SEQ ID NO: 2958508 - RNA, 15 nt, Human
agcccugcagagggc

SEQ ID NO: 2958509 - RNA, 14 nt, Human
agcccugcagaggg

SEQ ID NO: 2958510 - RNA, 14 nt, Human
agccccuucugacc

SEQ ID NO: 2958511 - RNA, 16 nt, Human
agccccuucugaccca

SEQ ID NO: 2958512 - RNA, 15 nt, Human
agccccuucugaccc

SEQ ID NO: 2958513 - RNA, 15 nt, Human
agcccgggcucugcc

SEQ ID NO: 2958514 - RNA, 14 nt, Human
agcccgggcucugc

SEQ ID NO: 2958515 - RNA, 13 nt, Human
agcccgggcucug

SEQ ID NO: 2958516 - RNA, 19 nt, Human
agccccuucugacccaugc

SEQ ID NO: 2958517 - RNA, 17 nt, Human
aggacuuuucuuugugg

SEQ ID NO: 2958518 - RNA, 19 nt, Human
aggacuuuucuuuguggcu

SEQ ID NO: 2958519 - RNA, 22 nt, Human
aggacuuuucuuuguggcuucc

SEQ ID NO: 2958520 - RNA, 17 nt, Human
aggagaaacuggaacuc

SEQ ID NO: 2958521 - RNA, 18 nt, Human
aggagaaacuggaacucu

SEQ ID NO: 2958522 - RNA, 19 nt, Human
aggagaaacuggaacucuc

SEQ ID NO: 2958523 - RNA, 20 nt, Human
aggagaucgagaccauccug

SEQ ID NO: 2958524 - RNA, 13 nt, Human
aggagcagccaca

SEQ ID NO: 2958525 - RNA, 12 nt, Human
aggagcagccac

SEQ ID NO: 2958526 - RNA, 17 nt, Human
aggagccccgaggccuu

SEQ ID NO: 2958527 - RNA, 16 nt, Human
aggagccuccugcccu

SEQ ID NO: 2958528 - RNA, 18 nt, Human
aggacuccaggcagcaga

SEQ ID NO: 2958529 - RNA, 14 nt, Human
aggacuccaggcag

SEQ ID NO: 2958530 - RNA, 19 nt, Human
aggacuccaggcagcagac

SEQ ID NO: 2958531 - RNA, 23 nt, Human
aggacuccaggcagcagacacau

SEQ ID NO: 2958532 - RNA, 13 nt, Human
aggacgcucucug

SEQ ID NO: 2958533 - RNA, 14 nt, Human
aggacgcucucugg

SEQ ID NO: 2958534 - RNA, 16 nt, Human
aggacgcucucuggcc

SEQ ID NO: 2958535 - RNA, 17 nt, Human
aggacgcucucuggccu

SEQ ID NO: 2958536 - RNA, 19 nt, Human
aggacgcucucuggccuuc

SEQ ID NO: 2958537 - RNA, 20 nt, Human
aggacgcucucuggccuucg

SEQ ID NO: 2958538 - RNA, 15 nt, Human
uggaagacagcucuu

SEQ ID NO: 2958539 - RNA, 16 nt, Human
uggaagacagcucuua

SEQ ID NO: 2958540 - RNA, 21 nt, Human
uggaaauuuguuauaaugaau

SEQ ID NO: 2958541 - RNA, 23 nt, Human
uggaaauuuguuauaaugaauga

SEQ ID NO: 2958542 - RNA, 15 nt, Human
ugcuugagcucagga

SEQ ID NO: 2958543 - RNA, 17 nt, Human
aggagccuccugcccuu

SEQ ID NO: 2958544 - RNA, 17 nt, Human
ugcuuugugauuuuugu

SEQ ID NO: 2958545 - RNA, 22 nt, Human
ugcuuugugauuuuuguaauuu

SEQ ID NO: 2958546 - RNA, 20 nt, Human
ugcuuuugucuaugggacuc

SEQ ID NO: 2958547 - RNA, 23 nt, Human
ugcuuuuuaauauugauaugcuu

SEQ ID NO: 2958548 - RNA, 18 nt, Human
ugcuuuuggucuguguga

SEQ ID NO: 2958549 - RNA, 17 nt, Human
ugcuuuuaaaaaaaaau

SEQ ID NO: 2958550 - RNA, 16 nt, Human
aggauucuuccucccu

SEQ ID NO: 2958551 - RNA, 22 nt, Human
aggaugcacagaguuguuacau

SEQ ID NO: 2958552 - RNA, 23 nt, Human
aggaugaucuaggaagacuuugg

SEQ ID NO: 2958553 - RNA, 22 nt, Human
aggaugaucuaggaagacuuug

SEQ ID NO: 2958554 - RNA, 17 nt, Human
aggauucuuccucccuc

SEQ ID NO: 2958555 - RNA, 19 nt, Human
aggauucuuccucccuccc

SEQ ID NO: 2958556 - RNA, 13 nt, Human
aggaucagucuga

SEQ ID NO: 2958557 - RNA, 23 nt, Human
uggcacaucagcacgauuucugu

SEQ ID NO: 2958558 - RNA, 21 nt, Human
uggcacaucagcacgauuucu

SEQ ID NO: 2958559 - RNA, 17 nt, Human
uggauucauauuuaauu

SEQ ID NO: 2958560 - RNA, 14 nt, Human
uggauucauauuua

SEQ ID NO: 2958561 - RNA, 20 nt, Human
uggaugccugguggcagcug

SEQ ID NO: 2958562 - RNA, 21 nt, Human
uggaugccugguggcagcugc

SEQ ID NO: 2958563 - RNA, 23 nt, Human
uggaugccugguggcagcugcgg

SEQ ID NO: 2958564 - RNA, 20 nt, Human
uggagguacgaaaagagggg

SEQ ID NO: 2958565 - RNA, 20 nt, Human
aggcauuugcugaauacaga

SEQ ID NO: 2958566 - RNA, 16 nt, Human
aggcauuugcugaaua

SEQ ID NO: 2958567 - RNA, 14 nt, Human
uggagugcagugag

SEQ ID NO: 2958568 - RNA, 20 nt, Human
uggaguuauugaagcagagu

SEQ ID NO: 2958569 - RNA, 14 nt, Human
uggaguugaaaauc

SEQ ID NO: 2958570 - RNA, 18 nt, Human
uggcacccggccccugcu

SEQ ID NO: 2958571 - RNA, 19 nt, Human
uggcacccggccccugcug

SEQ ID NO: 2958572 - RNA, 20 nt, Human
uggcacccggccccugcugg

SEQ ID NO: 2958573 - RNA, 22 nt, Human
uggcagcucaccucucccuugg

SEQ ID NO: 2958574 - RNA, 21 nt, Human
uggcagcucaccucucccuug

SEQ ID NO: 2958575 - RNA, 23 nt, Human
uggcagcucaccucucccuugga

SEQ ID NO: 2958576 - RNA, 13 nt, Human
uggcagcucagag

SEQ ID NO: 2958577 - RNA, 15 nt, Human
aggccagccuugacc

SEQ ID NO: 2958578 - RNA, 13 nt, Human
aggccagccuuga

SEQ ID NO: 2958579 - RNA, 13 nt, Human
aggcccagagggc

SEQ ID NO: 2958580 - RNA, 13 nt, Human
aggcccggcucca

SEQ ID NO: 2958581 - RNA, 17 nt, Human
aggcccggcuccaggcu

SEQ ID NO: 2958582 - RNA, 14 nt, Human
aggccccgcccagg

SEQ ID NO: 2958583 - RNA, 15 nt, Human
aggcccccaggugcc

SEQ ID NO: 2958584 - RNA, 14 nt, Human
aggcaggggaaugu

SEQ ID NO: 2958585 - RNA, 19 nt, Human
aggcaggggaauguaugug

SEQ ID NO: 2958586 - RNA, 16 nt, Human
aggcaggggaauguau

SEQ ID NO: 2958587 - RNA, 15 nt, Human
aggcagcuugaaacu

SEQ ID NO: 2958588 - RNA, 20 nt, Human
aggcagcucuaaaugucaau

SEQ ID NO: 2958589 - RNA, 22 nt, Human
aggcaggucuugaacuccuggc

SEQ ID NO: 2958590 - RNA, 12 nt, Human
aggcagggucuc

SEQ ID NO: 2958591 - RNA, 15 nt, Human
aggcauaaagucagg

SEQ ID NO: 2958592 - RNA, 17 nt, Human
aggcaggugggauggau

SEQ ID NO: 2958593 - RNA, 20 nt, Human
aggcauuuaggccaugggac

SEQ ID NO: 2958594 - RNA, 18 nt, Human
aggcauugugggaagggg

SEQ ID NO: 2958595 - RNA, 22 nt, Human
aggcauaaagucagggguuccc

SEQ ID NO: 2958596 - RNA, 19 nt, Human
uggacuucuggaugcccau

SEQ ID NO: 2958597 - RNA, 18 nt, Human
aggauugcuacuguccua

SEQ ID NO: 2958598 - RNA, 15 nt, Human
aggauugcuacuguc

SEQ ID NO: 2958599 - RNA, 17 nt, Human
aggauugcuacuguccu

SEQ ID NO: 2958600 - RNA, 11 nt, Human
uggacuucugg

SEQ ID NO: 2958601 - RNA, 14 nt, Human
uggagaaaauggac

SEQ ID NO: 2958602 - RNA, 16 nt, Human
aggcaaggcugucaau

SEQ ID NO: 2958603 - RNA, 17 nt, Human
aggcaaggcugucaauu

SEQ ID NO: 2958604 - RNA, 18 nt, Human
aggcaagcaccuccugcc

SEQ ID NO: 2958605 - RNA, 19 nt, Human
aggcaagcaccuccugccu

SEQ ID NO: 2958606 - RNA, 20 nt, Human
aggcaagcaccuccugccuc

SEQ ID NO: 2958607 - RNA, 14 nt, Human
uggagcucguggaa

SEQ ID NO: 2958608 - RNA, 17 nt, Human
aggcaagcaccuccugc

SEQ ID NO: 2958609 - RNA, 17 nt, Human
uggagcucguggaacag

SEQ ID NO: 2958610 - RNA, 21 nt, Human
uggagcucguggaacaguuac

SEQ ID NO: 2958611 - RNA, 11 nt, Human
aggaaaauuau

SEQ ID NO: 2958612 - RNA, 21 nt, Human
aggaaaauuauucuauaauuu

SEQ ID NO: 2958613 - RNA, 16 nt, Human
aggaaaagcugcugac

SEQ ID NO: 2958614 - RNA, 13 nt, Human
ugcuaucuccccc

SEQ ID NO: 2958615 - RNA, 17 nt, Human
ugcuaucucccccagcc

SEQ ID NO: 2958616 - RNA, 14 nt, Human
ugcuaucuccccca

SEQ ID NO: 2958617 - RNA, 16 nt, Human
ugcucccaccuggcuc

SEQ ID NO: 2958618 - RNA, 14 nt, Human
ugcucugcugacag

SEQ ID NO: 2958619 - RNA, 15 nt, Human
ugcucugcugacaga

SEQ ID NO: 2958620 - RNA, 15 nt, Human
ugcucccaccuggcu

SEQ ID NO: 2958621 - RNA, 15 nt, Human
ugcuccauccuccug

SEQ ID NO: 2958622 - RNA, 20 nt, Human
ugcuccagcuguucagcugg

SEQ ID NO: 2958623 - RNA, 21 nt, Human
ugcuccagcuguucagcuggu

SEQ ID NO: 2958624 - RNA, 15 nt, Human
aggaagcucagggcc

SEQ ID NO: 2958625 - RNA, 16 nt, Human
aggaagcucagggccu

SEQ ID NO: 2958626 - RNA, 14 nt, Human
aggaagcucagggc

SEQ ID NO: 2958627 - RNA, 13 nt, Human
aggaagcucaggg

SEQ ID NO: 2958628 - RNA, 18 nt, Human
ugcugagccucacagcag

SEQ ID NO: 2958629 - RNA, 14 nt, Human
ugcugagauccugg

SEQ ID NO: 2958630 - RNA, 18 nt, Human
ugcugagauccuggacug

SEQ ID NO: 2958631 - RNA, 19 nt, Human
ugcugagccucacagcagu

SEQ ID NO: 2958632 - RNA, 21 nt, Human
ugcugagccucacagcaguga

SEQ ID NO: 2958633 - RNA, 23 nt, Human
aggaaaggcuccaggagcagcca

SEQ ID NO: 2958634 - RNA, 19 nt, Human
aggaaaucaaauaugcaaa

SEQ ID NO: 2958635 - RNA, 20 nt, Human
aggaaaucaaauaugcaaag

SEQ ID NO: 2958636 - RNA, 22 nt, Human
aggaaaucaaauaugcaaagca

SEQ ID NO: 2958637 - RNA, 21 nt, Human
aggaaaucaaauaugcaaagc

SEQ ID NO: 2958638 - RNA, 19 nt, Human
agcuugcccuguuaaaaga

SEQ ID NO: 2958639 - RNA, 18 nt, Human
agcuugcccuguuaaaag

SEQ ID NO: 2958640 - RNA, 16 nt, Human
agcuugcccuguuaaa

SEQ ID NO: 2958641 - RNA, 22 nt, Human
agcuugaccgugaggccagaga

SEQ ID NO: 2958642 - RNA, 20 nt, Human
agcuugaccgugaggccaga

SEQ ID NO: 2958643 - RNA, 22 nt, Human
agcuugaggguugggcuggugu

SEQ ID NO: 2958644 - RNA, 23 nt, Human
agcuugaccgugaggccagagac

SEQ ID NO: 2958645 - RNA, 20 nt, Human
agcuugcccuggugccucac

SEQ ID NO: 2958646 - RNA, 14 nt, Human
aggaaaagcugcug

SEQ ID NO: 2958647 - RNA, 20 nt, Human
agcuuaagaaauuuguggaa

SEQ ID NO: 2958648 - RNA, 20 nt, Human
agcuuaaaggggcuagagug

SEQ ID NO: 2958649 - RNA, 13 nt, Human
ugcuacaguaaua

SEQ ID NO: 2958650 - RNA, 14 nt, Human
ugcuacaaaaacac

SEQ ID NO: 2958651 - RNA, 11 nt, Human
ugcuacacacu

SEQ ID NO: 2958652 - RNA, 20 nt, Human
ugccuuuuuauaacuuuuua

SEQ ID NO: 2958653 - RNA, 14 nt, Human
ugcgguccacccag

SEQ ID NO: 2958654 - RNA, 15 nt, Human
ugcgguccacccagg

SEQ ID NO: 2958655 - RNA, 17 nt, Human
ugccuuuucccaacucc

SEQ ID NO: 2958656 - RNA, 19 nt, Human
ugccuuuucccaacuccag

SEQ ID NO: 2958657 - RNA, 21 nt, Human
agcugcugagauccuggacug

SEQ ID NO: 2958658 - RNA, 16 nt, Human
agcugcuugggcuuca

SEQ ID NO: 2958659 - RNA, 20 nt, Human
agcugcuugggcuucauccu

SEQ ID NO: 2958660 - RNA, 18 nt, Human
agcugccuguucagcucc

SEQ ID NO: 2958661 - RNA, 14 nt, Human
agcugccuguucag

SEQ ID NO: 2958662 - RNA, 16 nt, Human
agcugccuguucagcu

SEQ ID NO: 2958663 - RNA, 21 nt, Human
ugccuggauggggcugcaccg

SEQ ID NO: 2958664 - RNA, 20 nt, Human
ugccuggauggggcugcacc

SEQ ID NO: 2958665 - RNA, 17 nt, Human
ugccuggauggggcugc

SEQ ID NO: 2958666 - RNA, 16 nt, Human
ugccuggauggggcug

SEQ ID NO: 2958667 - RNA, 20 nt, Human
ugccugcccaggccccugcc

SEQ ID NO: 2958668 - RNA, 22 nt, Human
ugccugcccaggccccugccac

SEQ ID NO: 2958669 - RNA, 23 nt, Human
ugccugcccaggccccugccacc

SEQ ID NO: 2958670 - RNA, 14 nt, Human
ugccucagccuccc

SEQ ID NO: 2958671 - RNA, 18 nt, Human
ugccucugccucugacac

SEQ ID NO: 2958672 - RNA, 20 nt, Human
ugccucugccucugacacac

SEQ ID NO: 2958673 - RNA, 17 nt, Human
ugccucugccucugaca

SEQ ID NO: 2958674 - RNA, 20 nt, Human
agcugggacuacaggcaccc

SEQ ID NO: 2958675 - RNA, 23 nt, Human
agcugggacuacaggcacccacc

SEQ ID NO: 2958676 - RNA, 16 nt, Human
agcugggacuacaggu

SEQ ID NO: 2958677 - RNA, 20 nt, Human
agcugggguggggaccucag

SEQ ID NO: 2958678 - RNA, 23 nt, Human
agcugggguggggaccucaggcc

SEQ ID NO: 2958679 - RNA, 22 nt, Human
agcugggguggggaccucaggc

SEQ ID NO: 2958680 - RNA, 17 nt, Human
agcugugcucuggacag

SEQ ID NO: 2958681 - RNA, 18 nt, Human
agcugugcucuggacagg

SEQ ID NO: 2958682 - RNA, 23 nt, Human
agcugugcucuggacaggcaugu

SEQ ID NO: 2958683 - RNA, 14 nt, Human
agcuguuacugucu

SEQ ID NO: 2958684 - RNA, 18 nt, Human
agcuguuacugucuucag

SEQ ID NO: 2958685 - RNA, 21 nt, Human
ugccuuacccucauguucuua

SEQ ID NO: 2958686 - RNA, 16 nt, Human
ugccuuggggacaaga

SEQ ID NO: 2958687 - RNA, 20 nt, Human
ugccuuacccucauguucuu

SEQ ID NO: 2958688 - RNA, 17 nt, Human
ugccuguugggccagga

SEQ ID NO: 2958689 - RNA, 16 nt, Human
ugccuguugggccagg

SEQ ID NO: 2958690 - RNA, 14 nt, Human
agcuguucacagcc

SEQ ID NO: 2958691 - RNA, 19 nt, Human
agcuguuacugucuucagu

SEQ ID NO: 2958692 - RNA, 16 nt, Human
agcuccuucuguccua

SEQ ID NO: 2958693 - RNA, 21 nt, Human
agcuccuucuguccuacucug

SEQ ID NO: 2958694 - RNA, 14 nt, Human
agcucuguccuggg

SEQ ID NO: 2958695 - RNA, 17 nt, Human
agcucugguccauagag

SEQ ID NO: 2958696 - RNA, 12 nt, Human
agcucuggucca

SEQ ID NO: 2958697 - RNA, 13 nt, Human
agcucccaggcau

SEQ ID NO: 2958698 - RNA, 15 nt, Human
agcuccuucuguccu

SEQ ID NO: 2958699 - RNA, 23 nt, Human
agcucccaggcauuccccaggag

SEQ ID NO: 2958700 - RNA, 14 nt, Human
agcugccagccgag

SEQ ID NO: 2958701 - RNA, 20 nt, Human
agcugccagccgagauagcc

SEQ ID NO: 2958702 - RNA, 16 nt, Human
agcucuguccugggag

SEQ ID NO: 2958703 - RNA, 21 nt, Human
agcucuguccugggagugagc

SEQ ID NO: 2958704 - RNA, 23 nt, Human
agcucuguccugggagugagcug

SEQ ID NO: 2958705 - RNA, 12 nt, Human
ugccucagccuc

SEQ ID NO: 2958706 - RNA, 13 nt, Human
ugccucagccucc

SEQ ID NO: 2958707 - RNA, 12 nt, Human
ugccgcagcccu

SEQ ID NO: 2958708 - RNA, 14 nt, Human
ugccgcagcccugc

SEQ ID NO: 2958709 - RNA, 18 nt, Human
ugcccuuaccugccagga

SEQ ID NO: 2958710 - RNA, 19 nt, Human
ugcccuguuaaaagaugaa

SEQ ID NO: 2958711 - RNA, 20 nt, Human
ugcccuguuaaaagaugaaa

SEQ ID NO: 2958712 - RNA, 13 nt, Human
agcugcccucucc

SEQ ID NO: 2958713 - RNA, 14 nt, Human
agcugcccucuccu

SEQ ID NO: 2958714 - RNA, 15 nt, Human
agcugcccucuccug

SEQ ID NO: 2958715 - RNA, 15 nt, Human
uguaaauagcucagg

SEQ ID NO: 2958716 - RNA, 16 nt, Human
uguaaauagcucaggu

SEQ ID NO: 2958717 - RNA, 16 nt, Human
uguaaaggaauuuaaa

SEQ ID NO: 2958718 - RNA, 21 nt, Human
ugguuaguagagguacacuug

SEQ ID NO: 2958719 - RNA, 17 nt, Human
ugguuauaacuuaauga

SEQ ID NO: 2958720 - RNA, 16 nt, Human
ugguuauaacuuaaug

SEQ ID NO: 2958721 - RNA, 14 nt, Human
ugguuauggagagg

SEQ ID NO: 2958722 - RNA, 15 nt, Human
ugguuuguaaauuaa

SEQ ID NO: 2958723 - RNA, 14 nt, Human
ugguuuucaaaaua

SEQ ID NO: 2958724 - RNA, 15 nt, Human
ugguuuucaaaauaa

SEQ ID NO: 2958725 - RNA, 17 nt, Human
ugguuuucaaaauaaaa

SEQ ID NO: 2958726 - RNA, 12 nt, Human
aggugugcucug

SEQ ID NO: 2958727 - RNA, 14 nt, Human
agguuuaagcuguu

SEQ ID NO: 2958728 - RNA, 20 nt, Human
aggugucccugcacuugcag

SEQ ID NO: 2958729 - RNA, 19 nt, Human
agguggggucacucuggca

SEQ ID NO: 2958730 - RNA, 17 nt, Human
aggugugaaccaccaca

SEQ ID NO: 2958731 - RNA, 15 nt, Human
aggugugcucugauc

SEQ ID NO: 2958732 - RNA, 20 nt, Human
aggugugcucugaucaucca

SEQ ID NO: 2958733 - RNA, 14 nt, Human
aggugauccaccca

SEQ ID NO: 2958734 - RNA, 20 nt, Human
aggugauccacccaccucag

SEQ ID NO: 2958735 - RNA, 15 nt, Human
aggugggauccucca

SEQ ID NO: 2958736 - RNA, 18 nt, Human
aggugccucaagagaagg

SEQ ID NO: 2958737 - RNA, 16 nt, Human
agguggggcagcuuga

SEQ ID NO: 2958738 - RNA, 18 nt, Human
aggugggauccuccaggu

SEQ ID NO: 2958739 - RNA, 23 nt, Human
agguggggcagcuugaggguugg

SEQ ID NO: 2958740 - RNA, 17 nt, Human
aggugggauccuccagg

SEQ ID NO: 2958741 - RNA, 16 nt, Human
aggugggauccuccag

SEQ ID NO: 2958742 - RNA, 21 nt, Human
aggucaggagaucgagaccau

SEQ ID NO: 2958743 - RNA, 16 nt, Human
aggucuugaacuccug

SEQ ID NO: 2958744 - RNA, 13 nt, Human
aggucagagccug

SEQ ID NO: 2958745 - RNA, 16 nt, Human
uggucagauuugaacu

SEQ ID NO: 2958746 - RNA, 15 nt, Human
uggucagauuugaac

SEQ ID NO: 2958747 - RNA, 14 nt, Human
aggucagagccugc

SEQ ID NO: 2958748 - RNA, 15 nt, Human
aggucagagccugca

SEQ ID NO: 2958749 - RNA, 17 nt, Human
aggucagagccugcagu

SEQ ID NO: 2958750 - RNA, 18 nt, Human
aggucagagccugcaguu

SEQ ID NO: 2958751 - RNA, 22 nt, Human
aggugacagagugagacucugu

SEQ ID NO: 2958752 - RNA, 15 nt, Human
aggugacauauacau

SEQ ID NO: 2958753 - RNA, 13 nt, Human
aggugaccccagg

SEQ ID NO: 2958754 - RNA, 17 nt, Human
aggucuugaacuccugg

SEQ ID NO: 2958755 - RNA, 13 nt, Human
aggugacagagug

SEQ ID NO: 2958756 - RNA, 15 nt, Human
aggugacagagugag

SEQ ID NO: 2958757 - RNA, 23 nt, Human
aggugagaagcagaggaaggaga

SEQ ID NO: 2958758 - RNA, 21 nt, Human
aggugagaagcagaggaagga

SEQ ID NO: 2958759 - RNA, 16 nt, Human
aggugagaagcagagg

SEQ ID NO: 2958760 - RNA, 20 nt, Human
ugguuaggcauugugggaag

SEQ ID NO: 2958761 - RNA, 18 nt, Human
ugguuaggcauuguggga

SEQ ID NO: 2958762 - RNA, 14 nt, Human
ugguggcagcugcg

SEQ ID NO: 2958763 - RNA, 13 nt, Human
ugguggcagcugc

SEQ ID NO: 2958764 - RNA, 15 nt, Human
ugguggcagcugcgg

SEQ ID NO: 2958765 - RNA, 19 nt, Human
uggugucgggcaugacacg

SEQ ID NO: 2958766 - RNA, 16 nt, Human
uggugcgaucuggguu

SEQ ID NO: 2958767 - RNA, 17 nt, Human
uggugcgaucuggguuc

SEQ ID NO: 2958768 - RNA, 17 nt, Human
aguagaagucuuagaug

SEQ ID NO: 2958769 - RNA, 21 nt, Human
aguagaagucuuagauguaua

SEQ ID NO: 2958770 - RNA, 19 nt, Human
aguagaagucuuagaugua

SEQ ID NO: 2958771 - RNA, 20 nt, Human
aguagaagucuuagauguau

SEQ ID NO: 2958772 - RNA, 11 nt, Human
aguagagacag

SEQ ID NO: 2958773 - RNA, 20 nt, Human
uguaggcauaaagucagggg

SEQ ID NO: 2958774 - RNA, 17 nt, Human
uguaggcauaaagucag

SEQ ID NO: 2958775 - RNA, 16 nt, Human
uguagagccagggucu

SEQ ID NO: 2958776 - RNA, 18 nt, Human
uguagagccagggucuca

SEQ ID NO: 2958777 - RNA, 20 nt, Human
aguaaaaccacagcaguuga

SEQ ID NO: 2958778 - RNA, 13 nt, Human
aguaaaauccaca

SEQ ID NO: 2958779 - RNA, 16 nt, Human
aguaaaauguggcagg

SEQ ID NO: 2958780 - RNA, 14 nt, Human
aguaauaugcacac

SEQ ID NO: 2958781 - RNA, 15 nt, Human
aguaauaugcacaca

SEQ ID NO: 2958782 - RNA, 13 nt, Human
aguaaugauaacu

SEQ ID NO: 2958783 - RNA, 17 nt, Human
aguaaugauaacuggaa

SEQ ID NO: 2958784 - RNA, 18 nt, Human
aguaaugauaacuggaaa

SEQ ID NO: 2958785 - RNA, 20 nt, Human
aguaaugauaacuggaaacu

SEQ ID NO: 2958786 - RNA, 14 nt, Human
aguaugguggcugg

SEQ ID NO: 2958787 - RNA, 23 nt, Human
agucacacaguauuacuucugcu

SEQ ID NO: 2958788 - RNA, 18 nt, Human
aguauuucuaugaaauau

SEQ ID NO: 2958789 - RNA, 17 nt, Human
aguauuucuaugaaaua

SEQ ID NO: 2958790 - RNA, 16 nt, Human
aguauuucuaugaaau

SEQ ID NO: 2958791 - RNA, 19 nt, Human
agucaccccggccaccugc

SEQ ID NO: 2958792 - RNA, 15 nt, Human
agucacacagugagu

SEQ ID NO: 2958793 - RNA, 23 nt, Human
agucacacagugagucgaggaca

SEQ ID NO: 2958794 - RNA, 17 nt, Human
agucaccucauggaauu

SEQ ID NO: 2958795 - RNA, 14 nt, Human
agucaccucaugga

SEQ ID NO: 2958796 - RNA, 15 nt, Human
agucaccucauggaa

SEQ ID NO: 2958797 - RNA, 18 nt, Human
aguaggggucugucuuuu

SEQ ID NO: 2958798 - RNA, 20 nt, Human
aguaggggucugucuuuuaa

SEQ ID NO: 2958799 - RNA, 17 nt, Human
ugucaauuacaggaagu

SEQ ID NO: 2958800 - RNA, 15 nt, Human
ugucaauuacaggaa

SEQ ID NO: 2958801 - RNA, 14 nt, Human
ugucaauuacagga

SEQ ID NO: 2958802 - RNA, 15 nt, Human
aguaugguggcuggg

SEQ ID NO: 2958803 - RNA, 16 nt, Human
aguaugguggcugggu

SEQ ID NO: 2958804 - RNA, 13 nt, Human
aguagucagacug

SEQ ID NO: 2958805 - RNA, 15 nt, Human
aguauuacuucugcu

SEQ ID NO: 2958806 - RNA, 17 nt, Human
aguaugguggcuggguu

SEQ ID NO: 2958807 - RNA, 18 nt, Human
aguauuacuucugcuaca

SEQ ID NO: 2958808 - RNA, 18 nt, Human
aguauuagaauaccacag

SEQ ID NO: 2958809 - RNA, 19 nt, Human
ugucaagcugaccuugcug

SEQ ID NO: 2958810 - RNA, 16 nt, Human
uguauuuuuuuacuaa

SEQ ID NO: 2958811 - RNA, 19 nt, Human
uguauucucuccuguaccu

SEQ ID NO: 2958812 - RNA, 20 nt, Human
uguauucucuccuguaccuc

SEQ ID NO: 2958813 - RNA, 13 nt, Human
uguauuacaaauc

SEQ ID NO: 2958814 - RNA, 22 nt, Human
uguauuacaaauccaaugaaau

SEQ ID NO: 2958815 - RNA, 17 nt, Human
uguaucaaugaguaaca

SEQ ID NO: 2958816 - RNA, 18 nt, Human
uguaucacaaaucuuaac

SEQ ID NO: 2958817 - RNA, 15 nt, Human
uguaucacaaaucuu

SEQ ID NO: 2958818 - RNA, 14 nt, Human
uguaguguuggaga

SEQ ID NO: 2958819 - RNA, 15 nt, Human
uguaguguuggagaa

SEQ ID NO: 2958820 - RNA, 21 nt, Human
aggcccggcuccaggcuccuu

SEQ ID NO: 2958821 - RNA, 18 nt, Human
aggcccggcuccaggcuc

SEQ ID NO: 2958822 - RNA, 20 nt, Human
aggcccggcuccaggcuccu

SEQ ID NO: 2958823 - RNA, 13 nt, Human
agggaaauuucag

SEQ ID NO: 2958824 - RNA, 22 nt, Human
agggaaggauacaaaagcaugu

SEQ ID NO: 2958825 - RNA, 22 nt, Human
ugggagaaccaaaaagaggcua

SEQ ID NO: 2958826 - RNA, 20 nt, Human
ugggacucaaugcacugaca

SEQ ID NO: 2958827 - RNA, 16 nt, Human
ugggagagccuuccag

SEQ ID NO: 2958828 - RNA, 18 nt, Human
ugggaggaucucuugagc

SEQ ID NO: 2958829 - RNA, 21 nt, Human
ugggagagaagagaaugcaca

SEQ ID NO: 2958830 - RNA, 19 nt, Human
ugggagagaagagaaugca

SEQ ID NO: 2958831 - RNA, 14 nt, Human
ugggacuacaggca

SEQ ID NO: 2958832 - RNA, 15 nt, Human
ugggacuacaggcac

SEQ ID NO: 2958833 - RNA, 16 nt, Human
ugggacuacaggcacc

SEQ ID NO: 2958834 - RNA, 23 nt, Human
agggaggacgcucucuggccuuc

SEQ ID NO: 2958835 - RNA, 21 nt, Human
agggaggacgcucucuggccu

SEQ ID NO: 2958836 - RNA, 22 nt, Human
agggaggacgcucucuggccuu

SEQ ID NO: 2958837 - RNA, 13 nt, Human
agggagggcucca

SEQ ID NO: 2958838 - RNA, 15 nt, Human
agggagggagggcuc

SEQ ID NO: 2958839 - RNA, 16 nt, Human
ugggcccccaaaugga

SEQ ID NO: 2958840 - RNA, 21 nt, Human
ugggcccccaaauggaaaugg

SEQ ID NO: 2958841 - RNA, 20 nt, Human
ugggcacuauuuauuuacaa

SEQ ID NO: 2958842 - RNA, 20 nt, Human
ugggaggccaaggugggagg

SEQ ID NO: 2958843 - RNA, 19 nt, Human
ugggaggccaaggugggag

SEQ ID NO: 2958844 - RNA, 22 nt, Human
ugggaggaucucuugagccugg

SEQ ID NO: 2958845 - RNA, 21 nt, Human
ugggaggaucucuugagccug

SEQ ID NO: 2958846 - RNA, 20 nt, Human
ugggaggaucucuugagccu

SEQ ID NO: 2958847 - RNA, 12 nt, Human
ugggcagaagga

SEQ ID NO: 2958848 - RNA, 18 nt, Human
ugggccaggagccuccug

SEQ ID NO: 2958849 - RNA, 12 nt, Human
ugggcagagcag

SEQ ID NO: 2958850 - RNA, 11 nt, Human
ugggcagagca

SEQ ID NO: 2958851 - RNA, 16 nt, Human
agggagggcuccagac

SEQ ID NO: 2958852 - RNA, 15 nt, Human
agggagggcuccaga

SEQ ID NO: 2958853 - RNA, 14 nt, Human
agggagggcuccag

SEQ ID NO: 2958854 - RNA, 19 nt, Human
agggcucagcggggacagc

SEQ ID NO: 2958855 - RNA, 20 nt, Human
agggcucagcggggacagcu

SEQ ID NO: 2958856 - RNA, 22 nt, Human
agggcucagcggggacagcucc

SEQ ID NO: 2958857 - RNA, 23 nt, Human
agggcucagcggggacagcuccu

SEQ ID NO: 2958858 - RNA, 17 nt, Human
agggcccuuuuucaaua

SEQ ID NO: 2958859 - RNA, 21 nt, Human
uggguggcaccagcagccugg

SEQ ID NO: 2958860 - RNA, 20 nt, Human
uggguggcaccagcagccug

SEQ ID NO: 2958861 - RNA, 17 nt, Human
uggguggcaccagcagc

SEQ ID NO: 2958862 - RNA, 12 nt, Human
ugguagcauuuu

SEQ ID NO: 2958863 - RNA, 18 nt, Human
ugguagcauuuuaaacaa

SEQ ID NO: 2958864 - RNA, 19 nt, Human
ugguagcauuuuaaacaaa

SEQ ID NO: 2958865 - RNA, 20 nt, Human
ugguagagugugccugaagu

SEQ ID NO: 2958866 - RNA, 16 nt, Human
aggguggugaccucug

SEQ ID NO: 2958867 - RNA, 15 nt, Human
agggugggagugggc

SEQ ID NO: 2958868 - RNA, 18 nt, Human
aggggugggacacccugu

SEQ ID NO: 2958869 - RNA, 20 nt, Human
aggggguggccucccaacuc

SEQ ID NO: 2958870 - RNA, 15 nt, Human
aggguaaggcugugg

SEQ ID NO: 2958871 - RNA, 14 nt, Human
agggucucacucug

SEQ ID NO: 2958872 - RNA, 15 nt, Human
agggucucacucugu

SEQ ID NO: 2958873 - RNA, 16 nt, Human
agggucucacucuguc

SEQ ID NO: 2958874 - RNA, 14 nt, Human
agggggcugcuccc

SEQ ID NO: 2958875 - RNA, 15 nt, Human
agggggcugcuccca

SEQ ID NO: 2958876 - RNA, 16 nt, Human
agggggcugcucccac

SEQ ID NO: 2958877 - RNA, 19 nt, Human
agggggcugcucccaccug

SEQ ID NO: 2958878 - RNA, 22 nt, Human
agggggcugcucccaccuggcu

SEQ ID NO: 2958879 - RNA, 17 nt, Human
agggggccuggaugccc

SEQ ID NO: 2958880 - RNA, 15 nt, Human
agggggccuggaugc

SEQ ID NO: 2958881 - RNA, 21 nt, Human
aggggaauguuugccucugcc

SEQ ID NO: 2958882 - RNA, 19 nt, Human
aggggaauguuugccucug

SEQ ID NO: 2958883 - RNA, 20 nt, Human
aggggaauguuugccucugc

SEQ ID NO: 2958884 - RNA, 18 nt, Human
aggggagcaugggaagug

SEQ ID NO: 2958885 - RNA, 13 nt, Human
aggggaaaagagg

SEQ ID NO: 2958886 - RNA, 14 nt, Human
aggggaacagacug

SEQ ID NO: 2958887 - RNA, 22 nt, Human
aggggaaaaucagccugcucca

SEQ ID NO: 2958888 - RNA, 18 nt, Human
aggggaaaaucagccugc

SEQ ID NO: 2958889 - RNA, 13 nt, Human
aggggaauguuug

SEQ ID NO: 2958890 - RNA, 17 nt, Human
ugggguacccacugcuc

SEQ ID NO: 2958891 - RNA, 18 nt, Human
ugggguacccacugcucu

SEQ ID NO: 2958892 - RNA, 19 nt, Human
ugggguacccacugcucug

SEQ ID NO: 2958893 - RNA, 15 nt, Human
ugggguaugggagag

SEQ ID NO: 2958894 - RNA, 14 nt, Human
uggggucacucugg

SEQ ID NO: 2958895 - RNA, 13 nt, Human
uggggucacucug

SEQ ID NO: 2958896 - RNA, 16 nt, Human
uggggucacucuggca

SEQ ID NO: 2958897 - RNA, 22 nt, Human
uggggucacucuggcagcucag

SEQ ID NO: 2958898 - RNA, 12 nt, Human
uggggcucccag

SEQ ID NO: 2958899 - RNA, 13 nt, Human
uggggcucccagc

SEQ ID NO: 2958900 - RNA, 15 nt, Human
uggggcucccagcca

SEQ ID NO: 2958901 - RNA, 18 nt, Human
uggggcucccagccaggc

SEQ ID NO: 2958902 - RNA, 19 nt, Human
uggggcucccagccaggcc

SEQ ID NO: 2958903 - RNA, 20 nt, Human
uggggcucccagccaggccc

SEQ ID NO: 2958904 - RNA, 21 nt, Human
uggggcucccagccaggcccu

SEQ ID NO: 2958905 - RNA, 23 nt, Human
uggggcucccagccaggcccuug

SEQ ID NO: 2958906 - RNA, 23 nt, Human
uggggcugcaccggcuggccugg

SEQ ID NO: 2958907 - RNA, 22 nt, Human
uggggcugcaccggcuggccug

SEQ ID NO: 2958908 - RNA, 12 nt, Human
uggggcccugcc

SEQ ID NO: 2958909 - RNA, 21 nt, Human
uggggccaguuggucccccuu

SEQ ID NO: 2958910 - RNA, 17 nt, Human
uggggaccucaggccug

SEQ ID NO: 2958911 - RNA, 16 nt, Human
uggggaccucaggccu

SEQ ID NO: 2958912 - RNA, 15 nt, Human
uggggaccucaggcc

SEQ ID NO: 2958913 - RNA, 14 nt, Human
uggggaccucaggc

SEQ ID NO: 2958914 - RNA, 15 nt, Human
agggcuccagacaca

SEQ ID NO: 2958915 - RNA, 12 nt, Human
agggcuccagac

SEQ ID NO: 2958916 - RNA, 19 nt, Human
uguuuucauuaucucaaaa

SEQ ID NO: 2958917 - RNA, 20 nt, Human
uguuuuccaugaguccccug

SEQ ID NO: 2958918 - RNA, 21 nt, Human
uguuuuauuuaaccucuaaau

SEQ ID NO: 2958919 - RNA, 21 nt, Human
uguuuuauuuuaauucaguug

SEQ ID NO: 2958920 - RNA, 16 nt, Human
uguuuuaucuucuaua

SEQ ID NO: 2958921 - RNA, 14 nt, Human
aguucugguuccua

SEQ ID NO: 2958922 - RNA, 14 nt, Human
uguuuugcaagcca

SEQ ID NO: 2958923 - RNA, 19 nt, Human
uguuuugccaauuugcaca

SEQ ID NO: 2958924 - RNA, 17 nt, Human
uguuuugccaauuugca

SEQ ID NO: 2958925 - RNA, 16 nt, Human
aguucugaagaagaug

SEQ ID NO: 2958926 - RNA, 21 nt, Human
uguuuugccaauuugcacauu

SEQ ID NO: 2958927 - RNA, 22 nt, Human
uguuuugccaauuugcacauua

SEQ ID NO: 2958928 - RNA, 23 nt, Human
uguuuugccaauuugcacauuaa

SEQ ID NO: 2958929 - RNA, 16 nt, Human
aguucugcagauaaac

SEQ ID NO: 2958930 - RNA, 21 nt, Human
aguucugcagauaaacaguag

SEQ ID NO: 2958931 - RNA, 22 nt, Human
uguuugagcaucgcuuaggaga

SEQ ID NO: 2958932 - RNA, 22 nt, Human
uguuugauucagacagcugccu

SEQ ID NO: 2958933 - RNA, 17 nt, Human
uguuugauucagacagc

SEQ ID NO: 2958934 - RNA, 14 nt, Human
uguugcuaacagca

SEQ ID NO: 2958935 - RNA, 19 nt, Human
uguugcccaggcaggucuu

SEQ ID NO: 2958936 - RNA, 19 nt, Human
uguuuauugucaaaguggu

SEQ ID NO: 2958937 - RNA, 17 nt, Human
uguuuauugucaaagug

SEQ ID NO: 2958938 - RNA, 20 nt, Human
uuaaauucuugcaaaguauc

SEQ ID NO: 2958939 - RNA, 13 nt, Human
aguuuauaaaagu

SEQ ID NO: 2958940 - RNA, 22 nt, Human
uuaaaaacaacgaaagaaggca

SEQ ID NO: 2958941 - RNA, 20 nt, Human
uuaaaaagaaaaguuuauaa

SEQ ID NO: 2958942 - RNA, 16 nt, Human
aguuggcuaggacccc

SEQ ID NO: 2958943 - RNA, 17 nt, Human
aguuggguggaugccug

SEQ ID NO: 2958944 - RNA, 21 nt, Human
aguuggguggaugccuggugg

SEQ ID NO: 2958945 - RNA, 23 nt, Human
aguuguuugauucagacagcugc

SEQ ID NO: 2958946 - RNA, 21 nt, Human
aguuguuugauucagacagcu

SEQ ID NO: 2958947 - RNA, 15 nt, Human
aguuggguuuuuuaa

SEQ ID NO: 2958948 - RNA, 18 nt, Human
aguuggucccccuuccau

SEQ ID NO: 2958949 - RNA, 16 nt, Human
aguuuagcuggaaaag

SEQ ID NO: 2958950 - RNA, 14 nt, Human
uuaccuuacagaag

SEQ ID NO: 2958951 - RNA, 12 nt, Human
uuaccugggaaa

SEQ ID NO: 2958952 - RNA, 20 nt, Human
uuacauaagauaaaugugcu

SEQ ID NO: 2958953 - RNA, 12 nt, Human
uuacuauuucuu

SEQ ID NO: 2958954 - RNA, 15 nt, Human
uuacuauuucuugug

SEQ ID NO: 2958955 - RNA, 19 nt, Human
uuacuauggcccuggccua

SEQ ID NO: 2958956 - RNA, 18 nt, Human
uuacucagaauucucuag

SEQ ID NO: 2958957 - RNA, 23 nt, Human
uuacucagaauucucuaguuuga

SEQ ID NO: 2958958 - RNA, 11 nt, Human
uuagacagagu

SEQ ID NO: 2958959 - RNA, 16 nt, Human
uuagaaauaacagaag

SEQ ID NO: 2958960 - RNA, 11 nt, Human
uuagaaauaua

SEQ ID NO: 2958961 - RNA, 12 nt, Human
uuagaaauauaa

SEQ ID NO: 2958962 - RNA, 14 nt, Human
uuagaaauauaauu

SEQ ID NO: 2958963 - RNA, 15 nt, Human
uuacuguaagaaaau

SEQ ID NO: 2958964 - RNA, 15 nt, Human
auaaaugaaugucac

SEQ ID NO: 2958965 - RNA, 12 nt, Human
auaaaugaaugu

SEQ ID NO: 2958966 - RNA, 16 nt, Human
auaacuaaaagguaug

SEQ ID NO: 2958967 - RNA, 14 nt, Human
uuacaggaaguacu

SEQ ID NO: 2958968 - RNA, 18 nt, Human
auaaauauguuucacaca

SEQ ID NO: 2958969 - RNA, 23 nt, Human
auaaauauugguugggaugacuu

SEQ ID NO: 2958970 - RNA, 15 nt, Human
auaaaauaauuuuua

SEQ ID NO: 2958971 - RNA, 16 nt, Human
auaaaauaauuuuuau

SEQ ID NO: 2958972 - RNA, 21 nt, Human
auaaaauaauuuuuauauuug

SEQ ID NO: 2958973 - RNA, 18 nt, Human
auaaaauccauacauuug

SEQ ID NO: 2958974 - RNA, 19 nt, Human
auaaaauccauacauuugu

SEQ ID NO: 2958975 - RNA, 22 nt, Human
uuaagugcugcauuuaaaagau

SEQ ID NO: 2958976 - RNA, 18 nt, Human
uuaaguaaugauaacugg

SEQ ID NO: 2958977 - RNA, 17 nt, Human
uuaaguacuauguauca

SEQ ID NO: 2958978 - RNA, 15 nt, Human
uuaagaggcaggguc

SEQ ID NO: 2958979 - RNA, 16 nt, Human
uuaagaggcagggucu

SEQ ID NO: 2958980 - RNA, 13 nt, Human
uuaagaggcaggg

SEQ ID NO: 2958981 - RNA, 20 nt, Human
uuaagaagacugcauuauau

SEQ ID NO: 2958982 - RNA, 22 nt, Human
uuaagaagacugcauuauauuu

SEQ ID NO: 2958983 - RNA, 19 nt, Human
uuaauuuuuuugagacaga

SEQ ID NO: 2958984 - RNA, 23 nt, Human
auaaacaagaccacguuucuaaa

SEQ ID NO: 2958985 - RNA, 15 nt, Human
auaaacaagaccacg

SEQ ID NO: 2958986 - RNA, 22 nt, Human
auaaacaagaccacguuucuaa

SEQ ID NO: 2958987 - RNA, 15 nt, Human
uuaauucuuagcuca

SEQ ID NO: 2958988 - RNA, 23 nt, Human
uuaaugaaagacuguacaaagua

SEQ ID NO: 2958989 - RNA, 20 nt, Human
uuaaugaaagacuguacaaa

SEQ ID NO: 2958990 - RNA, 19 nt, Human
ugugaaccaccacacccag

SEQ ID NO: 2958991 - RNA, 20 nt, Human
ugugaacaguuguguuugaa

SEQ ID NO: 2958992 - RNA, 20 nt, Human
ugugaaccaccacacccagc

SEQ ID NO: 2958993 - RNA, 21 nt, Human
ugugaaccaccacacccagcc

SEQ ID NO: 2958994 - RNA, 17 nt, Human
ugugaaccaccacaccc

SEQ ID NO: 2958995 - RNA, 15 nt, Human
ugugaaaggaaagag

SEQ ID NO: 2958996 - RNA, 21 nt, Human
ugugaaaggaaagagggaggu

SEQ ID NO: 2958997 - RNA, 18 nt, Human
ugugaaaggaaagaggcu

SEQ ID NO: 2958998 - RNA, 14 nt, Human
ugucagacacagau

SEQ ID NO: 2958999 - RNA, 13 nt, Human
ugucagacacaga

SEQ ID NO: 2959000 - RNA, 12 nt, Human
ugucagacacag

SEQ ID NO: 2959001 - RNA, 16 nt, Human
ugugacugaauuucuu

SEQ ID NO: 2959002 - RNA, 15 nt, Human
ugugacugaauuucu

SEQ ID NO: 2959003 - RNA, 15 nt, Human
ugugagaugcuagaa

SEQ ID NO: 2959004 - RNA, 19 nt, Human
ugugagaugcuagaacucc

SEQ ID NO: 2959005 - RNA, 22 nt, Human
agucucaggaaaucaaauaugc

SEQ ID NO: 2959006 - RNA, 16 nt, Human
agucucaggaaaucaa

SEQ ID NO: 2959007 - RNA, 23 nt, Human
agucuuagauguauauauuuccu

SEQ ID NO: 2959008 - RNA, 18 nt, Human
agucuucaguuugcagag

SEQ ID NO: 2959009 - RNA, 20 nt, Human
agucuucaguuugcagagua

SEQ ID NO: 2959010 - RNA, 21 nt, Human
agucuucaguuugcagaguag

SEQ ID NO: 2959011 - RNA, 14 nt, Human
agucuuuguacaga

SEQ ID NO: 2959012 - RNA, 20 nt, Human
agugaaacucguuaauuugu

SEQ ID NO: 2959013 - RNA, 18 nt, Human
agucuuucacauuuaaau

SEQ ID NO: 2959014 - RNA, 17 nt, Human
agugaggcucugcccuu

SEQ ID NO: 2959015 - RNA, 16 nt, Human
agugaggcucugcccu

SEQ ID NO: 2959016 - RNA, 14 nt, Human
agugaggcucugcc

SEQ ID NO: 2959017 - RNA, 15 nt, Human
agugaggcucugccc

SEQ ID NO: 2959018 - RNA, 15 nt, Human
agugagucgaggaca

SEQ ID NO: 2959019 - RNA, 21 nt, Human
agugaguugauagcacagacc

SEQ ID NO: 2959020 - RNA, 21 nt, Human
agugaggcucugcccuugguu

SEQ ID NO: 2959021 - RNA, 20 nt, Human
agugaggcucugcccuuggu

SEQ ID NO: 2959022 - RNA, 19 nt, Human
agugaggcucugcccuugg

SEQ ID NO: 2959023 - RNA, 21 nt, Human
ugugcccccauguaagcaccc

SEQ ID NO: 2959024 - RNA, 21 nt, Human
uguggaguucaucuugaauug

SEQ ID NO: 2959025 - RNA, 17 nt, Human
uguggaguucaucuuga

SEQ ID NO: 2959026 - RNA, 23 nt, Human
ugugcauuuggugguuucagaaa

SEQ ID NO: 2959027 - RNA, 20 nt, Human
ugugccagguuuuuggucug

SEQ ID NO: 2959028 - RNA, 12 nt, Human
ugugccaugugc

SEQ ID NO: 2959029 - RNA, 16 nt, Human
ugugccaugugccagg

SEQ ID NO: 2959030 - RNA, 18 nt, Human
ugugaugacauucccugc

SEQ ID NO: 2959031 - RNA, 18 nt, Human
ugugauggggcccugccu

SEQ ID NO: 2959032 - RNA, 20 nt, Human
ugugauggggcccugccucc

SEQ ID NO: 2959033 - RNA, 19 nt, Human
ugugauggggcccugccuc

SEQ ID NO: 2959034 - RNA, 15 nt, Human
agugaaagaaaauaa

SEQ ID NO: 2959035 - RNA, 16 nt, Human
agugaacaaauuuaca

SEQ ID NO: 2959036 - RNA, 20 nt, Human
agugaacaaauuuacagaga

SEQ ID NO: 2959037 - RNA, 20 nt, Human
uguuccacaaguuaaauaaa

SEQ ID NO: 2959038 - RNA, 20 nt, Human
agugugucuuagugugugca

SEQ ID NO: 2959039 - RNA, 15 nt, Human
uguuauaaucuuuca

SEQ ID NO: 2959040 - RNA, 16 nt, Human
uguucugggacacagu

SEQ ID NO: 2959041 - RNA, 18 nt, Human
uguuccuagugaaagagg

SEQ ID NO: 2959042 - RNA, 14 nt, Human
uguuccuagugaaa

SEQ ID NO: 2959043 - RNA, 13 nt, Human
uguugcccaggca

SEQ ID NO: 2959044 - RNA, 12 nt, Human
uguugcccaggc

SEQ ID NO: 2959045 - RNA, 15 nt, Human
uguugcccaggcagg

SEQ ID NO: 2959046 - RNA, 16 nt, Human
uguugcccaggcaggu

SEQ ID NO: 2959047 - RNA, 17 nt, Human
uguugcccaggcagguc

SEQ ID NO: 2959048 - RNA, 18 nt, Human
uguugcccaggcaggucu

SEQ ID NO: 2959049 - RNA, 16 nt, Human
aguggugcgaucuggg

SEQ ID NO: 2959050 - RNA, 17 nt, Human
aguggugcgaucugggu

SEQ ID NO: 2959051 - RNA, 14 nt, Human
aguggaauaagaca

SEQ ID NO: 2959052 - RNA, 21 nt, Human
agugguggugaacagaacaaa

SEQ ID NO: 2959053 - RNA, 17 nt, Human
aguggugguuuucuguu

SEQ ID NO: 2959054 - RNA, 18 nt, Human
aguggugguuuucuguuc

SEQ ID NO: 2959055 - RNA, 19 nt, Human
aguggugguuuucuguucu

SEQ ID NO: 2959056 - RNA, 20 nt, Human
aguggugguuuucuguucuu

SEQ ID NO: 2959057 - RNA, 21 nt, Human
aguggugguuuucuguucuuu

SEQ ID NO: 2959058 - RNA, 23 nt, Human
aguggugguuuucuguucuuucu

SEQ ID NO: 2959059 - RNA, 23 nt, Human
agugugauguauguguaauaaau

SEQ ID NO: 2959060 - RNA, 18 nt, Human
agugugauguauguguaa

SEQ ID NO: 2959061 - RNA, 22 nt, Human
agugugauguauguguaauaaa

SEQ ID NO: 2959062 - RNA, 17 nt, Human
agugugguguuuccugg

SEQ ID NO: 2959063 - RNA, 19 nt, Human
agugugguguuuccuggca

SEQ ID NO: 2959064 - RNA, 16 nt, Human
agugugguguuuccug

SEQ ID NO: 2959065 - RNA, 13 nt, Human
uguguugaagagg

SEQ ID NO: 2959066 - RNA, 23 nt, Human
uguguguuuauugucaaaguggu

SEQ ID NO: 2959067 - RNA, 19 nt, Human
uguguguuuauugucaaag

SEQ ID NO: 2959068 - RNA, 21 nt, Human
ugugucuugcaauggcagccu

SEQ ID NO: 2959069 - RNA, 20 nt, Human
ugugucuugcaauggcagcc

SEQ ID NO: 2959070 - RNA, 21 nt, Human
ugugucucuugguccugcugc

SEQ ID NO: 2959071 - RNA, 13 nt, Human
uguguaaguagau

SEQ ID NO: 2959072 - RNA, 20 nt, Human
ugugucucuugguccugcug

SEQ ID NO: 2959073 - RNA, 17 nt, Human
ugugucucuugguccug

SEQ ID NO: 2959074 - RNA, 20 nt, Human
agugcugggauuacaggugu

SEQ ID NO: 2959075 - RNA, 19 nt, Human
agugcugcauuuaaaagau

SEQ ID NO: 2959076 - RNA, 16 nt, Human
agugcugcauuuaaaa

SEQ ID NO: 2959077 - RNA, 17 nt, Human
agugcugcauuuaaaag

SEQ ID NO: 2959078 - RNA, 21 nt, Human
agugcugggauuacaggugug

SEQ ID NO: 2959079 - RNA, 12 nt, Human
agugcugcauuu

SEQ ID NO: 2959080 - RNA, 13 nt, Human
agugcugcauuua

SEQ ID NO: 2959081 - RNA, 23 nt, Human
agugaguugauagcacagacccu

SEQ ID NO: 2959082 - RNA, 22 nt, Human
agugaguugauagcacagaccc

SEQ ID NO: 2959083 - RNA, 15 nt, Human
uguggucccacccca

SEQ ID NO: 2959084 - RNA, 13 nt, Human
uguggucccaccc

SEQ ID NO: 2959085 - RNA, 18 nt, Human
uguguaagacaaaaagcu

SEQ ID NO: 2959086 - RNA, 16 nt, Human
ugugguguuuccuggc

SEQ ID NO: 2959087 - RNA, 14 nt, Human
ugugguguuuccug

SEQ ID NO: 2959088 - RNA, 21 nt, Human
uguggguuucuaaagcugcca

SEQ ID NO: 2959089 - RNA, 20 nt, Human
uguggucacaggaaguagag

SEQ ID NO: 2959090 - RNA, 23 nt, Human
uguggguuucuaaagcugccagc

SEQ ID NO: 2959091 - RNA, 18 nt, Human
auauuuucaugcuguuca

SEQ ID NO: 2959092 - RNA, 21 nt, Human
auauuuucaugcuguucauga

SEQ ID NO: 2959093 - RNA, 14 nt, Human
uuccuucagugccu

SEQ ID NO: 2959094 - RNA, 11 nt, Human
uuccuucagug

SEQ ID NO: 2959095 - RNA, 17 nt, Human
uuccuguucccaugaga

SEQ ID NO: 2959096 - RNA, 16 nt, Human
uuccugggagcuuuug

SEQ ID NO: 2959097 - RNA, 11 nt, Human
uuccucuuucc

SEQ ID NO: 2959098 - RNA, 15 nt, Human
uuccugggagcuuuu

SEQ ID NO: 2959099 - RNA, 15 nt, Human
uuccuaauccucuag

SEQ ID NO: 2959100 - RNA, 13 nt, Human
uuccuaauccucu

SEQ ID NO: 2959101 - RNA, 17 nt, Human
aucaaguauagaaaauc

SEQ ID NO: 2959102 - RNA, 19 nt, Human
aucaaguauagaaaaucuu

SEQ ID NO: 2959103 - RNA, 21 nt, Human
aucaaguauagaaaaucuuca

SEQ ID NO: 2959104 - RNA, 15 nt, Human
aucaaguauagaaaa

SEQ ID NO: 2959105 - RNA, 16 nt, Human
aucaaguauagaaaau

SEQ ID NO: 2959106 - RNA, 13 nt, Human
aucaaguauagaa

SEQ ID NO: 2959107 - RNA, 13 nt, Human
aucaaguauuaua

SEQ ID NO: 2959108 - RNA, 14 nt, Human
aucaaguauuauac

SEQ ID NO: 2959109 - RNA, 18 nt, Human
aucaaguauuauaccuuu

SEQ ID NO: 2959110 - RNA, 22 nt, Human
aucacggcucacugcagccuca

SEQ ID NO: 2959111 - RNA, 19 nt, Human
aucaauuuuucuuauuuca

SEQ ID NO: 2959112 - RNA, 20 nt, Human
auauguuuuaagaggcaggg

SEQ ID NO: 2959113 - RNA, 18 nt, Human
auauguuuuaagaggcag

SEQ ID NO: 2959114 - RNA, 21 nt, Human
auauguuucacacaaacaagg

SEQ ID NO: 2959115 - RNA, 14 nt, Human
auauguuucacaca

SEQ ID NO: 2959116 - RNA, 18 nt, Human
auauguuucacacaaaca

SEQ ID NO: 2959117 - RNA, 24 nt, Human
auauuaagaaagacuaucuaaaug

SEQ ID NO: 2959118 - RNA, 22 nt, Human
auauuaaggaagacaaugugaa

SEQ ID NO: 2959119 - RNA, 19 nt, Human
auauugauuuccguuaaaa

SEQ ID NO: 2959120 - RNA, 21 nt, Human
auauugauuuccguuaaaaua

SEQ ID NO: 2959121 - RNA, 22 nt, Human
auauugauuuccguuaaaauac

SEQ ID NO: 2959122 - RNA, 16 nt, Human
auauucuguuggccag

SEQ ID NO: 2959123 - RNA, 21 nt, Human
auauucucacagcuccaagaa

SEQ ID NO: 2959124 - RNA, 16 nt, Human
auauucucagcagagu

SEQ ID NO: 2959125 - RNA, 15 nt, Human
auauucucagcagag

SEQ ID NO: 2959126 - RNA, 17 nt, Human
auauucucagcagagug

SEQ ID NO: 2959127 - RNA, 18 nt, Human
auauucucagcagagugc

SEQ ID NO: 2959128 - RNA, 22 nt, Human
auauucucacagcuccaagaau

SEQ ID NO: 2959129 - RNA, 23 nt, Human
auauucucacagcuccaagaauu

SEQ ID NO: 2959130 - RNA, 23 nt, Human
auauuugaaauauugacuuuuua

SEQ ID NO: 2959131 - RNA, 14 nt, Human
auauuugaaauauu

SEQ ID NO: 2959132 - RNA, 19 nt, Human
auauuugaaauauugacuu

SEQ ID NO: 2959133 - RNA, 22 nt, Human
auauuuguaucacaaaucuuaa

SEQ ID NO: 2959134 - RNA, 12 nt, Human
auauuuuaacuu

SEQ ID NO: 2959135 - RNA, 16 nt, Human
auauugccaaugcuac

SEQ ID NO: 2959136 - RNA, 22 nt, Human
auauugcauacuauuaaacaug

SEQ ID NO: 2959137 - RNA, 20 nt, Human
auauugcauacuauuaaaca

SEQ ID NO: 2959138 - RNA, 21 nt, Human
auauugcugauggugcaauga

SEQ ID NO: 2959139 - RNA, 17 nt, Human
auauugcugauggugca

SEQ ID NO: 2959140 - RNA, 17 nt, Human
auauuguuuucagugua

SEQ ID NO: 2959141 - RNA, 20 nt, Human
auauuguuuucaguguacau

SEQ ID NO: 2959142 - RNA, 23 nt, Human
auauuucugaggagccugcaaca

SEQ ID NO: 2959143 - RNA, 13 nt, Human
auauuugaaauau

SEQ ID NO: 2959144 - RNA, 15 nt, Human
uucugaaagggacgc

SEQ ID NO: 2959145 - RNA, 19 nt, Human
aucauugaaaucuuuuugc

SEQ ID NO: 2959146 - RNA, 16 nt, Human
uucugcaucagcugcu

SEQ ID NO: 2959147 - RNA, 14 nt, Human
uucugaagaagaug

SEQ ID NO: 2959148 - RNA, 23 nt, Human
uucugcaucagcugcugaaacaa

SEQ ID NO: 2959149 - RNA, 12 nt, Human
uucugaagaaga

SEQ ID NO: 2959150 - RNA, 13 nt, Human
uucugaagaagau

SEQ ID NO: 2959151 - RNA, 21 nt, Human
uucugaaauuuccugggagcu

SEQ ID NO: 2959152 - RNA, 20 nt, Human
uucugaaaugucaguucuga

SEQ ID NO: 2959153 - RNA, 16 nt, Human
uucugccgcagcccug

SEQ ID NO: 2959154 - RNA, 23 nt, Human
uucugccgcagcccugcagaggg

SEQ ID NO: 2959155 - RNA, 10 nt, Human
uucugggaca

SEQ ID NO: 2959156 - RNA, 11 nt, Human
uucugggacac

SEQ ID NO: 2959157 - RNA, 22 nt, Human
uucugggacacaguucaauucu

SEQ ID NO: 2959158 - RNA, 15 nt, Human
auccagguucagcuu

SEQ ID NO: 2959159 - RNA, 16 nt, Human
auccagguucagcuug

SEQ ID NO: 2959160 - RNA, 20 nt, Human
aucauuucugcaucagcugc

SEQ ID NO: 2959161 - RNA, 16 nt, Human
aucccauaugccuggg

SEQ ID NO: 2959162 - RNA, 17 nt, Human
aucccauaugccugggc

SEQ ID NO: 2959163 - RNA, 21 nt, Human
aucccucccuccaccucccug

SEQ ID NO: 2959164 - RNA, 23 nt, Human
aucccucccuccaccucccugca

SEQ ID NO: 2959165 - RNA, 11 nt, Human
aucccucccuc

SEQ ID NO: 2959166 - RNA, 13 nt, Human
aucccucccucca

SEQ ID NO: 2959167 - RNA, 23 nt, Human
uucuaggacugaauuaugaaacu

SEQ ID NO: 2959168 - RNA, 13 nt, Human
uucuaggccuggg

SEQ ID NO: 2959169 - RNA, 14 nt, Human
uucucaacuccaaa

SEQ ID NO: 2959170 - RNA, 18 nt, Human
uucucaacuccaaacuga

SEQ ID NO: 2959171 - RNA, 13 nt, Human
uucucacagaaga

SEQ ID NO: 2959172 - RNA, 23 nt, Human
uucucagaaucucaaauaacuaa

SEQ ID NO: 2959173 - RNA, 19 nt, Human
uucucagaaucucaaauaa

SEQ ID NO: 2959174 - RNA, 22 nt, Human
uucucagaaucucaaauaacua

SEQ ID NO: 2959175 - RNA, 15 nt, Human
aucagcacgauuucu

SEQ ID NO: 2959176 - RNA, 16 nt, Human
aucagcacgauuucug

SEQ ID NO: 2959177 - RNA, 17 nt, Human
aucagcacgauuucugu

SEQ ID NO: 2959178 - RNA, 18 nt, Human
aucagcacgauuucuguu

SEQ ID NO: 2959179 - RNA, 17 nt, Human
aucauguuuaugagaaa

SEQ ID NO: 2959180 - RNA, 22 nt, Human
aucauuaaagccugaguuugcu

SEQ ID NO: 2959181 - RNA, 15 nt, Human
aucauugaaaucuuu

SEQ ID NO: 2959182 - RNA, 14 nt, Human
aucauugaaaucuu

SEQ ID NO: 2959183 - RNA, 16 nt, Human
uuauuuaguuccuuga

SEQ ID NO: 2959184 - RNA, 14 nt, Human
uuauuuacaaaugu

SEQ ID NO: 2959185 - RNA, 11 nt, Human
uuauuuauuga

SEQ ID NO: 2959186 - RNA, 13 nt, Human
uuauuuaaauaga

SEQ ID NO: 2959187 - RNA, 14 nt, Human
uuauuuaaauuuua

SEQ ID NO: 2959188 - RNA, 18 nt, Human
uuauuuaaugaaagacug

SEQ ID NO: 2959189 - RNA, 22 nt, Human
uuauuuaaugaaagacuguaca

SEQ ID NO: 2959190 - RNA, 23 nt, Human
auagcuggucuuauuuguaaagc

SEQ ID NO: 2959191 - RNA, 17 nt, Human
auagcugggacuacagg

SEQ ID NO: 2959192 - RNA, 22 nt, Human
auagcuggucuuauuuguaaag

SEQ ID NO: 2959193 - RNA, 17 nt, Human
uuauuguuuaaaaucau

SEQ ID NO: 2959194 - RNA, 19 nt, Human
auagcugugauuuuuggua

SEQ ID NO: 2959195 - RNA, 18 nt, Human
auaacuuuuuauauucuc

SEQ ID NO: 2959196 - RNA, 12 nt, Human
auaacuuuuuau

SEQ ID NO: 2959197 - RNA, 13 nt, Human
auaagauaaaugu

SEQ ID NO: 2959198 - RNA, 17 nt, Human
auaagauaaaugugcug

SEQ ID NO: 2959199 - RNA, 18 nt, Human
auagccugccucuucucu

SEQ ID NO: 2959200 - RNA, 17 nt, Human
auagcuacuaauuuuaa

SEQ ID NO: 2959201 - RNA, 14 nt, Human
auagcuacuaauuu

SEQ ID NO: 2959202 - RNA, 22 nt, Human
auagcucaggugucccugcacu

SEQ ID NO: 2959203 - RNA, 20 nt, Human
auagcucaggugucccugca

SEQ ID NO: 2959204 - RNA, 21 nt, Human
auagcucaggugucccugcac

SEQ ID NO: 2959205 - RNA, 12 nt, Human
auagcugggacu

SEQ ID NO: 2959206 - RNA, 19 nt, Human
auagcucaggugucccugc

SEQ ID NO: 2959207 - RNA, 22 nt, Human
auagcuaggugacauauacaua

SEQ ID NO: 2959208 - RNA, 18 nt, Human
auagcuacuaauuuuaaa

SEQ ID NO: 2959209 - RNA, 13 nt, Human
uucacauuggaaa

SEQ ID NO: 2959210 - RNA, 17 nt, Human
uucacauauugauuucc

SEQ ID NO: 2959211 - RNA, 14 nt, Human
uucacauuggaaac

SEQ ID NO: 2959212 - RNA, 22 nt, Human
uucaccacaugugcacaugcac

SEQ ID NO: 2959213 - RNA, 17 nt, Human
auaggcacuuuaaaaca

SEQ ID NO: 2959214 - RNA, 22 nt, Human
auagcugugauuuuugguauuu

SEQ ID NO: 2959215 - RNA, 19 nt, Human
auaggaacuuaaauaaugu

SEQ ID NO: 2959216 - RNA, 21 nt, Human
auaggaauugacccacaagaa

SEQ ID NO: 2959217 - RNA, 15 nt, Human
uucaaggauccugag

SEQ ID NO: 2959218 - RNA, 21 nt, Human
uucaaggauccugagccagau

SEQ ID NO: 2959219 - RNA, 19 nt, Human
uucaaggauccugagccag

SEQ ID NO: 2959220 - RNA, 18 nt, Human
uucaaggauccugagcca

SEQ ID NO: 2959221 - RNA, 16 nt, Human
uucaaggauccugagc

SEQ ID NO: 2959222 - RNA, 21 nt, Human
uuauuucucucaucuguuaca

SEQ ID NO: 2959223 - RNA, 17 nt, Human
uucaaaauaaaaaugag

SEQ ID NO: 2959224 - RNA, 14 nt, Human
uucaaacauauaua

SEQ ID NO: 2959225 - RNA, 15 nt, Human
uucaaacauauauaa

SEQ ID NO: 2959226 - RNA, 23 nt, Human
auaugcaaagcacugacuucuaa

SEQ ID NO: 2959227 - RNA, 15 nt, Human
auaugcaaagcacug

SEQ ID NO: 2959228 - RNA, 16 nt, Human
auaugcaaagcacuga

SEQ ID NO: 2959229 - RNA, 14 nt, Human
auaugucaagccau

SEQ ID NO: 2959230 - RNA, 13 nt, Human
auaugugaacagu

SEQ ID NO: 2959231 - RNA, 12 nt, Human
auaugauucaaa

SEQ ID NO: 2959232 - RNA, 13 nt, Human
auaugauucaaau

SEQ ID NO: 2959233 - RNA, 22 nt, Human
auaugauucaaaugucuauaaa

SEQ ID NO: 2959234 - RNA, 20 nt, Human
auaugauuuaaaucagccgu

SEQ ID NO: 2959235 - RNA, 22 nt, Human
auaucugaaaauguauguguaa

SEQ ID NO: 2959236 - RNA, 17 nt, Human
auaucuauauuuuacau

SEQ ID NO: 2959237 - RNA, 16 nt, Human
auaucuauauuuuaca

SEQ ID NO: 2959238 - RNA, 20 nt, Human
auaucuauauuuuacauaaa

SEQ ID NO: 2959239 - RNA, 22 nt, Human
auaucuauauuuuacauaaauu

SEQ ID NO: 2959240 - RNA, 14 nt, Human
auauauuauuugca

SEQ ID NO: 2959241 - RNA, 21 nt, Human
uucaucauccuaagcuauuca

SEQ ID NO: 2959242 - RNA, 18 nt, Human
uucaucauccuaagcuau

SEQ ID NO: 2959243 - RNA, 20 nt, Human
uucauauuuaauuugaaggu

SEQ ID NO: 2959244 - RNA, 18 nt, Human
uucauagagaauauaaaa

SEQ ID NO: 2959245 - RNA, 11 nt, Human
uucauagagaa

SEQ ID NO: 2959246 - RNA, 16 nt, Human
uucauauuuacuucuu

SEQ ID NO: 2959247 - RNA, 21 nt, Human
uucauauuuacuucuuauaca

SEQ ID NO: 2959248 - RNA, 14 nt, Human
uucaguaauaacuc

SEQ ID NO: 2959249 - RNA, 18 nt, Human
uucacugguacucugcca

SEQ ID NO: 2959250 - RNA, 19 nt, Human
uucagccaagaauucuuaa

SEQ ID NO: 2959251 - RNA, 14 nt, Human
uucagccaagaauu

SEQ ID NO: 2959252 - RNA, 15 nt, Human
uucagcccucagaau

SEQ ID NO: 2959253 - RNA, 17 nt, Human
uucagaucucuaacuuc

SEQ ID NO: 2959254 - RNA, 12 nt, Human
auauaacaaugc

SEQ ID NO: 2959255 - RNA, 15 nt, Human
auauaacaaugcugu

SEQ ID NO: 2959256 - RNA, 13 nt, Human
auauaagguuuuu

SEQ ID NO: 2959257 - RNA, 19 nt, Human
auauaagcuuguauuccuu

SEQ ID NO: 2959258 - RNA, 14 nt, Human
auauauaacaaugc

SEQ ID NO: 2959259 - RNA, 17 nt, Human
auauauaacaaugcugu

SEQ ID NO: 2959260 - RNA, 18 nt, Human
auauauaacaaugcugua

SEQ ID NO: 2959261 - RNA, 17 nt, Human
auagucaaauuguguga

SEQ ID NO: 2959262 - RNA, 18 nt, Human
auagucaaauugugugaa

SEQ ID NO: 2959263 - RNA, 18 nt, Human
uuggugguuucagaaaug

SEQ ID NO: 2959264 - RNA, 19 nt, Human
uuggugguuucagaaaugu

SEQ ID NO: 2959265 - RNA, 18 nt, Human
augaaugucagugugacu

SEQ ID NO: 2959266 - RNA, 16 nt, Human
augaaugucaguguga

SEQ ID NO: 2959267 - RNA, 17 nt, Human
uuggugucgggcaugac

SEQ ID NO: 2959268 - RNA, 19 nt, Human
uuggugucgggcaugacac

SEQ ID NO: 2959269 - RNA, 18 nt, Human
uuggugucgggcaugaca

SEQ ID NO: 2959270 - RNA, 14 nt, Human
uugguuuguaaauu

SEQ ID NO: 2959271 - RNA, 20 nt, Human
uugguuuucacauuggaaac

SEQ ID NO: 2959272 - RNA, 23 nt, Human
augaaccacaucuugcucugcug

SEQ ID NO: 2959273 - RNA, 22 nt, Human
augaaccacaucuugcucugcu

SEQ ID NO: 2959274 - RNA, 20 nt, Human
uuggcccaggauuauuguca

SEQ ID NO: 2959275 - RNA, 22 nt, Human
uuggcccaggaguuuggccaga

SEQ ID NO: 2959276 - RNA, 21 nt, Human
uuggcccaggaguuuggccag

SEQ ID NO: 2959277 - RNA, 20 nt, Human
uuggcccaggaguuuggcca

SEQ ID NO: 2959278 - RNA, 15 nt, Human
uuggcccaggaguuu

SEQ ID NO: 2959279 - RNA, 14 nt, Human
uuggcccaggaguu

SEQ ID NO: 2959280 - RNA, 13 nt, Human
uuggcccaggagu

SEQ ID NO: 2959281 - RNA, 19 nt, Human
augaaugucacuucuggau

SEQ ID NO: 2959282 - RNA, 21 nt, Human
augaaugucacuucuggauau

SEQ ID NO: 2959283 - RNA, 17 nt, Human
augaaugaaacauuuug

SEQ ID NO: 2959284 - RNA, 18 nt, Human
augaacuuguaaaggaau

SEQ ID NO: 2959285 - RNA, 15 nt, Human
aucuugcucugcuga

SEQ ID NO: 2959286 - RNA, 16 nt, Human
aucuugcucugcugac

SEQ ID NO: 2959287 - RNA, 14 nt, Human
aucuuauaauuuaa

SEQ ID NO: 2959288 - RNA, 14 nt, Human
aucuugcucugcug

SEQ ID NO: 2959289 - RNA, 16 nt, Human
aucuuauaauuuaaaa

SEQ ID NO: 2959290 - RNA, 15 nt, Human
aucuuauaauuuaaa

SEQ ID NO: 2959291 - RNA, 21 nt, Human
aucugugaugacauucccugc

SEQ ID NO: 2959292 - RNA, 19 nt, Human
aucugugaugacauucccu

SEQ ID NO: 2959293 - RNA, 13 nt, Human
aucuuaaaaacaa

SEQ ID NO: 2959294 - RNA, 14 nt, Human
aucuuaaaaacaac

SEQ ID NO: 2959295 - RNA, 21 nt, Human
aucuuaaaaacaacgaaagaa

SEQ ID NO: 2959296 - RNA, 12 nt, Human
aucugucauuug

SEQ ID NO: 2959297 - RNA, 17 nt, Human
aucugucauuugagcag

SEQ ID NO: 2959298 - RNA, 22 nt, Human
aucugucauuugagcagggcuc

SEQ ID NO: 2959299 - RNA, 15 nt, Human
aucuuuaaaauacac

SEQ ID NO: 2959300 - RNA, 12 nt, Human
aucuuuaaaaua

SEQ ID NO: 2959301 - RNA, 15 nt, Human
uugcuuugugauuuu

SEQ ID NO: 2959302 - RNA, 20 nt, Human
uugcuuugugauuuuuguaa

SEQ ID NO: 2959303 - RNA, 17 nt, Human
uuggaaaauaaauuauu

SEQ ID NO: 2959304 - RNA, 15 nt, Human
uuggagaagaacuga

SEQ ID NO: 2959305 - RNA, 17 nt, Human
uuggagaagaacugaaa

SEQ ID NO: 2959306 - RNA, 22 nt, Human
uuggagaagaacugaaaucaua

SEQ ID NO: 2959307 - RNA, 19 nt, Human
aucuagauacuguaucaug

SEQ ID NO: 2959308 - RNA, 16 nt, Human
aucuaggaaaauuauu

SEQ ID NO: 2959309 - RNA, 14 nt, Human
aucuaggaaaauua

SEQ ID NO: 2959310 - RNA, 19 nt, Human
aucuaggaagacuuuggaa

SEQ ID NO: 2959311 - RNA, 18 nt, Human
aucuaggaagacuuugga

SEQ ID NO: 2959312 - RNA, 17 nt, Human
aucuaggaagacuuugg

SEQ ID NO: 2959313 - RNA, 15 nt, Human
aucucaaaacugcac

SEQ ID NO: 2959314 - RNA, 20 nt, Human
aucucaaaacugcacuguca

SEQ ID NO: 2959315 - RNA, 19 nt, Human
aucucaaaacugcacuguc

SEQ ID NO: 2959316 - RNA, 14 nt, Human
aucucaaauuucua

SEQ ID NO: 2959317 - RNA, 23 nt, Human
aucucaaauaacuaaaagguaug

SEQ ID NO: 2959318 - RNA, 14 nt, Human
aucucaaauaacua

SEQ ID NO: 2959319 - RNA, 21 nt, Human
aucucaaauaacuaaaaggua

SEQ ID NO: 2959320 - RNA, 14 nt, Human
uugagugucaagcu

SEQ ID NO: 2959321 - RNA, 11 nt, Human
uugagugccuu

SEQ ID NO: 2959322 - RNA, 21 nt, Human
uugagugcugucuccauguuu

SEQ ID NO: 2959323 - RNA, 18 nt, Human
uugauagcacagacccug

SEQ ID NO: 2959324 - RNA, 15 nt, Human
uugauacuacaguuu

SEQ ID NO: 2959325 - RNA, 17 nt, Human
uugauacuacaguuugu

SEQ ID NO: 2959326 - RNA, 20 nt, Human
aucuaauauguaacaagcca

SEQ ID NO: 2959327 - RNA, 23 nt, Human
aucuaauauguaacaagccaccc

SEQ ID NO: 2959328 - RNA, 18 nt, Human
aucuagauacuguaucau

SEQ ID NO: 2959329 - RNA, 11 nt, Human
uugagacagag

SEQ ID NO: 2959330 - RNA, 12 nt, Human
uugagcagggcu

SEQ ID NO: 2959331 - RNA, 16 nt, Human
uugagcagggcucagc

SEQ ID NO: 2959332 - RNA, 14 nt, Human
uugacauugaaauc

SEQ ID NO: 2959333 - RNA, 23 nt, Human
uugacauugaaaucuaggaaaau

SEQ ID NO: 2959334 - RNA, 12 nt, Human
uugacuuuuuau

SEQ ID NO: 2959335 - RNA, 19 nt, Human
aucccuuggacauuuuaug

SEQ ID NO: 2959336 - RNA, 17 nt, Human
aucccuuggacauuuua

SEQ ID NO: 2959337 - RNA, 21 nt, Human
aucccuuggacauuuuauguc

SEQ ID NO: 2959338 - RNA, 20 nt, Human
aucccuuggacauuuuaugu

SEQ ID NO: 2959339 - RNA, 16 nt, Human
aucccuuucccuuggu

SEQ ID NO: 2959340 - RNA, 19 nt, Human
uugacaggauuauuggaaa

SEQ ID NO: 2959341 - RNA, 10 nt, Human
uugacagggc

SEQ ID NO: 2959342 - RNA, 12 nt, Human
uugacagggcac

SEQ ID NO: 2959343 - RNA, 13 nt, Human
uugacaugggaca

SEQ ID NO: 2959344 - RNA, 16 nt, Human
uugacaucaacugcau

SEQ ID NO: 2959345 - RNA, 13 nt, Human
uugacaucaacug

SEQ ID NO: 2959346 - RNA, 21 nt, Human
uugcaccacugcacuccagcc

SEQ ID NO: 2959347 - RNA, 14 nt, Human
uugcaauggcagcc

SEQ ID NO: 2959348 - RNA, 19 nt, Human
uugcaugguuuggagcuga

SEQ ID NO: 2959349 - RNA, 12 nt, Human
uugcaugaggcu

SEQ ID NO: 2959350 - RNA, 14 nt, Human
uugcaugaggcuag

SEQ ID NO: 2959351 - RNA, 19 nt, Human
uugccaauuugcacauuaa

SEQ ID NO: 2959352 - RNA, 22 nt, Human
uugccaauuugcacauuaaaug

SEQ ID NO: 2959353 - RNA, 23 nt, Human
uugccaauuugcacauuaaauga

SEQ ID NO: 2959354 - RNA, 13 nt, Human
uugcccaggcagg

SEQ ID NO: 2959355 - RNA, 14 nt, Human
uugcccaggcaggu

SEQ ID NO: 2959356 - RNA, 16 nt, Human
uugcccaggcaggucu

SEQ ID NO: 2959357 - RNA, 18 nt, Human
uugcccaggcaggucuug

SEQ ID NO: 2959358 - RNA, 11 nt, Human
uugcccaggcu

SEQ ID NO: 2959359 - RNA, 12 nt, Human
uugcccaggcug

SEQ ID NO: 2959360 - RNA, 14 nt, Human
uugcccaggcuggc

SEQ ID NO: 2959361 - RNA, 23 nt, Human
uugcccaggcuggcgugcagugg

SEQ ID NO: 2959362 - RNA, 15 nt, Human
uugauuaaauucuug

SEQ ID NO: 2959363 - RNA, 16 nt, Human
uugauuaaauucuugc

SEQ ID NO: 2959364 - RNA, 20 nt, Human
uugauuaaauucuugcaaag

SEQ ID NO: 2959365 - RNA, 21 nt, Human
uugauuaaauucuugcaaagu

SEQ ID NO: 2959366 - RNA, 23 nt, Human
uugauguucuuucacccuuuucu

SEQ ID NO: 2959367 - RNA, 23 nt, Human
aucucacacaugagcaucaggcc

SEQ ID NO: 2959368 - RNA, 16 nt, Human
aucucaaauuucuaaa

SEQ ID NO: 2959369 - RNA, 17 nt, Human
aucucaaauuucuaaau

SEQ ID NO: 2959370 - RNA, 11 nt, Human
uuuacuuaaac

SEQ ID NO: 2959371 - RNA, 16 nt, Human
uuuacugcagcuuugu

SEQ ID NO: 2959372 - RNA, 15 nt, Human
augcuacaguaauaa

SEQ ID NO: 2959373 - RNA, 17 nt, Human
augcuacaguaauaaau

SEQ ID NO: 2959374 - RNA, 18 nt, Human
uuuaccugaagucuuugu

SEQ ID NO: 2959375 - RNA, 22 nt, Human
uuuaccugaagucuuuguacag

SEQ ID NO: 2959376 - RNA, 15 nt, Human
uuuacuucuuauaca

SEQ ID NO: 2959377 - RNA, 14 nt, Human
uuuacuucuuauac

SEQ ID NO: 2959378 - RNA, 14 nt, Human
uuuacuuaagacuu

SEQ ID NO: 2959379 - RNA, 12 nt, Human
uuuacuuaagac

SEQ ID NO: 2959380 - RNA, 13 nt, Human
uuuacuucuuaua

SEQ ID NO: 2959381 - RNA, 17 nt, Human
uuuagggguagcauuug

SEQ ID NO: 2959382 - RNA, 19 nt, Human
uuuauaugcuucuguuuua

SEQ ID NO: 2959383 - RNA, 16 nt, Human
uuuaucagaacuaugu

SEQ ID NO: 2959384 - RNA, 17 nt, Human
uuuaucagaacuauguu

SEQ ID NO: 2959385 - RNA, 21 nt, Human
uuuauaugcuucuguuuuaua

SEQ ID NO: 2959386 - RNA, 23 nt, Human
augccagggccaugucagacaca

SEQ ID NO: 2959387 - RNA, 21 nt, Human
augccagggccaugucagaca

SEQ ID NO: 2959388 - RNA, 18 nt, Human
uuuaaucuuuuaugauug

SEQ ID NO: 2959389 - RNA, 21 nt, Human
uuuaaugaaagacuguacaaa

SEQ ID NO: 2959390 - RNA, 23 nt, Human
uuuaaugaaagacuguacaaagu

SEQ ID NO: 2959391 - RNA, 15 nt, Human
augccccugaauuua

SEQ ID NO: 2959392 - RNA, 20 nt, Human
augccccugaauuuaaauag

SEQ ID NO: 2959393 - RNA, 17 nt, Human
augcccagccccuucug

SEQ ID NO: 2959394 - RNA, 16 nt, Human
augcccagugagacug

SEQ ID NO: 2959395 - RNA, 15 nt, Human
augcccagugagacu

SEQ ID NO: 2959396 - RNA, 15 nt, Human
augcccagccccuuc

SEQ ID NO: 2959397 - RNA, 16 nt, Human
augcccagccccuucu

SEQ ID NO: 2959398 - RNA, 21 nt, Human
augccaugaggaacaaggcaa

SEQ ID NO: 2959399 - RNA, 20 nt, Human
augcgugcauaccacuuuug

SEQ ID NO: 2959400 - RNA, 22 nt, Human
augcgugcauaccacuuuuguu

SEQ ID NO: 2959401 - RNA, 18 nt, Human
augcuacaggauuugaaa

SEQ ID NO: 2959402 - RNA, 14 nt, Human
augccucucucagg

SEQ ID NO: 2959403 - RNA, 13 nt, Human
augccucucucag

SEQ ID NO: 2959404 - RNA, 14 nt, Human
augccuuuucccaa

SEQ ID NO: 2959405 - RNA, 15 nt, Human
augccucucucaggc

SEQ ID NO: 2959406 - RNA, 20 nt, Human
augccuuuucccaacuccag

SEQ ID NO: 2959407 - RNA, 22 nt, Human
augccuuuucccaacuccagaa

SEQ ID NO: 2959408 - RNA, 23 nt, Human
augcuguucaugaaagauucaau

SEQ ID NO: 2959409 - RNA, 23 nt, Human
augcuguauuuuaaaagaaugau

SEQ ID NO: 2959410 - RNA, 19 nt, Human
augcuggcuguuggcuggg

SEQ ID NO: 2959411 - RNA, 20 nt, Human
augcuggcuguuggcugggg

SEQ ID NO: 2959412 - RNA, 19 nt, Human
augcuguauuuuaaaagaa

SEQ ID NO: 2959413 - RNA, 22 nt, Human
augcuguauuuuaaaagaauga

SEQ ID NO: 2959414 - RNA, 18 nt, Human
auggaagacagcucuuau

SEQ ID NO: 2959415 - RNA, 17 nt, Human
auggaagacagcucuua

SEQ ID NO: 2959416 - RNA, 20 nt, Human
augcuucucacugccaugcc

SEQ ID NO: 2959417 - RNA, 16 nt, Human
augcuucucacugcca

SEQ ID NO: 2959418 - RNA, 18 nt, Human
uuuaucagaacuauguuu

SEQ ID NO: 2959419 - RNA, 14 nt, Human
uuuaucagaauucu

SEQ ID NO: 2959420 - RNA, 19 nt, Human
augcuccuggcccacugca

SEQ ID NO: 2959421 - RNA, 14 nt, Human
augcuccuggccca

SEQ ID NO: 2959422 - RNA, 18 nt, Human
augcuggcuguuggcugg

SEQ ID NO: 2959423 - RNA, 17 nt, Human
auggaauucacaaagua

SEQ ID NO: 2959424 - RNA, 16 nt, Human
auggaauucacaaagu

SEQ ID NO: 2959425 - RNA, 17 nt, Human
uuucaaacauauauaac

SEQ ID NO: 2959426 - RNA, 20 nt, Human
auggaauucacaaaguaauu

SEQ ID NO: 2959427 - RNA, 19 nt, Human
uuucaaacauauauaacaa

SEQ ID NO: 2959428 - RNA, 12 nt, Human
uuucaaacuuua

SEQ ID NO: 2959429 - RNA, 14 nt, Human
uuucacauuggaaa

SEQ ID NO: 2959430 - RNA, 19 nt, Human
uuucacauuggaaacaagu

SEQ ID NO: 2959431 - RNA, 13 nt, Human
uuucacauuggaa

SEQ ID NO: 2959432 - RNA, 17 nt, Human
uuuccauuuacuuaaga

SEQ ID NO: 2959433 - RNA, 16 nt, Human
uuucccuauuagagaa

SEQ ID NO: 2959434 - RNA, 21 nt, Human
uuucaugcuguucaugaaaga

SEQ ID NO: 2959435 - RNA, 19 nt, Human
uuucaugcuguucaugaaa

SEQ ID NO: 2959436 - RNA, 11 nt, Human
uuucagaaaug

SEQ ID NO: 2959437 - RNA, 12 nt, Human
uuucagaaaugu

SEQ ID NO: 2959438 - RNA, 13 nt, Human
uugugaggaagcc

SEQ ID NO: 2959439 - RNA, 19 nt, Human
uugugauacaaugcugugc

SEQ ID NO: 2959440 - RNA, 20 nt, Human
uugugauacaaugcugugcc

SEQ ID NO: 2959441 - RNA, 18 nt, Human
uugugaggaagccgcugg

SEQ ID NO: 2959442 - RNA, 17 nt, Human
uugugaggaagccgcug

SEQ ID NO: 2959443 - RNA, 22 nt, Human
uugugaaugcagguuuuaucag

SEQ ID NO: 2959444 - RNA, 16 nt, Human
uuguccccgacccuug

SEQ ID NO: 2959445 - RNA, 15 nt, Human
uuguccccgacccuu

SEQ ID NO: 2959446 - RNA, 15 nt, Human
uugucccaagugcca

SEQ ID NO: 2959447 - RNA, 20 nt, Human
uuguccccaccgcagacagg

SEQ ID NO: 2959448 - RNA, 18 nt, Human
uuguccccaccgcagaca

SEQ ID NO: 2959449 - RNA, 16 nt, Human
uuguguacuuuuaaga

SEQ ID NO: 2959450 - RNA, 21 nt, Human
uugucauauaagauucauauu

SEQ ID NO: 2959451 - RNA, 17 nt, Human
uugucacacacuuuggc

SEQ ID NO: 2959452 - RNA, 13 nt, Human
augaguccccugu

SEQ ID NO: 2959453 - RNA, 23 nt, Human
augaguccccuguuuguuucuga

SEQ ID NO: 2959454 - RNA, 20 nt, Human
uugucaauaaaauccauaca

SEQ ID NO: 2959455 - RNA, 19 nt, Human
augaggucagagccugcag

SEQ ID NO: 2959456 - RNA, 20 nt, Human
augaggucagagccugcagu

SEQ ID NO: 2959457 - RNA, 15 nt, Human
augaggucagagccu

SEQ ID NO: 2959458 - RNA, 16 nt, Human
augaggucagagccug

SEQ ID NO: 2959459 - RNA, 18 nt, Human
augaggucagagccugca

SEQ ID NO: 2959460 - RNA, 16 nt, Human
uuguagcauccuggaa

SEQ ID NO: 2959461 - RNA, 18 nt, Human
uuguagcauccuggaaua

SEQ ID NO: 2959462 - RNA, 17 nt, Human
augagguacugagagug

SEQ ID NO: 2959463 - RNA, 18 nt, Human
augagguacugagaguga

SEQ ID NO: 2959464 - RNA, 15 nt, Human
augagguacugagag

SEQ ID NO: 2959465 - RNA, 17 nt, Human
uuguucuugguuuguaa

SEQ ID NO: 2959466 - RNA, 19 nt, Human
uuguucuugguuuguaaau

SEQ ID NO: 2959467 - RNA, 16 nt, Human
augcaaaaaaaauuag

SEQ ID NO: 2959468 - RNA, 13 nt, Human
augauuucauuca

SEQ ID NO: 2959469 - RNA, 23 nt, Human
augcacuuuguucuggcucuucc

SEQ ID NO: 2959470 - RNA, 18 nt, Human
uuuaaaaaaauuccaagu

SEQ ID NO: 2959471 - RNA, 21 nt, Human
augcacuuuguucuggcucuu

SEQ ID NO: 2959472 - RNA, 20 nt, Human
augcaaagaugaaggucugu

SEQ ID NO: 2959473 - RNA, 14 nt, Human
augcaaagcacuga

SEQ ID NO: 2959474 - RNA, 13 nt, Human
augcaaagcacug

SEQ ID NO: 2959475 - RNA, 12 nt, Human
augcaaagcacu

SEQ ID NO: 2959476 - RNA, 22 nt, Human
uuuaaggaugcuuguacauaau

SEQ ID NO: 2959477 - RNA, 20 nt, Human
uuuaaggaugcuuguacaua

SEQ ID NO: 2959478 - RNA, 21 nt, Human
uuuaaggaugcuuguacauaa

SEQ ID NO: 2959479 - RNA, 18 nt, Human
uuuaagggcccuuuuuca

SEQ ID NO: 2959480 - RNA, 20 nt, Human
uuuaagggcccuuuuucaau

SEQ ID NO: 2959481 - RNA, 21 nt, Human
uuuaagggcccuuuuucaaua

SEQ ID NO: 2959482 - RNA, 15 nt, Human
uuuaaucuuuuauga

SEQ ID NO: 2959483 - RNA, 16 nt, Human
uuuaaugaaagacugu

SEQ ID NO: 2959484 - RNA, 19 nt, Human
uuuaaggaugcuuguacau

SEQ ID NO: 2959485 - RNA, 21 nt, Human
uuuaagcuguuacugucuuca

SEQ ID NO: 2959486 - RNA, 16 nt, Human
uuuaagacuuugguua

SEQ ID NO: 2959487 - RNA, 12 nt, Human
uuuaagagaaau

SEQ ID NO: 2959488 - RNA, 11 nt, Human
uuuaaaugcac

SEQ ID NO: 2959489 - RNA, 21 nt, Human
uuuaaauauaugcuaagucuu

SEQ ID NO: 2959490 - RNA, 16 nt, Human
uuuuguuuuugucuua

SEQ ID NO: 2959491 - RNA, 15 nt, Human
uuuuguuuucauuau

SEQ ID NO: 2959492 - RNA, 20 nt, Human
uuuuguuuuuauuaaaagga

SEQ ID NO: 2959493 - RNA, 23 nt, Human
uuuuuauacauaaacaagaccac

SEQ ID NO: 2959494 - RNA, 21 nt, Human
uuuuuauauucucagcagagu

SEQ ID NO: 2959495 - RNA, 22 nt, Human
uuuuuauauucucagcagagug

SEQ ID NO: 2959496 - RNA, 14 nt, Human
uuuuggaaaagaau

SEQ ID NO: 2959497 - RNA, 12 nt, Human
uuuuguguacuu

SEQ ID NO: 2959498 - RNA, 23 nt, Human
uuuugugcauuaucuagauacug

SEQ ID NO: 2959499 - RNA, 14 nt, Human
uuuugugaagcaaa

SEQ ID NO: 2959500 - RNA, 18 nt, Human
uuuuuggaaaagaauaaa

SEQ ID NO: 2959501 - RNA, 15 nt, Human
uuuuugaagcuguau

SEQ ID NO: 2959502 - RNA, 18 nt, Human
auuaaguacuauguauca

SEQ ID NO: 2959503 - RNA, 16 nt, Human
auuaaguacuauguau

SEQ ID NO: 2959504 - RNA, 19 nt, Human
auuaaguacuauguaucaa

SEQ ID NO: 2959505 - RNA, 13 nt, Human
auuaaggaagaca

SEQ ID NO: 2959506 - RNA, 15 nt, Human
uuuuugguauuugaa

SEQ ID NO: 2959507 - RNA, 14 nt, Human
auuacuucugcuac

SEQ ID NO: 2959508 - RNA, 12 nt, Human
auuacuucugcu

SEQ ID NO: 2959509 - RNA, 13 nt, Human
auuacuucugcua

SEQ ID NO: 2959510 - RNA, 13 nt, Human
auuagagaagaga

SEQ ID NO: 2959511 - RNA, 15 nt, Human
auuacuguaagaaaa

SEQ ID NO: 2959512 - RNA, 16 nt, Human
auuacuguaagaaaau

SEQ ID NO: 2959513 - RNA, 17 nt, Human
auuauugauguuuucau

SEQ ID NO: 2959514 - RNA, 19 nt, Human
auucaccuccuaaaacaac

SEQ ID NO: 2959515 - RNA, 18 nt, Human
auucaccuccuaaaacaa

SEQ ID NO: 2959516 - RNA, 21 nt, Human
auucaccuccuaaaacaacag

SEQ ID NO: 2959517 - RNA, 22 nt, Human
auucaaacagucucaggaaauc

SEQ ID NO: 2959518 - RNA, 20 nt, Human
auuauauggcuugaguuuaa

SEQ ID NO: 2959519 - RNA, 21 nt, Human
auuccuaacuaucacugguuu

SEQ ID NO: 2959520 - RNA, 22 nt, Human
auuccccaggaggccagccuug

SEQ ID NO: 2959521 - RNA, 20 nt, Human
auuccccaggaggccagccu

SEQ ID NO: 2959522 - RNA, 18 nt, Human
auucccaagcucugcucc

SEQ ID NO: 2959523 - RNA, 19 nt, Human
auucccaagcucugcuccu

SEQ ID NO: 2959524 - RNA, 17 nt, Human
auucccaagcucugcuc

SEQ ID NO: 2959525 - RNA, 17 nt, Human
auuccaagugauugaaa

SEQ ID NO: 2959526 - RNA, 18 nt, Human
uuugauucagacagcugc

SEQ ID NO: 2959527 - RNA, 22 nt, Human
uuuggauuggaugaauuccaaa

SEQ ID NO: 2959528 - RNA, 20 nt, Human
uuugcuggagcucugcccau

SEQ ID NO: 2959529 - RNA, 22 nt, Human
uuugcuggggccgaaagaacag

SEQ ID NO: 2959530 - RNA, 19 nt, Human
uuugcuggggccgaaagaa

SEQ ID NO: 2959531 - RNA, 22 nt, Human
uuugggguacccacugcucugg

SEQ ID NO: 2959532 - RNA, 21 nt, Human
uuugggguacccacugcucug

SEQ ID NO: 2959533 - RNA, 13 nt, Human
uuuggcugcugaa

SEQ ID NO: 2959534 - RNA, 12 nt, Human
uuuggcugcuga

SEQ ID NO: 2959535 - RNA, 15 nt, Human
uuugauucagacagc

SEQ ID NO: 2959536 - RNA, 14 nt, Human
uuugauccaagcug

SEQ ID NO: 2959537 - RNA, 15 nt, Human
uuugauccaagcugg

SEQ ID NO: 2959538 - RNA, 13 nt, Human
uuugagacagagu

SEQ ID NO: 2959539 - RNA, 23 nt, Human
uuugagaaauuuuuuuuuccagu

SEQ ID NO: 2959540 - RNA, 18 nt, Human
uuugaccucugcagcaau

SEQ ID NO: 2959541 - RNA, 14 nt, Human
uuugacaaggggca

SEQ ID NO: 2959542 - RNA, 19 nt, Human
uuugaccucugcagcaaua

SEQ ID NO: 2959543 - RNA, 21 nt, Human
uuugaccucugcagcaauaaa

SEQ ID NO: 2959544 - RNA, 23 nt, Human
uuucccucccuuccucuuuccau

SEQ ID NO: 2959545 - RNA, 16 nt, Human
uuuguuucugaaaggg

SEQ ID NO: 2959546 - RNA, 14 nt, Human
uuuguuucugaaag

SEQ ID NO: 2959547 - RNA, 22 nt, Human
uuugugcauuaucuagauacug

SEQ ID NO: 2959548 - RNA, 15 nt, Human
uuugugauacaaugc

SEQ ID NO: 2959549 - RNA, 22 nt, Human
uuugugauacaaugcugugccc

SEQ ID NO: 2959550 - RNA, 19 nt, Human
uuugugcauuaucuagaua

SEQ ID NO: 2959551 - RNA, 14 nt, Human
uuugucuuaaaaag

SEQ ID NO: 2959552 - RNA, 13 nt, Human
uuugucuuaaaaa

SEQ ID NO: 2959553 - RNA, 16 nt, Human
uuugugauacaaugcu

SEQ ID NO: 2959554 - RNA, 23 nt, Human
uuugucuuaaaaaguggaaaaau

SEQ ID NO: 2959555 - RNA, 16 nt, Human
uuuguaauuuuuuuau

SEQ ID NO: 2959556 - RNA, 14 nt, Human
uuuguacagacaac

SEQ ID NO: 2959557 - RNA, 17 nt, Human
auguccaagaagcccag

SEQ ID NO: 2959558 - RNA, 16 nt, Human
auguccaagaagccca

SEQ ID NO: 2959559 - RNA, 12 nt, Human
auguaucaauga

SEQ ID NO: 2959560 - RNA, 19 nt, Human
auguauauuuuauaucaau

SEQ ID NO: 2959561 - RNA, 14 nt, Human
augugagacugguu

SEQ ID NO: 2959562 - RNA, 13 nt, Human
augugagaccauu

SEQ ID NO: 2959563 - RNA, 23 nt, Human
augucgucaaagcugaaauggac

SEQ ID NO: 2959564 - RNA, 21 nt, Human
augugcuaguaauuggaaagg

SEQ ID NO: 2959565 - RNA, 21 nt, Human
augugccagguuuuuggucug

SEQ ID NO: 2959566 - RNA, 20 nt, Human
augugcuaguaauuggaaag

SEQ ID NO: 2959567 - RNA, 17 nt, Human
uuuguuuuuauuaaaag

SEQ ID NO: 2959568 - RNA, 18 nt, Human
uuuuaaaaaacugcugac

SEQ ID NO: 2959569 - RNA, 17 nt, Human
uuuuagaguugauacua

SEQ ID NO: 2959570 - RNA, 21 nt, Human
uuuuagacccuauugcugcuu

SEQ ID NO: 2959571 - RNA, 14 nt, Human
auguugcuaacagc

SEQ ID NO: 2959572 - RNA, 12 nt, Human
auguugaaagau

SEQ ID NO: 2959573 - RNA, 13 nt, Human
auguugcccaggc

SEQ ID NO: 2959574 - RNA, 18 nt, Human
auguugaaagaucaaaag

SEQ ID NO: 2959575 - RNA, 14 nt, Human
auguugcccaggca

SEQ ID NO: 2959576 - RNA, 15 nt, Human
auguugcccaggcag

SEQ ID NO: 2959577 - RNA, 20 nt, Human
auguuacauaagauaaaugu

SEQ ID NO: 2959578 - RNA, 19 nt, Human
auguuacauaagauaaaug

SEQ ID NO: 2959579 - RNA, 15 nt, Human
uuuuaguagagacag

SEQ ID NO: 2959580 - RNA, 22 nt, Human
uuuuauggcacuaguauuucua

SEQ ID NO: 2959581 - RNA, 18 nt, Human
uuuuauggcuuuugugca

SEQ ID NO: 2959582 - RNA, 19 nt, Human
uuuuauggcuuuugugcau

SEQ ID NO: 2959583 - RNA, 12 nt, Human
uuuuauuaaauu

SEQ ID NO: 2959584 - RNA, 21 nt, Human
uuuuauggcuuuugugcauua

SEQ ID NO: 2959585 - RNA, 20 nt, Human
uuuucaggcuagauguaugu

SEQ ID NO: 2959586 - RNA, 16 nt, Human
uuuucucuaggaaaua

SEQ ID NO: 2959587 - RNA, 17 nt, Human
uuuucucugauacagaa

SEQ ID NO: 2959588 - RNA, 19 nt, Human
auuaaaacacaacaucuuu

SEQ ID NO: 2959589 - RNA, 23 nt, Human
auuaaaaaucucaaauuucuaaa

SEQ ID NO: 2959590 - RNA, 17 nt, Human
auguuggccaggcuggu

SEQ ID NO: 2959591 - RNA, 13 nt, Human
uuuucuguucuuu

SEQ ID NO: 2959592 - RNA, 23 nt, Human
auuggcuagagguucaaagauau

SEQ ID NO: 2959593 - RNA, 14 nt, Human
auuggggcucccag

SEQ ID NO: 2959594 - RNA, 19 nt, Human
auuggcuagagguucaaag

SEQ ID NO: 2959595 - RNA, 20 nt, Human
auuggcuagagguucaaaga

SEQ ID NO: 2959596 - RNA, 22 nt, Human
auuggcuagagguucaaagaua

SEQ ID NO: 2959597 - RNA, 16 nt, Human
auuggagcucguggaa

SEQ ID NO: 2959598 - RNA, 17 nt, Human
auuggagcucgugggac

SEQ ID NO: 2959599 - RNA, 22 nt, Human
auugcauacuauuaaacaugcu

SEQ ID NO: 2959600 - RNA, 19 nt, Human
auugcauacuauuaaacau

SEQ ID NO: 2959601 - RNA, 20 nt, Human
auugcauacuauuaaacaug

SEQ ID NO: 2959602 - RNA, 19 nt, Human
auugccuuuuuauaacuuu

SEQ ID NO: 2959603 - RNA, 20 nt, Human
auugccuuuuuauaacuuuu

SEQ ID NO: 2959604 - RNA, 21 nt, Human
auugccuuuuuauaacuuuuu

SEQ ID NO: 2959605 - RNA, 14 nt, Human
auuggaaacaaguc

SEQ ID NO: 2959606 - RNA, 13 nt, Human
auuggaaacaagu

SEQ ID NO: 2959607 - RNA, 15 nt, Human
auugaaguaaaaugu

SEQ ID NO: 2959608 - RNA, 24 nt, Human
auuccuagaaacugacacaugcug

SEQ ID NO: 2959609 - RNA, 17 nt, Human
auugaaggaugcugucu

SEQ ID NO: 2959610 - RNA, 14 nt, Human
auugaaguaaaaug

SEQ ID NO: 2959611 - RNA, 17 nt, Human
auugauguuuucauaga

SEQ ID NO: 2959612 - RNA, 16 nt, Human
auugauguuuucauag

SEQ ID NO: 2959613 - RNA, 13 nt, Human
auugauguuuuca

SEQ ID NO: 2959614 - RNA, 19 nt, Human
auugcaacaggcugggcuu

SEQ ID NO: 2959615 - RNA, 12 nt, Human
auugcaccacug

SEQ ID NO: 2959616 - RNA, 17 nt, Human
auugcaacaggcugggc

SEQ ID NO: 2959617 - RNA, 18 nt, Human
auugcaacaggcugggcu

SEQ ID NO: 2959618 - RNA, 18 nt, Human
auugcauacuauuaaaca

SEQ ID NO: 2959619 - RNA, 17 nt, Human
auugcauacuauuaaac

SEQ ID NO: 2959620 - RNA, 17 nt, Human
auugcaccuggauguac

SEQ ID NO: 2959621 - RNA, 16 nt, Human
auugcaacaggcuggg

SEQ ID NO: 2959622 - RNA, 16 nt, Human
auuucuuccacaagag

SEQ ID NO: 2959623 - RNA, 20 nt, Human
auuucuugagguaaaagcau

SEQ ID NO: 2959624 - RNA, 15 nt, Human
auuugagcagggcuc

SEQ ID NO: 2959625 - RNA, 15 nt, Human
auuugaggucuguuc

SEQ ID NO: 2959626 - RNA, 17 nt, Human
auuugaggucuguucuu

SEQ ID NO: 2959627 - RNA, 18 nt, Human
auuugaggucuguucuuu

SEQ ID NO: 2959628 - RNA, 21 nt, Human
auuuggugguuucagaaaugu

SEQ ID NO: 2959629 - RNA, 12 nt, Human
auuugguuuuca

SEQ ID NO: 2959630 - RNA, 14 nt, Human
auuugguuuucaca

SEQ ID NO: 2959631 - RNA, 21 nt, Human
auuugaggucuguucuuucca

SEQ ID NO: 2959632 - RNA, 19 nt, Human
auuugauaugugaacaguu

SEQ ID NO: 2959633 - RNA, 18 nt, Human
auuugauaugugaacagu

SEQ ID NO: 2959634 - RNA, 18 nt, Human
auuuccauuuacuuaaga

SEQ ID NO: 2959635 - RNA, 21 nt, Human
auuuauuuuaauaauguuuca

SEQ ID NO: 2959636 - RNA, 22 nt, Human
auuuccauuuacuuaagacuua

SEQ ID NO: 2959637 - RNA, 19 nt, Human
auuuccauuuacuuaagac

SEQ ID NO: 2959638 - RNA, 20 nt, Human
auuuccauuuacuuaagacu

SEQ ID NO: 2959639 - RNA, 16 nt, Human
auuucccaaagcagug

SEQ ID NO: 2959640 - RNA, 14 nt, Human
auuucccaaagcag

SEQ ID NO: 2959641 - RNA, 17 nt, Human
auuuccguuaaaauacc

SEQ ID NO: 2959642 - RNA, 19 nt, Human
auuuauuacuguaagaaaa

SEQ ID NO: 2959643 - RNA, 20 nt, Human
auuuauuacuguaagaaaau

SEQ ID NO: 2959644 - RNA, 22 nt, Human
auuuauugaaaugauuucacag

SEQ ID NO: 2959645 - RNA, 15 nt, Human
auuuauugaaaugau

SEQ ID NO: 2959646 - RNA, 13 nt, Human
auuuauugaaaug

SEQ ID NO: 2959647 - RNA, 12 nt, Human
auuuauuacaac

SEQ ID NO: 2959648 - RNA, 15 nt, Human
auuuacuuuaaacua

SEQ ID NO: 2959649 - RNA, 19 nt, Human
auuuacuucuuauacauuu

SEQ ID NO: 2959650 - RNA, 20 nt, Human
auuuacuucuuauacauuug

SEQ ID NO: 2959651 - RNA, 22 nt, Human
auuuacaacugggggaggguga

SEQ ID NO: 2959652 - RNA, 15 nt, Human
auuggggcucccagc

SEQ ID NO: 2959653 - RNA, 14 nt, Human
auuuaaauagauga

SEQ ID NO: 2959654 - RNA, 15 nt, Human
auuuaaauagaugac

SEQ ID NO: 2959655 - RNA, 16 nt, Human
auuuaaauagcuuuuu

SEQ ID NO: 2959656 - RNA, 22 nt, Human
auuuaccacuuguguuuugcaa

SEQ ID NO: 2959657 - RNA, 15 nt, Human
auuuaccacuugugu

SEQ ID NO: 2959658 - RNA, 17 nt, Human
auuguuuucaguguaca

SEQ ID NO: 2959659 - RNA, 20 nt, Human
auuguagcauccuggaauau

SEQ ID NO: 2959660 - RNA, 16 nt, Human
auuguaguccuguaau

SEQ ID NO: 2959661 - RNA, 17 nt, Human
auuguagcauccuggaa

SEQ ID NO: 2959662 - RNA, 14 nt, Human
auuuaaaaaaaauc

SEQ ID NO: 2959663 - RNA, 17 nt, Human
auuuaaaaaaaaaccug

SEQ ID NO: 2959664 - RNA, 18 nt, Human
auuguuuucaguguacau

SEQ ID NO: 2959665 - RNA, 19 nt, Human
auuguuuucaguguacaug

SEQ ID NO: 2959666 - RNA, 17 nt, Human
aaaacacauuuuucuua

SEQ ID NO: 2959667 - RNA, 19 nt, Human
aaaacacuguucucugccc

SEQ ID NO: 2959668 - RNA, 11 nt, Human
aaaagaaaaag

SEQ ID NO: 2959669 - RNA, 13 nt, Human
aaaagacuccaaa

SEQ ID NO: 2959670 - RNA, 11 nt, Human
aaaagaaugau

SEQ ID NO: 2959671 - RNA, 13 nt, Human
aaaagaauauuuu

SEQ ID NO: 2959672 - RNA, 20 nt, Human
aaaagacaaggaaaaaauaa

SEQ ID NO: 2959673 - RNA, 12 nt, Human
aaaagaauauuu

SEQ ID NO: 2959674 - RNA, 13 nt, Human
aaaagaaaaguuu

SEQ ID NO: 2959675 - RNA, 17 nt, Human
aaaagaaagaaaaucag

SEQ ID NO: 2959676 - RNA, 14 nt, Human
aaaauaaaacuuuu

SEQ ID NO: 2959677 - RNA, 18 nt, Human
aaaaguugaauuuuacau

SEQ ID NO: 2959678 - RNA, 10 nt, Human
aaaaucauuu

SEQ ID NO: 2959679 - RNA, 12 nt, Human
aaaaucauuucu

SEQ ID NO: 2959680 - RNA, 11 nt, Human
aaaaucauuuc

SEQ ID NO: 2959681 - RNA, 21 nt, Human
aaaaucagccugcuccagcug

SEQ ID NO: 2959682 - RNA, 17 nt, Human
aaaaucagccugcucca

SEQ ID NO: 2959683 - RNA, 16 nt, Human
aaaauaaaacuuuuua

SEQ ID NO: 2959684 - RNA, 13 nt, Human
aaaaucagccugc

SEQ ID NO: 2959685 - RNA, 17 nt, Human
aaagccucuguuuugau

SEQ ID NO: 2959686 - RNA, 16 nt, Human
aaagccucuguuuuga

SEQ ID NO: 2959687 - RNA, 17 nt, Human
aaagcauuguaaaugug

SEQ ID NO: 2959688 - RNA, 15 nt, Human
aaagcauuguaaaug

SEQ ID NO: 2959689 - RNA, 20 nt, Human
aaagauauuuugcuuuguga

SEQ ID NO: 2959690 - RNA, 15 nt, Human
aaacugcacugucaa

SEQ ID NO: 2959691 - RNA, 23 nt, Human
aaacugauuuuuuuuuccuucag

SEQ ID NO: 2959692 - RNA, 22 nt, Human
aaacugauuuuuuuuuccuuca

SEQ ID NO: 2959693 - RNA, 23 nt, Human
aaacucuuaaaacccaagugccu

SEQ ID NO: 2959694 - RNA, 12 nt, Human
aaacucuuaaaa

SEQ ID NO: 2959695 - RNA, 19 nt, Human
aaacccuugccaugugcua

SEQ ID NO: 2959696 - RNA, 22 nt, Human
aaaccgaacugauguaaguaaa

SEQ ID NO: 2959697 - RNA, 16 nt, Human
aaacccagcucugguc

SEQ ID NO: 2959698 - RNA, 12 nt, Human
aaacccagcucu

SEQ ID NO: 2959699 - RNA, 16 nt, Human
aaaccgccaaggcugg

SEQ ID NO: 2959700 - RNA, 15 nt, Human
aaaccgccaaggcug

SEQ ID NO: 2959701 - RNA, 21 nt, Human
aaaaucauuucugcaucagcu

SEQ ID NO: 2959702 - RNA, 15 nt, Human
aaaaucucaaauuuc

SEQ ID NO: 2959703 - RNA, 16 nt, Human
aaaaucucaaauuucu

SEQ ID NO: 2959704 - RNA, 18 nt, Human
aaaaucucaaauuucuaa

SEQ ID NO: 2959705 - RNA, 11 nt, Human
aaauguuuugc

SEQ ID NO: 2959706 - RNA, 22 nt, Human
aaauguuuugcucaauagauug

SEQ ID NO: 2959707 - RNA, 23 nt, Human
aaauguugacaugggacauuugc

SEQ ID NO: 2959708 - RNA, 13 nt, Human
aaauguucaucaa

SEQ ID NO: 2959709 - RNA, 22 nt, Human
aaauguugacaugggacauuug

SEQ ID NO: 2959710 - RNA, 20 nt, Human
aaaggaugcccaaagaugca

SEQ ID NO: 2959711 - RNA, 14 nt, Human
aaaggaugcacaga

SEQ ID NO: 2959712 - RNA, 19 nt, Human
aaaugcuguaacuuucuga

SEQ ID NO: 2959713 - RNA, 14 nt, Human
aaaucuuuuugcuu

SEQ ID NO: 2959714 - RNA, 13 nt, Human
aaaucuuuuugcu

SEQ ID NO: 2959715 - RNA, 18 nt, Human
aaaucucaauauuucaga

SEQ ID NO: 2959716 - RNA, 22 nt, Human
aaauagcagcccucaauuguga

SEQ ID NO: 2959717 - RNA, 21 nt, Human
aaauagaugacauugacuauu

SEQ ID NO: 2959718 - RNA, 14 nt, Human
aaauagaugacauu

SEQ ID NO: 2959719 - RNA, 21 nt, Human
aaauauuuauuuuaauaaugu

SEQ ID NO: 2959720 - RNA, 23 nt, Human
aacauggccuuugcuugaaagaa

SEQ ID NO: 2959721 - RNA, 23 nt, Human
aaccuuuugagugccuuacacaa

SEQ ID NO: 2959722 - RNA, 16 nt, Human
aaccuuuugagugccu

SEQ ID NO: 2959723 - RNA, 22 nt, Human
aacauggccuuugcuugaaaga

SEQ ID NO: 2959724 - RNA, 11 nt, Human
aacaggcagau

SEQ ID NO: 2959725 - RNA, 23 nt, Human
aaauucuucuccacuuucuagcc

SEQ ID NO: 2959726 - RNA, 15 nt, Human
aaauucuugcaaagu

SEQ ID NO: 2959727 - RNA, 20 nt, Human
aaugaagauacugaaauaaa

SEQ ID NO: 2959728 - RNA, 21 nt, Human
aaugaaagacuguacaaagua

SEQ ID NO: 2959729 - RNA, 18 nt, Human
aaugaaagacuguacaaa

SEQ ID NO: 2959730 - RNA, 20 nt, Human
aaugaaagacuguacaaagu

SEQ ID NO: 2959731 - RNA, 20 nt, Human
aaugaugccaugaggaacaa

SEQ ID NO: 2959732 - RNA, 20 nt, Human
aaugaauacuuuauaaagga

SEQ ID NO: 2959733 - RNA, 16 nt, Human
aaucucaauauuucag

SEQ ID NO: 2959734 - RNA, 21 nt, Human
aaucaaucaugucagucugcu

SEQ ID NO: 2959735 - RNA, 21 nt, Human
aaucaccgaaaacguggcugc

SEQ ID NO: 2959736 - RNA, 23 nt, Human
aaucaccgaaaacguggcugcuu

SEQ ID NO: 2959737 - RNA, 23 nt, Human
aauauguggaguucaucuugaau

SEQ ID NO: 2959738 - RNA, 13 nt, Human
aauauuaagaaag

SEQ ID NO: 2959739 - RNA, 12 nt, Human
aagugcugggau

SEQ ID NO: 2959740 - RNA, 22 nt, Human
aagugcugcauuuaaaagauac

SEQ ID NO: 2959741 - RNA, 17 nt, Human
aauaaugugaaacugga

SEQ ID NO: 2959742 - RNA, 22 nt, Human
aauaaugugaaacuggauuaaa

SEQ ID NO: 2959743 - RNA, 14 nt, Human
aauaaagcagcguu

SEQ ID NO: 2959744 - RNA, 19 nt, Human
aauaauguuaacauggaca

SEQ ID NO: 2959745 - RNA, 20 nt, Human
aagaagacugcauuauauuu

SEQ ID NO: 2959746 - RNA, 21 nt, Human
aagacaaggaaaaaauaacaa

SEQ ID NO: 2959747 - RNA, 15 nt, Human
aagaagacugcauua

SEQ ID NO: 2959748 - RNA, 22 nt, Human
aagacaaugacuuacuguacau

SEQ ID NO: 2959749 - RNA, 19 nt, Human
aagacaaugugaaaagaaa

SEQ ID NO: 2959750 - RNA, 20 nt, Human
aagacaaugugaaaagaaaa

SEQ ID NO: 2959751 - RNA, 15 nt, Human
aagaacugaaaucau

SEQ ID NO: 2959752 - RNA, 11 nt, Human
aagaacugaaa

SEQ ID NO: 2959753 - RNA, 12 nt, Human
aagaacugaaau

SEQ ID NO: 2959754 - RNA, 13 nt, Human
aagaacugaaauc

SEQ ID NO: 2959755 - RNA, 20 nt, Human
aacgcaggcccccaggugcc

SEQ ID NO: 2959756 - RNA, 17 nt, Human
aagacuuuuccaacccu

SEQ ID NO: 2959757 - RNA, 15 nt, Human
aagaccacguuucua

SEQ ID NO: 2959758 - RNA, 17 nt, Human
aagaccacguuucuaaa

SEQ ID NO: 2959759 - RNA, 12 nt, Human
aagacuuuucuu

SEQ ID NO: 2959760 - RNA, 21 nt, Human
aagacuuuuccaacccucauc

SEQ ID NO: 2959761 - RNA, 19 nt, Human
aagacuuuucuuucagcca

SEQ ID NO: 2959762 - RNA, 13 nt, Human
aagagaaaaaaua

SEQ ID NO: 2959763 - RNA, 23 nt, Human
aagacagauacuccuccaagguu

SEQ ID NO: 2959764 - RNA, 22 nt, Human
aagacagagccccacccucaga

SEQ ID NO: 2959765 - RNA, 20 nt, Human
aagaguaggaagacuuugga

SEQ ID NO: 2959766 - RNA, 14 nt, Human
aagauaaaugugcu

SEQ ID NO: 2959767 - RNA, 21 nt, Human
aagauaauauuaaggaagaca

SEQ ID NO: 2959768 - RNA, 19 nt, Human
aagauaauauuaaggaaga

SEQ ID NO: 2959769 - RNA, 17 nt, Human
aagauacaguuacucag

SEQ ID NO: 2959770 - RNA, 14 nt, Human
aagcggcuggcagc

SEQ ID NO: 2959771 - RNA, 15 nt, Human
aagcgugagccacug

SEQ ID NO: 2959772 - RNA, 13 nt, Human
aagcuacuuauug

SEQ ID NO: 2959773 - RNA, 20 nt, Human
aaggcaggggaauguaugug

SEQ ID NO: 2959774 - RNA, 18 nt, Human
aaggcaggggaauguaug

SEQ ID NO: 2959775 - RNA, 15 nt, Human
aaggcaaggcuguca

SEQ ID NO: 2959776 - RNA, 13 nt, Human
aaggcaaggcugu

SEQ ID NO: 2959777 - RNA, 19 nt, Human
aagcugcacccucaggcag

SEQ ID NO: 2959778 - RNA, 13 nt, Human
aagcugcacccuc

SEQ ID NO: 2959779 - RNA, 15 nt, Human
aauugggcacuauuu

SEQ ID NO: 2959780 - RNA, 22 nt, Human
aauuguaaggaaugauuaauua

SEQ ID NO: 2959781 - RNA, 16 nt, Human
aauugggcacuauuua

SEQ ID NO: 2959782 - RNA, 18 nt, Human
aauugggcacuauuuauu

SEQ ID NO: 2959783 - RNA, 15 nt, Human
aauuggagcucgugg

SEQ ID NO: 2959784 - RNA, 18 nt, Human
aauucuguuuuucuaggc

SEQ ID NO: 2959785 - RNA, 14 nt, Human
aauucuguuuuucu

SEQ ID NO: 2959786 - RNA, 21 nt, Human
aauucucauuugucacacacu

SEQ ID NO: 2959787 - RNA, 15 nt, Human
aauucucuuauccaa

SEQ ID NO: 2959788 - RNA, 15 nt, Human
aauucucuaguuuga

SEQ ID NO: 2959789 - RNA, 17 nt, Human
aauucucuaguuugauu

SEQ ID NO: 2959790 - RNA, 14 nt, Human
aauucuacuuugag

SEQ ID NO: 2959791 - RNA, 19 nt, Human
aauucucagaaucucaaau

SEQ ID NO: 2959792 - RNA, 19 nt, Human
aauuccuguuuuuauuauu

SEQ ID NO: 2959793 - RNA, 21 nt, Human
aauuccuguuuuuauuauuaa

SEQ ID NO: 2959794 - RNA, 22 nt, Human
aauuccuguuuuuauuauuaac

SEQ ID NO: 2959795 - RNA, 13 nt, Human
aauuccuguuuuu

SEQ ID NO: 2959796 - RNA, 20 nt, Human
aauuaugguuaguagaggua

SEQ ID NO: 2959797 - RNA, 18 nt, Human
aauuaugaaacuuuugga

SEQ ID NO: 2959798 - RNA, 19 nt, Human
aauuaugaguuauuuuuau

SEQ ID NO: 2959799 - RNA, 13 nt, Human
aauuaugaaacuu

SEQ ID NO: 2959800 - RNA, 15 nt, Human
aauuaugaaacuuuu

SEQ ID NO: 2959801 - RNA, 12 nt, Human
aauuaugaaacu

SEQ ID NO: 2959802 - RNA, 13 nt, Human
aauuaugaaaaua

SEQ ID NO: 2959803 - RNA, 22 nt, Human
aauuucauaccuaucaucuuaa

SEQ ID NO: 2959804 - RNA, 11 nt, Human
aauuguaauag

SEQ ID NO: 2959805 - RNA, 22 nt, Human
aauuuccauuuacuuaagacuu

SEQ ID NO: 2959806 - RNA, 21 nt, Human
aauuuccauuuacuuaagacu

SEQ ID NO: 2959807 - RNA, 17 nt, Human
aauuucccaaagcagug

SEQ ID NO: 2959808 - RNA, 15 nt, Human
aauuucccaaagcag

SEQ ID NO: 2959809 - RNA, 12 nt, Human
aauuuccuggga

SEQ ID NO: 2959810 - RNA, 15 nt, Human
aauuuccugggagcu

SEQ ID NO: 2959811 - RNA, 15 nt, Human
acaaguuaaauaaau

SEQ ID NO: 2959812 - RNA, 15 nt, Human
acaaggcaaggcugu

SEQ ID NO: 2959813 - RNA, 19 nt, Human
acaaggcaaggcugucaau

SEQ ID NO: 2959814 - RNA, 17 nt, Human
acaaggcaaggcuguca

SEQ ID NO: 2959815 - RNA, 16 nt, Human
acaaggcaaggcuguc

SEQ ID NO: 2959816 - RNA, 21 nt, Human
acaaacaaggccugucagcua

SEQ ID NO: 2959817 - RNA, 14 nt, Human
acacagcucuucuc

SEQ ID NO: 2959818 - RNA, 16 nt, Human
acacagcucuucucca

SEQ ID NO: 2959819 - RNA, 18 nt, Human
acacagcucuucuccagg

SEQ ID NO: 2959820 - RNA, 18 nt, Human
acaccagagcccaccuug

SEQ ID NO: 2959821 - RNA, 23 nt, Human
acaccagagcccaccuuggcuca

SEQ ID NO: 2959822 - RNA, 13 nt, Human
acaccagagccca

SEQ ID NO: 2959823 - RNA, 15 nt, Human
acaccaauauucaua

SEQ ID NO: 2959824 - RNA, 19 nt, Human
acauguuuuucuucucccu

SEQ ID NO: 2959825 - RNA, 20 nt, Human
acauacaggaagguagaaau

SEQ ID NO: 2959826 - RNA, 16 nt, Human
acauacaauuccaaac

SEQ ID NO: 2959827 - RNA, 14 nt, Human
acaucauuucaaga

SEQ ID NO: 2959828 - RNA, 20 nt, Human
acauaaauuuaguauuuugu

SEQ ID NO: 2959829 - RNA, 13 nt, Human
acaugcacgugug

SEQ ID NO: 2959830 - RNA, 20 nt, Human
acaugccucucucaggccaa

SEQ ID NO: 2959831 - RNA, 22 nt, Human
acauguguguauauguagaugu

SEQ ID NO: 2959832 - RNA, 12 nt, Human
accagagcugcc

SEQ ID NO: 2959833 - RNA, 13 nt, Human
accagagcugcca

SEQ ID NO: 2959834 - RNA, 16 nt, Human
accagagcugccaccu

SEQ ID NO: 2959835 - RNA, 14 nt, Human
accagagcugccac

SEQ ID NO: 2959836 - RNA, 13 nt, Human
accacguuucuaa

SEQ ID NO: 2959837 - RNA, 14 nt, Human
accacguuucuaaa

SEQ ID NO: 2959838 - RNA, 18 nt, Human
accacgcuggaccuugaa

SEQ ID NO: 2959839 - RNA, 14 nt, Human
accacgcuggaccu

SEQ ID NO: 2959840 - RNA, 16 nt, Human
accacgcuggaccuug

SEQ ID NO: 2959841 - RNA, 21 nt, Human
accaacgucugugccauuuug

SEQ ID NO: 2959842 - RNA, 21 nt, Human
acauuuguauaaaauaauuuu

SEQ ID NO: 2959843 - RNA, 17 nt, Human
accaacgucugugccau

SEQ ID NO: 2959844 - RNA, 14 nt, Human
accaacgucugugc

SEQ ID NO: 2959845 - RNA, 15 nt, Human
acauuugcucaugga

SEQ ID NO: 2959846 - RNA, 16 nt, Human
acauuuguauaaaaua

SEQ ID NO: 2959847 - RNA, 19 nt, Human
acauuuguauaaaauaauu

SEQ ID NO: 2959848 - RNA, 23 nt, Human
acaggcacccaccaucaugucug

SEQ ID NO: 2959849 - RNA, 23 nt, Human
acagugaucaaguuauuuuuaau

SEQ ID NO: 2959850 - RNA, 19 nt, Human
acagugauuaccagggacu

SEQ ID NO: 2959851 - RNA, 19 nt, Human
acagcucuucuccaggcug

SEQ ID NO: 2959852 - RNA, 20 nt, Human
acagcucuucuccaggcugu

SEQ ID NO: 2959853 - RNA, 18 nt, Human
acagcucuucuccaggcu

SEQ ID NO: 2959854 - RNA, 15 nt, Human
acaggcaaugcuggc

SEQ ID NO: 2959855 - RNA, 16 nt, Human
acaggcaaugcuggcu

SEQ ID NO: 2959856 - RNA, 14 nt, Human
acaggcacccacca

SEQ ID NO: 2959857 - RNA, 17 nt, Human
acaggcaaugcuggcug

SEQ ID NO: 2959858 - RNA, 24 nt, Human
acaggaugguucccuugaugaaga

SEQ ID NO: 2959859 - RNA, 22 nt, Human
acaggaugguucccuugaugaa

SEQ ID NO: 2959860 - RNA, 19 nt, Human
acuguuucaaacuuuacua

SEQ ID NO: 2959861 - RNA, 15 nt, Human
acuguuucaaacuuu

SEQ ID NO: 2959862 - RNA, 18 nt, Human
acuguuucaaacuuuacu

SEQ ID NO: 2959863 - RNA, 17 nt, Human
acuucaaauccuugaag

SEQ ID NO: 2959864 - RNA, 18 nt, Human
acuucaaauccuugaaga

SEQ ID NO: 2959865 - RNA, 22 nt, Human
acuuaaaaaugguuuaaauggu

SEQ ID NO: 2959866 - RNA, 21 nt, Human
acuuaaaaaugguuuaaaugg

SEQ ID NO: 2959867 - RNA, 23 nt, Human
acuuggggggcugaggugggagg

SEQ ID NO: 2959868 - RNA, 21 nt, Human
acuucagacauagaauuaaca

SEQ ID NO: 2959869 - RNA, 17 nt, Human
acugugccaugugccag

SEQ ID NO: 2959870 - RNA, 18 nt, Human
acugugccaugugccagg

SEQ ID NO: 2959871 - RNA, 16 nt, Human
acugugccaugugcca

SEQ ID NO: 2959872 - RNA, 16 nt, Human
acugugaagagaacca

SEQ ID NO: 2959873 - RNA, 14 nt, Human
acugccaugccagc

SEQ ID NO: 2959874 - RNA, 19 nt, Human
acuggaacacucuauaaca

SEQ ID NO: 2959875 - RNA, 17 nt, Human
acuguaaaauaauaacu

SEQ ID NO: 2959876 - RNA, 13 nt, Human
acugacacaugcu

SEQ ID NO: 2959877 - RNA, 23 nt, Human
acugaauuucuuuugccguuauu

SEQ ID NO: 2959878 - RNA, 17 nt, Human
acugacauuguuggcca

SEQ ID NO: 2959879 - RNA, 18 nt, Human
acugacauuguuggccaa

SEQ ID NO: 2959880 - RNA, 22 nt, Human
acugaauggacuuugcacacuu

SEQ ID NO: 2959881 - RNA, 17 nt, Human
acugaauggacuuugca

SEQ ID NO: 2959882 - RNA, 13 nt, Human
acugaauuaugaa

SEQ ID NO: 2959883 - RNA, 14 nt, Human
acugaauuaugaaa

SEQ ID NO: 2959884 - RNA, 15 nt, Human
acugaauuaugaaac

SEQ ID NO: 2959885 - RNA, 20 nt, Human
acugaauuaugaaacuuuug

SEQ ID NO: 2959886 - RNA, 12 nt, Human
acugaauuucuu

SEQ ID NO: 2959887 - RNA, 16 nt, Human
acugauuuuuuuuucc

SEQ ID NO: 2959888 - RNA, 20 nt, Human
acugauuuuuuuuuccuuca

SEQ ID NO: 2959889 - RNA, 19 nt, Human
acugauuuuuuuuuccuuc

SEQ ID NO: 2959890 - RNA, 18 nt, Human
acugauuuuuuuuuccuu

SEQ ID NO: 2959891 - RNA, 17 nt, Human
acugauuuuuuuuuccu

SEQ ID NO: 2959892 - RNA, 23 nt, Human
acugaugggcaacccccagccug

SEQ ID NO: 2959893 - RNA, 23 nt, Human
acugaucauguuuaugagaaacu

SEQ ID NO: 2959894 - RNA, 19 nt, Human
acugauaugggucuugaua

SEQ ID NO: 2959895 - RNA, 21 nt, Human
acugaucauguuuaugagaaa

SEQ ID NO: 2959896 - RNA, 15 nt, Human
acucuacagaggcca

SEQ ID NO: 2959897 - RNA, 14 nt, Human
acucguuaauuugu

SEQ ID NO: 2959898 - RNA, 19 nt, Human
acucguuaauuuguagugu

SEQ ID NO: 2959899 - RNA, 19 nt, Human
acuccggcccuccagagcc

SEQ ID NO: 2959900 - RNA, 17 nt, Human
acucccaugagggagau

SEQ ID NO: 2959901 - RNA, 22 nt, Human
acucccaugagggagaugccau

SEQ ID NO: 2959902 - RNA, 23 nt, Human
acucccaugagggagaugccaug

SEQ ID NO: 2959903 - RNA, 22 nt, Human
acucccaucugugaaaggaaag

SEQ ID NO: 2959904 - RNA, 16 nt, Human
acuccggcccuccaga

SEQ ID NO: 2959905 - RNA, 14 nt, Human
acucccuuucaaca

SEQ ID NO: 2959906 - RNA, 18 nt, Human
accgugaggccagagaca

SEQ ID NO: 2959907 - RNA, 23 nt, Human
accgugaggccagagacacaagc

SEQ ID NO: 2959908 - RNA, 12 nt, Human
accucagccucc

SEQ ID NO: 2959909 - RNA, 11 nt, Human
accucagccuc

SEQ ID NO: 2959910 - RNA, 12 nt, Human
accgggcacuca

SEQ ID NO: 2959911 - RNA, 14 nt, Human
accgggcacucaga

SEQ ID NO: 2959912 - RNA, 20 nt, Human
accgggccacagagaaagua

SEQ ID NO: 2959913 - RNA, 16 nt, Human
accgggcacucagaag

SEQ ID NO: 2959914 - RNA, 21 nt, Human
acccugugauggggcccugcc

SEQ ID NO: 2959915 - RNA, 20 nt, Human
acccugugauggggcccugc

SEQ ID NO: 2959916 - RNA, 19 nt, Human
acccugugauggggcccug

SEQ ID NO: 2959917 - RNA, 17 nt, Human
acccugugauggggccc

SEQ ID NO: 2959918 - RNA, 11 nt, Human
accucaggccu

SEQ ID NO: 2959919 - RNA, 20 nt, Human
accucaggugauccacccac

SEQ ID NO: 2959920 - RNA, 21 nt, Human
accucaggugauccacccacc

SEQ ID NO: 2959921 - RNA, 17 nt, Human
acccgucuccagcugcu

SEQ ID NO: 2959922 - RNA, 13 nt, Human
acccuauugcugc

SEQ ID NO: 2959923 - RNA, 19 nt, Human
acccuauugcugcuugagg

SEQ ID NO: 2959924 - RNA, 14 nt, Human
acccuauugcugcu

SEQ ID NO: 2959925 - RNA, 23 nt, Human
acccuggcacuauaauguaagcu

SEQ ID NO: 2959926 - RNA, 22 nt, Human
acccucaugcugccaauauccu

SEQ ID NO: 2959927 - RNA, 16 nt, Human
acccucaugcugccaa

SEQ ID NO: 2959928 - RNA, 14 nt, Human
acccucaugcugcc

SEQ ID NO: 2959929 - RNA, 23 nt, Human
acccucaucaccaacgucugugc

SEQ ID NO: 2959930 - RNA, 13 nt, Human
acccucaucacca

SEQ ID NO: 2959931 - RNA, 16 nt, Human
acccucaggcaggugg

SEQ ID NO: 2959932 - RNA, 15 nt, Human
acccucaggcaggug

SEQ ID NO: 2959933 - RNA, 20 nt, Human
acccucagaugcacaugagc

SEQ ID NO: 2959934 - RNA, 14 nt, Human
acccucaggcaggu

SEQ ID NO: 2959935 - RNA, 13 nt, Human
acccucaggcagg

SEQ ID NO: 2959936 - RNA, 16 nt, Human
acccuggggagaaagu

SEQ ID NO: 2959937 - RNA, 16 nt, Human
acccugugauggggcc

SEQ ID NO: 2959938 - RNA, 21 nt, Human
acccugucucuacuaaaaaua

SEQ ID NO: 2959939 - RNA, 20 nt, Human
acuaauguguaagacaaaaa

SEQ ID NO: 2959940 - RNA, 18 nt, Human
acuaauggggcggugaga

SEQ ID NO: 2959941 - RNA, 17 nt, Human
acggacacucaaaagcu

SEQ ID NO: 2959942 - RNA, 19 nt, Human
acggaauaguuggcuagga

SEQ ID NO: 2959943 - RNA, 13 nt, Human
acgucuuaaauau

SEQ ID NO: 2959944 - RNA, 14 nt, Human
acgucuuaaauauu

SEQ ID NO: 2959945 - RNA, 13 nt, Human
acgucugugccau

SEQ ID NO: 2959946 - RNA, 12 nt, Human
acgucugugcca

SEQ ID NO: 2959947 - RNA, 19 nt, Human
acgcugugcugcccugccc

SEQ ID NO: 2959948 - RNA, 22 nt, Human
acgcugugcugcccugcccacc

SEQ ID NO: 2959949 - RNA, 14 nt, Human
acgcacacugucug

SEQ ID NO: 2959950 - RNA, 20 nt, Human
acgauuucuguuuagauaau

SEQ ID NO: 2959951 - RNA, 23 nt, Human
acgauuucuguuuagauaauaca

SEQ ID NO: 2959952 - RNA, 19 nt, Human
acgauuucuguuuagauaa

SEQ ID NO: 2959953 - RNA, 15 nt, Human
accugccccucaacu

SEQ ID NO: 2959954 - RNA, 12 nt, Human
accugccccuca

SEQ ID NO: 2959955 - RNA, 22 nt, Human
accugccaggaagccagcaggc

SEQ ID NO: 2959956 - RNA, 21 nt, Human
accugccaggaagccagcagg

SEQ ID NO: 2959957 - RNA, 23 nt, Human
accugccaggaagccagcaggcu

SEQ ID NO: 2959958 - RNA, 19 nt, Human
accugccaggaagccagca

SEQ ID NO: 2959959 - RNA, 20 nt, Human
accucugccugaagucacac

SEQ ID NO: 2959960 - RNA, 23 nt, Human
accucugccugaagucacacagu

SEQ ID NO: 2959961 - RNA, 12 nt, Human
accucugccuga

SEQ ID NO: 2959962 - RNA, 20 nt, Human
accucugccucagaaaacaa

SEQ ID NO: 2959963 - RNA, 14 nt, Human
aguuugauuaaauu

SEQ ID NO: 2959964 - RNA, 13 nt, Human
aguuugcagagua

SEQ ID NO: 2959965 - RNA, 11 nt, Human
aguuugcaguu

SEQ ID NO: 2959966 - RNA, 15 nt, Human
auaaaagacagugaa

SEQ ID NO: 2959967 - RNA, 16 nt, Human
auaaaagacagugaaa

SEQ ID NO: 2959968 - RNA, 22 nt, Human
aguuguuagugugucuuagugu

SEQ ID NO: 2959969 - RNA, 17 nt, Human
aguuguuagugugucuu

SEQ ID NO: 2959970 - RNA, 17 nt, Human
aguuguuauuuauugaa

SEQ ID NO: 2959971 - RNA, 17 nt, Human
aguugaaaaacagcuga

SEQ ID NO: 2959972 - RNA, 17 nt, Human
aguugaagacagagcua

SEQ ID NO: 2959973 - RNA, 16 nt, Human
aguugaagacagagcu

SEQ ID NO: 2959974 - RNA, 18 nt, Human
aguugaaaaacagcugag

SEQ ID NO: 2959975 - RNA, 21 nt, Human
aguuccaccaucaagccacca

SEQ ID NO: 2959976 - RNA, 18 nt, Human
aguuccaccaucaagcca

SEQ ID NO: 2959977 - RNA, 14 nt, Human
aguucauacccugu

SEQ ID NO: 2959978 - RNA, 14 nt, Human
agugcuauugcaga

SEQ ID NO: 2959979 - RNA, 17 nt, Human
agugcucacccacacca

SEQ ID NO: 2959980 - RNA, 18 nt, Human
agugcucacccacaccau

SEQ ID NO: 2959981 - RNA, 18 nt, Human
aguguuuucaauuuuaaa

SEQ ID NO: 2959982 - RNA, 16 nt, Human
aguguuuucaauuuua

SEQ ID NO: 2959983 - RNA, 17 nt, Human
auacaccacuacauucu

SEQ ID NO: 2959984 - RNA, 21 nt, Human
auaaagaugagugagcaugcc

SEQ ID NO: 2959985 - RNA, 14 nt, Human
auaagcuacugcca

SEQ ID NO: 2959986 - RNA, 16 nt, Human
auaagcuacugccauc

SEQ ID NO: 2959987 - RNA, 21 nt, Human
auaagugcuauugcagagccg

SEQ ID NO: 2959988 - RNA, 12 nt, Human
auaauguuaaca

SEQ ID NO: 2959989 - RNA, 23 nt, Human
auacaaugcugugcccuaaagug

SEQ ID NO: 2959990 - RNA, 20 nt, Human
auacacacucaaaucaagaa

SEQ ID NO: 2959991 - RNA, 15 nt, Human
auacaccacuacauu

SEQ ID NO: 2959992 - RNA, 17 nt, Human
aguaacuuacuuaggug

SEQ ID NO: 2959993 - RNA, 21 nt, Human
aguaaaugggggugcauuuga

SEQ ID NO: 2959994 - RNA, 19 nt, Human
aguaaaugggggugcauuu

SEQ ID NO: 2959995 - RNA, 20 nt, Human
aguaaaugggggugcauuug

SEQ ID NO: 2959996 - RNA, 18 nt, Human
aguaaaugggggugcauu

SEQ ID NO: 2959997 - RNA, 20 nt, Human
aguacuucuccacccugcuc

SEQ ID NO: 2959998 - RNA, 19 nt, Human
aguacuucuccacccugcu

SEQ ID NO: 2959999 - RNA, 21 nt, Human
aguacuucuccacccugcucu

SEQ ID NO: 2960000 - RNA, 15 nt, Human
aguacuggagaaaau

SEQ ID NO: 2960001 - RNA, 13 nt, Human
aguacucauacau

SEQ ID NO: 2960002 - RNA, 17 nt, Human
aguaucaaguauagaaa

SEQ ID NO: 2960003 - RNA, 16 nt, Human
aguaucaaguauagaa

SEQ ID NO: 2960004 - RNA, 21 nt, Human
agucugauucccaagcucugc

SEQ ID NO: 2960005 - RNA, 22 nt, Human
agucugauucccaagcucugcu

SEQ ID NO: 2960006 - RNA, 20 nt, Human
agucugauucccaagcucug

SEQ ID NO: 2960007 - RNA, 11 nt, Human
agucugauuua

SEQ ID NO: 2960008 - RNA, 18 nt, Human
agucuggaaugcaguggu

SEQ ID NO: 2960009 - RNA, 12 nt, Human
agucugauuuaa

SEQ ID NO: 2960010 - RNA, 16 nt, Human
agucgaggacagggag

SEQ ID NO: 2960011 - RNA, 22 nt, Human
agucuggcagacuuucuucucu

SEQ ID NO: 2960012 - RNA, 18 nt, Human
agucuggcccuuccuuuu

SEQ ID NO: 2960013 - RNA, 14 nt, Human
aguccucuuuucug

SEQ ID NO: 2960014 - RNA, 18 nt, Human
aguccuuaccagcagagc

SEQ ID NO: 2960015 - RNA, 16 nt, Human
aguccuuaccagcaga

SEQ ID NO: 2960016 - RNA, 13 nt, Human
agucauuuaauaa

SEQ ID NO: 2960017 - RNA, 16 nt, Human
agugacagaggcagcc

SEQ ID NO: 2960018 - RNA, 19 nt, Human
agugacagaggcagcccca

SEQ ID NO: 2960019 - RNA, 17 nt, Human
agugaauaaccugagga

SEQ ID NO: 2960020 - RNA, 14 nt, Human
agugacagaggcag

SEQ ID NO: 2960021 - RNA, 22 nt, Human
agugcuacacaccuaacuuaug

SEQ ID NO: 2960022 - RNA, 19 nt, Human
agugauucuccugccucag

SEQ ID NO: 2960023 - RNA, 18 nt, Human
agugauucuccugccuca

SEQ ID NO: 2960024 - RNA, 20 nt, Human
agugauucuccugccucagc

SEQ ID NO: 2960025 - RNA, 18 nt, Human
agugccuuauggaacacu

SEQ ID NO: 2960026 - RNA, 22 nt, Human
agugccuuauggaacacucuga

SEQ ID NO: 2960027 - RNA, 21 nt, Human
agugccuuauggaacacucug

SEQ ID NO: 2960028 - RNA, 20 nt, Human
agugccuuauggaacacucu

SEQ ID NO: 2960029 - RNA, 19 nt, Human
agugccuuauggaacacuc

SEQ ID NO: 2960030 - RNA, 19 nt, Human
agugauccucccaccucag

SEQ ID NO: 2960031 - RNA, 20 nt, Human
agugauccucccaccucagc

SEQ ID NO: 2960032 - RNA, 22 nt, Human
agugauccucccaccucagccu

SEQ ID NO: 2960033 - RNA, 19 nt, Human
agugaugucacuagggcag

SEQ ID NO: 2960034 - RNA, 18 nt, Human
agugauguaauuaugguu

SEQ ID NO: 2960035 - RNA, 13 nt, Human
agugauuaccagg

SEQ ID NO: 2960036 - RNA, 14 nt, Human
aucaugcauagagu

SEQ ID NO: 2960037 - RNA, 15 nt, Human
aucaugcauagagug

SEQ ID NO: 2960038 - RNA, 15 nt, Human
aucauccuaagcuau

SEQ ID NO: 2960039 - RNA, 15 nt, Human
aucaucccuuucccu

SEQ ID NO: 2960040 - RNA, 19 nt, Human
aucaucccuuucccuuggu

SEQ ID NO: 2960041 - RNA, 21 nt, Human
aucaugaauuaguuuuauaug

SEQ ID NO: 2960042 - RNA, 20 nt, Human
aucaugacaaagacugagua

SEQ ID NO: 2960043 - RNA, 21 nt, Human
auccacuggguguaaacacau

SEQ ID NO: 2960044 - RNA, 21 nt, Human
auccacugugccaugugccag

SEQ ID NO: 2960045 - RNA, 20 nt, Human
auccacuggguguaaacaca

SEQ ID NO: 2960046 - RNA, 12 nt, Human
auccuugaagau

SEQ ID NO: 2960047 - RNA, 22 nt, Human
aucuaggaagacuuuggaaaga

SEQ ID NO: 2960048 - RNA, 16 nt, Human
auagcaagacauuaua

SEQ ID NO: 2960049 - RNA, 14 nt, Human
auagcacagacccu

SEQ ID NO: 2960050 - RNA, 20 nt, Human
aucaaaagguuaauaaagua

SEQ ID NO: 2960051 - RNA, 19 nt, Human
aucaaagagguuuuaaaaa

SEQ ID NO: 2960052 - RNA, 14 nt, Human
auauuuuuuucuga

SEQ ID NO: 2960053 - RNA, 16 nt, Human
auauuuuuuucugaaa

SEQ ID NO: 2960054 - RNA, 18 nt, Human
auauuuuuuucugaaauu

SEQ ID NO: 2960055 - RNA, 18 nt, Human
auauuuuuuucuuuucuu

SEQ ID NO: 2960056 - RNA, 14 nt, Human
aucaaaagaaagaa

SEQ ID NO: 2960057 - RNA, 19 nt, Human
auauuuuuuucugaaauuu

SEQ ID NO: 2960058 - RNA, 23 nt, Human
augaagcauuuacuuuguguuca

SEQ ID NO: 2960059 - RNA, 16 nt, Human
augaaacuuuuggaag

SEQ ID NO: 2960060 - RNA, 12 nt, Human
augaaagacugu

SEQ ID NO: 2960061 - RNA, 23 nt, Human
augaaguaauaugcacacauuuu

SEQ ID NO: 2960062 - RNA, 14 nt, Human
augaaguaauaugc

SEQ ID NO: 2960063 - RNA, 21 nt, Human
augaaguaauaugcacacauu

SEQ ID NO: 2960064 - RNA, 23 nt, Human
augagcuuaagaaauuuguggaa

SEQ ID NO: 2960065 - RNA, 14 nt, Human
augagcuuaagaaa

SEQ ID NO: 2960066 - RNA, 21 nt, Human
augagccucagcauccuggca

SEQ ID NO: 2960067 - RNA, 19 nt, Human
augagccucagcauccugg

SEQ ID NO: 2960068 - RNA, 11 nt, Human
augagccuggc

SEQ ID NO: 2960069 - RNA, 13 nt, Human
augaccuuucaau

SEQ ID NO: 2960070 - RNA, 18 nt, Human
augaccuuucaauaggaa

SEQ ID NO: 2960071 - RNA, 15 nt, Human
augaccuuucaauag

SEQ ID NO: 2960072 - RNA, 23 nt, Human
aucuaggaagacuuuggaaagag

SEQ ID NO: 2960073 - RNA, 16 nt, Human
augcauagagugugau

SEQ ID NO: 2960074 - RNA, 21 nt, Human
augccugguggcagcugcggu

SEQ ID NO: 2960075 - RNA, 11 nt, Human
augccuggugg

SEQ ID NO: 2960076 - RNA, 12 nt, Human
augccugguggc

SEQ ID NO: 2960077 - RNA, 13 nt, Human
augccugguggca

SEQ ID NO: 2960078 - RNA, 14 nt, Human
augccugguggcag

SEQ ID NO: 2960079 - RNA, 19 nt, Human
augccugguggcagcugcg

SEQ ID NO: 2960080 - RNA, 18 nt, Human
augccugguggcagcugc

SEQ ID NO: 2960081 - RNA, 16 nt, Human
augcuuugaucccuuc

SEQ ID NO: 2960082 - RNA, 18 nt, Human
augcucugcauguuacau

SEQ ID NO: 2960083 - RNA, 19 nt, Human
augcucugcauguuacaua

SEQ ID NO: 2960084 - RNA, 21 nt, Human
augcuucuguuuuauaauuuu

SEQ ID NO: 2960085 - RNA, 20 nt, Human
augcuucuucagagacuccu

SEQ ID NO: 2960086 - RNA, 17 nt, Human
augcuucuucagagacu

SEQ ID NO: 2960087 - RNA, 14 nt, Human
augcuucuucagag

SEQ ID NO: 2960088 - RNA, 15 nt, Human
augggacagggagga

SEQ ID NO: 2960089 - RNA, 20 nt, Human
augggacauuugcucaugga

SEQ ID NO: 2960090 - RNA, 21 nt, Human
augggaaugaaugucagugug

SEQ ID NO: 2960091 - RNA, 20 nt, Human
augggaaagcauuguaaaug

SEQ ID NO: 2960092 - RNA, 14 nt, Human
augggaaagcauug

SEQ ID NO: 2960093 - RNA, 18 nt, Human
auggauaaauauugguug

SEQ ID NO: 2960094 - RNA, 23 nt, Human
auggcuuccuggcaauagucaaa

SEQ ID NO: 2960095 - RNA, 12 nt, Human
aggccagcugcu

SEQ ID NO: 2960096 - RNA, 23 nt, Human
aggcauuccccaggaggccagcc

SEQ ID NO: 2960097 - RNA, 22 nt, Human
aggcauuccccaggaggccagc

SEQ ID NO: 2960098 - RNA, 21 nt, Human
aggcauuccccaggaggccag

SEQ ID NO: 2960099 - RNA, 20 nt, Human
aggcauguucucugaggaca

SEQ ID NO: 2960100 - RNA, 22 nt, Human
aggcauguucucugaggacacu

SEQ ID NO: 2960101 - RNA, 24 nt, Human
aggcaugugaugagaggaaaucac

SEQ ID NO: 2960102 - RNA, 23 nt, Human
aggcaugugaugagaggaaauca

SEQ ID NO: 2960103 - RNA, 14 nt, Human
aggccaugggccuc

SEQ ID NO: 2960104 - RNA, 16 nt, Human
aggccaugggccuccu

SEQ ID NO: 2960105 - RNA, 17 nt, Human
aggccaugggccuccug

SEQ ID NO: 2960106 - RNA, 17 nt, Human
aggcccucugcccacuc

SEQ ID NO: 2960107 - RNA, 20 nt, Human
aggccaggcgcgguggcuca

SEQ ID NO: 2960108 - RNA, 23 nt, Human
aggccaugggcacuguggguaga

SEQ ID NO: 2960109 - RNA, 23 nt, Human
aggccaggcccucugcccacucc

SEQ ID NO: 2960110 - RNA, 19 nt, Human
aggccaggcccucugccca

SEQ ID NO: 2960111 - RNA, 18 nt, Human
aggccaggcccucugccc

SEQ ID NO: 2960112 - RNA, 17 nt, Human
aggccaggcccucugcc

SEQ ID NO: 2960113 - RNA, 16 nt, Human
aggccaggcccucugc

SEQ ID NO: 2960114 - RNA, 16 nt, Human
aggccagcugcuuggg

SEQ ID NO: 2960115 - RNA, 14 nt, Human
aggccagcugcuug

SEQ ID NO: 2960116 - RNA, 13 nt, Human
aggccagcugcuu

SEQ ID NO: 2960117 - RNA, 15 nt, Human
aggcacuuuaaaaca

SEQ ID NO: 2960118 - RNA, 14 nt, Human
aggcagccaggcca

SEQ ID NO: 2960119 - RNA, 16 nt, Human
aggcagccaggccaca

SEQ ID NO: 2960120 - RNA, 15 nt, Human
aggcagccaggccac

SEQ ID NO: 2960121 - RNA, 13 nt, Human
aggcagauacagg

SEQ ID NO: 2960122 - RNA, 20 nt, Human
aggcagagguugcagugagc

SEQ ID NO: 2960123 - RNA, 19 nt, Human
aggaaguacuggagaaaau

SEQ ID NO: 2960124 - RNA, 14 nt, Human
aggaggucucuaag

SEQ ID NO: 2960125 - RNA, 22 nt, Human
aggagguaaugaccaugaaaga

SEQ ID NO: 2960126 - RNA, 15 nt, Human
aggaggucucuaaga

SEQ ID NO: 2960127 - RNA, 12 nt, Human
aggagugagcac

SEQ ID NO: 2960128 - RNA, 14 nt, Human
aggagugagcacua

SEQ ID NO: 2960129 - RNA, 23 nt, Human
aggcuguaucccaugagccucag

SEQ ID NO: 2960130 - RNA, 19 nt, Human
aggcugcagugagccgaga

SEQ ID NO: 2960131 - RNA, 17 nt, Human
aggcugcagugagccga

SEQ ID NO: 2960132 - RNA, 12 nt, Human
aggcugucaauu

SEQ ID NO: 2960133 - RNA, 11 nt, Human
aggcugccagu

SEQ ID NO: 2960134 - RNA, 13 nt, Human
aggcugccagugc

SEQ ID NO: 2960135 - RNA, 24 nt, Human
aggcuguaucccaugagccucagc

SEQ ID NO: 2960136 - RNA, 12 nt, Human
aggcuuagaccc

SEQ ID NO: 2960137 - RNA, 21 nt, Human
aggcuuagacccucaugcugc

SEQ ID NO: 2960138 - RNA, 14 nt, Human
aggcuuagacccuc

SEQ ID NO: 2960139 - RNA, 22 nt, Human
aggcuuagacccucaugcugcc

SEQ ID NO: 2960140 - RNA, 23 nt, Human
aggcuuagacccucaugcugcca

SEQ ID NO: 2960141 - RNA, 17 nt, Human
agggacaggauaagagg

SEQ ID NO: 2960142 - RNA, 20 nt, Human
aggcccucugcccacucccu

SEQ ID NO: 2960143 - RNA, 19 nt, Human
aggcccucugcccacuccc

SEQ ID NO: 2960144 - RNA, 18 nt, Human
agggccuggccugagcug

SEQ ID NO: 2960145 - RNA, 14 nt, Human
agggccuggcucag

SEQ ID NO: 2960146 - RNA, 13 nt, Human
agggccuggcuca

SEQ ID NO: 2960147 - RNA, 18 nt, Human
agggccuggcucaggugg

SEQ ID NO: 2960148 - RNA, 20 nt, Human
agggauuagggagagaagau

SEQ ID NO: 2960149 - RNA, 15 nt, Human
aggaaguacuggaga

SEQ ID NO: 2960150 - RNA, 11 nt, Human
aggaaguacug

SEQ ID NO: 2960151 - RNA, 14 nt, Human
aggaagguagaaau

SEQ ID NO: 2960152 - RNA, 23 nt, Human
aggaacaaggcaaggcugucaau

SEQ ID NO: 2960153 - RNA, 12 nt, Human
aggaacacuccu

SEQ ID NO: 2960154 - RNA, 23 nt, Human
aggaacuuaaauaaugugaaacu

SEQ ID NO: 2960155 - RNA, 15 nt, Human
aggaacacuccuuca

SEQ ID NO: 2960156 - RNA, 21 nt, Human
agcuuuguuuguugucagcug

SEQ ID NO: 2960157 - RNA, 23 nt, Human
agcuuuuuucucugauacagaaa

SEQ ID NO: 2960158 - RNA, 19 nt, Human
agcuuuuuucucugauaca

SEQ ID NO: 2960159 - RNA, 20 nt, Human
agcuuuuuucucugauacag

SEQ ID NO: 2960160 - RNA, 22 nt, Human
agcuuuuuucucugauacagaa

SEQ ID NO: 2960161 - RNA, 18 nt, Human
aggaaaaaauaacaauga

SEQ ID NO: 2960162 - RNA, 17 nt, Human
agcuguaugauucccag

SEQ ID NO: 2960163 - RNA, 18 nt, Human
agcuguaugauucccagc

SEQ ID NO: 2960164 - RNA, 22 nt, Human
agcucaccagccccagugccca

SEQ ID NO: 2960165 - RNA, 23 nt, Human
agcucaccagccccagugcccac

SEQ ID NO: 2960166 - RNA, 21 nt, Human
agcugacuuuucuguccgagc

SEQ ID NO: 2960167 - RNA, 15 nt, Human
agcugacuuuucugu

SEQ ID NO: 2960168 - RNA, 15 nt, Human
agcuggucccacuca

SEQ ID NO: 2960169 - RNA, 14 nt, Human
agcuguaugauucc

SEQ ID NO: 2960170 - RNA, 22 nt, Human
agcugccuguucagcuccagcu

SEQ ID NO: 2960171 - RNA, 20 nt, Human
agcugcugaaacaacaaaua

SEQ ID NO: 2960172 - RNA, 16 nt, Human
agcugcugaaacaaca

SEQ ID NO: 2960173 - RNA, 15 nt, Human
agcugcugaaacaac

SEQ ID NO: 2960174 - RNA, 14 nt, Human
agcugcugaaacaa

SEQ ID NO: 2960175 - RNA, 10 nt, Human
agccuggaug

SEQ ID NO: 2960176 - RNA, 11 nt, Human
agccuggaugc

SEQ ID NO: 2960177 - RNA, 13 nt, Human
agccuggaugcca

SEQ ID NO: 2960178 - RNA, 15 nt, Human
agccuggaugccauc

SEQ ID NO: 2960179 - RNA, 16 nt, Human
agccuggaugccaucc

SEQ ID NO: 2960180 - RNA, 14 nt, Human
agccuggacccugu

SEQ ID NO: 2960181 - RNA, 20 nt, Human
agccugggaggucaaggcug

SEQ ID NO: 2960182 - RNA, 21 nt, Human
agccugggcaacagagcaaga

SEQ ID NO: 2960183 - RNA, 18 nt, Human
agccugggcaaugugaua

SEQ ID NO: 2960184 - RNA, 20 nt, Human
agcuaacauggaaguacuau

SEQ ID NO: 2960185 - RNA, 16 nt, Human
agcuaaagaaguuuga

SEQ ID NO: 2960186 - RNA, 19 nt, Human
agcuaacauggaaguacua

SEQ ID NO: 2960187 - RNA, 17 nt, Human
agcgauucuucugcuuc

SEQ ID NO: 2960188 - RNA, 19 nt, Human
agcgauucuucugcuucag

SEQ ID NO: 2960189 - RNA, 15 nt, Human
agcgauucuucugcu

SEQ ID NO: 2960190 - RNA, 13 nt, Human
agcgacagugaga

SEQ ID NO: 2960191 - RNA, 15 nt, Human
agcgacagugagacu

SEQ ID NO: 2960192 - RNA, 13 nt, Human
agcuaaugggaca

SEQ ID NO: 2960193 - RNA, 14 nt, Human
agcuaaugggacac

SEQ ID NO: 2960194 - RNA, 15 nt, Human
agcuaaugggacacu

SEQ ID NO: 2960195 - RNA, 12 nt, Human
agcuacaaaugc

SEQ ID NO: 2960196 - RNA, 13 nt, Human
agcucaccagccc

SEQ ID NO: 2960197 - RNA, 14 nt, Human
agcucaccagcccc

SEQ ID NO: 2960198 - RNA, 21 nt, Human
agcucaccagccccagugccc

SEQ ID NO: 2960199 - RNA, 13 nt, Human
agcuacaaaugca

SEQ ID NO: 2960200 - RNA, 18 nt, Human
agagaaaguacuucucca

SEQ ID NO: 2960201 - RNA, 17 nt, Human
agagcccacgcccccac

SEQ ID NO: 2960202 - RNA, 18 nt, Human
agagcccacgcccccacu

SEQ ID NO: 2960203 - RNA, 23 nt, Human
agagagcaagacgcugugcugcc

SEQ ID NO: 2960204 - RNA, 19 nt, Human
agagagcaagacgcugugc

SEQ ID NO: 2960205 - RNA, 11 nt, Human
agagagcaaga

SEQ ID NO: 2960206 - RNA, 16 nt, Human
agacucuuuggacacu

SEQ ID NO: 2960207 - RNA, 23 nt, Human
agacagcccgggcucugccuccc

SEQ ID NO: 2960208 - RNA, 22 nt, Human
agacagcccgggcucugccucc

SEQ ID NO: 2960209 - RNA, 14 nt, Human
agacaauuuauuau

SEQ ID NO: 2960210 - RNA, 21 nt, Human
agacagcccgggcucugccuc

SEQ ID NO: 2960211 - RNA, 19 nt, Human
agaccauuggggcucccag

SEQ ID NO: 2960212 - RNA, 20 nt, Human
agaccauuggggcucccagc

SEQ ID NO: 2960213 - RNA, 22 nt, Human
agaccauuggggcucccagcca

SEQ ID NO: 2960214 - RNA, 23 nt, Human
agaccauuggggcucccagccag

SEQ ID NO: 2960215 - RNA, 23 nt, Human
agaccaucccugaaggccccgcc

SEQ ID NO: 2960216 - RNA, 14 nt, Human
agaccacguuucua

SEQ ID NO: 2960217 - RNA, 15 nt, Human
agaccauccuggcua

SEQ ID NO: 2960218 - RNA, 18 nt, Human
agaccauuggggcuccca

SEQ ID NO: 2960219 - RNA, 17 nt, Human
agacgcugugcugcccu

SEQ ID NO: 2960220 - RNA, 19 nt, Human
agacgcugugcugcccugc

SEQ ID NO: 2960221 - RNA, 18 nt, Human
agacgcugugcugcccug

SEQ ID NO: 2960222 - RNA, 20 nt, Human
agacgcugugcugcccugcc

SEQ ID NO: 2960223 - RNA, 20 nt, Human
agacaaugugaaaagaaaaa

SEQ ID NO: 2960224 - RNA, 23 nt, Human
agacaaugacuuacuguacauga

SEQ ID NO: 2960225 - RNA, 19 nt, Human
agacaaggaaaaaauaaca

SEQ ID NO: 2960226 - RNA, 13 nt, Human
agaagagcuguuc

SEQ ID NO: 2960227 - RNA, 23 nt, Human
agaagagaaugcacaaacagagg

SEQ ID NO: 2960228 - RNA, 15 nt, Human
agaagagaaugcaca

SEQ ID NO: 2960229 - RNA, 13 nt, Human
agaagauagcagg

SEQ ID NO: 2960230 - RNA, 20 nt, Human
agaagagcuguucacagcca

SEQ ID NO: 2960231 - RNA, 21 nt, Human
agaaccaaaaagaggcuaugu

SEQ ID NO: 2960232 - RNA, 18 nt, Human
agaagacugcauuauauu

SEQ ID NO: 2960233 - RNA, 21 nt, Human
agaagacugcauuauauuuau

SEQ ID NO: 2960234 - RNA, 18 nt, Human
agaagucuucuauuuauu

SEQ ID NO: 2960235 - RNA, 17 nt, Human
agaagucuuagauguau

SEQ ID NO: 2960236 - RNA, 19 nt, Human
agaagucuuagauguauau

SEQ ID NO: 2960237 - RNA, 14 nt, Human
agaagucacacagu

SEQ ID NO: 2960238 - RNA, 19 nt, Human
agaagucaaggcuuagacc

SEQ ID NO: 2960239 - RNA, 18 nt, Human
agaagucaaggcuuagac

SEQ ID NO: 2960240 - RNA, 17 nt, Human
agaagucaaggcuuaga

SEQ ID NO: 2960241 - RNA, 16 nt, Human
agaagucaaggcuuag

SEQ ID NO: 2960242 - RNA, 23 nt, Human
agaaugcacaaacagaggccgcc

SEQ ID NO: 2960243 - RNA, 23 nt, Human
agaaugcaguacuaacauuuauu

SEQ ID NO: 2960244 - RNA, 18 nt, Human
agaaugcucuuuacuuca

SEQ ID NO: 2960245 - RNA, 16 nt, Human
agaaugaaagggccca

SEQ ID NO: 2960246 - RNA, 17 nt, Human
agaaucucaaauaacua

SEQ ID NO: 2960247 - RNA, 18 nt, Human
agaaccaaaaagaggcua

SEQ ID NO: 2960248 - RNA, 17 nt, Human
agaaccaaaaagaggcu

SEQ ID NO: 2960249 - RNA, 22 nt, Human
agaacagugauuaccagggacu

SEQ ID NO: 2960250 - RNA, 13 nt, Human
agcaaaucaguuu

SEQ ID NO: 2960251 - RNA, 19 nt, Human
agcaaauucuguuuuucua

SEQ ID NO: 2960252 - RNA, 20 nt, Human
agcaaaguagaucaugcaua

SEQ ID NO: 2960253 - RNA, 14 nt, Human
agauugcucaaauc

SEQ ID NO: 2960254 - RNA, 16 nt, Human
agauugcucaaaucag

SEQ ID NO: 2960255 - RNA, 17 nt, Human
agauugcaacaggcugg

SEQ ID NO: 2960256 - RNA, 19 nt, Human
agauugcaacaggcugggc

SEQ ID NO: 2960257 - RNA, 16 nt, Human
agauugcaccacugca

SEQ ID NO: 2960258 - RNA, 21 nt, Human
agauucuauguuaauauuuua

SEQ ID NO: 2960259 - RNA, 16 nt, Human
agauucuuuccugagg

SEQ ID NO: 2960260 - RNA, 15 nt, Human
agauucuuuccugag

SEQ ID NO: 2960261 - RNA, 16 nt, Human
agauugcaacaggcug

SEQ ID NO: 2960262 - RNA, 23 nt, Human
agaugacauugacuauuuuuguu

SEQ ID NO: 2960263 - RNA, 18 nt, Human
agaugacauugacuauuu

SEQ ID NO: 2960264 - RNA, 15 nt, Human
agaugaaugucaguu

SEQ ID NO: 2960265 - RNA, 18 nt, Human
agaugacaucugucuagg

SEQ ID NO: 2960266 - RNA, 11 nt, Human
agaugaauguc

SEQ ID NO: 2960267 - RNA, 22 nt, Human
agaugggugcuuggaggaagga

SEQ ID NO: 2960268 - RNA, 20 nt, Human
agaugggugcuuggaggaag

SEQ ID NO: 2960269 - RNA, 18 nt, Human
agauucuauguuaauauu

SEQ ID NO: 2960270 - RNA, 14 nt, Human
agauucuuuccuga

SEQ ID NO: 2960271 - RNA, 20 nt, Human
agagggucugaggaauccag

SEQ ID NO: 2960272 - RNA, 23 nt, Human
agaggggguggccucccaacuca

SEQ ID NO: 2960273 - RNA, 15 nt, Human
agaguugaagacaga

SEQ ID NO: 2960274 - RNA, 14 nt, Human
agaguugaagacag

SEQ ID NO: 2960275 - RNA, 13 nt, Human
agaguugaagaca

SEQ ID NO: 2960276 - RNA, 20 nt, Human
agauagccaaggccaaagga

SEQ ID NO: 2960277 - RNA, 20 nt, Human
agauagauaggucagugcaa

SEQ ID NO: 2960278 - RNA, 15 nt, Human
agauaugauucaaau

SEQ ID NO: 2960279 - RNA, 16 nt, Human
agauaugauucaaaug

SEQ ID NO: 2960280 - RNA, 14 nt, Human
agauaugauucaaa

SEQ ID NO: 2960281 - RNA, 16 nt, Human
agcaucuaugugagac

SEQ ID NO: 2960282 - RNA, 22 nt, Human
agccagauuucacucuccuugg

SEQ ID NO: 2960283 - RNA, 20 nt, Human
agccagauuucacucuccuu

SEQ ID NO: 2960284 - RNA, 17 nt, Human
agccagauuucacucuc

SEQ ID NO: 2960285 - RNA, 14 nt, Human
agccagauuucacu

SEQ ID NO: 2960286 - RNA, 13 nt, Human
agcccaccuuggc

SEQ ID NO: 2960287 - RNA, 23 nt, Human
agcccaccccucaacaccucugc

SEQ ID NO: 2960288 - RNA, 19 nt, Human
agcccacgcccccacuggu

SEQ ID NO: 2960289 - RNA, 15 nt, Human
agcccacgcccccac

SEQ ID NO: 2960290 - RNA, 18 nt, Human
agcccacgcccccacugg

SEQ ID NO: 2960291 - RNA, 17 nt, Human
agcccacgcccccacug

SEQ ID NO: 2960292 - RNA, 19 nt, Human
agccauuugucccaagugc

SEQ ID NO: 2960293 - RNA, 14 nt, Human
agccagcaguucag

SEQ ID NO: 2960294 - RNA, 23 nt, Human
agccagcaggcucucaggccagc

SEQ ID NO: 2960295 - RNA, 21 nt, Human
agccagcaggcucucaggcca

SEQ ID NO: 2960296 - RNA, 22 nt, Human
agccagcaggcucucaggccag

SEQ ID NO: 2960297 - RNA, 20 nt, Human
agcacuaaggugugcucuga

SEQ ID NO: 2960298 - RNA, 21 nt, Human
agcacagacccugcccugugg

SEQ ID NO: 2960299 - RNA, 17 nt, Human
agcagugcaugcugucc

SEQ ID NO: 2960300 - RNA, 20 nt, Human
agcagccuggacccugugga

SEQ ID NO: 2960301 - RNA, 18 nt, Human
agcagcguuucuaugaca

SEQ ID NO: 2960302 - RNA, 19 nt, Human
agcagcguuucuaugacac

SEQ ID NO: 2960303 - RNA, 16 nt, Human
agcagugcaugcuguc

SEQ ID NO: 2960304 - RNA, 13 nt, Human
agcagugcaugcu

SEQ ID NO: 2960305 - RNA, 17 nt, Human
agcacugacuucuaagu

SEQ ID NO: 2960306 - RNA, 19 nt, Human
agcacugacuucuaaguaa

SEQ ID NO: 2960307 - RNA, 16 nt, Human
agcagccuggacccug

SEQ ID NO: 2960308 - RNA, 14 nt, Human
caaagaaauguaag

SEQ ID NO: 2960309 - RNA, 21 nt, Human
caaagagguuuuaaaaaaauc

SEQ ID NO: 2960310 - RNA, 14 nt, Human
caaagagguuuuaa

SEQ ID NO: 2960311 - RNA, 18 nt, Human
auuuuaauaauguuucaa

SEQ ID NO: 2960312 - RNA, 19 nt, Human
auuuuaauaauguuucaaa

SEQ ID NO: 2960313 - RNA, 16 nt, Human
auuuuaauaauguuuc

SEQ ID NO: 2960314 - RNA, 16 nt, Human
caaauguuuauuuaaa

SEQ ID NO: 2960315 - RNA, 17 nt, Human
caaauguuuauuuaaaa

SEQ ID NO: 2960316 - RNA, 18 nt, Human
caaauguuuauuuaaaag

SEQ ID NO: 2960317 - RNA, 20 nt, Human
caaaggguaucaggugcugc

SEQ ID NO: 2960318 - RNA, 21 nt, Human
caaaggguaucaggugcugcc

SEQ ID NO: 2960319 - RNA, 23 nt, Human
caaaggguaucaggugcugccau

SEQ ID NO: 2960320 - RNA, 17 nt, Human
caaaguggugagaggca

SEQ ID NO: 2960321 - RNA, 16 nt, Human
caaaguggugagaggc

SEQ ID NO: 2960322 - RNA, 20 nt, Human
caaaggagauuggaaggaac

SEQ ID NO: 2960323 - RNA, 14 nt, Human
caaaggagauugga

SEQ ID NO: 2960324 - RNA, 20 nt, Human
caacaggcugggcuucagug

SEQ ID NO: 2960325 - RNA, 14 nt, Human
caagugagacccug

SEQ ID NO: 2960326 - RNA, 23 nt, Human
caagugaaaaaggaggaagagaa

SEQ ID NO: 2960327 - RNA, 15 nt, Human
caagguuuaaguuau

SEQ ID NO: 2960328 - RNA, 17 nt, Human
caagguuuaaguuauua

SEQ ID NO: 2960329 - RNA, 22 nt, Human
caagugaaaaaggaggaagaga

SEQ ID NO: 2960330 - RNA, 19 nt, Human
caagugauucuccugccuc

SEQ ID NO: 2960331 - RNA, 18 nt, Human
caagugauucuccugccu

SEQ ID NO: 2960332 - RNA, 19 nt, Human
caagugagacccugucuca

SEQ ID NO: 2960333 - RNA, 15 nt, Human
caagugagacccugu

SEQ ID NO: 2960334 - RNA, 20 nt, Human
caagugauucuccugccuca

SEQ ID NO: 2960335 - RNA, 21 nt, Human
caaggggaauguuugccucug

SEQ ID NO: 2960336 - RNA, 15 nt, Human
caagggccuggccug

SEQ ID NO: 2960337 - RNA, 14 nt, Human
caagggccuggccu

SEQ ID NO: 2960338 - RNA, 13 nt, Human
caagggccuggcc

SEQ ID NO: 2960339 - RNA, 23 nt, Human
caaggggaauguuugccucugcc

SEQ ID NO: 2960340 - RNA, 13 nt, Human
caaggucauuuuu

SEQ ID NO: 2960341 - RNA, 14 nt, Human
caaggcugucaauu

SEQ ID NO: 2960342 - RNA, 13 nt, Human
caaggcugucaau

SEQ ID NO: 2960343 - RNA, 21 nt, Human
caaggcugggggaagaagcuc

SEQ ID NO: 2960344 - RNA, 17 nt, Human
caaggauccugagccag

SEQ ID NO: 2960345 - RNA, 16 nt, Human
caaggauccugagcca

SEQ ID NO: 2960346 - RNA, 15 nt, Human
caaggauccugagcc

SEQ ID NO: 2960347 - RNA, 14 nt, Human
caaggauccugagc

SEQ ID NO: 2960348 - RNA, 16 nt, Human
caagcauuuagaugua

SEQ ID NO: 2960349 - RNA, 19 nt, Human
caagcauuuagauguauag

SEQ ID NO: 2960350 - RNA, 15 nt, Human
caagcauguauuuuu

SEQ ID NO: 2960351 - RNA, 21 nt, Human
caagcauguauuuuugucaau

SEQ ID NO: 2960352 - RNA, 21 nt, Human
caagcauaccaacacgagcag

SEQ ID NO: 2960353 - RNA, 16 nt, Human
caagcauaccaacacg

SEQ ID NO: 2960354 - RNA, 17 nt, Human
caagagcccaggccucc

SEQ ID NO: 2960355 - RNA, 12 nt, Human
caagagggucug

SEQ ID NO: 2960356 - RNA, 16 nt, Human
caagagggucugagga

SEQ ID NO: 2960357 - RNA, 17 nt, Human
caagagggucugaggaa

SEQ ID NO: 2960358 - RNA, 23 nt, Human
caagacccuuguggucccacccc

SEQ ID NO: 2960359 - RNA, 13 nt, Human
caagaaaugaaag

SEQ ID NO: 2960360 - RNA, 19 nt, Human
caagacugcacaucaaaau

SEQ ID NO: 2960361 - RNA, 22 nt, Human
caagacgcugugcugcccugcc

SEQ ID NO: 2960362 - RNA, 21 nt, Human
caagacgcugugcugcccugc

SEQ ID NO: 2960363 - RNA, 20 nt, Human
caagacgcugugcugcccug

SEQ ID NO: 2960364 - RNA, 19 nt, Human
caagacgcugugcugcccu

SEQ ID NO: 2960365 - RNA, 13 nt, Human
caagaccuucucc

SEQ ID NO: 2960366 - RNA, 13 nt, Human
caacaggcugggc

SEQ ID NO: 2960367 - RNA, 17 nt, Human
caacaggcugggcuuca

SEQ ID NO: 2960368 - RNA, 14 nt, Human
caacaggcugggcu

SEQ ID NO: 2960369 - RNA, 23 nt, Human
caaauuuacagagacagaaagca

SEQ ID NO: 2960370 - RNA, 16 nt, Human
caaauuuacagagaca

SEQ ID NO: 2960371 - RNA, 17 nt, Human
caaauuuacagagacag

SEQ ID NO: 2960372 - RNA, 16 nt, Human
caacauacucccaucu

SEQ ID NO: 2960373 - RNA, 17 nt, Human
caacauaacucaagucu

SEQ ID NO: 2960374 - RNA, 15 nt, Human
caacauacucccauc

SEQ ID NO: 2960375 - RNA, 14 nt, Human
caacauacucccau

SEQ ID NO: 2960376 - RNA, 17 nt, Human
caaccugauugugucuc

SEQ ID NO: 2960377 - RNA, 21 nt, Human
caaccugauugugucucuugg

SEQ ID NO: 2960378 - RNA, 19 nt, Human
caaccugauugugucucuu

SEQ ID NO: 2960379 - RNA, 17 nt, Human
caacugcaucaagaugu

SEQ ID NO: 2960380 - RNA, 23 nt, Human
caacugcaucaagaugugacaug

SEQ ID NO: 2960381 - RNA, 20 nt, Human
caacugcaucaagaugugac

SEQ ID NO: 2960382 - RNA, 23 nt, Human
caacugggguggguggggcagug

SEQ ID NO: 2960383 - RNA, 23 nt, Human
cacaagacccaaaaggcagaagc

SEQ ID NO: 2960384 - RNA, 23 nt, Human
cacaagaaaugaaagcagggacu

SEQ ID NO: 2960385 - RNA, 18 nt, Human
cacaaaguaauuuggaaa

SEQ ID NO: 2960386 - RNA, 17 nt, Human
cacaaagguagcuuuuc

SEQ ID NO: 2960387 - RNA, 15 nt, Human
cacaagaaaugaaag

SEQ ID NO: 2960388 - RNA, 13 nt, Human
cacaagaaaugaa

SEQ ID NO: 2960389 - RNA, 15 nt, Human
caauuaugaaaauaa

SEQ ID NO: 2960390 - RNA, 17 nt, Human
cacaaacgggcucagca

SEQ ID NO: 2960391 - RNA, 15 nt, Human
cacaaacagaggccg

SEQ ID NO: 2960392 - RNA, 11 nt, Human
caauuaugaaa

SEQ ID NO: 2960393 - RNA, 14 nt, Human
caauuaugaaaaua

SEQ ID NO: 2960394 - RNA, 14 nt, Human
caaugcacuuuguu

SEQ ID NO: 2960395 - RNA, 18 nt, Human
caaugguuuucuugugug

SEQ ID NO: 2960396 - RNA, 15 nt, Human
cacacaccagagccc

SEQ ID NO: 2960397 - RNA, 16 nt, Human
cacacaccagagccca

SEQ ID NO: 2960398 - RNA, 20 nt, Human
cacacaccagagcccaccuu

SEQ ID NO: 2960399 - RNA, 14 nt, Human
cacacacuuuggcu

SEQ ID NO: 2960400 - RNA, 21 nt, Human
cacacagaggcugccucuccc

SEQ ID NO: 2960401 - RNA, 17 nt, Human
cacaccgggcacucaga

SEQ ID NO: 2960402 - RNA, 14 nt, Human
cacacccagcccac

SEQ ID NO: 2960403 - RNA, 20 nt, Human
cacacccagcccacuucugc

SEQ ID NO: 2960404 - RNA, 13 nt, Human
cacacagcucugu

SEQ ID NO: 2960405 - RNA, 14 nt, Human
cacacagcucuguc

SEQ ID NO: 2960406 - RNA, 15 nt, Human
cacacagcucugucc

SEQ ID NO: 2960407 - RNA, 21 nt, Human
cacaccagagcccaccuuggc

SEQ ID NO: 2960408 - RNA, 22 nt, Human
cacaccagagcccaccuuggcu

SEQ ID NO: 2960409 - RNA, 13 nt, Human
cacacccagccca

SEQ ID NO: 2960410 - RNA, 20 nt, Human
caaugcaaaccaucauugaa

SEQ ID NO: 2960411 - RNA, 23 nt, Human
caaugcaaaccaucauugaaauc

SEQ ID NO: 2960412 - RNA, 14 nt, Human
caaugcacugacau

SEQ ID NO: 2960413 - RNA, 13 nt, Human
caaugcacuuugu

SEQ ID NO: 2960414 - RNA, 14 nt, Human
caaugcaaaccauc

SEQ ID NO: 2960415 - RNA, 14 nt, Human
caaugauggucacc

SEQ ID NO: 2960416 - RNA, 22 nt, Human
caaugcaaaccaucauugaaau

SEQ ID NO: 2960417 - RNA, 21 nt, Human
caaugcaaaccaucauugaaa

SEQ ID NO: 2960418 - RNA, 13 nt, Human
caaugaccuuuca

SEQ ID NO: 2960419 - RNA, 14 nt, Human
caaugaccuuucaa

SEQ ID NO: 2960420 - RNA, 13 nt, Human
caaugauggucac

SEQ ID NO: 2960421 - RNA, 16 nt, Human
caaugaccuuucaaua

SEQ ID NO: 2960422 - RNA, 15 nt, Human
caaugaccuuucaau

SEQ ID NO: 2960423 - RNA, 21 nt, Human
caauauccuaauaaaaaggug

SEQ ID NO: 2960424 - RNA, 20 nt, Human
caauauccuaauaaaaaggu

SEQ ID NO: 2960425 - RNA, 19 nt, Human
caauauccuaauaaaaagg

SEQ ID NO: 2960426 - RNA, 18 nt, Human
caauauccuaauaaaaag

SEQ ID NO: 2960427 - RNA, 16 nt, Human
caauauccuaauaaaa

SEQ ID NO: 2960428 - RNA, 15 nt, Human
caauauccuaauaaa

SEQ ID NO: 2960429 - RNA, 14 nt, Human
caauauccuaauaa

SEQ ID NO: 2960430 - RNA, 13 nt, Human
caauauccuaaua

SEQ ID NO: 2960431 - RNA, 12 nt, Human
caauauccuaau

SEQ ID NO: 2960432 - RNA, 13 nt, Human
cacccaagggccu

SEQ ID NO: 2960433 - RNA, 19 nt, Human
caccacacccagcccacuu

SEQ ID NO: 2960434 - RNA, 17 nt, Human
caccagagcccaccuug

SEQ ID NO: 2960435 - RNA, 18 nt, Human
caccagagcccaccuugg

SEQ ID NO: 2960436 - RNA, 20 nt, Human
caccagagcccaccuuggcu

SEQ ID NO: 2960437 - RNA, 22 nt, Human
caccagagcccaccuuggcuca

SEQ ID NO: 2960438 - RNA, 15 nt, Human
caccagagcccaccu

SEQ ID NO: 2960439 - RNA, 12 nt, Human
caccaagcccag

SEQ ID NO: 2960440 - RNA, 13 nt, Human
caccaagcccagu

SEQ ID NO: 2960441 - RNA, 17 nt, Human
caccaacgucugugcca

SEQ ID NO: 2960442 - RNA, 22 nt, Human
cacauguccaagaagcccagga

SEQ ID NO: 2960443 - RNA, 21 nt, Human
cacauguccaagaagcccagg

SEQ ID NO: 2960444 - RNA, 19 nt, Human
cacauguccaagaagccca

SEQ ID NO: 2960445 - RNA, 18 nt, Human
cacauguccaagaagccc

SEQ ID NO: 2960446 - RNA, 16 nt, Human
caccaugggauuaaua

SEQ ID NO: 2960447 - RNA, 18 nt, Human
caccaucaugucuggcua

SEQ ID NO: 2960448 - RNA, 15 nt, Human
caccaucaugucugg

SEQ ID NO: 2960449 - RNA, 17 nt, Human
caccaucaugucuggcu

SEQ ID NO: 2960450 - RNA, 24 nt, Human
caccaucaagccaccaacauacuc

SEQ ID NO: 2960451 - RNA, 19 nt, Human
caccaucaagccaccaaca

SEQ ID NO: 2960452 - RNA, 17 nt, Human
caccaucaagccaccaa

SEQ ID NO: 2960453 - RNA, 16 nt, Human
caccaucaagccacca

SEQ ID NO: 2960454 - RNA, 13 nt, Human
caccaucaagcca

SEQ ID NO: 2960455 - RNA, 15 nt, Human
caccaucaagccacc

SEQ ID NO: 2960456 - RNA, 14 nt, Human
caccaucaagccac

SEQ ID NO: 2960457 - RNA, 20 nt, Human
caccauaagcuacugccauc

SEQ ID NO: 2960458 - RNA, 21 nt, Human
caccauaagcuacugccaucc

SEQ ID NO: 2960459 - RNA, 21 nt, Human
caccauauuaccacagacaua

SEQ ID NO: 2960460 - RNA, 16 nt, Human
caccauaagcuacugc

SEQ ID NO: 2960461 - RNA, 18 nt, Human
caccauaagcuacugcca

SEQ ID NO: 2960462 - RNA, 19 nt, Human
caccauaagcuacugccau

SEQ ID NO: 2960463 - RNA, 12 nt, Human
caccagugccuc

SEQ ID NO: 2960464 - RNA, 13 nt, Human
caccagugccucu

SEQ ID NO: 2960465 - RNA, 14 nt, Human
caccagugccucuc

SEQ ID NO: 2960466 - RNA, 17 nt, Human
caccagugccucucccu

SEQ ID NO: 2960467 - RNA, 11 nt, Human
caccagugccu

SEQ ID NO: 2960468 - RNA, 22 nt, Human
cacacggacacucaaaagcugg

SEQ ID NO: 2960469 - RNA, 18 nt, Human
cacagcucuucuccaggc

SEQ ID NO: 2960470 - RNA, 17 nt, Human
cacaggaucagucugau

SEQ ID NO: 2960471 - RNA, 19 nt, Human
cacagcucuucuccaggcu

SEQ ID NO: 2960472 - RNA, 20 nt, Human
cacagcucuucuccaggcug

SEQ ID NO: 2960473 - RNA, 14 nt, Human
cacaggcccggcuc

SEQ ID NO: 2960474 - RNA, 23 nt, Human
cacaguccuuaccagcagagcac

SEQ ID NO: 2960475 - RNA, 19 nt, Human
cacaggcagguccaggguu

SEQ ID NO: 2960476 - RNA, 21 nt, Human
cacaugccucucucaggccaa

SEQ ID NO: 2960477 - RNA, 20 nt, Human
cacaugccucucucaggcca

SEQ ID NO: 2960478 - RNA, 17 nt, Human
cacauguccaagaagcc

SEQ ID NO: 2960479 - RNA, 16 nt, Human
cacauguccaagaagc

SEQ ID NO: 2960480 - RNA, 18 nt, Human
cacaugcacgugugugca

SEQ ID NO: 2960481 - RNA, 20 nt, Human
cacaugcaaggucauuuuuu

SEQ ID NO: 2960482 - RNA, 17 nt, Human
cacaugcaaggucauuu

SEQ ID NO: 2960483 - RNA, 19 nt, Human
cacaugcaaggucauuuuu

SEQ ID NO: 2960484 - RNA, 17 nt, Human
cacaugagcaucaggcc

SEQ ID NO: 2960485 - RNA, 13 nt, Human
cacaugagcauca

SEQ ID NO: 2960486 - RNA, 21 nt, Human
cacaugagcaucaggccaggc

SEQ ID NO: 2960487 - RNA, 20 nt, Human
cacaugagcaucaggccagg

SEQ ID NO: 2960488 - RNA, 19 nt, Human
cacaugagcaucaggccag

SEQ ID NO: 2960489 - RNA, 18 nt, Human
cacaugagcaucaggcca

SEQ ID NO: 2960490 - RNA, 22 nt, Human
cacaguuuucugagaaagacua

SEQ ID NO: 2960491 - RNA, 21 nt, Human
cacaguuuucugagaaagacu

SEQ ID NO: 2960492 - RNA, 17 nt, Human
cacaugaaguccaagca

SEQ ID NO: 2960493 - RNA, 20 nt, Human
cacaugaaguccaagcauuu

SEQ ID NO: 2960494 - RNA, 16 nt, Human
cacaugaaguccaagc

SEQ ID NO: 2960495 - RNA, 20 nt, Human
cacaguuuucugagaaagac

SEQ ID NO: 2960496 - RNA, 17 nt, Human
ccccaagacucccauga

SEQ ID NO: 2960497 - RNA, 13 nt, Human
cccauucugccug

SEQ ID NO: 2960498 - RNA, 22 nt, Human
ccccaaauggaaaugggcagag

SEQ ID NO: 2960499 - RNA, 16 nt, Human
ccccaccagugccucu

SEQ ID NO: 2960500 - RNA, 15 nt, Human
ccccaccagugccuc

SEQ ID NO: 2960501 - RNA, 22 nt, Human
ccccaccagugccucucccugc

SEQ ID NO: 2960502 - RNA, 17 nt, Human
ccccaccagugccucuc

SEQ ID NO: 2960503 - RNA, 18 nt, Human
ccccaccagugccucucc

SEQ ID NO: 2960504 - RNA, 20 nt, Human
ccccacccaagggccuggcc

SEQ ID NO: 2960505 - RNA, 14 nt, Human
ccccacccaagggc

SEQ ID NO: 2960506 - RNA, 15 nt, Human
cccagugcccacagg

SEQ ID NO: 2960507 - RNA, 20 nt, Human
cccagugcccacaggaucag

SEQ ID NO: 2960508 - RNA, 17 nt, Human
cccagugccgagaagga

SEQ ID NO: 2960509 - RNA, 18 nt, Human
cccagugccgagaaggaa

SEQ ID NO: 2960510 - RNA, 16 nt, Human
cccaugcugcccugug

SEQ ID NO: 2960511 - RNA, 15 nt, Human
cccaugcugcccugu

SEQ ID NO: 2960512 - RNA, 18 nt, Human
cccaugcugcccugugag

SEQ ID NO: 2960513 - RNA, 17 nt, Human
cccaugcugcccuguga

SEQ ID NO: 2960514 - RNA, 17 nt, Human
ccccaggaggccagccu

SEQ ID NO: 2960515 - RNA, 11 nt, Human
cccagccccuu

SEQ ID NO: 2960516 - RNA, 19 nt, Human
cccagcaagugagagcugg

SEQ ID NO: 2960517 - RNA, 20 nt, Human
cccagcaagugagagcuggg

SEQ ID NO: 2960518 - RNA, 21 nt, Human
cccagcaagugagagcugggu

SEQ ID NO: 2960519 - RNA, 22 nt, Human
cccagcaagugagagcugggug

SEQ ID NO: 2960520 - RNA, 12 nt, Human
cccagccugcua

SEQ ID NO: 2960521 - RNA, 18 nt, Human
cccagccuggaugccauc

SEQ ID NO: 2960522 - RNA, 14 nt, Human
cccagccuggaugc

SEQ ID NO: 2960523 - RNA, 18 nt, Human
cccagccccuucugaccc

SEQ ID NO: 2960524 - RNA, 19 nt, Human
cccagcgagcccugguggc

SEQ ID NO: 2960525 - RNA, 23 nt, Human
cccagcgagcccugguggcagug

SEQ ID NO: 2960526 - RNA, 17 nt, Human
cccagcgagcccuggug

SEQ ID NO: 2960527 - RNA, 18 nt, Human
cccagcgagcccuggugg

SEQ ID NO: 2960528 - RNA, 15 nt, Human
cccagcgagcccugg

SEQ ID NO: 2960529 - RNA, 19 nt, Human
cccagccuggaugccaucc

SEQ ID NO: 2960530 - RNA, 18 nt, Human
cccagagggccugcaagg

SEQ ID NO: 2960531 - RNA, 20 nt, Human
cccagagggccugcaaggga

SEQ ID NO: 2960532 - RNA, 20 nt, Human
cccagauugcaacaggcugg

SEQ ID NO: 2960533 - RNA, 21 nt, Human
cccagauugcaacaggcuggg

SEQ ID NO: 2960534 - RNA, 22 nt, Human
cccagauugcaacaggcugggc

SEQ ID NO: 2960535 - RNA, 16 nt, Human
cccagcaagugagagc

SEQ ID NO: 2960536 - RNA, 18 nt, Human
cccagcaagugagagcug

SEQ ID NO: 2960537 - RNA, 23 nt, Human
cccaagggccuggccugagcugg

SEQ ID NO: 2960538 - RNA, 19 nt, Human
cccaagggccuggccugag

SEQ ID NO: 2960539 - RNA, 18 nt, Human
cccaagggccuggccuga

SEQ ID NO: 2960540 - RNA, 17 nt, Human
cccaagggccuggccug

SEQ ID NO: 2960541 - RNA, 23 nt, Human
cccaaauggaaaugggcagagca

SEQ ID NO: 2960542 - RNA, 17 nt, Human
cccacaccauaagcuac

SEQ ID NO: 2960543 - RNA, 21 nt, Human
cccacaccauaagcuacugcc

SEQ ID NO: 2960544 - RNA, 23 nt, Human
cccaaugcacuuuguucuggcuc

SEQ ID NO: 2960545 - RNA, 17 nt, Human
cccaggcaggucuugaa

SEQ ID NO: 2960546 - RNA, 18 nt, Human
cccaggcauuccccagga

SEQ ID NO: 2960547 - RNA, 21 nt, Human
cccaggcauuccccaggaggc

SEQ ID NO: 2960548 - RNA, 20 nt, Human
cccaggcauuccccaggagg

SEQ ID NO: 2960549 - RNA, 23 nt, Human
cccaggcauuccccaggaggcca

SEQ ID NO: 2960550 - RNA, 22 nt, Human
cccaggcauuccccaggaggcc

SEQ ID NO: 2960551 - RNA, 11 nt, Human
cccaggccccu

SEQ ID NO: 2960552 - RNA, 16 nt, Human
cccaggccccugccac

SEQ ID NO: 2960553 - RNA, 18 nt, Human
cccaggccccugccaccc

SEQ ID NO: 2960554 - RNA, 21 nt, Human
cccaggccccugccacccugg

SEQ ID NO: 2960555 - RNA, 22 nt, Human
cccaggccccugccacccuggg

SEQ ID NO: 2960556 - RNA, 21 nt, Human
cccaggagccccgaggccuuc

SEQ ID NO: 2960557 - RNA, 18 nt, Human
cccaggagccccgaggcc

SEQ ID NO: 2960558 - RNA, 22 nt, Human
cccaggaggccagccuugacca

SEQ ID NO: 2960559 - RNA, 13 nt, Human
cccaggaggccag

SEQ ID NO: 2960560 - RNA, 11 nt, Human
cccaggcaggu

SEQ ID NO: 2960561 - RNA, 13 nt, Human
cccaggcaggucu

SEQ ID NO: 2960562 - RNA, 16 nt, Human
cccaggaguuuggcca

SEQ ID NO: 2960563 - RNA, 15 nt, Human
cccaggaguuuggcc

SEQ ID NO: 2960564 - RNA, 20 nt, Human
cccaggaguuuggccagaag

SEQ ID NO: 2960565 - RNA, 19 nt, Human
cccaggaguuuggccagaa

SEQ ID NO: 2960566 - RNA, 18 nt, Human
cccaggaguuuggccaga

SEQ ID NO: 2960567 - RNA, 17 nt, Human
cccaggaguuuggccag

SEQ ID NO: 2960568 - RNA, 18 nt, Human
cccaggccuccuacagcu

SEQ ID NO: 2960569 - RNA, 17 nt, Human
cccaggccuccuacagc

SEQ ID NO: 2960570 - RNA, 20 nt, Human
cccagucuggaaugcagugg

SEQ ID NO: 2960571 - RNA, 13 nt, Human
cccagugcccaca

SEQ ID NO: 2960572 - RNA, 23 nt, Human
cccaggugcuaggaacacuccuu

SEQ ID NO: 2960573 - RNA, 13 nt, Human
cccaggugccagu

SEQ ID NO: 2960574 - RNA, 22 nt, Human
cccaggugcuaggaacacuccu

SEQ ID NO: 2960575 - RNA, 16 nt, Human
ccauucuccaccugcc

SEQ ID NO: 2960576 - RNA, 15 nt, Human
ccauucuccaccugc

SEQ ID NO: 2960577 - RNA, 14 nt, Human
ccauggacuuuguu

SEQ ID NO: 2960578 - RNA, 13 nt, Human
ccauggacuuugu

SEQ ID NO: 2960579 - RNA, 21 nt, Human
ccauucugccugcccaggccc

SEQ ID NO: 2960580 - RNA, 14 nt, Human
ccauucuccaccug

SEQ ID NO: 2960581 - RNA, 19 nt, Human
ccauucugccugcccaggc

SEQ ID NO: 2960582 - RNA, 20 nt, Human
ccauucugccugcccaggcc

SEQ ID NO: 2960583 - RNA, 16 nt, Human
ccauucugccugccca

SEQ ID NO: 2960584 - RNA, 17 nt, Human
ccauucuccaccugcca

SEQ ID NO: 2960585 - RNA, 17 nt, Human
ccauucugccugcccag

SEQ ID NO: 2960586 - RNA, 18 nt, Human
ccauucugccugcccagg

SEQ ID NO: 2960587 - RNA, 16 nt, Human
cccaaagcagugcaug

SEQ ID NO: 2960588 - RNA, 15 nt, Human
cccaaagaugcagcc

SEQ ID NO: 2960589 - RNA, 12 nt, Human
cccaaagaugca

SEQ ID NO: 2960590 - RNA, 22 nt, Human
ccauuuugggguacccacugcu

SEQ ID NO: 2960591 - RNA, 20 nt, Human
ccauuuugggguacccacug

SEQ ID NO: 2960592 - RNA, 23 nt, Human
ccauuuuggauucuuauggacaa

SEQ ID NO: 2960593 - RNA, 18 nt, Human
cccaaaaggcagaagcaa

SEQ ID NO: 2960594 - RNA, 13 nt, Human
cccaaaaggcaga

SEQ ID NO: 2960595 - RNA, 20 nt, Human
cccaaaacucuccucugcug

SEQ ID NO: 2960596 - RNA, 13 nt, Human
ccaugcugcccug

SEQ ID NO: 2960597 - RNA, 11 nt, Human
ccaugcugccc

SEQ ID NO: 2960598 - RNA, 14 nt, Human
ccaugcugcccugu

SEQ ID NO: 2960599 - RNA, 16 nt, Human
ccaugauguuuagaaa

SEQ ID NO: 2960600 - RNA, 18 nt, Human
ccaugauguuuuccauga

SEQ ID NO: 2960601 - RNA, 21 nt, Human
ccaugauuaaccacuucagcu

SEQ ID NO: 2960602 - RNA, 19 nt, Human
ccaugauuaaccacuucag

SEQ ID NO: 2960603 - RNA, 14 nt, Human
ccaugaagauguag

SEQ ID NO: 2960604 - RNA, 23 nt, Human
ccauccacuggguguaaacacau

SEQ ID NO: 2960605 - RNA, 22 nt, Human
ccaucauugaaaucuuuuugcu

SEQ ID NO: 2960606 - RNA, 14 nt, Human
ccauccuccuggga

SEQ ID NO: 2960607 - RNA, 19 nt, Human
ccauccucuguacagagcc

SEQ ID NO: 2960608 - RNA, 12 nt, Human
ccauccucugua

SEQ ID NO: 2960609 - RNA, 19 nt, Human
ccagugaggcucugcccuu

SEQ ID NO: 2960610 - RNA, 18 nt, Human
ccagugaggcucugcccu

SEQ ID NO: 2960611 - RNA, 20 nt, Human
ccagugaggcucugcccuug

SEQ ID NO: 2960612 - RNA, 17 nt, Human
ccagugaggcucugccc

SEQ ID NO: 2960613 - RNA, 13 nt, Human
ccaucaccagaca

SEQ ID NO: 2960614 - RNA, 18 nt, Human
ccaucaaggguacacugc

SEQ ID NO: 2960615 - RNA, 20 nt, Human
ccauccucuguacagagccc

SEQ ID NO: 2960616 - RNA, 11 nt, Human
ccagcucuggu

SEQ ID NO: 2960617 - RNA, 13 nt, Human
ccagcucuggucc

SEQ ID NO: 2960618 - RNA, 12 nt, Human
ccagcucugguc

SEQ ID NO: 2960619 - RNA, 14 nt, Human
ccagcgagcccugg

SEQ ID NO: 2960620 - RNA, 22 nt, Human
ccagccuugaccauucuccacc

SEQ ID NO: 2960621 - RNA, 15 nt, Human
ccagcgagcccuggu

SEQ ID NO: 2960622 - RNA, 16 nt, Human
ccagcgagcccuggug

SEQ ID NO: 2960623 - RNA, 22 nt, Human
ccagagcccaccuuggcucaag

SEQ ID NO: 2960624 - RNA, 16 nt, Human
ccagagcccaccuugg

SEQ ID NO: 2960625 - RNA, 20 nt, Human
ccagccuugaccauucucca

SEQ ID NO: 2960626 - RNA, 19 nt, Human
ccagccuugaccauucucc

SEQ ID NO: 2960627 - RNA, 23 nt, Human
ccagcugcuugggcuucauccuc

SEQ ID NO: 2960628 - RNA, 20 nt, Human
ccagcugcuugggcuucauc

SEQ ID NO: 2960629 - RNA, 22 nt, Human
ccagcugcugagauccuggacu

SEQ ID NO: 2960630 - RNA, 23 nt, Human
ccagcugcugagauccuggacug

SEQ ID NO: 2960631 - RNA, 21 nt, Human
ccagcugcugagauccuggac

SEQ ID NO: 2960632 - RNA, 20 nt, Human
ccagcugcugagauccugga

SEQ ID NO: 2960633 - RNA, 22 nt, Human
ccagcucugguccauagagagc

SEQ ID NO: 2960634 - RNA, 21 nt, Human
ccagcucugguccauagagag

SEQ ID NO: 2960635 - RNA, 17 nt, Human
ccagcucugguccauag

SEQ ID NO: 2960636 - RNA, 14 nt, Human
ccagcucuggucca

SEQ ID NO: 2960637 - RNA, 22 nt, Human
ccaggaagccagcaggcucuca

SEQ ID NO: 2960638 - RNA, 20 nt, Human
ccaggaagccagcaggcucu

SEQ ID NO: 2960639 - RNA, 13 nt, Human
ccaggaggccagc

SEQ ID NO: 2960640 - RNA, 12 nt, Human
ccaggaggccag

SEQ ID NO: 2960641 - RNA, 18 nt, Human
ccaggagccuccugcccu

SEQ ID NO: 2960642 - RNA, 14 nt, Human
ccaggagccuccug

SEQ ID NO: 2960643 - RNA, 13 nt, Human
ccaggagccuccu

SEQ ID NO: 2960644 - RNA, 22 nt, Human
ccaggcauuccccaggaggcca

SEQ ID NO: 2960645 - RNA, 23 nt, Human
ccaggcauuccccaggaggccag

SEQ ID NO: 2960646 - RNA, 24 nt, Human
ccaggcauuccccaggaggccagc

SEQ ID NO: 2960647 - RNA, 14 nt, Human
ccaggcauucccca

SEQ ID NO: 2960648 - RNA, 13 nt, Human
ccaggcauggugg

SEQ ID NO: 2960649 - RNA, 15 nt, Human
ccaggagccccgagg

SEQ ID NO: 2960650 - RNA, 16 nt, Human
ccaggagcagccacau

SEQ ID NO: 2960651 - RNA, 15 nt, Human
ccaggagcagccaca

SEQ ID NO: 2960652 - RNA, 15 nt, Human
ccagggcaucuggga

SEQ ID NO: 2960653 - RNA, 16 nt, Human
ccagggcaucugggag

SEQ ID NO: 2960654 - RNA, 20 nt, Human
ccaggcuguaucccaugagc

SEQ ID NO: 2960655 - RNA, 14 nt, Human
ccaggcuggucuca

SEQ ID NO: 2960656 - RNA, 19 nt, Human
ccaggcuggucucaaacuc

SEQ ID NO: 2960657 - RNA, 13 nt, Human
ccaggccccugcc

SEQ ID NO: 2960658 - RNA, 23 nt, Human
ccaguaaaugggggugcauuuga

SEQ ID NO: 2960659 - RNA, 14 nt, Human
ccagguucagcuug

SEQ ID NO: 2960660 - RNA, 19 nt, Human
ccaggugcuaggaacacuc

SEQ ID NO: 2960661 - RNA, 17 nt, Human
ccaggugccaguuaugg

SEQ ID NO: 2960662 - RNA, 13 nt, Human
ccaggugccaguu

SEQ ID NO: 2960663 - RNA, 22 nt, Human
ccaaagccuccuccagccgcca

SEQ ID NO: 2960664 - RNA, 17 nt, Human
ccaaagccuccuccagc

SEQ ID NO: 2960665 - RNA, 19 nt, Human
ccaaagccaaagcuaggcc

SEQ ID NO: 2960666 - RNA, 23 nt, Human
ccaaagcagugcaugcugucccu

SEQ ID NO: 2960667 - RNA, 22 nt, Human
ccaaacugacucuuaagaagac

SEQ ID NO: 2960668 - RNA, 19 nt, Human
ccaaagcagugcaugcugu

SEQ ID NO: 2960669 - RNA, 20 nt, Human
ccaaacucaccugccccuca

SEQ ID NO: 2960670 - RNA, 21 nt, Human
ccaaagcuaggccuggccaga

SEQ ID NO: 2960671 - RNA, 16 nt, Human
ccaaagcuaggccugg

SEQ ID NO: 2960672 - RNA, 17 nt, Human
ccaaagcuaggccuggc

SEQ ID NO: 2960673 - RNA, 15 nt, Human
ccaaagcuaggccug

SEQ ID NO: 2960674 - RNA, 23 nt, Human
ccaaaggaagcacaugccucucu

SEQ ID NO: 2960675 - RNA, 15 nt, Human
ccaaaggaagcacau

SEQ ID NO: 2960676 - RNA, 15 nt, Human
ccaaaguacacuguu

SEQ ID NO: 2960677 - RNA, 18 nt, Human
ccaaaguacacuguuuca

SEQ ID NO: 2960678 - RNA, 23 nt, Human
ccaaauuucauaccuaucaucuu

SEQ ID NO: 2960679 - RNA, 20 nt, Human
ccaaaguacacuguuucaaa

SEQ ID NO: 2960680 - RNA, 22 nt, Human
ccaacauacucccaucugugaa

SEQ ID NO: 2960681 - RNA, 21 nt, Human
ccaacauacucccaucuguga

SEQ ID NO: 2960682 - RNA, 16 nt, Human
ccaacauacucccauc

SEQ ID NO: 2960683 - RNA, 20 nt, Human
ccaacauacucccaucugug

SEQ ID NO: 2960684 - RNA, 19 nt, Human
ccaacauacucccaucugu

SEQ ID NO: 2960685 - RNA, 18 nt, Human
ccaacauacucccaucug

SEQ ID NO: 2960686 - RNA, 17 nt, Human
ccaacauacucccaucu

SEQ ID NO: 2960687 - RNA, 20 nt, Human
ccaagaagcccaggaaaggc

SEQ ID NO: 2960688 - RNA, 19 nt, Human
ccaagaagcccaggaaagg

SEQ ID NO: 2960689 - RNA, 12 nt, Human
ccaacccucauc

SEQ ID NO: 2960690 - RNA, 15 nt, Human
ccaagaagcccagga

SEQ ID NO: 2960691 - RNA, 14 nt, Human
ccaagcaaguauua

SEQ ID NO: 2960692 - RNA, 16 nt, Human
ccaagggaauauugcc

SEQ ID NO: 2960693 - RNA, 15 nt, Human
ccaagggccuggccu

SEQ ID NO: 2960694 - RNA, 21 nt, Human
ccaaggccaaaggaagcacau

SEQ ID NO: 2960695 - RNA, 18 nt, Human
ccaaggccaaaggaagca

SEQ ID NO: 2960696 - RNA, 22 nt, Human
ccaaggggaauguuugccucug

SEQ ID NO: 2960697 - RNA, 18 nt, Human
ccaagggccuggccugag

SEQ ID NO: 2960698 - RNA, 16 nt, Human
ccaagggccuggccug

SEQ ID NO: 2960699 - RNA, 19 nt, Human
ccaagggccuggccugagc

SEQ ID NO: 2960700 - RNA, 20 nt, Human
ccaagucaagugaaaaagga

SEQ ID NO: 2960701 - RNA, 13 nt, Human
ccaaggugggagg

SEQ ID NO: 2960702 - RNA, 23 nt, Human
ccaagguuuggggaagaacgaag

SEQ ID NO: 2960703 - RNA, 14 nt, Human
ccaagcucccaggc

SEQ ID NO: 2960704 - RNA, 17 nt, Human
ccaaggccaaaggaagc

SEQ ID NO: 2960705 - RNA, 22 nt, Human
ccaagcucccaggcauucccca

SEQ ID NO: 2960706 - RNA, 16 nt, Human
ccaagcucccaggcau

SEQ ID NO: 2960707 - RNA, 15 nt, Human
ccaagcucccaggca

SEQ ID NO: 2960708 - RNA, 22 nt, Human
ccaagcauaccaacacgagcag

SEQ ID NO: 2960709 - RNA, 17 nt, Human
ccaagcauuuagaugua

SEQ ID NO: 2960710 - RNA, 17 nt, Human
cauuuaggccaugggac

SEQ ID NO: 2960711 - RNA, 12 nt, Human
cauuuaaaagau

SEQ ID NO: 2960712 - RNA, 15 nt, Human
cauuuaaaagauaca

SEQ ID NO: 2960713 - RNA, 16 nt, Human
cauuuaaaagauacag

SEQ ID NO: 2960714 - RNA, 12 nt, Human
cauuuccugugu

SEQ ID NO: 2960715 - RNA, 13 nt, Human
cauuuccuguguc

SEQ ID NO: 2960716 - RNA, 17 nt, Human
cauuguuggccaaagcc

SEQ ID NO: 2960717 - RNA, 18 nt, Human
cauuguuggccaaagcca

SEQ ID NO: 2960718 - RNA, 15 nt, Human
cacccaagggccugg

SEQ ID NO: 2960719 - RNA, 14 nt, Human
cacccaagggccug

SEQ ID NO: 2960720 - RNA, 16 nt, Human
cauuugagcagggcuc

SEQ ID NO: 2960721 - RNA, 20 nt, Human
cauuugagcagggcucagcg

SEQ ID NO: 2960722 - RNA, 17 nt, Human
cauuugagcagggcuca

SEQ ID NO: 2960723 - RNA, 18 nt, Human
cauuugagcagggcucag

SEQ ID NO: 2960724 - RNA, 17 nt, Human
cauuuguuugaacugau

SEQ ID NO: 2960725 - RNA, 20 nt, Human
cauuuguuugaacugauaaa

SEQ ID NO: 2960726 - RNA, 22 nt, Human
cauuuguuugaacugauaaaga

SEQ ID NO: 2960727 - RNA, 13 nt, Human
cauuugcucaugg

SEQ ID NO: 2960728 - RNA, 18 nt, Human
cauuugcucauggaauug

SEQ ID NO: 2960729 - RNA, 14 nt, Human
cauuugcuccuuuc

SEQ ID NO: 2960730 - RNA, 13 nt, Human
cauuugcuccuuu

SEQ ID NO: 2960731 - RNA, 22 nt, Human
cauuugaaaauuuugauguuuu

SEQ ID NO: 2960732 - RNA, 20 nt, Human
cauuugaaaauuuugauguu

SEQ ID NO: 2960733 - RNA, 17 nt, Human
ccaaacucaccugcccc

SEQ ID NO: 2960734 - RNA, 19 nt, Human
cauuuuagggguagcauuu

SEQ ID NO: 2960735 - RNA, 21 nt, Human
ccacccaggagccccgaggcc

SEQ ID NO: 2960736 - RNA, 23 nt, Human
ccacccaggagccccgaggccuu

SEQ ID NO: 2960737 - RNA, 17 nt, Human
ccacccccacccaaggg

SEQ ID NO: 2960738 - RNA, 16 nt, Human
ccacaugugcacaugc

SEQ ID NO: 2960739 - RNA, 16 nt, Human
ccacauuccugaugcu

SEQ ID NO: 2960740 - RNA, 19 nt, Human
ccacaucuugcucugcuga

SEQ ID NO: 2960741 - RNA, 18 nt, Human
ccacaucuugcucugcug

SEQ ID NO: 2960742 - RNA, 17 nt, Human
ccacaucuugcucugcu

SEQ ID NO: 2960743 - RNA, 21 nt, Human
ccaccaacauacucccaucug

SEQ ID NO: 2960744 - RNA, 21 nt, Human
ccacacccagcccacuucugc

SEQ ID NO: 2960745 - RNA, 22 nt, Human
ccacacccagcccacuucugcc

SEQ ID NO: 2960746 - RNA, 20 nt, Human
ccacacccagcccacuucug

SEQ ID NO: 2960747 - RNA, 15 nt, Human
ccacacccagcccac

SEQ ID NO: 2960748 - RNA, 20 nt, Human
ccacaccauaagcuacugcc

SEQ ID NO: 2960749 - RNA, 21 nt, Human
ccacaccauaagcuacugcca

SEQ ID NO: 2960750 - RNA, 22 nt, Human
ccacaccauaagcuacugccau

SEQ ID NO: 2960751 - RNA, 16 nt, Human
ccacaggaucagucug

SEQ ID NO: 2960752 - RNA, 20 nt, Human
ccacaggaaccacaagacug

SEQ ID NO: 2960753 - RNA, 16 nt, Human
ccaauauucauagcag

SEQ ID NO: 2960754 - RNA, 19 nt, Human
ccaauauccuaauaaaaag

SEQ ID NO: 2960755 - RNA, 18 nt, Human
ccaauauccuaauaaaaa

SEQ ID NO: 2960756 - RNA, 17 nt, Human
ccaauauccuaauaaaa

SEQ ID NO: 2960757 - RNA, 16 nt, Human
ccaauauccuaauaaa

SEQ ID NO: 2960758 - RNA, 15 nt, Human
ccaauauccuaauaa

SEQ ID NO: 2960759 - RNA, 14 nt, Human
ccaauauccuaaua

SEQ ID NO: 2960760 - RNA, 13 nt, Human
ccaauauccuaau

SEQ ID NO: 2960761 - RNA, 12 nt, Human
ccaauauccuaa

SEQ ID NO: 2960762 - RNA, 15 nt, Human
ccaccccacacacgc

SEQ ID NO: 2960763 - RNA, 23 nt, Human
ccacggccaggccagagggagug

SEQ ID NO: 2960764 - RNA, 18 nt, Human
ccacgcuggagugcagug

SEQ ID NO: 2960765 - RNA, 19 nt, Human
ccacgcuggagugcaguga

SEQ ID NO: 2960766 - RNA, 16 nt, Human
ccacggccaggccaga

SEQ ID NO: 2960767 - RNA, 18 nt, Human
ccacggccaggccagagg

SEQ ID NO: 2960768 - RNA, 15 nt, Human
ccacccccacccaag

SEQ ID NO: 2960769 - RNA, 16 nt, Human
ccacgcuggagugcag

SEQ ID NO: 2960770 - RNA, 13 nt, Human
ccacgcuggagug

SEQ ID NO: 2960771 - RNA, 16 nt, Human
ccacuacauucuguua

SEQ ID NO: 2960772 - RNA, 17 nt, Human
ccacuacauucuguuaa

SEQ ID NO: 2960773 - RNA, 11 nt, Human
ccacuacauuc

SEQ ID NO: 2960774 - RNA, 15 nt, Human
ccacuacauucuguu

SEQ ID NO: 2960775 - RNA, 14 nt, Human
ccacuacauucugu

SEQ ID NO: 2960776 - RNA, 19 nt, Human
ccagaauuucccaaagcag

SEQ ID NO: 2960777 - RNA, 12 nt, Human
ccagaauuuccc

SEQ ID NO: 2960778 - RNA, 18 nt, Human
ccagaauuucccaaagca

SEQ ID NO: 2960779 - RNA, 21 nt, Human
ccagaauuucccaaagcagug

SEQ ID NO: 2960780 - RNA, 21 nt, Human
ccagacaccuugacagggcac

SEQ ID NO: 2960781 - RNA, 20 nt, Human
ccagacaccuugacagggca

SEQ ID NO: 2960782 - RNA, 23 nt, Human
ccagaaguuugagaucagccugg

SEQ ID NO: 2960783 - RNA, 18 nt, Human
ccagaagucaaggcuuag

SEQ ID NO: 2960784 - RNA, 22 nt, Human
ccagaaguuugagaucagccug

SEQ ID NO: 2960785 - RNA, 14 nt, Human
ccacuucagcugac

SEQ ID NO: 2960786 - RNA, 13 nt, Human
ccacuucagcuga

SEQ ID NO: 2960787 - RNA, 23 nt, Human
ccacugcacuccagccuggguga

SEQ ID NO: 2960788 - RNA, 13 nt, Human
ccacugcagaaga

SEQ ID NO: 2960789 - RNA, 18 nt, Human
ccacugcagaagacagua

SEQ ID NO: 2960790 - RNA, 13 nt, Human
cgcuccugugucu

SEQ ID NO: 2960791 - RNA, 20 nt, Human
cggaaugaaccacaucuugc

SEQ ID NO: 2960792 - RNA, 20 nt, Human
cggaagaccugaagaguggu

SEQ ID NO: 2960793 - RNA, 15 nt, Human
cggacagccacggcc

SEQ ID NO: 2960794 - RNA, 16 nt, Human
cggacagccacggcca

SEQ ID NO: 2960795 - RNA, 18 nt, Human
cggacagccacggccagg

SEQ ID NO: 2960796 - RNA, 21 nt, Human
cggaccuuguagugagccgag

SEQ ID NO: 2960797 - RNA, 17 nt, Human
cggaccccacuccggcc

SEQ ID NO: 2960798 - RNA, 21 nt, Human
cggaccccacuccggcccucc

SEQ ID NO: 2960799 - RNA, 20 nt, Human
cgggaggauguucugggaca

SEQ ID NO: 2960800 - RNA, 18 nt, Human
cgggaggcugaggcagga

SEQ ID NO: 2960801 - RNA, 16 nt, Human
cgggaggcugaggcag

SEQ ID NO: 2960802 - RNA, 17 nt, Human
cgggaggcugaggcagg

SEQ ID NO: 2960803 - RNA, 16 nt, Human
cgggaggucgaggcag

SEQ ID NO: 2960804 - RNA, 17 nt, Human
cgggaggucgaggcagg

SEQ ID NO: 2960805 - RNA, 15 nt, Human
cgggcaugacacgaa

SEQ ID NO: 2960806 - RNA, 12 nt, Human
cgggcaugacac

SEQ ID NO: 2960807 - RNA, 18 nt, Human
cggcuggccuggccccuc

SEQ ID NO: 2960808 - RNA, 14 nt, Human
cggcuggccuggcc

SEQ ID NO: 2960809 - RNA, 16 nt, Human
cggcuggccuggcccc

SEQ ID NO: 2960810 - RNA, 15 nt, Human
cggcuggccuggccc

SEQ ID NO: 2960811 - RNA, 21 nt, Human
cggccccaccagugccucucc

SEQ ID NO: 2960812 - RNA, 18 nt, Human
cggccccaccagugccuc

SEQ ID NO: 2960813 - RNA, 20 nt, Human
cggccccaccagugccucuc

SEQ ID NO: 2960814 - RNA, 15 nt, Human
cggccccaccagugc

SEQ ID NO: 2960815 - RNA, 16 nt, Human
cggccccaccagugcc

SEQ ID NO: 2960816 - RNA, 17 nt, Human
cggccccaccagugccu

SEQ ID NO: 2960817 - RNA, 13 nt, Human
cggccccaccagu

SEQ ID NO: 2960818 - RNA, 14 nt, Human
cggccuccauccug

SEQ ID NO: 2960819 - RNA, 16 nt, Human
cggccuccauccugag

SEQ ID NO: 2960820 - RNA, 17 nt, Human
cggccuccauccugagg

SEQ ID NO: 2960821 - RNA, 12 nt, Human
cgauuucuguuu

SEQ ID NO: 2960822 - RNA, 23 nt, Human
cgcacuucgggaggucgaggcag

SEQ ID NO: 2960823 - RNA, 11 nt, Human
cgcaaugugac

SEQ ID NO: 2960824 - RNA, 19 nt, Human
cgaucuggguucacugcaa

SEQ ID NO: 2960825 - RNA, 21 nt, Human
cgauucuucugcuucagccuc

SEQ ID NO: 2960826 - RNA, 13 nt, Human
cgauucuucugcu

SEQ ID NO: 2960827 - RNA, 19 nt, Human
cgauucuucugcuucagcc

SEQ ID NO: 2960828 - RNA, 15 nt, Human
ccuuuguauucucuc

SEQ ID NO: 2960829 - RNA, 18 nt, Human
ccuuuguauucucuccug

SEQ ID NO: 2960830 - RNA, 20 nt, Human
ccuuuguauucucuccugua

SEQ ID NO: 2960831 - RNA, 18 nt, Human
cgaggccuucucugaagg

SEQ ID NO: 2960832 - RNA, 19 nt, Human
cgaggccuucucugaagga

SEQ ID NO: 2960833 - RNA, 13 nt, Human
cgaggacagggag

SEQ ID NO: 2960834 - RNA, 12 nt, Human
cgaggacaggga

SEQ ID NO: 2960835 - RNA, 16 nt, Human
ccuuugcuugaaagaa

SEQ ID NO: 2960836 - RNA, 23 nt, Human
ccuuugacgccaucccagcccca

SEQ ID NO: 2960837 - RNA, 12 nt, Human
ccuuggcugcag

SEQ ID NO: 2960838 - RNA, 13 nt, Human
ccuuggcugcagg

SEQ ID NO: 2960839 - RNA, 20 nt, Human
ccuuguggucccaccccaca

SEQ ID NO: 2960840 - RNA, 19 nt, Human
ccuuguggucccaccccac

SEQ ID NO: 2960841 - RNA, 16 nt, Human
ccuuguggucccaccc

SEQ ID NO: 2960842 - RNA, 13 nt, Human
ccuuuaagagaaa

SEQ ID NO: 2960843 - RNA, 14 nt, Human
cgcagacaggacca

SEQ ID NO: 2960844 - RNA, 13 nt, Human
cgcagacaggacc

SEQ ID NO: 2960845 - RNA, 15 nt, Human
cgcccccacugguga

SEQ ID NO: 2960846 - RNA, 15 nt, Human
cgcgacaaugcaaac

SEQ ID NO: 2960847 - RNA, 17 nt, Human
cgcgacaaugcaaacca

SEQ ID NO: 2960848 - RNA, 16 nt, Human
cgcgacaaugcaaacc

SEQ ID NO: 2960849 - RNA, 21 nt, Human
cgcuaagagggagggagggcu

SEQ ID NO: 2960850 - RNA, 14 nt, Human
cgcuaagagggagg

SEQ ID NO: 2960851 - RNA, 16 nt, Human
cgcuaagagggaggga

SEQ ID NO: 2960852 - RNA, 15 nt, Human
cgcuaagagggaggg

SEQ ID NO: 2960853 - RNA, 16 nt, Human
cgcgugcacacaccag

SEQ ID NO: 2960854 - RNA, 19 nt, Human
cgcgugcacacaccagagc

SEQ ID NO: 2960855 - RNA, 20 nt, Human
cgcgugcacacaccagagcc

SEQ ID NO: 2960856 - RNA, 22 nt, Human
cgugcaguggugcgaucugggu

SEQ ID NO: 2960857 - RNA, 22 nt, Human
cgugcacacaccagagcccacc

SEQ ID NO: 2960858 - RNA, 14 nt, Human
cgugcauaccacuu

SEQ ID NO: 2960859 - RNA, 18 nt, Human
cgugcauaccacuuuugu

SEQ ID NO: 2960860 - RNA, 19 nt, Human
cgugcauaccacuuuuguu

SEQ ID NO: 2960861 - RNA, 17 nt, Human
cgugaacccaggaggcg

SEQ ID NO: 2960862 - RNA, 19 nt, Human
cgugaacccaggaggcgga

SEQ ID NO: 2960863 - RNA, 20 nt, Human
cgugcacacaccagagccca

SEQ ID NO: 2960864 - RNA, 21 nt, Human
cgugcacacaccagagcccac

SEQ ID NO: 2960865 - RNA, 14 nt, Human
cguccccugucccc

SEQ ID NO: 2960866 - RNA, 11 nt, Human
cguccccuguc

SEQ ID NO: 2960867 - RNA, 13 nt, Human
cgucugacaggca

SEQ ID NO: 2960868 - RNA, 14 nt, Human
cgucugacaggcaa

SEQ ID NO: 2960869 - RNA, 14 nt, Human
cgucuaccugaggg

SEQ ID NO: 2960870 - RNA, 16 nt, Human
cgucucuacuaaaaau

SEQ ID NO: 2960871 - RNA, 23 nt, Human
cggugcuaucucccccagcccca

SEQ ID NO: 2960872 - RNA, 16 nt, Human
cgucaacucauauuuu

SEQ ID NO: 2960873 - RNA, 20 nt, Human
cgucaacucauauuuucaug

SEQ ID NO: 2960874 - RNA, 17 nt, Human
cguggcugcuucaagga

SEQ ID NO: 2960875 - RNA, 15 nt, Human
cguggcugcuucaag

SEQ ID NO: 2960876 - RNA, 14 nt, Human
cguggcugcuucaa

SEQ ID NO: 2960877 - RNA, 12 nt, Human
cguggcugcuuc

SEQ ID NO: 2960878 - RNA, 20 nt, Human
cguuucuaugacacaugcaa

SEQ ID NO: 2960879 - RNA, 19 nt, Human
cguuucuaaaggcuaccuu

SEQ ID NO: 2960880 - RNA, 21 nt, Human
cguuucuaaaggcuaccuuug

SEQ ID NO: 2960881 - RNA, 19 nt, Human
ccugcugguucaggguugg

SEQ ID NO: 2960882 - RNA, 13 nt, Human
ccugcugguucag

SEQ ID NO: 2960883 - RNA, 21 nt, Human
ccugcuggguguggcgcagca

SEQ ID NO: 2960884 - RNA, 12 nt, Human
ccugcuccagcu

SEQ ID NO: 2960885 - RNA, 22 nt, Human
ccugcuccagcuguucagcugg

SEQ ID NO: 2960886 - RNA, 14 nt, Human
ccugcuccagcugu

SEQ ID NO: 2960887 - RNA, 13 nt, Human
ccugcuccagcug

SEQ ID NO: 2960888 - RNA, 18 nt, Human
ccugcaacaccuuguuuc

SEQ ID NO: 2960889 - RNA, 23 nt, Human
ccugauuuaauaugcaaagucua

SEQ ID NO: 2960890 - RNA, 16 nt, Human
ccugcaaccugauugu

SEQ ID NO: 2960891 - RNA, 19 nt, Human
ccugcaacaccuuguuucc

SEQ ID NO: 2960892 - RNA, 23 nt, Human
ccugcgucucauacucaccucac

SEQ ID NO: 2960893 - RNA, 13 nt, Human
ccuggacugaggg

SEQ ID NO: 2960894 - RNA, 14 nt, Human
ccuggacugagggg

SEQ ID NO: 2960895 - RNA, 21 nt, Human
ccuggacugagggggccugga

SEQ ID NO: 2960896 - RNA, 22 nt, Human
ccuggacugagggggccuggau

SEQ ID NO: 2960897 - RNA, 14 nt, Human
ccuggacccugugg

SEQ ID NO: 2960898 - RNA, 13 nt, Human
ccuggacccugug

SEQ ID NO: 2960899 - RNA, 14 nt, Human
ccuggcaugggaau

SEQ ID NO: 2960900 - RNA, 17 nt, Human
ccuggcaugggaaugaa

SEQ ID NO: 2960901 - RNA, 16 nt, Human
ccuggcaugggaauga

SEQ ID NO: 2960902 - RNA, 16 nt, Human
ccuggcagccccuguu

SEQ ID NO: 2960903 - RNA, 14 nt, Human
ccuggcagccccug

SEQ ID NO: 2960904 - RNA, 22 nt, Human
ccuggcacuggcaaacagggcc

SEQ ID NO: 2960905 - RNA, 23 nt, Human
ccuggcacuggcaaacagggccu

SEQ ID NO: 2960906 - RNA, 21 nt, Human
ccuggcacugcuuccagugag

SEQ ID NO: 2960907 - RNA, 13 nt, Human
ccuggcacuggca

SEQ ID NO: 2960908 - RNA, 23 nt, Human
ccuggacugagggggccuggaug

SEQ ID NO: 2960909 - RNA, 17 nt, Human
ccuggcacugcuuccag

SEQ ID NO: 2960910 - RNA, 20 nt, Human
ccuggcacugcuuccaguga

SEQ ID NO: 2960911 - RNA, 18 nt, Human
ccuggcaugggaaugaau

SEQ ID NO: 2960912 - RNA, 12 nt, Human
ccuggcucugug

SEQ ID NO: 2960913 - RNA, 18 nt, Human
ccuggcucuguggcgagc

SEQ ID NO: 2960914 - RNA, 17 nt, Human
ccuggcuaacacgguga

SEQ ID NO: 2960915 - RNA, 14 nt, Human
ccuggccccucagg

SEQ ID NO: 2960916 - RNA, 20 nt, Human
ccugggaggucaaggcugca

SEQ ID NO: 2960917 - RNA, 20 nt, Human
ccugggaucccucauccuca

SEQ ID NO: 2960918 - RNA, 16 nt, Human
ccugggaucccucauc

SEQ ID NO: 2960919 - RNA, 15 nt, Human
ccugggcagcugccu

SEQ ID NO: 2960920 - RNA, 16 nt, Human
ccugggcagcugccuc

SEQ ID NO: 2960921 - RNA, 17 nt, Human
ccugggcagcugccucc

SEQ ID NO: 2960922 - RNA, 18 nt, Human
ccugggcagcugccuccc

SEQ ID NO: 2960923 - RNA, 14 nt, Human
ccugggcagaagga

SEQ ID NO: 2960924 - RNA, 12 nt, Human
ccugggcagaag

SEQ ID NO: 2960925 - RNA, 17 nt, Human
ccugggcaacagagcaa

SEQ ID NO: 2960926 - RNA, 18 nt, Human
ccuguccccgcacugggc

SEQ ID NO: 2960927 - RNA, 16 nt, Human
ccugucccccugacaa

SEQ ID NO: 2960928 - RNA, 17 nt, Human
ccugucccccugacaac

SEQ ID NO: 2960929 - RNA, 20 nt, Human
ccugugaguacuacaguccu

SEQ ID NO: 2960930 - RNA, 17 nt, Human
ccugugauggggcccug

SEQ ID NO: 2960931 - RNA, 19 nt, Human
ccugugauggggcccugcc

SEQ ID NO: 2960932 - RNA, 18 nt, Human
ccugugauggggcccugc

SEQ ID NO: 2960933 - RNA, 22 nt, Human
ccugugauggggcccugccucc

SEQ ID NO: 2960934 - RNA, 21 nt, Human
ccugugauggggcccugccuc

SEQ ID NO: 2960935 - RNA, 20 nt, Human
ccugugauggggcccugccu

SEQ ID NO: 2960936 - RNA, 19 nt, Human
ccugugccucugggacugg

SEQ ID NO: 2960937 - RNA, 15 nt, Human
ccugugccucuggga

SEQ ID NO: 2960938 - RNA, 17 nt, Human
ccugugccucugggacu

SEQ ID NO: 2960939 - RNA, 23 nt, Human
ccuguagagugggagcugagugg

SEQ ID NO: 2960940 - RNA, 19 nt, Human
ccuguagagugggagcuga

SEQ ID NO: 2960941 - RNA, 21 nt, Human
ccuguagagugggagcugagu

SEQ ID NO: 2960942 - RNA, 20 nt, Human
ccuguaaucccagcacuuug

SEQ ID NO: 2960943 - RNA, 20 nt, Human
ccuguaauccuagcacuuug

SEQ ID NO: 2960944 - RNA, 12 nt, Human
ccuguaccucuu

SEQ ID NO: 2960945 - RNA, 18 nt, Human
ccugguggcagcucaccu

SEQ ID NO: 2960946 - RNA, 17 nt, Human
ccugguggcagcucacc

SEQ ID NO: 2960947 - RNA, 16 nt, Human
ccugguggcagcucac

SEQ ID NO: 2960948 - RNA, 14 nt, Human
ccugguggcagcuc

SEQ ID NO: 2960949 - RNA, 12 nt, Human
ccugguggcagc

SEQ ID NO: 2960950 - RNA, 13 nt, Human
ccugguggcagcu

SEQ ID NO: 2960951 - RNA, 20 nt, Human
ccugggcagcugccuccccu

SEQ ID NO: 2960952 - RNA, 12 nt, Human
ccuucagccuga

SEQ ID NO: 2960953 - RNA, 12 nt, Human
ccuucagugccu

SEQ ID NO: 2960954 - RNA, 14 nt, Human
ccuucagugccuua

SEQ ID NO: 2960955 - RNA, 13 nt, Human
ccuucagugccuu

SEQ ID NO: 2960956 - RNA, 19 nt, Human
ccuucagugccuuauggaa

SEQ ID NO: 2960957 - RNA, 15 nt, Human
ccuucagugccuuau

SEQ ID NO: 2960958 - RNA, 20 nt, Human
ccuucagugccuuauggaac

SEQ ID NO: 2960959 - RNA, 11 nt, Human
ccuuccugcug

SEQ ID NO: 2960960 - RNA, 14 nt, Human
ccuuccucuuucca

SEQ ID NO: 2960961 - RNA, 22 nt, Human
ccuuccaggggugggacacccu

SEQ ID NO: 2960962 - RNA, 18 nt, Human
ccuuccaggggugggaca

SEQ ID NO: 2960963 - RNA, 16 nt, Human
ccuuccagggguggga

SEQ ID NO: 2960964 - RNA, 15 nt, Human
ccuuccagggguggg

SEQ ID NO: 2960965 - RNA, 17 nt, Human
ccuuagacagucccugc

SEQ ID NO: 2960966 - RNA, 16 nt, Human
ccuuagacagucccug

SEQ ID NO: 2960967 - RNA, 19 nt, Human
ccuuagacagucccugcca

SEQ ID NO: 2960968 - RNA, 18 nt, Human
ccuuagacagucccugcc

SEQ ID NO: 2960969 - RNA, 21 nt, Human
ccuuagacagucccugccaau

SEQ ID NO: 2960970 - RNA, 14 nt, Human
ccuuaccugccagg

SEQ ID NO: 2960971 - RNA, 20 nt, Human
ccuuaccucggugccuuccu

SEQ ID NO: 2960972 - RNA, 19 nt, Human
ccuuacccucauguucuua

SEQ ID NO: 2960973 - RNA, 17 nt, Human
ccuuaccagcagagcac

SEQ ID NO: 2960974 - RNA, 16 nt, Human
ccuuaccagcagagca

SEQ ID NO: 2960975 - RNA, 15 nt, Human
ccuuaccagcagagc

SEQ ID NO: 2960976 - RNA, 14 nt, Human
ccuuaccagcagag

SEQ ID NO: 2960977 - RNA, 21 nt, Human
ccuugaccauucuccaccugc

SEQ ID NO: 2960978 - RNA, 23 nt, Human
ccuugaguugauucagcucugca

SEQ ID NO: 2960979 - RNA, 22 nt, Human
ccuugaguugauucagcucugc

SEQ ID NO: 2960980 - RNA, 19 nt, Human
ccuuggauuguccccgacc

SEQ ID NO: 2960981 - RNA, 14 nt, Human
ccuugacagggcac

SEQ ID NO: 2960982 - RNA, 13 nt, Human
ccuugacagggca

SEQ ID NO: 2960983 - RNA, 15 nt, Human
ccuugacagggcaca

SEQ ID NO: 2960984 - RNA, 17 nt, Human
ccuugacagggcacacc

SEQ ID NO: 2960985 - RNA, 20 nt, Human
ccuugaccauucuccaccug

SEQ ID NO: 2960986 - RNA, 19 nt, Human
ccuugaccauucuccaccu

SEQ ID NO: 2960987 - RNA, 15 nt, Human
ccuugaaaacacugu

SEQ ID NO: 2960988 - RNA, 13 nt, Human
ccuucgcuccugu

SEQ ID NO: 2960989 - RNA, 14 nt, Human
ccuucgcuccugug

SEQ ID NO: 2960990 - RNA, 15 nt, Human
ccuucgcuccugugu

SEQ ID NO: 2960991 - RNA, 18 nt, Human
ccuucgcuccugugucuu

SEQ ID NO: 2960992 - RNA, 14 nt, Human
ccuugaacugggua

SEQ ID NO: 2960993 - RNA, 22 nt, Human
ccuugaaaacacuguucucugc

SEQ ID NO: 2960994 - RNA, 21 nt, Human
ccuugaaaacacuguucucug

SEQ ID NO: 2960995 - RNA, 19 nt, Human
ccuugaaaacacuguucuc

SEQ ID NO: 2960996 - RNA, 16 nt, Human
ccuugaacuggguacu

SEQ ID NO: 2960997 - RNA, 17 nt, Human
ccuugaacuuugaccuc

SEQ ID NO: 2960998 - RNA, 17 nt, Human
ccuugaaugaugccaug

SEQ ID NO: 2960999 - RNA, 11 nt, Human
ccuuuggcuuc

SEQ ID NO: 2961000 - RNA, 15 nt, Human
cccugugggccccca

SEQ ID NO: 2961001 - RNA, 16 nt, Human
cccugugggcccccaa

SEQ ID NO: 2961002 - RNA, 16 nt, Human
cccugugucauuucaa

SEQ ID NO: 2961003 - RNA, 18 nt, Human
cccugugggcccccaaau

SEQ ID NO: 2961004 - RNA, 15 nt, Human
cccuguuuguuucug

SEQ ID NO: 2961005 - RNA, 17 nt, Human
ccccucagggucccugg

SEQ ID NO: 2961006 - RNA, 20 nt, Human
ccccucagggucccuggugg

SEQ ID NO: 2961007 - RNA, 18 nt, Human
ccccucagggucccuggu

SEQ ID NO: 2961008 - RNA, 21 nt, Human
cccugguggcagugggagcug

SEQ ID NO: 2961009 - RNA, 15 nt, Human
cccugguggcagugg

SEQ ID NO: 2961010 - RNA, 16 nt, Human
cccugguggcaguggg

SEQ ID NO: 2961011 - RNA, 19 nt, Human
cccugguggcagugggagc

SEQ ID NO: 2961012 - RNA, 21 nt, Human
cccccgcugucagccauuccu

SEQ ID NO: 2961013 - RNA, 12 nt, Human
cccccagcccca

SEQ ID NO: 2961014 - RNA, 22 nt, Human
ccccaggaggccagccuugacc

SEQ ID NO: 2961015 - RNA, 21 nt, Human
ccccaggaggccagccuugac

SEQ ID NO: 2961016 - RNA, 15 nt, Human
ccccaggaggccagc

SEQ ID NO: 2961017 - RNA, 14 nt, Human
ccccaggaggccag

SEQ ID NO: 2961018 - RNA, 13 nt, Human
ccccaggaggcca

SEQ ID NO: 2961019 - RNA, 13 nt, Human
ccccacuggugac

SEQ ID NO: 2961020 - RNA, 12 nt, Human
ccccacugguga

SEQ ID NO: 2961021 - RNA, 16 nt, Human
ccgagggggcugcucc

SEQ ID NO: 2961022 - RNA, 18 nt, Human
ccgagggggcugcuccca

SEQ ID NO: 2961023 - RNA, 19 nt, Human
ccgagggggcugcucccac

SEQ ID NO: 2961024 - RNA, 18 nt, Human
ccgagaucacgccacugc

SEQ ID NO: 2961025 - RNA, 17 nt, Human
ccgaggccuucucugaa

SEQ ID NO: 2961026 - RNA, 19 nt, Human
cccuuuuuuggcugcugaa

SEQ ID NO: 2961027 - RNA, 22 nt, Human
ccgagauagccaaggccaaagg

SEQ ID NO: 2961028 - RNA, 19 nt, Human
ccgagauagccaaggccaa

SEQ ID NO: 2961029 - RNA, 18 nt, Human
ccgagauagccaaggcca

SEQ ID NO: 2961030 - RNA, 17 nt, Human
ccgagaaggaagccucc

SEQ ID NO: 2961031 - RNA, 17 nt, Human
cccuuuuucaauaacug

SEQ ID NO: 2961032 - RNA, 22 nt, Human
cccuuuuucaauaacuggaaca

SEQ ID NO: 2961033 - RNA, 18 nt, Human
cccuuuuuuggcugcuga

SEQ ID NO: 2961034 - RNA, 17 nt, Human
cccuuuuuuggcugcug

SEQ ID NO: 2961035 - RNA, 13 nt, Human
cccuuuucuguuu

SEQ ID NO: 2961036 - RNA, 11 nt, Human
cccuuuuccuu

SEQ ID NO: 2961037 - RNA, 20 nt, Human
cccuuugacgccaucccagc

SEQ ID NO: 2961038 - RNA, 18 nt, Human
cccuuguggucccacccc

SEQ ID NO: 2961039 - RNA, 16 nt, Human
cccuuguggucccacc

SEQ ID NO: 2961040 - RNA, 14 nt, Human
cccuugugguccca

SEQ ID NO: 2961041 - RNA, 18 nt, Human
cccuuggggagcaggcuc

SEQ ID NO: 2961042 - RNA, 22 nt, Human
cccuugccgucuaccugagggg

SEQ ID NO: 2961043 - RNA, 18 nt, Human
cccuugccgucuaccuga

SEQ ID NO: 2961044 - RNA, 17 nt, Human
cccuugccgucuaccug

SEQ ID NO: 2961045 - RNA, 19 nt, Human
cccuuaccucggugccuuc

SEQ ID NO: 2961046 - RNA, 16 nt, Human
cccuugaugaagaagu

SEQ ID NO: 2961047 - RNA, 15 nt, Human
cccuugaugaagaag

SEQ ID NO: 2961048 - RNA, 18 nt, Human
ccucaauaaacauuucau

SEQ ID NO: 2961049 - RNA, 14 nt, Human
ccucaauugugaaa

SEQ ID NO: 2961050 - RNA, 17 nt, Human
ccucacaguccuuacca

SEQ ID NO: 2961051 - RNA, 17 nt, Human
ccucaccuuucccaucu

SEQ ID NO: 2961052 - RNA, 15 nt, Human
ccucaccccacugug

SEQ ID NO: 2961053 - RNA, 12 nt, Human
ccucaccccacu

SEQ ID NO: 2961054 - RNA, 22 nt, Human
ccucacaguccuuaccagcaga

SEQ ID NO: 2961055 - RNA, 20 nt, Human
ccucacaguccuuaccagca

SEQ ID NO: 2961056 - RNA, 23 nt, Human
ccgcuuucuacccagcgagcccu

SEQ ID NO: 2961057 - RNA, 12 nt, Human
ccggcuggccug

SEQ ID NO: 2961058 - RNA, 15 nt, Human
ccgggcacucagaag

SEQ ID NO: 2961059 - RNA, 22 nt, Human
ccgggaggcagagguugcagug

SEQ ID NO: 2961060 - RNA, 13 nt, Human
ccggcuggccugg

SEQ ID NO: 2961061 - RNA, 23 nt, Human
ccucuguacagagcccacgcccc

SEQ ID NO: 2961062 - RNA, 18 nt, Human
ccucuguacagagcccac

SEQ ID NO: 2961063 - RNA, 17 nt, Human
ccucuguacagagccca

SEQ ID NO: 2961064 - RNA, 16 nt, Human
ccucuguacagagccc

SEQ ID NO: 2961065 - RNA, 15 nt, Human
ccucuguacagagcc

SEQ ID NO: 2961066 - RNA, 14 nt, Human
ccucuguacagagc

SEQ ID NO: 2961067 - RNA, 14 nt, Human
ccucuuagaaaaac

SEQ ID NO: 2961068 - RNA, 23 nt, Human
ccucuuagaugcaguucugaaga

SEQ ID NO: 2961069 - RNA, 14 nt, Human
ccucuuaugggcug

SEQ ID NO: 2961070 - RNA, 16 nt, Human
ccucuuaugggcuggg

SEQ ID NO: 2961071 - RNA, 15 nt, Human
ccucuuaugggcugg

SEQ ID NO: 2961072 - RNA, 20 nt, Human
ccugaacaggauauucucac

SEQ ID NO: 2961073 - RNA, 15 nt, Human
ccugaagucacacag

SEQ ID NO: 2961074 - RNA, 13 nt, Human
ccugaaggccccg

SEQ ID NO: 2961075 - RNA, 16 nt, Human
ccugaagucacacagu

SEQ ID NO: 2961076 - RNA, 17 nt, Human
ccugaagucacacagug

SEQ ID NO: 2961077 - RNA, 17 nt, Human
ccucuuaugggcugggu

SEQ ID NO: 2961078 - RNA, 22 nt, Human
ccucuuuggucuacacugugcu

SEQ ID NO: 2961079 - RNA, 18 nt, Human
ccugaaagaggaaugaag

SEQ ID NO: 2961080 - RNA, 13 nt, Human
ccugaaagaggaa

SEQ ID NO: 2961081 - RNA, 23 nt, Human
ccugaaagaggaaugaaguacuc

SEQ ID NO: 2961082 - RNA, 18 nt, Human
ccugaugcuucuucagag

SEQ ID NO: 2961083 - RNA, 17 nt, Human
ccugaugcuucuucaga

SEQ ID NO: 2961084 - RNA, 22 nt, Human
ccugauuuaauaugcaaagucu

SEQ ID NO: 2961085 - RNA, 23 nt, Human
ccugauugugucucuugguccug

SEQ ID NO: 2961086 - RNA, 14 nt, Human
ccugaugcuucuuc

SEQ ID NO: 2961087 - RNA, 18 nt, Human
ccugaggcuccacuuggu

SEQ ID NO: 2961088 - RNA, 20 nt, Human
ccugaggcuccacuuggucu

SEQ ID NO: 2961089 - RNA, 12 nt, Human
ccugaggcccag

SEQ ID NO: 2961090 - RNA, 14 nt, Human
ccugaggcccagag

SEQ ID NO: 2961091 - RNA, 13 nt, Human
ccugaggcccaga

SEQ ID NO: 2961092 - RNA, 16 nt, Human
ccugacaacacucauu

SEQ ID NO: 2961093 - RNA, 15 nt, Human
ccugacaacacucau

SEQ ID NO: 2961094 - RNA, 14 nt, Human
ccugacaacacuca

SEQ ID NO: 2961095 - RNA, 12 nt, Human
ccugacaacacu

SEQ ID NO: 2961096 - RNA, 17 nt, Human
ccugaggcuccacuugg

SEQ ID NO: 2961097 - RNA, 23 nt, Human
ccugaggcccuucucuccagccc

SEQ ID NO: 2961098 - RNA, 22 nt, Human
ccugaggcccuucucuccagcc

SEQ ID NO: 2961099 - RNA, 21 nt, Human
ccugaggcccuucucuccagc

SEQ ID NO: 2961100 - RNA, 20 nt, Human
ccugaggcccuucucuccag

SEQ ID NO: 2961101 - RNA, 19 nt, Human
ccugaggcccuucucucca

SEQ ID NO: 2961102 - RNA, 17 nt, Human
ccugaggcccuucucuc

SEQ ID NO: 2961103 - RNA, 16 nt, Human
ccugaggcccuucucu

SEQ ID NO: 2961104 - RNA, 23 nt, Human
ccuccugugugugcgccuacagg

SEQ ID NO: 2961105 - RNA, 12 nt, Human
ccucucccauca

SEQ ID NO: 2961106 - RNA, 16 nt, Human
ccucugacacacagcu

SEQ ID NO: 2961107 - RNA, 15 nt, Human
ccucugacacacagc

SEQ ID NO: 2961108 - RNA, 23 nt, Human
ccucugaaaaccaauguucucuc

SEQ ID NO: 2961109 - RNA, 11 nt, Human
ccucuccuggg

SEQ ID NO: 2961110 - RNA, 12 nt, Human
ccucuccugggc

SEQ ID NO: 2961111 - RNA, 13 nt, Human
ccucuccugggca

SEQ ID NO: 2961112 - RNA, 17 nt, Human
ccucugacacacagcuc

SEQ ID NO: 2961113 - RNA, 18 nt, Human
ccucugacacacagcucu

SEQ ID NO: 2961114 - RNA, 15 nt, Human
ccucugcacaagcug

SEQ ID NO: 2961115 - RNA, 11 nt, Human
ccucugcacaa

SEQ ID NO: 2961116 - RNA, 19 nt, Human
ccucugcacaagcugcacc

SEQ ID NO: 2961117 - RNA, 17 nt, Human
ccucugcacaagcugca

SEQ ID NO: 2961118 - RNA, 20 nt, Human
ccucugcacaagcugcaccc

SEQ ID NO: 2961119 - RNA, 22 nt, Human
ccucugcacuccccugcugggu

SEQ ID NO: 2961120 - RNA, 21 nt, Human
ccucugcacuccccugcuggg

SEQ ID NO: 2961121 - RNA, 20 nt, Human
ccucugcacuccccugcugg

SEQ ID NO: 2961122 - RNA, 19 nt, Human
ccucugcacuccccugcug

SEQ ID NO: 2961123 - RNA, 14 nt, Human
ccucugcacucccc

SEQ ID NO: 2961124 - RNA, 12 nt, Human
ccucugggacug

SEQ ID NO: 2961125 - RNA, 21 nt, Human
ccucugcuugccaucccuccc

SEQ ID NO: 2961126 - RNA, 17 nt, Human
ccucugcuugccauccc

SEQ ID NO: 2961127 - RNA, 20 nt, Human
ccucugcuugccaucccucc

SEQ ID NO: 2961128 - RNA, 14 nt, Human
ccucagggucccug

SEQ ID NO: 2961129 - RNA, 11 nt, Human
ccucaggccug

SEQ ID NO: 2961130 - RNA, 21 nt, Human
ccucaggccugggggcugggc

SEQ ID NO: 2961131 - RNA, 14 nt, Human
ccucaggccugggg

SEQ ID NO: 2961132 - RNA, 16 nt, Human
ccucagcauccuggca

SEQ ID NO: 2961133 - RNA, 17 nt, Human
ccucagcauccuggcac

SEQ ID NO: 2961134 - RNA, 14 nt, Human
ccucagcauccugg

SEQ ID NO: 2961135 - RNA, 20 nt, Human
ccucagaaaacaaggaugaa

SEQ ID NO: 2961136 - RNA, 16 nt, Human
ccucaggugagaagca

SEQ ID NO: 2961137 - RNA, 22 nt, Human
ccucagggucccugguggcagc

SEQ ID NO: 2961138 - RNA, 15 nt, Human
ccucagggucccugg

SEQ ID NO: 2961139 - RNA, 22 nt, Human
ccucaggugauccacccaccuc

SEQ ID NO: 2961140 - RNA, 22 nt, Human
ccucaggugagaagcagaggaa

SEQ ID NO: 2961141 - RNA, 17 nt, Human
ccucaggugauccaccc

SEQ ID NO: 2961142 - RNA, 19 nt, Human
ccucaggugauccacccac

SEQ ID NO: 2961143 - RNA, 15 nt, Human
ccucagucuggcccu

SEQ ID NO: 2961144 - RNA, 15 nt, Human
ccuccccuccucugc

SEQ ID NO: 2961145 - RNA, 14 nt, Human
ccuccccuccucug

SEQ ID NO: 2961146 - RNA, 13 nt, Human
ccuccugggcuaa

SEQ ID NO: 2961147 - RNA, 20 nt, Human
ccuccugggauuggcuguga

SEQ ID NO: 2961148 - RNA, 13 nt, Human
ccuccugugugug

SEQ ID NO: 2961149 - RNA, 15 nt, Human
ccuccugugugugcg

SEQ ID NO: 2961150 - RNA, 22 nt, Human
ccuccugugugugcgccuacag

SEQ ID NO: 2961151 - RNA, 13 nt, Human
ccuccugccucga

SEQ ID NO: 2961152 - RNA, 11 nt, Human
ccuccucugcu

SEQ ID NO: 2961153 - RNA, 12 nt, Human
ccucccugcaau

SEQ ID NO: 2961154 - RNA, 16 nt, Human
ccucccugcaauaaaa

SEQ ID NO: 2961155 - RNA, 16 nt, Human
ccucccucccucuuuc

SEQ ID NO: 2961156 - RNA, 13 nt, Human
ccucccucccucu

SEQ ID NO: 2961157 - RNA, 15 nt, Human
ccucccucccucuuu

SEQ ID NO: 2961158 - RNA, 17 nt, Human
ccuccccuccucugcuu

SEQ ID NO: 2961159 - RNA, 18 nt, Human
ccuccccuccucugcuug

SEQ ID NO: 2961160 - RNA, 21 nt, Human
cugauaaagaugagugagcau

SEQ ID NO: 2961161 - RNA, 23 nt, Human
cugaucauguuuaugagaaacug

SEQ ID NO: 2961162 - RNA, 14 nt, Human
cugaucgcuucucc

SEQ ID NO: 2961163 - RNA, 16 nt, Human
cugauucccugauuua

SEQ ID NO: 2961164 - RNA, 22 nt, Human
cugauucccaagcucugcuccu

SEQ ID NO: 2961165 - RNA, 19 nt, Human
cugauucccaagcucugcu

SEQ ID NO: 2961166 - RNA, 20 nt, Human
cugauucccaagcucugcuc

SEQ ID NO: 2961167 - RNA, 17 nt, Human
cugauucccaagcucug

SEQ ID NO: 2961168 - RNA, 18 nt, Human
cugauucccaagcucugc

SEQ ID NO: 2961169 - RNA, 15 nt, Human
cugauucccaagcuc

SEQ ID NO: 2961170 - RNA, 21 nt, Human
cugauguuccuagugaaagag

SEQ ID NO: 2961171 - RNA, 20 nt, Human
cugauguuccuagugaaaga

SEQ ID NO: 2961172 - RNA, 18 nt, Human
cugauguuccuagugaaa

SEQ ID NO: 2961173 - RNA, 13 nt, Human
cugauguuccuag

SEQ ID NO: 2961174 - RNA, 22 nt, Human
cugagugggggaucacagccuc

SEQ ID NO: 2961175 - RNA, 13 nt, Human
cugauaaagauga

SEQ ID NO: 2961176 - RNA, 16 nt, Human
cugagucugaaggcug

SEQ ID NO: 2961177 - RNA, 15 nt, Human
cugagucugaaggcu

SEQ ID NO: 2961178 - RNA, 14 nt, Human
cugagucugaaggc

SEQ ID NO: 2961179 - RNA, 13 nt, Human
cugagucugaagg

SEQ ID NO: 2961180 - RNA, 22 nt, Human
cugcacagcaggcugccagugc

SEQ ID NO: 2961181 - RNA, 21 nt, Human
cugcacagcaggcugccagug

SEQ ID NO: 2961182 - RNA, 20 nt, Human
cugcacagcaggcugccagu

SEQ ID NO: 2961183 - RNA, 16 nt, Human
cugcacaagcugcacc

SEQ ID NO: 2961184 - RNA, 15 nt, Human
cugcacaagcugcac

SEQ ID NO: 2961185 - RNA, 14 nt, Human
cugcacaagcugca

SEQ ID NO: 2961186 - RNA, 13 nt, Human
cugcacaagcugc

SEQ ID NO: 2961187 - RNA, 18 nt, Human
cugcacccucaggcaggu

SEQ ID NO: 2961188 - RNA, 16 nt, Human
cugcacccucaggcag

SEQ ID NO: 2961189 - RNA, 17 nt, Human
cugcacccucaggcagg

SEQ ID NO: 2961190 - RNA, 22 nt, Human
cugcagccucaaccuccugggc

SEQ ID NO: 2961191 - RNA, 19 nt, Human
cugcagccucaaccuccug

SEQ ID NO: 2961192 - RNA, 20 nt, Human
cugcagccucaaccuccugg

SEQ ID NO: 2961193 - RNA, 17 nt, Human
cugcagggacagagcau

SEQ ID NO: 2961194 - RNA, 22 nt, Human
cugcagggaguccgaaagggac

SEQ ID NO: 2961195 - RNA, 11 nt, Human
cugcagccuca

SEQ ID NO: 2961196 - RNA, 14 nt, Human
cugcacuugcagac

SEQ ID NO: 2961197 - RNA, 16 nt, Human
cugcacuugcagacuc

SEQ ID NO: 2961198 - RNA, 17 nt, Human
cugcacuugcagacucu

SEQ ID NO: 2961199 - RNA, 19 nt, Human
cugcaccggcuggccuggc

SEQ ID NO: 2961200 - RNA, 18 nt, Human
cugcaccggcuggccugg

SEQ ID NO: 2961201 - RNA, 17 nt, Human
cugcaccggcuggccug

SEQ ID NO: 2961202 - RNA, 23 nt, Human
cugcagaagacaguauggcagcu

SEQ ID NO: 2961203 - RNA, 13 nt, Human
cugcagaagacag

SEQ ID NO: 2961204 - RNA, 16 nt, Human
cugccauuucugagau

SEQ ID NO: 2961205 - RNA, 13 nt, Human
cugcccaggcccc

SEQ ID NO: 2961206 - RNA, 16 nt, Human
cugccccuggcagccc

SEQ ID NO: 2961207 - RNA, 15 nt, Human
cugccccuggcagcc

SEQ ID NO: 2961208 - RNA, 14 nt, Human
cugccccuggcagc

SEQ ID NO: 2961209 - RNA, 16 nt, Human
cugcccugcccaccug

SEQ ID NO: 2961210 - RNA, 15 nt, Human
cugcccugcccaccu

SEQ ID NO: 2961211 - RNA, 14 nt, Human
cugcccugcccacc

SEQ ID NO: 2961212 - RNA, 13 nt, Human
cugcccugcccac

SEQ ID NO: 2961213 - RNA, 11 nt, Human
cugcccggcug

SEQ ID NO: 2961214 - RNA, 15 nt, Human
cugcccggcugcgga

SEQ ID NO: 2961215 - RNA, 19 nt, Human
cugcccuccaagaccuucu

SEQ ID NO: 2961216 - RNA, 15 nt, Human
cugccacccugggga

SEQ ID NO: 2961217 - RNA, 16 nt, Human
cugccacccuggggag

SEQ ID NO: 2961218 - RNA, 20 nt, Human
cugccacccuggggagaaag

SEQ ID NO: 2961219 - RNA, 14 nt, Human
cugccacccugggg

SEQ ID NO: 2961220 - RNA, 19 nt, Human
cugccaugccagcuuaucu

SEQ ID NO: 2961221 - RNA, 17 nt, Human
cugccaugccagcuuau

SEQ ID NO: 2961222 - RNA, 15 nt, Human
cugccaugccagcuu

SEQ ID NO: 2961223 - RNA, 19 nt, Human
cugccagccgagauagcca

SEQ ID NO: 2961224 - RNA, 19 nt, Human
cugccaggaagccagcagg

SEQ ID NO: 2961225 - RNA, 18 nt, Human
cugccaggaagccagcag

SEQ ID NO: 2961226 - RNA, 16 nt, Human
cugccaggaagccagc

SEQ ID NO: 2961227 - RNA, 15 nt, Human
cugccaggaagccag

SEQ ID NO: 2961228 - RNA, 14 nt, Human
cugcuccagcuguu

SEQ ID NO: 2961229 - RNA, 16 nt, Human
cugcgguccacccagg

SEQ ID NO: 2961230 - RNA, 21 nt, Human
cugcggaaugaaccacaucuu

SEQ ID NO: 2961231 - RNA, 15 nt, Human
cugcgguccacccag

SEQ ID NO: 2961232 - RNA, 20 nt, Human
cugcggaaugaaccacaucu

SEQ ID NO: 2961233 - RNA, 16 nt, Human
cugcuccucuccccag

SEQ ID NO: 2961234 - RNA, 17 nt, Human
cugcuccucuccccagc

SEQ ID NO: 2961235 - RNA, 15 nt, Human
cugcuccagcuguuc

SEQ ID NO: 2961236 - RNA, 18 nt, Human
cugcuccucuccccagca

SEQ ID NO: 2961237 - RNA, 23 nt, Human
cugccugaagucacacagugagu

SEQ ID NO: 2961238 - RNA, 13 nt, Human
cugccucuucucu

SEQ ID NO: 2961239 - RNA, 13 nt, Human
cugccugcccagg

SEQ ID NO: 2961240 - RNA, 14 nt, Human
cugccugcccaggc

SEQ ID NO: 2961241 - RNA, 14 nt, Human
cugccucagccucc

SEQ ID NO: 2961242 - RNA, 13 nt, Human
cugccucagccuc

SEQ ID NO: 2961243 - RNA, 15 nt, Human
cugccuaagugcagc

SEQ ID NO: 2961244 - RNA, 17 nt, Human
cuggagcuagaauuuga

SEQ ID NO: 2961245 - RNA, 22 nt, Human
cuggagcuagaauuugauaugu

SEQ ID NO: 2961246 - RNA, 16 nt, Human
cuggagcuagaauuug

SEQ ID NO: 2961247 - RNA, 13 nt, Human
cugcugaaacaac

SEQ ID NO: 2961248 - RNA, 22 nt, Human
cuggacacuucacgcccuuggc

SEQ ID NO: 2961249 - RNA, 20 nt, Human
cuggacacuucacgcccuug

SEQ ID NO: 2961250 - RNA, 14 nt, Human
cuggaaugcagugg

SEQ ID NO: 2961251 - RNA, 15 nt, Human
cuggaaugcaguggu

SEQ ID NO: 2961252 - RNA, 14 nt, Human
cuggaagcacagcu

SEQ ID NO: 2961253 - RNA, 18 nt, Human
cuggaagcacagcuucau

SEQ ID NO: 2961254 - RNA, 15 nt, Human
cuggaagcacagcuu

SEQ ID NO: 2961255 - RNA, 23 nt, Human
cuggaauaauccuaaacauauga

SEQ ID NO: 2961256 - RNA, 23 nt, Human
cuggccuagcauacguacacauu

SEQ ID NO: 2961257 - RNA, 20 nt, Human
cuggcccagggcaucuggga

SEQ ID NO: 2961258 - RNA, 13 nt, Human
cuggcccacugca

SEQ ID NO: 2961259 - RNA, 12 nt, Human
cuggcccacugc

SEQ ID NO: 2961260 - RNA, 17 nt, Human
cuggccuagcauacgua

SEQ ID NO: 2961261 - RNA, 17 nt, Human
cuggcccagggcaucug

SEQ ID NO: 2961262 - RNA, 18 nt, Human
cuggcccagggcaucugg

SEQ ID NO: 2961263 - RNA, 14 nt, Human
cuggcccagggcau

SEQ ID NO: 2961264 - RNA, 13 nt, Human
cuggcccagggca

SEQ ID NO: 2961265 - RNA, 21 nt, Human
cuggccagaugcaccagcccu

SEQ ID NO: 2961266 - RNA, 17 nt, Human
cuggccagaugcaccag

SEQ ID NO: 2961267 - RNA, 18 nt, Human
cuggccagaugcaccagc

SEQ ID NO: 2961268 - RNA, 19 nt, Human
cuggccagaugcaccagcc

SEQ ID NO: 2961269 - RNA, 20 nt, Human
cuggccagaugcaccagccc

SEQ ID NO: 2961270 - RNA, 17 nt, Human
cuggcacugcuuccagu

SEQ ID NO: 2961271 - RNA, 16 nt, Human
cuggcacugcuuccag

SEQ ID NO: 2961272 - RNA, 15 nt, Human
cuggcacugcuucca

SEQ ID NO: 2961273 - RNA, 16 nt, Human
cuggccagaugcacca

SEQ ID NO: 2961274 - RNA, 16 nt, Human
cuggccaacgggguga

SEQ ID NO: 2961275 - RNA, 15 nt, Human
cuggauggggcugca

SEQ ID NO: 2961276 - RNA, 13 nt, Human
cuggauuaaacuu

SEQ ID NO: 2961277 - RNA, 23 nt, Human
cuggauuaaacuuaaucuaaaug

SEQ ID NO: 2961278 - RNA, 16 nt, Human
cuggauggggcugcac

SEQ ID NO: 2961279 - RNA, 12 nt, Human
cuggcaaagcag

SEQ ID NO: 2961280 - RNA, 16 nt, Human
cuggcaaagcagaaug

SEQ ID NO: 2961281 - RNA, 19 nt, Human
cuggcaaagcagaauguga

SEQ ID NO: 2961282 - RNA, 23 nt, Human
cuggcaaacagggccucugcgga

SEQ ID NO: 2961283 - RNA, 20 nt, Human
cuggcaaacagggccucugc

SEQ ID NO: 2961284 - RNA, 21 nt, Human
cuggcaaacagggccucugcg

SEQ ID NO: 2961285 - RNA, 16 nt, Human
cuggcaaacagggccu

SEQ ID NO: 2961286 - RNA, 17 nt, Human
cuggcaaacagggccuc

SEQ ID NO: 2961287 - RNA, 19 nt, Human
cuggcaaacagggccucug

SEQ ID NO: 2961288 - RNA, 19 nt, Human
cuggcacaguuuucugaga

SEQ ID NO: 2961289 - RNA, 18 nt, Human
cuggcacaguuuucugag

SEQ ID NO: 2961290 - RNA, 14 nt, Human
cuggcacugcuucc

SEQ ID NO: 2961291 - RNA, 13 nt, Human
cuggcacugcuuc

SEQ ID NO: 2961292 - RNA, 23 nt, Human
cuggcacuauaauguaagcucua

SEQ ID NO: 2961293 - RNA, 22 nt, Human
cuggcacuauaauguaagcucu

SEQ ID NO: 2961294 - RNA, 13 nt, Human
cuggccugagcug

SEQ ID NO: 2961295 - RNA, 17 nt, Human
cuggcucuuccaggcug

SEQ ID NO: 2961296 - RNA, 20 nt, Human
cuggcucuuccaggcuggga

SEQ ID NO: 2961297 - RNA, 19 nt, Human
cuggcucuuccaggcuggg

SEQ ID NO: 2961298 - RNA, 18 nt, Human
cuggcucuuccaggcugg

SEQ ID NO: 2961299 - RNA, 19 nt, Human
cuggcuguuggcugggggc

SEQ ID NO: 2961300 - RNA, 22 nt, Human
cuggcuggguggcaccagcagc

SEQ ID NO: 2961301 - RNA, 21 nt, Human
cuggcuggguggcaccagcag

SEQ ID NO: 2961302 - RNA, 18 nt, Human
cuggcuguuggcuggggg

SEQ ID NO: 2961303 - RNA, 20 nt, Human
cuggcuguuggcugggggcc

SEQ ID NO: 2961304 - RNA, 20 nt, Human
cugggcaaugugauaaaacc

SEQ ID NO: 2961305 - RNA, 16 nt, Human
cugggagugagcuggu

SEQ ID NO: 2961306 - RNA, 13 nt, Human
cugggagugagcu

SEQ ID NO: 2961307 - RNA, 12 nt, Human
cugggagugagc

SEQ ID NO: 2961308 - RNA, 18 nt, Human
cugggaggaaccgagggg

SEQ ID NO: 2961309 - RNA, 18 nt, Human
cugggaggucaaggcugc

SEQ ID NO: 2961310 - RNA, 16 nt, Human
cugggagcuuuuguag

SEQ ID NO: 2961311 - RNA, 12 nt, Human
cugggaggaacc

SEQ ID NO: 2961312 - RNA, 22 nt, Human
cugggaacccaaguccaagcau

SEQ ID NO: 2961313 - RNA, 21 nt, Human
cugggcuucaguggcagcugc

SEQ ID NO: 2961314 - RNA, 22 nt, Human
cugggcuucaguggcagcugcu

SEQ ID NO: 2961315 - RNA, 23 nt, Human
cugggcuucaguggcagcugcuu

SEQ ID NO: 2961316 - RNA, 13 nt, Human
cugggcuugggga

SEQ ID NO: 2961317 - RNA, 20 nt, Human
cugggcuuggggaccagagc

SEQ ID NO: 2961318 - RNA, 17 nt, Human
cugggcuuggggaccag

SEQ ID NO: 2961319 - RNA, 21 nt, Human
cugggcuuggggaccagagcu

SEQ ID NO: 2961320 - RNA, 18 nt, Human
cugggcuucaguggcagc

SEQ ID NO: 2961321 - RNA, 17 nt, Human
cugggcuucaguggcag

SEQ ID NO: 2961322 - RNA, 19 nt, Human
cugggcuucaguggcagcu

SEQ ID NO: 2961323 - RNA, 20 nt, Human
cugggcuucaguggcagcug

SEQ ID NO: 2961324 - RNA, 19 nt, Human
cuggguacuuguggacaca

SEQ ID NO: 2961325 - RNA, 21 nt, Human
cuggguacuuguggacacagc

SEQ ID NO: 2961326 - RNA, 23 nt, Human
cuggguacuuguggacacagcuc

SEQ ID NO: 2961327 - RNA, 20 nt, Human
cuggguacuuguggacacag

SEQ ID NO: 2961328 - RNA, 23 nt, Human
cugggguggggaccucaggccug

SEQ ID NO: 2961329 - RNA, 22 nt, Human
cugggguggggaccucaggccu

SEQ ID NO: 2961330 - RNA, 21 nt, Human
cugggguggggaccucaggcc

SEQ ID NO: 2961331 - RNA, 13 nt, Human
cugggggccucag

SEQ ID NO: 2961332 - RNA, 17 nt, Human
cugggggccucagugcc

SEQ ID NO: 2961333 - RNA, 18 nt, Human
cugggggccucagugcca

SEQ ID NO: 2961334 - RNA, 17 nt, Human
cugggguggggaccuca

SEQ ID NO: 2961335 - RNA, 19 nt, Human
cugggguggggaccucagg

SEQ ID NO: 2961336 - RNA, 18 nt, Human
cugggguggggaccucag

SEQ ID NO: 2961337 - RNA, 19 nt, Human
cugguggcagugggagcug

SEQ ID NO: 2961338 - RNA, 23 nt, Human
cugguggcagugggagcugccug

SEQ ID NO: 2961339 - RNA, 19 nt, Human
cuggguucuacccaggugc

SEQ ID NO: 2961340 - RNA, 13 nt, Human
cuggguuggaggg

SEQ ID NO: 2961341 - RNA, 17 nt, Human
cugguccauagagagca

SEQ ID NO: 2961342 - RNA, 15 nt, Human
cugguccauagagag

SEQ ID NO: 2961343 - RNA, 15 nt, Human
cuggucccacucagu

SEQ ID NO: 2961344 - RNA, 18 nt, Human
cuggucccacucagucca

SEQ ID NO: 2961345 - RNA, 14 nt, Human
cuggucccacucag

SEQ ID NO: 2961346 - RNA, 18 nt, Human
cugguccauagagagcaa

SEQ ID NO: 2961347 - RNA, 21 nt, Human
cuggucccagccagcaguuca

SEQ ID NO: 2961348 - RNA, 14 nt, Human
cugaagucacacag

SEQ ID NO: 2961349 - RNA, 15 nt, Human
cugaagucacacagu

SEQ ID NO: 2961350 - RNA, 24 nt, Human
cugaagucuuuguacagacaacaa

SEQ ID NO: 2961351 - RNA, 16 nt, Human
cugaauacagaggcaa

SEQ ID NO: 2961352 - RNA, 19 nt, Human
cugaagacucauucuucug

SEQ ID NO: 2961353 - RNA, 21 nt, Human
cugaagacucauucuucugua

SEQ ID NO: 2961354 - RNA, 21 nt, Human
cugaacuuggcgcugccccug

SEQ ID NO: 2961355 - RNA, 16 nt, Human
cugaacuuggcgcugc

SEQ ID NO: 2961356 - RNA, 15 nt, Human
cugaacuuggcgcug

SEQ ID NO: 2961357 - RNA, 16 nt, Human
cugaacuucagagcau

SEQ ID NO: 2961358 - RNA, 21 nt, Human
cugaaccuggguaacuaggga

SEQ ID NO: 2961359 - RNA, 18 nt, Human
cucuuugggccuggcucc

SEQ ID NO: 2961360 - RNA, 21 nt, Human
cucuuuggucuacacugugcu

SEQ ID NO: 2961361 - RNA, 19 nt, Human
cucuuuggucuacacugug

SEQ ID NO: 2961362 - RNA, 11 nt, Human
cugacccacug

SEQ ID NO: 2961363 - RNA, 17 nt, Human
cugacauuguuggccaa

SEQ ID NO: 2961364 - RNA, 20 nt, Human
cugacaggcaaugcuggcug

SEQ ID NO: 2961365 - RNA, 16 nt, Human
cugacaggcaaugcug

SEQ ID NO: 2961366 - RNA, 17 nt, Human
cugacaggcaaugcugg

SEQ ID NO: 2961367 - RNA, 18 nt, Human
cugacaggcaaugcuggc

SEQ ID NO: 2961368 - RNA, 19 nt, Human
cugacaggcaaugcuggcu

SEQ ID NO: 2961369 - RNA, 11 nt, Human
cugacaggcaa

SEQ ID NO: 2961370 - RNA, 21 nt, Human
cugacagacacaggcccggcu

SEQ ID NO: 2961371 - RNA, 19 nt, Human
cugacagacacaggcccgg

SEQ ID NO: 2961372 - RNA, 23 nt, Human
cugaauuuaaauagcuuuuuucu

SEQ ID NO: 2961373 - RNA, 14 nt, Human
cugaauuuaaauag

SEQ ID NO: 2961374 - RNA, 18 nt, Human
cugaauuuaaauagcuuu

SEQ ID NO: 2961375 - RNA, 19 nt, Human
cucuggcagcucagagagg

SEQ ID NO: 2961376 - RNA, 18 nt, Human
cucuggcagcucagagag

SEQ ID NO: 2961377 - RNA, 17 nt, Human
cucuggcagcucagaga

SEQ ID NO: 2961378 - RNA, 13 nt, Human
cucuuaaaaccca

SEQ ID NO: 2961379 - RNA, 24 nt, Human
cucuuaaaacccaagugccuuagc

SEQ ID NO: 2961380 - RNA, 12 nt, Human
cucuucuccagg

SEQ ID NO: 2961381 - RNA, 23 nt, Human
cucuuccaggcugggagagccuu

SEQ ID NO: 2961382 - RNA, 21 nt, Human
cucuuccaggcugggagagcc

SEQ ID NO: 2961383 - RNA, 22 nt, Human
cucuuccaggcugggagagccu

SEQ ID NO: 2961384 - RNA, 19 nt, Human
cucuugguccugcugcagu

SEQ ID NO: 2961385 - RNA, 18 nt, Human
cucuugguccugcugcag

SEQ ID NO: 2961386 - RNA, 16 nt, Human
cucuugaccucaggug

SEQ ID NO: 2961387 - RNA, 13 nt, Human
cucuugaccucag

SEQ ID NO: 2961388 - RNA, 15 nt, Human
cucuugaccucaggu

SEQ ID NO: 2961389 - RNA, 17 nt, Human
cucuuucuauuguuucu

SEQ ID NO: 2961390 - RNA, 18 nt, Human
cucuuuggacacucacac

SEQ ID NO: 2961391 - RNA, 15 nt, Human
cucuuuggacacuca

SEQ ID NO: 2961392 - RNA, 17 nt, Human
cucuuuccaucuacccu

SEQ ID NO: 2961393 - RNA, 22 nt, Human
cucuccuguaccucuugagccu

SEQ ID NO: 2961394 - RNA, 17 nt, Human
cucuccuguaccucuug

SEQ ID NO: 2961395 - RNA, 18 nt, Human
cucuccuguaccucuuga

SEQ ID NO: 2961396 - RNA, 21 nt, Human
cucuccugggcagcugccucc

SEQ ID NO: 2961397 - RNA, 13 nt, Human
cucuccuguaccu

SEQ ID NO: 2961398 - RNA, 14 nt, Human
cucuccuguaccuc

SEQ ID NO: 2961399 - RNA, 15 nt, Human
cucuccuguaccucu

SEQ ID NO: 2961400 - RNA, 14 nt, Human
cucucucacuccuu

SEQ ID NO: 2961401 - RNA, 12 nt, Human
cucucucaggcc

SEQ ID NO: 2961402 - RNA, 16 nt, Human
cucucucacuccuuga

SEQ ID NO: 2961403 - RNA, 15 nt, Human
cucucucacuccuug

SEQ ID NO: 2961404 - RNA, 22 nt, Human
cucucaggccagcugcuugggc

SEQ ID NO: 2961405 - RNA, 23 nt, Human
cucucaggccagcugcuugggcu

SEQ ID NO: 2961406 - RNA, 13 nt, Human
cucucccaucacu

SEQ ID NO: 2961407 - RNA, 20 nt, Human
cucucccaucacuucccuac

SEQ ID NO: 2961408 - RNA, 14 nt, Human
cucucccaucacuu

SEQ ID NO: 2961409 - RNA, 18 nt, Human
cucucccaucacuucccu

SEQ ID NO: 2961410 - RNA, 12 nt, Human
cucuccagcccc

SEQ ID NO: 2961411 - RNA, 13 nt, Human
cucuccagccccu

SEQ ID NO: 2961412 - RNA, 17 nt, Human
cucugcggagcacacug

SEQ ID NO: 2961413 - RNA, 18 nt, Human
cucugcggagcacacugg

SEQ ID NO: 2961414 - RNA, 19 nt, Human
cucugcggagcacacuggc

SEQ ID NO: 2961415 - RNA, 21 nt, Human
cucugcggagcacacuggcuc

SEQ ID NO: 2961416 - RNA, 23 nt, Human
cucugcggagcacacuggcucac

SEQ ID NO: 2961417 - RNA, 14 nt, Human
cucugccucugaca

SEQ ID NO: 2961418 - RNA, 23 nt, Human
cucugcccuccaagaccuucucc

SEQ ID NO: 2961419 - RNA, 16 nt, Human
cucugcccuccaagac

SEQ ID NO: 2961420 - RNA, 15 nt, Human
cucugcccuccaaga

SEQ ID NO: 2961421 - RNA, 14 nt, Human
cucugcccuccaag

SEQ ID NO: 2961422 - RNA, 22 nt, Human
cucugcaagaauugaagcagga

SEQ ID NO: 2961423 - RNA, 23 nt, Human
cucugcauacucauuaggauggc

SEQ ID NO: 2961424 - RNA, 11 nt, Human
cuccacccugc

SEQ ID NO: 2961425 - RNA, 12 nt, Human
cuccacccugcu

SEQ ID NO: 2961426 - RNA, 14 nt, Human
cuccaccucccugc

SEQ ID NO: 2961427 - RNA, 15 nt, Human
cuccaccucccugca

SEQ ID NO: 2961428 - RNA, 16 nt, Human
cuccaccucccugcaa

SEQ ID NO: 2961429 - RNA, 17 nt, Human
cuccaccucccugcaau

SEQ ID NO: 2961430 - RNA, 21 nt, Human
cuccaccugccagggacagag

SEQ ID NO: 2961431 - RNA, 18 nt, Human
cuccaccugccagggaca

SEQ ID NO: 2961432 - RNA, 17 nt, Human
cuccaccugccagggac

SEQ ID NO: 2961433 - RNA, 15 nt, Human
cuccaccugccaggg

SEQ ID NO: 2961434 - RNA, 19 nt, Human
cuccagcucaccagcccca

SEQ ID NO: 2961435 - RNA, 20 nt, Human
cuccagcucaccagccccag

SEQ ID NO: 2961436 - RNA, 19 nt, Human
cuccagcuguucagcuggu

SEQ ID NO: 2961437 - RNA, 18 nt, Human
cuccagcuguucagcugg

SEQ ID NO: 2961438 - RNA, 13 nt, Human
cuccagcuguuca

SEQ ID NO: 2961439 - RNA, 11 nt, Human
cuccaggcucc

SEQ ID NO: 2961440 - RNA, 21 nt, Human
cuccauccugaggcuccacuu

SEQ ID NO: 2961441 - RNA, 20 nt, Human
cuccauccugaggcuccacu

SEQ ID NO: 2961442 - RNA, 23 nt, Human
cuccauccugaggcuccacuugg

SEQ ID NO: 2961443 - RNA, 14 nt, Human
cuccaugugggcua

SEQ ID NO: 2961444 - RNA, 15 nt, Human
cucccaggcauuccc

SEQ ID NO: 2961445 - RNA, 21 nt, Human
cucccaaggggcccaaauucu

SEQ ID NO: 2961446 - RNA, 22 nt, Human
cucccaaggggcccaaauucuu

SEQ ID NO: 2961447 - RNA, 22 nt, Human
cucccaggcauuccccaggagg

SEQ ID NO: 2961448 - RNA, 17 nt, Human
cucccagucauuuaaua

SEQ ID NO: 2961449 - RNA, 21 nt, Human
cucccaggcauuccccaggag

SEQ ID NO: 2961450 - RNA, 20 nt, Human
cucccaggcauuccccagga

SEQ ID NO: 2961451 - RNA, 19 nt, Human
cucccaggcauuccccagg

SEQ ID NO: 2961452 - RNA, 17 nt, Human
cucccaggcauucccca

SEQ ID NO: 2961453 - RNA, 17 nt, Human
cucauuaggauggcuag

SEQ ID NO: 2961454 - RNA, 18 nt, Human
cucauuaggauggcuagu

SEQ ID NO: 2961455 - RNA, 21 nt, Human
cucauuagcauuuugcuaaau

SEQ ID NO: 2961456 - RNA, 14 nt, Human
cucauauuuucaug

SEQ ID NO: 2961457 - RNA, 16 nt, Human
cucauugaccugaggc

SEQ ID NO: 2961458 - RNA, 23 nt, Human
cucauucuucuguacgucugaca

SEQ ID NO: 2961459 - RNA, 15 nt, Human
cucauugaccugagg

SEQ ID NO: 2961460 - RNA, 13 nt, Human
cucauugaccuga

SEQ ID NO: 2961461 - RNA, 17 nt, Human
cucauucauuacuaaaa

SEQ ID NO: 2961462 - RNA, 13 nt, Human
cucauucauuacu

SEQ ID NO: 2961463 - RNA, 13 nt, Human
cucauucuucugu

SEQ ID NO: 2961464 - RNA, 14 nt, Human
cucauucuucugua

SEQ ID NO: 2961465 - RNA, 12 nt, Human
cucauucuucug

SEQ ID NO: 2961466 - RNA, 19 nt, Human
cucaggugucccugcacuu

SEQ ID NO: 2961467 - RNA, 17 nt, Human
cucaggugucccugcac

SEQ ID NO: 2961468 - RNA, 18 nt, Human
cucaggugucccugcacu

SEQ ID NO: 2961469 - RNA, 20 nt, Human
cucauaguaugguggcuggg

SEQ ID NO: 2961470 - RNA, 18 nt, Human
cucauaguaugguggcug

SEQ ID NO: 2961471 - RNA, 19 nt, Human
cucauaguaugguggcugg

SEQ ID NO: 2961472 - RNA, 23 nt, Human
cuaaaagguaugcaaucaaaucu

SEQ ID NO: 2961473 - RNA, 12 nt, Human
cucagggucccu

SEQ ID NO: 2961474 - RNA, 14 nt, Human
cucagggucccugg

SEQ ID NO: 2961475 - RNA, 15 nt, Human
cucaggugucccugc

SEQ ID NO: 2961476 - RNA, 16 nt, Human
cucaggugucccugca

SEQ ID NO: 2961477 - RNA, 23 nt, Human
cucagguggggucacucuggcag

SEQ ID NO: 2961478 - RNA, 22 nt, Human
cucagguggggucacucuggca

SEQ ID NO: 2961479 - RNA, 12 nt, Human
cuccugcaggca

SEQ ID NO: 2961480 - RNA, 14 nt, Human
cuccugcaggcagc

SEQ ID NO: 2961481 - RNA, 13 nt, Human
cuccugcaggcag

SEQ ID NO: 2961482 - RNA, 14 nt, Human
cuccucagaucuuc

SEQ ID NO: 2961483 - RNA, 12 nt, Human
cuccucagaucu

SEQ ID NO: 2961484 - RNA, 23 nt, Human
cucccuucccaccucucucacuc

SEQ ID NO: 2961485 - RNA, 10 nt, Human
cucccuuccu

SEQ ID NO: 2961486 - RNA, 18 nt, Human
cucccaucucacacauga

SEQ ID NO: 2961487 - RNA, 15 nt, Human
cucccaucucacaca

SEQ ID NO: 2961488 - RNA, 14 nt, Human
cucccaucucacac

SEQ ID NO: 2961489 - RNA, 14 nt, Human
cucccuuccucuuu

SEQ ID NO: 2961490 - RNA, 22 nt, Human
cucccuuccuaugcuguucacu

SEQ ID NO: 2961491 - RNA, 13 nt, Human
cucccuuccucuu

SEQ ID NO: 2961492 - RNA, 16 nt, Human
cucccuucucuucaca

SEQ ID NO: 2961493 - RNA, 20 nt, Human
cuccuaggacccgucuccag

SEQ ID NO: 2961494 - RNA, 21 nt, Human
cuccuaggacccgucuccagc

SEQ ID NO: 2961495 - RNA, 22 nt, Human
cuccuaggacccgucuccagcu

SEQ ID NO: 2961496 - RNA, 13 nt, Human
cucccuuucaaca

SEQ ID NO: 2961497 - RNA, 12 nt, Human
cucccuuucaac

SEQ ID NO: 2961498 - RNA, 17 nt, Human
cucccuuggauuguccc

SEQ ID NO: 2961499 - RNA, 15 nt, Human
cuccugugucuugca

SEQ ID NO: 2961500 - RNA, 23 nt, Human
cuccugugucuugcaauggcagc

SEQ ID NO: 2961501 - RNA, 11 nt, Human
cuccugugugu

SEQ ID NO: 2961502 - RNA, 22 nt, Human
cuccugcaggcagccaggccac

SEQ ID NO: 2961503 - RNA, 21 nt, Human
cuccugcaggcagccaggcca

SEQ ID NO: 2961504 - RNA, 15 nt, Human
cuccugcaggcagcc

SEQ ID NO: 2961505 - RNA, 21 nt, Human
cuccuucaccuuuguccccac

SEQ ID NO: 2961506 - RNA, 19 nt, Human
cuccuucaccuuugucccc

SEQ ID NO: 2961507 - RNA, 16 nt, Human
cuccuucaccuuuguc

SEQ ID NO: 2961508 - RNA, 14 nt, Human
cuccuucaccuuug

SEQ ID NO: 2961509 - RNA, 21 nt, Human
cuccuugaaaacacuguucuc

SEQ ID NO: 2961510 - RNA, 11 nt, Human
cuccuucuucc

SEQ ID NO: 2961511 - RNA, 16 nt, Human
cucgaacuggcugcaa

SEQ ID NO: 2961512 - RNA, 13 nt, Human
cuccuucaccuuu

SEQ ID NO: 2961513 - RNA, 14 nt, Human
cuccuucuguccua

SEQ ID NO: 2961514 - RNA, 15 nt, Human
cuccuucuguccuac

SEQ ID NO: 2961515 - RNA, 20 nt, Human
cuccuucuguccuacucugu

SEQ ID NO: 2961516 - RNA, 20 nt, Human
cucgaguuacagacaaagcg

SEQ ID NO: 2961517 - RNA, 16 nt, Human
cucgaguuacagacaa

SEQ ID NO: 2961518 - RNA, 15 nt, Human
cucgcgacaaugcaa

SEQ ID NO: 2961519 - RNA, 13 nt, Human
cucgcgacaaugc

SEQ ID NO: 2961520 - RNA, 13 nt, Human
cucuaaauucuuu

SEQ ID NO: 2961521 - RNA, 17 nt, Human
cucuaaauucuuucauu

SEQ ID NO: 2961522 - RNA, 21 nt, Human
cucggaccccacuccggcccu

SEQ ID NO: 2961523 - RNA, 19 nt, Human
cucggaccccacuccggcc

SEQ ID NO: 2961524 - RNA, 12 nt, Human
cucggagaagag

SEQ ID NO: 2961525 - RNA, 20 nt, Human
cucggagaagagcuguucac

SEQ ID NO: 2961526 - RNA, 13 nt, Human
cucggagaagagc

SEQ ID NO: 2961527 - RNA, 12 nt, Human
cuucagugccuu

SEQ ID NO: 2961528 - RNA, 11 nt, Human
cuucagugccu

SEQ ID NO: 2961529 - RNA, 18 nt, Human
cuucauuuccugugucuu

SEQ ID NO: 2961530 - RNA, 14 nt, Human
cuucagugccuuau

SEQ ID NO: 2961531 - RNA, 13 nt, Human
cuucagugccuua

SEQ ID NO: 2961532 - RNA, 23 nt, Human
cuuccacaagagcccaggccucc

SEQ ID NO: 2961533 - RNA, 22 nt, Human
cuuccacaagagcccaggccuc

SEQ ID NO: 2961534 - RNA, 11 nt, Human
cuucagcugac

SEQ ID NO: 2961535 - RNA, 16 nt, Human
cuucagcgguuuauau

SEQ ID NO: 2961536 - RNA, 18 nt, Human
cuucagcgguuuauauaa

SEQ ID NO: 2961537 - RNA, 14 nt, Human
cuuccagugaggcu

SEQ ID NO: 2961538 - RNA, 15 nt, Human
cuuccagugaggcuc

SEQ ID NO: 2961539 - RNA, 24 nt, Human
cuuccaggggugggacacccugug

SEQ ID NO: 2961540 - RNA, 22 nt, Human
cuuccaggggugggacacccug

SEQ ID NO: 2961541 - RNA, 19 nt, Human
cuuccagauccuggaaauc

SEQ ID NO: 2961542 - RNA, 18 nt, Human
cuucugcuucagccuccc

SEQ ID NO: 2961543 - RNA, 16 nt, Human
cuucugcuucagccuc

SEQ ID NO: 2961544 - RNA, 17 nt, Human
cuucugcuucagccucc

SEQ ID NO: 2961545 - RNA, 15 nt, Human
cuucugccauauucu

SEQ ID NO: 2961546 - RNA, 17 nt, Human
cuucugccauauucugu

SEQ ID NO: 2961547 - RNA, 20 nt, Human
cuucucuacccaucuuaaaa

SEQ ID NO: 2961548 - RNA, 21 nt, Human
cuucugccauauucuguuggc

SEQ ID NO: 2961549 - RNA, 17 nt, Human
cuucuccaggcuguauc

SEQ ID NO: 2961550 - RNA, 14 nt, Human
cuucuccaggcugu

SEQ ID NO: 2961551 - RNA, 14 nt, Human
cuucuccacccugc

SEQ ID NO: 2961552 - RNA, 15 nt, Human
cuucuccacccugcu

SEQ ID NO: 2961553 - RNA, 21 nt, Human
cuucucccccacccccuaggg

SEQ ID NO: 2961554 - RNA, 22 nt, Human
cuucuccuucaccuuugucccc

SEQ ID NO: 2961555 - RNA, 13 nt, Human
cuucgcuccugug

SEQ ID NO: 2961556 - RNA, 14 nt, Human
cuucgcuccugugu

SEQ ID NO: 2961557 - RNA, 15 nt, Human
cuucgcuccuguguc

SEQ ID NO: 2961558 - RNA, 19 nt, Human
cuuccuuggacucauuuua

SEQ ID NO: 2961559 - RNA, 21 nt, Human
cuucgggaggucgaggcagga

SEQ ID NO: 2961560 - RNA, 20 nt, Human
cuucgggaggucgaggcagg

SEQ ID NO: 2961561 - RNA, 17 nt, Human
cuucggccuccauccug

SEQ ID NO: 2961562 - RNA, 18 nt, Human
cuucggccuccauccuga

SEQ ID NO: 2961563 - RNA, 18 nt, Human
cuguuuguuucugaaagg

SEQ ID NO: 2961564 - RNA, 12 nt, Human
cuguuuagauaa

SEQ ID NO: 2961565 - RNA, 17 nt, Human
cuguuuucucuugagag

SEQ ID NO: 2961566 - RNA, 19 nt, Human
cuguuuuauaauuuuguga

SEQ ID NO: 2961567 - RNA, 23 nt, Human
cuguuuguuucugaaagggacgc

SEQ ID NO: 2961568 - RNA, 21 nt, Human
cuguuuguuucugaaagggac

SEQ ID NO: 2961569 - RNA, 21 nt, Human
cuguuuuauuuuaauucaguu

SEQ ID NO: 2961570 - RNA, 14 nt, Human
cuguuuucucuuga

SEQ ID NO: 2961571 - RNA, 13 nt, Human
cuguuuucucuug

SEQ ID NO: 2961572 - RNA, 18 nt, Human
cuuaagaaauuuguggaa

SEQ ID NO: 2961573 - RNA, 19 nt, Human
cuuaauaaacuguggugcu

SEQ ID NO: 2961574 - RNA, 18 nt, Human
cuuaaugccacuaaauug

SEQ ID NO: 2961575 - RNA, 14 nt, Human
cuuaaucuaaaugg

SEQ ID NO: 2961576 - RNA, 16 nt, Human
cuuaaucuaaauggaa

SEQ ID NO: 2961577 - RNA, 23 nt, Human
cuuaaugagacuuuaaaagcauu

SEQ ID NO: 2961578 - RNA, 12 nt, Human
cuuaacuucaca

SEQ ID NO: 2961579 - RNA, 14 nt, Human
cuuaacuucacaua

SEQ ID NO: 2961580 - RNA, 15 nt, Human
cuuaacuucacauau

SEQ ID NO: 2961581 - RNA, 16 nt, Human
cuuaacuucacauauu

SEQ ID NO: 2961582 - RNA, 17 nt, Human
cuuaacuucacauauug

SEQ ID NO: 2961583 - RNA, 22 nt, Human
cuuaacuucacauauugauuuc

SEQ ID NO: 2961584 - RNA, 13 nt, Human
cuuacuguacaug

SEQ ID NO: 2961585 - RNA, 16 nt, Human
cuuacuguacaugaaa

SEQ ID NO: 2961586 - RNA, 22 nt, Human
cuuacgaaaaaaugguagcauu

SEQ ID NO: 2961587 - RNA, 15 nt, Human
cuuacgugaguccug

SEQ ID NO: 2961588 - RNA, 19 nt, Human
cuuacuaguuucccuugca

SEQ ID NO: 2961589 - RNA, 15 nt, Human
cuuagaagucacaca

SEQ ID NO: 2961590 - RNA, 14 nt, Human
cuuagacagucccu

SEQ ID NO: 2961591 - RNA, 16 nt, Human
cuuagacagucccugc

SEQ ID NO: 2961592 - RNA, 15 nt, Human
cuuagacagucccug

SEQ ID NO: 2961593 - RNA, 11 nt, Human
cuuagacaguc

SEQ ID NO: 2961594 - RNA, 19 nt, Human
cuuagacagucccugccaa

SEQ ID NO: 2961595 - RNA, 18 nt, Human
cuuagacagucccugcca

SEQ ID NO: 2961596 - RNA, 17 nt, Human
cuuagacagucccugcc

SEQ ID NO: 2961597 - RNA, 18 nt, Human
cuuagacccucaugcugc

SEQ ID NO: 2961598 - RNA, 14 nt, Human
cuuagacccucaug

SEQ ID NO: 2961599 - RNA, 19 nt, Human
cuuagaugcaguucugaag

SEQ ID NO: 2961600 - RNA, 17 nt, Human
cuuaucuuacgaaaaaa

SEQ ID NO: 2961601 - RNA, 18 nt, Human
cuuauuuaaauagaugac

SEQ ID NO: 2961602 - RNA, 19 nt, Human
cuuauuuaaauagaugaca

SEQ ID NO: 2961603 - RNA, 15 nt, Human
cuuauuuaaugaaag

SEQ ID NO: 2961604 - RNA, 13 nt, Human
cuuauuuaaauag

SEQ ID NO: 2961605 - RNA, 14 nt, Human
cuuauuuaaauaga

SEQ ID NO: 2961606 - RNA, 19 nt, Human
cuuauaggaauugacccac

SEQ ID NO: 2961607 - RNA, 14 nt, Human
cuuauaauuuaaaa

SEQ ID NO: 2961608 - RNA, 21 nt, Human
cuuaggguuaugauuaaguaa

SEQ ID NO: 2961609 - RNA, 17 nt, Human
cuuagguuggcaaaaag

SEQ ID NO: 2961610 - RNA, 13 nt, Human
cuuauaauuuaaa

SEQ ID NO: 2961611 - RNA, 15 nt, Human
cuucuggauauagcu

SEQ ID NO: 2961612 - RNA, 15 nt, Human
cuugaggguugggcu

SEQ ID NO: 2961613 - RNA, 17 nt, Human
cuugaggguugggcugg

SEQ ID NO: 2961614 - RNA, 15 nt, Human
cuugagccugggagg

SEQ ID NO: 2961615 - RNA, 12 nt, Human
cuugagccuggg

SEQ ID NO: 2961616 - RNA, 15 nt, Human
cuugcaauggcagcc

SEQ ID NO: 2961617 - RNA, 16 nt, Human
cuugcaauggcagccu

SEQ ID NO: 2961618 - RNA, 17 nt, Human
cuugcaauggcagccuu

SEQ ID NO: 2961619 - RNA, 18 nt, Human
cuugcaauggcagccuug

SEQ ID NO: 2961620 - RNA, 19 nt, Human
cuugaguugauucagcucu

SEQ ID NO: 2961621 - RNA, 18 nt, Human
cuugaguugauucagcuc

SEQ ID NO: 2961622 - RNA, 20 nt, Human
cuugaguugauucagcucug

SEQ ID NO: 2961623 - RNA, 20 nt, Human
cuugcagacucuacagaggc

SEQ ID NO: 2961624 - RNA, 21 nt, Human
cuugcagacucuacagaggcc

SEQ ID NO: 2961625 - RNA, 23 nt, Human
cuugcaucaauuuuucuuauuuc

SEQ ID NO: 2961626 - RNA, 22 nt, Human
cuugcagcucuccccuucucug

SEQ ID NO: 2961627 - RNA, 14 nt, Human
cuugcaugaggcua

SEQ ID NO: 2961628 - RNA, 13 nt, Human
cuugcaugaggcu

SEQ ID NO: 2961629 - RNA, 14 nt, Human
cuugccaucccucc

SEQ ID NO: 2961630 - RNA, 17 nt, Human
cuugccaucccucccuc

SEQ ID NO: 2961631 - RNA, 15 nt, Human
cuugccaucccuccc

SEQ ID NO: 2961632 - RNA, 16 nt, Human
cuugccaucccucccu

SEQ ID NO: 2961633 - RNA, 19 nt, Human
cuugccaucccucccucca

SEQ ID NO: 2961634 - RNA, 18 nt, Human
cuugcccagccuggaugc

SEQ ID NO: 2961635 - RNA, 18 nt, Human
cuugcccuggugccucac

SEQ ID NO: 2961636 - RNA, 14 nt, Human
cuugcccuguuaaa

SEQ ID NO: 2961637 - RNA, 20 nt, Human
cuuggaagcuccgcuuucua

SEQ ID NO: 2961638 - RNA, 14 nt, Human
cuuggaagcuccgc

SEQ ID NO: 2961639 - RNA, 20 nt, Human
cuugcuugauuguauggugg

SEQ ID NO: 2961640 - RNA, 22 nt, Human
cuugcucugcugacagacacag

SEQ ID NO: 2961641 - RNA, 22 nt, Human
cuugcccuguuaaaagaugaaa

SEQ ID NO: 2961642 - RNA, 17 nt, Human
cuuuaccuuuuuuauac

SEQ ID NO: 2961643 - RNA, 19 nt, Human
cuuuaccuuuuuuauacau

SEQ ID NO: 2961644 - RNA, 20 nt, Human
cuuuaccuuuuuuauacaua

SEQ ID NO: 2961645 - RNA, 20 nt, Human
cuuguugaggguauguuuua

SEQ ID NO: 2961646 - RNA, 21 nt, Human
cuuguugaggguauguuuuau

SEQ ID NO: 2961647 - RNA, 22 nt, Human
cuuguugaggguauguuuuaua

SEQ ID NO: 2961648 - RNA, 16 nt, Human
cuuguugaggguaugu

SEQ ID NO: 2961649 - RNA, 15 nt, Human
cuuguggucccaccc

SEQ ID NO: 2961650 - RNA, 15 nt, Human
cuugucggccccacc

SEQ ID NO: 2961651 - RNA, 20 nt, Human
cuugucggccccaccagugc

SEQ ID NO: 2961652 - RNA, 23 nt, Human
cuugucggccccaccagugccuc

SEQ ID NO: 2961653 - RNA, 21 nt, Human
cuugucggccccaccagugcc

SEQ ID NO: 2961654 - RNA, 22 nt, Human
cuugucggccccaccagugccu

SEQ ID NO: 2961655 - RNA, 19 nt, Human
cuuguggucccaccccaca

SEQ ID NO: 2961656 - RNA, 16 nt, Human
cuuguggucccacccc

SEQ ID NO: 2961657 - RNA, 16 nt, Human
cuuguuaagauaguua

SEQ ID NO: 2961658 - RNA, 22 nt, Human
cuugugguuauaacuuaaugaa

SEQ ID NO: 2961659 - RNA, 20 nt, Human
cuugggccacugugaagaga

SEQ ID NO: 2961660 - RNA, 18 nt, Human
cuugggccacugugaaga

SEQ ID NO: 2961661 - RNA, 16 nt, Human
cuuggacucauuuuaa

SEQ ID NO: 2961662 - RNA, 18 nt, Human
cuuggggcugaugcaguu

SEQ ID NO: 2961663 - RNA, 16 nt, Human
cuuggggcugaugcag

SEQ ID NO: 2961664 - RNA, 16 nt, Human
cuuguacacucauuca

SEQ ID NO: 2961665 - RNA, 17 nt, Human
cuuguacuuuauuuucu

SEQ ID NO: 2961666 - RNA, 14 nt, Human
cuugguuuguaaau

SEQ ID NO: 2961667 - RNA, 15 nt, Human
cuugguuuguaaauu

SEQ ID NO: 2961668 - RNA, 23 nt, Human
cuuugggaggccaaggugggagg

SEQ ID NO: 2961669 - RNA, 23 nt, Human
cuuugugaggaagccgcuggggc

SEQ ID NO: 2961670 - RNA, 13 nt, Human
cuuuguggcuucc

SEQ ID NO: 2961671 - RNA, 19 nt, Human
cuuugugaggaagccgcug

SEQ ID NO: 2961672 - RNA, 12 nt, Human
cuuugugauuuu

SEQ ID NO: 2961673 - RNA, 21 nt, Human
cuuuguucuggcucuuccagg

SEQ ID NO: 2961674 - RNA, 16 nt, Human
cuuuguucuggcucuu

SEQ ID NO: 2961675 - RNA, 12 nt, Human
cuuuggaaagac

SEQ ID NO: 2961676 - RNA, 23 nt, Human
cuuuggaaagacuuuuccaaccc

SEQ ID NO: 2961677 - RNA, 14 nt, Human
cuuugcuugaaaga

SEQ ID NO: 2961678 - RNA, 13 nt, Human
cuuucugaaauaa

SEQ ID NO: 2961679 - RNA, 19 nt, Human
cuuuccucaaaacuucaga

SEQ ID NO: 2961680 - RNA, 15 nt, Human
cuuuuucaauaacug

SEQ ID NO: 2961681 - RNA, 22 nt, Human
cuuuuguucuugguuuguaaau

SEQ ID NO: 2961682 - RNA, 20 nt, Human
cuuuuguucuugguuuguaa

SEQ ID NO: 2961683 - RNA, 14 nt, Human
cuuuuugaaauguc

SEQ ID NO: 2961684 - RNA, 15 nt, Human
cuuuucuguuugcua

SEQ ID NO: 2961685 - RNA, 21 nt, Human
cuuuguuuguugucagcugaa

SEQ ID NO: 2961686 - RNA, 16 nt, Human
cuuuuuuagaguugau

SEQ ID NO: 2961687 - RNA, 14 nt, Human
gaaaacaaggauga

SEQ ID NO: 2961688 - RNA, 19 nt, Human
gaaaacacuguucucugcc

SEQ ID NO: 2961689 - RNA, 18 nt, Human
gaaaacacuguucucugc

SEQ ID NO: 2961690 - RNA, 21 nt, Human
gaaaacacuguucucugcccu

SEQ ID NO: 2961691 - RNA, 20 nt, Human
gaaaacacuguucucugccc

SEQ ID NO: 2961692 - RNA, 16 nt, Human
gaaaacaugcuacaca

SEQ ID NO: 2961693 - RNA, 18 nt, Human
gaaaacaugcuacacacu

SEQ ID NO: 2961694 - RNA, 20 nt, Human
gaaaagggacugcugggagg

SEQ ID NO: 2961695 - RNA, 19 nt, Human
gaaaacaugcuacacacug

SEQ ID NO: 2961696 - RNA, 20 nt, Human
gaaaaguauguuagugcaaa

SEQ ID NO: 2961697 - RNA, 14 nt, Human
gaaaaguauguuag

SEQ ID NO: 2961698 - RNA, 19 nt, Human
gaaaauaacaauaaaagac

SEQ ID NO: 2961699 - RNA, 23 nt, Human
gacaucaacugcaucaagaugug

SEQ ID NO: 2961700 - RNA, 14 nt, Human
gacaucaacagaua

SEQ ID NO: 2961701 - RNA, 16 nt, Human
gacaucaacugcauca

SEQ ID NO: 2961702 - RNA, 17 nt, Human
gacaguuggguuuuuua

SEQ ID NO: 2961703 - RNA, 13 nt, Human
gacaguuggguuu

SEQ ID NO: 2961704 - RNA, 22 nt, Human
gacaggcauguucucugaggac

SEQ ID NO: 2961705 - RNA, 23 nt, Human
gacaggcaaugcuggcuguuggc

SEQ ID NO: 2961706 - RNA, 20 nt, Human
gacaggcauguucucugagg

SEQ ID NO: 2961707 - RNA, 21 nt, Human
gacaggcauguucucugagga

SEQ ID NO: 2961708 - RNA, 20 nt, Human
gacaggcaagcaccuccugc

SEQ ID NO: 2961709 - RNA, 21 nt, Human
gacaggcaagcaccuccugcc

SEQ ID NO: 2961710 - RNA, 18 nt, Human
gacaggcaaugcuggcug

SEQ ID NO: 2961711 - RNA, 19 nt, Human
gacaggcaaugcuggcugu

SEQ ID NO: 2961712 - RNA, 13 nt, Human
gacaggcaagcac

SEQ ID NO: 2961713 - RNA, 17 nt, Human
gacaggcaagcaccucc

SEQ ID NO: 2961714 - RNA, 18 nt, Human
gacaggcaagcaccuccu

SEQ ID NO: 2961715 - RNA, 23 nt, Human
gacaggaugguucccuugaugaa

SEQ ID NO: 2961716 - RNA, 17 nt, Human
gacagacacaggcccgg

SEQ ID NO: 2961717 - RNA, 16 nt, Human
gacacuagaagauuuu

SEQ ID NO: 2961718 - RNA, 20 nt, Human
gacagacacaggcccggcuc

SEQ ID NO: 2961719 - RNA, 22 nt, Human
gacagacacaggcccggcucca

SEQ ID NO: 2961720 - RNA, 22 nt, Human
gacacgaauauugcugauggug

SEQ ID NO: 2961721 - RNA, 18 nt, Human
gaauuucccaaagcagug

SEQ ID NO: 2961722 - RNA, 16 nt, Human
gaauuucccaaagcag

SEQ ID NO: 2961723 - RNA, 22 nt, Human
gaauuucccaaagcagugcaug

SEQ ID NO: 2961724 - RNA, 14 nt, Human
gacagagucucacu

SEQ ID NO: 2961725 - RNA, 23 nt, Human
gacagaggcagccccauucugcc

SEQ ID NO: 2961726 - RNA, 19 nt, Human
gacagagugagacucuguc

SEQ ID NO: 2961727 - RNA, 21 nt, Human
gacagagucucacuguugccc

SEQ ID NO: 2961728 - RNA, 16 nt, Human
gacagagugagacucu

SEQ ID NO: 2961729 - RNA, 21 nt, Human
gacagagccccacccucagau

SEQ ID NO: 2961730 - RNA, 20 nt, Human
gacagagcuacacaggggaa

SEQ ID NO: 2961731 - RNA, 17 nt, Human
gaccccacuccggcccu

SEQ ID NO: 2961732 - RNA, 22 nt, Human
gaccccacuccggcccuccaga

SEQ ID NO: 2961733 - RNA, 15 nt, Human
gaccccacuccggcc

SEQ ID NO: 2961734 - RNA, 17 nt, Human
gacccaugcugcccugu

SEQ ID NO: 2961735 - RNA, 10 nt, Human
gacccugagg

SEQ ID NO: 2961736 - RNA, 12 nt, Human
gacccugaggcc

SEQ ID NO: 2961737 - RNA, 11 nt, Human
gacccugaggc

SEQ ID NO: 2961738 - RNA, 22 nt, Human
gacccugcccugugggccccca

SEQ ID NO: 2961739 - RNA, 20 nt, Human
gacccugcccugugggcccc

SEQ ID NO: 2961740 - RNA, 17 nt, Human
gacccugcccugugggc

SEQ ID NO: 2961741 - RNA, 16 nt, Human
gacccugaggcccaga

SEQ ID NO: 2961742 - RNA, 18 nt, Human
gacccaugcugcccugug

SEQ ID NO: 2961743 - RNA, 20 nt, Human
gacccaugcugcccugugag

SEQ ID NO: 2961744 - RNA, 19 nt, Human
gacccaugcugcccuguga

SEQ ID NO: 2961745 - RNA, 12 nt, Human
gacccacugcuu

SEQ ID NO: 2961746 - RNA, 18 nt, Human
gacccaaaaggcagaagc

SEQ ID NO: 2961747 - RNA, 19 nt, Human
gacccaaaaggcagaagca

SEQ ID NO: 2961748 - RNA, 18 nt, Human
gaccacaaaacuuuucua

SEQ ID NO: 2961749 - RNA, 21 nt, Human
gaccagagcugccaccugccu

SEQ ID NO: 2961750 - RNA, 23 nt, Human
gaccagacaccuugacagggcac

SEQ ID NO: 2961751 - RNA, 21 nt, Human
gaccagcaccaucucuccucc

SEQ ID NO: 2961752 - RNA, 20 nt, Human
gaccagcaccaucucuccuc

SEQ ID NO: 2961753 - RNA, 16 nt, Human
gaccacguuucuaaag

SEQ ID NO: 2961754 - RNA, 22 nt, Human
gaccagacaccuugacagggca

SEQ ID NO: 2961755 - RNA, 21 nt, Human
gaccagacaccuugacagggc

SEQ ID NO: 2961756 - RNA, 16 nt, Human
gaccacugcagaagac

SEQ ID NO: 2961757 - RNA, 18 nt, Human
gaccacugcagaagacag

SEQ ID NO: 2961758 - RNA, 19 nt, Human
gacccuugccgucuaccug

SEQ ID NO: 2961759 - RNA, 23 nt, Human
gacccuugccgucuaccugaggg

SEQ ID NO: 2961760 - RNA, 20 nt, Human
gacccuugccgucuaccuga

SEQ ID NO: 2961761 - RNA, 14 nt, Human
gaccuucuccuuca

SEQ ID NO: 2961762 - RNA, 16 nt, Human
gaccuucuccuucacc

SEQ ID NO: 2961763 - RNA, 15 nt, Human
gaccuucuccuucac

SEQ ID NO: 2961764 - RNA, 14 nt, Human
gaccuugaacuggg

SEQ ID NO: 2961765 - RNA, 21 nt, Human
gaccuucuccuucaccuuugu

SEQ ID NO: 2961766 - RNA, 20 nt, Human
gaccuucuccuucaccuuug

SEQ ID NO: 2961767 - RNA, 23 nt, Human
gacggagucccaccuuggcugca

SEQ ID NO: 2961768 - RNA, 13 nt, Human
gacggagucccac

SEQ ID NO: 2961769 - RNA, 21 nt, Human
gacgcugugcugcccugccca

SEQ ID NO: 2961770 - RNA, 22 nt, Human
gacgcugugcugcccugcccac

SEQ ID NO: 2961771 - RNA, 20 nt, Human
gaccuuucaauaggaaaaac

SEQ ID NO: 2961772 - RNA, 19 nt, Human
gaccuuucaauaggaaaaa

SEQ ID NO: 2961773 - RNA, 11 nt, Human
gaccuuucaau

SEQ ID NO: 2961774 - RNA, 22 nt, Human
gaccuuuaagagaaaugagcug

SEQ ID NO: 2961775 - RNA, 15 nt, Human
gacguguuaugacuc

SEQ ID NO: 2961776 - RNA, 14 nt, Human
gacguguuaugacu

SEQ ID NO: 2961777 - RNA, 11 nt, Human
gacguguuaug

SEQ ID NO: 2961778 - RNA, 23 nt, Human
gacuaacuugucuuuggacccug

SEQ ID NO: 2961779 - RNA, 16 nt, Human
gacuaacuugucuuug

SEQ ID NO: 2961780 - RNA, 18 nt, Human
gacuuacuguacaugaaa

SEQ ID NO: 2961781 - RNA, 23 nt, Human
gacuuacuguacaugaaaacaca

SEQ ID NO: 2961782 - RNA, 15 nt, Human
gacuuacuguacaug

SEQ ID NO: 2961783 - RNA, 16 nt, Human
gacuuacuguacauga

SEQ ID NO: 2961784 - RNA, 12 nt, Human
gacuuacuguac

SEQ ID NO: 2961785 - RNA, 20 nt, Human
gacuucaucccucuggggcu

SEQ ID NO: 2961786 - RNA, 12 nt, Human
gacuucaucccu

SEQ ID NO: 2961787 - RNA, 23 nt, Human
gacuuaaugagacuuuaaaagca

SEQ ID NO: 2961788 - RNA, 22 nt, Human
gacuggauaguccgucucugcu

SEQ ID NO: 2961789 - RNA, 23 nt, Human
gacuggccaagguuuggggaaga

SEQ ID NO: 2961790 - RNA, 14 nt, Human
gacuggcacaguuu

SEQ ID NO: 2961791 - RNA, 17 nt, Human
gacuggauaguccgucu

SEQ ID NO: 2961792 - RNA, 22 nt, Human
gacuggcacaguuuucugagaa

SEQ ID NO: 2961793 - RNA, 18 nt, Human
gacuggcacaguuuucug

SEQ ID NO: 2961794 - RNA, 15 nt, Human
gacucuacagaggcc

SEQ ID NO: 2961795 - RNA, 21 nt, Human
gacucuacagaggccaugggc

SEQ ID NO: 2961796 - RNA, 16 nt, Human
gacugaauuucuuuug

SEQ ID NO: 2961797 - RNA, 18 nt, Human
gacuacaggcacccacca

SEQ ID NO: 2961798 - RNA, 13 nt, Human
gacuacaggcacc

SEQ ID NO: 2961799 - RNA, 15 nt, Human
gacuacaggcaccca

SEQ ID NO: 2961800 - RNA, 21 nt, Human
gacuccugcaggcagccaggc

SEQ ID NO: 2961801 - RNA, 20 nt, Human
gacuccugcaggcagccagg

SEQ ID NO: 2961802 - RNA, 19 nt, Human
gacuccugcaggcagccag

SEQ ID NO: 2961803 - RNA, 18 nt, Human
gacuccugcaggcagcca

SEQ ID NO: 2961804 - RNA, 19 nt, Human
gacugagggggccuggaug

SEQ ID NO: 2961805 - RNA, 17 nt, Human
gacugagggggccugga

SEQ ID NO: 2961806 - RNA, 18 nt, Human
gacugagggggccuggau

SEQ ID NO: 2961807 - RNA, 18 nt, Human
gacugaguacguugugca

SEQ ID NO: 2961808 - RNA, 15 nt, Human
gacugagggggccug

SEQ ID NO: 2961809 - RNA, 16 nt, Human
gacugagggggccugg

SEQ ID NO: 2961810 - RNA, 16 nt, Human
gacugaggggagggga

SEQ ID NO: 2961811 - RNA, 24 nt, Human
gacugcauuauauuuauuacugua

SEQ ID NO: 2961812 - RNA, 15 nt, Human
gaauuucccaaagca

SEQ ID NO: 2961813 - RNA, 22 nt, Human
gaauuuaaauagcuuuuuucuc

SEQ ID NO: 2961814 - RNA, 22 nt, Human
gaauugauugggcacaucauuu

SEQ ID NO: 2961815 - RNA, 22 nt, Human
gaauuguaaggaaugauuaauu

SEQ ID NO: 2961816 - RNA, 19 nt, Human
gaauucucuaguuugauua

SEQ ID NO: 2961817 - RNA, 14 nt, Human
gaauugaaaaacca

SEQ ID NO: 2961818 - RNA, 16 nt, Human
gaauuccuaaaauuau

SEQ ID NO: 2961819 - RNA, 20 nt, Human
gaauuccuaaaauuauggaa

SEQ ID NO: 2961820 - RNA, 17 nt, Human
gaauucucuaguuugau

SEQ ID NO: 2961821 - RNA, 17 nt, Human
gaauucucagaaucuca

SEQ ID NO: 2961822 - RNA, 22 nt, Human
gaauucacaaaguaauuuggaa

SEQ ID NO: 2961823 - RNA, 21 nt, Human
gaaugucaguuguuauuuauu

SEQ ID NO: 2961824 - RNA, 17 nt, Human
gaaugucaguuguuauu

SEQ ID NO: 2961825 - RNA, 21 nt, Human
gaaugucagugugacugaucu

SEQ ID NO: 2961826 - RNA, 20 nt, Human
gaaugucagugugacugauc

SEQ ID NO: 2961827 - RNA, 14 nt, Human
gaaugucaguguga

SEQ ID NO: 2961828 - RNA, 22 nt, Human
gaaugguuuucaaaauaaaaau

SEQ ID NO: 2961829 - RNA, 19 nt, Human
gaaugaagauacugaaaua

SEQ ID NO: 2961830 - RNA, 11 nt, Human
gaaugcagugg

SEQ ID NO: 2961831 - RNA, 17 nt, Human
gaaugaagauacugaaa

SEQ ID NO: 2961832 - RNA, 18 nt, Human
gaaugaagauacugaaau

SEQ ID NO: 2961833 - RNA, 21 nt, Human
gaaugaagauacugaaauaaa

SEQ ID NO: 2961834 - RNA, 23 nt, Human
gaaugaaccacaucuugcucugc

SEQ ID NO: 2961835 - RNA, 22 nt, Human
gaaugaaccacaucuugcucug

SEQ ID NO: 2961836 - RNA, 18 nt, Human
gaaugaaccacaucuugc

SEQ ID NO: 2961837 - RNA, 13 nt, Human
gaaguuugaacau

SEQ ID NO: 2961838 - RNA, 20 nt, Human
gaaguuugagaucagccugg

SEQ ID NO: 2961839 - RNA, 18 nt, Human
gaauaacauguaauuaag

SEQ ID NO: 2961840 - RNA, 19 nt, Human
gaauaacauguaauuaagu

SEQ ID NO: 2961841 - RNA, 21 nt, Human
gaauacagaggcaacugcauu

SEQ ID NO: 2961842 - RNA, 17 nt, Human
gaauaauacaguaucuc

SEQ ID NO: 2961843 - RNA, 21 nt, Human
gaauaccccaagacucccaug

SEQ ID NO: 2961844 - RNA, 13 nt, Human
gaauaccuguccc

SEQ ID NO: 2961845 - RNA, 15 nt, Human
gaauaccuguccccc

SEQ ID NO: 2961846 - RNA, 23 nt, Human
gaauagcugggacuacaggugug

SEQ ID NO: 2961847 - RNA, 16 nt, Human
gaauaggcacuuuaaa

SEQ ID NO: 2961848 - RNA, 22 nt, Human
gaauagcugggacuacaggugu

SEQ ID NO: 2961849 - RNA, 20 nt, Human
gaauacucuuauaucuauau

SEQ ID NO: 2961850 - RNA, 16 nt, Human
gaauauuuuaacuucc

SEQ ID NO: 2961851 - RNA, 18 nt, Human
gaaguacuauaauuuacc

SEQ ID NO: 2961852 - RNA, 15 nt, Human
gaaguacuggagaaa

SEQ ID NO: 2961853 - RNA, 22 nt, Human
gaaguaauaugcacacauuuuu

SEQ ID NO: 2961854 - RNA, 23 nt, Human
gaaggugccucuggaugcuguga

SEQ ID NO: 2961855 - RNA, 19 nt, Human
gaagggggcugggacaugg

SEQ ID NO: 2961856 - RNA, 16 nt, Human
gaagggggcugggaca

SEQ ID NO: 2961857 - RNA, 15 nt, Human
gaagggggcugggac

SEQ ID NO: 2961858 - RNA, 14 nt, Human
gaagcggcuggcag

SEQ ID NO: 2961859 - RNA, 12 nt, Human
gaaguccaagca

SEQ ID NO: 2961860 - RNA, 22 nt, Human
gaaguccaagcauuuagaugua

SEQ ID NO: 2961861 - RNA, 20 nt, Human
gaaguuucugccgcagcccu

SEQ ID NO: 2961862 - RNA, 15 nt, Human
gaagucuuagaugua

SEQ ID NO: 2961863 - RNA, 21 nt, Human
gaaguuucugccgcagcccug

SEQ ID NO: 2961864 - RNA, 14 nt, Human
gaaguauccuucag

SEQ ID NO: 2961865 - RNA, 16 nt, Human
gaaguauccuucagcc

SEQ ID NO: 2961866 - RNA, 23 nt, Human
gaacuuugaccucugcagcaaua

SEQ ID NO: 2961867 - RNA, 17 nt, Human
gaagacugcauuauauu

SEQ ID NO: 2961868 - RNA, 13 nt, Human
gaagacuuuggaa

SEQ ID NO: 2961869 - RNA, 11 nt, Human
gaagacuuugg

SEQ ID NO: 2961870 - RNA, 12 nt, Human
gaagaacugaaa

SEQ ID NO: 2961871 - RNA, 19 nt, Human
gaagacugcauuauauuua

SEQ ID NO: 2961872 - RNA, 19 nt, Human
gaagagaaugcacaaacag

SEQ ID NO: 2961873 - RNA, 20 nt, Human
gaagacuuuucuuucagcca

SEQ ID NO: 2961874 - RNA, 17 nt, Human
gaagacuuuggaaagag

SEQ ID NO: 2961875 - RNA, 14 nt, Human
gaagacuuuggaaa

SEQ ID NO: 2961876 - RNA, 23 nt, Human
gaagcccaggaaaggcuccagga

SEQ ID NO: 2961877 - RNA, 23 nt, Human
gaagcccuucuaccuuccugcaa

SEQ ID NO: 2961878 - RNA, 19 nt, Human
gaagcccaggaaaggcucc

SEQ ID NO: 2961879 - RNA, 16 nt, Human
gaagcccaggaaaggc

SEQ ID NO: 2961880 - RNA, 15 nt, Human
gaagcccaggaaagg

SEQ ID NO: 2961881 - RNA, 13 nt, Human
gaagcccaggaaa

SEQ ID NO: 2961882 - RNA, 22 nt, Human
gaagccagcaggcucucaggcc

SEQ ID NO: 2961883 - RNA, 21 nt, Human
gaagccagcaggcucucaggc

SEQ ID NO: 2961884 - RNA, 19 nt, Human
gaagccagcaggcucucag

SEQ ID NO: 2961885 - RNA, 20 nt, Human
gaagccagcaggcucucagg

SEQ ID NO: 2961886 - RNA, 17 nt, Human
gaagauucuauguuaau

SEQ ID NO: 2961887 - RNA, 23 nt, Human
gaagauucuauguuaauauuuua

SEQ ID NO: 2961888 - RNA, 20 nt, Human
gaagauucuauguuaauauu

SEQ ID NO: 2961889 - RNA, 17 nt, Human
gaagcauuuacuuugug

SEQ ID NO: 2961890 - RNA, 20 nt, Human
gaagagguuuuaaagcuucc

SEQ ID NO: 2961891 - RNA, 20 nt, Human
gaagauaauauuaaggaaga

SEQ ID NO: 2961892 - RNA, 15 nt, Human
gaagauacugaaaua

SEQ ID NO: 2961893 - RNA, 17 nt, Human
gaagauguagaggagaa

SEQ ID NO: 2961894 - RNA, 18 nt, Human
gaagauguagaggagaaa

SEQ ID NO: 2961895 - RNA, 22 nt, Human
gaaccuuuugagugccuuacac

SEQ ID NO: 2961896 - RNA, 16 nt, Human
gaacauuucauggugu

SEQ ID NO: 2961897 - RNA, 21 nt, Human
gaacauuuggguuacuauuuc

SEQ ID NO: 2961898 - RNA, 18 nt, Human
gaaccuuuugagugccuu

SEQ ID NO: 2961899 - RNA, 21 nt, Human
gaaccuuuugagugccuuaca

SEQ ID NO: 2961900 - RNA, 19 nt, Human
gaaccuuuugagugccuua

SEQ ID NO: 2961901 - RNA, 14 nt, Human
gaacaucacagcuu

SEQ ID NO: 2961902 - RNA, 15 nt, Human
gaacauaaaauacaa

SEQ ID NO: 2961903 - RNA, 15 nt, Human
gaacacucugagacu

SEQ ID NO: 2961904 - RNA, 16 nt, Human
gaacagugauuaccag

SEQ ID NO: 2961905 - RNA, 20 nt, Human
gaacagugauuaccagggac

SEQ ID NO: 2961906 - RNA, 14 nt, Human
gaacacucugagac

SEQ ID NO: 2961907 - RNA, 13 nt, Human
gaacacucugaga

SEQ ID NO: 2961908 - RNA, 17 nt, Human
gaaaauagaauugacau

SEQ ID NO: 2961909 - RNA, 16 nt, Human
gaaauuguauuacaaa

SEQ ID NO: 2961910 - RNA, 13 nt, Human
gauaaacaguagu

SEQ ID NO: 2961911 - RNA, 12 nt, Human
gauaauacacca

SEQ ID NO: 2961912 - RNA, 23 nt, Human
gauaauacaccacuacauucugu

SEQ ID NO: 2961913 - RNA, 24 nt, Human
gauaauacaccacuacauucuguu

SEQ ID NO: 2961914 - RNA, 19 nt, Human
gaguuauugaagcagagug

SEQ ID NO: 2961915 - RNA, 20 nt, Human
gaguuauugaagcagagugg

SEQ ID NO: 2961916 - RNA, 16 nt, Human
gauacaaaagcaugug

SEQ ID NO: 2961917 - RNA, 20 nt, Human
gauagugucccacggugccu

SEQ ID NO: 2961918 - RNA, 18 nt, Human
gauauaugcucugcaugu

SEQ ID NO: 2961919 - RNA, 21 nt, Human
gauauagcuaggugacauaua

SEQ ID NO: 2961920 - RNA, 14 nt, Human
gaucacagccucug

SEQ ID NO: 2961921 - RNA, 23 nt, Human
gaucacggcucacugcagccuca

SEQ ID NO: 2961922 - RNA, 20 nt, Human
gaucacggcucacugcagcc

SEQ ID NO: 2961923 - RNA, 23 nt, Human
gaucagcuuauugucuagugaaa

SEQ ID NO: 2961924 - RNA, 22 nt, Human
gaugaaugucaguuguuauuua

SEQ ID NO: 2961925 - RNA, 22 nt, Human
gaucuucuguggguuucuaaag

SEQ ID NO: 2961926 - RNA, 19 nt, Human
gaucuucuuuauaauucua

SEQ ID NO: 2961927 - RNA, 15 nt, Human
gaugaaaugagguca

SEQ ID NO: 2961928 - RNA, 21 nt, Human
gaugaaaugaggucagagccu

SEQ ID NO: 2961929 - RNA, 19 nt, Human
gaugcagccucacaguccu

SEQ ID NO: 2961930 - RNA, 14 nt, Human
gaugccugguggca

SEQ ID NO: 2961931 - RNA, 14 nt, Human
gaugcagugcuucc

SEQ ID NO: 2961932 - RNA, 15 nt, Human
gaugccugguggcag

SEQ ID NO: 2961933 - RNA, 16 nt, Human
gaugccugguggcagc

SEQ ID NO: 2961934 - RNA, 20 nt, Human
gaugaccuugaaugaugcca

SEQ ID NO: 2961935 - RNA, 18 nt, Human
gaugaccuugaaugaugc

SEQ ID NO: 2961936 - RNA, 23 nt, Human
gaugagaaauaaaguuucuguug

SEQ ID NO: 2961937 - RNA, 14 nt, Human
gaugcaccagcccu

SEQ ID NO: 2961938 - RNA, 14 nt, Human
gaugagaggaaauc

SEQ ID NO: 2961939 - RNA, 15 nt, Human
gaugcaccagcccuu

SEQ ID NO: 2961940 - RNA, 23 nt, Human
gaugcaccagcccuuagcaggga

SEQ ID NO: 2961941 - RNA, 13 nt, Human
gaucauccacugu

SEQ ID NO: 2961942 - RNA, 16 nt, Human
gauccucccaccucag

SEQ ID NO: 2961943 - RNA, 14 nt, Human
gauccuccaggugc

SEQ ID NO: 2961944 - RNA, 17 nt, Human
gauccucccaccucagc

SEQ ID NO: 2961945 - RNA, 13 nt, Human
gaucuaggaagac

SEQ ID NO: 2961946 - RNA, 18 nt, Human
gaucuaggaagacuuugg

SEQ ID NO: 2961947 - RNA, 14 nt, Human
gaucuaggaagacu

SEQ ID NO: 2961948 - RNA, 20 nt, Human
gaucuaggaagacuuuggaa

SEQ ID NO: 2961949 - RNA, 14 nt, Human
gauccuggaaauca

SEQ ID NO: 2961950 - RNA, 13 nt, Human
gauccuggaaauc

SEQ ID NO: 2961951 - RNA, 12 nt, Human
gauccugagcca

SEQ ID NO: 2961952 - RNA, 20 nt, Human
gauuuaaacacauuaaaggu

SEQ ID NO: 2961953 - RNA, 20 nt, Human
gauugggcacaucauuucaa

SEQ ID NO: 2961954 - RNA, 19 nt, Human
gauuuguuaaugauagcua

SEQ ID NO: 2961955 - RNA, 22 nt, Human
gauuucuguuuagauaauacac

SEQ ID NO: 2961956 - RNA, 21 nt, Human
gauuucuguuuagauaauaca

SEQ ID NO: 2961957 - RNA, 15 nt, Human
gauugcaacaggcug

SEQ ID NO: 2961958 - RNA, 17 nt, Human
gauugcaacaggcuggg

SEQ ID NO: 2961959 - RNA, 18 nt, Human
gauugcaacaggcugggc

SEQ ID NO: 2961960 - RNA, 16 nt, Human
gauugcaacaggcugg

SEQ ID NO: 2961961 - RNA, 22 nt, Human
gauucuuuccugaggcugggcu

SEQ ID NO: 2961962 - RNA, 20 nt, Human
gauucuuuccugaggcuggg

SEQ ID NO: 2961963 - RNA, 16 nt, Human
gauucccaagcucugc

SEQ ID NO: 2961964 - RNA, 17 nt, Human
gauucccaagcucugcu

SEQ ID NO: 2961965 - RNA, 19 nt, Human
gauucuuuccugaggcugg

SEQ ID NO: 2961966 - RNA, 15 nt, Human
gauucccaagcucug

SEQ ID NO: 2961967 - RNA, 13 nt, Human
gauuacaagcgug

SEQ ID NO: 2961968 - RNA, 21 nt, Human
gauuacaagcgugagccacug

SEQ ID NO: 2961969 - RNA, 18 nt, Human
gauucagacagcugccug

SEQ ID NO: 2961970 - RNA, 17 nt, Human
gauucagacagcugccu

SEQ ID NO: 2961971 - RNA, 14 nt, Human
gauucagacagcug

SEQ ID NO: 2961972 - RNA, 13 nt, Human
gauucagacagcu

SEQ ID NO: 2961973 - RNA, 14 nt, Human
gauuaaguaaugau

SEQ ID NO: 2961974 - RNA, 22 nt, Human
gauuaaguaaugauaacuggaa

SEQ ID NO: 2961975 - RNA, 18 nt, Human
gauguucuagcauggcug

SEQ ID NO: 2961976 - RNA, 16 nt, Human
gaugcuagaacucccu

SEQ ID NO: 2961977 - RNA, 15 nt, Human
gcaaacuucagaguu

SEQ ID NO: 2961978 - RNA, 16 nt, Human
gcaaaccaucauugaa

SEQ ID NO: 2961979 - RNA, 21 nt, Human
gcaaaccaucauugaaaucuu

SEQ ID NO: 2961980 - RNA, 20 nt, Human
gcaaaccaucauugaaaucu

SEQ ID NO: 2961981 - RNA, 19 nt, Human
gcaaaccaucauugaaauc

SEQ ID NO: 2961982 - RNA, 17 nt, Human
gcaaaccaucauugaaa

SEQ ID NO: 2961983 - RNA, 17 nt, Human
gcaaauaaguguauuuu

SEQ ID NO: 2961984 - RNA, 23 nt, Human
gcaaauaaguguauuuugaaauu

SEQ ID NO: 2961985 - RNA, 21 nt, Human
gcaaauaaguguauuuugaaa

SEQ ID NO: 2961986 - RNA, 18 nt, Human
gcaacugcauuggcuuug

SEQ ID NO: 2961987 - RNA, 22 nt, Human
gcaagguuuaaguuauuaagag

SEQ ID NO: 2961988 - RNA, 14 nt, Human
gcaagguuuaaguu

SEQ ID NO: 2961989 - RNA, 17 nt, Human
gcaagguuuaaguuauu

SEQ ID NO: 2961990 - RNA, 19 nt, Human
gcaagguuuaaguuauuaa

SEQ ID NO: 2961991 - RNA, 17 nt, Human
gcaauccugcaagaaca

SEQ ID NO: 2961992 - RNA, 13 nt, Human
gcaaggcugucaa

SEQ ID NO: 2961993 - RNA, 14 nt, Human
gcaaggucauuuuu

SEQ ID NO: 2961994 - RNA, 18 nt, Human
gcaaggcugucaauuaca

SEQ ID NO: 2961995 - RNA, 14 nt, Human
gcaaggcugucaau

SEQ ID NO: 2961996 - RNA, 18 nt, Human
gcaagcaccuccugccuc

SEQ ID NO: 2961997 - RNA, 20 nt, Human
gcaagcaccuccugccucga

SEQ ID NO: 2961998 - RNA, 15 nt, Human
gcaagcaccuccugc

SEQ ID NO: 2961999 - RNA, 16 nt, Human
gcaagcaccuccugcc

SEQ ID NO: 2962000 - RNA, 16 nt, Human
gcaagaugugggcagu

SEQ ID NO: 2962001 - RNA, 12 nt, Human
gcaagauguggg

SEQ ID NO: 2962002 - RNA, 20 nt, Human
gcagcagggagggcuucugc

SEQ ID NO: 2962003 - RNA, 19 nt, Human
gcagccucaaccuccuggg

SEQ ID NO: 2962004 - RNA, 20 nt, Human
gcagccucaaccuccugggc

SEQ ID NO: 2962005 - RNA, 21 nt, Human
gcagccucaaccuccugggcu

SEQ ID NO: 2962006 - RNA, 22 nt, Human
gcagccucaaccuccugggcua

SEQ ID NO: 2962007 - RNA, 14 nt, Human
gcagccuggacccu

SEQ ID NO: 2962008 - RNA, 19 nt, Human
gcagagaaugaaagggccc

SEQ ID NO: 2962009 - RNA, 20 nt, Human
gcagagaaugaaagggccca

SEQ ID NO: 2962010 - RNA, 21 nt, Human
gcagagaaugaaagggcccag

SEQ ID NO: 2962011 - RNA, 21 nt, Human
gcagagaauucucuuauccaa

SEQ ID NO: 2962012 - RNA, 22 nt, Human
gcagagaaugaaagggcccaga

SEQ ID NO: 2962013 - RNA, 23 nt, Human
gcagagaaugaaagggcccagag

SEQ ID NO: 2962014 - RNA, 13 nt, Human
gcagaguggcagu

SEQ ID NO: 2962015 - RNA, 22 nt, Human
gcagaguggcagucuucaguuu

SEQ ID NO: 2962016 - RNA, 15 nt, Human
gcagaguugaagaca

SEQ ID NO: 2962017 - RNA, 17 nt, Human
gcagagaccaucccuga

SEQ ID NO: 2962018 - RNA, 15 nt, Human
gcagagaccaucccu

SEQ ID NO: 2962019 - RNA, 14 nt, Human
gcagagaccauccc

SEQ ID NO: 2962020 - RNA, 12 nt, Human
gcagcaauaaag

SEQ ID NO: 2962021 - RNA, 19 nt, Human
gcagaguugaagacagagc

SEQ ID NO: 2962022 - RNA, 17 nt, Human
gcagaguugaagacaga

SEQ ID NO: 2962023 - RNA, 16 nt, Human
gcagaguugaagacag

SEQ ID NO: 2962024 - RNA, 14 nt, Human
gcacccggccccug

SEQ ID NO: 2962025 - RNA, 23 nt, Human
gcacccauuaugcgcuguggcca

SEQ ID NO: 2962026 - RNA, 15 nt, Human
gcacccggccccugc

SEQ ID NO: 2962027 - RNA, 17 nt, Human
gcacccggccccugcug

SEQ ID NO: 2962028 - RNA, 14 nt, Human
gcaccuccugccuc

SEQ ID NO: 2962029 - RNA, 15 nt, Human
gcaccuccugccucg

SEQ ID NO: 2962030 - RNA, 19 nt, Human
gcaccacugcacuccagcc

SEQ ID NO: 2962031 - RNA, 16 nt, Human
gcacagcuucauuucc

SEQ ID NO: 2962032 - RNA, 22 nt, Human
gcacaugccucucucaggccaa

SEQ ID NO: 2962033 - RNA, 19 nt, Human
gcacagcuaacauggaagu

SEQ ID NO: 2962034 - RNA, 18 nt, Human
gcacagccucuuagaugc

SEQ ID NO: 2962035 - RNA, 20 nt, Human
gcacagccucuuagaugcag

SEQ ID NO: 2962036 - RNA, 14 nt, Human
gcaaugaccuuuca

SEQ ID NO: 2962037 - RNA, 13 nt, Human
gcaaugaccuuuc

SEQ ID NO: 2962038 - RNA, 17 nt, Human
gcacuaaggugugcucu

SEQ ID NO: 2962039 - RNA, 18 nt, Human
gcacuaaggugugcucug

SEQ ID NO: 2962040 - RNA, 14 nt, Human
gcacugggcuuggg

SEQ ID NO: 2962041 - RNA, 23 nt, Human
gcacugggcuuggggaccagagc

SEQ ID NO: 2962042 - RNA, 22 nt, Human
gcacugggcuuggggaccagag

SEQ ID NO: 2962043 - RNA, 15 nt, Human
gcacugucaagauga

SEQ ID NO: 2962044 - RNA, 12 nt, Human
gcagaaggaaga

SEQ ID NO: 2962045 - RNA, 14 nt, Human
gcagaaggaagacu

SEQ ID NO: 2962046 - RNA, 13 nt, Human
gcagaaggaagac

SEQ ID NO: 2962047 - RNA, 14 nt, Human
gcagaagacaguau

SEQ ID NO: 2962048 - RNA, 20 nt, Human
gcauauucaggaagcucagg

SEQ ID NO: 2962049 - RNA, 18 nt, Human
gcauauucaggaagcuca

SEQ ID NO: 2962050 - RNA, 17 nt, Human
gcauauucaggaagcuc

SEQ ID NO: 2962051 - RNA, 22 nt, Human
gcauauugcauacuauuaaaca

SEQ ID NO: 2962052 - RNA, 21 nt, Human
gcaucaagaugugacauguuu

SEQ ID NO: 2962053 - RNA, 15 nt, Human
gcauauucaggaagc

SEQ ID NO: 2962054 - RNA, 17 nt, Human
gcagugggagcugccug

SEQ ID NO: 2962055 - RNA, 18 nt, Human
gcagugggagcugccugu

SEQ ID NO: 2962056 - RNA, 18 nt, Human
gcauagauucccugagca

SEQ ID NO: 2962057 - RNA, 13 nt, Human
gcaguucugaaga

SEQ ID NO: 2962058 - RNA, 14 nt, Human
gcagugcucaccca

SEQ ID NO: 2962059 - RNA, 16 nt, Human
gcagugggagcugccu

SEQ ID NO: 2962060 - RNA, 17 nt, Human
gcagugcuuggcccagg

SEQ ID NO: 2962061 - RNA, 16 nt, Human
gcagugcuuggcccag

SEQ ID NO: 2962062 - RNA, 23 nt, Human
gcagugcuuccaaggauggacca

SEQ ID NO: 2962063 - RNA, 16 nt, Human
gcagggagggcuucug

SEQ ID NO: 2962064 - RNA, 12 nt, Human
gcagggcucagc

SEQ ID NO: 2962065 - RNA, 20 nt, Human
gcaggauucuuccucccucc

SEQ ID NO: 2962066 - RNA, 15 nt, Human
gcaggcuacugucag

SEQ ID NO: 2962067 - RNA, 19 nt, Human
gccaaacucaccugccccu

SEQ ID NO: 2962068 - RNA, 21 nt, Human
gccaaacucaccugccccuca

SEQ ID NO: 2962069 - RNA, 16 nt, Human
gccaaagaagcagacc

SEQ ID NO: 2962070 - RNA, 14 nt, Human
gccaaaggaagcac

SEQ ID NO: 2962071 - RNA, 20 nt, Human
gccaaaggaagcacaugccu

SEQ ID NO: 2962072 - RNA, 16 nt, Human
gccaaaggaagcacau

SEQ ID NO: 2962073 - RNA, 22 nt, Human
gcauuuugcuaaaugugaauga

SEQ ID NO: 2962074 - RNA, 12 nt, Human
gcauuccccacu

SEQ ID NO: 2962075 - RNA, 23 nt, Human
gcauuuuaaacaaaauagaaagu

SEQ ID NO: 2962076 - RNA, 23 nt, Human
gcauuugcugaauacagaggcaa

SEQ ID NO: 2962077 - RNA, 21 nt, Human
gcauuuggugguuucagaaau

SEQ ID NO: 2962078 - RNA, 17 nt, Human
gcauuugcugaauacag

SEQ ID NO: 2962079 - RNA, 17 nt, Human
gcauguuugugauugac

SEQ ID NO: 2962080 - RNA, 15 nt, Human
gcaugccuggauggg

SEQ ID NO: 2962081 - RNA, 15 nt, Human
gcaugcugucccuua

SEQ ID NO: 2962082 - RNA, 22 nt, Human
gcaugccuggauggggcugcac

SEQ ID NO: 2962083 - RNA, 17 nt, Human
gcaugccuggauggggc

SEQ ID NO: 2962084 - RNA, 23 nt, Human
gcaugaaguaauaugcacacauu

SEQ ID NO: 2962085 - RNA, 17 nt, Human
gcaucaggccaggcccu

SEQ ID NO: 2962086 - RNA, 16 nt, Human
gcaucaggccaggccc

SEQ ID NO: 2962087 - RNA, 15 nt, Human
gcaucaggccaggcc

SEQ ID NO: 2962088 - RNA, 13 nt, Human
gcaucaggccagg

SEQ ID NO: 2962089 - RNA, 22 nt, Human
gccauuuaaagcuuauuaaaac

SEQ ID NO: 2962090 - RNA, 17 nt, Human
gccauuucuuccacaag

SEQ ID NO: 2962091 - RNA, 13 nt, Human
gccauuuguccca

SEQ ID NO: 2962092 - RNA, 14 nt, Human
gccauuugucccaa

SEQ ID NO: 2962093 - RNA, 16 nt, Human
gccauuugucccaagu

SEQ ID NO: 2962094 - RNA, 18 nt, Human
gccauuugucccaagugc

SEQ ID NO: 2962095 - RNA, 20 nt, Human
gccauuugucccaagugcca

SEQ ID NO: 2962096 - RNA, 22 nt, Human
gccauuucuuccacaagagccc

SEQ ID NO: 2962097 - RNA, 20 nt, Human
gccauuucuuccacaagagc

SEQ ID NO: 2962098 - RNA, 15 nt, Human
gccaucccucccucc

SEQ ID NO: 2962099 - RNA, 14 nt, Human
gccaugggacaggg

SEQ ID NO: 2962100 - RNA, 19 nt, Human
gccaugggacagggaggac

SEQ ID NO: 2962101 - RNA, 15 nt, Human
gcccaccccucaaca

SEQ ID NO: 2962102 - RNA, 19 nt, Human
gcccacaggaucagucuga

SEQ ID NO: 2962103 - RNA, 13 nt, Human
gcccacaggauca

SEQ ID NO: 2962104 - RNA, 18 nt, Human
gcccacaggaucagucug

SEQ ID NO: 2962105 - RNA, 16 nt, Human
gcccaaagaugcagcc

SEQ ID NO: 2962106 - RNA, 15 nt, Human
gcccaaagaugcagc

SEQ ID NO: 2962107 - RNA, 16 nt, Human
gcccacagcuguauga

SEQ ID NO: 2962108 - RNA, 23 nt, Human
gccaggggaaaaucagccugcuc

SEQ ID NO: 2962109 - RNA, 17 nt, Human
gccaggggaaaaucagc

SEQ ID NO: 2962110 - RNA, 22 nt, Human
gccaggggaaaaucagccugcu

SEQ ID NO: 2962111 - RNA, 21 nt, Human
gccaggggaaaaucagccugc

SEQ ID NO: 2962112 - RNA, 19 nt, Human
gccaggaagccagcaggcu

SEQ ID NO: 2962113 - RNA, 11 nt, Human
gccaggaagcc

SEQ ID NO: 2962114 - RNA, 18 nt, Human
gccaggaagccagcaggc

SEQ ID NO: 2962115 - RNA, 17 nt, Human
gccaggaagccagcagg

SEQ ID NO: 2962116 - RNA, 19 nt, Human
gccauccagguucagcuug

SEQ ID NO: 2962117 - RNA, 20 nt, Human
gccauccagguucagcuugu

SEQ ID NO: 2962118 - RNA, 14 nt, Human
gccauccagguuca

SEQ ID NO: 2962119 - RNA, 17 nt, Human
gccaucccagccccaau

SEQ ID NO: 2962120 - RNA, 11 nt, Human
gccaucccucc

SEQ ID NO: 2962121 - RNA, 13 nt, Human
gccaucccucccu

SEQ ID NO: 2962122 - RNA, 14 nt, Human
gccaucccucccuc

SEQ ID NO: 2962123 - RNA, 16 nt, Human
gccaucccagccccaa

SEQ ID NO: 2962124 - RNA, 15 nt, Human
gccaucccagcccca

SEQ ID NO: 2962125 - RNA, 14 nt, Human
gccaucccagcccc

SEQ ID NO: 2962126 - RNA, 13 nt, Human
gccaucccagccc

SEQ ID NO: 2962127 - RNA, 15 nt, Human
gccagagacacaagc

SEQ ID NO: 2962128 - RNA, 12 nt, Human
gccagagacaca

SEQ ID NO: 2962129 - RNA, 17 nt, Human
gccagagggagugacag

SEQ ID NO: 2962130 - RNA, 18 nt, Human
gccagagggagugacaga

SEQ ID NO: 2962131 - RNA, 17 nt, Human
gccacugcaccgggcca

SEQ ID NO: 2962132 - RNA, 18 nt, Human
gccacugcaccgggccac

SEQ ID NO: 2962133 - RNA, 14 nt, Human
gccacggccaggcc

SEQ ID NO: 2962134 - RNA, 15 nt, Human
gccacggccaggcca

SEQ ID NO: 2962135 - RNA, 20 nt, Human
gccacuauuguuagucucuu

SEQ ID NO: 2962136 - RNA, 21 nt, Human
gccacuauuguuagucucuug

SEQ ID NO: 2962137 - RNA, 16 nt, Human
gccacggccaggccag

SEQ ID NO: 2962138 - RNA, 22 nt, Human
gccacguucuuacuaguuuccc

SEQ ID NO: 2962139 - RNA, 17 nt, Human
gccagauucuuuccuga

SEQ ID NO: 2962140 - RNA, 19 nt, Human
gccagagggagugacagag

SEQ ID NO: 2962141 - RNA, 20 nt, Human
gccagagggagugacagagg

SEQ ID NO: 2962142 - RNA, 16 nt, Human
gccagauucuuuccug

SEQ ID NO: 2962143 - RNA, 12 nt, Human
gccagccuugac

SEQ ID NO: 2962144 - RNA, 20 nt, Human
gccagccgagauagccaagg

SEQ ID NO: 2962145 - RNA, 21 nt, Human
gccagccgagauagccaaggc

SEQ ID NO: 2962146 - RNA, 22 nt, Human
gccagccuugaccauucuccac

SEQ ID NO: 2962147 - RNA, 21 nt, Human
gccagccuugaccauucucca

SEQ ID NO: 2962148 - RNA, 20 nt, Human
gccagccuugaccauucucc

SEQ ID NO: 2962149 - RNA, 14 nt, Human
gccagccuugacca

SEQ ID NO: 2962150 - RNA, 15 nt, Human
gccagcugcuugggc

SEQ ID NO: 2962151 - RNA, 14 nt, Human
gccagcugcuuggg

SEQ ID NO: 2962152 - RNA, 15 nt, Human
gccccaucugcgggg

SEQ ID NO: 2962153 - RNA, 23 nt, Human
gccccauccucuguacagagccc

SEQ ID NO: 2962154 - RNA, 17 nt, Human
gccccauucugccugcc

SEQ ID NO: 2962155 - RNA, 18 nt, Human
gccccauucugccugccc

SEQ ID NO: 2962156 - RNA, 20 nt, Human
gccccauucugccugcccag

SEQ ID NO: 2962157 - RNA, 21 nt, Human
gccccauucugccugcccagg

SEQ ID NO: 2962158 - RNA, 15 nt, Human
gccccagugcccaca

SEQ ID NO: 2962159 - RNA, 16 nt, Human
gccccagugcccacag

SEQ ID NO: 2962160 - RNA, 17 nt, Human
gccccagugcccacagg

SEQ ID NO: 2962161 - RNA, 21 nt, Human
gccccagugcccacaggauca

SEQ ID NO: 2962162 - RNA, 11 nt, Human
gcccaggcugg

SEQ ID NO: 2962163 - RNA, 18 nt, Human
gcccaggccuccuacagc

SEQ ID NO: 2962164 - RNA, 16 nt, Human
gcccaggaaaggcucc

SEQ ID NO: 2962165 - RNA, 15 nt, Human
gcccaggaaaggcuc

SEQ ID NO: 2962166 - RNA, 12 nt, Human
gcccaggaaagg

SEQ ID NO: 2962167 - RNA, 22 nt, Human
gcccagucuggaaugcaguggu

SEQ ID NO: 2962168 - RNA, 20 nt, Human
gcccagucuggaaugcagug

SEQ ID NO: 2962169 - RNA, 16 nt, Human
gcccaggcuggcgugc

SEQ ID NO: 2962170 - RNA, 14 nt, Human
gcccaggcuggcgu

SEQ ID NO: 2962171 - RNA, 15 nt, Human
gcccaggcuggcgug

SEQ ID NO: 2962172 - RNA, 22 nt, Human
gccccgaggccuucucugaagg

SEQ ID NO: 2962173 - RNA, 14 nt, Human
gccccgcccaggcu

SEQ ID NO: 2962174 - RNA, 23 nt, Human
gccccgaggccuucucugaagga

SEQ ID NO: 2962175 - RNA, 22 nt, Human
gccccauucugccugcccaggc

SEQ ID NO: 2962176 - RNA, 23 nt, Human
gccccauucugccugcccaggcc

SEQ ID NO: 2962177 - RNA, 17 nt, Human
gccccgugggguuccuc

SEQ ID NO: 2962178 - RNA, 21 nt, Human
gccccucagggucccuggugg

SEQ ID NO: 2962179 - RNA, 19 nt, Human
gccccucagggucccuggu

SEQ ID NO: 2962180 - RNA, 23 nt, Human
gccccucaacucuccuccagagu

SEQ ID NO: 2962181 - RNA, 23 nt, Human
gccccugcacagcaggcugccag

SEQ ID NO: 2962182 - RNA, 14 nt, Human
gccccugcacagca

SEQ ID NO: 2962183 - RNA, 17 nt, Human
gccccugcacagcaggc

SEQ ID NO: 2962184 - RNA, 22 nt, Human
gccccugcacagcaggcugcca

SEQ ID NO: 2962185 - RNA, 19 nt, Human
gccccugcacuccagccug

SEQ ID NO: 2962186 - RNA, 23 nt, Human
gccccuggcagccccuguucugg

SEQ ID NO: 2962187 - RNA, 19 nt, Human
gccccuucugacccaugcu

SEQ ID NO: 2962188 - RNA, 12 nt, Human
gcccggcuccag

SEQ ID NO: 2962189 - RNA, 13 nt, Human
gcccggcuccagg

SEQ ID NO: 2962190 - RNA, 14 nt, Human
gcccggcuccaggc

SEQ ID NO: 2962191 - RNA, 15 nt, Human
gcccggcuccaggcu

SEQ ID NO: 2962192 - RNA, 12 nt, Human
gcccgggcucug

SEQ ID NO: 2962193 - RNA, 18 nt, Human
gcccgggcucugccuccc

SEQ ID NO: 2962194 - RNA, 15 nt, Human
gcccgggcucugccu

SEQ ID NO: 2962195 - RNA, 14 nt, Human
gcccgggcucugcc

SEQ ID NO: 2962196 - RNA, 13 nt, Human
gcccgggcucugc

SEQ ID NO: 2962197 - RNA, 21 nt, Human
gcccgggcucugccucccauc

SEQ ID NO: 2962198 - RNA, 20 nt, Human
gcccgggcucugccucccau

SEQ ID NO: 2962199 - RNA, 19 nt, Human
gcccgggcucugccuccca

SEQ ID NO: 2962200 - RNA, 14 nt, Human
gcccucuccugggc

SEQ ID NO: 2962201 - RNA, 15 nt, Human
gcccucuccugggca

SEQ ID NO: 2962202 - RNA, 16 nt, Human
gcccucuccugggcag

SEQ ID NO: 2962203 - RNA, 22 nt, Human
gcccucugcccacucccugcaa

SEQ ID NO: 2962204 - RNA, 18 nt, Human
gcccucuccugggcagcu

SEQ ID NO: 2962205 - RNA, 19 nt, Human
gcccucuccugggcagcug

SEQ ID NO: 2962206 - RNA, 21 nt, Human
gcccucuccugggcagcugcc

SEQ ID NO: 2962207 - RNA, 22 nt, Human
gccucaagugauucuccugccu

SEQ ID NO: 2962208 - RNA, 24 nt, Human
gccucaagugauucuccugccuca

SEQ ID NO: 2962209 - RNA, 18 nt, Human
gccucagcauccuggcac

SEQ ID NO: 2962210 - RNA, 17 nt, Human
gccucagcauccuggca

SEQ ID NO: 2962211 - RNA, 21 nt, Human
gccucagcauccuggcacccg

SEQ ID NO: 2962212 - RNA, 23 nt, Human
gccgucuaccugaggggccucuu

SEQ ID NO: 2962213 - RNA, 22 nt, Human
gccgucuaccugaggggccucu

SEQ ID NO: 2962214 - RNA, 20 nt, Human
gccgucuaccugaggggccu

SEQ ID NO: 2962215 - RNA, 18 nt, Human
gccgucuaccugaggggc

SEQ ID NO: 2962216 - RNA, 13 nt, Human
gccgcagcccugc

SEQ ID NO: 2962217 - RNA, 17 nt, Human
gccgagauagccaaggc

SEQ ID NO: 2962218 - RNA, 15 nt, Human
gccgcagcccugcag

SEQ ID NO: 2962219 - RNA, 17 nt, Human
gccgcagcccugcagag

SEQ ID NO: 2962220 - RNA, 16 nt, Human
gccgcagcccugcaga

SEQ ID NO: 2962221 - RNA, 16 nt, Human
gccgagauagccaagg

SEQ ID NO: 2962222 - RNA, 19 nt, Human
gcccuucuuuccacagaag

SEQ ID NO: 2962223 - RNA, 23 nt, Human
gcccuucucuccagccccuggau

SEQ ID NO: 2962224 - RNA, 13 nt, Human
gcccuucucucca

SEQ ID NO: 2962225 - RNA, 11 nt, Human
gccugcccagg

SEQ ID NO: 2962226 - RNA, 12 nt, Human
gccugcccaggc

SEQ ID NO: 2962227 - RNA, 14 nt, Human
gccuggacccugug

SEQ ID NO: 2962228 - RNA, 15 nt, Human
gccucugacacacag

SEQ ID NO: 2962229 - RNA, 16 nt, Human
gccucugacacacagc

SEQ ID NO: 2962230 - RNA, 16 nt, Human
gccucugcacuccccu

SEQ ID NO: 2962231 - RNA, 20 nt, Human
gccucugcacuccccugcug

SEQ ID NO: 2962232 - RNA, 19 nt, Human
gccucugcacuccccugcu

SEQ ID NO: 2962233 - RNA, 18 nt, Human
gccucugcacuccccugc

SEQ ID NO: 2962234 - RNA, 17 nt, Human
gccucugcacuccccug

SEQ ID NO: 2962235 - RNA, 13 nt, Human
gccugagaugguc

SEQ ID NO: 2962236 - RNA, 15 nt, Human
gccucugcacucccc

SEQ ID NO: 2962237 - RNA, 21 nt, Human
gccucugcacuccccugcugg

SEQ ID NO: 2962238 - RNA, 15 nt, Human
gccucucccaucacu

SEQ ID NO: 2962239 - RNA, 22 nt, Human
gccucagccucccaaagugcug

SEQ ID NO: 2962240 - RNA, 17 nt, Human
gccucccaucacccgcu

SEQ ID NO: 2962241 - RNA, 12 nt, Human
gccucagccucc

SEQ ID NO: 2962242 - RNA, 14 nt, Human
gccucagccuccca

SEQ ID NO: 2962243 - RNA, 20 nt, Human
gccucccgaauagcugggac

SEQ ID NO: 2962244 - RNA, 21 nt, Human
gccucccgaguagcugggacu

SEQ ID NO: 2962245 - RNA, 23 nt, Human
gccucccgaguagcugggacuac

SEQ ID NO: 2962246 - RNA, 18 nt, Human
gccucccgaauagcuggg

SEQ ID NO: 2962247 - RNA, 19 nt, Human
gccucccgaauagcuggga

SEQ ID NO: 2962248 - RNA, 11 nt, Human
gccuccccucc

SEQ ID NO: 2962249 - RNA, 12 nt, Human
gccuccccuccu

SEQ ID NO: 2962250 - RNA, 13 nt, Human
gccuccccuccuc

SEQ ID NO: 2962251 - RNA, 14 nt, Human
gccuccccuccucu

SEQ ID NO: 2962252 - RNA, 17 nt, Human
gcgcugccccuggcagc

SEQ ID NO: 2962253 - RNA, 14 nt, Human
gcgcugccccuggc

SEQ ID NO: 2962254 - RNA, 20 nt, Human
gcgccuacaggagugagcac

SEQ ID NO: 2962255 - RNA, 21 nt, Human
gcgccuacaggagugagcacu

SEQ ID NO: 2962256 - RNA, 22 nt, Human
gcgccacugugcuccagccugg

SEQ ID NO: 2962257 - RNA, 23 nt, Human
gcgccacugugcuccagccuggg

SEQ ID NO: 2962258 - RNA, 18 nt, Human
gcgccuacaggagugagc

SEQ ID NO: 2962259 - RNA, 19 nt, Human
gcggaaugaaccacaucuu

SEQ ID NO: 2962260 - RNA, 16 nt, Human
gcggacagccacggcc

SEQ ID NO: 2962261 - RNA, 19 nt, Human
gcggacagccacggccagg

SEQ ID NO: 2962262 - RNA, 18 nt, Human
gcggggacagcuccuucu

SEQ ID NO: 2962263 - RNA, 19 nt, Human
gcggggacagcuccuucug

SEQ ID NO: 2962264 - RNA, 23 nt, Human
gcggacagccacggccaggccag

SEQ ID NO: 2962265 - RNA, 23 nt, Human
gcggggacagcuccuucuguccu

SEQ ID NO: 2962266 - RNA, 20 nt, Human
gcgguccacccaggagcccc

SEQ ID NO: 2962267 - RNA, 23 nt, Human
gcgguccacccaggagccccgag

SEQ ID NO: 2962268 - RNA, 19 nt, Human
gcguccugucggagcccug

SEQ ID NO: 2962269 - RNA, 14 nt, Human
gcuaacuuggguua

SEQ ID NO: 2962270 - RNA, 22 nt, Human
gcuacacaggggaaaagaggag

SEQ ID NO: 2962271 - RNA, 14 nt, Human
gcuaacauggaagu

SEQ ID NO: 2962272 - RNA, 18 nt, Human
gcuaacauggaaguacua

SEQ ID NO: 2962273 - RNA, 17 nt, Human
gcuaacauggaaguacu

SEQ ID NO: 2962274 - RNA, 15 nt, Human
gcgugagccacugca

SEQ ID NO: 2962275 - RNA, 14 nt, Human
gcgugagccacugc

SEQ ID NO: 2962276 - RNA, 22 nt, Human
gcguccugucggagcccugucu

SEQ ID NO: 2962277 - RNA, 22 nt, Human
gcuagacgagcaggcuucuucc

SEQ ID NO: 2962278 - RNA, 21 nt, Human
gcuagacgagcaggcuucuuc

SEQ ID NO: 2962279 - RNA, 23 nt, Human
gccuuauggaacacucugagacu

SEQ ID NO: 2962280 - RNA, 22 nt, Human
gccuuauggaacacucugagac

SEQ ID NO: 2962281 - RNA, 21 nt, Human
gccuuauggaacacucugaga

SEQ ID NO: 2962282 - RNA, 19 nt, Human
gccuuacccucauguucuu

SEQ ID NO: 2962283 - RNA, 20 nt, Human
gccuuagaagucacacagua

SEQ ID NO: 2962284 - RNA, 14 nt, Human
gccugguggcagcu

SEQ ID NO: 2962285 - RNA, 15 nt, Human
gccugguggcagcug

SEQ ID NO: 2962286 - RNA, 17 nt, Human
gccugucagcuaaagaa

SEQ ID NO: 2962287 - RNA, 16 nt, Human
gccugguggcagcugc

SEQ ID NO: 2962288 - RNA, 17 nt, Human
gccugguggcagcugcg

SEQ ID NO: 2962289 - RNA, 18 nt, Human
gccuguaaucacagcuac

SEQ ID NO: 2962290 - RNA, 19 nt, Human
gccuuuuuauaacuuuuua

SEQ ID NO: 2962291 - RNA, 22 nt, Human
gcgacagugagacucugucuca

SEQ ID NO: 2962292 - RNA, 19 nt, Human
gccuuccccuggcacuggc

SEQ ID NO: 2962293 - RNA, 18 nt, Human
gccuucggccuccauccu

SEQ ID NO: 2962294 - RNA, 20 nt, Human
gccuuccccuggcacuggca

SEQ ID NO: 2962295 - RNA, 19 nt, Human
gccuucggccuccauccug

SEQ ID NO: 2962296 - RNA, 21 nt, Human
ggagaccccuuggggagcagg

SEQ ID NO: 2962297 - RNA, 21 nt, Human
ggagagcuagcagcagggagg

SEQ ID NO: 2962298 - RNA, 17 nt, Human
ggagagcuagcagcagg

SEQ ID NO: 2962299 - RNA, 20 nt, Human
ggagcaaaaucgaugcagug

SEQ ID NO: 2962300 - RNA, 20 nt, Human
ggagauuuacaacuggggga

SEQ ID NO: 2962301 - RNA, 15 nt, Human
ggagaggggcacagg

SEQ ID NO: 2962302 - RNA, 20 nt, Human
ggaagccagcaggcucucag

SEQ ID NO: 2962303 - RNA, 23 nt, Human
ggaccccacuccggcccuccaga

SEQ ID NO: 2962304 - RNA, 15 nt, Human
ggagggcuccagaca

SEQ ID NO: 2962305 - RNA, 14 nt, Human
ggagggcuccagac

SEQ ID NO: 2962306 - RNA, 17 nt, Human
ggagggcuccagacaca

SEQ ID NO: 2962307 - RNA, 20 nt, Human
ggagucccaccuuggcugca

SEQ ID NO: 2962308 - RNA, 11 nt, Human
ggagugacaga

SEQ ID NO: 2962309 - RNA, 16 nt, Human
ggagugacagaggcag

SEQ ID NO: 2962310 - RNA, 16 nt, Human
ggaucacagccucuga

SEQ ID NO: 2962311 - RNA, 12 nt, Human
ggagugagcugg

SEQ ID NO: 2962312 - RNA, 14 nt, Human
ggagugagcugguu

SEQ ID NO: 2962313 - RNA, 21 nt, Human
ggagugaguugauagcacaga

SEQ ID NO: 2962314 - RNA, 17 nt, Human
ggagugacagaggcagc

SEQ ID NO: 2962315 - RNA, 18 nt, Human
ggagugacagaggcagcc

SEQ ID NO: 2962316 - RNA, 19 nt, Human
ggagugacagaggcagccc

SEQ ID NO: 2962317 - RNA, 21 nt, Human
ggagugacagaggcagcccca

SEQ ID NO: 2962318 - RNA, 12 nt, Human
ggagggagggcu

SEQ ID NO: 2962319 - RNA, 13 nt, Human
ggagggcuccaga

SEQ ID NO: 2962320 - RNA, 12 nt, Human
ggagggcuccag

SEQ ID NO: 2962321 - RNA, 21 nt, Human
ggaggaucucuugagccuggg

SEQ ID NO: 2962322 - RNA, 17 nt, Human
ggaggaucucuugagcc

SEQ ID NO: 2962323 - RNA, 23 nt, Human
ggaggaucacuugaguccagaag

SEQ ID NO: 2962324 - RNA, 15 nt, Human
ggaggauguucuggg

SEQ ID NO: 2962325 - RNA, 19 nt, Human
ggaggacuccaggcagcag

SEQ ID NO: 2962326 - RNA, 20 nt, Human
ggaggacgcucucuggccuu

SEQ ID NO: 2962327 - RNA, 21 nt, Human
ggaggacgcucucuggccuuc

SEQ ID NO: 2962328 - RNA, 19 nt, Human
ggaggacgcucucuggccu

SEQ ID NO: 2962329 - RNA, 11 nt, Human
ggccacuguga

SEQ ID NO: 2962330 - RNA, 16 nt, Human
ggccaggagccuccug

SEQ ID NO: 2962331 - RNA, 14 nt, Human
ggccaggagccucc

SEQ ID NO: 2962332 - RNA, 16 nt, Human
ggccacugugaagaga

SEQ ID NO: 2962333 - RNA, 11 nt, Human
ggccaggcugg

SEQ ID NO: 2962334 - RNA, 14 nt, Human
ggccaggccagagg

SEQ ID NO: 2962335 - RNA, 16 nt, Human
ggccaggccagaggga

SEQ ID NO: 2962336 - RNA, 15 nt, Human
ggcagguuggugggg

SEQ ID NO: 2962337 - RNA, 19 nt, Human
ggcagugcucacccacacc

SEQ ID NO: 2962338 - RNA, 23 nt, Human
ggcauguucucugaggacacuaa

SEQ ID NO: 2962339 - RNA, 16 nt, Human
ggcagugcuuggccca

SEQ ID NO: 2962340 - RNA, 22 nt, Human
ggccaccugcggugcuaucucc

SEQ ID NO: 2962341 - RNA, 16 nt, Human
ggccaccugcggugcu

SEQ ID NO: 2962342 - RNA, 17 nt, Human
ggccacaagacccuugu

SEQ ID NO: 2962343 - RNA, 16 nt, Human
ggccacaagacccuug

SEQ ID NO: 2962344 - RNA, 15 nt, Human
ggcauuccccaggag

SEQ ID NO: 2962345 - RNA, 21 nt, Human
ggccccucagggucccuggug

SEQ ID NO: 2962346 - RNA, 20 nt, Human
ggccccucagggucccuggu

SEQ ID NO: 2962347 - RNA, 19 nt, Human
ggccccucagggucccugg

SEQ ID NO: 2962348 - RNA, 16 nt, Human
ggccccucaggguccc

SEQ ID NO: 2962349 - RNA, 17 nt, Human
ggccccugccacccugg

SEQ ID NO: 2962350 - RNA, 18 nt, Human
ggccccugccacccuggg

SEQ ID NO: 2962351 - RNA, 13 nt, Human
ggccccugcccgg

SEQ ID NO: 2962352 - RNA, 13 nt, Human
ggccccugccacc

SEQ ID NO: 2962353 - RNA, 16 nt, Human
ggccccugccacccug

SEQ ID NO: 2962354 - RNA, 12 nt, Human
ggccccugccac

SEQ ID NO: 2962355 - RNA, 13 nt, Human
ggccaugggccuc

SEQ ID NO: 2962356 - RNA, 22 nt, Human
ggccaugggacagggaggacgc

SEQ ID NO: 2962357 - RNA, 16 nt, Human
ggcaaggcugucaauu

SEQ ID NO: 2962358 - RNA, 15 nt, Human
ggcacccggccccug

SEQ ID NO: 2962359 - RNA, 16 nt, Human
ggcacccggccccugc

SEQ ID NO: 2962360 - RNA, 12 nt, Human
ggcagagcagag

SEQ ID NO: 2962361 - RNA, 16 nt, Human
ggcagagcagagacca

SEQ ID NO: 2962362 - RNA, 15 nt, Human
ggcagagcagagacc

SEQ ID NO: 2962363 - RNA, 20 nt, Human
ggcagagcagagaccauccc

SEQ ID NO: 2962364 - RNA, 21 nt, Human
ggaucagucugauucccaagc

SEQ ID NO: 2962365 - RNA, 19 nt, Human
ggcaacccccagccugcua

SEQ ID NO: 2962366 - RNA, 15 nt, Human
ggcaaggcugucaau

SEQ ID NO: 2962367 - RNA, 19 nt, Human
ggcaacugcauuggcuuug

SEQ ID NO: 2962368 - RNA, 18 nt, Human
ggcaacugcauuggcuuu

SEQ ID NO: 2962369 - RNA, 14 nt, Human
ggcagcagacacau

SEQ ID NO: 2962370 - RNA, 17 nt, Human
ggcagaggaaagcaaag

SEQ ID NO: 2962371 - RNA, 23 nt, Human
ggcagauacaggaaaagcugcug

SEQ ID NO: 2962372 - RNA, 23 nt, Human
ggcagaguugaagacagagcuac

SEQ ID NO: 2962373 - RNA, 23 nt, Human
ggcaggucuugaacuccuggccu

SEQ ID NO: 2962374 - RNA, 13 nt, Human
ggcagguccaggg

SEQ ID NO: 2962375 - RNA, 19 nt, Human
ggcagcugcgguccaccca

SEQ ID NO: 2962376 - RNA, 18 nt, Human
ggcagcugccuccccucc

SEQ ID NO: 2962377 - RNA, 21 nt, Human
ggcagcugccuccccuccucu

SEQ ID NO: 2962378 - RNA, 21 nt, Human
ggcagcuugaggguugggcug

SEQ ID NO: 2962379 - RNA, 22 nt, Human
ggcagcugccuccccuccucug

SEQ ID NO: 2962380 - RNA, 16 nt, Human
ggcagcagacacaugc

SEQ ID NO: 2962381 - RNA, 16 nt, Human
ggcagcugccuccccu

SEQ ID NO: 2962382 - RNA, 16 nt, Human
ggcagcucaccucucc

SEQ ID NO: 2962383 - RNA, 22 nt, Human
ggcagcucaccucucccuugga

SEQ ID NO: 2962384 - RNA, 21 nt, Human
ggcagcucaccucucccuugg

SEQ ID NO: 2962385 - RNA, 18 nt, Human
ggcagcucaccucucccu

SEQ ID NO: 2962386 - RNA, 17 nt, Human
gcugucuccauguuuga

SEQ ID NO: 2962387 - RNA, 19 nt, Human
gcugucccuuacgugaguc

SEQ ID NO: 2962388 - RNA, 22 nt, Human
gcugucccuuacgugaguccug

SEQ ID NO: 2962389 - RNA, 21 nt, Human
gcugucccuuacgugaguccu

SEQ ID NO: 2962390 - RNA, 23 nt, Human
gcugucaauuacaggaaguacug

SEQ ID NO: 2962391 - RNA, 22 nt, Human
gcugucaauuacaggaaguacu

SEQ ID NO: 2962392 - RNA, 19 nt, Human
gcugucaauuacaggaagu

SEQ ID NO: 2962393 - RNA, 17 nt, Human
gcugucaauuacaggaa

SEQ ID NO: 2962394 - RNA, 16 nt, Human
gcuggugucaccugaa

SEQ ID NO: 2962395 - RNA, 18 nt, Human
gcuggugucaccugaaga

SEQ ID NO: 2962396 - RNA, 20 nt, Human
gcuggucccacucaguccau

SEQ ID NO: 2962397 - RNA, 14 nt, Human
gcuggucccacuca

SEQ ID NO: 2962398 - RNA, 15 nt, Human
gcugguucaggguug

SEQ ID NO: 2962399 - RNA, 21 nt, Human
gcugguuagagguucccuuug

SEQ ID NO: 2962400 - RNA, 16 nt, Human
gcugucaauuacagga

SEQ ID NO: 2962401 - RNA, 22 nt, Human
gcugguucaggguuggccccug

SEQ ID NO: 2962402 - RNA, 22 nt, Human
gcuguauuuuaaaagaaugauu

SEQ ID NO: 2962403 - RNA, 17 nt, Human
gcugggcuucaguggca

SEQ ID NO: 2962404 - RNA, 21 nt, Human
gcugggaugauuggagggggg

SEQ ID NO: 2962405 - RNA, 22 nt, Human
gcugggagagccuuccaggggu

SEQ ID NO: 2962406 - RNA, 19 nt, Human
gcugggagagccuuccagg

SEQ ID NO: 2962407 - RNA, 18 nt, Human
gcugggagagccuuccag

SEQ ID NO: 2962408 - RNA, 17 nt, Human
gcugggagagccuucca

SEQ ID NO: 2962409 - RNA, 13 nt, Human
gcugggagagccu

SEQ ID NO: 2962410 - RNA, 12 nt, Human
gcugggagagcc

SEQ ID NO: 2962411 - RNA, 19 nt, Human
gcugggggccucagugcca

SEQ ID NO: 2962412 - RNA, 20 nt, Human
gcugggggccucagugccac

SEQ ID NO: 2962413 - RNA, 15 nt, Human
gcuggucccacucag

SEQ ID NO: 2962414 - RNA, 19 nt, Human
gcuggucccacucagucca

SEQ ID NO: 2962415 - RNA, 12 nt, Human
gcuggggccagu

SEQ ID NO: 2962416 - RNA, 23 nt, Human
gcugggggaagaagcucucuccu

SEQ ID NO: 2962417 - RNA, 18 nt, Human
gcugggcuucaguggcag

SEQ ID NO: 2962418 - RNA, 19 nt, Human
gcugggcuucaguggcagc

SEQ ID NO: 2962419 - RNA, 19 nt, Human
gcugggacuacagguguga

SEQ ID NO: 2962420 - RNA, 13 nt, Human
gcugggacuacag

SEQ ID NO: 2962421 - RNA, 18 nt, Human
gcugggacuacaggcacc

SEQ ID NO: 2962422 - RNA, 19 nt, Human
gcugggacuacaggcaccc

SEQ ID NO: 2962423 - RNA, 20 nt, Human
gcugggacuacaggcaccca

SEQ ID NO: 2962424 - RNA, 20 nt, Human
gcugggacaugggaaagggg

SEQ ID NO: 2962425 - RNA, 16 nt, Human
gcuggaccuugaacug

SEQ ID NO: 2962426 - RNA, 18 nt, Human
gcuggaccuugaacuggg

SEQ ID NO: 2962427 - RNA, 22 nt, Human
gcugcuugggcuucauccuccu

SEQ ID NO: 2962428 - RNA, 17 nt, Human
gcugcuugggcuucauc

SEQ ID NO: 2962429 - RNA, 21 nt, Human
gcuggaccuugaacuggguac

SEQ ID NO: 2962430 - RNA, 22 nt, Human
gcuggaccuugaacuggguacu

SEQ ID NO: 2962431 - RNA, 11 nt, Human
gcugcucccac

SEQ ID NO: 2962432 - RNA, 23 nt, Human
gcugcuucaaggauccugagcca

SEQ ID NO: 2962433 - RNA, 22 nt, Human
gcugcuucaaggauccugagcc

SEQ ID NO: 2962434 - RNA, 21 nt, Human
gcugcuucaaggauccugagc

SEQ ID NO: 2962435 - RNA, 16 nt, Human
gcugcuugggcuucau

SEQ ID NO: 2962436 - RNA, 17 nt, Human
gcugcgguccacccagg

SEQ ID NO: 2962437 - RNA, 18 nt, Human
gcugcgguccacccagga

SEQ ID NO: 2962438 - RNA, 19 nt, Human
gcugcgguccacccaggag

SEQ ID NO: 2962439 - RNA, 10 nt, Human
gcugcuccca

SEQ ID NO: 2962440 - RNA, 13 nt, Human
gcugcuucaagga

SEQ ID NO: 2962441 - RNA, 16 nt, Human
gcugcgguccacccag

SEQ ID NO: 2962442 - RNA, 14 nt, Human
gcugcccugugagu

SEQ ID NO: 2962443 - RNA, 12 nt, Human
gcugcccuguga

SEQ ID NO: 2962444 - RNA, 11 nt, Human
gcugcccugug

SEQ ID NO: 2962445 - RNA, 16 nt, Human
gcuagauguauguacu

SEQ ID NO: 2962446 - RNA, 18 nt, Human
gcuagauguauguacuuc

SEQ ID NO: 2962447 - RNA, 12 nt, Human
ggaaauauuuau

SEQ ID NO: 2962448 - RNA, 13 nt, Human
ggaaauauuuauu

SEQ ID NO: 2962449 - RNA, 15 nt, Human
ggaaauauuuauuuu

SEQ ID NO: 2962450 - RNA, 17 nt, Human
ggaacagacuggaagca

SEQ ID NO: 2962451 - RNA, 17 nt, Human
ggaaauauuuauuuuaa

SEQ ID NO: 2962452 - RNA, 18 nt, Human
ggaaauauuuauuuuaau

SEQ ID NO: 2962453 - RNA, 15 nt, Human
ggaaaaucagccugc

SEQ ID NO: 2962454 - RNA, 10 nt, Human
ggaaaagaau

SEQ ID NO: 2962455 - RNA, 14 nt, Human
ggaaaauaaauuau

SEQ ID NO: 2962456 - RNA, 23 nt, Human
ggaaccgagggggcugcucccac

SEQ ID NO: 2962457 - RNA, 19 nt, Human
ggaacagacuggaagcaca

SEQ ID NO: 2962458 - RNA, 20 nt, Human
ggaacagacuggaagcacag

SEQ ID NO: 2962459 - RNA, 14 nt, Human
ggaagccagcaggc

SEQ ID NO: 2962460 - RNA, 13 nt, Human
ggaagccagcagg

SEQ ID NO: 2962461 - RNA, 18 nt, Human
ggaagccagcaggcucuc

SEQ ID NO: 2962462 - RNA, 17 nt, Human
ggaagccagcaggcucu

SEQ ID NO: 2962463 - RNA, 16 nt, Human
ggaagccagcaggcuc

SEQ ID NO: 2962464 - RNA, 15 nt, Human
ggaagccagcaggcu

SEQ ID NO: 2962465 - RNA, 23 nt, Human
ggaagcacaugccucucucaggc

SEQ ID NO: 2962466 - RNA, 22 nt, Human
ggaagcacaugccucucucagg

SEQ ID NO: 2962467 - RNA, 21 nt, Human
ggaagcacaugccucucucag

SEQ ID NO: 2962468 - RNA, 13 nt, Human
ggaagagccuugc

SEQ ID NO: 2962469 - RNA, 17 nt, Human
ggaagcacagcuucauu

SEQ ID NO: 2962470 - RNA, 17 nt, Human
ggaagcacaugccucuc

SEQ ID NO: 2962471 - RNA, 15 nt, Human
ggaagcacaugccuc

SEQ ID NO: 2962472 - RNA, 14 nt, Human
ggaagcacaugccu

SEQ ID NO: 2962473 - RNA, 13 nt, Human
ggaagcacaugcc

SEQ ID NO: 2962474 - RNA, 22 nt, Human
gcuuuaccaauugaaguaaaau

SEQ ID NO: 2962475 - RNA, 23 nt, Human
gcuuggcccaggaguuuggccag

SEQ ID NO: 2962476 - RNA, 13 nt, Human
gcuuggcccagga

SEQ ID NO: 2962477 - RNA, 22 nt, Human
gcuuggcccaggaguuuggcca

SEQ ID NO: 2962478 - RNA, 16 nt, Human
gcuuggcccaggaguu

SEQ ID NO: 2962479 - RNA, 15 nt, Human
gcuuggcccaggagu

SEQ ID NO: 2962480 - RNA, 14 nt, Human
gcuuggcccaggag

SEQ ID NO: 2962481 - RNA, 13 nt, Human
ggaaaaauagccu

SEQ ID NO: 2962482 - RNA, 14 nt, Human
ggaaaaacugauuu

SEQ ID NO: 2962483 - RNA, 15 nt, Human
ggaaaaauagccugc

SEQ ID NO: 2962484 - RNA, 17 nt, Human
gcuuuuaaaaaaaaaua

SEQ ID NO: 2962485 - RNA, 20 nt, Human
ggaaaaaauaacaaugaaag

SEQ ID NO: 2962486 - RNA, 14 nt, Human
gcuuuuacuuaaac

SEQ ID NO: 2962487 - RNA, 22 nt, Human
gcuugaggguugggcugguguc

SEQ ID NO: 2962488 - RNA, 16 nt, Human
gcuugccaucccuccc

SEQ ID NO: 2962489 - RNA, 18 nt, Human
gcuugccaucccucccuc

SEQ ID NO: 2962490 - RNA, 21 nt, Human
gcuugccaucccucccuccac

SEQ ID NO: 2962491 - RNA, 17 nt, Human
gcuugcccuggugccuc

SEQ ID NO: 2962492 - RNA, 19 nt, Human
gcuugcccuggugccucac

SEQ ID NO: 2962493 - RNA, 15 nt, Human
gcuuggaggaaggaa

SEQ ID NO: 2962494 - RNA, 14 nt, Human
gcuuggaggaagga

SEQ ID NO: 2962495 - RNA, 13 nt, Human
gcuuggaggaagg

SEQ ID NO: 2962496 - RNA, 21 nt, Human
gcuuccagugaggcucugccc

SEQ ID NO: 2962497 - RNA, 20 nt, Human
gcuuccagugaggcucugcc

SEQ ID NO: 2962498 - RNA, 19 nt, Human
gcuuccagugaggcucugc

SEQ ID NO: 2962499 - RNA, 23 nt, Human
gcuguucacagccagacuggcac

SEQ ID NO: 2962500 - RNA, 18 nt, Human
gcuuccagugaggcucug

SEQ ID NO: 2962501 - RNA, 16 nt, Human
gcuguucacagccaga

SEQ ID NO: 2962502 - RNA, 15 nt, Human
gcuguucacagccag

SEQ ID NO: 2962503 - RNA, 13 nt, Human
gggaaugaagaua

SEQ ID NO: 2962504 - RNA, 17 nt, Human
gggaagggggcugggac

SEQ ID NO: 2962505 - RNA, 16 nt, Human
gggaagggggcuggga

SEQ ID NO: 2962506 - RNA, 14 nt, Human
gggaagggggcugg

SEQ ID NO: 2962507 - RNA, 16 nt, Human
gggaaggauacaaaag

SEQ ID NO: 2962508 - RNA, 14 nt, Human
ggcuuuugugcauu

SEQ ID NO: 2962509 - RNA, 21 nt, Human
gggaaggauacaaaagcaugu

SEQ ID NO: 2962510 - RNA, 23 nt, Human
gggaaggauacaaaagcauguga

SEQ ID NO: 2962511 - RNA, 17 nt, Human
gggacuacaggcaccca

SEQ ID NO: 2962512 - RNA, 16 nt, Human
gggacucaaugcacug

SEQ ID NO: 2962513 - RNA, 15 nt, Human
gggaccucaggccug

SEQ ID NO: 2962514 - RNA, 13 nt, Human
gggaccucaggcc

SEQ ID NO: 2962515 - RNA, 12 nt, Human
gggaccucaggc

SEQ ID NO: 2962516 - RNA, 14 nt, Human
gggaauugaggaca

SEQ ID NO: 2962517 - RNA, 17 nt, Human
ggcugggcucccuuccc

SEQ ID NO: 2962518 - RNA, 12 nt, Human
ggcugggcuuca

SEQ ID NO: 2962519 - RNA, 15 nt, Human
ggcuuaaaacaacac

SEQ ID NO: 2962520 - RNA, 13 nt, Human
ggcugggcuucag

SEQ ID NO: 2962521 - RNA, 17 nt, Human
ggcugggcuucaguggc

SEQ ID NO: 2962522 - RNA, 21 nt, Human
ggcuuaauuauugauguuuuc

SEQ ID NO: 2962523 - RNA, 16 nt, Human
ggcuuagacccucaug

SEQ ID NO: 2962524 - RNA, 18 nt, Human
ggcuuagacccucaugcu

SEQ ID NO: 2962525 - RNA, 17 nt, Human
ggcuuagugauguaauu

SEQ ID NO: 2962526 - RNA, 21 nt, Human
ggcuuagucacugagacagcc

SEQ ID NO: 2962527 - RNA, 10 nt, Human
ggcuuuugug

SEQ ID NO: 2962528 - RNA, 22 nt, Human
ggcuugaguuuaaauuguaaua

SEQ ID NO: 2962529 - RNA, 21 nt, Human
ggcuuggggaccagagcugcc

SEQ ID NO: 2962530 - RNA, 19 nt, Human
ggcuuggggaccagagcug

SEQ ID NO: 2962531 - RNA, 22 nt, Human
ggcugcuucaaggauccugagc

SEQ ID NO: 2962532 - RNA, 14 nt, Human
ggcugcuucaagga

SEQ ID NO: 2962533 - RNA, 12 nt, Human
ggcugcuucaag

SEQ ID NO: 2962534 - RNA, 11 nt, Human
ggcugcuucaa

SEQ ID NO: 2962535 - RNA, 12 nt, Human
ggcugcagggag

SEQ ID NO: 2962536 - RNA, 13 nt, Human
ggcugcagggagu

SEQ ID NO: 2962537 - RNA, 14 nt, Human
ggcugcugaaggcu

SEQ ID NO: 2962538 - RNA, 17 nt, Human
ggcugcugaaggcucga

SEQ ID NO: 2962539 - RNA, 15 nt, Human
ggcugcugaaggcuc

SEQ ID NO: 2962540 - RNA, 18 nt, Human
ggcugcugaaggcucgag

SEQ ID NO: 2962541 - RNA, 13 nt, Human
ggcugcugaaggc

SEQ ID NO: 2962542 - RNA, 23 nt, Human
ggcugcuucaaggauccugagcc

SEQ ID NO: 2962543 - RNA, 19 nt, Human
ggcugggagagccuuccag

SEQ ID NO: 2962544 - RNA, 18 nt, Human
ggcugggagagccuucca

SEQ ID NO: 2962545 - RNA, 19 nt, Human
ggcugggcagaggaaagca

SEQ ID NO: 2962546 - RNA, 15 nt, Human
ggcugggcagaggaa

SEQ ID NO: 2962547 - RNA, 23 nt, Human
ggcugggagagccuuccaggggu

SEQ ID NO: 2962548 - RNA, 20 nt, Human
ggcugggagagccuuccagg

SEQ ID NO: 2962549 - RNA, 14 nt, Human
ggcugggcagagga

SEQ ID NO: 2962550 - RNA, 13 nt, Human
ggcugggcagagg

SEQ ID NO: 2962551 - RNA, 15 nt, Human
ggcugaggugggagg

SEQ ID NO: 2962552 - RNA, 13 nt, Human
ggcugagguggga

SEQ ID NO: 2962553 - RNA, 20 nt, Human
ggccccugcccggcugcgga

SEQ ID NO: 2962554 - RNA, 17 nt, Human
ggcucugccucccauca

SEQ ID NO: 2962555 - RNA, 16 nt, Human
ggccccugcccggcug

SEQ ID NO: 2962556 - RNA, 17 nt, Human
ggccccugcccggcugc

SEQ ID NO: 2962557 - RNA, 24 nt, Human
ggcugcaaaggguaucaggugcug

SEQ ID NO: 2962558 - RNA, 17 nt, Human
ggcugcaccggcuggcc

SEQ ID NO: 2962559 - RNA, 19 nt, Human
ggcugcaccggcuggccug

SEQ ID NO: 2962560 - RNA, 18 nt, Human
ggcugcaccggcuggccu

SEQ ID NO: 2962561 - RNA, 18 nt, Human
ggcugcaaaggguaucag

SEQ ID NO: 2962562 - RNA, 22 nt, Human
ggcugcaaaggguaucaggugc

SEQ ID NO: 2962563 - RNA, 23 nt, Human
ggcugcaaaggguaucaggugcu

SEQ ID NO: 2962564 - RNA, 23 nt, Human
gggcagugcuuggcccaggaguu

SEQ ID NO: 2962565 - RNA, 20 nt, Human
gggcagugcucacccacacc

SEQ ID NO: 2962566 - RNA, 22 nt, Human
gggcagugcuuggcccaggagu

SEQ ID NO: 2962567 - RNA, 20 nt, Human
gggcagugcuuggcccagga

SEQ ID NO: 2962568 - RNA, 19 nt, Human
gggcagugcuuggcccagg

SEQ ID NO: 2962569 - RNA, 18 nt, Human
gggcagugcuuggcccag

SEQ ID NO: 2962570 - RNA, 12 nt, Human
gggcaugacacg

SEQ ID NO: 2962571 - RNA, 17 nt, Human
gggcccagagagggugg

SEQ ID NO: 2962572 - RNA, 19 nt, Human
gggccaccgccuugcccag

SEQ ID NO: 2962573 - RNA, 23 nt, Human
gggccacagagaaaguacuucuc

SEQ ID NO: 2962574 - RNA, 16 nt, Human
gggccacagagaaagu

SEQ ID NO: 2962575 - RNA, 12 nt, Human
gggccuggccug

SEQ ID NO: 2962576 - RNA, 13 nt, Human
gggccuggccuga

SEQ ID NO: 2962577 - RNA, 13 nt, Human
gggcccugccucc

SEQ ID NO: 2962578 - RNA, 13 nt, Human
gggccuggcuccc

SEQ ID NO: 2962579 - RNA, 17 nt, Human
gggccuggcucaggugg

SEQ ID NO: 2962580 - RNA, 18 nt, Human
gggccuggccugagcugg

SEQ ID NO: 2962581 - RNA, 14 nt, Human
gggccuggccugag

SEQ ID NO: 2962582 - RNA, 13 nt, Human
gggauagagagag

SEQ ID NO: 2962583 - RNA, 21 nt, Human
gggauaugauuuaaaucagcc

SEQ ID NO: 2962584 - RNA, 18 nt, Human
gggauaucacuuccauga

SEQ ID NO: 2962585 - RNA, 16 nt, Human
gggauccuccaggugc

SEQ ID NO: 2962586 - RNA, 15 nt, Human
gggauccuccaggug

SEQ ID NO: 2962587 - RNA, 23 nt, Human
gggauccuggaguucugguuccu

SEQ ID NO: 2962588 - RNA, 20 nt, Human
gggcaacccccagccugcua

SEQ ID NO: 2962589 - RNA, 18 nt, Human
gggcaacccuggugacca

SEQ ID NO: 2962590 - RNA, 16 nt, Human
gggaggugaccccagg

SEQ ID NO: 2962591 - RNA, 17 nt, Human
gggaggugggauccucc

SEQ ID NO: 2962592 - RNA, 18 nt, Human
gggagugacagaggcagc

SEQ ID NO: 2962593 - RNA, 11 nt, Human
gggagugagcu

SEQ ID NO: 2962594 - RNA, 14 nt, Human
gggagugagcuggu

SEQ ID NO: 2962595 - RNA, 21 nt, Human
gggcacagaaaauggaagaca

SEQ ID NO: 2962596 - RNA, 20 nt, Human
gggcacagaaaauggaagac

SEQ ID NO: 2962597 - RNA, 18 nt, Human
gggcacagaaaauggaag

SEQ ID NO: 2962598 - RNA, 23 nt, Human
gggcacaccgggcacucagaaga

SEQ ID NO: 2962599 - RNA, 16 nt, Human
gggcacaucauuucaa

SEQ ID NO: 2962600 - RNA, 16 nt, Human
gggcacagggucucua

SEQ ID NO: 2962601 - RNA, 13 nt, Human
gggcacagggucu

SEQ ID NO: 2962602 - RNA, 16 nt, Human
gggcacucagaagaca

SEQ ID NO: 2962603 - RNA, 19 nt, Human
gggcacucagaagacacug

SEQ ID NO: 2962604 - RNA, 17 nt, Human
gggcagguugguggggg

SEQ ID NO: 2962605 - RNA, 11 nt, Human
gggcagagcag

SEQ ID NO: 2962606 - RNA, 20 nt, Human
gggcacucagaagacacuga

SEQ ID NO: 2962607 - RNA, 14 nt, Human
gggcagaaggaaga

SEQ ID NO: 2962608 - RNA, 18 nt, Human
gggcagaaggaagacuuc

SEQ ID NO: 2962609 - RNA, 23 nt, Human
gguuauaacuuaaugaaaacaau

SEQ ID NO: 2962610 - RNA, 13 nt, Human
gguuauggagagg

SEQ ID NO: 2962611 - RNA, 17 nt, Human
gguuaggcauuguggga

SEQ ID NO: 2962612 - RNA, 21 nt, Human
gguuacccaguuagcucucaa

SEQ ID NO: 2962613 - RNA, 13 nt, Human
gguucaaagauau

SEQ ID NO: 2962614 - RNA, 16 nt, Human
gguuauuuuacuuuuu

SEQ ID NO: 2962615 - RNA, 21 nt, Human
gguucaaagauauuuugcuuu

SEQ ID NO: 2962616 - RNA, 13 nt, Human
gguugagguuuca

SEQ ID NO: 2962617 - RNA, 16 nt, Human
gguggugaccucugcc

SEQ ID NO: 2962618 - RNA, 14 nt, Human
gguggugaccucug

SEQ ID NO: 2962619 - RNA, 15 nt, Human
gguggugaccucugc

SEQ ID NO: 2962620 - RNA, 13 nt, Human
gguguaaacacau

SEQ ID NO: 2962621 - RNA, 14 nt, Human
gguguaaacacauc

SEQ ID NO: 2962622 - RNA, 15 nt, Human
ggugguuuucuguuc

SEQ ID NO: 2962623 - RNA, 18 nt, Human
ggugguuuucuguucuuu

SEQ ID NO: 2962624 - RNA, 17 nt, Human
ggugguuucagaaaugu

SEQ ID NO: 2962625 - RNA, 18 nt, Human
ggugguuucagaaaugug

SEQ ID NO: 2962626 - RNA, 21 nt, Human
ggugguuauggagaggguguc

SEQ ID NO: 2962627 - RNA, 19 nt, Human
ggugucaccugaagacuca

SEQ ID NO: 2962628 - RNA, 19 nt, Human
ggugucaagagggucugag

SEQ ID NO: 2962629 - RNA, 17 nt, Human
ggugucaagagggucug

SEQ ID NO: 2962630 - RNA, 22 nt, Human
ggucucacucugucgcccaguc

SEQ ID NO: 2962631 - RNA, 23 nt, Human
ggucucacucugucgcccagucu

SEQ ID NO: 2962632 - RNA, 14 nt, Human
ggucccaccccaca

SEQ ID NO: 2962633 - RNA, 17 nt, Human
ggucccaccccacacac

SEQ ID NO: 2962634 - RNA, 16 nt, Human
ggugacauauacauac

SEQ ID NO: 2962635 - RNA, 21 nt, Human
ggugacagagugagacucugu

SEQ ID NO: 2962636 - RNA, 14 nt, Human
ggucugacccacug

SEQ ID NO: 2962637 - RNA, 21 nt, Human
ggugaccucugccugaaguca

SEQ ID NO: 2962638 - RNA, 22 nt, Human
ggugaccagcaccaucucuccu

SEQ ID NO: 2962639 - RNA, 18 nt, Human
ggugcugaguguacagag

SEQ ID NO: 2962640 - RNA, 15 nt, Human
ggugcugccauccag

SEQ ID NO: 2962641 - RNA, 19 nt, Human
gguggcagugggagcugcc

SEQ ID NO: 2962642 - RNA, 22 nt, Human
gguggcagugggagcugccugu

SEQ ID NO: 2962643 - RNA, 16 nt, Human
gguggcagugggagcu

SEQ ID NO: 2962644 - RNA, 22 nt, Human
gguggccucccaacucacccca

SEQ ID NO: 2962645 - RNA, 23 nt, Human
gguggccucccaacucaccccag

SEQ ID NO: 2962646 - RNA, 15 nt, Human
ggugagaagcagagg

SEQ ID NO: 2962647 - RNA, 16 nt, Human
ggugagaggggaacag

SEQ ID NO: 2962648 - RNA, 23 nt, Human
ggugcuacaaaaacacagcaagg

SEQ ID NO: 2962649 - RNA, 21 nt, Human
ggugcuacaaaaacacagcaa

SEQ ID NO: 2962650 - RNA, 20 nt, Human
ggugcuaucucccccagccc

SEQ ID NO: 2962651 - RNA, 19 nt, Human
ggugcuaucucccccagcc

SEQ ID NO: 2962652 - RNA, 17 nt, Human
ggugcuaucucccccag

SEQ ID NO: 2962653 - RNA, 16 nt, Human
ggugcuaucuccccca

SEQ ID NO: 2962654 - RNA, 18 nt, Human
gguagcauuuguguugaa

SEQ ID NO: 2962655 - RNA, 14 nt, Human
gguagcauuuuaaa

SEQ ID NO: 2962656 - RNA, 22 nt, Human
gguagaagcccuucuaccuucc

SEQ ID NO: 2962657 - RNA, 23 nt, Human
gguagaaauaucugaaaauguau

SEQ ID NO: 2962658 - RNA, 16 nt, Human
gguacuuguggacaca

SEQ ID NO: 2962659 - RNA, 17 nt, Human
gguacuuguggacacag

SEQ ID NO: 2962660 - RNA, 22 nt, Human
gguagaaauaucugaaaaugua

SEQ ID NO: 2962661 - RNA, 11 nt, Human
gguacccacug

SEQ ID NO: 2962662 - RNA, 13 nt, Human
gguacccacugcu

SEQ ID NO: 2962663 - RNA, 16 nt, Human
ggucccaccccacaca

SEQ ID NO: 2962664 - RNA, 15 nt, Human
ggucccaccccacac

SEQ ID NO: 2962665 - RNA, 11 nt, Human
ggucagagccu

SEQ ID NO: 2962666 - RNA, 19 nt, Human
gggugacagagcaagugag

SEQ ID NO: 2962667 - RNA, 17 nt, Human
gggugaagugaagacaa

SEQ ID NO: 2962668 - RNA, 12 nt, Human
ggguucuaccca

SEQ ID NO: 2962669 - RNA, 22 nt, Human
ggguucaagcgauucuucugcu

SEQ ID NO: 2962670 - RNA, 23 nt, Human
ggguucaagcgauucuucugcuu

SEQ ID NO: 2962671 - RNA, 12 nt, Human
gggguggccucc

SEQ ID NO: 2962672 - RNA, 17 nt, Human
gggguggggaccucagg

SEQ ID NO: 2962673 - RNA, 23 nt, Human
ggggcugcaccggcuggccuggc

SEQ ID NO: 2962674 - RNA, 22 nt, Human
gggggaggugggauccuccagg

SEQ ID NO: 2962675 - RNA, 22 nt, Human
ggggcugcaccggcuggccugg

SEQ ID NO: 2962676 - RNA, 21 nt, Human
ggggcugcaccggcuggccug

SEQ ID NO: 2962677 - RNA, 12 nt, Human
ggggcugcaccg

SEQ ID NO: 2962678 - RNA, 19 nt, Human
ggggcugaggugggaggau

SEQ ID NO: 2962679 - RNA, 12 nt, Human
gggucugaggaa

SEQ ID NO: 2962680 - RNA, 21 nt, Human
gggucugaggaauccagaccc

SEQ ID NO: 2962681 - RNA, 12 nt, Human
gggucucacucu

SEQ ID NO: 2962682 - RNA, 14 nt, Human
gggucucacucugu

SEQ ID NO: 2962683 - RNA, 17 nt, Human
ggguaagugagagaggg

SEQ ID NO: 2962684 - RNA, 20 nt, Human
ggggcucccagccaggcccu

SEQ ID NO: 2962685 - RNA, 13 nt, Human
ggggcucccagcc

SEQ ID NO: 2962686 - RNA, 16 nt, Human
ggggcucccagccagg

SEQ ID NO: 2962687 - RNA, 12 nt, Human
ggggcucccagc

SEQ ID NO: 2962688 - RNA, 17 nt, Human
ggggcugaggugggagg

SEQ ID NO: 2962689 - RNA, 16 nt, Human
ggggcaacccugguga

SEQ ID NO: 2962690 - RNA, 13 nt, Human
ggggcagugcuca

SEQ ID NO: 2962691 - RNA, 17 nt, Human
ggggcagugcucaccca

SEQ ID NO: 2962692 - RNA, 20 nt, Human
ggggcagugcucacccacac

SEQ ID NO: 2962693 - RNA, 23 nt, Human
ggggcagugcuuggcccaggagu

SEQ ID NO: 2962694 - RNA, 21 nt, Human
ggggcagugcuuggcccagga

SEQ ID NO: 2962695 - RNA, 22 nt, Human
gggcuuggggaccagagcugcc

SEQ ID NO: 2962696 - RNA, 16 nt, Human
ggggaaaaucagccug

SEQ ID NO: 2962697 - RNA, 19 nt, Human
ggggaaaaucagccugcuc

SEQ ID NO: 2962698 - RNA, 17 nt, Human
ggggaaaaucagccugc

SEQ ID NO: 2962699 - RNA, 21 nt, Human
ggggaaaaucagccugcucca

SEQ ID NO: 2962700 - RNA, 19 nt, Human
uaucgucacugcuuaacuu

SEQ ID NO: 2962701 - RNA, 15 nt, Human
uaucuaaauguugaa

SEQ ID NO: 2962702 - RNA, 16 nt, Human
uaucaugacaaagacu

SEQ ID NO: 2962703 - RNA, 17 nt, Human
uaucaggugcugccauc

SEQ ID NO: 2962704 - RNA, 19 nt, Human
uauauuuuuuguuaaauga

SEQ ID NO: 2962705 - RNA, 19 nt, Human
uauauuuuuuaaaauaagu

SEQ ID NO: 2962706 - RNA, 18 nt, Human
uauauuuuuuaaaauaag

SEQ ID NO: 2962707 - RNA, 14 nt, Human
uauauuugaaauau

SEQ ID NO: 2962708 - RNA, 13 nt, Human
uauauuugaaaua

SEQ ID NO: 2962709 - RNA, 15 nt, Human
uauauguagauguau

SEQ ID NO: 2962710 - RNA, 18 nt, Human
uauauguagauguaugca

SEQ ID NO: 2962711 - RNA, 20 nt, Human
uauauguagauguaugcaca

SEQ ID NO: 2962712 - RNA, 20 nt, Human
uauauuuauuacuguaagaa

SEQ ID NO: 2962713 - RNA, 23 nt, Human
uauauuuauuacuguaagaaaau

SEQ ID NO: 2962714 - RNA, 13 nt, Human
uaguuucuccaag

SEQ ID NO: 2962715 - RNA, 23 nt, Human
uaguuugauuaaauucuugcaaa

SEQ ID NO: 2962716 - RNA, 12 nt, Human
uaguuugcaguu

SEQ ID NO: 2962717 - RNA, 21 nt, Human
uaguuguaccgcaaugugacu

SEQ ID NO: 2962718 - RNA, 15 nt, Human
uaguggauguucuga

SEQ ID NO: 2962719 - RNA, 18 nt, Human
uagucaaauugugugaaa

SEQ ID NO: 2962720 - RNA, 14 nt, Human
uagucaaauugugu

SEQ ID NO: 2962721 - RNA, 21 nt, Human
uaguuugauuaaauucuugca

SEQ ID NO: 2962722 - RNA, 20 nt, Human
uauaacaaaggauacuuauu

SEQ ID NO: 2962723 - RNA, 20 nt, Human
uauaaugaaugaaacauuuu

SEQ ID NO: 2962724 - RNA, 18 nt, Human
uauaaugaaugaaacauu

SEQ ID NO: 2962725 - RNA, 22 nt, Human
uauaacaaaggauacuuauuua

SEQ ID NO: 2962726 - RNA, 23 nt, Human
uauaauuccuguuuuuauuauua

SEQ ID NO: 2962727 - RNA, 17 nt, Human
uauaauucuacuuugag

SEQ ID NO: 2962728 - RNA, 14 nt, Human
uauaauguaagcuc

SEQ ID NO: 2962729 - RNA, 19 nt, Human
uauaauguaagcucuacug

SEQ ID NO: 2962730 - RNA, 20 nt, Human
uauaauguaagcucuacuga

SEQ ID NO: 2962731 - RNA, 17 nt, Human
uaggaacacuccuucac

SEQ ID NO: 2962732 - RNA, 21 nt, Human
uaggaacuuaaauaaugugaa

SEQ ID NO: 2962733 - RNA, 14 nt, Human
uaggaacacuccuu

SEQ ID NO: 2962734 - RNA, 13 nt, Human
uaggaacacuccu

SEQ ID NO: 2962735 - RNA, 13 nt, Human
uaggaagacuuug

SEQ ID NO: 2962736 - RNA, 15 nt, Human
uaggaagacuuugga

SEQ ID NO: 2962737 - RNA, 14 nt, Human
uaggaagacuuugg

SEQ ID NO: 2962738 - RNA, 17 nt, Human
uaggaagacuuuggaaa

SEQ ID NO: 2962739 - RNA, 16 nt, Human
uaggaagacuuuggaa

SEQ ID NO: 2962740 - RNA, 13 nt, Human
uaggccuggccag

SEQ ID NO: 2962741 - RNA, 14 nt, Human
uaggccuggccaga

SEQ ID NO: 2962742 - RNA, 13 nt, Human
uaggccaugggac

SEQ ID NO: 2962743 - RNA, 15 nt, Human
uaggaagguuaaugu

SEQ ID NO: 2962744 - RNA, 23 nt, Human
uaggaauugacccacaagaaaug

SEQ ID NO: 2962745 - RNA, 20 nt, Human
uaggaauugacccacaagaa

SEQ ID NO: 2962746 - RNA, 11 nt, Human
uagcugggacu

SEQ ID NO: 2962747 - RNA, 18 nt, Human
uagcugggacuacaggug

SEQ ID NO: 2962748 - RNA, 20 nt, Human
uagcugggacuacaggcacc

SEQ ID NO: 2962749 - RNA, 22 nt, Human
uagcucauucuccuuguguuac

SEQ ID NO: 2962750 - RNA, 17 nt, Human
uagccugccucuucucu

SEQ ID NO: 2962751 - RNA, 21 nt, Human
uagcucuaggagggcuggcaa

SEQ ID NO: 2962752 - RNA, 14 nt, Human
uagcccaaaaccaa

SEQ ID NO: 2962753 - RNA, 14 nt, Human
uagcccugaacauu

SEQ ID NO: 2962754 - RNA, 16 nt, Human
uagccuaggugacaga

SEQ ID NO: 2962755 - RNA, 21 nt, Human
uagaguuuagcccugaacauu

SEQ ID NO: 2962756 - RNA, 17 nt, Human
uagaguuuagcuggaaa

SEQ ID NO: 2962757 - RNA, 18 nt, Human
uagaguuuagcuggaaaa

SEQ ID NO: 2962758 - RNA, 21 nt, Human
uagagguucaaagauauuuug

SEQ ID NO: 2962759 - RNA, 19 nt, Human
uagagguucaaagauauuu

SEQ ID NO: 2962760 - RNA, 16 nt, Human
uagagguucaaagaua

SEQ ID NO: 2962761 - RNA, 16 nt, Human
uagagagagaccacuu

SEQ ID NO: 2962762 - RNA, 11 nt, Human
uagagacaggg

SEQ ID NO: 2962763 - RNA, 16 nt, Human
uagauguaugcacaca

SEQ ID NO: 2962764 - RNA, 16 nt, Human
uagauguauguacuuc

SEQ ID NO: 2962765 - RNA, 22 nt, Human
uagauguaugcacacacauaua

SEQ ID NO: 2962766 - RNA, 19 nt, Human
uagauguaugcacacacau

SEQ ID NO: 2962767 - RNA, 20 nt, Human
uagauguaugcacacacaua

SEQ ID NO: 2962768 - RNA, 20 nt, Human
uagauguauguacuucaugc

SEQ ID NO: 2962769 - RNA, 12 nt, Human
uagauguauaua

SEQ ID NO: 2962770 - RNA, 18 nt, Human
uagauaauacaccacuac

SEQ ID NO: 2962771 - RNA, 13 nt, Human
uagauguugcuaa

SEQ ID NO: 2962772 - RNA, 11 nt, Human
uagauguugcu

SEQ ID NO: 2962773 - RNA, 16 nt, Human
uagcacuuugggaggc

SEQ ID NO: 2962774 - RNA, 19 nt, Human
uagcagagaaugaaagggc

SEQ ID NO: 2962775 - RNA, 23 nt, Human
uagcagagaaugaaagggcccag

SEQ ID NO: 2962776 - RNA, 20 nt, Human
uagcagcccucaauugugaa

SEQ ID NO: 2962777 - RNA, 21 nt, Human
uagcagcccucaauugugaaa

SEQ ID NO: 2962778 - RNA, 20 nt, Human
uagcagggcauggcugggaa

SEQ ID NO: 2962779 - RNA, 23 nt, Human
uagcaguaaaaaaugguguuuua

SEQ ID NO: 2962780 - RNA, 21 nt, Human
uacuguaucaugacaaagacu

SEQ ID NO: 2962781 - RNA, 17 nt, Human
uacugcauaugaaagga

SEQ ID NO: 2962782 - RNA, 14 nt, Human
uacuuguggacaca

SEQ ID NO: 2962783 - RNA, 19 nt, Human
uacuuguggacacagcucu

SEQ ID NO: 2962784 - RNA, 15 nt, Human
uacuuguggacacag

SEQ ID NO: 2962785 - RNA, 18 nt, Human
uacuuguggacacagcuc

SEQ ID NO: 2962786 - RNA, 15 nt, Human
uagaaauauaauuga

SEQ ID NO: 2962787 - RNA, 20 nt, Human
uagaaauaucugaaaaugua

SEQ ID NO: 2962788 - RNA, 21 nt, Human
uagaaauaucugaaaauguau

SEQ ID NO: 2962789 - RNA, 23 nt, Human
uagaaauaucugaaaauguaugu

SEQ ID NO: 2962790 - RNA, 13 nt, Human
uagaaauaacaga

SEQ ID NO: 2962791 - RNA, 16 nt, Human
uagaaauaacagaaga

SEQ ID NO: 2962792 - RNA, 18 nt, Human
uaccuuuuuuauacauaa

SEQ ID NO: 2962793 - RNA, 19 nt, Human
uaccuuuuuuauacauaaa

SEQ ID NO: 2962794 - RNA, 20 nt, Human
uaccuuuuuuauacauaaac

SEQ ID NO: 2962795 - RNA, 20 nt, Human
uaccuuuguauucucuccug

SEQ ID NO: 2962796 - RNA, 15 nt, Human
uacccaucuuaaaaa

SEQ ID NO: 2962797 - RNA, 22 nt, Human
uacccaucccauaugccugggc

SEQ ID NO: 2962798 - RNA, 19 nt, Human
uacccaucuuaaaaacaac

SEQ ID NO: 2962799 - RNA, 18 nt, Human
uacccaucuuaaaaacaa

SEQ ID NO: 2962800 - RNA, 19 nt, Human
uaccccaagacucccauga

SEQ ID NO: 2962801 - RNA, 22 nt, Human
uaccuuuuuuauacauaaacaa

SEQ ID NO: 2962802 - RNA, 19 nt, Human
uacuaaccagcagaaaugc

SEQ ID NO: 2962803 - RNA, 18 nt, Human
uacuaaccagcagaaaug

SEQ ID NO: 2962804 - RNA, 17 nt, Human
uacuaaccagcagaaau

SEQ ID NO: 2962805 - RNA, 17 nt, Human
uacuacaguccucccau

SEQ ID NO: 2962806 - RNA, 12 nt, Human
uacuacaguccu

SEQ ID NO: 2962807 - RNA, 15 nt, Human
uacuaauagacaauu

SEQ ID NO: 2962808 - RNA, 17 nt, Human
uacuaauagacaauuua

SEQ ID NO: 2962809 - RNA, 22 nt, Human
uacuaauaaaauuuaaaagucu

SEQ ID NO: 2962810 - RNA, 16 nt, Human
uacucagaauucucua

SEQ ID NO: 2962811 - RNA, 22 nt, Human
uacucagaauucucuaguuuga

SEQ ID NO: 2962812 - RNA, 20 nt, Human
uacuacaguuuguuaguaug

SEQ ID NO: 2962813 - RNA, 20 nt, Human
uacuacaguccucccaucuc

SEQ ID NO: 2962814 - RNA, 12 nt, Human
uacucaccucac

SEQ ID NO: 2962815 - RNA, 14 nt, Human
uacucaccucaccc

SEQ ID NO: 2962816 - RNA, 17 nt, Human
uacucccaucugugaaa

SEQ ID NO: 2962817 - RNA, 16 nt, Human
uacucccaucugugaa

SEQ ID NO: 2962818 - RNA, 14 nt, Human
uacucccaucugug

SEQ ID NO: 2962819 - RNA, 12 nt, Human
uacucccaucug

SEQ ID NO: 2962820 - RNA, 23 nt, Human
uacugauguuccuagugaaagag

SEQ ID NO: 2962821 - RNA, 19 nt, Human
uacugagagugaacaaauu

SEQ ID NO: 2962822 - RNA, 15 nt, Human
uacugaggugcuaug

SEQ ID NO: 2962823 - RNA, 15 nt, Human
uacccaaauuaagag

SEQ ID NO: 2962824 - RNA, 15 nt, Human
uacccacccccaccc

SEQ ID NO: 2962825 - RNA, 12 nt, Human
uacccaccccca

SEQ ID NO: 2962826 - RNA, 23 nt, Human
uacccacccccacccaagggccu

SEQ ID NO: 2962827 - RNA, 19 nt, Human
uacccacccccacccaagg

SEQ ID NO: 2962828 - RNA, 17 nt, Human
uacccacccccacccaa

SEQ ID NO: 2962829 - RNA, 11 nt, Human
uacccacugcu

SEQ ID NO: 2962830 - RNA, 12 nt, Human
uacccacugcuc

SEQ ID NO: 2962831 - RNA, 13 nt, Human
uacccacugcucu

SEQ ID NO: 2962832 - RNA, 14 nt, Human
uacccacugcucug

SEQ ID NO: 2962833 - RNA, 16 nt, Human
uacccagcgagcccug

SEQ ID NO: 2962834 - RNA, 18 nt, Human
uacccagcgagcccuggu

SEQ ID NO: 2962835 - RNA, 22 nt, Human
uacccaggugcuaggaacacuc

SEQ ID NO: 2962836 - RNA, 13 nt, Human
uaccaauauuuaa

SEQ ID NO: 2962837 - RNA, 16 nt, Human
uaccaauauuuaaucu

SEQ ID NO: 2962838 - RNA, 21 nt, Human
uaccaauauuuaaucuuuuau

SEQ ID NO: 2962839 - RNA, 23 nt, Human
uaccaauauuuaaucuuuuauga

SEQ ID NO: 2962840 - RNA, 13 nt, Human
uaccacagacaua

SEQ ID NO: 2962841 - RNA, 23 nt, Human
uaccauuuugggguacccacugc

SEQ ID NO: 2962842 - RNA, 23 nt, Human
uaccacaggaaccacaagacugc

SEQ ID NO: 2962843 - RNA, 22 nt, Human
uacauaagauaaaugugcugaa

SEQ ID NO: 2962844 - RNA, 18 nt, Human
uacauaagauaaaugugc

SEQ ID NO: 2962845 - RNA, 19 nt, Human
uacauaagauaaaugugcu

SEQ ID NO: 2962846 - RNA, 23 nt, Human
uacaguuacucagaauucucuag

SEQ ID NO: 2962847 - RNA, 19 nt, Human
uacaguuacucagaauucu

SEQ ID NO: 2962848 - RNA, 13 nt, Human
uacauuuuacaca

SEQ ID NO: 2962849 - RNA, 15 nt, Human
uacauuuuacacacu

SEQ ID NO: 2962850 - RNA, 18 nt, Human
uacauuuuacacacugua

SEQ ID NO: 2962851 - RNA, 22 nt, Human
uacauuuuacacacuguacaca

SEQ ID NO: 2962852 - RNA, 16 nt, Human
uaccaacacgagcagg

SEQ ID NO: 2962853 - RNA, 21 nt, Human
uacauuugcuccauccuccug

SEQ ID NO: 2962854 - RNA, 16 nt, Human
uacauuuguauaaaau

SEQ ID NO: 2962855 - RNA, 17 nt, Human
uacauuuguauaaaaua

SEQ ID NO: 2962856 - RNA, 11 nt, Human
uacauuugugu

SEQ ID NO: 2962857 - RNA, 21 nt, Human
uacaugagguacugagaguga

SEQ ID NO: 2962858 - RNA, 22 nt, Human
uacaugagguacugagagugaa

SEQ ID NO: 2962859 - RNA, 17 nt, Human
uacacacuguacacaua

SEQ ID NO: 2962860 - RNA, 18 nt, Human
uacacacuguacacauaa

SEQ ID NO: 2962861 - RNA, 22 nt, Human
uacacacugcauguuugugauu

SEQ ID NO: 2962862 - RNA, 16 nt, Human
uacacugugcugaguc

SEQ ID NO: 2962863 - RNA, 14 nt, Human
uacacuguuucaaa

SEQ ID NO: 2962864 - RNA, 17 nt, Human
uacacacugcauguuug

SEQ ID NO: 2962865 - RNA, 21 nt, Human
uacacacacacgcgugcacac

SEQ ID NO: 2962866 - RNA, 15 nt, Human
uacacacacauacac

SEQ ID NO: 2962867 - RNA, 17 nt, Human
uacacaaugguuuucuu

SEQ ID NO: 2962868 - RNA, 23 nt, Human
uacacaaugguuuucuugugugu

SEQ ID NO: 2962869 - RNA, 21 nt, Human
uacacaaugguuuucuugugu

SEQ ID NO: 2962870 - RNA, 13 nt, Human
uacacuuuaugca

SEQ ID NO: 2962871 - RNA, 18 nt, Human
uacagaaaaguugaauuu

SEQ ID NO: 2962872 - RNA, 22 nt, Human
uacagaaaaguugaauuuuaca

SEQ ID NO: 2962873 - RNA, 13 nt, Human
uacacuugugaau

SEQ ID NO: 2962874 - RNA, 19 nt, Human
uacacuguuucaaacuuua

SEQ ID NO: 2962875 - RNA, 17 nt, Human
uacacuguuucaaacuu

SEQ ID NO: 2962876 - RNA, 18 nt, Human
uacacuguuucaaacuuu

SEQ ID NO: 2962877 - RNA, 24 nt, Human
uacagcaaggagauuuacaacugg

SEQ ID NO: 2962878 - RNA, 23 nt, Human
uacagcuugaccgugaggccaga

SEQ ID NO: 2962879 - RNA, 17 nt, Human
uacaggaaaagcugcug

SEQ ID NO: 2962880 - RNA, 18 nt, Human
uacaggaaaagcugcuga

SEQ ID NO: 2962881 - RNA, 21 nt, Human
uacagcuugaccgugaggcca

SEQ ID NO: 2962882 - RNA, 22 nt, Human
uacagcuugaccgugaggccag

SEQ ID NO: 2962883 - RNA, 19 nt, Human
uacaggaaaagcugcugac

SEQ ID NO: 2962884 - RNA, 16 nt, Human
uacaggcacccaccau

SEQ ID NO: 2962885 - RNA, 14 nt, Human
uacaggauuugaaa

SEQ ID NO: 2962886 - RNA, 19 nt, Human
uaauaaaugaaugucacuu

SEQ ID NO: 2962887 - RNA, 20 nt, Human
uaagugguacuaacuuuccu

SEQ ID NO: 2962888 - RNA, 21 nt, Human
uaauaguucagguaacaggca

SEQ ID NO: 2962889 - RNA, 15 nt, Human
uaauaauguuucaaa

SEQ ID NO: 2962890 - RNA, 14 nt, Human
uaauaauguuucaa

SEQ ID NO: 2962891 - RNA, 23 nt, Human
uaaucucugauucccugauuuaa

SEQ ID NO: 2962892 - RNA, 11 nt, Human
uaaucuaaaug

SEQ ID NO: 2962893 - RNA, 23 nt, Human
uaaugauaacuggaaacuucagc

SEQ ID NO: 2962894 - RNA, 19 nt, Human
uaaugccacuaaauugaca

SEQ ID NO: 2962895 - RNA, 22 nt, Human
uaauuggaaaggcagcucuaaa

SEQ ID NO: 2962896 - RNA, 17 nt, Human
uaauugggcacuauuua

SEQ ID NO: 2962897 - RNA, 20 nt, Human
uaauugggcacuauuuauuu

SEQ ID NO: 2962898 - RNA, 19 nt, Human
uaauuugugauacaaugcu

SEQ ID NO: 2962899 - RNA, 22 nt, Human
uaauuugugauacaaugcugug

SEQ ID NO: 2962900 - RNA, 15 nt, Human
uaauuugguuuucac

SEQ ID NO: 2962901 - RNA, 17 nt, Human
uaauuugguuuucacau

SEQ ID NO: 2962902 - RNA, 18 nt, Human
uaauuugguuuucacauu

SEQ ID NO: 2962903 - RNA, 20 nt, Human
uaauuuguaguguuggagaa

SEQ ID NO: 2962904 - RNA, 23 nt, Human
uaauuuguaguguuggagaagaa

SEQ ID NO: 2962905 - RNA, 14 nt, Human
uaauuugugauaca

SEQ ID NO: 2962906 - RNA, 15 nt, Human
uaauuugugauacaa

SEQ ID NO: 2962907 - RNA, 18 nt, Human
uaauuugugauacaaugc

SEQ ID NO: 2962908 - RNA, 18 nt, Human
uaauucuuagcucauucu

SEQ ID NO: 2962909 - RNA, 22 nt, Human
uaauugacaggauuauuggaaa

SEQ ID NO: 2962910 - RNA, 20 nt, Human
uaauugacaggauuauugga

SEQ ID NO: 2962911 - RNA, 14 nt, Human
uaaugcgugcauac

SEQ ID NO: 2962912 - RNA, 14 nt, Human
uaauguuucaaaca

SEQ ID NO: 2962913 - RNA, 15 nt, Human
uaauguuucaaacau

SEQ ID NO: 2962914 - RNA, 20 nt, Human
uaauuaaaagaauauuuuaa

SEQ ID NO: 2962915 - RNA, 17 nt, Human
uaauuaaaacacaacau

SEQ ID NO: 2962916 - RNA, 20 nt, Human
uaacuuuuauaaacuuuacc

SEQ ID NO: 2962917 - RNA, 16 nt, Human
uaaccagcagaaaugc

SEQ ID NO: 2962918 - RNA, 19 nt, Human
uaaccagcagaaaugccuu

SEQ ID NO: 2962919 - RNA, 14 nt, Human
uaaccagcagaaau

SEQ ID NO: 2962920 - RNA, 14 nt, Human
uaacaggcuuagug

SEQ ID NO: 2962921 - RNA, 19 nt, Human
uaacaggcagauacaggaa

SEQ ID NO: 2962922 - RNA, 21 nt, Human
uaacaggcuuagugauguaau

SEQ ID NO: 2962923 - RNA, 12 nt, Human
uaacagaaaugu

SEQ ID NO: 2962924 - RNA, 14 nt, Human
uaacagaaauguac

SEQ ID NO: 2962925 - RNA, 15 nt, Human
uaacagaaauguaca

SEQ ID NO: 2962926 - RNA, 13 nt, Human
uaacagaaaugua

SEQ ID NO: 2962927 - RNA, 16 nt, Human
uaacaggacgagauga

SEQ ID NO: 2962928 - RNA, 14 nt, Human
uaacagaagaaaau

SEQ ID NO: 2962929 - RNA, 15 nt, Human
uaacagaagaaaaua

SEQ ID NO: 2962930 - RNA, 19 nt, Human
uaacagaagaaaauagaau

SEQ ID NO: 2962931 - RNA, 18 nt, Human
uaacagcaacacaaagcu

SEQ ID NO: 2962932 - RNA, 20 nt, Human
uaacagcaacacaaagcuuu

SEQ ID NO: 2962933 - RNA, 23 nt, Human
uaaauugacacuuaaaaaugguu

SEQ ID NO: 2962934 - RNA, 14 nt, Human
uaaauuuaguauuu

SEQ ID NO: 2962935 - RNA, 19 nt, Human
uaacaaugcuguauuuuaa

SEQ ID NO: 2962936 - RNA, 20 nt, Human
uaagccagacaucaacagau

SEQ ID NO: 2962937 - RNA, 21 nt, Human
uaagccagacaucaacagaua

SEQ ID NO: 2962938 - RNA, 19 nt, Human
uaaggaugcuuguacauaa

SEQ ID NO: 2962939 - RNA, 18 nt, Human
uaaggaugcuuguacaua

SEQ ID NO: 2962940 - RNA, 20 nt, Human
uaaggaugcuuguacauaau

SEQ ID NO: 2962941 - RNA, 21 nt, Human
uaaggaugcuuguacauaaug

SEQ ID NO: 2962942 - RNA, 22 nt, Human
uaaggaugcuuguacauaaugc

SEQ ID NO: 2962943 - RNA, 23 nt, Human
uaaggaugcuuguacauaaugcg

SEQ ID NO: 2962944 - RNA, 20 nt, Human
uaagcauuccaacuaucuca

SEQ ID NO: 2962945 - RNA, 16 nt, Human
uaagcauuccaacuau

SEQ ID NO: 2962946 - RNA, 18 nt, Human
uaagcauuccaacuaucu

SEQ ID NO: 2962947 - RNA, 18 nt, Human
uaagccaaaacugagcau

SEQ ID NO: 2962948 - RNA, 15 nt, Human
uaagccaaaacugag

SEQ ID NO: 2962949 - RNA, 13 nt, Human
uaagccagacauc

SEQ ID NO: 2962950 - RNA, 22 nt, Human
uaagaaccuuuugagugccuua

SEQ ID NO: 2962951 - RNA, 21 nt, Human
uaacuuuuauaaacuuuaccu

SEQ ID NO: 2962952 - RNA, 22 nt, Human
uaacuuuuauaaacuuuaccuu

SEQ ID NO: 2962953 - RNA, 19 nt, Human
uaacuuuuauaaacuuuac

SEQ ID NO: 2962954 - RNA, 24 nt, Human
uaagaaagacuaucuaaauguuga

SEQ ID NO: 2962955 - RNA, 22 nt, Human
uaagaggcagggucucacucug

SEQ ID NO: 2962956 - RNA, 16 nt, Human
uaagaacuaaaauguu

SEQ ID NO: 2962957 - RNA, 17 nt, Human
uaagagagucuauuuac

SEQ ID NO: 2962958 - RNA, 23 nt, Human
uaagagagaaugagagacacacu

SEQ ID NO: 2962959 - RNA, 16 nt, Human
uaagauaaaugugcug

SEQ ID NO: 2962960 - RNA, 17 nt, Human
uaagauaaaugugcuga

SEQ ID NO: 2962961 - RNA, 19 nt, Human
uaagagguaagacuuagua

SEQ ID NO: 2962962 - RNA, 14 nt, Human
uaagauaaaugugc

SEQ ID NO: 2962963 - RNA, 23 nt, Human
uaagagggauuagggagagaaga

SEQ ID NO: 2962964 - RNA, 23 nt, Human
uaagagggagggagggcuccaga

SEQ ID NO: 2962965 - RNA, 22 nt, Human
uaagagggagggagggcuccag

SEQ ID NO: 2962966 - RNA, 12 nt, Human
uaagagggaggg

SEQ ID NO: 2962967 - RNA, 20 nt, Human
guuucuaaagcugccagccg

SEQ ID NO: 2962968 - RNA, 16 nt, Human
guuucuaaagcugcca

SEQ ID NO: 2962969 - RNA, 15 nt, Human
guuucuaaagcugcc

SEQ ID NO: 2962970 - RNA, 14 nt, Human
guuucuaaagcugc

SEQ ID NO: 2962971 - RNA, 18 nt, Human
guuugagaucagccuggg

SEQ ID NO: 2962972 - RNA, 16 nt, Human
guuugaaccaagaacu

SEQ ID NO: 2962973 - RNA, 22 nt, Human
guuugauuaaauucuugcaaag

SEQ ID NO: 2962974 - RNA, 17 nt, Human
guuugauuaaauucuug

SEQ ID NO: 2962975 - RNA, 19 nt, Human
guuugauuaaauucuugca

SEQ ID NO: 2962976 - RNA, 17 nt, Human
guuuguaaauuaacuuu

SEQ ID NO: 2962977 - RNA, 19 nt, Human
guuuguaaauuaacuuuua

SEQ ID NO: 2962978 - RNA, 20 nt, Human
guuuccuggcacugcuucca

SEQ ID NO: 2962979 - RNA, 16 nt, Human
guuuccuggcacugcu

SEQ ID NO: 2962980 - RNA, 22 nt, Human
guuuccuggcacugcuuccagu

SEQ ID NO: 2962981 - RNA, 21 nt, Human
guuuccuggcacugcuuccag

SEQ ID NO: 2962982 - RNA, 14 nt, Human
guuucagaaaugug

SEQ ID NO: 2962983 - RNA, 18 nt, Human
guuucagaaauguguuau

SEQ ID NO: 2962984 - RNA, 18 nt, Human
gguuggcaaaaaggcagg

SEQ ID NO: 2962985 - RNA, 21 nt, Human
gguuggccccugcccggcugc

SEQ ID NO: 2962986 - RNA, 13 nt, Human
guuuagaaagcuu

SEQ ID NO: 2962987 - RNA, 18 nt, Human
guuuagaugaaugucagu

SEQ ID NO: 2962988 - RNA, 17 nt, Human
guuuagaugaaugucag

SEQ ID NO: 2962989 - RNA, 20 nt, Human
guuuaggauguugaaaaagu

SEQ ID NO: 2962990 - RNA, 23 nt, Human
uaaaaaacugcugacuguuuucu

SEQ ID NO: 2962991 - RNA, 20 nt, Human
uaaaaaacugcugacuguuu

SEQ ID NO: 2962992 - RNA, 16 nt, Human
uaaaaaagaaacauuu

SEQ ID NO: 2962993 - RNA, 20 nt, Human
uaaaaaugcaaaaaaaauua

SEQ ID NO: 2962994 - RNA, 18 nt, Human
guuuuuauuauuaacaaa

SEQ ID NO: 2962995 - RNA, 15 nt, Human
guuuuuauuauuaac

SEQ ID NO: 2962996 - RNA, 14 nt, Human
guuuuuauuaaaag

SEQ ID NO: 2962997 - RNA, 17 nt, Human
guuuuuauuaaaaggaa

SEQ ID NO: 2962998 - RNA, 13 nt, Human
guuuuuauuaaaa

SEQ ID NO: 2962999 - RNA, 17 nt, Human
guuuucaguguacaugg

SEQ ID NO: 2963000 - RNA, 18 nt, Human
guuuucaggcuagaugua

SEQ ID NO: 2963001 - RNA, 16 nt, Human
guuuucaguguacaug

SEQ ID NO: 2963002 - RNA, 13 nt, Human
guuuguucccugu

SEQ ID NO: 2963003 - RNA, 16 nt, Human
guuuucauuaucucaa

SEQ ID NO: 2963004 - RNA, 17 nt, Human
guuuuguguacuuuuaa

SEQ ID NO: 2963005 - RNA, 15 nt, Human
guuuuguguacuuuu

SEQ ID NO: 2963006 - RNA, 16 nt, Human
guuuuguguacuuuua

SEQ ID NO: 2963007 - RNA, 19 nt, Human
guuuucucuugagagggug

SEQ ID NO: 2963008 - RNA, 12 nt, Human
guuuucucuuga

SEQ ID NO: 2963009 - RNA, 19 nt, Human
guuuuuauggcuuuugugc

SEQ ID NO: 2963010 - RNA, 22 nt, Human
guuuuuauggcuuuugugcauu

SEQ ID NO: 2963011 - RNA, 23 nt, Human
guuuuuauggcuuuugugcauua

SEQ ID NO: 2963012 - RNA, 14 nt, Human
uaaaggaauuuaaa

SEQ ID NO: 2963013 - RNA, 21 nt, Human
uaaaguguauuuuuuuacuaa

SEQ ID NO: 2963014 - RNA, 22 nt, Human
uaaaguguauuuuuuuacuaau

SEQ ID NO: 2963015 - RNA, 23 nt, Human
uaaaguguauuuuuuuacuaaua

SEQ ID NO: 2963016 - RNA, 20 nt, Human
uaaaguguauuuuuuuacua

SEQ ID NO: 2963017 - RNA, 13 nt, Human
uaaaguuucuguu

SEQ ID NO: 2963018 - RNA, 17 nt, Human
uaaauaaaaauaauccu

SEQ ID NO: 2963019 - RNA, 19 nt, Human
uaaauauuuugacuuguug

SEQ ID NO: 2963020 - RNA, 19 nt, Human
uaaaucagccguguaacca

SEQ ID NO: 2963021 - RNA, 15 nt, Human
uaaauauuuugacuu

SEQ ID NO: 2963022 - RNA, 18 nt, Human
uaaauauuuugacuuguu

SEQ ID NO: 2963023 - RNA, 23 nt, Human
uaaauauugguugggaugacuug

SEQ ID NO: 2963024 - RNA, 22 nt, Human
uaaauauugguugggaugacuu

SEQ ID NO: 2963025 - RNA, 17 nt, Human
uaaauauguuucacaca

SEQ ID NO: 2963026 - RNA, 22 nt, Human
uaaauaucccuuggacauuuua

SEQ ID NO: 2963027 - RNA, 18 nt, Human
uaaauauaugcuaagucu

SEQ ID NO: 2963028 - RNA, 20 nt, Human
uaaacauauccaaguuugaa

SEQ ID NO: 2963029 - RNA, 19 nt, Human
uaaacauauccaaguuuga

SEQ ID NO: 2963030 - RNA, 16 nt, Human
uaaacuuuaccuuuuu

SEQ ID NO: 2963031 - RNA, 22 nt, Human
uaaacuuuaccuuuuuuauaca

SEQ ID NO: 2963032 - RNA, 14 nt, Human
uaaacuuaaucuaa

SEQ ID NO: 2963033 - RNA, 13 nt, Human
uaaacuuaaucua

SEQ ID NO: 2963034 - RNA, 18 nt, Human
uaaacuuaaucuaaaugg

SEQ ID NO: 2963035 - RNA, 19 nt, Human
uaaacuuaaucuaaaugga

SEQ ID NO: 2963036 - RNA, 12 nt, Human
uaaacacauuaa

SEQ ID NO: 2963037 - RNA, 23 nt, Human
uaaacaagaccacguuucuaaag

SEQ ID NO: 2963038 - RNA, 18 nt, Human
uaaacaagaccacguuuc

SEQ ID NO: 2963039 - RNA, 17 nt, Human
uaaaauggguuuuacug

SEQ ID NO: 2963040 - RNA, 19 nt, Human
uaaaauccauacauuugug

SEQ ID NO: 2963041 - RNA, 18 nt, Human
uaaaauccauacauuugu

SEQ ID NO: 2963042 - RNA, 14 nt, Human
uaaaagcauuuuuu

SEQ ID NO: 2963043 - RNA, 14 nt, Human
uaaaagaugaaaau

SEQ ID NO: 2963044 - RNA, 22 nt, Human
uauuuuagguguaaaauaauua

SEQ ID NO: 2963045 - RNA, 15 nt, Human
uauuuuacuuuuugg

SEQ ID NO: 2963046 - RNA, 14 nt, Human
uauuuuacuuuuug

SEQ ID NO: 2963047 - RNA, 13 nt, Human
uauuuuacuuuuu

SEQ ID NO: 2963048 - RNA, 23 nt, Human
uauuucugaggagccugcaacau

SEQ ID NO: 2963049 - RNA, 23 nt, Human
uauuugaguggaguuacugaaca

SEQ ID NO: 2963050 - RNA, 20 nt, Human
uaucugaaaauguaugugua

SEQ ID NO: 2963051 - RNA, 14 nt, Human
uaucugaaaaugua

SEQ ID NO: 2963052 - RNA, 15 nt, Human
uaucugaaaauguau

SEQ ID NO: 2963053 - RNA, 23 nt, Human
uauuuauuaaaugcccagccccu

SEQ ID NO: 2963054 - RNA, 12 nt, Human
uauuuauugaaa

SEQ ID NO: 2963055 - RNA, 20 nt, Human
uauuuauugaaaugauuuca

SEQ ID NO: 2963056 - RNA, 16 nt, Human
uauuuauugaaaugau

SEQ ID NO: 2963057 - RNA, 22 nt, Human
uauuucuaugaaauauuauguu

SEQ ID NO: 2963058 - RNA, 21 nt, Human
uauuucuaugaaauauuaugu

SEQ ID NO: 2963059 - RNA, 13 nt, Human
ucaaaacugcacu

SEQ ID NO: 2963060 - RNA, 22 nt, Human
ucaaaacgguuuuacugcagcu

SEQ ID NO: 2963061 - RNA, 12 nt, Human
ucaaacuaacag

SEQ ID NO: 2963062 - RNA, 13 nt, Human
ucaaacuaacagg

SEQ ID NO: 2963063 - RNA, 14 nt, Human
ucaaacucuuaaaa

SEQ ID NO: 2963064 - RNA, 15 nt, Human
uauuuuuuuacuaau

SEQ ID NO: 2963065 - RNA, 16 nt, Human
uauuuuuuucugaaau

SEQ ID NO: 2963066 - RNA, 17 nt, Human
uauuuuuuucugaaauu

SEQ ID NO: 2963067 - RNA, 20 nt, Human
uauuuuuuacauuuuacaca

SEQ ID NO: 2963068 - RNA, 14 nt, Human
uauuuugacuuguu

SEQ ID NO: 2963069 - RNA, 18 nt, Human
uauuuuuguuuuuauuaa

SEQ ID NO: 2963070 - RNA, 20 nt, Human
uauuuuuguuuuuauuaaaa

SEQ ID NO: 2963071 - RNA, 12 nt, Human
uauuuugaaauu

SEQ ID NO: 2963072 - RNA, 19 nt, Human
ucaauuacaggaaguacug

SEQ ID NO: 2963073 - RNA, 21 nt, Human
ucacacaguauuacuucugcu

SEQ ID NO: 2963074 - RNA, 22 nt, Human
ucacacaguauuacuucugcua

SEQ ID NO: 2963075 - RNA, 13 nt, Human
ucacacagugagu

SEQ ID NO: 2963076 - RNA, 21 nt, Human
ucacacaugagcaucaggcca

SEQ ID NO: 2963077 - RNA, 22 nt, Human
ucacacagugagucgaggacag

SEQ ID NO: 2963078 - RNA, 23 nt, Human
ucacacagugagucgaggacagg

SEQ ID NO: 2963079 - RNA, 11 nt, Human
ucacaggcagg

SEQ ID NO: 2963080 - RNA, 23 nt, Human
ucacaggacagcccuucuuucca

SEQ ID NO: 2963081 - RNA, 14 nt, Human
ucacaggaaguaga

SEQ ID NO: 2963082 - RNA, 19 nt, Human
ucacaggaaguagaggagg

SEQ ID NO: 2963083 - RNA, 13 nt, Human
ucaauaggaaaaa

SEQ ID NO: 2963084 - RNA, 14 nt, Human
ucaaugcacugaca

SEQ ID NO: 2963085 - RNA, 14 nt, Human
ucaauaggaaaaac

SEQ ID NO: 2963086 - RNA, 18 nt, Human
ucaaugcacugacauugu

SEQ ID NO: 2963087 - RNA, 22 nt, Human
ucaaugccccugaauuuaaaua

SEQ ID NO: 2963088 - RNA, 18 nt, Human
ucaauuacaggaaguacu

SEQ ID NO: 2963089 - RNA, 13 nt, Human
ucaauuacaggaa

SEQ ID NO: 2963090 - RNA, 15 nt, Human
ucaagcauguauuuu

SEQ ID NO: 2963091 - RNA, 16 nt, Human
ucaagcgauucuucug

SEQ ID NO: 2963092 - RNA, 22 nt, Human
ucaagugauucuccugccucag

SEQ ID NO: 2963093 - RNA, 20 nt, Human
ucaaggauccugagccagau

SEQ ID NO: 2963094 - RNA, 19 nt, Human
ucaaggauccugagccaga

SEQ ID NO: 2963095 - RNA, 18 nt, Human
ucaaggauccugagccag

SEQ ID NO: 2963096 - RNA, 18 nt, Human
ucaagcugaccuugcuga

SEQ ID NO: 2963097 - RNA, 22 nt, Human
ucaaacucuugaccucagguga

SEQ ID NO: 2963098 - RNA, 15 nt, Human
ucaaacuuuacuaug

SEQ ID NO: 2963099 - RNA, 13 nt, Human
ucaaacuuuacua

SEQ ID NO: 2963100 - RNA, 16 nt, Human
ucaaacuuuacuaugg

SEQ ID NO: 2963101 - RNA, 13 nt, Human
ucaaccuccuggg

SEQ ID NO: 2963102 - RNA, 14 nt, Human
ucaaccuccugggc

SEQ ID NO: 2963103 - RNA, 19 nt, Human
ucaacuccaaacugacucu

SEQ ID NO: 2963104 - RNA, 19 nt, Human
ucacgccuguaauccuagc

SEQ ID NO: 2963105 - RNA, 20 nt, Human
ucacgccuguaauccuagca

SEQ ID NO: 2963106 - RNA, 16 nt, Human
ucacgccacugcacua

SEQ ID NO: 2963107 - RNA, 13 nt, Human
ucacgccacugca

SEQ ID NO: 2963108 - RNA, 14 nt, Human
ucacgccacugcac

SEQ ID NO: 2963109 - RNA, 22 nt, Human
ucaccuuuguccccaccgcaga

SEQ ID NO: 2963110 - RNA, 18 nt, Human
ucaccuuuguccccaccg

SEQ ID NO: 2963111 - RNA, 17 nt, Human
ucaccuuuguccccacc

SEQ ID NO: 2963112 - RNA, 15 nt, Human
ucaccuuugucccca

SEQ ID NO: 2963113 - RNA, 14 nt, Human
ucaccuuugucccc

SEQ ID NO: 2963114 - RNA, 12 nt, Human
ucaccuuugucc

SEQ ID NO: 2963115 - RNA, 14 nt, Human
ucaccuuucccauc

SEQ ID NO: 2963116 - RNA, 19 nt, Human
ucacaggcagguccagggu

SEQ ID NO: 2963117 - RNA, 12 nt, Human
ucacaggcaggu

SEQ ID NO: 2963118 - RNA, 15 nt, Human
ucacaggcaggucca

SEQ ID NO: 2963119 - RNA, 14 nt, Human
ucacggaagagccu

SEQ ID NO: 2963120 - RNA, 17 nt, Human
ucacggaagagccuugc

SEQ ID NO: 2963121 - RNA, 16 nt, Human
ucacggaagagccuug

SEQ ID NO: 2963122 - RNA, 13 nt, Human
ucacggcucacug

SEQ ID NO: 2963123 - RNA, 15 nt, Human
ucacggcucacugca

SEQ ID NO: 2963124 - RNA, 20 nt, Human
ucacggcucacugcagccuc

SEQ ID NO: 2963125 - RNA, 13 nt, Human
ucacuccuugaaa

SEQ ID NO: 2963126 - RNA, 23 nt, Human
ucacucuccuuggugucgggcau

SEQ ID NO: 2963127 - RNA, 13 nt, Human
ucacucuggcagc

SEQ ID NO: 2963128 - RNA, 12 nt, Human
ucacucuggcag

SEQ ID NO: 2963129 - RNA, 14 nt, Human
ucacucuccuuggu

SEQ ID NO: 2963130 - RNA, 12 nt, Human
ucacucuccuug

SEQ ID NO: 2963131 - RNA, 22 nt, Human
ucacucuggcagcucagagagg

SEQ ID NO: 2963132 - RNA, 20 nt, Human
ucacucuggcagcucagaga

SEQ ID NO: 2963133 - RNA, 19 nt, Human
ucacucuggcagcucagag

SEQ ID NO: 2963134 - RNA, 18 nt, Human
ucacucuggcagcucaga

SEQ ID NO: 2963135 - RNA, 17 nt, Human
ucacucuggcagcucag

SEQ ID NO: 2963136 - RNA, 16 nt, Human
ucacucuggcagcuca

SEQ ID NO: 2963137 - RNA, 15 nt, Human
ucacucuggcagcuc

SEQ ID NO: 2963138 - RNA, 14 nt, Human
ucacucuggcagcu

SEQ ID NO: 2963139 - RNA, 19 nt, Human
ucacucugucgcccagucu

SEQ ID NO: 2963140 - RNA, 12 nt, Human
ucacucugucgc

SEQ ID NO: 2963141 - RNA, 16 nt, Human
ucacucugucgcccag

SEQ ID NO: 2963142 - RNA, 15 nt, Human
ucacugcuuaacuuc

SEQ ID NO: 2963143 - RNA, 17 nt, Human
ucacugcuuaacuucac

SEQ ID NO: 2963144 - RNA, 18 nt, Human
ucacugcuuaacuucaca

SEQ ID NO: 2963145 - RNA, 20 nt, Human
ucacugcuuaacuucacaua

SEQ ID NO: 2963146 - RNA, 17 nt, Human
ucacuugucaauaaaau

SEQ ID NO: 2963147 - RNA, 18 nt, Human
ucagcacgauuucuguuu

SEQ ID NO: 2963148 - RNA, 19 nt, Human
ucagcacgauuucuguuua

SEQ ID NO: 2963149 - RNA, 19 nt, Human
ucagacauagaauuaacac

SEQ ID NO: 2963150 - RNA, 20 nt, Human
ucagacagcugccugggauc

SEQ ID NO: 2963151 - RNA, 19 nt, Human
ucagacagcugccugggau

SEQ ID NO: 2963152 - RNA, 18 nt, Human
ucagacagcugccuggga

SEQ ID NO: 2963153 - RNA, 17 nt, Human
ucagacagcugccuggg

SEQ ID NO: 2963154 - RNA, 16 nt, Human
ucagacagcugccugg

SEQ ID NO: 2963155 - RNA, 15 nt, Human
ucagacagcugccug

SEQ ID NO: 2963156 - RNA, 22 nt, Human
ucagacauagaauuaacacaug

SEQ ID NO: 2963157 - RNA, 23 nt, Human
ucagagcugcccucuccugggca

SEQ ID NO: 2963158 - RNA, 23 nt, Human
ucagugguuggcaauuguuucaa

SEQ ID NO: 2963159 - RNA, 11 nt, Human
ucaguguacau

SEQ ID NO: 2963160 - RNA, 13 nt, Human
ucagugugacuga

SEQ ID NO: 2963161 - RNA, 17 nt, Human
ucagugugacugaucuc

SEQ ID NO: 2963162 - RNA, 21 nt, Human
ucagucugcuuagaaauaaca

SEQ ID NO: 2963163 - RNA, 19 nt, Human
ucagucugcuuagaaauaa

SEQ ID NO: 2963164 - RNA, 16 nt, Human
ucagucugcuuagaaa

SEQ ID NO: 2963165 - RNA, 15 nt, Human
ucagucuggcccuuc

SEQ ID NO: 2963166 - RNA, 24 nt, Human
ucagucugauucccaagcucugcu

SEQ ID NO: 2963167 - RNA, 16 nt, Human
ucagcagagugcuuua

SEQ ID NO: 2963168 - RNA, 22 nt, Human
ucagcagagugcuuuaccaauu

SEQ ID NO: 2963169 - RNA, 11 nt, Human
ucagcagagug

SEQ ID NO: 2963170 - RNA, 12 nt, Human
ucagcagagugc

SEQ ID NO: 2963171 - RNA, 13 nt, Human
ucaguucugauau

SEQ ID NO: 2963172 - RNA, 13 nt, Human
ucauaaugacuua

SEQ ID NO: 2963173 - RNA, 13 nt, Human
ucauacccacccc

SEQ ID NO: 2963174 - RNA, 22 nt, Human
ucauacaaggcccaggaggcuu

SEQ ID NO: 2963175 - RNA, 15 nt, Human
ucaucuguuacacaa

SEQ ID NO: 2963176 - RNA, 15 nt, Human
ucauacccaccccca

SEQ ID NO: 2963177 - RNA, 14 nt, Human
ucauacccaccccc

SEQ ID NO: 2963178 - RNA, 20 nt, Human
ucauacccacccccacccaa

SEQ ID NO: 2963179 - RNA, 16 nt, Human
ucauuaggugugacug

SEQ ID NO: 2963180 - RNA, 22 nt, Human
ucauuaggugugacugaauuuc

SEQ ID NO: 2963181 - RNA, 18 nt, Human
ucauuaggugugacugaa

SEQ ID NO: 2963182 - RNA, 21 nt, Human
ucauuaggugugacugaauuu

SEQ ID NO: 2963183 - RNA, 13 nt, Human
uccaccugccagg

SEQ ID NO: 2963184 - RNA, 12 nt, Human
uccacuuggucu

SEQ ID NO: 2963185 - RNA, 13 nt, Human
uccacuuggucug

SEQ ID NO: 2963186 - RNA, 14 nt, Human
uccagauccuggaa

SEQ ID NO: 2963187 - RNA, 16 nt, Human
uccagauccuggaaau

SEQ ID NO: 2963188 - RNA, 17 nt, Human
uccagauccuggaaauc

SEQ ID NO: 2963189 - RNA, 14 nt, Human
uccacaagagccca

SEQ ID NO: 2963190 - RNA, 22 nt, Human
uccaagcaggacauggacaagg

SEQ ID NO: 2963191 - RNA, 23 nt, Human
uccaccucccugcaauaaaaugg

SEQ ID NO: 2963192 - RNA, 12 nt, Human
uccaccugccag

SEQ ID NO: 2963193 - RNA, 14 nt, Human
uccaccuacaugag

SEQ ID NO: 2963194 - RNA, 17 nt, Human
uccaaaauaaaacuuuu

SEQ ID NO: 2963195 - RNA, 16 nt, Human
uccaaaauaaaacuuu

SEQ ID NO: 2963196 - RNA, 12 nt, Human
uccaaagaaaug

SEQ ID NO: 2963197 - RNA, 23 nt, Human
uccaaacugacucuuaagaagac

SEQ ID NO: 2963198 - RNA, 22 nt, Human
ucauucagauaugauucaaaug

SEQ ID NO: 2963199 - RNA, 14 nt, Human
ucauuucuuugagu

SEQ ID NO: 2963200 - RNA, 22 nt, Human
ucauuucugcaucagcugcuga

SEQ ID NO: 2963201 - RNA, 16 nt, Human
ucauuucugcaucagc

SEQ ID NO: 2963202 - RNA, 20 nt, Human
uccaagaagcccaggaaagg

SEQ ID NO: 2963203 - RNA, 22 nt, Human
uccaagaagcccaggaaaggcu

SEQ ID NO: 2963204 - RNA, 14 nt, Human
uccaagaauuucua

SEQ ID NO: 2963205 - RNA, 17 nt, Human
uccaagcauuuagaugu

SEQ ID NO: 2963206 - RNA, 23 nt, Human
uccaagcauaccaacacgagcag

SEQ ID NO: 2963207 - RNA, 20 nt, Human
uccccgcacugggcuugggg

SEQ ID NO: 2963208 - RNA, 21 nt, Human
ucccccuuccauggacuuugu

SEQ ID NO: 2963209 - RNA, 17 nt, Human
ucccccuggcacugguu

SEQ ID NO: 2963210 - RNA, 15 nt, Human
uccccuggcacuggc

SEQ ID NO: 2963211 - RNA, 19 nt, Human
uccccuguagagugggagc

SEQ ID NO: 2963212 - RNA, 24 nt, Human
uccccugcuggguguggcgcagca

SEQ ID NO: 2963213 - RNA, 23 nt, Human
uccccuguccccgcacugggcuu

SEQ ID NO: 2963214 - RNA, 22 nt, Human
uccccuguagagugggagcuga

SEQ ID NO: 2963215 - RNA, 21 nt, Human
uccccugcuggguguggcgca

SEQ ID NO: 2963216 - RNA, 20 nt, Human
uccccugcuggguguggcgc

SEQ ID NO: 2963217 - RNA, 15 nt, Human
uccccugcugggugu

SEQ ID NO: 2963218 - RNA, 14 nt, Human
uccccugcugggug

SEQ ID NO: 2963219 - RNA, 15 nt, Human
ucccuacuguaauuu

SEQ ID NO: 2963220 - RNA, 15 nt, Human
ucccucccucuuucc

SEQ ID NO: 2963221 - RNA, 17 nt, Human
ucccucccuccaccucc

SEQ ID NO: 2963222 - RNA, 17 nt, Human
ucccucccucuuucccu

SEQ ID NO: 2963223 - RNA, 13 nt, Human
ucccaccucagcc

SEQ ID NO: 2963224 - RNA, 14 nt, Human
ucccaccucagccu

SEQ ID NO: 2963225 - RNA, 15 nt, Human
ucccaccucagccuc

SEQ ID NO: 2963226 - RNA, 21 nt, Human
ucccaggcauuccccaggagg

SEQ ID NO: 2963227 - RNA, 20 nt, Human
ucccaggcauuccccaggag

SEQ ID NO: 2963228 - RNA, 19 nt, Human
ucccaggcauuccccagga

SEQ ID NO: 2963229 - RNA, 22 nt, Human
ucccaggcauuccccaggaggc

SEQ ID NO: 2963230 - RNA, 23 nt, Human
ucccaucucacacaugagcauca

SEQ ID NO: 2963231 - RNA, 20 nt, Human
ucccaucucacacaugagca

SEQ ID NO: 2963232 - RNA, 15 nt, Human
ucccauucuuggccc

SEQ ID NO: 2963233 - RNA, 16 nt, Human
ucccauucuuggccca

SEQ ID NO: 2963234 - RNA, 22 nt, Human
uccccacuugagaauuacccuu

SEQ ID NO: 2963235 - RNA, 23 nt, Human
uccagcucaccagccccagugcc

SEQ ID NO: 2963236 - RNA, 21 nt, Human
ucccaaagugcugggauuaca

SEQ ID NO: 2963237 - RNA, 15 nt, Human
uccauggacuuuguu

SEQ ID NO: 2963238 - RNA, 14 nt, Human
uccauggacuuugu

SEQ ID NO: 2963239 - RNA, 13 nt, Human
uccauggacuuug

SEQ ID NO: 2963240 - RNA, 17 nt, Human
ucccaagcucugcuccu

SEQ ID NO: 2963241 - RNA, 12 nt, Human
ucccaagcucug

SEQ ID NO: 2963242 - RNA, 13 nt, Human
ucccaagcucugc

SEQ ID NO: 2963243 - RNA, 14 nt, Human
ucccaagcucugcu

SEQ ID NO: 2963244 - RNA, 15 nt, Human
ucccaagcucugcuc

SEQ ID NO: 2963245 - RNA, 16 nt, Human
ucccaacucaccccag

SEQ ID NO: 2963246 - RNA, 15 nt, Human
ucccaacucacccca

SEQ ID NO: 2963247 - RNA, 14 nt, Human
ucccaacucacccc

SEQ ID NO: 2963248 - RNA, 13 nt, Human
ucccaacucaccc

SEQ ID NO: 2963249 - RNA, 16 nt, Human
ucccaaauuucauacc

SEQ ID NO: 2963250 - RNA, 17 nt, Human
ucgaguuacagacaaag

SEQ ID NO: 2963251 - RNA, 15 nt, Human
ucgaguuacagacaa

SEQ ID NO: 2963252 - RNA, 15 nt, Human
uccugguguggaaga

SEQ ID NO: 2963253 - RNA, 17 nt, Human
uccuggcccacugcauc

SEQ ID NO: 2963254 - RNA, 22 nt, Human
uccuggcaugggaaugaauguc

SEQ ID NO: 2963255 - RNA, 10 nt, Human
ucccucccuu

SEQ ID NO: 2963256 - RNA, 23 nt, Human
uccugguccccucagcucugccu

SEQ ID NO: 2963257 - RNA, 12 nt, Human
uccuucuguccu

SEQ ID NO: 2963258 - RNA, 19 nt, Human
uccuucuguccuacucugu

SEQ ID NO: 2963259 - RNA, 15 nt, Human
uccuugcaucaauuu

SEQ ID NO: 2963260 - RNA, 21 nt, Human
ucuacacuaagagagaaugag

SEQ ID NO: 2963261 - RNA, 22 nt, Human
ucuaacuucaccauauuaccac

SEQ ID NO: 2963262 - RNA, 15 nt, Human
ucuaacuucaccaua

SEQ ID NO: 2963263 - RNA, 16 nt, Human
ucuaacuucaccauau

SEQ ID NO: 2963264 - RNA, 16 nt, Human
ucuaaauucuuucauu

SEQ ID NO: 2963265 - RNA, 22 nt, Human
ucuaaaucuccaaaauaaaacu

SEQ ID NO: 2963266 - RNA, 19 nt, Human
ucuagggaaaaaccagcgu

SEQ ID NO: 2963267 - RNA, 22 nt, Human
ucuagggaaaaaccagcgugug

SEQ ID NO: 2963268 - RNA, 22 nt, Human
ucuacugaggugcuauguucuu

SEQ ID NO: 2963269 - RNA, 15 nt, Human
ucuacacugugcuga

SEQ ID NO: 2963270 - RNA, 18 nt, Human
ucuacugaggugcuaugu

SEQ ID NO: 2963271 - RNA, 19 nt, Human
ucuacugaggugcuauguu

SEQ ID NO: 2963272 - RNA, 17 nt, Human
ucuacacuaagagagaa

SEQ ID NO: 2963273 - RNA, 17 nt, Human
ucuacacuccagugaga

SEQ ID NO: 2963274 - RNA, 14 nt, Human
ucuacacugugcug

SEQ ID NO: 2963275 - RNA, 12 nt, Human
ucuacacugugc

SEQ ID NO: 2963276 - RNA, 17 nt, Human
ucucacuguugcccagg

SEQ ID NO: 2963277 - RNA, 17 nt, Human
ucucagaaucucaaaua

SEQ ID NO: 2963278 - RNA, 21 nt, Human
ucucagaaucucaaauaacua

SEQ ID NO: 2963279 - RNA, 18 nt, Human
ucucacuguugcccaggc

SEQ ID NO: 2963280 - RNA, 19 nt, Human
ucucacuguugcccaggcu

SEQ ID NO: 2963281 - RNA, 20 nt, Human
ucucacuguugcccaggcug

SEQ ID NO: 2963282 - RNA, 21 nt, Human
ucucacuguugcccaggcugg

SEQ ID NO: 2963283 - RNA, 18 nt, Human
ucucacucugucgcccag

SEQ ID NO: 2963284 - RNA, 22 nt, Human
ucucacucugucgcccagucug

SEQ ID NO: 2963285 - RNA, 16 nt, Human
ucucacucugucgccc

SEQ ID NO: 2963286 - RNA, 17 nt, Human
ucucacucugucgccca

SEQ ID NO: 2963287 - RNA, 22 nt, Human
ucucaaacucuugaccucaggu

SEQ ID NO: 2963288 - RNA, 13 nt, Human
ucucaaacucuug

SEQ ID NO: 2963289 - RNA, 21 nt, Human
ucucaaacucuugaccucagg

SEQ ID NO: 2963290 - RNA, 19 nt, Human
ucuaguaguuguucugaaa

SEQ ID NO: 2963291 - RNA, 15 nt, Human
ucucaaacuaacagg

SEQ ID NO: 2963292 - RNA, 17 nt, Human
ucucaaacuaacaggcu

SEQ ID NO: 2963293 - RNA, 22 nt, Human
ucuccugccucagccucccaaa

SEQ ID NO: 2963294 - RNA, 19 nt, Human
ucuccugccucagccuccc

SEQ ID NO: 2963295 - RNA, 14 nt, Human
ucuccugggcagcu

SEQ ID NO: 2963296 - RNA, 13 nt, Human
ucuccugggcagc

SEQ ID NO: 2963297 - RNA, 15 nt, Human
ucuccugggcagcug

SEQ ID NO: 2963298 - RNA, 16 nt, Human
ucuccugggcagcugc

SEQ ID NO: 2963299 - RNA, 17 nt, Human
ucuccugggcagcugcc

SEQ ID NO: 2963300 - RNA, 18 nt, Human
ucuccugggcagcugccu

SEQ ID NO: 2963301 - RNA, 20 nt, Human
ucucccccagccccauccuc

SEQ ID NO: 2963302 - RNA, 18 nt, Human
ucucccccagccccaucc

SEQ ID NO: 2963303 - RNA, 13 nt, Human
ucucccccagccc

SEQ ID NO: 2963304 - RNA, 22 nt, Human
ucucccccagccccauccucug

SEQ ID NO: 2963305 - RNA, 14 nt, Human
ucucccccagcccc

SEQ ID NO: 2963306 - RNA, 17 nt, Human
ucucccccagccccauc

SEQ ID NO: 2963307 - RNA, 15 nt, Human
ucucccccagcccca

SEQ ID NO: 2963308 - RNA, 21 nt, Human
ucucagugucaaugcagcccc

SEQ ID NO: 2963309 - RNA, 13 nt, Human
ucucugaggacac

SEQ ID NO: 2963310 - RNA, 18 nt, Human
ucucuacccaucuuaaaa

SEQ ID NO: 2963311 - RNA, 19 nt, Human
ucucuacccaucuuaaaaa

SEQ ID NO: 2963312 - RNA, 20 nt, Human
ucucuacccaucuuaaaaac

SEQ ID NO: 2963313 - RNA, 23 nt, Human
ucucuacccaucuuaaaaacaac

SEQ ID NO: 2963314 - RNA, 14 nt, Human
ucucuacuaaaaau

SEQ ID NO: 2963315 - RNA, 13 nt, Human
ucuccuguaccuc

SEQ ID NO: 2963316 - RNA, 15 nt, Human
ucucuacaaaaagca

SEQ ID NO: 2963317 - RNA, 21 nt, Human
ucuccugggcagcugccuccc

SEQ ID NO: 2963318 - RNA, 19 nt, Human
ucuccugggcagcugccuc

SEQ ID NO: 2963319 - RNA, 20 nt, Human
ucuccugggcagcugccucc

SEQ ID NO: 2963320 - RNA, 13 nt, Human
ucucuaggaaaua

SEQ ID NO: 2963321 - RNA, 16 nt, Human
ucucuaguuugauuaa

SEQ ID NO: 2963322 - RNA, 18 nt, Human
ucucuaguuugauuaaau

SEQ ID NO: 2963323 - RNA, 19 nt, Human
ucucuaguuugauuaaauu

SEQ ID NO: 2963324 - RNA, 14 nt, Human
ucugacccaugcug

SEQ ID NO: 2963325 - RNA, 21 nt, Human
ucugaacuuggcgcugccccu

SEQ ID NO: 2963326 - RNA, 20 nt, Human
ucugaacuuggcgcugcccc

SEQ ID NO: 2963327 - RNA, 18 nt, Human
ucugacccaugcugcccu

SEQ ID NO: 2963328 - RNA, 17 nt, Human
ucugacccaugcugccc

SEQ ID NO: 2963329 - RNA, 16 nt, Human
ucugacccaugcugcc

SEQ ID NO: 2963330 - RNA, 15 nt, Human
ucugacccaugcugc

SEQ ID NO: 2963331 - RNA, 19 nt, Human
ucugcacaagcugcacccu

SEQ ID NO: 2963332 - RNA, 14 nt, Human
ucugcacaagcugc

SEQ ID NO: 2963333 - RNA, 23 nt, Human
ucugauucccaagcucugcuccu

SEQ ID NO: 2963334 - RNA, 19 nt, Human
ucugauucccugauuuaau

SEQ ID NO: 2963335 - RNA, 16 nt, Human
ucugaggaauccagac

SEQ ID NO: 2963336 - RNA, 17 nt, Human
ucugaggaauccagacc

SEQ ID NO: 2963337 - RNA, 20 nt, Human
ucugaggacacuaaccacgc

SEQ ID NO: 2963338 - RNA, 23 nt, Human
ucugaggacacuaaccacgcugg

SEQ ID NO: 2963339 - RNA, 16 nt, Human
ucugaaaauguaugug

SEQ ID NO: 2963340 - RNA, 15 nt, Human
ucucuuuucaaaaca

SEQ ID NO: 2963341 - RNA, 16 nt, Human
ucucuuuucaaaacau

SEQ ID NO: 2963342 - RNA, 21 nt, Human
ucugaaaugucaguucugaua

SEQ ID NO: 2963343 - RNA, 14 nt, Human
ucugaaauuuccug

SEQ ID NO: 2963344 - RNA, 14 nt, Human
ucugaaaauguaug

SEQ ID NO: 2963345 - RNA, 23 nt, Human
ucugaaaauguauguguaaguau

SEQ ID NO: 2963346 - RNA, 13 nt, Human
ucugaaagggacg

SEQ ID NO: 2963347 - RNA, 18 nt, Human
ucucuucacagucacauu

SEQ ID NO: 2963348 - RNA, 20 nt, Human
ugaacugaucauguuuauga

SEQ ID NO: 2963349 - RNA, 15 nt, Human
ugaacugauaaagau

SEQ ID NO: 2963350 - RNA, 13 nt, Human
ugaacugauaaag

SEQ ID NO: 2963351 - RNA, 18 nt, Human
ugaacucuucaaucucuu

SEQ ID NO: 2963352 - RNA, 20 nt, Human
ugaaccacaucuugcucugc

SEQ ID NO: 2963353 - RNA, 21 nt, Human
ugaaccacaucuugcucugcu

SEQ ID NO: 2963354 - RNA, 22 nt, Human
ugaaccacaucuugcucugcug

SEQ ID NO: 2963355 - RNA, 15 nt, Human
ugaacucuucaaucu

SEQ ID NO: 2963356 - RNA, 19 nt, Human
ugaaccacaucuugcucug

SEQ ID NO: 2963357 - RNA, 14 nt, Human
ugaacacaucagcu

SEQ ID NO: 2963358 - RNA, 20 nt, Human
ugaaggcucgagcaugccug

SEQ ID NO: 2963359 - RNA, 21 nt, Human
ugaaguccaagcauuuagaug

SEQ ID NO: 2963360 - RNA, 22 nt, Human
ugaaguccaagcauuuagaugu

SEQ ID NO: 2963361 - RNA, 21 nt, Human
ugaaggcucgagcaugccugg

SEQ ID NO: 2963362 - RNA, 14 nt, Human
ugaagacuuuucuu

SEQ ID NO: 2963363 - RNA, 22 nt, Human
ugaagacuuuucuuucagccaa

SEQ ID NO: 2963364 - RNA, 17 nt, Human
ugaagacuuuucuuuca

SEQ ID NO: 2963365 - RNA, 19 nt, Human
ugaacuggguacuugugga

SEQ ID NO: 2963366 - RNA, 12 nt, Human
ugaacuugguuc

SEQ ID NO: 2963367 - RNA, 14 nt, Human
ugaacuuggcgcug

SEQ ID NO: 2963368 - RNA, 22 nt, Human
ugaacuuguaaaggaauuuaaa

SEQ ID NO: 2963369 - RNA, 16 nt, Human
ugaagacagagcuaca

SEQ ID NO: 2963370 - RNA, 14 nt, Human
ugaagacagagcua

SEQ ID NO: 2963371 - RNA, 16 nt, Human
ucuuuuugcuuugcuu

SEQ ID NO: 2963372 - RNA, 14 nt, Human
ucuuuuugaaaugu

SEQ ID NO: 2963373 - RNA, 19 nt, Human
ugaaaacuuuaugcuaagu

SEQ ID NO: 2963374 - RNA, 19 nt, Human
ugaaaagacuccaaagaaa

SEQ ID NO: 2963375 - RNA, 17 nt, Human
ugaaaagacuccaaaga

SEQ ID NO: 2963376 - RNA, 16 nt, Human
ugaaaagacuccaaag

SEQ ID NO: 2963377 - RNA, 15 nt, Human
ugaaaagacuccaaa

SEQ ID NO: 2963378 - RNA, 17 nt, Human
ucuuuugccguuauuaa

SEQ ID NO: 2963379 - RNA, 19 nt, Human
ucuuuugccguuauuaaaa

SEQ ID NO: 2963380 - RNA, 15 nt, Human
ugaaaucuaggaaaa

SEQ ID NO: 2963381 - RNA, 17 nt, Human
ugaaaucuaggaaaauu

SEQ ID NO: 2963382 - RNA, 18 nt, Human
ugaaaucuaggaaaauua

SEQ ID NO: 2963383 - RNA, 19 nt, Human
ugaaaucuaggaaaauuau

SEQ ID NO: 2963384 - RNA, 17 nt, Human
ugaaaucuuuuugcuuu

SEQ ID NO: 2963385 - RNA, 15 nt, Human
ugaaagggcccagag

SEQ ID NO: 2963386 - RNA, 16 nt, Human
ugaaagggcccagaga

SEQ ID NO: 2963387 - RNA, 17 nt, Human
ugaaagggcccagagag

SEQ ID NO: 2963388 - RNA, 19 nt, Human
ugaaaugaggucagagccu

SEQ ID NO: 2963389 - RNA, 20 nt, Human
ugaaaugaggucagagccug

SEQ ID NO: 2963390 - RNA, 23 nt, Human
ugaaaugaggucagagccugcag

SEQ ID NO: 2963391 - RNA, 21 nt, Human
ugaaaugaggucagagccugc

SEQ ID NO: 2963392 - RNA, 22 nt, Human
ugaaaugaggucagagccugca

SEQ ID NO: 2963393 - RNA, 18 nt, Human
ugaaacccugucucuacu

SEQ ID NO: 2963394 - RNA, 22 nt, Human
ugaaaagacuccaaagaaaugu

SEQ ID NO: 2963395 - RNA, 13 nt, Human
ugaaagauucaau

SEQ ID NO: 2963396 - RNA, 12 nt, Human
ugaaaggaaaga

SEQ ID NO: 2963397 - RNA, 17 nt, Human
ugaaaggaaagaggcuc

SEQ ID NO: 2963398 - RNA, 18 nt, Human
ugaaagcagggacuugaa

SEQ ID NO: 2963399 - RNA, 19 nt, Human
ugaaagcagggacuugaac

SEQ ID NO: 2963400 - RNA, 23 nt, Human
ugaaagcagggacuugaacccau

SEQ ID NO: 2963401 - RNA, 14 nt, Human
ucuggcuaugcauu

SEQ ID NO: 2963402 - RNA, 23 nt, Human
ucuggccuucggccuccauccug

SEQ ID NO: 2963403 - RNA, 17 nt, Human
ucuggcucuuccaggcu

SEQ ID NO: 2963404 - RNA, 16 nt, Human
ucuggcucuuccaggc

SEQ ID NO: 2963405 - RNA, 15 nt, Human
ucuggcucuuccagg

SEQ ID NO: 2963406 - RNA, 12 nt, Human
ucugggacacag

SEQ ID NO: 2963407 - RNA, 23 nt, Human
ucuguacagagcccacgccccca

SEQ ID NO: 2963408 - RNA, 24 nt, Human
ucuguaauaaacucauuucuagca

SEQ ID NO: 2963409 - RNA, 23 nt, Human
ucuguaauaaacucauuucuagc

SEQ ID NO: 2963410 - RNA, 19 nt, Human
ucuguaauaaacucauuuc

SEQ ID NO: 2963411 - RNA, 22 nt, Human
ucugugucagguggggcagcuu

SEQ ID NO: 2963412 - RNA, 23 nt, Human
ucuguggguuucuaaagcugcca

SEQ ID NO: 2963413 - RNA, 19 nt, Human
ucuguccgagcuuugaaaa

SEQ ID NO: 2963414 - RNA, 22 nt, Human
ucuguggguuucuaaagcugcc

SEQ ID NO: 2963415 - RNA, 17 nt, Human
ucuguacgucugacagg

SEQ ID NO: 2963416 - RNA, 20 nt, Human
ucuguuacacaaagaaccac

SEQ ID NO: 2963417 - RNA, 20 nt, Human
ucuguuuuauaauuuuguga

SEQ ID NO: 2963418 - RNA, 22 nt, Human
ucuguuuuauaauuuugugaag

SEQ ID NO: 2963419 - RNA, 18 nt, Human
ucuuaaaaaguggaaaaa

SEQ ID NO: 2963420 - RNA, 12 nt, Human
ucuugcucugcu

SEQ ID NO: 2963421 - RNA, 13 nt, Human
ucuugcucugcug

SEQ ID NO: 2963422 - RNA, 11 nt, Human
ucuugcucugc

SEQ ID NO: 2963423 - RNA, 21 nt, Human
ucuugaauuguaaggaaugau

SEQ ID NO: 2963424 - RNA, 15 nt, Human
ucuucuccaggcugu

SEQ ID NO: 2963425 - RNA, 16 nt, Human
ucuugaacuccuggcc

SEQ ID NO: 2963426 - RNA, 17 nt, Human
ucuugaacuccuggccu

SEQ ID NO: 2963427 - RNA, 18 nt, Human
ucuugaacuccuggccuc

SEQ ID NO: 2963428 - RNA, 13 nt, Human
ucuucuccaggcu

SEQ ID NO: 2963429 - RNA, 14 nt, Human
ucuucuccaggcug

SEQ ID NO: 2963430 - RNA, 12 nt, Human
ucuucuccaggc

SEQ ID NO: 2963431 - RNA, 22 nt, Human
ucuucuauuuauuuauuuauuc

SEQ ID NO: 2963432 - RNA, 22 nt, Human
ucuucuauauaauuccuguuuu

SEQ ID NO: 2963433 - RNA, 12 nt, Human
ucuucuauuuau

SEQ ID NO: 2963434 - RNA, 13 nt, Human
ucuucuauauaau

SEQ ID NO: 2963435 - RNA, 21 nt, Human
ucuucuccacuuucuagccag

SEQ ID NO: 2963436 - RNA, 19 nt, Human
ucuucuccacuuucuagcc

SEQ ID NO: 2963437 - RNA, 14 nt, Human
ucuuccaggcuggg

SEQ ID NO: 2963438 - RNA, 16 nt, Human
ucuucaguaagccgug

SEQ ID NO: 2963439 - RNA, 21 nt, Human
ucuuccacaagagcccaggcc

SEQ ID NO: 2963440 - RNA, 13 nt, Human
ucuuaugggcugg

SEQ ID NO: 2963441 - RNA, 15 nt, Human
ucuucaguaagccgu

SEQ ID NO: 2963442 - RNA, 13 nt, Human
ucuuaaaaagugg

SEQ ID NO: 2963443 - RNA, 14 nt, Human
ucuuagugugugca

SEQ ID NO: 2963444 - RNA, 16 nt, Human
ucuuaguggauguucu

SEQ ID NO: 2963445 - RNA, 15 nt, Human
ucuuauacauuugau

SEQ ID NO: 2963446 - RNA, 14 nt, Human
ucuuauacauuuga

SEQ ID NO: 2963447 - RNA, 16 nt, Human
uggaauaucuccguca

SEQ ID NO: 2963448 - RNA, 16 nt, Human
uggaauacucuuauau

SEQ ID NO: 2963449 - RNA, 14 nt, Human
uggaagacagcucu

SEQ ID NO: 2963450 - RNA, 15 nt, Human
uggaaaauaaauuau

SEQ ID NO: 2963451 - RNA, 16 nt, Human
uggaaaauaaauuauu

SEQ ID NO: 2963452 - RNA, 22 nt, Human
uggaaaaguauguuagugcaaa

SEQ ID NO: 2963453 - RNA, 12 nt, Human
uggaagacagcu

SEQ ID NO: 2963454 - RNA, 11 nt, Human
uggaagacagc

SEQ ID NO: 2963455 - RNA, 14 nt, Human
uggaacucucgagc

SEQ ID NO: 2963456 - RNA, 15 nt, Human
ugcuuuuuuuggccu

SEQ ID NO: 2963457 - RNA, 18 nt, Human
ugcuuccagugaggcucu

SEQ ID NO: 2963458 - RNA, 20 nt, Human
ugcuuccagugaggcucugc

SEQ ID NO: 2963459 - RNA, 19 nt, Human
ugcuuccagugaggcucug

SEQ ID NO: 2963460 - RNA, 14 nt, Human
ugcuucuguuuuau

SEQ ID NO: 2963461 - RNA, 16 nt, Human
ugcuucuucagagacu

SEQ ID NO: 2963462 - RNA, 23 nt, Human
uggauauagcuaggugacauaua

SEQ ID NO: 2963463 - RNA, 21 nt, Human
uggauauagcuaggugacaua

SEQ ID NO: 2963464 - RNA, 22 nt, Human
uggaggcaugugaugagaggaa

SEQ ID NO: 2963465 - RNA, 12 nt, Human
uggacaggcaug

SEQ ID NO: 2963466 - RNA, 16 nt, Human
uggacaggcauguucu

SEQ ID NO: 2963467 - RNA, 18 nt, Human
uggcacugcuuccaguga

SEQ ID NO: 2963468 - RNA, 16 nt, Human
uggcacugcuuccagu

SEQ ID NO: 2963469 - RNA, 14 nt, Human
uggcacugcuucca

SEQ ID NO: 2963470 - RNA, 14 nt, Human
uggaugccuggugg

SEQ ID NO: 2963471 - RNA, 19 nt, Human
uggcagcugcgguccaccc

SEQ ID NO: 2963472 - RNA, 14 nt, Human
uggcaggcaccugu

SEQ ID NO: 2963473 - RNA, 23 nt, Human
uggcagcugcgguccacccagga

SEQ ID NO: 2963474 - RNA, 21 nt, Human
uggcagcugcgguccacccag

SEQ ID NO: 2963475 - RNA, 22 nt, Human
uggcagcugcgguccacccagg

SEQ ID NO: 2963476 - RNA, 13 nt, Human
uggcagugggagc

SEQ ID NO: 2963477 - RNA, 14 nt, Human
uggcagugggagcu

SEQ ID NO: 2963478 - RNA, 15 nt, Human
uggcagugggagcug

SEQ ID NO: 2963479 - RNA, 16 nt, Human
uggcagugggagcugc

SEQ ID NO: 2963480 - RNA, 19 nt, Human
uggcagugggagcugccug

SEQ ID NO: 2963481 - RNA, 17 nt, Human
uggccagaagucaaggc

SEQ ID NO: 2963482 - RNA, 20 nt, Human
uggcagugggagcugccugu

SEQ ID NO: 2963483 - RNA, 13 nt, Human
uggguuuauuugg

SEQ ID NO: 2963484 - RNA, 14 nt, Human
uggguguggcgcag

SEQ ID NO: 2963485 - RNA, 23 nt, Human
uggguucaagcgauucuucugcu

SEQ ID NO: 2963486 - RNA, 16 nt, Human
uggguucacugcaacc

SEQ ID NO: 2963487 - RNA, 21 nt, Human
ugggugucaagagggucugag

SEQ ID NO: 2963488 - RNA, 23 nt, Human
ugggugucaagagggucugagga

SEQ ID NO: 2963489 - RNA, 18 nt, Human
uggggcagugcuuggccc

SEQ ID NO: 2963490 - RNA, 22 nt, Human
uggggcagugcuuggcccagga

SEQ ID NO: 2963491 - RNA, 20 nt, Human
uggggcagugcuuggcccag

SEQ ID NO: 2963492 - RNA, 23 nt, Human
uggggcagugcuuggcccaggag

SEQ ID NO: 2963493 - RNA, 17 nt, Human
ugggguggggaccucag

SEQ ID NO: 2963494 - RNA, 17 nt, Human
uggguagacacacauga

SEQ ID NO: 2963495 - RNA, 16 nt, Human
uggguagacacacaug

SEQ ID NO: 2963496 - RNA, 20 nt, Human
ugggcuucaguggcagcugc

SEQ ID NO: 2963497 - RNA, 19 nt, Human
ugggcuuggggaccagagc

SEQ ID NO: 2963498 - RNA, 16 nt, Human
uggggcagcuugaggg

SEQ ID NO: 2963499 - RNA, 21 nt, Human
ugggcuuggggaccagagcug

SEQ ID NO: 2963500 - RNA, 13 nt, Human
uggggcagcuuga

SEQ ID NO: 2963501 - RNA, 18 nt, Human
ugggcuucaguggcagcu

SEQ ID NO: 2963502 - RNA, 19 nt, Human
ugggcuucaguggcagcug

SEQ ID NO: 2963503 - RNA, 14 nt, Human
ugggccuccugugu

SEQ ID NO: 2963504 - RNA, 16 nt, Human
ugggccuccugugugu

SEQ ID NO: 2963505 - RNA, 22 nt, Human
ugggccuccugugugugcgccu

SEQ ID NO: 2963506 - RNA, 16 nt, Human
ugggagcuuuuguaga

SEQ ID NO: 2963507 - RNA, 16 nt, Human
ugggagcugucaagca

SEQ ID NO: 2963508 - RNA, 24 nt, Human
ugggagcugccuguucagcuccag

SEQ ID NO: 2963509 - RNA, 14 nt, Human
uggcugggggccuc

SEQ ID NO: 2963510 - RNA, 22 nt, Human
uggcugguuagagguucccuuu

SEQ ID NO: 2963511 - RNA, 22 nt, Human
ugggaaugaaugucagugugac

SEQ ID NO: 2963512 - RNA, 18 nt, Human
ugggacagucaccucaug

SEQ ID NO: 2963513 - RNA, 20 nt, Human
ugggacagucaccucaugga

SEQ ID NO: 2963514 - RNA, 21 nt, Human
ugggacagucaccucauggaa

SEQ ID NO: 2963515 - RNA, 23 nt, Human
ugggagcugccuguucagcucca

SEQ ID NO: 2963516 - RNA, 16 nt, Human
ugggacaugggaaagg

SEQ ID NO: 2963517 - RNA, 19 nt, Human
ugggacauuugcucaugga

SEQ ID NO: 2963518 - RNA, 20 nt, Human
ugggacauuugcucauggaa

SEQ ID NO: 2963519 - RNA, 22 nt, Human
uggcucagguggggucacucug

SEQ ID NO: 2963520 - RNA, 20 nt, Human
uggcucagguggggucacuc

SEQ ID NO: 2963521 - RNA, 16 nt, Human
uggcucuuccaggcug

SEQ ID NO: 2963522 - RNA, 12 nt, Human
uggcugggggcc

SEQ ID NO: 2963523 - RNA, 15 nt, Human
uggcucuuccaggcu

SEQ ID NO: 2963524 - RNA, 13 nt, Human
uggcucuuccagg

SEQ ID NO: 2963525 - RNA, 22 nt, Human
uggcgugcaguggugcgaucug

SEQ ID NO: 2963526 - RNA, 14 nt, Human
uggcgugaacccag

SEQ ID NO: 2963527 - RNA, 14 nt, Human
uggcgcugccccug

SEQ ID NO: 2963528 - RNA, 14 nt, Human
uggcgagccauuug

SEQ ID NO: 2963529 - RNA, 19 nt, Human
uggcgagccauuuguccca

SEQ ID NO: 2963530 - RNA, 15 nt, Human
uggccagaugcacca

SEQ ID NO: 2963531 - RNA, 17 nt, Human
uggccuucggccuccau

SEQ ID NO: 2963532 - RNA, 18 nt, Human
uggccuucggccuccauc

SEQ ID NO: 2963533 - RNA, 14 nt, Human
uggccuucggccuc

SEQ ID NO: 2963534 - RNA, 19 nt, Human
ugcauguuacauaagauaa

SEQ ID NO: 2963535 - RNA, 15 nt, Human
ugcauuauauuuauu

SEQ ID NO: 2963536 - RNA, 14 nt, Human
ugcauuauauuuau

SEQ ID NO: 2963537 - RNA, 20 nt, Human
ugcauuauauuuauuacugu

SEQ ID NO: 2963538 - RNA, 15 nt, Human
ugcaucguuucaucu

SEQ ID NO: 2963539 - RNA, 16 nt, Human
ugcaggcagccaggcc

SEQ ID NO: 2963540 - RNA, 22 nt, Human
ugcaucagcugcugaaacaaca

SEQ ID NO: 2963541 - RNA, 19 nt, Human
ugcaucagcugcugaaaca

SEQ ID NO: 2963542 - RNA, 19 nt, Human
ugcaggcagccaggccaca

SEQ ID NO: 2963543 - RNA, 18 nt, Human
ugcaggcagccaggccac

SEQ ID NO: 2963544 - RNA, 17 nt, Human
ugcaggcagccaggcca

SEQ ID NO: 2963545 - RNA, 15 nt, Human
ugccauccuggccca

SEQ ID NO: 2963546 - RNA, 16 nt, Human
ugccauccuggcccag

SEQ ID NO: 2963547 - RNA, 18 nt, Human
ugccauccuggcccaggg

SEQ ID NO: 2963548 - RNA, 21 nt, Human
ugccauccuggcccagggcau

SEQ ID NO: 2963549 - RNA, 10 nt, Human
ugcccagccc

SEQ ID NO: 2963550 - RNA, 14 nt, Human
ugcccaccuggccu

SEQ ID NO: 2963551 - RNA, 18 nt, Human
ugcccaccuggccucugc

SEQ ID NO: 2963552 - RNA, 17 nt, Human
ugcccaccuggccucug

SEQ ID NO: 2963553 - RNA, 15 nt, Human
ugcccaccuggccuc

SEQ ID NO: 2963554 - RNA, 22 nt, Human
ugccagggacagaggggguggc

SEQ ID NO: 2963555 - RNA, 11 nt, Human
ugccagggaca

SEQ ID NO: 2963556 - RNA, 24 nt, Human
ugccagguuuuuggucugacccac

SEQ ID NO: 2963557 - RNA, 14 nt, Human
ugccagucaccccg

SEQ ID NO: 2963558 - RNA, 13 nt, Human
ugccauccuggcc

SEQ ID NO: 2963559 - RNA, 21 nt, Human
ugccaucccucccuccaccuc

SEQ ID NO: 2963560 - RNA, 22 nt, Human
ugccaucccucccuccaccucc

SEQ ID NO: 2963561 - RNA, 15 nt, Human
ugccaucccucccuc

SEQ ID NO: 2963562 - RNA, 14 nt, Human
ugccaucccucccu

SEQ ID NO: 2963563 - RNA, 19 nt, Human
ugccaucccucccuccacc

SEQ ID NO: 2963564 - RNA, 20 nt, Human
ugccaucccucccuccaccu

SEQ ID NO: 2963565 - RNA, 21 nt, Human
ugcacagcaggcugccagugc

SEQ ID NO: 2963566 - RNA, 22 nt, Human
ugcacagcaggcugccagugcc

SEQ ID NO: 2963567 - RNA, 23 nt, Human
ugcacagcaggcugccagugccu

SEQ ID NO: 2963568 - RNA, 17 nt, Human
ugcacagcuaacaugga

SEQ ID NO: 2963569 - RNA, 18 nt, Human
ugcacagcaggcugccag

SEQ ID NO: 2963570 - RNA, 23 nt, Human
ugcacagaguuguuacauuuuua

SEQ ID NO: 2963571 - RNA, 21 nt, Human
ugcacacuuuggcccagggug

SEQ ID NO: 2963572 - RNA, 20 nt, Human
ugcacagaguuguuacauuu

SEQ ID NO: 2963573 - RNA, 21 nt, Human
ugcacagaguuguuacauuuu

SEQ ID NO: 2963574 - RNA, 22 nt, Human
ugcacagaguuguuacauuuuu

SEQ ID NO: 2963575 - RNA, 17 nt, Human
ugcacacuuuggcccag

SEQ ID NO: 2963576 - RNA, 18 nt, Human
ugcacacuuuggcccagg

SEQ ID NO: 2963577 - RNA, 19 nt, Human
ugcacacuuuggcccaggg

SEQ ID NO: 2963578 - RNA, 20 nt, Human
ugcacacuuuggcccagggu

SEQ ID NO: 2963579 - RNA, 16 nt, Human
ugcacacuuuggccca

SEQ ID NO: 2963580 - RNA, 13 nt, Human
ugcacacuuuggc

SEQ ID NO: 2963581 - RNA, 22 nt, Human
ugaagucuuuguacagacaaca

SEQ ID NO: 2963582 - RNA, 20 nt, Human
ugaagucuuuguacagacaa

SEQ ID NO: 2963583 - RNA, 17 nt, Human
ugaagucuuuguacaga

SEQ ID NO: 2963584 - RNA, 23 nt, Human
ugcacagcuaacauggaaguacu

SEQ ID NO: 2963585 - RNA, 20 nt, Human
ugcacagcuaacauggaagu

SEQ ID NO: 2963586 - RNA, 18 nt, Human
ugcacagcuaacauggaa

SEQ ID NO: 2963587 - RNA, 13 nt, Human
ugcacaucuguuu

SEQ ID NO: 2963588 - RNA, 15 nt, Human
ugcacaucaaaauau

SEQ ID NO: 2963589 - RNA, 18 nt, Human
ugcaggaccucaggugag

SEQ ID NO: 2963590 - RNA, 16 nt, Human
ugcaggaccucaggug

SEQ ID NO: 2963591 - RNA, 15 nt, Human
ugcaggaccucaggu

SEQ ID NO: 2963592 - RNA, 14 nt, Human
ugcaggaccucagg

SEQ ID NO: 2963593 - RNA, 14 nt, Human
ugcagcaauaaagc

SEQ ID NO: 2963594 - RNA, 15 nt, Human
ugcagcaauaaagca

SEQ ID NO: 2963595 - RNA, 16 nt, Human
ugcagcaauaaagcag

SEQ ID NO: 2963596 - RNA, 21 nt, Human
ugcacuugcagacucuacaga

SEQ ID NO: 2963597 - RNA, 16 nt, Human
ugcacuugcagacucu

SEQ ID NO: 2963598 - RNA, 16 nt, Human
ugcacguacacacaca

SEQ ID NO: 2963599 - RNA, 16 nt, Human
ugcagauaaacaguag

SEQ ID NO: 2963600 - RNA, 20 nt, Human
ugcacuuuguucuggcucuu

SEQ ID NO: 2963601 - RNA, 19 nt, Human
ugcacuuuguucuggcucu

SEQ ID NO: 2963602 - RNA, 18 nt, Human
ugcacuuuguucuggcuc

SEQ ID NO: 2963603 - RNA, 15 nt, Human
ugcacuuuguucugg

SEQ ID NO: 2963604 - RNA, 21 nt, Human
ugcugaaggcucgagcaugcc

SEQ ID NO: 2963605 - RNA, 23 nt, Human
ugcugaauacagaggcaacugca

SEQ ID NO: 2963606 - RNA, 18 nt, Human
ugcugaauacagaggcaa

SEQ ID NO: 2963607 - RNA, 17 nt, Human
ugcugaaugguuuucaa

SEQ ID NO: 2963608 - RNA, 18 nt, Human
ugcugaaugguuuucaaa

SEQ ID NO: 2963609 - RNA, 22 nt, Human
ugcugaaugguuuucaaaauaa

SEQ ID NO: 2963610 - RNA, 20 nt, Human
ugcuccugggcuacaaggac

SEQ ID NO: 2963611 - RNA, 19 nt, Human
ugcuccuggcccacugcau

SEQ ID NO: 2963612 - RNA, 14 nt, Human
ugcugauuuaaaca

SEQ ID NO: 2963613 - RNA, 16 nt, Human
ugcugcaguugccagu

SEQ ID NO: 2963614 - RNA, 15 nt, Human
ugcugcaguugccag

SEQ ID NO: 2963615 - RNA, 23 nt, Human
ugcugauggugcaaugaccuuuc

SEQ ID NO: 2963616 - RNA, 20 nt, Human
ugcugauggugcaaugaccu

SEQ ID NO: 2963617 - RNA, 15 nt, Human
ugcugacagacacag

SEQ ID NO: 2963618 - RNA, 16 nt, Human
ugcugacagacacagg

SEQ ID NO: 2963619 - RNA, 19 nt, Human
ugcugacagacacaggccc

SEQ ID NO: 2963620 - RNA, 23 nt, Human
ugcugaguguacagaguggaaua

SEQ ID NO: 2963621 - RNA, 18 nt, Human
ugcuccucuccccagcaa

SEQ ID NO: 2963622 - RNA, 19 nt, Human
ugcuccucuccccagcaag

SEQ ID NO: 2963623 - RNA, 16 nt, Human
ugcuaggaacacuccu

SEQ ID NO: 2963624 - RNA, 19 nt, Human
ugcuaggaacacuccuuca

SEQ ID NO: 2963625 - RNA, 17 nt, Human
ugcuaggaacacuccuu

SEQ ID NO: 2963626 - RNA, 20 nt, Human
ugcuagaacucccuuucaac

SEQ ID NO: 2963627 - RNA, 21 nt, Human
ugcuagaacucccuuucaaca

SEQ ID NO: 2963628 - RNA, 15 nt, Human
ugcgugcauaccacu

SEQ ID NO: 2963629 - RNA, 19 nt, Human
ugcuagaacucccuuucaa

SEQ ID NO: 2963630 - RNA, 18 nt, Human
ugcuagaacucccuuuca

SEQ ID NO: 2963631 - RNA, 22 nt, Human
ugccuuauggaacacucugaga

SEQ ID NO: 2963632 - RNA, 21 nt, Human
ugccuuauggaacacucugag

SEQ ID NO: 2963633 - RNA, 20 nt, Human
ugccuuauggaacacucuga

SEQ ID NO: 2963634 - RNA, 18 nt, Human
ugccuuauggaacacucu

SEQ ID NO: 2963635 - RNA, 13 nt, Human
ugcgccuacagga

SEQ ID NO: 2963636 - RNA, 23 nt, Human
ugcggugcuaucucccccagccc

SEQ ID NO: 2963637 - RNA, 17 nt, Human
ugccuucucaacuccaa

SEQ ID NO: 2963638 - RNA, 22 nt, Human
ugccuucucaacuccaaacuga

SEQ ID NO: 2963639 - RNA, 14 nt, Human
ugccucugggacug

SEQ ID NO: 2963640 - RNA, 16 nt, Human
ugccuccuuugugagg

SEQ ID NO: 2963641 - RNA, 18 nt, Human
ugccuccuuugugaggaa

SEQ ID NO: 2963642 - RNA, 17 nt, Human
ugccuccuuugugagga

SEQ ID NO: 2963643 - RNA, 22 nt, Human
ugccugaagucacacagugagu

SEQ ID NO: 2963644 - RNA, 18 nt, Human
ugccugaagucacacagu

SEQ ID NO: 2963645 - RNA, 17 nt, Human
ugccugaagucacacag

SEQ ID NO: 2963646 - RNA, 23 nt, Human
ugcccaggcuggcgugcaguggu

SEQ ID NO: 2963647 - RNA, 11 nt, Human
ugcccagcccc

SEQ ID NO: 2963648 - RNA, 23 nt, Human
ugccuaccaauauuuaaucuuuu

SEQ ID NO: 2963649 - RNA, 17 nt, Human
ugccuaccaauauuuaa

SEQ ID NO: 2963650 - RNA, 17 nt, Human
ugccuaauaugaugacu

SEQ ID NO: 2963651 - RNA, 22 nt, Human
ugccuaauaugaugacuguuuu

SEQ ID NO: 2963652 - RNA, 18 nt, Human
ugccuccccuccucugcu

SEQ ID NO: 2963653 - RNA, 19 nt, Human
ugccuccccuccucugcuu

SEQ ID NO: 2963654 - RNA, 22 nt, Human
ugccuccccuccucugcuugcc

SEQ ID NO: 2963655 - RNA, 23 nt, Human
ugccuccccuccucugcuugcca

SEQ ID NO: 2963656 - RNA, 20 nt, Human
uuaaagcuuauuaaaacuca

SEQ ID NO: 2963657 - RNA, 20 nt, Human
uuaaacuuaaucuaaaugga

SEQ ID NO: 2963658 - RNA, 16 nt, Human
uuaaacuuaaucuaaa

SEQ ID NO: 2963659 - RNA, 18 nt, Human
uuaaacuuaaucuaaaug

SEQ ID NO: 2963660 - RNA, 13 nt, Human
uuaaaagaaugau

SEQ ID NO: 2963661 - RNA, 19 nt, Human
uuaaaagaaugauuaugaa

SEQ ID NO: 2963662 - RNA, 18 nt, Human
uuaaaugcccagccccuu

SEQ ID NO: 2963663 - RNA, 17 nt, Human
uuaaaugcccagccccu

SEQ ID NO: 2963664 - RNA, 19 nt, Human
uuaaauagcuuuuuucucu

SEQ ID NO: 2963665 - RNA, 15 nt, Human
uuaaagcuuccauug

SEQ ID NO: 2963666 - RNA, 20 nt, Human
uuaaagcuuccauuguuguc

SEQ ID NO: 2963667 - RNA, 17 nt, Human
uuaaaugcaccuggaau

SEQ ID NO: 2963668 - RNA, 18 nt, Human
uuaaaugcaccuggaaua

SEQ ID NO: 2963669 - RNA, 16 nt, Human
uuaaaugcaccuggaa

SEQ ID NO: 2963670 - RNA, 11 nt, Human
uuaaaugcacc

SEQ ID NO: 2963671 - RNA, 16 nt, Human
uguuuguugucagcug

SEQ ID NO: 2963672 - RNA, 17 nt, Human
uguuuguugucagcuga

SEQ ID NO: 2963673 - RNA, 22 nt, Human
uguuuccuggcacugcuuccag

SEQ ID NO: 2963674 - RNA, 21 nt, Human
uguuuccuggcacugcuucca

SEQ ID NO: 2963675 - RNA, 20 nt, Human
uguuuccuggcacugcuucc

SEQ ID NO: 2963676 - RNA, 13 nt, Human
uguuuuugucuua

SEQ ID NO: 2963677 - RNA, 18 nt, Human
uguuuuuauuauuaacaa

SEQ ID NO: 2963678 - RNA, 15 nt, Human
uguuuuuauuauuaa

SEQ ID NO: 2963679 - RNA, 17 nt, Human
uguuuugcucaauagau

SEQ ID NO: 2963680 - RNA, 20 nt, Human
uuacagagacagaaagcaga

SEQ ID NO: 2963681 - RNA, 14 nt, Human
uuacauuuguauaa

SEQ ID NO: 2963682 - RNA, 15 nt, Human
uuacauuuguauaaa

SEQ ID NO: 2963683 - RNA, 23 nt, Human
uuacauggcuggagcuagaauuu

SEQ ID NO: 2963684 - RNA, 22 nt, Human
uuacauggcuggagcuagaauu

SEQ ID NO: 2963685 - RNA, 16 nt, Human
uuacggaacucaaaua

SEQ ID NO: 2963686 - RNA, 20 nt, Human
uuacgguuuuccagguuuaa

SEQ ID NO: 2963687 - RNA, 23 nt, Human
uuacgaaaaaaugguagcauuuu

SEQ ID NO: 2963688 - RNA, 22 nt, Human
uuaccuuuuuuauacauaaaca

SEQ ID NO: 2963689 - RNA, 19 nt, Human
uuaccuuuuuuauacauaa

SEQ ID NO: 2963690 - RNA, 20 nt, Human
uuaccuuuuuuauacauaaa

SEQ ID NO: 2963691 - RNA, 14 nt, Human
uuaccagcagagca

SEQ ID NO: 2963692 - RNA, 21 nt, Human
uuaccacuuguguuuugcaag

SEQ ID NO: 2963693 - RNA, 20 nt, Human
uuacauuuuuaagugcugca

SEQ ID NO: 2963694 - RNA, 21 nt, Human
uuacauuuuuaagugcugcau

SEQ ID NO: 2963695 - RNA, 22 nt, Human
uuacauuuuuaagugcugcauu

SEQ ID NO: 2963696 - RNA, 21 nt, Human
uuaauagguuuggacaaaaug

SEQ ID NO: 2963697 - RNA, 18 nt, Human
uuaaugucacaggcaggu

SEQ ID NO: 2963698 - RNA, 17 nt, Human
uuaaugucacaggcagg

SEQ ID NO: 2963699 - RNA, 22 nt, Human
uuaaugucaauucuugccaaau

SEQ ID NO: 2963700 - RNA, 21 nt, Human
uuaaggaagacaaugugaaaa

SEQ ID NO: 2963701 - RNA, 17 nt, Human
uuaaggaugcuuguaca

SEQ ID NO: 2963702 - RNA, 18 nt, Human
uuaaggaugcuuguacau

SEQ ID NO: 2963703 - RNA, 19 nt, Human
uuaaggaugcuuguacaua

SEQ ID NO: 2963704 - RNA, 20 nt, Human
uuaaggaugcuuguacauaa

SEQ ID NO: 2963705 - RNA, 22 nt, Human
uuaaggaugcuuguacauaaug

SEQ ID NO: 2963706 - RNA, 16 nt, Human
uuaauaauguuucaaa

SEQ ID NO: 2963707 - RNA, 16 nt, Human
uuaauagguuuggaca

SEQ ID NO: 2963708 - RNA, 18 nt, Human
uuaauaauguuucaaaca

SEQ ID NO: 2963709 - RNA, 16 nt, Human
uguguagggcgggagg

SEQ ID NO: 2963710 - RNA, 18 nt, Human
ugugugaauaccccaaga

SEQ ID NO: 2963711 - RNA, 13 nt, Human
uguguuuauuguc

SEQ ID NO: 2963712 - RNA, 19 nt, Human
ugugugcguccugucggag

SEQ ID NO: 2963713 - RNA, 16 nt, Human
uguuacugucuucagu

SEQ ID NO: 2963714 - RNA, 15 nt, Human
uguuacugucuucag

SEQ ID NO: 2963715 - RNA, 22 nt, Human
uguuacauuuuuaagugcugca

SEQ ID NO: 2963716 - RNA, 13 nt, Human
uguuacauuuuua

SEQ ID NO: 2963717 - RNA, 12 nt, Human
uguuauaaucuu

SEQ ID NO: 2963718 - RNA, 14 nt, Human
uguuagugcaaauu

SEQ ID NO: 2963719 - RNA, 15 nt, Human
uguucagcuccagcu

SEQ ID NO: 2963720 - RNA, 16 nt, Human
uguucagcuccagcuc

SEQ ID NO: 2963721 - RNA, 11 nt, Human
uguucagcugg

SEQ ID NO: 2963722 - RNA, 14 nt, Human
uguucagcuccagc

SEQ ID NO: 2963723 - RNA, 16 nt, Human
uguucacagccagacu

SEQ ID NO: 2963724 - RNA, 15 nt, Human
uguuggccaaagcca

SEQ ID NO: 2963725 - RNA, 11 nt, Human
uguuggccagg

SEQ ID NO: 2963726 - RNA, 21 nt, Human
uguuggagaagaacugaaauc

SEQ ID NO: 2963727 - RNA, 19 nt, Human
uguugaagagguuuuaaag

SEQ ID NO: 2963728 - RNA, 14 nt, Human
uguuggccaggcug

SEQ ID NO: 2963729 - RNA, 15 nt, Human
uguuuaaugguaguu

SEQ ID NO: 2963730 - RNA, 13 nt, Human
uguuuaaaaucau

SEQ ID NO: 2963731 - RNA, 21 nt, Human
uguucuccagucauuauguua

SEQ ID NO: 2963732 - RNA, 13 nt, Human
uguucucugagga

SEQ ID NO: 2963733 - RNA, 16 nt, Human
uguucucugaggacac

SEQ ID NO: 2963734 - RNA, 18 nt, Human
uguucucugaggacacua

SEQ ID NO: 2963735 - RNA, 12 nt, Human
uguucucugccc

SEQ ID NO: 2963736 - RNA, 20 nt, Human
uguucaugaaagauucaaug

SEQ ID NO: 2963737 - RNA, 14 nt, Human
uguucuuucuggcu

SEQ ID NO: 2963738 - RNA, 18 nt, Human
uguucugacccugcuuca

SEQ ID NO: 2963739 - RNA, 19 nt, Human
uguucucugcccuccaaga

SEQ ID NO: 2963740 - RNA, 15 nt, Human
uguucugacccugcu

SEQ ID NO: 2963741 - RNA, 20 nt, Human
uguucuuuccaaaguacacu

SEQ ID NO: 2963742 - RNA, 20 nt, Human
uguucuuucuggcuaugcau

SEQ ID NO: 2963743 - RNA, 22 nt, Human
uguucuuucuggcuaugcauuu

SEQ ID NO: 2963744 - RNA, 11 nt, Human
uguugaaagau

SEQ ID NO: 2963745 - RNA, 16 nt, Human
uguugaaacuuuaaga

SEQ ID NO: 2963746 - RNA, 16 nt, Human
uguaugauucccagcc

SEQ ID NO: 2963747 - RNA, 16 nt, Human
uguaugcacacacaua

SEQ ID NO: 2963748 - RNA, 17 nt, Human
uguaugcacacacauau

SEQ ID NO: 2963749 - RNA, 19 nt, Human
uguaugcacacacauauau

SEQ ID NO: 2963750 - RNA, 21 nt, Human
uguaugcacacacauauauua

SEQ ID NO: 2963751 - RNA, 15 nt, Human
uguaugcacacacau

SEQ ID NO: 2963752 - RNA, 16 nt, Human
uguaucccaugagccu

SEQ ID NO: 2963753 - RNA, 19 nt, Human
uguaucccaugagccucag

SEQ ID NO: 2963754 - RNA, 23 nt, Human
uguaucccaugagccucagcauc

SEQ ID NO: 2963755 - RNA, 18 nt, Human
ugucaguuguuauuuauu

SEQ ID NO: 2963756 - RNA, 17 nt, Human
ugucaguuguuauuuau

SEQ ID NO: 2963757 - RNA, 19 nt, Human
ugucaguucugauauggaa

SEQ ID NO: 2963758 - RNA, 22 nt, Human
ugucaguuguuauuuauugaaa

SEQ ID NO: 2963759 - RNA, 20 nt, Human
ugucagugugacugaucucu

SEQ ID NO: 2963760 - RNA, 12 nt, Human
ugucagugugac

SEQ ID NO: 2963761 - RNA, 20 nt, Human
ugucagucugcuuagaaaua

SEQ ID NO: 2963762 - RNA, 17 nt, Human
ugucagucugcuuagaa

SEQ ID NO: 2963763 - RNA, 19 nt, Human
ugucagucugcuuagaaau

SEQ ID NO: 2963764 - RNA, 21 nt, Human
uguaacuguuuagaugaaugu

SEQ ID NO: 2963765 - RNA, 14 nt, Human
uguaaucacagcua

SEQ ID NO: 2963766 - RNA, 15 nt, Human
uguaaucacagcuac

SEQ ID NO: 2963767 - RNA, 13 nt, Human
uguaaacacaucu

SEQ ID NO: 2963768 - RNA, 20 nt, Human
uguaaacacaucuaguaguu

SEQ ID NO: 2963769 - RNA, 13 nt, Human
uguaaauuaacuu

SEQ ID NO: 2963770 - RNA, 14 nt, Human
uguaaauuaacuuu

SEQ ID NO: 2963771 - RNA, 15 nt, Human
uguaaauuaacuuuu

SEQ ID NO: 2963772 - RNA, 16 nt, Human
uguaaauuaacuuuua

SEQ ID NO: 2963773 - RNA, 17 nt, Human
uguaaauuaacuuuuau

SEQ ID NO: 2963774 - RNA, 23 nt, Human
uguaccucuugagccuugaacuu

SEQ ID NO: 2963775 - RNA, 22 nt, Human
uguaccucuugagccuugaacu

SEQ ID NO: 2963776 - RNA, 14 nt, Human
uguaccucuugagc

SEQ ID NO: 2963777 - RNA, 17 nt, Human
uguacgucugacaggca

SEQ ID NO: 2963778 - RNA, 16 nt, Human
uguacgucugacaggc

SEQ ID NO: 2963779 - RNA, 17 nt, Human
uguagauaauacaguuc

SEQ ID NO: 2963780 - RNA, 14 nt, Human
uguggacacagcuc

SEQ ID NO: 2963781 - RNA, 13 nt, Human
uguggacacagcu

SEQ ID NO: 2963782 - RNA, 15 nt, Human
uguggacacagcucu

SEQ ID NO: 2963783 - RNA, 16 nt, Human
uguggacacagcucuu

SEQ ID NO: 2963784 - RNA, 21 nt, Human
uguggagaagcggcuggcagc

SEQ ID NO: 2963785 - RNA, 12 nt, Human
uguggagaagcg

SEQ ID NO: 2963786 - RNA, 12 nt, Human
uguguacuuuua

SEQ ID NO: 2963787 - RNA, 15 nt, Human
uguguacuuuuaaga

SEQ ID NO: 2963788 - RNA, 12 nt, Human
ugugggaagggg

SEQ ID NO: 2963789 - RNA, 16 nt, Human
ugugcacaugcacgug

SEQ ID NO: 2963790 - RNA, 22 nt, Human
ugugcacaugcacgugugugca

SEQ ID NO: 2963791 - RNA, 13 nt, Human
ugugccucuggga

SEQ ID NO: 2963792 - RNA, 15 nt, Human
ugugccucugggacu

SEQ ID NO: 2963793 - RNA, 16 nt, Human
ugugccucugggacug

SEQ ID NO: 2963794 - RNA, 17 nt, Human
ugugccucugggacugg

SEQ ID NO: 2963795 - RNA, 14 nt, Human
ugugcguccugucg

SEQ ID NO: 2963796 - RNA, 20 nt, Human
ugugcgugcauguguguuca

SEQ ID NO: 2963797 - RNA, 12 nt, Human
ugugaaaaaauu

SEQ ID NO: 2963798 - RNA, 17 nt, Human
ugugaaaaaauuuacuu

SEQ ID NO: 2963799 - RNA, 23 nt, Human
ugugaaaaaauuuacuuuaaacu

SEQ ID NO: 2963800 - RNA, 13 nt, Human
ugugaaaggaaag

SEQ ID NO: 2963801 - RNA, 14 nt, Human
ugugaaaggaaaga

SEQ ID NO: 2963802 - RNA, 16 nt, Human
ugucuuuuuucacuac

SEQ ID NO: 2963803 - RNA, 22 nt, Human
ugucuuuggacccugaggccca

SEQ ID NO: 2963804 - RNA, 19 nt, Human
ugucuuuggacccugaggc

SEQ ID NO: 2963805 - RNA, 18 nt, Human
ugucuuuggacccugagg

SEQ ID NO: 2963806 - RNA, 17 nt, Human
ugucuuuggacccugag

SEQ ID NO: 2963807 - RNA, 21 nt, Human
ugucucaguccaugaagaugu

SEQ ID NO: 2963808 - RNA, 18 nt, Human
ugugaguacuacaguccu

SEQ ID NO: 2963809 - RNA, 23 nt, Human
ugugaguacuacaguccucccau

SEQ ID NO: 2963810 - RNA, 20 nt, Human
ugugaguacuacaguccucc

SEQ ID NO: 2963811 - RNA, 19 nt, Human
ugugaguacuacaguccuc

SEQ ID NO: 2963812 - RNA, 21 nt, Human
ugugauacaaugcugugcccu

SEQ ID NO: 2963813 - RNA, 21 nt, Human
ugugaauaaagagggugggug

SEQ ID NO: 2963814 - RNA, 16 nt, Human
ugugaauaccccaaga

SEQ ID NO: 2963815 - RNA, 14 nt, Human
ugugaaugcagguu

SEQ ID NO: 2963816 - RNA, 20 nt, Human
ugugaaugcagguuuuauca

SEQ ID NO: 2963817 - RNA, 21 nt, Human
ugugacaaggauugcuacugu

SEQ ID NO: 2963818 - RNA, 22 nt, Human
ugugaccacugcagaagacagu

SEQ ID NO: 2963819 - RNA, 17 nt, Human
uuggguuuauuuggaaa

SEQ ID NO: 2963820 - RNA, 12 nt, Human
uuggguuuauuu

SEQ ID NO: 2963821 - RNA, 16 nt, Human
uuggguggaugccugg

SEQ ID NO: 2963822 - RNA, 22 nt, Human
uuggcuuuggguugcaggaccu

SEQ ID NO: 2963823 - RNA, 16 nt, Human
uugggaggccauuugu

SEQ ID NO: 2963824 - RNA, 12 nt, Human
uugggaggcuga

SEQ ID NO: 2963825 - RNA, 13 nt, Human
uuggcauucccca

SEQ ID NO: 2963826 - RNA, 14 nt, Human
uuggccaggcuggu

SEQ ID NO: 2963827 - RNA, 22 nt, Human
uuggccagaaaccuuccugcug

SEQ ID NO: 2963828 - RNA, 24 nt, Human
uuggccaaagccaaagcuaggccu

SEQ ID NO: 2963829 - RNA, 21 nt, Human
uuggcugggggccucagugcc

SEQ ID NO: 2963830 - RNA, 22 nt, Human
uuggcugggggccucagugcca

SEQ ID NO: 2963831 - RNA, 18 nt, Human
uuggcugggggccucagu

SEQ ID NO: 2963832 - RNA, 20 nt, Human
uuggccagaagucaaggcuu

SEQ ID NO: 2963833 - RNA, 16 nt, Human
uuggcugcugaaggcu

SEQ ID NO: 2963834 - RNA, 16 nt, Human
uuguaaaggaauuuaa

SEQ ID NO: 2963835 - RNA, 16 nt, Human
uuggucccccuuccau

SEQ ID NO: 2963836 - RNA, 22 nt, Human
uuggucccccuuccauggacuu

SEQ ID NO: 2963837 - RNA, 12 nt, Human
uugguccugcug

SEQ ID NO: 2963838 - RNA, 20 nt, Human
uuguacacucauucauuacu

SEQ ID NO: 2963839 - RNA, 13 nt, Human
uuguacagacaac

SEQ ID NO: 2963840 - RNA, 12 nt, Human
uuguacagacaa

SEQ ID NO: 2963841 - RNA, 18 nt, Human
uuguaaaugugcuuuuaa

SEQ ID NO: 2963842 - RNA, 14 nt, Human
uuguaaaugugcuu

SEQ ID NO: 2963843 - RNA, 11 nt, Human
uuguaaaugug

SEQ ID NO: 2963844 - RNA, 14 nt, Human
uuguagagccaggg

SEQ ID NO: 2963845 - RNA, 15 nt, Human
uuguagagccagggu

SEQ ID NO: 2963846 - RNA, 19 nt, Human
uuguaucacaaaucuuaac

SEQ ID NO: 2963847 - RNA, 21 nt, Human
uuguauucucuccuguaccuc

SEQ ID NO: 2963848 - RNA, 14 nt, Human
uuguauuacaaauc

SEQ ID NO: 2963849 - RNA, 20 nt, Human
uugcuaacagcaacacaaag

SEQ ID NO: 2963850 - RNA, 19 nt, Human
uugcugauggugcaaugac

SEQ ID NO: 2963851 - RNA, 20 nt, Human
uugcugauggugcaaugacc

SEQ ID NO: 2963852 - RNA, 22 nt, Human
uugcugauggugcaaugaccuu

SEQ ID NO: 2963853 - RNA, 13 nt, Human
uugcuaacagcaa

SEQ ID NO: 2963854 - RNA, 23 nt, Human
uugcccacgcuggagugcaguga

SEQ ID NO: 2963855 - RNA, 11 nt, Human
uugcccaggca

SEQ ID NO: 2963856 - RNA, 13 nt, Human
uugccagucaccc

SEQ ID NO: 2963857 - RNA, 18 nt, Human
uugccagucaccccggcc

SEQ ID NO: 2963858 - RNA, 15 nt, Human
uugcccagccuggau

SEQ ID NO: 2963859 - RNA, 11 nt, Human
uugccucugcc

SEQ ID NO: 2963860 - RNA, 14 nt, Human
uugccucugccucu

SEQ ID NO: 2963861 - RNA, 16 nt, Human
uugccucugccucuga

SEQ ID NO: 2963862 - RNA, 18 nt, Human
uugccucugccucugaca

SEQ ID NO: 2963863 - RNA, 14 nt, Human
uuggauuguccccg

SEQ ID NO: 2963864 - RNA, 17 nt, Human
uuggcaaaaaggcagga

SEQ ID NO: 2963865 - RNA, 19 nt, Human
uuggaaggaacguccccug

SEQ ID NO: 2963866 - RNA, 11 nt, Human
uuggaaggaac

SEQ ID NO: 2963867 - RNA, 20 nt, Human
uuggacauuuuaugucuuuc

SEQ ID NO: 2963868 - RNA, 18 nt, Human
uuggacauuuuaugucuu

SEQ ID NO: 2963869 - RNA, 17 nt, Human
uuggacauuuuaugucu

SEQ ID NO: 2963870 - RNA, 16 nt, Human
uuggacauuuuauguc

SEQ ID NO: 2963871 - RNA, 20 nt, Human
uugcuggggccgaaagaaca

SEQ ID NO: 2963872 - RNA, 21 nt, Human
uuggaaaggaaugcaaagaug

SEQ ID NO: 2963873 - RNA, 23 nt, Human
uuggaaagaguaggaagacuuug

SEQ ID NO: 2963874 - RNA, 21 nt, Human
uuggaaauuagguugaaacau

SEQ ID NO: 2963875 - RNA, 23 nt, Human
uuggaaauuagguugaaacauau

SEQ ID NO: 2963876 - RNA, 17 nt, Human
uucuguccuacucugug

SEQ ID NO: 2963877 - RNA, 23 nt, Human
uucuguggguuucuaaagcugcc

SEQ ID NO: 2963878 - RNA, 21 nt, Human
uucuguccgagcuuugaaaau

SEQ ID NO: 2963879 - RNA, 17 nt, Human
uucuguccgagcuuuga

SEQ ID NO: 2963880 - RNA, 15 nt, Human
uucugagaaagacua

SEQ ID NO: 2963881 - RNA, 14 nt, Human
uucugagcauuuaa

SEQ ID NO: 2963882 - RNA, 15 nt, Human
uucuuauuucauuuc

SEQ ID NO: 2963883 - RNA, 19 nt, Human
uucuuauuuaaugaaagac

SEQ ID NO: 2963884 - RNA, 23 nt, Human
uucuuauuuaaugaaagacugua

SEQ ID NO: 2963885 - RNA, 13 nt, Human
uucuugguuugua

SEQ ID NO: 2963886 - RNA, 16 nt, Human
uucuugguuuguaaau

SEQ ID NO: 2963887 - RNA, 23 nt, Human
uucuugguuuguaaauuaacuuu

SEQ ID NO: 2963888 - RNA, 17 nt, Human
uucuugguuuguaaauu

SEQ ID NO: 2963889 - RNA, 18 nt, Human
uucuugguuuguaaauua

SEQ ID NO: 2963890 - RNA, 22 nt, Human
uugaacuuugaccucugcagca

SEQ ID NO: 2963891 - RNA, 20 nt, Human
uugaacuuugaccucugcag

SEQ ID NO: 2963892 - RNA, 16 nt, Human
uugaacugauaaagau

SEQ ID NO: 2963893 - RNA, 19 nt, Human
uugaacucuucaaucucuu

SEQ ID NO: 2963894 - RNA, 19 nt, Human
uugaagacuuuucuuucag

SEQ ID NO: 2963895 - RNA, 17 nt, Human
uugaagacagagcuaca

SEQ ID NO: 2963896 - RNA, 18 nt, Human
uucuuuauaauucuacuu

SEQ ID NO: 2963897 - RNA, 21 nt, Human
uugaaaacacuguucucugcc

SEQ ID NO: 2963898 - RNA, 19 nt, Human
uugaaaacacuguucucug

SEQ ID NO: 2963899 - RNA, 23 nt, Human
uugaaacugagaugugaacacau

SEQ ID NO: 2963900 - RNA, 14 nt, Human
uugaaacuuuaaga

SEQ ID NO: 2963901 - RNA, 23 nt, Human
uugaaaagacuccaaagaaaugu

SEQ ID NO: 2963902 - RNA, 22 nt, Human
uugaaaagacuccaaagaaaug

SEQ ID NO: 2963903 - RNA, 18 nt, Human
uugaaaagacuccaaaga

SEQ ID NO: 2963904 - RNA, 16 nt, Human
uugaaaagacuccaaa

SEQ ID NO: 2963905 - RNA, 14 nt, Human
uugcaacaggcugg

SEQ ID NO: 2963906 - RNA, 17 nt, Human
uugcaacaggcugggcu

SEQ ID NO: 2963907 - RNA, 18 nt, Human
uugauuuccguuaaaaua

SEQ ID NO: 2963908 - RNA, 12 nt, Human
uugaugaagaag

SEQ ID NO: 2963909 - RNA, 21 nt, Human
uugauagcacagacccugccc

SEQ ID NO: 2963910 - RNA, 18 nt, Human
uugaggguauguuuuaua

SEQ ID NO: 2963911 - RNA, 16 nt, Human
uugcagacaggcaagc

SEQ ID NO: 2963912 - RNA, 22 nt, Human
uugcagacaggcaagcaccucc

SEQ ID NO: 2963913 - RNA, 19 nt, Human
uugcauacuauuaaacaug

SEQ ID NO: 2963914 - RNA, 18 nt, Human
uugcauacuauuaaacau

SEQ ID NO: 2963915 - RNA, 16 nt, Human
uugcauacuauuaaac

SEQ ID NO: 2963916 - RNA, 18 nt, Human
uugcauagauucccugag

SEQ ID NO: 2963917 - RNA, 22 nt, Human
uugaccugaggcccuucucucc

SEQ ID NO: 2963918 - RNA, 19 nt, Human
uugaccugaggcccuucuc

SEQ ID NO: 2963919 - RNA, 12 nt, Human
uugaccugaggc

SEQ ID NO: 2963920 - RNA, 22 nt, Human
uugacgccaucccagccccaau

SEQ ID NO: 2963921 - RNA, 14 nt, Human
uugacgccauccca

SEQ ID NO: 2963922 - RNA, 15 nt, Human
uugaccucaggugau

SEQ ID NO: 2963923 - RNA, 21 nt, Human
uugaccgugaggccagagaca

SEQ ID NO: 2963924 - RNA, 20 nt, Human
uugaccgugaggccagagac

SEQ ID NO: 2963925 - RNA, 20 nt, Human
uugacgccaucccagcccca

SEQ ID NO: 2963926 - RNA, 12 nt, Human
uugacuauuuuu

SEQ ID NO: 2963927 - RNA, 19 nt, Human
uugacuauuuuuguuuuua

SEQ ID NO: 2963928 - RNA, 20 nt, Human
uugauagcacagacccugcc

SEQ ID NO: 2963929 - RNA, 19 nt, Human
uugauagcacagacccugc

SEQ ID NO: 2963930 - RNA, 15 nt, Human
uugaggacacugaua

SEQ ID NO: 2963931 - RNA, 14 nt, Human
uugaggacacugau

SEQ ID NO: 2963932 - RNA, 13 nt, Human
uucaaagauauuu

SEQ ID NO: 2963933 - RNA, 19 nt, Human
uuacuaaaaguuuugagaa

SEQ ID NO: 2963934 - RNA, 20 nt, Human
uuacuaaaaguuuugagaaa

SEQ ID NO: 2963935 - RNA, 14 nt, Human
uuacgugaguccug

SEQ ID NO: 2963936 - RNA, 13 nt, Human
uuacgugaguccu

SEQ ID NO: 2963937 - RNA, 19 nt, Human
uucaaucuggauucauauu

SEQ ID NO: 2963938 - RNA, 23 nt, Human
uucaaucuggauucauauuuaau

SEQ ID NO: 2963939 - RNA, 20 nt, Human
uucaaucuggauucauauuu

SEQ ID NO: 2963940 - RNA, 18 nt, Human
uucaauucucauuuguca

SEQ ID NO: 2963941 - RNA, 19 nt, Human
uucaaugccccugaauuua

SEQ ID NO: 2963942 - RNA, 23 nt, Human
uucagcuccagcucaccagcccc

SEQ ID NO: 2963943 - RNA, 24 nt, Human
uucagcucugcaagaauugaagca

SEQ ID NO: 2963944 - RNA, 17 nt, Human
uucagcucugcaagaau

SEQ ID NO: 2963945 - RNA, 16 nt, Human
uucaggaagcucaggg

SEQ ID NO: 2963946 - RNA, 17 nt, Human
uucagcugacuuuucug

SEQ ID NO: 2963947 - RNA, 18 nt, Human
uucagcugcauacaguuu

SEQ ID NO: 2963948 - RNA, 19 nt, Human
uucaggaagcucagggccu

SEQ ID NO: 2963949 - RNA, 17 nt, Human
uucaggaagcucagggc

SEQ ID NO: 2963950 - RNA, 20 nt, Human
uucaggaagcucagggccug

SEQ ID NO: 2963951 - RNA, 15 nt, Human
uucaggaagcucagg

SEQ ID NO: 2963952 - RNA, 14 nt, Human
uucacucuccuugg

SEQ ID NO: 2963953 - RNA, 15 nt, Human
uucagagacuccugc

SEQ ID NO: 2963954 - RNA, 22 nt, Human
uucagcuccagcucaccagccc

SEQ ID NO: 2963955 - RNA, 21 nt, Human
uucagagcugcccucuccugg

SEQ ID NO: 2963956 - RNA, 22 nt, Human
uucagagcugcccucuccuggg

SEQ ID NO: 2963957 - RNA, 23 nt, Human
uucagagcugcccucuccugggc

SEQ ID NO: 2963958 - RNA, 19 nt, Human
uuccauuuacuuaagacuu

SEQ ID NO: 2963959 - RNA, 18 nt, Human
uuccauuuacuuaagacu

SEQ ID NO: 2963960 - RNA, 17 nt, Human
uuccaugaguccccugu

SEQ ID NO: 2963961 - RNA, 17 nt, Human
uuccacuugagugucaa

SEQ ID NO: 2963962 - RNA, 21 nt, Human
uuccacuugagugucaagcug

SEQ ID NO: 2963963 - RNA, 19 nt, Human
uuccacuuauaggaauuga

SEQ ID NO: 2963964 - RNA, 15 nt, Human
uucaguuuaucuguu

SEQ ID NO: 2963965 - RNA, 21 nt, Human
uucagugccuuauggaacacu

SEQ ID NO: 2963966 - RNA, 19 nt, Human
uucagugccuuauggaaca

SEQ ID NO: 2963967 - RNA, 18 nt, Human
uucaguuuaucuguucau

SEQ ID NO: 2963968 - RNA, 23 nt, Human
uucauaaugacuuaagcacacuu

SEQ ID NO: 2963969 - RNA, 13 nt, Human
uucauaaugacuu

SEQ ID NO: 2963970 - RNA, 19 nt, Human
uucauuuaggugaggaagc

SEQ ID NO: 2963971 - RNA, 12 nt, Human
uucaucuugaau

SEQ ID NO: 2963972 - RNA, 18 nt, Human
uucaugaaagauucaaug

SEQ ID NO: 2963973 - RNA, 11 nt, Human
uucaucuugaa

SEQ ID NO: 2963974 - RNA, 20 nt, Human
uucaucuuccaacucaaacu

SEQ ID NO: 2963975 - RNA, 15 nt, Human
uuccuucagugccuu

SEQ ID NO: 2963976 - RNA, 19 nt, Human
uuccuucagugccuuaugg

SEQ ID NO: 2963977 - RNA, 16 nt, Human
uuccuucagugccuua

SEQ ID NO: 2963978 - RNA, 23 nt, Human
uuccuucagugccuuauggaaca

SEQ ID NO: 2963979 - RNA, 19 nt, Human
uuccuucauucaacccacc

SEQ ID NO: 2963980 - RNA, 17 nt, Human
uucuaaaggcuaccuuu

SEQ ID NO: 2963981 - RNA, 18 nt, Human
uucuaaaggcuaccuuug

SEQ ID NO: 2963982 - RNA, 16 nt, Human
uucuaaaggcuaccuu

SEQ ID NO: 2963983 - RNA, 18 nt, Human
uucggccuccauccugag

SEQ ID NO: 2963984 - RNA, 19 nt, Human
uucggccuccauccugagg

SEQ ID NO: 2963985 - RNA, 22 nt, Human
uuccccacuugagaauuacccu

SEQ ID NO: 2963986 - RNA, 19 nt, Human
uucccuuugacgccauccc

SEQ ID NO: 2963987 - RNA, 18 nt, Human
uucccuugaugaagaagu

SEQ ID NO: 2963988 - RNA, 12 nt, Human
uuccucccuccc

SEQ ID NO: 2963989 - RNA, 19 nt, Human
uuccucccucccucuuucc

SEQ ID NO: 2963990 - RNA, 21 nt, Human
uuccucccucccucuuucccu

SEQ ID NO: 2963991 - RNA, 22 nt, Human
uuccucccucccucuuucccuc

SEQ ID NO: 2963992 - RNA, 23 nt, Human
uuccucauaguaugguggcuggg

SEQ ID NO: 2963993 - RNA, 12 nt, Human
uuccuagugaaa

SEQ ID NO: 2963994 - RNA, 21 nt, Human
uucuauuuauuuauuuauuca

SEQ ID NO: 2963995 - RNA, 14 nt, Human
uucuauuuauuugu

SEQ ID NO: 2963996 - RNA, 14 nt, Human
uucuauuguuucuu

SEQ ID NO: 2963997 - RNA, 16 nt, Human
uucuaugacacaugca

SEQ ID NO: 2963998 - RNA, 17 nt, Human
uucuaugacacaugcaa

SEQ ID NO: 2963999 - RNA, 17 nt, Human
uucuccagucauuaugu

SEQ ID NO: 2964000 - RNA, 19 nt, Human
uucuccagucauuauguua

SEQ ID NO: 2964001 - RNA, 11 nt, Human
uucuccaggcu

SEQ ID NO: 2964002 - RNA, 13 nt, Human
uucuccacccugc

SEQ ID NO: 2964003 - RNA, 16 nt, Human
uucuccaagcaggaca

SEQ ID NO: 2964004 - RNA, 18 nt, Human
uucucuccagccccugga

SEQ ID NO: 2964005 - RNA, 22 nt, Human
uucucuccuguaccucuugagc

SEQ ID NO: 2964006 - RNA, 15 nt, Human
uucucugauacagaa

SEQ ID NO: 2964007 - RNA, 16 nt, Human
uucucugauacagaaa

SEQ ID NO: 2964008 - RNA, 14 nt, Human
uucucugauacaga

SEQ ID NO: 2964009 - RNA, 17 nt, Human
uucucugauacagaaaa

SEQ ID NO: 2964010 - RNA, 21 nt, Human
uucugacccaugcugcccugu

SEQ ID NO: 2964011 - RNA, 20 nt, Human
uucugacccaugcugcccug

SEQ ID NO: 2964012 - RNA, 18 nt, Human
uucugacccaugcugccc

SEQ ID NO: 2964013 - RNA, 16 nt, Human
uucugacccaugcugc

SEQ ID NO: 2964014 - RNA, 17 nt, Human
uuuacauggcuggagcu

SEQ ID NO: 2964015 - RNA, 16 nt, Human
uuuacauggcuggagc

SEQ ID NO: 2964016 - RNA, 13 nt, Human
uuuaaucuuuuau

SEQ ID NO: 2964017 - RNA, 20 nt, Human
uuuagaaacacaacuauauu

SEQ ID NO: 2964018 - RNA, 15 nt, Human
uuuacuuuguguuca

SEQ ID NO: 2964019 - RNA, 22 nt, Human
uuuacauggcuggagcuagaau

SEQ ID NO: 2964020 - RNA, 15 nt, Human
uuuacuuuuuggaaa

SEQ ID NO: 2964021 - RNA, 23 nt, Human
uuuacuuuuuggaaaagaauaaa

SEQ ID NO: 2964022 - RNA, 12 nt, Human
uuuagaaacaca

SEQ ID NO: 2964023 - RNA, 19 nt, Human
uuuauuuaguuccuugagu

SEQ ID NO: 2964024 - RNA, 16 nt, Human
uuuauugucaaagugg

SEQ ID NO: 2964025 - RNA, 14 nt, Human
uuuauugucaaagu

SEQ ID NO: 2964026 - RNA, 21 nt, Human
uuuaucgucacugcuuaacuu

SEQ ID NO: 2964027 - RNA, 16 nt, Human
uuuaucgucacugcuu

SEQ ID NO: 2964028 - RNA, 16 nt, Human
uuuauaaacuuuaccu

SEQ ID NO: 2964029 - RNA, 14 nt, Human
uuuauaaacuuuac

SEQ ID NO: 2964030 - RNA, 21 nt, Human
uuuccucuuuggucuacacug

SEQ ID NO: 2964031 - RNA, 14 nt, Human
uuucuaaaggcuac

SEQ ID NO: 2964032 - RNA, 17 nt, Human
uuucuaaagcugccagc

SEQ ID NO: 2964033 - RNA, 14 nt, Human
uuucuaaagcugcc

SEQ ID NO: 2964034 - RNA, 15 nt, Human
uuucuagccagagga

SEQ ID NO: 2964035 - RNA, 16 nt, Human
uuucuaggacugaauu

SEQ ID NO: 2964036 - RNA, 22 nt, Human
uuucugagaaagacuauucaaa

SEQ ID NO: 2964037 - RNA, 15 nt, Human
uuucugagaaagacu

SEQ ID NO: 2964038 - RNA, 13 nt, Human
uuuccaggaaggc

SEQ ID NO: 2964039 - RNA, 12 nt, Human
uuuccaaaguac

SEQ ID NO: 2964040 - RNA, 15 nt, Human
uuuccaaaguacacu

SEQ ID NO: 2964041 - RNA, 15 nt, Human
uuucagccaagaauu

SEQ ID NO: 2964042 - RNA, 22 nt, Human
uuucauugcugggcuugucugu

SEQ ID NO: 2964043 - RNA, 16 nt, Human
uuuauuuauuuauuca

SEQ ID NO: 2964044 - RNA, 22 nt, Human
uuuauuuggaaaggaaugcaaa

SEQ ID NO: 2964045 - RNA, 19 nt, Human
uuucaauaggaaaaacuga

SEQ ID NO: 2964046 - RNA, 22 nt, Human
uuucaauaggaaaaacugauuu

SEQ ID NO: 2964047 - RNA, 20 nt, Human
uuucaauaggaaaaacugau

SEQ ID NO: 2964048 - RNA, 15 nt, Human
uuucagauaaucaca

SEQ ID NO: 2964049 - RNA, 15 nt, Human
uuucagcagcugcag

SEQ ID NO: 2964050 - RNA, 14 nt, Human
uuuuaaacaaaaua

SEQ ID NO: 2964051 - RNA, 22 nt, Human
uuuuacauaaauuuaguauuuu

SEQ ID NO: 2964052 - RNA, 21 nt, Human
uuuuaauuugguuuucacauu

SEQ ID NO: 2964053 - RNA, 17 nt, Human
uuuuaauuugguuuuca

SEQ ID NO: 2964054 - RNA, 20 nt, Human
uuuuauaucaauuuaaaaaa

SEQ ID NO: 2964055 - RNA, 15 nt, Human
uuuuauaugcuucug

SEQ ID NO: 2964056 - RNA, 20 nt, Human
uuuuauaugcuucuguuuua

SEQ ID NO: 2964057 - RNA, 18 nt, Human
uuuuaucgucacugcuua

SEQ ID NO: 2964058 - RNA, 22 nt, Human
uuuuaucagaacuauguuuuug

SEQ ID NO: 2964059 - RNA, 15 nt, Human
uuuuauauucucagc

SEQ ID NO: 2964060 - RNA, 10 nt, Human
uuuuauauuu

SEQ ID NO: 2964061 - RNA, 19 nt, Human
uuuuccaugaguccccugu

SEQ ID NO: 2964062 - RNA, 18 nt, Human
uuuuccaugaguccccug

SEQ ID NO: 2964063 - RNA, 15 nt, Human
uuuuccuucagugcc

SEQ ID NO: 2964064 - RNA, 16 nt, Human
uuuucuugcaugguuu

SEQ ID NO: 2964065 - RNA, 17 nt, Human
uuuucuugcaugaggcu

SEQ ID NO: 2964066 - RNA, 14 nt, Human
uuuucuucucccuc

SEQ ID NO: 2964067 - RNA, 15 nt, Human
uuuucacaguucucu

SEQ ID NO: 2964068 - RNA, 17 nt, Human
uuuucaauuuuaaacau

SEQ ID NO: 2964069 - RNA, 23 nt, Human
uuuucaauaacuggaacacucua

SEQ ID NO: 2964070 - RNA, 13 nt, Human
uuuucaauaacug

SEQ ID NO: 2964071 - RNA, 16 nt, Human
uuuucaauaacuggaa

SEQ ID NO: 2964072 - RNA, 19 nt, Human
uuuucaauaacuggaacac

SEQ ID NO: 2964073 - RNA, 17 nt, Human
uuugaggucuguucuuu

SEQ ID NO: 2964074 - RNA, 22 nt, Human
uuugaggucuguucuuuccaaa

SEQ ID NO: 2964075 - RNA, 15 nt, Human
uuugagcagggcuca

SEQ ID NO: 2964076 - RNA, 11 nt, Human
uuugcagagua

SEQ ID NO: 2964077 - RNA, 14 nt, Human
uuugcagacaggca

SEQ ID NO: 2964078 - RNA, 23 nt, Human
uuuggaaauuagguugaaacaua

SEQ ID NO: 2964079 - RNA, 18 nt, Human
uuugccauguuggccagg

SEQ ID NO: 2964080 - RNA, 21 nt, Human
uuugcauagauucccugagca

SEQ ID NO: 2964081 - RNA, 16 nt, Human
uuugucccaagugcca

SEQ ID NO: 2964082 - RNA, 21 nt, Human
uuuguccccaccgcagacagg

SEQ ID NO: 2964083 - RNA, 13 nt, Human
uuuguccccaccg

SEQ ID NO: 2964084 - RNA, 13 nt, Human
uuugguuauuuua

SEQ ID NO: 2964085 - RNA, 16 nt, Human
uuuguugucagcugaa

SEQ ID NO: 2964086 - RNA, 19 nt, Human
uuuggugguuucagaaaug

SEQ ID NO: 2964087 - RNA, 16 nt, Human
uuuguaaauuaacuuu

SEQ ID NO: 2964088 - RNA, 17 nt, Human
uuuguaaauuaacuuuu

SEQ ID NO: 2964089 - RNA, 15 nt, Human
uuuguaaauuaacuu

SEQ ID NO: 2964090 - RNA, 21 nt, Human
uuuguauaaaauaauuuuuau

SEQ ID NO: 2964091 - RNA, 22 nt, Human
uuuguaaauuaacuuuuauaaa

SEQ ID NO: 2964092 - RNA, 17 nt, Human
uuuuuuccuucagugcc

SEQ ID NO: 2964093 - RNA, 12 nt, Human
uuuuuucugaaa

SEQ ID NO: 2964094 - RNA, 12 nt, Human
uuuuuuacuaau

SEQ ID NO: 2964095 - RNA, 13 nt, Human
uuuugaaauguca

SEQ ID NO: 2964096 - RNA, 15 nt, Human
cuggcucuuccaggc

SEQ ID NO: 2964097 - RNA, 15 nt, Human
aucccauaugccugg

SEQ ID NO: 2964098 - RNA, 12 nt, Human
agccuuccaggg

SEQ ID NO: 2964099 - RNA, 15 nt, Human
cacugcuuccaguga

SEQ ID NO: 2964100 - RNA, 17 nt, Human
agcugccaccugccugu

SEQ ID NO: 2964101 - RNA, 22 nt, Human
auuuccaugauguuuuccauga

SEQ ID NO: 2964102 - RNA, 21 nt, Human
cugacacaugcugaacaucac

SEQ ID NO: 2964103 - RNA, 17 nt, Human
cucacaauccuugccac

SEQ ID NO: 2964104 - RNA, 20 nt, Human
cccagcacaaagcagauccu

SEQ ID NO: 2964105 - RNA, 21 nt, Human
ccagucauuauguuaauauuu

SEQ ID NO: 2964106 - RNA, 22 nt, Human
ccagucauuauguuaauauuuc

SEQ ID NO: 2964107 - RNA, 16 nt, Human
ccauucuuggcccagg

SEQ ID NO: 2964108 - RNA, 15 nt, Human
ccuaauaaaaaggug

SEQ ID NO: 2964109 - RNA, 16 nt, Human
ccuaauaaaaagguga

SEQ ID NO: 2964110 - RNA, 20 nt, Human
ccuaauaaaaaggugaccau

SEQ ID NO: 2964111 - RNA, 14 nt, Human
ccuaauaaaaaggu

SEQ ID NO: 2964112 - RNA, 12 nt, Human
ccuaauguguuu

SEQ ID NO: 2964113 - RNA, 23 nt, Human
caauugaaguaaaauguggcagg

SEQ ID NO: 2964114 - RNA, 13 nt, Human
cacagaagaugaa

SEQ ID NO: 2964115 - RNA, 18 nt, Human
cacccaggaacuccugac

SEQ ID NO: 2964116 - RNA, 15 nt, Human
cacaucuguuuugua

SEQ ID NO: 2964117 - RNA, 13 nt, Human
auuuuaugucuuu

SEQ ID NO: 2964118 - RNA, 17 nt, Human
caaacagucucccuucc

SEQ ID NO: 2964119 - RNA, 24 nt, Human
caaacccaguguuuuaggagcaug

SEQ ID NO: 2964120 - RNA, 13 nt, Human
auuaaaugacucu

SEQ ID NO: 2964121 - RNA, 12 nt, Human
auuaaaugacuc

SEQ ID NO: 2964122 - RNA, 14 nt, Human
auuaaaugacucuu

SEQ ID NO: 2964123 - RNA, 13 nt, Human
cauuaguuuugaa

SEQ ID NO: 2964124 - RNA, 16 nt, Human
cauuagguugugaaug

SEQ ID NO: 2964125 - RNA, 15 nt, Human
cauuagguugugaau

SEQ ID NO: 2964126 - RNA, 14 nt, Human
cauuagguugugaa

SEQ ID NO: 2964127 - RNA, 18 nt, Human
cauagcugugauuuuugg

SEQ ID NO: 2964128 - RNA, 15 nt, Human
cauagcugugauuuu

SEQ ID NO: 2964129 - RNA, 13 nt, Human
cauagcugugauu

SEQ ID NO: 2964130 - RNA, 20 nt, Human
cagaguaggggucugucuuu

SEQ ID NO: 2964131 - RNA, 23 nt, Human
cagaguaggggucugucuuuuaa

SEQ ID NO: 2964132 - RNA, 22 nt, Human
cagaguaggggucugucuuuua

SEQ ID NO: 2964133 - RNA, 16 nt, Human
gcccucaauugugaaa

SEQ ID NO: 2964134 - RNA, 19 nt, Human
gcuccaccuugcagcucuc

SEQ ID NO: 2964135 - RNA, 23 nt, Human
ggaacagaagaggaaagagagac

SEQ ID NO: 2964136 - RNA, 16 nt, Human
gcuuguacacucauuc

SEQ ID NO: 2964137 - RNA, 15 nt, Human
aaacacauuaaaggu

SEQ ID NO: 2964138 - RNA, 11 nt, Human
aaacacauuaa

SEQ ID NO: 2964139 - RNA, 21 nt, Human
aaacacauuaaagguacuuug

SEQ ID NO: 2964140 - RNA, 17 nt, Human
aaagcuuuugcauauug

SEQ ID NO: 2964141 - RNA, 14 nt, Human
aaagcuuuugcaua

SEQ ID NO: 2964142 - RNA, 13 nt, Human
aaagcuuuugcau

SEQ ID NO: 2964143 - RNA, 14 nt, Human
ggguggggcagugc

SEQ ID NO: 2964144 - RNA, 16 nt, Human
aaagguacuuugcagg

SEQ ID NO: 2964145 - RNA, 14 nt, Human
guaacucuguaauu

SEQ ID NO: 2964146 - RNA, 21 nt, Human
guacucugccacuuuauuucu

SEQ ID NO: 2964147 - RNA, 20 nt, Human
guagacgugcacgcacacug

SEQ ID NO: 2964148 - RNA, 23 nt, Human
guagacgugcacgcacacugucu

SEQ ID NO: 2964149 - RNA, 16 nt, Human
guagacaguuggguuu

SEQ ID NO: 2964150 - RNA, 14 nt, Human
guagaauguuuuca

SEQ ID NO: 2964151 - RNA, 20 nt, Human
aaaaggaagcuuacaugccu

SEQ ID NO: 2964152 - RNA, 18 nt, Human
ggcugaacuuuguggucg

SEQ ID NO: 2964153 - RNA, 19 nt, Human
ggcccuuuuucaauaacug

SEQ ID NO: 2964154 - RNA, 20 nt, Human
ggcacugguuuguucccugu

SEQ ID NO: 2964155 - RNA, 21 nt, Human
gacccucucaaacuaacaggc

SEQ ID NO: 2964156 - RNA, 22 nt, Human
gacuuugguuauuuuacuuuuu

SEQ ID NO: 2964157 - RNA, 14 nt, Human
gcaggcuggaguua

SEQ ID NO: 2964158 - RNA, 21 nt, Human
gaugcugucuucguacuggga

SEQ ID NO: 2964159 - RNA, 21 nt, Human
gauucuuguauuuauuacaac

SEQ ID NO: 2964160 - RNA, 15 nt, Human
gauucuuguauuuau

SEQ ID NO: 2964161 - RNA, 12 nt, Human
gaaagggauuuu

SEQ ID NO: 2964162 - RNA, 20 nt, Human
gaaagggauuuucagcccuc

SEQ ID NO: 2964163 - RNA, 22 nt, Human
cuugugaauaaagagggugggu

SEQ ID NO: 2964164 - RNA, 20 nt, Human
cuuuaccaauugaaguaaaa

SEQ ID NO: 2964165 - RNA, 19 nt, Human
cuuuaccaauugaaguaaa

SEQ ID NO: 2964166 - RNA, 16 nt, Human
cuuuaccaauugaagu

SEQ ID NO: 2964167 - RNA, 18 nt, Human
cuuuaccaauugaaguaa

SEQ ID NO: 2964168 - RNA, 13 nt, Human
cuuugguuauuuu

SEQ ID NO: 2964169 - RNA, 19 nt, Human
cuuugguuauuuuacuuuu

SEQ ID NO: 2964170 - RNA, 17 nt, Human
cuuugguuauuuuacuu

SEQ ID NO: 2964171 - RNA, 23 nt, Human
cuuugguuauuuuacuuuuugga

SEQ ID NO: 2964172 - RNA, 17 nt, Human
cugucggagcccugucu

SEQ ID NO: 2964173 - RNA, 18 nt, Human
cuggauaguccgucucug

SEQ ID NO: 2964174 - RNA, 19 nt, Human
cuggauaguccgucucugc

SEQ ID NO: 2964175 - RNA, 14 nt, Human
auuauguuaauauu

SEQ ID NO: 2964176 - RNA, 16 nt, Human
auuauguuaauauuuc

SEQ ID NO: 2964177 - RNA, 13 nt, Human
auuauguuaauau

SEQ ID NO: 2964178 - RNA, 17 nt, Human
auuauguuaauauuucu

SEQ ID NO: 2964179 - RNA, 16 nt, Human
auuauauucauucuuu

SEQ ID NO: 2964180 - RNA, 17 nt, Human
uuuguggaaaauaacuc

SEQ ID NO: 2964181 - RNA, 13 nt, Human
auugaagcagagu

SEQ ID NO: 2964182 - RNA, 15 nt, Human
auugaagcagagugg

SEQ ID NO: 2964183 - RNA, 14 nt, Human
auugaagcagagug

SEQ ID NO: 2964184 - RNA, 18 nt, Human
auugaagcagaguggcag

SEQ ID NO: 2964185 - RNA, 19 nt, Human
auuuuugguauuugaaaca

SEQ ID NO: 2964186 - RNA, 19 nt, Human
auuuuuguuuuuauuaaaa

SEQ ID NO: 2964187 - RNA, 21 nt, Human
auuuuuguuuuuauuaaaagg

SEQ ID NO: 2964188 - RNA, 17 nt, Human
auuugaaacacugguuu

SEQ ID NO: 2964189 - RNA, 14 nt, Human
auuugaaacacugg

SEQ ID NO: 2964190 - RNA, 16 nt, Human
auuuauuuauuuauuc

SEQ ID NO: 2964191 - RNA, 23 nt, Human
auugauugggcacaucauuucaa

SEQ ID NO: 2964192 - RNA, 19 nt, Human
auugauugggcacaucauu

SEQ ID NO: 2964193 - RNA, 14 nt, Human
uuucaaauguucuc

SEQ ID NO: 2964194 - RNA, 19 nt, Human
augauugccuuuuuauaac

SEQ ID NO: 2964195 - RNA, 17 nt, Human
uuuaaagauguagacag

SEQ ID NO: 2964196 - RNA, 18 nt, Human
uuguuuugccaauuugca

SEQ ID NO: 2964197 - RNA, 16 nt, Human
augauauaagguuuuu

SEQ ID NO: 2964198 - RNA, 22 nt, Human
uuuaauuugaagguagaauguu

SEQ ID NO: 2964199 - RNA, 15 nt, Human
uuuaaauagaugaca

SEQ ID NO: 2964200 - RNA, 18 nt, Human
auguagacaguuggguuu

SEQ ID NO: 2964201 - RNA, 20 nt, Human
auguagacaguuggguuuuu

SEQ ID NO: 2964202 - RNA, 16 nt, Human
augucaguauuucaac

SEQ ID NO: 2964203 - RNA, 13 nt, Human
augucaguauuuc

SEQ ID NO: 2964204 - RNA, 19 nt, Human
augugcacaucuguuuugu

SEQ ID NO: 2964205 - RNA, 15 nt, Human
uucccucaaaugugu

SEQ ID NO: 2964206 - RNA, 19 nt, Human
uucuagcaugaagacagag

SEQ ID NO: 2964207 - RNA, 17 nt, Human
aucugaaauaaggaaug

SEQ ID NO: 2964208 - RNA, 17 nt, Human
uugcauauugcauacua

SEQ ID NO: 2964209 - RNA, 21 nt, Human
uugaaggaugcugucuucgua

SEQ ID NO: 2964210 - RNA, 22 nt, Human
auaacuuuuuauauucucagca

SEQ ID NO: 2964211 - RNA, 15 nt, Human
aguuuuacaguguuu

SEQ ID NO: 2964212 - RNA, 15 nt, Human
aguuuaucuguucau

SEQ ID NO: 2964213 - RNA, 19 nt, Human
uuaagacuuugguuauuuu

SEQ ID NO: 2964214 - RNA, 19 nt, Human
aguuuuuuuccuucaagaa

SEQ ID NO: 2964215 - RNA, 13 nt, Human
uuauguuaauauu

SEQ ID NO: 2964216 - RNA, 18 nt, Human
uuauucauuaguuuugaa

SEQ ID NO: 2964217 - RNA, 21 nt, Human
uuauucauuaguuuugaagau

SEQ ID NO: 2964218 - RNA, 14 nt, Human
uuauuauuaacaaa

SEQ ID NO: 2964219 - RNA, 13 nt, Human
uuauuauuaacaa

SEQ ID NO: 2964220 - RNA, 18 nt, Human
auacugccuuguuuaaug

SEQ ID NO: 2964221 - RNA, 20 nt, Human
auacugccuuguuuaauggu

SEQ ID NO: 2964222 - RNA, 14 nt, Human
auagauguugcuaa

SEQ ID NO: 2964223 - RNA, 20 nt, Human
auagauguugcuaacagcaa

SEQ ID NO: 2964224 - RNA, 17 nt, Human
auacuauuaaacaugcu

SEQ ID NO: 2964225 - RNA, 19 nt, Human
auacuauuaaacaugcugu

SEQ ID NO: 2964226 - RNA, 18 nt, Human
auacuauuaaacaugcug

SEQ ID NO: 2964227 - RNA, 20 nt, Human
auacuauuaaacaugcugua

SEQ ID NO: 2964228 - RNA, 15 nt, Human
agucucccuuccuau

SEQ ID NO: 2964229 - RNA, 18 nt, Human
agugcaaacuucagaguu

SEQ ID NO: 2964230 - RNA, 17 nt, Human
ugugccuaauguguuug

SEQ ID NO: 2964231 - RNA, 18 nt, Human
ugugccuaauguguuuga

SEQ ID NO: 2964232 - RNA, 14 nt, Human
ugugccuaaugugu

SEQ ID NO: 2964233 - RNA, 15 nt, Human
ugugccuaauguguu

SEQ ID NO: 2964234 - RNA, 22 nt, Human
uguggucaacauuucucauguu

SEQ ID NO: 2964235 - RNA, 14 nt, Human
ugugucauuucaaa

SEQ ID NO: 2964236 - RNA, 13 nt, Human
ugugucauuucaa

SEQ ID NO: 2964237 - RNA, 13 nt, Human
uguuaauauuuua

SEQ ID NO: 2964238 - RNA, 22 nt, Human
uguucuaaauaucccuuggaca

SEQ ID NO: 2964239 - RNA, 19 nt, Human
aguguguggucaacauuuc

SEQ ID NO: 2964240 - RNA, 20 nt, Human
aguaaaaaaugguguuuuau

SEQ ID NO: 2964241 - RNA, 16 nt, Human
agguuuuuuuuucuca

SEQ ID NO: 2964242 - RNA, 17 nt, Human
aguaaugagcuuaagaa

SEQ ID NO: 2964243 - RNA, 15 nt, Human
uguacauacuuuuug

SEQ ID NO: 2964244 - RNA, 20 nt, Human
uguacauacuuuuuggguuu

SEQ ID NO: 2964245 - RNA, 22 nt, Human
aggugggauaucacuuccauga

SEQ ID NO: 2964246 - RNA, 20 nt, Human
uguccagccccguagacgug

SEQ ID NO: 2964247 - RNA, 16 nt, Human
aguccccucuccucca

SEQ ID NO: 2964248 - RNA, 16 nt, Human
uggcuaacuuggguua

SEQ ID NO: 2964249 - RNA, 18 nt, Human
aggcuuagugauguaauu

SEQ ID NO: 2964250 - RNA, 17 nt, Human
aggcuuagugauguaau

SEQ ID NO: 2964251 - RNA, 19 nt, Human
aggcuuagugauguaauua

SEQ ID NO: 2964252 - RNA, 12 nt, Human
uggcccaggagu

SEQ ID NO: 2964253 - RNA, 11 nt, Human
uggcccaggag

SEQ ID NO: 2964254 - RNA, 12 nt, Human
aggaguuuggcc

SEQ ID NO: 2964255 - RNA, 13 nt, Human
aggaguuuggcca

SEQ ID NO: 2964256 - RNA, 19 nt, Human
uggaacacucuauaacaaa

SEQ ID NO: 2964257 - RNA, 15 nt, Human
aggaaugcaaagaug

SEQ ID NO: 2964258 - RNA, 22 nt, Human
ugcugccaauauccuaauaaaa

SEQ ID NO: 2964259 - RNA, 23 nt, Human
ugcugccaauauccuaauaaaaa

SEQ ID NO: 2964260 - RNA, 23 nt, Human
aggaaagcaaaucaguuugguug

SEQ ID NO: 2964261 - RNA, 15 nt, Human
ugccaauauccuaau

SEQ ID NO: 2964262 - RNA, 16 nt, Human
ugccaauauccuaaua

SEQ ID NO: 2964263 - RNA, 17 nt, Human
ugccaauauccuaauaa

SEQ ID NO: 2964264 - RNA, 18 nt, Human
ugccaauauccuaauaaa

SEQ ID NO: 2964265 - RNA, 19 nt, Human
ugccaauauccuaauaaaa

SEQ ID NO: 2964266 - RNA, 21 nt, Human
ugccaauauccuaauaaaaag

SEQ ID NO: 2964267 - RNA, 23 nt, Human
ugccaauauccuaauaaaaaggu

SEQ ID NO: 2964268 - RNA, 17 nt, Human
ugcacaucuguuuugua

SEQ ID NO: 2964269 - RNA, 16 nt, Human
ugcauacuauuaaaca

SEQ ID NO: 2964270 - RNA, 15 nt, Human
ugcauacuauuaaac

SEQ ID NO: 2964271 - RNA, 12 nt, Human
ugcauacuauua

SEQ ID NO: 2964272 - RNA, 20 nt, Human
ugcauacuauuaaacaugcu

SEQ ID NO: 2964273 - RNA, 18 nt, Human
ugcauacuauuaaacaug

SEQ ID NO: 2964274 - RNA, 17 nt, Human
ugcauacuauuaaacau

SEQ ID NO: 2964275 - RNA, 16 nt, Human
ucugucuuuuaaacuc

SEQ ID NO: 2964276 - RNA, 12 nt, Human
ucugucuuuuaa

SEQ ID NO: 2964277 - RNA, 18 nt, Human
ucugucuuuuaaacucug

SEQ ID NO: 2964278 - RNA, 16 nt, Human
ucuucccucaaaugug

SEQ ID NO: 2964279 - RNA, 20 nt, Human
agacuggauaguccgucucu

SEQ ID NO: 2964280 - RNA, 21 nt, Human
agacuggauaguccgucucug

SEQ ID NO: 2964281 - RNA, 16 nt, Human
agacccucucaaacua

SEQ ID NO: 2964282 - RNA, 24 nt, Human
agacccucaugcugccaauauccu

SEQ ID NO: 2964283 - RNA, 20 nt, Human
agacccucaugcugccaaua

SEQ ID NO: 2964284 - RNA, 21 nt, Human
agacccucaugcugccaauau

SEQ ID NO: 2964285 - RNA, 18 nt, Human
agacccucaugcugccaa

SEQ ID NO: 2964286 - RNA, 19 nt, Human
agacccucaugcugccaau

SEQ ID NO: 2964287 - RNA, 15 nt, Human
ucuggauucauauuu

SEQ ID NO: 2964288 - RNA, 17 nt, Human
agaacuaaaauguucua

SEQ ID NO: 2964289 - RNA, 20 nt, Human
agaacaaaggggcuuaauua

SEQ ID NO: 2964290 - RNA, 15 nt, Human
ucuccucucucugua

SEQ ID NO: 2964291 - RNA, 20 nt, Human
acuuguugaggguauguuuu

SEQ ID NO: 2964292 - RNA, 18 nt, Human
agcaacacaaagcuuuug

SEQ ID NO: 2964293 - RNA, 16 nt, Human
agcaacacaaagcuuu

SEQ ID NO: 2964294 - RNA, 21 nt, Human
agcaacacaaagcuuuugcau

SEQ ID NO: 2964295 - RNA, 15 nt, Human
agcaacacaaagcuu

SEQ ID NO: 2964296 - RNA, 16 nt, Human
ugacauugacuauuuu

SEQ ID NO: 2964297 - RNA, 14 nt, Human
ugacauugacuauu

SEQ ID NO: 2964298 - RNA, 17 nt, Human
ugacauugcaccuggau

SEQ ID NO: 2964299 - RNA, 14 nt, Human
ugacauugcaccug

SEQ ID NO: 2964300 - RNA, 21 nt, Human
ugaagauucuauguuaauauu

SEQ ID NO: 2964301 - RNA, 17 nt, Human
ugaagcagaguggcagu

SEQ ID NO: 2964302 - RNA, 20 nt, Human
ugaaugcccagugagacugu

SEQ ID NO: 2964303 - RNA, 13 nt, Human
agcagagugcuuu

SEQ ID NO: 2964304 - RNA, 10 nt, Human
agcagagugc

SEQ ID NO: 2964305 - RNA, 23 nt, Human
ugagcaucgcuuaggagaagucu

SEQ ID NO: 2964306 - RNA, 18 nt, Human
ucagaugcacaugagcug

SEQ ID NO: 2964307 - RNA, 16 nt, Human
ucagaacuauguuuuu

SEQ ID NO: 2964308 - RNA, 19 nt, Human
ucagaacuauguuuuuguu

SEQ ID NO: 2964309 - RNA, 21 nt, Human
uccacauuuguuuugccaauu

SEQ ID NO: 2964310 - RNA, 20 nt, Human
uccuguuuuuauuauuaaca

SEQ ID NO: 2964311 - RNA, 16 nt, Human
uccuguuuuuauuauu

SEQ ID NO: 2964312 - RNA, 21 nt, Human
uccuguuuuuauuauuaacaa

SEQ ID NO: 2964313 - RNA, 15 nt, Human
uccuguuuuuauuau

SEQ ID NO: 2964314 - RNA, 14 nt, Human
acuaaaauguucua

SEQ ID NO: 2964315 - RNA, 20 nt, Human
acuacauuagguugugaaug

SEQ ID NO: 2964316 - RNA, 19 nt, Human
acuacauuagguugugaau

SEQ ID NO: 2964317 - RNA, 18 nt, Human
acuacauuagguugugaa

SEQ ID NO: 2964318 - RNA, 20 nt, Human
acuauguuuuuguucaguuu

SEQ ID NO: 2964319 - RNA, 21 nt, Human
acuauuaaacaugcuguacau

SEQ ID NO: 2964320 - RNA, 17 nt, Human
acuaucacugguuuggu

SEQ ID NO: 2964321 - RNA, 15 nt, Human
ucccuuucccuuggu

SEQ ID NO: 2964322 - RNA, 14 nt, Human
uagucauucuuccc

SEQ ID NO: 2964323 - RNA, 15 nt, Human
uagucauucuucccu

SEQ ID NO: 2964324 - RNA, 13 nt, Human
uauagcaagacau

SEQ ID NO: 2964325 - RNA, 15 nt, Human
uaugaugacuguuuu

SEQ ID NO: 2964326 - RNA, 14 nt, Human
uaugaugacuguuu

SEQ ID NO: 2964327 - RNA, 20 nt, Human
uaucagaacuauguuuuugu

SEQ ID NO: 2964328 - RNA, 14 nt, Human
uaucagaacuaugu

SEQ ID NO: 2964329 - RNA, 17 nt, Human
uauauucucagcagagu

SEQ ID NO: 2964330 - RNA, 19 nt, Human
uauauucucagcagagugc

SEQ ID NO: 2964331 - RNA, 20 nt, Human
uaucacuuccaugacauaag

SEQ ID NO: 2964332 - RNA, 21 nt, Human
acaguaacauagcugugauuu

SEQ ID NO: 2964333 - RNA, 22 nt, Human
acaguguguggucaacauuucu

SEQ ID NO: 2964334 - RNA, 15 nt, Human
uauguuuuauauagc

SEQ ID NO: 2964335 - RNA, 19 nt, Human
uauuaaacaugcuguacau

SEQ ID NO: 2964336 - RNA, 15 nt, Human
uauuaaacaugcugu

SEQ ID NO: 2964337 - RNA, 17 nt, Human
uauuaaacaugcuguac

SEQ ID NO: 2964338 - RNA, 15 nt, Human
uauucugagaugacu

SEQ ID NO: 2964339 - RNA, 20 nt, Human
uauugaagcagaguggcagu

SEQ ID NO: 2964340 - RNA, 16 nt, Human
uauugaagcagagugg

SEQ ID NO: 2964341 - RNA, 14 nt, Human
uauugaagcagagu

SEQ ID NO: 2964342 - RNA, 16 nt, Human
uauugaaaugauuuca

SEQ ID NO: 2964343 - RNA, 15 nt, Human
uauuuaaucuuuuau

SEQ ID NO: 2964344 - RNA, 13 nt, Human
uauuuaaucuuuu

SEQ ID NO: 2964345 - RNA, 16 nt, Human
uauuuaauuugaaggu

SEQ ID NO: 2964346 - RNA, 23 nt, Human
uauuuaauuugaagguagaaugu

SEQ ID NO: 2964347 - RNA, 13 nt, Human
uauuuaauuugaa

SEQ ID NO: 2964348 - RNA, 13 nt, Human
uauuuauuuguga

SEQ ID NO: 2964349 - RNA, 14 nt, Human
uauuuauuuauuua

SEQ ID NO: 2964350 - RNA, 13 nt, Human
uacuauuaaacau

SEQ ID NO: 2964351 - RNA, 16 nt, Human
uacuauuaaacaugcu

SEQ ID NO: 2964352 - RNA, 15 nt, Human
uacuauuaaacaugc

SEQ ID NO: 2964353 - RNA, 14 nt, Human
uacuauuaaacaug

SEQ ID NO: 2964354 - RNA, 18 nt, Human
uacuauuaaacaugcugu

SEQ ID NO: 2964355 - RNA, 16 nt, Human
uacauuagguugugaa

SEQ ID NO: 2964356 - RNA, 12 nt, Human
uacauacuuuuu

SEQ ID NO: 2964357 - RNA, 15 nt, Human
uacauacuuuuuggg

SEQ ID NO: 2964358 - RNA, 14 nt, Human
uacauacuuuuugg

SEQ ID NO: 2964359 - RNA, 21 nt, Human
uaauuaugguuaguagaggua

SEQ ID NO: 2964360 - RNA, 12 nt, Human
aaugcaaagaug

SEQ ID NO: 2964361 - RNA, 18 nt, Human
aaugcaaagaugaagguc

SEQ ID NO: 2964362 - RNA, 14 nt, Human
aaugcaaagaugaa

SEQ ID NO: 2964363 - RNA, 21 nt, Human
aaugcaaagaugaaggucugu

SEQ ID NO: 2964364 - RNA, 20 nt, Human
uaauuugaagguagaauguu

SEQ ID NO: 2964365 - RNA, 19 nt, Human
aaucuuuuaugauugccuu

SEQ ID NO: 2964366 - RNA, 13 nt, Human
aacucuguaauuc

SEQ ID NO: 2964367 - RNA, 18 nt, Human
aacuaacaggcuuaguga

SEQ ID NO: 2964368 - RNA, 22 nt, Human
aacuaacaggcuuagugaugua

SEQ ID NO: 2964369 - RNA, 23 nt, Human
guguguggucaacauuucucaug

SEQ ID NO: 2964370 - RNA, 12 nt, Human
guuuggccagaa

SEQ ID NO: 2964371 - RNA, 18 nt, Human
guuuggccagaagucaag

SEQ ID NO: 2964372 - RNA, 23 nt, Human
guuuggccagaagucaaggcuua

SEQ ID NO: 2964373 - RNA, 11 nt, Human
guuuggccaga

SEQ ID NO: 2964374 - RNA, 16 nt, Human
aagggcccuuuuucaa

SEQ ID NO: 2964375 - RNA, 22 nt, Human
aagggcccuuuuucaauaacug

SEQ ID NO: 2964376 - RNA, 21 nt, Human
guuucuagcaugaagacagag

SEQ ID NO: 2964377 - RNA, 13 nt, Human
aagucaaggcuua

SEQ ID NO: 2964378 - RNA, 22 nt, Human
aagucaaggcuuagacccucau

SEQ ID NO: 2964379 - RNA, 23 nt, Human
guuuuuuaagggcccuuuuucaa

SEQ ID NO: 2964380 - RNA, 23 nt, Human
guugcuaacagcaacacaaagcu

SEQ ID NO: 2964381 - RNA, 18 nt, Human
guucuccagucauuaugu

SEQ ID NO: 2964382 - RNA, 20 nt, Human
guucuccagucauuauguua

SEQ ID NO: 2964383 - RNA, 20 nt, Human
uaaacucugagugcaaacuu

SEQ ID NO: 2964384 - RNA, 12 nt, Human
uaaacucauuuc

SEQ ID NO: 2964385 - RNA, 17 nt, Human
uaaacucauuucuagca

SEQ ID NO: 2964386 - RNA, 22 nt, Human
uaaacuacauuagguugugaau

SEQ ID NO: 2964387 - RNA, 13 nt, Human
aaguuuugagaaa

SEQ ID NO: 2964388 - RNA, 16 nt, Human
uaaaugacucuucccu

SEQ ID NO: 2964389 - RNA, 14 nt, Human
augcugccaauauc

SEQ ID NO: 2964390 - RNA, 17 nt, Human
augcugccaauauccua

SEQ ID NO: 2964391 - RNA, 18 nt, Human
augcugccaauauccuaa

SEQ ID NO: 2964392 - RNA, 19 nt, Human
augcugccaauauccuaau

SEQ ID NO: 2964393 - RNA, 13 nt, Human
augcugccaauau

SEQ ID NO: 2964394 - RNA, 20 nt, Human
augcugccaauauccuaaua

SEQ ID NO: 2964395 - RNA, 21 nt, Human
augcugccaauauccuaauaa

SEQ ID NO: 2964396 - RNA, 22 nt, Human
augcugccaauauccuaauaaa

SEQ ID NO: 2964397 - RNA, 23 nt, Human
augcugccaauauccuaauaaaa

SEQ ID NO: 2964398 - RNA, 20 nt, Human
auguucuccagucauuaugu

SEQ ID NO: 2964399 - RNA, 12 nt, Human
auguuuucaaau

SEQ ID NO: 2964400 - RNA, 15 nt, Human
auguuuucaaauguu

SEQ ID NO: 2964401 - RNA, 17 nt, Human
auguuuuauauagcaag

SEQ ID NO: 2964402 - RNA, 18 nt, Human
auguuuucaaauguucuc

SEQ ID NO: 2964403 - RNA, 20 nt, Human
auaacaaaggauacuuauuu

SEQ ID NO: 2964404 - RNA, 21 nt, Human
auaacaaaggauacuuauuua

SEQ ID NO: 2964405 - RNA, 15 nt, Human
auaaugucccuucac

SEQ ID NO: 2964406 - RNA, 15 nt, Human
auagcaguaaaaaau

SEQ ID NO: 2964407 - RNA, 21 nt, Human
auagcaguaaaaaaugguguu

SEQ ID NO: 2964408 - RNA, 16 nt, Human
auauccuaauaaaaag

SEQ ID NO: 2964409 - RNA, 18 nt, Human
auauccuaauaaaaaggu

SEQ ID NO: 2964410 - RNA, 20 nt, Human
auauccuaauaaaaagguga

SEQ ID NO: 2964411 - RNA, 22 nt, Human
auaucccuuggacauuuuaugu

SEQ ID NO: 2964412 - RNA, 23 nt, Human
auaucccuuggacauuuuauguc

SEQ ID NO: 2964413 - RNA, 12 nt, Human
auauccuaauaa

SEQ ID NO: 2964414 - RNA, 13 nt, Human
auauccuaauaaa

SEQ ID NO: 2964415 - RNA, 14 nt, Human
auauccuaauaaaa

SEQ ID NO: 2964416 - RNA, 20 nt, Human
auaucccuuggacauuuuau

SEQ ID NO: 2964417 - RNA, 22 nt, Human
aggucuguuuuguguacuuuua

SEQ ID NO: 2964418 - RNA, 23 nt, Human
aggagaagucuucuauuuauuua

SEQ ID NO: 2964419 - RNA, 22 nt, Human
aggagaagucuucuauuuauuu

SEQ ID NO: 2964420 - RNA, 12 nt, Human
agcuuuugcaua

SEQ ID NO: 2964421 - RNA, 21 nt, Human
agacgugcacgcacacugucu

SEQ ID NO: 2964422 - RNA, 22 nt, Human
agacgugcacgcacacugucug

SEQ ID NO: 2964423 - RNA, 16 nt, Human
agcccucaauugugaa

SEQ ID NO: 2964424 - RNA, 17 nt, Human
agcccucaauugugaaa

SEQ ID NO: 2964425 - RNA, 19 nt, Human
agcaucgcuuaggagaagu

SEQ ID NO: 2964426 - RNA, 15 nt, Human
agcaugaagacagag

SEQ ID NO: 2964427 - RNA, 11 nt, Human
aagauucuaug

SEQ ID NO: 2964428 - RNA, 19 nt, Human
aagauucuauguuaauauu

SEQ ID NO: 2964429 - RNA, 12 nt, Human
aaggugcaucug

SEQ ID NO: 2964430 - RNA, 22 nt, Human
aacagcaacacaaagcuuuugc

SEQ ID NO: 2964431 - RNA, 15 nt, Human
aacacauuaaaggua

SEQ ID NO: 2964432 - RNA, 20 nt, Human
aacacauuaaagguacuuug

SEQ ID NO: 2964433 - RNA, 19 nt, Human
aaacacugguuuuaaauau

SEQ ID NO: 2964434 - RNA, 13 nt, Human
aaacucugagugc

SEQ ID NO: 2964435 - RNA, 15 nt, Human
aaacucugagugcaa

SEQ ID NO: 2964436 - RNA, 22 nt, Human
acccaguguuuuaggagcauga

SEQ ID NO: 2964437 - RNA, 19 nt, Human
acccaguguuuuaggagca

SEQ ID NO: 2964438 - RNA, 16 nt, Human
acuuuauuucucucau

SEQ ID NO: 2964439 - RNA, 13 nt, Human
acuuuuaagacuu

SEQ ID NO: 2964440 - RNA, 12 nt, Human
acuuuuaagacu

SEQ ID NO: 2964441 - RNA, 16 nt, Human
acuucacgcccuuggc

SEQ ID NO: 2964442 - RNA, 14 nt, Human
acugguuuuaaaua

SEQ ID NO: 2964443 - RNA, 17 nt, Human
acugguuuguucccugu

SEQ ID NO: 2964444 - RNA, 22 nt, Human
acuauuuuuguuuuuauuaaaa

SEQ ID NO: 2964445 - RNA, 21 nt, Human
acuauuuuuguuuuuauuaaa

SEQ ID NO: 2964446 - RNA, 18 nt, Human
acuauucugagaugacua

SEQ ID NO: 2964447 - RNA, 19 nt, Human
acuauucugagaugacuau

SEQ ID NO: 2964448 - RNA, 20 nt, Human
acuauuuuuguuuuuauuaa

SEQ ID NO: 2964449 - RNA, 15 nt, Human
cacaaagcagauccu

SEQ ID NO: 2964450 - RNA, 23 nt, Human
cacaaagaaccaccaggaaagca

SEQ ID NO: 2964451 - RNA, 15 nt, Human
cacauuaaaugacuc

SEQ ID NO: 2964452 - RNA, 13 nt, Human
cacauuaaaugac

SEQ ID NO: 2964453 - RNA, 17 nt, Human
cacauuaaagguacuuu

SEQ ID NO: 2964454 - RNA, 22 nt, Human
caacauuucucauguugaaacu

SEQ ID NO: 2964455 - RNA, 23 nt, Human
caacaugccagccacugugauag

SEQ ID NO: 2964456 - RNA, 17 nt, Human
caaagcuuuugcauauu

SEQ ID NO: 2964457 - RNA, 16 nt, Human
caaaggauacuuauuu

SEQ ID NO: 2964458 - RNA, 21 nt, Human
caaaggauacuuauuuaaaua

SEQ ID NO: 2964459 - RNA, 14 nt, Human
uuuguguacuuuua

SEQ ID NO: 2964460 - RNA, 13 nt, Human
uuuguguacuuuu

SEQ ID NO: 2964461 - RNA, 17 nt, Human
uuuguguacuuuuaaga

SEQ ID NO: 2964462 - RNA, 15 nt, Human
uuggacauuuuaugu

SEQ ID NO: 2964463 - RNA, 23 nt, Human
uugcuaacagcaacacaaagcuu

SEQ ID NO: 2964464 - RNA, 19 nt, Human
uugcugcugauuuaaacac

SEQ ID NO: 2964465 - RNA, 17 nt, Human
uugcugcugauuuaaac

SEQ ID NO: 2964466 - RNA, 21 nt, Human
uugcugcugauuuaaacacau

SEQ ID NO: 2964467 - RNA, 16 nt, Human
uugcugcuuguacacu

SEQ ID NO: 2964468 - RNA, 18 nt, Human
uugccuuggcugcaguuu

SEQ ID NO: 2964469 - RNA, 17 nt, Human
uugccuuuuuauaacuu

SEQ ID NO: 2964470 - RNA, 20 nt, Human
uugggcacaucauuucaaga

SEQ ID NO: 2964471 - RNA, 18 nt, Human
uugguaacucuguaauuc

SEQ ID NO: 2964472 - RNA, 23 nt, Human
uugcagcucuccccuucucugua

SEQ ID NO: 2964473 - RNA, 15 nt, Human
uugaaacacugguuu

SEQ ID NO: 2964474 - RNA, 22 nt, Human
uugaagauucuauguuaauauu

SEQ ID NO: 2964475 - RNA, 23 nt, Human
uugaagauucuauguuaauauuu

SEQ ID NO: 2964476 - RNA, 13 nt, Human
uugaagauucuau

SEQ ID NO: 2964477 - RNA, 12 nt, Human
uugaagcagagu

SEQ ID NO: 2964478 - RNA, 14 nt, Human
uugaagcagagugg

SEQ ID NO: 2964479 - RNA, 13 nt, Human
uucuuguauuuau

SEQ ID NO: 2964480 - RNA, 22 nt, Human
uuucacaguguguggucaacau

SEQ ID NO: 2964481 - RNA, 17 nt, Human
uuuggguuuauuuggaa

SEQ ID NO: 2964482 - RNA, 14 nt, Human
uuugguuauuuuac

SEQ ID NO: 2964483 - RNA, 13 nt, Human
uuugguuauuuua

SEQ ID NO: 2964484 - RNA, 22 nt, Human
uuugguugguaacucuguaauu

SEQ ID NO: 2964485 - RNA, 15 nt, Human
uuugccaauuugcac

SEQ ID NO: 2964486 - RNA, 20 nt, Human
uuugccaauuugcacauuaa

SEQ ID NO: 2964487 - RNA, 21 nt, Human
uuugaagguagaauguuuuca

SEQ ID NO: 2964488 - RNA, 15 nt, Human
uuuaaacuacauuag

SEQ ID NO: 2964489 - RNA, 15 nt, Human
uuuaaacacauuaaa

SEQ ID NO: 2964490 - RNA, 14 nt, Human
uuuaaacacauuaa

SEQ ID NO: 2964491 - RNA, 20 nt, Human
uuguuauuuauugaaaugau

SEQ ID NO: 2964492 - RNA, 15 nt, Human
uuguuauuuauugaa

SEQ ID NO: 2964493 - RNA, 12 nt, Human
uuguuuaauggu

SEQ ID NO: 2964494 - RNA, 23 nt, Human
uuguuuaaugguaguuuuacagu

SEQ ID NO: 2964495 - RNA, 22 nt, Human
uuuauccuagucauucuucccu

SEQ ID NO: 2964496 - RNA, 16 nt, Human
uuuaucuguucauaug

SEQ ID NO: 2964497 - RNA, 15 nt, Human
uuuaucuguucauau

SEQ ID NO: 2964498 - RNA, 23 nt, Human
uuuauccuagucauucuucccua

SEQ ID NO: 2964499 - RNA, 17 nt, Human
uuuacaguguuucuggc

SEQ ID NO: 2964500 - RNA, 19 nt, Human
uuuacaguguuucuggcuu

SEQ ID NO: 2964501 - RNA, 12 nt, Human
uuauugaagcag

SEQ ID NO: 2964502 - RNA, 17 nt, Human
uuauugaagcagagugg

SEQ ID NO: 2964503 - RNA, 16 nt, Human
uuauugaagcagagug

SEQ ID NO: 2964504 - RNA, 15 nt, Human
uuauugaagcagagu

SEQ ID NO: 2964505 - RNA, 13 nt, Human
uuauugaagcaga

SEQ ID NO: 2964506 - RNA, 15 nt, Human
uuauugauguuuuca

SEQ ID NO: 2964507 - RNA, 13 nt, Human
uuauuuuacuuuu

SEQ ID NO: 2964508 - RNA, 15 nt, Human
uuauuuuacuuuuug

SEQ ID NO: 2964509 - RNA, 13 nt, Human
uuacuuuaaacua

SEQ ID NO: 2964510 - RNA, 19 nt, Human
uuagacccucaugcugcca

SEQ ID NO: 2964511 - RNA, 20 nt, Human
uuagacccucaugcugccaa

SEQ ID NO: 2964512 - RNA, 20 nt, Human
uuaggagaagucuucuauuu

SEQ ID NO: 2964513 - RNA, 23 nt, Human
uuaguagagguacacuugugaau

SEQ ID NO: 2964514 - RNA, 22 nt, Human
uuaguagagguacacuugugaa

SEQ ID NO: 2964515 - RNA, 19 nt, Human
uuaaugguaguuuuacagu

SEQ ID NO: 2964516 - RNA, 21 nt, Human
uuaaacucugagugcaaacuu

SEQ ID NO: 2964517 - RNA, 15 nt, Human
ugguauuugaaacac

SEQ ID NO: 2964518 - RNA, 14 nt, Human
uggucaacauuucu

SEQ ID NO: 2964519 - RNA, 16 nt, Human
uggugauuuagcagga

SEQ ID NO: 2964520 - RNA, 22 nt, Human
uggugauuuagcaggaagcugu

SEQ ID NO: 2964521 - RNA, 14 nt, Human
uggguauagauguu

SEQ ID NO: 2964522 - RNA, 18 nt, Human
uggguauagauguugcua

SEQ ID NO: 2964523 - RNA, 19 nt, Human
uggaucuguauguguucua

SEQ ID NO: 2964524 - RNA, 16 nt, Human
ugcagggacagagcau

SEQ ID NO: 2964525 - RNA, 23 nt, Human
ugcauauugcauacuauuaaaca

SEQ ID NO: 2964526 - RNA, 15 nt, Human
ugcauauugcauacu

SEQ ID NO: 2964527 - RNA, 21 nt, Human
ugcugccaauauccuaauaaa

SEQ ID NO: 2964528 - RNA, 15 nt, Human
ugcugccaauauccu

SEQ ID NO: 2964529 - RNA, 16 nt, Human
ugcugccaauauccua

SEQ ID NO: 2964530 - RNA, 17 nt, Human
ugcugccaauauccuaa

SEQ ID NO: 2964531 - RNA, 18 nt, Human
ugcugccaauauccuaau

SEQ ID NO: 2964532 - RNA, 19 nt, Human
ugcugccaauauccuaaua

SEQ ID NO: 2964533 - RNA, 21 nt, Human
ugcuguucacuggacacuuca

SEQ ID NO: 2964534 - RNA, 17 nt, Human
ugauugggcacaucauu

SEQ ID NO: 2964535 - RNA, 21 nt, Human
ugauugggcacaucauuucaa

SEQ ID NO: 2964536 - RNA, 20 nt, Human
ugauugggcacaucauuuca

SEQ ID NO: 2964537 - RNA, 18 nt, Human
ugauugggcacaucauuu

SEQ ID NO: 2964538 - RNA, 23 nt, Human
ugauugggcacaucauuucaaga

SEQ ID NO: 2964539 - RNA, 17 nt, Human
ugauuuaaacacauuaa

SEQ ID NO: 2964540 - RNA, 16 nt, Human
ugauuuaaacacauua

SEQ ID NO: 2964541 - RNA, 18 nt, Human
ugauuuaaacacauuaaa

SEQ ID NO: 2964542 - RNA, 15 nt, Human
ugauuuaaacacauu

SEQ ID NO: 2964543 - RNA, 17 nt, Human
ugauugccuuuuuauaa

SEQ ID NO: 2964544 - RNA, 22 nt, Human
ugauugccuuuuuauaacuuuu

SEQ ID NO: 2964545 - RNA, 17 nt, Human
ugaacaguaacauagcu

SEQ ID NO: 2964546 - RNA, 13 nt, Human
ugaaaugucaacc

SEQ ID NO: 2964547 - RNA, 20 nt, Human
ucccuucacaaacccagugu

SEQ ID NO: 2964548 - RNA, 16 nt, Human
ucccuuggacauuuua

SEQ ID NO: 2964549 - RNA, 18 nt, Human
ucccuuggacauuuuaug

SEQ ID NO: 2964550 - RNA, 19 nt, Human
ucccuuggacauuuuaugu

SEQ ID NO: 2964551 - RNA, 21 nt, Human
ucccuuggacauuuuaugucu

SEQ ID NO: 2964552 - RNA, 15 nt, Human
ucccuuggacauuuu

SEQ ID NO: 2964553 - RNA, 17 nt, Human
uccuagucauucuuccc

SEQ ID NO: 2964554 - RNA, 22 nt, Human
uccucauuuuuauaaugucccu

SEQ ID NO: 2964555 - RNA, 13 nt, Human
uccuccacauuug

SEQ ID NO: 2964556 - RNA, 16 nt, Human
uccuccacauuuguuu

SEQ ID NO: 2964557 - RNA, 20 nt, Human
uaugauugccuuuuuauaac

SEQ ID NO: 2964558 - RNA, 23 nt, Human
uaugauugccuuuuuauaacuuu

SEQ ID NO: 2964559 - RNA, 18 nt, Human
uaucuguucauauggaua

SEQ ID NO: 2964560 - RNA, 13 nt, Human
uauguuaauauuu

SEQ ID NO: 2964561 - RNA, 16 nt, Human
uauguuaauauuucug

SEQ ID NO: 2964562 - RNA, 14 nt, Human
uauguuaauauuuu

SEQ ID NO: 2964563 - RNA, 13 nt, Human
uauguguucuauu

SEQ ID NO: 2964564 - RNA, 13 nt, Human
uauuauauucauu

SEQ ID NO: 2964565 - RNA, 17 nt, Human
uauuauauucauucuuu

SEQ ID NO: 2964566 - RNA, 23 nt, Human
uauuauauucauucuuuuugaaa

SEQ ID NO: 2964567 - RNA, 18 nt, Human
uauucauucuuuuugaaa

SEQ ID NO: 2964568 - RNA, 23 nt, Human
uauucauucuuuuugaaauguca

SEQ ID NO: 2964569 - RNA, 19 nt, Human
uauugcauacuauuaaaca

SEQ ID NO: 2964570 - RNA, 23 nt, Human
uauugcauacuauuaaacaugcu

SEQ ID NO: 2964571 - RNA, 18 nt, Human
uauuugaaacacugguuu

SEQ ID NO: 2964572 - RNA, 17 nt, Human
uauuuaaauagaugaca

SEQ ID NO: 2964573 - RNA, 15 nt, Human
uauuuaaauagauga

SEQ ID NO: 2964574 - RNA, 12 nt, Human
ucaaauguguac

SEQ ID NO: 2964575 - RNA, 14 nt, Human
guggaaaauaacuc

SEQ ID NO: 2964576 - RNA, 13 nt, Human
gugcuuggcccag

SEQ ID NO: 2964577 - RNA, 14 nt, Human
gugcuuggcccagg

SEQ ID NO: 2964578 - RNA, 15 nt, Human
gugcuuggcccagga

SEQ ID NO: 2964579 - RNA, 16 nt, Human
gugcuuggcccaggag

SEQ ID NO: 2964580 - RNA, 17 nt, Human
gugcuuggcccaggagu

SEQ ID NO: 2964581 - RNA, 19 nt, Human
gugcuuggcccaggaguuu

SEQ ID NO: 2964582 - RNA, 24 nt, Human
gugcuuggcccaggaguuuggcca

SEQ ID NO: 2964583 - RNA, 18 nt, Human
guccugucggagcccugu

SEQ ID NO: 2964584 - RNA, 20 nt, Human
guccugucggagcccugucu

SEQ ID NO: 2964585 - RNA, 21 nt, Human
guccugucggagcccugucuc

SEQ ID NO: 2964586 - RNA, 21 nt, Human
guccuauuauauucauucuuu

SEQ ID NO: 2964587 - RNA, 19 nt, Human
guccuauuauauucauucu

SEQ ID NO: 2964588 - RNA, 20 nt, Human
guagagguacacuugugaau

SEQ ID NO: 2964589 - RNA, 13 nt, Human
gucaaggcuuaga

SEQ ID NO: 2964590 - RNA, 14 nt, Human
gucaaggcuuagac

SEQ ID NO: 2964591 - RNA, 23 nt, Human
gguagaauguuuucaaauguucu

SEQ ID NO: 2964592 - RNA, 21 nt, Human
ggguagccacuggacugacga

SEQ ID NO: 2964593 - RNA, 14 nt, Human
guacacuugugaau

SEQ ID NO: 2964594 - RNA, 15 nt, Human
guacacuugugaaua

SEQ ID NO: 2964595 - RNA, 14 nt, Human
guacauacuuuuug

SEQ ID NO: 2964596 - RNA, 13 nt, Human
guacauacuuuuu

SEQ ID NO: 2964597 - RNA, 19 nt, Human
guacauacuuuuuggguuu

SEQ ID NO: 2964598 - RNA, 18 nt, Human
guacuaacauuuauuuga

SEQ ID NO: 2964599 - RNA, 19 nt, Human
guagagguacacuugugaa

SEQ ID NO: 2964600 - RNA, 17 nt, Human
guagagguacacuugug

SEQ ID NO: 2964601 - RNA, 15 nt, Human
guagagguacacuug

SEQ ID NO: 2964602 - RNA, 14 nt, Human
guacuuuuaagacu

SEQ ID NO: 2964603 - RNA, 16 nt, Human
guaaaaaaugguguuu

SEQ ID NO: 2964604 - RNA, 18 nt, Human
guaaaaaaugguguuuua

SEQ ID NO: 2964605 - RNA, 10 nt, Human
gguugugaau

SEQ ID NO: 2964606 - RNA, 22 nt, Human
guaacuguuuagaugaauguca

SEQ ID NO: 2964607 - RNA, 16 nt, Human
gcugccaauauccuaa

SEQ ID NO: 2964608 - RNA, 17 nt, Human
gcugccaauauccuaau

SEQ ID NO: 2964609 - RNA, 18 nt, Human
gcugccaauauccuaaua

SEQ ID NO: 2964610 - RNA, 19 nt, Human
gcugccaauauccuaauaa

SEQ ID NO: 2964611 - RNA, 14 nt, Human
gcugccaauauccu

SEQ ID NO: 2964612 - RNA, 15 nt, Human
gcugccaauauccua

SEQ ID NO: 2964613 - RNA, 13 nt, Human
gcugcaguuuuuu

SEQ ID NO: 2964614 - RNA, 19 nt, Human
gcucaccccaucaucccuu

SEQ ID NO: 2964615 - RNA, 17 nt, Human
gcucaccccaucauccc

SEQ ID NO: 2964616 - RNA, 18 nt, Human
gccuaauaugaugacugu

SEQ ID NO: 2964617 - RNA, 18 nt, Human
gcccuuuuucaauaacug

SEQ ID NO: 2964618 - RNA, 14 nt, Human
gcccuuuuucaaua

SEQ ID NO: 2964619 - RNA, 20 nt, Human
gcugccaauauccuaauaaa

SEQ ID NO: 2964620 - RNA, 21 nt, Human
gcugccaauauccuaauaaaa

SEQ ID NO: 2964621 - RNA, 23 nt, Human
gcugccaauauccuaauaaaaag

SEQ ID NO: 2964622 - RNA, 21 nt, Human
gcuuaggagaagucuucuauu

SEQ ID NO: 2964623 - RNA, 23 nt, Human
ggaaagggauuuucagcccucag

SEQ ID NO: 2964624 - RNA, 13 nt, Human
ggaaugcaaagau

SEQ ID NO: 2964625 - RNA, 13 nt, Human
ggauacuuauuua

SEQ ID NO: 2964626 - RNA, 22 nt, Human
gauugccuuuuuauaacuuuuu

SEQ ID NO: 2964627 - RNA, 21 nt, Human
gauugccuuuuuauaacuuuu

SEQ ID NO: 2964628 - RNA, 15 nt, Human
gauugccuuuuuaua

SEQ ID NO: 2964629 - RNA, 14 nt, Human
gcaaagaugaaggu

SEQ ID NO: 2964630 - RNA, 18 nt, Human
gcaaagaugaaggucugu

SEQ ID NO: 2964631 - RNA, 16 nt, Human
gauguugcuaacagca

SEQ ID NO: 2964632 - RNA, 13 nt, Human
gcacacugucugc

SEQ ID NO: 2964633 - RNA, 14 nt, Human
gcacauuaaaugac

SEQ ID NO: 2964634 - RNA, 12 nt, Human
gcacauuaaaug

SEQ ID NO: 2964635 - RNA, 21 nt, Human
gcacauuaaaugacucuuccc

SEQ ID NO: 2964636 - RNA, 16 nt, Human
gcacauuaaaugacuc

SEQ ID NO: 2964637 - RNA, 12 nt, Human
gagcccugucuc

SEQ ID NO: 2964638 - RNA, 18 nt, Human
gagguacacuugugaaua

SEQ ID NO: 2964639 - RNA, 19 nt, Human
gacagagccccacccucag

SEQ ID NO: 2964640 - RNA, 22 nt, Human
gaaugucaguuguuauuuauug

SEQ ID NO: 2964641 - RNA, 19 nt, Human
cugugaugacauucccugc

SEQ ID NO: 2964642 - RNA, 21 nt, Human
cugugcaucuagccucaagcu

SEQ ID NO: 2964643 - RNA, 22 nt, Human
cuguaauaaacucauuucuagc

SEQ ID NO: 2964644 - RNA, 21 nt, Human
cugguacucugccacuuuauu

SEQ ID NO: 2964645 - RNA, 22 nt, Human
cuggcacugguuuguucccugu

SEQ ID NO: 2964646 - RNA, 16 nt, Human
cuuagugauguaauua

SEQ ID NO: 2964647 - RNA, 15 nt, Human
cuuagugauguaauu

SEQ ID NO: 2964648 - RNA, 15 nt, Human
cuuauuuccucauuu

SEQ ID NO: 2964649 - RNA, 14 nt, Human
cuuugcaggaaauc

SEQ ID NO: 2964650 - RNA, 17 nt, Human
gaaaaggccuucuuccc

SEQ ID NO: 2964651 - RNA, 21 nt, Human
cuuuuuggguuuauuuggaaa

SEQ ID NO: 2964652 - RNA, 13 nt, Human
cuaccaauauuua

SEQ ID NO: 2964653 - RNA, 15 nt, Human
cuaccaauauuuaau

SEQ ID NO: 2964654 - RNA, 21 nt, Human
cuaccaauauuuaaucuuuua

SEQ ID NO: 2964655 - RNA, 17 nt, Human
cuacauuagguugugaa

SEQ ID NO: 2964656 - RNA, 18 nt, Human
cuacauuagguugugaau

SEQ ID NO: 2964657 - RNA, 17 nt, Human
cuacauugacagauuga

SEQ ID NO: 2964658 - RNA, 21 nt, Human
cuaauaugaugacuguuuuua

SEQ ID NO: 2964659 - RNA, 19 nt, Human
cuaauaugaugacuguuuu

SEQ ID NO: 2964660 - RNA, 20 nt, Human
cuaacagcaacacaaagcuu

SEQ ID NO: 2964661 - RNA, 12 nt, Human
cuauuuauuuau

SEQ ID NO: 2964662 - RNA, 19 nt, Human
cuauuuauuuauuuauuca

SEQ ID NO: 2964663 - RNA, 15 nt, Human
cucacagaagaugaa

SEQ ID NO: 2964664 - RNA, 16 nt, Human
cuauucugagaugacu

SEQ ID NO: 2964665 - RNA, 15 nt, Human
cuauucugagaugac

SEQ ID NO: 2964666 - RNA, 18 nt, Human
cuauucugagaugacuau

SEQ ID NO: 2964667 - RNA, 23 nt, Human
cuauucagcacaaggaaauaaaa

SEQ ID NO: 2964668 - RNA, 18 nt, Human
cuauauaauuccuguuuu

SEQ ID NO: 2964669 - RNA, 20 nt, Human
cuauauaauuccuguuuuua

SEQ ID NO: 2964670 - RNA, 23 nt, Human
cucauuuuuauaaugucccuuca

SEQ ID NO: 2964671 - RNA, 21 nt, Human
cucagaugcacaugagcuggc

SEQ ID NO: 2964672 - RNA, 18 nt, Human
ccagugacagucagggaa

SEQ ID NO: 2964673 - RNA, 13 nt, Human
ccagugagacugu

SEQ ID NO: 2964674 - RNA, 14 nt, Human
ccagcacaaagcag

SEQ ID NO: 2964675 - RNA, 19 nt, Human
aaaaauuuacuuuaaacua

SEQ ID NO: 2964676 - RNA, 18 nt, Human
aaaaauuuacuuuaaacu

SEQ ID NO: 2964677 - RNA, 13 nt, Human
aaaaauuuacuuu

SEQ ID NO: 2964678 - RNA, 19 nt, Human
agccccacccucagaugca

SEQ ID NO: 2964679 - RNA, 20 nt, Human
agauguagacaguuggguuu

SEQ ID NO: 2964680 - RNA, 20 nt, Human
agcagcccucaauugugaaa

SEQ ID NO: 2964681 - RNA, 12 nt, Human
agcaugaagaca

SEQ ID NO: 2964682 - RNA, 16 nt, Human
agagguacacuuguga

SEQ ID NO: 2964683 - RNA, 17 nt, Human
agagguacacuugugaa

SEQ ID NO: 2964684 - RNA, 18 nt, Human
agagguacacuugugaau

SEQ ID NO: 2964685 - RNA, 14 nt, Human
agguacacuuguga

SEQ ID NO: 2964686 - RNA, 16 nt, Human
agguacacuugugaau

SEQ ID NO: 2964687 - RNA, 17 nt, Human
agguacacuugugaaua

SEQ ID NO: 2964688 - RNA, 22 nt, Human
augcuugcugcugauuuaaaca

SEQ ID NO: 2964689 - RNA, 16 nt, Human
augcuugcugcugauu

SEQ ID NO: 2964690 - RNA, 23 nt, Human
augcuugcugcugauuuaaacac

SEQ ID NO: 2964691 - RNA, 21 nt, Human
auuaaaugacucuucccucaa

SEQ ID NO: 2964692 - RNA, 17 nt, Human
auuaaaugacucuuccc

SEQ ID NO: 2964693 - RNA, 18 nt, Human
augacucuucccucaaau

SEQ ID NO: 2964694 - RNA, 18 nt, Human
augacuauucaguggcua

SEQ ID NO: 2964695 - RNA, 23 nt, Human
aucuucuauauaauuccuguuuu

SEQ ID NO: 2964696 - RNA, 14 nt, Human
agucaaggcuuaga

SEQ ID NO: 2964697 - RNA, 16 nt, Human
agucaaggcuuagacc

SEQ ID NO: 2964698 - RNA, 14 nt, Human
agucauucuucccu

SEQ ID NO: 2964699 - RNA, 13 nt, Human
agucauucuuuaa

SEQ ID NO: 2964700 - RNA, 18 nt, Human
agucauuauguuaauauu

SEQ ID NO: 2964701 - RNA, 12 nt, Human
agucauuauguu

SEQ ID NO: 2964702 - RNA, 16 nt, Human
auauaauuccuguuuu

SEQ ID NO: 2964703 - RNA, 22 nt, Human
auauaauuccuguuuuuauuau

SEQ ID NO: 2964704 - RNA, 21 nt, Human
auacuuauuuaaauagaugac

SEQ ID NO: 2964705 - RNA, 15 nt, Human
auacuuauuuaaaua

SEQ ID NO: 2964706 - RNA, 22 nt, Human
auacuuauuuaaauagaugaca

SEQ ID NO: 2964707 - RNA, 17 nt, Human
auauagcaagacauuau

SEQ ID NO: 2964708 - RNA, 11 nt, Human
auaucacuucc

SEQ ID NO: 2964709 - RNA, 19 nt, Human
auaucccuuggacauuuua

SEQ ID NO: 2964710 - RNA, 23 nt, Human
auauccuaauaaaaaggugacca

SEQ ID NO: 2964711 - RNA, 13 nt, Human
auacuuauuuaaa

SEQ ID NO: 2964712 - RNA, 16 nt, Human
acgugcacgcacacug

SEQ ID NO: 2964713 - RNA, 16 nt, Human
acucuaccugcacacu

SEQ ID NO: 2964714 - RNA, 22 nt, Human
acucuauaacaaaggauacuua

SEQ ID NO: 2964715 - RNA, 13 nt, Human
acuuauuuaaaua

SEQ ID NO: 2964716 - RNA, 18 nt, Human
acuuauuuaaauagauga

SEQ ID NO: 2964717 - RNA, 14 nt, Human
acuguuuagaugaa

SEQ ID NO: 2964718 - RNA, 15 nt, Human
acauuaaaugacucu

SEQ ID NO: 2964719 - RNA, 11 nt, Human
acauuaaauga

SEQ ID NO: 2964720 - RNA, 12 nt, Human
acauuaaaugac

SEQ ID NO: 2964721 - RNA, 13 nt, Human
acauuaaagguac

SEQ ID NO: 2964722 - RNA, 18 nt, Human
acacuguccuauuauauu

SEQ ID NO: 2964723 - RNA, 18 nt, Human
acacaaagcuuuugcaua

SEQ ID NO: 2964724 - RNA, 13 nt, Human
acacaaagcuuuu

SEQ ID NO: 2964725 - RNA, 18 nt, Human
aaagaugaaggucuguuu

SEQ ID NO: 2964726 - RNA, 15 nt, Human
aacaaaggauacuua

SEQ ID NO: 2964727 - RNA, 19 nt, Human
aacaaaggauacuuauuua

SEQ ID NO: 2964728 - RNA, 16 nt, Human
aacuuuuuauauucuc

SEQ ID NO: 2964729 - RNA, 23 nt, Human
aacugacacaugcugaacaucac

SEQ ID NO: 2964730 - RNA, 19 nt, Human
aacuuauggggccaaaaua

SEQ ID NO: 2964731 - RNA, 20 nt, Human
aacucaccuggcaucuuaca

SEQ ID NO: 2964732 - RNA, 15 nt, Human
aacugaacuucagag

SEQ ID NO: 2964733 - RNA, 19 nt, Human
aaucacacugucuucugau

SEQ ID NO: 2964734 - RNA, 19 nt, Human
aaugucaguuguuauuuau

SEQ ID NO: 2964735 - RNA, 20 nt, Human
aaugucaguuguuauuuauu

SEQ ID NO: 2964736 - RNA, 22 nt, Human
aaugucaguuguuauuuauuga

SEQ ID NO: 2964737 - RNA, 14 nt, Human
aaugguaguuuuac

SEQ ID NO: 2964738 - RNA, 20 nt, Human
aaguccccucuccuccacau

SEQ ID NO: 2964739 - RNA, 21 nt, Human
aaguccccucuccuccacauu

SEQ ID NO: 2964740 - RNA, 13 nt, Human
aagaaauuugugg

SEQ ID NO: 2964741 - RNA, 15 nt, Human
auucuauguuaauau

SEQ ID NO: 2964742 - RNA, 18 nt, Human
auucuauguuaauauuuu

SEQ ID NO: 2964743 - RNA, 17 nt, Human
auuauauagcaguaaaa

SEQ ID NO: 2964744 - RNA, 16 nt, Human
uuuugccaauuugcac

SEQ ID NO: 2964745 - RNA, 19 nt, Human
uuuugccaauuugcacauu

SEQ ID NO: 2964746 - RNA, 18 nt, Human
uuuugccaauuugcacau

SEQ ID NO: 2964747 - RNA, 15 nt, Human
uuuugcauauugcau

SEQ ID NO: 2964748 - RNA, 18 nt, Human
uuuugcauauugcauacu

SEQ ID NO: 2964749 - RNA, 14 nt, Human
auguguucuauuca

SEQ ID NO: 2964750 - RNA, 13 nt, Human
auguuaauauuuc

SEQ ID NO: 2964751 - RNA, 13 nt, Human
auguuaauauuuu

SEQ ID NO: 2964752 - RNA, 22 nt, Human
auguuaauauuuuagguguaaa

SEQ ID NO: 2964753 - RNA, 16 nt, Human
auuaaacaugcuguac

SEQ ID NO: 2964754 - RNA, 14 nt, Human
auuuuacuuuuugg

SEQ ID NO: 2964755 - RNA, 17 nt, Human
auuuuacuuuuuggaaa

SEQ ID NO: 2964756 - RNA, 18 nt, Human
auuugaagguagaauguu

SEQ ID NO: 2964757 - RNA, 23 nt, Human
auuugaagguagaauguuuucaa

SEQ ID NO: 2964758 - RNA, 23 nt, Human
auuuguuuugccaauuugcacau

SEQ ID NO: 2964759 - RNA, 21 nt, Human
auuuguuuugccaauuugcac

SEQ ID NO: 2964760 - RNA, 14 nt, Human
auuugugagacugu

SEQ ID NO: 2964761 - RNA, 12 nt, Human
auuugugagacu

SEQ ID NO: 2964762 - RNA, 23 nt, Human
auugggcacaucauuucaagaag

SEQ ID NO: 2964763 - RNA, 21 nt, Human
auugggcacaucauuucaaga

SEQ ID NO: 2964764 - RNA, 19 nt, Human
auugggcacaucauuucaa

SEQ ID NO: 2964765 - RNA, 18 nt, Human
auugggcacaucauuuca

SEQ ID NO: 2964766 - RNA, 17 nt, Human
auugggcacaucauuuc

SEQ ID NO: 2964767 - RNA, 16 nt, Human
auucuuuuugaaaugu

SEQ ID NO: 2964768 - RNA, 14 nt, Human
auuuauuuauucau

SEQ ID NO: 2964769 - RNA, 14 nt, Human
auuuauucauuagu

SEQ ID NO: 2964770 - RNA, 12 nt, Human
auuucaagaagu

SEQ ID NO: 2964771 - RNA, 23 nt, Human
auuucaaacagucucccuuccua

SEQ ID NO: 2964772 - RNA, 13 nt, Human
aucuuuuaugauu

SEQ ID NO: 2964773 - RNA, 23 nt, Human
uuggccugucuuuggauuguuaa

SEQ ID NO: 2964774 - RNA, 22 nt, Human
uuguaacuguuuagaugaaugu

SEQ ID NO: 2964775 - RNA, 21 nt, Human
uuguaacuguuuagaugaaug

SEQ ID NO: 2964776 - RNA, 16 nt, Human
uuguuuuuauuaaaag

SEQ ID NO: 2964777 - RNA, 22 nt, Human
uuguucccugugucauuucaaa

SEQ ID NO: 2964778 - RNA, 19 nt, Human
uuguugaggguauguuuua

SEQ ID NO: 2964779 - RNA, 14 nt, Human
uugugaauaaagag

SEQ ID NO: 2964780 - RNA, 22 nt, Human
uugugaaggcaggggaauguau

SEQ ID NO: 2964781 - RNA, 17 nt, Human
uuuagaugaaugucagu

SEQ ID NO: 2964782 - RNA, 22 nt, Human
uuuauauagcaagacauuauau

SEQ ID NO: 2964783 - RNA, 18 nt, Human
uuuauauagcaagacauu

SEQ ID NO: 2964784 - RNA, 16 nt, Human
augccuaccaauauuu

SEQ ID NO: 2964785 - RNA, 17 nt, Human
augccuaccaauauuua

SEQ ID NO: 2964786 - RNA, 23 nt, Human
augccuaccaauauuuaaucuuu

SEQ ID NO: 2964787 - RNA, 23 nt, Human
uuugaaacacugguuuuaaauau

SEQ ID NO: 2964788 - RNA, 13 nt, Human
uuucucauguuga

SEQ ID NO: 2964789 - RNA, 15 nt, Human
uuucucauguugaaa

SEQ ID NO: 2964790 - RNA, 22 nt, Human
uuucucacagaagaugaagcac

SEQ ID NO: 2964791 - RNA, 18 nt, Human
uuucucacagaagaugaa

SEQ ID NO: 2964792 - RNA, 20 nt, Human
uuuccuucaagaaugcagua

SEQ ID NO: 2964793 - RNA, 19 nt, Human
uucauuaguuuugaagauu

SEQ ID NO: 2964794 - RNA, 14 nt, Human
uucauuaguuuuga

SEQ ID NO: 2964795 - RNA, 19 nt, Human
uucauucuuuuugaaaugu

SEQ ID NO: 2964796 - RNA, 16 nt, Human
uuccaguaaugagcuu

SEQ ID NO: 2964797 - RNA, 22 nt, Human
uuccuguuuuuauuauuaacaa

SEQ ID NO: 2964798 - RNA, 19 nt, Human
auauugguugggaugacuu

SEQ ID NO: 2964799 - RNA, 20 nt, Human
auauugguugggaugacuug

SEQ ID NO: 2964800 - RNA, 13 nt, Human
auauuuaaucuuu

SEQ ID NO: 2964801 - RNA, 14 nt, Human
uucucucaucuguu

SEQ ID NO: 2964802 - RNA, 14 nt, Human
aucacuuccaugac

SEQ ID NO: 2964803 - RNA, 16 nt, Human
auccaauugcugcuug

SEQ ID NO: 2964804 - RNA, 14 nt, Human
uugaaggaugcugu

SEQ ID NO: 2964805 - RNA, 16 nt, Human
uugaaggaugcugucu

SEQ ID NO: 2964806 - RNA, 14 nt, Human
uugaaguaaaaugu

SEQ ID NO: 2964807 - RNA, 16 nt, Human
uugaagguagaauguu

SEQ ID NO: 2964808 - RNA, 19 nt, Human
uugaagguagaauguuuuc

SEQ ID NO: 2964809 - RNA, 15 nt, Human
uugaagguagaaugu

SEQ ID NO: 2964810 - RNA, 22 nt, Human
uggaguuauugaagcagagugg

SEQ ID NO: 2964811 - RNA, 20 nt, Human
ugggaaagggauuuucagcc

SEQ ID NO: 2964812 - RNA, 17 nt, Human
aggaagcuuacaugccu

SEQ ID NO: 2964813 - RNA, 18 nt, Human
aggaagcugugagagcag

SEQ ID NO: 2964814 - RNA, 11 nt, Human
ugcuguacaua

SEQ ID NO: 2964815 - RNA, 22 nt, Human
ugcuguacauacuuuuuggguu

SEQ ID NO: 2964816 - RNA, 17 nt, Human
ugcuguacauacuuuuu

SEQ ID NO: 2964817 - RNA, 15 nt, Human
ugcuguacauacuuu

SEQ ID NO: 2964818 - RNA, 18 nt, Human
ugcuuggcccaggaguuu

SEQ ID NO: 2964819 - RNA, 23 nt, Human
ugcuuggcccaggaguuuggcca

SEQ ID NO: 2964820 - RNA, 15 nt, Human
ugcuuggcccaggag

SEQ ID NO: 2964821 - RNA, 16 nt, Human
ugcuuggcccaggagu

SEQ ID NO: 2964822 - RNA, 12 nt, Human
ugcuuggcccag

SEQ ID NO: 2964823 - RNA, 22 nt, Human
uggaaaggaaugcaaagaugaa

SEQ ID NO: 2964824 - RNA, 21 nt, Human
uggaaaggaaugcaaagauga

SEQ ID NO: 2964825 - RNA, 15 nt, Human
uggaaaggaaugcaa

SEQ ID NO: 2964826 - RNA, 12 nt, Human
uggaaaggaaug

SEQ ID NO: 2964827 - RNA, 15 nt, Human
aggaguuuggccaga

SEQ ID NO: 2964828 - RNA, 16 nt, Human
aggaguuuggccagaa

SEQ ID NO: 2964829 - RNA, 17 nt, Human
aggaguuuggccagaag

SEQ ID NO: 2964830 - RNA, 18 nt, Human
aggaguuuggccagaagu

SEQ ID NO: 2964831 - RNA, 14 nt, Human
aggaguuuggccag

SEQ ID NO: 2964832 - RNA, 13 nt, Human
ugaugacuguuuu

SEQ ID NO: 2964833 - RNA, 15 nt, Human
ugaugacauucccug

SEQ ID NO: 2964834 - RNA, 18 nt, Human
ugaugacauucccugcua

SEQ ID NO: 2964835 - RNA, 20 nt, Human
ugauuuagcaggaagcugug

SEQ ID NO: 2964836 - RNA, 17 nt, Human
ugauuuagcaggaagcu

SEQ ID NO: 2964837 - RNA, 11 nt, Human
agcccugucuc

SEQ ID NO: 2964838 - RNA, 18 nt, Human
agcccugucuccucucuc

SEQ ID NO: 2964839 - RNA, 22 nt, Human
ugcagcucuccccuucucugua

SEQ ID NO: 2964840 - RNA, 20 nt, Human
ugcagcucuccccuucucug

SEQ ID NO: 2964841 - RNA, 17 nt, Human
ugccagccacugugaua

SEQ ID NO: 2964842 - RNA, 13 nt, Human
aguuuggccagaa

SEQ ID NO: 2964843 - RNA, 14 nt, Human
aguuuggccagaag

SEQ ID NO: 2964844 - RNA, 16 nt, Human
aguuugguuucuagca

SEQ ID NO: 2964845 - RNA, 12 nt, Human
aguuuggccaga

SEQ ID NO: 2964846 - RNA, 13 nt, Human
uguuuucaaaugu

SEQ ID NO: 2964847 - RNA, 14 nt, Human
uguuuucaaauguu

SEQ ID NO: 2964848 - RNA, 17 nt, Human
uguuuuauauagcaaga

SEQ ID NO: 2964849 - RNA, 21 nt, Human
uguuuuauauagcaagacauu

SEQ ID NO: 2964850 - RNA, 14 nt, Human
uguuuuaggagcau

SEQ ID NO: 2964851 - RNA, 22 nt, Human
aguucuugccuuggcugcaguu

SEQ ID NO: 2964852 - RNA, 23 nt, Human
aguggcagucuucaguuugcaga

SEQ ID NO: 2964853 - RNA, 14 nt, Human
aguuauugaagcag

SEQ ID NO: 2964854 - RNA, 18 nt, Human
aguuauugaagcagagug

SEQ ID NO: 2964855 - RNA, 17 nt, Human
aguuauugaagcagagu

SEQ ID NO: 2964856 - RNA, 16 nt, Human
aguuauugaagcagag

SEQ ID NO: 2964857 - RNA, 23 nt, Human
aguuauugaagcagaguggcagu

SEQ ID NO: 2964858 - RNA, 19 nt, Human
aguuauugaagcagagugg

SEQ ID NO: 2964859 - RNA, 15 nt, Human
uuaucagaacuaugu

SEQ ID NO: 2964860 - RNA, 13 nt, Human
uuauauagcaaga

SEQ ID NO: 2964861 - RNA, 19 nt, Human
uuauauagcaagacauuau

SEQ ID NO: 2964862 - RNA, 16 nt, Human
uuauaacuuuuuauau

SEQ ID NO: 2964863 - RNA, 14 nt, Human
uuauaacuuuuuau

SEQ ID NO: 2964864 - RNA, 21 nt, Human
uuagccguggugauuuagcag

SEQ ID NO: 2964865 - RNA, 15 nt, Human
auaaacucauuucua

SEQ ID NO: 2964866 - RNA, 23 nt, Human
auaacuggaacacucuauaacaa

SEQ ID NO: 2964867 - RNA, 21 nt, Human
auaacuggaacacucuauaac

SEQ ID NO: 2964868 - RNA, 18 nt, Human
auaacuggaacacucuau

SEQ ID NO: 2964869 - RNA, 16 nt, Human
auaacuggaacacucu

SEQ ID NO: 2964870 - RNA, 18 nt, Human
uuagcaggaagcugugag

SEQ ID NO: 2964871 - RNA, 21 nt, Human
aguccccucuccuccacauuu

SEQ ID NO: 2964872 - RNA, 20 nt, Human
ugucaaccccaaguuaguuc

SEQ ID NO: 2964873 - RNA, 22 nt, Human
aguccccucuccuccacauuug

SEQ ID NO: 2964874 - RNA, 15 nt, Human
ugucuccucucucug

SEQ ID NO: 2964875 - RNA, 20 nt, Human
ugugauuuuugguauuugaa

SEQ ID NO: 2964876 - RNA, 21 nt, Human
ugugauuuuugguauuugaaa

SEQ ID NO: 2964877 - RNA, 19 nt, Human
ugugauuuuugguauuuga

SEQ ID NO: 2964878 - RNA, 14 nt, Human
agucuucuauuuau

SEQ ID NO: 2964879 - RNA, 14 nt, Human
aggguuuaaagaug

SEQ ID NO: 2964880 - RNA, 21 nt, Human
aggggcuuaauuauugauguu

SEQ ID NO: 2964881 - RNA, 18 nt, Human
ugguuauuuuacuuuuug

SEQ ID NO: 2964882 - RNA, 15 nt, Human
ugguuauuuuacuuu

SEQ ID NO: 2964883 - RNA, 16 nt, Human
ugguuauuuuacuuuu

SEQ ID NO: 2964884 - RNA, 15 nt, Human
ugguuucuagcauga

SEQ ID NO: 2964885 - RNA, 15 nt, Human
ugguuuguucccugu

SEQ ID NO: 2964886 - RNA, 12 nt, Human
agguugugaaug

SEQ ID NO: 2964887 - RNA, 17 nt, Human
uguagacaguuggguuu

SEQ ID NO: 2964888 - RNA, 18 nt, Human
ugaaguaaaauguggcag

SEQ ID NO: 2964889 - RNA, 19 nt, Human
ugaaguaaaauguggcagg

SEQ ID NO: 2964890 - RNA, 23 nt, Human
agacuuugguuauuuuacuuuuu

SEQ ID NO: 2964891 - RNA, 17 nt, Human
agacuuugguuauuuua

SEQ ID NO: 2964892 - RNA, 21 nt, Human
ugagagcaguuugguuucuag

SEQ ID NO: 2964893 - RNA, 23 nt, Human
ugagagcaguuugguuucuagca

SEQ ID NO: 2964894 - RNA, 16 nt, Human
agaugcacaugagcug

SEQ ID NO: 2964895 - RNA, 13 nt, Human
agaugcacaugag

SEQ ID NO: 2964896 - RNA, 14 nt, Human
ugacagauugaauu

SEQ ID NO: 2964897 - RNA, 13 nt, Human
ugacauucccugc

SEQ ID NO: 2964898 - RNA, 22 nt, Human
ugacuauucugagaugacuauu

SEQ ID NO: 2964899 - RNA, 21 nt, Human
ugacuauucugagaugacuau

SEQ ID NO: 2964900 - RNA, 19 nt, Human
ugacuauucugagaugacu

SEQ ID NO: 2964901 - RNA, 16 nt, Human
ugacuauaaccuuguu

SEQ ID NO: 2964902 - RNA, 11 nt, Human
ugacuguuuuu

SEQ ID NO: 2964903 - RNA, 22 nt, Human
ugacuauuuuuguuuuuauuaa

SEQ ID NO: 2964904 - RNA, 18 nt, Human
ugacuauuuuuguuuuua

SEQ ID NO: 2964905 - RNA, 23 nt, Human
ugacuauuuuuguuuuuauuaaa

SEQ ID NO: 2964906 - RNA, 14 nt, Human
ucugagugcaaacu

SEQ ID NO: 2964907 - RNA, 23 nt, Human
ucugagugcaaacuucagaguuc

SEQ ID NO: 2964908 - RNA, 22 nt, Human
ucugagugcaaacuucagaguu

SEQ ID NO: 2964909 - RNA, 24 nt, Human
agaauugauugggcacaucauuuc

SEQ ID NO: 2964910 - RNA, 23 nt, Human
agaauugauugggcacaucauuu

SEQ ID NO: 2964911 - RNA, 22 nt, Human
agaauugauugggcacaucauu

SEQ ID NO: 2964912 - RNA, 16 nt, Human
agaauugauugggcac

SEQ ID NO: 2964913 - RNA, 22 nt, Human
agacagagccccacccucagau

SEQ ID NO: 2964914 - RNA, 24 nt, Human
agacagagccccacccucagaugc

SEQ ID NO: 2964915 - RNA, 17 nt, Human
ucugugaugacauuccc

SEQ ID NO: 2964916 - RNA, 15 nt, Human
agaauguuuucaaau

SEQ ID NO: 2964917 - RNA, 21 nt, Human
agaauguuuucaaauguucuc

SEQ ID NO: 2964918 - RNA, 23 nt, Human
ucuauaacaaaggauacuuauuu

SEQ ID NO: 2964919 - RNA, 22 nt, Human
ucuauaacaaaggauacuuauu

SEQ ID NO: 2964920 - RNA, 14 nt, Human
ucuauguuaauauu

SEQ ID NO: 2964921 - RNA, 16 nt, Human
ucuauguuaauauuuu

SEQ ID NO: 2964922 - RNA, 13 nt, Human
ucuauuuauuuau

SEQ ID NO: 2964923 - RNA, 14 nt, Human
ucuauuuauuuauu

SEQ ID NO: 2964924 - RNA, 15 nt, Human
ucuauuuauuuguga

SEQ ID NO: 2964925 - RNA, 14 nt, Human
ucucagcagagugc

SEQ ID NO: 2964926 - RNA, 13 nt, Human
ucucagcagagug

SEQ ID NO: 2964927 - RNA, 12 nt, Human
ucucagcagagu

SEQ ID NO: 2964928 - RNA, 15 nt, Human
acuugugaauaaaga

SEQ ID NO: 2964929 - RNA, 21 nt, Human
acuuugguuauuuuacuuuuu

SEQ ID NO: 2964930 - RNA, 13 nt, Human
acuuugguuauuu

SEQ ID NO: 2964931 - RNA, 10 nt, Human
acuuugguua

SEQ ID NO: 2964932 - RNA, 23 nt, Human
acuuugguuauuuuacuuuuugg

SEQ ID NO: 2964933 - RNA, 22 nt, Human
acuuugguuauuuuacuuuuug

SEQ ID NO: 2964934 - RNA, 16 nt, Human
acuuuuuauauucuca

SEQ ID NO: 2964935 - RNA, 15 nt, Human
acuuuuuauauucuc

SEQ ID NO: 2964936 - RNA, 12 nt, Human
acuuuuuauauu

SEQ ID NO: 2964937 - RNA, 22 nt, Human
acuuuuuauauucucagcagag

SEQ ID NO: 2964938 - RNA, 14 nt, Human
uccagucauuaugu

SEQ ID NO: 2964939 - RNA, 15 nt, Human
uccagucauuauguu

SEQ ID NO: 2964940 - RNA, 21 nt, Human
uccagucauuauguuaauauu

SEQ ID NO: 2964941 - RNA, 23 nt, Human
uccagucauuauguuaauauuuc

SEQ ID NO: 2964942 - RNA, 15 nt, Human
acugaacaguaacau

SEQ ID NO: 2964943 - RNA, 21 nt, Human
acugaacaguaacauagcugu

SEQ ID NO: 2964944 - RNA, 22 nt, Human
acucugagugcaaacuucagag

SEQ ID NO: 2964945 - RNA, 17 nt, Human
acucugccacuuuauuu

SEQ ID NO: 2964946 - RNA, 16 nt, Human
acucugccacuuuauu

SEQ ID NO: 2964947 - RNA, 14 nt, Human
ucagcccucagaau

SEQ ID NO: 2964948 - RNA, 15 nt, Human
accccaucaucccuu

SEQ ID NO: 2964949 - RNA, 14 nt, Human
acccucucaaacua

SEQ ID NO: 2964950 - RNA, 15 nt, Human
ucauauggauaaaua

SEQ ID NO: 2964951 - RNA, 19 nt, Human
ucaaucuggauucauauuu

SEQ ID NO: 2964952 - RNA, 14 nt, Human
acauugacuauuuu

SEQ ID NO: 2964953 - RNA, 17 nt, Human
acauugacuauuuuugu

SEQ ID NO: 2964954 - RNA, 11 nt, Human
acauucccugc

SEQ ID NO: 2964955 - RNA, 17 nt, Human
ucaacauuucucauguu

SEQ ID NO: 2964956 - RNA, 21 nt, Human
acaugcuguacauacuuuuug

SEQ ID NO: 2964957 - RNA, 20 nt, Human
acaugcuguacauacuuuuu

SEQ ID NO: 2964958 - RNA, 16 nt, Human
ucacacugucuucuga

SEQ ID NO: 2964959 - RNA, 12 nt, Human
ucaauugugaaa

SEQ ID NO: 2964960 - RNA, 16 nt, Human
aaucuggauucauauu

SEQ ID NO: 2964961 - RNA, 17 nt, Human
aaucuggauucauauuu

SEQ ID NO: 2964962 - RNA, 18 nt, Human
aaucuggauucauauuua

SEQ ID NO: 2964963 - RNA, 19 nt, Human
aaucuggauucauauuuaa

SEQ ID NO: 2964964 - RNA, 23 nt, Human
aaucgcuccaccuugcagcucuc

SEQ ID NO: 2964965 - RNA, 12 nt, Human
uaauaaacucau

SEQ ID NO: 2964966 - RNA, 11 nt, Human
uaaucuuuuau

SEQ ID NO: 2964967 - RNA, 17 nt, Human
uaaugucaguauuucaa

SEQ ID NO: 2964968 - RNA, 13 nt, Human
aauauuuaaucuu

SEQ ID NO: 2964969 - RNA, 21 nt, Human
aauuaaugucaguauuucaac

SEQ ID NO: 2964970 - RNA, 17 nt, Human
aauuauugauguuuuca

SEQ ID NO: 2964971 - RNA, 20 nt, Human
uacucugccacuuuauuucu

SEQ ID NO: 2964972 - RNA, 23 nt, Human
uauguuuuuguucaguuuaucug

SEQ ID NO: 2964973 - RNA, 18 nt, Human
uauucaguggcuaacuug

SEQ ID NO: 2964974 - RNA, 14 nt, Human
acaggcuuagugau

SEQ ID NO: 2964975 - RNA, 20 nt, Human
acaggcuuagugauguaauu

SEQ ID NO: 2964976 - RNA, 19 nt, Human
acaggcuuagugauguaau

SEQ ID NO: 2964977 - RNA, 12 nt, Human
acagauugaauu

SEQ ID NO: 2964978 - RNA, 18 nt, Human
acagauugaauuugccua

SEQ ID NO: 2964979 - RNA, 22 nt, Human
uauccuaauaaaaaggugacca

SEQ ID NO: 2964980 - RNA, 19 nt, Human
uauccuaauaaaaagguga

SEQ ID NO: 2964981 - RNA, 15 nt, Human
uauccuaauaaaaag

SEQ ID NO: 2964982 - RNA, 18 nt, Human
uauccuaauaaaaaggug

SEQ ID NO: 2964983 - RNA, 12 nt, Human
uauccuaauaaa

SEQ ID NO: 2964984 - RNA, 18 nt, Human
uaucccuuggacauuuua

SEQ ID NO: 2964985 - RNA, 19 nt, Human
uaucccuuggacauuuuau

SEQ ID NO: 2964986 - RNA, 17 nt, Human
uaucccuuggacauuuu

SEQ ID NO: 2964987 - RNA, 17 nt, Human
uauaacuuuuuauauuc

SEQ ID NO: 2964988 - RNA, 12 nt, Human
uauaacuuuuua

SEQ ID NO: 2964989 - RNA, 20 nt, Human
uauaacuuuuuauauucuca

SEQ ID NO: 2964990 - RNA, 12 nt, Human
uaggagcaugag

SEQ ID NO: 2964991 - RNA, 20 nt, Human
uaggagaagucuucuauuua

SEQ ID NO: 2964992 - RNA, 18 nt, Human
uagcauguccuaaugcuu

SEQ ID NO: 2964993 - RNA, 19 nt, Human
uagaugacauugacuauuu

SEQ ID NO: 2964994 - RNA, 18 nt, Human
uagaugacauugacuauu

SEQ ID NO: 2964995 - RNA, 24 nt, Human
acaaaggauacuuauuuaaauaga

SEQ ID NO: 2964996 - RNA, 17 nt, Human
acaaaggggcuuaauua

SEQ ID NO: 2964997 - RNA, 14 nt, Human
aacuucagaguucu

SEQ ID NO: 2964998 - RNA, 18 nt, Human
gugcacgcacacugucug

SEQ ID NO: 2964999 - RNA, 15 nt, Human
aacuaaaauguucua

SEQ ID NO: 2965000 - RNA, 20 nt, Human
aacacaaagcuuuugcauau

SEQ ID NO: 2965001 - RNA, 19 nt, Human
aacacaaagcuuuugcaua

SEQ ID NO: 2965002 - RNA, 18 nt, Human
aacacaaagcuuuugcau

SEQ ID NO: 2965003 - RNA, 12 nt, Human
aacacaaagcuu

SEQ ID NO: 2965004 - RNA, 16 nt, Human
aacacugguuuuaaau

SEQ ID NO: 2965005 - RNA, 18 nt, Human
aacacugguuuuaaauau

SEQ ID NO: 2965006 - RNA, 15 nt, Human
aacauagcugugauu

SEQ ID NO: 2965007 - RNA, 19 nt, Human
aagcuuuugcauauugcau

SEQ ID NO: 2965008 - RNA, 15 nt, Human
aagcuuuugcauauu

SEQ ID NO: 2965009 - RNA, 22 nt, Human
aagcuuuugcauauugcauacu

SEQ ID NO: 2965010 - RNA, 13 nt, Human
aagcuuuugcaua

SEQ ID NO: 2965011 - RNA, 15 nt, Human
guuauuuuacuuuuu

SEQ ID NO: 2965012 - RNA, 16 nt, Human
guuauuuuacuuuuug

SEQ ID NO: 2965013 - RNA, 17 nt, Human
aagagggugggugggua

SEQ ID NO: 2965014 - RNA, 13 nt, Human
uaaaaaggugacc

SEQ ID NO: 2965015 - RNA, 15 nt, Human
uaaaaaggugaccau

SEQ ID NO: 2965016 - RNA, 14 nt, Human
aagguagaauguuu

SEQ ID NO: 2965017 - RNA, 13 nt, Human
aagguagaauguu

SEQ ID NO: 2965018 - RNA, 22 nt, Human
cuucucuguauuccuagaaacu

SEQ ID NO: 2965019 - RNA, 16 nt, Human
cuucuauuuauuuauu

SEQ ID NO: 2965020 - RNA, 22 nt, Human
cuucuauuuauuuauuuauuca

SEQ ID NO: 2965021 - RNA, 14 nt, Human
cuucuauauaauuc

SEQ ID NO: 2965022 - RNA, 15 nt, Human
cuuuaagaacuaaaa

SEQ ID NO: 2965023 - RNA, 16 nt, Human
cuuggcccaggaguuu

SEQ ID NO: 2965024 - RNA, 20 nt, Human
cuuggcccaggaguuuggcc

SEQ ID NO: 2965025 - RNA, 22 nt, Human
cuuggcccaggaguuuggccag

SEQ ID NO: 2965026 - RNA, 23 nt, Human
cuuggcccaggaguuuggccaga

SEQ ID NO: 2965027 - RNA, 15 nt, Human
cuuggcccaggaguu

SEQ ID NO: 2965028 - RNA, 24 nt, Human
cuggaguuauugaagcagaguggc

SEQ ID NO: 2965029 - RNA, 23 nt, Human
cuggaguuauugaagcagagugg

SEQ ID NO: 2965030 - RNA, 21 nt, Human
cuggaguuauugaagcagagu

SEQ ID NO: 2965031 - RNA, 22 nt, Human
cuggaguuauugaagcagagug

SEQ ID NO: 2965032 - RNA, 23 nt, Human
cugucggagcccugucuccucuc

SEQ ID NO: 2965033 - RNA, 19 nt, Human
gacacuucacgcccuuggc

SEQ ID NO: 2965034 - RNA, 16 nt, Human
gacauuuuaugucuuu

SEQ ID NO: 2965035 - RNA, 20 nt, Human
gacauuuuaugucuuucuug

SEQ ID NO: 2965036 - RNA, 18 nt, Human
gacccucaugcugccaau

SEQ ID NO: 2965037 - RNA, 21 nt, Human
gacccucaugcugccaauauc

SEQ ID NO: 2965038 - RNA, 22 nt, Human
gacccucaugcugccaauaucc

SEQ ID NO: 2965039 - RNA, 23 nt, Human
gacccucaugcugccaauauccu

SEQ ID NO: 2965040 - RNA, 12 nt, Human
gacccucaugcu

SEQ ID NO: 2965041 - RNA, 14 nt, Human
gacccucaugcugc

SEQ ID NO: 2965042 - RNA, 16 nt, Human
gacccucaugcugcca

SEQ ID NO: 2965043 - RNA, 17 nt, Human
gacccucaugcugccaa

SEQ ID NO: 2965044 - RNA, 17 nt, Human
gaauguuuucaaauguu

SEQ ID NO: 2965045 - RNA, 16 nt, Human
gagccccacccucaga

SEQ ID NO: 2965046 - RNA, 17 nt, Human
gagccccacccucagau

SEQ ID NO: 2965047 - RNA, 15 nt, Human
gcagcucuccccuuc

SEQ ID NO: 2965048 - RNA, 14 nt, Human
gcagucuucaguuu

SEQ ID NO: 2965049 - RNA, 20 nt, Human
ggaaugauauaagguuuuuu

SEQ ID NO: 2965050 - RNA, 13 nt, Human
ggaaaggaaugca

SEQ ID NO: 2965051 - RNA, 17 nt, Human
ggaaaggaaugcaaaga

SEQ ID NO: 2965052 - RNA, 13 nt, Human
gcuuuugcauauu

SEQ ID NO: 2965053 - RNA, 19 nt, Human
gcccaggaguuuggccaga

SEQ ID NO: 2965054 - RNA, 20 nt, Human
gcccaggaguuuggccagaa

SEQ ID NO: 2965055 - RNA, 19 nt, Human
aaaauaauuagguauuuuc

SEQ ID NO: 2965056 - RNA, 21 nt, Human
aaaaggaagcuuacaugccua

SEQ ID NO: 2965057 - RNA, 20 nt, Human
aaaaugguguuuuaucuucu

SEQ ID NO: 2965058 - RNA, 16 nt, Human
gggguaaggugcaucu

SEQ ID NO: 2965059 - RNA, 15 nt, Human
aaacauuucauuucc

SEQ ID NO: 2965060 - RNA, 16 nt, Human
gguauagauguugcua

SEQ ID NO: 2965061 - RNA, 22 nt, Human
aaauaucccuuggacauuuuau

SEQ ID NO: 2965062 - RNA, 23 nt, Human
aaauaucccuuggacauuuuaug

SEQ ID NO: 2965063 - RNA, 21 nt, Human
aaauauugguugggaugacuu

SEQ ID NO: 2965064 - RNA, 17 nt, Human
guaacauagcugugauu

SEQ ID NO: 2965065 - RNA, 17 nt, Human
aaauaauuagguauuuu

SEQ ID NO: 2965066 - RNA, 13 nt, Human
guaauaaacucau

SEQ ID NO: 2965067 - RNA, 21 nt, Human
aaagggguaggguuuaaagau

SEQ ID NO: 2965068 - RNA, 15 nt, Human
ggcacaucauuucaa

SEQ ID NO: 2965069 - RNA, 14 nt, Human
ggcacaucauuuca

SEQ ID NO: 2965070 - RNA, 23 nt, Human
ggauugugccuaauguguuugag

SEQ ID NO: 2965071 - RNA, 19 nt, Human
ggaguuauugaagcagagu

SEQ ID NO: 2965072 - RNA, 15 nt, Human
ggcuaacuuggguua

SEQ ID NO: 2965073 - RNA, 19 nt, Human
caauaaacauuucauuucc

SEQ ID NO: 2965074 - RNA, 13 nt, Human
caccuugcagcuc

SEQ ID NO: 2965075 - RNA, 15 nt, Human
caccuugcagcucuc

SEQ ID NO: 2965076 - RNA, 22 nt, Human
caccuugcagcucuccccuucu

SEQ ID NO: 2965077 - RNA, 12 nt, Human
cacuugugaaua

SEQ ID NO: 2965078 - RNA, 11 nt, Human
cacuugugaau

SEQ ID NO: 2965079 - RNA, 20 nt, Human
caagaaguccccucuccucc

SEQ ID NO: 2965080 - RNA, 19 nt, Human
auucugagaugacuauuca

SEQ ID NO: 2965081 - RNA, 15 nt, Human
auuucucauguugaa

SEQ ID NO: 2965082 - RNA, 23 nt, Human
auuucaagaaguccccucuccuc

SEQ ID NO: 2965083 - RNA, 14 nt, Human
auuuaaucuuuuau

SEQ ID NO: 2965084 - RNA, 17 nt, Human
auuuaaucuuuuaugau

SEQ ID NO: 2965085 - RNA, 20 nt, Human
cauuauauagcaguaaaaaa

SEQ ID NO: 2965086 - RNA, 16 nt, Human
cauuaguuuugaagau

SEQ ID NO: 2965087 - RNA, 17 nt, Human
cauuauauagcaguaaa

SEQ ID NO: 2965088 - RNA, 14 nt, Human
cauuaguuuugaag

SEQ ID NO: 2965089 - RNA, 15 nt, Human
cauuaguuuugaaga

SEQ ID NO: 2965090 - RNA, 18 nt, Human
caucuguuacacaaagaa

SEQ ID NO: 2965091 - RNA, 14 nt, Human
cauauggauaaaua

SEQ ID NO: 2965092 - RNA, 20 nt, Human
ccaggauuauugucaaagaa

SEQ ID NO: 2965093 - RNA, 20 nt, Human
ccucaugcugccaauauccu

SEQ ID NO: 2965094 - RNA, 21 nt, Human
ccucaugcugccaauauccua

SEQ ID NO: 2965095 - RNA, 21 nt, Human
ccucauuuuuauaaugucccu

SEQ ID NO: 2965096 - RNA, 19 nt, Human
cccugucuccucucucugu

SEQ ID NO: 2965097 - RNA, 17 nt, Human
ccugucggagcccuguc

SEQ ID NO: 2965098 - RNA, 21 nt, Human
ccugucggagcccugucuccu

SEQ ID NO: 2965099 - RNA, 16 nt, Human
ccugucggagcccugu

SEQ ID NO: 2965100 - RNA, 22 nt, Human
ccugucggagcccugucuccuc

SEQ ID NO: 2965101 - RNA, 21 nt, Human
cuauuaaacaugcuguacaua

SEQ ID NO: 2965102 - RNA, 21 nt, Human
cuauuuuuguuuuuauuaaaa

SEQ ID NO: 2965103 - RNA, 15 nt, Human
cuauuuuuguuuuua

SEQ ID NO: 2965104 - RNA, 21 nt, Human
cucaaacuaacaggcuuagug

SEQ ID NO: 2965105 - RNA, 21 nt, Human
cucaauaaacauuucauuucc

SEQ ID NO: 2965106 - RNA, 17 nt, Human
cucaauaaacauuucau

SEQ ID NO: 2965107 - RNA, 13 nt, Human
cucaauugugaaa

SEQ ID NO: 2965108 - RNA, 12 nt, Human
cucaauugugaa

SEQ ID NO: 2965109 - RNA, 20 nt, Human
cgugugugugcguccugucg

SEQ ID NO: 2965110 - RNA, 15 nt, Human
cuaauaaaaagguga

SEQ ID NO: 2965111 - RNA, 14 nt, Human
cuaauaaaaaggug

SEQ ID NO: 2965112 - RNA, 13 nt, Human
cuaauaaaaaggu

SEQ ID NO: 2965113 - RNA, 11 nt, Human
cuaauaaaaag

SEQ ID NO: 2965114 - RNA, 16 nt, Human
ccuuuuucaauaacug

SEQ ID NO: 2965115 - RNA, 21 nt, Human
ccuuuuuauaacuuuuuauau

SEQ ID NO: 2965116 - RNA, 15 nt, Human
ccuuuuuauaacuuu

SEQ ID NO: 2965117 - RNA, 12 nt, Human
ccuuuuuauaac

SEQ ID NO: 2965118 - RNA, 22 nt, Human
cguggugauuuagcaggaagcu

SEQ ID NO: 2965119 - RNA, 15 nt, Human
cguggugauuuagca

SEQ ID NO: 2965120 - RNA, 16 nt, Human
cucuccccuucucugu

SEQ ID NO: 2965121 - RNA, 21 nt, Human
cacaguguguggucaacauuu

SEQ ID NO: 2965122 - RNA, 23 nt, Human
cacaguguguggucaacauuucu

SEQ ID NO: 2965123 - RNA, 20 nt, Human
caaacuaacaggcuuaguga

SEQ ID NO: 2965124 - RNA, 16 nt, Human
caaacuaacaggcuua

SEQ ID NO: 2965125 - RNA, 14 nt, Human
caaacuaacaggcu

SEQ ID NO: 2965126 - RNA, 18 nt, Human
caaggcuuagacccucau

SEQ ID NO: 2965127 - RNA, 15 nt, Human
caaggcugugcaucu

SEQ ID NO: 2965128 - RNA, 15 nt, Human
caaggcuuagacccu

SEQ ID NO: 2965129 - RNA, 14 nt, Human
caaggcuuagaccc

SEQ ID NO: 2965130 - RNA, 19 nt, Human
caaugagaucauugugaag

SEQ ID NO: 2965131 - RNA, 22 nt, Human
caauuugcacauuaaaugacuc

SEQ ID NO: 2965132 - RNA, 15 nt, Human
caauuugcacauuaa

SEQ ID NO: 2965133 - RNA, 14 nt, Human
caauuugcacauua

SEQ ID NO: 2965134 - RNA, 16 nt, Human
caaguuaguucaaucu

SEQ ID NO: 2965135 - RNA, 23 nt, Human
caaucugugaugacauucccugc

SEQ ID NO: 2965136 - RNA, 20 nt, Human
caaucuggauucauauuuaa

SEQ ID NO: 2965137 - RNA, 16 nt, Human
caaucuggauucauau

SEQ ID NO: 2965138 - RNA, 20 nt, Human
uucuucccaauagcaaggcu

SEQ ID NO: 2965139 - RNA, 15 nt, Human
uucuggacuaaaacu

SEQ ID NO: 2965140 - RNA, 22 nt, Human
uugauugggcacaucauuucaa

SEQ ID NO: 2965141 - RNA, 17 nt, Human
uugauugggcacaucau

SEQ ID NO: 2965142 - RNA, 16 nt, Human
uugauugggcacauca

SEQ ID NO: 2965143 - RNA, 21 nt, Human
uugacuauuuuuguuuuuauu

SEQ ID NO: 2965144 - RNA, 22 nt, Human
uucucauguugaaacuuuaaga

SEQ ID NO: 2965145 - RNA, 21 nt, Human
uucuauauaauuccuguuuuu

SEQ ID NO: 2965146 - RNA, 14 nt, Human
uucacgcccuuggc

SEQ ID NO: 2965147 - RNA, 16 nt, Human
uuauuuggaaaggaau

SEQ ID NO: 2965148 - RNA, 22 nt, Human
uuauuugaguggaguuacugaa

SEQ ID NO: 2965149 - RNA, 20 nt, Human
uuauuuggaaaggaaugcaa

SEQ ID NO: 2965150 - RNA, 22 nt, Human
uucaauaacuggaacacucuau

SEQ ID NO: 2965151 - RNA, 16 nt, Human
uucaauaacuggaaca

SEQ ID NO: 2965152 - RNA, 12 nt, Human
uucaauaacugg

SEQ ID NO: 2965153 - RNA, 14 nt, Human
uuagugauguaauu

SEQ ID NO: 2965154 - RNA, 17 nt, Human
uuauaacuuuuuauauu

SEQ ID NO: 2965155 - RNA, 21 nt, Human
uuauauucucagcagagugcu

SEQ ID NO: 2965156 - RNA, 20 nt, Human
uuauauucucagcagagugc

SEQ ID NO: 2965157 - RNA, 19 nt, Human
uuauauucucagcagagug

SEQ ID NO: 2965158 - RNA, 18 nt, Human
uuauauucucagcagagu

SEQ ID NO: 2965159 - RNA, 16 nt, Human
uuauauucucagcaga

SEQ ID NO: 2965160 - RNA, 15 nt, Human
uuaugauugccuuuu

SEQ ID NO: 2965161 - RNA, 21 nt, Human
uuaugauugccuuuuuauaac

SEQ ID NO: 2965162 - RNA, 16 nt, Human
uuauuaacaaaacagu

SEQ ID NO: 2965163 - RNA, 20 nt, Human
uugugaaaaaauuuacuuua

SEQ ID NO: 2965164 - RNA, 15 nt, Human
uugguauuugaaaca

SEQ ID NO: 2965165 - RNA, 15 nt, Human
uugugccuaaugugu

SEQ ID NO: 2965166 - RNA, 18 nt, Human
uugugccuaauguguuug

SEQ ID NO: 2965167 - RNA, 13 nt, Human
uuuauaacuuuuu

SEQ ID NO: 2965168 - RNA, 16 nt, Human
uuuauaacuuuuuaua

SEQ ID NO: 2965169 - RNA, 14 nt, Human
uuuacuuuaaacua

SEQ ID NO: 2965170 - RNA, 17 nt, Human
uuuaagaacuaaaaugu

SEQ ID NO: 2965171 - RNA, 16 nt, Human
uuuaagacccucucaa

SEQ ID NO: 2965172 - RNA, 21 nt, Human
uuuugaagauucuauguuaau

SEQ ID NO: 2965173 - RNA, 13 nt, Human
uuugguauuugaa

SEQ ID NO: 2965174 - RNA, 18 nt, Human
uuuggaaaggaaugcaaa

SEQ ID NO: 2965175 - RNA, 17 nt, Human
uuuggaaaggaaugcaa

SEQ ID NO: 2965176 - RNA, 16 nt, Human
uuuggaaaggaaugca

SEQ ID NO: 2965177 - RNA, 19 nt, Human
uuuggaaaggaaugcaaag

SEQ ID NO: 2965178 - RNA, 15 nt, Human
uuugcaggaaauccu

SEQ ID NO: 2965179 - RNA, 22 nt, Human
uuugaguggaguuacugaacag

SEQ ID NO: 2965180 - RNA, 15 nt, Human
uuuucaaauguucuc

SEQ ID NO: 2965181 - RNA, 13 nt, Human
uuuuauauagcaa

SEQ ID NO: 2965182 - RNA, 13 nt, Human
uuuuaucuucuau

SEQ ID NO: 2965183 - RNA, 17 nt, Human
ugcacgcacacugucug

SEQ ID NO: 2965184 - RNA, 16 nt, Human
ugcacgcacacugucu

SEQ ID NO: 2965185 - RNA, 22 nt, Human
ugcagaguaggggucugucuuu

SEQ ID NO: 2965186 - RNA, 16 nt, Human
ugauguaauuaugguu

SEQ ID NO: 2965187 - RNA, 16 nt, Human
uggacauuuuaugucu

SEQ ID NO: 2965188 - RNA, 17 nt, Human
uggacauuuuaugucuu

SEQ ID NO: 2965189 - RNA, 11 nt, Human
uggacauuuua

SEQ ID NO: 2965190 - RNA, 13 nt, Human
uggacauuuuaug

SEQ ID NO: 2965191 - RNA, 20 nt, Human
uggauugugccuaauguguu

SEQ ID NO: 2965192 - RNA, 23 nt, Human
uggauugugccuaauguguuuga

SEQ ID NO: 2965193 - RNA, 19 nt, Human
uggauugugccuaaugugu

SEQ ID NO: 2965194 - RNA, 14 nt, Human
uggaaaagaauaaa

SEQ ID NO: 2965195 - RNA, 14 nt, Human
ugucuuuuaaacuc

SEQ ID NO: 2965196 - RNA, 15 nt, Human
uguccuauuauauuc

SEQ ID NO: 2965197 - RNA, 19 nt, Human
ucuguuuuguguacuuuua

SEQ ID NO: 2965198 - RNA, 13 nt, Human
ucuguuuugugua

SEQ ID NO: 2965199 - RNA, 22 nt, Human
ucucuguaauaaacucauuucu

SEQ ID NO: 2965200 - RNA, 18 nt, Human
ucucuguaauaaacucau

SEQ ID NO: 2965201 - RNA, 18 nt, Human
uccuaauaaaaaggugac

SEQ ID NO: 2965202 - RNA, 16 nt, Human
uccuaauaaaaaggug

SEQ ID NO: 2965203 - RNA, 17 nt, Human
uccuaauaaaaagguga

SEQ ID NO: 2965204 - RNA, 12 nt, Human
uccuaauaaaaa

SEQ ID NO: 2965205 - RNA, 13 nt, Human
uccuaauaaaaag

SEQ ID NO: 2965206 - RNA, 14 nt, Human
uccuaauaaaaagg

SEQ ID NO: 2965207 - RNA, 15 nt, Human
uccuaauaaaaaggu

SEQ ID NO: 2965208 - RNA, 12 nt, Human
uccuauuauauu

SEQ ID NO: 2965209 - RNA, 22 nt, Human
ucuaaauaucccuuggacauuu

SEQ ID NO: 2965210 - RNA, 22 nt, Human
uccugucggagcccugucuccu

SEQ ID NO: 2965211 - RNA, 19 nt, Human
uccugucggagcccugucu

SEQ ID NO: 2965212 - RNA, 17 nt, Human
uauuuucuccaaauguu

SEQ ID NO: 2965213 - RNA, 15 nt, Human
uauucucagcagagu

SEQ ID NO: 2965214 - RNA, 21 nt, Human
uauucucagcagagugcuuua

SEQ ID NO: 2965215 - RNA, 17 nt, Human
uauucucagcagagugc

SEQ ID NO: 2965216 - RNA, 13 nt, Human
uauugauguuuuc

SEQ ID NO: 2965217 - RNA, 14 nt, Human
uauugauguuuuca

SEQ ID NO: 2965218 - RNA, 13 nt, Human
uauuaacaaaaca

SEQ ID NO: 2965219 - RNA, 14 nt, Human
ucauuaguuuugaa

SEQ ID NO: 2965220 - RNA, 23 nt, Human
ucauuaguuuugaagauucuaug

SEQ ID NO: 2965221 - RNA, 21 nt, Human
ucaugcugccaauauccuaau

SEQ ID NO: 2965222 - RNA, 23 nt, Human
ucaugcugccaauauccuaauaa

SEQ ID NO: 2965223 - RNA, 16 nt, Human
ucauuauguuaauauu

SEQ ID NO: 2965224 - RNA, 17 nt, Human
ucauuauguuaauauuu

SEQ ID NO: 2965225 - RNA, 13 nt, Human
ucaugcugccaau

SEQ ID NO: 2965226 - RNA, 17 nt, Human
ucaugcugccaauaucc

SEQ ID NO: 2965227 - RNA, 19 nt, Human
ucaugcugccaauauccua

SEQ ID NO: 2965228 - RNA, 20 nt, Human
ucaugcugccaauauccuaa

SEQ ID NO: 2965229 - RNA, 17 nt, Human
ucacugguacucugcca

SEQ ID NO: 2965230 - RNA, 22 nt, Human
ggcuuagacccucaugcugcca

SEQ ID NO: 2965231 - RNA, 23 nt, Human
ggcuuagacccucaugcugccaa

SEQ ID NO: 2965232 - RNA, 20 nt, Human
ggcuuagacccucaugcugc

SEQ ID NO: 2965233 - RNA, 18 nt, Human
ggcuuagacccucaugcu

SEQ ID NO: 2965234 - RNA, 15 nt, Human
ggcuggaguuauuga

SEQ ID NO: 2965235 - RNA, 23 nt, Human
ggcuggaguuauugaagcagagu

SEQ ID NO: 2965236 - RNA, 19 nt, Human
ggauugaaggaugcugucu

SEQ ID NO: 2965237 - RNA, 17 nt, Human
ggcagugcuuggcccag

SEQ ID NO: 2965238 - RNA, 18 nt, Human
ggcagugcuuggcccagg

SEQ ID NO: 2965239 - RNA, 19 nt, Human
ggcagugcuuggcccagga

SEQ ID NO: 2965240 - RNA, 20 nt, Human
ggcagugcuuggcccaggag

SEQ ID NO: 2965241 - RNA, 21 nt, Human
ggcagugcuuggcccaggagu

SEQ ID NO: 2965242 - RNA, 22 nt, Human
ggcagugcuuggcccaggaguu

SEQ ID NO: 2965243 - RNA, 23 nt, Human
ggcagugcuuggcccaggaguuu

SEQ ID NO: 2965244 - RNA, 16 nt, Human
ggcagugcuuggccca

SEQ ID NO: 2965245 - RNA, 15 nt, Human
ggacauuuuaugucu

SEQ ID NO: 2965246 - RNA, 19 nt, Human
ggagaagucuucuauuuau

SEQ ID NO: 2965247 - RNA, 20 nt, Human
ggagaagucuucuauuuauu

SEQ ID NO: 2965248 - RNA, 18 nt, Human
ggagcccugucuccucuc

SEQ ID NO: 2965249 - RNA, 23 nt, Human
ggagcccugucuccucucucugu

SEQ ID NO: 2965250 - RNA, 23 nt, Human
gccuuguuuaaugguaguuuuac

SEQ ID NO: 2965251 - RNA, 15 nt, Human
gccuuguuuaauggu

SEQ ID NO: 2965252 - RNA, 14 nt, Human
gcugaccuugcuga

SEQ ID NO: 2965253 - RNA, 19 nt, Human
gcugauuuaaacacauuaa

SEQ ID NO: 2965254 - RNA, 22 nt, Human
gcuuacaugccuaccaauauuu

SEQ ID NO: 2965255 - RNA, 16 nt, Human
gcuuagacccucaugc

SEQ ID NO: 2965256 - RNA, 21 nt, Human
gcuuagacccucaugcugcca

SEQ ID NO: 2965257 - RNA, 22 nt, Human
gcagaguaggggucugucuuuu

SEQ ID NO: 2965258 - RNA, 16 nt, Human
gcaggaagcugugaga

SEQ ID NO: 2965259 - RNA, 15 nt, Human
gcacgcacacugucu

SEQ ID NO: 2965260 - RNA, 16 nt, Human
gcacgcacacugucug

SEQ ID NO: 2965261 - RNA, 21 nt, Human
gcauacuauuaaacaugcugu

SEQ ID NO: 2965262 - RNA, 17 nt, Human
gcauacuauuaaacaug

SEQ ID NO: 2965263 - RNA, 14 nt, Human
gcauacuauuaaac

SEQ ID NO: 2965264 - RNA, 13 nt, Human
gcauacuauuaaa

SEQ ID NO: 2965265 - RNA, 22 nt, Human
gcauacugccuuguuuaauggu

SEQ ID NO: 2965266 - RNA, 12 nt, Human
gccaauuugcac

SEQ ID NO: 2965267 - RNA, 14 nt, Human
gccaauauccuaau

SEQ ID NO: 2965268 - RNA, 15 nt, Human
gccaauauccuaaua

SEQ ID NO: 2965269 - RNA, 16 nt, Human
gccaauauccuaauaa

SEQ ID NO: 2965270 - RNA, 17 nt, Human
gccaauauccuaauaaa

SEQ ID NO: 2965271 - RNA, 13 nt, Human
gccaauauccuaa

SEQ ID NO: 2965272 - RNA, 18 nt, Human
gccaauauccuaauaaaa

SEQ ID NO: 2965273 - RNA, 19 nt, Human
gccaauauccuaauaaaaa

SEQ ID NO: 2965274 - RNA, 20 nt, Human
gccaauauccuaauaaaaag

SEQ ID NO: 2965275 - RNA, 22 nt, Human
gccaauauccuaauaaaaaggu

SEQ ID NO: 2965276 - RNA, 23 nt, Human
gccaauauccuaauaaaaaggug

SEQ ID NO: 2965277 - RNA, 17 nt, Human
gaguuauugaagcagag

SEQ ID NO: 2965278 - RNA, 18 nt, Human
gauugugccuaauguguu

SEQ ID NO: 2965279 - RNA, 20 nt, Human
gauucuauguuaauauuuua

SEQ ID NO: 2965280 - RNA, 17 nt, Human
gauucuauguuaauauu

SEQ ID NO: 2965281 - RNA, 15 nt, Human
gaugacuguuuuuaa

SEQ ID NO: 2965282 - RNA, 23 nt, Human
cugacgacuugagugcucaguag

SEQ ID NO: 2965283 - RNA, 17 nt, Human
cugaacaucacagcuua

SEQ ID NO: 2965284 - RNA, 22 nt, Human
cugauuuaaacacauuaaaggu

SEQ ID NO: 2965285 - RNA, 13 nt, Human
cucagcagagugc

SEQ ID NO: 2965286 - RNA, 12 nt, Human
cucagcagagug

SEQ ID NO: 2965287 - RNA, 11 nt, Human
cucagcagagu

SEQ ID NO: 2965288 - RNA, 16 nt, Human
cucagcagagugcuuu

SEQ ID NO: 2965289 - RNA, 15 nt, Human
cucaagucuggcaga

SEQ ID NO: 2965290 - RNA, 22 nt, Human
cuaugcuguucacuggacacuu

SEQ ID NO: 2965291 - RNA, 22 nt, Human
cuaugggguaaaagggguaggg

SEQ ID NO: 2965292 - RNA, 17 nt, Human
cuccaccuugcagcucu

SEQ ID NO: 2965293 - RNA, 13 nt, Human
cuccacauuuguu

SEQ ID NO: 2965294 - RNA, 15 nt, Human
cuccacauuuguuuu

SEQ ID NO: 2965295 - RNA, 14 nt, Human
cucauuucuagcag

SEQ ID NO: 2965296 - RNA, 17 nt, Human
cucauguugaaacuuua

SEQ ID NO: 2965297 - RNA, 16 nt, Human
cuuguuuaaugguagu

SEQ ID NO: 2965298 - RNA, 19 nt, Human
cuuuaaacuacauuagguu

SEQ ID NO: 2965299 - RNA, 13 nt, Human
gaaacacugguuu

SEQ ID NO: 2965300 - RNA, 22 nt, Human
gaaacacugguuuuaaauauuu

SEQ ID NO: 2965301 - RNA, 18 nt, Human
gaaguaaaauguggcagg

SEQ ID NO: 2965302 - RNA, 17 nt, Human
gaaguaaaauguggcag

SEQ ID NO: 2965303 - RNA, 20 nt, Human
gaagguagaauguuuucaaa

SEQ ID NO: 2965304 - RNA, 16 nt, Human
gaagguagaauguuuu

SEQ ID NO: 2965305 - RNA, 17 nt, Human
gaagguagaauguuuuc

SEQ ID NO: 2965306 - RNA, 15 nt, Human
gaagguagaauguuu

SEQ ID NO: 2965307 - RNA, 14 nt, Human
gaagaaaauaauua

SEQ ID NO: 2965308 - RNA, 23 nt, Human
cugggguggguggggcagugcuu

SEQ ID NO: 2965309 - RNA, 15 nt, Human
cugucuuuuaaacuc

SEQ ID NO: 2965310 - RNA, 14 nt, Human
cugucuuuuaaacu

SEQ ID NO: 2965311 - RNA, 22 nt, Human
cugugauuuuugguauuugaaa

SEQ ID NO: 2965312 - RNA, 15 nt, Human
cuguguuguacagcu

SEQ ID NO: 2965313 - RNA, 23 nt, Human
cuuagacccucaugcugccaaua

SEQ ID NO: 2965314 - RNA, 19 nt, Human
cuuagacccucaugcugcc

SEQ ID NO: 2965315 - RNA, 20 nt, Human
cuuagacccucaugcugcca

SEQ ID NO: 2965316 - RNA, 21 nt, Human
cuuagacccucaugcugccaa

SEQ ID NO: 2965317 - RNA, 22 nt, Human
cuuagacccucaugcugccaau

SEQ ID NO: 2965318 - RNA, 10 nt, Human
cuuaauuauu

SEQ ID NO: 2965319 - RNA, 16 nt, Human
cuuaauuauugauguu

SEQ ID NO: 2965320 - RNA, 20 nt, Human
cuguuuuuauuauuaacaaa

SEQ ID NO: 2965321 - RNA, 18 nt, Human
cuguuuuuauuauuaaca

SEQ ID NO: 2965322 - RNA, 14 nt, Human
cuucaagaaugcag

SEQ ID NO: 2965323 - RNA, 16 nt, Human
cuuccacuugaguguc

SEQ ID NO: 2965324 - RNA, 12 nt, Human
cccuaaucuucc

SEQ ID NO: 2965325 - RNA, 15 nt, Human
ccuccacauuuguuu

SEQ ID NO: 2965326 - RNA, 15 nt, Human
ccuguuuuuauuauu

SEQ ID NO: 2965327 - RNA, 14 nt, Human
ccuguuuuuauuau

SEQ ID NO: 2965328 - RNA, 13 nt, Human
ccuuguuuaaugg

SEQ ID NO: 2965329 - RNA, 23 nt, Human
ccuucuucccaauagcaaggcug

SEQ ID NO: 2965330 - RNA, 19 nt, Human
ccaguguuuuaggagcaug

SEQ ID NO: 2965331 - RNA, 12 nt, Human
cagugcuuggcc

SEQ ID NO: 2965332 - RNA, 21 nt, Human
cauauugcauacuauuaaaca

SEQ ID NO: 2965333 - RNA, 19 nt, Human
cauauugcauacuauuaaa

SEQ ID NO: 2965334 - RNA, 22 nt, Human
cauauugcauacuauuaaacau

SEQ ID NO: 2965335 - RNA, 17 nt, Human
cauauuuaauuugaagg

SEQ ID NO: 2965336 - RNA, 14 nt, Human
caucccuuucccuu

SEQ ID NO: 2965337 - RNA, 17 nt, Human
caucccuuucccuuggu

SEQ ID NO: 2965338 - RNA, 11 nt, Human
caucaucccuu

SEQ ID NO: 2965339 - RNA, 13 nt, Human
caugcuguacaua

SEQ ID NO: 2965340 - RNA, 21 nt, Human
caugcuguacauacuuuuugg

SEQ ID NO: 2965341 - RNA, 19 nt, Human
caugcuguacauacuuuuu

SEQ ID NO: 2965342 - RNA, 16 nt, Human
caugcuguacauacuu

SEQ ID NO: 2965343 - RNA, 14 nt, Human
cauucuuuuugaaa

SEQ ID NO: 2965344 - RNA, 16 nt, Human
cauucuuuuugaaaug

SEQ ID NO: 2965345 - RNA, 13 nt, Human
cauucuuuuugaa

SEQ ID NO: 2965346 - RNA, 13 nt, Human
cauucuuggccca

SEQ ID NO: 2965347 - RNA, 16 nt, Human
cauucuuggcccagga

SEQ ID NO: 2965348 - RNA, 18 nt, Human
caguacuaacauuuauuu

SEQ ID NO: 2965349 - RNA, 21 nt, Human
caguaaugagcuuaagaaauu

SEQ ID NO: 2965350 - RNA, 13 nt, Human
caguaacauagcu

SEQ ID NO: 2965351 - RNA, 23 nt, Human
cagucagggaaggugccucugga

SEQ ID NO: 2965352 - RNA, 19 nt, Human
cagucauuauguuaauauu

SEQ ID NO: 2965353 - RNA, 15 nt, Human
caggaguuuggccag

SEQ ID NO: 2965354 - RNA, 16 nt, Human
caggaguuuggccaga

SEQ ID NO: 2965355 - RNA, 17 nt, Human
caggaguuuggccagaa

SEQ ID NO: 2965356 - RNA, 13 nt, Human
caggaguuuggcc

SEQ ID NO: 2965357 - RNA, 14 nt, Human
caggaguuuggcca

SEQ ID NO: 2965358 - RNA, 13 nt, Human
caggcuggaguua

SEQ ID NO: 2965359 - RNA, 16 nt, Human
caggcuggaguuauug

SEQ ID NO: 2965360 - RNA, 19 nt, Human
cagcacaaggaaauaaaau

SEQ ID NO: 2965361 - RNA, 10 nt, Human
cagcagagug

SEQ ID NO: 2965362 - RNA, 9 nt, Human
cagcagagu

SEQ ID NO: 2965363 - RNA, 15 nt, Human
cagcagagugcuuua

SEQ ID NO: 2965364 - RNA, 11 nt, Human
cagcagagugc

SEQ ID NO: 2965365 - RNA, 15 nt, Human
cagcaacacaaagcu

SEQ ID NO: 2965366 - RNA, 23 nt, Human
cagcaacacaaagcuuuugcaua

SEQ ID NO: 2965367 - RNA, 13 nt, Human
cagcccucagaau

SEQ ID NO: 2965368 - RNA, 18 nt, Human
cagcccucaauugugaaa

SEQ ID NO: 2965369 - RNA, 16 nt, Human
cagcucuccccuucuc

SEQ ID NO: 2965370 - RNA, 22 nt, Human
caggaagcugugagagcaguuu

SEQ ID NO: 2965371 - RNA, 13 nt, Human
caggaagcuguga

SEQ ID NO: 2965372 - RNA, 14 nt, Human
caggaagcugugag

SEQ ID NO: 2965373 - RNA, 20 nt, Human
cagagccccacccucagaug

SEQ ID NO: 2965374 - RNA, 21 nt, Human
cagagaagauucuuguauuua

SEQ ID NO: 2965375 - RNA, 21 nt, Human
cagagugcuuuaccaauugaa

SEQ ID NO: 2965376 - RNA, 12 nt, Human
cagaguggcagu

SEQ ID NO: 2965377 - RNA, 17 nt, Human
cagaugcacaugagcug

SEQ ID NO: 2965378 - RNA, 17 nt, Human
cagaacuauguuuuugu

SEQ ID NO: 2965379 - RNA, 18 nt, Human
cagaagucaaggcuuaga

SEQ ID NO: 2965380 - RNA, 16 nt, Human
cagaagucaaggcuua

SEQ ID NO: 2965381 - RNA, 17 nt, Human
cagaagucaaggcuuag

SEQ ID NO: 2965382 - RNA, 23 nt, Human
cagaaucgcuccaccuugcagcu

SEQ ID NO: 2965383 - RNA, 21 nt, Human
cagaaucgcuccaccuugcag

SEQ ID NO: 2965384 - RNA, 20 nt, Human
cacccucagaugcacaugag

SEQ ID NO: 2965385 - RNA, 15 nt, Human
cacgcacacugucug

SEQ ID NO: 2965386 - RNA, 13 nt, Human
cacucuauaacaa

SEQ ID NO: 2965387 - RNA, 19 nt, Human
cacuucacgcccuuggcca

SEQ ID NO: 2965388 - RNA, 17 nt, Human
cacuucacgcccuuggc

SEQ ID NO: 2965389 - RNA, 21 nt, Human
cacuucacgcccuuggccaug

SEQ ID NO: 2965390 - RNA, 20 nt, Human
cacuucacgcccuuggccau

SEQ ID NO: 2965391 - RNA, 18 nt, Human
cacugguuuguucccugu

SEQ ID NO: 2965392 - RNA, 16 nt, Human
cacugguuuuaaauau

SEQ ID NO: 2965393 - RNA, 15 nt, Human
cacugguuuuaaaua

SEQ ID NO: 2965394 - RNA, 13 nt, Human
cacugguuuuaaa

SEQ ID NO: 2965395 - RNA, 12 nt, Human
cacugguuuuaa

SEQ ID NO: 2965396 - RNA, 16 nt, Human
cacuguccuauuauau

SEQ ID NO: 2965397 - RNA, 18 nt, Human
cugccaauauccuaauaa

SEQ ID NO: 2965398 - RNA, 19 nt, Human
cugccaauauccuaauaaa

SEQ ID NO: 2965399 - RNA, 20 nt, Human
cugccaauauccuaauaaaa

SEQ ID NO: 2965400 - RNA, 22 nt, Human
cugccaauauccuaauaaaaag

SEQ ID NO: 2965401 - RNA, 13 nt, Human
cugccaauauccu

SEQ ID NO: 2965402 - RNA, 14 nt, Human
cugccaauauccua

SEQ ID NO: 2965403 - RNA, 16 nt, Human
cugccaauauccuaau

SEQ ID NO: 2965404 - RNA, 17 nt, Human
cugccaauauccuaaua

SEQ ID NO: 2965405 - RNA, 22 nt, Human
cugguuuuaaauauuuugacuu

SEQ ID NO: 2965406 - RNA, 16 nt, Human
cugguuuguucccugu

SEQ ID NO: 2965407 - RNA, 15 nt, Human
cuucacgcccuuggc

SEQ ID NO: 2965408 - RNA, 17 nt, Human
cuucacgcccuuggcca

SEQ ID NO: 2965409 - RNA, 16 nt, Human
cuucaguuugcagagu

SEQ ID NO: 2965410 - RNA, 17 nt, Human
cuucaguuugcagagua

SEQ ID NO: 2965411 - RNA, 20 nt, Human
gaaaaaauuuacuuuaaacu

SEQ ID NO: 2965412 - RNA, 22 nt, Human
cuuuuaugauugccuuuuuaua

SEQ ID NO: 2965413 - RNA, 20 nt, Human
gagaagucuucuauuuauuu

SEQ ID NO: 2965414 - RNA, 21 nt, Human
gagaagucuucuauuuauuua

SEQ ID NO: 2965415 - RNA, 22 nt, Human
gacuauuuuuguuuuuauuaaa

SEQ ID NO: 2965416 - RNA, 21 nt, Human
gacuauuuuuguuuuuauuaa

SEQ ID NO: 2965417 - RNA, 18 nt, Human
gacuauuuuuguuuuuau

SEQ ID NO: 2965418 - RNA, 17 nt, Human
gacuauuuuuguuuuua

SEQ ID NO: 2965419 - RNA, 13 nt, Human
gacuauuuuuguu

SEQ ID NO: 2965420 - RNA, 15 nt, Human
gcacaucuguuuugu

SEQ ID NO: 2965421 - RNA, 21 nt, Human
gcacaugagcuggcgggauug

SEQ ID NO: 2965422 - RNA, 19 nt, Human
gcaguaaaaaaugguguuu

SEQ ID NO: 2965423 - RNA, 22 nt, Human
gcaguaaaaaaugguguuuuau

SEQ ID NO: 2965424 - RNA, 21 nt, Human
gcaguacuaacauuuauuuga

SEQ ID NO: 2965425 - RNA, 15 nt, Human
gcaguacuaacauuu

SEQ ID NO: 2965426 - RNA, 21 nt, Human
gagugcucaguagucagacug

SEQ ID NO: 2965427 - RNA, 12 nt, Human
gaguuuggccag

SEQ ID NO: 2965428 - RNA, 13 nt, Human
gaguuuggccaga

SEQ ID NO: 2965429 - RNA, 14 nt, Human
gaguuuggccagaa

SEQ ID NO: 2965430 - RNA, 16 nt, Human
gauacuuauuuaaaua

SEQ ID NO: 2965431 - RNA, 19 nt, Human
gauacuuauuuaaauagau

SEQ ID NO: 2965432 - RNA, 13 nt, Human
gauacuuauuuaa

SEQ ID NO: 2965433 - RNA, 12 nt, Human
gcugaacaucac

SEQ ID NO: 2965434 - RNA, 17 nt, Human
gcuuauuuccucauuuu

SEQ ID NO: 2965435 - RNA, 22 nt, Human
gcuuaauuauugauguuuucau

SEQ ID NO: 2965436 - RNA, 22 nt, Human
gcuguacauacuuuuuggguuu

SEQ ID NO: 2965437 - RNA, 22 nt, Human
gcuggaguuauugaagcagagu

SEQ ID NO: 2965438 - RNA, 15 nt, Human
gcccaggaguuuggc

SEQ ID NO: 2965439 - RNA, 16 nt, Human
gcccaggaguuuggcc

SEQ ID NO: 2965440 - RNA, 13 nt, Human
gcccaggaguuug

SEQ ID NO: 2965441 - RNA, 17 nt, Human
gcccaggaguuuggcca

SEQ ID NO: 2965442 - RNA, 18 nt, Human
gcccaggaguuuggccag

SEQ ID NO: 2965443 - RNA, 15 nt, Human
gccccacccucagau

SEQ ID NO: 2965444 - RNA, 18 nt, Human
gccccacccucagaugca

SEQ ID NO: 2965445 - RNA, 15 nt, Human
gguacacuugugaau

SEQ ID NO: 2965446 - RNA, 21 nt, Human
ggucuguuuuguguacuuuua

SEQ ID NO: 2965447 - RNA, 11 nt, Human
gguuuauuugg

SEQ ID NO: 2965448 - RNA, 12 nt, Human
gguuucuagcau

SEQ ID NO: 2965449 - RNA, 18 nt, Human
gguggggcagugcuuggc

SEQ ID NO: 2965450 - RNA, 22 nt, Human
aaauaaggaaugauauaagguu

SEQ ID NO: 2965451 - RNA, 16 nt, Human
aaacagucucccuucc

SEQ ID NO: 2965452 - RNA, 19 nt, Human
gggcccuuuuucaauaacu

SEQ ID NO: 2965453 - RNA, 22 nt, Human
aaaagggguaggguuuaaagau

SEQ ID NO: 2965454 - RNA, 14 nt, Human
ggaguuuggccaga

SEQ ID NO: 2965455 - RNA, 15 nt, Human
ggaguuuggccagaa

SEQ ID NO: 2965456 - RNA, 13 nt, Human
ggaguuuggccag

SEQ ID NO: 2965457 - RNA, 19 nt, Human
ggaucuguauguguucuau

SEQ ID NO: 2965458 - RNA, 18 nt, Human
ggaucuguauguguucua

SEQ ID NO: 2965459 - RNA, 11 nt, Human
ggcccaggagu

SEQ ID NO: 2965460 - RNA, 13 nt, Human
ggcccaggaguuu

SEQ ID NO: 2965461 - RNA, 18 nt, Human
ggcccaggaguuuggcca

SEQ ID NO: 2965462 - RNA, 19 nt, Human
ggcccaggaguuuggccag

SEQ ID NO: 2965463 - RNA, 20 nt, Human
ggcccaggaguuuggccaga

SEQ ID NO: 2965464 - RNA, 21 nt, Human
caguaaaaaaugguguuuuau

SEQ ID NO: 2965465 - RNA, 20 nt, Human
caguaaaaaaugguguuuua

SEQ ID NO: 2965466 - RNA, 14 nt, Human
cauuucaagaaguc

SEQ ID NO: 2965467 - RNA, 14 nt, Human
caguuugcagagua

SEQ ID NO: 2965468 - RNA, 21 nt, Human
caguuugguugguaacucugu

SEQ ID NO: 2965469 - RNA, 11 nt, Human
caguuugguug

SEQ ID NO: 2965470 - RNA, 15 nt, Human
caugcugccaauauc

SEQ ID NO: 2965471 - RNA, 17 nt, Human
caugcugccaauauccu

SEQ ID NO: 2965472 - RNA, 19 nt, Human
caugcugccaauauccuaa

SEQ ID NO: 2965473 - RNA, 21 nt, Human
caugcugccaauauccuaaua

SEQ ID NO: 2965474 - RNA, 22 nt, Human
caugcugccaauauccuaauaa

SEQ ID NO: 2965475 - RNA, 14 nt, Human
cacugguuugguuc

SEQ ID NO: 2965476 - RNA, 17 nt, Human
auugcugcuuguacacu

SEQ ID NO: 2965477 - RNA, 17 nt, Human
auuacaacucuauuuaa

SEQ ID NO: 2965478 - RNA, 13 nt, Human
auuagguugugaa

SEQ ID NO: 2965479 - RNA, 15 nt, Human
auuagguugugaaug

SEQ ID NO: 2965480 - RNA, 14 nt, Human
auuagguugugaau

SEQ ID NO: 2965481 - RNA, 15 nt, Human
auuuggaaaggaaug

SEQ ID NO: 2965482 - RNA, 18 nt, Human
auuuggaaaggaaugcaa

SEQ ID NO: 2965483 - RNA, 18 nt, Human
auuuguggaaaauaacuc

SEQ ID NO: 2965484 - RNA, 21 nt, Human
auuugccuaauaugaugacug

SEQ ID NO: 2965485 - RNA, 13 nt, Human
caaacccaguguu

SEQ ID NO: 2965486 - RNA, 24 nt, Human
ccguagacgugcacgcacacuguc

SEQ ID NO: 2965487 - RNA, 13 nt, Human
cccuucucuguau

SEQ ID NO: 2965488 - RNA, 16 nt, Human
cuagcaugaagacaga

SEQ ID NO: 2965489 - RNA, 18 nt, Human
cuauaacaaaggauacuu

SEQ ID NO: 2965490 - RNA, 22 nt, Human
cuauaacaaaggauacuuauuu

SEQ ID NO: 2965491 - RNA, 16 nt, Human
ccuuggacauuuuaug

SEQ ID NO: 2965492 - RNA, 18 nt, Human
ccuuggacauuuuauguc

SEQ ID NO: 2965493 - RNA, 21 nt, Human
ccuuggacauuuuaugucuuu

SEQ ID NO: 2965494 - RNA, 13 nt, Human
cucuauuucugga

SEQ ID NO: 2965495 - RNA, 14 nt, Human
cucaugcugccaau

SEQ ID NO: 2965496 - RNA, 22 nt, Human
cucaugcugccaauauccuaau

SEQ ID NO: 2965497 - RNA, 12 nt, Human
cucaugcugcca

SEQ ID NO: 2965498 - RNA, 22 nt, Human
cuccagucauuauguuaauauu

SEQ ID NO: 2965499 - RNA, 13 nt, Human
augaaugcccagu

SEQ ID NO: 2965500 - RNA, 21 nt, Human
augaaugcccagugagacugu

SEQ ID NO: 2965501 - RNA, 21 nt, Human
uugguugguaacucuguaauu

SEQ ID NO: 2965502 - RNA, 17 nt, Human
uugguugggaugacuug

SEQ ID NO: 2965503 - RNA, 20 nt, Human
uugguucuggacuaaaacua

SEQ ID NO: 2965504 - RNA, 18 nt, Human
uugguucuggacuaaaac

SEQ ID NO: 2965505 - RNA, 23 nt, Human
augacuuggugucuaauguguag

SEQ ID NO: 2965506 - RNA, 18 nt, Human
augacuuggugucuaaug

SEQ ID NO: 2965507 - RNA, 19 nt, Human
augacauugacuauuuuug

SEQ ID NO: 2965508 - RNA, 16 nt, Human
augacauugacuauuu

SEQ ID NO: 2965509 - RNA, 14 nt, Human
augacauucccugc

SEQ ID NO: 2965510 - RNA, 11 nt, Human
uugcacauuaa

SEQ ID NO: 2965511 - RNA, 23 nt, Human
uugcacauuaaaugacucuuccc

SEQ ID NO: 2965512 - RNA, 20 nt, Human
uugccuaauaugaugacugu

SEQ ID NO: 2965513 - RNA, 12 nt, Human
aucuguuacaca

SEQ ID NO: 2965514 - RNA, 22 nt, Human
uuuagaugaaugucaguuguua

SEQ ID NO: 2965515 - RNA, 18 nt, Human
uuuagaugaaugucaguu

SEQ ID NO: 2965516 - RNA, 18 nt, Human
augcuguacauacuuuuu

SEQ ID NO: 2965517 - RNA, 16 nt, Human
augcuguacauacuuu

SEQ ID NO: 2965518 - RNA, 15 nt, Human
augcuguacauacuu

SEQ ID NO: 2965519 - RNA, 12 nt, Human
augcuguacaua

SEQ ID NO: 2965520 - RNA, 18 nt, Human
augcaguacuaacauuua

SEQ ID NO: 2965521 - RNA, 13 nt, Human
augcagguuuuau

SEQ ID NO: 2965522 - RNA, 13 nt, Human
augauuucacagu

SEQ ID NO: 2965523 - RNA, 13 nt, Human
aucauuucaagaa

SEQ ID NO: 2965524 - RNA, 14 nt, Human
uugaaaugauuuca

SEQ ID NO: 2965525 - RNA, 14 nt, Human
uucuuuuugaaaug

SEQ ID NO: 2965526 - RNA, 15 nt, Human
uucuuuuugaaaugu

SEQ ID NO: 2965527 - RNA, 20 nt, Human
auccuagucauucuucccua

SEQ ID NO: 2965528 - RNA, 18 nt, Human
auccuaauaaaaagguga

SEQ ID NO: 2965529 - RNA, 22 nt, Human
auccuaauaaaaaggugaccau

SEQ ID NO: 2965530 - RNA, 14 nt, Human
auccuaauaaaaag

SEQ ID NO: 2965531 - RNA, 15 nt, Human
auccuaauaaaaagg

SEQ ID NO: 2965532 - RNA, 16 nt, Human
auccuaauaaaaaggu

SEQ ID NO: 2965533 - RNA, 17 nt, Human
auccuaauaaaaaggug

SEQ ID NO: 2965534 - RNA, 12 nt, Human
auccuaauaaaa

SEQ ID NO: 2965535 - RNA, 15 nt, Human
uucuuggcccaggau

SEQ ID NO: 2965536 - RNA, 13 nt, Human
uucucagcagagu

SEQ ID NO: 2965537 - RNA, 22 nt, Human
uucuaaauaucccuuggacauu

SEQ ID NO: 2965538 - RNA, 21 nt, Human
uuccuucaagaaugcaguacu

SEQ ID NO: 2965539 - RNA, 14 nt, Human
uuccuucaagaaug

SEQ ID NO: 2965540 - RNA, 16 nt, Human
auaugaugacuguuuu

SEQ ID NO: 2965541 - RNA, 13 nt, Human
uucauauuuaauu

SEQ ID NO: 2965542 - RNA, 23 nt, Human
uucaagaaguccccucuccucca

SEQ ID NO: 2965543 - RNA, 23 nt, Human
uucaagaaugcaguacuaacauu

SEQ ID NO: 2965544 - RNA, 14 nt, Human
auucucagcagagu

SEQ ID NO: 2965545 - RNA, 15 nt, Human
auucucagcagagug

SEQ ID NO: 2965546 - RNA, 16 nt, Human
auugacagauugaauu

SEQ ID NO: 2965547 - RNA, 16 nt, Human
auucucagcagagugc

SEQ ID NO: 2965548 - RNA, 18 nt, Human
auuuaaacacauuaaagg

SEQ ID NO: 2965549 - RNA, 17 nt, Human
auuuaaacacauuaaag

SEQ ID NO: 2965550 - RNA, 17 nt, Human
auucucagcagagugcu

SEQ ID NO: 2965551 - RNA, 11 nt, Human
auuauuaacaa

SEQ ID NO: 2965552 - RNA, 12 nt, Human
uuugcacauuaa

SEQ ID NO: 2965553 - RNA, 16 nt, Human
uuugcacauuaaauga

SEQ ID NO: 2965554 - RNA, 13 nt, Human
uuugcacauuaaa

SEQ ID NO: 2965555 - RNA, 10 nt, Human
uuuggccaga

SEQ ID NO: 2965556 - RNA, 12 nt, Human
uuuggccagaag

SEQ ID NO: 2965557 - RNA, 14 nt, Human
uuuggccagaaguc

SEQ ID NO: 2965558 - RNA, 23 nt, Human
augucuagaccaggaccucccuc

SEQ ID NO: 2965559 - RNA, 15 nt, Human
augucaguuguuauu

SEQ ID NO: 2965560 - RNA, 17 nt, Human
augucaguuguuauuua

SEQ ID NO: 2965561 - RNA, 17 nt, Human
uuuuaagacuuugguua

SEQ ID NO: 2965562 - RNA, 22 nt, Human
uuuuaagggcccuuuuucaaua

SEQ ID NO: 2965563 - RNA, 22 nt, Human
uuuguaacuguuuagaugaaug

SEQ ID NO: 2965564 - RNA, 23 nt, Human
uuuguaacuguuuagaugaaugu

SEQ ID NO: 2965565 - RNA, 15 nt, Human
uuuuauuauuaacaa

SEQ ID NO: 2965566 - RNA, 23 nt, Human
uuuuccaguaaugagcuuaagaa

SEQ ID NO: 2965567 - RNA, 13 nt, Human
auuaaagugccca

SEQ ID NO: 2965568 - RNA, 19 nt, Human
uuuucucacagaagaugaa

SEQ ID NO: 2965569 - RNA, 17 nt, Human
aguuuugaagauucuau

SEQ ID NO: 2965570 - RNA, 18 nt, Human
aguuuugaagauucuaug

SEQ ID NO: 2965571 - RNA, 20 nt, Human
uuaagaacuaaaauguucua

SEQ ID NO: 2965572 - RNA, 16 nt, Human
uuaagaacuaaaaugu

SEQ ID NO: 2965573 - RNA, 19 nt, Human
uuaagaacuaaaauguucu

SEQ ID NO: 2965574 - RNA, 13 nt, Human
uuaaggguaugau

SEQ ID NO: 2965575 - RNA, 14 nt, Human
uuaaacacauuaaa

SEQ ID NO: 2965576 - RNA, 19 nt, Human
uuaaacaugcuguacauac

SEQ ID NO: 2965577 - RNA, 23 nt, Human
uuaaacaugcuguacauacuuuu

SEQ ID NO: 2965578 - RNA, 22 nt, Human
uuaaacaugcuguacauacuuu

SEQ ID NO: 2965579 - RNA, 21 nt, Human
uuaaacaugcuguacauacuu

SEQ ID NO: 2965580 - RNA, 13 nt, Human
uuaaauagaugac

SEQ ID NO: 2965581 - RNA, 14 nt, Human
uuaaauagaugaca

SEQ ID NO: 2965582 - RNA, 16 nt, Human
uuaaauagaugacauu

SEQ ID NO: 2965583 - RNA, 15 nt, Human
uuacugaacaguaac

SEQ ID NO: 2965584 - RNA, 23 nt, Human
uuacugaacaguaacauagcugu

SEQ ID NO: 2965585 - RNA, 17 nt, Human
uuagguugugaaugcag

SEQ ID NO: 2965586 - RNA, 13 nt, Human
uuagguugugaau

SEQ ID NO: 2965587 - RNA, 12 nt, Human
uuagguugugaa

SEQ ID NO: 2965588 - RNA, 15 nt, Human
uguuuagaugaaugu

SEQ ID NO: 2965589 - RNA, 20 nt, Human
uguuuagaugaaugucaguu

SEQ ID NO: 2965590 - RNA, 23 nt, Human
aguucuauuuauuugugagacug

SEQ ID NO: 2965591 - RNA, 24 nt, Human
aguucaaucuggauucauauuuaa

SEQ ID NO: 2965592 - RNA, 13 nt, Human
uguuauuuauuga

SEQ ID NO: 2965593 - RNA, 15 nt, Human
uguuauuuauugaaa

SEQ ID NO: 2965594 - RNA, 17 nt, Human
uguuauuuauugaaaug

SEQ ID NO: 2965595 - RNA, 18 nt, Human
uguuauuuauugaaauga

SEQ ID NO: 2965596 - RNA, 19 nt, Human
uguuauuuauugaaaugau

SEQ ID NO: 2965597 - RNA, 15 nt, Human
aguggaguuacugaa

SEQ ID NO: 2965598 - RNA, 16 nt, Human
aguuacugaacaguaa

SEQ ID NO: 2965599 - RNA, 12 nt, Human
agugcuuggccc

SEQ ID NO: 2965600 - RNA, 14 nt, Human
agugcuuggcccag

SEQ ID NO: 2965601 - RNA, 15 nt, Human
agugcuuggcccagg

SEQ ID NO: 2965602 - RNA, 16 nt, Human
agugcuuggcccagga

SEQ ID NO: 2965603 - RNA, 18 nt, Human
agugcuuggcccaggagu

SEQ ID NO: 2965604 - RNA, 19 nt, Human
agugcuuggcccaggaguu

SEQ ID NO: 2965605 - RNA, 20 nt, Human
agugcuuggcccaggaguuu

SEQ ID NO: 2965606 - RNA, 22 nt, Human
agugcuuuaccaauugaaguaa

SEQ ID NO: 2965607 - RNA, 17 nt, Human
agguagaauguuuucaa

SEQ ID NO: 2965608 - RNA, 15 nt, Human
ugggcacaucauuuc

SEQ ID NO: 2965609 - RNA, 20 nt, Human
ugggcacaucauuucaagaa

SEQ ID NO: 2965610 - RNA, 15 nt, Human
ugucaguauuucaac

SEQ ID NO: 2965611 - RNA, 23 nt, Human
agucagacuggauaguccgucuc

SEQ ID NO: 2965612 - RNA, 22 nt, Human
uguccuaaugcuugcugcugau

SEQ ID NO: 2965613 - RNA, 23 nt, Human
uguaauuaugguuaguagaggua

SEQ ID NO: 2965614 - RNA, 21 nt, Human
aguagagguacacuugugaau

SEQ ID NO: 2965615 - RNA, 20 nt, Human
aguagagguacacuugugaa

SEQ ID NO: 2965616 - RNA, 22 nt, Human
aguagagguacacuugugaaua

SEQ ID NO: 2965617 - RNA, 14 nt, Human
aguagagguacacu

SEQ ID NO: 2965618 - RNA, 15 nt, Human
uguacuuuuaagacu

SEQ ID NO: 2965619 - RNA, 18 nt, Human
uguacuuuuaagacuuug

SEQ ID NO: 2965620 - RNA, 17 nt, Human
aggaaugcaaagaugaa

SEQ ID NO: 2965621 - RNA, 16 nt, Human
uggcaucuuacaucug

SEQ ID NO: 2965622 - RNA, 13 nt, Human
aggauacuuauuu

SEQ ID NO: 2965623 - RNA, 16 nt, Human
aggauacuuauuuaaa

SEQ ID NO: 2965624 - RNA, 15 nt, Human
aggauacuuauuuaa

SEQ ID NO: 2965625 - RNA, 18 nt, Human
ugcuugcugcugauuuaa

SEQ ID NO: 2965626 - RNA, 16 nt, Human
ugcuuguacacucauu

SEQ ID NO: 2965627 - RNA, 22 nt, Human
ugcuuguacacucauucauuac

SEQ ID NO: 2965628 - RNA, 19 nt, Human
ugcuuguacacucauucau

SEQ ID NO: 2965629 - RNA, 14 nt, Human
ugccaauauccuaa

SEQ ID NO: 2965630 - RNA, 13 nt, Human
ugccaauuugcac

SEQ ID NO: 2965631 - RNA, 15 nt, Human
ugccaauuugcacau

SEQ ID NO: 2965632 - RNA, 21 nt, Human
ugccaauuugcacauuaaaug

SEQ ID NO: 2965633 - RNA, 17 nt, Human
ugccaauuugcacauua

SEQ ID NO: 2965634 - RNA, 14 nt, Human
ugcaguacuaacau

SEQ ID NO: 2965635 - RNA, 14 nt, Human
ugcacacuguccua

SEQ ID NO: 2965636 - RNA, 21 nt, Human
ugcacacuguccuauuauauu

SEQ ID NO: 2965637 - RNA, 23 nt, Human
agcauguccuaaugcuugcugcu

SEQ ID NO: 2965638 - RNA, 21 nt, Human
ugaaaaaauuuacuuuaaacu

SEQ ID NO: 2965639 - RNA, 12 nt, Human
ucuuuuaaacuc

SEQ ID NO: 2965640 - RNA, 11 nt, Human
ucuuuuaaacu

SEQ ID NO: 2965641 - RNA, 21 nt, Human
agagcaguuugguuucuagca

SEQ ID NO: 2965642 - RNA, 23 nt, Human
agagcaguuugguuucuagcaug

SEQ ID NO: 2965643 - RNA, 12 nt, Human
agauguugcuaa

SEQ ID NO: 2965644 - RNA, 14 nt, Human
agcaagacauuaua

SEQ ID NO: 2965645 - RNA, 14 nt, Human
ugaauuugccuaau

SEQ ID NO: 2965646 - RNA, 18 nt, Human
ugaagguagaauguuuuc

SEQ ID NO: 2965647 - RNA, 19 nt, Human
ugaagguagaauguuuuca

SEQ ID NO: 2965648 - RNA, 19 nt, Human
ucuggauucauauuuaauu

SEQ ID NO: 2965649 - RNA, 16 nt, Human
ucuggauucauauuua

SEQ ID NO: 2965650 - RNA, 16 nt, Human
agaauaaaccaagaau

SEQ ID NO: 2965651 - RNA, 17 nt, Human
agaacuauguuuuuguu

SEQ ID NO: 2965652 - RNA, 12 nt, Human
ucuagcaugaag

SEQ ID NO: 2965653 - RNA, 15 nt, Human
acuguccuauuauau

SEQ ID NO: 2965654 - RNA, 16 nt, Human
acuguccuauuauauu

SEQ ID NO: 2965655 - RNA, 18 nt, Human
acuguccuauuauauuca

SEQ ID NO: 2965656 - RNA, 13 nt, Human
ucaguagucagac

SEQ ID NO: 2965657 - RNA, 15 nt, Human
ucaguuguuauuuau

SEQ ID NO: 2965658 - RNA, 20 nt, Human
ucaguuguuauuuauugaaa

SEQ ID NO: 2965659 - RNA, 14 nt, Human
ucaguuuaucuguu

SEQ ID NO: 2965660 - RNA, 16 nt, Human
ucaguuuaucuguuca

SEQ ID NO: 2965661 - RNA, 12 nt, Human
ucaguuugguug

SEQ ID NO: 2965662 - RNA, 16 nt, Human
ucaguuugcagaguag

SEQ ID NO: 2965663 - RNA, 15 nt, Human
ucaguuugcagagua

SEQ ID NO: 2965664 - RNA, 12 nt, Human
ucagcccucaga

SEQ ID NO: 2965665 - RNA, 13 nt, Human
ucagcccucagaa

SEQ ID NO: 2965666 - RNA, 13 nt, Human
acauuuuaugucu

SEQ ID NO: 2965667 - RNA, 15 nt, Human
acauuuuaugucuuu

SEQ ID NO: 2965668 - RNA, 14 nt, Human
ucacagaagaugaa

SEQ ID NO: 2965669 - RNA, 20 nt, Human
ucaauugugaaaaaauuuac

SEQ ID NO: 2965670 - RNA, 16 nt, Human
ucaauugugaaaaaau

SEQ ID NO: 2965671 - RNA, 22 nt, Human
ucacagcuuauuuccucauuuu

SEQ ID NO: 2965672 - RNA, 20 nt, Human
uauuuugacuuguugagggu

SEQ ID NO: 2965673 - RNA, 12 nt, Human
uauuuuacuuuu

SEQ ID NO: 2965674 - RNA, 14 nt, Human
uauuuugacuuguu

SEQ ID NO: 2965675 - RNA, 17 nt, Human
acgcccuuggccauggg

SEQ ID NO: 2965676 - RNA, 20 nt, Human
accugcacacuguccuauua

SEQ ID NO: 2965677 - RNA, 15 nt, Human
acucuucccucaaau

SEQ ID NO: 2965678 - RNA, 19 nt, Human
acacaaagcuuuugcauau

SEQ ID NO: 2965679 - RNA, 20 nt, Human
acacaaagcuuuugcauauu

SEQ ID NO: 2965680 - RNA, 17 nt, Human
uaguagagguacacuug

SEQ ID NO: 2965681 - RNA, 22 nt, Human
uaggggucugucuuuuaaacuc

SEQ ID NO: 2965682 - RNA, 13 nt, Human
uagagguacacuu

SEQ ID NO: 2965683 - RNA, 18 nt, Human
uagagguacacuugugaa

SEQ ID NO: 2965684 - RNA, 19 nt, Human
uagagguacacuugugaau

SEQ ID NO: 2965685 - RNA, 20 nt, Human
uaugugcacaucuguuuugu

SEQ ID NO: 2965686 - RNA, 16 nt, Human
acacucauucauuacu

SEQ ID NO: 2965687 - RNA, 14 nt, Human
uauccaaucuguga

SEQ ID NO: 2965688 - RNA, 23 nt, Human
uauccaauugcugcuuguacacu

SEQ ID NO: 2965689 - RNA, 15 nt, Human
uauccaauugcugcu

SEQ ID NO: 2965690 - RNA, 18 nt, Human
uauauagcaagacauuau

SEQ ID NO: 2965691 - RNA, 16 nt, Human
uauauagcaguaaaaa

SEQ ID NO: 2965692 - RNA, 20 nt, Human
uauauagcaagacauuauau

SEQ ID NO: 2965693 - RNA, 15 nt, Human
uauauagcaguaaaa

SEQ ID NO: 2965694 - RNA, 18 nt, Human
uauagcaguaaaaaaugg

SEQ ID NO: 2965695 - RNA, 20 nt, Human
uauagauguugcuaacagca

SEQ ID NO: 2965696 - RNA, 15 nt, Human
uauagauguugcuaa

SEQ ID NO: 2965697 - RNA, 21 nt, Human
uauagauguugcuaacagcaa

SEQ ID NO: 2965698 - RNA, 10 nt, Human
uauagauguu

SEQ ID NO: 2965699 - RNA, 23 nt, Human
uauauagcaguaaaaaauggugu

SEQ ID NO: 2965700 - RNA, 17 nt, Human
uacauuagguugugaau

SEQ ID NO: 2965701 - RNA, 22 nt, Human
aauguucacugguacucugcca

SEQ ID NO: 2965702 - RNA, 16 nt, Human
uaauuauugauguuuu

SEQ ID NO: 2965703 - RNA, 20 nt, Human
aaugcuugcugcugauuuaa

SEQ ID NO: 2965704 - RNA, 18 nt, Human
aaugcuugcugcugauuu

SEQ ID NO: 2965705 - RNA, 23 nt, Human
aaugcuugcugcugauuuaaaca

SEQ ID NO: 2965706 - RNA, 22 nt, Human
aaugcuugcugcugauuuaaac

SEQ ID NO: 2965707 - RNA, 23 nt, Human
aauauuuugacuuguugagggua

SEQ ID NO: 2965708 - RNA, 14 nt, Human
uaauaaaaagguga

SEQ ID NO: 2965709 - RNA, 15 nt, Human
uaauaaaaaggugac

SEQ ID NO: 2965710 - RNA, 12 nt, Human
uaauaaaaaggu

SEQ ID NO: 2965711 - RNA, 16 nt, Human
uaacuaucacugguuu

SEQ ID NO: 2965712 - RNA, 21 nt, Human
uaacuaucacugguuugguuc

SEQ ID NO: 2965713 - RNA, 18 nt, Human
uaacaaaggauacuuauu

SEQ ID NO: 2965714 - RNA, 17 nt, Human
uaacaaaggauacuuau

SEQ ID NO: 2965715 - RNA, 16 nt, Human
uaacaaaggauacuua

SEQ ID NO: 2965716 - RNA, 15 nt, Human
uaacaaaggauacuu

SEQ ID NO: 2965717 - RNA, 20 nt, Human
uaacaaaggauacuuauuua

SEQ ID NO: 2965718 - RNA, 19 nt, Human
uaacaaaggauacuuauuu

SEQ ID NO: 2965719 - RNA, 21 nt, Human
uaacaaaggauacuuauuuaa

SEQ ID NO: 2965720 - RNA, 21 nt, Human
aauagcaaggcugugcaucua

SEQ ID NO: 2965721 - RNA, 22 nt, Human
aauagcagcccucaauugugaa

SEQ ID NO: 2965722 - RNA, 23 nt, Human
aauagcagcccucaauugugaaa

SEQ ID NO: 2965723 - RNA, 13 nt, Human
gugucauuucaaa

SEQ ID NO: 2965724 - RNA, 18 nt, Human
aagaugaaggucuguuuu

SEQ ID NO: 2965725 - RNA, 18 nt, Human
guuauugaagcagagugg

SEQ ID NO: 2965726 - RNA, 17 nt, Human
guuauugaagcagagug

SEQ ID NO: 2965727 - RNA, 16 nt, Human
guuauugaagcagagu

SEQ ID NO: 2965728 - RNA, 13 nt, Human
aagucuucuauuu

SEQ ID NO: 2965729 - RNA, 17 nt, Human
aagucuucuauuuauuu

SEQ ID NO: 2965730 - RNA, 14 nt, Human
guugcuaacagcaa

SEQ ID NO: 2965731 - RNA, 13 nt, Human
aaggauacuuauu

SEQ ID NO: 2965732 - RNA, 16 nt, Human
aaggauacuuauuuaa

SEQ ID NO: 2965733 - RNA, 12 nt, Human
guuuaaugguag

SEQ ID NO: 2965734 - RNA, 17 nt, Human
guuuaaugguaguuuua

SEQ ID NO: 2965735 - RNA, 20 nt, Human
guuuaaugguaguuuuacag

SEQ ID NO: 2965736 - RNA, 22 nt, Human
guuuauuuggaaaggaaugcaa

SEQ ID NO: 2965737 - RNA, 18 nt, Human
aaaugguguuuuaucuuc

SEQ ID NO: 2965738 - RNA, 17 nt, Human
aaaugguguuuuaucuu

SEQ ID NO: 2965739 - RNA, 12 nt, Human
aaauuuguggaa

SEQ ID NO: 2965740 - RNA, 16 nt, Human
gucaguuguuauuuau

SEQ ID NO: 2965741 - RNA, 17 nt, Human
gucaguuguuauuuauu

SEQ ID NO: 2965742 - RNA, 18 nt, Human
gucaguuguuauuuauug

SEQ ID NO: 2965743 - RNA, 21 nt, Human
gucaguuguuauuuauugaaa

SEQ ID NO: 2965744 - RNA, 21 nt, Human
aacacaaagcuuuugcauauu

SEQ ID NO: 2965745 - RNA, 22 nt, Human
aacucugagugcaaacuucaga

SEQ ID NO: 2965746 - RNA, 20 nt, Human
aacucugagugcaaacuuca

SEQ ID NO: 2965747 - RNA, 18 nt, Human
aacucugagugcaaacuu

SEQ ID NO: 2965748 - RNA, 19 nt, Human
aacucugagugcaaacuuc

SEQ ID NO: 2965749 - RNA, 20 nt, Human
aacugggaugaggugacuau

SEQ ID NO: 2965750 - RNA, 17 nt, Human
gugcacaucuguuuugu

SEQ ID NO: 2965751 - RNA, 17 nt, Human
gucuucuauuuauuuau

SEQ ID NO: 2965752 - RNA, 12 nt, Human
gucuucuauuua

SEQ ID NO: 2965753 - RNA, 14 nt, Human
gucuucuauuuauu

SEQ ID NO: 2965754 - RNA, 12 nt, Human
aacucauuucua

SEQ ID NO: 2965755 - RNA, 20 nt, Human
aacuacauuagguugugaau

SEQ ID NO: 2965756 - RNA, 17 nt, Human
accaagaauugauuggg

SEQ ID NO: 2965757 - RNA, 17 nt, Human
acauuucucauguugaa

SEQ ID NO: 2965758 - RNA, 19 nt, Human
acaugccuaccaauauuua

SEQ ID NO: 2965759 - RNA, 18 nt, Human
acaugccuaccaauauuu

SEQ ID NO: 2965760 - RNA, 14 nt, Human
acaugccuaccaau

SEQ ID NO: 2965761 - RNA, 12 nt, Human
aaagugcccagc

SEQ ID NO: 2965762 - RNA, 18 nt, Human
aacagcaacacaaagcuu

SEQ ID NO: 2965763 - RNA, 17 nt, Human
aacagcaacacaaagcu

SEQ ID NO: 2965764 - RNA, 20 nt, Human
aacaugcuguacauacuuuu

SEQ ID NO: 2965765 - RNA, 19 nt, Human
aacaugcuguacauacuuu

SEQ ID NO: 2965766 - RNA, 18 nt, Human
aacaugcuguacauacuu

SEQ ID NO: 2965767 - RNA, 21 nt, Human
aacaugcuguacauacuuuuu

SEQ ID NO: 2965768 - RNA, 18 nt, Human
aacugaaguucuauuuau

SEQ ID NO: 2965769 - RNA, 13 nt, Human
aauauaaaaauaa

SEQ ID NO: 2965770 - RNA, 17 nt, Human
aauaaaauuuuaguuga

SEQ ID NO: 2965771 - RNA, 10 nt, Human
aagcagagug

SEQ ID NO: 2965772 - RNA, 14 nt, Human
aagcagaguggcag

SEQ ID NO: 2965773 - RNA, 11 nt, Human
aagcagagugg

SEQ ID NO: 2965774 - RNA, 20 nt, Human
aagcagaguggcagucuuca

SEQ ID NO: 2965775 - RNA, 21 nt, Human
aagauucuauguuaauauuuu

SEQ ID NO: 2965776 - RNA, 22 nt, Human
aagauucuauguuaauauuuua

SEQ ID NO: 2965777 - RNA, 15 nt, Human
aagacuuugguuauu

SEQ ID NO: 2965778 - RNA, 13 nt, Human
aagacuuugguua

SEQ ID NO: 2965779 - RNA, 23 nt, Human
aagacuuugguuauuuuacuuuu

SEQ ID NO: 2965780 - RNA, 17 nt, Human
aagacuuugguuauuuu

SEQ ID NO: 2965781 - RNA, 13 nt, Human
aacuguuuagaug

SEQ ID NO: 2965782 - RNA, 16 nt, Human
aaggaaugcaaagaug

SEQ ID NO: 2965783 - RNA, 15 nt, Human
aaggaaugcaaagau

SEQ ID NO: 2965784 - RNA, 23 nt, Human
aaggucuguuuuguguacuuuua

SEQ ID NO: 2965785 - RNA, 20 nt, Human
aaggucuguuuuguguacuu

SEQ ID NO: 2965786 - RNA, 19 nt, Human
aaggucuguuuuguguacu

SEQ ID NO: 2965787 - RNA, 21 nt, Human
aagggauuuucagcccucaga

SEQ ID NO: 2965788 - RNA, 23 nt, Human
aagggauuuucagcccucagaau

SEQ ID NO: 2965789 - RNA, 15 nt, Human
aagggauuuucagcc

SEQ ID NO: 2965790 - RNA, 17 nt, Human
agaugaaggucuguuuu

SEQ ID NO: 2965791 - RNA, 14 nt, Human
agaugaaggucugu

SEQ ID NO: 2965792 - RNA, 22 nt, Human
agauucuuguauuuauuacaac

SEQ ID NO: 2965793 - RNA, 21 nt, Human
agauucuauguuaauauuuua

SEQ ID NO: 2965794 - RNA, 16 nt, Human
agacuggauaguccgu

SEQ ID NO: 2965795 - RNA, 21 nt, Human
agaagucuucuauuuauuuau

SEQ ID NO: 2965796 - RNA, 24 nt, Human
aggcuuagacccucaugcugccaa

SEQ ID NO: 2965797 - RNA, 23 nt, Human
aggcuuagacccucaugcugcca

SEQ ID NO: 2965798 - RNA, 17 nt, Human
agggauuuucagcccuc

SEQ ID NO: 2965799 - RNA, 22 nt, Human
agggauuuucagcccucagaau

SEQ ID NO: 2965800 - RNA, 20 nt, Human
agcuuauuuccucauuuuua

SEQ ID NO: 2965801 - RNA, 14 nt, Human
augacuguuuuuaa

SEQ ID NO: 2965802 - RNA, 17 nt, Human
aucgcuccaccuugcag

SEQ ID NO: 2965803 - RNA, 21 nt, Human
aucgcuccaccuugcagcucu

SEQ ID NO: 2965804 - RNA, 21 nt, Human
augguaguuuuacaguguuuc

SEQ ID NO: 2965805 - RNA, 22 nt, Human
augguaguuuuacaguguuucu

SEQ ID NO: 2965806 - RNA, 15 nt, Human
augguaguuuuacag

SEQ ID NO: 2965807 - RNA, 16 nt, Human
aguacuaacauuuauu

SEQ ID NO: 2965808 - RNA, 17 nt, Human
auauucauucuuuuuga

SEQ ID NO: 2965809 - RNA, 21 nt, Human
auagcagcccucaauugugaa

SEQ ID NO: 2965810 - RNA, 22 nt, Human
auagcagcccucaauugugaaa

SEQ ID NO: 2965811 - RNA, 16 nt, Human
auagcauguccuaaug

SEQ ID NO: 2965812 - RNA, 19 nt, Human
auagcauguccuaaugcuu

SEQ ID NO: 2965813 - RNA, 11 nt, Human
aguuuggccag

SEQ ID NO: 2965814 - RNA, 19 nt, Human
caaggcuuagacccucaug

SEQ ID NO: 2965815 - RNA, 22 nt, Human
caaggcuuagacccucaugcug

SEQ ID NO: 2965816 - RNA, 21 nt, Human
caauauccuaauaaaaaggug

SEQ ID NO: 2965817 - RNA, 18 nt, Human
caauaacuggaacacucu

SEQ ID NO: 2965818 - RNA, 13 nt, Human
cacaaagcuuuug

SEQ ID NO: 2965819 - RNA, 16 nt, Human
cacaaagcuuuugcau

SEQ ID NO: 2965820 - RNA, 22 nt, Human
caauauccuaauaaaaagguga

SEQ ID NO: 2965821 - RNA, 18 nt, Human
uguucacuggacacuuca

SEQ ID NO: 2965822 - RNA, 14 nt, Human
uguguggucaacau

SEQ ID NO: 2965823 - RNA, 23 nt, Human
uguguggucaacauuucucaugu

SEQ ID NO: 2965824 - RNA, 22 nt, Human
uuaaacuacauuagguugugaa

SEQ ID NO: 2965825 - RNA, 23 nt, Human
uuaaacuacauuagguugugaau

SEQ ID NO: 2965826 - RNA, 20 nt, Human
uuaaauauuuugacuuguug

SEQ ID NO: 2965827 - RNA, 11 nt, Human
uuaaaugacuc

SEQ ID NO: 2965828 - RNA, 18 nt, Human
uuaaaugacucuucccuc

SEQ ID NO: 2965829 - RNA, 18 nt, Human
uguuucuggcuuagaaca

SEQ ID NO: 2965830 - RNA, 20 nt, Human
uguaauaaacucauuucuag

SEQ ID NO: 2965831 - RNA, 23 nt, Human
ugugaaggcaggggaauguaugu

SEQ ID NO: 2965832 - RNA, 17 nt, Human
ugugcacaucuguuuug

SEQ ID NO: 2965833 - RNA, 15 nt, Human
ugugcacaucuguuu

SEQ ID NO: 2965834 - RNA, 21 nt, Human
ugcuuuaccaauugaaguaaa

SEQ ID NO: 2965835 - RNA, 22 nt, Human
uggcccaggaguuuggccagaa

SEQ ID NO: 2965836 - RNA, 20 nt, Human
uggcccaggaguuuggccag

SEQ ID NO: 2965837 - RNA, 21 nt, Human
uggcccaggaguuuggccaga

SEQ ID NO: 2965838 - RNA, 14 nt, Human
uggcccaggaguuu

SEQ ID NO: 2965839 - RNA, 19 nt, Human
uggcccaggaguuuggcca

SEQ ID NO: 2965840 - RNA, 13 nt, Human
uggcccaggaguu

SEQ ID NO: 2965841 - RNA, 15 nt, Human
ugguaguuuuacagu

SEQ ID NO: 2965842 - RNA, 19 nt, Human
ugcacgcacacugucugcc

SEQ ID NO: 2965843 - RNA, 16 nt, Human
ugcucaguagucagac

SEQ ID NO: 2965844 - RNA, 14 nt, Human
ugcugauuuaaaca

SEQ ID NO: 2965845 - RNA, 17 nt, Human
ugcugauuuaaacacau

SEQ ID NO: 2965846 - RNA, 15 nt, Human
ugcugauuuaaacac

SEQ ID NO: 2965847 - RNA, 23 nt, Human
ugcuaacagcaacacaaagcuuu

SEQ ID NO: 2965848 - RNA, 22 nt, Human
ugcuaacagcaacacaaagcuu

SEQ ID NO: 2965849 - RNA, 21 nt, Human
ugcuaacagcaacacaaagcu

SEQ ID NO: 2965850 - RNA, 14 nt, Human
ucggagcccugucu

SEQ ID NO: 2965851 - RNA, 15 nt, Human
ucggagcccugucuc

SEQ ID NO: 2965852 - RNA, 14 nt, Human
ucuggacuaaaacu

SEQ ID NO: 2965853 - RNA, 20 nt, Human
ugaaacacugguuuuaaaua

SEQ ID NO: 2965854 - RNA, 15 nt, Human
ugaaacacugguuuu

SEQ ID NO: 2965855 - RNA, 18 nt, Human
ucuucaguuugcagagua

SEQ ID NO: 2965856 - RNA, 17 nt, Human
ucuucaguuugcagagu

SEQ ID NO: 2965857 - RNA, 15 nt, Human
ugacucuucccucaa

SEQ ID NO: 2965858 - RNA, 20 nt, Human
ugaaugcagguuuuaucaga

SEQ ID NO: 2965859 - RNA, 18 nt, Human
ugaaugcagguuuuauca

SEQ ID NO: 2965860 - RNA, 21 nt, Human
ugaaacacugguuuuaaauau

SEQ ID NO: 2965861 - RNA, 18 nt, Human
uacuaacauuuauuugag

SEQ ID NO: 2965862 - RNA, 17 nt, Human
uacuaacauuuauuuga

SEQ ID NO: 2965863 - RNA, 19 nt, Human
uacaugccuaccaauauuu

SEQ ID NO: 2965864 - RNA, 16 nt, Human
uacaugccuaccaaua

SEQ ID NO: 2965865 - RNA, 18 nt, Human
uaauuccuguuuuuauua

SEQ ID NO: 2965866 - RNA, 19 nt, Human
uagaauguuuucaaauguu

SEQ ID NO: 2965867 - RNA, 18 nt, Human
uagaauguuuucaaaugu

SEQ ID NO: 2965868 - RNA, 12 nt, Human
uacuuuaaacua

SEQ ID NO: 2965869 - RNA, 23 nt, Human
uagacccucaugcugccaauauc

SEQ ID NO: 2965870 - RNA, 19 nt, Human
uagacccucaugcugccaa

SEQ ID NO: 2965871 - RNA, 17 nt, Human
uagacccucaugcugcc

SEQ ID NO: 2965872 - RNA, 18 nt, Human
uagacccucaugcugcca

SEQ ID NO: 2965873 - RNA, 16 nt, Human
uagcaugaagacagag

SEQ ID NO: 2965874 - RNA, 21 nt, Human
uagcagcccucaauugugaaa

SEQ ID NO: 2965875 - RNA, 21 nt, Human
uaguagagguacacuugugaa

SEQ ID NO: 2965876 - RNA, 20 nt, Human
uaguagagguacacuuguga

SEQ ID NO: 2965877 - RNA, 22 nt, Human
uaguagagguacacuugugaau

SEQ ID NO: 2965878 - RNA, 10 nt, Human
uaacuggaac

SEQ ID NO: 2965879 - RNA, 14 nt, Human
uaacuuuuuauauu

SEQ ID NO: 2965880 - RNA, 13 nt, Human
uaacuuuuuauau

SEQ ID NO: 2965881 - RNA, 16 nt, Human
uaacuuuuuauauucu

SEQ ID NO: 2965882 - RNA, 15 nt, Human
uaacuuuuuauauuc

SEQ ID NO: 2965883 - RNA, 18 nt, Human
uaacucaccuggcaucuu

SEQ ID NO: 2965884 - RNA, 15 nt, Human
uaauauggaucugua

SEQ ID NO: 2965885 - RNA, 15 nt, Human
uaauaugaugacugu

SEQ ID NO: 2965886 - RNA, 19 nt, Human
uaaugcuugcugcugauuu

SEQ ID NO: 2965887 - RNA, 16 nt, Human
uaaugguaguuuuaca

SEQ ID NO: 2965888 - RNA, 22 nt, Human
uaaacaugcuguacauacuuuu

SEQ ID NO: 2965889 - RNA, 21 nt, Human
uaaacaugcuguacauacuuu

SEQ ID NO: 2965890 - RNA, 23 nt, Human
uaaacaugcuguacauacuuuuu

SEQ ID NO: 2965891 - RNA, 22 nt, Human
uaaacacauuaaagguacuuug

SEQ ID NO: 2965892 - RNA, 19 nt, Human
uaaacaugcuguacauacu

SEQ ID NO: 2965893 - RNA, 20 nt, Human
uaaacaugcuguacauacuu

SEQ ID NO: 2965894 - RNA, 18 nt, Human
uaaaaggaagcuuacaug

SEQ ID NO: 2965895 - RNA, 21 nt, Human
uaaaaggaagcuuacaugccu

SEQ ID NO: 2965896 - RNA, 14 nt, Human
guggggcagugcuu

SEQ ID NO: 2965897 - RNA, 23 nt, Human
guggggcagugcuuggcccagga

SEQ ID NO: 2965898 - RNA, 14 nt, Human
gugugcguccuguc

SEQ ID NO: 2965899 - RNA, 16 nt, Human
gugugcguccugucgg

SEQ ID NO: 2965900 - RNA, 24 nt, Human
guucacuggacacuucacgcccuu

SEQ ID NO: 2965901 - RNA, 23 nt, Human
guucaaucuggauucauauuuaa

SEQ ID NO: 2965902 - RNA, 24 nt, Human
guuaguucaaucuggauucauauu

SEQ ID NO: 2965903 - RNA, 17 nt, Human
gucugucuuuuaaacuc

SEQ ID NO: 2965904 - RNA, 14 nt, Human
gucuguuuugugua

SEQ ID NO: 2965905 - RNA, 15 nt, Human
gucuguuuuguguac

SEQ ID NO: 2965906 - RNA, 20 nt, Human
gucuguuuuguguacuuuua

SEQ ID NO: 2965907 - RNA, 12 nt, Human
gucggagcccug

SEQ ID NO: 2965908 - RNA, 16 nt, Human
gucggagcccugucuc

SEQ ID NO: 2965909 - RNA, 13 nt, Human
gugcguccugucg

SEQ ID NO: 2965910 - RNA, 15 nt, Human
guauagauguugcua

SEQ ID NO: 2965911 - RNA, 16 nt, Human
guauagauguugcuaa

SEQ ID NO: 2965912 - RNA, 20 nt, Human
guauguuuuauauagcaaga

SEQ ID NO: 2965913 - RNA, 16 nt, Human
gucaaggcuuagaccc

SEQ ID NO: 2965914 - RNA, 18 nt, Human
gucaaggcuuagacccuc

SEQ ID NO: 2965915 - RNA, 20 nt, Human
gucaaggcuuagacccucau

SEQ ID NO: 2965916 - RNA, 22 nt, Human
guauuuucuccaaauguucacu

SEQ ID NO: 2965917 - RNA, 14 nt, Human
gucauucuucccua

SEQ ID NO: 2965918 - RNA, 17 nt, Human
gucauuauguuaauauu

SEQ ID NO: 2965919 - RNA, 19 nt, Human
gucauuauguuaauauuuc

SEQ ID NO: 2965920 - RNA, 13 nt, Human
uuuuccuucaaga

SEQ ID NO: 2965921 - RNA, 21 nt, Human
uuuuccuucaagaaugcagua

SEQ ID NO: 2965922 - RNA, 14 nt, Human
uuuuccuucaagaa

SEQ ID NO: 2965923 - RNA, 16 nt, Human
uuuugguauuugaaac

SEQ ID NO: 2965924 - RNA, 14 nt, Human
uuuugguauuugaa

SEQ ID NO: 2965925 - RNA, 18 nt, Human
uuuuggguuuauuuggaa

SEQ ID NO: 2965926 - RNA, 17 nt, Human
uuuuggguuuauuugga

SEQ ID NO: 2965927 - RNA, 20 nt, Human
uuuuuaagggcccuuuuuca

SEQ ID NO: 2965928 - RNA, 21 nt, Human
uuuuuccuucaagaaugcagu

SEQ ID NO: 2965929 - RNA, 23 nt, Human
uuaccaauugaaguaaaaugugg

SEQ ID NO: 2965930 - RNA, 18 nt, Human
uuuccucauuuuuauaau

SEQ ID NO: 2965931 - RNA, 22 nt, Human
uuaccaauugaaguaaaaugug

SEQ ID NO: 2965932 - RNA, 16 nt, Human
uuugaagauucuaugu

SEQ ID NO: 2965933 - RNA, 14 nt, Human
uuuggaaaagaaua

SEQ ID NO: 2965934 - RNA, 20 nt, Human
uuugcauauugcauacuauu

SEQ ID NO: 2965935 - RNA, 15 nt, Human
uuugcauauugcaua

SEQ ID NO: 2965936 - RNA, 13 nt, Human
uuugguuucuagc

SEQ ID NO: 2965937 - RNA, 12 nt, Human
uuuguucccugu

SEQ ID NO: 2965938 - RNA, 19 nt, Human
uuuuaauauggaucuguau

SEQ ID NO: 2965939 - RNA, 22 nt, Human
gccgugugugugcguccugucg

SEQ ID NO: 2965940 - RNA, 23 nt, Human
gccguggugauuuagcaggaagc

SEQ ID NO: 2965941 - RNA, 16 nt, Human
gcccuuggccaugggu

SEQ ID NO: 2965942 - RNA, 13 nt, Human
gcuacacaccuaa

SEQ ID NO: 2965943 - RNA, 19 nt, Human
gcagcccucaauugugaaa

SEQ ID NO: 2965944 - RNA, 17 nt, Human
gcacugguuuguucccu

SEQ ID NO: 2965945 - RNA, 19 nt, Human
gcacugguuuguucccugu

SEQ ID NO: 2965946 - RNA, 18 nt, Human
gcagugcuuggcccagga

SEQ ID NO: 2965947 - RNA, 19 nt, Human
gcagugcuuggcccaggag

SEQ ID NO: 2965948 - RNA, 20 nt, Human
gcagugcuuggcccaggagu

SEQ ID NO: 2965949 - RNA, 12 nt, Human
gauucauauuua

SEQ ID NO: 2965950 - RNA, 11 nt, Human
gauuuucagcc

SEQ ID NO: 2965951 - RNA, 15 nt, Human
gauuuucagcccuca

SEQ ID NO: 2965952 - RNA, 19 nt, Human
gauuuucagcccucagaau

SEQ ID NO: 2965953 - RNA, 15 nt, Human
gaugacauucccugc

SEQ ID NO: 2965954 - RNA, 23 nt, Human
gaugacauugacuauuuuuguuu

SEQ ID NO: 2965955 - RNA, 21 nt, Human
gaugacauugacuauuuuugu

SEQ ID NO: 2965956 - RNA, 17 nt, Human
gaugacauugacuauuu

SEQ ID NO: 2965957 - RNA, 17 nt, Human
gaugacauucccugcua

SEQ ID NO: 2965958 - RNA, 15 nt, Human
gaugaaggucuguuu

SEQ ID NO: 2965959 - RNA, 18 nt, Human
gaugaaggucuguuuugu

SEQ ID NO: 2965960 - RNA, 13 nt, Human
gaagucuucuauu

SEQ ID NO: 2965961 - RNA, 17 nt, Human
gaagucuucuauuuauu

SEQ ID NO: 2965962 - RNA, 17 nt, Human
cuugcugcugauuuaaa

SEQ ID NO: 2965963 - RNA, 19 nt, Human
cuugcugcugauuuaaaca

SEQ ID NO: 2965964 - RNA, 17 nt, Human
cuuggacauuuuauguc

SEQ ID NO: 2965965 - RNA, 18 nt, Human
cuuggacauuuuaugucu

SEQ ID NO: 2965966 - RNA, 16 nt, Human
cuuggacauuuuaugu

SEQ ID NO: 2965967 - RNA, 19 nt, Human
cuuggacauuuuaugucuu

SEQ ID NO: 2965968 - RNA, 16 nt, Human
cuugagugcucaguag

SEQ ID NO: 2965969 - RNA, 22 nt, Human
cuugagugucaagcugaccuug

SEQ ID NO: 2965970 - RNA, 17 nt, Human
cuuucccuuggugcccu

SEQ ID NO: 2965971 - RNA, 12 nt, Human
cuuucccuuggu

SEQ ID NO: 2965972 - RNA, 11 nt, Human
cuuuuaaacuc

SEQ ID NO: 2965973 - RNA, 17 nt, Human
cuuuuaagacuuugguu

SEQ ID NO: 2965974 - RNA, 23 nt, Human
cuuuugcauauugcauacuauua

SEQ ID NO: 2965975 - RNA, 15 nt, Human
cuuuugcauauugca

SEQ ID NO: 2965976 - RNA, 22 nt, Human
cuuuuuauauucucagcagagu

SEQ ID NO: 2965977 - RNA, 16 nt, Human
cuuuuuauaacuuuuu

SEQ ID NO: 2965978 - RNA, 18 nt, Human
cuuuuuauauucucagca

SEQ ID NO: 2965979 - RNA, 12 nt, Human
cuuuuuauaacu

SEQ ID NO: 2965980 - RNA, 20 nt, Human
gaaaggaaugcaaagaugaa

SEQ ID NO: 2965981 - RNA, 16 nt, Human
gaaacugacacaugcu

SEQ ID NO: 2965982 - RNA, 22 nt, Human
gaacaguaacauagcugugauu

SEQ ID NO: 2965983 - RNA, 21 nt, Human
gaacacucuauaacaaaggau

SEQ ID NO: 2965984 - RNA, 15 nt, Human
gaacacucuauaaca

SEQ ID NO: 2965985 - RNA, 18 nt, Human
gaaguccccucuccucca

SEQ ID NO: 2965986 - RNA, 23 nt, Human
gaaguccccucuccuccacauuu

SEQ ID NO: 2965987 - RNA, 18 nt, Human
gaagucaaggcuuagacc

SEQ ID NO: 2965988 - RNA, 19 nt, Human
gaaggucuguuuuguguac

SEQ ID NO: 2965989 - RNA, 14 nt, Human
gaaggaugcugucu

SEQ ID NO: 2965990 - RNA, 20 nt, Human
gaagauucuuguauuuauua

SEQ ID NO: 2965991 - RNA, 21 nt, Human
cuguaaguuacaugaaggcag

SEQ ID NO: 2965992 - RNA, 16 nt, Human
cuguacauacuuuuug

SEQ ID NO: 2965993 - RNA, 15 nt, Human
cuguacauacuuuuu

SEQ ID NO: 2965994 - RNA, 17 nt, Human
cugucuccucucucugu

SEQ ID NO: 2965995 - RNA, 20 nt, Human
cugucuccucucucuguaau

SEQ ID NO: 2965996 - RNA, 15 nt, Human
cuguccuauuauauu

SEQ ID NO: 2965997 - RNA, 21 nt, Human
cuguccuauuauauucauucu

SEQ ID NO: 2965998 - RNA, 20 nt, Human
cugggaaagggauuuucagc

SEQ ID NO: 2965999 - RNA, 20 nt, Human
cugcaguuuuuuuccuucaa

SEQ ID NO: 2966000 - RNA, 22 nt, Human
cugcaguuuuuuuccuucaaga

SEQ ID NO: 2966001 - RNA, 23 nt, Human
cugcaguuuuuuuccuucaagaa

SEQ ID NO: 2966002 - RNA, 16 nt, Human
cugaaauaaggaauga

SEQ ID NO: 2966003 - RNA, 13 nt, Human
cuccuccacauuu

SEQ ID NO: 2966004 - RNA, 22 nt, Human
cgccagcucaccccaucauccc

SEQ ID NO: 2966005 - RNA, 18 nt, Human
cgugcacgcacacugucu

SEQ ID NO: 2966006 - RNA, 13 nt, Human
cuaaaauguucua

SEQ ID NO: 2966007 - RNA, 18 nt, Human
cuacacaccuaacuuaug

SEQ ID NO: 2966008 - RNA, 14 nt, Human
cccucaugcugcca

SEQ ID NO: 2966009 - RNA, 17 nt, Human
cccucaugcugccaaua

SEQ ID NO: 2966010 - RNA, 16 nt, Human
ccucccccuggcacug

SEQ ID NO: 2966011 - RNA, 14 nt, Human
ccucuccuccacau

SEQ ID NO: 2966012 - RNA, 20 nt, Human
ccucagaugcacaugagcug

SEQ ID NO: 2966013 - RNA, 15 nt, Human
cccuuggacauuuua

SEQ ID NO: 2966014 - RNA, 14 nt, Human
cccuuggacauuuu

SEQ ID NO: 2966015 - RNA, 16 nt, Human
cccaguguuuuaggag

SEQ ID NO: 2966016 - RNA, 17 nt, Human
cccaguguuuuaggagc

SEQ ID NO: 2966017 - RNA, 22 nt, Human
cauugacuauuuuuguuuuuau

SEQ ID NO: 2966018 - RNA, 14 nt, Human
cauugacagauuga

SEQ ID NO: 2966019 - RNA, 16 nt, Human
cauuucucauguugaa

SEQ ID NO: 2966020 - RNA, 17 nt, Human
cauuucucauguugaaa

SEQ ID NO: 2966021 - RNA, 20 nt, Human
ccaauuugcacauuaaauga

SEQ ID NO: 2966022 - RNA, 19 nt, Human
ccaauuugcacauuaaaug

SEQ ID NO: 2966023 - RNA, 21 nt, Human
ccaauauuuaaucuuuuauga

SEQ ID NO: 2966024 - RNA, 17 nt, Human
cauuaaagguacuuugc

SEQ ID NO: 2966025 - RNA, 18 nt, Human
cauuaaaugacucuuccc

SEQ ID NO: 2966026 - RNA, 14 nt, Human
cauuaaaugacucu

SEQ ID NO: 2966027 - RNA, 13 nt, Human
cauuaaaugacuc

SEQ ID NO: 2966028 - RNA, 17 nt, Human
caugccuaccaauauuu

SEQ ID NO: 2966029 - RNA, 18 nt, Human
cauacuuuuuggguuuau

SEQ ID NO: 2966030 - RNA, 16 nt, Human
cauacuuuuuggguuu

SEQ ID NO: 2966031 - RNA, 12 nt, Human
cauacuuuuugg

SEQ ID NO: 2966032 - RNA, 18 nt, Human
cauacuauuaaacaugcu

SEQ ID NO: 2966033 - RNA, 14 nt, Human
caucauuucaagaa

SEQ ID NO: 2966034 - RNA, 12 nt, Human
caucauuucaag

SEQ ID NO: 2966035 - RNA, 14 nt, Human
cauacuauuaaaca

SEQ ID NO: 2966036 - RNA, 18 nt, Human
caguuggguuuuuuaagg

SEQ ID NO: 2966037 - RNA, 16 nt, Human
caguuggguuuuuuaa

SEQ ID NO: 2966038 - RNA, 11 nt, Human
caguuggguuu

SEQ ID NO: 2966039 - RNA, 19 nt, Human
caguuuuuuuccuucaaga

SEQ ID NO: 2966040 - RNA, 22 nt, Human
cauaagugcuauugcagagccg

SEQ ID NO: 2966041 - RNA, 18 nt, Human
cauaagugcuauugcaga

SEQ ID NO: 2966042 - RNA, 20 nt, Human
caguguuuuaggagcaugag

SEQ ID NO: 2966043 - RNA, 16 nt, Human
caguguuuuaggagca

SEQ ID NO: 2966044 - RNA, 13 nt, Human
cagugcuuggccc

SEQ ID NO: 2966045 - RNA, 14 nt, Human
cagugcuuggccca

SEQ ID NO: 2966046 - RNA, 15 nt, Human
cagugcuuggcccag

SEQ ID NO: 2966047 - RNA, 16 nt, Human
cagugcuuggcccagg

SEQ ID NO: 2966048 - RNA, 17 nt, Human
cagugcuuggcccagga

SEQ ID NO: 2966049 - RNA, 18 nt, Human
cagugcuuggcccaggag

SEQ ID NO: 2966050 - RNA, 19 nt, Human
cagugcuuggcccaggagu

SEQ ID NO: 2966051 - RNA, 20 nt, Human
cagugcuuggcccaggaguu

SEQ ID NO: 2966052 - RNA, 17 nt, Human
caguguguggucaacau

SEQ ID NO: 2966053 - RNA, 21 nt, Human
caguguguggucaacauuucu

SEQ ID NO: 2966054 - RNA, 16 nt, Human
caccaugggauuaaua

SEQ ID NO: 2966055 - RNA, 12 nt, Human
caauauccuaau

SEQ ID NO: 2966056 - RNA, 13 nt, Human
caauauccuaaua

SEQ ID NO: 2966057 - RNA, 14 nt, Human
caauauccuaauaa

SEQ ID NO: 2966058 - RNA, 15 nt, Human
caauauccuaauaaa

SEQ ID NO: 2966059 - RNA, 16 nt, Human
caauauccuaauaaaa

SEQ ID NO: 2966060 - RNA, 18 nt, Human
caauauccuaauaaaaag

SEQ ID NO: 2966061 - RNA, 19 nt, Human
caauauccuaauaaaaagg

SEQ ID NO: 2966062 - RNA, 20 nt, Human
caauauccuaauaaaaaggu

SEQ ID NO: 2966063 - RNA, 23 nt, Human
caacugggguggguggggcagug

SEQ ID NO: 2966064 - RNA, 17 nt, Human
caacauaacucaagucu

SEQ ID NO: 2966065 - RNA, 18 nt, Human
agauucuauguuaauauu

SEQ ID NO: 2966066 - RNA, 11 nt, Human
agaugaauguc

SEQ ID NO: 2966067 - RNA, 15 nt, Human
agaugaaugucaguu

SEQ ID NO: 2966068 - RNA, 18 nt, Human
agaugacauugacuauuu

SEQ ID NO: 2966069 - RNA, 23 nt, Human
agaugacauugacuauuuuuguu

SEQ ID NO: 2966070 - RNA, 13 nt, Human
agcaaaucaguuu

SEQ ID NO: 2966071 - RNA, 23 nt, Human
agaaugcaguacuaacauuuauu

SEQ ID NO: 2966072 - RNA, 16 nt, Human
agaagucaaggcuuag

SEQ ID NO: 2966073 - RNA, 17 nt, Human
agaagucaaggcuuaga

SEQ ID NO: 2966074 - RNA, 18 nt, Human
agaagucaaggcuuagac

SEQ ID NO: 2966075 - RNA, 19 nt, Human
agaagucaaggcuuagacc

SEQ ID NO: 2966076 - RNA, 18 nt, Human
agaagucuucuauuuauu

SEQ ID NO: 2966077 - RNA, 22 nt, Human
aggcuuagacccucaugcugcc

SEQ ID NO: 2966078 - RNA, 14 nt, Human
aggcuuagacccuc

SEQ ID NO: 2966079 - RNA, 21 nt, Human
aggcuuagacccucaugcugc

SEQ ID NO: 2966080 - RNA, 12 nt, Human
aggcuuagaccc

SEQ ID NO: 2966081 - RNA, 18 nt, Human
auggauaaauauugguug

SEQ ID NO: 2966082 - RNA, 14 nt, Human
augagcuuaagaaa

SEQ ID NO: 2966083 - RNA, 23 nt, Human
augagcuuaagaaauuuguggaa

SEQ ID NO: 2966084 - RNA, 16 nt, Human
auagcaagacauuaua

SEQ ID NO: 2966085 - RNA, 19 nt, Human
aucaucccuuucccuuggu

SEQ ID NO: 2966086 - RNA, 15 nt, Human
aucaucccuuucccu

SEQ ID NO: 2966087 - RNA, 18 nt, Human
agugauguaauuaugguu

SEQ ID NO: 2966088 - RNA, 22 nt, Human
agugcuacacaccuaacuuaug

SEQ ID NO: 2966089 - RNA, 22 nt, Human
agucuggcagacuuucuucucu

SEQ ID NO: 2966090 - RNA, 21 nt, Human
auaagugcuauugcagagccg

SEQ ID NO: 2966091 - RNA, 14 nt, Human
agugcuauugcaga

SEQ ID NO: 2966092 - RNA, 17 nt, Human
aguuguuauuuauugaa

SEQ ID NO: 2966093 - RNA, 13 nt, Human
aguuugcagagua

SEQ ID NO: 2966094 - RNA, 14 nt, Human
acgcacacugucug

SEQ ID NO: 2966095 - RNA, 20 nt, Human
acccucagaugcacaugagc

SEQ ID NO: 2966096 - RNA, 14 nt, Human
acccucaugcugcc

SEQ ID NO: 2966097 - RNA, 16 nt, Human
acccucaugcugccaa

SEQ ID NO: 2966098 - RNA, 22 nt, Human
acccucaugcugccaauauccu

SEQ ID NO: 2966099 - RNA, 13 nt, Human
acugacacaugcu

SEQ ID NO: 2966100 - RNA, 19 nt, Human
acuggaacacucuauaaca

SEQ ID NO: 2966101 - RNA, 14 nt, Human
acaucauuucaaga

SEQ ID NO: 2966102 - RNA, 20 nt, Human
aauuaugguuaguagaggua

SEQ ID NO: 2966103 - RNA, 13 nt, Human
aauuccuguuuuu

SEQ ID NO: 2966104 - RNA, 22 nt, Human
aauuccuguuuuuauuauuaac

SEQ ID NO: 2966105 - RNA, 21 nt, Human
aauuccuguuuuuauuauuaa

SEQ ID NO: 2966106 - RNA, 19 nt, Human
aauuccuguuuuuauuauu

SEQ ID NO: 2966107 - RNA, 18 nt, Human
aaggcaggggaauguaug

SEQ ID NO: 2966108 - RNA, 20 nt, Human
aaggcaggggaauguaugug

SEQ ID NO: 2966109 - RNA, 22 nt, Human
aagacagagccccacccucaga

SEQ ID NO: 2966110 - RNA, 14 nt, Human
aaauagaugacauu

SEQ ID NO: 2966111 - RNA, 21 nt, Human
aaauagaugacauugacuauu

SEQ ID NO: 2966112 - RNA, 22 nt, Human
aaauagcagcccucaauuguga

SEQ ID NO: 2966113 - RNA, 15 nt, Human
auuuaaauagaugac

SEQ ID NO: 2966114 - RNA, 14 nt, Human
auuuaaauagauga

SEQ ID NO: 2966115 - RNA, 15 nt, Human
auuuacuuuaaacua

SEQ ID NO: 2966116 - RNA, 12 nt, Human
auuuauuacaac

SEQ ID NO: 2966117 - RNA, 13 nt, Human
auuuauugaaaug

SEQ ID NO: 2966118 - RNA, 15 nt, Human
auuuauugaaaugau

SEQ ID NO: 2966119 - RNA, 22 nt, Human
auuuauugaaaugauuucacag

SEQ ID NO: 2966120 - RNA, 17 nt, Human
auugcaccuggauguac

SEQ ID NO: 2966121 - RNA, 17 nt, Human
auugcauacuauuaaac

SEQ ID NO: 2966122 - RNA, 18 nt, Human
auugcauacuauuaaaca

SEQ ID NO: 2966123 - RNA, 13 nt, Human
auugauguuuuca

SEQ ID NO: 2966124 - RNA, 16 nt, Human
auugauguuuucauag

SEQ ID NO: 2966125 - RNA, 17 nt, Human
auugauguuuucauaga

SEQ ID NO: 2966126 - RNA, 14 nt, Human
auugaaguaaaaug

SEQ ID NO: 2966127 - RNA, 17 nt, Human
auugaaggaugcugucu

SEQ ID NO: 2966128 - RNA, 24 nt, Human
auuccuagaaacugacacaugcug

SEQ ID NO: 2966129 - RNA, 15 nt, Human
auugaaguaaaaugu

SEQ ID NO: 2966130 - RNA, 21 nt, Human
auugccuuuuuauaacuuuuu

SEQ ID NO: 2966131 - RNA, 20 nt, Human
auugccuuuuuauaacuuuu

SEQ ID NO: 2966132 - RNA, 19 nt, Human
auugccuuuuuauaacuuu

SEQ ID NO: 2966133 - RNA, 20 nt, Human
auugcauacuauuaaacaug

SEQ ID NO: 2966134 - RNA, 19 nt, Human
auugcauacuauuaaacau

SEQ ID NO: 2966135 - RNA, 22 nt, Human
auugcauacuauuaaacaugcu

SEQ ID NO: 2966136 - RNA, 14 nt, Human
auguugcuaacagc

SEQ ID NO: 2966137 - RNA, 17 nt, Human
uuuguuuuuauuaaaag

SEQ ID NO: 2966138 - RNA, 23 nt, Human
uuugagaaauuuuuuuuuccagu

SEQ ID NO: 2966139 - RNA, 21 nt, Human
auuccuaacuaucacugguuu

SEQ ID NO: 2966140 - RNA, 21 nt, Human
auuaguuuugaagauucuaug

SEQ ID NO: 2966141 - RNA, 17 nt, Human
auuauugauguuuucau

SEQ ID NO: 2966142 - RNA, 15 nt, Human
uuuuugguauuugaa

SEQ ID NO: 2966143 - RNA, 18 nt, Human
uuuuuggaaaagaauaaa

SEQ ID NO: 2966144 - RNA, 12 nt, Human
uuuuguguacuu

SEQ ID NO: 2966145 - RNA, 14 nt, Human
uuuuggaaaagaau

SEQ ID NO: 2966146 - RNA, 22 nt, Human
uuuuuauauucucagcagagug

SEQ ID NO: 2966147 - RNA, 21 nt, Human
uuuuuauauucucagcagagu

SEQ ID NO: 2966148 - RNA, 20 nt, Human
uuuuguuuuuauuaaaagga

SEQ ID NO: 2966149 - RNA, 16 nt, Human
uuuaagacuuugguua

SEQ ID NO: 2966150 - RNA, 15 nt, Human
uuuaaucuuuuauga

SEQ ID NO: 2966151 - RNA, 21 nt, Human
uuuaagggcccuuuuucaaua

SEQ ID NO: 2966152 - RNA, 20 nt, Human
uuuaagggcccuuuuucaau

SEQ ID NO: 2966153 - RNA, 18 nt, Human
uuuaagggcccuuuuuca

SEQ ID NO: 2966154 - RNA, 20 nt, Human
augcaaagaugaaggucugu

SEQ ID NO: 2966155 - RNA, 16 nt, Human
uuguguacuuuuaaga

SEQ ID NO: 2966156 - RNA, 22 nt, Human
uugugaaugcagguuuuaucag

SEQ ID NO: 2966157 - RNA, 18 nt, Human
uuuaucagaacuauguuu

SEQ ID NO: 2966158 - RNA, 15 nt, Human
augcccagugagacu

SEQ ID NO: 2966159 - RNA, 16 nt, Human
augcccagugagacug

SEQ ID NO: 2966160 - RNA, 18 nt, Human
uuuaaucuuuuaugauug

SEQ ID NO: 2966161 - RNA, 17 nt, Human
uuuaucagaacuauguu

SEQ ID NO: 2966162 - RNA, 16 nt, Human
uuuaucagaacuaugu

SEQ ID NO: 2966163 - RNA, 23 nt, Human
uugccaauuugcacauuaaauga

SEQ ID NO: 2966164 - RNA, 22 nt, Human
uugccaauuugcacauuaaaug

SEQ ID NO: 2966165 - RNA, 19 nt, Human
uugccaauuugcacauuaa

SEQ ID NO: 2966166 - RNA, 16 nt, Human
aucccuuucccuuggu

SEQ ID NO: 2966167 - RNA, 20 nt, Human
aucccuuggacauuuuaugu

SEQ ID NO: 2966168 - RNA, 21 nt, Human
aucccuuggacauuuuauguc

SEQ ID NO: 2966169 - RNA, 17 nt, Human
aucccuuggacauuuua

SEQ ID NO: 2966170 - RNA, 19 nt, Human
aucccuuggacauuuuaug

SEQ ID NO: 2966171 - RNA, 14 nt, Human
uugagugucaagcu

SEQ ID NO: 2966172 - RNA, 19 nt, Human
aucugugaugacauucccu

SEQ ID NO: 2966173 - RNA, 21 nt, Human
aucugugaugacauucccugc

SEQ ID NO: 2966174 - RNA, 13 nt, Human
uuggcccaggagu

SEQ ID NO: 2966175 - RNA, 14 nt, Human
uuggcccaggaguu

SEQ ID NO: 2966176 - RNA, 15 nt, Human
uuggcccaggaguuu

SEQ ID NO: 2966177 - RNA, 20 nt, Human
uuggcccaggaguuuggcca

SEQ ID NO: 2966178 - RNA, 21 nt, Human
uuggcccaggaguuuggccag

SEQ ID NO: 2966179 - RNA, 22 nt, Human
uuggcccaggaguuuggccaga

SEQ ID NO: 2966180 - RNA, 20 nt, Human
uuggcccaggauuauuguca

SEQ ID NO: 2966181 - RNA, 13 nt, Human
auauaagguuuuu

SEQ ID NO: 2966182 - RNA, 15 nt, Human
uucagcccucagaau

SEQ ID NO: 2966183 - RNA, 18 nt, Human
uucacugguacucugcca

SEQ ID NO: 2966184 - RNA, 11 nt, Human
uucauagagaa

SEQ ID NO: 2966185 - RNA, 18 nt, Human
uucauagagaauauaaaa

SEQ ID NO: 2966186 - RNA, 20 nt, Human
uucauauuuaauuugaaggu

SEQ ID NO: 2966187 - RNA, 21 nt, Human
uuauuucucucaucuguuaca

SEQ ID NO: 2966188 - RNA, 22 nt, Human
auagcugugauuuuugguauuu

SEQ ID NO: 2966189 - RNA, 12 nt, Human
auaacuuuuuau

SEQ ID NO: 2966190 - RNA, 18 nt, Human
auaacuuuuuauauucuc

SEQ ID NO: 2966191 - RNA, 19 nt, Human
auagcugugauuuuuggua

SEQ ID NO: 2966192 - RNA, 13 nt, Human
uuauuuaaauaga

SEQ ID NO: 2966193 - RNA, 11 nt, Human
uuauuuauuga

SEQ ID NO: 2966194 - RNA, 13 nt, Human
uucucacagaaga

SEQ ID NO: 2966195 - RNA, 23 nt, Human
auauuucugaggagccugcaaca

SEQ ID NO: 2966196 - RNA, 20 nt, Human
auauugcauacuauuaaaca

SEQ ID NO: 2966197 - RNA, 22 nt, Human
auauugcauacuauuaaacaug

SEQ ID NO: 2966198 - RNA, 18 nt, Human
auauucucagcagagugc

SEQ ID NO: 2966199 - RNA, 17 nt, Human
auauucucagcagagug

SEQ ID NO: 2966200 - RNA, 15 nt, Human
auauucucagcagag

SEQ ID NO: 2966201 - RNA, 16 nt, Human
auauucucagcagagu

SEQ ID NO: 2966202 - RNA, 18 nt, Human
ugugaugacauucccugc

SEQ ID NO: 2966203 - RNA, 21 nt, Human
agucuucaguuugcagaguag

SEQ ID NO: 2966204 - RNA, 20 nt, Human
agucuucaguuugcagagua

SEQ ID NO: 2966205 - RNA, 18 nt, Human
agucuucaguuugcagag

SEQ ID NO: 2966206 - RNA, 23 nt, Human
auaaauauugguugggaugacuu

SEQ ID NO: 2966207 - RNA, 15 nt, Human
aguuggguuuuuuaa

SEQ ID NO: 2966208 - RNA, 14 nt, Human
uguugcuaacagca

SEQ ID NO: 2966209 - RNA, 22 nt, Human
uguuugagcaucgcuuaggaga

SEQ ID NO: 2966210 - RNA, 23 nt, Human
uguuuugccaauuugcacauuaa

SEQ ID NO: 2966211 - RNA, 22 nt, Human
uguuuugccaauuugcacauua

SEQ ID NO: 2966212 - RNA, 21 nt, Human
uguuuugccaauuugcacauu

SEQ ID NO: 2966213 - RNA, 17 nt, Human
uguuuugccaauuugca

SEQ ID NO: 2966214 - RNA, 19 nt, Human
uguuuugccaauuugcaca

SEQ ID NO: 2966215 - RNA, 16 nt, Human
uguuuuaucuucuaua

SEQ ID NO: 2966216 - RNA, 17 nt, Human
agggcccuuuuucaaua

SEQ ID NO: 2966217 - RNA, 19 nt, Human
ugucaagcugaccuugcug

SEQ ID NO: 2966218 - RNA, 13 nt, Human
aguagucagacug

SEQ ID NO: 2966219 - RNA, 20 nt, Human
aguaggggucugucuuuuaa

SEQ ID NO: 2966220 - RNA, 18 nt, Human
aguaggggucugucuuuu

SEQ ID NO: 2966221 - RNA, 16 nt, Human
aguaaaauguggcagg

SEQ ID NO: 2966222 - RNA, 21 nt, Human
ugguuaguagagguacacuug

SEQ ID NO: 2966223 - RNA, 20 nt, Human
ugccuuuuuauaacuuuuua

SEQ ID NO: 2966224 - RNA, 20 nt, Human
agcuuaagaaauuuguggaa

SEQ ID NO: 2966225 - RNA, 16 nt, Human
aggcaggggaauguau

SEQ ID NO: 2966226 - RNA, 19 nt, Human
aggcaggggaauguaugug

SEQ ID NO: 2966227 - RNA, 14 nt, Human
aggcaggggaaugu

SEQ ID NO: 2966228 - RNA, 20 nt, Human
uggaguuauugaagcagagu

SEQ ID NO: 2966229 - RNA, 14 nt, Human
uggauucauauuua

SEQ ID NO: 2966230 - RNA, 17 nt, Human
uggauucauauuuaauu

SEQ ID NO: 2966231 - RNA, 13 nt, Human
ugcacauuaaaug

SEQ ID NO: 2966232 - RNA, 18 nt, Human
ugcacauuaaaugacucu

SEQ ID NO: 2966233 - RNA, 15 nt, Human
ugcacauuaaaugac

SEQ ID NO: 2966234 - RNA, 12 nt, Human
ugcaaagaugaa

SEQ ID NO: 2966235 - RNA, 23 nt, Human
ugcaaagaugaaggucuguuuug

SEQ ID NO: 2966236 - RNA, 16 nt, Human
ugcaaacuucagaguu

SEQ ID NO: 2966237 - RNA, 14 nt, Human
ugauuucacagugu

SEQ ID NO: 2966238 - RNA, 16 nt, Human
ugauuucacagugugu

SEQ ID NO: 2966239 - RNA, 18 nt, Human
ugcaucuagccucaagcu

SEQ ID NO: 2966240 - RNA, 22 nt, Human
ugagugcaaacuucagaguucu

SEQ ID NO: 2966241 - RNA, 20 nt, Human
ugagugcaaacuucagaguu

SEQ ID NO: 2966242 - RNA, 18 nt, Human
ugagugcaaacuucagag

SEQ ID NO: 2966243 - RNA, 14 nt, Human
ugaguggaguuacu

SEQ ID NO: 2966244 - RNA, 22 nt, Human
agcaguuugguuucuagcauga

SEQ ID NO: 2966245 - RNA, 23 nt, Human
agcaguuugguuucuagcaugaa

SEQ ID NO: 2966246 - RNA, 20 nt, Human
agcaguuugguuucuagcau

SEQ ID NO: 2966247 - RNA, 20 nt, Human
agcaggaagcugugagagca

SEQ ID NO: 2966248 - RNA, 18 nt, Human
ugaaauaaggaaugauau

SEQ ID NO: 2966249 - RNA, 14 nt, Human
ugaaauaaggaaug

SEQ ID NO: 2966250 - RNA, 15 nt, Human
ugaaugucaguuguu

SEQ ID NO: 2966251 - RNA, 16 nt, Human
ugaagcagaguggcag

SEQ ID NO: 2966252 - RNA, 13 nt, Human
ugaagcagagugg

SEQ ID NO: 2966253 - RNA, 12 nt, Human
ugaagcagagug

SEQ ID NO: 2966254 - RNA, 17 nt, Human
agacccucaugcugcca

SEQ ID NO: 2966255 - RNA, 12 nt, Human
agaauguuuuca

SEQ ID NO: 2966256 - RNA, 15 nt, Human
ucuguauguguucua

SEQ ID NO: 2966257 - RNA, 12 nt, Human
ucuguauguguu

SEQ ID NO: 2966258 - RNA, 20 nt, Human
ucugugaugacauucccugc

SEQ ID NO: 2966259 - RNA, 14 nt, Human
agacaguuggguuu

SEQ ID NO: 2966260 - RNA, 15 nt, Human
ucuuacaucugaaau

SEQ ID NO: 2966261 - RNA, 21 nt, Human
ucuauuucuggaugaaugccc

SEQ ID NO: 2966262 - RNA, 11 nt, Human
acuuuaaacua

SEQ ID NO: 2966263 - RNA, 18 nt, Human
ucucucaucuguuacaca

SEQ ID NO: 2966264 - RNA, 12 nt, Human
ucugacuauaac

SEQ ID NO: 2966265 - RNA, 18 nt, Human
ucgcuccaccuugcagcu

SEQ ID NO: 2966266 - RNA, 22 nt, Human
uccaaucugugaugacauuccc

SEQ ID NO: 2966267 - RNA, 22 nt, Human
accuggauugugccuaaugugu

SEQ ID NO: 2966268 - RNA, 21 nt, Human
ucauucuuuuugaaaugucaa

SEQ ID NO: 2966269 - RNA, 12 nt, Human
ucauuacuaaaa

SEQ ID NO: 2966270 - RNA, 18 nt, Human
acuaacaggcuuagugau

SEQ ID NO: 2966271 - RNA, 17 nt, Human
acuaacaggcuuaguga

SEQ ID NO: 2966272 - RNA, 12 nt, Human
acuaacaggcuu

SEQ ID NO: 2966273 - RNA, 18 nt, Human
acuaacauuuauuugagu

SEQ ID NO: 2966274 - RNA, 16 nt, Human
ucccugugucauuuca

SEQ ID NO: 2966275 - RNA, 17 nt, Human
ucccugugucauuucaa

SEQ ID NO: 2966276 - RNA, 11 nt, Human
uccuaaauagc

SEQ ID NO: 2966277 - RNA, 14 nt, Human
uccccucuccucca

SEQ ID NO: 2966278 - RNA, 23 nt, Human
accaauauuuaaucuuuuaugau

SEQ ID NO: 2966279 - RNA, 20 nt, Human
accaauauuuaaucuuuuau

SEQ ID NO: 2966280 - RNA, 16 nt, Human
accaauauuuaaucuu

SEQ ID NO: 2966281 - RNA, 17 nt, Human
accaauauuuaaucuuu

SEQ ID NO: 2966282 - RNA, 14 nt, Human
acauagcugugauu

SEQ ID NO: 2966283 - RNA, 13 nt, Human
acaucuguuuugu

SEQ ID NO: 2966284 - RNA, 16 nt, Human
acaguuggguuuuuua

SEQ ID NO: 2966285 - RNA, 18 nt, Human
acaguuggguuuuuuaag

SEQ ID NO: 2966286 - RNA, 20 nt, Human
acauacuuuuuggguuuauu

SEQ ID NO: 2966287 - RNA, 17 nt, Human
acauacuuuuuggguuu

SEQ ID NO: 2966288 - RNA, 13 nt, Human
acauacuuuuugg

SEQ ID NO: 2966289 - RNA, 11 nt, Human
acauacuuuuu

SEQ ID NO: 2966290 - RNA, 14 nt, Human
ucaaggcuuagacc

SEQ ID NO: 2966291 - RNA, 16 nt, Human
ucaagaaugcaguacu

SEQ ID NO: 2966292 - RNA, 21 nt, Human
acauuaaaugacucuucccuc

SEQ ID NO: 2966293 - RNA, 19 nt, Human
acauuaaaugacucuuccc

SEQ ID NO: 2966294 - RNA, 19 nt, Human
acaugcuguacauacuuuu

SEQ ID NO: 2966295 - RNA, 17 nt, Human
acaugcuguacauacuu

SEQ ID NO: 2966296 - RNA, 14 nt, Human
acaugcugaacauc

SEQ ID NO: 2966297 - RNA, 21 nt, Human
acaugcugaacaucacagcuu

SEQ ID NO: 2966298 - RNA, 17 nt, Human
acauuagguugugaaug

SEQ ID NO: 2966299 - RNA, 16 nt, Human
acauuagguugugaau

SEQ ID NO: 2966300 - RNA, 15 nt, Human
acauuagguugugaa

SEQ ID NO: 2966301 - RNA, 15 nt, Human
uauuugugagacugu

SEQ ID NO: 2966302 - RNA, 20 nt, Human
uauccuagucauucuucccu

SEQ ID NO: 2966303 - RNA, 17 nt, Human
acagcaacacaaagcuu

SEQ ID NO: 2966304 - RNA, 20 nt, Human
acagcaacacaaagcuuuug

SEQ ID NO: 2966305 - RNA, 15 nt, Human
acacucuauaacaaa

SEQ ID NO: 2966306 - RNA, 13 nt, Human
acacuugugaaua

SEQ ID NO: 2966307 - RNA, 12 nt, Human
acacuugugaau

SEQ ID NO: 2966308 - RNA, 18 nt, Human
acacuugugaauaaagag

SEQ ID NO: 2966309 - RNA, 20 nt, Human
uauauucauucuuuuugaaa

SEQ ID NO: 2966310 - RNA, 19 nt, Human
uauauucauucuuuuugaa

SEQ ID NO: 2966311 - RNA, 18 nt, Human
acacaugcugaacaucac

SEQ ID NO: 2966312 - RNA, 23 nt, Human
uaguucaaucuggauucauauuu

SEQ ID NO: 2966313 - RNA, 14 nt, Human
acacaccuaacuua

SEQ ID NO: 2966314 - RNA, 12 nt, Human
uagguugugaau

SEQ ID NO: 2966315 - RNA, 19 nt, Human
aauugauugggcacaucau

SEQ ID NO: 2966316 - RNA, 23 nt, Human
aauugauugggcacaucauuuca

SEQ ID NO: 2966317 - RNA, 20 nt, Human
aauugauugggcacaucauu

SEQ ID NO: 2966318 - RNA, 14 nt, Human
uacugaacaguaac

SEQ ID NO: 2966319 - RNA, 23 nt, Human
uacugggaaagggauuuucagcc

SEQ ID NO: 2966320 - RNA, 21 nt, Human
uacuaaaaguuuugagaaauu

SEQ ID NO: 2966321 - RNA, 18 nt, Human
aauuuacuuuaaacuaca

SEQ ID NO: 2966322 - RNA, 15 nt, Human
aauuuacuuuaaacu

SEQ ID NO: 2966323 - RNA, 16 nt, Human
aauuuacuuuaaacua

SEQ ID NO: 2966324 - RNA, 14 nt, Human
aauuugcacauuaa

SEQ ID NO: 2966325 - RNA, 16 nt, Human
aauuugcacauuaaau

SEQ ID NO: 2966326 - RNA, 21 nt, Human
uacuuauuuaaauagaugaca

SEQ ID NO: 2966327 - RNA, 14 nt, Human
uacuuauuuaaaua

SEQ ID NO: 2966328 - RNA, 12 nt, Human
uacuuauuuaaa

SEQ ID NO: 2966329 - RNA, 12 nt, Human
aauuugcacauu

SEQ ID NO: 2966330 - RNA, 10 nt, Human
uacuuuuugg

SEQ ID NO: 2966331 - RNA, 23 nt, Human
aauuugccuaauaugaugacugu

SEQ ID NO: 2966332 - RNA, 20 nt, Human
uagaugaaugucaguuguua

SEQ ID NO: 2966333 - RNA, 23 nt, Human
acaaaggauacuuauuuaaauag

SEQ ID NO: 2966334 - RNA, 21 nt, Human
acaaaggauacuuauuuaaau

SEQ ID NO: 2966335 - RNA, 23 nt, Human
acaaagcuuuugcauauugcaua

SEQ ID NO: 2966336 - RNA, 22 nt, Human
acaaagcuuuugcauauugcau

SEQ ID NO: 2966337 - RNA, 15 nt, Human
acaaagcuuuugcau

SEQ ID NO: 2966338 - RNA, 21 nt, Human
aauaucccuuggacauuuuau

SEQ ID NO: 2966339 - RNA, 20 nt, Human
aauaucccuuggacauuuua

SEQ ID NO: 2966340 - RNA, 22 nt, Human
aauaucccuuggacauuuuaug

SEQ ID NO: 2966341 - RNA, 12 nt, Human
aauauccuaaua

SEQ ID NO: 2966342 - RNA, 13 nt, Human
aauauccuaauaa

SEQ ID NO: 2966343 - RNA, 14 nt, Human
aauauccuaauaaa

SEQ ID NO: 2966344 - RNA, 20 nt, Human
aauauccaauugcugcuugu

SEQ ID NO: 2966345 - RNA, 15 nt, Human
aauauccuaauaaaa

SEQ ID NO: 2966346 - RNA, 19 nt, Human
aauauccuaauaaaaaggu

SEQ ID NO: 2966347 - RNA, 21 nt, Human
aauauccuaauaaaaagguga

SEQ ID NO: 2966348 - RNA, 22 nt, Human
aauagaugacauugacuauuuu

SEQ ID NO: 2966349 - RNA, 21 nt, Human
aauagaugacauugacuauuu

SEQ ID NO: 2966350 - RNA, 19 nt, Human
aauagaugacauugacuau

SEQ ID NO: 2966351 - RNA, 20 nt, Human
aauagcauguccuaaugcuu

SEQ ID NO: 2966352 - RNA, 17 nt, Human
aauaugaugacuguuuu

SEQ ID NO: 2966353 - RNA, 16 nt, Human
aauaugaugacuguuu

SEQ ID NO: 2966354 - RNA, 21 nt, Human
aauauuuuagguguaaaauaa

SEQ ID NO: 2966355 - RNA, 21 nt, Human
aauauugguugggaugacuug

SEQ ID NO: 2966356 - RNA, 15 nt, Human
aauauugguugggau

SEQ ID NO: 2966357 - RNA, 21 nt, Human
uaaauagaugacauugacuau

SEQ ID NO: 2966358 - RNA, 19 nt, Human
uaaauagaugacauugacu

SEQ ID NO: 2966359 - RNA, 14 nt, Human
uaaauagaugacau

SEQ ID NO: 2966360 - RNA, 16 nt, Human
aauaaaaaggugacca

SEQ ID NO: 2966361 - RNA, 12 nt, Human
aauaaaaaggug

SEQ ID NO: 2966362 - RNA, 13 nt, Human
aauaaaaagguga

SEQ ID NO: 2966363 - RNA, 16 nt, Human
guuuugaagauucuau

SEQ ID NO: 2966364 - RNA, 17 nt, Human
guuuugaagauucuaug

SEQ ID NO: 2966365 - RNA, 20 nt, Human
guuuugaagauucuauguua

SEQ ID NO: 2966366 - RNA, 17 nt, Human
aauaacuggaacacucu

SEQ ID NO: 2966367 - RNA, 18 nt, Human
aaugcaguacuaacauuu

SEQ ID NO: 2966368 - RNA, 14 nt, Human
aaugagcuuaagaa

SEQ ID NO: 2966369 - RNA, 18 nt, Human
uaauuauugauguuuuca

SEQ ID NO: 2966370 - RNA, 13 nt, Human
aaugacucuuccc

SEQ ID NO: 2966371 - RNA, 18 nt, Human
uaaugguaguuuuacagu

SEQ ID NO: 2966372 - RNA, 18 nt, Human
uaaugagcuuaagaaauu

SEQ ID NO: 2966373 - RNA, 21 nt, Human
aacuuuaagaacuaaaauguu

SEQ ID NO: 2966374 - RNA, 15 nt, Human
gugccuaauguguuu

SEQ ID NO: 2966375 - RNA, 24 nt, Human
aagaaugcaguacuaacauuuauu

SEQ ID NO: 2966376 - RNA, 23 nt, Human
aagaauugauugggcacaucauu

SEQ ID NO: 2966377 - RNA, 17 nt, Human
aagacccucucaaacua

SEQ ID NO: 2966378 - RNA, 17 nt, Human
guggcuaacuuggguua

SEQ ID NO: 2966379 - RNA, 15 nt, Human
guggguggggcagug

SEQ ID NO: 2966380 - RNA, 14 nt, Human
guuacacaaagaac

SEQ ID NO: 2966381 - RNA, 14 nt, Human
guuuuacaguguuu

SEQ ID NO: 2966382 - RNA, 16 nt, Human
aaccccaaguuaguuc

SEQ ID NO: 2966383 - RNA, 22 nt, Human
aacacugguuuuaaauauuuug

SEQ ID NO: 2966384 - RNA, 21 nt, Human
aacacucuauaacaaaggaua

SEQ ID NO: 2966385 - RNA, 22 nt, Human
aacauuuauuugaguggaguua

SEQ ID NO: 2966386 - RNA, 15 nt, Human
aacaguaacauagcu

SEQ ID NO: 2966387 - RNA, 18 nt, Human
aacaggcuuagugaugua

SEQ ID NO: 2966388 - RNA, 22 nt, Human
aacaguaacauagcugugauuu

SEQ ID NO: 2966389 - RNA, 15 nt, Human
aaaugauuucacagu

SEQ ID NO: 2966390 - RNA, 15 nt, Human
aaaggauacuuauuu

SEQ ID NO: 2966391 - RNA, 17 nt, Human
aaaggauacuuauuuaa

SEQ ID NO: 2966392 - RNA, 13 nt, Human
gucaacauuucuc

SEQ ID NO: 2966393 - RNA, 17 nt, Human
gucaacauuucucaugu

SEQ ID NO: 2966394 - RNA, 20 nt, Human
aaauuuacuuuaaacuacau

SEQ ID NO: 2966395 - RNA, 17 nt, Human
aaauuuacuuuaaacua

SEQ ID NO: 2966396 - RNA, 22 nt, Human
cugcugauuuaaacacauuaaa

SEQ ID NO: 2966397 - RNA, 16 nt, Human
cugcugauuuaaacac

SEQ ID NO: 2966398 - RNA, 20 nt, Human
cugcuuauccguuagccgug

SEQ ID NO: 2966399 - RNA, 14 nt, Human
cuuggcccaggagu

SEQ ID NO: 2966400 - RNA, 13 nt, Human
cuuggcccaggag

SEQ ID NO: 2966401 - RNA, 13 nt, Human
gacucuucccuca

SEQ ID NO: 2966402 - RNA, 12 nt, Human
gacauucccugc

SEQ ID NO: 2966403 - RNA, 14 nt, Human
gacauugacuauuu

SEQ ID NO: 2966404 - RNA, 22 nt, Human
gacauugacuauuuuuguuuuu

SEQ ID NO: 2966405 - RNA, 16 nt, Human
gaaguucuauuuauuu

SEQ ID NO: 2966406 - RNA, 12 nt, Human
gaagcagagugg

SEQ ID NO: 2966407 - RNA, 11 nt, Human
gaagcagagug

SEQ ID NO: 2966408 - RNA, 13 nt, Human
gcacaucauuuca

SEQ ID NO: 2966409 - RNA, 11 nt, Human
gaguggaguua

SEQ ID NO: 2966410 - RNA, 17 nt, Human
gaguggaguuacugaac

SEQ ID NO: 2966411 - RNA, 16 nt, Human
gcuguacauacuuuuu

SEQ ID NO: 2966412 - RNA, 15 nt, Human
gcuguacauacuuuu

SEQ ID NO: 2966413 - RNA, 14 nt, Human
gcuguacauacuuu

SEQ ID NO: 2966414 - RNA, 13 nt, Human
gcuguacauacuu

SEQ ID NO: 2966415 - RNA, 17 nt, Human
gcuguacauacuuuuug

SEQ ID NO: 2966416 - RNA, 16 nt, Human
gcugcugauuuaaaca

SEQ ID NO: 2966417 - RNA, 23 nt, Human
gccagaagucaaggcuuagaccc

SEQ ID NO: 2966418 - RNA, 16 nt, Human
gccagaagucaaggcu

SEQ ID NO: 2966419 - RNA, 20 nt, Human
gccagaagucaaggcuuaga

SEQ ID NO: 2966420 - RNA, 22 nt, Human
gccagaagucaaggcuuagacc

SEQ ID NO: 2966421 - RNA, 14 nt, Human
gccacuuuauuucu

SEQ ID NO: 2966422 - RNA, 15 nt, Human
gccuaccaauauuua

SEQ ID NO: 2966423 - RNA, 22 nt, Human
ggcccaggaguuuggccagaag

SEQ ID NO: 2966424 - RNA, 23 nt, Human
ggcccaggaguuuggccagaagu

SEQ ID NO: 2966425 - RNA, 21 nt, Human
ggcccaggaguuuggccagaa

SEQ ID NO: 2966426 - RNA, 12 nt, Human
ggauuuucagcc

SEQ ID NO: 2966427 - RNA, 19 nt, Human
aaagaugaaggucuguuuu

SEQ ID NO: 2966428 - RNA, 22 nt, Human
aaaggaaugcaaagaugaaggu

SEQ ID NO: 2966429 - RNA, 19 nt, Human
aaaggaaugcaaagaugaa

SEQ ID NO: 2966430 - RNA, 13 nt, Human
ggucugucuuuua

SEQ ID NO: 2966431 - RNA, 14 nt, Human
ggucugucuuuuaa

SEQ ID NO: 2966432 - RNA, 20 nt, Human
ggugauuuagcaggaagcug

SEQ ID NO: 2966433 - RNA, 18 nt, Human
aaacaugcuguacauacu

SEQ ID NO: 2966434 - RNA, 16 nt, Human
aaacaugcuguacaua

SEQ ID NO: 2966435 - RNA, 15 nt, Human
aaacaugcuguacau

SEQ ID NO: 2966436 - RNA, 21 nt, Human
aaacaugcuguacauacuuuu

SEQ ID NO: 2966437 - RNA, 20 nt, Human
aaacaugcuguacauacuuu

SEQ ID NO: 2966438 - RNA, 22 nt, Human
aaacaugcuguacauacuuuuu

SEQ ID NO: 2966439 - RNA, 23 nt, Human
aaacaugcuguacauacuuuuug

SEQ ID NO: 2966440 - RNA, 20 nt, Human
aaacuacauuagguugugaa

SEQ ID NO: 2966441 - RNA, 22 nt, Human
aaacuacauuagguugugaaug

SEQ ID NO: 2966442 - RNA, 21 nt, Human
aaacuacauuagguugugaau

SEQ ID NO: 2966443 - RNA, 16 nt, Human
aaacucauuucuagca

SEQ ID NO: 2966444 - RNA, 18 nt, Human
aaacuacauugacagauu

SEQ ID NO: 2966445 - RNA, 17 nt, Human
gggauugaaggaugcug

SEQ ID NO: 2966446 - RNA, 21 nt, Human
gggauuuucagcccucagaau

SEQ ID NO: 2966447 - RNA, 20 nt, Human
auuaaugucaguauuucaac

SEQ ID NO: 2966448 - RNA, 16 nt, Human
auucauucuuuuugaa

SEQ ID NO: 2966449 - RNA, 21 nt, Human
auucauucuuuuugaaauguc

SEQ ID NO: 2966450 - RNA, 15 nt, Human
auucauucuuuuuga

SEQ ID NO: 2966451 - RNA, 14 nt, Human
auucauuaguuuug

SEQ ID NO: 2966452 - RNA, 15 nt, Human
auucauuaguuuuga

SEQ ID NO: 2966453 - RNA, 17 nt, Human
auuucucucaucuguua

SEQ ID NO: 2966454 - RNA, 19 nt, Human
auuugcacauuaaaugacu

SEQ ID NO: 2966455 - RNA, 17 nt, Human
auuugcacauuaaauga

SEQ ID NO: 2966456 - RNA, 15 nt, Human
auuugcacauuaaau

SEQ ID NO: 2966457 - RNA, 14 nt, Human
auuugcacauuaaa

SEQ ID NO: 2966458 - RNA, 13 nt, Human
auuuaauuugaag

SEQ ID NO: 2966459 - RNA, 15 nt, Human
auuuaauuugaaggu

SEQ ID NO: 2966460 - RNA, 22 nt, Human
auuuaauuugaagguagaaugu

SEQ ID NO: 2966461 - RNA, 17 nt, Human
auuucacaguguguggu

SEQ ID NO: 2966462 - RNA, 21 nt, Human
auuugcacauuaaaugacucu

SEQ ID NO: 2966463 - RNA, 20 nt, Human
auuugcacauuaaaugacuc

SEQ ID NO: 2966464 - RNA, 17 nt, Human
auuuucuccaaauguuc

SEQ ID NO: 2966465 - RNA, 23 nt, Human
caauugugaaaaaauuuacuuua

SEQ ID NO: 2966466 - RNA, 17 nt, Human
cacaaggaaauaaaauu

SEQ ID NO: 2966467 - RNA, 22 nt, Human
caauugugaaaaaauuuacuuu

SEQ ID NO: 2966468 - RNA, 18 nt, Human
caauauuuaaucuuuuau

SEQ ID NO: 2966469 - RNA, 19 nt, Human
cagacuggauaguccgucu

SEQ ID NO: 2966470 - RNA, 14 nt, Human
caguuguuauuuau

SEQ ID NO: 2966471 - RNA, 19 nt, Human
caguuguuauuuauugaaa

SEQ ID NO: 2966472 - RNA, 21 nt, Human
caguuguuauuuauugaaaug

SEQ ID NO: 2966473 - RNA, 17 nt, Human
cauuauguuaauauuuc

SEQ ID NO: 2966474 - RNA, 14 nt, Human
cauuauguuaauau

SEQ ID NO: 2966475 - RNA, 15 nt, Human
cauuauguuaauauu

SEQ ID NO: 2966476 - RNA, 16 nt, Human
cauuauguuaauauuu

SEQ ID NO: 2966477 - RNA, 14 nt, Human
ccaggaguuuggcc

SEQ ID NO: 2966478 - RNA, 15 nt, Human
ccaggaguuuggcca

SEQ ID NO: 2966479 - RNA, 16 nt, Human
ccaggaguuuggccag

SEQ ID NO: 2966480 - RNA, 17 nt, Human
ccaggaguuuggccaga

SEQ ID NO: 2966481 - RNA, 18 nt, Human
ccaggaguuuggccagaa

SEQ ID NO: 2966482 - RNA, 18 nt, Human
ccacuugagugucaagcu

SEQ ID NO: 2966483 - RNA, 14 nt, Human
cccauucuuggccc

SEQ ID NO: 2966484 - RNA, 13 nt, Human
ccucaugcugcca

SEQ ID NO: 2966485 - RNA, 15 nt, Human
ccucaugcugccaau

SEQ ID NO: 2966486 - RNA, 16 nt, Human
ccucaugcugccaaua

SEQ ID NO: 2966487 - RNA, 13 nt, Human
ccuuucccuuggu

SEQ ID NO: 2966488 - RNA, 13 nt, Human
cuaacuuggguua

SEQ ID NO: 2966489 - RNA, 19 nt, Human
cuaauaaaaaggugaccau

SEQ ID NO: 2966490 - RNA, 13 nt, Human
cuauguuaauauu

SEQ ID NO: 2966491 - RNA, 15 nt, Human
cuauguuaauauuuu

SEQ ID NO: 2966492 - RNA, 17 nt, Human
cuauguuaauauuuuag

SEQ ID NO: 2966493 - RNA, 14 nt, Human
cuauguuaauauuu

SEQ ID NO: 2966494 - RNA, 21 nt, Human
cuauguuaauauuuuaggugu

SEQ ID NO: 2966495 - RNA, 17 nt, Human
cuaucacugguuugguu

SEQ ID NO: 2966496 - RNA, 12 nt, Human
cuauguuuuugu

SEQ ID NO: 2966497 - RNA, 18 nt, Human
cucaguagucagacugga

SEQ ID NO: 2966498 - RNA, 16 nt, Human
cucucuguaauaaacu

SEQ ID NO: 2966499 - RNA, 21 nt, Human
cucucuguaauaaacucauuu

SEQ ID NO: 2966500 - RNA, 13 nt, Human
uuuugaaauguca

SEQ ID NO: 2966501 - RNA, 11 nt, Human
uuugcagagua

SEQ ID NO: 2966502 - RNA, 19 nt, Human
uuuucaauaacuggaacac

SEQ ID NO: 2966503 - RNA, 16 nt, Human
uuuucaauaacuggaa

SEQ ID NO: 2966504 - RNA, 13 nt, Human
uuuucaauaacug

SEQ ID NO: 2966505 - RNA, 23 nt, Human
uuuucaauaacuggaacacucua

SEQ ID NO: 2966506 - RNA, 15 nt, Human
uuuuauauucucagc

SEQ ID NO: 2966507 - RNA, 22 nt, Human
uuuuaucagaacuauguuuuug

SEQ ID NO: 2966508 - RNA, 22 nt, Human
uuuauuuggaaaggaaugcaaa

SEQ ID NO: 2966509 - RNA, 16 nt, Human
uuuauuuauuuauuca

SEQ ID NO: 2966510 - RNA, 23 nt, Human
uuuacuuuuuggaaaagaauaaa

SEQ ID NO: 2966511 - RNA, 15 nt, Human
uuuacuuuuuggaaa

SEQ ID NO: 2966512 - RNA, 13 nt, Human
uuuaaucuuuuau

SEQ ID NO: 2966513 - RNA, 19 nt, Human
uucuccagucauuauguua

SEQ ID NO: 2966514 - RNA, 17 nt, Human
uucuccagucauuaugu

SEQ ID NO: 2966515 - RNA, 14 nt, Human
uucuauuuauuugu

SEQ ID NO: 2966516 - RNA, 21 nt, Human
uucuauuuauuuauuuauuca

SEQ ID NO: 2966517 - RNA, 18 nt, Human
uucaguuuaucuguucau

SEQ ID NO: 2966518 - RNA, 15 nt, Human
uucaguuuaucuguu

SEQ ID NO: 2966519 - RNA, 21 nt, Human
uuccacuugagugucaagcug

SEQ ID NO: 2966520 - RNA, 17 nt, Human
uuccacuugagugucaa

SEQ ID NO: 2966521 - RNA, 20 nt, Human
uucaaucuggauucauauuu

SEQ ID NO: 2966522 - RNA, 23 nt, Human
uucaaucuggauucauauuuaau

SEQ ID NO: 2966523 - RNA, 19 nt, Human
uucaaucuggauucauauu

SEQ ID NO: 2966524 - RNA, 20 nt, Human
uuacuaaaaguuuugagaaa

SEQ ID NO: 2966525 - RNA, 19 nt, Human
uuacuaaaaguuuugagaa

SEQ ID NO: 2966526 - RNA, 19 nt, Human
uugacuauuuuuguuuuua

SEQ ID NO: 2966527 - RNA, 12 nt, Human
uugacuauuuuu

SEQ ID NO: 2966528 - RNA, 16 nt, Human
uugcauacuauuaaac

SEQ ID NO: 2966529 - RNA, 18 nt, Human
uugcauacuauuaaacau

SEQ ID NO: 2966530 - RNA, 19 nt, Human
uugcauacuauuaaacaug

SEQ ID NO: 2966531 - RNA, 18 nt, Human
uugaggguauguuuuaua

SEQ ID NO: 2966532 - RNA, 14 nt, Human
uugaaacuuuaaga

SEQ ID NO: 2966533 - RNA, 21 nt, Human
uuggaaaggaaugcaaagaug

SEQ ID NO: 2966534 - RNA, 16 nt, Human
uuggacauuuuauguc

SEQ ID NO: 2966535 - RNA, 17 nt, Human
uuggacauuuuaugucu

SEQ ID NO: 2966536 - RNA, 18 nt, Human
uuggacauuuuaugucuu

SEQ ID NO: 2966537 - RNA, 20 nt, Human
uuggacauuuuaugucuuuc

SEQ ID NO: 2966538 - RNA, 13 nt, Human
uugcuaacagcaa

SEQ ID NO: 2966539 - RNA, 20 nt, Human
uugcuaacagcaacacaaag

SEQ ID NO: 2966540 - RNA, 20 nt, Human
uuguacacucauucauuacu

SEQ ID NO: 2966541 - RNA, 20 nt, Human
uuggccagaagucaaggcuu

SEQ ID NO: 2966542 - RNA, 12 nt, Human
uuggguuuauuu

SEQ ID NO: 2966543 - RNA, 17 nt, Human
uuggguuuauuuggaaa

SEQ ID NO: 2966544 - RNA, 20 nt, Human
ugugaaugcagguuuuauca

SEQ ID NO: 2966545 - RNA, 14 nt, Human
ugugaaugcagguu

SEQ ID NO: 2966546 - RNA, 21 nt, Human
ugugaauaaagagggugggug

SEQ ID NO: 2966547 - RNA, 23 nt, Human
ugugaaaaaauuuacuuuaaacu

SEQ ID NO: 2966548 - RNA, 17 nt, Human
ugugaaaaaauuuacuu

SEQ ID NO: 2966549 - RNA, 12 nt, Human
ugugaaaaaauu

SEQ ID NO: 2966550 - RNA, 14 nt, Human
ugugcguccugucg

SEQ ID NO: 2966551 - RNA, 15 nt, Human
uguguacuuuuaaga

SEQ ID NO: 2966552 - RNA, 12 nt, Human
uguguacuuuua

SEQ ID NO: 2966553 - RNA, 21 nt, Human
uguaacuguuuagaugaaugu

SEQ ID NO: 2966554 - RNA, 22 nt, Human
ugucaguuguuauuuauugaaa

SEQ ID NO: 2966555 - RNA, 17 nt, Human
ugucaguuguuauuuau

SEQ ID NO: 2966556 - RNA, 18 nt, Human
ugucaguuguuauuuauu

SEQ ID NO: 2966557 - RNA, 16 nt, Human
uguugaaacuuuaaga

SEQ ID NO: 2966558 - RNA, 21 nt, Human
uguucuccagucauuauguua

SEQ ID NO: 2966559 - RNA, 15 nt, Human
uguuuaaugguaguu

SEQ ID NO: 2966560 - RNA, 19 nt, Human
ugugugcguccugucggag

SEQ ID NO: 2966561 - RNA, 15 nt, Human
uguuuuuauuauuaa

SEQ ID NO: 2966562 - RNA, 18 nt, Human
uguuuuuauuauuaacaa

SEQ ID NO: 2966563 - RNA, 22 nt, Human
ugccuaauaugaugacuguuuu

SEQ ID NO: 2966564 - RNA, 17 nt, Human
ugccuaauaugaugacu

SEQ ID NO: 2966565 - RNA, 17 nt, Human
ugccuaccaauauuuaa

SEQ ID NO: 2966566 - RNA, 23 nt, Human
ugccuaccaauauuuaaucuuuu

SEQ ID NO: 2966567 - RNA, 13 nt, Human
ugcacaucuguuu

SEQ ID NO: 2966568 - RNA, 23 nt, Human
uggggcagugcuuggcccaggag

SEQ ID NO: 2966569 - RNA, 20 nt, Human
uggggcagugcuuggcccag

SEQ ID NO: 2966570 - RNA, 22 nt, Human
uggggcagugcuuggcccagga

SEQ ID NO: 2966571 - RNA, 18 nt, Human
uggggcagugcuuggccc

SEQ ID NO: 2966572 - RNA, 13 nt, Human
uggguuuauuugg

SEQ ID NO: 2966573 - RNA, 17 nt, Human
uggccagaagucaaggc

SEQ ID NO: 2966574 - RNA, 15 nt, Human
ugcuuuuuuuggccu

SEQ ID NO: 2966575 - RNA, 13 nt, Human
ucuucuauauaau

SEQ ID NO: 2966576 - RNA, 12 nt, Human
ucuucuauuuau

SEQ ID NO: 2966577 - RNA, 22 nt, Human
ucuucuauauaauuccuguuuu

SEQ ID NO: 2966578 - RNA, 22 nt, Human
ucuucuauuuauuuauuuauuc

SEQ ID NO: 2966579 - RNA, 20 nt, Human
ucuguuacacaaagaaccac

SEQ ID NO: 2966580 - RNA, 19 nt, Human
ucuguaauaaacucauuuc

SEQ ID NO: 2966581 - RNA, 23 nt, Human
ucuguaauaaacucauuucuagc

SEQ ID NO: 2966582 - RNA, 24 nt, Human
ucuguaauaaacucauuucuagca

SEQ ID NO: 2966583 - RNA, 14 nt, Human
ucuuuuugaaaugu

SEQ ID NO: 2966584 - RNA, 17 nt, Human
ucucaaacuaacaggcu

SEQ ID NO: 2966585 - RNA, 15 nt, Human
ucucaaacuaacagg

SEQ ID NO: 2966586 - RNA, 16 nt, Human
ucccauucuuggccca

SEQ ID NO: 2966587 - RNA, 15 nt, Human
ucccauucuuggccc

SEQ ID NO: 2966588 - RNA, 17 nt, Human
ucccccuggcacugguu

SEQ ID NO: 2966589 - RNA, 15 nt, Human
ucaucuguuacacaa

SEQ ID NO: 2966590 - RNA, 12 nt, Human
ucagcagagugc

SEQ ID NO: 2966591 - RNA, 11 nt, Human
ucagcagagug

SEQ ID NO: 2966592 - RNA, 22 nt, Human
ucagcagagugcuuuaccaauu

SEQ ID NO: 2966593 - RNA, 16 nt, Human
ucagcagagugcuuua

SEQ ID NO: 2966594 - RNA, 18 nt, Human
ucaagcugaccuugcuga

SEQ ID NO: 2966595 - RNA, 20 nt, Human
uauuuuuguuuuuauuaaaa

SEQ ID NO: 2966596 - RNA, 18 nt, Human
uauuuuuguuuuuauuaa

SEQ ID NO: 2966597 - RNA, 13 nt, Human
ucaaacuaacagg

SEQ ID NO: 2966598 - RNA, 12 nt, Human
ucaaacuaacag

SEQ ID NO: 2966599 - RNA, 16 nt, Human
uauuuauugaaaugau

SEQ ID NO: 2966600 - RNA, 20 nt, Human
uauuuauugaaaugauuuca

SEQ ID NO: 2966601 - RNA, 12 nt, Human
uauuuauugaaa

SEQ ID NO: 2966602 - RNA, 23 nt, Human
uauuugaguggaguuacugaaca

SEQ ID NO: 2966603 - RNA, 23 nt, Human
uauuucugaggagccugcaacau

SEQ ID NO: 2966604 - RNA, 13 nt, Human
uauuuuacuuuuu

SEQ ID NO: 2966605 - RNA, 14 nt, Human
uauuuuacuuuuug

SEQ ID NO: 2966606 - RNA, 15 nt, Human
uauuuuacuuuuugg

SEQ ID NO: 2966607 - RNA, 22 nt, Human
uauuuuagguguaaaauaauua

SEQ ID NO: 2966608 - RNA, 12 nt, Human
uaaacacauuaa

SEQ ID NO: 2966609 - RNA, 22 nt, Human
uaaauaucccuuggacauuuua

SEQ ID NO: 2966610 - RNA, 22 nt, Human
uaaauauugguugggaugacuu

SEQ ID NO: 2966611 - RNA, 23 nt, Human
uaaauauugguugggaugacuug

SEQ ID NO: 2966612 - RNA, 18 nt, Human
uaaauauuuugacuuguu

SEQ ID NO: 2966613 - RNA, 15 nt, Human
uaaauauuuugacuu

SEQ ID NO: 2966614 - RNA, 19 nt, Human
uaaauauuuugacuuguug

SEQ ID NO: 2966615 - RNA, 16 nt, Human
guuuuguguacuuuua

SEQ ID NO: 2966616 - RNA, 15 nt, Human
guuuuguguacuuuu

SEQ ID NO: 2966617 - RNA, 17 nt, Human
guuuuguguacuuuuaa

SEQ ID NO: 2966618 - RNA, 13 nt, Human
guuuguucccugu

SEQ ID NO: 2966619 - RNA, 13 nt, Human
guuuuuauuaaaa

SEQ ID NO: 2966620 - RNA, 17 nt, Human
guuuuuauuaaaaggaa

SEQ ID NO: 2966621 - RNA, 14 nt, Human
guuuuuauuaaaag

SEQ ID NO: 2966622 - RNA, 15 nt, Human
guuuuuauuauuaac

SEQ ID NO: 2966623 - RNA, 18 nt, Human
guuuuuauuauuaacaaa

SEQ ID NO: 2966624 - RNA, 17 nt, Human
guuuagaugaaugucag

SEQ ID NO: 2966625 - RNA, 18 nt, Human
guuuagaugaaugucagu

SEQ ID NO: 2966626 - RNA, 16 nt, Human
uaagaacuaaaauguu

SEQ ID NO: 2966627 - RNA, 20 nt, Human
uaacagcaacacaaagcuuu

SEQ ID NO: 2966628 - RNA, 18 nt, Human
uaacagcaacacaaagcu

SEQ ID NO: 2966629 - RNA, 21 nt, Human
uaacaggcuuagugauguaau

SEQ ID NO: 2966630 - RNA, 14 nt, Human
uaacaggcuuagug

SEQ ID NO: 2966631 - RNA, 13 nt, Human
uacacuugugaau

SEQ ID NO: 2966632 - RNA, 23 nt, Human
uaccaauauuuaaucuuuuauga

SEQ ID NO: 2966633 - RNA, 21 nt, Human
uaccaauauuuaaucuuuuau

SEQ ID NO: 2966634 - RNA, 16 nt, Human
uaccaauauuuaaucu

SEQ ID NO: 2966635 - RNA, 13 nt, Human
uaccaauauuuaa

SEQ ID NO: 2966636 - RNA, 23 nt, Human
uagcaguaaaaaaugguguuuua

SEQ ID NO: 2966637 - RNA, 20 nt, Human
uagcagcccucaauugugaa

SEQ ID NO: 2966638 - RNA, 11 nt, Human
uagauguugcu

SEQ ID NO: 2966639 - RNA, 13 nt, Human
uagauguugcuaa

SEQ ID NO: 2966640 - RNA, 23 nt, Human
uauaauuccuguuuuuauuauua

SEQ ID NO: 2966641 - RNA, 22 nt, Human
uauaacaaaggauacuuauuua

SEQ ID NO: 2966642 - RNA, 20 nt, Human
uauaacaaaggauacuuauu

SEQ ID NO: 2966643 - RNA, 21 nt, Human
ggggcagugcuuggcccagga

SEQ ID NO: 2966644 - RNA, 23 nt, Human
ggggcagugcuuggcccaggagu

SEQ ID NO: 2966645 - RNA, 16 nt, Human
gguuauuuuacuuuuu

SEQ ID NO: 2966646 - RNA, 16 nt, Human
gggcacaucauuucaa

SEQ ID NO: 2966647 - RNA, 18 nt, Human
gggauaucacuuccauga

SEQ ID NO: 2966648 - RNA, 18 nt, Human
gggcagugcuuggcccag

SEQ ID NO: 2966649 - RNA, 19 nt, Human
gggcagugcuuggcccagg

SEQ ID NO: 2966650 - RNA, 20 nt, Human
gggcagugcuuggcccagga

SEQ ID NO: 2966651 - RNA, 22 nt, Human
gggcagugcuuggcccaggagu

SEQ ID NO: 2966652 - RNA, 23 nt, Human
gggcagugcuuggcccaggaguu

SEQ ID NO: 2966653 - RNA, 17 nt, Human
ggcuuagugauguaauu

SEQ ID NO: 2966654 - RNA, 16 nt, Human
ggcuuagacccucaug

SEQ ID NO: 2966655 - RNA, 21 nt, Human
ggcuuaauuauugauguuuuc

SEQ ID NO: 2966656 - RNA, 14 nt, Human
gcuuggcccaggag

SEQ ID NO: 2966657 - RNA, 15 nt, Human
gcuuggcccaggagu

SEQ ID NO: 2966658 - RNA, 16 nt, Human
gcuuggcccaggaguu

SEQ ID NO: 2966659 - RNA, 22 nt, Human
gcuuggcccaggaguuuggcca

SEQ ID NO: 2966660 - RNA, 13 nt, Human
gcuuggcccagga

SEQ ID NO: 2966661 - RNA, 23 nt, Human
gcuuggcccaggaguuuggccag

SEQ ID NO: 2966662 - RNA, 22 nt, Human
gcuuuaccaauugaaguaaaau

SEQ ID NO: 2966663 - RNA, 10 nt, Human
ggaaaagaau

SEQ ID NO: 2966664 - RNA, 19 nt, Human
gccuuuuuauaacuuuuua

SEQ ID NO: 2966665 - RNA, 22 nt, Human
gcguccugucggagcccugucu

SEQ ID NO: 2966666 - RNA, 14 nt, Human
gcuaacuuggguua

SEQ ID NO: 2966667 - RNA, 19 nt, Human
gcguccugucggagcccug

SEQ ID NO: 2966668 - RNA, 16 nt, Human
gcagugcuuggcccag

SEQ ID NO: 2966669 - RNA, 17 nt, Human
gcagugcuuggcccagg

SEQ ID NO: 2966670 - RNA, 22 nt, Human
gcauauugcauacuauuaaaca

SEQ ID NO: 2966671 - RNA, 22 nt, Human
gcagaguggcagucuucaguuu

SEQ ID NO: 2966672 - RNA, 13 nt, Human
gcagaguggcagu

SEQ ID NO: 2966673 - RNA, 15 nt, Human
gcaaacuucagaguu

SEQ ID NO: 2966674 - RNA, 20 nt, Human
gauugggcacaucauuucaa

SEQ ID NO: 2966675 - RNA, 20 nt, Human
gauuuaaacacauuaaaggu

SEQ ID NO: 2966676 - RNA, 22 nt, Human
gaugaaugucaguuguuauuua

SEQ ID NO: 2966677 - RNA, 20 nt, Human
gaguuauugaagcagagugg

SEQ ID NO: 2966678 - RNA, 19 nt, Human
gaguuauugaagcagagug

SEQ ID NO: 2966679 - RNA, 18 nt, Human
gaguuauugaagcagagu

SEQ ID NO: 2966680 - RNA, 14 nt, Human
gaacaucacagcuu

SEQ ID NO: 2966681 - RNA, 20 nt, Human
gaagauucuauguuaauauu

SEQ ID NO: 2966682 - RNA, 23 nt, Human
gaagauucuauguuaauauuuua

SEQ ID NO: 2966683 - RNA, 17 nt, Human
gaagauucuauguuaau

SEQ ID NO: 2966684 - RNA, 23 nt, Human
gaaggugccucuggaugcuguga

SEQ ID NO: 2966685 - RNA, 17 nt, Human
gaaugucaguuguuauu

SEQ ID NO: 2966686 - RNA, 21 nt, Human
gaaugucaguuguuauuuauu

SEQ ID NO: 2966687 - RNA, 22 nt, Human
gaauugauugggcacaucauuu

SEQ ID NO: 2966688 - RNA, 17 nt, Human
gacuggauaguccgucu

SEQ ID NO: 2966689 - RNA, 16 nt, Human
gacuggauaguccguc

SEQ ID NO: 2966690 - RNA, 22 nt, Human
gacuggauaguccgucucugcu

SEQ ID NO: 2966691 - RNA, 21 nt, Human
gacagagccccacccucagau

SEQ ID NO: 2966692 - RNA, 13 nt, Human
gacaguuggguuu

SEQ ID NO: 2966693 - RNA, 17 nt, Human
gacaguuggguuuuuua

SEQ ID NO: 2966694 - RNA, 14 nt, Human
cuuuuugaaauguc

SEQ ID NO: 2966695 - RNA, 15 nt, Human
cuuuuucaauaacug

SEQ ID NO: 2966696 - RNA, 16 nt, Human
cuuguacacucauuca

SEQ ID NO: 2966697 - RNA, 16 nt, Human
cuuguugaggguaugu

SEQ ID NO: 2966698 - RNA, 22 nt, Human
cuuguugaggguauguuuuaua

SEQ ID NO: 2966699 - RNA, 21 nt, Human
cuuguugaggguauguuuuau

SEQ ID NO: 2966700 - RNA, 20 nt, Human
cuuguugaggguauguuuua

SEQ ID NO: 2966701 - RNA, 22 nt, Human
cuugcagcucuccccuucucug

SEQ ID NO: 2966702 - RNA, 14 nt, Human
cuuauuuaaauaga

SEQ ID NO: 2966703 - RNA, 13 nt, Human
cuuauuuaaauag

SEQ ID NO: 2966704 - RNA, 19 nt, Human
cuuauuuaaauagaugaca

SEQ ID NO: 2966705 - RNA, 18 nt, Human
cuuauuuaaauagaugac

SEQ ID NO: 2966706 - RNA, 14 nt, Human
cuuagacccucaug

SEQ ID NO: 2966707 - RNA, 18 nt, Human
cuuagacccucaugcugc

SEQ ID NO: 2966708 - RNA, 19 nt, Human
cuuaauaaacuguggugcu

SEQ ID NO: 2966709 - RNA, 18 nt, Human
cuuaagaaauuuguggaa

SEQ ID NO: 2966710 - RNA, 22 nt, Human
cucccuuccuaugcuguucacu

SEQ ID NO: 2966711 - RNA, 13 nt, Human
cucauucauuacu

SEQ ID NO: 2966712 - RNA, 17 nt, Human
cucauucauuacuaaaa

SEQ ID NO: 2966713 - RNA, 16 nt, Human
cugaacuucagagcau

SEQ ID NO: 2966714 - RNA, 20 nt, Human
cuggacacuucacgcccuug

SEQ ID NO: 2966715 - RNA, 22 nt, Human
cuggacacuucacgcccuuggc

SEQ ID NO: 2966716 - RNA, 17 nt, Human
cugcagggacagagcau

SEQ ID NO: 2966717 - RNA, 14 nt, Human
ccucaauugugaaa

SEQ ID NO: 2966718 - RNA, 18 nt, Human
ccucaauaaacauuucau

SEQ ID NO: 2966719 - RNA, 22 nt, Human
cccuuuuucaauaacuggaaca

SEQ ID NO: 2966720 - RNA, 17 nt, Human
cccuuuuucaauaacug

SEQ ID NO: 2966721 - RNA, 16 nt, Human
cccugugucauuucaa

SEQ ID NO: 2966722 - RNA, 18 nt, Human
ccagaagucaaggcuuag

SEQ ID NO: 2966723 - RNA, 12 nt, Human
ccaauauccuaa

SEQ ID NO: 2966724 - RNA, 13 nt, Human
ccaauauccuaau

SEQ ID NO: 2966725 - RNA, 14 nt, Human
ccaauauccuaaua

SEQ ID NO: 2966726 - RNA, 15 nt, Human
ccaauauccuaauaa

SEQ ID NO: 2966727 - RNA, 16 nt, Human
ccaauauccuaauaaa

SEQ ID NO: 2966728 - RNA, 17 nt, Human
ccaauauccuaauaaaa

SEQ ID NO: 2966729 - RNA, 18 nt, Human
ccaauauccuaauaaaaa

SEQ ID NO: 2966730 - RNA, 19 nt, Human
ccaauauccuaauaaaaag

SEQ ID NO: 2966731 - RNA, 17 nt, Human
cccaggaguuuggccag

SEQ ID NO: 2966732 - RNA, 18 nt, Human
cccaggaguuuggccaga

SEQ ID NO: 2966733 - RNA, 19 nt, Human
cccaggaguuuggccagaa

SEQ ID NO: 2966734 - RNA, 20 nt, Human
cccaggaguuuggccagaag

SEQ ID NO: 2966735 - RNA, 15 nt, Human
cccaggaguuuggcc

SEQ ID NO: 2966736 - RNA, 16 nt, Human
cccaggaguuuggcca

SEQ ID NO: 2966737 - RNA, 21 nt, Human
cucucuguaauaaacucauuu

SEQ ID NO: 2966738 - RNA, 16 nt, Human
cucucuguaauaaacu

SEQ ID NO: 2966739 - RNA, 18 nt, Human
cucaguagucagacugga

SEQ ID NO: 2966740 - RNA, 12 nt, Human
cuauguuuuugu

SEQ ID NO: 2966741 - RNA, 17 nt, Human
cuaucacugguuugguu

SEQ ID NO: 2966742 - RNA, 21 nt, Human
cuauguuaauauuuuaggugu

SEQ ID NO: 2966743 - RNA, 14 nt, Human
cuauguuaauauuu

SEQ ID NO: 2966744 - RNA, 17 nt, Human
cuauguuaauauuuuag

SEQ ID NO: 2966745 - RNA, 15 nt, Human
cuauguuaauauuuu

SEQ ID NO: 2966746 - RNA, 13 nt, Human
cuauguuaauauu

SEQ ID NO: 2966747 - RNA, 19 nt, Human
cuaauaaaaaggugaccau

SEQ ID NO: 2966748 - RNA, 13 nt, Human
cuaacuuggguua

SEQ ID NO: 2966749 - RNA, 13 nt, Human
ccuuucccuuggu

SEQ ID NO: 2966750 - RNA, 16 nt, Human
ccucaugcugccaaua

SEQ ID NO: 2966751 - RNA, 15 nt, Human
ccucaugcugccaau

SEQ ID NO: 2966752 - RNA, 13 nt, Human
ccucaugcugcca

SEQ ID NO: 2966753 - RNA, 14 nt, Human
cccauucuuggccc

SEQ ID NO: 2966754 - RNA, 18 nt, Human
ccacuugagugucaagcu

SEQ ID NO: 2966755 - RNA, 18 nt, Human
ccaggaguuuggccagaa

SEQ ID NO: 2966756 - RNA, 17 nt, Human
ccaggaguuuggccaga

SEQ ID NO: 2966757 - RNA, 16 nt, Human
ccaggaguuuggccag

SEQ ID NO: 2966758 - RNA, 15 nt, Human
ccaggaguuuggcca

SEQ ID NO: 2966759 - RNA, 14 nt, Human
ccaggaguuuggcc

SEQ ID NO: 2966760 - RNA, 16 nt, Human
cauuauguuaauauuu

SEQ ID NO: 2966761 - RNA, 15 nt, Human
cauuauguuaauauu

SEQ ID NO: 2966762 - RNA, 14 nt, Human
cauuauguuaauau

SEQ ID NO: 2966763 - RNA, 17 nt, Human
cauuauguuaauauuuc

SEQ ID NO: 2966764 - RNA, 21 nt, Human
caguuguuauuuauugaaaug

SEQ ID NO: 2966765 - RNA, 19 nt, Human
caguuguuauuuauugaaa

SEQ ID NO: 2966766 - RNA, 14 nt, Human
caguuguuauuuau

SEQ ID NO: 2966767 - RNA, 19 nt, Human
cagacuggauaguccgucu

SEQ ID NO: 2966768 - RNA, 18 nt, Human
caauauuuaaucuuuuau

SEQ ID NO: 2966769 - RNA, 22 nt, Human
caauugugaaaaaauuuacuuu

SEQ ID NO: 2966770 - RNA, 17 nt, Human
cacaaggaaauaaaauu

SEQ ID NO: 2966771 - RNA, 23 nt, Human
caauugugaaaaaauuuacuuua

SEQ ID NO: 2966772 - RNA, 17 nt, Human
auuuucuccaaauguuc

SEQ ID NO: 2966773 - RNA, 20 nt, Human
auuugcacauuaaaugacuc

SEQ ID NO: 2966774 - RNA, 21 nt, Human
auuugcacauuaaaugacucu

SEQ ID NO: 2966775 - RNA, 17 nt, Human
auuucacaguguguggu

SEQ ID NO: 2966776 - RNA, 22 nt, Human
auuuaauuugaagguagaaugu

SEQ ID NO: 2966777 - RNA, 15 nt, Human
auuuaauuugaaggu

SEQ ID NO: 2966778 - RNA, 13 nt, Human
auuuaauuugaag

SEQ ID NO: 2966779 - RNA, 14 nt, Human
auuugcacauuaaa

SEQ ID NO: 2966780 - RNA, 15 nt, Human
auuugcacauuaaau

SEQ ID NO: 2966781 - RNA, 17 nt, Human
auuugcacauuaaauga

SEQ ID NO: 2966782 - RNA, 19 nt, Human
auuugcacauuaaaugacu

SEQ ID NO: 2966783 - RNA, 17 nt, Human
auuucucucaucuguua

SEQ ID NO: 2966784 - RNA, 15 nt, Human
auucauuaguuuuga

SEQ ID NO: 2966785 - RNA, 14 nt, Human
auucauuaguuuug

SEQ ID NO: 2966786 - RNA, 15 nt, Human
auucauucuuuuuga

SEQ ID NO: 2966787 - RNA, 21 nt, Human
auucauucuuuuugaaauguc

SEQ ID NO: 2966788 - RNA, 16 nt, Human
auucauucuuuuugaa

SEQ ID NO: 2966789 - RNA, 21 nt, Human
gggauuuucagcccucagaau

SEQ ID NO: 2966790 - RNA, 17 nt, Human
gggauugaaggaugcug

SEQ ID NO: 2966791 - RNA, 18 nt, Human
aaacuacauugacagauu

SEQ ID NO: 2966792 - RNA, 16 nt, Human
aaacucauuucuagca

SEQ ID NO: 2966793 - RNA, 21 nt, Human
aaacuacauuagguugugaau

SEQ ID NO: 2966794 - RNA, 22 nt, Human
aaacuacauuagguugugaaug

SEQ ID NO: 2966795 - RNA, 20 nt, Human
aaacuacauuagguugugaa

SEQ ID NO: 2966796 - RNA, 22 nt, Human
aaacaugcuguacauacuuuuu

SEQ ID NO: 2966797 - RNA, 20 nt, Human
aaacaugcuguacauacuuu

SEQ ID NO: 2966798 - RNA, 21 nt, Human
aaacaugcuguacauacuuuu

SEQ ID NO: 2966799 - RNA, 15 nt, Human
aaacaugcuguacau

SEQ ID NO: 2966800 - RNA, 16 nt, Human
aaacaugcuguacaua

SEQ ID NO: 2966801 - RNA, 18 nt, Human
aaacaugcuguacauacu

SEQ ID NO: 2966802 - RNA, 20 nt, Human
ggugauuuagcaggaagcug

SEQ ID NO: 2966803 - RNA, 14 nt, Human
ggucugucuuuuaa

SEQ ID NO: 2966804 - RNA, 13 nt, Human
ggucugucuuuua

SEQ ID NO: 2966805 - RNA, 19 nt, Human
aaaggaaugcaaagaugaa

SEQ ID NO: 2966806 - RNA, 22 nt, Human
aaaggaaugcaaagaugaaggu

SEQ ID NO: 2966807 - RNA, 19 nt, Human
aaagaugaaggucuguuuu

SEQ ID NO: 2966808 - RNA, 12 nt, Human
ggauuuucagcc

SEQ ID NO: 2966809 - RNA, 21 nt, Human
ggcccaggaguuuggccagaa

SEQ ID NO: 2966810 - RNA, 23 nt, Human
ggcccaggaguuuggccagaagu

SEQ ID NO: 2966811 - RNA, 22 nt, Human
ggcccaggaguuuggccagaag

SEQ ID NO: 2966812 - RNA, 15 nt, Human
gccuaccaauauuua

SEQ ID NO: 2966813 - RNA, 14 nt, Human
gccacuuuauuucu

SEQ ID NO: 2966814 - RNA, 22 nt, Human
gccagaagucaaggcuuagacc

SEQ ID NO: 2966815 - RNA, 20 nt, Human
gccagaagucaaggcuuaga

SEQ ID NO: 2966816 - RNA, 16 nt, Human
gccagaagucaaggcu

SEQ ID NO: 2966817 - RNA, 23 nt, Human
gccagaagucaaggcuuagaccc

SEQ ID NO: 2966818 - RNA, 16 nt, Human
gcugcugauuuaaaca

SEQ ID NO: 2966819 - RNA, 17 nt, Human
gcuguacauacuuuuug

SEQ ID NO: 2966820 - RNA, 13 nt, Human
gcuguacauacuu

SEQ ID NO: 2966821 - RNA, 14 nt, Human
gcuguacauacuuu

SEQ ID NO: 2966822 - RNA, 15 nt, Human
gcuguacauacuuuu

SEQ ID NO: 2966823 - RNA, 16 nt, Human
gcuguacauacuuuuu

SEQ ID NO: 2966824 - RNA, 17 nt, Human
gaguggaguuacugaac

SEQ ID NO: 2966825 - RNA, 11 nt, Human
gaguggaguua

SEQ ID NO: 2966826 - RNA, 13 nt, Human
gcacaucauuuca

SEQ ID NO: 2966827 - RNA, 11 nt, Human
gaagcagagug

SEQ ID NO: 2966828 - RNA, 12 nt, Human
gaagcagagugg

SEQ ID NO: 2966829 - RNA, 16 nt, Human
gaaguucuauuuauuu

SEQ ID NO: 2966830 - RNA, 22 nt, Human
gacauugacuauuuuuguuuuu

SEQ ID NO: 2966831 - RNA, 14 nt, Human
gacauugacuauuu

SEQ ID NO: 2966832 - RNA, 12 nt, Human
gacauucccugc

SEQ ID NO: 2966833 - RNA, 13 nt, Human
gacucuucccuca

SEQ ID NO: 2966834 - RNA, 13 nt, Human
cuuggcccaggag

SEQ ID NO: 2966835 - RNA, 20 nt, Human
cugcuuauccguuagccgug

SEQ ID NO: 2966836 - RNA, 16 nt, Human
cugcugauuuaaacac

SEQ ID NO: 2966837 - RNA, 22 nt, Human
cugcugauuuaaacacauuaaa

SEQ ID NO: 2966838 - RNA, 17 nt, Human
aaauuuacuuuaaacua

SEQ ID NO: 2966839 - RNA, 20 nt, Human
aaauuuacuuuaaacuacau

SEQ ID NO: 2966840 - RNA, 17 nt, Human
gucaacauuucucaugu

SEQ ID NO: 2966841 - RNA, 13 nt, Human
gucaacauuucuc

SEQ ID NO: 2966842 - RNA, 17 nt, Human
aaaggauacuuauuuaa

SEQ ID NO: 2966843 - RNA, 15 nt, Human
aaaggauacuuauuu

SEQ ID NO: 2966844 - RNA, 15 nt, Human
aaaugauuucacagu

SEQ ID NO: 2966845 - RNA, 22 nt, Human
aacaguaacauagcugugauuu

SEQ ID NO: 2966846 - RNA, 18 nt, Human
aacaggcuuagugaugua

SEQ ID NO: 2966847 - RNA, 15 nt, Human
aacaguaacauagcu

SEQ ID NO: 2966848 - RNA, 22 nt, Human
aacauuuauuugaguggaguua

SEQ ID NO: 2966849 - RNA, 21 nt, Human
aacacucuauaacaaaggaua

SEQ ID NO: 2966850 - RNA, 22 nt, Human
aacacugguuuuaaauauuuug

SEQ ID NO: 2966851 - RNA, 18 nt, Human
aacacugguuuuaaauau

SEQ ID NO: 2966852 - RNA, 16 nt, Human
aaccccaaguuaguuc

SEQ ID NO: 2966853 - RNA, 14 nt, Human
guuuuacaguguuu

SEQ ID NO: 2966854 - RNA, 20 nt, Human
guuuaaugguaguuuuacag

SEQ ID NO: 2966855 - RNA, 14 nt, Human
guuacacaaagaac

SEQ ID NO: 2966856 - RNA, 17 nt, Human
guggcuaacuuggguua

SEQ ID NO: 2966857 - RNA, 17 nt, Human
aagacccucucaaacua

SEQ ID NO: 2966858 - RNA, 23 nt, Human
aagaauugauugggcacaucauu

SEQ ID NO: 2966859 - RNA, 24 nt, Human
aagaaugcaguacuaacauuuauu

SEQ ID NO: 2966860 - RNA, 15 nt, Human
gugccuaauguguuu

SEQ ID NO: 2966861 - RNA, 21 nt, Human
aacuuuaagaacuaaaauguu

SEQ ID NO: 2966862 - RNA, 18 nt, Human
uaaugagcuuaagaaauu

SEQ ID NO: 2966863 - RNA, 18 nt, Human
uaaugguaguuuuacagu

SEQ ID NO: 2966864 - RNA, 13 nt, Human
aaugacucuuccc

SEQ ID NO: 2966865 - RNA, 18 nt, Human
uaauuauugauguuuuca

SEQ ID NO: 2966866 - RNA, 14 nt, Human
aaugagcuuaagaa

SEQ ID NO: 2966867 - RNA, 18 nt, Human
aaugcaguacuaacauuu

SEQ ID NO: 2966868 - RNA, 17 nt, Human
aauaacuggaacacucu

SEQ ID NO: 2966869 - RNA, 20 nt, Human
guuuugaagauucuauguua

SEQ ID NO: 2966870 - RNA, 17 nt, Human
guuuugaagauucuaug

SEQ ID NO: 2966871 - RNA, 16 nt, Human
guuuugaagauucuau

SEQ ID NO: 2966872 - RNA, 13 nt, Human
aauaaaaagguga

SEQ ID NO: 2966873 - RNA, 12 nt, Human
aauaaaaaggug

SEQ ID NO: 2966874 - RNA, 16 nt, Human
aauaaaaaggugacca

SEQ ID NO: 2966875 - RNA, 14 nt, Human
uaaauagaugacau

SEQ ID NO: 2966876 - RNA, 19 nt, Human
uaaauagaugacauugacu

SEQ ID NO: 2966877 - RNA, 21 nt, Human
uaaauagaugacauugacuau

SEQ ID NO: 2966878 - RNA, 15 nt, Human
aauauugguugggau

SEQ ID NO: 2966879 - RNA, 21 nt, Human
aauauugguugggaugacuug

SEQ ID NO: 2966880 - RNA, 21 nt, Human
aauauuuuagguguaaaauaa

SEQ ID NO: 2966881 - RNA, 16 nt, Human
aauaugaugacuguuu

SEQ ID NO: 2966882 - RNA, 17 nt, Human
aauaugaugacuguuuu

SEQ ID NO: 2966883 - RNA, 21 nt, Human
aauauccuaauaaaaagguga

SEQ ID NO: 2966884 - RNA, 20 nt, Human
aauagcauguccuaaugcuu

SEQ ID NO: 2966885 - RNA, 19 nt, Human
aauagaugacauugacuau

SEQ ID NO: 2966886 - RNA, 21 nt, Human
aauagaugacauugacuauuu

SEQ ID NO: 2966887 - RNA, 22 nt, Human
aauagaugacauugacuauuuu

SEQ ID NO: 2966888 - RNA, 19 nt, Human
aauauccuaauaaaaaggu

SEQ ID NO: 2966889 - RNA, 15 nt, Human
aauauccuaauaaaa

SEQ ID NO: 2966890 - RNA, 20 nt, Human
aauauccaauugcugcuugu

SEQ ID NO: 2966891 - RNA, 14 nt, Human
aauauccuaauaaa

SEQ ID NO: 2966892 - RNA, 13 nt, Human
aauauccuaauaa

SEQ ID NO: 2966893 - RNA, 12 nt, Human
aauauccuaaua

SEQ ID NO: 2966894 - RNA, 22 nt, Human
aauaucccuuggacauuuuaug

SEQ ID NO: 2966895 - RNA, 20 nt, Human
aauaucccuuggacauuuua

SEQ ID NO: 2966896 - RNA, 21 nt, Human
aauaucccuuggacauuuuau

SEQ ID NO: 2966897 - RNA, 15 nt, Human
acaaagcuuuugcau

SEQ ID NO: 2966898 - RNA, 22 nt, Human
acaaagcuuuugcauauugcau

SEQ ID NO: 2966899 - RNA, 23 nt, Human
acaaagcuuuugcauauugcaua

SEQ ID NO: 2966900 - RNA, 21 nt, Human
acaaaggauacuuauuuaaau

SEQ ID NO: 2966901 - RNA, 23 nt, Human
acaaaggauacuuauuuaaauag

SEQ ID NO: 2966902 - RNA, 20 nt, Human
uagaugaaugucaguuguua

SEQ ID NO: 2966903 - RNA, 23 nt, Human
aauuugccuaauaugaugacugu

SEQ ID NO: 2966904 - RNA, 10 nt, Human
uacuuuuugg

SEQ ID NO: 2966905 - RNA, 12 nt, Human
aauuugcacauu

SEQ ID NO: 2966906 - RNA, 12 nt, Human
uacuuauuuaaa

SEQ ID NO: 2966907 - RNA, 14 nt, Human
uacuuauuuaaaua

SEQ ID NO: 2966908 - RNA, 21 nt, Human
uacuuauuuaaauagaugaca

SEQ ID NO: 2966909 - RNA, 16 nt, Human
aauuugcacauuaaau

SEQ ID NO: 2966910 - RNA, 14 nt, Human
aauuugcacauuaa

SEQ ID NO: 2966911 - RNA, 16 nt, Human
aauuuacuuuaaacua

SEQ ID NO: 2966912 - RNA, 15 nt, Human
aauuuacuuuaaacu

SEQ ID NO: 2966913 - RNA, 18 nt, Human
aauuuacuuuaaacuaca

SEQ ID NO: 2966914 - RNA, 21 nt, Human
uacuaaaaguuuugagaaauu

SEQ ID NO: 2966915 - RNA, 23 nt, Human
uacugggaaagggauuuucagcc

SEQ ID NO: 2966916 - RNA, 14 nt, Human
uacugaacaguaac

SEQ ID NO: 2966917 - RNA, 20 nt, Human
aauugauugggcacaucauu

SEQ ID NO: 2966918 - RNA, 23 nt, Human
aauugauugggcacaucauuuca

SEQ ID NO: 2966919 - RNA, 19 nt, Human
aauugauugggcacaucau

SEQ ID NO: 2966920 - RNA, 12 nt, Human
uagguugugaau

SEQ ID NO: 2966921 - RNA, 14 nt, Human
acacaccuaacuua

SEQ ID NO: 2966922 - RNA, 23 nt, Human
uaguucaaucuggauucauauuu

SEQ ID NO: 2966923 - RNA, 18 nt, Human
acacaugcugaacaucac

SEQ ID NO: 2966924 - RNA, 19 nt, Human
uauauucauucuuuuugaa

SEQ ID NO: 2966925 - RNA, 20 nt, Human
uauauucauucuuuuugaaa

SEQ ID NO: 2966926 - RNA, 18 nt, Human
acacuugugaauaaagag

SEQ ID NO: 2966927 - RNA, 12 nt, Human
acacuugugaau

SEQ ID NO: 2966928 - RNA, 13 nt, Human
acacuugugaaua

SEQ ID NO: 2966929 - RNA, 15 nt, Human
acacucuauaacaaa

SEQ ID NO: 2966930 - RNA, 20 nt, Human
acagcaacacaaagcuuuug

SEQ ID NO: 2966931 - RNA, 17 nt, Human
acagcaacacaaagcuu

SEQ ID NO: 2966932 - RNA, 20 nt, Human
uauccuagucauucuucccu

SEQ ID NO: 2966933 - RNA, 15 nt, Human
uauuugugagacugu

SEQ ID NO: 2966934 - RNA, 15 nt, Human
acauuagguugugaa

SEQ ID NO: 2966935 - RNA, 16 nt, Human
acauuagguugugaau

SEQ ID NO: 2966936 - RNA, 17 nt, Human
acauuagguugugaaug

SEQ ID NO: 2966937 - RNA, 21 nt, Human
acaugcugaacaucacagcuu

SEQ ID NO: 2966938 - RNA, 14 nt, Human
acaugcugaacauc

SEQ ID NO: 2966939 - RNA, 17 nt, Human
acaugcuguacauacuu

SEQ ID NO: 2966940 - RNA, 19 nt, Human
acaugcuguacauacuuuu

SEQ ID NO: 2966941 - RNA, 19 nt, Human
acauuaaaugacucuuccc

SEQ ID NO: 2966942 - RNA, 21 nt, Human
acauuaaaugacucuucccuc

SEQ ID NO: 2966943 - RNA, 16 nt, Human
ucaagaaugcaguacu

SEQ ID NO: 2966944 - RNA, 14 nt, Human
ucaaggcuuagacc

SEQ ID NO: 2966945 - RNA, 11 nt, Human
acauacuuuuu

SEQ ID NO: 2966946 - RNA, 13 nt, Human
acauacuuuuugg

SEQ ID NO: 2966947 - RNA, 17 nt, Human
acauacuuuuuggguuu

SEQ ID NO: 2966948 - RNA, 20 nt, Human
acauacuuuuuggguuuauu

SEQ ID NO: 2966949 - RNA, 18 nt, Human
acaguuggguuuuuuaag

SEQ ID NO: 2966950 - RNA, 16 nt, Human
acaguuggguuuuuua

SEQ ID NO: 2966951 - RNA, 13 nt, Human
acaucuguuuugu

SEQ ID NO: 2966952 - RNA, 14 nt, Human
acauagcugugauu

SEQ ID NO: 2966953 - RNA, 17 nt, Human
accaauauuuaaucuuu

SEQ ID NO: 2966954 - RNA, 16 nt, Human
accaauauuuaaucuu

SEQ ID NO: 2966955 - RNA, 20 nt, Human
accaauauuuaaucuuuuau

SEQ ID NO: 2966956 - RNA, 23 nt, Human
accaauauuuaaucuuuuaugau

SEQ ID NO: 2966957 - RNA, 14 nt, Human
uccccucuccucca

SEQ ID NO: 2966958 - RNA, 11 nt, Human
uccuaaauagc

SEQ ID NO: 2966959 - RNA, 17 nt, Human
ucccugugucauuucaa

SEQ ID NO: 2966960 - RNA, 16 nt, Human
ucccugugucauuuca

SEQ ID NO: 2966961 - RNA, 18 nt, Human
acuaacauuuauuugagu

SEQ ID NO: 2966962 - RNA, 12 nt, Human
acuaacaggcuu

SEQ ID NO: 2966963 - RNA, 17 nt, Human
acuaacaggcuuaguga

SEQ ID NO: 2966964 - RNA, 18 nt, Human
acuaacaggcuuagugau

SEQ ID NO: 2966965 - RNA, 12 nt, Human
ucauuacuaaaa

SEQ ID NO: 2966966 - RNA, 21 nt, Human
ucauucuuuuugaaaugucaa

SEQ ID NO: 2966967 - RNA, 22 nt, Human
accuggauugugccuaaugugu

SEQ ID NO: 2966968 - RNA, 22 nt, Human
uccaaucugugaugacauuccc

SEQ ID NO: 2966969 - RNA, 18 nt, Human
ucgcuccaccuugcagcu

SEQ ID NO: 2966970 - RNA, 12 nt, Human
ucugacuauaac

SEQ ID NO: 2966971 - RNA, 18 nt, Human
ucucucaucuguuacaca

SEQ ID NO: 2966972 - RNA, 11 nt, Human
acuuuaaacua

SEQ ID NO: 2966973 - RNA, 21 nt, Human
ucuauuucuggaugaaugccc

SEQ ID NO: 2966974 - RNA, 15 nt, Human
ucuuacaucugaaau

SEQ ID NO: 2966975 - RNA, 14 nt, Human
agacaguuggguuu

SEQ ID NO: 2966976 - RNA, 20 nt, Human
ucugugaugacauucccugc

SEQ ID NO: 2966977 - RNA, 17 nt, Human
ucugugaugacauuccc

SEQ ID NO: 2966978 - RNA, 12 nt, Human
ucuguauguguu

SEQ ID NO: 2966979 - RNA, 15 nt, Human
ucuguauguguucua

SEQ ID NO: 2966980 - RNA, 12 nt, Human
agaauguuuuca

SEQ ID NO: 2966981 - RNA, 17 nt, Human
agacccucaugcugcca

SEQ ID NO: 2966982 - RNA, 12 nt, Human
ugaagcagagug

SEQ ID NO: 2966983 - RNA, 13 nt, Human
ugaagcagagugg

SEQ ID NO: 2966984 - RNA, 16 nt, Human
ugaagcagaguggcag

SEQ ID NO: 2966985 - RNA, 15 nt, Human
ugaaugucaguuguu

SEQ ID NO: 2966986 - RNA, 14 nt, Human
ugaaauaaggaaug

SEQ ID NO: 2966987 - RNA, 18 nt, Human
ugaaauaaggaaugauau

SEQ ID NO: 2966988 - RNA, 20 nt, Human
agcaggaagcugugagagca

SEQ ID NO: 2966989 - RNA, 20 nt, Human
agcaguuugguuucuagcau

SEQ ID NO: 2966990 - RNA, 23 nt, Human
agcaguuugguuucuagcaugaa

SEQ ID NO: 2966991 - RNA, 22 nt, Human
agcaguuugguuucuagcauga

SEQ ID NO: 2966992 - RNA, 14 nt, Human
ugaguggaguuacu

SEQ ID NO: 2966993 - RNA, 18 nt, Human
ugagugcaaacuucagag

SEQ ID NO: 2966994 - RNA, 20 nt, Human
ugagugcaaacuucagaguu

SEQ ID NO: 2966995 - RNA, 22 nt, Human
ugagugcaaacuucagaguucu

SEQ ID NO: 2966996 - RNA, 18 nt, Human
ugcaucuagccucaagcu

SEQ ID NO: 2966997 - RNA, 16 nt, Human
ugauuucacagugugu

SEQ ID NO: 2966998 - RNA, 14 nt, Human
ugauuucacagugu

SEQ ID NO: 2966999 - RNA, 16 nt, Human
ugcaaacuucagaguu

SEQ ID NO: 2967000 - RNA, 23 nt, Human
ugcaaagaugaaggucuguuuug

SEQ ID NO: 2967001 - RNA, 12 nt, Human
ugcaaagaugaa

SEQ ID NO: 2967002 - RNA, 15 nt, Human
ugcacauuaaaugac

SEQ ID NO: 2967003 - RNA, 18 nt, Human
ugcacauuaaaugacucu

SEQ ID NO: 2967004 - RNA, 13 nt, Human
ugcacauuaaaug

SEQ ID NO: 2967005 - RNA, 17 nt, Human
uggauucauauuuaauu

SEQ ID NO: 2967006 - RNA, 14 nt, Human
uggauucauauuua

SEQ ID NO: 2967007 - RNA, 20 nt, Human
uggaguuauugaagcagagu

SEQ ID NO: 2967008 - RNA, 14 nt, Human
aggcaggggaaugu

SEQ ID NO: 2967009 - RNA, 19 nt, Human
aggcaggggaauguaugug

SEQ ID NO: 2967010 - RNA, 16 nt, Human
aggcaggggaauguau

SEQ ID NO: 2967011 - RNA, 20 nt, Human
agcuuaagaaauuuguggaa

SEQ ID NO: 2967012 - RNA, 21 nt, Human
ugguuaguagagguacacuug

SEQ ID NO: 2967013 - RNA, 16 nt, Human
aguaaaauguggcagg

SEQ ID NO: 2967014 - RNA, 18 nt, Human
aguaggggucugucuuuu

SEQ ID NO: 2967015 - RNA, 20 nt, Human
aguaggggucugucuuuuaa

SEQ ID NO: 2967016 - RNA, 13 nt, Human
aguagucagacug

SEQ ID NO: 2967017 - RNA, 19 nt, Human
ugucaagcugaccuugcug

SEQ ID NO: 2967018 - RNA, 17 nt, Human
agggcccuuuuucaaua

SEQ ID NO: 2967019 - RNA, 16 nt, Human
uguuuuaucuucuaua

SEQ ID NO: 2967020 - RNA, 21 nt, Human
uguuuuauauagcaagacauu

SEQ ID NO: 2967021 - RNA, 19 nt, Human
uguuuugccaauuugcaca

SEQ ID NO: 2967022 - RNA, 17 nt, Human
uguuuugccaauuugca

SEQ ID NO: 2967023 - RNA, 21 nt, Human
uguuuugccaauuugcacauu

SEQ ID NO: 2967024 - RNA, 22 nt, Human
uguuuugccaauuugcacauua

SEQ ID NO: 2967025 - RNA, 23 nt, Human
uguuuugccaauuugcacauuaa

SEQ ID NO: 2967026 - RNA, 22 nt, Human
uguuugagcaucgcuuaggaga

SEQ ID NO: 2967027 - RNA, 14 nt, Human
uguugcuaacagca

SEQ ID NO: 2967028 - RNA, 15 nt, Human
aguuggguuuuuuaa

SEQ ID NO: 2967029 - RNA, 18 nt, Human
agucuucaguuugcagag

SEQ ID NO: 2967030 - RNA, 20 nt, Human
agucuucaguuugcagagua

SEQ ID NO: 2967031 - RNA, 21 nt, Human
agucuucaguuugcagaguag

SEQ ID NO: 2967032 - RNA, 18 nt, Human
ugugaugacauucccugc

SEQ ID NO: 2967033 - RNA, 16 nt, Human
auauucucagcagagu

SEQ ID NO: 2967034 - RNA, 15 nt, Human
auauucucagcagag

SEQ ID NO: 2967035 - RNA, 17 nt, Human
auauucucagcagagug

SEQ ID NO: 2967036 - RNA, 18 nt, Human
auauucucagcagagugc

SEQ ID NO: 2967037 - RNA, 22 nt, Human
auauugcauacuauuaaacaug

SEQ ID NO: 2967038 - RNA, 20 nt, Human
auauugcauacuauuaaaca

SEQ ID NO: 2967039 - RNA, 23 nt, Human
auauuucugaggagccugcaaca

SEQ ID NO: 2967040 - RNA, 13 nt, Human
uucucacagaaga

SEQ ID NO: 2967041 - RNA, 11 nt, Human
uuauuuauuga

SEQ ID NO: 2967042 - RNA, 13 nt, Human
uuauuuaaauaga

SEQ ID NO: 2967043 - RNA, 19 nt, Human
auagcugugauuuuuggua

SEQ ID NO: 2967044 - RNA, 12 nt, Human
auaacuuuuuau

SEQ ID NO: 2967045 - RNA, 22 nt, Human
auagcugugauuuuugguauuu

SEQ ID NO: 2967046 - RNA, 21 nt, Human
uuauuucucucaucuguuaca

SEQ ID NO: 2967047 - RNA, 20 nt, Human
uucauauuuaauuugaaggu

SEQ ID NO: 2967048 - RNA, 18 nt, Human
uucauagagaauauaaaa

SEQ ID NO: 2967049 - RNA, 11 nt, Human
uucauagagaa

SEQ ID NO: 2967050 - RNA, 18 nt, Human
uucacugguacucugcca

SEQ ID NO: 2967051 - RNA, 15 nt, Human
uucagcccucagaau

SEQ ID NO: 2967052 - RNA, 13 nt, Human
auauaagguuuuu

SEQ ID NO: 2967053 - RNA, 20 nt, Human
uuggcccaggauuauuguca

SEQ ID NO: 2967054 - RNA, 22 nt, Human
uuggcccaggaguuuggccaga

SEQ ID NO: 2967055 - RNA, 21 nt, Human
uuggcccaggaguuuggccag

SEQ ID NO: 2967056 - RNA, 20 nt, Human
uuggcccaggaguuuggcca

SEQ ID NO: 2967057 - RNA, 15 nt, Human
uuggcccaggaguuu

SEQ ID NO: 2967058 - RNA, 14 nt, Human
uuggcccaggaguu

SEQ ID NO: 2967059 - RNA, 13 nt, Human
uuggcccaggagu

SEQ ID NO: 2967060 - RNA, 21 nt, Human
aucugugaugacauucccugc

SEQ ID NO: 2967061 - RNA, 19 nt, Human
aucugugaugacauucccu

SEQ ID NO: 2967062 - RNA, 14 nt, Human
uugagugucaagcu

SEQ ID NO: 2967063 - RNA, 19 nt, Human
aucccuuggacauuuuaug

SEQ ID NO: 2967064 - RNA, 17 nt, Human
aucccuuggacauuuua

SEQ ID NO: 2967065 - RNA, 21 nt, Human
aucccuuggacauuuuauguc

SEQ ID NO: 2967066 - RNA, 20 nt, Human
aucccuuggacauuuuaugu

SEQ ID NO: 2967067 - RNA, 16 nt, Human
aucccuuucccuuggu

SEQ ID NO: 2967068 - RNA, 19 nt, Human
uugccaauuugcacauuaa

SEQ ID NO: 2967069 - RNA, 22 nt, Human
uugccaauuugcacauuaaaug

SEQ ID NO: 2967070 - RNA, 23 nt, Human
uugccaauuugcacauuaaauga

SEQ ID NO: 2967071 - RNA, 16 nt, Human
uuuaucagaacuaugu

SEQ ID NO: 2967072 - RNA, 17 nt, Human
uuuaucagaacuauguu

SEQ ID NO: 2967073 - RNA, 18 nt, Human
uuuaaucuuuuaugauug

SEQ ID NO: 2967074 - RNA, 16 nt, Human
augcccagugagacug

SEQ ID NO: 2967075 - RNA, 15 nt, Human
augcccagugagacu

SEQ ID NO: 2967076 - RNA, 18 nt, Human
uuuaucagaacuauguuu

SEQ ID NO: 2967077 - RNA, 22 nt, Human
uugugaaugcagguuuuaucag

SEQ ID NO: 2967078 - RNA, 16 nt, Human
uuguguacuuuuaaga

SEQ ID NO: 2967079 - RNA, 20 nt, Human
augcaaagaugaaggucugu

SEQ ID NO: 2967080 - RNA, 18 nt, Human
uuuaagggcccuuuuuca

SEQ ID NO: 2967081 - RNA, 20 nt, Human
uuuaagggcccuuuuucaau

SEQ ID NO: 2967082 - RNA, 21 nt, Human
uuuaagggcccuuuuucaaua

SEQ ID NO: 2967083 - RNA, 15 nt, Human
uuuaaucuuuuauga

SEQ ID NO: 2967084 - RNA, 16 nt, Human
uuuaagacuuugguua

SEQ ID NO: 2967085 - RNA, 20 nt, Human
uuuuguuuuuauuaaaagga

SEQ ID NO: 2967086 - RNA, 21 nt, Human
uuuuuauauucucagcagagu

SEQ ID NO: 2967087 - RNA, 22 nt, Human
uuuuuauauucucagcagagug

SEQ ID NO: 2967088 - RNA, 14 nt, Human
uuuuggaaaagaau

SEQ ID NO: 2967089 - RNA, 12 nt, Human
uuuuguguacuu

SEQ ID NO: 2967090 - RNA, 18 nt, Human
uuuuuggaaaagaauaaa

SEQ ID NO: 2967091 - RNA, 15 nt, Human
uuuuugguauuugaa

SEQ ID NO: 2967092 - RNA, 17 nt, Human
auuauugauguuuucau

SEQ ID NO: 2967093 - RNA, 21 nt, Human
auuaguuuugaagauucuaug

SEQ ID NO: 2967094 - RNA, 21 nt, Human
auuccuaacuaucacugguuu

SEQ ID NO: 2967095 - RNA, 23 nt, Human
uuugagaaauuuuuuuuuccagu

SEQ ID NO: 2967096 - RNA, 17 nt, Human
uuuguuuuuauuaaaag

SEQ ID NO: 2967097 - RNA, 14 nt, Human
auguugcuaacagc

SEQ ID NO: 2967098 - RNA, 22 nt, Human
auugcauacuauuaaacaugcu

SEQ ID NO: 2967099 - RNA, 19 nt, Human
auugcauacuauuaaacau

SEQ ID NO: 2967100 - RNA, 20 nt, Human
auugcauacuauuaaacaug

SEQ ID NO: 2967101 - RNA, 19 nt, Human
auugccuuuuuauaacuuu

SEQ ID NO: 2967102 - RNA, 20 nt, Human
auugccuuuuuauaacuuuu

SEQ ID NO: 2967103 - RNA, 21 nt, Human
auugccuuuuuauaacuuuuu

SEQ ID NO: 2967104 - RNA, 15 nt, Human
auugaaguaaaaugu

SEQ ID NO: 2967105 - RNA, 24 nt, Human
auuccuagaaacugacacaugcug

SEQ ID NO: 2967106 - RNA, 17 nt, Human
auugaaggaugcugucu

SEQ ID NO: 2967107 - RNA, 14 nt, Human
auugaaguaaaaug

SEQ ID NO: 2967108 - RNA, 17 nt, Human
auugauguuuucauaga

SEQ ID NO: 2967109 - RNA, 16 nt, Human
auugauguuuucauag

SEQ ID NO: 2967110 - RNA, 13 nt, Human
auugauguuuuca

SEQ ID NO: 2967111 - RNA, 18 nt, Human
auugcauacuauuaaaca

SEQ ID NO: 2967112 - RNA, 17 nt, Human
auugcauacuauuaaac

SEQ ID NO: 2967113 - RNA, 17 nt, Human
auugcaccuggauguac

SEQ ID NO: 2967114 - RNA, 22 nt, Human
auuuauugaaaugauuucacag

SEQ ID NO: 2967115 - RNA, 15 nt, Human
auuuauugaaaugau

SEQ ID NO: 2967116 - RNA, 13 nt, Human
auuuauugaaaug

SEQ ID NO: 2967117 - RNA, 12 nt, Human
auuuauuacaac

SEQ ID NO: 2967118 - RNA, 15 nt, Human
auuuacuuuaaacua

SEQ ID NO: 2967119 - RNA, 14 nt, Human
auuuaaauagauga

SEQ ID NO: 2967120 - RNA, 15 nt, Human
auuuaaauagaugac

SEQ ID NO: 2967121 - RNA, 22 nt, Human
aaauagcagcccucaauuguga

SEQ ID NO: 2967122 - RNA, 21 nt, Human
aaauagaugacauugacuauu

SEQ ID NO: 2967123 - RNA, 14 nt, Human
aaauagaugacauu

SEQ ID NO: 2967124 - RNA, 22 nt, Human
aagacagagccccacccucaga

SEQ ID NO: 2967125 - RNA, 20 nt, Human
aaggcaggggaauguaugug

SEQ ID NO: 2967126 - RNA, 18 nt, Human
aaggcaggggaauguaug

SEQ ID NO: 2967127 - RNA, 19 nt, Human
aauuccuguuuuuauuauu

SEQ ID NO: 2967128 - RNA, 21 nt, Human
aauuccuguuuuuauuauuaa

SEQ ID NO: 2967129 - RNA, 22 nt, Human
aauuccuguuuuuauuauuaac

SEQ ID NO: 2967130 - RNA, 13 nt, Human
aauuccuguuuuu

SEQ ID NO: 2967131 - RNA, 20 nt, Human
aauuaugguuaguagaggua

SEQ ID NO: 2967132 - RNA, 14 nt, Human
acaucauuucaaga

SEQ ID NO: 2967133 - RNA, 19 nt, Human
acuggaacacucuauaaca

SEQ ID NO: 2967134 - RNA, 13 nt, Human
acugacacaugcu

SEQ ID NO: 2967135 - RNA, 22 nt, Human
acccucaugcugccaauauccu

SEQ ID NO: 2967136 - RNA, 16 nt, Human
acccucaugcugccaa

SEQ ID NO: 2967137 - RNA, 14 nt, Human
acccucaugcugcc

SEQ ID NO: 2967138 - RNA, 20 nt, Human
acccucagaugcacaugagc

SEQ ID NO: 2967139 - RNA, 14 nt, Human
acgcacacugucug

SEQ ID NO: 2967140 - RNA, 13 nt, Human
aguuugcagagua

SEQ ID NO: 2967141 - RNA, 17 nt, Human
aguuguuauuuauugaa

SEQ ID NO: 2967142 - RNA, 14 nt, Human
agugcuauugcaga

SEQ ID NO: 2967143 - RNA, 21 nt, Human
auaagugcuauugcagagccg

SEQ ID NO: 2967144 - RNA, 22 nt, Human
agucuggcagacuuucuucucu

SEQ ID NO: 2967145 - RNA, 22 nt, Human
agugcuacacaccuaacuuaug

SEQ ID NO: 2967146 - RNA, 18 nt, Human
agugauguaauuaugguu

SEQ ID NO: 2967147 - RNA, 15 nt, Human
aucaucccuuucccu

SEQ ID NO: 2967148 - RNA, 19 nt, Human
aucaucccuuucccuuggu

SEQ ID NO: 2967149 - RNA, 16 nt, Human
auagcaagacauuaua

SEQ ID NO: 2967150 - RNA, 23 nt, Human
augagcuuaagaaauuuguggaa

SEQ ID NO: 2967151 - RNA, 14 nt, Human
augagcuuaagaaa

SEQ ID NO: 2967152 - RNA, 12 nt, Human
aggcuuagaccc

SEQ ID NO: 2967153 - RNA, 21 nt, Human
aggcuuagacccucaugcugc

SEQ ID NO: 2967154 - RNA, 14 nt, Human
aggcuuagacccuc

SEQ ID NO: 2967155 - RNA, 22 nt, Human
aggcuuagacccucaugcugcc

SEQ ID NO: 2967156 - RNA, 18 nt, Human
agaagucuucuauuuauu

SEQ ID NO: 2967157 - RNA, 19 nt, Human
agaagucaaggcuuagacc

SEQ ID NO: 2967158 - RNA, 18 nt, Human
agaagucaaggcuuagac

SEQ ID NO: 2967159 - RNA, 17 nt, Human
agaagucaaggcuuaga

SEQ ID NO: 2967160 - RNA, 16 nt, Human
agaagucaaggcuuag

SEQ ID NO: 2967161 - RNA, 23 nt, Human
agaaugcaguacuaacauuuauu

SEQ ID NO: 2967162 - RNA, 13 nt, Human
agcaaaucaguuu

SEQ ID NO: 2967163 - RNA, 23 nt, Human
agaugacauugacuauuuuuguu

SEQ ID NO: 2967164 - RNA, 18 nt, Human
agaugacauugacuauuu

SEQ ID NO: 2967165 - RNA, 15 nt, Human
agaugaaugucaguu

SEQ ID NO: 2967166 - RNA, 11 nt, Human
agaugaauguc

SEQ ID NO: 2967167 - RNA, 18 nt, Human
agauucuauguuaauauu

SEQ ID NO: 2967168 - RNA, 19 nt, Human
agcaucgcuuaggagaagu

SEQ ID NO: 2967169 - RNA, 17 nt, Human
caacauaacucaagucu

SEQ ID NO: 2967170 - RNA, 23 nt, Human
caacugggguggguggggcagug

SEQ ID NO: 2967171 - RNA, 20 nt, Human
caauauccuaauaaaaaggu

SEQ ID NO: 2967172 - RNA, 19 nt, Human
caauauccuaauaaaaagg

SEQ ID NO: 2967173 - RNA, 18 nt, Human
caauauccuaauaaaaag

SEQ ID NO: 2967174 - RNA, 16 nt, Human
caauauccuaauaaaa

SEQ ID NO: 2967175 - RNA, 15 nt, Human
caauauccuaauaaa

SEQ ID NO: 2967176 - RNA, 14 nt, Human
caauauccuaauaa

SEQ ID NO: 2967177 - RNA, 13 nt, Human
caauauccuaaua

SEQ ID NO: 2967178 - RNA, 12 nt, Human
caauauccuaau

SEQ ID NO: 2967179 - RNA, 16 nt, Human
caccaugggauuaaua

SEQ ID NO: 2967180 - RNA, 16 nt, Human
cccaggaguuuggcca

SEQ ID NO: 2967181 - RNA, 15 nt, Human
cccaggaguuuggcc

SEQ ID NO: 2967182 - RNA, 20 nt, Human
cccaggaguuuggccagaag

SEQ ID NO: 2967183 - RNA, 19 nt, Human
cccaggaguuuggccagaa

SEQ ID NO: 2967184 - RNA, 18 nt, Human
cccaggaguuuggccaga

SEQ ID NO: 2967185 - RNA, 17 nt, Human
cccaggaguuuggccag

SEQ ID NO: 2967186 - RNA, 19 nt, Human
ccaauauccuaauaaaaag

SEQ ID NO: 2967187 - RNA, 18 nt, Human
ccaauauccuaauaaaaa

SEQ ID NO: 2967188 - RNA, 17 nt, Human
ccaauauccuaauaaaa

SEQ ID NO: 2967189 - RNA, 16 nt, Human
ccaauauccuaauaaa

SEQ ID NO: 2967190 - RNA, 15 nt, Human
ccaauauccuaauaa

SEQ ID NO: 2967191 - RNA, 14 nt, Human
ccaauauccuaaua

SEQ ID NO: 2967192 - RNA, 13 nt, Human
ccaauauccuaau

SEQ ID NO: 2967193 - RNA, 12 nt, Human
ccaauauccuaa

SEQ ID NO: 2967194 - RNA, 18 nt, Human
ccagaagucaaggcuuag

SEQ ID NO: 2967195 - RNA, 16 nt, Human
cccugugucauuucaa

SEQ ID NO: 2967196 - RNA, 17 nt, Human
cccuuuuucaauaacug

SEQ ID NO: 2967197 - RNA, 22 nt, Human
cccuuuuucaauaacuggaaca

SEQ ID NO: 2967198 - RNA, 18 nt, Human
ccucaauaaacauuucau

SEQ ID NO: 2967199 - RNA, 14 nt, Human
ccucaauugugaaa

SEQ ID NO: 2967200 - RNA, 17 nt, Human
cugcagggacagagcau

SEQ ID NO: 2967201 - RNA, 22 nt, Human
cuggacacuucacgcccuuggc

SEQ ID NO: 2967202 - RNA, 20 nt, Human
cuggacacuucacgcccuug

SEQ ID NO: 2967203 - RNA, 16 nt, Human
cugaacuucagagcau

SEQ ID NO: 2967204 - RNA, 17 nt, Human
cucauucauuacuaaaa

SEQ ID NO: 2967205 - RNA, 13 nt, Human
cucauucauuacu

SEQ ID NO: 2967206 - RNA, 22 nt, Human
cucccuuccuaugcuguucacu

SEQ ID NO: 2967207 - RNA, 18 nt, Human
cuuaagaaauuuguggaa

SEQ ID NO: 2967208 - RNA, 19 nt, Human
cuuaauaaacuguggugcu

SEQ ID NO: 2967209 - RNA, 18 nt, Human
cuuagacccucaugcugc

SEQ ID NO: 2967210 - RNA, 14 nt, Human
cuuagacccucaug

SEQ ID NO: 2967211 - RNA, 18 nt, Human
cuuauuuaaauagaugac

SEQ ID NO: 2967212 - RNA, 19 nt, Human
cuuauuuaaauagaugaca

SEQ ID NO: 2967213 - RNA, 13 nt, Human
cuuauuuaaauag

SEQ ID NO: 2967214 - RNA, 14 nt, Human
cuuauuuaaauaga

SEQ ID NO: 2967215 - RNA, 22 nt, Human
cuugcagcucuccccuucucug

SEQ ID NO: 2967216 - RNA, 20 nt, Human
cuuguugaggguauguuuua

SEQ ID NO: 2967217 - RNA, 21 nt, Human
cuuguugaggguauguuuuau

SEQ ID NO: 2967218 - RNA, 22 nt, Human
cuuguugaggguauguuuuaua

SEQ ID NO: 2967219 - RNA, 16 nt, Human
cuuguugaggguaugu

SEQ ID NO: 2967220 - RNA, 16 nt, Human
cuuguacacucauuca

SEQ ID NO: 2967221 - RNA, 15 nt, Human
cuuuuucaauaacug

SEQ ID NO: 2967222 - RNA, 14 nt, Human
cuuuuugaaauguc

SEQ ID NO: 2967223 - RNA, 17 nt, Human
gacaguuggguuuuuua

SEQ ID NO: 2967224 - RNA, 13 nt, Human
gacaguuggguuu

SEQ ID NO: 2967225 - RNA, 21 nt, Human
gacagagccccacccucagau

SEQ ID NO: 2967226 - RNA, 22 nt, Human
gacuggauaguccgucucugcu

SEQ ID NO: 2967227 - RNA, 16 nt, Human
gacuggauaguccguc

SEQ ID NO: 2967228 - RNA, 17 nt, Human
gacuggauaguccgucu

SEQ ID NO: 2967229 - RNA, 22 nt, Human
gaauugauugggcacaucauuu

SEQ ID NO: 2967230 - RNA, 21 nt, Human
gaaugucaguuguuauuuauu

SEQ ID NO: 2967231 - RNA, 17 nt, Human
gaaugucaguuguuauu

SEQ ID NO: 2967232 - RNA, 23 nt, Human
gaaggugccucuggaugcuguga

SEQ ID NO: 2967233 - RNA, 17 nt, Human
gaagauucuauguuaau

SEQ ID NO: 2967234 - RNA, 23 nt, Human
gaagauucuauguuaauauuuua

SEQ ID NO: 2967235 - RNA, 20 nt, Human
gaagauucuauguuaauauu

SEQ ID NO: 2967236 - RNA, 14 nt, Human
gaacaucacagcuu

SEQ ID NO: 2967237 - RNA, 18 nt, Human
gaguuauugaagcagagu

SEQ ID NO: 2967238 - RNA, 19 nt, Human
gaguuauugaagcagagug

SEQ ID NO: 2967239 - RNA, 20 nt, Human
gaguuauugaagcagagugg

SEQ ID NO: 2967240 - RNA, 22 nt, Human
gaugaaugucaguuguuauuua

SEQ ID NO: 2967241 - RNA, 20 nt, Human
gauuuaaacacauuaaaggu

SEQ ID NO: 2967242 - RNA, 20 nt, Human
gauugggcacaucauuucaa

SEQ ID NO: 2967243 - RNA, 15 nt, Human
gcaaacuucagaguu

SEQ ID NO: 2967244 - RNA, 13 nt, Human
gcagaguggcagu

SEQ ID NO: 2967245 - RNA, 22 nt, Human
gcagaguggcagucuucaguuu

SEQ ID NO: 2967246 - RNA, 22 nt, Human
gcauauugcauacuauuaaaca

SEQ ID NO: 2967247 - RNA, 17 nt, Human
gcagugcuuggcccagg

SEQ ID NO: 2967248 - RNA, 16 nt, Human
gcagugcuuggcccag

SEQ ID NO: 2967249 - RNA, 19 nt, Human
gcguccugucggagcccug

SEQ ID NO: 2967250 - RNA, 14 nt, Human
gcuaacuuggguua

SEQ ID NO: 2967251 - RNA, 22 nt, Human
gcguccugucggagcccugucu

SEQ ID NO: 2967252 - RNA, 19 nt, Human
gccuuuuuauaacuuuuua

SEQ ID NO: 2967253 - RNA, 10 nt, Human
ggaaaagaau

SEQ ID NO: 2967254 - RNA, 22 nt, Human
gcuuuaccaauugaaguaaaau

SEQ ID NO: 2967255 - RNA, 23 nt, Human
gcuuggcccaggaguuuggccag

SEQ ID NO: 2967256 - RNA, 13 nt, Human
gcuuggcccagga

SEQ ID NO: 2967257 - RNA, 22 nt, Human
gcuuggcccaggaguuuggcca

SEQ ID NO: 2967258 - RNA, 16 nt, Human
gcuuggcccaggaguu

SEQ ID NO: 2967259 - RNA, 15 nt, Human
gcuuggcccaggagu

SEQ ID NO: 2967260 - RNA, 14 nt, Human
gcuuggcccaggag

SEQ ID NO: 2967261 - RNA, 23 nt, Human
ggagcccugucuccucucucugu

SEQ ID NO: 2967262 - RNA, 21 nt, Human
ggcuuaauuauugauguuuuc

SEQ ID NO: 2967263 - RNA, 16 nt, Human
ggcuuagacccucaug

SEQ ID NO: 2967264 - RNA, 17 nt, Human
ggcuuagugauguaauu

SEQ ID NO: 2967265 - RNA, 23 nt, Human
gggcagugcuuggcccaggaguu

SEQ ID NO: 2967266 - RNA, 22 nt, Human
gggcagugcuuggcccaggagu

SEQ ID NO: 2967267 - RNA, 20 nt, Human
gggcagugcuuggcccagga

SEQ ID NO: 2967268 - RNA, 19 nt, Human
gggcagugcuuggcccagg

SEQ ID NO: 2967269 - RNA, 18 nt, Human
gggcagugcuuggcccag

SEQ ID NO: 2967270 - RNA, 18 nt, Human
gggauaucacuuccauga

SEQ ID NO: 2967271 - RNA, 16 nt, Human
gggcacaucauuucaa

SEQ ID NO: 2967272 - RNA, 16 nt, Human
gguuauuuuacuuuuu

SEQ ID NO: 2967273 - RNA, 23 nt, Human
ggggcagugcuuggcccaggagu

SEQ ID NO: 2967274 - RNA, 21 nt, Human
ggggcagugcuuggcccagga

SEQ ID NO: 2967275 - RNA, 20 nt, Human
uauaacaaaggauacuuauu

SEQ ID NO: 2967276 - RNA, 22 nt, Human
uauaacaaaggauacuuauuua

SEQ ID NO: 2967277 - RNA, 23 nt, Human
uauaauuccuguuuuuauuauua

SEQ ID NO: 2967278 - RNA, 13 nt, Human
uagauguugcuaa

SEQ ID NO: 2967279 - RNA, 11 nt, Human
uagauguugcu

SEQ ID NO: 2967280 - RNA, 20 nt, Human
uagcagcccucaauugugaa

SEQ ID NO: 2967281 - RNA, 23 nt, Human
uagcaguaaaaaaugguguuuua

SEQ ID NO: 2967282 - RNA, 13 nt, Human
uaccaauauuuaa

SEQ ID NO: 2967283 - RNA, 16 nt, Human
uaccaauauuuaaucu

SEQ ID NO: 2967284 - RNA, 21 nt, Human
uaccaauauuuaaucuuuuau

SEQ ID NO: 2967285 - RNA, 23 nt, Human
uaccaauauuuaaucuuuuauga

SEQ ID NO: 2967286 - RNA, 13 nt, Human
uacacuugugaau

SEQ ID NO: 2967287 - RNA, 14 nt, Human
uaacaggcuuagug

SEQ ID NO: 2967288 - RNA, 21 nt, Human
uaacaggcuuagugauguaau

SEQ ID NO: 2967289 - RNA, 18 nt, Human
uaacagcaacacaaagcu

SEQ ID NO: 2967290 - RNA, 20 nt, Human
uaacagcaacacaaagcuuu

SEQ ID NO: 2967291 - RNA, 16 nt, Human
uaagaacuaaaauguu

SEQ ID NO: 2967292 - RNA, 18 nt, Human
guuuagaugaaugucagu

SEQ ID NO: 2967293 - RNA, 17 nt, Human
guuuagaugaaugucag

SEQ ID NO: 2967294 - RNA, 18 nt, Human
guuuuuauuauuaacaaa

SEQ ID NO: 2967295 - RNA, 15 nt, Human
guuuuuauuauuaac

SEQ ID NO: 2967296 - RNA, 14 nt, Human
guuuuuauuaaaag

SEQ ID NO: 2967297 - RNA, 17 nt, Human
guuuuuauuaaaaggaa

SEQ ID NO: 2967298 - RNA, 13 nt, Human
guuuuuauuaaaa

SEQ ID NO: 2967299 - RNA, 13 nt, Human
guuuguucccugu

SEQ ID NO: 2967300 - RNA, 17 nt, Human
guuuuguguacuuuuaa

SEQ ID NO: 2967301 - RNA, 15 nt, Human
guuuuguguacuuuu

SEQ ID NO: 2967302 - RNA, 16 nt, Human
guuuuguguacuuuua

SEQ ID NO: 2967303 - RNA, 19 nt, Human
uaaauauuuugacuuguug

SEQ ID NO: 2967304 - RNA, 15 nt, Human
uaaauauuuugacuu

SEQ ID NO: 2967305 - RNA, 18 nt, Human
uaaauauuuugacuuguu

SEQ ID NO: 2967306 - RNA, 23 nt, Human
uaaauauugguugggaugacuug

SEQ ID NO: 2967307 - RNA, 22 nt, Human
uaaauauugguugggaugacuu

SEQ ID NO: 2967308 - RNA, 22 nt, Human
uaaauaucccuuggacauuuua

SEQ ID NO: 2967309 - RNA, 12 nt, Human
uaaacacauuaa

SEQ ID NO: 2967310 - RNA, 22 nt, Human
uauuuuagguguaaaauaauua

SEQ ID NO: 2967311 - RNA, 15 nt, Human
uauuuuacuuuuugg

SEQ ID NO: 2967312 - RNA, 14 nt, Human
uauuuuacuuuuug

SEQ ID NO: 2967313 - RNA, 13 nt, Human
uauuuuacuuuuu

SEQ ID NO: 2967314 - RNA, 12 nt, Human
uauuuuacuuuu

SEQ ID NO: 2967315 - RNA, 23 nt, Human
uauuucugaggagccugcaacau

SEQ ID NO: 2967316 - RNA, 23 nt, Human
uauuugaguggaguuacugaaca

SEQ ID NO: 2967317 - RNA, 12 nt, Human
uauuuauugaaa

SEQ ID NO: 2967318 - RNA, 20 nt, Human
uauuuauugaaaugauuuca

SEQ ID NO: 2967319 - RNA, 16 nt, Human
uauuuauugaaaugau

SEQ ID NO: 2967320 - RNA, 12 nt, Human
ucaaacuaacag

SEQ ID NO: 2967321 - RNA, 13 nt, Human
ucaaacuaacagg

SEQ ID NO: 2967322 - RNA, 18 nt, Human
uauuuuuguuuuuauuaa

SEQ ID NO: 2967323 - RNA, 20 nt, Human
uauuuuuguuuuuauuaaaa

SEQ ID NO: 2967324 - RNA, 18 nt, Human
ucaagcugaccuugcuga

SEQ ID NO: 2967325 - RNA, 16 nt, Human
ucagcagagugcuuua

SEQ ID NO: 2967326 - RNA, 22 nt, Human
ucagcagagugcuuuaccaauu

SEQ ID NO: 2967327 - RNA, 11 nt, Human
ucagcagagug

SEQ ID NO: 2967328 - RNA, 12 nt, Human
ucagcagagugc

SEQ ID NO: 2967329 - RNA, 15 nt, Human
ucaucuguuacacaa

SEQ ID NO: 2967330 - RNA, 17 nt, Human
ucccccuggcacugguu

SEQ ID NO: 2967331 - RNA, 15 nt, Human
ucccauucuuggccc

SEQ ID NO: 2967332 - RNA, 16 nt, Human
ucccauucuuggccca

SEQ ID NO: 2967333 - RNA, 15 nt, Human
ucucaaacuaacagg

SEQ ID NO: 2967334 - RNA, 17 nt, Human
ucucaaacuaacaggcu

SEQ ID NO: 2967335 - RNA, 14 nt, Human
ucuuuuugaaaugu

SEQ ID NO: 2967336 - RNA, 24 nt, Human
ucuguaauaaacucauuucuagca

SEQ ID NO: 2967337 - RNA, 23 nt, Human
ucuguaauaaacucauuucuagc

SEQ ID NO: 2967338 - RNA, 19 nt, Human
ucuguaauaaacucauuuc

SEQ ID NO: 2967339 - RNA, 20 nt, Human
ucuguuacacaaagaaccac

SEQ ID NO: 2967340 - RNA, 22 nt, Human
ucuucuauuuauuuauuuauuc

SEQ ID NO: 2967341 - RNA, 22 nt, Human
ucuucuauauaauuccuguuuu

SEQ ID NO: 2967342 - RNA, 12 nt, Human
ucuucuauuuau

SEQ ID NO: 2967343 - RNA, 13 nt, Human
ucuucuauauaau

SEQ ID NO: 2967344 - RNA, 15 nt, Human
ugcuuuuuuuggccu

SEQ ID NO: 2967345 - RNA, 17 nt, Human
uggccagaagucaaggc

SEQ ID NO: 2967346 - RNA, 13 nt, Human
uggguuuauuugg

SEQ ID NO: 2967347 - RNA, 18 nt, Human
uggggcagugcuuggccc

SEQ ID NO: 2967348 - RNA, 22 nt, Human
uggggcagugcuuggcccagga

SEQ ID NO: 2967349 - RNA, 20 nt, Human
uggggcagugcuuggcccag

SEQ ID NO: 2967350 - RNA, 23 nt, Human
uggggcagugcuuggcccaggag

SEQ ID NO: 2967351 - RNA, 13 nt, Human
ugcacaucuguuu

SEQ ID NO: 2967352 - RNA, 21 nt, Human
ugcacacuguccuauuauauu

SEQ ID NO: 2967353 - RNA, 23 nt, Human
ugccuaccaauauuuaaucuuuu

SEQ ID NO: 2967354 - RNA, 17 nt, Human
ugccuaccaauauuuaa

SEQ ID NO: 2967355 - RNA, 17 nt, Human
ugccuaauaugaugacu

SEQ ID NO: 2967356 - RNA, 22 nt, Human
ugccuaauaugaugacuguuuu

SEQ ID NO: 2967357 - RNA, 18 nt, Human
uguuuuuauuauuaacaa

SEQ ID NO: 2967358 - RNA, 15 nt, Human
uguuuuuauuauuaa

SEQ ID NO: 2967359 - RNA, 19 nt, Human
ugugugcguccugucggag

SEQ ID NO: 2967360 - RNA, 15 nt, Human
uguuuaaugguaguu

SEQ ID NO: 2967361 - RNA, 21 nt, Human
uguucuccagucauuauguua

SEQ ID NO: 2967362 - RNA, 16 nt, Human
uguugaaacuuuaaga

SEQ ID NO: 2967363 - RNA, 18 nt, Human
ugucaguuguuauuuauu

SEQ ID NO: 2967364 - RNA, 17 nt, Human
ugucaguuguuauuuau

SEQ ID NO: 2967365 - RNA, 22 nt, Human
ugucaguuguuauuuauugaaa

SEQ ID NO: 2967366 - RNA, 21 nt, Human
uguaacuguuuagaugaaugu

SEQ ID NO: 2967367 - RNA, 12 nt, Human
uguguacuuuua

SEQ ID NO: 2967368 - RNA, 15 nt, Human
uguguacuuuuaaga

SEQ ID NO: 2967369 - RNA, 14 nt, Human
ugugcguccugucg

SEQ ID NO: 2967370 - RNA, 12 nt, Human
ugugaaaaaauu

SEQ ID NO: 2967371 - RNA, 17 nt, Human
ugugaaaaaauuuacuu

SEQ ID NO: 2967372 - RNA, 23 nt, Human
ugugaaaaaauuuacuuuaaacu

SEQ ID NO: 2967373 - RNA, 21 nt, Human
ugugaauaaagagggugggug

SEQ ID NO: 2967374 - RNA, 14 nt, Human
ugugaaugcagguu

SEQ ID NO: 2967375 - RNA, 20 nt, Human
ugugaaugcagguuuuauca

SEQ ID NO: 2967376 - RNA, 17 nt, Human
uuggguuuauuuggaaa

SEQ ID NO: 2967377 - RNA, 12 nt, Human
uuggguuuauuu

SEQ ID NO: 2967378 - RNA, 20 nt, Human
uuggccagaagucaaggcuu

SEQ ID NO: 2967379 - RNA, 20 nt, Human
uuguacacucauucauuacu

SEQ ID NO: 2967380 - RNA, 20 nt, Human
uugcuaacagcaacacaaag

SEQ ID NO: 2967381 - RNA, 13 nt, Human
uugcuaacagcaa

SEQ ID NO: 2967382 - RNA, 20 nt, Human
uuggacauuuuaugucuuuc

SEQ ID NO: 2967383 - RNA, 18 nt, Human
uuggacauuuuaugucuu

SEQ ID NO: 2967384 - RNA, 17 nt, Human
uuggacauuuuaugucu

SEQ ID NO: 2967385 - RNA, 16 nt, Human
uuggacauuuuauguc

SEQ ID NO: 2967386 - RNA, 15 nt, Human
uuggacauuuuaugu

SEQ ID NO: 2967387 - RNA, 21 nt, Human
uuggaaaggaaugcaaagaug

SEQ ID NO: 2967388 - RNA, 14 nt, Human
uugaaacuuuaaga

SEQ ID NO: 2967389 - RNA, 18 nt, Human
uugaggguauguuuuaua

SEQ ID NO: 2967390 - RNA, 19 nt, Human
uugcauacuauuaaacaug

SEQ ID NO: 2967391 - RNA, 18 nt, Human
uugcauacuauuaaacau

SEQ ID NO: 2967392 - RNA, 16 nt, Human
uugcauacuauuaaac

SEQ ID NO: 2967393 - RNA, 12 nt, Human
uugacuauuuuu

SEQ ID NO: 2967394 - RNA, 19 nt, Human
uuacuaaaaguuuugagaa

SEQ ID NO: 2967395 - RNA, 20 nt, Human
uuacuaaaaguuuugagaaa

SEQ ID NO: 2967396 - RNA, 19 nt, Human
uucaaucuggauucauauu

SEQ ID NO: 2967397 - RNA, 23 nt, Human
uucaaucuggauucauauuuaau

SEQ ID NO: 2967398 - RNA, 20 nt, Human
uucaaucuggauucauauuu

SEQ ID NO: 2967399 - RNA, 17 nt, Human
uuccacuugagugucaa

SEQ ID NO: 2967400 - RNA, 21 nt, Human
uuccacuugagugucaagcug

SEQ ID NO: 2967401 - RNA, 15 nt, Human
uucaguuuaucuguu

SEQ ID NO: 2967402 - RNA, 18 nt, Human
uucaguuuaucuguucau

SEQ ID NO: 2967403 - RNA, 21 nt, Human
uucuauuuauuuauuuauuca

SEQ ID NO: 2967404 - RNA, 14 nt, Human
uucuauuuauuugu

SEQ ID NO: 2967405 - RNA, 17 nt, Human
uucuccagucauuaugu

SEQ ID NO: 2967406 - RNA, 19 nt, Human
uucuccagucauuauguua

SEQ ID NO: 2967407 - RNA, 13 nt, Human
uuuaaucuuuuau

SEQ ID NO: 2967408 - RNA, 15 nt, Human
uuuacuuuuuggaaa

SEQ ID NO: 2967409 - RNA, 23 nt, Human
uuuacuuuuuggaaaagaauaaa

SEQ ID NO: 2967410 - RNA, 16 nt, Human
uuuauuuauuuauuca

SEQ ID NO: 2967411 - RNA, 22 nt, Human
uuuauuuggaaaggaaugcaaa

SEQ ID NO: 2967412 - RNA, 22 nt, Human
uuuuaucagaacuauguuuuug

SEQ ID NO: 2967413 - RNA, 15 nt, Human
uuuuauauucucagc

SEQ ID NO: 2967414 - RNA, 13 nt, Human
uuuuauauagcaa

SEQ ID NO: 2967415 - RNA, 23 nt, Human
uuuucaauaacuggaacacucua

SEQ ID NO: 2967416 - RNA, 13 nt, Human
uuuucaauaacug

SEQ ID NO: 2967417 - RNA, 16 nt, Human
uuuucaauaacuggaa

SEQ ID NO: 2967418 - RNA, 19 nt, Human
uuuucaauaacuggaacac

SEQ ID NO: 2967419 - RNA, 11 nt, Human
uuugcagagua

SEQ ID NO: 2967420 - RNA, 22 nt, Human
caauauccuaauaaaaagguga

SEQ ID NO: 2967421 - RNA, 16 nt, Human
cacaaagcuuuugcau

SEQ ID NO: 2967422 - RNA, 13 nt, Human
cacaaagcuuuug

SEQ ID NO: 2967423 - RNA, 18 nt, Human
caauaacuggaacacucu

SEQ ID NO: 2967424 - RNA, 21 nt, Human
caauauccuaauaaaaaggug

SEQ ID NO: 2967425 - RNA, 22 nt, Human
caaggcuuagacccucaugcug

SEQ ID NO: 2967426 - RNA, 19 nt, Human
caaggcuuagacccucaug

SEQ ID NO: 2967427 - RNA, 23 nt, Human
cacaguguguggucaacauuucu

SEQ ID NO: 2967428 - RNA, 11 nt, Human
aguuuggccag

SEQ ID NO: 2967429 - RNA, 19 nt, Human
auagcauguccuaaugcuu

SEQ ID NO: 2967430 - RNA, 16 nt, Human
auagcauguccuaaug

SEQ ID NO: 2967431 - RNA, 22 nt, Human
auagcagcccucaauugugaaa

SEQ ID NO: 2967432 - RNA, 21 nt, Human
auagcagcccucaauugugaa

SEQ ID NO: 2967433 - RNA, 17 nt, Human
auauucauucuuuuuga

SEQ ID NO: 2967434 - RNA, 16 nt, Human
aguacuaacauuuauu

SEQ ID NO: 2967435 - RNA, 15 nt, Human
augguaguuuuacag

SEQ ID NO: 2967436 - RNA, 22 nt, Human
augguaguuuuacaguguuucu

SEQ ID NO: 2967437 - RNA, 21 nt, Human
augguaguuuuacaguguuuc

SEQ ID NO: 2967438 - RNA, 18 nt, Human
auggauaaauauugguug

SEQ ID NO: 2967439 - RNA, 21 nt, Human
aucgcuccaccuugcagcucu

SEQ ID NO: 2967440 - RNA, 17 nt, Human
aucgcuccaccuugcag

SEQ ID NO: 2967441 - RNA, 14 nt, Human
augacuguuuuuaa

SEQ ID NO: 2967442 - RNA, 20 nt, Human
agcuuauuuccucauuuuua

SEQ ID NO: 2967443 - RNA, 22 nt, Human
agggauuuucagcccucagaau

SEQ ID NO: 2967444 - RNA, 17 nt, Human
agggauuuucagcccuc

SEQ ID NO: 2967445 - RNA, 23 nt, Human
aggcuuagacccucaugcugcca

SEQ ID NO: 2967446 - RNA, 24 nt, Human
aggcuuagacccucaugcugccaa

SEQ ID NO: 2967447 - RNA, 21 nt, Human
agaagucuucuauuuauuuau

SEQ ID NO: 2967448 - RNA, 16 nt, Human
agacuggauaguccgu

SEQ ID NO: 2967449 - RNA, 21 nt, Human
agauucuauguuaauauuuua

SEQ ID NO: 2967450 - RNA, 22 nt, Human
agauucuuguauuuauuacaac

SEQ ID NO: 2967451 - RNA, 14 nt, Human
agaugaaggucugu

SEQ ID NO: 2967452 - RNA, 17 nt, Human
agaugaaggucuguuuu

SEQ ID NO: 2967453 - RNA, 15 nt, Human
aagggauuuucagcc

SEQ ID NO: 2967454 - RNA, 23 nt, Human
aagggauuuucagcccucagaau

SEQ ID NO: 2967455 - RNA, 21 nt, Human
aagggauuuucagcccucaga

SEQ ID NO: 2967456 - RNA, 19 nt, Human
aaggucuguuuuguguacu

SEQ ID NO: 2967457 - RNA, 20 nt, Human
aaggucuguuuuguguacuu

SEQ ID NO: 2967458 - RNA, 23 nt, Human
aaggucuguuuuguguacuuuua

SEQ ID NO: 2967459 - RNA, 15 nt, Human
aaggaaugcaaagau

SEQ ID NO: 2967460 - RNA, 16 nt, Human
aaggaaugcaaagaug

SEQ ID NO: 2967461 - RNA, 13 nt, Human
aacuguuuagaug

SEQ ID NO: 2967462 - RNA, 17 nt, Human
aagacuuugguuauuuu

SEQ ID NO: 2967463 - RNA, 23 nt, Human
aagacuuugguuauuuuacuuuu

SEQ ID NO: 2967464 - RNA, 13 nt, Human
aagacuuugguua

SEQ ID NO: 2967465 - RNA, 15 nt, Human
aagacuuugguuauu

SEQ ID NO: 2967466 - RNA, 22 nt, Human
aagauucuauguuaauauuuua

SEQ ID NO: 2967467 - RNA, 21 nt, Human
aagauucuauguuaauauuuu

SEQ ID NO: 2967468 - RNA, 19 nt, Human
aagauucuauguuaauauu

SEQ ID NO: 2967469 - RNA, 20 nt, Human
aagcagaguggcagucuuca

SEQ ID NO: 2967470 - RNA, 11 nt, Human
aagcagagugg

SEQ ID NO: 2967471 - RNA, 14 nt, Human
aagcagaguggcag

SEQ ID NO: 2967472 - RNA, 10 nt, Human
aagcagagug

SEQ ID NO: 2967473 - RNA, 17 nt, Human
aauaaaauuuuaguuga

SEQ ID NO: 2967474 - RNA, 13 nt, Human
aauauaaaaauaa

SEQ ID NO: 2967475 - RNA, 18 nt, Human
aacugaaguucuauuuau

SEQ ID NO: 2967476 - RNA, 21 nt, Human
aacaugcuguacauacuuuuu

SEQ ID NO: 2967477 - RNA, 18 nt, Human
aacaugcuguacauacuu

SEQ ID NO: 2967478 - RNA, 19 nt, Human
aacaugcuguacauacuuu

SEQ ID NO: 2967479 - RNA, 20 nt, Human
aacaugcuguacauacuuuu

SEQ ID NO: 2967480 - RNA, 17 nt, Human
aacagcaacacaaagcu

SEQ ID NO: 2967481 - RNA, 18 nt, Human
aacagcaacacaaagcuu

SEQ ID NO: 2967482 - RNA, 12 nt, Human
aaagugcccagc

SEQ ID NO: 2967483 - RNA, 14 nt, Human
acaugccuaccaau

SEQ ID NO: 2967484 - RNA, 18 nt, Human
acaugccuaccaauauuu

SEQ ID NO: 2967485 - RNA, 19 nt, Human
acaugccuaccaauauuua

SEQ ID NO: 2967486 - RNA, 17 nt, Human
acauuucucauguugaa

SEQ ID NO: 2967487 - RNA, 17 nt, Human
accaagaauugauuggg

SEQ ID NO: 2967488 - RNA, 20 nt, Human
aacuacauuagguugugaau

SEQ ID NO: 2967489 - RNA, 12 nt, Human
aacucauuucua

SEQ ID NO: 2967490 - RNA, 14 nt, Human
gucuucuauuuauu

SEQ ID NO: 2967491 - RNA, 12 nt, Human
gucuucuauuua

SEQ ID NO: 2967492 - RNA, 17 nt, Human
gucuucuauuuauuuau

SEQ ID NO: 2967493 - RNA, 17 nt, Human
gugcacaucuguuuugu

SEQ ID NO: 2967494 - RNA, 20 nt, Human
aacugggaugaggugacuau

SEQ ID NO: 2967495 - RNA, 19 nt, Human
aacucugagugcaaacuuc

SEQ ID NO: 2967496 - RNA, 18 nt, Human
aacucugagugcaaacuu

SEQ ID NO: 2967497 - RNA, 20 nt, Human
aacucugagugcaaacuuca

SEQ ID NO: 2967498 - RNA, 22 nt, Human
aacucugagugcaaacuucaga

SEQ ID NO: 2967499 - RNA, 21 nt, Human
aacacaaagcuuuugcauauu

SEQ ID NO: 2967500 - RNA, 21 nt, Human
gucaguuguuauuuauugaaa

SEQ ID NO: 2967501 - RNA, 18 nt, Human
gucaguuguuauuuauug

SEQ ID NO: 2967502 - RNA, 17 nt, Human
gucaguuguuauuuauu

SEQ ID NO: 2967503 - RNA, 16 nt, Human
gucaguuguuauuuau

SEQ ID NO: 2967504 - RNA, 12 nt, Human
aaauuuguggaa

SEQ ID NO: 2967505 - RNA, 17 nt, Human
aaaugguguuuuaucuu

SEQ ID NO: 2967506 - RNA, 18 nt, Human
aaaugguguuuuaucuuc

SEQ ID NO: 2967507 - RNA, 22 nt, Human
guuuauuuggaaaggaaugcaa

SEQ ID NO: 2967508 - RNA, 17 nt, Human
guuuaaugguaguuuua

SEQ ID NO: 2967509 - RNA, 12 nt, Human
guuuaaugguag

SEQ ID NO: 2967510 - RNA, 16 nt, Human
aaggauacuuauuuaa

SEQ ID NO: 2967511 - RNA, 13 nt, Human
aaggauacuuauu

SEQ ID NO: 2967512 - RNA, 14 nt, Human
guugcuaacagcaa

SEQ ID NO: 2967513 - RNA, 17 nt, Human
aagucuucuauuuauuu

SEQ ID NO: 2967514 - RNA, 13 nt, Human
aagucuucuauuu

SEQ ID NO: 2967515 - RNA, 16 nt, Human
guuauugaagcagagu

SEQ ID NO: 2967516 - RNA, 17 nt, Human
guuauugaagcagagug

SEQ ID NO: 2967517 - RNA, 18 nt, Human
guuauugaagcagagugg

SEQ ID NO: 2967518 - RNA, 18 nt, Human
aagaugaaggucuguuuu

SEQ ID NO: 2967519 - RNA, 13 nt, Human
gugucauuucaaa

SEQ ID NO: 2967520 - RNA, 23 nt, Human
aauagcagcccucaauugugaaa

SEQ ID NO: 2967521 - RNA, 22 nt, Human
aauagcagcccucaauugugaa

SEQ ID NO: 2967522 - RNA, 21 nt, Human
aauagcaaggcugugcaucua

SEQ ID NO: 2967523 - RNA, 21 nt, Human
uaacaaaggauacuuauuuaa

SEQ ID NO: 2967524 - RNA, 19 nt, Human
uaacaaaggauacuuauuu

SEQ ID NO: 2967525 - RNA, 20 nt, Human
uaacaaaggauacuuauuua

SEQ ID NO: 2967526 - RNA, 15 nt, Human
uaacaaaggauacuu

SEQ ID NO: 2967527 - RNA, 16 nt, Human
uaacaaaggauacuua

SEQ ID NO: 2967528 - RNA, 17 nt, Human
uaacaaaggauacuuau

SEQ ID NO: 2967529 - RNA, 18 nt, Human
uaacaaaggauacuuauu

SEQ ID NO: 2967530 - RNA, 21 nt, Human
uaacuaucacugguuugguuc

SEQ ID NO: 2967531 - RNA, 16 nt, Human
uaacuaucacugguuu

SEQ ID NO: 2967532 - RNA, 12 nt, Human
uaauaaaaaggu

SEQ ID NO: 2967533 - RNA, 15 nt, Human
uaauaaaaaggugac

SEQ ID NO: 2967534 - RNA, 14 nt, Human
uaauaaaaagguga

SEQ ID NO: 2967535 - RNA, 23 nt, Human
aauauuuugacuuguugagggua

SEQ ID NO: 2967536 - RNA, 22 nt, Human
aaugcuugcugcugauuuaaac

SEQ ID NO: 2967537 - RNA, 23 nt, Human
aaugcuugcugcugauuuaaaca

SEQ ID NO: 2967538 - RNA, 18 nt, Human
aaugcuugcugcugauuu

SEQ ID NO: 2967539 - RNA, 20 nt, Human
aaugcuugcugcugauuuaa

SEQ ID NO: 2967540 - RNA, 16 nt, Human
uaauuauugauguuuu

SEQ ID NO: 2967541 - RNA, 22 nt, Human
aauguucacugguacucugcca

SEQ ID NO: 2967542 - RNA, 17 nt, Human
uacauuagguugugaau

SEQ ID NO: 2967543 - RNA, 23 nt, Human
uauauagcaguaaaaaauggugu

SEQ ID NO: 2967544 - RNA, 10 nt, Human
uauagauguu

SEQ ID NO: 2967545 - RNA, 21 nt, Human
uauagauguugcuaacagcaa

SEQ ID NO: 2967546 - RNA, 15 nt, Human
uauagauguugcuaa

SEQ ID NO: 2967547 - RNA, 20 nt, Human
uauagauguugcuaacagca

SEQ ID NO: 2967548 - RNA, 18 nt, Human
uauagcaguaaaaaaugg

SEQ ID NO: 2967549 - RNA, 15 nt, Human
uauauagcaguaaaa

SEQ ID NO: 2967550 - RNA, 20 nt, Human
uauauagcaagacauuauau

SEQ ID NO: 2967551 - RNA, 16 nt, Human
uauauagcaguaaaaa

SEQ ID NO: 2967552 - RNA, 18 nt, Human
uauauagcaagacauuau

SEQ ID NO: 2967553 - RNA, 15 nt, Human
uauccaauugcugcu

SEQ ID NO: 2967554 - RNA, 23 nt, Human
uauccaauugcugcuuguacacu

SEQ ID NO: 2967555 - RNA, 14 nt, Human
uauccaaucuguga

SEQ ID NO: 2967556 - RNA, 16 nt, Human
acacucauucauuacu

SEQ ID NO: 2967557 - RNA, 20 nt, Human
uaugugcacaucuguuuugu

SEQ ID NO: 2967558 - RNA, 19 nt, Human
uagagguacacuugugaau

SEQ ID NO: 2967559 - RNA, 18 nt, Human
uagagguacacuugugaa

SEQ ID NO: 2967560 - RNA, 13 nt, Human
uagagguacacuu

SEQ ID NO: 2967561 - RNA, 22 nt, Human
uaggggucugucuuuuaaacuc

SEQ ID NO: 2967562 - RNA, 20 nt, Human
acacaaagcuuuugcauauu

SEQ ID NO: 2967563 - RNA, 19 nt, Human
acacaaagcuuuugcauau

SEQ ID NO: 2967564 - RNA, 15 nt, Human
acucuucccucaaau

SEQ ID NO: 2967565 - RNA, 20 nt, Human
accugcacacuguccuauua

SEQ ID NO: 2967566 - RNA, 17 nt, Human
acgcccuuggccauggg

SEQ ID NO: 2967567 - RNA, 14 nt, Human
uauuuugacuuguu

SEQ ID NO: 2967568 - RNA, 20 nt, Human
uauuuugacuuguugagggu

SEQ ID NO: 2967569 - RNA, 22 nt, Human
ucacagcuuauuuccucauuuu

SEQ ID NO: 2967570 - RNA, 16 nt, Human
ucaauugugaaaaaau

SEQ ID NO: 2967571 - RNA, 20 nt, Human
ucaauugugaaaaaauuuac

SEQ ID NO: 2967572 - RNA, 14 nt, Human
ucacagaagaugaa

SEQ ID NO: 2967573 - RNA, 15 nt, Human
acauuuuaugucuuu

SEQ ID NO: 2967574 - RNA, 13 nt, Human
acauuuuaugucu

SEQ ID NO: 2967575 - RNA, 13 nt, Human
ucagcccucagaa

SEQ ID NO: 2967576 - RNA, 12 nt, Human
ucagcccucaga

SEQ ID NO: 2967577 - RNA, 15 nt, Human
ucaguuugcagagua

SEQ ID NO: 2967578 - RNA, 16 nt, Human
ucaguuugcagaguag

SEQ ID NO: 2967579 - RNA, 12 nt, Human
ucaguuugguug

SEQ ID NO: 2967580 - RNA, 16 nt, Human
ucaguuuaucuguuca

SEQ ID NO: 2967581 - RNA, 14 nt, Human
ucaguuuaucuguu

SEQ ID NO: 2967582 - RNA, 20 nt, Human
ucaguuguuauuuauugaaa

SEQ ID NO: 2967583 - RNA, 15 nt, Human
ucaguuguuauuuau

SEQ ID NO: 2967584 - RNA, 13 nt, Human
ucaguagucagac

SEQ ID NO: 2967585 - RNA, 18 nt, Human
acuguccuauuauauuca

SEQ ID NO: 2967586 - RNA, 16 nt, Human
acuguccuauuauauu

SEQ ID NO: 2967587 - RNA, 15 nt, Human
acuguccuauuauau

SEQ ID NO: 2967588 - RNA, 12 nt, Human
ucuagcaugaag

SEQ ID NO: 2967589 - RNA, 17 nt, Human
agaacuauguuuuuguu

SEQ ID NO: 2967590 - RNA, 16 nt, Human
agaauaaaccaagaau

SEQ ID NO: 2967591 - RNA, 16 nt, Human
ucuggauucauauuua

SEQ ID NO: 2967592 - RNA, 19 nt, Human
ucuggauucauauuuaauu

SEQ ID NO: 2967593 - RNA, 19 nt, Human
ugaagguagaauguuuuca

SEQ ID NO: 2967594 - RNA, 18 nt, Human
ugaagguagaauguuuuc

SEQ ID NO: 2967595 - RNA, 14 nt, Human
ugaauuugccuaau

SEQ ID NO: 2967596 - RNA, 14 nt, Human
agcaagacauuaua

SEQ ID NO: 2967597 - RNA, 12 nt, Human
agauguugcuaa

SEQ ID NO: 2967598 - RNA, 23 nt, Human
ugacuauuuuuguuuuuauuaaa

SEQ ID NO: 2967599 - RNA, 23 nt, Human
agagcaguuugguuucuagcaug

SEQ ID NO: 2967600 - RNA, 21 nt, Human
agagcaguuugguuucuagca

SEQ ID NO: 2967601 - RNA, 11 nt, Human
ucuuuuaaacu

SEQ ID NO: 2967602 - RNA, 12 nt, Human
ucuuuuaaacuc

SEQ ID NO: 2967603 - RNA, 21 nt, Human
ugaaaaaauuuacuuuaaacu

SEQ ID NO: 2967604 - RNA, 23 nt, Human
agcauguccuaaugcuugcugcu

SEQ ID NO: 2967605 - RNA, 14 nt, Human
ugcacacuguccua

SEQ ID NO: 2967606 - RNA, 14 nt, Human
ugcaguacuaacau

SEQ ID NO: 2967607 - RNA, 17 nt, Human
ugccaauuugcacauua

SEQ ID NO: 2967608 - RNA, 21 nt, Human
ugccaauuugcacauuaaaug

SEQ ID NO: 2967609 - RNA, 15 nt, Human
ugccaauuugcacau

SEQ ID NO: 2967610 - RNA, 13 nt, Human
ugccaauuugcac

SEQ ID NO: 2967611 - RNA, 14 nt, Human
ugccaauauccuaa

SEQ ID NO: 2967612 - RNA, 19 nt, Human
ugcuuguacacucauucau

SEQ ID NO: 2967613 - RNA, 22 nt, Human
ugcuuguacacucauucauuac

SEQ ID NO: 2967614 - RNA, 16 nt, Human
ugcuuguacacucauu

SEQ ID NO: 2967615 - RNA, 18 nt, Human
ugcuugcugcugauuuaa

SEQ ID NO: 2967616 - RNA, 15 nt, Human
aggauacuuauuuaa

SEQ ID NO: 2967617 - RNA, 16 nt, Human
aggauacuuauuuaaa

SEQ ID NO: 2967618 - RNA, 13 nt, Human
aggauacuuauuu

SEQ ID NO: 2967619 - RNA, 16 nt, Human
uggcaucuuacaucug

SEQ ID NO: 2967620 - RNA, 17 nt, Human
aggaaugcaaagaugaa

SEQ ID NO: 2967621 - RNA, 18 nt, Human
uguacuuuuaagacuuug

SEQ ID NO: 2967622 - RNA, 15 nt, Human
uguacuuuuaagacu

SEQ ID NO: 2967623 - RNA, 14 nt, Human
aguagagguacacu

SEQ ID NO: 2967624 - RNA, 22 nt, Human
aguagagguacacuugugaaua

SEQ ID NO: 2967625 - RNA, 20 nt, Human
aguagagguacacuugugaa

SEQ ID NO: 2967626 - RNA, 21 nt, Human
aguagagguacacuugugaau

SEQ ID NO: 2967627 - RNA, 23 nt, Human
uguaauuaugguuaguagaggua

SEQ ID NO: 2967628 - RNA, 22 nt, Human
uguccuaaugcuugcugcugau

SEQ ID NO: 2967629 - RNA, 23 nt, Human
agucagacuggauaguccgucuc

SEQ ID NO: 2967630 - RNA, 15 nt, Human
ugucaguauuucaac

SEQ ID NO: 2967631 - RNA, 20 nt, Human
ugggcacaucauuucaagaa

SEQ ID NO: 2967632 - RNA, 15 nt, Human
ugggcacaucauuuc

SEQ ID NO: 2967633 - RNA, 17 nt, Human
agguagaauguuuucaa

SEQ ID NO: 2967634 - RNA, 22 nt, Human
agugcuuuaccaauugaaguaa

SEQ ID NO: 2967635 - RNA, 13 nt, Human
uguuaauauuuua

SEQ ID NO: 2967636 - RNA, 20 nt, Human
agugcuuggcccaggaguuu

SEQ ID NO: 2967637 - RNA, 19 nt, Human
agugcuuggcccaggaguu

SEQ ID NO: 2967638 - RNA, 18 nt, Human
agugcuuggcccaggagu

SEQ ID NO: 2967639 - RNA, 16 nt, Human
agugcuuggcccagga

SEQ ID NO: 2967640 - RNA, 15 nt, Human
agugcuuggcccagg

SEQ ID NO: 2967641 - RNA, 14 nt, Human
agugcuuggcccag

SEQ ID NO: 2967642 - RNA, 12 nt, Human
agugcuuggccc

SEQ ID NO: 2967643 - RNA, 16 nt, Human
aguuacugaacaguaa

SEQ ID NO: 2967644 - RNA, 15 nt, Human
aguggaguuacugaa

SEQ ID NO: 2967645 - RNA, 19 nt, Human
uguuauuuauugaaaugau

SEQ ID NO: 2967646 - RNA, 18 nt, Human
uguuauuuauugaaauga

SEQ ID NO: 2967647 - RNA, 17 nt, Human
uguuauuuauugaaaug

SEQ ID NO: 2967648 - RNA, 15 nt, Human
uguuauuuauugaaa

SEQ ID NO: 2967649 - RNA, 13 nt, Human
uguuauuuauuga

SEQ ID NO: 2967650 - RNA, 24 nt, Human
aguucaaucuggauucauauuuaa

SEQ ID NO: 2967651 - RNA, 23 nt, Human
aguucuauuuauuugugagacug

SEQ ID NO: 2967652 - RNA, 20 nt, Human
uguuuagaugaaugucaguu

SEQ ID NO: 2967653 - RNA, 15 nt, Human
uguuuagaugaaugu

SEQ ID NO: 2967654 - RNA, 12 nt, Human
uuagguugugaa

SEQ ID NO: 2967655 - RNA, 13 nt, Human
uuagguugugaau

SEQ ID NO: 2967656 - RNA, 17 nt, Human
uuagguugugaaugcag

SEQ ID NO: 2967657 - RNA, 23 nt, Human
uuacugaacaguaacauagcugu

SEQ ID NO: 2967658 - RNA, 15 nt, Human
uuacugaacaguaac

SEQ ID NO: 2967659 - RNA, 23 nt, Human
auaaauauugguugggaugacuu

SEQ ID NO: 2967660 - RNA, 16 nt, Human
uuaaauagaugacauu

SEQ ID NO: 2967661 - RNA, 14 nt, Human
uuaaauagaugaca

SEQ ID NO: 2967662 - RNA, 13 nt, Human
uuaaauagaugac

SEQ ID NO: 2967663 - RNA, 21 nt, Human
uuaaacaugcuguacauacuu

SEQ ID NO: 2967664 - RNA, 22 nt, Human
uuaaacaugcuguacauacuuu

SEQ ID NO: 2967665 - RNA, 23 nt, Human
uuaaacaugcuguacauacuuuu

SEQ ID NO: 2967666 - RNA, 19 nt, Human
uuaaacaugcuguacauac

SEQ ID NO: 2967667 - RNA, 14 nt, Human
uuaaacacauuaaa

SEQ ID NO: 2967668 - RNA, 13 nt, Human
uuaaggguaugau

SEQ ID NO: 2967669 - RNA, 19 nt, Human
uuaagaacuaaaauguucu

SEQ ID NO: 2967670 - RNA, 16 nt, Human
uuaagaacuaaaaugu

SEQ ID NO: 2967671 - RNA, 20 nt, Human
uuaagaacuaaaauguucua

SEQ ID NO: 2967672 - RNA, 18 nt, Human
aguuuugaagauucuaug

SEQ ID NO: 2967673 - RNA, 17 nt, Human
aguuuugaagauucuau

SEQ ID NO: 2967674 - RNA, 19 nt, Human
uuuucucacagaagaugaa

SEQ ID NO: 2967675 - RNA, 13 nt, Human
auuaaagugccca

SEQ ID NO: 2967676 - RNA, 23 nt, Human
uuuuccaguaaugagcuuaagaa

SEQ ID NO: 2967677 - RNA, 15 nt, Human
uuuuauuauuaacaa

SEQ ID NO: 2967678 - RNA, 23 nt, Human
uuuguaacuguuuagaugaaugu

SEQ ID NO: 2967679 - RNA, 22 nt, Human
uuuguaacuguuuagaugaaug

SEQ ID NO: 2967680 - RNA, 22 nt, Human
uuuuaagggcccuuuuucaaua

SEQ ID NO: 2967681 - RNA, 17 nt, Human
uuuuaagacuuugguua

SEQ ID NO: 2967682 - RNA, 17 nt, Human
augucaguuguuauuua

SEQ ID NO: 2967683 - RNA, 15 nt, Human
augucaguuguuauu

SEQ ID NO: 2967684 - RNA, 23 nt, Human
augucuagaccaggaccucccuc

SEQ ID NO: 2967685 - RNA, 14 nt, Human
uuuggccagaaguc

SEQ ID NO: 2967686 - RNA, 12 nt, Human
uuuggccagaag

SEQ ID NO: 2967687 - RNA, 10 nt, Human
uuuggccaga

SEQ ID NO: 2967688 - RNA, 13 nt, Human
uuugcacauuaaa

SEQ ID NO: 2967689 - RNA, 16 nt, Human
uuugcacauuaaauga

SEQ ID NO: 2967690 - RNA, 12 nt, Human
uuugcacauuaa

SEQ ID NO: 2967691 - RNA, 11 nt, Human
auuauuaacaa

SEQ ID NO: 2967692 - RNA, 17 nt, Human
auuuaaacacauuaaag

SEQ ID NO: 2967693 - RNA, 18 nt, Human
auuuaaacacauuaaagg

SEQ ID NO: 2967694 - RNA, 16 nt, Human
auucucagcagagugc

SEQ ID NO: 2967695 - RNA, 16 nt, Human
auugacagauugaauu

SEQ ID NO: 2967696 - RNA, 15 nt, Human
auucucagcagagug

SEQ ID NO: 2967697 - RNA, 14 nt, Human
auucucagcagagu

SEQ ID NO: 2967698 - RNA, 23 nt, Human
uucaagaaugcaguacuaacauu

SEQ ID NO: 2967699 - RNA, 23 nt, Human
uucaagaaguccccucuccucca

SEQ ID NO: 2967700 - RNA, 13 nt, Human
uucauauuuaauu

SEQ ID NO: 2967701 - RNA, 16 nt, Human
auaugaugacuguuuu

SEQ ID NO: 2967702 - RNA, 14 nt, Human
uuccuucaagaaug

SEQ ID NO: 2967703 - RNA, 21 nt, Human
uuccuucaagaaugcaguacu

SEQ ID NO: 2967704 - RNA, 22 nt, Human
uucuaaauaucccuuggacauu

SEQ ID NO: 2967705 - RNA, 13 nt, Human
uucucagcagagu

SEQ ID NO: 2967706 - RNA, 15 nt, Human
uucuuggcccaggau

SEQ ID NO: 2967707 - RNA, 12 nt, Human
auccuaauaaaa

SEQ ID NO: 2967708 - RNA, 17 nt, Human
auccuaauaaaaaggug

SEQ ID NO: 2967709 - RNA, 16 nt, Human
auccuaauaaaaaggu

SEQ ID NO: 2967710 - RNA, 15 nt, Human
auccuaauaaaaagg

SEQ ID NO: 2967711 - RNA, 14 nt, Human
auccuaauaaaaag

SEQ ID NO: 2967712 - RNA, 22 nt, Human
auccuaauaaaaaggugaccau

SEQ ID NO: 2967713 - RNA, 18 nt, Human
auccuaauaaaaagguga

SEQ ID NO: 2967714 - RNA, 20 nt, Human
auccuagucauucuucccua

SEQ ID NO: 2967715 - RNA, 15 nt, Human
uucuuuuugaaaugu

SEQ ID NO: 2967716 - RNA, 14 nt, Human
uucuuuuugaaaug

SEQ ID NO: 2967717 - RNA, 14 nt, Human
uugaaaugauuuca

SEQ ID NO: 2967718 - RNA, 13 nt, Human
aucauuucaagaa

SEQ ID NO: 2967719 - RNA, 13 nt, Human
augauuucacagu

SEQ ID NO: 2967720 - RNA, 13 nt, Human
augcagguuuuau

SEQ ID NO: 2967721 - RNA, 18 nt, Human
augcaguacuaacauuua

SEQ ID NO: 2967722 - RNA, 12 nt, Human
augcuguacaua

SEQ ID NO: 2967723 - RNA, 15 nt, Human
augcuguacauacuu

SEQ ID NO: 2967724 - RNA, 16 nt, Human
augcuguacauacuuu

SEQ ID NO: 2967725 - RNA, 18 nt, Human
augcuguacauacuuuuu

SEQ ID NO: 2967726 - RNA, 18 nt, Human
uuuagaugaaugucaguu

SEQ ID NO: 2967727 - RNA, 17 nt, Human
uuuagaugaaugucagu

SEQ ID NO: 2967728 - RNA, 22 nt, Human
uuuagaugaaugucaguuguua

SEQ ID NO: 2967729 - RNA, 12 nt, Human
aucuguuacaca

SEQ ID NO: 2967730 - RNA, 20 nt, Human
uugccuaauaugaugacugu

SEQ ID NO: 2967731 - RNA, 23 nt, Human
uugcacauuaaaugacucuuccc

SEQ ID NO: 2967732 - RNA, 11 nt, Human
uugcacauuaa

SEQ ID NO: 2967733 - RNA, 14 nt, Human
augacauucccugc

SEQ ID NO: 2967734 - RNA, 16 nt, Human
augacauugacuauuu

SEQ ID NO: 2967735 - RNA, 19 nt, Human
augacauugacuauuuuug

SEQ ID NO: 2967736 - RNA, 18 nt, Human
augacuuggugucuaaug

SEQ ID NO: 2967737 - RNA, 23 nt, Human
augacuuggugucuaauguguag

SEQ ID NO: 2967738 - RNA, 18 nt, Human
uugguucuggacuaaaac

SEQ ID NO: 2967739 - RNA, 20 nt, Human
uugguucuggacuaaaacua

SEQ ID NO: 2967740 - RNA, 17 nt, Human
uugguugggaugacuug

SEQ ID NO: 2967741 - RNA, 21 nt, Human
uugguugguaacucuguaauu

SEQ ID NO: 2967742 - RNA, 21 nt, Human
augaaugcccagugagacugu

SEQ ID NO: 2967743 - RNA, 13 nt, Human
augaaugcccagu

SEQ ID NO: 2967744 - RNA, 22 nt, Human
cuccagucauuauguuaauauu

SEQ ID NO: 2967745 - RNA, 12 nt, Human
cucaugcugcca

SEQ ID NO: 2967746 - RNA, 22 nt, Human
cucaugcugccaauauccuaau

SEQ ID NO: 2967747 - RNA, 14 nt, Human
cucaugcugccaau

SEQ ID NO: 2967748 - RNA, 13 nt, Human
cucuauuucugga

SEQ ID NO: 2967749 - RNA, 21 nt, Human
ccuuggacauuuuaugucuuu

SEQ ID NO: 2967750 - RNA, 18 nt, Human
ccuuggacauuuuauguc

SEQ ID NO: 2967751 - RNA, 16 nt, Human
ccuuggacauuuuaug

SEQ ID NO: 2967752 - RNA, 22 nt, Human
cuauaacaaaggauacuuauuu

SEQ ID NO: 2967753 - RNA, 18 nt, Human
cuauaacaaaggauacuu

SEQ ID NO: 2967754 - RNA, 16 nt, Human
cuagcaugaagacaga

SEQ ID NO: 2967755 - RNA, 13 nt, Human
cccuucucuguau

SEQ ID NO: 2967756 - RNA, 24 nt, Human
ccguagacgugcacgcacacuguc

SEQ ID NO: 2967757 - RNA, 13 nt, Human
caaacccaguguu

SEQ ID NO: 2967758 - RNA, 21 nt, Human
auuugccuaauaugaugacug

SEQ ID NO: 2967759 - RNA, 18 nt, Human
auuuguggaaaauaacuc

SEQ ID NO: 2967760 - RNA, 18 nt, Human
auuuggaaaggaaugcaa

SEQ ID NO: 2967761 - RNA, 15 nt, Human
auuuggaaaggaaug

SEQ ID NO: 2967762 - RNA, 14 nt, Human
auuagguugugaau

SEQ ID NO: 2967763 - RNA, 15 nt, Human
auuagguugugaaug

SEQ ID NO: 2967764 - RNA, 13 nt, Human
auuagguugugaa

SEQ ID NO: 2967765 - RNA, 17 nt, Human
auuacaacucuauuuaa

SEQ ID NO: 2967766 - RNA, 20 nt, Human
auuaaugucaguauuucaac

SEQ ID NO: 2967767 - RNA, 17 nt, Human
auugcugcuuguacacu

SEQ ID NO: 2967768 - RNA, 14 nt, Human
cacugguuugguuc

SEQ ID NO: 2967769 - RNA, 22 nt, Human
caugcugccaauauccuaauaa

SEQ ID NO: 2967770 - RNA, 21 nt, Human
caugcugccaauauccuaaua

SEQ ID NO: 2967771 - RNA, 19 nt, Human
caugcugccaauauccuaa

SEQ ID NO: 2967772 - RNA, 17 nt, Human
caugcugccaauauccu

SEQ ID NO: 2967773 - RNA, 15 nt, Human
caugcugccaauauc

SEQ ID NO: 2967774 - RNA, 11 nt, Human
caguuugguug

SEQ ID NO: 2967775 - RNA, 21 nt, Human
caguuugguugguaacucugu

SEQ ID NO: 2967776 - RNA, 14 nt, Human
caguuugcagagua

SEQ ID NO: 2967777 - RNA, 14 nt, Human
cauuucaagaaguc

SEQ ID NO: 2967778 - RNA, 20 nt, Human
caguaaaaaaugguguuuua

SEQ ID NO: 2967779 - RNA, 21 nt, Human
caguaaaaaaugguguuuuau

SEQ ID NO: 2967780 - RNA, 20 nt, Human
ggcccaggaguuuggccaga

SEQ ID NO: 2967781 - RNA, 19 nt, Human
ggcccaggaguuuggccag

SEQ ID NO: 2967782 - RNA, 18 nt, Human
ggcccaggaguuuggcca

SEQ ID NO: 2967783 - RNA, 13 nt, Human
ggcccaggaguuu

SEQ ID NO: 2967784 - RNA, 11 nt, Human
ggcccaggagu

SEQ ID NO: 2967785 - RNA, 18 nt, Human
ggaucuguauguguucua

SEQ ID NO: 2967786 - RNA, 19 nt, Human
ggaucuguauguguucuau

SEQ ID NO: 2967787 - RNA, 13 nt, Human
ggaguuuggccag

SEQ ID NO: 2967788 - RNA, 15 nt, Human
ggaguuuggccagaa

SEQ ID NO: 2967789 - RNA, 14 nt, Human
ggaguuuggccaga

SEQ ID NO: 2967790 - RNA, 22 nt, Human
aaaagggguaggguuuaaagau

SEQ ID NO: 2967791 - RNA, 19 nt, Human
gggcccuuuuucaauaacu

SEQ ID NO: 2967792 - RNA, 16 nt, Human
aaacagucucccuucc

SEQ ID NO: 2967793 - RNA, 22 nt, Human
aaauaaggaaugauauaagguu

SEQ ID NO: 2967794 - RNA, 18 nt, Human
gguggggcagugcuuggc

SEQ ID NO: 2967795 - RNA, 12 nt, Human
gguuucuagcau

SEQ ID NO: 2967796 - RNA, 11 nt, Human
gguuuauuugg

SEQ ID NO: 2967797 - RNA, 21 nt, Human
ggucuguuuuguguacuuuua

SEQ ID NO: 2967798 - RNA, 15 nt, Human
gguacacuugugaau

SEQ ID NO: 2967799 - RNA, 18 nt, Human
gccccacccucagaugca

SEQ ID NO: 2967800 - RNA, 15 nt, Human
gccccacccucagau

SEQ ID NO: 2967801 - RNA, 18 nt, Human
gcccaggaguuuggccag

SEQ ID NO: 2967802 - RNA, 17 nt, Human
gcccaggaguuuggcca

SEQ ID NO: 2967803 - RNA, 13 nt, Human
gcccaggaguuug

SEQ ID NO: 2967804 - RNA, 16 nt, Human
gcccaggaguuuggcc

SEQ ID NO: 2967805 - RNA, 15 nt, Human
gcccaggaguuuggc

SEQ ID NO: 2967806 - RNA, 22 nt, Human
gcuggaguuauugaagcagagu

SEQ ID NO: 2967807 - RNA, 22 nt, Human
gcuguacauacuuuuuggguuu

SEQ ID NO: 2967808 - RNA, 22 nt, Human
gcuuaauuauugauguuuucau

SEQ ID NO: 2967809 - RNA, 17 nt, Human
gcuuauuuccucauuuu

SEQ ID NO: 2967810 - RNA, 12 nt, Human
gcugaacaucac

SEQ ID NO: 2967811 - RNA, 13 nt, Human
gauacuuauuuaa

SEQ ID NO: 2967812 - RNA, 19 nt, Human
gauacuuauuuaaauagau

SEQ ID NO: 2967813 - RNA, 16 nt, Human
gauacuuauuuaaaua

SEQ ID NO: 2967814 - RNA, 14 nt, Human
gaguuuggccagaa

SEQ ID NO: 2967815 - RNA, 13 nt, Human
gaguuuggccaga

SEQ ID NO: 2967816 - RNA, 12 nt, Human
gaguuuggccag

SEQ ID NO: 2967817 - RNA, 21 nt, Human
gagugcucaguagucagacug

SEQ ID NO: 2967818 - RNA, 15 nt, Human
gcaguacuaacauuu

SEQ ID NO: 2967819 - RNA, 21 nt, Human
gcaguacuaacauuuauuuga

SEQ ID NO: 2967820 - RNA, 22 nt, Human
gcaguaaaaaaugguguuuuau

SEQ ID NO: 2967821 - RNA, 19 nt, Human
gcaguaaaaaaugguguuu

SEQ ID NO: 2967822 - RNA, 21 nt, Human
gcacaugagcuggcgggauug

SEQ ID NO: 2967823 - RNA, 15 nt, Human
gcacaucuguuuugu

SEQ ID NO: 2967824 - RNA, 13 nt, Human
gacuauuuuuguu

SEQ ID NO: 2967825 - RNA, 17 nt, Human
gacuauuuuuguuuuua

SEQ ID NO: 2967826 - RNA, 18 nt, Human
gacuauuuuuguuuuuau

SEQ ID NO: 2967827 - RNA, 21 nt, Human
gacuauuuuuguuuuuauuaa

SEQ ID NO: 2967828 - RNA, 22 nt, Human
gacuauuuuuguuuuuauuaaa

SEQ ID NO: 2967829 - RNA, 21 nt, Human
gagaagucuucuauuuauuua

SEQ ID NO: 2967830 - RNA, 20 nt, Human
gagaagucuucuauuuauuu

SEQ ID NO: 2967831 - RNA, 22 nt, Human
cuuuuaugauugccuuuuuaua

SEQ ID NO: 2967832 - RNA, 20 nt, Human
gaaaaaauuuacuuuaaacu

SEQ ID NO: 2967833 - RNA, 17 nt, Human
cuucaguuugcagagua

SEQ ID NO: 2967834 - RNA, 16 nt, Human
cuucaguuugcagagu

SEQ ID NO: 2967835 - RNA, 17 nt, Human
cuucacgcccuuggcca

SEQ ID NO: 2967836 - RNA, 15 nt, Human
cuucacgcccuuggc

SEQ ID NO: 2967837 - RNA, 16 nt, Human
cugguuuguucccugu

SEQ ID NO: 2967838 - RNA, 22 nt, Human
cugguuuuaaauauuuugacuu

SEQ ID NO: 2967839 - RNA, 17 nt, Human
cugccaauauccuaaua

SEQ ID NO: 2967840 - RNA, 16 nt, Human
cugccaauauccuaau

SEQ ID NO: 2967841 - RNA, 14 nt, Human
cugccaauauccua

SEQ ID NO: 2967842 - RNA, 13 nt, Human
cugccaauauccu

SEQ ID NO: 2967843 - RNA, 22 nt, Human
cugccaauauccuaauaaaaag

SEQ ID NO: 2967844 - RNA, 20 nt, Human
cugccaauauccuaauaaaa

SEQ ID NO: 2967845 - RNA, 19 nt, Human
cugccaauauccuaauaaa

SEQ ID NO: 2967846 - RNA, 18 nt, Human
cugccaauauccuaauaa

SEQ ID NO: 2967847 - RNA, 21 nt, Human
caguguguggucaacauuucu

SEQ ID NO: 2967848 - RNA, 17 nt, Human
caguguguggucaacau

SEQ ID NO: 2967849 - RNA, 20 nt, Human
cagugcuuggcccaggaguu

SEQ ID NO: 2967850 - RNA, 19 nt, Human
cagugcuuggcccaggagu

SEQ ID NO: 2967851 - RNA, 18 nt, Human
cagugcuuggcccaggag

SEQ ID NO: 2967852 - RNA, 17 nt, Human
cagugcuuggcccagga

SEQ ID NO: 2967853 - RNA, 12 nt, Human
cagugcuuggcc

SEQ ID NO: 2967854 - RNA, 16 nt, Human
cagugcuuggcccagg

SEQ ID NO: 2967855 - RNA, 15 nt, Human
cagugcuuggcccag

SEQ ID NO: 2967856 - RNA, 14 nt, Human
cagugcuuggccca

SEQ ID NO: 2967857 - RNA, 13 nt, Human
cagugcuuggccc

SEQ ID NO: 2967858 - RNA, 16 nt, Human
caguguuuuaggagca

SEQ ID NO: 2967859 - RNA, 20 nt, Human
caguguuuuaggagcaugag

SEQ ID NO: 2967860 - RNA, 18 nt, Human
cauaagugcuauugcaga

SEQ ID NO: 2967861 - RNA, 22 nt, Human
cauaagugcuauugcagagccg

SEQ ID NO: 2967862 - RNA, 19 nt, Human
caguuuuuuuccuucaaga

SEQ ID NO: 2967863 - RNA, 11 nt, Human
caguuggguuu

SEQ ID NO: 2967864 - RNA, 16 nt, Human
caguuggguuuuuuaa

SEQ ID NO: 2967865 - RNA, 18 nt, Human
caguuggguuuuuuaagg

SEQ ID NO: 2967866 - RNA, 14 nt, Human
cauacuauuaaaca

SEQ ID NO: 2967867 - RNA, 12 nt, Human
caucauuucaag

SEQ ID NO: 2967868 - RNA, 14 nt, Human
caucauuucaagaa

SEQ ID NO: 2967869 - RNA, 18 nt, Human
cauacuauuaaacaugcu

SEQ ID NO: 2967870 - RNA, 12 nt, Human
cauacuuuuugg

SEQ ID NO: 2967871 - RNA, 16 nt, Human
cauacuuuuuggguuu

SEQ ID NO: 2967872 - RNA, 18 nt, Human
cauacuuuuuggguuuau

SEQ ID NO: 2967873 - RNA, 17 nt, Human
caugccuaccaauauuu

SEQ ID NO: 2967874 - RNA, 13 nt, Human
cauuaaaugacuc

SEQ ID NO: 2967875 - RNA, 14 nt, Human
cauuaaaugacucu

SEQ ID NO: 2967876 - RNA, 18 nt, Human
cauuaaaugacucuuccc

SEQ ID NO: 2967877 - RNA, 17 nt, Human
cauuaaagguacuuugc

SEQ ID NO: 2967878 - RNA, 21 nt, Human
ccaauauuuaaucuuuuauga

SEQ ID NO: 2967879 - RNA, 19 nt, Human
ccaauuugcacauuaaaug

SEQ ID NO: 2967880 - RNA, 20 nt, Human
ccaauuugcacauuaaauga

SEQ ID NO: 2967881 - RNA, 17 nt, Human
cauuucucauguugaaa

SEQ ID NO: 2967882 - RNA, 16 nt, Human
cauuucucauguugaa

SEQ ID NO: 2967883 - RNA, 14 nt, Human
cauugacagauuga

SEQ ID NO: 2967884 - RNA, 22 nt, Human
cauugacuauuuuuguuuuuau

SEQ ID NO: 2967885 - RNA, 17 nt, Human
cccaguguuuuaggagc

SEQ ID NO: 2967886 - RNA, 16 nt, Human
cccaguguuuuaggag

SEQ ID NO: 2967887 - RNA, 14 nt, Human
cccuuggacauuuu

SEQ ID NO: 2967888 - RNA, 15 nt, Human
cccuuggacauuuua

SEQ ID NO: 2967889 - RNA, 20 nt, Human
ccucagaugcacaugagcug

SEQ ID NO: 2967890 - RNA, 14 nt, Human
ccucuccuccacau

SEQ ID NO: 2967891 - RNA, 16 nt, Human
ccucccccuggcacug

SEQ ID NO: 2967892 - RNA, 17 nt, Human
cccucaugcugccaaua

SEQ ID NO: 2967893 - RNA, 14 nt, Human
cccucaugcugcca

SEQ ID NO: 2967894 - RNA, 18 nt, Human
cuacacaccuaacuuaug

SEQ ID NO: 2967895 - RNA, 13 nt, Human
cuaaaauguucua

SEQ ID NO: 2967896 - RNA, 18 nt, Human
cgugcacgcacacugucu

SEQ ID NO: 2967897 - RNA, 22 nt, Human
cgccagcucaccccaucauccc

SEQ ID NO: 2967898 - RNA, 13 nt, Human
cuccuccacauuu

SEQ ID NO: 2967899 - RNA, 16 nt, Human
cugaaauaaggaauga

SEQ ID NO: 2967900 - RNA, 23 nt, Human
cugcaguuuuuuuccuucaagaa

SEQ ID NO: 2967901 - RNA, 22 nt, Human
cugcaguuuuuuuccuucaaga

SEQ ID NO: 2967902 - RNA, 20 nt, Human
cugcaguuuuuuuccuucaa

SEQ ID NO: 2967903 - RNA, 20 nt, Human
cugggaaagggauuuucagc

SEQ ID NO: 2967904 - RNA, 21 nt, Human
cuguccuauuauauucauucu

SEQ ID NO: 2967905 - RNA, 15 nt, Human
cuguccuauuauauu

SEQ ID NO: 2967906 - RNA, 20 nt, Human
cugucuccucucucuguaau

SEQ ID NO: 2967907 - RNA, 17 nt, Human
cugucuccucucucugu

SEQ ID NO: 2967908 - RNA, 15 nt, Human
cuguacauacuuuuu

SEQ ID NO: 2967909 - RNA, 16 nt, Human
cuguacauacuuuuug

SEQ ID NO: 2967910 - RNA, 21 nt, Human
cuguaaguuacaugaaggcag

SEQ ID NO: 2967911 - RNA, 21 nt, Human
cugguacucugccacuuuauu

SEQ ID NO: 2967912 - RNA, 20 nt, Human
gaagauucuuguauuuauua

SEQ ID NO: 2967913 - RNA, 14 nt, Human
gaaggaugcugucu

SEQ ID NO: 2967914 - RNA, 19 nt, Human
gaaggucuguuuuguguac

SEQ ID NO: 2967915 - RNA, 18 nt, Human
gaagucaaggcuuagacc

SEQ ID NO: 2967916 - RNA, 23 nt, Human
gaaguccccucuccuccacauuu

SEQ ID NO: 2967917 - RNA, 18 nt, Human
gaaguccccucuccucca

SEQ ID NO: 2967918 - RNA, 15 nt, Human
gaacacucuauaaca

SEQ ID NO: 2967919 - RNA, 21 nt, Human
gaacacucuauaacaaaggau

SEQ ID NO: 2967920 - RNA, 22 nt, Human
gaacaguaacauagcugugauu

SEQ ID NO: 2967921 - RNA, 16 nt, Human
gaaacugacacaugcu

SEQ ID NO: 2967922 - RNA, 20 nt, Human
gaaaggaaugcaaagaugaa

SEQ ID NO: 2967923 - RNA, 12 nt, Human
cuuuuuauaacu

SEQ ID NO: 2967924 - RNA, 18 nt, Human
cuuuuuauauucucagca

SEQ ID NO: 2967925 - RNA, 16 nt, Human
cuuuuuauaacuuuuu

SEQ ID NO: 2967926 - RNA, 22 nt, Human
cuuuuuauauucucagcagagu

SEQ ID NO: 2967927 - RNA, 15 nt, Human
cuuuugcauauugca

SEQ ID NO: 2967928 - RNA, 23 nt, Human
cuuuugcauauugcauacuauua

SEQ ID NO: 2967929 - RNA, 17 nt, Human
cuuuuaagacuuugguu

SEQ ID NO: 2967930 - RNA, 11 nt, Human
cuuuuaaacuc

SEQ ID NO: 2967931 - RNA, 12 nt, Human
cuuucccuuggu

SEQ ID NO: 2967932 - RNA, 17 nt, Human
cuuucccuuggugcccu

SEQ ID NO: 2967933 - RNA, 22 nt, Human
cuugagugucaagcugaccuug

SEQ ID NO: 2967934 - RNA, 16 nt, Human
cuugagugcucaguag

SEQ ID NO: 2967935 - RNA, 19 nt, Human
cuuggacauuuuaugucuu

SEQ ID NO: 2967936 - RNA, 16 nt, Human
cuuggacauuuuaugu

SEQ ID NO: 2967937 - RNA, 18 nt, Human
cuuggacauuuuaugucu

SEQ ID NO: 2967938 - RNA, 17 nt, Human
cuuggacauuuuauguc

SEQ ID NO: 2967939 - RNA, 19 nt, Human
cuugcugcugauuuaaaca

SEQ ID NO: 2967940 - RNA, 17 nt, Human
cuugcugcugauuuaaa

SEQ ID NO: 2967941 - RNA, 17 nt, Human
gaagucuucuauuuauu

SEQ ID NO: 2967942 - RNA, 13 nt, Human
gaagucuucuauu

SEQ ID NO: 2967943 - RNA, 18 nt, Human
gaugaaggucuguuuugu

SEQ ID NO: 2967944 - RNA, 15 nt, Human
gaugaaggucuguuu

SEQ ID NO: 2967945 - RNA, 17 nt, Human
gaugacauucccugcua

SEQ ID NO: 2967946 - RNA, 17 nt, Human
gaugacauugacuauuu

SEQ ID NO: 2967947 - RNA, 21 nt, Human
gaugacauugacuauuuuugu

SEQ ID NO: 2967948 - RNA, 23 nt, Human
gaugacauugacuauuuuuguuu

SEQ ID NO: 2967949 - RNA, 15 nt, Human
gaugacauucccugc

SEQ ID NO: 2967950 - RNA, 19 nt, Human
gauuuucagcccucagaau

SEQ ID NO: 2967951 - RNA, 15 nt, Human
gauuuucagcccuca

SEQ ID NO: 2967952 - RNA, 11 nt, Human
gauuuucagcc

SEQ ID NO: 2967953 - RNA, 12 nt, Human
gauucauauuua

SEQ ID NO: 2967954 - RNA, 20 nt, Human
gcagugcuuggcccaggagu

SEQ ID NO: 2967955 - RNA, 19 nt, Human
gcagugcuuggcccaggag

SEQ ID NO: 2967956 - RNA, 18 nt, Human
gcagugcuuggcccagga

SEQ ID NO: 2967957 - RNA, 19 nt, Human
gcacugguuuguucccugu

SEQ ID NO: 2967958 - RNA, 17 nt, Human
gcacugguuuguucccu

SEQ ID NO: 2967959 - RNA, 19 nt, Human
gcagcccucaauugugaaa

SEQ ID NO: 2967960 - RNA, 13 nt, Human
gcuacacaccuaa

SEQ ID NO: 2967961 - RNA, 16 nt, Human
gcccuuggccaugggu

SEQ ID NO: 2967962 - RNA, 18 nt, Human
gcccuuuuucaauaacug

SEQ ID NO: 2967963 - RNA, 23 nt, Human
gccguggugauuuagcaggaagc

SEQ ID NO: 2967964 - RNA, 22 nt, Human
gccgugugugugcguccugucg

SEQ ID NO: 2967965 - RNA, 19 nt, Human
uuuuaauauggaucuguau

SEQ ID NO: 2967966 - RNA, 12 nt, Human
uuuguucccugu

SEQ ID NO: 2967967 - RNA, 13 nt, Human
uuugguuucuagc

SEQ ID NO: 2967968 - RNA, 15 nt, Human
uuugcauauugcaua

SEQ ID NO: 2967969 - RNA, 20 nt, Human
uuugcauauugcauacuauu

SEQ ID NO: 2967970 - RNA, 14 nt, Human
uuuggaaaagaaua

SEQ ID NO: 2967971 - RNA, 16 nt, Human
uuugaagauucuaugu

SEQ ID NO: 2967972 - RNA, 22 nt, Human
uuaccaauugaaguaaaaugug

SEQ ID NO: 2967973 - RNA, 18 nt, Human
uuuccucauuuuuauaau

SEQ ID NO: 2967974 - RNA, 23 nt, Human
uuaccaauugaaguaaaaugugg

SEQ ID NO: 2967975 - RNA, 21 nt, Human
uuuuuccuucaagaaugcagu

SEQ ID NO: 2967976 - RNA, 20 nt, Human
uuuuuaagggcccuuuuuca

SEQ ID NO: 2967977 - RNA, 17 nt, Human
uuuuggguuuauuugga

SEQ ID NO: 2967978 - RNA, 18 nt, Human
uuuuggguuuauuuggaa

SEQ ID NO: 2967979 - RNA, 14 nt, Human
uuuugguauuugaa

SEQ ID NO: 2967980 - RNA, 16 nt, Human
uuuugguauuugaaac

SEQ ID NO: 2967981 - RNA, 14 nt, Human
uuuuccuucaagaa

SEQ ID NO: 2967982 - RNA, 21 nt, Human
uuuuccuucaagaaugcagua

SEQ ID NO: 2967983 - RNA, 13 nt, Human
uuuuccuucaaga

SEQ ID NO: 2967984 - RNA, 19 nt, Human
gucauuauguuaauauuuc

SEQ ID NO: 2967985 - RNA, 17 nt, Human
gucauuauguuaauauu

SEQ ID NO: 2967986 - RNA, 14 nt, Human
gucauucuucccua

SEQ ID NO: 2967987 - RNA, 22 nt, Human
guauuuucuccaaauguucacu

SEQ ID NO: 2967988 - RNA, 20 nt, Human
gucaaggcuuagacccucau

SEQ ID NO: 2967989 - RNA, 18 nt, Human
gucaaggcuuagacccuc

SEQ ID NO: 2967990 - RNA, 16 nt, Human
gucaaggcuuagaccc

SEQ ID NO: 2967991 - RNA, 20 nt, Human
guauguuuuauauagcaaga

SEQ ID NO: 2967992 - RNA, 16 nt, Human
guauagauguugcuaa

SEQ ID NO: 2967993 - RNA, 15 nt, Human
guauagauguugcua

SEQ ID NO: 2967994 - RNA, 13 nt, Human
gugcguccugucg

SEQ ID NO: 2967995 - RNA, 16 nt, Human
gucggagcccugucuc

SEQ ID NO: 2967996 - RNA, 12 nt, Human
gucggagcccug

SEQ ID NO: 2967997 - RNA, 20 nt, Human
gucuguuuuguguacuuuua

SEQ ID NO: 2967998 - RNA, 15 nt, Human
gucuguuuuguguac

SEQ ID NO: 2967999 - RNA, 14 nt, Human
gucuguuuugugua

SEQ ID NO: 2968000 - RNA, 17 nt, Human
gucugucuuuuaaacuc

SEQ ID NO: 2968001 - RNA, 24 nt, Human
guuaguucaaucuggauucauauu

SEQ ID NO: 2968002 - RNA, 23 nt, Human
guucaaucuggauucauauuuaa

SEQ ID NO: 2968003 - RNA, 24 nt, Human
guucacuggacacuucacgcccuu

SEQ ID NO: 2968004 - RNA, 16 nt, Human
gugugcguccugucgg

SEQ ID NO: 2968005 - RNA, 14 nt, Human
gugugcguccuguc

SEQ ID NO: 2968006 - RNA, 23 nt, Human
guggggcagugcuuggcccagga

SEQ ID NO: 2968007 - RNA, 14 nt, Human
guggggcagugcuu

SEQ ID NO: 2968008 - RNA, 15 nt, Human
guggguggggcagug

SEQ ID NO: 2968009 - RNA, 21 nt, Human
uaaaaggaagcuuacaugccu

SEQ ID NO: 2968010 - RNA, 18 nt, Human
uaaaaggaagcuuacaug

SEQ ID NO: 2968011 - RNA, 20 nt, Human
uaaacaugcuguacauacuu

SEQ ID NO: 2968012 - RNA, 19 nt, Human
uaaacaugcuguacauacu

SEQ ID NO: 2968013 - RNA, 22 nt, Human
uaaacacauuaaagguacuuug

SEQ ID NO: 2968014 - RNA, 23 nt, Human
uaaacaugcuguacauacuuuuu

SEQ ID NO: 2968015 - RNA, 21 nt, Human
uaaacaugcuguacauacuuu

SEQ ID NO: 2968016 - RNA, 22 nt, Human
uaaacaugcuguacauacuuuu

SEQ ID NO: 2968017 - RNA, 16 nt, Human
uaaugguaguuuuaca

SEQ ID NO: 2968018 - RNA, 19 nt, Human
uaaugcuugcugcugauuu

SEQ ID NO: 2968019 - RNA, 15 nt, Human
uaauaugaugacugu

SEQ ID NO: 2968020 - RNA, 15 nt, Human
uaauauggaucugua

SEQ ID NO: 2968021 - RNA, 18 nt, Human
uaacucaccuggcaucuu

SEQ ID NO: 2968022 - RNA, 15 nt, Human
uaacuuuuuauauuc

SEQ ID NO: 2968023 - RNA, 16 nt, Human
uaacuuuuuauauucu

SEQ ID NO: 2968024 - RNA, 13 nt, Human
uaacuuuuuauau

SEQ ID NO: 2968025 - RNA, 14 nt, Human
uaacuuuuuauauu

SEQ ID NO: 2968026 - RNA, 10 nt, Human
uaacuggaac

SEQ ID NO: 2968027 - RNA, 22 nt, Human
uaguagagguacacuugugaau

SEQ ID NO: 2968028 - RNA, 20 nt, Human
uaguagagguacacuuguga

SEQ ID NO: 2968029 - RNA, 21 nt, Human
uaguagagguacacuugugaa

SEQ ID NO: 2968030 - RNA, 17 nt, Human
uaguagagguacacuug

SEQ ID NO: 2968031 - RNA, 21 nt, Human
uagcagcccucaauugugaaa

SEQ ID NO: 2968032 - RNA, 16 nt, Human
uagcaugaagacagag

SEQ ID NO: 2968033 - RNA, 18 nt, Human
uagacccucaugcugcca

SEQ ID NO: 2968034 - RNA, 17 nt, Human
uagacccucaugcugcc

SEQ ID NO: 2968035 - RNA, 19 nt, Human
uagacccucaugcugccaa

SEQ ID NO: 2968036 - RNA, 23 nt, Human
uagacccucaugcugccaauauc

SEQ ID NO: 2968037 - RNA, 12 nt, Human
uacuuuaaacua

SEQ ID NO: 2968038 - RNA, 18 nt, Human
uagaauguuuucaaaugu

SEQ ID NO: 2968039 - RNA, 19 nt, Human
uagaauguuuucaaauguu

SEQ ID NO: 2968040 - RNA, 18 nt, Human
uaauuccuguuuuuauua

SEQ ID NO: 2968041 - RNA, 16 nt, Human
uacaugccuaccaaua

SEQ ID NO: 2968042 - RNA, 19 nt, Human
uacaugccuaccaauauuu

SEQ ID NO: 2968043 - RNA, 17 nt, Human
uacuaacauuuauuuga

SEQ ID NO: 2968044 - RNA, 18 nt, Human
uacuaacauuuauuugag

SEQ ID NO: 2968045 - RNA, 21 nt, Human
ugaaacacugguuuuaaauau

SEQ ID NO: 2968046 - RNA, 18 nt, Human
ugaaugcagguuuuauca

SEQ ID NO: 2968047 - RNA, 20 nt, Human
ugaaugcagguuuuaucaga

SEQ ID NO: 2968048 - RNA, 15 nt, Human
ugacucuucccucaa

SEQ ID NO: 2968049 - RNA, 17 nt, Human
ucuucaguuugcagagu

SEQ ID NO: 2968050 - RNA, 18 nt, Human
ucuucaguuugcagagua

SEQ ID NO: 2968051 - RNA, 15 nt, Human
ugaaacacugguuuu

SEQ ID NO: 2968052 - RNA, 20 nt, Human
ugaaacacugguuuuaaaua

SEQ ID NO: 2968053 - RNA, 14 nt, Human
ucuggacuaaaacu

SEQ ID NO: 2968054 - RNA, 15 nt, Human
ucggagcccugucuc

SEQ ID NO: 2968055 - RNA, 14 nt, Human
ucggagcccugucu

SEQ ID NO: 2968056 - RNA, 21 nt, Human
ugcuaacagcaacacaaagcu

SEQ ID NO: 2968057 - RNA, 22 nt, Human
ugcuaacagcaacacaaagcuu

SEQ ID NO: 2968058 - RNA, 23 nt, Human
ugcuaacagcaacacaaagcuuu

SEQ ID NO: 2968059 - RNA, 15 nt, Human
ugcugauuuaaacac

SEQ ID NO: 2968060 - RNA, 17 nt, Human
ugcugauuuaaacacau

SEQ ID NO: 2968061 - RNA, 14 nt, Human
ugcugauuuaaaca

SEQ ID NO: 2968062 - RNA, 16 nt, Human
ugcucaguagucagac

SEQ ID NO: 2968063 - RNA, 19 nt, Human
ugcacgcacacugucugcc

SEQ ID NO: 2968064 - RNA, 15 nt, Human
ugguaguuuuacagu

SEQ ID NO: 2968065 - RNA, 13 nt, Human
uggcccaggaguu

SEQ ID NO: 2968066 - RNA, 19 nt, Human
uggcccaggaguuuggcca

SEQ ID NO: 2968067 - RNA, 14 nt, Human
uggcccaggaguuu

SEQ ID NO: 2968068 - RNA, 21 nt, Human
uggcccaggaguuuggccaga

SEQ ID NO: 2968069 - RNA, 20 nt, Human
uggcccaggaguuuggccag

SEQ ID NO: 2968070 - RNA, 22 nt, Human
uggcccaggaguuuggccagaa

SEQ ID NO: 2968071 - RNA, 12 nt, Human
uggcccaggagu

SEQ ID NO: 2968072 - RNA, 21 nt, Human
ugcuuuaccaauugaaguaaa

SEQ ID NO: 2968073 - RNA, 15 nt, Human
ugugcacaucuguuu

SEQ ID NO: 2968074 - RNA, 17 nt, Human
ugugcacaucuguuuug

SEQ ID NO: 2968075 - RNA, 23 nt, Human
ugugaaggcaggggaauguaugu

SEQ ID NO: 2968076 - RNA, 20 nt, Human
uguaauaaacucauuucuag

SEQ ID NO: 2968077 - RNA, 18 nt, Human
uguuucuggcuuagaaca

SEQ ID NO: 2968078 - RNA, 18 nt, Human
uuaaaugacucuucccuc

SEQ ID NO: 2968079 - RNA, 11 nt, Human
uuaaaugacuc

SEQ ID NO: 2968080 - RNA, 20 nt, Human
uuaaauauuuugacuuguug

SEQ ID NO: 2968081 - RNA, 23 nt, Human
uuaaacuacauuagguugugaau

SEQ ID NO: 2968082 - RNA, 22 nt, Human
uuaaacuacauuagguugugaa

SEQ ID NO: 2968083 - RNA, 23 nt, Human
uguguggucaacauuucucaugu

SEQ ID NO: 2968084 - RNA, 14 nt, Human
uguguggucaacau

SEQ ID NO: 2968085 - RNA, 18 nt, Human
uguucacuggacacuuca

SEQ ID NO: 2968086 - RNA, 16 nt, Human
caaucuggauucauau

SEQ ID NO: 2968087 - RNA, 20 nt, Human
caaucuggauucauauuuaa

SEQ ID NO: 2968088 - RNA, 23 nt, Human
caaucugugaugacauucccugc

SEQ ID NO: 2968089 - RNA, 16 nt, Human
caaguuaguucaaucu

SEQ ID NO: 2968090 - RNA, 14 nt, Human
caauuugcacauua

SEQ ID NO: 2968091 - RNA, 15 nt, Human
caauuugcacauuaa

SEQ ID NO: 2968092 - RNA, 22 nt, Human
caauuugcacauuaaaugacuc

SEQ ID NO: 2968093 - RNA, 19 nt, Human
caaugagaucauugugaag

SEQ ID NO: 2968094 - RNA, 14 nt, Human
caaggcuuagaccc

SEQ ID NO: 2968095 - RNA, 15 nt, Human
caaggcuuagacccu

SEQ ID NO: 2968096 - RNA, 15 nt, Human
caaggcugugcaucu

SEQ ID NO: 2968097 - RNA, 18 nt, Human
caaggcuuagacccucau

SEQ ID NO: 2968098 - RNA, 14 nt, Human
caaacuaacaggcu

SEQ ID NO: 2968099 - RNA, 16 nt, Human
caaacuaacaggcuua

SEQ ID NO: 2968100 - RNA, 20 nt, Human
caaacuaacaggcuuaguga

SEQ ID NO: 2968101 - RNA, 21 nt, Human
cacaguguguggucaacauuu

SEQ ID NO: 2968102 - RNA, 16 nt, Human
cucuccccuucucugu

SEQ ID NO: 2968103 - RNA, 15 nt, Human
cguggugauuuagca

SEQ ID NO: 2968104 - RNA, 22 nt, Human
cguggugauuuagcaggaagcu

SEQ ID NO: 2968105 - RNA, 12 nt, Human
ccuuuuuauaac

SEQ ID NO: 2968106 - RNA, 15 nt, Human
ccuuuuuauaacuuu

SEQ ID NO: 2968107 - RNA, 21 nt, Human
ccuuuuuauaacuuuuuauau

SEQ ID NO: 2968108 - RNA, 16 nt, Human
ccuuuuucaauaacug

SEQ ID NO: 2968109 - RNA, 11 nt, Human
cuaauaaaaag

SEQ ID NO: 2968110 - RNA, 13 nt, Human
cuaauaaaaaggu

SEQ ID NO: 2968111 - RNA, 14 nt, Human
cuaauaaaaaggug

SEQ ID NO: 2968112 - RNA, 15 nt, Human
cuaauaaaaagguga

SEQ ID NO: 2968113 - RNA, 20 nt, Human
cgugugugugcguccugucg

SEQ ID NO: 2968114 - RNA, 12 nt, Human
cucaauugugaa

SEQ ID NO: 2968115 - RNA, 13 nt, Human
cucaauugugaaa

SEQ ID NO: 2968116 - RNA, 17 nt, Human
cucaauaaacauuucau

SEQ ID NO: 2968117 - RNA, 21 nt, Human
cucaauaaacauuucauuucc

SEQ ID NO: 2968118 - RNA, 21 nt, Human
cucaaacuaacaggcuuagug

SEQ ID NO: 2968119 - RNA, 15 nt, Human
cuauuuuuguuuuua

SEQ ID NO: 2968120 - RNA, 21 nt, Human
cuauuuuuguuuuuauuaaaa

SEQ ID NO: 2968121 - RNA, 21 nt, Human
cuauuaaacaugcuguacaua

SEQ ID NO: 2968122 - RNA, 22 nt, Human
ccugucggagcccugucuccuc

SEQ ID NO: 2968123 - RNA, 16 nt, Human
ccugucggagcccugu

SEQ ID NO: 2968124 - RNA, 21 nt, Human
ccugucggagcccugucuccu

SEQ ID NO: 2968125 - RNA, 17 nt, Human
ccugucggagcccuguc

SEQ ID NO: 2968126 - RNA, 19 nt, Human
cccugucuccucucucugu

SEQ ID NO: 2968127 - RNA, 21 nt, Human
ccucauuuuuauaaugucccu

SEQ ID NO: 2968128 - RNA, 21 nt, Human
ccucaugcugccaauauccua

SEQ ID NO: 2968129 - RNA, 20 nt, Human
ccucaugcugccaauauccu

SEQ ID NO: 2968130 - RNA, 20 nt, Human
ccaggauuauugucaaagaa

SEQ ID NO: 2968131 - RNA, 14 nt, Human
cauauggauaaaua

SEQ ID NO: 2968132 - RNA, 18 nt, Human
caucuguuacacaaagaa

SEQ ID NO: 2968133 - RNA, 15 nt, Human
cauuaguuuugaaga

SEQ ID NO: 2968134 - RNA, 14 nt, Human
cauuaguuuugaag

SEQ ID NO: 2968135 - RNA, 17 nt, Human
cauuauauagcaguaaa

SEQ ID NO: 2968136 - RNA, 16 nt, Human
cauuaguuuugaagau

SEQ ID NO: 2968137 - RNA, 20 nt, Human
cauuauauagcaguaaaaaa

SEQ ID NO: 2968138 - RNA, 17 nt, Human
auuuaaucuuuuaugau

SEQ ID NO: 2968139 - RNA, 14 nt, Human
auuuaaucuuuuau

SEQ ID NO: 2968140 - RNA, 23 nt, Human
auuucaagaaguccccucuccuc

SEQ ID NO: 2968141 - RNA, 12 nt, Human
auuucaagaagu

SEQ ID NO: 2968142 - RNA, 15 nt, Human
auuucucauguugaa

SEQ ID NO: 2968143 - RNA, 19 nt, Human
auucugagaugacuauuca

SEQ ID NO: 2968144 - RNA, 20 nt, Human
caagaaguccccucuccucc

SEQ ID NO: 2968145 - RNA, 11 nt, Human
cacuugugaau

SEQ ID NO: 2968146 - RNA, 12 nt, Human
cacuugugaaua

SEQ ID NO: 2968147 - RNA, 22 nt, Human
caccuugcagcucuccccuucu

SEQ ID NO: 2968148 - RNA, 15 nt, Human
caccuugcagcucuc

SEQ ID NO: 2968149 - RNA, 13 nt, Human
caccuugcagcuc

SEQ ID NO: 2968150 - RNA, 19 nt, Human
caauaaacauuucauuucc

SEQ ID NO: 2968151 - RNA, 15 nt, Human
ggcuaacuuggguua

SEQ ID NO: 2968152 - RNA, 19 nt, Human
ggaguuauugaagcagagu

SEQ ID NO: 2968153 - RNA, 23 nt, Human
ggauugugccuaauguguuugag

SEQ ID NO: 2968154 - RNA, 14 nt, Human
ggcacaucauuuca

SEQ ID NO: 2968155 - RNA, 15 nt, Human
ggcacaucauuucaa

SEQ ID NO: 2968156 - RNA, 21 nt, Human
aaagggguaggguuuaaagau

SEQ ID NO: 2968157 - RNA, 13 nt, Human
guaauaaacucau

SEQ ID NO: 2968158 - RNA, 17 nt, Human
aaauaauuagguauuuu

SEQ ID NO: 2968159 - RNA, 17 nt, Human
guaacauagcugugauu

SEQ ID NO: 2968160 - RNA, 21 nt, Human
aaauauugguugggaugacuu

SEQ ID NO: 2968161 - RNA, 23 nt, Human
aaauaucccuuggacauuuuaug

SEQ ID NO: 2968162 - RNA, 22 nt, Human
aaauaucccuuggacauuuuau

SEQ ID NO: 2968163 - RNA, 16 nt, Human
gguauagauguugcua

SEQ ID NO: 2968164 - RNA, 15 nt, Human
aaacauuucauuucc

SEQ ID NO: 2968165 - RNA, 16 nt, Human
gggguaaggugcaucu

SEQ ID NO: 2968166 - RNA, 20 nt, Human
aaaaugguguuuuaucuucu

SEQ ID NO: 2968167 - RNA, 21 nt, Human
aaaaggaagcuuacaugccua

SEQ ID NO: 2968168 - RNA, 19 nt, Human
aaaauaauuagguauuuuc

SEQ ID NO: 2968169 - RNA, 20 nt, Human
gcccaggaguuuggccagaa

SEQ ID NO: 2968170 - RNA, 19 nt, Human
gcccaggaguuuggccaga

SEQ ID NO: 2968171 - RNA, 13 nt, Human
gcuuuugcauauu

SEQ ID NO: 2968172 - RNA, 17 nt, Human
ggaaaggaaugcaaaga

SEQ ID NO: 2968173 - RNA, 13 nt, Human
ggaaaggaaugca

SEQ ID NO: 2968174 - RNA, 20 nt, Human
ggaaugauauaagguuuuuu

SEQ ID NO: 2968175 - RNA, 14 nt, Human
gcagucuucaguuu

SEQ ID NO: 2968176 - RNA, 15 nt, Human
gcagcucuccccuuc

SEQ ID NO: 2968177 - RNA, 17 nt, Human
gagccccacccucagau

SEQ ID NO: 2968178 - RNA, 16 nt, Human
gagccccacccucaga

SEQ ID NO: 2968179 - RNA, 17 nt, Human
gaauguuuucaaauguu

SEQ ID NO: 2968180 - RNA, 17 nt, Human
gacccucaugcugccaa

SEQ ID NO: 2968181 - RNA, 16 nt, Human
gacccucaugcugcca

SEQ ID NO: 2968182 - RNA, 14 nt, Human
gacccucaugcugc

SEQ ID NO: 2968183 - RNA, 12 nt, Human
gacccucaugcu

SEQ ID NO: 2968184 - RNA, 23 nt, Human
gacccucaugcugccaauauccu

SEQ ID NO: 2968185 - RNA, 22 nt, Human
gacccucaugcugccaauaucc

SEQ ID NO: 2968186 - RNA, 21 nt, Human
gacccucaugcugccaauauc

SEQ ID NO: 2968187 - RNA, 18 nt, Human
gacccucaugcugccaau

SEQ ID NO: 2968188 - RNA, 20 nt, Human
gacauuuuaugucuuucuug

SEQ ID NO: 2968189 - RNA, 16 nt, Human
gacauuuuaugucuuu

SEQ ID NO: 2968190 - RNA, 19 nt, Human
gacacuucacgcccuuggc

SEQ ID NO: 2968191 - RNA, 23 nt, Human
cugucggagcccugucuccucuc

SEQ ID NO: 2968192 - RNA, 22 nt, Human
cuggaguuauugaagcagagug

SEQ ID NO: 2968193 - RNA, 21 nt, Human
cuggaguuauugaagcagagu

SEQ ID NO: 2968194 - RNA, 23 nt, Human
cuggaguuauugaagcagagugg

SEQ ID NO: 2968195 - RNA, 24 nt, Human
cuggaguuauugaagcagaguggc

SEQ ID NO: 2968196 - RNA, 15 nt, Human
cuuggcccaggaguu

SEQ ID NO: 2968197 - RNA, 14 nt, Human
cuuggcccaggagu

SEQ ID NO: 2968198 - RNA, 23 nt, Human
cuuggcccaggaguuuggccaga

SEQ ID NO: 2968199 - RNA, 22 nt, Human
cuuggcccaggaguuuggccag

SEQ ID NO: 2968200 - RNA, 20 nt, Human
cuuggcccaggaguuuggcc

SEQ ID NO: 2968201 - RNA, 16 nt, Human
cuuggcccaggaguuu

SEQ ID NO: 2968202 - RNA, 15 nt, Human
cuuuaagaacuaaaa

SEQ ID NO: 2968203 - RNA, 14 nt, Human
cuucuauauaauuc

SEQ ID NO: 2968204 - RNA, 22 nt, Human
cuucuauuuauuuauuuauuca

SEQ ID NO: 2968205 - RNA, 16 nt, Human
cuucuauuuauuuauu

SEQ ID NO: 2968206 - RNA, 22 nt, Human
cuucucuguauuccuagaaacu

SEQ ID NO: 2968207 - RNA, 13 nt, Human
aagguagaauguu

SEQ ID NO: 2968208 - RNA, 14 nt, Human
aagguagaauguuu

SEQ ID NO: 2968209 - RNA, 15 nt, Human
uaaaaaggugaccau

SEQ ID NO: 2968210 - RNA, 13 nt, Human
uaaaaaggugacc

SEQ ID NO: 2968211 - RNA, 17 nt, Human
aagagggugggugggua

SEQ ID NO: 2968212 - RNA, 16 nt, Human
guuauuuuacuuuuug

SEQ ID NO: 2968213 - RNA, 15 nt, Human
guuauuuuacuuuuu

SEQ ID NO: 2968214 - RNA, 13 nt, Human
aagcuuuugcaua

SEQ ID NO: 2968215 - RNA, 22 nt, Human
aagcuuuugcauauugcauacu

SEQ ID NO: 2968216 - RNA, 15 nt, Human
aagcuuuugcauauu

SEQ ID NO: 2968217 - RNA, 19 nt, Human
aagcuuuugcauauugcau

SEQ ID NO: 2968218 - RNA, 15 nt, Human
aacauagcugugauu

SEQ ID NO: 2968219 - RNA, 16 nt, Human
aacacugguuuuaaau

SEQ ID NO: 2968220 - RNA, 12 nt, Human
aacacaaagcuu

SEQ ID NO: 2968221 - RNA, 18 nt, Human
aacacaaagcuuuugcau

SEQ ID NO: 2968222 - RNA, 19 nt, Human
aacacaaagcuuuugcaua

SEQ ID NO: 2968223 - RNA, 20 nt, Human
aacacaaagcuuuugcauau

SEQ ID NO: 2968224 - RNA, 15 nt, Human
aacuaaaauguucua

SEQ ID NO: 2968225 - RNA, 18 nt, Human
gugcacgcacacugucug

SEQ ID NO: 2968226 - RNA, 14 nt, Human
aacuucagaguucu

SEQ ID NO: 2968227 - RNA, 17 nt, Human
acaaaggggcuuaauua

SEQ ID NO: 2968228 - RNA, 24 nt, Human
acaaaggauacuuauuuaaauaga

SEQ ID NO: 2968229 - RNA, 18 nt, Human
uagaugacauugacuauu

SEQ ID NO: 2968230 - RNA, 19 nt, Human
uagaugacauugacuauuu

SEQ ID NO: 2968231 - RNA, 18 nt, Human
uagcauguccuaaugcuu

SEQ ID NO: 2968232 - RNA, 20 nt, Human
uaggagaagucuucuauuua

SEQ ID NO: 2968233 - RNA, 12 nt, Human
uaggagcaugag

SEQ ID NO: 2968234 - RNA, 20 nt, Human
uauaacuuuuuauauucuca

SEQ ID NO: 2968235 - RNA, 12 nt, Human
uauaacuuuuua

SEQ ID NO: 2968236 - RNA, 17 nt, Human
uauaacuuuuuauauuc

SEQ ID NO: 2968237 - RNA, 17 nt, Human
uaucccuuggacauuuu

SEQ ID NO: 2968238 - RNA, 19 nt, Human
uaucccuuggacauuuuau

SEQ ID NO: 2968239 - RNA, 18 nt, Human
uaucccuuggacauuuua

SEQ ID NO: 2968240 - RNA, 12 nt, Human
uauccuaauaaa

SEQ ID NO: 2968241 - RNA, 18 nt, Human
uauccuaauaaaaaggug

SEQ ID NO: 2968242 - RNA, 15 nt, Human
uauccuaauaaaaag

SEQ ID NO: 2968243 - RNA, 19 nt, Human
uauccuaauaaaaagguga

SEQ ID NO: 2968244 - RNA, 22 nt, Human
uauccuaauaaaaaggugacca

SEQ ID NO: 2968245 - RNA, 18 nt, Human
acagauugaauuugccua

SEQ ID NO: 2968246 - RNA, 12 nt, Human
acagauugaauu

SEQ ID NO: 2968247 - RNA, 19 nt, Human
acaggcuuagugauguaau

SEQ ID NO: 2968248 - RNA, 20 nt, Human
acaggcuuagugauguaauu

SEQ ID NO: 2968249 - RNA, 14 nt, Human
acaggcuuagugau

SEQ ID NO: 2968250 - RNA, 18 nt, Human
uauucaguggcuaacuug

SEQ ID NO: 2968251 - RNA, 23 nt, Human
uauguuuuuguucaguuuaucug

SEQ ID NO: 2968252 - RNA, 20 nt, Human
uacucugccacuuuauuucu

SEQ ID NO: 2968253 - RNA, 17 nt, Human
aauuauugauguuuuca

SEQ ID NO: 2968254 - RNA, 21 nt, Human
aauuaaugucaguauuucaac

SEQ ID NO: 2968255 - RNA, 13 nt, Human
aauauuuaaucuu

SEQ ID NO: 2968256 - RNA, 17 nt, Human
uaaugucaguauuucaa

SEQ ID NO: 2968257 - RNA, 11 nt, Human
uaaucuuuuau

SEQ ID NO: 2968258 - RNA, 12 nt, Human
uaauaaacucau

SEQ ID NO: 2968259 - RNA, 23 nt, Human
aaucgcuccaccuugcagcucuc

SEQ ID NO: 2968260 - RNA, 19 nt, Human
aaucuggauucauauuuaa

SEQ ID NO: 2968261 - RNA, 18 nt, Human
aaucuggauucauauuua

SEQ ID NO: 2968262 - RNA, 17 nt, Human
aaucuggauucauauuu

SEQ ID NO: 2968263 - RNA, 16 nt, Human
aaucuggauucauauu

SEQ ID NO: 2968264 - RNA, 12 nt, Human
ucaauugugaaa

SEQ ID NO: 2968265 - RNA, 16 nt, Human
ucacacugucuucuga

SEQ ID NO: 2968266 - RNA, 20 nt, Human
acaugcuguacauacuuuuu

SEQ ID NO: 2968267 - RNA, 21 nt, Human
acaugcuguacauacuuuuug

SEQ ID NO: 2968268 - RNA, 17 nt, Human
ucaacauuucucauguu

SEQ ID NO: 2968269 - RNA, 11 nt, Human
acauucccugc

SEQ ID NO: 2968270 - RNA, 17 nt, Human
acauugacuauuuuugu

SEQ ID NO: 2968271 - RNA, 14 nt, Human
acauugacuauuuu

SEQ ID NO: 2968272 - RNA, 19 nt, Human
ucaaucuggauucauauuu

SEQ ID NO: 2968273 - RNA, 15 nt, Human
ucauauggauaaaua

SEQ ID NO: 2968274 - RNA, 14 nt, Human
acccucucaaacua

SEQ ID NO: 2968275 - RNA, 15 nt, Human
accccaucaucccuu

SEQ ID NO: 2968276 - RNA, 14 nt, Human
ucagcccucagaau

SEQ ID NO: 2968277 - RNA, 16 nt, Human
acucugccacuuuauu

SEQ ID NO: 2968278 - RNA, 17 nt, Human
acucugccacuuuauuu

SEQ ID NO: 2968279 - RNA, 22 nt, Human
acucugagugcaaacuucagag

SEQ ID NO: 2968280 - RNA, 21 nt, Human
acugaacaguaacauagcugu

SEQ ID NO: 2968281 - RNA, 15 nt, Human
acugaacaguaacau

SEQ ID NO: 2968282 - RNA, 23 nt, Human
uccagucauuauguuaauauuuc

SEQ ID NO: 2968283 - RNA, 21 nt, Human
uccagucauuauguuaauauu

SEQ ID NO: 2968284 - RNA, 15 nt, Human
uccagucauuauguu

SEQ ID NO: 2968285 - RNA, 14 nt, Human
uccagucauuaugu

SEQ ID NO: 2968286 - RNA, 22 nt, Human
acuuuuuauauucucagcagag

SEQ ID NO: 2968287 - RNA, 12 nt, Human
acuuuuuauauu

SEQ ID NO: 2968288 - RNA, 15 nt, Human
acuuuuuauauucuc

SEQ ID NO: 2968289 - RNA, 16 nt, Human
acuuuuuauauucuca

SEQ ID NO: 2968290 - RNA, 22 nt, Human
acuuugguuauuuuacuuuuug

SEQ ID NO: 2968291 - RNA, 23 nt, Human
acuuugguuauuuuacuuuuugg

SEQ ID NO: 2968292 - RNA, 10 nt, Human
acuuugguua

SEQ ID NO: 2968293 - RNA, 13 nt, Human
acuuugguuauuu

SEQ ID NO: 2968294 - RNA, 21 nt, Human
acuuugguuauuuuacuuuuu

SEQ ID NO: 2968295 - RNA, 15 nt, Human
acuugugaauaaaga

SEQ ID NO: 2968296 - RNA, 12 nt, Human
ucucagcagagu

SEQ ID NO: 2968297 - RNA, 13 nt, Human
ucucagcagagug

SEQ ID NO: 2968298 - RNA, 14 nt, Human
ucucagcagagugc

SEQ ID NO: 2968299 - RNA, 15 nt, Human
ucuauuuauuuguga

SEQ ID NO: 2968300 - RNA, 14 nt, Human
ucuauuuauuuauu

SEQ ID NO: 2968301 - RNA, 13 nt, Human
ucuauuuauuuau

SEQ ID NO: 2968302 - RNA, 16 nt, Human
ucuauguuaauauuuu

SEQ ID NO: 2968303 - RNA, 14 nt, Human
ucuauguuaauauu

SEQ ID NO: 2968304 - RNA, 22 nt, Human
ucuauaacaaaggauacuuauu

SEQ ID NO: 2968305 - RNA, 23 nt, Human
ucuauaacaaaggauacuuauuu

SEQ ID NO: 2968306 - RNA, 21 nt, Human
agaauguuuucaaauguucuc

SEQ ID NO: 2968307 - RNA, 15 nt, Human
agaauguuuucaaau

SEQ ID NO: 2968308 - RNA, 24 nt, Human
agacagagccccacccucagaugc

SEQ ID NO: 2968309 - RNA, 22 nt, Human
agacagagccccacccucagau

SEQ ID NO: 2968310 - RNA, 16 nt, Human
agaauugauugggcac

SEQ ID NO: 2968311 - RNA, 22 nt, Human
agaauugauugggcacaucauu

SEQ ID NO: 2968312 - RNA, 23 nt, Human
agaauugauugggcacaucauuu

SEQ ID NO: 2968313 - RNA, 24 nt, Human
agaauugauugggcacaucauuuc

SEQ ID NO: 2968314 - RNA, 22 nt, Human
ucugagugcaaacuucagaguu

SEQ ID NO: 2968315 - RNA, 23 nt, Human
ucugagugcaaacuucagaguuc

SEQ ID NO: 2968316 - RNA, 14 nt, Human
ucugagugcaaacu

SEQ ID NO: 2968317 - RNA, 18 nt, Human
ugacuauuuuuguuuuua

SEQ ID NO: 2968318 - RNA, 22 nt, Human
ugacuauuuuuguuuuuauuaa

SEQ ID NO: 2968319 - RNA, 11 nt, Human
ugacuguuuuu

SEQ ID NO: 2968320 - RNA, 16 nt, Human
ugacuauaaccuuguu

SEQ ID NO: 2968321 - RNA, 19 nt, Human
ugacuauucugagaugacu

SEQ ID NO: 2968322 - RNA, 21 nt, Human
ugacuauucugagaugacuau

SEQ ID NO: 2968323 - RNA, 22 nt, Human
ugacuauucugagaugacuauu

SEQ ID NO: 2968324 - RNA, 13 nt, Human
ugacauucccugc

SEQ ID NO: 2968325 - RNA, 14 nt, Human
ugacagauugaauu

SEQ ID NO: 2968326 - RNA, 13 nt, Human
agaugcacaugag

SEQ ID NO: 2968327 - RNA, 16 nt, Human
agaugcacaugagcug

SEQ ID NO: 2968328 - RNA, 23 nt, Human
ugagagcaguuugguuucuagca

SEQ ID NO: 2968329 - RNA, 21 nt, Human
ugagagcaguuugguuucuag

SEQ ID NO: 2968330 - RNA, 17 nt, Human
agacuuugguuauuuua

SEQ ID NO: 2968331 - RNA, 23 nt, Human
agacuuugguuauuuuacuuuuu

SEQ ID NO: 2968332 - RNA, 19 nt, Human
ugaaguaaaauguggcagg

SEQ ID NO: 2968333 - RNA, 18 nt, Human
ugaaguaaaauguggcag

SEQ ID NO: 2968334 - RNA, 17 nt, Human
uguagacaguuggguuu

SEQ ID NO: 2968335 - RNA, 12 nt, Human
agguugugaaug

SEQ ID NO: 2968336 - RNA, 15 nt, Human
ugguuuguucccugu

SEQ ID NO: 2968337 - RNA, 15 nt, Human
ugguuucuagcauga

SEQ ID NO: 2968338 - RNA, 16 nt, Human
ugguuauuuuacuuuu

SEQ ID NO: 2968339 - RNA, 15 nt, Human
ugguuauuuuacuuu

SEQ ID NO: 2968340 - RNA, 18 nt, Human
ugguuauuuuacuuuuug

SEQ ID NO: 2968341 - RNA, 21 nt, Human
aggggcuuaauuauugauguu

SEQ ID NO: 2968342 - RNA, 14 nt, Human
aggguuuaaagaug

SEQ ID NO: 2968343 - RNA, 14 nt, Human
agucuucuauuuau

SEQ ID NO: 2968344 - RNA, 19 nt, Human
ugugauuuuugguauuuga

SEQ ID NO: 2968345 - RNA, 21 nt, Human
ugugauuuuugguauuugaaa

SEQ ID NO: 2968346 - RNA, 20 nt, Human
ugugauuuuugguauuugaa

SEQ ID NO: 2968347 - RNA, 15 nt, Human
ugucuccucucucug

SEQ ID NO: 2968348 - RNA, 22 nt, Human
aguccccucuccuccacauuug

SEQ ID NO: 2968349 - RNA, 20 nt, Human
ugucaaccccaaguuaguuc

SEQ ID NO: 2968350 - RNA, 21 nt, Human
aguccccucuccuccacauuu

SEQ ID NO: 2968351 - RNA, 18 nt, Human
uuagcaggaagcugugag

SEQ ID NO: 2968352 - RNA, 16 nt, Human
auaacuggaacacucu

SEQ ID NO: 2968353 - RNA, 18 nt, Human
auaacuggaacacucuau

SEQ ID NO: 2968354 - RNA, 21 nt, Human
auaacuggaacacucuauaac

SEQ ID NO: 2968355 - RNA, 23 nt, Human
auaacuggaacacucuauaacaa

SEQ ID NO: 2968356 - RNA, 15 nt, Human
auaaacucauuucua

SEQ ID NO: 2968357 - RNA, 21 nt, Human
uuagccguggugauuuagcag

SEQ ID NO: 2968358 - RNA, 14 nt, Human
uuauaacuuuuuau

SEQ ID NO: 2968359 - RNA, 16 nt, Human
uuauaacuuuuuauau

SEQ ID NO: 2968360 - RNA, 19 nt, Human
uuauauagcaagacauuau

SEQ ID NO: 2968361 - RNA, 13 nt, Human
uuauauagcaaga

SEQ ID NO: 2968362 - RNA, 15 nt, Human
uuaucagaacuaugu

SEQ ID NO: 2968363 - RNA, 20 nt, Human
auacuauuaaacaugcugua

SEQ ID NO: 2968364 - RNA, 19 nt, Human
aguuauugaagcagagugg

SEQ ID NO: 2968365 - RNA, 23 nt, Human
aguuauugaagcagaguggcagu

SEQ ID NO: 2968366 - RNA, 16 nt, Human
aguuauugaagcagag

SEQ ID NO: 2968367 - RNA, 17 nt, Human
aguuauugaagcagagu

SEQ ID NO: 2968368 - RNA, 18 nt, Human
aguuauugaagcagagug

SEQ ID NO: 2968369 - RNA, 14 nt, Human
aguuauugaagcag

SEQ ID NO: 2968370 - RNA, 23 nt, Human
aguggcagucuucaguuugcaga

SEQ ID NO: 2968371 - RNA, 22 nt, Human
aguucuugccuuggcugcaguu

SEQ ID NO: 2968372 - RNA, 14 nt, Human
uguuuuaggagcau

SEQ ID NO: 2968373 - RNA, 17 nt, Human
uguuuuauauagcaaga

SEQ ID NO: 2968374 - RNA, 14 nt, Human
uguuuucaaauguu

SEQ ID NO: 2968375 - RNA, 13 nt, Human
uguuuucaaaugu

SEQ ID NO: 2968376 - RNA, 12 nt, Human
aguuuggccaga

SEQ ID NO: 2968377 - RNA, 16 nt, Human
aguuugguuucuagca

SEQ ID NO: 2968378 - RNA, 14 nt, Human
aguuuggccagaag

SEQ ID NO: 2968379 - RNA, 13 nt, Human
aguuuggccagaa

SEQ ID NO: 2968380 - RNA, 17 nt, Human
ugccagccacugugaua

SEQ ID NO: 2968381 - RNA, 20 nt, Human
ugcagcucuccccuucucug

SEQ ID NO: 2968382 - RNA, 22 nt, Human
ugcagcucuccccuucucugua

SEQ ID NO: 2968383 - RNA, 18 nt, Human
agcccugucuccucucuc

SEQ ID NO: 2968384 - RNA, 11 nt, Human
agcccugucuc

SEQ ID NO: 2968385 - RNA, 17 nt, Human
ugauuuagcaggaagcu

SEQ ID NO: 2968386 - RNA, 20 nt, Human
ugauuuagcaggaagcugug

SEQ ID NO: 2968387 - RNA, 18 nt, Human
ugaugacauucccugcua

SEQ ID NO: 2968388 - RNA, 15 nt, Human
ugaugacauucccug

SEQ ID NO: 2968389 - RNA, 13 nt, Human
ugaugacuguuuu

SEQ ID NO: 2968390 - RNA, 14 nt, Human
aggaguuuggccag

SEQ ID NO: 2968391 - RNA, 18 nt, Human
aggaguuuggccagaagu

SEQ ID NO: 2968392 - RNA, 17 nt, Human
aggaguuuggccagaag

SEQ ID NO: 2968393 - RNA, 16 nt, Human
aggaguuuggccagaa

SEQ ID NO: 2968394 - RNA, 15 nt, Human
aggaguuuggccaga

SEQ ID NO: 2968395 - RNA, 12 nt, Human
uggaaaggaaug

SEQ ID NO: 2968396 - RNA, 15 nt, Human
uggaaaggaaugcaa

SEQ ID NO: 2968397 - RNA, 21 nt, Human
uggaaaggaaugcaaagauga

SEQ ID NO: 2968398 - RNA, 22 nt, Human
uggaaaggaaugcaaagaugaa

SEQ ID NO: 2968399 - RNA, 12 nt, Human
ugcuuggcccag

SEQ ID NO: 2968400 - RNA, 16 nt, Human
ugcuuggcccaggagu

SEQ ID NO: 2968401 - RNA, 15 nt, Human
ugcuuggcccaggag

SEQ ID NO: 2968402 - RNA, 23 nt, Human
ugcuuggcccaggaguuuggcca

SEQ ID NO: 2968403 - RNA, 18 nt, Human
ugcuuggcccaggaguuu

SEQ ID NO: 2968404 - RNA, 15 nt, Human
ugcuguacauacuuu

SEQ ID NO: 2968405 - RNA, 17 nt, Human
ugcuguacauacuuuuu

SEQ ID NO: 2968406 - RNA, 22 nt, Human
ugcuguacauacuuuuuggguu

SEQ ID NO: 2968407 - RNA, 11 nt, Human
ugcuguacaua

SEQ ID NO: 2968408 - RNA, 18 nt, Human
aggaagcugugagagcag

SEQ ID NO: 2968409 - RNA, 17 nt, Human
aggaagcuuacaugccu

SEQ ID NO: 2968410 - RNA, 20 nt, Human
ugggaaagggauuuucagcc

SEQ ID NO: 2968411 - RNA, 22 nt, Human
uggaguuauugaagcagagugg

SEQ ID NO: 2968412 - RNA, 15 nt, Human
uugaagguagaaugu

SEQ ID NO: 2968413 - RNA, 19 nt, Human
uugaagguagaauguuuuc

SEQ ID NO: 2968414 - RNA, 16 nt, Human
uugaagguagaauguu

SEQ ID NO: 2968415 - RNA, 14 nt, Human
uugaaguaaaaugu

SEQ ID NO: 2968416 - RNA, 16 nt, Human
uugaaggaugcugucu

SEQ ID NO: 2968417 - RNA, 14 nt, Human
uugaaggaugcugu

SEQ ID NO: 2968418 - RNA, 16 nt, Human
auccaauugcugcuug

SEQ ID NO: 2968419 - RNA, 14 nt, Human
aucacuuccaugac

SEQ ID NO: 2968420 - RNA, 14 nt, Human
uucucucaucuguu

SEQ ID NO: 2968421 - RNA, 13 nt, Human
auauuuaaucuuu

SEQ ID NO: 2968422 - RNA, 20 nt, Human
auauugguugggaugacuug

SEQ ID NO: 2968423 - RNA, 19 nt, Human
auauugguugggaugacuu

SEQ ID NO: 2968424 - RNA, 22 nt, Human
uuccuguuuuuauuauuaacaa

SEQ ID NO: 2968425 - RNA, 16 nt, Human
uuccaguaaugagcuu

SEQ ID NO: 2968426 - RNA, 19 nt, Human
uucauucuuuuugaaaugu

SEQ ID NO: 2968427 - RNA, 14 nt, Human
uucauuaguuuuga

SEQ ID NO: 2968428 - RNA, 19 nt, Human
uucauuaguuuugaagauu

SEQ ID NO: 2968429 - RNA, 20 nt, Human
uuuccuucaagaaugcagua

SEQ ID NO: 2968430 - RNA, 18 nt, Human
uuucucacagaagaugaa

SEQ ID NO: 2968431 - RNA, 22 nt, Human
uuucucacagaagaugaagcac

SEQ ID NO: 2968432 - RNA, 15 nt, Human
uuucucauguugaaa

SEQ ID NO: 2968433 - RNA, 13 nt, Human
uuucucauguuga

SEQ ID NO: 2968434 - RNA, 23 nt, Human
uuugaaacacugguuuuaaauau

SEQ ID NO: 2968435 - RNA, 23 nt, Human
augccuaccaauauuuaaucuuu

SEQ ID NO: 2968436 - RNA, 17 nt, Human
augccuaccaauauuua

SEQ ID NO: 2968437 - RNA, 16 nt, Human
augccuaccaauauuu

SEQ ID NO: 2968438 - RNA, 18 nt, Human
uuuauauagcaagacauu

SEQ ID NO: 2968439 - RNA, 22 nt, Human
uuuauauagcaagacauuauau

SEQ ID NO: 2968440 - RNA, 22 nt, Human
uugugaaggcaggggaauguau

SEQ ID NO: 2968441 - RNA, 14 nt, Human
uugugaauaaagag

SEQ ID NO: 2968442 - RNA, 19 nt, Human
uuguugaggguauguuuua

SEQ ID NO: 2968443 - RNA, 22 nt, Human
uuguucccugugucauuucaaa

SEQ ID NO: 2968444 - RNA, 16 nt, Human
uuguuuuuauuaaaag

SEQ ID NO: 2968445 - RNA, 21 nt, Human
uuguaacuguuuagaugaaug

SEQ ID NO: 2968446 - RNA, 22 nt, Human
uuguaacuguuuagaugaaugu

SEQ ID NO: 2968447 - RNA, 23 nt, Human
uuggccugucuuuggauuguuaa

SEQ ID NO: 2968448 - RNA, 13 nt, Human
aucuuuuaugauu

SEQ ID NO: 2968449 - RNA, 23 nt, Human
auuucaaacagucucccuuccua

SEQ ID NO: 2968450 - RNA, 14 nt, Human
auuuauucauuagu

SEQ ID NO: 2968451 - RNA, 14 nt, Human
auuuauuuauucau

SEQ ID NO: 2968452 - RNA, 16 nt, Human
auucuuuuugaaaugu

SEQ ID NO: 2968453 - RNA, 17 nt, Human
auugggcacaucauuuc

SEQ ID NO: 2968454 - RNA, 18 nt, Human
auugggcacaucauuuca

SEQ ID NO: 2968455 - RNA, 19 nt, Human
auugggcacaucauuucaa

SEQ ID NO: 2968456 - RNA, 21 nt, Human
auugggcacaucauuucaaga

SEQ ID NO: 2968457 - RNA, 23 nt, Human
auugggcacaucauuucaagaag

SEQ ID NO: 2968458 - RNA, 12 nt, Human
auuugugagacu

SEQ ID NO: 2968459 - RNA, 14 nt, Human
auuugugagacugu

SEQ ID NO: 2968460 - RNA, 21 nt, Human
auuuguuuugccaauuugcac

SEQ ID NO: 2968461 - RNA, 23 nt, Human
auuuguuuugccaauuugcacau

SEQ ID NO: 2968462 - RNA, 23 nt, Human
auuugaagguagaauguuuucaa

SEQ ID NO: 2968463 - RNA, 18 nt, Human
auuugaagguagaauguu

SEQ ID NO: 2968464 - RNA, 17 nt, Human
auuuuacuuuuuggaaa

SEQ ID NO: 2968465 - RNA, 14 nt, Human
auuuuacuuuuugg

SEQ ID NO: 2968466 - RNA, 16 nt, Human
auuaaacaugcuguac

SEQ ID NO: 2968467 - RNA, 22 nt, Human
auguuaauauuuuagguguaaa

SEQ ID NO: 2968468 - RNA, 13 nt, Human
auguuaauauuuu

SEQ ID NO: 2968469 - RNA, 13 nt, Human
auguuaauauuuc

SEQ ID NO: 2968470 - RNA, 14 nt, Human
auguguucuauuca

SEQ ID NO: 2968471 - RNA, 18 nt, Human
uuuugcauauugcauacu

SEQ ID NO: 2968472 - RNA, 15 nt, Human
uuuugcauauugcau

SEQ ID NO: 2968473 - RNA, 18 nt, Human
uuuugccaauuugcacau

SEQ ID NO: 2968474 - RNA, 19 nt, Human
uuuugccaauuugcacauu

SEQ ID NO: 2968475 - RNA, 16 nt, Human
uuuugccaauuugcac

SEQ ID NO: 2968476 - RNA, 17 nt, Human
auuauauagcaguaaaa

SEQ ID NO: 2968477 - RNA, 18 nt, Human
auucuauguuaauauuuu

SEQ ID NO: 2968478 - RNA, 15 nt, Human
auucuauguuaauau

SEQ ID NO: 2968479 - RNA, 17 nt, Human
auucucagcagagugcu

SEQ ID NO: 2968480 - RNA, 13 nt, Human
aagaaauuugugg

SEQ ID NO: 2968481 - RNA, 21 nt, Human
aaguccccucuccuccacauu

SEQ ID NO: 2968482 - RNA, 20 nt, Human
aaguccccucuccuccacau

SEQ ID NO: 2968483 - RNA, 14 nt, Human
aaugguaguuuuac

SEQ ID NO: 2968484 - RNA, 22 nt, Human
aaugucaguuguuauuuauuga

SEQ ID NO: 2968485 - RNA, 20 nt, Human
aaugucaguuguuauuuauu

SEQ ID NO: 2968486 - RNA, 19 nt, Human
aaugucaguuguuauuuau

SEQ ID NO: 2968487 - RNA, 19 nt, Human
aaucacacugucuucugau

SEQ ID NO: 2968488 - RNA, 15 nt, Human
aacugaacuucagag

SEQ ID NO: 2968489 - RNA, 20 nt, Human
aacucaccuggcaucuuaca

SEQ ID NO: 2968490 - RNA, 19 nt, Human
aacuuauggggccaaaaua

SEQ ID NO: 2968491 - RNA, 23 nt, Human
aacugacacaugcugaacaucac

SEQ ID NO: 2968492 - RNA, 16 nt, Human
aacuuuuuauauucuc

SEQ ID NO: 2968493 - RNA, 19 nt, Human
aacaaaggauacuuauuua

SEQ ID NO: 2968494 - RNA, 15 nt, Human
aacaaaggauacuua

SEQ ID NO: 2968495 - RNA, 18 nt, Human
aaagaugaaggucuguuu

SEQ ID NO: 2968496 - RNA, 13 nt, Human
acacaaagcuuuu

SEQ ID NO: 2968497 - RNA, 18 nt, Human
acacaaagcuuuugcaua

SEQ ID NO: 2968498 - RNA, 18 nt, Human
acacuguccuauuauauu

SEQ ID NO: 2968499 - RNA, 13 nt, Human
acauuaaagguac

SEQ ID NO: 2968500 - RNA, 12 nt, Human
acauuaaaugac

SEQ ID NO: 2968501 - RNA, 11 nt, Human
acauuaaauga

SEQ ID NO: 2968502 - RNA, 15 nt, Human
acauuaaaugacucu

SEQ ID NO: 2968503 - RNA, 14 nt, Human
acuguuuagaugaa

SEQ ID NO: 2968504 - RNA, 18 nt, Human
acuuauuuaaauagauga

SEQ ID NO: 2968505 - RNA, 13 nt, Human
acuuauuuaaaua

SEQ ID NO: 2968506 - RNA, 22 nt, Human
acucuauaacaaaggauacuua

SEQ ID NO: 2968507 - RNA, 16 nt, Human
acucuaccugcacacu

SEQ ID NO: 2968508 - RNA, 16 nt, Human
acgugcacgcacacug

SEQ ID NO: 2968509 - RNA, 13 nt, Human
auacuuauuuaaa

SEQ ID NO: 2968510 - RNA, 23 nt, Human
auauccuaauaaaaaggugacca

SEQ ID NO: 2968511 - RNA, 19 nt, Human
auaucccuuggacauuuua

SEQ ID NO: 2968512 - RNA, 11 nt, Human
auaucacuucc

SEQ ID NO: 2968513 - RNA, 17 nt, Human
auauagcaagacauuau

SEQ ID NO: 2968514 - RNA, 22 nt, Human
auacuuauuuaaauagaugaca

SEQ ID NO: 2968515 - RNA, 15 nt, Human
auacuuauuuaaaua

SEQ ID NO: 2968516 - RNA, 21 nt, Human
auacuuauuuaaauagaugac

SEQ ID NO: 2968517 - RNA, 22 nt, Human
auauaauuccuguuuuuauuau

SEQ ID NO: 2968518 - RNA, 16 nt, Human
auauaauuccuguuuu

SEQ ID NO: 2968519 - RNA, 12 nt, Human
agucauuauguu

SEQ ID NO: 2968520 - RNA, 18 nt, Human
agucauuauguuaauauu

SEQ ID NO: 2968521 - RNA, 13 nt, Human
agucauucuuuaa

SEQ ID NO: 2968522 - RNA, 14 nt, Human
agucauucuucccu

SEQ ID NO: 2968523 - RNA, 16 nt, Human
agucaaggcuuagacc

SEQ ID NO: 2968524 - RNA, 14 nt, Human
agucaaggcuuaga

SEQ ID NO: 2968525 - RNA, 23 nt, Human
aucuucuauauaauuccuguuuu

SEQ ID NO: 2968526 - RNA, 18 nt, Human
augacuauucaguggcua

SEQ ID NO: 2968527 - RNA, 18 nt, Human
augacucuucccucaaau

SEQ ID NO: 2968528 - RNA, 17 nt, Human
auuaaaugacucuuccc

SEQ ID NO: 2968529 - RNA, 14 nt, Human
auuaaaugacucuu

SEQ ID NO: 2968530 - RNA, 21 nt, Human
auuaaaugacucuucccucaa

SEQ ID NO: 2968531 - RNA, 23 nt, Human
augcuugcugcugauuuaaacac

SEQ ID NO: 2968532 - RNA, 16 nt, Human
augcuugcugcugauu

SEQ ID NO: 2968533 - RNA, 22 nt, Human
augcuugcugcugauuuaaaca

SEQ ID NO: 2968534 - RNA, 17 nt, Human
agguacacuugugaaua

SEQ ID NO: 2968535 - RNA, 16 nt, Human
agguacacuugugaau

SEQ ID NO: 2968536 - RNA, 14 nt, Human
agguacacuuguga

SEQ ID NO: 2968537 - RNA, 18 nt, Human
agagguacacuugugaau

SEQ ID NO: 2968538 - RNA, 17 nt, Human
agagguacacuugugaa

SEQ ID NO: 2968539 - RNA, 16 nt, Human
agagguacacuuguga

SEQ ID NO: 2968540 - RNA, 12 nt, Human
agcaugaagaca

SEQ ID NO: 2968541 - RNA, 20 nt, Human
agcagcccucaauugugaaa

SEQ ID NO: 2968542 - RNA, 20 nt, Human
agauguagacaguuggguuu

SEQ ID NO: 2968543 - RNA, 19 nt, Human
agccccacccucagaugca

SEQ ID NO: 2968544 - RNA, 13 nt, Human
aaaaauuuacuuu

SEQ ID NO: 2968545 - RNA, 18 nt, Human
aaaaauuuacuuuaaacu

SEQ ID NO: 2968546 - RNA, 19 nt, Human
aaaaauuuacuuuaaacua

SEQ ID NO: 2968547 - RNA, 16 nt, Human
cacuguccuauuauau

SEQ ID NO: 2968548 - RNA, 12 nt, Human
cacugguuuuaa

SEQ ID NO: 2968549 - RNA, 13 nt, Human
cacugguuuuaaa

SEQ ID NO: 2968550 - RNA, 15 nt, Human
cacugguuuuaaaua

SEQ ID NO: 2968551 - RNA, 16 nt, Human
cacugguuuuaaauau

SEQ ID NO: 2968552 - RNA, 18 nt, Human
cacugguuuguucccugu

SEQ ID NO: 2968553 - RNA, 20 nt, Human
cacuucacgcccuuggccau

SEQ ID NO: 2968554 - RNA, 21 nt, Human
cacuucacgcccuuggccaug

SEQ ID NO: 2968555 - RNA, 17 nt, Human
cacuucacgcccuuggc

SEQ ID NO: 2968556 - RNA, 19 nt, Human
cacuucacgcccuuggcca

SEQ ID NO: 2968557 - RNA, 13 nt, Human
cacucuauaacaa

SEQ ID NO: 2968558 - RNA, 15 nt, Human
cacgcacacugucug

SEQ ID NO: 2968559 - RNA, 20 nt, Human
cacccucagaugcacaugag

SEQ ID NO: 2968560 - RNA, 21 nt, Human
cagaaucgcuccaccuugcag

SEQ ID NO: 2968561 - RNA, 23 nt, Human
cagaaucgcuccaccuugcagcu

SEQ ID NO: 2968562 - RNA, 17 nt, Human
cagaagucaaggcuuag

SEQ ID NO: 2968563 - RNA, 16 nt, Human
cagaagucaaggcuua

SEQ ID NO: 2968564 - RNA, 18 nt, Human
cagaagucaaggcuuaga

SEQ ID NO: 2968565 - RNA, 17 nt, Human
cagaacuauguuuuugu

SEQ ID NO: 2968566 - RNA, 17 nt, Human
cagaugcacaugagcug

SEQ ID NO: 2968567 - RNA, 12 nt, Human
cagaguggcagu

SEQ ID NO: 2968568 - RNA, 21 nt, Human
cagagugcuuuaccaauugaa

SEQ ID NO: 2968569 - RNA, 21 nt, Human
cagagaagauucuuguauuua

SEQ ID NO: 2968570 - RNA, 20 nt, Human
cagagccccacccucagaug

SEQ ID NO: 2968571 - RNA, 14 nt, Human
caggaagcugugag

SEQ ID NO: 2968572 - RNA, 13 nt, Human
caggaagcuguga

SEQ ID NO: 2968573 - RNA, 22 nt, Human
caggaagcugugagagcaguuu

SEQ ID NO: 2968574 - RNA, 16 nt, Human
cagcucuccccuucuc

SEQ ID NO: 2968575 - RNA, 18 nt, Human
cagcccucaauugugaaa

SEQ ID NO: 2968576 - RNA, 13 nt, Human
cagcccucagaau

SEQ ID NO: 2968577 - RNA, 23 nt, Human
cagcaacacaaagcuuuugcaua

SEQ ID NO: 2968578 - RNA, 15 nt, Human
cagcaacacaaagcu

SEQ ID NO: 2968579 - RNA, 11 nt, Human
cagcagagugc

SEQ ID NO: 2968580 - RNA, 15 nt, Human
cagcagagugcuuua

SEQ ID NO: 2968581 - RNA, 9 nt, Human
cagcagagu

SEQ ID NO: 2968582 - RNA, 10 nt, Human
cagcagagug

SEQ ID NO: 2968583 - RNA, 19 nt, Human
cagcacaaggaaauaaaau

SEQ ID NO: 2968584 - RNA, 16 nt, Human
caggcuggaguuauug

SEQ ID NO: 2968585 - RNA, 13 nt, Human
caggcuggaguua

SEQ ID NO: 2968586 - RNA, 14 nt, Human
caggaguuuggcca

SEQ ID NO: 2968587 - RNA, 13 nt, Human
caggaguuuggcc

SEQ ID NO: 2968588 - RNA, 17 nt, Human
caggaguuuggccagaa

SEQ ID NO: 2968589 - RNA, 16 nt, Human
caggaguuuggccaga

SEQ ID NO: 2968590 - RNA, 15 nt, Human
caggaguuuggccag

SEQ ID NO: 2968591 - RNA, 19 nt, Human
cagucauuauguuaauauu

SEQ ID NO: 2968592 - RNA, 23 nt, Human
cagucagggaaggugccucugga

SEQ ID NO: 2968593 - RNA, 13 nt, Human
caguaacauagcu

SEQ ID NO: 2968594 - RNA, 21 nt, Human
caguaaugagcuuaagaaauu

SEQ ID NO: 2968595 - RNA, 18 nt, Human
caguacuaacauuuauuu

SEQ ID NO: 2968596 - RNA, 16 nt, Human
cauucuuggcccagga

SEQ ID NO: 2968597 - RNA, 13 nt, Human
cauucuuggccca

SEQ ID NO: 2968598 - RNA, 13 nt, Human
cauucuuuuugaa

SEQ ID NO: 2968599 - RNA, 16 nt, Human
cauucuuuuugaaaug

SEQ ID NO: 2968600 - RNA, 14 nt, Human
cauucuuuuugaaa

SEQ ID NO: 2968601 - RNA, 16 nt, Human
caugcuguacauacuu

SEQ ID NO: 2968602 - RNA, 19 nt, Human
caugcuguacauacuuuuu

SEQ ID NO: 2968603 - RNA, 21 nt, Human
caugcuguacauacuuuuugg

SEQ ID NO: 2968604 - RNA, 13 nt, Human
caugcuguacaua

SEQ ID NO: 2968605 - RNA, 11 nt, Human
caucaucccuu

SEQ ID NO: 2968606 - RNA, 17 nt, Human
caucccuuucccuuggu

SEQ ID NO: 2968607 - RNA, 14 nt, Human
caucccuuucccuu

SEQ ID NO: 2968608 - RNA, 17 nt, Human
cauauuuaauuugaagg

SEQ ID NO: 2968609 - RNA, 22 nt, Human
cauauugcauacuauuaaacau

SEQ ID NO: 2968610 - RNA, 19 nt, Human
cauauugcauacuauuaaa

SEQ ID NO: 2968611 - RNA, 21 nt, Human
cauauugcauacuauuaaaca

SEQ ID NO: 2968612 - RNA, 19 nt, Human
ccaguguuuuaggagcaug

SEQ ID NO: 2968613 - RNA, 23 nt, Human
ccuucuucccaauagcaaggcug

SEQ ID NO: 2968614 - RNA, 13 nt, Human
ccuuguuuaaugg

SEQ ID NO: 2968615 - RNA, 14 nt, Human
ccuguuuuuauuau

SEQ ID NO: 2968616 - RNA, 15 nt, Human
ccuguuuuuauuauu

SEQ ID NO: 2968617 - RNA, 15 nt, Human
ccuccacauuuguuu

SEQ ID NO: 2968618 - RNA, 12 nt, Human
cccuaaucuucc

SEQ ID NO: 2968619 - RNA, 16 nt, Human
cuuccacuugaguguc

SEQ ID NO: 2968620 - RNA, 14 nt, Human
cuucaagaaugcag

SEQ ID NO: 2968621 - RNA, 18 nt, Human
cuguuuuuauuauuaaca

SEQ ID NO: 2968622 - RNA, 20 nt, Human
cuguuuuuauuauuaacaaa

SEQ ID NO: 2968623 - RNA, 16 nt, Human
cuuaauuauugauguu

SEQ ID NO: 2968624 - RNA, 10 nt, Human
cuuaauuauu

SEQ ID NO: 2968625 - RNA, 22 nt, Human
cuuagacccucaugcugccaau

SEQ ID NO: 2968626 - RNA, 21 nt, Human
cuuagacccucaugcugccaa

SEQ ID NO: 2968627 - RNA, 20 nt, Human
cuuagacccucaugcugcca

SEQ ID NO: 2968628 - RNA, 19 nt, Human
cuuagacccucaugcugcc

SEQ ID NO: 2968629 - RNA, 23 nt, Human
cuuagacccucaugcugccaaua

SEQ ID NO: 2968630 - RNA, 15 nt, Human
cuguguuguacagcu

SEQ ID NO: 2968631 - RNA, 22 nt, Human
cugugauuuuugguauuugaaa

SEQ ID NO: 2968632 - RNA, 14 nt, Human
cugucuuuuaaacu

SEQ ID NO: 2968633 - RNA, 15 nt, Human
cugucuuuuaaacuc

SEQ ID NO: 2968634 - RNA, 23 nt, Human
cugggguggguggggcagugcuu

SEQ ID NO: 2968635 - RNA, 14 nt, Human
gaagaaaauaauua

SEQ ID NO: 2968636 - RNA, 15 nt, Human
gaagguagaauguuu

SEQ ID NO: 2968637 - RNA, 17 nt, Human
gaagguagaauguuuuc

SEQ ID NO: 2968638 - RNA, 16 nt, Human
gaagguagaauguuuu

SEQ ID NO: 2968639 - RNA, 20 nt, Human
gaagguagaauguuuucaaa

SEQ ID NO: 2968640 - RNA, 17 nt, Human
gaaguaaaauguggcag

SEQ ID NO: 2968641 - RNA, 18 nt, Human
gaaguaaaauguggcagg

SEQ ID NO: 2968642 - RNA, 22 nt, Human
gaaacacugguuuuaaauauuu

SEQ ID NO: 2968643 - RNA, 13 nt, Human
gaaacacugguuu

SEQ ID NO: 2968644 - RNA, 19 nt, Human
cuuuaaacuacauuagguu

SEQ ID NO: 2968645 - RNA, 16 nt, Human
cuuguuuaaugguagu

SEQ ID NO: 2968646 - RNA, 17 nt, Human
cucauguugaaacuuua

SEQ ID NO: 2968647 - RNA, 14 nt, Human
cucauuucuagcag

SEQ ID NO: 2968648 - RNA, 15 nt, Human
cuccacauuuguuuu

SEQ ID NO: 2968649 - RNA, 13 nt, Human
cuccacauuuguu

SEQ ID NO: 2968650 - RNA, 17 nt, Human
cuccaccuugcagcucu

SEQ ID NO: 2968651 - RNA, 22 nt, Human
cuaugggguaaaagggguaggg

SEQ ID NO: 2968652 - RNA, 22 nt, Human
cuaugcuguucacuggacacuu

SEQ ID NO: 2968653 - RNA, 15 nt, Human
cucaagucuggcaga

SEQ ID NO: 2968654 - RNA, 16 nt, Human
cucagcagagugcuuu

SEQ ID NO: 2968655 - RNA, 11 nt, Human
cucagcagagu

SEQ ID NO: 2968656 - RNA, 12 nt, Human
cucagcagagug

SEQ ID NO: 2968657 - RNA, 13 nt, Human
cucagcagagugc

SEQ ID NO: 2968658 - RNA, 22 nt, Human
cugauuuaaacacauuaaaggu

SEQ ID NO: 2968659 - RNA, 17 nt, Human
cugaacaucacagcuua

SEQ ID NO: 2968660 - RNA, 23 nt, Human
cugacgacuugagugcucaguag

SEQ ID NO: 2968661 - RNA, 15 nt, Human
gaugacuguuuuuaa

SEQ ID NO: 2968662 - RNA, 17 nt, Human
gauucuauguuaauauu

SEQ ID NO: 2968663 - RNA, 20 nt, Human
gauucuauguuaauauuuua

SEQ ID NO: 2968664 - RNA, 18 nt, Human
gauugugccuaauguguu

SEQ ID NO: 2968665 - RNA, 17 nt, Human
gaguuauugaagcagag

SEQ ID NO: 2968666 - RNA, 23 nt, Human
gccaauauccuaauaaaaaggug

SEQ ID NO: 2968667 - RNA, 22 nt, Human
gccaauauccuaauaaaaaggu

SEQ ID NO: 2968668 - RNA, 20 nt, Human
gccaauauccuaauaaaaag

SEQ ID NO: 2968669 - RNA, 19 nt, Human
gccaauauccuaauaaaaa

SEQ ID NO: 2968670 - RNA, 18 nt, Human
gccaauauccuaauaaaa

SEQ ID NO: 2968671 - RNA, 13 nt, Human
gccaauauccuaa

SEQ ID NO: 2968672 - RNA, 17 nt, Human
gccaauauccuaauaaa

SEQ ID NO: 2968673 - RNA, 16 nt, Human
gccaauauccuaauaa

SEQ ID NO: 2968674 - RNA, 15 nt, Human
gccaauauccuaaua

SEQ ID NO: 2968675 - RNA, 14 nt, Human
gccaauauccuaau

SEQ ID NO: 2968676 - RNA, 12 nt, Human
gccaauuugcac

SEQ ID NO: 2968677 - RNA, 22 nt, Human
gcauacugccuuguuuaauggu

SEQ ID NO: 2968678 - RNA, 13 nt, Human
gcauacuauuaaa

SEQ ID NO: 2968679 - RNA, 14 nt, Human
gcauacuauuaaac

SEQ ID NO: 2968680 - RNA, 17 nt, Human
gcauacuauuaaacaug

SEQ ID NO: 2968681 - RNA, 21 nt, Human
gcauacuauuaaacaugcugu

SEQ ID NO: 2968682 - RNA, 16 nt, Human
gcacgcacacugucug

SEQ ID NO: 2968683 - RNA, 15 nt, Human
gcacgcacacugucu

SEQ ID NO: 2968684 - RNA, 16 nt, Human
gcaggaagcugugaga

SEQ ID NO: 2968685 - RNA, 22 nt, Human
gcagaguaggggucugucuuuu

SEQ ID NO: 2968686 - RNA, 21 nt, Human
gcuuagacccucaugcugcca

SEQ ID NO: 2968687 - RNA, 16 nt, Human
gcuuagacccucaugc

SEQ ID NO: 2968688 - RNA, 22 nt, Human
gcuuacaugccuaccaauauuu

SEQ ID NO: 2968689 - RNA, 19 nt, Human
gcugauuuaaacacauuaa

SEQ ID NO: 2968690 - RNA, 14 nt, Human
gcugaccuugcuga

SEQ ID NO: 2968691 - RNA, 15 nt, Human
gccuuguuuaauggu

SEQ ID NO: 2968692 - RNA, 23 nt, Human
gccuuguuuaaugguaguuuuac

SEQ ID NO: 2968693 - RNA, 18 nt, Human
ggagcccugucuccucuc

SEQ ID NO: 2968694 - RNA, 20 nt, Human
ggagaagucuucuauuuauu

SEQ ID NO: 2968695 - RNA, 19 nt, Human
ggagaagucuucuauuuau

SEQ ID NO: 2968696 - RNA, 15 nt, Human
ggacauuuuaugucu

SEQ ID NO: 2968697 - RNA, 16 nt, Human
ggcagugcuuggccca

SEQ ID NO: 2968698 - RNA, 23 nt, Human
ggcagugcuuggcccaggaguuu

SEQ ID NO: 2968699 - RNA, 22 nt, Human
ggcagugcuuggcccaggaguu

SEQ ID NO: 2968700 - RNA, 21 nt, Human
ggcagugcuuggcccaggagu

SEQ ID NO: 2968701 - RNA, 20 nt, Human
ggcagugcuuggcccaggag

SEQ ID NO: 2968702 - RNA, 19 nt, Human
ggcagugcuuggcccagga

SEQ ID NO: 2968703 - RNA, 18 nt, Human
ggcagugcuuggcccagg

SEQ ID NO: 2968704 - RNA, 17 nt, Human
ggcagugcuuggcccag

SEQ ID NO: 2968705 - RNA, 19 nt, Human
ggauugaaggaugcugucu

SEQ ID NO: 2968706 - RNA, 23 nt, Human
ggcuggaguuauugaagcagagu

SEQ ID NO: 2968707 - RNA, 15 nt, Human
ggcuggaguuauuga

SEQ ID NO: 2968708 - RNA, 18 nt, Human
ggcuuagacccucaugcu

SEQ ID NO: 2968709 - RNA, 20 nt, Human
ggcuuagacccucaugcugc

SEQ ID NO: 2968710 - RNA, 23 nt, Human
ggcuuagacccucaugcugccaa

SEQ ID NO: 2968711 - RNA, 22 nt, Human
ggcuuagacccucaugcugcca

SEQ ID NO: 2968712 - RNA, 17 nt, Human
ucacugguacucugcca

SEQ ID NO: 2968713 - RNA, 20 nt, Human
ucaugcugccaauauccuaa

SEQ ID NO: 2968714 - RNA, 19 nt, Human
ucaugcugccaauauccua

SEQ ID NO: 2968715 - RNA, 17 nt, Human
ucaugcugccaauaucc

SEQ ID NO: 2968716 - RNA, 13 nt, Human
ucaugcugccaau

SEQ ID NO: 2968717 - RNA, 17 nt, Human
ucauuauguuaauauuu

SEQ ID NO: 2968718 - RNA, 16 nt, Human
ucauuauguuaauauu

SEQ ID NO: 2968719 - RNA, 23 nt, Human
ucaugcugccaauauccuaauaa

SEQ ID NO: 2968720 - RNA, 21 nt, Human
ucaugcugccaauauccuaau

SEQ ID NO: 2968721 - RNA, 23 nt, Human
ucauuaguuuugaagauucuaug

SEQ ID NO: 2968722 - RNA, 14 nt, Human
ucauuaguuuugaa

SEQ ID NO: 2968723 - RNA, 13 nt, Human
uauuaacaaaaca

SEQ ID NO: 2968724 - RNA, 14 nt, Human
uauugauguuuuca

SEQ ID NO: 2968725 - RNA, 13 nt, Human
uauugauguuuuc

SEQ ID NO: 2968726 - RNA, 17 nt, Human
uauucucagcagagugc

SEQ ID NO: 2968727 - RNA, 21 nt, Human
uauucucagcagagugcuuua

SEQ ID NO: 2968728 - RNA, 15 nt, Human
uauucucagcagagu

SEQ ID NO: 2968729 - RNA, 17 nt, Human
uauuuucuccaaauguu

SEQ ID NO: 2968730 - RNA, 19 nt, Human
uccugucggagcccugucu

SEQ ID NO: 2968731 - RNA, 22 nt, Human
ucuaaauaucccuuggacauuu

SEQ ID NO: 2968732 - RNA, 12 nt, Human
uccuauuauauu

SEQ ID NO: 2968733 - RNA, 15 nt, Human
uccuaauaaaaaggu

SEQ ID NO: 2968734 - RNA, 14 nt, Human
uccuaauaaaaagg

SEQ ID NO: 2968735 - RNA, 13 nt, Human
uccuaauaaaaag

SEQ ID NO: 2968736 - RNA, 12 nt, Human
uccuaauaaaaa

SEQ ID NO: 2968737 - RNA, 17 nt, Human
uccuaauaaaaagguga

SEQ ID NO: 2968738 - RNA, 16 nt, Human
uccuaauaaaaaggug

SEQ ID NO: 2968739 - RNA, 18 nt, Human
uccuaauaaaaaggugac

SEQ ID NO: 2968740 - RNA, 18 nt, Human
ucucuguaauaaacucau

SEQ ID NO: 2968741 - RNA, 22 nt, Human
ucucuguaauaaacucauuucu

SEQ ID NO: 2968742 - RNA, 13 nt, Human
ucuguuuugugua

SEQ ID NO: 2968743 - RNA, 19 nt, Human
ucuguuuuguguacuuuua

SEQ ID NO: 2968744 - RNA, 15 nt, Human
uguccuauuauauuc

SEQ ID NO: 2968745 - RNA, 14 nt, Human
ugucuuuuaaacuc

SEQ ID NO: 2968746 - RNA, 14 nt, Human
uggaaaagaauaaa

SEQ ID NO: 2968747 - RNA, 19 nt, Human
uggauugugccuaaugugu

SEQ ID NO: 2968748 - RNA, 23 nt, Human
uggauugugccuaauguguuuga

SEQ ID NO: 2968749 - RNA, 20 nt, Human
uggauugugccuaauguguu

SEQ ID NO: 2968750 - RNA, 13 nt, Human
uggacauuuuaug

SEQ ID NO: 2968751 - RNA, 11 nt, Human
uggacauuuua

SEQ ID NO: 2968752 - RNA, 17 nt, Human
uggacauuuuaugucuu

SEQ ID NO: 2968753 - RNA, 16 nt, Human
uggacauuuuaugucu

SEQ ID NO: 2968754 - RNA, 16 nt, Human
ugauguaauuaugguu

SEQ ID NO: 2968755 - RNA, 22 nt, Human
ugcagaguaggggucugucuuu

SEQ ID NO: 2968756 - RNA, 16 nt, Human
ugcacgcacacugucu

SEQ ID NO: 2968757 - RNA, 17 nt, Human
ugcacgcacacugucug

SEQ ID NO: 2968758 - RNA, 13 nt, Human
uuuuaucuucuau

SEQ ID NO: 2968759 - RNA, 15 nt, Human
uuuucaaauguucuc

SEQ ID NO: 2968760 - RNA, 13 nt, Human
uuuugaaauguca

SEQ ID NO: 2968761 - RNA, 22 nt, Human
uuugaguggaguuacugaacag

SEQ ID NO: 2968762 - RNA, 15 nt, Human
uuugcaggaaauccu

SEQ ID NO: 2968763 - RNA, 19 nt, Human
uuuggaaaggaaugcaaag

SEQ ID NO: 2968764 - RNA, 16 nt, Human
uuuggaaaggaaugca

SEQ ID NO: 2968765 - RNA, 17 nt, Human
uuuggaaaggaaugcaa

SEQ ID NO: 2968766 - RNA, 18 nt, Human
uuuggaaaggaaugcaaa

SEQ ID NO: 2968767 - RNA, 13 nt, Human
uuugguauuugaa

SEQ ID NO: 2968768 - RNA, 21 nt, Human
uuuugaagauucuauguuaau

SEQ ID NO: 2968769 - RNA, 16 nt, Human
uuuaagacccucucaa

SEQ ID NO: 2968770 - RNA, 17 nt, Human
uuuaagaacuaaaaugu

SEQ ID NO: 2968771 - RNA, 14 nt, Human
uuuacuuuaaacua

SEQ ID NO: 2968772 - RNA, 16 nt, Human
uuuauaacuuuuuaua

SEQ ID NO: 2968773 - RNA, 13 nt, Human
uuuauaacuuuuu

SEQ ID NO: 2968774 - RNA, 18 nt, Human
uugugccuaauguguuug

SEQ ID NO: 2968775 - RNA, 15 nt, Human
uugugccuaaugugu

SEQ ID NO: 2968776 - RNA, 15 nt, Human
uugguauuugaaaca

SEQ ID NO: 2968777 - RNA, 20 nt, Human
uugugaaaaaauuuacuuua

SEQ ID NO: 2968778 - RNA, 16 nt, Human
uuauuaacaaaacagu

SEQ ID NO: 2968779 - RNA, 21 nt, Human
uuaugauugccuuuuuauaac

SEQ ID NO: 2968780 - RNA, 15 nt, Human
uuaugauugccuuuu

SEQ ID NO: 2968781 - RNA, 16 nt, Human
uuauauucucagcaga

SEQ ID NO: 2968782 - RNA, 18 nt, Human
uuauauucucagcagagu

SEQ ID NO: 2968783 - RNA, 19 nt, Human
uuauauucucagcagagug

SEQ ID NO: 2968784 - RNA, 20 nt, Human
uuauauucucagcagagugc

SEQ ID NO: 2968785 - RNA, 21 nt, Human
uuauauucucagcagagugcu

SEQ ID NO: 2968786 - RNA, 17 nt, Human
uuauaacuuuuuauauu

SEQ ID NO: 2968787 - RNA, 14 nt, Human
uuagugauguaauu

SEQ ID NO: 2968788 - RNA, 12 nt, Human
uucaauaacugg

SEQ ID NO: 2968789 - RNA, 16 nt, Human
uucaauaacuggaaca

SEQ ID NO: 2968790 - RNA, 22 nt, Human
uucaauaacuggaacacucuau

SEQ ID NO: 2968791 - RNA, 20 nt, Human
uuauuuggaaaggaaugcaa

SEQ ID NO: 2968792 - RNA, 22 nt, Human
uuauuugaguggaguuacugaa

SEQ ID NO: 2968793 - RNA, 16 nt, Human
uuauuuggaaaggaau

SEQ ID NO: 2968794 - RNA, 14 nt, Human
uucacgcccuuggc

SEQ ID NO: 2968795 - RNA, 21 nt, Human
uucuauauaauuccuguuuuu

SEQ ID NO: 2968796 - RNA, 22 nt, Human
uucucauguugaaacuuuaaga

SEQ ID NO: 2968797 - RNA, 21 nt, Human
uugacuauuuuuguuuuuauu

SEQ ID NO: 2968798 - RNA, 19 nt, Human
uugacuauuuuuguuuuua

SEQ ID NO: 2968799 - RNA, 16 nt, Human
uugauugggcacauca

SEQ ID NO: 2968800 - RNA, 17 nt, Human
uugauugggcacaucau

SEQ ID NO: 2968801 - RNA, 22 nt, Human
uugauugggcacaucauuucaa

SEQ ID NO: 2968802 - RNA, 15 nt, Human
uucuggacuaaaacu

SEQ ID NO: 2968803 - RNA, 20 nt, Human
uucuucccaauagcaaggcu

SEQ ID NO: 2968804 - RNA, 21 nt, Human
caaaggauacuuauuuaaaua

SEQ ID NO: 2968805 - RNA, 16 nt, Human
caaaggauacuuauuu

SEQ ID NO: 2968806 - RNA, 17 nt, Human
caaagcuuuugcauauu

SEQ ID NO: 2968807 - RNA, 23 nt, Human
caacaugccagccacugugauag

SEQ ID NO: 2968808 - RNA, 22 nt, Human
caacauuucucauguugaaacu

SEQ ID NO: 2968809 - RNA, 17 nt, Human
cacauuaaagguacuuu

SEQ ID NO: 2968810 - RNA, 13 nt, Human
cacauuaaaugac

SEQ ID NO: 2968811 - RNA, 15 nt, Human
cacauuaaaugacuc

SEQ ID NO: 2968812 - RNA, 23 nt, Human
cacaaagaaccaccaggaaagca

SEQ ID NO: 2968813 - RNA, 15 nt, Human
cacaaagcagauccu

SEQ ID NO: 2968814 - RNA, 20 nt, Human
acuauuuuuguuuuuauuaa

SEQ ID NO: 2968815 - RNA, 19 nt, Human
acuauucugagaugacuau

SEQ ID NO: 2968816 - RNA, 18 nt, Human
acuauucugagaugacua

SEQ ID NO: 2968817 - RNA, 21 nt, Human
acuauuuuuguuuuuauuaaa

SEQ ID NO: 2968818 - RNA, 22 nt, Human
acuauuuuuguuuuuauuaaaa

SEQ ID NO: 2968819 - RNA, 17 nt, Human
acugguuuguucccugu

SEQ ID NO: 2968820 - RNA, 14 nt, Human
acugguuuuaaaua

SEQ ID NO: 2968821 - RNA, 16 nt, Human
acuucacgcccuuggc

SEQ ID NO: 2968822 - RNA, 12 nt, Human
acuuuuaagacu

SEQ ID NO: 2968823 - RNA, 13 nt, Human
acuuuuaagacuu

SEQ ID NO: 2968824 - RNA, 16 nt, Human
acuuuauuucucucau

SEQ ID NO: 2968825 - RNA, 19 nt, Human
acccaguguuuuaggagca

SEQ ID NO: 2968826 - RNA, 22 nt, Human
acccaguguuuuaggagcauga

SEQ ID NO: 2968827 - RNA, 15 nt, Human
aaacucugagugcaa

SEQ ID NO: 2968828 - RNA, 13 nt, Human
aaacucugagugc

SEQ ID NO: 2968829 - RNA, 19 nt, Human
aaacacugguuuuaaauau

SEQ ID NO: 2968830 - RNA, 20 nt, Human
aacacauuaaagguacuuug

SEQ ID NO: 2968831 - RNA, 15 nt, Human
aacacauuaaaggua

SEQ ID NO: 2968832 - RNA, 22 nt, Human
aacagcaacacaaagcuuuugc

SEQ ID NO: 2968833 - RNA, 12 nt, Human
aaggugcaucug

SEQ ID NO: 2968834 - RNA, 11 nt, Human
aagauucuaug

SEQ ID NO: 2968835 - RNA, 15 nt, Human
agcaugaagacagag

SEQ ID NO: 2968836 - RNA, 17 nt, Human
agcccucaauugugaaa

SEQ ID NO: 2968837 - RNA, 16 nt, Human
agcccucaauugugaa

SEQ ID NO: 2968838 - RNA, 22 nt, Human
agacgugcacgcacacugucug

SEQ ID NO: 2968839 - RNA, 21 nt, Human
agacgugcacgcacacugucu

SEQ ID NO: 2968840 - RNA, 12 nt, Human
agcuuuugcaua

SEQ ID NO: 2968841 - RNA, 22 nt, Human
aggagaagucuucuauuuauuu

SEQ ID NO: 2968842 - RNA, 23 nt, Human
aggagaagucuucuauuuauuua

SEQ ID NO: 2968843 - RNA, 22 nt, Human
aggucuguuuuguguacuuuua

SEQ ID NO: 2968844 - RNA, 20 nt, Human
auaucccuuggacauuuuau

SEQ ID NO: 2968845 - RNA, 14 nt, Human
auauccuaauaaaa

SEQ ID NO: 2968846 - RNA, 13 nt, Human
auauccuaauaaa

SEQ ID NO: 2968847 - RNA, 12 nt, Human
auauccuaauaa

SEQ ID NO: 2968848 - RNA, 23 nt, Human
auaucccuuggacauuuuauguc

SEQ ID NO: 2968849 - RNA, 22 nt, Human
auaucccuuggacauuuuaugu

SEQ ID NO: 2968850 - RNA, 20 nt, Human
auauccuaauaaaaagguga

SEQ ID NO: 2968851 - RNA, 18 nt, Human
auauccuaauaaaaaggu

SEQ ID NO: 2968852 - RNA, 16 nt, Human
auauccuaauaaaaag

SEQ ID NO: 2968853 - RNA, 21 nt, Human
auagcaguaaaaaaugguguu

SEQ ID NO: 2968854 - RNA, 15 nt, Human
auagcaguaaaaaau

SEQ ID NO: 2968855 - RNA, 15 nt, Human
auaaugucccuucac

SEQ ID NO: 2968856 - RNA, 21 nt, Human
auaacaaaggauacuuauuua

SEQ ID NO: 2968857 - RNA, 20 nt, Human
auaacaaaggauacuuauuu

SEQ ID NO: 2968858 - RNA, 18 nt, Human
auguuuucaaauguucuc

SEQ ID NO: 2968859 - RNA, 17 nt, Human
auguuuuauauagcaag

SEQ ID NO: 2968860 - RNA, 15 nt, Human
auguuuucaaauguu

SEQ ID NO: 2968861 - RNA, 12 nt, Human
auguuuucaaau

SEQ ID NO: 2968862 - RNA, 20 nt, Human
auguucuccagucauuaugu

SEQ ID NO: 2968863 - RNA, 23 nt, Human
augcugccaauauccuaauaaaa

SEQ ID NO: 2968864 - RNA, 22 nt, Human
augcugccaauauccuaauaaa

SEQ ID NO: 2968865 - RNA, 21 nt, Human
augcugccaauauccuaauaa

SEQ ID NO: 2968866 - RNA, 20 nt, Human
augcugccaauauccuaaua

SEQ ID NO: 2968867 - RNA, 13 nt, Human
augcugccaauau

SEQ ID NO: 2968868 - RNA, 19 nt, Human
augcugccaauauccuaau

SEQ ID NO: 2968869 - RNA, 18 nt, Human
augcugccaauauccuaa

SEQ ID NO: 2968870 - RNA, 17 nt, Human
augcugccaauauccua

SEQ ID NO: 2968871 - RNA, 14 nt, Human
augcugccaauauc

SEQ ID NO: 2968872 - RNA, 16 nt, Human
uaaaugacucuucccu

SEQ ID NO: 2968873 - RNA, 13 nt, Human
aaguuuugagaaa

SEQ ID NO: 2968874 - RNA, 22 nt, Human
uaaacuacauuagguugugaau

SEQ ID NO: 2968875 - RNA, 17 nt, Human
uaaacucauuucuagca

SEQ ID NO: 2968876 - RNA, 12 nt, Human
uaaacucauuuc

SEQ ID NO: 2968877 - RNA, 20 nt, Human
uaaacucugagugcaaacuu

SEQ ID NO: 2968878 - RNA, 20 nt, Human
guucuccagucauuauguua

SEQ ID NO: 2968879 - RNA, 18 nt, Human
guucuccagucauuaugu

SEQ ID NO: 2968880 - RNA, 23 nt, Human
guugcuaacagcaacacaaagcu

SEQ ID NO: 2968881 - RNA, 23 nt, Human
guuuuuuaagggcccuuuuucaa

SEQ ID NO: 2968882 - RNA, 22 nt, Human
aagucaaggcuuagacccucau

SEQ ID NO: 2968883 - RNA, 13 nt, Human
aagucaaggcuua

SEQ ID NO: 2968884 - RNA, 21 nt, Human
guuucuagcaugaagacagag

SEQ ID NO: 2968885 - RNA, 22 nt, Human
aagggcccuuuuucaauaacug

SEQ ID NO: 2968886 - RNA, 16 nt, Human
aagggcccuuuuucaa

SEQ ID NO: 2968887 - RNA, 11 nt, Human
guuuggccaga

SEQ ID NO: 2968888 - RNA, 23 nt, Human
guuuggccagaagucaaggcuua

SEQ ID NO: 2968889 - RNA, 18 nt, Human
guuuggccagaagucaag

SEQ ID NO: 2968890 - RNA, 12 nt, Human
guuuggccagaa

SEQ ID NO: 2968891 - RNA, 23 nt, Human
guguguggucaacauuucucaug

SEQ ID NO: 2968892 - RNA, 22 nt, Human
aacuaacaggcuuagugaugua

SEQ ID NO: 2968893 - RNA, 18 nt, Human
aacuaacaggcuuaguga

SEQ ID NO: 2968894 - RNA, 13 nt, Human
aacucuguaauuc

SEQ ID NO: 2968895 - RNA, 19 nt, Human
aaucuuuuaugauugccuu

SEQ ID NO: 2968896 - RNA, 20 nt, Human
uaauuugaagguagaauguu

SEQ ID NO: 2968897 - RNA, 21 nt, Human
aaugcaaagaugaaggucugu

SEQ ID NO: 2968898 - RNA, 14 nt, Human
aaugcaaagaugaa

SEQ ID NO: 2968899 - RNA, 18 nt, Human
aaugcaaagaugaagguc

SEQ ID NO: 2968900 - RNA, 12 nt, Human
aaugcaaagaug

SEQ ID NO: 2968901 - RNA, 21 nt, Human
uaauuaugguuaguagaggua

SEQ ID NO: 2968902 - RNA, 14 nt, Human
uacauacuuuuugg

SEQ ID NO: 2968903 - RNA, 15 nt, Human
uacauacuuuuuggg

SEQ ID NO: 2968904 - RNA, 12 nt, Human
uacauacuuuuu

SEQ ID NO: 2968905 - RNA, 16 nt, Human
uacauuagguugugaa

SEQ ID NO: 2968906 - RNA, 18 nt, Human
uacuauuaaacaugcugu

SEQ ID NO: 2968907 - RNA, 14 nt, Human
uacuauuaaacaug

SEQ ID NO: 2968908 - RNA, 15 nt, Human
uacuauuaaacaugc

SEQ ID NO: 2968909 - RNA, 16 nt, Human
uacuauuaaacaugcu

SEQ ID NO: 2968910 - RNA, 13 nt, Human
uacuauuaaacau

SEQ ID NO: 2968911 - RNA, 14 nt, Human
uauuuauuuauuua

SEQ ID NO: 2968912 - RNA, 13 nt, Human
uauuuauuuguga

SEQ ID NO: 2968913 - RNA, 13 nt, Human
uauuuaauuugaa

SEQ ID NO: 2968914 - RNA, 23 nt, Human
uauuuaauuugaagguagaaugu

SEQ ID NO: 2968915 - RNA, 16 nt, Human
uauuuaauuugaaggu

SEQ ID NO: 2968916 - RNA, 13 nt, Human
uauuuaaucuuuu

SEQ ID NO: 2968917 - RNA, 15 nt, Human
uauuuaaucuuuuau

SEQ ID NO: 2968918 - RNA, 16 nt, Human
uauugaaaugauuuca

SEQ ID NO: 2968919 - RNA, 14 nt, Human
uauugaagcagagu

SEQ ID NO: 2968920 - RNA, 16 nt, Human
uauugaagcagagugg

SEQ ID NO: 2968921 - RNA, 20 nt, Human
uauugaagcagaguggcagu

SEQ ID NO: 2968922 - RNA, 15 nt, Human
uauucugagaugacu

SEQ ID NO: 2968923 - RNA, 17 nt, Human
uauuaaacaugcuguac

SEQ ID NO: 2968924 - RNA, 15 nt, Human
uauuaaacaugcugu

SEQ ID NO: 2968925 - RNA, 19 nt, Human
uauuaaacaugcuguacau

SEQ ID NO: 2968926 - RNA, 15 nt, Human
uauguuuuauauagc

SEQ ID NO: 2968927 - RNA, 22 nt, Human
acaguguguggucaacauuucu

SEQ ID NO: 2968928 - RNA, 21 nt, Human
acaguaacauagcugugauuu

SEQ ID NO: 2968929 - RNA, 20 nt, Human
uaucacuuccaugacauaag

SEQ ID NO: 2968930 - RNA, 19 nt, Human
uauauucucagcagagugc

SEQ ID NO: 2968931 - RNA, 17 nt, Human
uauauucucagcagagu

SEQ ID NO: 2968932 - RNA, 14 nt, Human
uaucagaacuaugu

SEQ ID NO: 2968933 - RNA, 20 nt, Human
uaucagaacuauguuuuugu

SEQ ID NO: 2968934 - RNA, 14 nt, Human
uaugaugacuguuu

SEQ ID NO: 2968935 - RNA, 15 nt, Human
uaugaugacuguuuu

SEQ ID NO: 2968936 - RNA, 13 nt, Human
uauagcaagacau

SEQ ID NO: 2968937 - RNA, 15 nt, Human
uagucauucuucccu

SEQ ID NO: 2968938 - RNA, 14 nt, Human
uagucauucuuccc

SEQ ID NO: 2968939 - RNA, 15 nt, Human
ucccuuucccuuggu

SEQ ID NO: 2968940 - RNA, 17 nt, Human
acuaucacugguuuggu

SEQ ID NO: 2968941 - RNA, 21 nt, Human
acuauuaaacaugcuguacau

SEQ ID NO: 2968942 - RNA, 20 nt, Human
acuauguuuuuguucaguuu

SEQ ID NO: 2968943 - RNA, 18 nt, Human
acuacauuagguugugaa

SEQ ID NO: 2968944 - RNA, 19 nt, Human
acuacauuagguugugaau

SEQ ID NO: 2968945 - RNA, 20 nt, Human
acuacauuagguugugaaug

SEQ ID NO: 2968946 - RNA, 14 nt, Human
acuaaaauguucua

SEQ ID NO: 2968947 - RNA, 15 nt, Human
uccuguuuuuauuau

SEQ ID NO: 2968948 - RNA, 21 nt, Human
uccuguuuuuauuauuaacaa

SEQ ID NO: 2968949 - RNA, 16 nt, Human
uccuguuuuuauuauu

SEQ ID NO: 2968950 - RNA, 20 nt, Human
uccuguuuuuauuauuaaca

SEQ ID NO: 2968951 - RNA, 21 nt, Human
uccacauuuguuuugccaauu

SEQ ID NO: 2968952 - RNA, 19 nt, Human
ucagaacuauguuuuuguu

SEQ ID NO: 2968953 - RNA, 16 nt, Human
ucagaacuauguuuuu

SEQ ID NO: 2968954 - RNA, 18 nt, Human
ucagaugcacaugagcug

SEQ ID NO: 2968955 - RNA, 23 nt, Human
ugagcaucgcuuaggagaagucu

SEQ ID NO: 2968956 - RNA, 10 nt, Human
agcagagugc

SEQ ID NO: 2968957 - RNA, 13 nt, Human
agcagagugcuuu

SEQ ID NO: 2968958 - RNA, 20 nt, Human
ugaaugcccagugagacugu

SEQ ID NO: 2968959 - RNA, 17 nt, Human
ugaagcagaguggcagu

SEQ ID NO: 2968960 - RNA, 21 nt, Human
ugaagauucuauguuaauauu

SEQ ID NO: 2968961 - RNA, 14 nt, Human
ugacauugcaccug

SEQ ID NO: 2968962 - RNA, 17 nt, Human
ugacauugcaccuggau

SEQ ID NO: 2968963 - RNA, 14 nt, Human
ugacauugacuauu

SEQ ID NO: 2968964 - RNA, 16 nt, Human
ugacauugacuauuuu

SEQ ID NO: 2968965 - RNA, 15 nt, Human
agcaacacaaagcuu

SEQ ID NO: 2968966 - RNA, 21 nt, Human
agcaacacaaagcuuuugcau

SEQ ID NO: 2968967 - RNA, 16 nt, Human
agcaacacaaagcuuu

SEQ ID NO: 2968968 - RNA, 18 nt, Human
agcaacacaaagcuuuug

SEQ ID NO: 2968969 - RNA, 20 nt, Human
acuuguugaggguauguuuu

SEQ ID NO: 2968970 - RNA, 15 nt, Human
ucuccucucucugua

SEQ ID NO: 2968971 - RNA, 20 nt, Human
agaacaaaggggcuuaauua

SEQ ID NO: 2968972 - RNA, 17 nt, Human
agaacuaaaauguucua

SEQ ID NO: 2968973 - RNA, 15 nt, Human
ucuggauucauauuu

SEQ ID NO: 2968974 - RNA, 19 nt, Human
agacccucaugcugccaau

SEQ ID NO: 2968975 - RNA, 18 nt, Human
agacccucaugcugccaa

SEQ ID NO: 2968976 - RNA, 21 nt, Human
agacccucaugcugccaauau

SEQ ID NO: 2968977 - RNA, 20 nt, Human
agacccucaugcugccaaua

SEQ ID NO: 2968978 - RNA, 24 nt, Human
agacccucaugcugccaauauccu

SEQ ID NO: 2968979 - RNA, 16 nt, Human
agacccucucaaacua

SEQ ID NO: 2968980 - RNA, 21 nt, Human
agacuggauaguccgucucug

SEQ ID NO: 2968981 - RNA, 20 nt, Human
agacuggauaguccgucucu

SEQ ID NO: 2968982 - RNA, 16 nt, Human
ucuucccucaaaugug

SEQ ID NO: 2968983 - RNA, 18 nt, Human
ucugucuuuuaaacucug

SEQ ID NO: 2968984 - RNA, 12 nt, Human
ucugucuuuuaa

SEQ ID NO: 2968985 - RNA, 16 nt, Human
ucugucuuuuaaacuc

SEQ ID NO: 2968986 - RNA, 17 nt, Human
ugcauacuauuaaacau

SEQ ID NO: 2968987 - RNA, 18 nt, Human
ugcauacuauuaaacaug

SEQ ID NO: 2968988 - RNA, 20 nt, Human
ugcauacuauuaaacaugcu

SEQ ID NO: 2968989 - RNA, 12 nt, Human
ugcauacuauua

SEQ ID NO: 2968990 - RNA, 15 nt, Human
ugcauacuauuaaac

SEQ ID NO: 2968991 - RNA, 16 nt, Human
ugcauacuauuaaaca

SEQ ID NO: 2968992 - RNA, 17 nt, Human
ugcacaucuguuuugua

SEQ ID NO: 2968993 - RNA, 23 nt, Human
ugccaauauccuaauaaaaaggu

SEQ ID NO: 2968994 - RNA, 21 nt, Human
ugccaauauccuaauaaaaag

SEQ ID NO: 2968995 - RNA, 19 nt, Human
ugccaauauccuaauaaaa

SEQ ID NO: 2968996 - RNA, 18 nt, Human
ugccaauauccuaauaaa

SEQ ID NO: 2968997 - RNA, 17 nt, Human
ugccaauauccuaauaa

SEQ ID NO: 2968998 - RNA, 16 nt, Human
ugccaauauccuaaua

SEQ ID NO: 2968999 - RNA, 15 nt, Human
ugccaauauccuaau

SEQ ID NO: 2969000 - RNA, 23 nt, Human
aggaaagcaaaucaguuugguug

SEQ ID NO: 2969001 - RNA, 23 nt, Human
ugcugccaauauccuaauaaaaa

SEQ ID NO: 2969002 - RNA, 22 nt, Human
ugcugccaauauccuaauaaaa

SEQ ID NO: 2969003 - RNA, 15 nt, Human
aggaaugcaaagaug

SEQ ID NO: 2969004 - RNA, 20 nt, Human
ugccuuuuuauaacuuuuua

SEQ ID NO: 2969005 - RNA, 19 nt, Human
uggaacacucuauaacaaa

SEQ ID NO: 2969006 - RNA, 13 nt, Human
aggaguuuggcca

SEQ ID NO: 2969007 - RNA, 12 nt, Human
aggaguuuggcc

SEQ ID NO: 2969008 - RNA, 11 nt, Human
uggcccaggag

SEQ ID NO: 2969009 - RNA, 19 nt, Human
aggcuuagugauguaauua

SEQ ID NO: 2969010 - RNA, 17 nt, Human
aggcuuagugauguaau

SEQ ID NO: 2969011 - RNA, 18 nt, Human
aggcuuagugauguaauu

SEQ ID NO: 2969012 - RNA, 16 nt, Human
uggcuaacuuggguua

SEQ ID NO: 2969013 - RNA, 16 nt, Human
aguccccucuccucca

SEQ ID NO: 2969014 - RNA, 20 nt, Human
uguccagccccguagacgug

SEQ ID NO: 2969015 - RNA, 22 nt, Human
aggugggauaucacuuccauga

SEQ ID NO: 2969016 - RNA, 20 nt, Human
uguacauacuuuuuggguuu

SEQ ID NO: 2969017 - RNA, 15 nt, Human
uguacauacuuuuug

SEQ ID NO: 2969018 - RNA, 17 nt, Human
aguaaugagcuuaagaa

SEQ ID NO: 2969019 - RNA, 16 nt, Human
agguuuuuuuuucuca

SEQ ID NO: 2969020 - RNA, 20 nt, Human
aguaaaaaaugguguuuuau

SEQ ID NO: 2969021 - RNA, 19 nt, Human
aguguguggucaacauuuc

SEQ ID NO: 2969022 - RNA, 22 nt, Human
uguucuaaauaucccuuggaca

SEQ ID NO: 2969023 - RNA, 13 nt, Human
ugugucauuucaa

SEQ ID NO: 2969024 - RNA, 14 nt, Human
ugugucauuucaaa

SEQ ID NO: 2969025 - RNA, 22 nt, Human
uguggucaacauuucucauguu

SEQ ID NO: 2969026 - RNA, 15 nt, Human
ugugccuaauguguu

SEQ ID NO: 2969027 - RNA, 14 nt, Human
ugugccuaaugugu

SEQ ID NO: 2969028 - RNA, 18 nt, Human
ugugccuaauguguuuga

SEQ ID NO: 2969029 - RNA, 17 nt, Human
ugugccuaauguguuug

SEQ ID NO: 2969030 - RNA, 18 nt, Human
agugcaaacuucagaguu

SEQ ID NO: 2969031 - RNA, 15 nt, Human
agucucccuuccuau

SEQ ID NO: 2969032 - RNA, 18 nt, Human
auacuauuaaacaugcug

SEQ ID NO: 2969033 - RNA, 19 nt, Human
auacuauuaaacaugcugu

SEQ ID NO: 2969034 - RNA, 17 nt, Human
auacuauuaaacaugcu

SEQ ID NO: 2969035 - RNA, 20 nt, Human
auagauguugcuaacagcaa

SEQ ID NO: 2969036 - RNA, 14 nt, Human
auagauguugcuaa

SEQ ID NO: 2969037 - RNA, 20 nt, Human
auacugccuuguuuaauggu

SEQ ID NO: 2969038 - RNA, 18 nt, Human
auacugccuuguuuaaug

SEQ ID NO: 2969039 - RNA, 13 nt, Human
uuauuauuaacaa

SEQ ID NO: 2969040 - RNA, 14 nt, Human
uuauuauuaacaaa

SEQ ID NO: 2969041 - RNA, 21 nt, Human
uuauucauuaguuuugaagau

SEQ ID NO: 2969042 - RNA, 18 nt, Human
uuauucauuaguuuugaa

SEQ ID NO: 2969043 - RNA, 13 nt, Human
uuauguuaauauu

SEQ ID NO: 2969044 - RNA, 19 nt, Human
aguuuuuuuccuucaagaa

SEQ ID NO: 2969045 - RNA, 19 nt, Human
uuaagacuuugguuauuuu

SEQ ID NO: 2969046 - RNA, 15 nt, Human
aguuuaucuguucau

SEQ ID NO: 2969047 - RNA, 15 nt, Human
aguuuuacaguguuu

SEQ ID NO: 2969048 - RNA, 22 nt, Human
auaacuuuuuauauucucagca

SEQ ID NO: 2969049 - RNA, 18 nt, Human
auaacuuuuuauauucuc

SEQ ID NO: 2969050 - RNA, 21 nt, Human
uugaaggaugcugucuucgua

SEQ ID NO: 2969051 - RNA, 17 nt, Human
uugcauauugcauacua

SEQ ID NO: 2969052 - RNA, 17 nt, Human
aucugaaauaaggaaug

SEQ ID NO: 2969053 - RNA, 19 nt, Human
uucuagcaugaagacagag

SEQ ID NO: 2969054 - RNA, 15 nt, Human
uucccucaaaugugu

SEQ ID NO: 2969055 - RNA, 19 nt, Human
augugcacaucuguuuugu

SEQ ID NO: 2969056 - RNA, 13 nt, Human
augucaguauuuc

SEQ ID NO: 2969057 - RNA, 16 nt, Human
augucaguauuucaac

SEQ ID NO: 2969058 - RNA, 20 nt, Human
auguagacaguuggguuuuu

SEQ ID NO: 2969059 - RNA, 18 nt, Human
auguagacaguuggguuu

SEQ ID NO: 2969060 - RNA, 15 nt, Human
uuuaaauagaugaca

SEQ ID NO: 2969061 - RNA, 22 nt, Human
uuuaauuugaagguagaauguu

SEQ ID NO: 2969062 - RNA, 16 nt, Human
augauauaagguuuuu

SEQ ID NO: 2969063 - RNA, 18 nt, Human
uuguuuugccaauuugca

SEQ ID NO: 2969064 - RNA, 17 nt, Human
uuuaaagauguagacag

SEQ ID NO: 2969065 - RNA, 19 nt, Human
augauugccuuuuuauaac

SEQ ID NO: 2969066 - RNA, 14 nt, Human
uuucaaauguucuc

SEQ ID NO: 2969067 - RNA, 19 nt, Human
auugauugggcacaucauu

SEQ ID NO: 2969068 - RNA, 23 nt, Human
auugauugggcacaucauuucaa

SEQ ID NO: 2969069 - RNA, 16 nt, Human
auuuauuuauuuauuc

SEQ ID NO: 2969070 - RNA, 14 nt, Human
auuugaaacacugg

SEQ ID NO: 2969071 - RNA, 17 nt, Human
auuugaaacacugguuu

SEQ ID NO: 2969072 - RNA, 21 nt, Human
auuuuuguuuuuauuaaaagg

SEQ ID NO: 2969073 - RNA, 19 nt, Human
auuuuuguuuuuauuaaaa

SEQ ID NO: 2969074 - RNA, 19 nt, Human
auuuuugguauuugaaaca

SEQ ID NO: 2969075 - RNA, 18 nt, Human
auugaagcagaguggcag

SEQ ID NO: 2969076 - RNA, 14 nt, Human
auugaagcagagug

SEQ ID NO: 2969077 - RNA, 15 nt, Human
auugaagcagagugg

SEQ ID NO: 2969078 - RNA, 13 nt, Human
auugaagcagagu

SEQ ID NO: 2969079 - RNA, 17 nt, Human
uuuguggaaaauaacuc

SEQ ID NO: 2969080 - RNA, 16 nt, Human
auuauauucauucuuu

SEQ ID NO: 2969081 - RNA, 17 nt, Human
auuauguuaauauuucu

SEQ ID NO: 2969082 - RNA, 13 nt, Human
auuauguuaauau

SEQ ID NO: 2969083 - RNA, 16 nt, Human
auuauguuaauauuuc

SEQ ID NO: 2969084 - RNA, 14 nt, Human
auuauguuaauauu

SEQ ID NO: 2969085 - RNA, 19 nt, Human
cuggauaguccgucucugc

SEQ ID NO: 2969086 - RNA, 18 nt, Human
cuggauaguccgucucug

SEQ ID NO: 2969087 - RNA, 17 nt, Human
cugucggagcccugucu

SEQ ID NO: 2969088 - RNA, 23 nt, Human
cuuugguuauuuuacuuuuugga

SEQ ID NO: 2969089 - RNA, 17 nt, Human
cuuugguuauuuuacuu

SEQ ID NO: 2969090 - RNA, 19 nt, Human
cuuugguuauuuuacuuuu

SEQ ID NO: 2969091 - RNA, 13 nt, Human
cuuugguuauuuu

SEQ ID NO: 2969092 - RNA, 18 nt, Human
cuuuaccaauugaaguaa

SEQ ID NO: 2969093 - RNA, 16 nt, Human
cuuuaccaauugaagu

SEQ ID NO: 2969094 - RNA, 19 nt, Human
cuuuaccaauugaaguaaa

SEQ ID NO: 2969095 - RNA, 20 nt, Human
cuuuaccaauugaaguaaaa

SEQ ID NO: 2969096 - RNA, 22 nt, Human
cuugugaauaaagagggugggu

SEQ ID NO: 2969097 - RNA, 20 nt, Human
gaaagggauuuucagcccuc

SEQ ID NO: 2969098 - RNA, 12 nt, Human
gaaagggauuuu

SEQ ID NO: 2969099 - RNA, 15 nt, Human
gauucuuguauuuau

SEQ ID NO: 2969100 - RNA, 21 nt, Human
gauucuuguauuuauuacaac

SEQ ID NO: 2969101 - RNA, 21 nt, Human
gaugcugucuucguacuggga

SEQ ID NO: 2969102 - RNA, 14 nt, Human
gcaggcuggaguua

SEQ ID NO: 2969103 - RNA, 22 nt, Human
gacuuugguuauuuuacuuuuu

SEQ ID NO: 2969104 - RNA, 21 nt, Human
gacccucucaaacuaacaggc

SEQ ID NO: 2969105 - RNA, 20 nt, Human
ggcacugguuuguucccugu

SEQ ID NO: 2969106 - RNA, 19 nt, Human
ggcccuuuuucaauaacug

SEQ ID NO: 2969107 - RNA, 18 nt, Human
ggcugaacuuuguggucg

SEQ ID NO: 2969108 - RNA, 20 nt, Human
aaaaggaagcuuacaugccu

SEQ ID NO: 2969109 - RNA, 14 nt, Human
guagaauguuuuca

SEQ ID NO: 2969110 - RNA, 16 nt, Human
guagacaguuggguuu

SEQ ID NO: 2969111 - RNA, 23 nt, Human
guagacgugcacgcacacugucu

SEQ ID NO: 2969112 - RNA, 20 nt, Human
guagacgugcacgcacacug

SEQ ID NO: 2969113 - RNA, 21 nt, Human
guacucugccacuuuauuucu

SEQ ID NO: 2969114 - RNA, 14 nt, Human
guaacucuguaauu

SEQ ID NO: 2969115 - RNA, 16 nt, Human
aaagguacuuugcagg

SEQ ID NO: 2969116 - RNA, 14 nt, Human
ggguggggcagugc

SEQ ID NO: 2969117 - RNA, 13 nt, Human
aaagcuuuugcau

SEQ ID NO: 2969118 - RNA, 14 nt, Human
aaagcuuuugcaua

SEQ ID NO: 2969119 - RNA, 17 nt, Human
aaagcuuuugcauauug

SEQ ID NO: 2969120 - RNA, 21 nt, Human
aaacacauuaaagguacuuug

SEQ ID NO: 2969121 - RNA, 11 nt, Human
aaacacauuaa

SEQ ID NO: 2969122 - RNA, 15 nt, Human
aaacacauuaaaggu

SEQ ID NO: 2969123 - RNA, 23 nt, Human
aaacaugcuguacauacuuuuug

SEQ ID NO: 2969124 - RNA, 16 nt, Human
gcuuguacacucauuc

SEQ ID NO: 2969125 - RNA, 23 nt, Human
ggaacagaagaggaaagagagac

SEQ ID NO: 2969126 - RNA, 19 nt, Human
gcuccaccuugcagcucuc

SEQ ID NO: 2969127 - RNA, 16 nt, Human
gcccucaauugugaaa

SEQ ID NO: 2969128 - RNA, 22 nt, Human
cagaguaggggucugucuuuua

SEQ ID NO: 2969129 - RNA, 23 nt, Human
cagaguaggggucugucuuuuaa

SEQ ID NO: 2969130 - RNA, 20 nt, Human
cagaguaggggucugucuuu

SEQ ID NO: 2969131 - RNA, 13 nt, Human
cauagcugugauu

SEQ ID NO: 2969132 - RNA, 15 nt, Human
cauagcugugauuuu

SEQ ID NO: 2969133 - RNA, 18 nt, Human
cauagcugugauuuuugg

SEQ ID NO: 2969134 - RNA, 14 nt, Human
cauuagguugugaa

SEQ ID NO: 2969135 - RNA, 15 nt, Human
cauuagguugugaau

SEQ ID NO: 2969136 - RNA, 16 nt, Human
cauuagguugugaaug

SEQ ID NO: 2969137 - RNA, 13 nt, Human
cauuaguuuugaa

SEQ ID NO: 2969138 - RNA, 12 nt, Human
auuaaaugacuc

SEQ ID NO: 2969139 - RNA, 13 nt, Human
auuaaaugacucu

SEQ ID NO: 2969140 - RNA, 24 nt, Human
caaacccaguguuuuaggagcaug

SEQ ID NO: 2969141 - RNA, 17 nt, Human
caaacagucucccuucc

SEQ ID NO: 2969142 - RNA, 13 nt, Human
auuuuaugucuuu

SEQ ID NO: 2969143 - RNA, 15 nt, Human
cacaucuguuuugua

SEQ ID NO: 2969144 - RNA, 18 nt, Human
cacccaggaacuccugac

SEQ ID NO: 2969145 - RNA, 13 nt, Human
cacagaagaugaa

SEQ ID NO: 2969146 - RNA, 23 nt, Human
caauugaaguaaaauguggcagg

SEQ ID NO: 2969147 - RNA, 12 nt, Human
ccuaauguguuu

SEQ ID NO: 2969148 - RNA, 14 nt, Human
ccuaauaaaaaggu

SEQ ID NO: 2969149 - RNA, 20 nt, Human
ccuaauaaaaaggugaccau

SEQ ID NO: 2969150 - RNA, 16 nt, Human
ccuaauaaaaagguga

SEQ ID NO: 2969151 - RNA, 15 nt, Human
ccuaauaaaaaggug

SEQ ID NO: 2969152 - RNA, 16 nt, Human
ccauucuuggcccagg

SEQ ID NO: 2969153 - RNA, 22 nt, Human
ccagucauuauguuaauauuuc

SEQ ID NO: 2969154 - RNA, 21 nt, Human
ccagucauuauguuaauauuu

SEQ ID NO: 2969155 - RNA, 20 nt, Human
cccagcacaaagcagauccu

SEQ ID NO: 2969156 - RNA, 17 nt, Human
cucacaauccuugccac

SEQ ID NO: 2969157 - RNA, 21 nt, Human
cugacacaugcugaacaucac

SEQ ID NO: 2969158 - RNA, 14 nt, Human
ccagcacaaagcag

SEQ ID NO: 2969159 - RNA, 13 nt, Human
ccagugagacugu

SEQ ID NO: 2969160 - RNA, 18 nt, Human
ccagugacagucagggaa

SEQ ID NO: 2969161 - RNA, 21 nt, Human
cucagaugcacaugagcuggc

SEQ ID NO: 2969162 - RNA, 23 nt, Human
cucauuuuuauaaugucccuuca

SEQ ID NO: 2969163 - RNA, 20 nt, Human
cuauauaauuccuguuuuua

SEQ ID NO: 2969164 - RNA, 18 nt, Human
cuauauaauuccuguuuu

SEQ ID NO: 2969165 - RNA, 23 nt, Human
cuauucagcacaaggaaauaaaa

SEQ ID NO: 2969166 - RNA, 18 nt, Human
cuauucugagaugacuau

SEQ ID NO: 2969167 - RNA, 15 nt, Human
cuauucugagaugac

SEQ ID NO: 2969168 - RNA, 16 nt, Human
cuauucugagaugacu

SEQ ID NO: 2969169 - RNA, 15 nt, Human
cucacagaagaugaa

SEQ ID NO: 2969170 - RNA, 19 nt, Human
cuauuuauuuauuuauuca

SEQ ID NO: 2969171 - RNA, 12 nt, Human
cuauuuauuuau

SEQ ID NO: 2969172 - RNA, 20 nt, Human
cuaacagcaacacaaagcuu

SEQ ID NO: 2969173 - RNA, 19 nt, Human
cuaauaugaugacuguuuu

SEQ ID NO: 2969174 - RNA, 21 nt, Human
cuaauaugaugacuguuuuua

SEQ ID NO: 2969175 - RNA, 17 nt, Human
cuacauugacagauuga

SEQ ID NO: 2969176 - RNA, 18 nt, Human
cuacauuagguugugaau

SEQ ID NO: 2969177 - RNA, 17 nt, Human
cuacauuagguugugaa

SEQ ID NO: 2969178 - RNA, 21 nt, Human
cuaccaauauuuaaucuuuua

SEQ ID NO: 2969179 - RNA, 15 nt, Human
cuaccaauauuuaau

SEQ ID NO: 2969180 - RNA, 13 nt, Human
cuaccaauauuua

SEQ ID NO: 2969181 - RNA, 21 nt, Human
cuuuuuggguuuauuuggaaa

SEQ ID NO: 2969182 - RNA, 17 nt, Human
gaaaaggccuucuuccc

SEQ ID NO: 2969183 - RNA, 14 nt, Human
cuuugcaggaaauc

SEQ ID NO: 2969184 - RNA, 15 nt, Human
cuuauuuccucauuu

SEQ ID NO: 2969185 - RNA, 15 nt, Human
cuuagugauguaauu

SEQ ID NO: 2969186 - RNA, 16 nt, Human
cuuagugauguaauua

SEQ ID NO: 2969187 - RNA, 22 nt, Human
cuggcacugguuuguucccugu

SEQ ID NO: 2969188 - RNA, 22 nt, Human
cuguaauaaacucauuucuagc

SEQ ID NO: 2969189 - RNA, 21 nt, Human
cugugcaucuagccucaagcu

SEQ ID NO: 2969190 - RNA, 19 nt, Human
cugugaugacauucccugc

SEQ ID NO: 2969191 - RNA, 22 nt, Human
gaaugucaguuguuauuuauug

SEQ ID NO: 2969192 - RNA, 19 nt, Human
gacagagccccacccucag

SEQ ID NO: 2969193 - RNA, 18 nt, Human
gagguacacuugugaaua

SEQ ID NO: 2969194 - RNA, 12 nt, Human
gagcccugucuc

SEQ ID NO: 2969195 - RNA, 16 nt, Human
gcacauuaaaugacuc

SEQ ID NO: 2969196 - RNA, 21 nt, Human
gcacauuaaaugacucuuccc

SEQ ID NO: 2969197 - RNA, 12 nt, Human
gcacauuaaaug

SEQ ID NO: 2969198 - RNA, 14 nt, Human
gcacauuaaaugac

SEQ ID NO: 2969199 - RNA, 13 nt, Human
gcacacugucugc

SEQ ID NO: 2969200 - RNA, 16 nt, Human
gauguugcuaacagca

SEQ ID NO: 2969201 - RNA, 18 nt, Human
gcaaagaugaaggucugu

SEQ ID NO: 2969202 - RNA, 14 nt, Human
gcaaagaugaaggu

SEQ ID NO: 2969203 - RNA, 15 nt, Human
gauugccuuuuuaua

SEQ ID NO: 2969204 - RNA, 21 nt, Human
gauugccuuuuuauaacuuuu

SEQ ID NO: 2969205 - RNA, 22 nt, Human
gauugccuuuuuauaacuuuuu

SEQ ID NO: 2969206 - RNA, 13 nt, Human
ggauacuuauuua

SEQ ID NO: 2969207 - RNA, 13 nt, Human
ggaaugcaaagau

SEQ ID NO: 2969208 - RNA, 23 nt, Human
ggaaagggauuuucagcccucag

SEQ ID NO: 2969209 - RNA, 21 nt, Human
gcuuaggagaagucuucuauu

SEQ ID NO: 2969210 - RNA, 23 nt, Human
gcugccaauauccuaauaaaaag

SEQ ID NO: 2969211 - RNA, 21 nt, Human
gcugccaauauccuaauaaaa

SEQ ID NO: 2969212 - RNA, 20 nt, Human
gcugccaauauccuaauaaa

SEQ ID NO: 2969213 - RNA, 14 nt, Human
gcccuuuuucaaua

SEQ ID NO: 2969214 - RNA, 18 nt, Human
gccuaauaugaugacugu

SEQ ID NO: 2969215 - RNA, 17 nt, Human
gcucaccccaucauccc

SEQ ID NO: 2969216 - RNA, 19 nt, Human
gcucaccccaucaucccuu

SEQ ID NO: 2969217 - RNA, 13 nt, Human
gcugcaguuuuuu

SEQ ID NO: 2969218 - RNA, 15 nt, Human
gcugccaauauccua

SEQ ID NO: 2969219 - RNA, 14 nt, Human
gcugccaauauccu

SEQ ID NO: 2969220 - RNA, 19 nt, Human
gcugccaauauccuaauaa

SEQ ID NO: 2969221 - RNA, 18 nt, Human
gcugccaauauccuaaua

SEQ ID NO: 2969222 - RNA, 17 nt, Human
gcugccaauauccuaau

SEQ ID NO: 2969223 - RNA, 16 nt, Human
gcugccaauauccuaa

SEQ ID NO: 2969224 - RNA, 22 nt, Human
guaacuguuuagaugaauguca

SEQ ID NO: 2969225 - RNA, 10 nt, Human
gguugugaau

SEQ ID NO: 2969226 - RNA, 18 nt, Human
guaaaaaaugguguuuua

SEQ ID NO: 2969227 - RNA, 16 nt, Human
guaaaaaaugguguuu

SEQ ID NO: 2969228 - RNA, 14 nt, Human
guacuuuuaagacu

SEQ ID NO: 2969229 - RNA, 15 nt, Human
guagagguacacuug

SEQ ID NO: 2969230 - RNA, 17 nt, Human
guagagguacacuugug

SEQ ID NO: 2969231 - RNA, 19 nt, Human
guagagguacacuugugaa

SEQ ID NO: 2969232 - RNA, 18 nt, Human
guacuaacauuuauuuga

SEQ ID NO: 2969233 - RNA, 19 nt, Human
guacauacuuuuuggguuu

SEQ ID NO: 2969234 - RNA, 13 nt, Human
guacauacuuuuu

SEQ ID NO: 2969235 - RNA, 14 nt, Human
guacauacuuuuug

SEQ ID NO: 2969236 - RNA, 15 nt, Human
guacacuugugaaua

SEQ ID NO: 2969237 - RNA, 14 nt, Human
guacacuugugaau

SEQ ID NO: 2969238 - RNA, 21 nt, Human
ggguagccacuggacugacga

SEQ ID NO: 2969239 - RNA, 23 nt, Human
gguagaauguuuucaaauguucu

SEQ ID NO: 2969240 - RNA, 14 nt, Human
gucaaggcuuagac

SEQ ID NO: 2969241 - RNA, 13 nt, Human
gucaaggcuuaga

SEQ ID NO: 2969242 - RNA, 20 nt, Human
guagagguacacuugugaau

SEQ ID NO: 2969243 - RNA, 19 nt, Human
guccuauuauauucauucu

SEQ ID NO: 2969244 - RNA, 21 nt, Human
guccuauuauauucauucuuu

SEQ ID NO: 2969245 - RNA, 21 nt, Human
guccugucggagcccugucuc

SEQ ID NO: 2969246 - RNA, 20 nt, Human
guccugucggagcccugucu

SEQ ID NO: 2969247 - RNA, 18 nt, Human
guccugucggagcccugu

SEQ ID NO: 2969248 - RNA, 24 nt, Human
gugcuuggcccaggaguuuggcca

SEQ ID NO: 2969249 - RNA, 19 nt, Human
gugcuuggcccaggaguuu

SEQ ID NO: 2969250 - RNA, 17 nt, Human
gugcuuggcccaggagu

SEQ ID NO: 2969251 - RNA, 16 nt, Human
gugcuuggcccaggag

SEQ ID NO: 2969252 - RNA, 15 nt, Human
gugcuuggcccagga

SEQ ID NO: 2969253 - RNA, 14 nt, Human
gugcuuggcccagg

SEQ ID NO: 2969254 - RNA, 13 nt, Human
gugcuuggcccag

SEQ ID NO: 2969255 - RNA, 14 nt, Human
guggaaaauaacuc

SEQ ID NO: 2969256 - RNA, 12 nt, Human
ucaaauguguac

SEQ ID NO: 2969257 - RNA, 15 nt, Human
uauuuaaauagauga

SEQ ID NO: 2969258 - RNA, 17 nt, Human
uauuuaaauagaugaca

SEQ ID NO: 2969259 - RNA, 18 nt, Human
uauuugaaacacugguuu

SEQ ID NO: 2969260 - RNA, 23 nt, Human
uauugcauacuauuaaacaugcu

SEQ ID NO: 2969261 - RNA, 19 nt, Human
uauugcauacuauuaaaca

SEQ ID NO: 2969262 - RNA, 23 nt, Human
uauucauucuuuuugaaauguca

SEQ ID NO: 2969263 - RNA, 18 nt, Human
uauucauucuuuuugaaa

SEQ ID NO: 2969264 - RNA, 23 nt, Human
uauuauauucauucuuuuugaaa

SEQ ID NO: 2969265 - RNA, 17 nt, Human
uauuauauucauucuuu

SEQ ID NO: 2969266 - RNA, 13 nt, Human
uauuauauucauu

SEQ ID NO: 2969267 - RNA, 13 nt, Human
uauguguucuauu

SEQ ID NO: 2969268 - RNA, 14 nt, Human
uauguuaauauuuu

SEQ ID NO: 2969269 - RNA, 16 nt, Human
uauguuaauauuucug

SEQ ID NO: 2969270 - RNA, 13 nt, Human
uauguuaauauuu

SEQ ID NO: 2969271 - RNA, 18 nt, Human
uaucuguucauauggaua

SEQ ID NO: 2969272 - RNA, 23 nt, Human
uaugauugccuuuuuauaacuuu

SEQ ID NO: 2969273 - RNA, 20 nt, Human
uaugauugccuuuuuauaac

SEQ ID NO: 2969274 - RNA, 16 nt, Human
uccuccacauuuguuu

SEQ ID NO: 2969275 - RNA, 13 nt, Human
uccuccacauuug

SEQ ID NO: 2969276 - RNA, 22 nt, Human
uccucauuuuuauaaugucccu

SEQ ID NO: 2969277 - RNA, 17 nt, Human
uccuagucauucuuccc

SEQ ID NO: 2969278 - RNA, 15 nt, Human
ucccuuggacauuuu

SEQ ID NO: 2969279 - RNA, 21 nt, Human
ucccuuggacauuuuaugucu

SEQ ID NO: 2969280 - RNA, 19 nt, Human
ucccuuggacauuuuaugu

SEQ ID NO: 2969281 - RNA, 18 nt, Human
ucccuuggacauuuuaug

SEQ ID NO: 2969282 - RNA, 16 nt, Human
ucccuuggacauuuua

SEQ ID NO: 2969283 - RNA, 20 nt, Human
ucccuucacaaacccagugu

SEQ ID NO: 2969284 - RNA, 22 nt, Human
uccugucggagcccugucuccu

SEQ ID NO: 2969285 - RNA, 13 nt, Human
ugaaaugucaacc

SEQ ID NO: 2969286 - RNA, 17 nt, Human
ugaacaguaacauagcu

SEQ ID NO: 2969287 - RNA, 22 nt, Human
ugauugccuuuuuauaacuuuu

SEQ ID NO: 2969288 - RNA, 17 nt, Human
ugauugccuuuuuauaa

SEQ ID NO: 2969289 - RNA, 15 nt, Human
ugauuuaaacacauu

SEQ ID NO: 2969290 - RNA, 18 nt, Human
ugauuuaaacacauuaaa

SEQ ID NO: 2969291 - RNA, 16 nt, Human
ugauuuaaacacauua

SEQ ID NO: 2969292 - RNA, 17 nt, Human
ugauuuaaacacauuaa

SEQ ID NO: 2969293 - RNA, 23 nt, Human
ugauugggcacaucauuucaaga

SEQ ID NO: 2969294 - RNA, 18 nt, Human
ugauugggcacaucauuu

SEQ ID NO: 2969295 - RNA, 20 nt, Human
ugauugggcacaucauuuca

SEQ ID NO: 2969296 - RNA, 21 nt, Human
ugauugggcacaucauuucaa

SEQ ID NO: 2969297 - RNA, 17 nt, Human
ugauugggcacaucauu

SEQ ID NO: 2969298 - RNA, 21 nt, Human
ugcuguucacuggacacuuca

SEQ ID NO: 2969299 - RNA, 19 nt, Human
ugcugccaauauccuaaua

SEQ ID NO: 2969300 - RNA, 18 nt, Human
ugcugccaauauccuaau

SEQ ID NO: 2969301 - RNA, 17 nt, Human
ugcugccaauauccuaa

SEQ ID NO: 2969302 - RNA, 16 nt, Human
ugcugccaauauccua

SEQ ID NO: 2969303 - RNA, 15 nt, Human
ugcugccaauauccu

SEQ ID NO: 2969304 - RNA, 21 nt, Human
ugcugccaauauccuaauaaa

SEQ ID NO: 2969305 - RNA, 15 nt, Human
ugcauauugcauacu

SEQ ID NO: 2969306 - RNA, 23 nt, Human
ugcauauugcauacuauuaaaca

SEQ ID NO: 2969307 - RNA, 16 nt, Human
ugcagggacagagcau

SEQ ID NO: 2969308 - RNA, 19 nt, Human
uggaucuguauguguucua

SEQ ID NO: 2969309 - RNA, 18 nt, Human
uggguauagauguugcua

SEQ ID NO: 2969310 - RNA, 14 nt, Human
uggguauagauguu

SEQ ID NO: 2969311 - RNA, 22 nt, Human
uggugauuuagcaggaagcugu

SEQ ID NO: 2969312 - RNA, 16 nt, Human
uggugauuuagcagga

SEQ ID NO: 2969313 - RNA, 14 nt, Human
uggucaacauuucu

SEQ ID NO: 2969314 - RNA, 15 nt, Human
ugguauuugaaacac

SEQ ID NO: 2969315 - RNA, 21 nt, Human
uuaaacucugagugcaaacuu

SEQ ID NO: 2969316 - RNA, 19 nt, Human
uuaaugguaguuuuacagu

SEQ ID NO: 2969317 - RNA, 22 nt, Human
uuaguagagguacacuugugaa

SEQ ID NO: 2969318 - RNA, 23 nt, Human
uuaguagagguacacuugugaau

SEQ ID NO: 2969319 - RNA, 20 nt, Human
uuaggagaagucuucuauuu

SEQ ID NO: 2969320 - RNA, 20 nt, Human
uuagacccucaugcugccaa

SEQ ID NO: 2969321 - RNA, 19 nt, Human
uuagacccucaugcugcca

SEQ ID NO: 2969322 - RNA, 13 nt, Human
uuacuuuaaacua

SEQ ID NO: 2969323 - RNA, 15 nt, Human
uuauuuuacuuuuug

SEQ ID NO: 2969324 - RNA, 13 nt, Human
uuauuuuacuuuu

SEQ ID NO: 2969325 - RNA, 15 nt, Human
uuauugauguuuuca

SEQ ID NO: 2969326 - RNA, 13 nt, Human
uuauugaagcaga

SEQ ID NO: 2969327 - RNA, 15 nt, Human
uuauugaagcagagu

SEQ ID NO: 2969328 - RNA, 16 nt, Human
uuauugaagcagagug

SEQ ID NO: 2969329 - RNA, 17 nt, Human
uuauugaagcagagugg

SEQ ID NO: 2969330 - RNA, 12 nt, Human
uuauugaagcag

SEQ ID NO: 2969331 - RNA, 19 nt, Human
uuuacaguguuucuggcuu

SEQ ID NO: 2969332 - RNA, 17 nt, Human
uuuacaguguuucuggc

SEQ ID NO: 2969333 - RNA, 23 nt, Human
uuuauccuagucauucuucccua

SEQ ID NO: 2969334 - RNA, 15 nt, Human
uuuaucuguucauau

SEQ ID NO: 2969335 - RNA, 16 nt, Human
uuuaucuguucauaug

SEQ ID NO: 2969336 - RNA, 22 nt, Human
uuuauccuagucauucuucccu

SEQ ID NO: 2969337 - RNA, 23 nt, Human
uuguuuaaugguaguuuuacagu

SEQ ID NO: 2969338 - RNA, 12 nt, Human
uuguuuaauggu

SEQ ID NO: 2969339 - RNA, 15 nt, Human
uuguuauuuauugaa

SEQ ID NO: 2969340 - RNA, 20 nt, Human
uuguuauuuauugaaaugau

SEQ ID NO: 2969341 - RNA, 14 nt, Human
uuuaaacacauuaa

SEQ ID NO: 2969342 - RNA, 15 nt, Human
uuuaaacacauuaaa

SEQ ID NO: 2969343 - RNA, 15 nt, Human
uuuaaacuacauuag

SEQ ID NO: 2969344 - RNA, 21 nt, Human
uuugaagguagaauguuuuca

SEQ ID NO: 2969345 - RNA, 20 nt, Human
uuugccaauuugcacauuaa

SEQ ID NO: 2969346 - RNA, 15 nt, Human
uuugccaauuugcac

SEQ ID NO: 2969347 - RNA, 22 nt, Human
uuugguugguaacucuguaauu

SEQ ID NO: 2969348 - RNA, 13 nt, Human
uuugguuauuuua

SEQ ID NO: 2969349 - RNA, 14 nt, Human
uuugguuauuuuac

SEQ ID NO: 2969350 - RNA, 17 nt, Human
uuuggguuuauuuggaa

SEQ ID NO: 2969351 - RNA, 22 nt, Human
uuucacaguguguggucaacau

SEQ ID NO: 2969352 - RNA, 13 nt, Human
uucuuguauuuau

SEQ ID NO: 2969353 - RNA, 14 nt, Human
uugaagcagagugg

SEQ ID NO: 2969354 - RNA, 12 nt, Human
uugaagcagagu

SEQ ID NO: 2969355 - RNA, 13 nt, Human
uugaagauucuau

SEQ ID NO: 2969356 - RNA, 23 nt, Human
uugaagauucuauguuaauauuu

SEQ ID NO: 2969357 - RNA, 22 nt, Human
uugaagauucuauguuaauauu

SEQ ID NO: 2969358 - RNA, 15 nt, Human
uugaaacacugguuu

SEQ ID NO: 2969359 - RNA, 23 nt, Human
uugcagcucuccccuucucugua

SEQ ID NO: 2969360 - RNA, 18 nt, Human
uugguaacucuguaauuc

SEQ ID NO: 2969361 - RNA, 20 nt, Human
uugggcacaucauuucaaga

SEQ ID NO: 2969362 - RNA, 17 nt, Human
uugccuuuuuauaacuu

SEQ ID NO: 2969363 - RNA, 18 nt, Human
uugccuuggcugcaguuu

SEQ ID NO: 2969364 - RNA, 16 nt, Human
uugcugcuuguacacu

SEQ ID NO: 2969365 - RNA, 21 nt, Human
uugcugcugauuuaaacacau

SEQ ID NO: 2969366 - RNA, 17 nt, Human
uugcugcugauuuaaac

SEQ ID NO: 2969367 - RNA, 19 nt, Human
uugcugcugauuuaaacac

SEQ ID NO: 2969368 - RNA, 23 nt, Human
uugcuaacagcaacacaaagcuu

SEQ ID NO: 2969369 - RNA, 17 nt, Human
uuuguguacuuuuaaga

SEQ ID NO: 2969370 - RNA, 13 nt, Human
uuuguguacuuuu

SEQ ID NO: 2969371 - RNA, 14 nt, Human
uuuguguacuuuua

SEQ ID NO: 2969372 - RNA, 21 nt, Human
cugacacaugcugaacaucac

SEQ ID NO: 2969373 - RNA, 23 nt, Human
cugacacacagcucuguccuggg

SEQ ID NO: 2969374 - RNA, 22 nt, Human
cugacacacagcucuguccugg

SEQ ID NO: 2969375 - RNA, 21 nt, Human
cugacacacagcucuguccug

SEQ ID NO: 2969376 - RNA, 20 nt, Human
cugacacacagcucuguccu

SEQ ID NO: 2969377 - RNA, 19 nt, Human
cugacacacagcucugucc

SEQ ID NO: 2969378 - RNA, 18 nt, Human
cugacacacagcucuguc

SEQ ID NO: 2969379 - RNA, 17 nt, Human
cugacacacagcucugu

SEQ ID NO: 2969380 - RNA, 16 nt, Human
cugacacacagcucug

SEQ ID NO: 2969381 - RNA, 15 nt, Human
cugacacacagcucu

SEQ ID NO: 2969382 - RNA, 13 nt, Human
cugacacacagcu

SEQ ID NO: 2969383 - RNA, 17 nt, Human
cugaaagaggaaugaag

SEQ ID NO: 2969384 - RNA, 13 nt, Human
cugaaagaggaau

SEQ ID NO: 2969385 - RNA, 24 nt, Human
cucuugauucauaaugacuuaagc

SEQ ID NO: 2969386 - RNA, 13 nt, Human
cucuugagccugg

SEQ ID NO: 2969387 - RNA, 14 nt, Human
cucuugagccuggg

SEQ ID NO: 2969388 - RNA, 22 nt, Human
cucuugauucauaaugacuuaa

SEQ ID NO: 2969389 - RNA, 15 nt, Human
cucuugagccuggga

SEQ ID NO: 2969390 - RNA, 16 nt, Human
cucuugagccugggag

SEQ ID NO: 2969391 - RNA, 23 nt, Human
cucuugagccuugaacuuugacc

SEQ ID NO: 2969392 - RNA, 17 nt, Human
cucugcacaagcugcac

SEQ ID NO: 2969393 - RNA, 18 nt, Human
cucugcacaagcugcacc

SEQ ID NO: 2969394 - RNA, 17 nt, Human
cugaucucucgugauug

SEQ ID NO: 2969395 - RNA, 18 nt, Human
cugaucucucgugauuga

SEQ ID NO: 2969396 - RNA, 14 nt, Human
cugaucucucguga

SEQ ID NO: 2969397 - RNA, 23 nt, Human
cugaggaauccagacccggcugc

SEQ ID NO: 2969398 - RNA, 14 nt, Human
cugaggggccucuu

SEQ ID NO: 2969399 - RNA, 13 nt, Human
cugaggugggagg

SEQ ID NO: 2969400 - RNA, 12 nt, Human
cugaggugggag

SEQ ID NO: 2969401 - RNA, 22 nt, Human
cugaggugggaggaucucuuga

SEQ ID NO: 2969402 - RNA, 18 nt, Human
cugagggggccuggaugc

SEQ ID NO: 2969403 - RNA, 12 nt, Human
cugagcugggau

SEQ ID NO: 2969404 - RNA, 22 nt, Human
cugagcugggaugauuggaggg

SEQ ID NO: 2969405 - RNA, 19 nt, Human
cugacccugcuucaaauau

SEQ ID NO: 2969406 - RNA, 22 nt, Human
cuccgcuuucuacccagcgagc

SEQ ID NO: 2969407 - RNA, 14 nt, Human
cuccgucaacucau

SEQ ID NO: 2969408 - RNA, 20 nt, Human
cuccgcuuucuacccagcga

SEQ ID NO: 2969409 - RNA, 21 nt, Human
cuccgcuuucuacccagcgag

SEQ ID NO: 2969410 - RNA, 19 nt, Human
cucccucuuucccucccuu

SEQ ID NO: 2969411 - RNA, 16 nt, Human
cucccucccucuuucc

SEQ ID NO: 2969412 - RNA, 15 nt, Human
cucccucuuucccuc

SEQ ID NO: 2969413 - RNA, 22 nt, Human
cuccagaauuucccaaagcagu

SEQ ID NO: 2969414 - RNA, 11 nt, Human
cuccagacaca

SEQ ID NO: 2969415 - RNA, 16 nt, Human
cuccagacacaugucc

SEQ ID NO: 2969416 - RNA, 17 nt, Human
cucagaaucucaaauaa

SEQ ID NO: 2969417 - RNA, 16 nt, Human
cucagaaucucaaaua

SEQ ID NO: 2969418 - RNA, 21 nt, Human
cuccagaauuucccaaagcag

SEQ ID NO: 2969419 - RNA, 22 nt, Human
cuccaggcuguaucccaugagc

SEQ ID NO: 2969420 - RNA, 23 nt, Human
cuccaggcuguaucccaugagcc

SEQ ID NO: 2969421 - RNA, 22 nt, Human
cuccaggugcacaagcuccaag

SEQ ID NO: 2969422 - RNA, 21 nt, Human
cuccagugagacagcucugca

SEQ ID NO: 2969423 - RNA, 19 nt, Human
cuccaggugcacaagcucc

SEQ ID NO: 2969424 - RNA, 20 nt, Human
cuccaggugcacaagcucca

SEQ ID NO: 2969425 - RNA, 18 nt, Human
cuccaggugcacaagcuc

SEQ ID NO: 2969426 - RNA, 16 nt, Human
cucccagccaggcccu

SEQ ID NO: 2969427 - RNA, 14 nt, Human
cucccagccaggcc

SEQ ID NO: 2969428 - RNA, 13 nt, Human
cucccagccaggc

SEQ ID NO: 2969429 - RNA, 11 nt, Human
cucccagccag

SEQ ID NO: 2969430 - RNA, 13 nt, Human
cucccaccucagc

SEQ ID NO: 2969431 - RNA, 17 nt, Human
cucccaccucagccucc

SEQ ID NO: 2969432 - RNA, 16 nt, Human
cucccaccucagccuc

SEQ ID NO: 2969433 - RNA, 14 nt, Human
cucccaccucagcc

SEQ ID NO: 2969434 - RNA, 22 nt, Human
cuccuuuagcgcccaguugggu

SEQ ID NO: 2969435 - RNA, 22 nt, Human
cuccuagccugugccucuggga

SEQ ID NO: 2969436 - RNA, 17 nt, Human
cuccuuuagcgcccagu

SEQ ID NO: 2969437 - RNA, 16 nt, Human
cuccuuuagcgcccag

SEQ ID NO: 2969438 - RNA, 23 nt, Human
cuccuuugugaggaagccgcugg

SEQ ID NO: 2969439 - RNA, 24 nt, Human
cuccuuuucacaguucucuccuuc

SEQ ID NO: 2969440 - RNA, 11 nt, Human
cucggugccuu

SEQ ID NO: 2969441 - RNA, 23 nt, Human
cucgguguggagaagcggcuggc

SEQ ID NO: 2969442 - RNA, 16 nt, Human
cucugcacaagcugca

SEQ ID NO: 2969443 - RNA, 10 nt, Human
cucuccucug

SEQ ID NO: 2969444 - RNA, 17 nt, Human
cucucuggccuucggcc

SEQ ID NO: 2969445 - RNA, 19 nt, Human
cucucuggccuucggccuc

SEQ ID NO: 2969446 - RNA, 13 nt, Human
cucucccuuggau

SEQ ID NO: 2969447 - RNA, 13 nt, Human
cucuccuccuuuu

SEQ ID NO: 2969448 - RNA, 20 nt, Human
cucuccuccuuuucacaguu

SEQ ID NO: 2969449 - RNA, 16 nt, Human
cucuccgaccagacac

SEQ ID NO: 2969450 - RNA, 17 nt, Human
cucacaauccuugccac

SEQ ID NO: 2969451 - RNA, 14 nt, Human
cucacaaaggaugc

SEQ ID NO: 2969452 - RNA, 12 nt, Human
cucaaauaacua

SEQ ID NO: 2969453 - RNA, 14 nt, Human
cucacacaugagca

SEQ ID NO: 2969454 - RNA, 21 nt, Human
cucacacaugagcaucaggcc

SEQ ID NO: 2969455 - RNA, 13 nt, Human
cucaaaacugcac

SEQ ID NO: 2969456 - RNA, 18 nt, Human
cucaaaaaaagaaaaaga

SEQ ID NO: 2969457 - RNA, 17 nt, Human
cucaaaaaaagaaaaag

SEQ ID NO: 2969458 - RNA, 17 nt, Human
cuauguugcccaggcag

SEQ ID NO: 2969459 - RNA, 16 nt, Human
cuauguugcccaggca

SEQ ID NO: 2969460 - RNA, 20 nt, Human
cuaucucccccagccccauc

SEQ ID NO: 2969461 - RNA, 19 nt, Human
cuauguaucaaugaguaac

SEQ ID NO: 2969462 - RNA, 18 nt, Human
cuaucucccccagcccca

SEQ ID NO: 2969463 - RNA, 17 nt, Human
cuaugugagcacaaagg

SEQ ID NO: 2969464 - RNA, 16 nt, Human
cuauguaucaaugagu

SEQ ID NO: 2969465 - RNA, 22 nt, Human
cuauguguagggcgggaggaug

SEQ ID NO: 2969466 - RNA, 15 nt, Human
cuauguugcccaggc

SEQ ID NO: 2969467 - RNA, 14 nt, Human
cuauguugcccagg

SEQ ID NO: 2969468 - RNA, 23 nt, Human
cucagaaaacaaggaugaauuaa

SEQ ID NO: 2969469 - RNA, 19 nt, Human
cucagaaaacaaggaugaa

SEQ ID NO: 2969470 - RNA, 18 nt, Human
cucacuuguuuuauuuaa

SEQ ID NO: 2969471 - RNA, 14 nt, Human
cucaccugccccuc

SEQ ID NO: 2969472 - RNA, 16 nt, Human
cucaccugccccucaa

SEQ ID NO: 2969473 - RNA, 18 nt, Human
cucaccugccccucaacu

SEQ ID NO: 2969474 - RNA, 13 nt, Human
cucaccugccccu

SEQ ID NO: 2969475 - RNA, 14 nt, Human
cucaccucucccuu

SEQ ID NO: 2969476 - RNA, 15 nt, Human
cucaccucucccuug

SEQ ID NO: 2969477 - RNA, 16 nt, Human
cucaccucucccuugg

SEQ ID NO: 2969478 - RNA, 17 nt, Human
cucaccucucccuugga

SEQ ID NO: 2969479 - RNA, 13 nt, Human
cucaccucucccu

SEQ ID NO: 2969480 - RNA, 15 nt, Human
cuaccugaggggccu

SEQ ID NO: 2969481 - RNA, 16 nt, Human
cuaccugaggggccuc

SEQ ID NO: 2969482 - RNA, 19 nt, Human
cuaccugaggggccucuua

SEQ ID NO: 2969483 - RNA, 23 nt, Human
cuaccugaggggccucuuauggg

SEQ ID NO: 2969484 - RNA, 20 nt, Human
cuacuaaaaaugcaaaaaaa

SEQ ID NO: 2969485 - RNA, 20 nt, Human
cuagcauacguacacauuuu

SEQ ID NO: 2969486 - RNA, 19 nt, Human
cuagcauacguacacauuu

SEQ ID NO: 2969487 - RNA, 18 nt, Human
cuagcauacguacacauu

SEQ ID NO: 2969488 - RNA, 16 nt, Human
cuagcauacguacaca

SEQ ID NO: 2969489 - RNA, 19 nt, Human
cuaggccuggccagaugca

SEQ ID NO: 2969490 - RNA, 18 nt, Human
cuaggccuggccagaugc

SEQ ID NO: 2969491 - RNA, 15 nt, Human
cuaggccuggccaga

SEQ ID NO: 2969492 - RNA, 14 nt, Human
cuaggccuggccag

SEQ ID NO: 2969493 - RNA, 12 nt, Human
cuaggccugggg

SEQ ID NO: 2969494 - RNA, 13 nt, Human
cuaggccugggga

SEQ ID NO: 2969495 - RNA, 13 nt, Human
cuaggccuggcca

SEQ ID NO: 2969496 - RNA, 19 nt, Human
cuagccagaggagagagga

SEQ ID NO: 2969497 - RNA, 17 nt, Human
cuagccagaggagagag

SEQ ID NO: 2969498 - RNA, 14 nt, Human
cuagggaagauaau

SEQ ID NO: 2969499 - RNA, 19 nt, Human
cuaguuugauuaaauucuu

SEQ ID NO: 2969500 - RNA, 17 nt, Human
cuaguuugauuaaauuc

SEQ ID NO: 2969501 - RNA, 20 nt, Human
cuaguuugauuaaauucuug

SEQ ID NO: 2969502 - RNA, 15 nt, Human
cuaguuugauuaaau

SEQ ID NO: 2969503 - RNA, 20 nt, Human
cgcuggggccaguugguccc

SEQ ID NO: 2969504 - RNA, 17 nt, Human
cgcuggggccaguuggu

SEQ ID NO: 2969505 - RNA, 16 nt, Human
cgcugccccuggcagc

SEQ ID NO: 2969506 - RNA, 17 nt, Human
cgcugccccuggcagcc

SEQ ID NO: 2969507 - RNA, 13 nt, Human
cgcugccccuggc

SEQ ID NO: 2969508 - RNA, 23 nt, Human
cgcuggaccuugaacuggguacu

SEQ ID NO: 2969509 - RNA, 19 nt, Human
cgcuggaccuugaacuggg

SEQ ID NO: 2969510 - RNA, 18 nt, Human
cgcugccccuggcagccc

SEQ ID NO: 2969511 - RNA, 16 nt, Human
cgccuuaaggauguuc

SEQ ID NO: 2969512 - RNA, 23 nt, Human
cggagaagagcuguucacagcca

SEQ ID NO: 2969513 - RNA, 24 nt, Human
cggagaagagcuguucacagccag

SEQ ID NO: 2969514 - RNA, 15 nt, Human
cggagacggaguccc

SEQ ID NO: 2969515 - RNA, 15 nt, Human
cgguuuauauaagcu

SEQ ID NO: 2969516 - RNA, 16 nt, Human
cguacacauuuuauuu

SEQ ID NO: 2969517 - RNA, 13 nt, Human
cguacacauuuua

SEQ ID NO: 2969518 - RNA, 13 nt, Human
cguuaaaauacca

SEQ ID NO: 2969519 - RNA, 15 nt, Human
cuaaagcugccagcc

SEQ ID NO: 2969520 - RNA, 16 nt, Human
cuaaaggcuaccuuug

SEQ ID NO: 2969521 - RNA, 15 nt, Human
cuaaaggcuaccuuu

SEQ ID NO: 2969522 - RNA, 14 nt, Human
cuaaagcugccagc

SEQ ID NO: 2969523 - RNA, 17 nt, Human
cuaaagaaguuugaaca

SEQ ID NO: 2969524 - RNA, 19 nt, Human
cuaaaguguauuuuuuuac

SEQ ID NO: 2969525 - RNA, 19 nt, Human
cuaaaggcuaccuuuguau

SEQ ID NO: 2969526 - RNA, 17 nt, Human
cuaaaggcuaccuuugu

SEQ ID NO: 2969527 - RNA, 22 nt, Human
cuaaaguguauuuuuuuacuaa

SEQ ID NO: 2969528 - RNA, 20 nt, Human
cccagcacaaagcagauccu

SEQ ID NO: 2969529 - RNA, 18 nt, Human
cccagcaauuaugaaaau

SEQ ID NO: 2969530 - RNA, 23 nt, Human
cccagcaagugagagcugggugu

SEQ ID NO: 2969531 - RNA, 16 nt, Human
cccagcaauuaugaaa

SEQ ID NO: 2969532 - RNA, 12 nt, Human
cccagccaggcc

SEQ ID NO: 2969533 - RNA, 14 nt, Human
cccagccaggcccu

SEQ ID NO: 2969534 - RNA, 24 nt, Human
cccagccagcaguucagagcugcc

SEQ ID NO: 2969535 - RNA, 15 nt, Human
cccaggaaaggcucc

SEQ ID NO: 2969536 - RNA, 16 nt, Human
cccaggaaaggcucca

SEQ ID NO: 2969537 - RNA, 20 nt, Human
cccauauuuguacaccaaua

SEQ ID NO: 2969538 - RNA, 17 nt, Human
cccaggaaaggcuccag

SEQ ID NO: 2969539 - RNA, 18 nt, Human
cccaggaaaggcuccagg

SEQ ID NO: 2969540 - RNA, 22 nt, Human
cccaggcuuagucacugagaca

SEQ ID NO: 2969541 - RNA, 21 nt, Human
cccauccucuguacagagccc

SEQ ID NO: 2969542 - RNA, 22 nt, Human
cccauccucuguacagagccca

SEQ ID NO: 2969543 - RNA, 14 nt, Human
ccccgcacugggcu

SEQ ID NO: 2969544 - RNA, 23 nt, Human
ccccgaggccuucucugaaggac

SEQ ID NO: 2969545 - RNA, 15 nt, Human
cccauucugccugcc

SEQ ID NO: 2969546 - RNA, 14 nt, Human
cccauucugccugc

SEQ ID NO: 2969547 - RNA, 19 nt, Human
cccauucugccugcccagg

SEQ ID NO: 2969548 - RNA, 15 nt, Human
cccauuugcuccuuu

SEQ ID NO: 2969549 - RNA, 20 nt, Human
ccccagauugcaacaggcug

SEQ ID NO: 2969550 - RNA, 15 nt, Human
ccccagauugcaaca

SEQ ID NO: 2969551 - RNA, 22 nt, Human
cccuccucugcuugccaucccu

SEQ ID NO: 2969552 - RNA, 13 nt, Human
cccuccucugcuu

SEQ ID NO: 2969553 - RNA, 13 nt, Human
ccccugcacucca

SEQ ID NO: 2969554 - RNA, 21 nt, Human
ccccugcacagcaggcugcca

SEQ ID NO: 2969555 - RNA, 16 nt, Human
ccccugcacagcaggc

SEQ ID NO: 2969556 - RNA, 15 nt, Human
ccccugcacagcagg

SEQ ID NO: 2969557 - RNA, 17 nt, Human
ccccugaauuuaaauag

SEQ ID NO: 2969558 - RNA, 15 nt, Human
ccccugacaacacuc

SEQ ID NO: 2969559 - RNA, 13 nt, Human
ccccugaauuuaa

SEQ ID NO: 2969560 - RNA, 16 nt, Human
ccccugccacccuggg

SEQ ID NO: 2969561 - RNA, 14 nt, Human
ccccugccacccug

SEQ ID NO: 2969562 - RNA, 23 nt, Human
ccccugcacagcaggcugccagu

SEQ ID NO: 2969563 - RNA, 22 nt, Human
ccccugcacagcaggcugccag

SEQ ID NO: 2969564 - RNA, 18 nt, Human
cccgggaagggggcuggg

SEQ ID NO: 2969565 - RNA, 21 nt, Human
cccgggaagggggcugggaca

SEQ ID NO: 2969566 - RNA, 16 nt, Human
cccucaacaccucugc

SEQ ID NO: 2969567 - RNA, 16 nt, Human
cccucaacucuccucc

SEQ ID NO: 2969568 - RNA, 18 nt, Human
cccgaauagcugggacua

SEQ ID NO: 2969569 - RNA, 17 nt, Human
cccgaauagcugggacu

SEQ ID NO: 2969570 - RNA, 16 nt, Human
cccgaauagcugggac

SEQ ID NO: 2969571 - RNA, 14 nt, Human
ccccuucugaccca

SEQ ID NO: 2969572 - RNA, 13 nt, Human
ccccuucugaccc

SEQ ID NO: 2969573 - RNA, 15 nt, Human
cccgggaagggggcu

SEQ ID NO: 2969574 - RNA, 12 nt, Human
cccgggaagggg

SEQ ID NO: 2969575 - RNA, 15 nt, Human
cccggccccugcugg

SEQ ID NO: 2969576 - RNA, 16 nt, Human
cccggccccugcuggu

SEQ ID NO: 2969577 - RNA, 21 nt, Human
ccagucauuauguuaauauuu

SEQ ID NO: 2969578 - RNA, 22 nt, Human
ccagucauuauguuaauauuuc

SEQ ID NO: 2969579 - RNA, 15 nt, Human
ccaguccugcccgcc

SEQ ID NO: 2969580 - RNA, 13 nt, Human
ccaguccugcccg

SEQ ID NO: 2969581 - RNA, 12 nt, Human
ccaguccugccc

SEQ ID NO: 2969582 - RNA, 14 nt, Human
ccaggcaggucuug

SEQ ID NO: 2969583 - RNA, 12 nt, Human
ccaggcaggucu

SEQ ID NO: 2969584 - RNA, 23 nt, Human
ccaggcaggucuugaacuccugg

SEQ ID NO: 2969585 - RNA, 12 nt, Human
ccaggcuggcgu

SEQ ID NO: 2969586 - RNA, 21 nt, Human
ccaggggaaaaucagccugcu

SEQ ID NO: 2969587 - RNA, 23 nt, Human
ccagccccuucugacccaugcug

SEQ ID NO: 2969588 - RNA, 24 nt, Human
ccagccccuucugacccaugcugc

SEQ ID NO: 2969589 - RNA, 23 nt, Human
ccagcuacucgggaggcugaggc

SEQ ID NO: 2969590 - RNA, 21 nt, Human
ccagcuacucgggaggcugag

SEQ ID NO: 2969591 - RNA, 12 nt, Human
ccagcagagcac

SEQ ID NO: 2969592 - RNA, 13 nt, Human
ccagcagagcacc

SEQ ID NO: 2969593 - RNA, 14 nt, Human
ccagcagagcaccu

SEQ ID NO: 2969594 - RNA, 17 nt, Human
ccagccccagugcccac

SEQ ID NO: 2969595 - RNA, 15 nt, Human
ccagccccauccucu

SEQ ID NO: 2969596 - RNA, 17 nt, Human
ccagccccauccucugu

SEQ ID NO: 2969597 - RNA, 23 nt, Human
ccagcacuuugggaggcugaggc

SEQ ID NO: 2969598 - RNA, 21 nt, Human
ccagcacuuugggaggcugag

SEQ ID NO: 2969599 - RNA, 16 nt, Human
ccauucuuggcccagg

SEQ ID NO: 2969600 - RNA, 15 nt, Human
cccaacucaccccag

SEQ ID NO: 2969601 - RNA, 16 nt, Human
cccaacucaccccagc

SEQ ID NO: 2969602 - RNA, 17 nt, Human
ccauuggggcucccagc

SEQ ID NO: 2969603 - RNA, 16 nt, Human
ccauuggggcucccag

SEQ ID NO: 2969604 - RNA, 15 nt, Human
ccauuggggcuccca

SEQ ID NO: 2969605 - RNA, 22 nt, Human
cccacugcuuuuggucugugug

SEQ ID NO: 2969606 - RNA, 23 nt, Human
cccacugcuuuuggucuguguga

SEQ ID NO: 2969607 - RNA, 21 nt, Human
cccacuccggcccuccagagc

SEQ ID NO: 2969608 - RNA, 19 nt, Human
cccacuccggcccuccaga

SEQ ID NO: 2969609 - RNA, 13 nt, Human
cccacucccugca

SEQ ID NO: 2969610 - RNA, 12 nt, Human
cccacucccugc

SEQ ID NO: 2969611 - RNA, 14 nt, Human
cccacuccggcccu

SEQ ID NO: 2969612 - RNA, 17 nt, Human
cccaacucaccccagcc

SEQ ID NO: 2969613 - RNA, 20 nt, Human
cccaacucaccccagcccca

SEQ ID NO: 2969614 - RNA, 13 nt, Human
cccaacuccagaa

SEQ ID NO: 2969615 - RNA, 20 nt, Human
cccaagacucccaugaggga

SEQ ID NO: 2969616 - RNA, 16 nt, Human
cccaagacucccauga

SEQ ID NO: 2969617 - RNA, 12 nt, Human
cccaagcucugc

SEQ ID NO: 2969618 - RNA, 14 nt, Human
cccaagcucugcuc

SEQ ID NO: 2969619 - RNA, 13 nt, Human
cccaagcucugcu

SEQ ID NO: 2969620 - RNA, 22 nt, Human
ccauccccuguagagugggagc

SEQ ID NO: 2969621 - RNA, 21 nt, Human
ccaucccauaugccugggcag

SEQ ID NO: 2969622 - RNA, 13 nt, Human
ccaucccucccuc

SEQ ID NO: 2969623 - RNA, 19 nt, Human
ccaucccauaugccugggc

SEQ ID NO: 2969624 - RNA, 20 nt, Human
ccaucccauaugccugggca

SEQ ID NO: 2969625 - RNA, 20 nt, Human
ccaucccaaacccuucagug

SEQ ID NO: 2969626 - RNA, 19 nt, Human
ccauccagguucagcuugu

SEQ ID NO: 2969627 - RNA, 18 nt, Human
ccauccagguucagcuug

SEQ ID NO: 2969628 - RNA, 18 nt, Human
ccaguuggucccccuucc

SEQ ID NO: 2969629 - RNA, 20 nt, Human
ccaguuggucccccuuccau

SEQ ID NO: 2969630 - RNA, 16 nt, Human
ccauaagcuacugcca

SEQ ID NO: 2969631 - RNA, 21 nt, Human
ccauaagcuacugccauccug

SEQ ID NO: 2969632 - RNA, 18 nt, Human
ccauaagcuacugccauc

SEQ ID NO: 2969633 - RNA, 17 nt, Human
ccauaagcuacugccau

SEQ ID NO: 2969634 - RNA, 13 nt, Human
ccaguuggucccc

SEQ ID NO: 2969635 - RNA, 23 nt, Human
ccaguuggguggaugccuggugg

SEQ ID NO: 2969636 - RNA, 22 nt, Human
ccaguuggagcagaugccuccc

SEQ ID NO: 2969637 - RNA, 20 nt, Human
ccaugaggaacaaggcaagg

SEQ ID NO: 2969638 - RNA, 15 nt, Human
ccaucccucccucca

SEQ ID NO: 2969639 - RNA, 14 nt, Human
ccaucccucccucc

SEQ ID NO: 2969640 - RNA, 23 nt, Human
ccaugaggaacaaggcaaggcug

SEQ ID NO: 2969641 - RNA, 17 nt, Human
ccaugagggagaugcca

SEQ ID NO: 2969642 - RNA, 18 nt, Human
ccaugaguccccuguuug

SEQ ID NO: 2969643 - RNA, 21 nt, Human
ccaugagggagaugccaugag

SEQ ID NO: 2969644 - RNA, 20 nt, Human
ccaugagggagaugccauga

SEQ ID NO: 2969645 - RNA, 19 nt, Human
ccaugagggagaugccaug

SEQ ID NO: 2969646 - RNA, 18 nt, Human
ccaugagggagaugccau

SEQ ID NO: 2969647 - RNA, 23 nt, Human
ccaugagggagaugccaugagcc

SEQ ID NO: 2969648 - RNA, 15 nt, Human
ccuaauaaaaaggug

SEQ ID NO: 2969649 - RNA, 16 nt, Human
ccuaauaaaaagguga

SEQ ID NO: 2969650 - RNA, 20 nt, Human
ccuaauaaaaaggugaccau

SEQ ID NO: 2969651 - RNA, 14 nt, Human
ccuaauaaaaaggu

SEQ ID NO: 2969652 - RNA, 12 nt, Human
ccuaauguguuu

SEQ ID NO: 2969653 - RNA, 21 nt, Human
ccuagcauacguacacauuuu

SEQ ID NO: 2969654 - RNA, 23 nt, Human
ccuagccugugccucugggacug

SEQ ID NO: 2969655 - RNA, 19 nt, Human
ccuagccuuagaagucaca

SEQ ID NO: 2969656 - RNA, 22 nt, Human
ccuagccuuagaagucacacag

SEQ ID NO: 2969657 - RNA, 18 nt, Human
ccggccaccugcggugcu

SEQ ID NO: 2969658 - RNA, 17 nt, Human
ccggccaccugcggugc

SEQ ID NO: 2969659 - RNA, 14 nt, Human
cccuucucuccagc

SEQ ID NO: 2969660 - RNA, 19 nt, Human
cccuucucuccagccccug

SEQ ID NO: 2969661 - RNA, 21 nt, Human
cccuuuuuuggcugcugaagg

SEQ ID NO: 2969662 - RNA, 22 nt, Human
cccuuuuuuggcugcugaaggc

SEQ ID NO: 2969663 - RNA, 23 nt, Human
cccuuuuuuggcugcugaaggcu

SEQ ID NO: 2969664 - RNA, 23 nt, Human
cccugugaguacuacaguccucc

SEQ ID NO: 2969665 - RNA, 15 nt, Human
cccugugauggggcc

SEQ ID NO: 2969666 - RNA, 21 nt, Human
cccugugaguacuacaguccu

SEQ ID NO: 2969667 - RNA, 14 nt, Human
cccuccuuucacca

SEQ ID NO: 2969668 - RNA, 19 nt, Human
cccuguggaugcugcugcc

SEQ ID NO: 2969669 - RNA, 14 nt, Human
ccgcagcccugcag

SEQ ID NO: 2969670 - RNA, 18 nt, Human
ccgcagcccugcagaggg

SEQ ID NO: 2969671 - RNA, 23 nt, Human
ccgcagcccugcagagggcacag

SEQ ID NO: 2969672 - RNA, 12 nt, Human
ccucggagaaga

SEQ ID NO: 2969673 - RNA, 14 nt, Human
ccucggagaagagc

SEQ ID NO: 2969674 - RNA, 22 nt, Human
ccucggaccccacuccggcccu

SEQ ID NO: 2969675 - RNA, 20 nt, Human
ccucggaccccacuccggcc

SEQ ID NO: 2969676 - RNA, 18 nt, Human
ccuccuuuucacaguucu

SEQ ID NO: 2969677 - RNA, 23 nt, Human
ccuccuuugugaggaagccgcug

SEQ ID NO: 2969678 - RNA, 16 nt, Human
ccucccuucucuucac

SEQ ID NO: 2969679 - RNA, 14 nt, Human
ccuccgccucuugg

SEQ ID NO: 2969680 - RNA, 13 nt, Human
ccuccgccucuug

SEQ ID NO: 2969681 - RNA, 16 nt, Human
ccucaacaccucugca

SEQ ID NO: 2969682 - RNA, 21 nt, Human
ccucaacucuccuccagaguc

SEQ ID NO: 2969683 - RNA, 23 nt, Human
ccucaacucuccuccagagucag

SEQ ID NO: 2969684 - RNA, 19 nt, Human
ccucaacucuccuccagag

SEQ ID NO: 2969685 - RNA, 15 nt, Human
ccucaaccuccuggg

SEQ ID NO: 2969686 - RNA, 18 nt, Human
ccucauuagcauuuugcu

SEQ ID NO: 2969687 - RNA, 10 nt, Human
ccucaggccu

SEQ ID NO: 2969688 - RNA, 12 nt, Human
ccucaggcaggu

SEQ ID NO: 2969689 - RNA, 18 nt, Human
ccucaggcaggugggaug

SEQ ID NO: 2969690 - RNA, 20 nt, Human
ccucaagugauucuccugcc

SEQ ID NO: 2969691 - RNA, 23 nt, Human
ccucaagugauucuccugccuca

SEQ ID NO: 2969692 - RNA, 17 nt, Human
ccucccaucacccgcua

SEQ ID NO: 2969693 - RNA, 17 nt, Human
ccuccaagaccuucucc

SEQ ID NO: 2969694 - RNA, 19 nt, Human
ccuccaagaccuucuccuu

SEQ ID NO: 2969695 - RNA, 16 nt, Human
ccuccaagaccuucuc

SEQ ID NO: 2969696 - RNA, 12 nt, Human
ccucccaucacc

SEQ ID NO: 2969697 - RNA, 17 nt, Human
ccugucucuacuaaaaa

SEQ ID NO: 2969698 - RNA, 14 nt, Human
ccuggaugcccccu

SEQ ID NO: 2969699 - RNA, 18 nt, Human
ccuggaugccauccaagu

SEQ ID NO: 2969700 - RNA, 14 nt, Human
ccuggaugccaucc

SEQ ID NO: 2969701 - RNA, 13 nt, Human
ccuggaugccauc

SEQ ID NO: 2969702 - RNA, 15 nt, Human
ccuggauggggcugc

SEQ ID NO: 2969703 - RNA, 17 nt, Human
ccuggauggggcugcac

SEQ ID NO: 2969704 - RNA, 18 nt, Human
ccuggauggggcugcacc

SEQ ID NO: 2969705 - RNA, 18 nt, Human
ccuggaugcccccugugg

SEQ ID NO: 2969706 - RNA, 16 nt, Human
ccuggaugcccccugu

SEQ ID NO: 2969707 - RNA, 19 nt, Human
ccuggaugcccccugugga

SEQ ID NO: 2969708 - RNA, 16 nt, Human
ccuggccccucagggu

SEQ ID NO: 2969709 - RNA, 18 nt, Human
ccuggccccucagggucc

SEQ ID NO: 2969710 - RNA, 20 nt, Human
ccuggccccucagggucccu

SEQ ID NO: 2969711 - RNA, 21 nt, Human
ccuggccccucagggucccug

SEQ ID NO: 2969712 - RNA, 22 nt, Human
ccuggccucaagugauucuccu

SEQ ID NO: 2969713 - RNA, 20 nt, Human
ccuggccugagcugggauga

SEQ ID NO: 2969714 - RNA, 19 nt, Human
ccugguggcagugggagcu

SEQ ID NO: 2969715 - RNA, 18 nt, Human
ccugguggcagugggagc

SEQ ID NO: 2969716 - RNA, 15 nt, Human
ccugguggcaguggg

SEQ ID NO: 2969717 - RNA, 20 nt, Human
ccugguggcagugggagcug

SEQ ID NO: 2969718 - RNA, 13 nt, Human
ccugguguggaag

SEQ ID NO: 2969719 - RNA, 15 nt, Human
ccuggggagaaagua

SEQ ID NO: 2969720 - RNA, 15 nt, Human
ccugggcuacaagga

SEQ ID NO: 2969721 - RNA, 15 nt, Human
ccucuuugagugaag

SEQ ID NO: 2969722 - RNA, 19 nt, Human
ccucuuucccucccuuccu

SEQ ID NO: 2969723 - RNA, 16 nt, Human
ccucuuucccucccuu

SEQ ID NO: 2969724 - RNA, 12 nt, Human
ccugcaggcagc

SEQ ID NO: 2969725 - RNA, 13 nt, Human
ccugcaggcagcc

SEQ ID NO: 2969726 - RNA, 14 nt, Human
ccugcaggcagcca

SEQ ID NO: 2969727 - RNA, 15 nt, Human
ccugcccaccuggcc

SEQ ID NO: 2969728 - RNA, 17 nt, Human
ccugcccaccuggccuc

SEQ ID NO: 2969729 - RNA, 18 nt, Human
ccugcccaccuggccucu

SEQ ID NO: 2969730 - RNA, 19 nt, Human
ccugcccaccuggccucug

SEQ ID NO: 2969731 - RNA, 19 nt, Human
ccugcccaggccccugcca

SEQ ID NO: 2969732 - RNA, 18 nt, Human
ccugcccaggccccugcc

SEQ ID NO: 2969733 - RNA, 21 nt, Human
ccugcccaggccccugccacc

SEQ ID NO: 2969734 - RNA, 15 nt, Human
ccugccucagccucc

SEQ ID NO: 2969735 - RNA, 16 nt, Human
ccugccucagccuccc

SEQ ID NO: 2969736 - RNA, 23 nt, Human
caauugaaguaaaauguggcagg

SEQ ID NO: 2969737 - RNA, 15 nt, Human
caaugggagcucaug

SEQ ID NO: 2969738 - RNA, 17 nt, Human
cacaagagcccaggccu

SEQ ID NO: 2969739 - RNA, 20 nt, Human
cacaagagcccaggccuccu

SEQ ID NO: 2969740 - RNA, 18 nt, Human
cacaagcuccaagcuccc

SEQ ID NO: 2969741 - RNA, 19 nt, Human
cacaagcuccaagcuccca

SEQ ID NO: 2969742 - RNA, 18 nt, Human
cacaagagcccaggccuc

SEQ ID NO: 2969743 - RNA, 19 nt, Human
cacaagagcccaggccucc

SEQ ID NO: 2969744 - RNA, 13 nt, Human
caaugcuggcugu

SEQ ID NO: 2969745 - RNA, 21 nt, Human
caaugcuggcuguuggcuggg

SEQ ID NO: 2969746 - RNA, 20 nt, Human
caaugcuggcuguuggcugg

SEQ ID NO: 2969747 - RNA, 12 nt, Human
caaugcuggcug

SEQ ID NO: 2969748 - RNA, 16 nt, Human
caauggcagccuuggc

SEQ ID NO: 2969749 - RNA, 13 nt, Human
caaucaugucagu

SEQ ID NO: 2969750 - RNA, 20 nt, Human
cacaagcuccaagcucccag

SEQ ID NO: 2969751 - RNA, 21 nt, Human
cacaagcuccaagcucccagg

SEQ ID NO: 2969752 - RNA, 15 nt, Human
caauaaaauggguuu

SEQ ID NO: 2969753 - RNA, 23 nt, Human
caauaaaauccauacauuugugu

SEQ ID NO: 2969754 - RNA, 20 nt, Human
caauaaaauccauacauuug

SEQ ID NO: 2969755 - RNA, 12 nt, Human
caaguuugaauu

SEQ ID NO: 2969756 - RNA, 21 nt, Human
caagucagucauucagauaug

SEQ ID NO: 2969757 - RNA, 21 nt, Human
caaggccugucagcuaaagaa

SEQ ID NO: 2969758 - RNA, 18 nt, Human
caaggccuuccccuggca

SEQ ID NO: 2969759 - RNA, 21 nt, Human
caaggccuuccccuggcacug

SEQ ID NO: 2969760 - RNA, 18 nt, Human
caaggcaaggcugucaau

SEQ ID NO: 2969761 - RNA, 17 nt, Human
caaggcaaggcugucaa

SEQ ID NO: 2969762 - RNA, 16 nt, Human
caaggcaaggcuguca

SEQ ID NO: 2969763 - RNA, 19 nt, Human
caaggccaaaggaagcaca

SEQ ID NO: 2969764 - RNA, 20 nt, Human
caaggccaaaggaagcacau

SEQ ID NO: 2969765 - RNA, 21 nt, Human
caaggccaaaggaagcacaug

SEQ ID NO: 2969766 - RNA, 13 nt, Human
cacagaagaugaa

SEQ ID NO: 2969767 - RNA, 14 nt, Human
cacagacccugccc

SEQ ID NO: 2969768 - RNA, 16 nt, Human
cacagacccugcccug

SEQ ID NO: 2969769 - RNA, 17 nt, Human
cacagacccugcccugu

SEQ ID NO: 2969770 - RNA, 18 nt, Human
cacagacccugcccugug

SEQ ID NO: 2969771 - RNA, 14 nt, Human
cacagcucuguccu

SEQ ID NO: 2969772 - RNA, 11 nt, Human
cacagcucugu

SEQ ID NO: 2969773 - RNA, 18 nt, Human
cacagcucuguccuggga

SEQ ID NO: 2969774 - RNA, 16 nt, Human
cacagcucuguccugg

SEQ ID NO: 2969775 - RNA, 15 nt, Human
cacagcucuguccug

SEQ ID NO: 2969776 - RNA, 15 nt, Human
cacagcucuucucca

SEQ ID NO: 2969777 - RNA, 14 nt, Human
cacagcucuucucc

SEQ ID NO: 2969778 - RNA, 17 nt, Human
cacagcucuucuccagg

SEQ ID NO: 2969779 - RNA, 20 nt, Human
cacacauuuuuuaaaugcac

SEQ ID NO: 2969780 - RNA, 19 nt, Human
cacacauuuuuuaaaugca

SEQ ID NO: 2969781 - RNA, 16 nt, Human
cacacauuuuuuaaau

SEQ ID NO: 2969782 - RNA, 12 nt, Human
cacacauuuuuu

SEQ ID NO: 2969783 - RNA, 11 nt, Human
cacacauuuuu

SEQ ID NO: 2969784 - RNA, 10 nt, Human
cacacauuuu

SEQ ID NO: 2969785 - RNA, 19 nt, Human
cacacuuuggcccagggug

SEQ ID NO: 2969786 - RNA, 18 nt, Human
cacacuuuggcccagggu

SEQ ID NO: 2969787 - RNA, 15 nt, Human
cacacuuuggcccag

SEQ ID NO: 2969788 - RNA, 18 nt, Human
cacccaggaacuccugac

SEQ ID NO: 2969789 - RNA, 16 nt, Human
cacccaggagccccga

SEQ ID NO: 2969790 - RNA, 18 nt, Human
cacccaccucagccuccc

SEQ ID NO: 2969791 - RNA, 17 nt, Human
cacccaccucagccucc

SEQ ID NO: 2969792 - RNA, 13 nt, Human
caccagccccagu

SEQ ID NO: 2969793 - RNA, 16 nt, Human
caccagccccagugcc

SEQ ID NO: 2969794 - RNA, 15 nt, Human
cacaucuguuuugua

SEQ ID NO: 2969795 - RNA, 21 nt, Human
cacauuuuauuuuauuaugca

SEQ ID NO: 2969796 - RNA, 20 nt, Human
cacauuuuauuuuauuaugc

SEQ ID NO: 2969797 - RNA, 19 nt, Human
cacauuuuauuuuauuaug

SEQ ID NO: 2969798 - RNA, 17 nt, Human
cacauuuuauuuuauua

SEQ ID NO: 2969799 - RNA, 16 nt, Human
caccaacgucugugcc

SEQ ID NO: 2969800 - RNA, 14 nt, Human
caccaacgucugug

SEQ ID NO: 2969801 - RNA, 23 nt, Human
cacaucuaguaguuguucugaaa

SEQ ID NO: 2969802 - RNA, 22 nt, Human
cacaucuaguaguuguucugaa

SEQ ID NO: 2969803 - RNA, 15 nt, Human
cacuuaaaaaugguu

SEQ ID NO: 2969804 - RNA, 19 nt, Human
cacuguugcccaggcuggc

SEQ ID NO: 2969805 - RNA, 18 nt, Human
cacuguugcccaggcugg

SEQ ID NO: 2969806 - RNA, 23 nt, Human
cacuguugcccaggcuggcgugc

SEQ ID NO: 2969807 - RNA, 18 nt, Human
cacuggguguaaacacau

SEQ ID NO: 2969808 - RNA, 14 nt, Human
cacugcagccucaa

SEQ ID NO: 2969809 - RNA, 19 nt, Human
cacugcagccucaaccucc

SEQ ID NO: 2969810 - RNA, 23 nt, Human
cacugcagccucaaccuccuggg

SEQ ID NO: 2969811 - RNA, 22 nt, Human
cacugcagccucaaccuccugg

SEQ ID NO: 2969812 - RNA, 21 nt, Human
cacugcagccucaaccuccug

SEQ ID NO: 2969813 - RNA, 20 nt, Human
cacugcagccucaaccuccu

SEQ ID NO: 2969814 - RNA, 17 nt, Human
cacugccaugccagcuu

SEQ ID NO: 2969815 - RNA, 18 nt, Human
cacuuguguuaugaagca

SEQ ID NO: 2969816 - RNA, 13 nt, Human
cacuuuaaaacac

SEQ ID NO: 2969817 - RNA, 16 nt, Human
cacuuucuagccagag

SEQ ID NO: 2969818 - RNA, 17 nt, Human
cacuuucuagccagagg

SEQ ID NO: 2969819 - RNA, 13 nt, Human
cacuuucuagcca

SEQ ID NO: 2969820 - RNA, 17 nt, Human
cagaacagugauuacca

SEQ ID NO: 2969821 - RNA, 12 nt, Human
cagaacagugau

SEQ ID NO: 2969822 - RNA, 11 nt, Human
cagaacaguga

SEQ ID NO: 2969823 - RNA, 14 nt, Human
cagaaguuucugcc

SEQ ID NO: 2969824 - RNA, 16 nt, Human
cagaaguuucugccgc

SEQ ID NO: 2969825 - RNA, 16 nt, Human
cagaaauguacagcaa

SEQ ID NO: 2969826 - RNA, 12 nt, Human
cacuccagccug

SEQ ID NO: 2969827 - RNA, 13 nt, Human
cacuccagccuga

SEQ ID NO: 2969828 - RNA, 21 nt, Human
cacuacauucuguuaaucauu

SEQ ID NO: 2969829 - RNA, 17 nt, Human
cacuacauucuguuaau

SEQ ID NO: 2969830 - RNA, 16 nt, Human
cacuacauucuguuaa

SEQ ID NO: 2969831 - RNA, 23 nt, Human
cacuccagccugagcgacaguga

SEQ ID NO: 2969832 - RNA, 14 nt, Human
cacuccagccuggg

SEQ ID NO: 2969833 - RNA, 13 nt, Human
cacuccagccugg

SEQ ID NO: 2969834 - RNA, 20 nt, Human
cacucugucgcccagucugg

SEQ ID NO: 2969835 - RNA, 13 nt, Human
cacggccaggcca

SEQ ID NO: 2969836 - RNA, 12 nt, Human
cacggccaggcc

SEQ ID NO: 2969837 - RNA, 17 nt, Human
cacggccaggccagagg

SEQ ID NO: 2969838 - RNA, 14 nt, Human
cacggcucacugca

SEQ ID NO: 2969839 - RNA, 22 nt, Human
cacucuuauugcccacgcugga

SEQ ID NO: 2969840 - RNA, 21 nt, Human
cacucuuauugcccacgcugg

SEQ ID NO: 2969841 - RNA, 20 nt, Human
cacucuuauugcccacgcug

SEQ ID NO: 2969842 - RNA, 16 nt, Human
caccuuggcugcaggg

SEQ ID NO: 2969843 - RNA, 15 nt, Human
caccuuggcugcagg

SEQ ID NO: 2969844 - RNA, 18 nt, Human
caccuuggcugcagggag

SEQ ID NO: 2969845 - RNA, 14 nt, Human
caccuuucccaucu

SEQ ID NO: 2969846 - RNA, 19 nt, Human
caccuuuuucauacaaggc

SEQ ID NO: 2969847 - RNA, 21 nt, Human
caccuuuuucauacaaggccc

SEQ ID NO: 2969848 - RNA, 13 nt, Human
auuuuaugucuuu

SEQ ID NO: 2969849 - RNA, 21 nt, Human
auuuuauaucaauuuaaaaaa

SEQ ID NO: 2969850 - RNA, 19 nt, Human
auuuuagggguagcauuug

SEQ ID NO: 2969851 - RNA, 15 nt, Human
auuuugaaauuguuu

SEQ ID NO: 2969852 - RNA, 13 nt, Human
auuuugaaauugu

SEQ ID NO: 2969853 - RNA, 19 nt, Human
auuuuuaagugcugcauuu

SEQ ID NO: 2969854 - RNA, 18 nt, Human
auuuuuaagugcugcauu

SEQ ID NO: 2969855 - RNA, 16 nt, Human
auuuuuaagugcugca

SEQ ID NO: 2969856 - RNA, 14 nt, Human
auuuuuagacagag

SEQ ID NO: 2969857 - RNA, 17 nt, Human
caaacagucucccuucc

SEQ ID NO: 2969858 - RNA, 16 nt, Human
caaacagucucaggaa

SEQ ID NO: 2969859 - RNA, 17 nt, Human
caaacagucucaggaaa

SEQ ID NO: 2969860 - RNA, 21 nt, Human
caaaaggauaaugaauacuuu

SEQ ID NO: 2969861 - RNA, 15 nt, Human
caaacagucucagga

SEQ ID NO: 2969862 - RNA, 24 nt, Human
caaacccaguguuuuaggagcaug

SEQ ID NO: 2969863 - RNA, 15 nt, Human
auuuuuauauuugaa

SEQ ID NO: 2969864 - RNA, 18 nt, Human
auuuuuuuuuccuucagu

SEQ ID NO: 2969865 - RNA, 16 nt, Human
auuuuuuugagacaga

SEQ ID NO: 2969866 - RNA, 20 nt, Human
auuuuuuuuuccuucagugc

SEQ ID NO: 2969867 - RNA, 22 nt, Human
auuuuuuuuuccuucagugccu

SEQ ID NO: 2969868 - RNA, 19 nt, Human
caaaagcugggcagguugg

SEQ ID NO: 2969869 - RNA, 18 nt, Human
caagaccacguuucuaaa

SEQ ID NO: 2969870 - RNA, 17 nt, Human
caagaccacguuucuaa

SEQ ID NO: 2969871 - RNA, 19 nt, Human
caagacccaaaaggcagaa

SEQ ID NO: 2969872 - RNA, 14 nt, Human
caacucuccuccag

SEQ ID NO: 2969873 - RNA, 22 nt, Human
caagaauugaagcaggacuaaa

SEQ ID NO: 2969874 - RNA, 17 nt, Human
caacucauauuuucaug

SEQ ID NO: 2969875 - RNA, 17 nt, Human
caacucaccccagcccc

SEQ ID NO: 2969876 - RNA, 18 nt, Human
caacucaccccagcccca

SEQ ID NO: 2969877 - RNA, 16 nt, Human
caaagauauuuugcuu

SEQ ID NO: 2969878 - RNA, 14 nt, Human
caaagauauuuugc

SEQ ID NO: 2969879 - RNA, 18 nt, Human
caaagcagugcaugcugu

SEQ ID NO: 2969880 - RNA, 21 nt, Human
caaagcagugcaugcuguccc

SEQ ID NO: 2969881 - RNA, 22 nt, Human
caaagcagugcaugcugucccu

SEQ ID NO: 2969882 - RNA, 21 nt, Human
caaaguaucccuacuguaauu

SEQ ID NO: 2969883 - RNA, 19 nt, Human
caaaguaucccuacuguaa

SEQ ID NO: 2969884 - RNA, 17 nt, Human
caaaguagaucaugcau

SEQ ID NO: 2969885 - RNA, 22 nt, Human
caaaguagaagucuuagaugua

SEQ ID NO: 2969886 - RNA, 20 nt, Human
caaaguagaucaugcauaga

SEQ ID NO: 2969887 - RNA, 21 nt, Human
caaaucuuaacuugaaggagu

SEQ ID NO: 2969888 - RNA, 21 nt, Human
caaaucugcuuuuuaaagaau

SEQ ID NO: 2969889 - RNA, 23 nt, Human
caaaugcuguaacuuucugaaau

SEQ ID NO: 2969890 - RNA, 13 nt, Human
auuaaaugacucu

SEQ ID NO: 2969891 - RNA, 12 nt, Human
auuaaaugacuc

SEQ ID NO: 2969892 - RNA, 17 nt, Human
auuaaaugcccagcccc

SEQ ID NO: 2969893 - RNA, 19 nt, Human
auuaaaugcccagccccuu

SEQ ID NO: 2969894 - RNA, 20 nt, Human
auuaugaauuacauuuguau

SEQ ID NO: 2969895 - RNA, 19 nt, Human
auuaugaauuacauuugua

SEQ ID NO: 2969896 - RNA, 22 nt, Human
auuaugaauuacauuuguauaa

SEQ ID NO: 2969897 - RNA, 18 nt, Human
auucaacagguuuuccug

SEQ ID NO: 2969898 - RNA, 16 nt, Human
auucaaaugucuauaa

SEQ ID NO: 2969899 - RNA, 18 nt, Human
auucaaauguauuacagu

SEQ ID NO: 2969900 - RNA, 14 nt, Human
auuauggaaacaga

SEQ ID NO: 2969901 - RNA, 16 nt, Human
auucuugcaaaguauc

SEQ ID NO: 2969902 - RNA, 15 nt, Human
auucuugcaaaguau

SEQ ID NO: 2969903 - RNA, 14 nt, Human
auucuugcaaagua

SEQ ID NO: 2969904 - RNA, 14 nt, Human
auucuucugcuuca

SEQ ID NO: 2969905 - RNA, 22 nt, Human
auucuucuguacgucugacagg

SEQ ID NO: 2969906 - RNA, 20 nt, Human
auucuucugcuucagccucc

SEQ ID NO: 2969907 - RNA, 19 nt, Human
auucuucugcuucagccuc

SEQ ID NO: 2969908 - RNA, 18 nt, Human
auucucuaguuugauuaa

SEQ ID NO: 2969909 - RNA, 17 nt, Human
auucucuaguuugauua

SEQ ID NO: 2969910 - RNA, 22 nt, Human
auucuccuuguguuacuaaguu

SEQ ID NO: 2969911 - RNA, 21 nt, Human
auucuccuuguguuacuaagu

SEQ ID NO: 2969912 - RNA, 19 nt, Human
auucuccuuguguuacuaa

SEQ ID NO: 2969913 - RNA, 18 nt, Human
auucuccuuguguuacua

SEQ ID NO: 2969914 - RNA, 17 nt, Human
auucuccuuguguuacu

SEQ ID NO: 2969915 - RNA, 15 nt, Human
auuguuuaaaaucau

SEQ ID NO: 2969916 - RNA, 16 nt, Human
auuguugucugcaacu

SEQ ID NO: 2969917 - RNA, 18 nt, Human
auugcuugagcucaggag

SEQ ID NO: 2969918 - RNA, 16 nt, Human
auuuaauaaaugugcc

SEQ ID NO: 2969919 - RNA, 21 nt, Human
auuuaaugaaagacuguacaa

SEQ ID NO: 2969920 - RNA, 20 nt, Human
auuuaaugaaagacuguaca

SEQ ID NO: 2969921 - RNA, 15 nt, Human
auuuaaugaaagacu

SEQ ID NO: 2969922 - RNA, 16 nt, Human
auuuaaugaaagacug

SEQ ID NO: 2969923 - RNA, 14 nt, Human
auuucuaugaaaua

SEQ ID NO: 2969924 - RNA, 20 nt, Human
auuucauaccuaucaucuua

SEQ ID NO: 2969925 - RNA, 13 nt, Human
cauuaguuuugaa

SEQ ID NO: 2969926 - RNA, 13 nt, Human
cauuaucucaaaa

SEQ ID NO: 2969927 - RNA, 23 nt, Human
cauuaucuagauacuguaucaug

SEQ ID NO: 2969928 - RNA, 12 nt, Human
cauuaucucaaa

SEQ ID NO: 2969929 - RNA, 16 nt, Human
cauuagguugugaaug

SEQ ID NO: 2969930 - RNA, 15 nt, Human
cauuagguugugaau

SEQ ID NO: 2969931 - RNA, 14 nt, Human
cauuagguugugaa

SEQ ID NO: 2969932 - RNA, 22 nt, Human
cauuaggugugacugaauuucu

SEQ ID NO: 2969933 - RNA, 19 nt, Human
cauguccaagaagcccagg

SEQ ID NO: 2969934 - RNA, 20 nt, Human
cauguccaagaagcccagga

SEQ ID NO: 2969935 - RNA, 18 nt, Human
cauguccaagaagcccag

SEQ ID NO: 2969936 - RNA, 13 nt, Human
cauguuggccagg

SEQ ID NO: 2969937 - RNA, 12 nt, Human
cauguuggccag

SEQ ID NO: 2969938 - RNA, 12 nt, Human
cauuccuguucc

SEQ ID NO: 2969939 - RNA, 14 nt, Human
caugucagacacag

SEQ ID NO: 2969940 - RNA, 13 nt, Human
caugucagacaca

SEQ ID NO: 2969941 - RNA, 22 nt, Human
caugauuaaccacuucagcuga

SEQ ID NO: 2969942 - RNA, 23 nt, Human
caugauuaaccacuucagcugac

SEQ ID NO: 2969943 - RNA, 24 nt, Human
caugauuaaccacuucagcugacu

SEQ ID NO: 2969944 - RNA, 12 nt, Human
caugcugcccug

SEQ ID NO: 2969945 - RNA, 13 nt, Human
caugcugcccugu

SEQ ID NO: 2969946 - RNA, 13 nt, Human
caugcuccuggcc

SEQ ID NO: 2969947 - RNA, 16 nt, Human
caugcacgugugugca

SEQ ID NO: 2969948 - RNA, 23 nt, Human
caugaaguaauaugcacacauuu

SEQ ID NO: 2969949 - RNA, 22 nt, Human
caugaaguaauaugcacacauu

SEQ ID NO: 2969950 - RNA, 19 nt, Human
caugaaguaauaugcacac

SEQ ID NO: 2969951 - RNA, 15 nt, Human
caugaaguaauaugc

SEQ ID NO: 2969952 - RNA, 21 nt, Human
caugacacgaauauugcugau

SEQ ID NO: 2969953 - RNA, 23 nt, Human
caugacacgaauauugcugaugg

SEQ ID NO: 2969954 - RNA, 14 nt, Human
caugcugcccugug

SEQ ID NO: 2969955 - RNA, 15 nt, Human
caugcugcccuguga

SEQ ID NO: 2969956 - RNA, 18 nt, Human
cauagcugugauuuuugg

SEQ ID NO: 2969957 - RNA, 15 nt, Human
cauagcugugauuuu

SEQ ID NO: 2969958 - RNA, 13 nt, Human
cauagcugugauu

SEQ ID NO: 2969959 - RNA, 22 nt, Human
cauagcagagaaugaaagggcc

SEQ ID NO: 2969960 - RNA, 19 nt, Human
cauagcagagaaugaaagg

SEQ ID NO: 2969961 - RNA, 22 nt, Human
cauaugccugggcagaaggaag

SEQ ID NO: 2969962 - RNA, 13 nt, Human
cauaugccugggc

SEQ ID NO: 2969963 - RNA, 15 nt, Human
cauaugccugggcag

SEQ ID NO: 2969964 - RNA, 20 nt, Human
cauaugccugggcagaagga

SEQ ID NO: 2969965 - RNA, 20 nt, Human
cauauucaggaagcucaggg

SEQ ID NO: 2969966 - RNA, 14 nt, Human
cauauucaggaagc

SEQ ID NO: 2969967 - RNA, 15 nt, Human
cauauucaggaagcu

SEQ ID NO: 2969968 - RNA, 15 nt, Human
caucaggccaggccc

SEQ ID NO: 2969969 - RNA, 14 nt, Human
caucaggccaggcc

SEQ ID NO: 2969970 - RNA, 16 nt, Human
caucaggccaggcccu

SEQ ID NO: 2969971 - RNA, 19 nt, Human
caucaggccaggcccucug

SEQ ID NO: 2969972 - RNA, 17 nt, Human
caucccagccccaauga

SEQ ID NO: 2969973 - RNA, 17 nt, Human
caucugcgggggcagug

SEQ ID NO: 2969974 - RNA, 20 nt, Human
caucugcgggggcagugcuc

SEQ ID NO: 2969975 - RNA, 19 nt, Human
caucugcgggggcagugcu

SEQ ID NO: 2969976 - RNA, 21 nt, Human
caucugcgggggcagugcuca

SEQ ID NO: 2969977 - RNA, 19 nt, Human
caucccauaugccugggca

SEQ ID NO: 2969978 - RNA, 14 nt, Human
cauccccuguagag

SEQ ID NO: 2969979 - RNA, 16 nt, Human
ccacagaagcuccagg

SEQ ID NO: 2969980 - RNA, 18 nt, Human
ccaccagucugacuguuu

SEQ ID NO: 2969981 - RNA, 18 nt, Human
ccacagaagcuccaggua

SEQ ID NO: 2969982 - RNA, 22 nt, Human
ccacagagaaaguacuucucca

SEQ ID NO: 2969983 - RNA, 17 nt, Human
ccaccagugccucuccc

SEQ ID NO: 2969984 - RNA, 15 nt, Human
ccaccagugccucuc

SEQ ID NO: 2969985 - RNA, 14 nt, Human
ccaccagugccucu

SEQ ID NO: 2969986 - RNA, 13 nt, Human
ccaccagugccuc

SEQ ID NO: 2969987 - RNA, 12 nt, Human
ccaccagugccu

SEQ ID NO: 2969988 - RNA, 18 nt, Human
ccaccaucaugucuggcu

SEQ ID NO: 2969989 - RNA, 19 nt, Human
ccaccagugccucucccug

SEQ ID NO: 2969990 - RNA, 18 nt, Human
ccaccaucaccagacagg

SEQ ID NO: 2969991 - RNA, 19 nt, Human
ccaccaucaugucuggcua

SEQ ID NO: 2969992 - RNA, 17 nt, Human
ccaccgccuugcccagc

SEQ ID NO: 2969993 - RNA, 16 nt, Human
ccaccgccuugcccag

SEQ ID NO: 2969994 - RNA, 19 nt, Human
ccaccgccuugcccagccu

SEQ ID NO: 2969995 - RNA, 16 nt, Human
ccaccuuggcugcagg

SEQ ID NO: 2969996 - RNA, 15 nt, Human
ccaccuuggcugcag

SEQ ID NO: 2969997 - RNA, 14 nt, Human
ccaccuuggcugca

SEQ ID NO: 2969998 - RNA, 12 nt, Human
ccaccuuggcug

SEQ ID NO: 2969999 - RNA, 19 nt, Human
ccaccuuggcugcagggag

SEQ ID NO: 2970000 - RNA, 18 nt, Human
ccaccuuggcugcaggga

SEQ ID NO: 2970001 - RNA, 18 nt, Human
ccacgcuggaccuugaac

SEQ ID NO: 2970002 - RNA, 15 nt, Human
cauuuggauuggaug

SEQ ID NO: 2970003 - RNA, 13 nt, Human
cauuugucccaag

SEQ ID NO: 2970004 - RNA, 12 nt, Human
cauuugucccaa

SEQ ID NO: 2970005 - RNA, 17 nt, Human
cauuugucacacacuuu

SEQ ID NO: 2970006 - RNA, 19 nt, Human
cauuugucccaagugccaa

SEQ ID NO: 2970007 - RNA, 18 nt, Human
cauuugucccaagugcca

SEQ ID NO: 2970008 - RNA, 16 nt, Human
cauuugucccaagugc

SEQ ID NO: 2970009 - RNA, 14 nt, Human
cauuugucccaagu

SEQ ID NO: 2970010 - RNA, 15 nt, Human
cauuuauucugcuca

SEQ ID NO: 2970011 - RNA, 14 nt, Human
cauuuauucugcuc

SEQ ID NO: 2970012 - RNA, 16 nt, Human
cauuuuuuaaaugcac

SEQ ID NO: 2970013 - RNA, 15 nt, Human
cauuuuuuaaaugca

SEQ ID NO: 2970014 - RNA, 19 nt, Human
cauuuuuuaaaugcaccug

SEQ ID NO: 2970015 - RNA, 16 nt, Human
ccaaggccaaaggaag

SEQ ID NO: 2970016 - RNA, 13 nt, Human
ccaagaagcccag

SEQ ID NO: 2970017 - RNA, 13 nt, Human
ccaacgucugugc

SEQ ID NO: 2970018 - RNA, 15 nt, Human
ccaacgucugugcca

SEQ ID NO: 2970019 - RNA, 22 nt, Human
ccaaauggaaaugggcagagca

SEQ ID NO: 2970020 - RNA, 15 nt, Human
ccaaggccaaaggaa

SEQ ID NO: 2970021 - RNA, 14 nt, Human
ccaagaagcccagg

SEQ ID NO: 2970022 - RNA, 19 nt, Human
ccaagcuggucccacucag

SEQ ID NO: 2970023 - RNA, 12 nt, Human
ccaagcuggucc

SEQ ID NO: 2970024 - RNA, 20 nt, Human
cagaguaggggucugucuuu

SEQ ID NO: 2970025 - RNA, 21 nt, Human
cagaguaggcuauuccugaga

SEQ ID NO: 2970026 - RNA, 23 nt, Human
cagaguaggggucugucuuuuaa

SEQ ID NO: 2970027 - RNA, 22 nt, Human
cagaguaggggucugucuuuua

SEQ ID NO: 2970028 - RNA, 22 nt, Human
cagaguaggcuauuccugagag

SEQ ID NO: 2970029 - RNA, 20 nt, Human
cagagucagaaguuucugcc

SEQ ID NO: 2970030 - RNA, 18 nt, Human
cagaggggguggccuccc

SEQ ID NO: 2970031 - RNA, 17 nt, Human
cagaggggguggccucc

SEQ ID NO: 2970032 - RNA, 19 nt, Human
cagaggggguggccuccca

SEQ ID NO: 2970033 - RNA, 20 nt, Human
cagaggggguggccucccaa

SEQ ID NO: 2970034 - RNA, 19 nt, Human
cagauaugauucaaauguc

SEQ ID NO: 2970035 - RNA, 17 nt, Human
cagauaugauucaaaug

SEQ ID NO: 2970036 - RNA, 16 nt, Human
cagauaugauucaaau

SEQ ID NO: 2970037 - RNA, 15 nt, Human
cagauaugauucaaa

SEQ ID NO: 2970038 - RNA, 20 nt, Human
cagaaguuugagaucagccu

SEQ ID NO: 2970039 - RNA, 23 nt, Human
cagaaguuucugccgcagcccug

SEQ ID NO: 2970040 - RNA, 22 nt, Human
cagaaguuugagaucagccugg

SEQ ID NO: 2970041 - RNA, 23 nt, Human
cagaaguuugagaucagccuggg

SEQ ID NO: 2970042 - RNA, 16 nt, Human
cagagcugccaccugc

SEQ ID NO: 2970043 - RNA, 18 nt, Human
cagagcugccaccugccu

SEQ ID NO: 2970044 - RNA, 15 nt, Human
cagagcugcccucuc

SEQ ID NO: 2970045 - RNA, 13 nt, Human
cagagcugcccuc

SEQ ID NO: 2970046 - RNA, 22 nt, Human
cagagggccugcaagggaguga

SEQ ID NO: 2970047 - RNA, 20 nt, Human
cagcaguugaaaagacucca

SEQ ID NO: 2970048 - RNA, 21 nt, Human
cagcaguugaaaagacuccaa

SEQ ID NO: 2970049 - RNA, 14 nt, Human
cagcagugagacug

SEQ ID NO: 2970050 - RNA, 17 nt, Human
cagcaguugaaaagacu

SEQ ID NO: 2970051 - RNA, 19 nt, Human
cagcauauucaggaagcuc

SEQ ID NO: 2970052 - RNA, 22 nt, Human
cagcauauucaggaagcucagg

SEQ ID NO: 2970053 - RNA, 23 nt, Human
cagcauauucaggaagcucaggg

SEQ ID NO: 2970054 - RNA, 21 nt, Human
cagccagcaguucagagcugc

SEQ ID NO: 2970055 - RNA, 15 nt, Human
cagccagcaguucag

SEQ ID NO: 2970056 - RNA, 14 nt, Human
cagccagcaguuca

SEQ ID NO: 2970057 - RNA, 12 nt, Human
cagccaggccac

SEQ ID NO: 2970058 - RNA, 13 nt, Human
cagccaggccaca

SEQ ID NO: 2970059 - RNA, 22 nt, Human
cagccaggccacaagacccuug

SEQ ID NO: 2970060 - RNA, 22 nt, Human
cagcacagccucuuagaugcag

SEQ ID NO: 2970061 - RNA, 22 nt, Human
caggaaaucaaauaugcaaagc

SEQ ID NO: 2970062 - RNA, 23 nt, Human
caggaaaucaaauaugcaaagca

SEQ ID NO: 2970063 - RNA, 14 nt, Human
caggaaaggcucca

SEQ ID NO: 2970064 - RNA, 15 nt, Human
caggaaaggcuccag

SEQ ID NO: 2970065 - RNA, 20 nt, Human
caggaaagagaacuuccaga

SEQ ID NO: 2970066 - RNA, 18 nt, Human
cagcuucauuuccugugu

SEQ ID NO: 2970067 - RNA, 15 nt, Human
cagcuucauuuccug

SEQ ID NO: 2970068 - RNA, 18 nt, Human
cagcugugcucuggacag

SEQ ID NO: 2970069 - RNA, 17 nt, Human
cagcuccccucggagaa

SEQ ID NO: 2970070 - RNA, 18 nt, Human
cagcuccccucggagaag

SEQ ID NO: 2970071 - RNA, 16 nt, Human
cagcuccccucggaga

SEQ ID NO: 2970072 - RNA, 22 nt, Human
cagcugccuccccuccucugcu

SEQ ID NO: 2970073 - RNA, 21 nt, Human
cagcugccuccccuccucugc

SEQ ID NO: 2970074 - RNA, 24 nt, Human
cagcugccuccccuccucugcuug

SEQ ID NO: 2970075 - RNA, 23 nt, Human
cagcugccuccccuccucugcuu

SEQ ID NO: 2970076 - RNA, 20 nt, Human
cagcugccuccccuccucug

SEQ ID NO: 2970077 - RNA, 16 nt, Human
cagcuccaagaauuuc

SEQ ID NO: 2970078 - RNA, 15 nt, Human
cagcuccagcucacc

SEQ ID NO: 2970079 - RNA, 14 nt, Human
cagcuccagcucac

SEQ ID NO: 2970080 - RNA, 19 nt, Human
cagcuccaagaauuucuag

SEQ ID NO: 2970081 - RNA, 13 nt, Human
cagcuccagcuca

SEQ ID NO: 2970082 - RNA, 20 nt, Human
cagcuccagcucaccagccc

SEQ ID NO: 2970083 - RNA, 18 nt, Human
cagcuccagcucaccagc

SEQ ID NO: 2970084 - RNA, 17 nt, Human
cagcuccagcucaccag

SEQ ID NO: 2970085 - RNA, 16 nt, Human
cagcuccagcucacca

SEQ ID NO: 2970086 - RNA, 22 nt, Human
cagcuccagcucaccagcccca

SEQ ID NO: 2970087 - RNA, 20 nt, Human
cagcccuucuuuccacagaa

SEQ ID NO: 2970088 - RNA, 19 nt, Human
cagcccuucuuuccacaga

SEQ ID NO: 2970089 - RNA, 15 nt, Human
cagcccuucuuucca

SEQ ID NO: 2970090 - RNA, 20 nt, Human
cagccgagauagccaaggcc

SEQ ID NO: 2970091 - RNA, 21 nt, Human
cagccgagauagccaaggcca

SEQ ID NO: 2970092 - RNA, 12 nt, Human
cagccccuggau

SEQ ID NO: 2970093 - RNA, 13 nt, Human
cagccccuggaug

SEQ ID NO: 2970094 - RNA, 14 nt, Human
cagccccuggaugc

SEQ ID NO: 2970095 - RNA, 17 nt, Human
cagccccuggaugcagc

SEQ ID NO: 2970096 - RNA, 18 nt, Human
cagccccuggaugcagcc

SEQ ID NO: 2970097 - RNA, 19 nt, Human
cagccccuggaugcagccu

SEQ ID NO: 2970098 - RNA, 21 nt, Human
cagccccuggaugcagccuca

SEQ ID NO: 2970099 - RNA, 21 nt, Human
cagcccuuagcagggaaacag

SEQ ID NO: 2970100 - RNA, 16 nt, Human
cagcccuuagcaggga

SEQ ID NO: 2970101 - RNA, 15 nt, Human
cagcccuuagcaggg

SEQ ID NO: 2970102 - RNA, 19 nt, Human
cagccugagcgacagugag

SEQ ID NO: 2970103 - RNA, 18 nt, Human
cagccugagcgacaguga

SEQ ID NO: 2970104 - RNA, 17 nt, Human
cagcggggacagcuccu

SEQ ID NO: 2970105 - RNA, 16 nt, Human
cagcggggacagcucc

SEQ ID NO: 2970106 - RNA, 14 nt, Human
cagcggggacagcu

SEQ ID NO: 2970107 - RNA, 15 nt, Human
cagcggggacagcuc

SEQ ID NO: 2970108 - RNA, 18 nt, Human
cagggaggacgcucucug

SEQ ID NO: 2970109 - RNA, 17 nt, Human
cagggaggacgcucucu

SEQ ID NO: 2970110 - RNA, 19 nt, Human
caggcugggcuucaguggc

SEQ ID NO: 2970111 - RNA, 17 nt, Human
caggcugggcuucagug

SEQ ID NO: 2970112 - RNA, 15 nt, Human
caggcugggcuucag

SEQ ID NO: 2970113 - RNA, 16 nt, Human
caggcugggcuucagu

SEQ ID NO: 2970114 - RNA, 18 nt, Human
cagggaggugaccccagg

SEQ ID NO: 2970115 - RNA, 22 nt, Human
cagggaguccgaaagggacuug

SEQ ID NO: 2970116 - RNA, 21 nt, Human
caggccagagggagugacaga

SEQ ID NO: 2970117 - RNA, 19 nt, Human
caggccagagggagugaca

SEQ ID NO: 2970118 - RNA, 17 nt, Human
caggcagcagacacaug

SEQ ID NO: 2970119 - RNA, 15 nt, Human
caggcagcagacaca

SEQ ID NO: 2970120 - RNA, 16 nt, Human
caggcagcagacacau

SEQ ID NO: 2970121 - RNA, 16 nt, Human
caggccagagggagug

SEQ ID NO: 2970122 - RNA, 23 nt, Human
caggccagagggagugacagagg

SEQ ID NO: 2970123 - RNA, 14 nt, Human
caggaggccagccu

SEQ ID NO: 2970124 - RNA, 15 nt, Human
caggaggccagccuu

SEQ ID NO: 2970125 - RNA, 16 nt, Human
caggaggccagccuug

SEQ ID NO: 2970126 - RNA, 23 nt, Human
caggcacccaccaucaugucugg

SEQ ID NO: 2970127 - RNA, 22 nt, Human
caggcacccaccaucaugucug

SEQ ID NO: 2970128 - RNA, 18 nt, Human
caggcacccaccaucaug

SEQ ID NO: 2970129 - RNA, 17 nt, Human
caggaggccagccuuga

SEQ ID NO: 2970130 - RNA, 16 nt, Human
cagguuuaagcuguua

SEQ ID NO: 2970131 - RNA, 18 nt, Human
cagguuuaagcuguuacu

SEQ ID NO: 2970132 - RNA, 22 nt, Human
cagucaccccggccaccugcgg

SEQ ID NO: 2970133 - RNA, 20 nt, Human
cagucaccccggccaccugc

SEQ ID NO: 2970134 - RNA, 19 nt, Human
cagucaccccggccaccug

SEQ ID NO: 2970135 - RNA, 14 nt, Human
cagguugguggggg

SEQ ID NO: 2970136 - RNA, 18 nt, Human
caggugcuaggaacacuc

SEQ ID NO: 2970137 - RNA, 20 nt, Human
caggugcuaggaacacuccu

SEQ ID NO: 2970138 - RNA, 14 nt, Human
caggugcgaaagga

SEQ ID NO: 2970139 - RNA, 17 nt, Human
caggugauccacccacc

SEQ ID NO: 2970140 - RNA, 16 nt, Human
caggugauccacccac

SEQ ID NO: 2970141 - RNA, 12 nt, Human
caggguuggccc

SEQ ID NO: 2970142 - RNA, 22 nt, Human
caggugcacaagcuccaagcuc

SEQ ID NO: 2970143 - RNA, 18 nt, Human
cagggucucacucugucg

SEQ ID NO: 2970144 - RNA, 17 nt, Human
cagggucucacucuguc

SEQ ID NO: 2970145 - RNA, 21 nt, Human
cagggucucacucugucgccc

SEQ ID NO: 2970146 - RNA, 22 nt, Human
cagugcaugcugucccuuacgu

SEQ ID NO: 2970147 - RNA, 23 nt, Human
cagugcaugcugucccuuacgug

SEQ ID NO: 2970148 - RNA, 19 nt, Human
cagugcaugcugucccuua

SEQ ID NO: 2970149 - RNA, 20 nt, Human
cagucugauucccaagcucu

SEQ ID NO: 2970150 - RNA, 19 nt, Human
cagucugauucccaagcuc

SEQ ID NO: 2970151 - RNA, 22 nt, Human
cagugcacuaauguguaagaca

SEQ ID NO: 2970152 - RNA, 12 nt, Human
cagugcccacag

SEQ ID NO: 2970153 - RNA, 11 nt, Human
cagugggagcu

SEQ ID NO: 2970154 - RNA, 15 nt, Human
cagugccaaaaacaa

SEQ ID NO: 2970155 - RNA, 14 nt, Human
cagugcaguauaga

SEQ ID NO: 2970156 - RNA, 15 nt, Human
cagucucaggaaauc

SEQ ID NO: 2970157 - RNA, 16 nt, Human
gcccucaauugugaaa

SEQ ID NO: 2970158 - RNA, 23 nt, Human
gcccgggcucugccucccaucac

SEQ ID NO: 2970159 - RNA, 16 nt, Human
gccccugccacccugg

SEQ ID NO: 2970160 - RNA, 17 nt, Human
gccccugccacccuggg

SEQ ID NO: 2970161 - RNA, 12 nt, Human
gcccccacuggu

SEQ ID NO: 2970162 - RNA, 15 nt, Human
gccuaggugacagag

SEQ ID NO: 2970163 - RNA, 14 nt, Human
gccuaggugacaga

SEQ ID NO: 2970164 - RNA, 13 nt, Human
gccuaggugacag

SEQ ID NO: 2970165 - RNA, 20 nt, Human
gccuagcauacguacacauu

SEQ ID NO: 2970166 - RNA, 22 nt, Human
gccuagcauacguacacauuuu

SEQ ID NO: 2970167 - RNA, 21 nt, Human
gccuagcauacguacacauuu

SEQ ID NO: 2970168 - RNA, 23 nt, Human
gccuagcauacguacacauuuua

SEQ ID NO: 2970169 - RNA, 20 nt, Human
gccuaggugacagagugaga

SEQ ID NO: 2970170 - RNA, 20 nt, Human
gcccuuagcagggaaacagc

SEQ ID NO: 2970171 - RNA, 19 nt, Human
gcccuuagcagggaaacag

SEQ ID NO: 2970172 - RNA, 12 nt, Human
gcccugccuccu

SEQ ID NO: 2970173 - RNA, 13 nt, Human
gcccugccuccuu

SEQ ID NO: 2970174 - RNA, 22 nt, Human
gcccuuagcagggaaacagcua

SEQ ID NO: 2970175 - RNA, 20 nt, Human
gccgcagcccugcagagggc

SEQ ID NO: 2970176 - RNA, 19 nt, Human
gccgcagcccugcagaggg

SEQ ID NO: 2970177 - RNA, 14 nt, Human
gccgcccaaggccu

SEQ ID NO: 2970178 - RNA, 23 nt, Human
gccgcccaaggccuuccccuggc

SEQ ID NO: 2970179 - RNA, 17 nt, Human
gcccugcccaccuggcc

SEQ ID NO: 2970180 - RNA, 20 nt, Human
gcccugcccaccuggccucu

SEQ ID NO: 2970181 - RNA, 21 nt, Human
gcccugcccaccuggccucug

SEQ ID NO: 2970182 - RNA, 22 nt, Human
gcccugcccaccuggccucugc

SEQ ID NO: 2970183 - RNA, 11 nt, Human
gcccugccucc

SEQ ID NO: 2970184 - RNA, 18 nt, Human
gcccugcagagggcacag

SEQ ID NO: 2970185 - RNA, 16 nt, Human
gcccugcagagggcac

SEQ ID NO: 2970186 - RNA, 20 nt, Human
gccuucggccuccauccuga

SEQ ID NO: 2970187 - RNA, 21 nt, Human
gccuucggccuccauccugag

SEQ ID NO: 2970188 - RNA, 17 nt, Human
gccuugaccauucucca

SEQ ID NO: 2970189 - RNA, 19 nt, Human
gccuugaccauucuccacc

SEQ ID NO: 2970190 - RNA, 20 nt, Human
gccuugaccauucuccaccu

SEQ ID NO: 2970191 - RNA, 15 nt, Human
gcgagcccugguggc

SEQ ID NO: 2970192 - RNA, 17 nt, Human
gcgagcccugguggcag

SEQ ID NO: 2970193 - RNA, 13 nt, Human
gccuugcccagcc

SEQ ID NO: 2970194 - RNA, 17 nt, Human
gccuugcccagccugga

SEQ ID NO: 2970195 - RNA, 15 nt, Human
gccuugcccagccug

SEQ ID NO: 2970196 - RNA, 14 nt, Human
gccuugcccagccu

SEQ ID NO: 2970197 - RNA, 19 nt, Human
gccuugcccagccuggaug

SEQ ID NO: 2970198 - RNA, 18 nt, Human
gccuugcccagccuggau

SEQ ID NO: 2970199 - RNA, 22 nt, Human
gcgaucuggguucacugcaacc

SEQ ID NO: 2970200 - RNA, 15 nt, Human
gccuguugggccagg

SEQ ID NO: 2970201 - RNA, 16 nt, Human
gccuguugggccagga

SEQ ID NO: 2970202 - RNA, 18 nt, Human
gccuguugggccaggagc

SEQ ID NO: 2970203 - RNA, 20 nt, Human
gccuguugggccaggagccu

SEQ ID NO: 2970204 - RNA, 14 nt, Human
gccuguugggccag

SEQ ID NO: 2970205 - RNA, 17 nt, Human
gccugugccucugggac

SEQ ID NO: 2970206 - RNA, 16 nt, Human
gccugugccucuggga

SEQ ID NO: 2970207 - RNA, 13 nt, Human
gccuggcucaggu

SEQ ID NO: 2970208 - RNA, 18 nt, Human
gccugugccucugggacu

SEQ ID NO: 2970209 - RNA, 13 nt, Human
gccuggccugagc

SEQ ID NO: 2970210 - RNA, 14 nt, Human
gccuggccugagcu

SEQ ID NO: 2970211 - RNA, 18 nt, Human
gccuggccugagcuggga

SEQ ID NO: 2970212 - RNA, 20 nt, Human
gccuggccugagcugggaug

SEQ ID NO: 2970213 - RNA, 17 nt, Human
gccucuuaugggcuggg

SEQ ID NO: 2970214 - RNA, 18 nt, Human
gccucuuaugggcugggu

SEQ ID NO: 2970215 - RNA, 16 nt, Human
gccucuuaugggcugg

SEQ ID NO: 2970216 - RNA, 15 nt, Human
gccucuuagaugcag

SEQ ID NO: 2970217 - RNA, 22 nt, Human
gccucgaacuggcugcaaaggg

SEQ ID NO: 2970218 - RNA, 20 nt, Human
gccucgaacuggcugcaaag

SEQ ID NO: 2970219 - RNA, 21 nt, Human
gccucuuaugggcuggguucu

SEQ ID NO: 2970220 - RNA, 14 nt, Human
gccucuuggguuca

SEQ ID NO: 2970221 - RNA, 14 nt, Human
gccugcccaggccc

SEQ ID NO: 2970222 - RNA, 13 nt, Human
gccugcccaggcc

SEQ ID NO: 2970223 - RNA, 17 nt, Human
gccucccaaagugcugg

SEQ ID NO: 2970224 - RNA, 13 nt, Human
gccuccugugugu

SEQ ID NO: 2970225 - RNA, 16 nt, Human
gccucccaaagugcug

SEQ ID NO: 2970226 - RNA, 23 nt, Human
gccuccugugugugcgccuacag

SEQ ID NO: 2970227 - RNA, 19 nt, Human
gccuccugugugugcgccu

SEQ ID NO: 2970228 - RNA, 17 nt, Human
gccucgaacuggcugca

SEQ ID NO: 2970229 - RNA, 20 nt, Human
gccugcccaggccccugcca

SEQ ID NO: 2970230 - RNA, 15 nt, Human
gccugcccaggcccc

SEQ ID NO: 2970231 - RNA, 22 nt, Human
gccugcccaggccccugccacc

SEQ ID NO: 2970232 - RNA, 19 nt, Human
gcuccaccuugcagcucuc

SEQ ID NO: 2970233 - RNA, 15 nt, Human
gcuccacuuggucug

SEQ ID NO: 2970234 - RNA, 21 nt, Human
gcuccccucggagaagagcug

SEQ ID NO: 2970235 - RNA, 18 nt, Human
gcuccccucggagaagag

SEQ ID NO: 2970236 - RNA, 18 nt, Human
gcuccuggcccacugcau

SEQ ID NO: 2970237 - RNA, 19 nt, Human
gcuccuggcccacugcauc

SEQ ID NO: 2970238 - RNA, 20 nt, Human
gcuccuggcccacugcaucg

SEQ ID NO: 2970239 - RNA, 14 nt, Human
gcuccuggcccacu

SEQ ID NO: 2970240 - RNA, 15 nt, Human
gcuccuggcccacug

SEQ ID NO: 2970241 - RNA, 19 nt, Human
gcuccacuuggucugugag

SEQ ID NO: 2970242 - RNA, 18 nt, Human
gcuccacuuggucuguga

SEQ ID NO: 2970243 - RNA, 18 nt, Human
gcuccagcucaccagccc

SEQ ID NO: 2970244 - RNA, 17 nt, Human
gcuccagcucaccagcc

SEQ ID NO: 2970245 - RNA, 21 nt, Human
gcuccagcucaccagccccag

SEQ ID NO: 2970246 - RNA, 20 nt, Human
gcuccagcucaccagcccca

SEQ ID NO: 2970247 - RNA, 15 nt, Human
gcucccagccaggcc

SEQ ID NO: 2970248 - RNA, 14 nt, Human
gcucccagccaggc

SEQ ID NO: 2970249 - RNA, 17 nt, Human
gcucccagccaggcccu

SEQ ID NO: 2970250 - RNA, 16 nt, Human
gcucccagccaggccc

SEQ ID NO: 2970251 - RNA, 18 nt, Human
gcucccagccaggcccuu

SEQ ID NO: 2970252 - RNA, 16 nt, Human
gcucccaccuggcucu

SEQ ID NO: 2970253 - RNA, 14 nt, Human
gcucccaccuggcu

SEQ ID NO: 2970254 - RNA, 18 nt, Human
gcucccaccuggcucugu

SEQ ID NO: 2970255 - RNA, 11 nt, Human
gcucugcccuu

SEQ ID NO: 2970256 - RNA, 23 nt, Human
gcucugcaagaauugaagcagga

SEQ ID NO: 2970257 - RNA, 17 nt, Human
gcucugaucauccacug

SEQ ID NO: 2970258 - RNA, 23 nt, Human
gcucugaucauccacugugccau

SEQ ID NO: 2970259 - RNA, 15 nt, Human
gcuaaugggacacua

SEQ ID NO: 2970260 - RNA, 13 nt, Human
gcuaaugggacac

SEQ ID NO: 2970261 - RNA, 23 nt, Human
gcuaagugauccucccaccucag

SEQ ID NO: 2970262 - RNA, 18 nt, Human
gcguuucuaugacacaug

SEQ ID NO: 2970263 - RNA, 23 nt, Human
gcgugcacacaccagagcccacc

SEQ ID NO: 2970264 - RNA, 19 nt, Human
gcgugcacacaccagagcc

SEQ ID NO: 2970265 - RNA, 20 nt, Human
gcgggaggauguucugggac

SEQ ID NO: 2970266 - RNA, 22 nt, Human
gcgggaggauguucugggacac

SEQ ID NO: 2970267 - RNA, 21 nt, Human
gcgggaggauguucugggaca

SEQ ID NO: 2970268 - RNA, 20 nt, Human
gcgugcacacaccagagccc

SEQ ID NO: 2970269 - RNA, 15 nt, Human
gcuagaacucccuuu

SEQ ID NO: 2970270 - RNA, 14 nt, Human
gcuagaacucccuu

SEQ ID NO: 2970271 - RNA, 13 nt, Human
gcuagaacucccu

SEQ ID NO: 2970272 - RNA, 12 nt, Human
gcuagaacuccc

SEQ ID NO: 2970273 - RNA, 18 nt, Human
gcuacucgggaggcugag

SEQ ID NO: 2970274 - RNA, 17 nt, Human
gcuacucgggaggcuga

SEQ ID NO: 2970275 - RNA, 23 nt, Human
gcuacucgggaggcugaggcagg

SEQ ID NO: 2970276 - RNA, 16 nt, Human
gcuagaacucccuuuc

SEQ ID NO: 2970277 - RNA, 13 nt, Human
gcuacugccaucc

SEQ ID NO: 2970278 - RNA, 11 nt, Human
gcuacugccau

SEQ ID NO: 2970279 - RNA, 20 nt, Human
gcuauucaguaauaacucua

SEQ ID NO: 2970280 - RNA, 18 nt, Human
gcuauucaguaauaacuc

SEQ ID NO: 2970281 - RNA, 14 nt, Human
gcucacugcagccu

SEQ ID NO: 2970282 - RNA, 13 nt, Human
gcucacugcagcc

SEQ ID NO: 2970283 - RNA, 12 nt, Human
gcucacugcagc

SEQ ID NO: 2970284 - RNA, 11 nt, Human
gcucacugcag

SEQ ID NO: 2970285 - RNA, 16 nt, Human
gcucacugcagccuca

SEQ ID NO: 2970286 - RNA, 15 nt, Human
gcucacugcagccuc

SEQ ID NO: 2970287 - RNA, 17 nt, Human
gcucacugcagccucaa

SEQ ID NO: 2970288 - RNA, 23 nt, Human
gcucagguggggucacucuggca

SEQ ID NO: 2970289 - RNA, 14 nt, Human
gcucaggugucccu

SEQ ID NO: 2970290 - RNA, 16 nt, Human
gcucaggugucccugc

SEQ ID NO: 2970291 - RNA, 14 nt, Human
gcucagagagggug

SEQ ID NO: 2970292 - RNA, 13 nt, Human
gcucagagagggu

SEQ ID NO: 2970293 - RNA, 21 nt, Human
gcuagugugguguuuccuggc

SEQ ID NO: 2970294 - RNA, 22 nt, Human
gcuagugugguguuuccuggca

SEQ ID NO: 2970295 - RNA, 12 nt, Human
gcuaugcauuug

SEQ ID NO: 2970296 - RNA, 13 nt, Human
gcuaugcauuuga

SEQ ID NO: 2970297 - RNA, 19 nt, Human
gcuauucaguaauaacucu

SEQ ID NO: 2970298 - RNA, 16 nt, Human
gcuaggccuggccaga

SEQ ID NO: 2970299 - RNA, 23 nt, Human
gcuaggccuggccagaugcacca

SEQ ID NO: 2970300 - RNA, 17 nt, Human
gcuaggccuggccagau

SEQ ID NO: 2970301 - RNA, 23 nt, Human
ggaacagaagaggaaagagagac

SEQ ID NO: 2970302 - RNA, 15 nt, Human
ggaacacucugagac

SEQ ID NO: 2970303 - RNA, 16 nt, Human
ggaacacucugagacu

SEQ ID NO: 2970304 - RNA, 12 nt, Human
ggaacacucuga

SEQ ID NO: 2970305 - RNA, 14 nt, Human
ggaacacucugaga

SEQ ID NO: 2970306 - RNA, 19 nt, Human
ggaacacuccuucacagau

SEQ ID NO: 2970307 - RNA, 13 nt, Human
ggaagacuuugga

SEQ ID NO: 2970308 - RNA, 17 nt, Human
ggaagacuuuggaaaga

SEQ ID NO: 2970309 - RNA, 12 nt, Human
ggaagacuuugg

SEQ ID NO: 2970310 - RNA, 13 nt, Human
ggaagacagcucu

SEQ ID NO: 2970311 - RNA, 14 nt, Human
ggaagacagcucuu

SEQ ID NO: 2970312 - RNA, 22 nt, Human
ggaagacaaugugaaaagaaaa

SEQ ID NO: 2970313 - RNA, 13 nt, Human
ggaagagaaaaaa

SEQ ID NO: 2970314 - RNA, 18 nt, Human
ggaagacuuuggaaagag

SEQ ID NO: 2970315 - RNA, 15 nt, Human
ggaagagaaaaaaua

SEQ ID NO: 2970316 - RNA, 18 nt, Human
ggaauaacauguaauuaa

SEQ ID NO: 2970317 - RNA, 13 nt, Human
ggaauaagacaga

SEQ ID NO: 2970318 - RNA, 17 nt, Human
ggaauaagacagagacc

SEQ ID NO: 2970319 - RNA, 16 nt, Human
ggaauccagacccggc

SEQ ID NO: 2970320 - RNA, 22 nt, Human
ggacaaggaugaucuaggaaga

SEQ ID NO: 2970321 - RNA, 23 nt, Human
ggacaaggaugaucuaggaagac

SEQ ID NO: 2970322 - RNA, 13 nt, Human
ggacaagagcagg

SEQ ID NO: 2970323 - RNA, 19 nt, Human
ggaaugaagauacugaaau

SEQ ID NO: 2970324 - RNA, 18 nt, Human
ggacacagcucuucucca

SEQ ID NO: 2970325 - RNA, 15 nt, Human
ggacacagcucuucu

SEQ ID NO: 2970326 - RNA, 21 nt, Human
ggacacagcucuucuccaggc

SEQ ID NO: 2970327 - RNA, 14 nt, Human
ggacacagcucuuc

SEQ ID NO: 2970328 - RNA, 17 nt, Human
ggacagcuccuucuguc

SEQ ID NO: 2970329 - RNA, 20 nt, Human
ggacagcuccuucuguccua

SEQ ID NO: 2970330 - RNA, 19 nt, Human
ggacagcuccuucuguccu

SEQ ID NO: 2970331 - RNA, 22 nt, Human
ggacacuaaccacgcuggaccu

SEQ ID NO: 2970332 - RNA, 17 nt, Human
ggacacuaaccacgcug

SEQ ID NO: 2970333 - RNA, 16 nt, Human
ggaaggaaacccagcu

SEQ ID NO: 2970334 - RNA, 15 nt, Human
ggaagcucagggccu

SEQ ID NO: 2970335 - RNA, 23 nt, Human
ggaagcucagggccuggcucagg

SEQ ID NO: 2970336 - RNA, 11 nt, Human
ggaagcuccgc

SEQ ID NO: 2970337 - RNA, 22 nt, Human
ggaagcucagggccuggcucag

SEQ ID NO: 2970338 - RNA, 19 nt, Human
ggaaggaaacccagcucug

SEQ ID NO: 2970339 - RNA, 20 nt, Human
ggaaggaaacccagcucugg

SEQ ID NO: 2970340 - RNA, 15 nt, Human
ggaagccgcuggggc

SEQ ID NO: 2970341 - RNA, 22 nt, Human
ggacucauuuuaaaaaauggaa

SEQ ID NO: 2970342 - RNA, 22 nt, Human
ggacuccaggcagcagacacau

SEQ ID NO: 2970343 - RNA, 21 nt, Human
ggacuccaggcagcagacaca

SEQ ID NO: 2970344 - RNA, 16 nt, Human
ggacucaaugcacuga

SEQ ID NO: 2970345 - RNA, 24 nt, Human
ggacuaacuugucuuuggacccug

SEQ ID NO: 2970346 - RNA, 14 nt, Human
ggacuacaggugug

SEQ ID NO: 2970347 - RNA, 15 nt, Human
ggacucaaugcacug

SEQ ID NO: 2970348 - RNA, 20 nt, Human
ggacuaacuugucuuuggac

SEQ ID NO: 2970349 - RNA, 16 nt, Human
ggagaaaggaagggcu

SEQ ID NO: 2970350 - RNA, 13 nt, Human
ggagaaacuggaa

SEQ ID NO: 2970351 - RNA, 14 nt, Human
ggacuuugcacacu

SEQ ID NO: 2970352 - RNA, 23 nt, Human
ggacuuugcacacuuuggcccag

SEQ ID NO: 2970353 - RNA, 14 nt, Human
ggacuuggaagcuc

SEQ ID NO: 2970354 - RNA, 14 nt, Human
ggaccucaggccug

SEQ ID NO: 2970355 - RNA, 15 nt, Human
ggaccucaggccugg

SEQ ID NO: 2970356 - RNA, 20 nt, Human
ggacguguuaugacuccaga

SEQ ID NO: 2970357 - RNA, 13 nt, Human
ggaccucaggccu

SEQ ID NO: 2970358 - RNA, 12 nt, Human
ggaccucaggcc

SEQ ID NO: 2970359 - RNA, 12 nt, Human
ggacccugaggc

SEQ ID NO: 2970360 - RNA, 13 nt, Human
ggacccugaggcc

SEQ ID NO: 2970361 - RNA, 11 nt, Human
ggacccugagg

SEQ ID NO: 2970362 - RNA, 12 nt, Human
ggacccccugaa

SEQ ID NO: 2970363 - RNA, 16 nt, Human
gcuuguacacucauuc

SEQ ID NO: 2970364 - RNA, 14 nt, Human
gcuugagcucagga

SEQ ID NO: 2970365 - RNA, 20 nt, Human
gcuuguaaauagcucaggug

SEQ ID NO: 2970366 - RNA, 12 nt, Human
gcuuguacauaa

SEQ ID NO: 2970367 - RNA, 22 nt, Human
gcuuccucauaguaugguggcu

SEQ ID NO: 2970368 - RNA, 23 nt, Human
gcuucuucagagacuccugcagg

SEQ ID NO: 2970369 - RNA, 18 nt, Human
gcuucacggaagagccuu

SEQ ID NO: 2970370 - RNA, 12 nt, Human
gcuucagccucc

SEQ ID NO: 2970371 - RNA, 17 nt, Human
gcuucacggaagagccu

SEQ ID NO: 2970372 - RNA, 15 nt, Human
gcuucacggaagagc

SEQ ID NO: 2970373 - RNA, 20 nt, Human
gcuucaaggauccugagcca

SEQ ID NO: 2970374 - RNA, 21 nt, Human
gcuucaaggauccugagccag

SEQ ID NO: 2970375 - RNA, 19 nt, Human
gcuucaaggauccugagcc

SEQ ID NO: 2970376 - RNA, 18 nt, Human
gcuucaaggauccugagc

SEQ ID NO: 2970377 - RNA, 16 nt, Human
gcuggcuguuggcugg

SEQ ID NO: 2970378 - RNA, 15 nt, Human
gcuggcuguuggcug

SEQ ID NO: 2970379 - RNA, 21 nt, Human
gcuggguggcaccagcagccu

SEQ ID NO: 2970380 - RNA, 22 nt, Human
gcuggguggcaccagcagccug

SEQ ID NO: 2970381 - RNA, 23 nt, Human
gcuggguggcaccagcagccugg

SEQ ID NO: 2970382 - RNA, 20 nt, Human
gcuggccuggccccucaggg

SEQ ID NO: 2970383 - RNA, 22 nt, Human
gcuggagugcagugagccgaga

SEQ ID NO: 2970384 - RNA, 17 nt, Human
gcuggagugcagugagc

SEQ ID NO: 2970385 - RNA, 18 nt, Human
gcuggagugcagugagcc

SEQ ID NO: 2970386 - RNA, 20 nt, Human
gcuggcgugcaguggugcga

SEQ ID NO: 2970387 - RNA, 13 nt, Human
gcugcugaaggcu

SEQ ID NO: 2970388 - RNA, 14 nt, Human
gcugcugaaggcuc

SEQ ID NO: 2970389 - RNA, 15 nt, Human
gcugcugaaggcucg

SEQ ID NO: 2970390 - RNA, 15 nt, Human
gcucugguccauaga

SEQ ID NO: 2970391 - RNA, 16 nt, Human
gcucugguccauagag

SEQ ID NO: 2970392 - RNA, 13 nt, Human
gcucugcccuugg

SEQ ID NO: 2970393 - RNA, 13 nt, Human
gcugcuggcuggu

SEQ ID NO: 2970394 - RNA, 23 nt, Human
aaacaugcuguacauacuuuuug

SEQ ID NO: 2970395 - RNA, 17 nt, Human
aaacauggccuuugcuu

SEQ ID NO: 2970396 - RNA, 16 nt, Human
aaacauggccuuugcu

SEQ ID NO: 2970397 - RNA, 15 nt, Human
aaacagucucaggaa

SEQ ID NO: 2970398 - RNA, 14 nt, Human
aaacaguagugaua

SEQ ID NO: 2970399 - RNA, 19 nt, Human
ggggaauugaggacacuga

SEQ ID NO: 2970400 - RNA, 16 nt, Human
ggggaccagagcugcc

SEQ ID NO: 2970401 - RNA, 15 nt, Human
ggggaccagagcugc

SEQ ID NO: 2970402 - RNA, 22 nt, Human
ggggaauguuugccucugccuc

SEQ ID NO: 2970403 - RNA, 18 nt, Human
ggggaauguuugccucug

SEQ ID NO: 2970404 - RNA, 18 nt, Human
gggggccucagugccacu

SEQ ID NO: 2970405 - RNA, 17 nt, Human
gggggccucagugccac

SEQ ID NO: 2970406 - RNA, 15 nt, Human
gggggccucagugcc

SEQ ID NO: 2970407 - RNA, 12 nt, Human
gggggccucagu

SEQ ID NO: 2970408 - RNA, 15 nt, Human
aaacacauuaaaggu

SEQ ID NO: 2970409 - RNA, 11 nt, Human
aaacacauuaa

SEQ ID NO: 2970410 - RNA, 11 nt, Human
aaacacauuuu

SEQ ID NO: 2970411 - RNA, 21 nt, Human
aaacacauuaaagguacuuug

SEQ ID NO: 2970412 - RNA, 12 nt, Human
aaacacagcaag

SEQ ID NO: 2970413 - RNA, 14 nt, Human
aaacacagcaaggg

SEQ ID NO: 2970414 - RNA, 18 nt, Human
aaacacaucuaguaguug

SEQ ID NO: 2970415 - RNA, 19 nt, Human
aaacacaaacgggcucagc

SEQ ID NO: 2970416 - RNA, 11 nt, Human
aaacacagcaa

SEQ ID NO: 2970417 - RNA, 13 nt, Human
gggaugagaaagg

SEQ ID NO: 2970418 - RNA, 19 nt, Human
aaaauuuagaaauauaauu

SEQ ID NO: 2970419 - RNA, 20 nt, Human
aaaauuuugauguuuuaagg

SEQ ID NO: 2970420 - RNA, 12 nt, Human
aaaccacagcag

SEQ ID NO: 2970421 - RNA, 23 nt, Human
aaaccaagucaagugaaaaagga

SEQ ID NO: 2970422 - RNA, 15 nt, Human
aaacgggcucagcaa

SEQ ID NO: 2970423 - RNA, 15 nt, Human
gggggccuggaugcc

SEQ ID NO: 2970424 - RNA, 14 nt, Human
aaacuuaaucuaaa

SEQ ID NO: 2970425 - RNA, 16 nt, Human
aaacuuaaucuaaaug

SEQ ID NO: 2970426 - RNA, 18 nt, Human
aaacuuaaucuaaaugga

SEQ ID NO: 2970427 - RNA, 17 nt, Human
aaacuuaaucuaaaugg

SEQ ID NO: 2970428 - RNA, 19 nt, Human
ggguggcaccagcagccug

SEQ ID NO: 2970429 - RNA, 14 nt, Human
aaacgucuuaaaua

SEQ ID NO: 2970430 - RNA, 13 nt, Human
aaacgucuuaaau

SEQ ID NO: 2970431 - RNA, 15 nt, Human
aaacucguuaauuug

SEQ ID NO: 2970432 - RNA, 17 nt, Human
aaagcuuuugcauauug

SEQ ID NO: 2970433 - RNA, 14 nt, Human
aaagcuuuugcaua

SEQ ID NO: 2970434 - RNA, 22 nt, Human
aaaggaaagagggagguaagga

SEQ ID NO: 2970435 - RNA, 21 nt, Human
aaaggagagcuagcagcaggg

SEQ ID NO: 2970436 - RNA, 17 nt, Human
aaaggagagcuagcagc

SEQ ID NO: 2970437 - RNA, 17 nt, Human
aaaggagauuggaagga

SEQ ID NO: 2970438 - RNA, 14 nt, Human
aaagguacuucaaa

SEQ ID NO: 2970439 - RNA, 22 nt, Human
aaagggacuuggaagcuccgcu

SEQ ID NO: 2970440 - RNA, 13 nt, Human
aaagcuuuugcau

SEQ ID NO: 2970441 - RNA, 15 nt, Human
aaagcuuguuaagau

SEQ ID NO: 2970442 - RNA, 13 nt, Human
aaagcugcugaca

SEQ ID NO: 2970443 - RNA, 17 nt, Human
aaagcacugacuucuaa

SEQ ID NO: 2970444 - RNA, 21 nt, Human
aaagcacugacuucuaaguaa

SEQ ID NO: 2970445 - RNA, 15 nt, Human
aaagcucacuuuacu

SEQ ID NO: 2970446 - RNA, 13 nt, Human
ggucgaggcagga

SEQ ID NO: 2970447 - RNA, 13 nt, Human
ggugaacagaaca

SEQ ID NO: 2970448 - RNA, 24 nt, Human
ggugauccacccaccucagccucc

SEQ ID NO: 2970449 - RNA, 23 nt, Human
ggugauccacccaccucagccuc

SEQ ID NO: 2970450 - RNA, 18 nt, Human
ggugauccacccaccuca

SEQ ID NO: 2970451 - RNA, 13 nt, Human
ggugcaaugaccu

SEQ ID NO: 2970452 - RNA, 12 nt, Human
ggugcaaugacc

SEQ ID NO: 2970453 - RNA, 13 nt, Human
gguggaugccugg

SEQ ID NO: 2970454 - RNA, 14 nt, Human
ggguggggcagugc

SEQ ID NO: 2970455 - RNA, 14 nt, Human
ggguggccucccaa

SEQ ID NO: 2970456 - RNA, 19 nt, Human
aaacuucagacauagaauu

SEQ ID NO: 2970457 - RNA, 23 nt, Human
aaacuucagcgguuuauauaagc

SEQ ID NO: 2970458 - RNA, 21 nt, Human
aaagacuauucaaacagucuc

SEQ ID NO: 2970459 - RNA, 15 nt, Human
aaagacuccaaagaa

SEQ ID NO: 2970460 - RNA, 21 nt, Human
aaagacuccaaagaaauguaa

SEQ ID NO: 2970461 - RNA, 14 nt, Human
aaagacuccaaaga

SEQ ID NO: 2970462 - RNA, 18 nt, Human
aaagacuauucaaacagu

SEQ ID NO: 2970463 - RNA, 19 nt, Human
aaagacuauucaaacaguc

SEQ ID NO: 2970464 - RNA, 17 nt, Human
aaagacuauucaaacag

SEQ ID NO: 2970465 - RNA, 13 nt, Human
aaagacagugaaa

SEQ ID NO: 2970466 - RNA, 15 nt, Human
aaagaggcagcuuga

SEQ ID NO: 2970467 - RNA, 15 nt, Human
aaagaggaaugaagu

SEQ ID NO: 2970468 - RNA, 17 nt, Human
aaagaugcuucucacug

SEQ ID NO: 2970469 - RNA, 14 nt, Human
aaagaugcuucuca

SEQ ID NO: 2970470 - RNA, 19 nt, Human
aaagaugcuucucacugcc

SEQ ID NO: 2970471 - RNA, 14 nt, Human
aaagacuguacaaa

SEQ ID NO: 2970472 - RNA, 13 nt, Human
aaagacuguacaa

SEQ ID NO: 2970473 - RNA, 23 nt, Human
aaagacugaguacguugugcauu

SEQ ID NO: 2970474 - RNA, 12 nt, Human
gguccugcugca

SEQ ID NO: 2970475 - RNA, 11 nt, Human
gguccugcugc

SEQ ID NO: 2970476 - RNA, 16 nt, Human
aaagguacuuugcagg

SEQ ID NO: 2970477 - RNA, 20 nt, Human
aaagguauuuuaaucaccaa

SEQ ID NO: 2970478 - RNA, 20 nt, Human
aaaguacacuguuucaaacu

SEQ ID NO: 2970479 - RNA, 19 nt, Human
aaaguacuucuccacccug

SEQ ID NO: 2970480 - RNA, 18 nt, Human
aaaguaucccuacuguaa

SEQ ID NO: 2970481 - RNA, 18 nt, Human
aaaguauguuagugcaaa

SEQ ID NO: 2970482 - RNA, 21 nt, Human
aaaguacuucuccacccugcu

SEQ ID NO: 2970483 - RNA, 20 nt, Human
aaaguacuucuccacccugc

SEQ ID NO: 2970484 - RNA, 23 nt, Human
aaaguacuucuccacccugcucu

SEQ ID NO: 2970485 - RNA, 17 nt, Human
aaaguauguuagugcaa

SEQ ID NO: 2970486 - RNA, 23 nt, Human
aaaguucugcagauaaacaguag

SEQ ID NO: 2970487 - RNA, 17 nt, Human
aaauaacagaagaaaau

SEQ ID NO: 2970488 - RNA, 16 nt, Human
aaauaacagaagaaaa

SEQ ID NO: 2970489 - RNA, 19 nt, Human
aaauaaguguauuuugaaa

SEQ ID NO: 2970490 - RNA, 14 nt, Human
aaauaaguguauuu

SEQ ID NO: 2970491 - RNA, 13 nt, Human
aaauaaucucuga

SEQ ID NO: 2970492 - RNA, 20 nt, Human
aaauaaguguauuuugaaau

SEQ ID NO: 2970493 - RNA, 14 nt, Human
guaacucuguaauu

SEQ ID NO: 2970494 - RNA, 20 nt, Human
guaauaggcguaacuaauuu

SEQ ID NO: 2970495 - RNA, 18 nt, Human
guaauaugcacacauuuu

SEQ ID NO: 2970496 - RNA, 17 nt, Human
guaauaugcacacauuu

SEQ ID NO: 2970497 - RNA, 16 nt, Human
guaauaugcacacauu

SEQ ID NO: 2970498 - RNA, 14 nt, Human
guaauaugcacaca

SEQ ID NO: 2970499 - RNA, 22 nt, Human
guaauuugugauacaaugcugu

SEQ ID NO: 2970500 - RNA, 21 nt, Human
aaauaauuuuuauauuugaaa

SEQ ID NO: 2970501 - RNA, 14 nt, Human
guacacauaagcca

SEQ ID NO: 2970502 - RNA, 15 nt, Human
aaauacacacucaaa

SEQ ID NO: 2970503 - RNA, 23 nt, Human
aaauaauuuuuauauuugaaaua

SEQ ID NO: 2970504 - RNA, 22 nt, Human
aaauaauuuuuauauuugaaau

SEQ ID NO: 2970505 - RNA, 17 nt, Human
aaauacagauagauaua

SEQ ID NO: 2970506 - RNA, 19 nt, Human
aaauacacacucaaaucaa

SEQ ID NO: 2970507 - RNA, 18 nt, Human
aaauaccagccaguaaau

SEQ ID NO: 2970508 - RNA, 22 nt, Human
aaauacgugggcauucaaaugu

SEQ ID NO: 2970509 - RNA, 14 nt, Human
aaauauaauugaca

SEQ ID NO: 2970510 - RNA, 21 nt, Human
guacucugccacuuuauuucu

SEQ ID NO: 2970511 - RNA, 17 nt, Human
guacuauguaucaauga

SEQ ID NO: 2970512 - RNA, 15 nt, Human
guacuauguaucaau

SEQ ID NO: 2970513 - RNA, 18 nt, Human
guacuacaguccucccau

SEQ ID NO: 2970514 - RNA, 19 nt, Human
guacuacaguccucccauc

SEQ ID NO: 2970515 - RNA, 14 nt, Human
guacccacugcucu

SEQ ID NO: 2970516 - RNA, 13 nt, Human
guacccacugcuc

SEQ ID NO: 2970517 - RNA, 13 nt, Human
guacuauguauca

SEQ ID NO: 2970518 - RNA, 21 nt, Human
guacuaucugugcguagaagu

SEQ ID NO: 2970519 - RNA, 17 nt, Human
guacuacaguccuccca

SEQ ID NO: 2970520 - RNA, 22 nt, Human
guacuucaaauccuugaagauu

SEQ ID NO: 2970521 - RNA, 21 nt, Human
guacuucaaauccuugaagau

SEQ ID NO: 2970522 - RNA, 16 nt, Human
guacuggagaaaaugg

SEQ ID NO: 2970523 - RNA, 20 nt, Human
guagacgugcacgcacacug

SEQ ID NO: 2970524 - RNA, 23 nt, Human
guagacgugcacgcacacugucu

SEQ ID NO: 2970525 - RNA, 12 nt, Human
guagagacaggg

SEQ ID NO: 2970526 - RNA, 11 nt, Human
guagagacagg

SEQ ID NO: 2970527 - RNA, 16 nt, Human
guagacaguuggguuu

SEQ ID NO: 2970528 - RNA, 11 nt, Human
guagagccagg

SEQ ID NO: 2970529 - RNA, 10 nt, Human
guagagccag

SEQ ID NO: 2970530 - RNA, 13 nt, Human
guagagacagggu

SEQ ID NO: 2970531 - RNA, 15 nt, Human
guagagccagggucu

SEQ ID NO: 2970532 - RNA, 14 nt, Human
guagaauguuuuca

SEQ ID NO: 2970533 - RNA, 19 nt, Human
guagaaguucuaguguuuu

SEQ ID NO: 2970534 - RNA, 18 nt, Human
guagaaguucuaguguuu

SEQ ID NO: 2970535 - RNA, 22 nt, Human
guagaaguucuaguguuuucaa

SEQ ID NO: 2970536 - RNA, 21 nt, Human
guagaagucuuagauguauau

SEQ ID NO: 2970537 - RNA, 18 nt, Human
guagaagcccuucuaccu

SEQ ID NO: 2970538 - RNA, 23 nt, Human
guagaaauaucugaaaauguaug

SEQ ID NO: 2970539 - RNA, 21 nt, Human
guagaaauaucugaaaaugua

SEQ ID NO: 2970540 - RNA, 20 nt, Human
guagaaauaucugaaaaugu

SEQ ID NO: 2970541 - RNA, 19 nt, Human
aaaucauuucugcaucagc

SEQ ID NO: 2970542 - RNA, 21 nt, Human
aaaucauuucugcaucagcug

SEQ ID NO: 2970543 - RNA, 22 nt, Human
aaaucauuucugcaucagcugc

SEQ ID NO: 2970544 - RNA, 23 nt, Human
aaaucauuucugcaucagcugcu

SEQ ID NO: 2970545 - RNA, 11 nt, Human
aaaucauuucu

SEQ ID NO: 2970546 - RNA, 19 nt, Human
aaaucagccguguaaccau

SEQ ID NO: 2970547 - RNA, 12 nt, Human
aaaucagccugc

SEQ ID NO: 2970548 - RNA, 18 nt, Human
aaaucagccugcuccagc

SEQ ID NO: 2970549 - RNA, 16 nt, Human
aaaucagcugcuacua

SEQ ID NO: 2970550 - RNA, 12 nt, Human
aaaucauuucug

SEQ ID NO: 2970551 - RNA, 22 nt, Human
aaaucagguuuucuuuuaagaa

SEQ ID NO: 2970552 - RNA, 19 nt, Human
aaaucagguuuucuuuuaa

SEQ ID NO: 2970553 - RNA, 18 nt, Human
aaaucagguuuucuuuua

SEQ ID NO: 2970554 - RNA, 16 nt, Human
aaaucagguuuucuuu

SEQ ID NO: 2970555 - RNA, 14 nt, Human
aaaucagguuuucu

SEQ ID NO: 2970556 - RNA, 17 nt, Human
aaauauuauguuaaaac

SEQ ID NO: 2970557 - RNA, 19 nt, Human
aaauauuaagaaagacuau

SEQ ID NO: 2970558 - RNA, 15 nt, Human
aaauccauacauuug

SEQ ID NO: 2970559 - RNA, 16 nt, Human
guacaugaaaacacau

SEQ ID NO: 2970560 - RNA, 15 nt, Human
guacaugaaaacaca

SEQ ID NO: 2970561 - RNA, 14 nt, Human
guacaugaaaacac

SEQ ID NO: 2970562 - RNA, 20 nt, Human
guacaugaaaacacauuuuu

SEQ ID NO: 2970563 - RNA, 19 nt, Human
guacaugaaaacacauuuu

SEQ ID NO: 2970564 - RNA, 18 nt, Human
guacaugaaaacacauuu

SEQ ID NO: 2970565 - RNA, 17 nt, Human
guacaugaaaacacauu

SEQ ID NO: 2970566 - RNA, 19 nt, Human
guacauggaauaacaugua

SEQ ID NO: 2970567 - RNA, 12 nt, Human
guacccacugcu

SEQ ID NO: 2970568 - RNA, 16 nt, Human
guaccacuuuugcaaa

SEQ ID NO: 2970569 - RNA, 20 nt, Human
aaaaggaagcuuacaugccu

SEQ ID NO: 2970570 - RNA, 12 nt, Human
aaaagcauuuuu

SEQ ID NO: 2970571 - RNA, 23 nt, Human
gggacuuggaagcuccgcuuucu

SEQ ID NO: 2970572 - RNA, 18 nt, Human
gggacuuggaagcuccgc

SEQ ID NO: 2970573 - RNA, 17 nt, Human
gggacuuggaagcuccg

SEQ ID NO: 2970574 - RNA, 15 nt, Human
gggacuuggaagcuc

SEQ ID NO: 2970575 - RNA, 21 nt, Human
gggagaaccaaaaagaggcua

SEQ ID NO: 2970576 - RNA, 18 nt, Human
gggaggucaaggcugcag

SEQ ID NO: 2970577 - RNA, 15 nt, Human
gggagggagggcucc

SEQ ID NO: 2970578 - RNA, 18 nt, Human
gggaggcugaggcaggag

SEQ ID NO: 2970579 - RNA, 16 nt, Human
gggagggagggcucca

SEQ ID NO: 2970580 - RNA, 15 nt, Human
gggagagccuuccag

SEQ ID NO: 2970581 - RNA, 19 nt, Human
gggagagccuuccaggggu

SEQ ID NO: 2970582 - RNA, 23 nt, Human
gggagcaggcucgggcuccccag

SEQ ID NO: 2970583 - RNA, 15 nt, Human
aaaacuucagacaua

SEQ ID NO: 2970584 - RNA, 13 nt, Human
aaaacugagcaua

SEQ ID NO: 2970585 - RNA, 18 nt, Human
aaaacucuccucugcugc

SEQ ID NO: 2970586 - RNA, 17 nt, Human
aaaaaugguuuaaaugg

SEQ ID NO: 2970587 - RNA, 20 nt, Human
aaaaaugguagcauuuuaaa

SEQ ID NO: 2970588 - RNA, 19 nt, Human
aaaaaugguagcauuuuaa

SEQ ID NO: 2970589 - RNA, 14 nt, Human
gggaccagagcugc

SEQ ID NO: 2970590 - RNA, 20 nt, Human
gggaccagagcugccaccug

SEQ ID NO: 2970591 - RNA, 14 nt, Human
aaaaccacagcagu

SEQ ID NO: 2970592 - RNA, 12 nt, Human
aaaacccaagug

SEQ ID NO: 2970593 - RNA, 14 nt, Human
aaaacaugcuacac

SEQ ID NO: 2970594 - RNA, 13 nt, Human
aaaacaugcuaca

SEQ ID NO: 2970595 - RNA, 21 nt, Human
gggacagucaccucauggaau

SEQ ID NO: 2970596 - RNA, 20 nt, Human
gggacagucaccucauggaa

SEQ ID NO: 2970597 - RNA, 22 nt, Human
gggacagucaccucauggaauu

SEQ ID NO: 2970598 - RNA, 15 nt, Human
gggacagcuccuucu

SEQ ID NO: 2970599 - RNA, 13 nt, Human
gggaagagacuug

SEQ ID NO: 2970600 - RNA, 13 nt, Human
gggacagcuccuu

SEQ ID NO: 2970601 - RNA, 12 nt, Human
gggacagcuccu

SEQ ID NO: 2970602 - RNA, 20 nt, Human
gggaacccaaguccaagcau

SEQ ID NO: 2970603 - RNA, 18 nt, Human
gggaagaagcucucuccu

SEQ ID NO: 2970604 - RNA, 21 nt, Human
ggcuuccuccugguguggaag

SEQ ID NO: 2970605 - RNA, 14 nt, Human
aaaaauaacaauga

SEQ ID NO: 2970606 - RNA, 19 nt, Human
ggcugggggccucagugcc

SEQ ID NO: 2970607 - RNA, 17 nt, Human
ggcugggggccucagug

SEQ ID NO: 2970608 - RNA, 16 nt, Human
ggcugggggccucagu

SEQ ID NO: 2970609 - RNA, 15 nt, Human
ggcugggggccucag

SEQ ID NO: 2970610 - RNA, 19 nt, Human
ggcuggguucuacccaggu

SEQ ID NO: 2970611 - RNA, 21 nt, Human
ggcuggguucuacccaggugc

SEQ ID NO: 2970612 - RNA, 19 nt, Human
ggcuggguggcaccagcag

SEQ ID NO: 2970613 - RNA, 18 nt, Human
ggcuguaucccaugagcc

SEQ ID NO: 2970614 - RNA, 20 nt, Human
ggcuucaguggcagcugcuu

SEQ ID NO: 2970615 - RNA, 19 nt, Human
ggcuucaguggcagcugcu

SEQ ID NO: 2970616 - RNA, 17 nt, Human
ggcuucaguggcagcug

SEQ ID NO: 2970617 - RNA, 18 nt, Human
ggcuucaguggcagcugc

SEQ ID NO: 2970618 - RNA, 16 nt, Human
ggcuuccucauaguau

SEQ ID NO: 2970619 - RNA, 18 nt, Human
ggcuucauccuccucaga

SEQ ID NO: 2970620 - RNA, 22 nt, Human
ggcuucauccuccucagaucuu

SEQ ID NO: 2970621 - RNA, 18 nt, Human
ggcugaacuuuguggucg

SEQ ID NO: 2970622 - RNA, 19 nt, Human
ggcugccaaugggagcuca

SEQ ID NO: 2970623 - RNA, 20 nt, Human
ggcugccaaugggagcucau

SEQ ID NO: 2970624 - RNA, 22 nt, Human
ggcugcaugcgggcuuccuccu

SEQ ID NO: 2970625 - RNA, 21 nt, Human
ggcugccaaugggagcucaug

SEQ ID NO: 2970626 - RNA, 22 nt, Human
ggcugcggaaugaaccacaucu

SEQ ID NO: 2970627 - RNA, 12 nt, Human
ggcucuuccagg

SEQ ID NO: 2970628 - RNA, 13 nt, Human
ggcucucaggcca

SEQ ID NO: 2970629 - RNA, 11 nt, Human
ggcucucaggc

SEQ ID NO: 2970630 - RNA, 13 nt, Human
ggcugggagagcc

SEQ ID NO: 2970631 - RNA, 14 nt, Human
ggcugggagagccu

SEQ ID NO: 2970632 - RNA, 15 nt, Human
ggcugggagagccuu

SEQ ID NO: 2970633 - RNA, 16 nt, Human
ggcugggagagccuuc

SEQ ID NO: 2970634 - RNA, 12 nt, Human
ggcugcucccac

SEQ ID NO: 2970635 - RNA, 11 nt, Human
ggcugcuccca

SEQ ID NO: 2970636 - RNA, 19 nt, Human
ggcugcucccaccuggcuc

SEQ ID NO: 2970637 - RNA, 18 nt, Human
ggcugcucccaccuggcu

SEQ ID NO: 2970638 - RNA, 15 nt, Human
ggcugcucccaccug

SEQ ID NO: 2970639 - RNA, 13 nt, Human
ggcugcucccacc

SEQ ID NO: 2970640 - RNA, 22 nt, Human
ggcugcucccaccuggcucugu

SEQ ID NO: 2970641 - RNA, 21 nt, Human
ggcugcucccaccuggcucug

SEQ ID NO: 2970642 - RNA, 18 nt, Human
ggcucagcggggacagcu

SEQ ID NO: 2970643 - RNA, 20 nt, Human
ggcucagcggggacagcucc

SEQ ID NO: 2970644 - RNA, 19 nt, Human
ggcucagcggggacagcuc

SEQ ID NO: 2970645 - RNA, 19 nt, Human
ggcucagguggggucacuc

SEQ ID NO: 2970646 - RNA, 20 nt, Human
ggcucagguggggucacucu

SEQ ID NO: 2970647 - RNA, 14 nt, Human
ggcuccacuugguc

SEQ ID NO: 2970648 - RNA, 19 nt, Human
ggcccuuuuucaauaacug

SEQ ID NO: 2970649 - RNA, 17 nt, Human
ggcccuugucggcccca

SEQ ID NO: 2970650 - RNA, 22 nt, Human
ggcccuucucuccagccccugg

SEQ ID NO: 2970651 - RNA, 23 nt, Human
ggcccuucucuccagccccugga

SEQ ID NO: 2970652 - RNA, 23 nt, Human
ggccucaagugauucuccugccu

SEQ ID NO: 2970653 - RNA, 13 nt, Human
ggccuccauccug

SEQ ID NO: 2970654 - RNA, 15 nt, Human
ggccuccauccugag

SEQ ID NO: 2970655 - RNA, 14 nt, Human
ggccuccauccuga

SEQ ID NO: 2970656 - RNA, 19 nt, Human
ggcccuucucuccagcccc

SEQ ID NO: 2970657 - RNA, 20 nt, Human
ggcccuucucuccagccccu

SEQ ID NO: 2970658 - RNA, 21 nt, Human
ggcccuucucuccagccccug

SEQ ID NO: 2970659 - RNA, 15 nt, Human
ggcccggcuccaggc

SEQ ID NO: 2970660 - RNA, 14 nt, Human
ggccccugcugguu

SEQ ID NO: 2970661 - RNA, 13 nt, Human
ggccccugcuggu

SEQ ID NO: 2970662 - RNA, 13 nt, Human
ggcccggcuccag

SEQ ID NO: 2970663 - RNA, 23 nt, Human
ggccccugcugguucaggguugg

SEQ ID NO: 2970664 - RNA, 20 nt, Human
ggccagugugacaaggauug

SEQ ID NO: 2970665 - RNA, 14 nt, Human
ggccaguugguccc

SEQ ID NO: 2970666 - RNA, 17 nt, Human
ggccaguuggucccccu

SEQ ID NO: 2970667 - RNA, 20 nt, Human
ggcacugguuuguucccugu

SEQ ID NO: 2970668 - RNA, 18 nt, Human
ggcacuuuaaaacacucu

SEQ ID NO: 2970669 - RNA, 16 nt, Human
ggcacuuuaaaacacu

SEQ ID NO: 2970670 - RNA, 11 nt, Human
ggcagccccug

SEQ ID NO: 2970671 - RNA, 23 nt, Human
ggcagccccauucugccugccca

SEQ ID NO: 2970672 - RNA, 23 nt, Human
ggcacagaaaauggaagacagcu

SEQ ID NO: 2970673 - RNA, 21 nt, Human
ggcacaguuuucugagaaaga

SEQ ID NO: 2970674 - RNA, 13 nt, Human
ggcacaucagcac

SEQ ID NO: 2970675 - RNA, 20 nt, Human
ggcacucagaagacacugau

SEQ ID NO: 2970676 - RNA, 23 nt, Human
ggcacucagaagacacugauggg

SEQ ID NO: 2970677 - RNA, 20 nt, Human
ggcacagaaaauggaagaca

SEQ ID NO: 2970678 - RNA, 21 nt, Human
ggcacagaaaauggaagacag

SEQ ID NO: 2970679 - RNA, 19 nt, Human
ggcacagaaaauggaagac

SEQ ID NO: 2970680 - RNA, 16 nt, Human
ggagagaagagaaugc

SEQ ID NO: 2970681 - RNA, 22 nt, Human
ggcagccccuguucuggcagag

SEQ ID NO: 2970682 - RNA, 21 nt, Human
ggcaguggugguuuucuguuc

SEQ ID NO: 2970683 - RNA, 20 nt, Human
ggcaguggugguuuucuguu

SEQ ID NO: 2970684 - RNA, 21 nt, Human
gacccucucaaacuaacaggc

SEQ ID NO: 2970685 - RNA, 12 nt, Human
gacgcugugcug

SEQ ID NO: 2970686 - RNA, 13 nt, Human
gacgcugugcugc

SEQ ID NO: 2970687 - RNA, 15 nt, Human
gacuauucaaacagu

SEQ ID NO: 2970688 - RNA, 16 nt, Human
gacuauucaaacaguc

SEQ ID NO: 2970689 - RNA, 22 nt, Human
gacuuugguuauuuuacuuuuu

SEQ ID NO: 2970690 - RNA, 22 nt, Human
gacuuuguuaguuucuccaagc

SEQ ID NO: 2970691 - RNA, 20 nt, Human
gacuuuuccaacccucauca

SEQ ID NO: 2970692 - RNA, 21 nt, Human
gacuuuucuguccgagcuuug

SEQ ID NO: 2970693 - RNA, 16 nt, Human
gacuguuuucucuuga

SEQ ID NO: 2970694 - RNA, 18 nt, Human
gacuguuuucucuugaga

SEQ ID NO: 2970695 - RNA, 14 nt, Human
gacuuuggaaagac

SEQ ID NO: 2970696 - RNA, 14 nt, Human
gacuuuggaaagag

SEQ ID NO: 2970697 - RNA, 14 nt, Human
gacucaaugcacug

SEQ ID NO: 2970698 - RNA, 17 nt, Human
gacucaaugcacugaca

SEQ ID NO: 2970699 - RNA, 22 nt, Human
gacuguacaaaguagaagucuu

SEQ ID NO: 2970700 - RNA, 17 nt, Human
gagaagcggcuggcagc

SEQ ID NO: 2970701 - RNA, 16 nt, Human
gagaagcggcuggcag

SEQ ID NO: 2970702 - RNA, 15 nt, Human
gacagcuccuucugu

SEQ ID NO: 2970703 - RNA, 14 nt, Human
gacagcuccuucug

SEQ ID NO: 2970704 - RNA, 13 nt, Human
gacagcuccuucu

SEQ ID NO: 2970705 - RNA, 20 nt, Human
gacagaaagcagaacaguga

SEQ ID NO: 2970706 - RNA, 21 nt, Human
gacagcccuucuuuccacaga

SEQ ID NO: 2970707 - RNA, 14 nt, Human
gacagaaagcagaa

SEQ ID NO: 2970708 - RNA, 18 nt, Human
gacccgucuccagcugcu

SEQ ID NO: 2970709 - RNA, 15 nt, Human
gacccgucuccagcu

SEQ ID NO: 2970710 - RNA, 14 nt, Human
gacccgucuccagc

SEQ ID NO: 2970711 - RNA, 16 nt, Human
gacccuauugcugcuu

SEQ ID NO: 2970712 - RNA, 13 nt, Human
gacccggcugcgu

SEQ ID NO: 2970713 - RNA, 12 nt, Human
gacccggcugcg

SEQ ID NO: 2970714 - RNA, 16 nt, Human
gaccaucccugaaggc

SEQ ID NO: 2970715 - RNA, 17 nt, Human
gaccaucccugaaggcc

SEQ ID NO: 2970716 - RNA, 16 nt, Human
gaccauucuccaccug

SEQ ID NO: 2970717 - RNA, 14 nt, Human
gaccaucccugaag

SEQ ID NO: 2970718 - RNA, 15 nt, Human
gaccaucccugaagg

SEQ ID NO: 2970719 - RNA, 12 nt, Human
gagccuuccagg

SEQ ID NO: 2970720 - RNA, 13 nt, Human
gagccuuccaggg

SEQ ID NO: 2970721 - RNA, 15 nt, Human
gagcgacagugagac

SEQ ID NO: 2970722 - RNA, 13 nt, Human
gagcgacagugag

SEQ ID NO: 2970723 - RNA, 17 nt, Human
gagcaucaggccaggcc

SEQ ID NO: 2970724 - RNA, 19 nt, Human
gagcugccuguucagcucc

SEQ ID NO: 2970725 - RNA, 16 nt, Human
gagcugccuguucagc

SEQ ID NO: 2970726 - RNA, 15 nt, Human
gagcugccuguucag

SEQ ID NO: 2970727 - RNA, 20 nt, Human
gagcaucaggccaggcccuc

SEQ ID NO: 2970728 - RNA, 22 nt, Human
gagcaucaggccaggcccucug

SEQ ID NO: 2970729 - RNA, 18 nt, Human
gagucagaaguuucugcc

SEQ ID NO: 2970730 - RNA, 18 nt, Human
gagugagacucugucuca

SEQ ID NO: 2970731 - RNA, 14 nt, Human
gagugagacucugu

SEQ ID NO: 2970732 - RNA, 18 nt, Human
gagugcagugagccgaga

SEQ ID NO: 2970733 - RNA, 13 nt, Human
gagugcagugagc

SEQ ID NO: 2970734 - RNA, 22 nt, Human
gaguugauacuacaguuuguua

SEQ ID NO: 2970735 - RNA, 21 nt, Human
gaguugauagcacagacccug

SEQ ID NO: 2970736 - RNA, 19 nt, Human
gaguugauacuacaguuug

SEQ ID NO: 2970737 - RNA, 14 nt, Human
gagucacuggaaca

SEQ ID NO: 2970738 - RNA, 21 nt, Human
gagucacuggaacacuaauga

SEQ ID NO: 2970739 - RNA, 17 nt, Human
gaggugggauccuccag

SEQ ID NO: 2970740 - RNA, 15 nt, Human
gaggugggauccucc

SEQ ID NO: 2970741 - RNA, 16 nt, Human
gaggugggauccucca

SEQ ID NO: 2970742 - RNA, 13 nt, Human
gaggugggauccu

SEQ ID NO: 2970743 - RNA, 12 nt, Human
gagggcuccaga

SEQ ID NO: 2970744 - RNA, 13 nt, Human
gagggcuccagac

SEQ ID NO: 2970745 - RNA, 14 nt, Human
gagggcuccagaca

SEQ ID NO: 2970746 - RNA, 15 nt, Human
gagggcuccagacac

SEQ ID NO: 2970747 - RNA, 12 nt, Human
gaggggaacaga

SEQ ID NO: 2970748 - RNA, 12 nt, Human
gaggcucugccc

SEQ ID NO: 2970749 - RNA, 13 nt, Human
gaggcucugcccu

SEQ ID NO: 2970750 - RNA, 14 nt, Human
gaggcucugcccuu

SEQ ID NO: 2970751 - RNA, 15 nt, Human
gaggcucugcccuug

SEQ ID NO: 2970752 - RNA, 17 nt, Human
gaggcucugcccuuggu

SEQ ID NO: 2970753 - RNA, 20 nt, Human
gaggccagagacacaagccu

SEQ ID NO: 2970754 - RNA, 14 nt, Human
gcaggcuggaguua

SEQ ID NO: 2970755 - RNA, 17 nt, Human
gcaggcugccagugccu

SEQ ID NO: 2970756 - RNA, 18 nt, Human
gcaggcugccagugccug

SEQ ID NO: 2970757 - RNA, 17 nt, Human
gcaggcucucaggccag

SEQ ID NO: 2970758 - RNA, 22 nt, Human
gcagggaaacagcuaaugggac

SEQ ID NO: 2970759 - RNA, 13 nt, Human
gcagggaaacagc

SEQ ID NO: 2970760 - RNA, 13 nt, Human
gcaggcucucagg

SEQ ID NO: 2970761 - RNA, 14 nt, Human
gcaggcucucaggc

SEQ ID NO: 2970762 - RNA, 15 nt, Human
gcaggcucucaggcc

SEQ ID NO: 2970763 - RNA, 16 nt, Human
gcaggcucucaggcca

SEQ ID NO: 2970764 - RNA, 22 nt, Human
gcaggcucgggcuccccagccc

SEQ ID NO: 2970765 - RNA, 12 nt, Human
gcaggcucucag

SEQ ID NO: 2970766 - RNA, 21 nt, Human
gcagcuugaggguugggcugg

SEQ ID NO: 2970767 - RNA, 19 nt, Human
gcagcuugaggguugggcu

SEQ ID NO: 2970768 - RNA, 15 nt, Human
gcagcuuauucacaa

SEQ ID NO: 2970769 - RNA, 16 nt, Human
gcagcuugaggguugg

SEQ ID NO: 2970770 - RNA, 20 nt, Human
gcagcugcuuuugucuaugg

SEQ ID NO: 2970771 - RNA, 13 nt, Human
gcagcugcuuuug

SEQ ID NO: 2970772 - RNA, 23 nt, Human
gcagcugcgguccacccaggagc

SEQ ID NO: 2970773 - RNA, 22 nt, Human
gcagcugcgguccacccaggag

SEQ ID NO: 2970774 - RNA, 16 nt, Human
gcacuuuguucuggcu

SEQ ID NO: 2970775 - RNA, 18 nt, Human
gcacuuugggaggcugag

SEQ ID NO: 2970776 - RNA, 22 nt, Human
gcaguugaaaagacuccaaaga

SEQ ID NO: 2970777 - RNA, 14 nt, Human
gcaguugccaguca

SEQ ID NO: 2970778 - RNA, 23 nt, Human
gcaguugccagucaccccggcca

SEQ ID NO: 2970779 - RNA, 15 nt, Human
gcauaaaaauuagcc

SEQ ID NO: 2970780 - RNA, 15 nt, Human
gcauaccacuuuugu

SEQ ID NO: 2970781 - RNA, 17 nt, Human
gccaaggccaaaggaag

SEQ ID NO: 2970782 - RNA, 11 nt, Human
gccaaggccaa

SEQ ID NO: 2970783 - RNA, 14 nt, Human
gccaagaauucuua

SEQ ID NO: 2970784 - RNA, 18 nt, Human
gccaagaauucuuaaaua

SEQ ID NO: 2970785 - RNA, 16 nt, Human
gcauuugaaaauuuug

SEQ ID NO: 2970786 - RNA, 14 nt, Human
gcauuugaaaauuu

SEQ ID NO: 2970787 - RNA, 15 nt, Human
gcauuuaaaagauac

SEQ ID NO: 2970788 - RNA, 12 nt, Human
gcauuuaaaaga

SEQ ID NO: 2970789 - RNA, 16 nt, Human
gcauuguaaaugugcu

SEQ ID NO: 2970790 - RNA, 17 nt, Human
gcaugugaugagaggaa

SEQ ID NO: 2970791 - RNA, 18 nt, Human
gcauguauuuuugucaau

SEQ ID NO: 2970792 - RNA, 13 nt, Human
gcaugggaaugaa

SEQ ID NO: 2970793 - RNA, 16 nt, Human
gcaugggaaugaaugu

SEQ ID NO: 2970794 - RNA, 19 nt, Human
gcaugggaaugaaugucag

SEQ ID NO: 2970795 - RNA, 23 nt, Human
gcauccuggcacccggccccugc

SEQ ID NO: 2970796 - RNA, 22 nt, Human
gcauccuggcacccggccccug

SEQ ID NO: 2970797 - RNA, 14 nt, Human
gcauccuggcaccc

SEQ ID NO: 2970798 - RNA, 21 nt, Human
gcauccuggcacccggccccu

SEQ ID NO: 2970799 - RNA, 17 nt, Human
gcauccuggcacccggc

SEQ ID NO: 2970800 - RNA, 21 nt, Human
gaugcugucuucguacuggga

SEQ ID NO: 2970801 - RNA, 21 nt, Human
gaugaugaaaugaggucagag

SEQ ID NO: 2970802 - RNA, 16 nt, Human
gaugcuuguacauaau

SEQ ID NO: 2970803 - RNA, 14 nt, Human
gaugcuuguacaua

SEQ ID NO: 2970804 - RNA, 19 nt, Human
gauggaggacuccaggcag

SEQ ID NO: 2970805 - RNA, 18 nt, Human
gaucuggguucacugcaa

SEQ ID NO: 2970806 - RNA, 20 nt, Human
gaucuggguucacugcaacc

SEQ ID NO: 2970807 - RNA, 21 nt, Human
gauucuuguauuuauuacaac

SEQ ID NO: 2970808 - RNA, 15 nt, Human
gauucuuguauuuau

SEQ ID NO: 2970809 - RNA, 23 nt, Human
gauuuaacagaaauguacagcaa

SEQ ID NO: 2970810 - RNA, 20 nt, Human
gauuuaacagaaauguacag

SEQ ID NO: 2970811 - RNA, 23 nt, Human
gauucuuauggacaaugacccag

SEQ ID NO: 2970812 - RNA, 21 nt, Human
gauucuucugcuucagccucc

SEQ ID NO: 2970813 - RNA, 21 nt, Human
gauucuccugccucagccucc

SEQ ID NO: 2970814 - RNA, 20 nt, Human
gauucuccugccucagccuc

SEQ ID NO: 2970815 - RNA, 19 nt, Human
gauucuccugccucagccu

SEQ ID NO: 2970816 - RNA, 17 nt, Human
gauuucacucuccuugg

SEQ ID NO: 2970817 - RNA, 18 nt, Human
gauuucacucuccuuggu

SEQ ID NO: 2970818 - RNA, 13 nt, Human
gauuucacucucc

SEQ ID NO: 2970819 - RNA, 16 nt, Human
gauuucacucuccuug

SEQ ID NO: 2970820 - RNA, 23 nt, Human
gauuuuuuuuuccuucagugccu

SEQ ID NO: 2970821 - RNA, 22 nt, Human
gauuuuuuuuuccuucagugcc

SEQ ID NO: 2970822 - RNA, 16 nt, Human
gcaaaaaaaauuagcc

SEQ ID NO: 2970823 - RNA, 13 nt, Human
gcaaaaaaaauua

SEQ ID NO: 2970824 - RNA, 11 nt, Human
gcaauaaagca

SEQ ID NO: 2970825 - RNA, 16 nt, Human
gcaauaaaauggguuu

SEQ ID NO: 2970826 - RNA, 18 nt, Human
gcaauagucaaauugugu

SEQ ID NO: 2970827 - RNA, 23 nt, Human
gcaauaaggggagaguaacccug

SEQ ID NO: 2970828 - RNA, 19 nt, Human
gcacacaccagagcccacc

SEQ ID NO: 2970829 - RNA, 18 nt, Human
gcacacaccagagcccac

SEQ ID NO: 2970830 - RNA, 17 nt, Human
gcacacaccagagccca

SEQ ID NO: 2970831 - RNA, 16 nt, Human
gcacacaccagagccc

SEQ ID NO: 2970832 - RNA, 15 nt, Human
gcacacaccagagcc

SEQ ID NO: 2970833 - RNA, 14 nt, Human
gcacacaccagagc

SEQ ID NO: 2970834 - RNA, 12 nt, Human
gcacacaccaga

SEQ ID NO: 2970835 - RNA, 15 nt, Human
gcaaaagaugcuucu

SEQ ID NO: 2970836 - RNA, 18 nt, Human
gcaacccccagccugcua

SEQ ID NO: 2970837 - RNA, 16 nt, Human
gcaaaagaugcuucuc

SEQ ID NO: 2970838 - RNA, 17 nt, Human
gcaacccccagccugcu

SEQ ID NO: 2970839 - RNA, 22 nt, Human
gcaacccuggugaccagcacca

SEQ ID NO: 2970840 - RNA, 18 nt, Human
gcaaccuccgccucuugg

SEQ ID NO: 2970841 - RNA, 12 nt, Human
gcacacauuuuu

SEQ ID NO: 2970842 - RNA, 11 nt, Human
gcacacauuuu

SEQ ID NO: 2970843 - RNA, 20 nt, Human
gcacacaccagagcccaccu

SEQ ID NO: 2970844 - RNA, 17 nt, Human
gcaccggcuggccuggc

SEQ ID NO: 2970845 - RNA, 15 nt, Human
gcaccggcuggccug

SEQ ID NO: 2970846 - RNA, 16 nt, Human
gcaccggcuggccugg

SEQ ID NO: 2970847 - RNA, 12 nt, Human
gcaccuccugcc

SEQ ID NO: 2970848 - RNA, 17 nt, Human
gcacuccagccugggug

SEQ ID NO: 2970849 - RNA, 15 nt, Human
gcacuccagccuggg

SEQ ID NO: 2970850 - RNA, 18 nt, Human
gcacuauuuauuuacaaa

SEQ ID NO: 2970851 - RNA, 17 nt, Human
gcacuauuuauuuacaa

SEQ ID NO: 2970852 - RNA, 21 nt, Human
gcacuauuuauuuacaaaugu

SEQ ID NO: 2970853 - RNA, 15 nt, Human
gcacuauuuauuuac

SEQ ID NO: 2970854 - RNA, 22 nt, Human
gcacuauagccuaggugacaga

SEQ ID NO: 2970855 - RNA, 22 nt, Human
gcacuauaauguaagcucuacu

SEQ ID NO: 2970856 - RNA, 12 nt, Human
gaaagggauuuu

SEQ ID NO: 2970857 - RNA, 20 nt, Human
gaaagggauuuucagcccuc

SEQ ID NO: 2970858 - RNA, 13 nt, Human
gaaagggcccaga

SEQ ID NO: 2970859 - RNA, 12 nt, Human
gaaaggcuccag

SEQ ID NO: 2970860 - RNA, 14 nt, Human
gaaaggcuccagga

SEQ ID NO: 2970861 - RNA, 15 nt, Human
gaaaggcuccaggag

SEQ ID NO: 2970862 - RNA, 13 nt, Human
gaaaggcuccagg

SEQ ID NO: 2970863 - RNA, 18 nt, Human
gaaagaaaaucaggcugg

SEQ ID NO: 2970864 - RNA, 16 nt, Human
gaaacuggcaaagcag

SEQ ID NO: 2970865 - RNA, 17 nt, Human
gaaacuggcaaagcaga

SEQ ID NO: 2970866 - RNA, 17 nt, Human
gaaacuggauuaaacuu

SEQ ID NO: 2970867 - RNA, 13 nt, Human
gaaacuggauuaa

SEQ ID NO: 2970868 - RNA, 16 nt, Human
gaaagggcccagagag

SEQ ID NO: 2970869 - RNA, 15 nt, Human
gaaagggcccagaga

SEQ ID NO: 2970870 - RNA, 18 nt, Human
gaaaucuaggaaaauuau

SEQ ID NO: 2970871 - RNA, 21 nt, Human
gaaaacuuuaugcuaagugaa

SEQ ID NO: 2970872 - RNA, 23 nt, Human
gaaaagaaaaaugagccuggcaa

SEQ ID NO: 2970873 - RNA, 14 nt, Human
gaaaagacuccaaa

SEQ ID NO: 2970874 - RNA, 16 nt, Human
gaaaagacuccaaaga

SEQ ID NO: 2970875 - RNA, 17 nt, Human
gaaaagacuccaaagaa

SEQ ID NO: 2970876 - RNA, 16 nt, Human
gaaaauuauucuauaa

SEQ ID NO: 2970877 - RNA, 16 nt, Human
gaagacucauucuucu

SEQ ID NO: 2970878 - RNA, 18 nt, Human
gaagacucauucuucugu

SEQ ID NO: 2970879 - RNA, 17 nt, Human
gaagacucauucuucug

SEQ ID NO: 2970880 - RNA, 17 nt, Human
gaagcacagugaucaag

SEQ ID NO: 2970881 - RNA, 22 nt, Human
gaagcacaugccucucucaggc

SEQ ID NO: 2970882 - RNA, 14 nt, Human
gaagcacagcuuca

SEQ ID NO: 2970883 - RNA, 13 nt, Human
gaagcacagcuuc

SEQ ID NO: 2970884 - RNA, 16 nt, Human
gaagcaccauaacuuu

SEQ ID NO: 2970885 - RNA, 21 nt, Human
gaagcacaugccucucucagg

SEQ ID NO: 2970886 - RNA, 20 nt, Human
gaagcacccauuaugcgcug

SEQ ID NO: 2970887 - RNA, 14 nt, Human
gaagacagcucuua

SEQ ID NO: 2970888 - RNA, 15 nt, Human
gaagacagcucuuau

SEQ ID NO: 2970889 - RNA, 13 nt, Human
gaagacagagcua

SEQ ID NO: 2970890 - RNA, 15 nt, Human
gaagacagagcuaca

SEQ ID NO: 2970891 - RNA, 12 nt, Human
gaagacagcucu

SEQ ID NO: 2970892 - RNA, 13 nt, Human
gaagacagcucuu

SEQ ID NO: 2970893 - RNA, 21 nt, Human
gaagacacugaugggcaaccc

SEQ ID NO: 2970894 - RNA, 16 nt, Human
gaagacacugaugggc

SEQ ID NO: 2970895 - RNA, 16 nt, Human
gaacccaaguccaagc

SEQ ID NO: 2970896 - RNA, 17 nt, Human
gaacccaaguccaagca

SEQ ID NO: 2970897 - RNA, 22 nt, Human
gaaccauggucggaaaacaugc

SEQ ID NO: 2970898 - RNA, 23 nt, Human
gaaccaccacacccagcccacuu

SEQ ID NO: 2970899 - RNA, 17 nt, Human
gaacccgggaggcagag

SEQ ID NO: 2970900 - RNA, 13 nt, Human
gaacuccuggccu

SEQ ID NO: 2970901 - RNA, 14 nt, Human
gaacuccuggccuc

SEQ ID NO: 2970902 - RNA, 17 nt, Human
gaacugauguaaguaaa

SEQ ID NO: 2970903 - RNA, 20 nt, Human
gaacugaucauguuuaugag

SEQ ID NO: 2970904 - RNA, 22 nt, Human
gaacugaucauguuuaugagaa

SEQ ID NO: 2970905 - RNA, 22 nt, Human
gaaccaccacacccagcccacu

SEQ ID NO: 2970906 - RNA, 21 nt, Human
gaaccaccacacccagcccac

SEQ ID NO: 2970907 - RNA, 20 nt, Human
gaaccaccacacccagccca

SEQ ID NO: 2970908 - RNA, 18 nt, Human
gaaccaccacacccagcc

SEQ ID NO: 2970909 - RNA, 22 nt, Human
cuugugaauaaagagggugggu

SEQ ID NO: 2970910 - RNA, 13 nt, Human
cuugucuuuggac

SEQ ID NO: 2970911 - RNA, 15 nt, Human
cuugucuuuggaccc

SEQ ID NO: 2970912 - RNA, 18 nt, Human
cuugucuuuggacccuga

SEQ ID NO: 2970913 - RNA, 19 nt, Human
cuuggugucgggcaugaca

SEQ ID NO: 2970914 - RNA, 14 nt, Human
cuugguccugcugc

SEQ ID NO: 2970915 - RNA, 16 nt, Human
cuuggucugugagaug

SEQ ID NO: 2970916 - RNA, 19 nt, Human
cuuggucugugagaugcua

SEQ ID NO: 2970917 - RNA, 22 nt, Human
cuugguagaagcccuucuaccu

SEQ ID NO: 2970918 - RNA, 20 nt, Human
cuuuaccaauugaaguaaaa

SEQ ID NO: 2970919 - RNA, 19 nt, Human
cuuuaccaauugaaguaaa

SEQ ID NO: 2970920 - RNA, 16 nt, Human
cuuuaccaauugaagu

SEQ ID NO: 2970921 - RNA, 18 nt, Human
cuuuaccaauugaaguaa

SEQ ID NO: 2970922 - RNA, 14 nt, Human
cuuucacccuuuuc

SEQ ID NO: 2970923 - RNA, 15 nt, Human
cuuucacccuuuucu

SEQ ID NO: 2970924 - RNA, 20 nt, Human
cuuucacccuuuucuguuug

SEQ ID NO: 2970925 - RNA, 23 nt, Human
cuuuaaugucacaggcaggucca

SEQ ID NO: 2970926 - RNA, 13 nt, Human
cuuugguuauuuu

SEQ ID NO: 2970927 - RNA, 20 nt, Human
cuuugcacacuuuggcccag

SEQ ID NO: 2970928 - RNA, 19 nt, Human
cuuugcacacuuuggccca

SEQ ID NO: 2970929 - RNA, 22 nt, Human
cuuugcacacuuuggcccaggg

SEQ ID NO: 2970930 - RNA, 19 nt, Human
cuuugguuauuuuacuuuu

SEQ ID NO: 2970931 - RNA, 17 nt, Human
cuuugguuauuuuacuu

SEQ ID NO: 2970932 - RNA, 23 nt, Human
cuuugguuauuuuacuuuuugga

SEQ ID NO: 2970933 - RNA, 15 nt, Human
cuuugcacacuuugg

SEQ ID NO: 2970934 - RNA, 17 nt, Human
cuuuguauucucuccug

SEQ ID NO: 2970935 - RNA, 21 nt, Human
cuuuuauaaacuuuaccuuuu

SEQ ID NO: 2970936 - RNA, 20 nt, Human
cuuuuauaaacuuuaccuuu

SEQ ID NO: 2970937 - RNA, 22 nt, Human
cuuuguauucucuccuguaccu

SEQ ID NO: 2970938 - RNA, 19 nt, Human
cuuuuauaaacuuuaccuu

SEQ ID NO: 2970939 - RNA, 16 nt, Human
cuuugacgccauccca

SEQ ID NO: 2970940 - RNA, 17 nt, Human
cuuugacgccaucccag

SEQ ID NO: 2970941 - RNA, 16 nt, Human
cuuucuacccagcgag

SEQ ID NO: 2970942 - RNA, 15 nt, Human
cuuucuacccagcga

SEQ ID NO: 2970943 - RNA, 13 nt, Human
cuucuaaguaaaa

SEQ ID NO: 2970944 - RNA, 17 nt, Human
cuucuaaguaaaaccac

SEQ ID NO: 2970945 - RNA, 21 nt, Human
cuucuaaguaaaaccacagca

SEQ ID NO: 2970946 - RNA, 13 nt, Human
cuucucacauuua

SEQ ID NO: 2970947 - RNA, 20 nt, Human
cuucucacauuuauauuuuu

SEQ ID NO: 2970948 - RNA, 21 nt, Human
cuuccucuuuccaucuacccu

SEQ ID NO: 2970949 - RNA, 22 nt, Human
cuuccucuuuccaucuacccuc

SEQ ID NO: 2970950 - RNA, 13 nt, Human
cuuccuccuggug

SEQ ID NO: 2970951 - RNA, 23 nt, Human
cuucugaacuuggcgcugccccu

SEQ ID NO: 2970952 - RNA, 13 nt, Human
cuucuucagagac

SEQ ID NO: 2970953 - RNA, 14 nt, Human
cuucuucagagacu

SEQ ID NO: 2970954 - RNA, 16 nt, Human
cuugacaucaacugca

SEQ ID NO: 2970955 - RNA, 20 nt, Human
cuugacagggcacaccgggc

SEQ ID NO: 2970956 - RNA, 22 nt, Human
cuugauauccucuuugagugaa

SEQ ID NO: 2970957 - RNA, 17 nt, Human
cuugauauccucuuuga

SEQ ID NO: 2970958 - RNA, 18 nt, Human
cuugauguguuaucucuu

SEQ ID NO: 2970959 - RNA, 12 nt, Human
cuugcaaaguau

SEQ ID NO: 2970960 - RNA, 12 nt, Human
cuugauucauaa

SEQ ID NO: 2970961 - RNA, 23 nt, Human
cuuggauuguccccgacccuugc

SEQ ID NO: 2970962 - RNA, 24 nt, Human
cuuggauuguccccgacccuugcc

SEQ ID NO: 2970963 - RNA, 22 nt, Human
cuuggauuguccccgacccuug

SEQ ID NO: 2970964 - RNA, 17 nt, Human
cugucggagcccugucu

SEQ ID NO: 2970965 - RNA, 16 nt, Human
cugucgcccagucugg

SEQ ID NO: 2970966 - RNA, 15 nt, Human
cugucgcccagucug

SEQ ID NO: 2970967 - RNA, 23 nt, Human
cugucaauuacaggaaguacugg

SEQ ID NO: 2970968 - RNA, 19 nt, Human
cugucaauuacaggaagua

SEQ ID NO: 2970969 - RNA, 20 nt, Human
cugucaauuacaggaaguac

SEQ ID NO: 2970970 - RNA, 21 nt, Human
cuguccugggagugagcuggu

SEQ ID NO: 2970971 - RNA, 13 nt, Human
cuguagaguggga

SEQ ID NO: 2970972 - RNA, 13 nt, Human
cuguuauaaucuu

SEQ ID NO: 2970973 - RNA, 15 nt, Human
cugugcugcccugcc

SEQ ID NO: 2970974 - RNA, 17 nt, Human
cugugcugcccugccca

SEQ ID NO: 2970975 - RNA, 18 nt, Human
cugugcugcccugcccac

SEQ ID NO: 2970976 - RNA, 19 nt, Human
cugugcugcccugcccacc

SEQ ID NO: 2970977 - RNA, 17 nt, Human
cugugucagcauagaag

SEQ ID NO: 2970978 - RNA, 19 nt, Human
cugugucagcauagaagua

SEQ ID NO: 2970979 - RNA, 18 nt, Human
cugugccucugggacugg

SEQ ID NO: 2970980 - RNA, 13 nt, Human
cugugcugcccug

SEQ ID NO: 2970981 - RNA, 14 nt, Human
cugugcugcccugc

SEQ ID NO: 2970982 - RNA, 12 nt, Human
cugugcugcccu

SEQ ID NO: 2970983 - RNA, 14 nt, Human
cuuaaaacaacacu

SEQ ID NO: 2970984 - RNA, 15 nt, Human
cuuaccagcagagca

SEQ ID NO: 2970985 - RNA, 21 nt, Human
cuuaaaaaugguuuaaauggu

SEQ ID NO: 2970986 - RNA, 22 nt, Human
cuguuggcugggggccucagug

SEQ ID NO: 2970987 - RNA, 19 nt, Human
cuguuggcugggggccuca

SEQ ID NO: 2970988 - RNA, 14 nt, Human
cuguuggcuggggg

SEQ ID NO: 2970989 - RNA, 23 nt, Human
cuuagcucauucuccuuguguua

SEQ ID NO: 2970990 - RNA, 22 nt, Human
cuuagcucauucuccuuguguu

SEQ ID NO: 2970991 - RNA, 16 nt, Human
cuuaccagcagagcac

SEQ ID NO: 2970992 - RNA, 21 nt, Human
cuuagcagggaaacagcuaau

SEQ ID NO: 2970993 - RNA, 19 nt, Human
cuuagggaaggauacaaaa

SEQ ID NO: 2970994 - RNA, 21 nt, Human
cuuagggaaggauacaaaagc

SEQ ID NO: 2970995 - RNA, 18 nt, Human
cuggauaguccgucucug

SEQ ID NO: 2970996 - RNA, 19 nt, Human
cuggauaguccgucucugc

SEQ ID NO: 2970997 - RNA, 18 nt, Human
cuggauauagcuagguga

SEQ ID NO: 2970998 - RNA, 14 nt, Human
cuggagaaaaugga

SEQ ID NO: 2970999 - RNA, 18 nt, Human
cuggacugagggggccug

SEQ ID NO: 2971000 - RNA, 22 nt, Human
cuggacugagggggccuggaug

SEQ ID NO: 2971001 - RNA, 21 nt, Human
cuggacugagggggccuggau

SEQ ID NO: 2971002 - RNA, 20 nt, Human
cuggacugagggggccugga

SEQ ID NO: 2971003 - RNA, 23 nt, Human
cuggacugagggggccuggaugc

SEQ ID NO: 2971004 - RNA, 19 nt, Human
cugcuuuuuaaagaaugcu

SEQ ID NO: 2971005 - RNA, 21 nt, Human
cugcuuuugucuaugggacuc

SEQ ID NO: 2971006 - RNA, 19 nt, Human
cugcuuuugucuaugggac

SEQ ID NO: 2971007 - RNA, 19 nt, Human
cugcuucaaauauuucccu

SEQ ID NO: 2971008 - RNA, 12 nt, Human
cugcuucaagga

SEQ ID NO: 2971009 - RNA, 13 nt, Human
cugcuucaaggau

SEQ ID NO: 2971010 - RNA, 21 nt, Human
cugcuucaaggauccugagcc

SEQ ID NO: 2971011 - RNA, 22 nt, Human
cugcuucaaggauccugagcca

SEQ ID NO: 2971012 - RNA, 23 nt, Human
cugcuucaaggauccugagccag

SEQ ID NO: 2971013 - RNA, 20 nt, Human
cugcuuuugucuaugggacu

SEQ ID NO: 2971014 - RNA, 20 nt, Human
cugcuucaaggauccugagc

SEQ ID NO: 2971015 - RNA, 14 nt, Human
cugcuucaaauauu

SEQ ID NO: 2971016 - RNA, 23 nt, Human
cugccucucccaucacuucccua

SEQ ID NO: 2971017 - RNA, 22 nt, Human
cugccucucccaucacuucccu

SEQ ID NO: 2971018 - RNA, 15 nt, Human
cugccucucccauca

SEQ ID NO: 2971019 - RNA, 20 nt, Human
cugccuguugggccaggagc

SEQ ID NO: 2971020 - RNA, 19 nt, Human
cugccuguucagcuccagc

SEQ ID NO: 2971021 - RNA, 18 nt, Human
cugccuguucagcuccag

SEQ ID NO: 2971022 - RNA, 17 nt, Human
cugccuguucagcucca

SEQ ID NO: 2971023 - RNA, 21 nt, Human
cugccuccccuccucugcuug

SEQ ID NO: 2971024 - RNA, 21 nt, Human
cugccuguugggccaggagcc

SEQ ID NO: 2971025 - RNA, 22 nt, Human
cugccuguugggccaggagccu

SEQ ID NO: 2971026 - RNA, 23 nt, Human
cugccuguugggccaggagccuc

SEQ ID NO: 2971027 - RNA, 18 nt, Human
cugcugacuguuuucucu

SEQ ID NO: 2971028 - RNA, 21 nt, Human
cugcugacuguuuucucuuga

SEQ ID NO: 2971029 - RNA, 15 nt, Human
cuggguucacugcaa

SEQ ID NO: 2971030 - RNA, 20 nt, Human
cuggguucacugcaaccucc

SEQ ID NO: 2971031 - RNA, 18 nt, Human
cuggguucacugcaaccu

SEQ ID NO: 2971032 - RNA, 14 nt, Human
cuggggagaaagua

SEQ ID NO: 2971033 - RNA, 12 nt, Human
cugggcagaagg

SEQ ID NO: 2971034 - RNA, 15 nt, Human
cugggcagaaggaag

SEQ ID NO: 2971035 - RNA, 22 nt, Human
cuggccccucagggucccuggu

SEQ ID NO: 2971036 - RNA, 14 nt, Human
cuggccuagcauac

SEQ ID NO: 2971037 - RNA, 11 nt, Human
cugggacacag

SEQ ID NO: 2971038 - RNA, 11 nt, Human
cuggcagccca

SEQ ID NO: 2971039 - RNA, 12 nt, Human
cuggcagccccu

SEQ ID NO: 2971040 - RNA, 17 nt, Human
cuggcagaguugaagac

SEQ ID NO: 2971041 - RNA, 18 nt, Human
cuggcagaguugaagaca

SEQ ID NO: 2971042 - RNA, 14 nt, Human
auuauguuaauauu

SEQ ID NO: 2971043 - RNA, 16 nt, Human
auuauguuaauauuuc

SEQ ID NO: 2971044 - RNA, 13 nt, Human
auuauguuaauau

SEQ ID NO: 2971045 - RNA, 17 nt, Human
auuauguuaauauuucu

SEQ ID NO: 2971046 - RNA, 20 nt, Human
auuauuaccuuacagaaguu

SEQ ID NO: 2971047 - RNA, 18 nt, Human
auuaucuagauacuguau

SEQ ID NO: 2971048 - RNA, 14 nt, Human
auuaucuagauacu

SEQ ID NO: 2971049 - RNA, 21 nt, Human
auuauguuaaaacugggacag

SEQ ID NO: 2971050 - RNA, 18 nt, Human
auuauauuuauuacugua

SEQ ID NO: 2971051 - RNA, 15 nt, Human
auuauauuuauuacu

SEQ ID NO: 2971052 - RNA, 19 nt, Human
auucaaacagucucaggaa

SEQ ID NO: 2971053 - RNA, 20 nt, Human
auucaaacagucucaggaaa

SEQ ID NO: 2971054 - RNA, 16 nt, Human
auucaaacagucucag

SEQ ID NO: 2971055 - RNA, 18 nt, Human
auucaaacagucucagga

SEQ ID NO: 2971056 - RNA, 13 nt, Human
auucaggaagcuc

SEQ ID NO: 2971057 - RNA, 14 nt, Human
auucagacagcugc

SEQ ID NO: 2971058 - RNA, 15 nt, Human
auucagacagcugcc

SEQ ID NO: 2971059 - RNA, 16 nt, Human
auucagacagcugccu

SEQ ID NO: 2971060 - RNA, 17 nt, Human
auucagacagcugccug

SEQ ID NO: 2971061 - RNA, 18 nt, Human
auucagacagcugccugg

SEQ ID NO: 2971062 - RNA, 12 nt, Human
auucaggaagcu

SEQ ID NO: 2971063 - RNA, 12 nt, Human
auucagacagcu

SEQ ID NO: 2971064 - RNA, 13 nt, Human
auucagacagcug

SEQ ID NO: 2971065 - RNA, 11 nt, Human
auucagacagc

SEQ ID NO: 2971066 - RNA, 16 nt, Human
auuauauucauucuuu

SEQ ID NO: 2971067 - RNA, 17 nt, Human
uuuguggaaaauaacuc

SEQ ID NO: 2971068 - RNA, 19 nt, Human
auucagacagcugccuggg

SEQ ID NO: 2971069 - RNA, 13 nt, Human
auugaagcagagu

SEQ ID NO: 2971070 - RNA, 15 nt, Human
auugaagcagagugg

SEQ ID NO: 2971071 - RNA, 14 nt, Human
auugaagcagagug

SEQ ID NO: 2971072 - RNA, 18 nt, Human
auugaagcagaguggcag

SEQ ID NO: 2971073 - RNA, 17 nt, Human
auugacacuuaaaaaug

SEQ ID NO: 2971074 - RNA, 15 nt, Human
auugacacuuaaaaa

SEQ ID NO: 2971075 - RNA, 17 nt, Human
auugaccugaggcccuu

SEQ ID NO: 2971076 - RNA, 19 nt, Human
auugacacuuaaaaauggu

SEQ ID NO: 2971077 - RNA, 17 nt, Human
auugaaaucuuuuugcu

SEQ ID NO: 2971078 - RNA, 18 nt, Human
auugaaaucuuuuugcuu

SEQ ID NO: 2971079 - RNA, 20 nt, Human
auugaaaucuuuuugcuuug

SEQ ID NO: 2971080 - RNA, 12 nt, Human
auugaaaucuuu

SEQ ID NO: 2971081 - RNA, 14 nt, Human
auucuuaaauaugu

SEQ ID NO: 2971082 - RNA, 14 nt, Human
auucuguuggccag

SEQ ID NO: 2971083 - RNA, 21 nt, Human
auucuguuggccagugugaca

SEQ ID NO: 2971084 - RNA, 19 nt, Human
auucuguuggccaguguga

SEQ ID NO: 2971085 - RNA, 22 nt, Human
auucugcucacauaucugucau

SEQ ID NO: 2971086 - RNA, 21 nt, Human
auucugcucacauaucuguca

SEQ ID NO: 2971087 - RNA, 20 nt, Human
auucugcucacauaucuguc

SEQ ID NO: 2971088 - RNA, 19 nt, Human
auucugcucacauaucugu

SEQ ID NO: 2971089 - RNA, 21 nt, Human
auucugccugcccaggccccu

SEQ ID NO: 2971090 - RNA, 20 nt, Human
auucugccugcccaggcccc

SEQ ID NO: 2971091 - RNA, 18 nt, Human
auucugcucacauaucug

SEQ ID NO: 2971092 - RNA, 19 nt, Human
auucugccugcccaggccc

SEQ ID NO: 2971093 - RNA, 18 nt, Human
auucugccugcccaggcc

SEQ ID NO: 2971094 - RNA, 17 nt, Human
auucugccugcccaggc

SEQ ID NO: 2971095 - RNA, 16 nt, Human
auucugccugcccagg

SEQ ID NO: 2971096 - RNA, 15 nt, Human
auucugccugcccag

SEQ ID NO: 2971097 - RNA, 14 nt, Human
auucugccugccca

SEQ ID NO: 2971098 - RNA, 13 nt, Human
auucugccugccc

SEQ ID NO: 2971099 - RNA, 11 nt, Human
auucugccugc

SEQ ID NO: 2971100 - RNA, 17 nt, Human
auucucauuugucacac

SEQ ID NO: 2971101 - RNA, 19 nt, Human
auuuuugguauuugaaaca

SEQ ID NO: 2971102 - RNA, 19 nt, Human
auuuuucuuauuucauuuc

SEQ ID NO: 2971103 - RNA, 20 nt, Human
auuuuucuuauuucauuucu

SEQ ID NO: 2971104 - RNA, 22 nt, Human
auuuuucuuagggaaggauaca

SEQ ID NO: 2971105 - RNA, 15 nt, Human
auuuuucuuauuuca

SEQ ID NO: 2971106 - RNA, 21 nt, Human
auuuuucuuagggaaggauac

SEQ ID NO: 2971107 - RNA, 19 nt, Human
auuuuuguuuuuauuaaaa

SEQ ID NO: 2971108 - RNA, 21 nt, Human
auuuuuguuuuuauuaaaagg

SEQ ID NO: 2971109 - RNA, 21 nt, Human
auuuuuguuuucauuaucuca

SEQ ID NO: 2971110 - RNA, 14 nt, Human
auuuuuuaaaauaa

SEQ ID NO: 2971111 - RNA, 14 nt, Human
auuuuuuaaaugca

SEQ ID NO: 2971112 - RNA, 13 nt, Human
auuuuuuaaaugc

SEQ ID NO: 2971113 - RNA, 23 nt, Human
auuuuuuaaccuccuaaguauca

SEQ ID NO: 2971114 - RNA, 22 nt, Human
auuuuugugauuuugugauuga

SEQ ID NO: 2971115 - RNA, 12 nt, Human
auuuuuguaauu

SEQ ID NO: 2971116 - RNA, 19 nt, Human
auuuuuguagagccagggu

SEQ ID NO: 2971117 - RNA, 18 nt, Human
auuuuuuguuaaaugauu

SEQ ID NO: 2971118 - RNA, 23 nt, Human
auuuuuucucuaggaaauauuua

SEQ ID NO: 2971119 - RNA, 20 nt, Human
auuuuuucucuaggaaauau

SEQ ID NO: 2971120 - RNA, 19 nt, Human
auuuuuuacauuuuacaca

SEQ ID NO: 2971121 - RNA, 14 nt, Human
auuuucuauaauuu

SEQ ID NO: 2971122 - RNA, 15 nt, Human
auuuucuauaauuua

SEQ ID NO: 2971123 - RNA, 19 nt, Human
auuuucccuauuagagaag

SEQ ID NO: 2971124 - RNA, 14 nt, Human
auuuuccugaaaac

SEQ ID NO: 2971125 - RNA, 16 nt, Human
auuuuccugccaggca

SEQ ID NO: 2971126 - RNA, 17 nt, Human
auuuugauguuuuaagg

SEQ ID NO: 2971127 - RNA, 15 nt, Human
auuuugauguuuuaa

SEQ ID NO: 2971128 - RNA, 19 nt, Human
auuuugauccaagcugguc

SEQ ID NO: 2971129 - RNA, 18 nt, Human
auuuugauccaagcuggu

SEQ ID NO: 2971130 - RNA, 21 nt, Human
auuuugcugucccuuuuccuu

SEQ ID NO: 2971131 - RNA, 20 nt, Human
auuuugcuaaaugugaauga

SEQ ID NO: 2971132 - RNA, 16 nt, Human
auuuuguuucagugca

SEQ ID NO: 2971133 - RNA, 23 nt, Human
auuuugucauauaagauucauau

SEQ ID NO: 2971134 - RNA, 19 nt, Human
auuuugugcccccauguaa

SEQ ID NO: 2971135 - RNA, 12 nt, Human
auuuugcuuugu

SEQ ID NO: 2971136 - RNA, 20 nt, Human
auuuugcuuugugauuuuug

SEQ ID NO: 2971137 - RNA, 18 nt, Human
auuuugcuuugugauuuu

SEQ ID NO: 2971138 - RNA, 19 nt, Human
auuuuggaaaauaaauuau

SEQ ID NO: 2971139 - RNA, 14 nt, Human
auuuuggaaaauaa

SEQ ID NO: 2971140 - RNA, 20 nt, Human
auuuuggaaaauaaauuauu

SEQ ID NO: 2971141 - RNA, 17 nt, Human
auuugaaacacugguuu

SEQ ID NO: 2971142 - RNA, 14 nt, Human
auuugaaacacugg

SEQ ID NO: 2971143 - RNA, 16 nt, Human
auuugaaaauuuugau

SEQ ID NO: 2971144 - RNA, 15 nt, Human
auuugaaaauuuuga

SEQ ID NO: 2971145 - RNA, 18 nt, Human
auuucuaggacugaauua

SEQ ID NO: 2971146 - RNA, 17 nt, Human
auuucuaggacugaauu

SEQ ID NO: 2971147 - RNA, 20 nt, Human
auuucuuccacaagagccca

SEQ ID NO: 2971148 - RNA, 23 nt, Human
auuucuuccacaagagcccaggc

SEQ ID NO: 2971149 - RNA, 23 nt, Human
auuucuaggacugaauuaugaaa

SEQ ID NO: 2971150 - RNA, 20 nt, Human
auuucuaggacugaauuaug

SEQ ID NO: 2971151 - RNA, 16 nt, Human
auuuauuuauuuauuc

SEQ ID NO: 2971152 - RNA, 14 nt, Human
auuuauuuaaauuu

SEQ ID NO: 2971153 - RNA, 12 nt, Human
auuuauuuaaau

SEQ ID NO: 2971154 - RNA, 14 nt, Human
auuuauuuuaauaa

SEQ ID NO: 2971155 - RNA, 19 nt, Human
auuucccaaagcagugcau

SEQ ID NO: 2971156 - RNA, 14 nt, Human
auuuguauaaaaua

SEQ ID NO: 2971157 - RNA, 22 nt, Human
auuuguaguguuggagaagaac

SEQ ID NO: 2971158 - RNA, 19 nt, Human
auuuguaguguuggagaag

SEQ ID NO: 2971159 - RNA, 23 nt, Human
auuuuaaaagaaugauuaugaau

SEQ ID NO: 2971160 - RNA, 14 nt, Human
auuugucccaagug

SEQ ID NO: 2971161 - RNA, 13 nt, Human
auuugucccaagu

SEQ ID NO: 2971162 - RNA, 18 nt, Human
auuugucccaagugccaa

SEQ ID NO: 2971163 - RNA, 22 nt, Human
auuuuaaaaauacagauagaua

SEQ ID NO: 2971164 - RNA, 16 nt, Human
auuuuaaaagaaugau

SEQ ID NO: 2971165 - RNA, 23 nt, Human
auugauugggcacaucauuucaa

SEQ ID NO: 2971166 - RNA, 19 nt, Human
auugauugggcacaucauu

SEQ ID NO: 2971167 - RNA, 20 nt, Human
auugauuauuacuggcaaaa

SEQ ID NO: 2971168 - RNA, 13 nt, Human
auugacuuuuuau

SEQ ID NO: 2971169 - RNA, 21 nt, Human
auugauuuccguuaaaauacc

SEQ ID NO: 2971170 - RNA, 19 nt, Human
auuggacaguaaaauccac

SEQ ID NO: 2971171 - RNA, 19 nt, Human
auuggagcucgugggacag

SEQ ID NO: 2971172 - RNA, 13 nt, Human
auugucuagugaa

SEQ ID NO: 2971173 - RNA, 14 nt, Human
auugugggaagggg

SEQ ID NO: 2971174 - RNA, 13 nt, Human
auugugggaaggg

SEQ ID NO: 2971175 - RNA, 23 nt, Human
auugucaaaguggugagaggcau

SEQ ID NO: 2971176 - RNA, 16 nt, Human
auugucaaagugguga

SEQ ID NO: 2971177 - RNA, 21 nt, Human
auuguuuggggaugagaaagg

SEQ ID NO: 2971178 - RNA, 13 nt, Human
auuuaaaagauac

SEQ ID NO: 2971179 - RNA, 16 nt, Human
auuuaaaagauacagu

SEQ ID NO: 2971180 - RNA, 14 nt, Human
auuuaaaagauaca

SEQ ID NO: 2971181 - RNA, 17 nt, Human
auuuaaaagauacaguu

SEQ ID NO: 2971182 - RNA, 14 nt, Human
uuucaaauguucuc

SEQ ID NO: 2971183 - RNA, 17 nt, Human
uuuccaugaguccccug

SEQ ID NO: 2971184 - RNA, 18 nt, Human
uuuccaugaguccccugu

SEQ ID NO: 2971185 - RNA, 14 nt, Human
auggacuucuggau

SEQ ID NO: 2971186 - RNA, 11 nt, Human
auggacuuugu

SEQ ID NO: 2971187 - RNA, 12 nt, Human
auggacuuuguu

SEQ ID NO: 2971188 - RNA, 22 nt, Human
auggacuuugcacacuuuggcc

SEQ ID NO: 2971189 - RNA, 19 nt, Human
auggacuaacuugucuuug

SEQ ID NO: 2971190 - RNA, 19 nt, Human
auggcuaagcaaaauguga

SEQ ID NO: 2971191 - RNA, 18 nt, Human
auggcuaauguacugcau

SEQ ID NO: 2971192 - RNA, 23 nt, Human
auggcuauaggugcuacaaaaac

SEQ ID NO: 2971193 - RNA, 22 nt, Human
augggagcugucaagcauguau

SEQ ID NO: 2971194 - RNA, 19 nt, Human
augggagagaagagaaugc

SEQ ID NO: 2971195 - RNA, 21 nt, Human
augggagcugucaagcaugua

SEQ ID NO: 2971196 - RNA, 15 nt, Human
augggagagaagaga

SEQ ID NO: 2971197 - RNA, 16 nt, Human
auggcacuaguauuuc

SEQ ID NO: 2971198 - RNA, 14 nt, Human
auggcacuaguauu

SEQ ID NO: 2971199 - RNA, 21 nt, Human
augcuagaacucccuuucaac

SEQ ID NO: 2971200 - RNA, 20 nt, Human
augcuagaacucccuuucaa

SEQ ID NO: 2971201 - RNA, 22 nt, Human
augcuagaacucccuuucaaca

SEQ ID NO: 2971202 - RNA, 19 nt, Human
augcuagaacucccuuuca

SEQ ID NO: 2971203 - RNA, 13 nt, Human
augcuucucacug

SEQ ID NO: 2971204 - RNA, 19 nt, Human
augcuguucaugaaagauu

SEQ ID NO: 2971205 - RNA, 22 nt, Human
augcugugcccuaaaguguauu

SEQ ID NO: 2971206 - RNA, 17 nt, Human
augcuguucaugaaaga

SEQ ID NO: 2971207 - RNA, 23 nt, Human
augcugcugccccugcacagcag

SEQ ID NO: 2971208 - RNA, 22 nt, Human
augcugcugccccugcacagca

SEQ ID NO: 2971209 - RNA, 21 nt, Human
augcugcugccccugcacagc

SEQ ID NO: 2971210 - RNA, 15 nt, Human
augcugcugccccug

SEQ ID NO: 2971211 - RNA, 13 nt, Human
augcugcugcccc

SEQ ID NO: 2971212 - RNA, 16 nt, Human
uuucaaacauauauaa

SEQ ID NO: 2971213 - RNA, 16 nt, Human
uuucaaacuuuacuau

SEQ ID NO: 2971214 - RNA, 22 nt, Human
uuucaaacuuuacuauggcccu

SEQ ID NO: 2971215 - RNA, 15 nt, Human
uuucaaacuuuacua

SEQ ID NO: 2971216 - RNA, 19 nt, Human
augauugccuuuuuauaac

SEQ ID NO: 2971217 - RNA, 19 nt, Human
augcacuuuguucuggcuc

SEQ ID NO: 2971218 - RNA, 20 nt, Human
augcacuuuguucuggcucu

SEQ ID NO: 2971219 - RNA, 17 nt, Human
augcacuuuguucuggc

SEQ ID NO: 2971220 - RNA, 16 nt, Human
augcacuuuguucugg

SEQ ID NO: 2971221 - RNA, 13 nt, Human
augcaccuggaau

SEQ ID NO: 2971222 - RNA, 22 nt, Human
augcaccagcccuuagcaggga

SEQ ID NO: 2971223 - RNA, 17 nt, Human
uuuaaagauguagacag

SEQ ID NO: 2971224 - RNA, 13 nt, Human
uuuaaagaaugcu

SEQ ID NO: 2971225 - RNA, 18 nt, Human
uuguuuugccaauuugca

SEQ ID NO: 2971226 - RNA, 23 nt, Human
uuuaaaaauacagauagauauau

SEQ ID NO: 2971227 - RNA, 16 nt, Human
augauauaagguuuuu

SEQ ID NO: 2971228 - RNA, 14 nt, Human
augauuaaguaaug

SEQ ID NO: 2971229 - RNA, 18 nt, Human
augauuaaguaaugauaa

SEQ ID NO: 2971230 - RNA, 17 nt, Human
augaucuaggaagacuu

SEQ ID NO: 2971231 - RNA, 20 nt, Human
augaucuaggaagacuuugg

SEQ ID NO: 2971232 - RNA, 15 nt, Human
augaucuaggaagac

SEQ ID NO: 2971233 - RNA, 15 nt, Human
augauaacuggaaac

SEQ ID NO: 2971234 - RNA, 20 nt, Human
uuguucuugguuuguaaauu

SEQ ID NO: 2971235 - RNA, 20 nt, Human
uuguguuacuaaguuuuuau

SEQ ID NO: 2971236 - RNA, 15 nt, Human
uuguguuacuaaguu

SEQ ID NO: 2971237 - RNA, 13 nt, Human
uuguguuacuaag

SEQ ID NO: 2971238 - RNA, 16 nt, Human
uuggugcgggguacac

SEQ ID NO: 2971239 - RNA, 21 nt, Human
uuguuccacaaguuaaauaaa

SEQ ID NO: 2971240 - RNA, 22 nt, Human
uuuaauuugaagguagaauguu

SEQ ID NO: 2971241 - RNA, 12 nt, Human
uuuacaaauguu

SEQ ID NO: 2971242 - RNA, 19 nt, Human
uuuaauuuuuuugagacag

SEQ ID NO: 2971243 - RNA, 18 nt, Human
augcagccucacaguccu

SEQ ID NO: 2971244 - RNA, 15 nt, Human
uuuaaauagaugaca

SEQ ID NO: 2971245 - RNA, 18 nt, Human
uuuaaauauaugcuaagu

SEQ ID NO: 2971246 - RNA, 13 nt, Human
augcaguucugaa

SEQ ID NO: 2971247 - RNA, 13 nt, Human
augcagugcuucc

SEQ ID NO: 2971248 - RNA, 23 nt, Human
augcagugguaugaucacggcuc

SEQ ID NO: 2971249 - RNA, 17 nt, Human
augccauuuaaagcuua

SEQ ID NO: 2971250 - RNA, 21 nt, Human
augccauuuaaagcuuauuaa

SEQ ID NO: 2971251 - RNA, 11 nt, Human
augcccagccc

SEQ ID NO: 2971252 - RNA, 12 nt, Human
augcccagcccc

SEQ ID NO: 2971253 - RNA, 13 nt, Human
augcccagccccu

SEQ ID NO: 2971254 - RNA, 14 nt, Human
augcccagccccuu

SEQ ID NO: 2971255 - RNA, 18 nt, Human
auguagacaguuggguuu

SEQ ID NO: 2971256 - RNA, 20 nt, Human
auguagacaguuggguuuuu

SEQ ID NO: 2971257 - RNA, 13 nt, Human
auguagaggagaa

SEQ ID NO: 2971258 - RNA, 12 nt, Human
auguagaggaga

SEQ ID NO: 2971259 - RNA, 19 nt, Human
auguagaggagaaacugga

SEQ ID NO: 2971260 - RNA, 17 nt, Human
auguagaggagaaacug

SEQ ID NO: 2971261 - RNA, 18 nt, Human
auguagauguaugcacac

SEQ ID NO: 2971262 - RNA, 17 nt, Human
auguagauguaugcaca

SEQ ID NO: 2971263 - RNA, 16 nt, Human
auguacuucaugcugu

SEQ ID NO: 2971264 - RNA, 17 nt, Human
auguacgacuugcauac

SEQ ID NO: 2971265 - RNA, 12 nt, Human
uuugaccucugc

SEQ ID NO: 2971266 - RNA, 22 nt, Human
auguaggcuggcuuucagagua

SEQ ID NO: 2971267 - RNA, 22 nt, Human
auguagauguaugcacacacau

SEQ ID NO: 2971268 - RNA, 19 nt, Human
auguagauguaugcacaca

SEQ ID NO: 2971269 - RNA, 13 nt, Human
uuugcucauggaa

SEQ ID NO: 2971270 - RNA, 13 nt, Human
uuugccucugccu

SEQ ID NO: 2971271 - RNA, 15 nt, Human
uuugccguuauuaaa

SEQ ID NO: 2971272 - RNA, 14 nt, Human
uuugcaagccagau

SEQ ID NO: 2971273 - RNA, 22 nt, Human
uuugauucagacagcugccugg

SEQ ID NO: 2971274 - RNA, 13 nt, Human
uuugcaaauaagu

SEQ ID NO: 2971275 - RNA, 13 nt, Human
uuugacgccaucc

SEQ ID NO: 2971276 - RNA, 14 nt, Human
uuugacgccauccc

SEQ ID NO: 2971277 - RNA, 16 nt, Human
uuugacgccaucccag

SEQ ID NO: 2971278 - RNA, 19 nt, Human
uuugacgccaucccagccc

SEQ ID NO: 2971279 - RNA, 20 nt, Human
uuugacgccaucccagcccc

SEQ ID NO: 2971280 - RNA, 23 nt, Human
uuugauuaaauucuugcaaagua

SEQ ID NO: 2971281 - RNA, 21 nt, Human
uuugauucagacagcugccug

SEQ ID NO: 2971282 - RNA, 21 nt, Human
uuugauuaaauucuugcaaag

SEQ ID NO: 2971283 - RNA, 18 nt, Human
uuugauuaaauucuugca

SEQ ID NO: 2971284 - RNA, 13 nt, Human
uuugauuaaauuc

SEQ ID NO: 2971285 - RNA, 22 nt, Human
uuugauguucuuucacccuuuu

SEQ ID NO: 2971286 - RNA, 16 nt, Human
augucaguauuucaac

SEQ ID NO: 2971287 - RNA, 13 nt, Human
augucaguauuuc

SEQ ID NO: 2971288 - RNA, 22 nt, Human
auguauuacaguggggaaugaa

SEQ ID NO: 2971289 - RNA, 17 nt, Human
auguauguguaauaaau

SEQ ID NO: 2971290 - RNA, 16 nt, Human
auguauguguaaguau

SEQ ID NO: 2971291 - RNA, 17 nt, Human
auguaugcacacacaua

SEQ ID NO: 2971292 - RNA, 16 nt, Human
auguaugcacacacau

SEQ ID NO: 2971293 - RNA, 15 nt, Human
auguaugcacacaca

SEQ ID NO: 2971294 - RNA, 15 nt, Human
auguauguguaagua

SEQ ID NO: 2971295 - RNA, 12 nt, Human
augucaguguga

SEQ ID NO: 2971296 - RNA, 13 nt, Human
augucagugugac

SEQ ID NO: 2971297 - RNA, 17 nt, Human
auguccacugguucuuc

SEQ ID NO: 2971298 - RNA, 16 nt, Human
auguccacugguucuu

SEQ ID NO: 2971299 - RNA, 22 nt, Human
augucagucugcuuagaaauaa

SEQ ID NO: 2971300 - RNA, 21 nt, Human
augucagucugcuuagaaaua

SEQ ID NO: 2971301 - RNA, 20 nt, Human
augucagucugcuuagaaau

SEQ ID NO: 2971302 - RNA, 19 nt, Human
augucagucugcuuagaaa

SEQ ID NO: 2971303 - RNA, 18 nt, Human
augucagucugcuuagaa

SEQ ID NO: 2971304 - RNA, 19 nt, Human
augugcacaucuguuuugu

SEQ ID NO: 2971305 - RNA, 23 nt, Human
augugcacaugcacgugugugca

SEQ ID NO: 2971306 - RNA, 16 nt, Human
augugaugagaggaaa

SEQ ID NO: 2971307 - RNA, 15 nt, Human
augugaugagaggaa

SEQ ID NO: 2971308 - RNA, 17 nt, Human
augugaugagaggaaau

SEQ ID NO: 2971309 - RNA, 19 nt, Human
augugaugagaggaaauca

SEQ ID NO: 2971310 - RNA, 21 nt, Human
uuuguaguguuggagaagaac

SEQ ID NO: 2971311 - RNA, 19 nt, Human
uuuguaguguuggagaaga

SEQ ID NO: 2971312 - RNA, 17 nt, Human
uuuguaguguuggagaa

SEQ ID NO: 2971313 - RNA, 17 nt, Human
uuugugaagcaaaauuu

SEQ ID NO: 2971314 - RNA, 15 nt, Human
uuugaaauauugacu

SEQ ID NO: 2971315 - RNA, 18 nt, Human
augggccuccugugugug

SEQ ID NO: 2971316 - RNA, 20 nt, Human
augggcuggguucuacccag

SEQ ID NO: 2971317 - RNA, 12 nt, Human
auggggcugcac

SEQ ID NO: 2971318 - RNA, 24 nt, Human
auggggcugcaccggcuggccugg

SEQ ID NO: 2971319 - RNA, 14 nt, Human
augggggugcauuu

SEQ ID NO: 2971320 - RNA, 15 nt, Human
augggggugcauuug

SEQ ID NO: 2971321 - RNA, 17 nt, Human
uuucucccagucauuua

SEQ ID NO: 2971322 - RNA, 18 nt, Human
uuucucccagucauuuaa

SEQ ID NO: 2971323 - RNA, 15 nt, Human
augggauccuggagu

SEQ ID NO: 2971324 - RNA, 19 nt, Human
uuucuggcuaugcauuuga

SEQ ID NO: 2971325 - RNA, 18 nt, Human
uuucuggcuaugcauuug

SEQ ID NO: 2971326 - RNA, 16 nt, Human
uuucuggcuaugcauu

SEQ ID NO: 2971327 - RNA, 15 nt, Human
uuucuggcuaugcau

SEQ ID NO: 2971328 - RNA, 19 nt, Human
uuucugcagccacuauugu

SEQ ID NO: 2971329 - RNA, 21 nt, Human
uuucugcagccacuauuguua

SEQ ID NO: 2971330 - RNA, 19 nt, Human
auggugcaaugaccuuuca

SEQ ID NO: 2971331 - RNA, 16 nt, Human
auggugcaaugaccuu

SEQ ID NO: 2971332 - RNA, 17 nt, Human
auggugcaaugaccuuu

SEQ ID NO: 2971333 - RNA, 12 nt, Human
auggugcaauga

SEQ ID NO: 2971334 - RNA, 13 nt, Human
auggugcaaugac

SEQ ID NO: 2971335 - RNA, 15 nt, Human
auggugcaaugaccu

SEQ ID NO: 2971336 - RNA, 15 nt, Human
augggugcuuggagg

SEQ ID NO: 2971337 - RNA, 20 nt, Human
auggugagggauacccaucc

SEQ ID NO: 2971338 - RNA, 17 nt, Human
augguggcuggguugga

SEQ ID NO: 2971339 - RNA, 15 nt, Human
augguggcuggguug

SEQ ID NO: 2971340 - RNA, 13 nt, Human
augguggcugggu

SEQ ID NO: 2971341 - RNA, 12 nt, Human
augguggcuggg

SEQ ID NO: 2971342 - RNA, 21 nt, Human
augguucccuugaugaagaag

SEQ ID NO: 2971343 - RNA, 15 nt, Human
augguuuucaaaaua

SEQ ID NO: 2971344 - RNA, 14 nt, Human
augguuuucaaaau

SEQ ID NO: 2971345 - RNA, 14 nt, Human
augguuuggagcug

SEQ ID NO: 2971346 - RNA, 15 nt, Human
augguuuggagcuga

SEQ ID NO: 2971347 - RNA, 16 nt, Human
augguuuucaaaauaa

SEQ ID NO: 2971348 - RNA, 14 nt, Human
augguuuucuugug

SEQ ID NO: 2971349 - RNA, 15 nt, Human
uucccucaaaugugu

SEQ ID NO: 2971350 - RNA, 20 nt, Human
uucccucaccuuucccaucu

SEQ ID NO: 2971351 - RNA, 15 nt, Human
uucccuauuagagaa

SEQ ID NO: 2971352 - RNA, 19 nt, Human
uuccguagguuauuuucag

SEQ ID NO: 2971353 - RNA, 16 nt, Human
uuccguuaaaauacca

SEQ ID NO: 2971354 - RNA, 14 nt, Human
uuccguuaaaauac

SEQ ID NO: 2971355 - RNA, 13 nt, Human
uuccucuuuccau

SEQ ID NO: 2971356 - RNA, 22 nt, Human
uuccucuuuccaucuacccucc

SEQ ID NO: 2971357 - RNA, 17 nt, Human
uuccucuuuccaucuac

SEQ ID NO: 2971358 - RNA, 14 nt, Human
uuccugaaccgaug

SEQ ID NO: 2971359 - RNA, 14 nt, Human
uuccugaacaggau

SEQ ID NO: 2971360 - RNA, 15 nt, Human
uuccugaacaggaua

SEQ ID NO: 2971361 - RNA, 17 nt, Human
uuccuaauccucuagga

SEQ ID NO: 2971362 - RNA, 13 nt, Human
uuccuaaaauuau

SEQ ID NO: 2971363 - RNA, 20 nt, Human
auauuuuuuguuaaaugauu

SEQ ID NO: 2971364 - RNA, 18 nt, Human
auauuuuuuguuaaauga

SEQ ID NO: 2971365 - RNA, 14 nt, Human
aucaacagauaaau

SEQ ID NO: 2971366 - RNA, 21 nt, Human
aucaagaugugacauguuuua

SEQ ID NO: 2971367 - RNA, 17 nt, Human
aucaacagugagagacu

SEQ ID NO: 2971368 - RNA, 11 nt, Human
uuccugugucu

SEQ ID NO: 2971369 - RNA, 14 nt, Human
aucaaugaguaaca

SEQ ID NO: 2971370 - RNA, 20 nt, Human
aucaaucaugucagucugcu

SEQ ID NO: 2971371 - RNA, 15 nt, Human
aucacggcucacugc

SEQ ID NO: 2971372 - RNA, 13 nt, Human
aucacgccacugc

SEQ ID NO: 2971373 - RNA, 19 nt, Human
aucacggcucacugcagcc

SEQ ID NO: 2971374 - RNA, 18 nt, Human
aucacggcucacugcagc

SEQ ID NO: 2971375 - RNA, 19 nt, Human
uucuagcaugaagacagag

SEQ ID NO: 2971376 - RNA, 16 nt, Human
uucuagcauggcugcc

SEQ ID NO: 2971377 - RNA, 16 nt, Human
uucuaaguaaaaccac

SEQ ID NO: 2971378 - RNA, 15 nt, Human
uucuaaguaaaacca

SEQ ID NO: 2971379 - RNA, 13 nt, Human
uucuaagaaguga

SEQ ID NO: 2971380 - RNA, 23 nt, Human
uucuaagaagugaaaaucuacac

SEQ ID NO: 2971381 - RNA, 21 nt, Human
uucuaaaggcuaccuuuguau

SEQ ID NO: 2971382 - RNA, 20 nt, Human
uucuaaaggcuaccuuugua

SEQ ID NO: 2971383 - RNA, 19 nt, Human
uucuaaaggcuaccuuugu

SEQ ID NO: 2971384 - RNA, 15 nt, Human
uucggccuccauccu

SEQ ID NO: 2971385 - RNA, 21 nt, Human
uucuaaaucuccaaaauaaaa

SEQ ID NO: 2971386 - RNA, 19 nt, Human
uucgcuccugugucuugca

SEQ ID NO: 2971387 - RNA, 15 nt, Human
uucgcuccugugucu

SEQ ID NO: 2971388 - RNA, 14 nt, Human
uucggccuccaucc

SEQ ID NO: 2971389 - RNA, 22 nt, Human
aucacuugucaauaaaauccau

SEQ ID NO: 2971390 - RNA, 11 nt, Human
aucagaauucu

SEQ ID NO: 2971391 - RNA, 16 nt, Human
uucuaggacugaauua

SEQ ID NO: 2971392 - RNA, 20 nt, Human
uucucacagcuccaagaauu

SEQ ID NO: 2971393 - RNA, 14 nt, Human
uucuaggacugaau

SEQ ID NO: 2971394 - RNA, 13 nt, Human
uucuaggacugaa

SEQ ID NO: 2971395 - RNA, 17 nt, Human
aucaggguuaguauugu

SEQ ID NO: 2971396 - RNA, 14 nt, Human
aucaggccaggccc

SEQ ID NO: 2971397 - RNA, 13 nt, Human
aucagcacgauuu

SEQ ID NO: 2971398 - RNA, 15 nt, Human
aucaggccaggcccu

SEQ ID NO: 2971399 - RNA, 16 nt, Human
aucaggccaggcccuc

SEQ ID NO: 2971400 - RNA, 18 nt, Human
aucaggccaggcccucug

SEQ ID NO: 2971401 - RNA, 12 nt, Human
aucagaauucuc

SEQ ID NO: 2971402 - RNA, 17 nt, Human
uucucuaguuugauuaa

SEQ ID NO: 2971403 - RNA, 15 nt, Human
uucucuaguuugauu

SEQ ID NO: 2971404 - RNA, 12 nt, Human
uucucuaggaaa

SEQ ID NO: 2971405 - RNA, 21 nt, Human
uucuccuuguguuacuaaguu

SEQ ID NO: 2971406 - RNA, 20 nt, Human
aucagguuuucuuuuaagaa

SEQ ID NO: 2971407 - RNA, 19 nt, Human
uucugaacuuggcgcugcc

SEQ ID NO: 2971408 - RNA, 22 nt, Human
uucugaacuuggcgcugccccu

SEQ ID NO: 2971409 - RNA, 15 nt, Human
uucugccauauucug

SEQ ID NO: 2971410 - RNA, 18 nt, Human
uucugccugcccaggccc

SEQ ID NO: 2971411 - RNA, 17 nt, Human
uucugccugcccaggcc

SEQ ID NO: 2971412 - RNA, 15 nt, Human
uucuggcucuuccag

SEQ ID NO: 2971413 - RNA, 21 nt, Human
uucugccugcccaggccccug

SEQ ID NO: 2971414 - RNA, 16 nt, Human
uucuggcucuuccagg

SEQ ID NO: 2971415 - RNA, 17 nt, Human
uucuggcucuuccaggc

SEQ ID NO: 2971416 - RNA, 21 nt, Human
auccaguaucuugaagacuuu

SEQ ID NO: 2971417 - RNA, 19 nt, Human
aucccaaacccuucagugc

SEQ ID NO: 2971418 - RNA, 20 nt, Human
aucccaaacccuucagugcc

SEQ ID NO: 2971419 - RNA, 12 nt, Human
aucccagcccca

SEQ ID NO: 2971420 - RNA, 18 nt, Human
aucccauaugccugggca

SEQ ID NO: 2971421 - RNA, 15 nt, Human
auccaguaucuugaa

SEQ ID NO: 2971422 - RNA, 16 nt, Human
auccaguaucuugaag

SEQ ID NO: 2971423 - RNA, 15 nt, Human
auccacccaccucag

SEQ ID NO: 2971424 - RNA, 13 nt, Human
auccacccaccuc

SEQ ID NO: 2971425 - RNA, 21 nt, Human
auccaagcuggucccacucag

SEQ ID NO: 2971426 - RNA, 18 nt, Human
auccaagcuggucccacu

SEQ ID NO: 2971427 - RNA, 21 nt, Human
aucccucauccucauacccac

SEQ ID NO: 2971428 - RNA, 23 nt, Human
aucccucauccucauacccaccc

SEQ ID NO: 2971429 - RNA, 13 nt, Human
aucccucauccuc

SEQ ID NO: 2971430 - RNA, 14 nt, Human
aucccucauccuca

SEQ ID NO: 2971431 - RNA, 24 nt, Human
aucccauaugccugggcagaagga

SEQ ID NO: 2971432 - RNA, 13 nt, Human
uucuucucccuca

SEQ ID NO: 2971433 - RNA, 11 nt, Human
uucuucucccu

SEQ ID NO: 2971434 - RNA, 14 nt, Human
uucuucucccucag

SEQ ID NO: 2971435 - RNA, 15 nt, Human
uucuucugcuucagc

SEQ ID NO: 2971436 - RNA, 13 nt, Human
uucuucugcuuca

SEQ ID NO: 2971437 - RNA, 20 nt, Human
uucuucugcuucagccuccc

SEQ ID NO: 2971438 - RNA, 12 nt, Human
auccuaagcuau

SEQ ID NO: 2971439 - RNA, 16 nt, Human
auccuaggcauuugcu

SEQ ID NO: 2971440 - RNA, 16 nt, Human
auccuccucagaucuu

SEQ ID NO: 2971441 - RNA, 19 nt, Human
uugaacccgggaggcagag

SEQ ID NO: 2971442 - RNA, 17 nt, Human
uugaaauuguauuacaa

SEQ ID NO: 2971443 - RNA, 18 nt, Human
uugaacccgggaggcaga

SEQ ID NO: 2971444 - RNA, 17 nt, Human
aucugaaauaaggaaug

SEQ ID NO: 2971445 - RNA, 12 nt, Human
aucugaaaaugu

SEQ ID NO: 2971446 - RNA, 23 nt, Human
aucugaaaauguauguguaagua

SEQ ID NO: 2971447 - RNA, 23 nt, Human
uugauguuuuaaggaugcuugua

SEQ ID NO: 2971448 - RNA, 13 nt, Human
uugauuaaauucu

SEQ ID NO: 2971449 - RNA, 16 nt, Human
uugcaaggcaaauguu

SEQ ID NO: 2971450 - RNA, 22 nt, Human
uugcaagccagauuuuccugaa

SEQ ID NO: 2971451 - RNA, 14 nt, Human
uugauuaaauucuu

SEQ ID NO: 2971452 - RNA, 17 nt, Human
uugcauauugcauacua

SEQ ID NO: 2971453 - RNA, 13 nt, Human
uugcaucaauuuu

SEQ ID NO: 2971454 - RNA, 14 nt, Human
uugcaccacugcac

SEQ ID NO: 2971455 - RNA, 15 nt, Human
uugcaccacugcacu

SEQ ID NO: 2971456 - RNA, 16 nt, Human
uugcaccacugcacuc

SEQ ID NO: 2971457 - RNA, 18 nt, Human
uugcaccacugcacucca

SEQ ID NO: 2971458 - RNA, 19 nt, Human
uugcaauggcagccuuggc

SEQ ID NO: 2971459 - RNA, 17 nt, Human
uugcaauggcagccuug

SEQ ID NO: 2971460 - RNA, 16 nt, Human
uugcaauggcagccuu

SEQ ID NO: 2971461 - RNA, 13 nt, Human
aucuccaaaauaa

SEQ ID NO: 2971462 - RNA, 21 nt, Human
aucuccaaaauaaaacuuuuu

SEQ ID NO: 2971463 - RNA, 20 nt, Human
aucuccaaaauaaaacuuuu

SEQ ID NO: 2971464 - RNA, 17 nt, Human
aucuccaaaauaaaacu

SEQ ID NO: 2971465 - RNA, 14 nt, Human
aucuccaaaauaaa

SEQ ID NO: 2971466 - RNA, 14 nt, Human
aucucagggccugg

SEQ ID NO: 2971467 - RNA, 16 nt, Human
aucucagggccugguc

SEQ ID NO: 2971468 - RNA, 16 nt, Human
aucucccccagcccca

SEQ ID NO: 2971469 - RNA, 17 nt, Human
aucucccccagccccau

SEQ ID NO: 2971470 - RNA, 14 nt, Human
aucucccccagccc

SEQ ID NO: 2971471 - RNA, 15 nt, Human
aucucccccagcccc

SEQ ID NO: 2971472 - RNA, 22 nt, Human
aucugaaaauguauguguaagu

SEQ ID NO: 2971473 - RNA, 20 nt, Human
aucugaaaauguauguguaa

SEQ ID NO: 2971474 - RNA, 19 nt, Human
aucugaaaauguaugugua

SEQ ID NO: 2971475 - RNA, 16 nt, Human
aucugaaaauguaugu

SEQ ID NO: 2971476 - RNA, 14 nt, Human
aucugaaaauguau

SEQ ID NO: 2971477 - RNA, 15 nt, Human
aucucuugagccugg

SEQ ID NO: 2971478 - RNA, 21 nt, Human
uugaaggaugcugucuucgua

SEQ ID NO: 2971479 - RNA, 17 nt, Human
uugaagggaaauuucag

SEQ ID NO: 2971480 - RNA, 13 nt, Human
aucuaaauggaac

SEQ ID NO: 2971481 - RNA, 18 nt, Human
aucuaaauggaaccacuc

SEQ ID NO: 2971482 - RNA, 17 nt, Human
aucuaaauggaaccacu

SEQ ID NO: 2971483 - RNA, 16 nt, Human
auccucuguacagagc

SEQ ID NO: 2971484 - RNA, 17 nt, Human
auccucuguacagagcc

SEQ ID NO: 2971485 - RNA, 18 nt, Human
auccuccugggauuggcu

SEQ ID NO: 2971486 - RNA, 19 nt, Human
aucuacacuccagugagac

SEQ ID NO: 2971487 - RNA, 18 nt, Human
aucuacacuccagugaga

SEQ ID NO: 2971488 - RNA, 18 nt, Human
aucuaauauguaacaagc

SEQ ID NO: 2971489 - RNA, 20 nt, Human
uugagugaagcugggagaac

SEQ ID NO: 2971490 - RNA, 20 nt, Human
uugaguugauucagcucugc

SEQ ID NO: 2971491 - RNA, 12 nt, Human
uugagacagagu

SEQ ID NO: 2971492 - RNA, 16 nt, Human
uugagaucagccuggg

SEQ ID NO: 2971493 - RNA, 15 nt, Human
uugagaucagccugg

SEQ ID NO: 2971494 - RNA, 23 nt, Human
augaauggcuaagcaaaauguga

SEQ ID NO: 2971495 - RNA, 15 nt, Human
augaauuacauuugu

SEQ ID NO: 2971496 - RNA, 15 nt, Human
augaauuaaguuuuu

SEQ ID NO: 2971497 - RNA, 18 nt, Human
uuggggaccagagcugcc

SEQ ID NO: 2971498 - RNA, 16 nt, Human
augaauuacauuugua

SEQ ID NO: 2971499 - RNA, 19 nt, Human
augaaagggcccagagagg

SEQ ID NO: 2971500 - RNA, 14 nt, Human
augaaaugagguca

SEQ ID NO: 2971501 - RNA, 14 nt, Human
uugcuugaaagaaa

SEQ ID NO: 2971502 - RNA, 16 nt, Human
uuggagggugucccaa

SEQ ID NO: 2971503 - RNA, 18 nt, Human
uuggccccugcccggcug

SEQ ID NO: 2971504 - RNA, 23 nt, Human
uuggcuauuagagaucaaccccu

SEQ ID NO: 2971505 - RNA, 22 nt, Human
aucuuuucauuuaggugaggaa

SEQ ID NO: 2971506 - RNA, 17 nt, Human
aucuuugcagacaggca

SEQ ID NO: 2971507 - RNA, 18 nt, Human
augaaagggcccagagag

SEQ ID NO: 2971508 - RNA, 15 nt, Human
augaaagggcccaga

SEQ ID NO: 2971509 - RNA, 23 nt, Human
aucugcgggggcagugcucaccc

SEQ ID NO: 2971510 - RNA, 21 nt, Human
aucugcgggggcagugcucac

SEQ ID NO: 2971511 - RNA, 20 nt, Human
aucugcgggggcagugcuca

SEQ ID NO: 2971512 - RNA, 19 nt, Human
aucugcgggggcagugcuc

SEQ ID NO: 2971513 - RNA, 18 nt, Human
aucugcgggggcagugcu

SEQ ID NO: 2971514 - RNA, 16 nt, Human
aucuggugacuuuccu

SEQ ID NO: 2971515 - RNA, 17 nt, Human
aucuggugacuuuccuc

SEQ ID NO: 2971516 - RNA, 10 nt, Human
aucuggugac

SEQ ID NO: 2971517 - RNA, 17 nt, Human
aucugugaaaggaaaga

SEQ ID NO: 2971518 - RNA, 18 nt, Human
aucugugaaaggaaagag

SEQ ID NO: 2971519 - RNA, 20 nt, Human
aucuuggucagauuugaacu

SEQ ID NO: 2971520 - RNA, 13 nt, Human
aucuugcucugcu

SEQ ID NO: 2971521 - RNA, 18 nt, Human
auaacuuuuuauauucuc

SEQ ID NO: 2971522 - RNA, 22 nt, Human
auaacuuuuuauauucucagca

SEQ ID NO: 2971523 - RNA, 14 nt, Human
auaagauucauauu

SEQ ID NO: 2971524 - RNA, 16 nt, Human
uuagaagucacacagu

SEQ ID NO: 2971525 - RNA, 23 nt, Human
uuacuguacaugaaaacacauuu

SEQ ID NO: 2971526 - RNA, 22 nt, Human
uuacuguacaugaaaacacauu

SEQ ID NO: 2971527 - RNA, 14 nt, Human
uuacuguacaugaa

SEQ ID NO: 2971528 - RNA, 13 nt, Human
uuacuguacauga

SEQ ID NO: 2971529 - RNA, 12 nt, Human
uuacuguacaug

SEQ ID NO: 2971530 - RNA, 15 nt, Human
uuacugcagcuuugu

SEQ ID NO: 2971531 - RNA, 11 nt, Human
uuacaaauguu

SEQ ID NO: 2971532 - RNA, 17 nt, Human
uuacaguggggaaugaa

SEQ ID NO: 2971533 - RNA, 19 nt, Human
uuaccagcagagcaccuua

SEQ ID NO: 2971534 - RNA, 14 nt, Human
uuacaggugugaac

SEQ ID NO: 2971535 - RNA, 14 nt, Human
auaaucuuucacag

SEQ ID NO: 2971536 - RNA, 23 nt, Human
auaauuuccauuuacuuaagacu

SEQ ID NO: 2971537 - RNA, 22 nt, Human
auaauuuccauuuacuuaagac

SEQ ID NO: 2971538 - RNA, 18 nt, Human
auaauuuaccugaagucu

SEQ ID NO: 2971539 - RNA, 21 nt, Human
auaagauucauauuuacuucu

SEQ ID NO: 2971540 - RNA, 22 nt, Human
auaagccaaaaaaugcuugcuu

SEQ ID NO: 2971541 - RNA, 19 nt, Human
auaagccaaaacugagcau

SEQ ID NO: 2971542 - RNA, 16 nt, Human
uuaggguuaugauuaa

SEQ ID NO: 2971543 - RNA, 14 nt, Human
uuaggguuaugauu

SEQ ID NO: 2971544 - RNA, 14 nt, Human
uuagggagagaaga

SEQ ID NO: 2971545 - RNA, 15 nt, Human
uuagggagagaagau

SEQ ID NO: 2971546 - RNA, 19 nt, Human
uuaggugugggggaagcac

SEQ ID NO: 2971547 - RNA, 14 nt, Human
uuagguugaaacau

SEQ ID NO: 2971548 - RNA, 16 nt, Human
uuagguugaaacauau

SEQ ID NO: 2971549 - RNA, 13 nt, Human
uuaguagagacag

SEQ ID NO: 2971550 - RNA, 14 nt, Human
uuaguagagacagg

SEQ ID NO: 2971551 - RNA, 15 nt, Human
uuauaaaagugaaua

SEQ ID NO: 2971552 - RNA, 13 nt, Human
uuauaaacuuuac

SEQ ID NO: 2971553 - RNA, 15 nt, Human
aguuuuacaguguuu

SEQ ID NO: 2971554 - RNA, 19 nt, Human
aguuucugccgcagcccug

SEQ ID NO: 2971555 - RNA, 22 nt, Human
aguuuguuaguaugaggcauuu

SEQ ID NO: 2971556 - RNA, 15 nt, Human
aguuucugccgcagc

SEQ ID NO: 2971557 - RNA, 14 nt, Human
aguuucucuuuuca

SEQ ID NO: 2971558 - RNA, 15 nt, Human
aguuuaucuguucau

SEQ ID NO: 2971559 - RNA, 14 nt, Human
uuaacagaaaugua

SEQ ID NO: 2971560 - RNA, 13 nt, Human
uuaacagaaaugu

SEQ ID NO: 2971561 - RNA, 12 nt, Human
uuaacagaaaug

SEQ ID NO: 2971562 - RNA, 17 nt, Human
aguuuaaauuguaauag

SEQ ID NO: 2971563 - RNA, 20 nt, Human
aguuuaaauuguaauaggcg

SEQ ID NO: 2971564 - RNA, 15 nt, Human
aguuuagcuggaaaa

SEQ ID NO: 2971565 - RNA, 19 nt, Human
uuaaaaaagaaacauuugg

SEQ ID NO: 2971566 - RNA, 22 nt, Human
aguuuagcccugaacauuucau

SEQ ID NO: 2971567 - RNA, 18 nt, Human
aguuuagcccugaacauu

SEQ ID NO: 2971568 - RNA, 19 nt, Human
uuaaaaaucucaaauuucu

SEQ ID NO: 2971569 - RNA, 16 nt, Human
uuaaaaaauggaacau

SEQ ID NO: 2971570 - RNA, 20 nt, Human
uuaaaaaucucaaauuucua

SEQ ID NO: 2971571 - RNA, 17 nt, Human
uuaaaaaucucaaauuu

SEQ ID NO: 2971572 - RNA, 22 nt, Human
uuaaaaucauuucugcaucagc

SEQ ID NO: 2971573 - RNA, 14 nt, Human
uuaaaaucauuucu

SEQ ID NO: 2971574 - RNA, 19 nt, Human
uuaagacuuugguuauuuu

SEQ ID NO: 2971575 - RNA, 22 nt, Human
uuaagagagucuauuuacggaa

SEQ ID NO: 2971576 - RNA, 23 nt, Human
uuaagacuuaaugagacuuuaaa

SEQ ID NO: 2971577 - RNA, 16 nt, Human
uuaagacuuaaugaga

SEQ ID NO: 2971578 - RNA, 15 nt, Human
uuaaucuaaauggaa

SEQ ID NO: 2971579 - RNA, 16 nt, Human
uuaauuugguuuucac

SEQ ID NO: 2971580 - RNA, 16 nt, Human
uuaauuuauccucugu

SEQ ID NO: 2971581 - RNA, 19 nt, Human
aguuuuuuuccuucaagaa

SEQ ID NO: 2971582 - RNA, 18 nt, Human
uuaacuuuuauaaacuuu

SEQ ID NO: 2971583 - RNA, 22 nt, Human
uuaacuuuuauaaacuuuaccu

SEQ ID NO: 2971584 - RNA, 23 nt, Human
uuaacuuuuauaaacuuuaccuu

SEQ ID NO: 2971585 - RNA, 16 nt, Human
aguuuuauaugcuucu

SEQ ID NO: 2971586 - RNA, 13 nt, Human
uuauguuaauauu

SEQ ID NO: 2971587 - RNA, 19 nt, Human
uuauguuaaaacugggaca

SEQ ID NO: 2971588 - RNA, 14 nt, Human
uuauuauauuuaca

SEQ ID NO: 2971589 - RNA, 12 nt, Human
uuauuaugcaug

SEQ ID NO: 2971590 - RNA, 15 nt, Human
uuauuauauuuacaa

SEQ ID NO: 2971591 - RNA, 18 nt, Human
uuauucauuaguuuugaa

SEQ ID NO: 2971592 - RNA, 21 nt, Human
uuauucauuaguuuugaagau

SEQ ID NO: 2971593 - RNA, 14 nt, Human
uuauuauuaacaaa

SEQ ID NO: 2971594 - RNA, 13 nt, Human
uuauuauuaacaa

SEQ ID NO: 2971595 - RNA, 13 nt, Human
uuauuaugcauga

SEQ ID NO: 2971596 - RNA, 18 nt, Human
auacugccuuguuuaaug

SEQ ID NO: 2971597 - RNA, 20 nt, Human
auacugccuuguuuaauggu

SEQ ID NO: 2971598 - RNA, 16 nt, Human
auacucugcuuagaau

SEQ ID NO: 2971599 - RNA, 18 nt, Human
auacucuuauaucuauau

SEQ ID NO: 2971600 - RNA, 14 nt, Human
auacucuuauaucu

SEQ ID NO: 2971601 - RNA, 17 nt, Human
auacuccuccaagguua

SEQ ID NO: 2971602 - RNA, 14 nt, Human
auacucccaucugu

SEQ ID NO: 2971603 - RNA, 22 nt, Human
uuauuccaagggaauauugcca

SEQ ID NO: 2971604 - RNA, 16 nt, Human
auacucauuaggaugg

SEQ ID NO: 2971605 - RNA, 11 nt, Human
auacucccauc

SEQ ID NO: 2971606 - RNA, 14 nt, Human
auagauguugcuaa

SEQ ID NO: 2971607 - RNA, 20 nt, Human
auagauguugcuaacagcaa

SEQ ID NO: 2971608 - RNA, 17 nt, Human
auagauugcucaaauca

SEQ ID NO: 2971609 - RNA, 18 nt, Human
auagauaggucagugcaa

SEQ ID NO: 2971610 - RNA, 22 nt, Human
auagagugugauguauguguaa

SEQ ID NO: 2971611 - RNA, 16 nt, Human
auagagugugauguau

SEQ ID NO: 2971612 - RNA, 14 nt, Human
auagagagagacca

SEQ ID NO: 2971613 - RNA, 17 nt, Human
auagaauuaacacauga

SEQ ID NO: 2971614 - RNA, 22 nt, Human
auagaauaggcacuuuaaaaca

SEQ ID NO: 2971615 - RNA, 20 nt, Human
auagaauaggcacuuuaaaa

SEQ ID NO: 2971616 - RNA, 18 nt, Human
auagaauaggcacuuuaa

SEQ ID NO: 2971617 - RNA, 22 nt, Human
auagacaauuuauuauggcaca

SEQ ID NO: 2971618 - RNA, 16 nt, Human
auagacaauuuauuau

SEQ ID NO: 2971619 - RNA, 22 nt, Human
auagaauugacauugaaaucua

SEQ ID NO: 2971620 - RNA, 18 nt, Human
auagaauugacauugaaa

SEQ ID NO: 2971621 - RNA, 13 nt, Human
auagaauugacau

SEQ ID NO: 2971622 - RNA, 23 nt, Human
auagacaauuuauuauggcacau

SEQ ID NO: 2971623 - RNA, 13 nt, Human
auagaaguaaaaa

SEQ ID NO: 2971624 - RNA, 17 nt, Human
auacuauuaaacaugcu

SEQ ID NO: 2971625 - RNA, 17 nt, Human
auacuauggaauuucuc

SEQ ID NO: 2971626 - RNA, 20 nt, Human
auacuaaccagcagaaaugc

SEQ ID NO: 2971627 - RNA, 19 nt, Human
auacuaaccagcagaaaug

SEQ ID NO: 2971628 - RNA, 13 nt, Human
auacuaaccagca

SEQ ID NO: 2971629 - RNA, 19 nt, Human
auacuauuaaacaugcugu

SEQ ID NO: 2971630 - RNA, 18 nt, Human
auacuauuaaacaugcug

SEQ ID NO: 2971631 - RNA, 15 nt, Human
uuauauuugaaauau

SEQ ID NO: 2971632 - RNA, 19 nt, Human
uuauauuugaaauauugac

SEQ ID NO: 2971633 - RNA, 18 nt, Human
auaccacuuuuguucuug

SEQ ID NO: 2971634 - RNA, 17 nt, Human
auaccacuuuuguucuu

SEQ ID NO: 2971635 - RNA, 22 nt, Human
auaccacaggaaccacaagacu

SEQ ID NO: 2971636 - RNA, 14 nt, Human
auaccuuuuuuaga

SEQ ID NO: 2971637 - RNA, 16 nt, Human
auacguacacauuuua

SEQ ID NO: 2971638 - RNA, 19 nt, Human
auacgugggcauucaaaug

SEQ ID NO: 2971639 - RNA, 18 nt, Human
auacgugggcauucaaau

SEQ ID NO: 2971640 - RNA, 15 nt, Human
auacguacacauuuu

SEQ ID NO: 2971641 - RNA, 14 nt, Human
auacguacacauuu

SEQ ID NO: 2971642 - RNA, 13 nt, Human
auacguacacauu

SEQ ID NO: 2971643 - RNA, 18 nt, Human
uuauaaacuuuaccuuuu

SEQ ID NO: 2971644 - RNA, 17 nt, Human
uuauaaacuuuaccuuu

SEQ ID NO: 2971645 - RNA, 16 nt, Human
auacagaggcaacugc

SEQ ID NO: 2971646 - RNA, 17 nt, Human
auacagaggcaacugca

SEQ ID NO: 2971647 - RNA, 23 nt, Human
auacaggaaaagcugcugacagu

SEQ ID NO: 2971648 - RNA, 22 nt, Human
auacaggaaaagcugcugacag

SEQ ID NO: 2971649 - RNA, 23 nt, Human
auacagauagauauaugcucugc

SEQ ID NO: 2971650 - RNA, 18 nt, Human
auacaguuacucagaauu

SEQ ID NO: 2971651 - RNA, 20 nt, Human
auacaguuacucagaauucu

SEQ ID NO: 2971652 - RNA, 20 nt, Human
auacauaaacaagaccacgu

SEQ ID NO: 2971653 - RNA, 18 nt, Human
auacauacuuacaugugu

SEQ ID NO: 2971654 - RNA, 20 nt, Human
auacauacuuacaugugugu

SEQ ID NO: 2971655 - RNA, 17 nt, Human
uuaugaauuacauuugu

SEQ ID NO: 2971656 - RNA, 16 nt, Human
uuaugaauuacauuug

SEQ ID NO: 2971657 - RNA, 14 nt, Human
uuaugaauuacauu

SEQ ID NO: 2971658 - RNA, 21 nt, Human
uuaugaauuacauuuguauaa

SEQ ID NO: 2971659 - RNA, 11 nt, Human
uuaugacucca

SEQ ID NO: 2971660 - RNA, 23 nt, Human
uuaugagaaacuggcaaagcaga

SEQ ID NO: 2971661 - RNA, 21 nt, Human
uuaugagaaacuggcaaagca

SEQ ID NO: 2971662 - RNA, 18 nt, Human
uuaugaaacuuuuggaag

SEQ ID NO: 2971663 - RNA, 17 nt, Human
uuaugaaacuuuuggaa

SEQ ID NO: 2971664 - RNA, 14 nt, Human
uuaugaaacuuuug

SEQ ID NO: 2971665 - RNA, 13 nt, Human
uuaugaaaauaau

SEQ ID NO: 2971666 - RNA, 19 nt, Human
uuaugaaacuuuuggaagg

SEQ ID NO: 2971667 - RNA, 21 nt, Human
uuaucacccagaagaaaauag

SEQ ID NO: 2971668 - RNA, 19 nt, Human
uuaucacccagaagaaaau

SEQ ID NO: 2971669 - RNA, 18 nt, Human
uuaucacccagaagaaaa

SEQ ID NO: 2971670 - RNA, 17 nt, Human
uuaucacccagaagaaa

SEQ ID NO: 2971671 - RNA, 19 nt, Human
uuaugauuaaguaaugaua

SEQ ID NO: 2971672 - RNA, 18 nt, Human
uuauggcuuuugugcauu

SEQ ID NO: 2971673 - RNA, 19 nt, Human
uuauggcuuuugugcauua

SEQ ID NO: 2971674 - RNA, 13 nt, Human
uuaugggcugggu

SEQ ID NO: 2971675 - RNA, 24 nt, Human
uuaugggagcugucaagcauguau

SEQ ID NO: 2971676 - RNA, 22 nt, Human
uuaugggcuggguucuacccag

SEQ ID NO: 2971677 - RNA, 15 nt, Human
agucucccuuccuau

SEQ ID NO: 2971678 - RNA, 11 nt, Human
ugugaggaagc

SEQ ID NO: 2971679 - RNA, 16 nt, Human
ugugacugaucucucg

SEQ ID NO: 2971680 - RNA, 13 nt, Human
agucuuagaugua

SEQ ID NO: 2971681 - RNA, 16 nt, Human
agucuuagauguauau

SEQ ID NO: 2971682 - RNA, 14 nt, Human
agucuuagauguau

SEQ ID NO: 2971683 - RNA, 16 nt, Human
agucucuugauucaua

SEQ ID NO: 2971684 - RNA, 17 nt, Human
agucucuugauucauaa

SEQ ID NO: 2971685 - RNA, 21 nt, Human
agugaacaaauuuacagagac

SEQ ID NO: 2971686 - RNA, 20 nt, Human
agugaacaaauuuacagaga

SEQ ID NO: 2971687 - RNA, 16 nt, Human
agucuuucacauuuaa

SEQ ID NO: 2971688 - RNA, 23 nt, Human
agugaacaaauuuacagagacag

SEQ ID NO: 2971689 - RNA, 22 nt, Human
agugaacaaauuuacagagaca

SEQ ID NO: 2971690 - RNA, 16 nt, Human
agugaacuugggccac

SEQ ID NO: 2971691 - RNA, 21 nt, Human
agugacugauggcuaauguac

SEQ ID NO: 2971692 - RNA, 22 nt, Human
agugagcacuaaggugugcucu

SEQ ID NO: 2971693 - RNA, 14 nt, Human
agugagcacuaagg

SEQ ID NO: 2971694 - RNA, 12 nt, Human
agugagcugguu

SEQ ID NO: 2971695 - RNA, 22 nt, Human
ugugaugaugaaaugaggucag

SEQ ID NO: 2971696 - RNA, 19 nt, Human
ugugaugagaggaaaucac

SEQ ID NO: 2971697 - RNA, 18 nt, Human
ugugaugagaggaaauca

SEQ ID NO: 2971698 - RNA, 18 nt, Human
agugcaaacuucagaguu

SEQ ID NO: 2971699 - RNA, 22 nt, Human
agugcaaauugucacaggacag

SEQ ID NO: 2971700 - RNA, 13 nt, Human
agugaggcucugc

SEQ ID NO: 2971701 - RNA, 12 nt, Human
agugaggcucug

SEQ ID NO: 2971702 - RNA, 16 nt, Human
agugaggaugaaaaaa

SEQ ID NO: 2971703 - RNA, 14 nt, Human
agugcaugcugucc

SEQ ID NO: 2971704 - RNA, 16 nt, Human
agugcaugcugucccu

SEQ ID NO: 2971705 - RNA, 21 nt, Human
agugcacuaauguguaagaca

SEQ ID NO: 2971706 - RNA, 17 nt, Human
agugcacuaauguguaa

SEQ ID NO: 2971707 - RNA, 14 nt, Human
agugcacuaaugug

SEQ ID NO: 2971708 - RNA, 17 nt, Human
agugcagugagccgaga

SEQ ID NO: 2971709 - RNA, 17 nt, Human
ugugccuaauguguuug

SEQ ID NO: 2971710 - RNA, 18 nt, Human
ugugccuaauguguuuga

SEQ ID NO: 2971711 - RNA, 14 nt, Human
ugugccuaaugugu

SEQ ID NO: 2971712 - RNA, 15 nt, Human
ugugccuaauguguu

SEQ ID NO: 2971713 - RNA, 18 nt, Human
ugugcugagucugaaggc

SEQ ID NO: 2971714 - RNA, 19 nt, Human
ugugcugagucugaaggcu

SEQ ID NO: 2971715 - RNA, 20 nt, Human
uguggauuuaacagaaaugu

SEQ ID NO: 2971716 - RNA, 19 nt, Human
uguggauuuaacagaaaug

SEQ ID NO: 2971717 - RNA, 22 nt, Human
uguggauuuaacagaaauguac

SEQ ID NO: 2971718 - RNA, 23 nt, Human
agugagcugguuuuuagcggaga

SEQ ID NO: 2971719 - RNA, 14 nt, Human
uguggaugauaaaa

SEQ ID NO: 2971720 - RNA, 18 nt, Human
ugugcugcccugcccacc

SEQ ID NO: 2971721 - RNA, 19 nt, Human
ugugcugcccugcccaccu

SEQ ID NO: 2971722 - RNA, 20 nt, Human
ugugcugcccugcccaccug

SEQ ID NO: 2971723 - RNA, 21 nt, Human
ugugcugcccugcccaccugg

SEQ ID NO: 2971724 - RNA, 22 nt, Human
uguggucaacauuucucauguu

SEQ ID NO: 2971725 - RNA, 14 nt, Human
ugugucauuucaaa

SEQ ID NO: 2971726 - RNA, 13 nt, Human
ugugucauuucaa

SEQ ID NO: 2971727 - RNA, 20 nt, Human
ugugucagguggggcagcuu

SEQ ID NO: 2971728 - RNA, 22 nt, Human
ugugucucuugguccugcugca

SEQ ID NO: 2971729 - RNA, 11 nt, Human
uguguguuuau

SEQ ID NO: 2971730 - RNA, 19 nt, Human
uguuacauaagauaaaugu

SEQ ID NO: 2971731 - RNA, 22 nt, Human
uguguuaucacccagaagaaaa

SEQ ID NO: 2971732 - RNA, 16 nt, Human
aguggggaaugaagau

SEQ ID NO: 2971733 - RNA, 22 nt, Human
agugggcccaaugcacuuuguu

SEQ ID NO: 2971734 - RNA, 18 nt, Human
agugggggaucacagccu

SEQ ID NO: 2971735 - RNA, 22 nt, Human
uguucuaaauaucccuuggaca

SEQ ID NO: 2971736 - RNA, 15 nt, Human
uguucuaagaaguga

SEQ ID NO: 2971737 - RNA, 19 nt, Human
aguguguggucaacauuuc

SEQ ID NO: 2971738 - RNA, 22 nt, Human
uguugcccacagcuguaugauu

SEQ ID NO: 2971739 - RNA, 20 nt, Human
uguugcccaggcuggcgugc

SEQ ID NO: 2971740 - RNA, 23 nt, Human
uguugcccaggcuggcgugcagu

SEQ ID NO: 2971741 - RNA, 16 nt, Human
aguguuguggauuuaa

SEQ ID NO: 2971742 - RNA, 23 nt, Human
aguguuggagaagaacugaaauc

SEQ ID NO: 2971743 - RNA, 20 nt, Human
aguguuguggauuuaacaga

SEQ ID NO: 2971744 - RNA, 19 nt, Human
aguguuguggauuuaacag

SEQ ID NO: 2971745 - RNA, 13 nt, Human
aguuacucagaau

SEQ ID NO: 2971746 - RNA, 20 nt, Human
agugugguguuuccuggcac

SEQ ID NO: 2971747 - RNA, 21 nt, Human
agugugccugaagucccagau

SEQ ID NO: 2971748 - RNA, 20 nt, Human
agugugccugaagucccaga

SEQ ID NO: 2971749 - RNA, 20 nt, Human
agugugacugaucucucgug

SEQ ID NO: 2971750 - RNA, 17 nt, Human
uguuaugacuccagaau

SEQ ID NO: 2971751 - RNA, 13 nt, Human
uguuaugacucca

SEQ ID NO: 2971752 - RNA, 22 nt, Human
agugugguguuuccuggcacug

SEQ ID NO: 2971753 - RNA, 19 nt, Human
uguuccacaaguuaaauaa

SEQ ID NO: 2971754 - RNA, 20 nt, Human
aguaaaaaaugguguuuuau

SEQ ID NO: 2971755 - RNA, 16 nt, Human
agguuuuuuuuucuca

SEQ ID NO: 2971756 - RNA, 21 nt, Human
uguacauggaauaacauguaa

SEQ ID NO: 2971757 - RNA, 16 nt, Human
aguaaaaccacagcag

SEQ ID NO: 2971758 - RNA, 17 nt, Human
aguaaaaccacagcagu

SEQ ID NO: 2971759 - RNA, 19 nt, Human
aguaaaaccacagcaguug

SEQ ID NO: 2971760 - RNA, 19 nt, Human
aguaauaaaugaaugucac

SEQ ID NO: 2971761 - RNA, 16 nt, Human
aguaauaaaugaaugu

SEQ ID NO: 2971762 - RNA, 17 nt, Human
aguaaugagcuuaagaa

SEQ ID NO: 2971763 - RNA, 13 nt, Human
aguaauuggaaag

SEQ ID NO: 2971764 - RNA, 12 nt, Human
aguaauuggaaa

SEQ ID NO: 2971765 - RNA, 21 nt, Human
aguacacuguuucaaacuuua

SEQ ID NO: 2971766 - RNA, 23 nt, Human
aguacacuguuucaaacuuuacu

SEQ ID NO: 2971767 - RNA, 18 nt, Human
uguaguguuggagaagaa

SEQ ID NO: 2971768 - RNA, 17 nt, Human
uguaguguuggagaaga

SEQ ID NO: 2971769 - RNA, 18 nt, Human
uguauauauuuccuauau

SEQ ID NO: 2971770 - RNA, 22 nt, Human
uguauauauuuccuauauuguu

SEQ ID NO: 2971771 - RNA, 21 nt, Human
uguauauguagauguaugcac

SEQ ID NO: 2971772 - RNA, 16 nt, Human
uguauauguagaugua

SEQ ID NO: 2971773 - RNA, 16 nt, Human
uguaguguuggagaag

SEQ ID NO: 2971774 - RNA, 15 nt, Human
uguagugagccgaga

SEQ ID NO: 2971775 - RNA, 17 nt, Human
uguaggguuauaauaau

SEQ ID NO: 2971776 - RNA, 16 nt, Human
uguaggguuauaauaa

SEQ ID NO: 2971777 - RNA, 15 nt, Human
uguacauacuuuuug

SEQ ID NO: 2971778 - RNA, 20 nt, Human
uguacauacuuuuuggguuu

SEQ ID NO: 2971779 - RNA, 14 nt, Human
uguacaugaaaaca

SEQ ID NO: 2971780 - RNA, 16 nt, Human
uguacaugaaaacaca

SEQ ID NO: 2971781 - RNA, 20 nt, Human
uguacaugaaaacacauuuu

SEQ ID NO: 2971782 - RNA, 20 nt, Human
uguacauaaugcgugcauac

SEQ ID NO: 2971783 - RNA, 19 nt, Human
uguacauaaugcgugcaua

SEQ ID NO: 2971784 - RNA, 20 nt, Human
uguaauuuuuuuaucgucac

SEQ ID NO: 2971785 - RNA, 21 nt, Human
uguaauuaaguacuauguauc

SEQ ID NO: 2971786 - RNA, 19 nt, Human
uguaauuaaguacuaugua

SEQ ID NO: 2971787 - RNA, 18 nt, Human
uguaauuaaguacuaugu

SEQ ID NO: 2971788 - RNA, 19 nt, Human
uguaagggaaacugccagc

SEQ ID NO: 2971789 - RNA, 17 nt, Human
uguaauuaaguacuaug

SEQ ID NO: 2971790 - RNA, 13 nt, Human
uguaagggaaacu

SEQ ID NO: 2971791 - RNA, 18 nt, Human
uguaagggaaacugccag

SEQ ID NO: 2971792 - RNA, 20 nt, Human
agguuggcaaaaaggcagga

SEQ ID NO: 2971793 - RNA, 22 nt, Human
aggugggauaucacuuccauga

SEQ ID NO: 2971794 - RNA, 12 nt, Human
aggugggaggau

SEQ ID NO: 2971795 - RNA, 16 nt, Human
aggugcuacaaaaaca

SEQ ID NO: 2971796 - RNA, 22 nt, Human
aggugugagucaccaagcccag

SEQ ID NO: 2971797 - RNA, 21 nt, Human
aggugugagucaccaagccca

SEQ ID NO: 2971798 - RNA, 16 nt, Human
aggugucccugcacuu

SEQ ID NO: 2971799 - RNA, 14 nt, Human
agguugcagugagc

SEQ ID NO: 2971800 - RNA, 14 nt, Human
agguugaagcacca

SEQ ID NO: 2971801 - RNA, 20 nt, Human
uguccagccccguagacgug

SEQ ID NO: 2971802 - RNA, 16 nt, Human
uguccaagaagcccag

SEQ ID NO: 2971803 - RNA, 17 nt, Human
uguccaagaagcccagg

SEQ ID NO: 2971804 - RNA, 18 nt, Human
uguccaagaagcccagga

SEQ ID NO: 2971805 - RNA, 22 nt, Human
uguccaagaagcccaggaaagg

SEQ ID NO: 2971806 - RNA, 23 nt, Human
ugucccugcacuugcagacucua

SEQ ID NO: 2971807 - RNA, 22 nt, Human
ugucccugcacuugcagacucu

SEQ ID NO: 2971808 - RNA, 20 nt, Human
ugucccugcacuugcagacu

SEQ ID NO: 2971809 - RNA, 22 nt, Human
ugucauuugagcagggcucagc

SEQ ID NO: 2971810 - RNA, 21 nt, Human
ugucauuugagcagggcucag

SEQ ID NO: 2971811 - RNA, 20 nt, Human
ugucauuugagcagggcuca

SEQ ID NO: 2971812 - RNA, 20 nt, Human
ugucagguggggcagcuuga

SEQ ID NO: 2971813 - RNA, 18 nt, Human
ugucagguggggcagcuu

SEQ ID NO: 2971814 - RNA, 17 nt, Human
ugucagguggggcagcu

SEQ ID NO: 2971815 - RNA, 14 nt, Human
uguccaagaagccc

SEQ ID NO: 2971816 - RNA, 15 nt, Human
uguccaagaagccca

SEQ ID NO: 2971817 - RNA, 16 nt, Human
ugucagguggggcagc

SEQ ID NO: 2971818 - RNA, 16 nt, Human
aguauagaaaaucuuc

SEQ ID NO: 2971819 - RNA, 15 nt, Human
aguauagaaaaucuu

SEQ ID NO: 2971820 - RNA, 12 nt, Human
aguauagaauag

SEQ ID NO: 2971821 - RNA, 19 nt, Human
aguauucuuauuuaaugaa

SEQ ID NO: 2971822 - RNA, 17 nt, Human
agucaccccggccaccu

SEQ ID NO: 2971823 - RNA, 15 nt, Human
agucaccaagcccag

SEQ ID NO: 2971824 - RNA, 14 nt, Human
agucaccaagccca

SEQ ID NO: 2971825 - RNA, 16 nt, Human
aguccccucuccucca

SEQ ID NO: 2971826 - RNA, 14 nt, Human
aguccucccaucuc

SEQ ID NO: 2971827 - RNA, 16 nt, Human
aguccucccaucucac

SEQ ID NO: 2971828 - RNA, 13 nt, Human
agucucaggaaau

SEQ ID NO: 2971829 - RNA, 21 nt, Human
agucucacuguugcccaggcu

SEQ ID NO: 2971830 - RNA, 22 nt, Human
ugucucaguccaugaagaugua

SEQ ID NO: 2971831 - RNA, 20 nt, Human
agucuagguugguagaguuu

SEQ ID NO: 2971832 - RNA, 20 nt, Human
agucuauuuacggaacucaa

SEQ ID NO: 2971833 - RNA, 15 nt, Human
agucuauuuacggaa

SEQ ID NO: 2971834 - RNA, 23 nt, Human
agucucacuguugcccaggcugg

SEQ ID NO: 2971835 - RNA, 16 nt, Human
agucccaccuuggcug

SEQ ID NO: 2971836 - RNA, 15 nt, Human
agucccaccuuggcu

SEQ ID NO: 2971837 - RNA, 19 nt, Human
agucccaccuuggcugcag

SEQ ID NO: 2971838 - RNA, 18 nt, Human
agucccaccuuggcugca

SEQ ID NO: 2971839 - RNA, 19 nt, Human
agucccagcuacucgggag

SEQ ID NO: 2971840 - RNA, 19 nt, Human
ugucccuuacgugaguccu

SEQ ID NO: 2971841 - RNA, 23 nt, Human
ugucccuuacgugaguccuggca

SEQ ID NO: 2971842 - RNA, 14 nt, Human
ugucccugcacuug

SEQ ID NO: 2971843 - RNA, 23 nt, Human
ugucggccccaccagugccucuc

SEQ ID NO: 2971844 - RNA, 22 nt, Human
ugucggccccaccagugccucu

SEQ ID NO: 2971845 - RNA, 21 nt, Human
ugucggccccaccagugccuc

SEQ ID NO: 2971846 - RNA, 20 nt, Human
ugucggccccaccagugccu

SEQ ID NO: 2971847 - RNA, 14 nt, Human
agucaggaaagaga

SEQ ID NO: 2971848 - RNA, 16 nt, Human
uggcuaacuuggguua

SEQ ID NO: 2971849 - RNA, 19 nt, Human
uggcuaauguacugcauau

SEQ ID NO: 2971850 - RNA, 17 nt, Human
uggcuaauguacugcau

SEQ ID NO: 2971851 - RNA, 15 nt, Human
uggcuauaggugcua

SEQ ID NO: 2971852 - RNA, 19 nt, Human
uggcuauaggugcuacaaa

SEQ ID NO: 2971853 - RNA, 17 nt, Human
aggcuccaggagcagcc

SEQ ID NO: 2971854 - RNA, 18 nt, Human
aggcuccaggagcagcca

SEQ ID NO: 2971855 - RNA, 19 nt, Human
aggcuccaggagcagccac

SEQ ID NO: 2971856 - RNA, 23 nt, Human
aggcuccaggagcagccacauuc

SEQ ID NO: 2971857 - RNA, 18 nt, Human
uggcuaagcaaaauguga

SEQ ID NO: 2971858 - RNA, 14 nt, Human
uggcuaaauucaug

SEQ ID NO: 2971859 - RNA, 23 nt, Human
uggcuauaggugcuacaaaaaca

SEQ ID NO: 2971860 - RNA, 13 nt, Human
uggcucacgccug

SEQ ID NO: 2971861 - RNA, 16 nt, Human
uggcucacccaguccu

SEQ ID NO: 2971862 - RNA, 13 nt, Human
uggcucacccagu

SEQ ID NO: 2971863 - RNA, 17 nt, Human
uggcuucacggaagagc

SEQ ID NO: 2971864 - RNA, 20 nt, Human
uggcuucacggaagagccuu

SEQ ID NO: 2971865 - RNA, 16 nt, Human
uggcuuuugugcauua

SEQ ID NO: 2971866 - RNA, 15 nt, Human
uggcuuuugugcauu

SEQ ID NO: 2971867 - RNA, 18 nt, Human
ugggaaacaaaaggauaa

SEQ ID NO: 2971868 - RNA, 21 nt, Human
uggcuuuugugcauuaucuag

SEQ ID NO: 2971869 - RNA, 17 nt, Human
ugggaaagcauuguaaa

SEQ ID NO: 2971870 - RNA, 18 nt, Human
ugggaaagcauuguaaau

SEQ ID NO: 2971871 - RNA, 14 nt, Human
ugggaaagcauugu

SEQ ID NO: 2971872 - RNA, 16 nt, Human
ugggaaagcauuguaa

SEQ ID NO: 2971873 - RNA, 23 nt, Human
uggcugcaaaggguaucaggugc

SEQ ID NO: 2971874 - RNA, 14 nt, Human
uggcugugaacuga

SEQ ID NO: 2971875 - RNA, 18 nt, Human
uggcuguuggcugggggc

SEQ ID NO: 2971876 - RNA, 16 nt, Human
uggcuguuggcugggg

SEQ ID NO: 2971877 - RNA, 14 nt, Human
uggcuucacggaag

SEQ ID NO: 2971878 - RNA, 23 nt, Human
uggcuguuggcugggggccucag

SEQ ID NO: 2971879 - RNA, 18 nt, Human
aggcuuagugauguaauu

SEQ ID NO: 2971880 - RNA, 17 nt, Human
aggcuuagugauguaau

SEQ ID NO: 2971881 - RNA, 19 nt, Human
aggcuuagugauguaauua

SEQ ID NO: 2971882 - RNA, 23 nt, Human
aggcuuagucacugagacagccc

SEQ ID NO: 2971883 - RNA, 21 nt, Human
aggcuuagucacugagacagc

SEQ ID NO: 2971884 - RNA, 22 nt, Human
aggcuuagucacugagacagcc

SEQ ID NO: 2971885 - RNA, 16 nt, Human
agggaaacugccagca

SEQ ID NO: 2971886 - RNA, 19 nt, Human
agggaaacugccagcaacg

SEQ ID NO: 2971887 - RNA, 21 nt, Human
agggaaacugccagcaacgca

SEQ ID NO: 2971888 - RNA, 23 nt, Human
agggaaacugccagcaacgcagg

SEQ ID NO: 2971889 - RNA, 14 nt, Human
agggaaacugccag

SEQ ID NO: 2971890 - RNA, 15 nt, Human
agggaaacugccagc

SEQ ID NO: 2971891 - RNA, 19 nt, Human
aggcugggagagccuucca

SEQ ID NO: 2971892 - RNA, 16 nt, Human
aggcugggagagccuu

SEQ ID NO: 2971893 - RNA, 20 nt, Human
ugggaacccaaguccaagca

SEQ ID NO: 2971894 - RNA, 20 nt, Human
aggcugggagagccuuccag

SEQ ID NO: 2971895 - RNA, 21 nt, Human
aggcugggagagccuuccagg

SEQ ID NO: 2971896 - RNA, 22 nt, Human
aggcugggagagccuuccaggg

SEQ ID NO: 2971897 - RNA, 21 nt, Human
aggcugggcucccuucccacc

SEQ ID NO: 2971898 - RNA, 23 nt, Human
aggcugggcucccuucccaccuc

SEQ ID NO: 2971899 - RNA, 14 nt, Human
aggcugggcuucag

SEQ ID NO: 2971900 - RNA, 14 nt, Human
aggcugggcucccu

SEQ ID NO: 2971901 - RNA, 18 nt, Human
aggcugggcucccuuccc

SEQ ID NO: 2971902 - RNA, 13 nt, Human
aggcugggcuccc

SEQ ID NO: 2971903 - RNA, 22 nt, Human
aggcugggggaagaagcucucu

SEQ ID NO: 2971904 - RNA, 14 nt, Human
aggcuggguucuga

SEQ ID NO: 2971905 - RNA, 17 nt, Human
aggcuggguucugaucc

SEQ ID NO: 2971906 - RNA, 21 nt, Human
aggcugggcuucaguggcagc

SEQ ID NO: 2971907 - RNA, 20 nt, Human
aggcugggcuucaguggcag

SEQ ID NO: 2971908 - RNA, 19 nt, Human
aggcugggcuucaguggca

SEQ ID NO: 2971909 - RNA, 18 nt, Human
aggcugggcuucaguggc

SEQ ID NO: 2971910 - RNA, 23 nt, Human
aggcugggcuucaguggcagcug

SEQ ID NO: 2971911 - RNA, 22 nt, Human
aggcugggcuucaguggcagcu

SEQ ID NO: 2971912 - RNA, 17 nt, Human
aggcugggggaagaagc

SEQ ID NO: 2971913 - RNA, 22 nt, Human
ugggaggauugcuugagcucag

SEQ ID NO: 2971914 - RNA, 18 nt, Human
ugggaggauugcuugagc

SEQ ID NO: 2971915 - RNA, 21 nt, Human
ugggaggauugcuugagcuca

SEQ ID NO: 2971916 - RNA, 21 nt, Human
ugggagaaccaaaaagaggcu

SEQ ID NO: 2971917 - RNA, 22 nt, Human
ugggaggaucucuugagccugg

SEQ ID NO: 2971918 - RNA, 19 nt, Human
ugggaggcugagaugggag

SEQ ID NO: 2971919 - RNA, 23 nt, Human
ugggcagaaggaagacuucaucc

SEQ ID NO: 2971920 - RNA, 13 nt, Human
ugggcauucaaau

SEQ ID NO: 2971921 - RNA, 14 nt, Human
ugggcauucaaaug

SEQ ID NO: 2971922 - RNA, 16 nt, Human
ugggcagaaggaagac

SEQ ID NO: 2971923 - RNA, 20 nt, Human
ugggcagaaggaagacuuca

SEQ ID NO: 2971924 - RNA, 13 nt, Human
ugggcagaaggaa

SEQ ID NO: 2971925 - RNA, 21 nt, Human
ugggcaacccccagccugcua

SEQ ID NO: 2971926 - RNA, 15 nt, Human
ugggcaacagagcaa

SEQ ID NO: 2971927 - RNA, 19 nt, Human
ugggcaacagagcaagacu

SEQ ID NO: 2971928 - RNA, 14 nt, Human
ugggcaacagagca

SEQ ID NO: 2971929 - RNA, 18 nt, Human
ugggacucaaugcacuga

SEQ ID NO: 2971930 - RNA, 16 nt, Human
ugggacuacaggugug

SEQ ID NO: 2971931 - RNA, 18 nt, Human
ugggacuacaggcaccca

SEQ ID NO: 2971932 - RNA, 13 nt, Human
agggagagaagau

SEQ ID NO: 2971933 - RNA, 14 nt, Human
agggagagaagaua

SEQ ID NO: 2971934 - RNA, 20 nt, Human
agggacuuggaagcuccgcu

SEQ ID NO: 2971935 - RNA, 23 nt, Human
agggacuucugucuucacaacag

SEQ ID NO: 2971936 - RNA, 15 nt, Human
agggacuuggaagcu

SEQ ID NO: 2971937 - RNA, 19 nt, Human
agggacuuggaagcuccgc

SEQ ID NO: 2971938 - RNA, 18 nt, Human
agggacuuggaagcuccg

SEQ ID NO: 2971939 - RNA, 22 nt, Human
agggcuguuauaaucuuucaca

SEQ ID NO: 2971940 - RNA, 14 nt, Human
ugggcucccuuccc

SEQ ID NO: 2971941 - RNA, 21 nt, Human
ugggcucccuucccaccucuc

SEQ ID NO: 2971942 - RNA, 20 nt, Human
agggcuccagacacaugucc

SEQ ID NO: 2971943 - RNA, 15 nt, Human
agggcuccagacaca

SEQ ID NO: 2971944 - RNA, 14 nt, Human
agggcccagagagg

SEQ ID NO: 2971945 - RNA, 17 nt, Human
agggagggcuccagaca

SEQ ID NO: 2971946 - RNA, 19 nt, Human
agggagggcuccagacaca

SEQ ID NO: 2971947 - RNA, 12 nt, Human
agggagggcucc

SEQ ID NO: 2971948 - RNA, 17 nt, Human
agggagggagggcucca

SEQ ID NO: 2971949 - RNA, 22 nt, Human
agggagggcuccagacacaugu

SEQ ID NO: 2971950 - RNA, 20 nt, Human
agggaguccgaaagggacuu

SEQ ID NO: 2971951 - RNA, 20 nt, Human
agggagugaguugauagcac

SEQ ID NO: 2971952 - RNA, 20 nt, Human
agggagugacagaggcagcc

SEQ ID NO: 2971953 - RNA, 23 nt, Human
agggaguccgaaagggacuugga

SEQ ID NO: 2971954 - RNA, 13 nt, Human
agggcccagagag

SEQ ID NO: 2971955 - RNA, 12 nt, Human
agggcccagaga

SEQ ID NO: 2971956 - RNA, 11 nt, Human
uggcccaggag

SEQ ID NO: 2971957 - RNA, 13 nt, Human
uggcccacugcau

SEQ ID NO: 2971958 - RNA, 14 nt, Human
uggcccacugcauc

SEQ ID NO: 2971959 - RNA, 19 nt, Human
uggcccacgcacuucggga

SEQ ID NO: 2971960 - RNA, 22 nt, Human
uggcaugggaaugaaugucagu

SEQ ID NO: 2971961 - RNA, 19 nt, Human
uggccucugcacuccccug

SEQ ID NO: 2971962 - RNA, 18 nt, Human
uggccucugcacuccccu

SEQ ID NO: 2971963 - RNA, 20 nt, Human
uggccucugcacuccccugc

SEQ ID NO: 2971964 - RNA, 18 nt, Human
uggccugagcugggauga

SEQ ID NO: 2971965 - RNA, 22 nt, Human
aggcuccacuuggucugugaga

SEQ ID NO: 2971966 - RNA, 21 nt, Human
aggcuccacuuggucugugag

SEQ ID NO: 2971967 - RNA, 17 nt, Human
aggcuccacuuggucug

SEQ ID NO: 2971968 - RNA, 11 nt, Human
aggcuccacuu

SEQ ID NO: 2971969 - RNA, 14 nt, Human
aggcuccaggagca

SEQ ID NO: 2971970 - RNA, 16 nt, Human
aggcuccaggagcagc

SEQ ID NO: 2971971 - RNA, 13 nt, Human
aggcuccaggagc

SEQ ID NO: 2971972 - RNA, 18 nt, Human
aggccuucucugaaggac

SEQ ID NO: 2971973 - RNA, 17 nt, Human
aggccuucucugaagga

SEQ ID NO: 2971974 - RNA, 22 nt, Human
aggcuauuccugagagcugcau

SEQ ID NO: 2971975 - RNA, 20 nt, Human
aggcuauuccugagagcugc

SEQ ID NO: 2971976 - RNA, 15 nt, Human
aggcuauuccugaga

SEQ ID NO: 2971977 - RNA, 21 nt, Human
aggccccugccacccugggga

SEQ ID NO: 2971978 - RNA, 12 nt, Human
aggccccugcca

SEQ ID NO: 2971979 - RNA, 18 nt, Human
aggccccugccacccugg

SEQ ID NO: 2971980 - RNA, 17 nt, Human
aggccccugccacccug

SEQ ID NO: 2971981 - RNA, 19 nt, Human
aggcccagagggccugcaa

SEQ ID NO: 2971982 - RNA, 20 nt, Human
aggcccagagggccugcaag

SEQ ID NO: 2971983 - RNA, 15 nt, Human
aggccccugccaccc

SEQ ID NO: 2971984 - RNA, 13 nt, Human
aggccccugccac

SEQ ID NO: 2971985 - RNA, 16 nt, Human
aggcccggcuccaggc

SEQ ID NO: 2971986 - RNA, 15 nt, Human
aggcccggcuccagg

SEQ ID NO: 2971987 - RNA, 14 nt, Human
aggcccggcuccag

SEQ ID NO: 2971988 - RNA, 12 nt, Human
aggccuggccag

SEQ ID NO: 2971989 - RNA, 13 nt, Human
aggccuggccaga

SEQ ID NO: 2971990 - RNA, 16 nt, Human
uggcaccagcagccug

SEQ ID NO: 2971991 - RNA, 17 nt, Human
uggcaccagcagccugg

SEQ ID NO: 2971992 - RNA, 16 nt, Human
uggcagcucagagagg

SEQ ID NO: 2971993 - RNA, 13 nt, Human
aggccagagacac

SEQ ID NO: 2971994 - RNA, 18 nt, Human
aggccagagacacaagcc

SEQ ID NO: 2971995 - RNA, 14 nt, Human
uggcagcucagaga

SEQ ID NO: 2971996 - RNA, 15 nt, Human
uggcagcucagagag

SEQ ID NO: 2971997 - RNA, 23 nt, Human
aggccagagacacaagccuucgg

SEQ ID NO: 2971998 - RNA, 18 nt, Human
aggccaugggccuccugu

SEQ ID NO: 2971999 - RNA, 17 nt, Human
aggccaugggccuccug

SEQ ID NO: 2972000 - RNA, 15 nt, Human
aggcccagagggccu

SEQ ID NO: 2972001 - RNA, 16 nt, Human
aggcccagagggccug

SEQ ID NO: 2972002 - RNA, 12 nt, Human
aggaguuuggcc

SEQ ID NO: 2972003 - RNA, 13 nt, Human
aggaguuuggcca

SEQ ID NO: 2972004 - RNA, 21 nt, Human
aggaguuugagaccaaccugg

SEQ ID NO: 2972005 - RNA, 15 nt, Human
aggaggccagccuug

SEQ ID NO: 2972006 - RNA, 19 nt, Human
uggaacacucuauaacaaa

SEQ ID NO: 2972007 - RNA, 20 nt, Human
ugcugccccugcacagcagg

SEQ ID NO: 2972008 - RNA, 21 nt, Human
ugcugccccugcacagcaggc

SEQ ID NO: 2972009 - RNA, 10 nt, Human
ugcugcccug

SEQ ID NO: 2972010 - RNA, 22 nt, Human
ugcugccccugcacagcaggcu

SEQ ID NO: 2972011 - RNA, 12 nt, Human
uggaacacucug

SEQ ID NO: 2972012 - RNA, 13 nt, Human
uggaagcuccgcu

SEQ ID NO: 2972013 - RNA, 20 nt, Human
uggaaguacuauaauuuacc

SEQ ID NO: 2972014 - RNA, 18 nt, Human
uggaaguacuauaauuua

SEQ ID NO: 2972015 - RNA, 19 nt, Human
aggcaacugcauuggcuuu

SEQ ID NO: 2972016 - RNA, 14 nt, Human
aggcaagcaccucc

SEQ ID NO: 2972017 - RNA, 22 nt, Human
uggaauuucucccagucauuua

SEQ ID NO: 2972018 - RNA, 15 nt, Human
uggacaccggaaaca

SEQ ID NO: 2972019 - RNA, 17 nt, Human
uggacaaaauggaauac

SEQ ID NO: 2972020 - RNA, 14 nt, Human
uggacaaaauggaa

SEQ ID NO: 2972021 - RNA, 16 nt, Human
aggaugcuuguacaua

SEQ ID NO: 2972022 - RNA, 15 nt, Human
aggaugcuuguacau

SEQ ID NO: 2972023 - RNA, 21 nt, Human
aggauccugagccagauuuca

SEQ ID NO: 2972024 - RNA, 12 nt, Human
aggaucagucug

SEQ ID NO: 2972025 - RNA, 18 nt, Human
aggaugcuuguacauaau

SEQ ID NO: 2972026 - RNA, 22 nt, Human
aggauugcuacuguccuaccca

SEQ ID NO: 2972027 - RNA, 21 nt, Human
aggcagggucucacucugucg

SEQ ID NO: 2972028 - RNA, 20 nt, Human
aggcagggucucacucuguc

SEQ ID NO: 2972029 - RNA, 18 nt, Human
aggcagggucucacucug

SEQ ID NO: 2972030 - RNA, 19 nt, Human
aggcagggucucacucugu

SEQ ID NO: 2972031 - RNA, 14 nt, Human
aggcagguccaggg

SEQ ID NO: 2972032 - RNA, 22 nt, Human
aggcagggucucacucugucgc

SEQ ID NO: 2972033 - RNA, 21 nt, Human
aggcaggucuugaacuccugg

SEQ ID NO: 2972034 - RNA, 12 nt, Human
aggcaggauggc

SEQ ID NO: 2972035 - RNA, 18 nt, Human
aggcaggagacuggcgug

SEQ ID NO: 2972036 - RNA, 15 nt, Human
aggcaggagacuggc

SEQ ID NO: 2972037 - RNA, 21 nt, Human
aggcagccccauucugccugc

SEQ ID NO: 2972038 - RNA, 20 nt, Human
aggcagccccauucugccug

SEQ ID NO: 2972039 - RNA, 19 nt, Human
aggcagccccauucugccu

SEQ ID NO: 2972040 - RNA, 22 nt, Human
aggcagccccauucugccugcc

SEQ ID NO: 2972041 - RNA, 24 nt, Human
uggacuuuguuaguuucuccaagc

SEQ ID NO: 2972042 - RNA, 14 nt, Human
uggagaagaacuga

SEQ ID NO: 2972043 - RNA, 16 nt, Human
uggagaagaacugaaa

SEQ ID NO: 2972044 - RNA, 11 nt, Human
uggacuuuguu

SEQ ID NO: 2972045 - RNA, 22 nt, Human
uggacuuuguuaguuucuccaa

SEQ ID NO: 2972046 - RNA, 16 nt, Human
aggcaaugcuggcugu

SEQ ID NO: 2972047 - RNA, 15 nt, Human
aggcaaugcuggcug

SEQ ID NO: 2972048 - RNA, 21 nt, Human
uggagcucgugggacagucac

SEQ ID NO: 2972049 - RNA, 20 nt, Human
ugccuuuuuauaacuuuuua

SEQ ID NO: 2972050 - RNA, 13 nt, Human
ugcgaaaggauga

SEQ ID NO: 2972051 - RNA, 17 nt, Human
ugcggacagccacggcc

SEQ ID NO: 2972052 - RNA, 18 nt, Human
ugcggacagccacggcca

SEQ ID NO: 2972053 - RNA, 19 nt, Human
ugcgaaaggaugaaaguga

SEQ ID NO: 2972054 - RNA, 16 nt, Human
ugccuguucagcucca

SEQ ID NO: 2972055 - RNA, 15 nt, Human
ugccuguucagcucc

SEQ ID NO: 2972056 - RNA, 21 nt, Human
agcugccugggaucccucauc

SEQ ID NO: 2972057 - RNA, 13 nt, Human
agcugccugggau

SEQ ID NO: 2972058 - RNA, 19 nt, Human
agcugccugggaucccuca

SEQ ID NO: 2972059 - RNA, 13 nt, Human
agcuggaaaagua

SEQ ID NO: 2972060 - RNA, 23 nt, Human
agcugccuccccuccucugcuug

SEQ ID NO: 2972061 - RNA, 22 nt, Human
agcugccuccccuccucugcuu

SEQ ID NO: 2972062 - RNA, 21 nt, Human
agcugccuccccuccucugcu

SEQ ID NO: 2972063 - RNA, 20 nt, Human
agcugccuccccuccucugc

SEQ ID NO: 2972064 - RNA, 19 nt, Human
agcugccuccccuccucug

SEQ ID NO: 2972065 - RNA, 18 nt, Human
agcugccuccccuccucu

SEQ ID NO: 2972066 - RNA, 17 nt, Human
agcugccuccccuccuc

SEQ ID NO: 2972067 - RNA, 22 nt, Human
ugccucugacacacagcucugu

SEQ ID NO: 2972068 - RNA, 14 nt, Human
agcugggcagguug

SEQ ID NO: 2972069 - RNA, 19 nt, Human
agcugggacuacaggugug

SEQ ID NO: 2972070 - RNA, 17 nt, Human
agcugggacuacaggug

SEQ ID NO: 2972071 - RNA, 23 nt, Human
agcugggaugauuggagggggga

SEQ ID NO: 2972072 - RNA, 19 nt, Human
ugcccuccaagaccuucuc

SEQ ID NO: 2972073 - RNA, 20 nt, Human
ugcccuccaagaccuucucc

SEQ ID NO: 2972074 - RNA, 22 nt, Human
ugcccuccaagaccuucuccuu

SEQ ID NO: 2972075 - RNA, 16 nt, Human
agcucucuccucccuu

SEQ ID NO: 2972076 - RNA, 20 nt, Human
agcucugguccauagagagc

SEQ ID NO: 2972077 - RNA, 22 nt, Human
agcucugcuccucuccccagca

SEQ ID NO: 2972078 - RNA, 12 nt, Human
agcucugcuccu

SEQ ID NO: 2972079 - RNA, 12 nt, Human
agcucuguccug

SEQ ID NO: 2972080 - RNA, 17 nt, Human
agcucuucuccaggcug

SEQ ID NO: 2972081 - RNA, 18 nt, Human
agcucuucuccaggcugu

SEQ ID NO: 2972082 - RNA, 20 nt, Human
agcugaucgcuucuccccca

SEQ ID NO: 2972083 - RNA, 18 nt, Human
agcugcacccucaggcag

SEQ ID NO: 2972084 - RNA, 19 nt, Human
agcugcacccucaggcagg

SEQ ID NO: 2972085 - RNA, 20 nt, Human
agcugcacccucaggcaggu

SEQ ID NO: 2972086 - RNA, 22 nt, Human
agcugcacccucaggcaggugg

SEQ ID NO: 2972087 - RNA, 13 nt, Human
agcugcacccuca

SEQ ID NO: 2972088 - RNA, 17 nt, Human
agcugcacccucaggca

SEQ ID NO: 2972089 - RNA, 13 nt, Human
agcugccaccugc

SEQ ID NO: 2972090 - RNA, 18 nt, Human
agcugcauacaguuugca

SEQ ID NO: 2972091 - RNA, 13 nt, Human
ugccucccaucac

SEQ ID NO: 2972092 - RNA, 14 nt, Human
ugccucccaucacc

SEQ ID NO: 2972093 - RNA, 19 nt, Human
ugccucccaucacccgcua

SEQ ID NO: 2972094 - RNA, 13 nt, Human
ugccucucucagg

SEQ ID NO: 2972095 - RNA, 14 nt, Human
ugccucucucaggc

SEQ ID NO: 2972096 - RNA, 15 nt, Human
ugccucucucaggcc

SEQ ID NO: 2972097 - RNA, 21 nt, Human
ugccucugacacacagcucug

SEQ ID NO: 2972098 - RNA, 20 nt, Human
ugccucugacacacagcucu

SEQ ID NO: 2972099 - RNA, 22 nt, Human
ugcugccaauauccuaauaaaa

SEQ ID NO: 2972100 - RNA, 23 nt, Human
ugcugccaauauccuaauaaaaa

SEQ ID NO: 2972101 - RNA, 11 nt, Human
ugcugccaucc

SEQ ID NO: 2972102 - RNA, 15 nt, Human
ugcugccauccaggu

SEQ ID NO: 2972103 - RNA, 14 nt, Human
ugcugccauccagg

SEQ ID NO: 2972104 - RNA, 13 nt, Human
ugcugccauccag

SEQ ID NO: 2972105 - RNA, 12 nt, Human
ugcugccaucca

SEQ ID NO: 2972106 - RNA, 22 nt, Human
ugcugccauccagguucagcuu

SEQ ID NO: 2972107 - RNA, 21 nt, Human
ugcugccauccagguucagcu

SEQ ID NO: 2972108 - RNA, 19 nt, Human
aggaauugacccacaagaa

SEQ ID NO: 2972109 - RNA, 23 nt, Human
aggaauccagacccggcugcgug

SEQ ID NO: 2972110 - RNA, 15 nt, Human
aggaagacuuuggaa

SEQ ID NO: 2972111 - RNA, 14 nt, Human
aggaagagaaaaaa

SEQ ID NO: 2972112 - RNA, 18 nt, Human
aggaagcucagggccugg

SEQ ID NO: 2972113 - RNA, 22 nt, Human
aggaagcucagggccuggcuca

SEQ ID NO: 2972114 - RNA, 17 nt, Human
aggaagcucagggccug

SEQ ID NO: 2972115 - RNA, 23 nt, Human
aggaaagcaaaucaguuugguug

SEQ ID NO: 2972116 - RNA, 19 nt, Human
aggaaagcaaaggagauug

SEQ ID NO: 2972117 - RNA, 21 nt, Human
ugcugacuguuuucucuugag

SEQ ID NO: 2972118 - RNA, 24 nt, Human
ugcugacuguuuucucuugagagg

SEQ ID NO: 2972119 - RNA, 16 nt, Human
ugcugacuguuuucuc

SEQ ID NO: 2972120 - RNA, 22 nt, Human
aggaaaggcuccaggagcagcc

SEQ ID NO: 2972121 - RNA, 13 nt, Human
aggaaauauuuau

SEQ ID NO: 2972122 - RNA, 18 nt, Human
aggaaauauuuauuuuaa

SEQ ID NO: 2972123 - RNA, 14 nt, Human
aggaaauauuuauu

SEQ ID NO: 2972124 - RNA, 18 nt, Human
aggaaaggcuccaggagc

SEQ ID NO: 2972125 - RNA, 20 nt, Human
aggaaaggcuccaggagcag

SEQ ID NO: 2972126 - RNA, 18 nt, Human
ugcucugcauguuacaua

SEQ ID NO: 2972127 - RNA, 15 nt, Human
ugcucugcauguuac

SEQ ID NO: 2972128 - RNA, 17 nt, Human
ugcucuggacaggcaug

SEQ ID NO: 2972129 - RNA, 17 nt, Human
ugcugacuguuuucucu

SEQ ID NO: 2972130 - RNA, 22 nt, Human
ugcucugaucauccacugugcc

SEQ ID NO: 2972131 - RNA, 19 nt, Human
ugcucugaucauccacugu

SEQ ID NO: 2972132 - RNA, 16 nt, Human
ugcuaguaauuggaaa

SEQ ID NO: 2972133 - RNA, 16 nt, Human
aggaaagaggcucugg

SEQ ID NO: 2972134 - RNA, 17 nt, Human
aggaaagcaaaggagau

SEQ ID NO: 2972135 - RNA, 14 nt, Human
ugcuaguaauugga

SEQ ID NO: 2972136 - RNA, 12 nt, Human
aggaaagaggcu

SEQ ID NO: 2972137 - RNA, 13 nt, Human
aggaaagaggcuc

SEQ ID NO: 2972138 - RNA, 19 nt, Human
aggaaagagaacuuccaga

SEQ ID NO: 2972139 - RNA, 13 nt, Human
aggaaagagaacu

SEQ ID NO: 2972140 - RNA, 12 nt, Human
agcuuugaaaau

SEQ ID NO: 2972141 - RNA, 16 nt, Human
agcuuugaaaauucag

SEQ ID NO: 2972142 - RNA, 18 nt, Human
agcuuugaaaauucagug

SEQ ID NO: 2972143 - RNA, 19 nt, Human
agcuuugaaaauucagugg

SEQ ID NO: 2972144 - RNA, 16 nt, Human
aggaaacccagcucug

SEQ ID NO: 2972145 - RNA, 17 nt, Human
aggaaacccagcucugg

SEQ ID NO: 2972146 - RNA, 15 nt, Human
aggaaacccagcucu

SEQ ID NO: 2972147 - RNA, 18 nt, Human
aggaaacccagcucuggu

SEQ ID NO: 2972148 - RNA, 20 nt, Human
aggaaacccagcucuggucc

SEQ ID NO: 2972149 - RNA, 21 nt, Human
aggaaacccagcucuggucca

SEQ ID NO: 2972150 - RNA, 20 nt, Human
agcuuauuaaaacucauuuu

SEQ ID NO: 2972151 - RNA, 15 nt, Human
agcuuauuaaaacuc

SEQ ID NO: 2972152 - RNA, 21 nt, Human
agcuuauugucuagugaaacu

SEQ ID NO: 2972153 - RNA, 21 nt, Human
agcuuguaaauagcucaggug

SEQ ID NO: 2972154 - RNA, 20 nt, Human
agcuuguaaauagcucaggu

SEQ ID NO: 2972155 - RNA, 19 nt, Human
agcuuguaaauagcucagg

SEQ ID NO: 2972156 - RNA, 18 nt, Human
agcuuguaaauagcucag

SEQ ID NO: 2972157 - RNA, 21 nt, Human
ugcggacagccacggccaggc

SEQ ID NO: 2972158 - RNA, 20 nt, Human
ugcggacagccacggccagg

SEQ ID NO: 2972159 - RNA, 12 nt, Human
agcuuaucucag

SEQ ID NO: 2972160 - RNA, 14 nt, Human
agcuuaucucaggg

SEQ ID NO: 2972161 - RNA, 15 nt, Human
agcuuaucucagggg

SEQ ID NO: 2972162 - RNA, 15 nt, Human
ugccaauauccuaau

SEQ ID NO: 2972163 - RNA, 16 nt, Human
ugccaauauccuaaua

SEQ ID NO: 2972164 - RNA, 17 nt, Human
ugccaauauccuaauaa

SEQ ID NO: 2972165 - RNA, 18 nt, Human
ugccaauauccuaauaaa

SEQ ID NO: 2972166 - RNA, 19 nt, Human
ugccaauauccuaauaaaa

SEQ ID NO: 2972167 - RNA, 21 nt, Human
ugccaauauccuaauaaaaag

SEQ ID NO: 2972168 - RNA, 23 nt, Human
ugccaauauccuaauaaaaaggu

SEQ ID NO: 2972169 - RNA, 23 nt, Human
ugcauuugaaaauuuugauguuu

SEQ ID NO: 2972170 - RNA, 19 nt, Human
ugcauuugaaaauuuugau

SEQ ID NO: 2972171 - RNA, 22 nt, Human
agcgcccaguuggguggaugcc

SEQ ID NO: 2972172 - RNA, 14 nt, Human
agcgcccaguuggg

SEQ ID NO: 2972173 - RNA, 19 nt, Human
agcuacuaauuuuaaaaug

SEQ ID NO: 2972174 - RNA, 23 nt, Human
agcgugguggacaugcacagcua

SEQ ID NO: 2972175 - RNA, 20 nt, Human
agcgugguggacaugcacag

SEQ ID NO: 2972176 - RNA, 17 nt, Human
agcgugagccacugcac

SEQ ID NO: 2972177 - RNA, 16 nt, Human
agcgugagccacugca

SEQ ID NO: 2972178 - RNA, 21 nt, Human
ugccauauucuguuggccagu

SEQ ID NO: 2972179 - RNA, 20 nt, Human
ugccauauucuguuggccag

SEQ ID NO: 2972180 - RNA, 15 nt, Human
agcggggacagcucc

SEQ ID NO: 2972181 - RNA, 17 nt, Human
agcggggacagcuccuu

SEQ ID NO: 2972182 - RNA, 16 nt, Human
agcggggacagcuccu

SEQ ID NO: 2972183 - RNA, 15 nt, Human
agcgugagccacugc

SEQ ID NO: 2972184 - RNA, 13 nt, Human
agcgugagccacu

SEQ ID NO: 2972185 - RNA, 15 nt, Human
ugccagucaccccgg

SEQ ID NO: 2972186 - RNA, 16 nt, Human
ugccagucaccccggc

SEQ ID NO: 2972187 - RNA, 18 nt, Human
ugccagucaccccggcca

SEQ ID NO: 2972188 - RNA, 20 nt, Human
ugccagucaccccggccacc

SEQ ID NO: 2972189 - RNA, 15 nt, Human
ugccauauucuguug

SEQ ID NO: 2972190 - RNA, 17 nt, Human
ugccauauucuguuggc

SEQ ID NO: 2972191 - RNA, 16 nt, Human
ugccauauucuguugg

SEQ ID NO: 2972192 - RNA, 22 nt, Human
ugccagucaccccggccaccug

SEQ ID NO: 2972193 - RNA, 23 nt, Human
ugccagucaccccggccaccugc

SEQ ID NO: 2972194 - RNA, 19 nt, Human
ugcccucaagagcaaagua

SEQ ID NO: 2972195 - RNA, 21 nt, Human
ugcccccuguggaugcugcug

SEQ ID NO: 2972196 - RNA, 19 nt, Human
ugcccccuguggaugcugc

SEQ ID NO: 2972197 - RNA, 13 nt, Human
ugcccccugugga

SEQ ID NO: 2972198 - RNA, 11 nt, Human
ugcccaggccc

SEQ ID NO: 2972199 - RNA, 20 nt, Human
ugcccaggcaggucuugaac

SEQ ID NO: 2972200 - RNA, 17 nt, Human
ugcccaggcaggucuug

SEQ ID NO: 2972201 - RNA, 16 nt, Human
ugcccaggcaggucuu

SEQ ID NO: 2972202 - RNA, 15 nt, Human
ugcccaggcaggucu

SEQ ID NO: 2972203 - RNA, 14 nt, Human
ugcccacaggauca

SEQ ID NO: 2972204 - RNA, 22 nt, Human
ugcccaggccccugccacccug

SEQ ID NO: 2972205 - RNA, 20 nt, Human
ugcccaggccccugccaccc

SEQ ID NO: 2972206 - RNA, 12 nt, Human
ugcccaggcccc

SEQ ID NO: 2972207 - RNA, 14 nt, Human
agcucagggccugg

SEQ ID NO: 2972208 - RNA, 15 nt, Human
agcucagggccuggc

SEQ ID NO: 2972209 - RNA, 16 nt, Human
agcucagggccuggcu

SEQ ID NO: 2972210 - RNA, 19 nt, Human
ugccauguuggccaggcug

SEQ ID NO: 2972211 - RNA, 18 nt, Human
ugccauguuggccaggcu

SEQ ID NO: 2972212 - RNA, 17 nt, Human
agcucagggccuggcuc

SEQ ID NO: 2972213 - RNA, 17 nt, Human
ugccauguuggccaggc

SEQ ID NO: 2972214 - RNA, 20 nt, Human
ugccauguuggccaggcugg

SEQ ID NO: 2972215 - RNA, 21 nt, Human
ugccauguuggccaggcuggu

SEQ ID NO: 2972216 - RNA, 22 nt, Human
agcuacugccauccuggcccag

SEQ ID NO: 2972217 - RNA, 15 nt, Human
agcuacucgggaggc

SEQ ID NO: 2972218 - RNA, 19 nt, Human
agcuacucgggaggcugag

SEQ ID NO: 2972219 - RNA, 18 nt, Human
agcuacugccauccuggc

SEQ ID NO: 2972220 - RNA, 16 nt, Human
agcuacugccauccug

SEQ ID NO: 2972221 - RNA, 14 nt, Human
agcuacugccaucc

SEQ ID NO: 2972222 - RNA, 13 nt, Human
agcuacugccauc

SEQ ID NO: 2972223 - RNA, 12 nt, Human
agcuacugccau

SEQ ID NO: 2972224 - RNA, 17 nt, Human
ugcacaucuguuuugua

SEQ ID NO: 2972225 - RNA, 13 nt, Human
ugcacacacauau

SEQ ID NO: 2972226 - RNA, 18 nt, Human
ugcacacacauauauuau

SEQ ID NO: 2972227 - RNA, 15 nt, Human
ugcacacacauauau

SEQ ID NO: 2972228 - RNA, 15 nt, Human
ugcacacaccagagc

SEQ ID NO: 2972229 - RNA, 18 nt, Human
ugcacaagcuccaagcuc

SEQ ID NO: 2972230 - RNA, 20 nt, Human
ugcacaagcuccaagcuccc

SEQ ID NO: 2972231 - RNA, 22 nt, Human
ugcacaagcuccaagcucccag

SEQ ID NO: 2972232 - RNA, 23 nt, Human
ugcacaagcuccaagcucccagg

SEQ ID NO: 2972233 - RNA, 15 nt, Human
ugcacaagcuccaag

SEQ ID NO: 2972234 - RNA, 16 nt, Human
ugcacaagcuccaagc

SEQ ID NO: 2972235 - RNA, 12 nt, Human
ugcacuccccug

SEQ ID NO: 2972236 - RNA, 13 nt, Human
ugcacuccccugc

SEQ ID NO: 2972237 - RNA, 19 nt, Human
ugcacguacacacacauac

SEQ ID NO: 2972238 - RNA, 14 nt, Human
ugcaccacugcacu

SEQ ID NO: 2972239 - RNA, 19 nt, Human
agcccuucuuuccacagaa

SEQ ID NO: 2972240 - RNA, 18 nt, Human
agcccuucuuuccacaga

SEQ ID NO: 2972241 - RNA, 17 nt, Human
agccuaggugacagagu

SEQ ID NO: 2972242 - RNA, 15 nt, Human
agccuaggugacaga

SEQ ID NO: 2972243 - RNA, 15 nt, Human
agccucaaccuccug

SEQ ID NO: 2972244 - RNA, 17 nt, Human
agcccuucuuuccacag

SEQ ID NO: 2972245 - RNA, 22 nt, Human
ugcagacucuacagaggccaug

SEQ ID NO: 2972246 - RNA, 15 nt, Human
ugcacuccccugcug

SEQ ID NO: 2972247 - RNA, 18 nt, Human
ugcagacucuacagaggc

SEQ ID NO: 2972248 - RNA, 20 nt, Human
ugcagacucuacagaggcca

SEQ ID NO: 2972249 - RNA, 19 nt, Human
ugcagacucuacagaggcc

SEQ ID NO: 2972250 - RNA, 16 nt, Human
ugcauacuauuaaaca

SEQ ID NO: 2972251 - RNA, 15 nt, Human
ugcauacuauuaaac

SEQ ID NO: 2972252 - RNA, 12 nt, Human
ugcauacuauua

SEQ ID NO: 2972253 - RNA, 22 nt, Human
ugcauaccacuuuuguucuugg

SEQ ID NO: 2972254 - RNA, 21 nt, Human
ugcauaccacuuuuguucuug

SEQ ID NO: 2972255 - RNA, 20 nt, Human
ugcauacuauuaaacaugcu

SEQ ID NO: 2972256 - RNA, 18 nt, Human
ugcauacuauuaaacaug

SEQ ID NO: 2972257 - RNA, 17 nt, Human
ugcauacuauuaaacau

SEQ ID NO: 2972258 - RNA, 20 nt, Human
ugcaugaaguaauaugcaca

SEQ ID NO: 2972259 - RNA, 22 nt, Human
ugcaugaaguaauaugcacaca

SEQ ID NO: 2972260 - RNA, 21 nt, Human
ugcaugaggcuaguguggugu

SEQ ID NO: 2972261 - RNA, 14 nt, Human
ugcaugcugucccu

SEQ ID NO: 2972262 - RNA, 15 nt, Human
ugcaugcugucccuu

SEQ ID NO: 2972263 - RNA, 13 nt, Human
ugcaugcuguccc

SEQ ID NO: 2972264 - RNA, 16 nt, Human
ugcaugcugucccuua

SEQ ID NO: 2972265 - RNA, 16 nt, Human
agccugccucuucucu

SEQ ID NO: 2972266 - RNA, 19 nt, Human
agccugccucuucucuacu

SEQ ID NO: 2972267 - RNA, 23 nt, Human
agccugcaguuauuaacacuaac

SEQ ID NO: 2972268 - RNA, 18 nt, Human
agccugagcgacagugag

SEQ ID NO: 2972269 - RNA, 15 nt, Human
agccucagcauccug

SEQ ID NO: 2972270 - RNA, 14 nt, Human
agccucagcauccu

SEQ ID NO: 2972271 - RNA, 13 nt, Human
agccucagcaucc

SEQ ID NO: 2972272 - RNA, 18 nt, Human
agccucaaccuccugggc

SEQ ID NO: 2972273 - RNA, 17 nt, Human
agccucaaccuccuggg

SEQ ID NO: 2972274 - RNA, 19 nt, Human
ugcagccucaaccuccugg

SEQ ID NO: 2972275 - RNA, 18 nt, Human
ugcagccucaaccuccug

SEQ ID NO: 2972276 - RNA, 14 nt, Human
ugcagugagccgag

SEQ ID NO: 2972277 - RNA, 16 nt, Human
ucugucuuuuaaacuc

SEQ ID NO: 2972278 - RNA, 12 nt, Human
ucugucuuuuaa

SEQ ID NO: 2972279 - RNA, 15 nt, Human
ucugugaaaggaaag

SEQ ID NO: 2972280 - RNA, 21 nt, Human
ucugugaaaggaaagagggag

SEQ ID NO: 2972281 - RNA, 18 nt, Human
ucugucuuuuaaacucug

SEQ ID NO: 2972282 - RNA, 16 nt, Human
ucugugcguagaaguu

SEQ ID NO: 2972283 - RNA, 20 nt, Human
ucuguuggccagugugacaa

SEQ ID NO: 2972284 - RNA, 19 nt, Human
ucuguuggccagugugaca

SEQ ID NO: 2972285 - RNA, 18 nt, Human
ucuguuggccagugugac

SEQ ID NO: 2972286 - RNA, 18 nt, Human
ucuguuuuauaauuuugu

SEQ ID NO: 2972287 - RNA, 23 nt, Human
agaauuucccaaagcagugcaug

SEQ ID NO: 2972288 - RNA, 21 nt, Human
agaauuucuaggacugaauua

SEQ ID NO: 2972289 - RNA, 13 nt, Human
agaauuucuagga

SEQ ID NO: 2972290 - RNA, 17 nt, Human
agaauuucccaaagcag

SEQ ID NO: 2972291 - RNA, 18 nt, Human
agaauuucccaaagcagu

SEQ ID NO: 2972292 - RNA, 15 nt, Human
ucugucauuugagca

SEQ ID NO: 2972293 - RNA, 23 nt, Human
ucugucauuugagcagggcucag

SEQ ID NO: 2972294 - RNA, 20 nt, Human
ucugucauuugagcagggcu

SEQ ID NO: 2972295 - RNA, 18 nt, Human
ucugguccauagagagca

SEQ ID NO: 2972296 - RNA, 16 nt, Human
ucuggguucacugcaa

SEQ ID NO: 2972297 - RNA, 14 nt, Human
ucuggguucacugc

SEQ ID NO: 2972298 - RNA, 11 nt, Human
ucuggggcugu

SEQ ID NO: 2972299 - RNA, 16 nt, Human
ucuucccucaaaugug

SEQ ID NO: 2972300 - RNA, 22 nt, Human
ucuuccaggcugggagagccuu

SEQ ID NO: 2972301 - RNA, 18 nt, Human
ucuuaauuaaaagaauau

SEQ ID NO: 2972302 - RNA, 21 nt, Human
ucuuaauuaaaagaauauuuu

SEQ ID NO: 2972303 - RNA, 14 nt, Human
ucuuaauuaaaaga

SEQ ID NO: 2972304 - RNA, 15 nt, Human
ucuuaugggcugggu

SEQ ID NO: 2972305 - RNA, 16 nt, Human
ucuuaugggcuggguu

SEQ ID NO: 2972306 - RNA, 14 nt, Human
ucuuaugggcuggg

SEQ ID NO: 2972307 - RNA, 22 nt, Human
ucuuauugcccacgcuggagug

SEQ ID NO: 2972308 - RNA, 18 nt, Human
ucuuauugcccacgcugg

SEQ ID NO: 2972309 - RNA, 14 nt, Human
ucuuauugcccacg

SEQ ID NO: 2972310 - RNA, 17 nt, Human
agaauuugauaugugaa

SEQ ID NO: 2972311 - RNA, 19 nt, Human
agaauuugauaugugaaca

SEQ ID NO: 2972312 - RNA, 18 nt, Human
agaauuugauaugugaac

SEQ ID NO: 2972313 - RNA, 20 nt, Human
agaauuugauaugugaacag

SEQ ID NO: 2972314 - RNA, 21 nt, Human
agacaggguuuugccauguug

SEQ ID NO: 2972315 - RNA, 15 nt, Human
agacaggaccaggga

SEQ ID NO: 2972316 - RNA, 22 nt, Human
agacaggcaagcaccuccugcc

SEQ ID NO: 2972317 - RNA, 23 nt, Human
agacaggcaagcaccuccugccu

SEQ ID NO: 2972318 - RNA, 16 nt, Human
agacagucccugccaa

SEQ ID NO: 2972319 - RNA, 17 nt, Human
agacagucccugccaau

SEQ ID NO: 2972320 - RNA, 15 nt, Human
agacagucccugcca

SEQ ID NO: 2972321 - RNA, 14 nt, Human
agacagucccugcc

SEQ ID NO: 2972322 - RNA, 20 nt, Human
agacuggauaguccgucucu

SEQ ID NO: 2972323 - RNA, 19 nt, Human
agacucuacagaggccaug

SEQ ID NO: 2972324 - RNA, 21 nt, Human
agacucgcgacaaugcaaacc

SEQ ID NO: 2972325 - RNA, 17 nt, Human
agacucuacagaggcca

SEQ ID NO: 2972326 - RNA, 18 nt, Human
agacuccugcaggcagcc

SEQ ID NO: 2972327 - RNA, 19 nt, Human
agacuccugcaggcagcca

SEQ ID NO: 2972328 - RNA, 20 nt, Human
agacuccugcaggcagccag

SEQ ID NO: 2972329 - RNA, 23 nt, Human
agacuccugcaggcagccaggcc

SEQ ID NO: 2972330 - RNA, 13 nt, Human
ucuuuccugaggc

SEQ ID NO: 2972331 - RNA, 14 nt, Human
ucuuuccugaggcu

SEQ ID NO: 2972332 - RNA, 15 nt, Human
ucuuuccugaggcug

SEQ ID NO: 2972333 - RNA, 12 nt, Human
ucuuuccugagg

SEQ ID NO: 2972334 - RNA, 14 nt, Human
agacuccugcaggc

SEQ ID NO: 2972335 - RNA, 15 nt, Human
agacuccugcaggca

SEQ ID NO: 2972336 - RNA, 16 nt, Human
agacuccugcaggcag

SEQ ID NO: 2972337 - RNA, 17 nt, Human
agacuccugcaggcagc

SEQ ID NO: 2972338 - RNA, 21 nt, Human
ucuuuaaagggauggcaagau

SEQ ID NO: 2972339 - RNA, 17 nt, Human
ucuuuaaaauacacacu

SEQ ID NO: 2972340 - RNA, 15 nt, Human
ucuuuacuucaugga

SEQ ID NO: 2972341 - RNA, 21 nt, Human
agacuggauaguccgucucug

SEQ ID NO: 2972342 - RNA, 14 nt, Human
agacuggcacaguu

SEQ ID NO: 2972343 - RNA, 15 nt, Human
agacuggcacaguuu

SEQ ID NO: 2972344 - RNA, 14 nt, Human
agacuucaucccuc

SEQ ID NO: 2972345 - RNA, 17 nt, Human
agacuucaucccucugg

SEQ ID NO: 2972346 - RNA, 13 nt, Human
agagaccaucccu

SEQ ID NO: 2972347 - RNA, 14 nt, Human
agagaccaucccug

SEQ ID NO: 2972348 - RNA, 20 nt, Human
agagacacacugaagaagca

SEQ ID NO: 2972349 - RNA, 18 nt, Human
agagacacacugaagaag

SEQ ID NO: 2972350 - RNA, 15 nt, Human
agagaccaucccuga

SEQ ID NO: 2972351 - RNA, 15 nt, Human
agagaaugagagaca

SEQ ID NO: 2972352 - RNA, 17 nt, Human
agagacacacugaagaa

SEQ ID NO: 2972353 - RNA, 12 nt, Human
agacuuuggaaa

SEQ ID NO: 2972354 - RNA, 14 nt, Human
agacuuuggaaaga

SEQ ID NO: 2972355 - RNA, 18 nt, Human
agagaaugaaagggccca

SEQ ID NO: 2972356 - RNA, 16 nt, Human
agacccucucaaacua

SEQ ID NO: 2972357 - RNA, 24 nt, Human
agacccucaugcugccaauauccu

SEQ ID NO: 2972358 - RNA, 20 nt, Human
agacccucaugcugccaaua

SEQ ID NO: 2972359 - RNA, 21 nt, Human
agacccucaugcugccaauau

SEQ ID NO: 2972360 - RNA, 18 nt, Human
agacccucaugcugccaa

SEQ ID NO: 2972361 - RNA, 19 nt, Human
agacccucaugcugccaau

SEQ ID NO: 2972362 - RNA, 17 nt, Human
agacccucaugcugcca

SEQ ID NO: 2972363 - RNA, 13 nt, Human
agacccugcccug

SEQ ID NO: 2972364 - RNA, 14 nt, Human
agacccugcccugu

SEQ ID NO: 2972365 - RNA, 12 nt, Human
agacccugcccu

SEQ ID NO: 2972366 - RNA, 19 nt, Human
agacccuuguggucccacc

SEQ ID NO: 2972367 - RNA, 20 nt, Human
agacccuuguggucccaccc

SEQ ID NO: 2972368 - RNA, 22 nt, Human
agacccuuguggucccacccca

SEQ ID NO: 2972369 - RNA, 23 nt, Human
agacccuuguggucccaccccac

SEQ ID NO: 2972370 - RNA, 16 nt, Human
agacccugcccugugg

SEQ ID NO: 2972371 - RNA, 19 nt, Human
agacccugcccugugggcc

SEQ ID NO: 2972372 - RNA, 21 nt, Human
agacccugcccugugggcccc

SEQ ID NO: 2972373 - RNA, 23 nt, Human
agacccugcccugugggccccca

SEQ ID NO: 2972374 - RNA, 13 nt, Human
agacccuuguggu

SEQ ID NO: 2972375 - RNA, 15 nt, Human
agacccuuguggucc

SEQ ID NO: 2972376 - RNA, 18 nt, Human
agacuauucaaacagucu

SEQ ID NO: 2972377 - RNA, 20 nt, Human
agacuauucaaacagucuca

SEQ ID NO: 2972378 - RNA, 21 nt, Human
agacuauucaaacagucucag

SEQ ID NO: 2972379 - RNA, 17 nt, Human
agacucauucuucugua

SEQ ID NO: 2972380 - RNA, 13 nt, Human
agacuccaaagaa

SEQ ID NO: 2972381 - RNA, 14 nt, Human
agacuccaaagaaa

SEQ ID NO: 2972382 - RNA, 12 nt, Human
agacuccaaaga

SEQ ID NO: 2972383 - RNA, 18 nt, Human
agacucauucuucuguac

SEQ ID NO: 2972384 - RNA, 18 nt, Human
agacuaucuaaauguuga

SEQ ID NO: 2972385 - RNA, 17 nt, Human
agacuaucuaaauguug

SEQ ID NO: 2972386 - RNA, 19 nt, Human
agacuaucuaaauguugaa

SEQ ID NO: 2972387 - RNA, 16 nt, Human
agacuauucaaacagu

SEQ ID NO: 2972388 - RNA, 15 nt, Human
agacuaucuaaaugu

SEQ ID NO: 2972389 - RNA, 16 nt, Human
agacuccaaagaaaug

SEQ ID NO: 2972390 - RNA, 19 nt, Human
agacuccaaagaaauguaa

SEQ ID NO: 2972391 - RNA, 15 nt, Human
agacucauucuucug

SEQ ID NO: 2972392 - RNA, 16 nt, Human
ucuugcaauggcagcc

SEQ ID NO: 2972393 - RNA, 13 nt, Human
ucuugcaauggca

SEQ ID NO: 2972394 - RNA, 17 nt, Human
ucuugcaauggcagccu

SEQ ID NO: 2972395 - RNA, 15 nt, Human
ucuggauucauauuu

SEQ ID NO: 2972396 - RNA, 14 nt, Human
ucuggcagcucaga

SEQ ID NO: 2972397 - RNA, 15 nt, Human
ucuggcagcucagag

SEQ ID NO: 2972398 - RNA, 12 nt, Human
ucugcuugccau

SEQ ID NO: 2972399 - RNA, 23 nt, Human
ucugcuuuuuaaagaaugcucuu

SEQ ID NO: 2972400 - RNA, 18 nt, Human
ucuggagguacgaaaaga

SEQ ID NO: 2972401 - RNA, 15 nt, Human
agaagcggcuggcag

SEQ ID NO: 2972402 - RNA, 16 nt, Human
agaagcggcuggcagc

SEQ ID NO: 2972403 - RNA, 11 nt, Human
ucugcuugcca

SEQ ID NO: 2972404 - RNA, 22 nt, Human
ucugcuuagaaauaacagaaga

SEQ ID NO: 2972405 - RNA, 17 nt, Human
ucugcuuagaaauaaca

SEQ ID NO: 2972406 - RNA, 16 nt, Human
ucugcuuagaaauaac

SEQ ID NO: 2972407 - RNA, 14 nt, Human
ucugcuuagaaaua

SEQ ID NO: 2972408 - RNA, 12 nt, Human
ucugcuuagaaa

SEQ ID NO: 2972409 - RNA, 16 nt, Human
ucugcucacauaucug

SEQ ID NO: 2972410 - RNA, 21 nt, Human
agaagaacugaaaucauacuu

SEQ ID NO: 2972411 - RNA, 14 nt, Human
ucugcccuccaaga

SEQ ID NO: 2972412 - RNA, 23 nt, Human
ucugccgcagcccugcagagggc

SEQ ID NO: 2972413 - RNA, 17 nt, Human
agaacuaaaauguucua

SEQ ID NO: 2972414 - RNA, 14 nt, Human
agaacucccuuuca

SEQ ID NO: 2972415 - RNA, 19 nt, Human
agaagaaaauagaauugac

SEQ ID NO: 2972416 - RNA, 20 nt, Human
agaacaaaggggcuuaauua

SEQ ID NO: 2972417 - RNA, 16 nt, Human
agaaauguacagcaag

SEQ ID NO: 2972418 - RNA, 17 nt, Human
agaaauguacagcaagg

SEQ ID NO: 2972419 - RNA, 11 nt, Human
agaaauguguu

SEQ ID NO: 2972420 - RNA, 21 nt, Human
ucugagaaagacuauucaaac

SEQ ID NO: 2972421 - RNA, 22 nt, Human
ucugagaaagacuauucaaaca

SEQ ID NO: 2972422 - RNA, 23 nt, Human
ucugagaaagacuauucaaacag

SEQ ID NO: 2972423 - RNA, 22 nt, Human
ucugcacuccccugcugggugu

SEQ ID NO: 2972424 - RNA, 21 nt, Human
ucugauucccaagcucugcuc

SEQ ID NO: 2972425 - RNA, 20 nt, Human
ucugauucccaagcucugcu

SEQ ID NO: 2972426 - RNA, 19 nt, Human
ucugauucccaagcucugc

SEQ ID NO: 2972427 - RNA, 17 nt, Human
ucugauacagaaaaguu

SEQ ID NO: 2972428 - RNA, 16 nt, Human
ucugauacagaaaagu

SEQ ID NO: 2972429 - RNA, 13 nt, Human
ucugauacagaaa

SEQ ID NO: 2972430 - RNA, 18 nt, Human
ucugauucccaagcucug

SEQ ID NO: 2972431 - RNA, 14 nt, Human
ucugagaaagacua

SEQ ID NO: 2972432 - RNA, 15 nt, Human
ucugagaaagacuau

SEQ ID NO: 2972433 - RNA, 19 nt, Human
ucugagaaagacuauucaa

SEQ ID NO: 2972434 - RNA, 20 nt, Human
ucugagaaagacuauucaaa

SEQ ID NO: 2972435 - RNA, 21 nt, Human
ucugacuguuuccaucaaggg

SEQ ID NO: 2972436 - RNA, 19 nt, Human
agaaagacuauucaaacag

SEQ ID NO: 2972437 - RNA, 18 nt, Human
agaaagacuauucaaaca

SEQ ID NO: 2972438 - RNA, 20 nt, Human
agaaagacuauucaaacagu

SEQ ID NO: 2972439 - RNA, 23 nt, Human
agaaagacuauucaaacagucuc

SEQ ID NO: 2972440 - RNA, 19 nt, Human
ucugacccugcuucaaaua

SEQ ID NO: 2972441 - RNA, 15 nt, Human
ucuccucucucugua

SEQ ID NO: 2972442 - RNA, 12 nt, Human
ucuccucugcug

SEQ ID NO: 2972443 - RNA, 19 nt, Human
ucucccuuggauugucccc

SEQ ID NO: 2972444 - RNA, 20 nt, Human
acuuguugaggguauguuuu

SEQ ID NO: 2972445 - RNA, 13 nt, Human
ucuccucugcugc

SEQ ID NO: 2972446 - RNA, 14 nt, Human
ucuccucugcugcu

SEQ ID NO: 2972447 - RNA, 11 nt, Human
ucucccuugga

SEQ ID NO: 2972448 - RNA, 18 nt, Human
ucucccuuggauuguccc

SEQ ID NO: 2972449 - RNA, 15 nt, Human
ucucccagucauuua

SEQ ID NO: 2972450 - RNA, 17 nt, Human
acuuuggaaagacuuuu

SEQ ID NO: 2972451 - RNA, 13 nt, Human
acuuuggaaagac

SEQ ID NO: 2972452 - RNA, 14 nt, Human
acuuuggaaagacu

SEQ ID NO: 2972453 - RNA, 12 nt, Human
acuuuggaaaga

SEQ ID NO: 2972454 - RNA, 18 nt, Human
acuuuaccuuuuuuauac

SEQ ID NO: 2972455 - RNA, 22 nt, Human
acuuuaccuuuuuuauacauaa

SEQ ID NO: 2972456 - RNA, 19 nt, Human
acuuuaccuuuuuuauaca

SEQ ID NO: 2972457 - RNA, 19 nt, Human
acuuugaccucugcagcaa

SEQ ID NO: 2972458 - RNA, 23 nt, Human
acuuugaccucugcagcaauaaa

SEQ ID NO: 2972459 - RNA, 14 nt, Human
acuuuuggaaggua

SEQ ID NO: 2972460 - RNA, 22 nt, Human
acuuuuuauggcacuaguauuu

SEQ ID NO: 2972461 - RNA, 13 nt, Human
agaaacuggaacu

SEQ ID NO: 2972462 - RNA, 14 nt, Human
agaaagaaaaucag

SEQ ID NO: 2972463 - RNA, 15 nt, Human
agaaacauuugguaa

SEQ ID NO: 2972464 - RNA, 19 nt, Human
agaaaacaaggaugaauua

SEQ ID NO: 2972465 - RNA, 16 nt, Human
agaaaacaaggaugaa

SEQ ID NO: 2972466 - RNA, 17 nt, Human
agaaaaaugagccuggc

SEQ ID NO: 2972467 - RNA, 18 nt, Human
agaaaaaggaugcacaga

SEQ ID NO: 2972468 - RNA, 22 nt, Human
ucucuuuaaugucacaggcagg

SEQ ID NO: 2972469 - RNA, 13 nt, Human
ucucuugagccug

SEQ ID NO: 2972470 - RNA, 14 nt, Human
ucucuugagccugg

SEQ ID NO: 2972471 - RNA, 15 nt, Human
ucucuugagccuggg

SEQ ID NO: 2972472 - RNA, 17 nt, Human
ucucuggccuucggccu

SEQ ID NO: 2972473 - RNA, 16 nt, Human
ucucuggccuucggcc

SEQ ID NO: 2972474 - RNA, 13 nt, Human
ucucuggccuucg

SEQ ID NO: 2972475 - RNA, 14 nt, Human
ucucuugagagggu

SEQ ID NO: 2972476 - RNA, 13 nt, Human
ucucuucuuuaaa

SEQ ID NO: 2972477 - RNA, 12 nt, Human
ucucuucuuuaa

SEQ ID NO: 2972478 - RNA, 13 nt, Human
ucucuccagcccc

SEQ ID NO: 2972479 - RNA, 14 nt, Human
ucucuccagccccu

SEQ ID NO: 2972480 - RNA, 20 nt, Human
ucuccuucaccuuugucccc

SEQ ID NO: 2972481 - RNA, 18 nt, Human
ucuccuucaccuuugucc

SEQ ID NO: 2972482 - RNA, 22 nt, Human
ucucuccuguaccucuugagcc

SEQ ID NO: 2972483 - RNA, 20 nt, Human
ucucuccuguaccucuugag

SEQ ID NO: 2972484 - RNA, 15 nt, Human
ucucuccagccccug

SEQ ID NO: 2972485 - RNA, 17 nt, Human
ucucuccuguaccucuu

SEQ ID NO: 2972486 - RNA, 18 nt, Human
agcaacacaaagcuuuug

SEQ ID NO: 2972487 - RNA, 16 nt, Human
agcaacacaaagcuuu

SEQ ID NO: 2972488 - RNA, 21 nt, Human
agcaacacaaagcuuuugcau

SEQ ID NO: 2972489 - RNA, 15 nt, Human
agcaacacaaagcuu

SEQ ID NO: 2972490 - RNA, 16 nt, Human
agauugugccccugca

SEQ ID NO: 2972491 - RNA, 16 nt, Human
agauuuaccacuugug

SEQ ID NO: 2972492 - RNA, 13 nt, Human
agauuucacucuc

SEQ ID NO: 2972493 - RNA, 14 nt, Human
agauuucacucucc

SEQ ID NO: 2972494 - RNA, 15 nt, Human
ugacuguuuccauca

SEQ ID NO: 2972495 - RNA, 20 nt, Human
ugacuccagaauuucccaaa

SEQ ID NO: 2972496 - RNA, 23 nt, Human
ugacuccagaauuucccaaagca

SEQ ID NO: 2972497 - RNA, 17 nt, Human
ugacuccagaauuuccc

SEQ ID NO: 2972498 - RNA, 19 nt, Human
ugacuccagaauuucccaa

SEQ ID NO: 2972499 - RNA, 14 nt, Human
ugaccugaggcccu

SEQ ID NO: 2972500 - RNA, 15 nt, Human
ugaccugaggcccuu

SEQ ID NO: 2972501 - RNA, 21 nt, Human
agauucaaugccccugaauuu

SEQ ID NO: 2972502 - RNA, 22 nt, Human
agauucaaugccccugaauuua

SEQ ID NO: 2972503 - RNA, 23 nt, Human
agauuauauauauuuuuuucuga

SEQ ID NO: 2972504 - RNA, 24 nt, Human
ugacuucuaaguaaaaccacagca

SEQ ID NO: 2972505 - RNA, 16 nt, Human
ugacauugacuauuuu

SEQ ID NO: 2972506 - RNA, 14 nt, Human
ugacauugacuauu

SEQ ID NO: 2972507 - RNA, 21 nt, Human
ugacauugaaaucuaggaaaa

SEQ ID NO: 2972508 - RNA, 20 nt, Human
ugacauugaaaucuaggaaa

SEQ ID NO: 2972509 - RNA, 13 nt, Human
ugacauugaaauc

SEQ ID NO: 2972510 - RNA, 17 nt, Human
ugacauugcaccuggau

SEQ ID NO: 2972511 - RNA, 14 nt, Human
ugacauugcaccug

SEQ ID NO: 2972512 - RNA, 19 nt, Human
agaugaugaugaucuuuaa

SEQ ID NO: 2972513 - RNA, 14 nt, Human
agauccuggaaauc

SEQ ID NO: 2972514 - RNA, 22 nt, Human
agaugcuagaacucccuuucaa

SEQ ID NO: 2972515 - RNA, 23 nt, Human
agaugcuagaacucccuuucaac

SEQ ID NO: 2972516 - RNA, 18 nt, Human
agaugcuucucacugcca

SEQ ID NO: 2972517 - RNA, 16 nt, Human
agaugcuucucacugc

SEQ ID NO: 2972518 - RNA, 13 nt, Human
ugaccucugccug

SEQ ID NO: 2972519 - RNA, 14 nt, Human
ugaccucugccuga

SEQ ID NO: 2972520 - RNA, 12 nt, Human
ugaccugaggcc

SEQ ID NO: 2972521 - RNA, 21 nt, Human
ugaagauucuauguuaauauu

SEQ ID NO: 2972522 - RNA, 18 nt, Human
ugaagauguagaggagaa

SEQ ID NO: 2972523 - RNA, 17 nt, Human
ugaagcagaguggcagu

SEQ ID NO: 2972524 - RNA, 17 nt, Human
ugaagauguagaggaga

SEQ ID NO: 2972525 - RNA, 22 nt, Human
agagggagggagggcuccagac

SEQ ID NO: 2972526 - RNA, 21 nt, Human
agagggagggagggcuccaga

SEQ ID NO: 2972527 - RNA, 20 nt, Human
agagggagggagggcuccag

SEQ ID NO: 2972528 - RNA, 11 nt, Human
ugaagacaaug

SEQ ID NO: 2972529 - RNA, 17 nt, Human
ugaagacaaugacuuac

SEQ ID NO: 2972530 - RNA, 13 nt, Human
ugaagacaaugac

SEQ ID NO: 2972531 - RNA, 20 nt, Human
ugaagaagcaccaaucauga

SEQ ID NO: 2972532 - RNA, 14 nt, Human
ugaagaagauggua

SEQ ID NO: 2972533 - RNA, 16 nt, Human
ugaacuuugaccucug

SEQ ID NO: 2972534 - RNA, 11 nt, Human
ugaacuuugac

SEQ ID NO: 2972535 - RNA, 22 nt, Human
ugaacuuguaaaggaauuuaaa

SEQ ID NO: 2972536 - RNA, 14 nt, Human
ucuuuggucuacac

SEQ ID NO: 2972537 - RNA, 21 nt, Human
ucuuuggucuacacugugcug

SEQ ID NO: 2972538 - RNA, 18 nt, Human
agaggcaacugcauuggc

SEQ ID NO: 2972539 - RNA, 21 nt, Human
agaggaaaucaccgaaaacgu

SEQ ID NO: 2972540 - RNA, 11 nt, Human
agaggaaauca

SEQ ID NO: 2972541 - RNA, 12 nt, Human
agaggaaaucac

SEQ ID NO: 2972542 - RNA, 12 nt, Human
agaggaaagcaa

SEQ ID NO: 2972543 - RNA, 16 nt, Human
agaggaaagcaaagga

SEQ ID NO: 2972544 - RNA, 18 nt, Human
agaggaaagcaaaggaga

SEQ ID NO: 2972545 - RNA, 19 nt, Human
agaggaaagcaaaggagau

SEQ ID NO: 2972546 - RNA, 19 nt, Human
agagcugggugucaagagg

SEQ ID NO: 2972547 - RNA, 19 nt, Human
ugaauggacuuugcacacu

SEQ ID NO: 2972548 - RNA, 22 nt, Human
agagugaacaaauuuacagaga

SEQ ID NO: 2972549 - RNA, 18 nt, Human
agagucuauuuacggaac

SEQ ID NO: 2972550 - RNA, 16 nt, Human
agagugagacucuguc

SEQ ID NO: 2972551 - RNA, 15 nt, Human
agagugagacucugu

SEQ ID NO: 2972552 - RNA, 14 nt, Human
agagugaacaaauu

SEQ ID NO: 2972553 - RNA, 22 nt, Human
agagucucacuguugcccaggc

SEQ ID NO: 2972554 - RNA, 20 nt, Human
agagucucacuguugcccag

SEQ ID NO: 2972555 - RNA, 15 nt, Human
ugaaugucaguguga

SEQ ID NO: 2972556 - RNA, 18 nt, Human
ugaaugucagugugacug

SEQ ID NO: 2972557 - RNA, 14 nt, Human
ugaaugucagugug

SEQ ID NO: 2972558 - RNA, 16 nt, Human
ugaaugucacuucugg

SEQ ID NO: 2972559 - RNA, 21 nt, Human
agaucaaccccuucgcuccug

SEQ ID NO: 2972560 - RNA, 19 nt, Human
agaucaaccccuucgcucc

SEQ ID NO: 2972561 - RNA, 14 nt, Human
agaucaaccccuuc

SEQ ID NO: 2972562 - RNA, 19 nt, Human
agauacaggaaaagcugcu

SEQ ID NO: 2972563 - RNA, 22 nt, Human
agauauuuugcuuugugauuuu

SEQ ID NO: 2972564 - RNA, 19 nt, Human
agagugagacucugucuca

SEQ ID NO: 2972565 - RNA, 19 nt, Human
agauaaggguaucugguga

SEQ ID NO: 2972566 - RNA, 17 nt, Human
agauaaggguaucuggu

SEQ ID NO: 2972567 - RNA, 13 nt, Human
agcagagugcuuu

SEQ ID NO: 2972568 - RNA, 10 nt, Human
agcagagugc

SEQ ID NO: 2972569 - RNA, 17 nt, Human
agcagaggaaggagagg

SEQ ID NO: 2972570 - RNA, 19 nt, Human
agcagauggagaccccuug

SEQ ID NO: 2972571 - RNA, 22 nt, Human
ugagguacugagagugaacaaa

SEQ ID NO: 2972572 - RNA, 13 nt, Human
ugaggucagagcc

SEQ ID NO: 2972573 - RNA, 16 nt, Human
ugaggucagagccugc

SEQ ID NO: 2972574 - RNA, 14 nt, Human
ugaggucagagccu

SEQ ID NO: 2972575 - RNA, 17 nt, Human
ugagguacugagaguga

SEQ ID NO: 2972576 - RNA, 20 nt, Human
ugaggguugggcugguguca

SEQ ID NO: 2972577 - RNA, 18 nt, Human
agcagagaccaucccuga

SEQ ID NO: 2972578 - RNA, 19 nt, Human
agcagagaccaucccugaa

SEQ ID NO: 2972579 - RNA, 17 nt, Human
agcagagaccaucccug

SEQ ID NO: 2972580 - RNA, 17 nt, Human
ugaggucagagccugca

SEQ ID NO: 2972581 - RNA, 20 nt, Human
agcagagcaccuuagacagu

SEQ ID NO: 2972582 - RNA, 20 nt, Human
agcagagaccaucccugaag

SEQ ID NO: 2972583 - RNA, 13 nt, Human
ugaggggccucuu

SEQ ID NO: 2972584 - RNA, 12 nt, Human
ugaggggccucu

SEQ ID NO: 2972585 - RNA, 20 nt, Human
ugaggcccuucucuccagcc

SEQ ID NO: 2972586 - RNA, 22 nt, Human
ugaggcccuucucuccagcccc

SEQ ID NO: 2972587 - RNA, 23 nt, Human
ugaggcccuucucuccagccccu

SEQ ID NO: 2972588 - RNA, 24 nt, Human
ugaggcccuucucuccagccccug

SEQ ID NO: 2972589 - RNA, 18 nt, Human
ugaggcccuucucuccag

SEQ ID NO: 2972590 - RNA, 19 nt, Human
ugaggcccuucucuccagc

SEQ ID NO: 2972591 - RNA, 16 nt, Human
ugaggcccuucucucc

SEQ ID NO: 2972592 - RNA, 19 nt, Human
ugagggauacccaucccau

SEQ ID NO: 2972593 - RNA, 15 nt, Human
ugaggacacugauau

SEQ ID NO: 2972594 - RNA, 21 nt, Human
ugaggacacuaaccacgcugg

SEQ ID NO: 2972595 - RNA, 23 nt, Human
ugaggcauuuguuugaacugaua

SEQ ID NO: 2972596 - RNA, 12 nt, Human
ugaggccagaga

SEQ ID NO: 2972597 - RNA, 22 nt, Human
ugaggaauccagacccggcugc

SEQ ID NO: 2972598 - RNA, 21 nt, Human
ugaggaauccagacccggcug

SEQ ID NO: 2972599 - RNA, 23 nt, Human
ugaggcccagagggccugcaagg

SEQ ID NO: 2972600 - RNA, 21 nt, Human
ugaggcccagagggccugcaa

SEQ ID NO: 2972601 - RNA, 22 nt, Human
ugaggcccagagggccugcaag

SEQ ID NO: 2972602 - RNA, 15 nt, Human
ugaggcccagagggc

SEQ ID NO: 2972603 - RNA, 17 nt, Human
ugaggcccagagggccu

SEQ ID NO: 2972604 - RNA, 18 nt, Human
ugaggcccagagggccug

SEQ ID NO: 2972605 - RNA, 20 nt, Human
ugaggcccagagggccugca

SEQ ID NO: 2972606 - RNA, 20 nt, Human
ugaggccagagacacaagcc

SEQ ID NO: 2972607 - RNA, 14 nt, Human
ugaggccagagaca

SEQ ID NO: 2972608 - RNA, 16 nt, Human
ugaggccagagacaca

SEQ ID NO: 2972609 - RNA, 12 nt, Human
ugaggcccagag

SEQ ID NO: 2972610 - RNA, 13 nt, Human
ugaggcccagagg

SEQ ID NO: 2972611 - RNA, 13 nt, Human
ugagcuacaaaug

SEQ ID NO: 2972612 - RNA, 14 nt, Human
ugagcuacaaaugc

SEQ ID NO: 2972613 - RNA, 16 nt, Human
ugagcuacaaaugcau

SEQ ID NO: 2972614 - RNA, 15 nt, Human
ugaggaagcaaaagc

SEQ ID NO: 2972615 - RNA, 22 nt, Human
ugaggaagcaaaagcaucuaug

SEQ ID NO: 2972616 - RNA, 14 nt, Human
ugaggaagccgcug

SEQ ID NO: 2972617 - RNA, 17 nt, Human
ugaggaagccgcugggg

SEQ ID NO: 2972618 - RNA, 18 nt, Human
ugaggaagccgcuggggc

SEQ ID NO: 2972619 - RNA, 19 nt, Human
ugaggaagccgcuggggcc

SEQ ID NO: 2972620 - RNA, 21 nt, Human
ugaggaagccgcuggggccag

SEQ ID NO: 2972621 - RNA, 23 nt, Human
ugagcaucgcuuaggagaagucu

SEQ ID NO: 2972622 - RNA, 22 nt, Human
ugagcaucaggccaggcccucu

SEQ ID NO: 2972623 - RNA, 24 nt, Human
ugagcaucaggccaggcccucugc

SEQ ID NO: 2972624 - RNA, 21 nt, Human
ugagcaucaggccaggcccuc

SEQ ID NO: 2972625 - RNA, 14 nt, Human
ugagccagauuuca

SEQ ID NO: 2972626 - RNA, 16 nt, Human
ugagccagauuucacu

SEQ ID NO: 2972627 - RNA, 13 nt, Human
ugagccagauuuc

SEQ ID NO: 2972628 - RNA, 23 nt, Human
ugagccacugcaccgggccacag

SEQ ID NO: 2972629 - RNA, 18 nt, Human
ugagccacugcaccgggc

SEQ ID NO: 2972630 - RNA, 21 nt, Human
ugagccacugcaccgggccac

SEQ ID NO: 2972631 - RNA, 14 nt, Human
agcaacgcaggccc

SEQ ID NO: 2972632 - RNA, 15 nt, Human
ugagcaauccugcaa

SEQ ID NO: 2972633 - RNA, 23 nt, Human
ugagcacuaaggugugcucugau

SEQ ID NO: 2972634 - RNA, 22 nt, Human
ugagcacuaaggugugcucuga

SEQ ID NO: 2972635 - RNA, 21 nt, Human
ugagcacuaaggugugcucug

SEQ ID NO: 2972636 - RNA, 20 nt, Human
ugagcacuaaggugugcucu

SEQ ID NO: 2972637 - RNA, 17 nt, Human
ugagccagauuucacuc

SEQ ID NO: 2972638 - RNA, 22 nt, Human
ugagccagauuucacucuccuu

SEQ ID NO: 2972639 - RNA, 13 nt, Human
agcaagugagagc

SEQ ID NO: 2972640 - RNA, 20 nt, Human
agcaagugagacccugucuc

SEQ ID NO: 2972641 - RNA, 14 nt, Human
agcaagugagagcu

SEQ ID NO: 2972642 - RNA, 18 nt, Human
agcaagugagagcugggu

SEQ ID NO: 2972643 - RNA, 22 nt, Human
agcaagugagagcuggguguca

SEQ ID NO: 2972644 - RNA, 16 nt, Human
agcaccaaucaugaau

SEQ ID NO: 2972645 - RNA, 13 nt, Human
agcacaugccucu

SEQ ID NO: 2972646 - RNA, 14 nt, Human
agcacaugccucuc

SEQ ID NO: 2972647 - RNA, 22 nt, Human
agcaccaaaagcuuaccaaggg

SEQ ID NO: 2972648 - RNA, 22 nt, Human
agcacagccucuuagaugcagu

SEQ ID NO: 2972649 - RNA, 16 nt, Human
agcacagcuucauuuc

SEQ ID NO: 2972650 - RNA, 15 nt, Human
agcacagugaucaag

SEQ ID NO: 2972651 - RNA, 19 nt, Human
agcagaaaugccuuacccu

SEQ ID NO: 2972652 - RNA, 13 nt, Human
agcagaaaugccu

SEQ ID NO: 2972653 - RNA, 12 nt, Human
agcagaaaugcc

SEQ ID NO: 2972654 - RNA, 14 nt, Human
agcagaacagugau

SEQ ID NO: 2972655 - RNA, 23 nt, Human
agcacuuugggaggccaaggugg

SEQ ID NO: 2972656 - RNA, 19 nt, Human
agcacuuugggaggcugag

SEQ ID NO: 2972657 - RNA, 22 nt, Human
agcacuuugggaggccaaggug

SEQ ID NO: 2972658 - RNA, 15 nt, Human
agcacgauuucuguu

SEQ ID NO: 2972659 - RNA, 14 nt, Human
agcacgauuucugu

SEQ ID NO: 2972660 - RNA, 16 nt, Human
agcacgauuucuguuu

SEQ ID NO: 2972661 - RNA, 23 nt, Human
agcaccuuagacagucccugcca

SEQ ID NO: 2972662 - RNA, 13 nt, Human
agcacgauuucug

SEQ ID NO: 2972663 - RNA, 19 nt, Human
agcaccuuagacagucccu

SEQ ID NO: 2972664 - RNA, 20 nt, Human
agcaccuuagacagucccug

SEQ ID NO: 2972665 - RNA, 21 nt, Human
agcaccuuagacagucccugc

SEQ ID NO: 2972666 - RNA, 22 nt, Human
agcaccuuagacagucccugcc

SEQ ID NO: 2972667 - RNA, 19 nt, Human
ugagccuugaacuuugacc

SEQ ID NO: 2972668 - RNA, 18 nt, Human
ugagccuugaacuuugac

SEQ ID NO: 2972669 - RNA, 17 nt, Human
ugagccuugaacuuuga

SEQ ID NO: 2972670 - RNA, 15 nt, Human
ugagccuugaacuuu

SEQ ID NO: 2972671 - RNA, 20 nt, Human
ugagcgacagugagacucug

SEQ ID NO: 2972672 - RNA, 16 nt, Human
ugagcgacagugagac

SEQ ID NO: 2972673 - RNA, 14 nt, Human
ugagcgacagugag

SEQ ID NO: 2972674 - RNA, 13 nt, Human
ugagcgacaguga

SEQ ID NO: 2972675 - RNA, 19 nt, Human
ugagccugggaggucaagg

SEQ ID NO: 2972676 - RNA, 22 nt, Human
ugagccugggaggucaaggcug

SEQ ID NO: 2972677 - RNA, 14 nt, Human
ugagccuugaacuu

SEQ ID NO: 2972678 - RNA, 11 nt, Human
ugagccuggca

SEQ ID NO: 2972679 - RNA, 16 nt, Human
ugagccuggcaagaau

SEQ ID NO: 2972680 - RNA, 14 nt, Human
ugagccugggaggu

SEQ ID NO: 2972681 - RNA, 21 nt, Human
agcagagaaugaaagggccca

SEQ ID NO: 2972682 - RNA, 23 nt, Human
agcagaccauuggggcucccagc

SEQ ID NO: 2972683 - RNA, 22 nt, Human
agcagaccauuggggcucccag

SEQ ID NO: 2972684 - RNA, 12 nt, Human
agcagacacaug

SEQ ID NO: 2972685 - RNA, 11 nt, Human
agcagacacau

SEQ ID NO: 2972686 - RNA, 16 nt, Human
agcagacacaugccag

SEQ ID NO: 2972687 - RNA, 13 nt, Human
agcagaaugugau

SEQ ID NO: 2972688 - RNA, 21 nt, Human
agcagagaauucucuuaucca

SEQ ID NO: 2972689 - RNA, 14 nt, Human
agcagagaauucuc

SEQ ID NO: 2972690 - RNA, 23 nt, Human
agcagagaaugaaagggcccaga

SEQ ID NO: 2972691 - RNA, 22 nt, Human
agcagagaaugaaagggcccag

SEQ ID NO: 2972692 - RNA, 15 nt, Human
agcagagaccauccc

SEQ ID NO: 2972693 - RNA, 16 nt, Human
agcagagaccaucccu

SEQ ID NO: 2972694 - RNA, 10 nt, Human
ugagccuggc

SEQ ID NO: 2972695 - RNA, 18 nt, Human
ucagaugcacaugagcug

SEQ ID NO: 2972696 - RNA, 16 nt, Human
ucagaacuauguuuuu

SEQ ID NO: 2972697 - RNA, 19 nt, Human
ucagaacuauguuuuuguu

SEQ ID NO: 2972698 - RNA, 13 nt, Human
ucagaagacacug

SEQ ID NO: 2972699 - RNA, 13 nt, Human
ucagaucuucugu

SEQ ID NO: 2972700 - RNA, 13 nt, Human
acccagcucuggu

SEQ ID NO: 2972701 - RNA, 15 nt, Human
acccagcucuggucc

SEQ ID NO: 2972702 - RNA, 16 nt, Human
acccaguccugcccgc

SEQ ID NO: 2972703 - RNA, 10 nt, Human
ucagccuggg

SEQ ID NO: 2972704 - RNA, 12 nt, Human
ucagccugggca

SEQ ID NO: 2972705 - RNA, 14 nt, Human
acccccagccugcu

SEQ ID NO: 2972706 - RNA, 15 nt, Human
acccccagccugcua

SEQ ID NO: 2972707 - RNA, 20 nt, Human
ucaggccaaacucaccugcc

SEQ ID NO: 2972708 - RNA, 23 nt, Human
ucaggccaaacucaccugccccu

SEQ ID NO: 2972709 - RNA, 16 nt, Human
ucaggaagcucagggc

SEQ ID NO: 2972710 - RNA, 17 nt, Human
ucaggaagcucagggcc

SEQ ID NO: 2972711 - RNA, 19 nt, Human
ucaggaagcucagggccug

SEQ ID NO: 2972712 - RNA, 20 nt, Human
ucaggaagcucagggccugg

SEQ ID NO: 2972713 - RNA, 17 nt, Human
ucagcggggacagcucc

SEQ ID NO: 2972714 - RNA, 16 nt, Human
ucagcggggacagcuc

SEQ ID NO: 2972715 - RNA, 15 nt, Human
ucagcggggacagcu

SEQ ID NO: 2972716 - RNA, 15 nt, Human
ucaggccagcugcuu

SEQ ID NO: 2972717 - RNA, 20 nt, Human
ucaggccagcugcuugggcu

SEQ ID NO: 2972718 - RNA, 11 nt, Human
ucaggccaggc

SEQ ID NO: 2972719 - RNA, 14 nt, Human
ucaggccagcugcu

SEQ ID NO: 2972720 - RNA, 19 nt, Human
accccuucgcuccuguguc

SEQ ID NO: 2972721 - RNA, 16 nt, Human
ucagguaacaggcaga

SEQ ID NO: 2972722 - RNA, 15 nt, Human
ucagguaacaggcag

SEQ ID NO: 2972723 - RNA, 13 nt, Human
ucagguaacaggc

SEQ ID NO: 2972724 - RNA, 14 nt, Human
ucagggucccuggu

SEQ ID NO: 2972725 - RNA, 18 nt, Human
ucagggucccugguggca

SEQ ID NO: 2972726 - RNA, 13 nt, Human
ucagggucccugg

SEQ ID NO: 2972727 - RNA, 20 nt, Human
accccuucgcuccugugucu

SEQ ID NO: 2972728 - RNA, 23 nt, Human
ucaggguuggccccugcccggcu

SEQ ID NO: 2972729 - RNA, 16 nt, Human
acccuuguggucccac

SEQ ID NO: 2972730 - RNA, 17 nt, Human
acccuuguggucccacc

SEQ ID NO: 2972731 - RNA, 19 nt, Human
acccuuguggucccacccc

SEQ ID NO: 2972732 - RNA, 15 nt, Human
acccuugugguccca

SEQ ID NO: 2972733 - RNA, 11 nt, Human
acccugcccug

SEQ ID NO: 2972734 - RNA, 12 nt, Human
acccugcccugu

SEQ ID NO: 2972735 - RNA, 13 nt, Human
acccugcccugug

SEQ ID NO: 2972736 - RNA, 14 nt, Human
acccucuuagaaaa

SEQ ID NO: 2972737 - RNA, 12 nt, Human
uauuucauuucu

SEQ ID NO: 2972738 - RNA, 11 nt, Human
accacagcagu

SEQ ID NO: 2972739 - RNA, 14 nt, Human
accacaucuugcuc

SEQ ID NO: 2972740 - RNA, 22 nt, Human
accacagacauacuaaccagca

SEQ ID NO: 2972741 - RNA, 21 nt, Human
accacagacauacuaaccagc

SEQ ID NO: 2972742 - RNA, 19 nt, Human
accacugcagaagacagua

SEQ ID NO: 2972743 - RNA, 14 nt, Human
accacugcagaaga

SEQ ID NO: 2972744 - RNA, 13 nt, Human
accacugcagaag

SEQ ID NO: 2972745 - RNA, 13 nt, Human
accacuucagcug

SEQ ID NO: 2972746 - RNA, 14 nt, Human
accacuucagcuga

SEQ ID NO: 2972747 - RNA, 15 nt, Human
accacuucagcugac

SEQ ID NO: 2972748 - RNA, 24 nt, Human
accacaucuugcucugcugacaga

SEQ ID NO: 2972749 - RNA, 21 nt, Human
accacaucuugcucugcugac

SEQ ID NO: 2972750 - RNA, 20 nt, Human
accacaucuugcucugcuga

SEQ ID NO: 2972751 - RNA, 20 nt, Human
accacucuaucaaguauuau

SEQ ID NO: 2972752 - RNA, 11 nt, Human
ucaccuccuaa

SEQ ID NO: 2972753 - RNA, 19 nt, Human
ucaccugaagacucauucu

SEQ ID NO: 2972754 - RNA, 16 nt, Human
ucaccugaagacucau

SEQ ID NO: 2972755 - RNA, 23 nt, Human
ucaccugaagacucauucuucug

SEQ ID NO: 2972756 - RNA, 23 nt, Human
accacuuguguuuugcaagccag

SEQ ID NO: 2972757 - RNA, 19 nt, Human
accacuuguguuuugcaag

SEQ ID NO: 2972758 - RNA, 12 nt, Human
accacuuuuguu

SEQ ID NO: 2972759 - RNA, 17 nt, Human
accagacaccuugacag

SEQ ID NO: 2972760 - RNA, 23 nt, Human
accagacaccuugacagggcaca

SEQ ID NO: 2972761 - RNA, 22 nt, Human
accagacaccuugacagggcac

SEQ ID NO: 2972762 - RNA, 17 nt, Human
accagagcccaccuugg

SEQ ID NO: 2972763 - RNA, 22 nt, Human
accagagcccaccuuggcucaa

SEQ ID NO: 2972764 - RNA, 19 nt, Human
accagagcccaccuuggcu

SEQ ID NO: 2972765 - RNA, 15 nt, Human
acccaaaaggcagaa

SEQ ID NO: 2972766 - RNA, 13 nt, Human
acccaaaaggcag

SEQ ID NO: 2972767 - RNA, 23 nt, Human
accauuuugggguacccacugcu

SEQ ID NO: 2972768 - RNA, 22 nt, Human
accauuuugggguacccacugc

SEQ ID NO: 2972769 - RNA, 13 nt, Human
accauucuccacc

SEQ ID NO: 2972770 - RNA, 16 nt, Human
accauucuccaccugc

SEQ ID NO: 2972771 - RNA, 18 nt, Human
accauucuccaccugcca

SEQ ID NO: 2972772 - RNA, 22 nt, Human
accaugauuaaccacuucagcu

SEQ ID NO: 2972773 - RNA, 23 nt, Human
accaugauuaaccacuucagcug

SEQ ID NO: 2972774 - RNA, 21 nt, Human
acccaaauguucaucaaugaa

SEQ ID NO: 2972775 - RNA, 18 nt, Human
acccaaaaggcagaagca

SEQ ID NO: 2972776 - RNA, 16 nt, Human
acccagaagaaaauag

SEQ ID NO: 2972777 - RNA, 16 nt, Human
ucagaacagagccuuu

SEQ ID NO: 2972778 - RNA, 18 nt, Human
acccagcccacuucugcc

SEQ ID NO: 2972779 - RNA, 17 nt, Human
acccagcccacuucugc

SEQ ID NO: 2972780 - RNA, 16 nt, Human
acccagcccacuucug

SEQ ID NO: 2972781 - RNA, 21 nt, Human
accaguguuguggauuuaaca

SEQ ID NO: 2972782 - RNA, 23 nt, Human
accagugccucucccugcugcuc

SEQ ID NO: 2972783 - RNA, 22 nt, Human
accagugccucucccugcugcu

SEQ ID NO: 2972784 - RNA, 21 nt, Human
accagugccucucccugcugc

SEQ ID NO: 2972785 - RNA, 18 nt, Human
accagugccucucccugc

SEQ ID NO: 2972786 - RNA, 10 nt, Human
accagugccu

SEQ ID NO: 2972787 - RNA, 13 nt, Human
accagugccucuc

SEQ ID NO: 2972788 - RNA, 18 nt, Human
ucacuguugcccaggcug

SEQ ID NO: 2972789 - RNA, 17 nt, Human
ucacuguugcccaggcu

SEQ ID NO: 2972790 - RNA, 14 nt, Human
accagggacugagg

SEQ ID NO: 2972791 - RNA, 16 nt, Human
ucaccugccccucaac

SEQ ID NO: 2972792 - RNA, 16 nt, Human
ucaccuccuaaaacaa

SEQ ID NO: 2972793 - RNA, 14 nt, Human
ucacugagacagcc

SEQ ID NO: 2972794 - RNA, 15 nt, Human
ucacugagacagccc

SEQ ID NO: 2972795 - RNA, 13 nt, Human
ucacugagacagc

SEQ ID NO: 2972796 - RNA, 16 nt, Human
ucacuguugcccaggc

SEQ ID NO: 2972797 - RNA, 12 nt, Human
ucacugcagccu

SEQ ID NO: 2972798 - RNA, 21 nt, Human
uccacauuuguuuugccaauu

SEQ ID NO: 2972799 - RNA, 11 nt, Human
uccaagcuggu

SEQ ID NO: 2972800 - RNA, 17 nt, Human
uccaauaaaaugccuca

SEQ ID NO: 2972801 - RNA, 12 nt, Human
uccaagcuccca

SEQ ID NO: 2972802 - RNA, 13 nt, Human
uccaagcucccag

SEQ ID NO: 2972803 - RNA, 14 nt, Human
uccaagcucccagg

SEQ ID NO: 2972804 - RNA, 15 nt, Human
uccaagcucccaggc

SEQ ID NO: 2972805 - RNA, 16 nt, Human
uccaagcucccaggca

SEQ ID NO: 2972806 - RNA, 13 nt, Human
ucauuuuuuuuaa

SEQ ID NO: 2972807 - RNA, 21 nt, Human
ucauuugagcagggcucagcg

SEQ ID NO: 2972808 - RNA, 20 nt, Human
ucauuuuagggguagcauuu

SEQ ID NO: 2972809 - RNA, 17 nt, Human
accuggaauauauaacc

SEQ ID NO: 2972810 - RNA, 14 nt, Human
accuggaauauaua

SEQ ID NO: 2972811 - RNA, 19 nt, Human
ucauuugagcagggcucag

SEQ ID NO: 2972812 - RNA, 19 nt, Human
accugcggugcuaucuccc

SEQ ID NO: 2972813 - RNA, 22 nt, Human
accugcggugcuaucuccccca

SEQ ID NO: 2972814 - RNA, 23 nt, Human
accugcggugcuaucucccccag

SEQ ID NO: 2972815 - RNA, 15 nt, Human
accugaagucuuugu

SEQ ID NO: 2972816 - RNA, 22 nt, Human
accugaagucuuuguacagaca

SEQ ID NO: 2972817 - RNA, 18 nt, Human
accugcggugcuaucucc

SEQ ID NO: 2972818 - RNA, 17 nt, Human
accuuagacagucccug

SEQ ID NO: 2972819 - RNA, 15 nt, Human
uccaccaucaagcca

SEQ ID NO: 2972820 - RNA, 12 nt, Human
accuucuccuuc

SEQ ID NO: 2972821 - RNA, 13 nt, Human
accuucuccuuca

SEQ ID NO: 2972822 - RNA, 15 nt, Human
accuugaaugaugcc

SEQ ID NO: 2972823 - RNA, 14 nt, Human
accuugacagggca

SEQ ID NO: 2972824 - RNA, 15 nt, Human
accuugacagggcac

SEQ ID NO: 2972825 - RNA, 20 nt, Human
uccagccugagcgacaguga

SEQ ID NO: 2972826 - RNA, 22 nt, Human
uccagccccuggaugcagccuc

SEQ ID NO: 2972827 - RNA, 21 nt, Human
uccagccugagcgacagugag

SEQ ID NO: 2972828 - RNA, 11 nt, Human
uccagccuggg

SEQ ID NO: 2972829 - RNA, 16 nt, Human
uccagccccuggaugc

SEQ ID NO: 2972830 - RNA, 17 nt, Human
uccagccccuggaugca

SEQ ID NO: 2972831 - RNA, 19 nt, Human
uccagccccuggaugcagc

SEQ ID NO: 2972832 - RNA, 21 nt, Human
uccagccccuggaugcagccu

SEQ ID NO: 2972833 - RNA, 15 nt, Human
uccagccccuggaug

SEQ ID NO: 2972834 - RNA, 14 nt, Human
uccagccccuggau

SEQ ID NO: 2972835 - RNA, 22 nt, Human
uccagaaguuugagaucagccu

SEQ ID NO: 2972836 - RNA, 19 nt, Human
accuuuguauucucuccug

SEQ ID NO: 2972837 - RNA, 15 nt, Human
accuuuguauucucu

SEQ ID NO: 2972838 - RNA, 23 nt, Human
accuuuguauucucuccuguacc

SEQ ID NO: 2972839 - RNA, 22 nt, Human
ucaugaauuaguuuuauaugcu

SEQ ID NO: 2972840 - RNA, 23 nt, Human
ucauccacugugccaugugccag

SEQ ID NO: 2972841 - RNA, 21 nt, Human
ucauccacugugccaugugcc

SEQ ID NO: 2972842 - RNA, 19 nt, Human
ucauccacugugccaugug

SEQ ID NO: 2972843 - RNA, 19 nt, Human
ucaugacaaagacugagua

SEQ ID NO: 2972844 - RNA, 21 nt, Human
ucaugaauuaguuuuauaugc

SEQ ID NO: 2972845 - RNA, 13 nt, Human
ucaugucuggcua

SEQ ID NO: 2972846 - RNA, 17 nt, Human
ucauguucuuaauucuu

SEQ ID NO: 2972847 - RNA, 11 nt, Human
ucauguucuua

SEQ ID NO: 2972848 - RNA, 22 nt, Human
ucauugaccugaggcccuucuc

SEQ ID NO: 2972849 - RNA, 21 nt, Human
ucauucuccuuguguuacuaa

SEQ ID NO: 2972850 - RNA, 19 nt, Human
ucauugaccugaggcccuu

SEQ ID NO: 2972851 - RNA, 17 nt, Human
accucggugccuuccuc

SEQ ID NO: 2972852 - RNA, 18 nt, Human
accucuaaauucuuucau

SEQ ID NO: 2972853 - RNA, 13 nt, Human
accucucccuugg

SEQ ID NO: 2972854 - RNA, 14 nt, Human
accucucccuugga

SEQ ID NO: 2972855 - RNA, 15 nt, Human
accucucccuuggau

SEQ ID NO: 2972856 - RNA, 21 nt, Human
accucuaaauucuuucauuuu

SEQ ID NO: 2972857 - RNA, 14 nt, Human
accucuaaauucuu

SEQ ID NO: 2972858 - RNA, 23 nt, Human
accucucccuuggauuguccccg

SEQ ID NO: 2972859 - RNA, 14 nt, Human
accucucucacucc

SEQ ID NO: 2972860 - RNA, 19 nt, Human
accucucucacuccuugaa

SEQ ID NO: 2972861 - RNA, 12 nt, Human
accucugcacaa

SEQ ID NO: 2972862 - RNA, 20 nt, Human
accgcagacaggaccaggga

SEQ ID NO: 2972863 - RNA, 17 nt, Human
accgccaaggcuggggg

SEQ ID NO: 2972864 - RNA, 17 nt, Human
accgcagacaggaccag

SEQ ID NO: 2972865 - RNA, 21 nt, Human
accgaacugauguaaguaaac

SEQ ID NO: 2972866 - RNA, 16 nt, Human
ucauauuuacuucuua

SEQ ID NO: 2972867 - RNA, 22 nt, Human
ucauauuuacuucuuauacauu

SEQ ID NO: 2972868 - RNA, 21 nt, Human
ucauauuuacuucuuauacau

SEQ ID NO: 2972869 - RNA, 20 nt, Human
ucauauuuacuucuuauaca

SEQ ID NO: 2972870 - RNA, 10 nt, Human
acccuuuucu

SEQ ID NO: 2972871 - RNA, 20 nt, Human
accuccgccucuuggguuca

SEQ ID NO: 2972872 - RNA, 18 nt, Human
ucauccacugugccaugu

SEQ ID NO: 2972873 - RNA, 14 nt, Human
accuccuaaaacaa

SEQ ID NO: 2972874 - RNA, 13 nt, Human
accuagccuuaga

SEQ ID NO: 2972875 - RNA, 20 nt, Human
uccuguuuuuauuauuaaca

SEQ ID NO: 2972876 - RNA, 16 nt, Human
uccuguuuuuauuauu

SEQ ID NO: 2972877 - RNA, 21 nt, Human
uccuguuuuuauuauuaacaa

SEQ ID NO: 2972878 - RNA, 15 nt, Human
uccuguuuuuauuau

SEQ ID NO: 2972879 - RNA, 19 nt, Human
uccuguucccaugagauga

SEQ ID NO: 2972880 - RNA, 24 nt, Human
uccugugucuugcaauggcagccu

SEQ ID NO: 2972881 - RNA, 23 nt, Human
uccugugucuugcaauggcagcc

SEQ ID NO: 2972882 - RNA, 14 nt, Human
uccugugugugcgc

SEQ ID NO: 2972883 - RNA, 13 nt, Human
uccugugugugcg

SEQ ID NO: 2972884 - RNA, 18 nt, Human
uccugugugugcgccuac

SEQ ID NO: 2972885 - RNA, 23 nt, Human
acugcagccucaaccuccugggc

SEQ ID NO: 2972886 - RNA, 13 nt, Human
acugcacuguuuu

SEQ ID NO: 2972887 - RNA, 22 nt, Human
acugcagccucaaccuccuggg

SEQ ID NO: 2972888 - RNA, 21 nt, Human
acugcagccucaaccuccugg

SEQ ID NO: 2972889 - RNA, 19 nt, Human
acugcagccucaaccuccu

SEQ ID NO: 2972890 - RNA, 13 nt, Human
uccugcugcaguu

SEQ ID NO: 2972891 - RNA, 17 nt, Human
uccugggcagcugccuc

SEQ ID NO: 2972892 - RNA, 16 nt, Human
uccugggcagcugccu

SEQ ID NO: 2972893 - RNA, 15 nt, Human
uccugggcagcugcc

SEQ ID NO: 2972894 - RNA, 14 nt, Human
uccugggcagcugc

SEQ ID NO: 2972895 - RNA, 23 nt, Human
uccugggcagcugccuccccucc

SEQ ID NO: 2972896 - RNA, 22 nt, Human
uccugggcagcugccuccccuc

SEQ ID NO: 2972897 - RNA, 19 nt, Human
uccugggcagcugccuccc

SEQ ID NO: 2972898 - RNA, 18 nt, Human
uccugggcagcugccucc

SEQ ID NO: 2972899 - RNA, 22 nt, Human
acugaggggaggggagcauggg

SEQ ID NO: 2972900 - RNA, 17 nt, Human
acugaggggaggggagc

SEQ ID NO: 2972901 - RNA, 15 nt, Human
uccucuccccagcaa

SEQ ID NO: 2972902 - RNA, 22 nt, Human
acugcaaccuccgccucuuggg

SEQ ID NO: 2972903 - RNA, 16 nt, Human
acugcaaccuccgccu

SEQ ID NO: 2972904 - RNA, 14 nt, Human
acugcaaccuccgc

SEQ ID NO: 2972905 - RNA, 13 nt, Human
acugcaaccuccg

SEQ ID NO: 2972906 - RNA, 21 nt, Human
acugaguacguugugcauuug

SEQ ID NO: 2972907 - RNA, 19 nt, Human
acugaguacguugugcauu

SEQ ID NO: 2972908 - RNA, 18 nt, Human
acugaguacguugugcau

SEQ ID NO: 2972909 - RNA, 18 nt, Human
acugagggggccuggaug

SEQ ID NO: 2972910 - RNA, 17 nt, Human
acugagggggccuggau

SEQ ID NO: 2972911 - RNA, 16 nt, Human
acugagggggccugga

SEQ ID NO: 2972912 - RNA, 23 nt, Human
acugaguacguugugcauuuggu

SEQ ID NO: 2972913 - RNA, 22 nt, Human
acugaguacguugugcauuugg

SEQ ID NO: 2972914 - RNA, 19 nt, Human
acugagggggccuggaugc

SEQ ID NO: 2972915 - RNA, 15 nt, Human
uccugcaggcagcca

SEQ ID NO: 2972916 - RNA, 16 nt, Human
uccugcaggcagccag

SEQ ID NO: 2972917 - RNA, 17 nt, Human
uccugcaggcagccagg

SEQ ID NO: 2972918 - RNA, 19 nt, Human
uccugcaggcagccaggcc

SEQ ID NO: 2972919 - RNA, 20 nt, Human
uccugcaggcagccaggcca

SEQ ID NO: 2972920 - RNA, 19 nt, Human
uccugccucagccucccaa

SEQ ID NO: 2972921 - RNA, 22 nt, Human
uccugcaggcagccaggccaca

SEQ ID NO: 2972922 - RNA, 20 nt, Human
uccugccucgaacuggcugc

SEQ ID NO: 2972923 - RNA, 17 nt, Human
uccugccucagccuccc

SEQ ID NO: 2972924 - RNA, 20 nt, Human
uccugcugagccucacagca

SEQ ID NO: 2972925 - RNA, 15 nt, Human
acuguacaaaguaga

SEQ ID NO: 2972926 - RNA, 14 nt, Human
acuguacaaaguag

SEQ ID NO: 2972927 - RNA, 13 nt, Human
acuguacaaagua

SEQ ID NO: 2972928 - RNA, 19 nt, Human
acuguaauuugugauacaa

SEQ ID NO: 2972929 - RNA, 14 nt, Human
acuguacaugaaaa

SEQ ID NO: 2972930 - RNA, 13 nt, Human
acuguacaugaaa

SEQ ID NO: 2972931 - RNA, 23 nt, Human
acuguacaugaaaacacauuuuu

SEQ ID NO: 2972932 - RNA, 22 nt, Human
acugggcuuggggaccagagcu

SEQ ID NO: 2972933 - RNA, 13 nt, Human
ucgcuccuguguc

SEQ ID NO: 2972934 - RNA, 12 nt, Human
ucgcuccugugu

SEQ ID NO: 2972935 - RNA, 19 nt, Human
acuggguacuuguggacac

SEQ ID NO: 2972936 - RNA, 23 nt, Human
acuggguacuuguggacacagcu

SEQ ID NO: 2972937 - RNA, 20 nt, Human
acuggguacuuguggacaca

SEQ ID NO: 2972938 - RNA, 18 nt, Human
acuggguacuuguggaca

SEQ ID NO: 2972939 - RNA, 13 nt, Human
ucgaacuggcugc

SEQ ID NO: 2972940 - RNA, 14 nt, Human
ucgaacuggcugca

SEQ ID NO: 2972941 - RNA, 15 nt, Human
ucgaacuggcugcaa

SEQ ID NO: 2972942 - RNA, 15 nt, Human
uccuuucaccacaug

SEQ ID NO: 2972943 - RNA, 14 nt, Human
ucgagcaugccugg

SEQ ID NO: 2972944 - RNA, 13 nt, Human
ucgaggacaggga

SEQ ID NO: 2972945 - RNA, 13 nt, Human
ucgcgacaaugca

SEQ ID NO: 2972946 - RNA, 17 nt, Human
ucgaggacagggaggug

SEQ ID NO: 2972947 - RNA, 14 nt, Human
ucgaggacagggag

SEQ ID NO: 2972948 - RNA, 20 nt, Human
acuggcaaacagggccucug

SEQ ID NO: 2972949 - RNA, 19 nt, Human
acuggcaaacagggccucu

SEQ ID NO: 2972950 - RNA, 17 nt, Human
acuggcaaacagggccu

SEQ ID NO: 2972951 - RNA, 21 nt, Human
acuggcaaacagggccucugc

SEQ ID NO: 2972952 - RNA, 22 nt, Human
acuggauuaaacuuaaucuaaa

SEQ ID NO: 2972953 - RNA, 18 nt, Human
acugcuuccagugaggcu

SEQ ID NO: 2972954 - RNA, 21 nt, Human
acugcuuccagugaggcucug

SEQ ID NO: 2972955 - RNA, 22 nt, Human
acugcuuccagugaggcucugc

SEQ ID NO: 2972956 - RNA, 23 nt, Human
acugcuuccagugaggcucugcc

SEQ ID NO: 2972957 - RNA, 22 nt, Human
acugccuucucaacuccaaacu

SEQ ID NO: 2972958 - RNA, 20 nt, Human
acugccuucucaacuccaaa

SEQ ID NO: 2972959 - RNA, 22 nt, Human
acuggcugcaaaggguaucagg

SEQ ID NO: 2972960 - RNA, 18 nt, Human
acuggcucacccaguccu

SEQ ID NO: 2972961 - RNA, 12 nt, Human
acuggcucaccc

SEQ ID NO: 2972962 - RNA, 15 nt, Human
acuggcucacccagu

SEQ ID NO: 2972963 - RNA, 21 nt, Human
acuggcgugaacccaggaggc

SEQ ID NO: 2972964 - RNA, 21 nt, Human
acuggcacaguuuucugagaa

SEQ ID NO: 2972965 - RNA, 22 nt, Human
acuggcacaguuuucugagaaa

SEQ ID NO: 2972966 - RNA, 13 nt, Human
acuggcaaagcag

SEQ ID NO: 2972967 - RNA, 15 nt, Human
acuggcaaagcagaa

SEQ ID NO: 2972968 - RNA, 13 nt, Human
uccuucagugccu

SEQ ID NO: 2972969 - RNA, 20 nt, Human
uccuucagugccuuauggaa

SEQ ID NO: 2972970 - RNA, 22 nt, Human
uccuucagugccuuauggaaca

SEQ ID NO: 2972971 - RNA, 11 nt, Human
uccuucagugc

SEQ ID NO: 2972972 - RNA, 13 nt, Human
uccuucagccuga

SEQ ID NO: 2972973 - RNA, 12 nt, Human
uccuucagugcc

SEQ ID NO: 2972974 - RNA, 14 nt, Human
acuaaaauguucua

SEQ ID NO: 2972975 - RNA, 16 nt, Human
acuaaccagcagaaau

SEQ ID NO: 2972976 - RNA, 13 nt, Human
acuaaccacgcug

SEQ ID NO: 2972977 - RNA, 17 nt, Human
acuaaccagcagaaaug

SEQ ID NO: 2972978 - RNA, 23 nt, Human
acuacaggugugagucaccaagc

SEQ ID NO: 2972979 - RNA, 15 nt, Human
acuacaguccuccca

SEQ ID NO: 2972980 - RNA, 13 nt, Human
acuaaaaauacaa

SEQ ID NO: 2972981 - RNA, 15 nt, Human
acuaaaaaugcaaaa

SEQ ID NO: 2972982 - RNA, 14 nt, Human
acguuucuaaaggc

SEQ ID NO: 2972983 - RNA, 12 nt, Human
acguuucuaaag

SEQ ID NO: 2972984 - RNA, 14 nt, Human
uccagcucaccagc

SEQ ID NO: 2972985 - RNA, 24 nt, Human
uccagccugggugacagagcaagu

SEQ ID NO: 2972986 - RNA, 13 nt, Human
uccagccugggug

SEQ ID NO: 2972987 - RNA, 20 nt, Human
acuacauuagguugugaaug

SEQ ID NO: 2972988 - RNA, 19 nt, Human
acuacauuagguugugaau

SEQ ID NO: 2972989 - RNA, 18 nt, Human
acuacauuagguugugaa

SEQ ID NO: 2972990 - RNA, 16 nt, Human
acuacaguccucccau

SEQ ID NO: 2972991 - RNA, 19 nt, Human
ucccagugccgagaaggaa

SEQ ID NO: 2972992 - RNA, 22 nt, Human
ucccagugccgagaaggaagcc

SEQ ID NO: 2972993 - RNA, 14 nt, Human
ucccaucucacaca

SEQ ID NO: 2972994 - RNA, 19 nt, Human
ucccaucucacacaugagc

SEQ ID NO: 2972995 - RNA, 13 nt, Human
ucccaucucacac

SEQ ID NO: 2972996 - RNA, 15 nt, Human
ucccauaugccuggg

SEQ ID NO: 2972997 - RNA, 22 nt, Human
uccccaccgcagacaggaccag

SEQ ID NO: 2972998 - RNA, 20 nt, Human
acuauguuuuuguucaguuu

SEQ ID NO: 2972999 - RNA, 23 nt, Human
acuauguugcccaggcaggucuu

SEQ ID NO: 2973000 - RNA, 20 nt, Human
acuauguugcccaggcaggu

SEQ ID NO: 2973001 - RNA, 19 nt, Human
acuauguugcccaggcagg

SEQ ID NO: 2973002 - RNA, 21 nt, Human
acuauuaaacaugcuguacau

SEQ ID NO: 2973003 - RNA, 18 nt, Human
acuauguugcccaggcag

SEQ ID NO: 2973004 - RNA, 17 nt, Human
acuauguugcccaggca

SEQ ID NO: 2973005 - RNA, 22 nt, Human
acuaucugugcguagaaguucu

SEQ ID NO: 2973006 - RNA, 20 nt, Human
acuaucugugcguagaaguu

SEQ ID NO: 2973007 - RNA, 17 nt, Human
acuaucacugguuuggu

SEQ ID NO: 2973008 - RNA, 23 nt, Human
acuauaauuuaccugaagucuuu

SEQ ID NO: 2973009 - RNA, 21 nt, Human
acuauaauguaagcucuacug

SEQ ID NO: 2973010 - RNA, 17 nt, Human
acuauagccuaggugac

SEQ ID NO: 2973011 - RNA, 23 nt, Human
uccccaggaggccagccuugacc

SEQ ID NO: 2973012 - RNA, 24 nt, Human
uccccaccgcagacaggaccaggg

SEQ ID NO: 2973013 - RNA, 12 nt, Human
uccccuccucug

SEQ ID NO: 2973014 - RNA, 16 nt, Human
ucccgaauagcuggga

SEQ ID NO: 2973015 - RNA, 15 nt, Human
ucccgaauagcuggg

SEQ ID NO: 2973016 - RNA, 18 nt, Human
ucccgaauagcugggacu

SEQ ID NO: 2973017 - RNA, 20 nt, Human
ucccgaguagcugggacuac

SEQ ID NO: 2973018 - RNA, 18 nt, Human
ucccuauuagagaagaga

SEQ ID NO: 2973019 - RNA, 22 nt, Human
ucccuuuccaaaugcccagcuu

SEQ ID NO: 2973020 - RNA, 18 nt, Human
ucccuuacgugaguccug

SEQ ID NO: 2973021 - RNA, 22 nt, Human
ucccuuacgugaguccuggcau

SEQ ID NO: 2973022 - RNA, 23 nt, Human
ucccugguggcagcucaccucuc

SEQ ID NO: 2973023 - RNA, 22 nt, Human
ucccuuugacgccaucccagcc

SEQ ID NO: 2973024 - RNA, 23 nt, Human
ucccuuugacgccaucccagccc

SEQ ID NO: 2973025 - RNA, 21 nt, Human
ucccuuugacgccaucccagc

SEQ ID NO: 2973026 - RNA, 14 nt, Human
uccuaggcauuugc

SEQ ID NO: 2973027 - RNA, 12 nt, Human
uccuaaaacaac

SEQ ID NO: 2973028 - RNA, 13 nt, Human
uccuaaaacaaca

SEQ ID NO: 2973029 - RNA, 20 nt, Human
uccuaaaacaacagauguac

SEQ ID NO: 2973030 - RNA, 16 nt, Human
uccuaaaacaacagau

SEQ ID NO: 2973031 - RNA, 22 nt, Human
uccuaaaauuauggaaacagau

SEQ ID NO: 2973032 - RNA, 17 nt, Human
uccuaaaauuauggaaa

SEQ ID NO: 2973033 - RNA, 22 nt, Human
acuccaggcagcagacacaugc

SEQ ID NO: 2973034 - RNA, 20 nt, Human
acuccaggcagcagacacau

SEQ ID NO: 2973035 - RNA, 17 nt, Human
acuccaggcagcagaca

SEQ ID NO: 2973036 - RNA, 21 nt, Human
acuccaaagaaauguaaggga

SEQ ID NO: 2973037 - RNA, 22 nt, Human
ucccucauccucauacccaccc

SEQ ID NO: 2973038 - RNA, 21 nt, Human
ucccucagucuggcccuuccu

SEQ ID NO: 2973039 - RNA, 20 nt, Human
uccucaaaacuucagacaua

SEQ ID NO: 2973040 - RNA, 19 nt, Human
acucuuauugcccacgcug

SEQ ID NO: 2973041 - RNA, 16 nt, Human
acucuuauugcccacg

SEQ ID NO: 2973042 - RNA, 20 nt, Human
uccucagaucuucugugggu

SEQ ID NO: 2973043 - RNA, 15 nt, Human
uccucccucccucuu

SEQ ID NO: 2973044 - RNA, 17 nt, Human
uccucccucccucuuuc

SEQ ID NO: 2973045 - RNA, 19 nt, Human
uccucccucccucuuuccc

SEQ ID NO: 2973046 - RNA, 12 nt, Human
uccucuccccag

SEQ ID NO: 2973047 - RNA, 14 nt, Human
uccucauacccacc

SEQ ID NO: 2973048 - RNA, 18 nt, Human
uccucauacccaccccca

SEQ ID NO: 2973049 - RNA, 22 nt, Human
uccucauacccacccccaccca

SEQ ID NO: 2973050 - RNA, 17 nt, Human
acucuccucugcugcug

SEQ ID NO: 2973051 - RNA, 21 nt, Human
acucgggaggcugaggcagga

SEQ ID NO: 2973052 - RNA, 18 nt, Human
acucgcgacaaugcaaac

SEQ ID NO: 2973053 - RNA, 19 nt, Human
uccuaggcauuugcugaau

SEQ ID NO: 2973054 - RNA, 20 nt, Human
acucgcgacaaugcaaacca

SEQ ID NO: 2973055 - RNA, 23 nt, Human
acucgcgacaaugcaaaccauca

SEQ ID NO: 2973056 - RNA, 17 nt, Human
acucgcgacaaugcaaa

SEQ ID NO: 2973057 - RNA, 22 nt, Human
acucuuauaucuauauuuuaca

SEQ ID NO: 2973058 - RNA, 23 nt, Human
acucuuauaucuauauuuuacau

SEQ ID NO: 2973059 - RNA, 18 nt, Human
acucuccucugcugcugg

SEQ ID NO: 2973060 - RNA, 19 nt, Human
acucuccucugcugcuggc

SEQ ID NO: 2973061 - RNA, 14 nt, Human
uagucauucuuccc

SEQ ID NO: 2973062 - RNA, 15 nt, Human
uagucauucuucccu

SEQ ID NO: 2973063 - RNA, 22 nt, Human
uagugagcagucaggaaagaga

SEQ ID NO: 2973064 - RNA, 19 nt, Human
acaagcugcacccucaggc

SEQ ID NO: 2973065 - RNA, 21 nt, Human
acaagcugcacccucaggcag

SEQ ID NO: 2973066 - RNA, 22 nt, Human
acaagcugcacccucaggcagg

SEQ ID NO: 2973067 - RNA, 23 nt, Human
acaagcugcacccucaggcaggu

SEQ ID NO: 2973068 - RNA, 21 nt, Human
uagucaggugccucaagagaa

SEQ ID NO: 2973069 - RNA, 16 nt, Human
uaguuuuauaugcuuc

SEQ ID NO: 2973070 - RNA, 15 nt, Human
uaguuuuauaugcuu

SEQ ID NO: 2973071 - RNA, 20 nt, Human
uaguuccucauuagcauuuu

SEQ ID NO: 2973072 - RNA, 21 nt, Human
acacaugcaaggucauuuuuu

SEQ ID NO: 2973073 - RNA, 21 nt, Human
acacccagcccacuucugcca

SEQ ID NO: 2973074 - RNA, 20 nt, Human
acacccagcccacuucugcc

SEQ ID NO: 2973075 - RNA, 19 nt, Human
acacccagcccacuucugc

SEQ ID NO: 2973076 - RNA, 12 nt, Human
acacccugugau

SEQ ID NO: 2973077 - RNA, 18 nt, Human
acacccugugauggggcc

SEQ ID NO: 2973078 - RNA, 11 nt, Human
acacccuguga

SEQ ID NO: 2973079 - RNA, 20 nt, Human
acaccauaagcuacugccau

SEQ ID NO: 2973080 - RNA, 19 nt, Human
acaccauaagcuacugcca

SEQ ID NO: 2973081 - RNA, 22 nt, Human
uauaaaauaauuuuuauauuug

SEQ ID NO: 2973082 - RNA, 21 nt, Human
uauaaaauaauuuuuauauuu

SEQ ID NO: 2973083 - RNA, 22 nt, Human
acacaucagcuugcccuguuaa

SEQ ID NO: 2973084 - RNA, 20 nt, Human
acacaugcaaggucauuuuu

SEQ ID NO: 2973085 - RNA, 19 nt, Human
acacaugcaaggucauuuu

SEQ ID NO: 2973086 - RNA, 18 nt, Human
acacaugcaaggucauuu

SEQ ID NO: 2973087 - RNA, 13 nt, Human
uauagcaagacau

SEQ ID NO: 2973088 - RNA, 20 nt, Human
uauagccuaggugacagagu

SEQ ID NO: 2973089 - RNA, 19 nt, Human
uauagcuaggugacauaua

SEQ ID NO: 2973090 - RNA, 22 nt, Human
uauagcuaggugacauauacau

SEQ ID NO: 2973091 - RNA, 12 nt, Human
uauaggaauuga

SEQ ID NO: 2973092 - RNA, 13 nt, Human
uauaggaauugac

SEQ ID NO: 2973093 - RNA, 14 nt, Human
uauaggaauugacc

SEQ ID NO: 2973094 - RNA, 21 nt, Human
uauaggugcuacaaaaacaca

SEQ ID NO: 2973095 - RNA, 20 nt, Human
uauaggugcuacaaaaacac

SEQ ID NO: 2973096 - RNA, 23 nt, Human
uauaggugcuacaaaaacacagc

SEQ ID NO: 2973097 - RNA, 21 nt, Human
acacucauugaccugaggccc

SEQ ID NO: 2973098 - RNA, 23 nt, Human
acacucauugaccugaggcccuu

SEQ ID NO: 2973099 - RNA, 19 nt, Human
acacucauugaccugaggc

SEQ ID NO: 2973100 - RNA, 22 nt, Human
uauauauuuuuuucugaaauuu

SEQ ID NO: 2973101 - RNA, 21 nt, Human
uauauauuuuuuucugaaauu

SEQ ID NO: 2973102 - RNA, 20 nt, Human
uauauauuuuuuucugaaau

SEQ ID NO: 2973103 - RNA, 23 nt, Human
uauauauuuuuuucugaaauuuc

SEQ ID NO: 2973104 - RNA, 14 nt, Human
uauacauuugauaa

SEQ ID NO: 2973105 - RNA, 14 nt, Human
uauacauaaacaag

SEQ ID NO: 2973106 - RNA, 13 nt, Human
uauacauaaacaa

SEQ ID NO: 2973107 - RNA, 14 nt, Human
uauaauuuugugaa

SEQ ID NO: 2973108 - RNA, 22 nt, Human
uauaauuuccauuuacuuaaga

SEQ ID NO: 2973109 - RNA, 21 nt, Human
uauaauuuccauuuacuuaag

SEQ ID NO: 2973110 - RNA, 20 nt, Human
uauaauuuccauuuacuuaa

SEQ ID NO: 2973111 - RNA, 15 nt, Human
uauaauuuccauuua

SEQ ID NO: 2973112 - RNA, 21 nt, Human
uauaauuuaccugaagucuuu

SEQ ID NO: 2973113 - RNA, 20 nt, Human
uauaaccaguguuguggauu

SEQ ID NO: 2973114 - RNA, 18 nt, Human
uauaacaaugcuguauuu

SEQ ID NO: 2973115 - RNA, 15 nt, Human
uaugaugacuguuuu

SEQ ID NO: 2973116 - RNA, 14 nt, Human
uaugaugacuguuu

SEQ ID NO: 2973117 - RNA, 14 nt, Human
uaugcucugcaugu

SEQ ID NO: 2973118 - RNA, 18 nt, Human
uaugcucugcauguuaca

SEQ ID NO: 2973119 - RNA, 16 nt, Human
uauggcuauaggugcu

SEQ ID NO: 2973120 - RNA, 22 nt, Human
uauggcccuggccuagcauacg

SEQ ID NO: 2973121 - RNA, 19 nt, Human
uaugcucugcauguuacau

SEQ ID NO: 2973122 - RNA, 14 nt, Human
acagcuaacaugga

SEQ ID NO: 2973123 - RNA, 15 nt, Human
acagcuaacauggaa

SEQ ID NO: 2973124 - RNA, 17 nt, Human
acagcuaacauggaagu

SEQ ID NO: 2973125 - RNA, 15 nt, Human
acagcuccaagaauu

SEQ ID NO: 2973126 - RNA, 17 nt, Human
uauggcuauaggugcua

SEQ ID NO: 2973127 - RNA, 16 nt, Human
uauggcuuuugugcau

SEQ ID NO: 2973128 - RNA, 10 nt, Human
uaugggagag

SEQ ID NO: 2973129 - RNA, 13 nt, Human
uaugggagcuguc

SEQ ID NO: 2973130 - RNA, 23 nt, Human
uaugaucacggcucacugcagcc

SEQ ID NO: 2973131 - RNA, 21 nt, Human
uaugaucacggcucacugcag

SEQ ID NO: 2973132 - RNA, 14 nt, Human
uaugaucacggcuc

SEQ ID NO: 2973133 - RNA, 15 nt, Human
uaucuugaagacuuu

SEQ ID NO: 2973134 - RNA, 13 nt, Human
uaugaggcauuug

SEQ ID NO: 2973135 - RNA, 23 nt, Human
uaugaggcauuuguuugaacuga

SEQ ID NO: 2973136 - RNA, 14 nt, Human
acagcaggcugcca

SEQ ID NO: 2973137 - RNA, 18 nt, Human
acagaguuuucacucuua

SEQ ID NO: 2973138 - RNA, 20 nt, Human
acagaguuuucacucuuauu

SEQ ID NO: 2973139 - RNA, 14 nt, Human
uaucuugaagacuu

SEQ ID NO: 2973140 - RNA, 20 nt, Human
uaucagaacuauguuuuugu

SEQ ID NO: 2973141 - RNA, 14 nt, Human
uaucagaacuaugu

SEQ ID NO: 2973142 - RNA, 16 nt, Human
uaucuagauacuguau

SEQ ID NO: 2973143 - RNA, 15 nt, Human
uaucuagauacugua

SEQ ID NO: 2973144 - RNA, 19 nt, Human
uaucuagauacuguaucau

SEQ ID NO: 2973145 - RNA, 16 nt, Human
uaucucccccagcccc

SEQ ID NO: 2973146 - RNA, 18 nt, Human
uaucucccccagccccau

SEQ ID NO: 2973147 - RNA, 17 nt, Human
uaucucccccagcccca

SEQ ID NO: 2973148 - RNA, 16 nt, Human
acagagcuacacaggg

SEQ ID NO: 2973149 - RNA, 20 nt, Human
acagagcccacgcccccacu

SEQ ID NO: 2973150 - RNA, 21 nt, Human
acagagugagacucugucuca

SEQ ID NO: 2973151 - RNA, 23 nt, Human
acagaguggaauaagacagagac

SEQ ID NO: 2973152 - RNA, 22 nt, Human
acagaguggaauaagacagaga

SEQ ID NO: 2973153 - RNA, 21 nt, Human
acagaguggaauaagacagag

SEQ ID NO: 2973154 - RNA, 22 nt, Human
acagacuggaagcacagcuuca

SEQ ID NO: 2973155 - RNA, 22 nt, Human
acagagaccugcccucaagagc

SEQ ID NO: 2973156 - RNA, 17 nt, Human
uauauucucagcagagu

SEQ ID NO: 2973157 - RNA, 14 nt, Human
acagacuggaagca

SEQ ID NO: 2973158 - RNA, 19 nt, Human
uauauucucagcagagugc

SEQ ID NO: 2973159 - RNA, 18 nt, Human
acagacccugcccugugg

SEQ ID NO: 2973160 - RNA, 20 nt, Human
acagacccugcccugugggc

SEQ ID NO: 2973161 - RNA, 11 nt, Human
acacuccuuca

SEQ ID NO: 2973162 - RNA, 23 nt, Human
acagacacaggcccggcuccagg

SEQ ID NO: 2973163 - RNA, 17 nt, Human
acagacccugcccugug

SEQ ID NO: 2973164 - RNA, 16 nt, Human
acagacccugcccugu

SEQ ID NO: 2973165 - RNA, 20 nt, Human
uaucacuuccaugacauaag

SEQ ID NO: 2973166 - RNA, 18 nt, Human
uaucacccagaagaaaau

SEQ ID NO: 2973167 - RNA, 14 nt, Human
uauauuuacaaaug

SEQ ID NO: 2973168 - RNA, 18 nt, Human
uaucaaguauuauaccuu

SEQ ID NO: 2973169 - RNA, 21 nt, Human
uaucaaguauuauaccuuuuu

SEQ ID NO: 2973170 - RNA, 15 nt, Human
uauauuuacaaaugg

SEQ ID NO: 2973171 - RNA, 21 nt, Human
acaguaacauagcugugauuu

SEQ ID NO: 2973172 - RNA, 21 nt, Human
acaguauggcagcuuuccuca

SEQ ID NO: 2973173 - RNA, 17 nt, Human
acaggcugggcuucagu

SEQ ID NO: 2973174 - RNA, 14 nt, Human
acaggcugggcuuc

SEQ ID NO: 2973175 - RNA, 21 nt, Human
acaggcugggcuucaguggca

SEQ ID NO: 2973176 - RNA, 20 nt, Human
acagggcacaccgggcacuc

SEQ ID NO: 2973177 - RNA, 12 nt, Human
acaggcugggcu

SEQ ID NO: 2973178 - RNA, 22 nt, Human
acagguuuuccugaagaauuga

SEQ ID NO: 2973179 - RNA, 22 nt, Human
acagggcacaccgggcacucag

SEQ ID NO: 2973180 - RNA, 15 nt, Human
acagucccugccaau

SEQ ID NO: 2973181 - RNA, 13 nt, Human
acaguccucccau

SEQ ID NO: 2973182 - RNA, 14 nt, Human
acaguccucccauc

SEQ ID NO: 2973183 - RNA, 15 nt, Human
acaguccucccaucu

SEQ ID NO: 2973184 - RNA, 18 nt, Human
acaguccuuaccagcaga

SEQ ID NO: 2973185 - RNA, 20 nt, Human
acaguccuuaccagcagagc

SEQ ID NO: 2973186 - RNA, 17 nt, Human
acaguccucccaucuca

SEQ ID NO: 2973187 - RNA, 19 nt, Human
acaguauuacuucugcuac

SEQ ID NO: 2973188 - RNA, 17 nt, Human
acaguauuacuucugcu

SEQ ID NO: 2973189 - RNA, 16 nt, Human
acaguauuacuucugc

SEQ ID NO: 2973190 - RNA, 15 nt, Human
acaguauuacuucug

SEQ ID NO: 2973191 - RNA, 12 nt, Human
acagucccugcc

SEQ ID NO: 2973192 - RNA, 13 nt, Human
acagucccugcca

SEQ ID NO: 2973193 - RNA, 22 nt, Human
acaguguguggucaacauuucu

SEQ ID NO: 2973194 - RNA, 23 nt, Human
acagugagagacuccauaguuug

SEQ ID NO: 2973195 - RNA, 12 nt, Human
acagugagagac

SEQ ID NO: 2973196 - RNA, 18 nt, Human
acagugagacucugucuc

SEQ ID NO: 2973197 - RNA, 14 nt, Human
acagugagacucug

SEQ ID NO: 2973198 - RNA, 15 nt, Human
acaguuaagagaaau

SEQ ID NO: 2973199 - RNA, 21 nt, Human
acaguuaccucugccucagaa

SEQ ID NO: 2973200 - RNA, 13 nt, Human
acagucucaggaa

SEQ ID NO: 2973201 - RNA, 14 nt, Human
acagucucaggaaa

SEQ ID NO: 2973202 - RNA, 15 nt, Human
acagucucaggaaau

SEQ ID NO: 2973203 - RNA, 16 nt, Human
acagucucaggaaauc

SEQ ID NO: 2973204 - RNA, 21 nt, Human
acaguccuuaccagcagagca

SEQ ID NO: 2973205 - RNA, 22 nt, Human
acaguccuuaccagcagagcac

SEQ ID NO: 2973206 - RNA, 20 nt, Human
acagugaaagaaaauaacaa

SEQ ID NO: 2973207 - RNA, 17 nt, Human
acagucucaggaaauca

SEQ ID NO: 2973208 - RNA, 15 nt, Human
uauguuuuauauagc

SEQ ID NO: 2973209 - RNA, 19 nt, Human
uauguuuuaagaggcaggg

SEQ ID NO: 2973210 - RNA, 17 nt, Human
uauguuuuaagaggcag

SEQ ID NO: 2973211 - RNA, 22 nt, Human
uauuaaaaaucucaaauuucua

SEQ ID NO: 2973212 - RNA, 20 nt, Human
uauuaaaaaucucaaauuuc

SEQ ID NO: 2973213 - RNA, 18 nt, Human
uauuaaaaaucucaaauu

SEQ ID NO: 2973214 - RNA, 16 nt, Human
uauuaaaaaucucaaa

SEQ ID NO: 2973215 - RNA, 19 nt, Human
uauuaaacaugcuguacau

SEQ ID NO: 2973216 - RNA, 15 nt, Human
uauuaaacaugcugu

SEQ ID NO: 2973217 - RNA, 17 nt, Human
uauuaaacaugcuguac

SEQ ID NO: 2973218 - RNA, 12 nt, Human
uauuaaaacuca

SEQ ID NO: 2973219 - RNA, 23 nt, Human
uauuaaaaaucucaaauuucuaa

SEQ ID NO: 2973220 - RNA, 23 nt, Human
uauuacaguggggaaugaagaua

SEQ ID NO: 2973221 - RNA, 23 nt, Human
uauucauagcagcuuauucacaa

SEQ ID NO: 2973222 - RNA, 18 nt, Human
uauucaggaagcucaggg

SEQ ID NO: 2973223 - RNA, 22 nt, Human
uauucaggaagcucagggccug

SEQ ID NO: 2973224 - RNA, 16 nt, Human
uauucaggaagcucag

SEQ ID NO: 2973225 - RNA, 15 nt, Human
uauuagaauaccaca

SEQ ID NO: 2973226 - RNA, 16 nt, Human
uauuaccacagacaua

SEQ ID NO: 2973227 - RNA, 12 nt, Human
uauuagagaaga

SEQ ID NO: 2973228 - RNA, 15 nt, Human
uauucugagaugacu

SEQ ID NO: 2973229 - RNA, 16 nt, Human
uauucuguuggccagu

SEQ ID NO: 2973230 - RNA, 15 nt, Human
uauucuuauuuaaug

SEQ ID NO: 2973231 - RNA, 24 nt, Human
uauucucuccuguaccucuugagc

SEQ ID NO: 2973232 - RNA, 20 nt, Human
uauucucuccuguaccucuu

SEQ ID NO: 2973233 - RNA, 18 nt, Human
uauucucuccuguaccuc

SEQ ID NO: 2973234 - RNA, 17 nt, Human
acaguucucuccuucuu

SEQ ID NO: 2973235 - RNA, 19 nt, Human
acaguucggugagcuacaa

SEQ ID NO: 2973236 - RNA, 22 nt, Human
acaguucggugagcuacaaaug

SEQ ID NO: 2973237 - RNA, 16 nt, Human
acaguucucuccuucu

SEQ ID NO: 2973238 - RNA, 23 nt, Human
acaguucggugagcuacaaaugc

SEQ ID NO: 2973239 - RNA, 20 nt, Human
acaguucaauucucauuugu

SEQ ID NO: 2973240 - RNA, 20 nt, Human
acaguuacucagaauucucu

SEQ ID NO: 2973241 - RNA, 13 nt, Human
acaguuacucaga

SEQ ID NO: 2973242 - RNA, 20 nt, Human
uauugaagcagaguggcagu

SEQ ID NO: 2973243 - RNA, 16 nt, Human
uauugaagcagagugg

SEQ ID NO: 2973244 - RNA, 14 nt, Human
uauugaagcagagu

SEQ ID NO: 2973245 - RNA, 16 nt, Human
uauugaaaugauuuca

SEQ ID NO: 2973246 - RNA, 15 nt, Human
uauuuaaucuuuuau

SEQ ID NO: 2973247 - RNA, 13 nt, Human
uauuuaaucuuuu

SEQ ID NO: 2973248 - RNA, 14 nt, Human
uauuuaauagguuu

SEQ ID NO: 2973249 - RNA, 21 nt, Human
uauuuaaugaaagacuguaca

SEQ ID NO: 2973250 - RNA, 15 nt, Human
uauuuaaugaaagac

SEQ ID NO: 2973251 - RNA, 17 nt, Human
uauugucuagugaaacu

SEQ ID NO: 2973252 - RNA, 18 nt, Human
uauuuaaccucuaaauuc

SEQ ID NO: 2973253 - RNA, 17 nt, Human
uauuuaaccucuaaauu

SEQ ID NO: 2973254 - RNA, 13 nt, Human
uauugucaaagug

SEQ ID NO: 2973255 - RNA, 17 nt, Human
uauugucaaagugguga

SEQ ID NO: 2973256 - RNA, 21 nt, Human
uauuguagcauccuggaauau

SEQ ID NO: 2973257 - RNA, 20 nt, Human
uauuguagcauccuggaaua

SEQ ID NO: 2973258 - RNA, 18 nt, Human
uauuguagcauccuggaa

SEQ ID NO: 2973259 - RNA, 17 nt, Human
uauuguagcauccugga

SEQ ID NO: 2973260 - RNA, 16 nt, Human
uauuuaauuugaaggu

SEQ ID NO: 2973261 - RNA, 23 nt, Human
uauuuaauuugaagguagaaugu

SEQ ID NO: 2973262 - RNA, 13 nt, Human
uauuuaauuugaa

SEQ ID NO: 2973263 - RNA, 21 nt, Human
uauuuacaaauguuuugcuca

SEQ ID NO: 2973264 - RNA, 14 nt, Human
uauuuacaaauguu

SEQ ID NO: 2973265 - RNA, 23 nt, Human
uauuuaauuuuuuugagacagag

SEQ ID NO: 2973266 - RNA, 18 nt, Human
uauuuacuucuuauacau

SEQ ID NO: 2973267 - RNA, 13 nt, Human
uauuuauuuguga

SEQ ID NO: 2973268 - RNA, 14 nt, Human
uauuuauuuauuua

SEQ ID NO: 2973269 - RNA, 18 nt, Human
uauuuauuuuaauaaugu

SEQ ID NO: 2973270 - RNA, 16 nt, Human
uauuuauuuuaauaau

SEQ ID NO: 2973271 - RNA, 14 nt, Human
uauuuauuuuaaua

SEQ ID NO: 2973272 - RNA, 14 nt, Human
uauuuauuuaaauu

SEQ ID NO: 2973273 - RNA, 15 nt, Human
uauuuauuuacaaau

SEQ ID NO: 2973274 - RNA, 16 nt, Human
uauuuauuuacaaaug

SEQ ID NO: 2973275 - RNA, 13 nt, Human
uauuuauuuaaau

SEQ ID NO: 2973276 - RNA, 13 nt, Human
uacuauuaaacau

SEQ ID NO: 2973277 - RNA, 16 nt, Human
uacuauguaucaauga

SEQ ID NO: 2973278 - RNA, 16 nt, Human
uacuauaauuuaccug

SEQ ID NO: 2973279 - RNA, 16 nt, Human
uacuauuaaacaugcu

SEQ ID NO: 2973280 - RNA, 15 nt, Human
uacuauuaaacaugc

SEQ ID NO: 2973281 - RNA, 14 nt, Human
uacuauuaaacaug

SEQ ID NO: 2973282 - RNA, 18 nt, Human
uacuauuaaacaugcugu

SEQ ID NO: 2973283 - RNA, 14 nt, Human
uacgucugacaggc

SEQ ID NO: 2973284 - RNA, 14 nt, Human
uacguugugcauuu

SEQ ID NO: 2973285 - RNA, 13 nt, Human
uacguugugcauu

SEQ ID NO: 2973286 - RNA, 22 nt, Human
uacucuuauaucuauauuuuac

SEQ ID NO: 2973287 - RNA, 20 nt, Human
uacucuuauaucuauauuuu

SEQ ID NO: 2973288 - RNA, 21 nt, Human
uacucugugucagguggggca

SEQ ID NO: 2973289 - RNA, 20 nt, Human
aauucuugcaaaguaucccu

SEQ ID NO: 2973290 - RNA, 14 nt, Human
aauucuugcaaagu

SEQ ID NO: 2973291 - RNA, 21 nt, Human
aauucuugccaaauauaaaua

SEQ ID NO: 2973292 - RNA, 22 nt, Human
aauucuucuccacuuucuagcc

SEQ ID NO: 2973293 - RNA, 13 nt, Human
aauucuuaaauau

SEQ ID NO: 2973294 - RNA, 14 nt, Human
aauucuuucauuuu

SEQ ID NO: 2973295 - RNA, 14 nt, Human
uacguacacauuuu

SEQ ID NO: 2973296 - RNA, 15 nt, Human
uacguacacauuuua

SEQ ID NO: 2973297 - RNA, 19 nt, Human
aauugacccacaagaaaug

SEQ ID NO: 2973298 - RNA, 16 nt, Human
aauugacccacaagaa

SEQ ID NO: 2973299 - RNA, 13 nt, Human
aauugacccacaa

SEQ ID NO: 2973300 - RNA, 20 nt, Human
aauuucucccagucauuuaa

SEQ ID NO: 2973301 - RNA, 19 nt, Human
aauuucucccagucauuua

SEQ ID NO: 2973302 - RNA, 21 nt, Human
aauuucuaaaucuccaaaaua

SEQ ID NO: 2973303 - RNA, 13 nt, Human
aauuucuaaaucu

SEQ ID NO: 2973304 - RNA, 17 nt, Human
aauuuagaaauauaauu

SEQ ID NO: 2973305 - RNA, 19 nt, Human
uacuucaaauccuugaaga

SEQ ID NO: 2973306 - RNA, 14 nt, Human
uacuucaaauccuu

SEQ ID NO: 2973307 - RNA, 19 nt, Human
aauuugauaugugaacagu

SEQ ID NO: 2973308 - RNA, 15 nt, Human
aauuugauaugugaa

SEQ ID NO: 2973309 - RNA, 18 nt, Human
aauuugauaugugaacag

SEQ ID NO: 2973310 - RNA, 16 nt, Human
aauuugauaugugaac

SEQ ID NO: 2973311 - RNA, 23 nt, Human
aauugugugaaagguacuucaaa

SEQ ID NO: 2973312 - RNA, 22 nt, Human
aauuguuuggggaugagaaagg

SEQ ID NO: 2973313 - RNA, 21 nt, Human
aauuguuugacggcaagguuu

SEQ ID NO: 2973314 - RNA, 13 nt, Human
aauuuaaaagucu

SEQ ID NO: 2973315 - RNA, 15 nt, Human
aauuuaaauagcuuu

SEQ ID NO: 2973316 - RNA, 16 nt, Human
aauuuaaauagcuuuu

SEQ ID NO: 2973317 - RNA, 19 nt, Human
aauuuacauacucugcuua

SEQ ID NO: 2973318 - RNA, 15 nt, Human
aauuuacauacucug

SEQ ID NO: 2973319 - RNA, 21 nt, Human
uagcaugucgucaaagcugaa

SEQ ID NO: 2973320 - RNA, 18 nt, Human
uagcaugucgucaaagcu

SEQ ID NO: 2973321 - RNA, 24 nt, Human
uagcacagacccugcccugugggc

SEQ ID NO: 2973322 - RNA, 16 nt, Human
uagcacagacccugcc

SEQ ID NO: 2973323 - RNA, 17 nt, Human
uagcacagacccugccc

SEQ ID NO: 2973324 - RNA, 18 nt, Human
uagcacagacccugcccu

SEQ ID NO: 2973325 - RNA, 19 nt, Human
uagcacagacccugcccug

SEQ ID NO: 2973326 - RNA, 22 nt, Human
uagauuuuagacccuauugcug

SEQ ID NO: 2973327 - RNA, 19 nt, Human
uagaugcaguucugaagaa

SEQ ID NO: 2973328 - RNA, 17 nt, Human
uagaugcaguucugaag

SEQ ID NO: 2973329 - RNA, 16 nt, Human
uagaugcaguucugaa

SEQ ID NO: 2973330 - RNA, 18 nt, Human
acaagcacuaaacaaaga

SEQ ID NO: 2973331 - RNA, 17 nt, Human
acaagagcccaggccuc

SEQ ID NO: 2973332 - RNA, 12 nt, Human
acaagccacccc

SEQ ID NO: 2973333 - RNA, 21 nt, Human
acaagcgugagccacugcacc

SEQ ID NO: 2973334 - RNA, 20 nt, Human
acaagcgugagccacugcac

SEQ ID NO: 2973335 - RNA, 13 nt, Human
acaagcugcaccc

SEQ ID NO: 2973336 - RNA, 18 nt, Human
acaagcgugagccacugc

SEQ ID NO: 2973337 - RNA, 22 nt, Human
acaagaaaugaaagcagggacu

SEQ ID NO: 2973338 - RNA, 15 nt, Human
acaacaacaaaauga

SEQ ID NO: 2973339 - RNA, 12 nt, Human
acaacacucaca

SEQ ID NO: 2973340 - RNA, 13 nt, Human
acaaauguuuugc

SEQ ID NO: 2973341 - RNA, 23 nt, Human
acaaauguuuugcucaauagauu

SEQ ID NO: 2973342 - RNA, 14 nt, Human
acaaauguuuugcu

SEQ ID NO: 2973343 - RNA, 18 nt, Human
uagaacucccuuucaaca

SEQ ID NO: 2973344 - RNA, 15 nt, Human
uagaagucacacagu

SEQ ID NO: 2973345 - RNA, 21 nt, Human
uacuucaaauccuugaagauu

SEQ ID NO: 2973346 - RNA, 21 nt, Human
uagaauugacauugaaaucua

SEQ ID NO: 2973347 - RNA, 19 nt, Human
uagaauugacauugaaauc

SEQ ID NO: 2973348 - RNA, 19 nt, Human
uagaagucuuagauguaua

SEQ ID NO: 2973349 - RNA, 18 nt, Human
uagaagucuuagauguau

SEQ ID NO: 2973350 - RNA, 17 nt, Human
uagaagucuuagaugua

SEQ ID NO: 2973351 - RNA, 16 nt, Human
uagaagucuuagaugu

SEQ ID NO: 2973352 - RNA, 23 nt, Human
uagaagucacauuccugaacagg

SEQ ID NO: 2973353 - RNA, 16 nt, Human
uagaagucacacagua

SEQ ID NO: 2973354 - RNA, 16 nt, Human
uagacaauuuauuaug

SEQ ID NO: 2973355 - RNA, 21 nt, Human
uagacagagucucacuguugc

SEQ ID NO: 2973356 - RNA, 19 nt, Human
aauuuuuauauuugaaaua

SEQ ID NO: 2973357 - RNA, 14 nt, Human
aauuuuaaacauau

SEQ ID NO: 2973358 - RNA, 13 nt, Human
aauuuuaaacaua

SEQ ID NO: 2973359 - RNA, 18 nt, Human
aauuuuuauuaaauuaug

SEQ ID NO: 2973360 - RNA, 17 nt, Human
aauuuuuauuaaauuau

SEQ ID NO: 2973361 - RNA, 12 nt, Human
uagacagucccu

SEQ ID NO: 2973362 - RNA, 14 nt, Human
uagacagucccugc

SEQ ID NO: 2973363 - RNA, 13 nt, Human
acaaaaacauggc

SEQ ID NO: 2973364 - RNA, 16 nt, Human
acaaaaacacagcaag

SEQ ID NO: 2973365 - RNA, 17 nt, Human
aauuuuuuugagacaga

SEQ ID NO: 2973366 - RNA, 19 nt, Human
aauuuuuucucuaggaaau

SEQ ID NO: 2973367 - RNA, 22 nt, Human
aauuuuuuuaucgucacugcuu

SEQ ID NO: 2973368 - RNA, 13 nt, Human
aauuaaguacuau

SEQ ID NO: 2973369 - RNA, 23 nt, Human
uacauggcuggagcuagaauuug

SEQ ID NO: 2973370 - RNA, 22 nt, Human
aauuaacuuuuauaaacuuuac

SEQ ID NO: 2973371 - RNA, 15 nt, Human
aauuaagagagucua

SEQ ID NO: 2973372 - RNA, 20 nt, Human
aauuaacuuuuauaaacuuu

SEQ ID NO: 2973373 - RNA, 18 nt, Human
aauuaacuuuuauaaacu

SEQ ID NO: 2973374 - RNA, 18 nt, Human
aauguugacaugggacau

SEQ ID NO: 2973375 - RNA, 17 nt, Human
uaccauccccuguagag

SEQ ID NO: 2973376 - RNA, 19 nt, Human
uaccccaagacucccauga

SEQ ID NO: 2973377 - RNA, 17 nt, Human
uaccacuuuuguucuug

SEQ ID NO: 2973378 - RNA, 15 nt, Human
uaccacuuuugcaaa

SEQ ID NO: 2973379 - RNA, 17 nt, Human
uaccacuuuugcaaaua

SEQ ID NO: 2973380 - RNA, 22 nt, Human
uacccuggcacuauaauguaag

SEQ ID NO: 2973381 - RNA, 20 nt, Human
uacccuggcacuauaaugua

SEQ ID NO: 2973382 - RNA, 16 nt, Human
uacccucauguucuua

SEQ ID NO: 2973383 - RNA, 15 nt, Human
uacccucauguucuu

SEQ ID NO: 2973384 - RNA, 20 nt, Human
uacccgggaagggggcuggg

SEQ ID NO: 2973385 - RNA, 12 nt, Human
uacauacuuuuu

SEQ ID NO: 2973386 - RNA, 15 nt, Human
uacauacuuuuuggg

SEQ ID NO: 2973387 - RNA, 14 nt, Human
uacauacuuuuugg

SEQ ID NO: 2973388 - RNA, 14 nt, Human
aauguaggcuggcu

SEQ ID NO: 2973389 - RNA, 22 nt, Human
aaugugaaacuggauuaaacuu

SEQ ID NO: 2973390 - RNA, 14 nt, Human
aaugucacaggcag

SEQ ID NO: 2973391 - RNA, 13 nt, Human
aaugucacaggca

SEQ ID NO: 2973392 - RNA, 18 nt, Human
uacaguaucucagggccu

SEQ ID NO: 2973393 - RNA, 12 nt, Human
uacaguccuccc

SEQ ID NO: 2973394 - RNA, 15 nt, Human
uacaguccucccauc

SEQ ID NO: 2973395 - RNA, 17 nt, Human
uacaguccucccaucuc

SEQ ID NO: 2973396 - RNA, 18 nt, Human
uacaguccucccaucuca

SEQ ID NO: 2973397 - RNA, 20 nt, Human
uacaguggggaaugaagaua

SEQ ID NO: 2973398 - RNA, 16 nt, Human
aaugguuuaaaugguc

SEQ ID NO: 2973399 - RNA, 15 nt, Human
aauguaagcucuacu

SEQ ID NO: 2973400 - RNA, 13 nt, Human
aauguaagcucua

SEQ ID NO: 2973401 - RNA, 17 nt, Human
aaugguuuucuugugug

SEQ ID NO: 2973402 - RNA, 18 nt, Human
aaugguuuucuugugugu

SEQ ID NO: 2973403 - RNA, 22 nt, Human
aaugguuuucuuguguguuuau

SEQ ID NO: 2973404 - RNA, 22 nt, Human
uacagcaaggagauuuacaacu

SEQ ID NO: 2973405 - RNA, 23 nt, Human
aauguacagcaaggagauuuaca

SEQ ID NO: 2973406 - RNA, 21 nt, Human
aauguacagcaaggagauuua

SEQ ID NO: 2973407 - RNA, 21 nt, Human
uaauuaugguuaguagaggua

SEQ ID NO: 2973408 - RNA, 19 nt, Human
aaugcacaaacagaggccg

SEQ ID NO: 2973409 - RNA, 20 nt, Human
aaugcacaaacagaggccgc

SEQ ID NO: 2973410 - RNA, 13 nt, Human
aaugcacuuuguu

SEQ ID NO: 2973411 - RNA, 16 nt, Human
aaugcacuuuguucug

SEQ ID NO: 2973412 - RNA, 19 nt, Human
aaugcacuuuguucuggcu

SEQ ID NO: 2973413 - RNA, 20 nt, Human
aaugcacuuuguucuggcuc

SEQ ID NO: 2973414 - RNA, 23 nt, Human
uaauuaguuccucauuagcauuu

SEQ ID NO: 2973415 - RNA, 12 nt, Human
aaugcaaagaug

SEQ ID NO: 2973416 - RNA, 18 nt, Human
aaugcaaagaugaagguc

SEQ ID NO: 2973417 - RNA, 14 nt, Human
aaugcaaagaugaa

SEQ ID NO: 2973418 - RNA, 21 nt, Human
aaugcaaagaugaaggucugu

SEQ ID NO: 2973419 - RNA, 22 nt, Human
aaugcaaaccaucauugaaauc

SEQ ID NO: 2973420 - RNA, 23 nt, Human
aaugcaaaccaucauugaaaucu

SEQ ID NO: 2973421 - RNA, 18 nt, Human
aaugcacaaacagaggcc

SEQ ID NO: 2973422 - RNA, 13 nt, Human
aaugaccuuucaa

SEQ ID NO: 2973423 - RNA, 14 nt, Human
aaugaccuuucaau

SEQ ID NO: 2973424 - RNA, 14 nt, Human
aaugcaaaccauca

SEQ ID NO: 2973425 - RNA, 16 nt, Human
aaugcaaaccaucauu

SEQ ID NO: 2973426 - RNA, 20 nt, Human
aaugaaugucagugugacug

SEQ ID NO: 2973427 - RNA, 21 nt, Human
aaugaaugucagugugacuga

SEQ ID NO: 2973428 - RNA, 20 nt, Human
uaauuugaagguagaauguu

SEQ ID NO: 2973429 - RNA, 17 nt, Human
uaauuuaccugaagucu

SEQ ID NO: 2973430 - RNA, 18 nt, Human
uaauuuaccugaagucuu

SEQ ID NO: 2973431 - RNA, 22 nt, Human
uaauuuccauuuacuuaagacu

SEQ ID NO: 2973432 - RNA, 17 nt, Human
uacaaaaacacagcaag

SEQ ID NO: 2973433 - RNA, 18 nt, Human
uacaaaaacacagcaagg

SEQ ID NO: 2973434 - RNA, 16 nt, Human
uacaaaaacauggccu

SEQ ID NO: 2973435 - RNA, 16 nt, Human
uacaaaaacacagcaa

SEQ ID NO: 2973436 - RNA, 20 nt, Human
uacaagcgugagccacugca

SEQ ID NO: 2973437 - RNA, 19 nt, Human
uacaagcgugagccacugc

SEQ ID NO: 2973438 - RNA, 18 nt, Human
uacaagcgugagccacug

SEQ ID NO: 2973439 - RNA, 16 nt, Human
uacaagcgugagccac

SEQ ID NO: 2973440 - RNA, 21 nt, Human
uacaagcgugagccacugcac

SEQ ID NO: 2973441 - RNA, 19 nt, Human
aaucuuuuaugauugccuu

SEQ ID NO: 2973442 - RNA, 23 nt, Human
aaucuucugaacuuggcgcugcc

SEQ ID NO: 2973443 - RNA, 15 nt, Human
aaugaaugucagugu

SEQ ID NO: 2973444 - RNA, 14 nt, Human
aaugaaugucagug

SEQ ID NO: 2973445 - RNA, 14 nt, Human
aaugaaugaaacau

SEQ ID NO: 2973446 - RNA, 15 nt, Human
aaugaaugaaugaau

SEQ ID NO: 2973447 - RNA, 23 nt, Human
uaaugugaaacuggauuaaacuu

SEQ ID NO: 2973448 - RNA, 22 nt, Human
uaaugugaaacuggauuaaacu

SEQ ID NO: 2973449 - RNA, 20 nt, Human
uaaugugaaacuggauuaaa

SEQ ID NO: 2973450 - RNA, 12 nt, Human
uaaugugaaacu

SEQ ID NO: 2973451 - RNA, 15 nt, Human
uaaugucacaggcag

SEQ ID NO: 2973452 - RNA, 17 nt, Human
uaaugucacaggcaggu

SEQ ID NO: 2973453 - RNA, 16 nt, Human
uaaugucacaggcagg

SEQ ID NO: 2973454 - RNA, 17 nt, Human
uaauguaagcucuacug

SEQ ID NO: 2973455 - RNA, 16 nt, Human
uaauguaagcucuacu

SEQ ID NO: 2973456 - RNA, 21 nt, Human
uaauacaccacuacauucugu

SEQ ID NO: 2973457 - RNA, 22 nt, Human
uaauacaccacuacauucuguu

SEQ ID NO: 2973458 - RNA, 23 nt, Human
uaauacaccacuacauucuguua

SEQ ID NO: 2973459 - RNA, 20 nt, Human
aauacaguaucucagggccu

SEQ ID NO: 2973460 - RNA, 21 nt, Human
uaauauugauaugcuuauaca

SEQ ID NO: 2973461 - RNA, 13 nt, Human
aacucuguaauuc

SEQ ID NO: 2973462 - RNA, 20 nt, Human
aacugaaaucauacuucuua

SEQ ID NO: 2973463 - RNA, 13 nt, Human
aacugaaaucaua

SEQ ID NO: 2973464 - RNA, 19 nt, Human
gugaguacuacaguccucc

SEQ ID NO: 2973465 - RNA, 17 nt, Human
gugaguccuggcauggg

SEQ ID NO: 2973466 - RNA, 20 nt, Human
gugaguccuggcaugggaau

SEQ ID NO: 2973467 - RNA, 16 nt, Human
gugagaggggaacaga

SEQ ID NO: 2973468 - RNA, 13 nt, Human
gugagagcugggu

SEQ ID NO: 2973469 - RNA, 15 nt, Human
gugagcaauccugca

SEQ ID NO: 2973470 - RNA, 21 nt, Human
gugagcacuaaggugugcucu

SEQ ID NO: 2973471 - RNA, 17 nt, Human
gugaguacuacaguccu

SEQ ID NO: 2973472 - RNA, 12 nt, Human
gugaccccaggu

SEQ ID NO: 2973473 - RNA, 12 nt, Human
gugagagcuggg

SEQ ID NO: 2973474 - RNA, 17 nt, Human
gugaccaaugaugguca

SEQ ID NO: 2973475 - RNA, 18 nt, Human
gugaccagcaccaucucu

SEQ ID NO: 2973476 - RNA, 21 nt, Human
gugaccagcaccaucucuccu

SEQ ID NO: 2973477 - RNA, 18 nt, Human
gugaccauguuuuguuua

SEQ ID NO: 2973478 - RNA, 14 nt, Human
gugacaugucuuuu

SEQ ID NO: 2973479 - RNA, 19 nt, Human
gugacagaggcagccccau

SEQ ID NO: 2973480 - RNA, 18 nt, Human
gugacagaggcagcccca

SEQ ID NO: 2973481 - RNA, 16 nt, Human
gugacagaggcagccc

SEQ ID NO: 2973482 - RNA, 20 nt, Human
aacuaucucauuuccaagca

SEQ ID NO: 2973483 - RNA, 13 nt, Human
aacuauauuguuu

SEQ ID NO: 2973484 - RNA, 23 nt, Human
gugaagacaaugacuuacuguac

SEQ ID NO: 2973485 - RNA, 14 nt, Human
gugaagugaagaca

SEQ ID NO: 2973486 - RNA, 18 nt, Human
aacuaacaggcuuaguga

SEQ ID NO: 2973487 - RNA, 22 nt, Human
aacuaacaggcuuagugaugua

SEQ ID NO: 2973488 - RNA, 23 nt, Human
aacguggcugcuucaaggauccu

SEQ ID NO: 2973489 - RNA, 15 nt, Human
gucuuuguacagaca

SEQ ID NO: 2973490 - RNA, 16 nt, Human
gucuuuguacagacaa

SEQ ID NO: 2973491 - RNA, 16 nt, Human
gucuucaguaagccgu

SEQ ID NO: 2973492 - RNA, 19 nt, Human
aaccugauugugucucuug

SEQ ID NO: 2973493 - RNA, 18 nt, Human
aaccugauugugucucuu

SEQ ID NO: 2973494 - RNA, 13 nt, Human
gucuucacaacag

SEQ ID NO: 2973495 - RNA, 23 nt, Human
gucugacaggcaaugcuggcugu

SEQ ID NO: 2973496 - RNA, 22 nt, Human
gucugacaggcaaugcuggcug

SEQ ID NO: 2973497 - RNA, 21 nt, Human
gucugacaggcaaugcuggcu

SEQ ID NO: 2973498 - RNA, 18 nt, Human
gucuggaaugcaguggua

SEQ ID NO: 2973499 - RNA, 13 nt, Human
gucucuugguccu

SEQ ID NO: 2973500 - RNA, 20 nt, Human
gucucuugguccugcugcag

SEQ ID NO: 2973501 - RNA, 18 nt, Human
gucucuugguccugcugc

SEQ ID NO: 2973502 - RNA, 19 nt, Human
gucucuugguccugcugca

SEQ ID NO: 2973503 - RNA, 17 nt, Human
gucucuugguccugcug

SEQ ID NO: 2973504 - RNA, 22 nt, Human
gucucuuuaaugucacaggcag

SEQ ID NO: 2973505 - RNA, 19 nt, Human
gucugaaggcuggguucug

SEQ ID NO: 2973506 - RNA, 14 nt, Human
gucugaaggcuggg

SEQ ID NO: 2973507 - RNA, 20 nt, Human
gucucuuuaaugucacaggc

SEQ ID NO: 2973508 - RNA, 19 nt, Human
gucucuuuaaugucacagg

SEQ ID NO: 2973509 - RNA, 18 nt, Human
gucucuuuaaugucacag

SEQ ID NO: 2973510 - RNA, 23 nt, Human
gucucaguccaugaagauguaga

SEQ ID NO: 2973511 - RNA, 14 nt, Human
gucuaugggacuca

SEQ ID NO: 2973512 - RNA, 22 nt, Human
gucucaaacucuugaccucagg

SEQ ID NO: 2973513 - RNA, 19 nt, Human
gucucaaaaaaagaaaaag

SEQ ID NO: 2973514 - RNA, 13 nt, Human
gucuccagcugcu

SEQ ID NO: 2973515 - RNA, 13 nt, Human
gucuccauguuug

SEQ ID NO: 2973516 - RNA, 14 nt, Human
gucuccagcugcug

SEQ ID NO: 2973517 - RNA, 13 nt, Human
aaccacaucuugc

SEQ ID NO: 2973518 - RNA, 23 nt, Human
aaccaucauugaaaucuuuuugc

SEQ ID NO: 2973519 - RNA, 14 nt, Human
gucgcccagucugg

SEQ ID NO: 2973520 - RNA, 13 nt, Human
gucgcccagucug

SEQ ID NO: 2973521 - RNA, 14 nt, Human
gucgaggacaggga

SEQ ID NO: 2973522 - RNA, 23 nt, Human
gucgcccagucuggaaugcagug

SEQ ID NO: 2973523 - RNA, 20 nt, Human
gucuaccugaggggccucuu

SEQ ID NO: 2973524 - RNA, 13 nt, Human
guccugcugcagu

SEQ ID NO: 2973525 - RNA, 16 nt, Human
guccugcugcaguugc

SEQ ID NO: 2973526 - RNA, 22 nt, Human
guagcucuaggagggcuggcaa

SEQ ID NO: 2973527 - RNA, 23 nt, Human
guccaugaagauguagaggagaa

SEQ ID NO: 2973528 - RNA, 18 nt, Human
gucccaccuuggcugcag

SEQ ID NO: 2973529 - RNA, 17 nt, Human
gucccaccuuggcugca

SEQ ID NO: 2973530 - RNA, 19 nt, Human
gucccaccuuggcugcagg

SEQ ID NO: 2973531 - RNA, 13 nt, Human
gucccuuuuccuu

SEQ ID NO: 2973532 - RNA, 21 nt, Human
guccgaaagggacuuggaagc

SEQ ID NO: 2973533 - RNA, 22 nt, Human
guccgaaagggacuuggaagcu

SEQ ID NO: 2973534 - RNA, 13 nt, Human
gucccccugacaa

SEQ ID NO: 2973535 - RNA, 15 nt, Human
guccccgcacugggc

SEQ ID NO: 2973536 - RNA, 16 nt, Human
guccccgcacugggcu

SEQ ID NO: 2973537 - RNA, 23 nt, Human
guccccuguuuguuucugaaagg

SEQ ID NO: 2973538 - RNA, 22 nt, Human
aacauguuuuucuucucccuca

SEQ ID NO: 2973539 - RNA, 14 nt, Human
aacauauccaaguu

SEQ ID NO: 2973540 - RNA, 16 nt, Human
aacauauauaacaaug

SEQ ID NO: 2973541 - RNA, 14 nt, Human
aacaucaacaucuu

SEQ ID NO: 2973542 - RNA, 20 nt, Human
aacauauccaaguuugaauu

SEQ ID NO: 2973543 - RNA, 19 nt, Human
aacauauccaaguuugaau

SEQ ID NO: 2973544 - RNA, 23 nt, Human
aacagugagagacuccauaguuu

SEQ ID NO: 2973545 - RNA, 18 nt, Human
aacauacucccaucugug

SEQ ID NO: 2973546 - RNA, 16 nt, Human
aacauacucccaucug

SEQ ID NO: 2973547 - RNA, 20 nt, Human
aacauacucccaucugugaa

SEQ ID NO: 2973548 - RNA, 19 nt, Human
aacagauuauuaccuuaca

SEQ ID NO: 2973549 - RNA, 20 nt, Human
aacagacuggaagcacagcu

SEQ ID NO: 2973550 - RNA, 13 nt, Human
guccuacccaccc

SEQ ID NO: 2973551 - RNA, 19 nt, Human
aacagucucaggaaaucaa

SEQ ID NO: 2973552 - RNA, 17 nt, Human
aacagucucaggaaauc

SEQ ID NO: 2973553 - RNA, 23 nt, Human
guguguggucaacauuucucaug

SEQ ID NO: 2973554 - RNA, 19 nt, Human
gugugguguuuccuggcac

SEQ ID NO: 2973555 - RNA, 16 nt, Human
aagcaaguauuagaau

SEQ ID NO: 2973556 - RNA, 20 nt, Human
gugucccaaaaagaaaggag

SEQ ID NO: 2973557 - RNA, 19 nt, Human
gugucuugcaauggcagcc

SEQ ID NO: 2973558 - RNA, 15 nt, Human
gugugguguuuccug

SEQ ID NO: 2973559 - RNA, 18 nt, Human
gugugagucaccaagccc

SEQ ID NO: 2973560 - RNA, 13 nt, Human
gugugagucacca

SEQ ID NO: 2973561 - RNA, 21 nt, Human
gugucuugcaauggcagccuu

SEQ ID NO: 2973562 - RNA, 22 nt, Human
aagauguagaggagaaacugga

SEQ ID NO: 2973563 - RNA, 13 nt, Human
aagcaaaauguga

SEQ ID NO: 2973564 - RNA, 19 nt, Human
aagauguagaggagaaacu

SEQ ID NO: 2973565 - RNA, 19 nt, Human
aagcaaaauuuuuucucua

SEQ ID NO: 2973566 - RNA, 16 nt, Human
aagaguaggaagacuu

SEQ ID NO: 2973567 - RNA, 18 nt, Human
aagaguaggaagacuuug

SEQ ID NO: 2973568 - RNA, 19 nt, Human
aagaguaggaagacuuugg

SEQ ID NO: 2973569 - RNA, 15 nt, Human
aagauauuuugcuuu

SEQ ID NO: 2973570 - RNA, 18 nt, Human
gugguuauggagagggug

SEQ ID NO: 2973571 - RNA, 19 nt, Human
gugguguuuccuggcacug

SEQ ID NO: 2973572 - RNA, 17 nt, Human
gugguuauaacuuaaug

SEQ ID NO: 2973573 - RNA, 20 nt, Human
gugguuauaacuuaaugaaa

SEQ ID NO: 2973574 - RNA, 14 nt, Human
aagaguaggaagac

SEQ ID NO: 2973575 - RNA, 20 nt, Human
aagauauuuugcuuugugau

SEQ ID NO: 2973576 - RNA, 17 nt, Human
aagauauuuugcuuugu

SEQ ID NO: 2973577 - RNA, 22 nt, Human
aagauauuuugcuuugugauuu

SEQ ID NO: 2973578 - RNA, 23 nt, Human
aagacgcugugcugcccugccca

SEQ ID NO: 2973579 - RNA, 20 nt, Human
aagacgcugugcugcccugc

SEQ ID NO: 2973580 - RNA, 13 nt, Human
aagacuauucaaa

SEQ ID NO: 2973581 - RNA, 14 nt, Human
aagacuauucaaac

SEQ ID NO: 2973582 - RNA, 21 nt, Human
aagacgcugugcugcccugcc

SEQ ID NO: 2973583 - RNA, 22 nt, Human
aagacgcugugcugcccugccc

SEQ ID NO: 2973584 - RNA, 16 nt, Human
aagacuccaaagaaau

SEQ ID NO: 2973585 - RNA, 17 nt, Human
aagacuccaaagaaaug

SEQ ID NO: 2973586 - RNA, 14 nt, Human
aagacuccaaagaa

SEQ ID NO: 2973587 - RNA, 17 nt, Human
aagacucauucuucugu

SEQ ID NO: 2973588 - RNA, 22 nt, Human
aagacucccaugagggagaugc

SEQ ID NO: 2973589 - RNA, 17 nt, Human
aagacugcauuauauuu

SEQ ID NO: 2973590 - RNA, 18 nt, Human
aagagcuguucacagcca

SEQ ID NO: 2973591 - RNA, 16 nt, Human
aagagauugugguuuc

SEQ ID NO: 2973592 - RNA, 19 nt, Human
aagagauugugguuucauu

SEQ ID NO: 2973593 - RNA, 12 nt, Human
aagagcccaggc

SEQ ID NO: 2973594 - RNA, 14 nt, Human
aagagcccaggccu

SEQ ID NO: 2973595 - RNA, 16 nt, Human
aagagcccaggccucc

SEQ ID NO: 2973596 - RNA, 15 nt, Human
guggccucccaacuc

SEQ ID NO: 2973597 - RNA, 13 nt, Human
guggccucccaac

SEQ ID NO: 2973598 - RNA, 14 nt, Human
guggccucccaacu

SEQ ID NO: 2973599 - RNA, 15 nt, Human
gugggauccuccagg

SEQ ID NO: 2973600 - RNA, 18 nt, Human
gugggauccuccaggugc

SEQ ID NO: 2973601 - RNA, 12 nt, Human
gugggagcugag

SEQ ID NO: 2973602 - RNA, 14 nt, Human
guggguagacacac

SEQ ID NO: 2973603 - RNA, 15 nt, Human
gugguguuuccuggc

SEQ ID NO: 2973604 - RNA, 16 nt, Human
gugguguuuccuggca

SEQ ID NO: 2973605 - RNA, 20 nt, Human
guggugguuuucuguucuuu

SEQ ID NO: 2973606 - RNA, 14 nt, Human
gugguggcaggcac

SEQ ID NO: 2973607 - RNA, 23 nt, Human
gugguggcaggcaccuguagucc

SEQ ID NO: 2973608 - RNA, 13 nt, Human
aagaauauuuuaa

SEQ ID NO: 2973609 - RNA, 17 nt, Human
guggcagcugcggucca

SEQ ID NO: 2973610 - RNA, 13 nt, Human
aagacccaaaagg

SEQ ID NO: 2973611 - RNA, 24 nt, Human
aagaauuucuaggacugaauuaug

SEQ ID NO: 2973612 - RNA, 22 nt, Human
guggcagcucaccucucccuug

SEQ ID NO: 2973613 - RNA, 14 nt, Human
guggcagcugcggu

SEQ ID NO: 2973614 - RNA, 13 nt, Human
guggcaccagcag

SEQ ID NO: 2973615 - RNA, 14 nt, Human
guggcaccagcagc

SEQ ID NO: 2973616 - RNA, 23 nt, Human
guggauuuaacagaaauguacag

SEQ ID NO: 2973617 - RNA, 20 nt, Human
guggauuuaacagaaaugua

SEQ ID NO: 2973618 - RNA, 21 nt, Human
guggauuuaacagaaauguac

SEQ ID NO: 2973619 - RNA, 21 nt, Human
gugcugcccugcccaccuggc

SEQ ID NO: 2973620 - RNA, 19 nt, Human
gugcugcccugcccaccug

SEQ ID NO: 2973621 - RNA, 20 nt, Human
gugcugcccugcccaccugg

SEQ ID NO: 2973622 - RNA, 18 nt, Human
gugcugcccugcccaccu

SEQ ID NO: 2973623 - RNA, 24 nt, Human
guggacacagcucuucuccaggcu

SEQ ID NO: 2973624 - RNA, 15 nt, Human
guggacacagcucuu

SEQ ID NO: 2973625 - RNA, 14 nt, Human
guggacacagcucu

SEQ ID NO: 2973626 - RNA, 13 nt, Human
aagaaaauaucac

SEQ ID NO: 2973627 - RNA, 16 nt, Human
aagaagcccaggaaag

SEQ ID NO: 2973628 - RNA, 17 nt, Human
aagaagcccaggaaagg

SEQ ID NO: 2973629 - RNA, 22 nt, Human
aagaagcaccaaucaugaauua

SEQ ID NO: 2973630 - RNA, 14 nt, Human
aagaagcucucucc

SEQ ID NO: 2973631 - RNA, 15 nt, Human
aagaagcucucuccu

SEQ ID NO: 2973632 - RNA, 20 nt, Human
aagaaaaaggaugcacagag

SEQ ID NO: 2973633 - RNA, 19 nt, Human
aagaaaaaggaugcacaga

SEQ ID NO: 2973634 - RNA, 22 nt, Human
aagaaaaaggaugcacagaguu

SEQ ID NO: 2973635 - RNA, 18 nt, Human
aagaaaaguuuauaaaag

SEQ ID NO: 2973636 - RNA, 23 nt, Human
aacuugguucccauuugcuccuu

SEQ ID NO: 2973637 - RNA, 22 nt, Human
aacuugucuuuggacccugagg

SEQ ID NO: 2973638 - RNA, 14 nt, Human
aacuuggcgcugcc

SEQ ID NO: 2973639 - RNA, 21 nt, Human
gugccuggguggaugggccac

SEQ ID NO: 2973640 - RNA, 15 nt, Human
gugccucugggacug

SEQ ID NO: 2973641 - RNA, 14 nt, Human
gugccucugggacu

SEQ ID NO: 2973642 - RNA, 22 nt, Human
gugcauuugaggucuguucuuu

SEQ ID NO: 2973643 - RNA, 21 nt, Human
gugcauuugaggucuguucuu

SEQ ID NO: 2973644 - RNA, 20 nt, Human
gugcauuugaggucuguucu

SEQ ID NO: 2973645 - RNA, 20 nt, Human
gugcacuaauguguaagaca

SEQ ID NO: 2973646 - RNA, 15 nt, Human
gugcauuuggugguu

SEQ ID NO: 2973647 - RNA, 14 nt, Human
gugccaagcagagg

SEQ ID NO: 2973648 - RNA, 17 nt, Human
gugcacacaccagagcc

SEQ ID NO: 2973649 - RNA, 23 nt, Human
gugcacaagcuccaagcucccag

SEQ ID NO: 2973650 - RNA, 18 nt, Human
gugcacguacacacacau

SEQ ID NO: 2973651 - RNA, 14 nt, Human
gugcacacaccaga

SEQ ID NO: 2973652 - RNA, 12 nt, Human
gugcacacacca

SEQ ID NO: 2973653 - RNA, 12 nt, Human
guuuggccagaa

SEQ ID NO: 2973654 - RNA, 18 nt, Human
guuuggccagaagucaag

SEQ ID NO: 2973655 - RNA, 23 nt, Human
guuuggccagaagucaaggcuua

SEQ ID NO: 2973656 - RNA, 11 nt, Human
guuuggccaga

SEQ ID NO: 2973657 - RNA, 16 nt, Human
guuuuaagaggcaggg

SEQ ID NO: 2973658 - RNA, 14 nt, Human
guuuuaagaggcag

SEQ ID NO: 2973659 - RNA, 15 nt, Human
guuuucugagaaaga

SEQ ID NO: 2973660 - RNA, 22 nt, Human
guuuuauaauuuugugaagcaa

SEQ ID NO: 2973661 - RNA, 15 nt, Human
guuuuauaauuuugu

SEQ ID NO: 2973662 - RNA, 16 nt, Human
guuuuacugcagcuuu

SEQ ID NO: 2973663 - RNA, 18 nt, Human
guuuuacugcagcuuugu

SEQ ID NO: 2973664 - RNA, 15 nt, Human
guuuuacugcagcuu

SEQ ID NO: 2973665 - RNA, 13 nt, Human
guuugcuaaguga

SEQ ID NO: 2973666 - RNA, 17 nt, Human
guuugccucugccucug

SEQ ID NO: 2973667 - RNA, 18 nt, Human
guuucugccgcagcccug

SEQ ID NO: 2973668 - RNA, 22 nt, Human
guuucugccgcagcccugcaga

SEQ ID NO: 2973669 - RNA, 16 nt, Human
aagggcccuuuuucaa

SEQ ID NO: 2973670 - RNA, 22 nt, Human
aagggcccuuuuucaauaacug

SEQ ID NO: 2973671 - RNA, 16 nt, Human
aaggguaucuggugac

SEQ ID NO: 2973672 - RNA, 19 nt, Human
aaggguaucaggugcugcc

SEQ ID NO: 2973673 - RNA, 14 nt, Human
aaggggcaguggug

SEQ ID NO: 2973674 - RNA, 17 nt, Human
aaggguaucaggugcug

SEQ ID NO: 2973675 - RNA, 13 nt, Human
aagggcccagaga

SEQ ID NO: 2973676 - RNA, 15 nt, Human
aagggcccagagagg

SEQ ID NO: 2973677 - RNA, 21 nt, Human
guuucuagcaugaagacagag

SEQ ID NO: 2973678 - RNA, 17 nt, Human
aaguaaaaccacagcag

SEQ ID NO: 2973679 - RNA, 18 nt, Human
aaguaaaaccacagcagu

SEQ ID NO: 2973680 - RNA, 21 nt, Human
aagggugaugggaaagcauug

SEQ ID NO: 2973681 - RNA, 15 nt, Human
aaguaaaaccacagc

SEQ ID NO: 2973682 - RNA, 16 nt, Human
aaguaaaaccacagca

SEQ ID NO: 2973683 - RNA, 14 nt, Human
aaguaaaaccacag

SEQ ID NO: 2973684 - RNA, 13 nt, Human
aagucaaggcuua

SEQ ID NO: 2973685 - RNA, 22 nt, Human
aagucaaggcuuagacccucau

SEQ ID NO: 2973686 - RNA, 21 nt, Human
aagucaagugaaaaaggagga

SEQ ID NO: 2973687 - RNA, 24 nt, Human
aagucacacaguauuacuucugcu

SEQ ID NO: 2973688 - RNA, 19 nt, Human
aaguauucuuauuuaauga

SEQ ID NO: 2973689 - RNA, 18 nt, Human
aaguauucuuauuuaaug

SEQ ID NO: 2973690 - RNA, 13 nt, Human
aagucacacagug

SEQ ID NO: 2973691 - RNA, 20 nt, Human
aagucacauuccugaacagg

SEQ ID NO: 2973692 - RNA, 21 nt, Human
aaguauguuagugcaaauugu

SEQ ID NO: 2973693 - RNA, 23 nt, Human
aaguauguuagugcaaauuguca

SEQ ID NO: 2973694 - RNA, 23 nt, Human
aaguacuucuccacccugcucuc

SEQ ID NO: 2973695 - RNA, 22 nt, Human
aaguacuucuccacccugcucu

SEQ ID NO: 2973696 - RNA, 20 nt, Human
aaguacuucuccacccugcu

SEQ ID NO: 2973697 - RNA, 16 nt, Human
guuuucugagaaagac

SEQ ID NO: 2973698 - RNA, 17 nt, Human
guuuucugagaaagacu

SEQ ID NO: 2973699 - RNA, 15 nt, Human
aaguacuauguauca

SEQ ID NO: 2973700 - RNA, 22 nt, Human
guuuucugagaaagacuauuca

SEQ ID NO: 2973701 - RNA, 16 nt, Human
aaguacuauguaucaa

SEQ ID NO: 2973702 - RNA, 15 nt, Human
aaguacuggagaaaa

SEQ ID NO: 2973703 - RNA, 21 nt, Human
aaguacuucuccacccugcuc

SEQ ID NO: 2973704 - RNA, 23 nt, Human
guuuuuuaagggcccuuuuucaa

SEQ ID NO: 2973705 - RNA, 23 nt, Human
guuuuuuuuuaaaaaagaaacau

SEQ ID NO: 2973706 - RNA, 16 nt, Human
guuuuugucuuaaaaa

SEQ ID NO: 2973707 - RNA, 17 nt, Human
aagucuuagauguauau

SEQ ID NO: 2973708 - RNA, 19 nt, Human
aagucuuagauguauauau

SEQ ID NO: 2973709 - RNA, 18 nt, Human
aagucuuagauguauaua

SEQ ID NO: 2973710 - RNA, 18 nt, Human
guuuuucuaggccugggg

SEQ ID NO: 2973711 - RNA, 23 nt, Human
guugcuaacagcaacacaaagcu

SEQ ID NO: 2973712 - RNA, 16 nt, Human
guugcccaggcuggcg

SEQ ID NO: 2973713 - RNA, 15 nt, Human
guugcccaggcuggc

SEQ ID NO: 2973714 - RNA, 23 nt, Human
guuggcugggggccucagugcca

SEQ ID NO: 2973715 - RNA, 17 nt, Human
guugggcuggugucacc

SEQ ID NO: 2973716 - RNA, 15 nt, Human
guugggcugguguca

SEQ ID NO: 2973717 - RNA, 19 nt, Human
aaggaugcccaaagaugca

SEQ ID NO: 2973718 - RNA, 14 nt, Human
aaggaugcccaaag

SEQ ID NO: 2973719 - RNA, 22 nt, Human
aaggaugcacagaguuguuaca

SEQ ID NO: 2973720 - RNA, 24 nt, Human
aaggaugcacagaguuguuacauu

SEQ ID NO: 2973721 - RNA, 14 nt, Human
aaggccccgcccag

SEQ ID NO: 2973722 - RNA, 16 nt, Human
aaggccccgcccaggc

SEQ ID NO: 2973723 - RNA, 19 nt, Human
aaggccccgcccaggcuua

SEQ ID NO: 2973724 - RNA, 15 nt, Human
aaggcuaccuuugua

SEQ ID NO: 2973725 - RNA, 14 nt, Human
guugcccaggcugg

SEQ ID NO: 2973726 - RNA, 13 nt, Human
aaggcuaccuuug

SEQ ID NO: 2973727 - RNA, 20 nt, Human
aaggccugucagcuaaagaa

SEQ ID NO: 2973728 - RNA, 20 nt, Human
aaggaggaagagaaaaaaua

SEQ ID NO: 2973729 - RNA, 20 nt, Human
aaggauccugagccagauuu

SEQ ID NO: 2973730 - RNA, 22 nt, Human
aaggauccugagccagauuuca

SEQ ID NO: 2973731 - RNA, 11 nt, Human
aaggauccuga

SEQ ID NO: 2973732 - RNA, 12 nt, Human
aaggauccugag

SEQ ID NO: 2973733 - RNA, 17 nt, Human
aaggagauuuacaacug

SEQ ID NO: 2973734 - RNA, 18 nt, Human
aaggagauuuacaacugg

SEQ ID NO: 2973735 - RNA, 15 nt, Human
aaggaaacccagcuc

SEQ ID NO: 2973736 - RNA, 18 nt, Human
guucuccagucauuaugu

SEQ ID NO: 2973737 - RNA, 20 nt, Human
guucuccagucauuauguua

SEQ ID NO: 2973738 - RNA, 14 nt, Human
guucucugaggaca

SEQ ID NO: 2973739 - RNA, 11 nt, Human
guucucugccc

SEQ ID NO: 2973740 - RNA, 16 nt, Human
guucucugaggacacu

SEQ ID NO: 2973741 - RNA, 12 nt, Human
guucucugcccu

SEQ ID NO: 2973742 - RNA, 13 nt, Human
guugaauuuuaca

SEQ ID NO: 2973743 - RNA, 23 nt, Human
guugauagcacagacccugcccu

SEQ ID NO: 2973744 - RNA, 22 nt, Human
guugauagcacagacccugccc

SEQ ID NO: 2973745 - RNA, 16 nt, Human
aaggaaaaaauaacaa

SEQ ID NO: 2973746 - RNA, 18 nt, Human
aagcuguuacugucuuca

SEQ ID NO: 2973747 - RNA, 13 nt, Human
aagcucugcuccu

SEQ ID NO: 2973748 - RNA, 12 nt, Human
aagcucccaggc

SEQ ID NO: 2973749 - RNA, 22 nt, Human
aagcucccaggcauuccccagg

SEQ ID NO: 2973750 - RNA, 23 nt, Human
aagcucccaggcauuccccagga

SEQ ID NO: 2973751 - RNA, 21 nt, Human
aagcucuacugaggugcuaug

SEQ ID NO: 2973752 - RNA, 11 nt, Human
aagcucccagg

SEQ ID NO: 2973753 - RNA, 13 nt, Human
guguuuauuguca

SEQ ID NO: 2973754 - RNA, 20 nt, Human
uaaacucugagugcaaacuu

SEQ ID NO: 2973755 - RNA, 12 nt, Human
uaaacucauuuc

SEQ ID NO: 2973756 - RNA, 17 nt, Human
uaaacucauuucuagca

SEQ ID NO: 2973757 - RNA, 22 nt, Human
uaaacuacauuagguugugaau

SEQ ID NO: 2973758 - RNA, 17 nt, Human
uaaacgucuuaaauauu

SEQ ID NO: 2973759 - RNA, 13 nt, Human
uaaacgucuuaaa

SEQ ID NO: 2973760 - RNA, 16 nt, Human
uaaaccgccaaggcug

SEQ ID NO: 2973761 - RNA, 18 nt, Human
uaaaccgccaaggcuggg

SEQ ID NO: 2973762 - RNA, 21 nt, Human
uaaaggcuaccuuuguauucu

SEQ ID NO: 2973763 - RNA, 19 nt, Human
uaaaggcuaccuuuguauu

SEQ ID NO: 2973764 - RNA, 18 nt, Human
uaaagaaguuugaacauu

SEQ ID NO: 2973765 - RNA, 14 nt, Human
uaaagaaguuugaa

SEQ ID NO: 2973766 - RNA, 13 nt, Human
uaaagaaguuuga

SEQ ID NO: 2973767 - RNA, 13 nt, Human
aaguuuugagaaa

SEQ ID NO: 2973768 - RNA, 19 nt, Human
uaaaccaaggcuagaacca

SEQ ID NO: 2973769 - RNA, 17 nt, Human
uaaacaaaauagaaagu

SEQ ID NO: 2973770 - RNA, 16 nt, Human
uaaacaaaauagaaag

SEQ ID NO: 2973771 - RNA, 15 nt, Human
uaaacaaaauagaaa

SEQ ID NO: 2973772 - RNA, 22 nt, Human
uaaacaaaauagaaaguugcaa

SEQ ID NO: 2973773 - RNA, 18 nt, Human
uaaacaaaauagaaaguu

SEQ ID NO: 2973774 - RNA, 16 nt, Human
uaaaauuauggaaaca

SEQ ID NO: 2973775 - RNA, 19 nt, Human
uaaaauuauggaaacagau

SEQ ID NO: 2973776 - RNA, 22 nt, Human
aaguucuaguguuuucaauuuu

SEQ ID NO: 2973777 - RNA, 21 nt, Human
aaguucuaguguuuucaauuu

SEQ ID NO: 2973778 - RNA, 14 nt, Human
aaguucuaguguuu

SEQ ID NO: 2973779 - RNA, 14 nt, Human
aaguuaaauaaauc

SEQ ID NO: 2973780 - RNA, 12 nt, Human
aaguuaaauaaa

SEQ ID NO: 2973781 - RNA, 16 nt, Human
uaaaugacucuucccu

SEQ ID NO: 2973782 - RNA, 21 nt, Human
uaaaucuccaaaauaaaacuu

SEQ ID NO: 2973783 - RNA, 20 nt, Human
uaaaucuccaaaauaaaacu

SEQ ID NO: 2973784 - RNA, 17 nt, Human
uaaaugauuucauucaa

SEQ ID NO: 2973785 - RNA, 15 nt, Human
uaaauguugacaugg

SEQ ID NO: 2973786 - RNA, 22 nt, Human
uaaauuaacuuuuauaaacuuu

SEQ ID NO: 2973787 - RNA, 17 nt, Human
uaacaaugcuguauuuu

SEQ ID NO: 2973788 - RNA, 15 nt, Human
uaacaaugcuguauu

SEQ ID NO: 2973789 - RNA, 13 nt, Human
uaacaaugcugua

SEQ ID NO: 2973790 - RNA, 13 nt, Human
uaacaagccaccc

SEQ ID NO: 2973791 - RNA, 15 nt, Human
aauacaccacuacau

SEQ ID NO: 2973792 - RNA, 14 nt, Human
aauacacacucaaa

SEQ ID NO: 2973793 - RNA, 20 nt, Human
aauacaccacuacauucugu

SEQ ID NO: 2973794 - RNA, 18 nt, Human
aauacaccacuacauucu

SEQ ID NO: 2973795 - RNA, 16 nt, Human
aauacaccacuacauu

SEQ ID NO: 2973796 - RNA, 19 nt, Human
uaaaucuccaaaauaaaac

SEQ ID NO: 2973797 - RNA, 12 nt, Human
uaaauagcuuuu

SEQ ID NO: 2973798 - RNA, 12 nt, Human
aauaaaaauaau

SEQ ID NO: 2973799 - RNA, 22 nt, Human
aauaaaauccauacauuugugu

SEQ ID NO: 2973800 - RNA, 14 nt, Human
aauaaaguaauuau

SEQ ID NO: 2973801 - RNA, 19 nt, Human
uaaaguguauuuuuuuacu

SEQ ID NO: 2973802 - RNA, 15 nt, Human
uaaaguguauuuuuu

SEQ ID NO: 2973803 - RNA, 14 nt, Human
uaaaguguauuuuu

SEQ ID NO: 2973804 - RNA, 13 nt, Human
uaaagucaggggu

SEQ ID NO: 2973805 - RNA, 19 nt, Human
aauaacauguaauuaagua

SEQ ID NO: 2973806 - RNA, 15 nt, Human
aauaacgauaaaaga

SEQ ID NO: 2973807 - RNA, 12 nt, Human
aauaacauguaa

SEQ ID NO: 2973808 - RNA, 22 nt, Human
aauaacagaagaaaauagaauu

SEQ ID NO: 2973809 - RNA, 15 nt, Human
aauaacaauaaaaga

SEQ ID NO: 2973810 - RNA, 12 nt, Human
aauaaaugugcc

SEQ ID NO: 2973811 - RNA, 21 nt, Human
aauaaaugugccuucauuuuu

SEQ ID NO: 2973812 - RNA, 12 nt, Human
aauaaauuauuu

SEQ ID NO: 2973813 - RNA, 19 nt, Human
aauaauguuucaaacauau

SEQ ID NO: 2973814 - RNA, 15 nt, Human
aauaagucugauuua

SEQ ID NO: 2973815 - RNA, 12 nt, Human
aauaagucugau

SEQ ID NO: 2973816 - RNA, 15 nt, Human
aauaacuaaaaggua

SEQ ID NO: 2973817 - RNA, 14 nt, Human
augcugccaauauc

SEQ ID NO: 2973818 - RNA, 17 nt, Human
augcugccaauauccua

SEQ ID NO: 2973819 - RNA, 18 nt, Human
augcugccaauauccuaa

SEQ ID NO: 2973820 - RNA, 19 nt, Human
augcugccaauauccuaau

SEQ ID NO: 2973821 - RNA, 13 nt, Human
augcugccaauau

SEQ ID NO: 2973822 - RNA, 20 nt, Human
augcugccaauauccuaaua

SEQ ID NO: 2973823 - RNA, 21 nt, Human
augcugccaauauccuaauaa

SEQ ID NO: 2973824 - RNA, 22 nt, Human
augcugccaauauccuaauaaa

SEQ ID NO: 2973825 - RNA, 23 nt, Human
augcugccaauauccuaauaaaa

SEQ ID NO: 2973826 - RNA, 11 nt, Human
augcugcccug

SEQ ID NO: 2973827 - RNA, 16 nt, Human
augcucuuuacuucau

SEQ ID NO: 2973828 - RNA, 15 nt, Human
auggauuuccagcca

SEQ ID NO: 2973829 - RNA, 21 nt, Human
auggaggacuccaggcagcag

SEQ ID NO: 2973830 - RNA, 19 nt, Human
auggaggacuccaggcagc

SEQ ID NO: 2973831 - RNA, 18 nt, Human
auggaggacuccaggcag

SEQ ID NO: 2973832 - RNA, 17 nt, Human
auggaggacuccaggca

SEQ ID NO: 2973833 - RNA, 12 nt, Human
augcuuguacau

SEQ ID NO: 2973834 - RNA, 14 nt, Human
augcuuguacauaa

SEQ ID NO: 2973835 - RNA, 13 nt, Human
augcuuguacaua

SEQ ID NO: 2973836 - RNA, 18 nt, Human
augcacagaguuguuaca

SEQ ID NO: 2973837 - RNA, 17 nt, Human
augcacagaguuguuac

SEQ ID NO: 2973838 - RNA, 16 nt, Human
augcacaaacagaggc

SEQ ID NO: 2973839 - RNA, 17 nt, Human
augcacaaacagaggcc

SEQ ID NO: 2973840 - RNA, 16 nt, Human
augcacagaguuguua

SEQ ID NO: 2973841 - RNA, 23 nt, Human
augcacacauuuuuuaaaugcac

SEQ ID NO: 2973842 - RNA, 17 nt, Human
augccucucucaggcca

SEQ ID NO: 2973843 - RNA, 16 nt, Human
augcaugaaguaauau

SEQ ID NO: 2973844 - RNA, 19 nt, Human
augccucucucaggccaaa

SEQ ID NO: 2973845 - RNA, 16 nt, Human
augaugccaugaggaa

SEQ ID NO: 2973846 - RNA, 17 nt, Human
augaugccaugaggaac

SEQ ID NO: 2973847 - RNA, 24 nt, Human
augauguuuuccaugaguccccug

SEQ ID NO: 2973848 - RNA, 15 nt, Human
augcacaaacagagg

SEQ ID NO: 2973849 - RNA, 20 nt, Human
auguucuccagucauuaugu

SEQ ID NO: 2973850 - RNA, 12 nt, Human
auguucugggac

SEQ ID NO: 2973851 - RNA, 11 nt, Human
auguucuggga

SEQ ID NO: 2973852 - RNA, 17 nt, Human
auguucuaagaagugaa

SEQ ID NO: 2973853 - RNA, 18 nt, Human
augugggcagugauguca

SEQ ID NO: 2973854 - RNA, 12 nt, Human
auguuuucaaau

SEQ ID NO: 2973855 - RNA, 15 nt, Human
auguuuucaaauguu

SEQ ID NO: 2973856 - RNA, 17 nt, Human
auguuuuauauagcaag

SEQ ID NO: 2973857 - RNA, 18 nt, Human
auguuuucaaauguucuc

SEQ ID NO: 2973858 - RNA, 21 nt, Human
auguuucaaacauauauaaca

SEQ ID NO: 2973859 - RNA, 16 nt, Human
auguuucacacaaaca

SEQ ID NO: 2973860 - RNA, 17 nt, Human
auguuucacacaaacaa

SEQ ID NO: 2973861 - RNA, 13 nt, Human
auguucugggaca

SEQ ID NO: 2973862 - RNA, 18 nt, Human
auguuugccucugccucu

SEQ ID NO: 2973863 - RNA, 22 nt, Human
auguuugccucugccucugaca

SEQ ID NO: 2973864 - RNA, 19 nt, Human
auguuugccucugccucug

SEQ ID NO: 2973865 - RNA, 17 nt, Human
auguaauuaaguacuau

SEQ ID NO: 2973866 - RNA, 15 nt, Human
auguaauuaaguacu

SEQ ID NO: 2973867 - RNA, 19 nt, Human
auguaagggaaacugccag

SEQ ID NO: 2973868 - RNA, 14 nt, Human
auguaagggaaacu

SEQ ID NO: 2973869 - RNA, 16 nt, Human
auguaagggaaacugc

SEQ ID NO: 2973870 - RNA, 17 nt, Human
auguauuuuugucaauu

SEQ ID NO: 2973871 - RNA, 19 nt, Human
auggucaccaaaucagcug

SEQ ID NO: 2973872 - RNA, 22 nt, Human
augugaaacuggauuaaacuua

SEQ ID NO: 2973873 - RNA, 21 nt, Human
augugaacaguuguguuugaa

SEQ ID NO: 2973874 - RNA, 11 nt, Human
augugaacagu

SEQ ID NO: 2973875 - RNA, 23 nt, Human
augugaacaguuguguuugaagc

SEQ ID NO: 2973876 - RNA, 14 nt, Human
augucuuuucuugc

SEQ ID NO: 2973877 - RNA, 21 nt, Human
aucuauauuuuacauaaauuu

SEQ ID NO: 2973878 - RNA, 17 nt, Human
aucuauauuuuacauaa

SEQ ID NO: 2973879 - RNA, 14 nt, Human
aucuauauuuuaca

SEQ ID NO: 2973880 - RNA, 21 nt, Human
aucucccccagccccauccuc

SEQ ID NO: 2973881 - RNA, 22 nt, Human
aucugcuuuuuaaagaaugcuc

SEQ ID NO: 2973882 - RNA, 22 nt, Human
aucuucugaacuuggcgcugcc

SEQ ID NO: 2973883 - RNA, 18 nt, Human
aucuugaagacuuuucuu

SEQ ID NO: 2973884 - RNA, 14 nt, Human
aucuucuuuauaau

SEQ ID NO: 2973885 - RNA, 17 nt, Human
aucuugaauuguaagga

SEQ ID NO: 2973886 - RNA, 19 nt, Human
augaaagacuguacaaagu

SEQ ID NO: 2973887 - RNA, 17 nt, Human
augaaagacuguacaaa

SEQ ID NO: 2973888 - RNA, 16 nt, Human
augaaagacuguacaa

SEQ ID NO: 2973889 - RNA, 13 nt, Human
augaaagacugua

SEQ ID NO: 2973890 - RNA, 21 nt, Human
augaccuuucaauaggaaaaa

SEQ ID NO: 2973891 - RNA, 18 nt, Human
augaccuuucaauaggaa

SEQ ID NO: 2973892 - RNA, 22 nt, Human
augaccuuucaauaggaaaaac

SEQ ID NO: 2973893 - RNA, 23 nt, Human
augaccuuucaauaggaaaaacu

SEQ ID NO: 2973894 - RNA, 11 nt, Human
auccuccaggu

SEQ ID NO: 2973895 - RNA, 23 nt, Human
auccucauacccacccccaccca

SEQ ID NO: 2973896 - RNA, 23 nt, Human
auccuccaggugcacaagcucca

SEQ ID NO: 2973897 - RNA, 15 nt, Human
auccucccaccucag

SEQ ID NO: 2973898 - RNA, 15 nt, Human
auccccuguagagug

SEQ ID NO: 2973899 - RNA, 15 nt, Human
auccagacccggcug

SEQ ID NO: 2973900 - RNA, 14 nt, Human
aucccauuuaaaaa

SEQ ID NO: 2973901 - RNA, 15 nt, Human
aucccauuuaaaaaa

SEQ ID NO: 2973902 - RNA, 19 nt, Human
auccucccaccucagccuc

SEQ ID NO: 2973903 - RNA, 18 nt, Human
auccucccaccucagccu

SEQ ID NO: 2973904 - RNA, 20 nt, Human
auccucccaccucagccucc

SEQ ID NO: 2973905 - RNA, 15 nt, Human
auauuuauuuuaaua

SEQ ID NO: 2973906 - RNA, 14 nt, Human
auauuuauuuuaau

SEQ ID NO: 2973907 - RNA, 17 nt, Human
auauuuauuuuaauaau

SEQ ID NO: 2973908 - RNA, 19 nt, Human
aucaccaacgucugugcca

SEQ ID NO: 2973909 - RNA, 23 nt, Human
aucacccgcuaagagggagggag

SEQ ID NO: 2973910 - RNA, 18 nt, Human
aucaccaacgucugugcc

SEQ ID NO: 2973911 - RNA, 21 nt, Human
aucacagccucugaaaaccaa

SEQ ID NO: 2973912 - RNA, 19 nt, Human
aucagccugcuccagcugu

SEQ ID NO: 2973913 - RNA, 17 nt, Human
aucagccugcuccagcu

SEQ ID NO: 2973914 - RNA, 18 nt, Human
aucagccugcuccagcug

SEQ ID NO: 2973915 - RNA, 21 nt, Human
aucagcugcugaaacaacaaa

SEQ ID NO: 2973916 - RNA, 19 nt, Human
aucaccgaaaacguggcug

SEQ ID NO: 2973917 - RNA, 21 nt, Human
aucaccgaaaacguggcugcu

SEQ ID NO: 2973918 - RNA, 14 nt, Human
aucaccgaaaacgu

SEQ ID NO: 2973919 - RNA, 20 nt, Human
aucagcacgauuucuguuua

SEQ ID NO: 2973920 - RNA, 19 nt, Human
aucagcacgauuucuguuu

SEQ ID NO: 2973921 - RNA, 23 nt, Human
aucagcacgauuucuguuuagau

SEQ ID NO: 2973922 - RNA, 22 nt, Human
aucagcugcugaaacaacaaau

SEQ ID NO: 2973923 - RNA, 23 nt, Human
aucagcugcugaaacaacaaaua

SEQ ID NO: 2973924 - RNA, 20 nt, Human
auaacaaaggauacuuauuu

SEQ ID NO: 2973925 - RNA, 21 nt, Human
auaacaaaggauacuuauuua

SEQ ID NO: 2973926 - RNA, 18 nt, Human
auaaaggauuaaugucaa

SEQ ID NO: 2973927 - RNA, 20 nt, Human
auaaagcagcguuucuauga

SEQ ID NO: 2973928 - RNA, 19 nt, Human
auaaagcagcguuucuaug

SEQ ID NO: 2973929 - RNA, 18 nt, Human
auaaagcagcguuucuau

SEQ ID NO: 2973930 - RNA, 14 nt, Human
auaaagcagcguuu

SEQ ID NO: 2973931 - RNA, 13 nt, Human
auaaagcagcguu

SEQ ID NO: 2973932 - RNA, 11 nt, Human
auaaaacuuuu

SEQ ID NO: 2973933 - RNA, 15 nt, Human
auaaaacuuuuuaaa

SEQ ID NO: 2973934 - RNA, 24 nt, Human
auaaacuuuaccuuuuuuauacau

SEQ ID NO: 2973935 - RNA, 16 nt, Human
auaaacuuuaccuuuu

SEQ ID NO: 2973936 - RNA, 21 nt, Human
auaaacuuuaccuuuuuuaua

SEQ ID NO: 2973937 - RNA, 17 nt, Human
auaaaacuuuuuaaaau

SEQ ID NO: 2973938 - RNA, 15 nt, Human
auaaugucccuucac

SEQ ID NO: 2973939 - RNA, 23 nt, Human
auaauguuucaaacauauauaac

SEQ ID NO: 2973940 - RNA, 15 nt, Human
auaauguaagcucua

SEQ ID NO: 2973941 - RNA, 18 nt, Human
auacaccacuacauucug

SEQ ID NO: 2973942 - RNA, 17 nt, Human
auacacacucaaaucaa

SEQ ID NO: 2973943 - RNA, 18 nt, Human
auacacacucaaaucaag

SEQ ID NO: 2973944 - RNA, 20 nt, Human
auacaccacuacauucuguu

SEQ ID NO: 2973945 - RNA, 19 nt, Human
auacaccacuacauucugu

SEQ ID NO: 2973946 - RNA, 21 nt, Human
auacaccacuacauucuguua

SEQ ID NO: 2973947 - RNA, 20 nt, Human
auaaugcgugcauaccacuu

SEQ ID NO: 2973948 - RNA, 21 nt, Human
auaaugcgugcauaccacuuu

SEQ ID NO: 2973949 - RNA, 14 nt, Human
auaauguaagcucu

SEQ ID NO: 2973950 - RNA, 12 nt, Human
auacccaccccc

SEQ ID NO: 2973951 - RNA, 11 nt, Human
auacccacccc

SEQ ID NO: 2973952 - RNA, 18 nt, Human
auaccugucccccugaca

SEQ ID NO: 2973953 - RNA, 17 nt, Human
auaccugucccccugac

SEQ ID NO: 2973954 - RNA, 15 nt, Human
auagcaguaaaaaau

SEQ ID NO: 2973955 - RNA, 21 nt, Human
auagcaguaaaaaaugguguu

SEQ ID NO: 2973956 - RNA, 18 nt, Human
auagcagcuuauucacaa

SEQ ID NO: 2973957 - RNA, 15 nt, Human
auagccaaggccaaa

SEQ ID NO: 2973958 - RNA, 21 nt, Human
auagccaaggccaaaggaagc

SEQ ID NO: 2973959 - RNA, 15 nt, Human
auagguuuaauaauu

SEQ ID NO: 2973960 - RNA, 14 nt, Human
auagguuuggacaa

SEQ ID NO: 2973961 - RNA, 18 nt, Human
auaguaugguggcugggu

SEQ ID NO: 2973962 - RNA, 17 nt, Human
auaguaugguggcuggg

SEQ ID NO: 2973963 - RNA, 14 nt, Human
auaggugcuacaaa

SEQ ID NO: 2973964 - RNA, 15 nt, Human
auaggugcuacaaaa

SEQ ID NO: 2973965 - RNA, 21 nt, Human
auaggugcuacaaaaacacag

SEQ ID NO: 2973966 - RNA, 23 nt, Human
auaggugcuacaaaaacacagca

SEQ ID NO: 2973967 - RNA, 14 nt, Human
auagucaaauugug

SEQ ID NO: 2973968 - RNA, 16 nt, Human
auauccuaauaaaaag

SEQ ID NO: 2973969 - RNA, 18 nt, Human
auauccuaauaaaaaggu

SEQ ID NO: 2973970 - RNA, 20 nt, Human
auauccuaauaaaaagguga

SEQ ID NO: 2973971 - RNA, 22 nt, Human
auaucccuuggacauuuuaugu

SEQ ID NO: 2973972 - RNA, 23 nt, Human
auaucccuuggacauuuuauguc

SEQ ID NO: 2973973 - RNA, 12 nt, Human
auauccuaauaa

SEQ ID NO: 2973974 - RNA, 13 nt, Human
auauccuaauaaa

SEQ ID NO: 2973975 - RNA, 14 nt, Human
auauccuaauaaaa

SEQ ID NO: 2973976 - RNA, 20 nt, Human
auaucccuuggacauuuuau

SEQ ID NO: 2973977 - RNA, 16 nt, Human
auauccaaguuugaau

SEQ ID NO: 2973978 - RNA, 21 nt, Human
auaugcuuauacacuuacacu

SEQ ID NO: 2973979 - RNA, 22 nt, Human
auaugcuucuguuuuauaauuu

SEQ ID NO: 2973980 - RNA, 20 nt, Human
auaugcuucuguuuuauaau

SEQ ID NO: 2973981 - RNA, 22 nt, Human
auauuaccacagacauacuaac

SEQ ID NO: 2973982 - RNA, 19 nt, Human
auauuaccacagacauacu

SEQ ID NO: 2973983 - RNA, 13 nt, Human
auauuuauuuuaa

SEQ ID NO: 2973984 - RNA, 19 nt, Human
auauuuacuucuuauacau

SEQ ID NO: 2973985 - RNA, 22 nt, Human
auauuuauuacuguaagaaaau

SEQ ID NO: 2973986 - RNA, 22 nt, Human
auauuauuugcagugcaguaua

SEQ ID NO: 2973987 - RNA, 16 nt, Human
auauuauguuaaaacu

SEQ ID NO: 2973988 - RNA, 19 nt, Human
auauauuuuuuucugaaau

SEQ ID NO: 2973989 - RNA, 19 nt, Human
agucaaauugugugaaagg

SEQ ID NO: 2973990 - RNA, 23 nt, Human
agucaaauugugugaaagguacu

SEQ ID NO: 2973991 - RNA, 11 nt, Human
aguaucuugaa

SEQ ID NO: 2973992 - RNA, 12 nt, Human
aguaucuugaag

SEQ ID NO: 2973993 - RNA, 15 nt, Human
aguaucuugaagacu

SEQ ID NO: 2973994 - RNA, 15 nt, Human
aguaucucagggccu

SEQ ID NO: 2973995 - RNA, 16 nt, Human
aguaugaggcauuugu

SEQ ID NO: 2973996 - RNA, 15 nt, Human
aguaugaggcauuug

SEQ ID NO: 2973997 - RNA, 12 nt, Human
agucugaaggcu

SEQ ID NO: 2973998 - RNA, 16 nt, Human
agucugaaggcugggu

SEQ ID NO: 2973999 - RNA, 13 nt, Human
agucugaaggcug

SEQ ID NO: 2974000 - RNA, 15 nt, Human
agucugaaggcuggg

SEQ ID NO: 2974001 - RNA, 12 nt, Human
aguccuguaaug

SEQ ID NO: 2974002 - RNA, 20 nt, Human
aguccuggcaugggaaugaa

SEQ ID NO: 2974003 - RNA, 21 nt, Human
aguccuggcaugggaaugaau

SEQ ID NO: 2974004 - RNA, 22 nt, Human
aguccuggcaugggaaugaaug

SEQ ID NO: 2974005 - RNA, 17 nt, Human
agucugcuuagaaauaa

SEQ ID NO: 2974006 - RNA, 20 nt, Human
agugaacuugggccacugug

SEQ ID NO: 2974007 - RNA, 17 nt, Human
agucuggaaugcagugg

SEQ ID NO: 2974008 - RNA, 18 nt, Human
agucugauucccaagcuc

SEQ ID NO: 2974009 - RNA, 16 nt, Human
agucugauucccaagc

SEQ ID NO: 2974010 - RNA, 16 nt, Human
agugaagacaaugacu

SEQ ID NO: 2974011 - RNA, 14 nt, Human
agugaagacaauga

SEQ ID NO: 2974012 - RNA, 22 nt, Human
aguugaaaaucuuauaauuuaa

SEQ ID NO: 2974013 - RNA, 21 nt, Human
aguugaaaagacuccaaagaa

SEQ ID NO: 2974014 - RNA, 22 nt, Human
aguucaucuugaauuguaagga

SEQ ID NO: 2974015 - RNA, 19 nt, Human
aguucagguaacaggcaga

SEQ ID NO: 2974016 - RNA, 18 nt, Human
aguucagguaacaggcag

SEQ ID NO: 2974017 - RNA, 20 nt, Human
aguucagguaacaggcagau

SEQ ID NO: 2974018 - RNA, 14 nt, Human
aguuacagacaaag

SEQ ID NO: 2974019 - RNA, 16 nt, Human
aguuacagacaaagcg

SEQ ID NO: 2974020 - RNA, 18 nt, Human
aguuacacuaaaagguga

SEQ ID NO: 2974021 - RNA, 12 nt, Human
aguuaaauaaau

SEQ ID NO: 2974022 - RNA, 20 nt, Human
aguuguuugauucagacagc

SEQ ID NO: 2974023 - RNA, 17 nt, Human
aguuguucugaaauguc

SEQ ID NO: 2974024 - RNA, 13 nt, Human
aguuguucugaaa

SEQ ID NO: 2974025 - RNA, 14 nt, Human
aguugaagacagag

SEQ ID NO: 2974026 - RNA, 16 nt, Human
aguuguguuugaagca

SEQ ID NO: 2974027 - RNA, 21 nt, Human
aguugugugaauaccccaaga

SEQ ID NO: 2974028 - RNA, 23 nt, Human
aguugaaaaucuuauaauuuaaa

SEQ ID NO: 2974029 - RNA, 22 nt, Human
aguugaaaagacuccaaagaaa

SEQ ID NO: 2974030 - RNA, 17 nt, Human
agugucuuaauuaaaag

SEQ ID NO: 2974031 - RNA, 18 nt, Human
agugucuuaauuaaaaga

SEQ ID NO: 2974032 - RNA, 15 nt, Human
agugucuuaauuaaa

SEQ ID NO: 2974033 - RNA, 18 nt, Human
aguguauuuuuuuacuaa

SEQ ID NO: 2974034 - RNA, 17 nt, Human
aguguauuuuuuuacua

SEQ ID NO: 2974035 - RNA, 16 nt, Human
aguguauuuugaaauu

SEQ ID NO: 2974036 - RNA, 14 nt, Human
agugggagcugccu

SEQ ID NO: 2974037 - RNA, 15 nt, Human
agugggagcugccug

SEQ ID NO: 2974038 - RNA, 23 nt, Human
aguggcuuaaaacaacacucaca

SEQ ID NO: 2974039 - RNA, 22 nt, Human
aggucuguuuuguguacuuuua

SEQ ID NO: 2974040 - RNA, 18 nt, Human
aggugcuacaaaaacaca

SEQ ID NO: 2974041 - RNA, 23 nt, Human
aggucuguucuuuccaaaguaca

SEQ ID NO: 2974042 - RNA, 22 nt, Human
aggucuguucuuuccaaaguac

SEQ ID NO: 2974043 - RNA, 19 nt, Human
aggugcuacaaaaacacag

SEQ ID NO: 2974044 - RNA, 20 nt, Human
aggugcuacaaaaacacagc

SEQ ID NO: 2974045 - RNA, 21 nt, Human
aggugcuacaaaaacacagca

SEQ ID NO: 2974046 - RNA, 22 nt, Human
aggugcuacaaaaacacagcaa

SEQ ID NO: 2974047 - RNA, 18 nt, Human
aggucuguucuuuccaaa

SEQ ID NO: 2974048 - RNA, 19 nt, Human
agguaaugaccaugaaaga

SEQ ID NO: 2974049 - RNA, 21 nt, Human
agguaaugaccaugaaagacu

SEQ ID NO: 2974050 - RNA, 20 nt, Human
agguaaugaccaugaaagac

SEQ ID NO: 2974051 - RNA, 20 nt, Human
agguaaaagcaucacaugaa

SEQ ID NO: 2974052 - RNA, 22 nt, Human
agguucccuuugacgccauccc

SEQ ID NO: 2974053 - RNA, 13 nt, Human
agguucccuuuga

SEQ ID NO: 2974054 - RNA, 14 nt, Human
agguucaaagauau

SEQ ID NO: 2974055 - RNA, 23 nt, Human
agguucccuuugacgccauccca

SEQ ID NO: 2974056 - RNA, 19 nt, Human
aggugcuaggaacacuccu

SEQ ID NO: 2974057 - RNA, 22 nt, Human
aggugcuaggaacacuccuuca

SEQ ID NO: 2974058 - RNA, 23 nt, Human
aggugcuacaaaaacacagcaag

SEQ ID NO: 2974059 - RNA, 24 nt, Human
aggugcuacaaaaacacagcaagg

SEQ ID NO: 2974060 - RNA, 23 nt, Human
aggugcuaggaacacuccuucac

SEQ ID NO: 2974061 - RNA, 16 nt, Human
agguuaaaaagaaaag

SEQ ID NO: 2974062 - RNA, 19 nt, Human
aggggccucuuaugggcug

SEQ ID NO: 2974063 - RNA, 20 nt, Human
aggggccucuuaugggcugg

SEQ ID NO: 2974064 - RNA, 21 nt, Human
aggggccucuuaugggcuggg

SEQ ID NO: 2974065 - RNA, 15 nt, Human
aggguaucuggugac

SEQ ID NO: 2974066 - RNA, 21 nt, Human
aggguaucaggugcugccauc

SEQ ID NO: 2974067 - RNA, 18 nt, Human
aggguaucaggugcugcc

SEQ ID NO: 2974068 - RNA, 19 nt, Human
aggguaucaggugcugcca

SEQ ID NO: 2974069 - RNA, 11 nt, Human
agggucccugg

SEQ ID NO: 2974070 - RNA, 17 nt, Human
aggcuacugucagcucc

SEQ ID NO: 2974071 - RNA, 21 nt, Human
aggcuagaaccaccugccuau

SEQ ID NO: 2974072 - RNA, 20 nt, Human
aggcccuucucuccagcccc

SEQ ID NO: 2974073 - RNA, 21 nt, Human
aggcccuucucuccagccccu

SEQ ID NO: 2974074 - RNA, 22 nt, Human
aggcccuucucuccagccccug

SEQ ID NO: 2974075 - RNA, 23 nt, Human
aggcccuucucuccagccccugg

SEQ ID NO: 2974076 - RNA, 22 nt, Human
aggcccuugucggccccaccag

SEQ ID NO: 2974077 - RNA, 16 nt, Human
aggcuagauguaugua

SEQ ID NO: 2974078 - RNA, 15 nt, Human
aggcuagauguaugu

SEQ ID NO: 2974079 - RNA, 20 nt, Human
aggcugucaauuacaggaag

SEQ ID NO: 2974080 - RNA, 19 nt, Human
aggcugucaauuacaggaa

SEQ ID NO: 2974081 - RNA, 18 nt, Human
aggcuguaucccaugagc

SEQ ID NO: 2974082 - RNA, 13 nt, Human
aggcuguauccca

SEQ ID NO: 2974083 - RNA, 22 nt, Human
agggacagaggggguggccucc

SEQ ID NO: 2974084 - RNA, 21 nt, Human
aggcugucaauuacaggaagu

SEQ ID NO: 2974085 - RNA, 23 nt, Human
agggacagaggggguggccuccc

SEQ ID NO: 2974086 - RNA, 23 nt, Human
aggagaagucuucuauuuauuua

SEQ ID NO: 2974087 - RNA, 22 nt, Human
aggagaagucuucuauuuauuu

SEQ ID NO: 2974088 - RNA, 13 nt, Human
aggaccucaggug

SEQ ID NO: 2974089 - RNA, 23 nt, Human
aggaugcuuguacauaaugcgug

SEQ ID NO: 2974090 - RNA, 21 nt, Human
aggaugcuuguacauaaugcg

SEQ ID NO: 2974091 - RNA, 23 nt, Human
aggaugguucccuugaugaagaa

SEQ ID NO: 2974092 - RNA, 22 nt, Human
aggauguucuagcauggcugcc

SEQ ID NO: 2974093 - RNA, 16 nt, Human
aggauguucugggaca

SEQ ID NO: 2974094 - RNA, 15 nt, Human
aggauguucugggac

SEQ ID NO: 2974095 - RNA, 17 nt, Human
aggauguugaaaaaguu

SEQ ID NO: 2974096 - RNA, 14 nt, Human
aggauuauuggaaa

SEQ ID NO: 2974097 - RNA, 12 nt, Human
agcuuuugcaua

SEQ ID NO: 2974098 - RNA, 21 nt, Human
aggaaucaugugccaagcaga

SEQ ID NO: 2974099 - RNA, 17 nt, Human
aggaauccagacccggc

SEQ ID NO: 2974100 - RNA, 20 nt, Human
aggaauccagacccggcugc

SEQ ID NO: 2974101 - RNA, 22 nt, Human
agcuccccucggagaagagcug

SEQ ID NO: 2974102 - RNA, 21 nt, Human
agcugcgguccacccaggagc

SEQ ID NO: 2974103 - RNA, 13 nt, Human
agcuccuucuguc

SEQ ID NO: 2974104 - RNA, 12 nt, Human
agcuccuucugu

SEQ ID NO: 2974105 - RNA, 21 nt, Human
agcuccgcuuucuacccagcg

SEQ ID NO: 2974106 - RNA, 20 nt, Human
agcuccgcuuucuacccagc

SEQ ID NO: 2974107 - RNA, 23 nt, Human
agcuccgcuuucuacccagcgag

SEQ ID NO: 2974108 - RNA, 23 nt, Human
agcugcgguccacccaggagccc

SEQ ID NO: 2974109 - RNA, 21 nt, Human
agacgugcacgcacacugucu

SEQ ID NO: 2974110 - RNA, 22 nt, Human
agacgugcacgcacacugucug

SEQ ID NO: 2974111 - RNA, 22 nt, Human
agacgcugugcugcccugccca

SEQ ID NO: 2974112 - RNA, 18 nt, Human
agacggagucccaccuug

SEQ ID NO: 2974113 - RNA, 21 nt, Human
agacgcugugcugcccugccc

SEQ ID NO: 2974114 - RNA, 11 nt, Human
agacagcucuu

SEQ ID NO: 2974115 - RNA, 12 nt, Human
agacagcucuua

SEQ ID NO: 2974116 - RNA, 12 nt, Human
agacagcugccu

SEQ ID NO: 2974117 - RNA, 14 nt, Human
agacagcccgggcu

SEQ ID NO: 2974118 - RNA, 15 nt, Human
agacagcccgggcuc

SEQ ID NO: 2974119 - RNA, 15 nt, Human
agacagauacuccuc

SEQ ID NO: 2974120 - RNA, 21 nt, Human
agacagauacuccuccaaggu

SEQ ID NO: 2974121 - RNA, 23 nt, Human
agacagagucucacuguugccca

SEQ ID NO: 2974122 - RNA, 21 nt, Human
agacugcauuauauuuauuac

SEQ ID NO: 2974123 - RNA, 16 nt, Human
agacuggaagcacagc

SEQ ID NO: 2974124 - RNA, 17 nt, Human
agacuggaagcacagcu

SEQ ID NO: 2974125 - RNA, 19 nt, Human
agacuggaagcacagcuuc

SEQ ID NO: 2974126 - RNA, 17 nt, Human
agagaacuuccagaucc

SEQ ID NO: 2974127 - RNA, 21 nt, Human
agagaggguggugaccucugc

SEQ ID NO: 2974128 - RNA, 20 nt, Human
agagaggguggugaccucug

SEQ ID NO: 2974129 - RNA, 22 nt, Human
agagaggguggugaccucugcc

SEQ ID NO: 2974130 - RNA, 16 nt, Human
agagcccacgccccca

SEQ ID NO: 2974131 - RNA, 13 nt, Human
agagcccacgccc

SEQ ID NO: 2974132 - RNA, 19 nt, Human
agagcccaccuuggcucaa

SEQ ID NO: 2974133 - RNA, 15 nt, Human
agagcccaggccucc

SEQ ID NO: 2974134 - RNA, 13 nt, Human
agagcccaggccu

SEQ ID NO: 2974135 - RNA, 14 nt, Human
agagcccaggccuc

SEQ ID NO: 2974136 - RNA, 14 nt, Human
agagugugccugaa

SEQ ID NO: 2974137 - RNA, 20 nt, Human
agagugugauguauguguaa

SEQ ID NO: 2974138 - RNA, 19 nt, Human
agaguggggauaugauuua

SEQ ID NO: 2974139 - RNA, 11 nt, Human
agagugggagc

SEQ ID NO: 2974140 - RNA, 12 nt, Human
agagggcacaga

SEQ ID NO: 2974141 - RNA, 22 nt, Human
agaggguggugaccucugccug

SEQ ID NO: 2974142 - RNA, 20 nt, Human
agaggguggugaccucugcc

SEQ ID NO: 2974143 - RNA, 19 nt, Human
agaggguggugaccucugc

SEQ ID NO: 2974144 - RNA, 15 nt, Human
agaggagagaggacc

SEQ ID NO: 2974145 - RNA, 16 nt, Human
agaggagagaggaccc

SEQ ID NO: 2974146 - RNA, 23 nt, Human
agaggacuuuucuuuguggcuuc

SEQ ID NO: 2974147 - RNA, 16 nt, Human
agaggaaggagaggag

SEQ ID NO: 2974148 - RNA, 14 nt, Human
agaucuucuguggg

SEQ ID NO: 2974149 - RNA, 19 nt, Human
agauauaugcucugcaugu

SEQ ID NO: 2974150 - RNA, 16 nt, Human
agcccucaauugugaa

SEQ ID NO: 2974151 - RNA, 17 nt, Human
agcccucaauugugaaa

SEQ ID NO: 2974152 - RNA, 16 nt, Human
agccccauucugccug

SEQ ID NO: 2974153 - RNA, 13 nt, Human
agccccauucugc

SEQ ID NO: 2974154 - RNA, 15 nt, Human
agccccagugcccac

SEQ ID NO: 2974155 - RNA, 14 nt, Human
agccccagugccca

SEQ ID NO: 2974156 - RNA, 13 nt, Human
agccccagugccc

SEQ ID NO: 2974157 - RNA, 18 nt, Human
agccagcaggcucucagg

SEQ ID NO: 2974158 - RNA, 19 nt, Human
agccagcaggcucucaggc

SEQ ID NO: 2974159 - RNA, 17 nt, Human
agccagcaggcucucag

SEQ ID NO: 2974160 - RNA, 20 nt, Human
agccagcaggcucucaggcc

SEQ ID NO: 2974161 - RNA, 16 nt, Human
agccgcccaaggccuu

SEQ ID NO: 2974162 - RNA, 15 nt, Human
agccgcccaaggccu

SEQ ID NO: 2974163 - RNA, 13 nt, Human
agccgcccaaggc

SEQ ID NO: 2974164 - RNA, 12 nt, Human
agccgcccaagg

SEQ ID NO: 2974165 - RNA, 13 nt, Human
agccgcuggggcc

SEQ ID NO: 2974166 - RNA, 21 nt, Human
agccgccaugcuccuggccca

SEQ ID NO: 2974167 - RNA, 19 nt, Human
agccucccgaguagcuggg

SEQ ID NO: 2974168 - RNA, 18 nt, Human
agccucccgaguagcugg

SEQ ID NO: 2974169 - RNA, 20 nt, Human
agccucccgaguagcuggga

SEQ ID NO: 2974170 - RNA, 14 nt, Human
agccuccuccagcc

SEQ ID NO: 2974171 - RNA, 21 nt, Human
agccucccaaagugcugggau

SEQ ID NO: 2974172 - RNA, 22 nt, Human
agccucccacgacugcccggca

SEQ ID NO: 2974173 - RNA, 22 nt, Human
agccgggcgugguggcaggcac

SEQ ID NO: 2974174 - RNA, 15 nt, Human
agcaugaagacagag

SEQ ID NO: 2974175 - RNA, 23 nt, Human
agcauccuggcacccggccccug

SEQ ID NO: 2974176 - RNA, 22 nt, Human
agcauccuggcacccggccccu

SEQ ID NO: 2974177 - RNA, 18 nt, Human
agcauccuggcacccggc

SEQ ID NO: 2974178 - RNA, 23 nt, Human
agccaagugugguagagugugcc

SEQ ID NO: 2974179 - RNA, 20 nt, Human
agcaugccuggauggggcug

SEQ ID NO: 2974180 - RNA, 23 nt, Human
agcaugccuggauggggcugcac

SEQ ID NO: 2974181 - RNA, 20 nt, Human
agcaguucagagcugcccuc

SEQ ID NO: 2974182 - RNA, 23 nt, Human
agcaguucagagcugcccucucc

SEQ ID NO: 2974183 - RNA, 13 nt, Human
agcaguugaaaag

SEQ ID NO: 2974184 - RNA, 16 nt, Human
agcaguugaaaagacu

SEQ ID NO: 2974185 - RNA, 16 nt, Human
agcacugacuucuaag

SEQ ID NO: 2974186 - RNA, 18 nt, Human
agcacagacccugcccug

SEQ ID NO: 2974187 - RNA, 19 nt, Human
agcacagacccugcccugu

SEQ ID NO: 2974188 - RNA, 20 nt, Human
agcacagacccugcccugug

SEQ ID NO: 2974189 - RNA, 17 nt, Human
agcacagacccugcccu

SEQ ID NO: 2974190 - RNA, 20 nt, Human
agcacacuggcucacccagu

SEQ ID NO: 2974191 - RNA, 23 nt, Human
agcacacuugacaucaacugcau

SEQ ID NO: 2974192 - RNA, 19 nt, Human
agcacacuggcucacccag

SEQ ID NO: 2974193 - RNA, 12 nt, Human
agcacacuggcu

SEQ ID NO: 2974194 - RNA, 18 nt, Human
agcagugcaugcuguccc

SEQ ID NO: 2974195 - RNA, 19 nt, Human
agcagugcaugcugucccu

SEQ ID NO: 2974196 - RNA, 20 nt, Human
agcagugcaugcugucccuu

SEQ ID NO: 2974197 - RNA, 13 nt, Human
agcagcguuucua

SEQ ID NO: 2974198 - RNA, 11 nt, Human
aagauucuaug

SEQ ID NO: 2974199 - RNA, 14 nt, Human
aagcagcguuucua

SEQ ID NO: 2974200 - RNA, 20 nt, Human
aagcagcguuucuaugacac

SEQ ID NO: 2974201 - RNA, 17 nt, Human
aagcagcguuucuauga

SEQ ID NO: 2974202 - RNA, 19 nt, Human
aagccagcaggcucucagg

SEQ ID NO: 2974203 - RNA, 22 nt, Human
aagcagcguuucuaugacacau

SEQ ID NO: 2974204 - RNA, 21 nt, Human
aagcagcguuucuaugacaca

SEQ ID NO: 2974205 - RNA, 20 nt, Human
aagccagcaggcucucaggc

SEQ ID NO: 2974206 - RNA, 23 nt, Human
aagccagcaggcucucaggccag

SEQ ID NO: 2974207 - RNA, 13 nt, Human
aagauacugaaau

SEQ ID NO: 2974208 - RNA, 13 nt, Human
aagauaaaugugc

SEQ ID NO: 2974209 - RNA, 23 nt, Human
aagauacaguuacucagaauucu

SEQ ID NO: 2974210 - RNA, 12 nt, Human
aagauaaaugug

SEQ ID NO: 2974211 - RNA, 17 nt, Human
aagcgauucuucugcuu

SEQ ID NO: 2974212 - RNA, 21 nt, Human
aagcgauucuucugcuucagc

SEQ ID NO: 2974213 - RNA, 20 nt, Human
aaggcagcucuaaaugucaa

SEQ ID NO: 2974214 - RNA, 15 nt, Human
aaggauugcuacugu

SEQ ID NO: 2974215 - RNA, 15 nt, Human
aaggauguucuagca

SEQ ID NO: 2974216 - RNA, 13 nt, Human
aaggacacuagaa

SEQ ID NO: 2974217 - RNA, 21 nt, Human
aagcuggucccacucagucca

SEQ ID NO: 2974218 - RNA, 18 nt, Human
aagcuggucccacucagu

SEQ ID NO: 2974219 - RNA, 15 nt, Human
aagcugggcagguug

SEQ ID NO: 2974220 - RNA, 17 nt, Human
aagcuacugccauccug

SEQ ID NO: 2974221 - RNA, 22 nt, Human
aagcuacugccauccuggccca

SEQ ID NO: 2974222 - RNA, 12 nt, Human
aaggugcaucug

SEQ ID NO: 2974223 - RNA, 20 nt, Human
aaguagaagucuuagaugua

SEQ ID NO: 2974224 - RNA, 19 nt, Human
aaguagaagucuuagaugu

SEQ ID NO: 2974225 - RNA, 21 nt, Human
aaguagggacuucugucuuca

SEQ ID NO: 2974226 - RNA, 21 nt, Human
aaguagaagucuuagauguau

SEQ ID NO: 2974227 - RNA, 23 nt, Human
aaguaucccuacuguaauuugug

SEQ ID NO: 2974228 - RNA, 18 nt, Human
aaguaucccuacuguaau

SEQ ID NO: 2974229 - RNA, 17 nt, Human
aaguaucccuacuguaa

SEQ ID NO: 2974230 - RNA, 17 nt, Human
aaguccaagcauaccaa

SEQ ID NO: 2974231 - RNA, 18 nt, Human
aaguccaagcauuuagau

SEQ ID NO: 2974232 - RNA, 18 nt, Human
aaguccucuuuucugaga

SEQ ID NO: 2974233 - RNA, 22 nt, Human
aaguccucuuuucugagaggac

SEQ ID NO: 2974234 - RNA, 20 nt, Human
aagucuagguugguagaguu

SEQ ID NO: 2974235 - RNA, 16 nt, Human
aagggaaacugccagc

SEQ ID NO: 2974236 - RNA, 17 nt, Human
aagggaaacugccagca

SEQ ID NO: 2974237 - RNA, 23 nt, Human
aagggaaacugccagcaacgcag

SEQ ID NO: 2974238 - RNA, 19 nt, Human
aaggucauuuuuuuuaaga

SEQ ID NO: 2974239 - RNA, 18 nt, Human
aaggucauuuuuuuuaag

SEQ ID NO: 2974240 - RNA, 19 nt, Human
aaguggaaaaauagccugc

SEQ ID NO: 2974241 - RNA, 21 nt, Human
aaguggaaaaauagccugccu

SEQ ID NO: 2974242 - RNA, 12 nt, Human
aaguugaauuuu

SEQ ID NO: 2974243 - RNA, 23 nt, Human
aaugccuuacccucauguucuua

SEQ ID NO: 2974244 - RNA, 18 nt, Human
aaugcgugcauaccacuu

SEQ ID NO: 2974245 - RNA, 19 nt, Human
aaugcgugcauaccacuuu

SEQ ID NO: 2974246 - RNA, 23 nt, Human
aauguuucaaacauauauaacaa

SEQ ID NO: 2974247 - RNA, 16 nt, Human
aauguuugccucugcc

SEQ ID NO: 2974248 - RNA, 15 nt, Human
aauguuugccucugc

SEQ ID NO: 2974249 - RNA, 15 nt, Human
aaugugaaaagaaaa

SEQ ID NO: 2974250 - RNA, 16 nt, Human
aaugauuaauuaaaac

SEQ ID NO: 2974251 - RNA, 21 nt, Human
aaugauuaugaauuacauuug

SEQ ID NO: 2974252 - RNA, 15 nt, Human
aaugauuaugaauua

SEQ ID NO: 2974253 - RNA, 18 nt, Human
aaucucaaauuucuaaau

SEQ ID NO: 2974254 - RNA, 17 nt, Human
aaucucaaauuucuaaa

SEQ ID NO: 2974255 - RNA, 21 nt, Human
aaucucugauucccugauuua

SEQ ID NO: 2974256 - RNA, 15 nt, Human
aaucucaaauuucua

SEQ ID NO: 2974257 - RNA, 16 nt, Human
aaucucaaauuucuaa

SEQ ID NO: 2974258 - RNA, 17 nt, Human
aauccagacccggcugc

SEQ ID NO: 2974259 - RNA, 19 nt, Human
aauccagacccggcugcgu

SEQ ID NO: 2974260 - RNA, 15 nt, Human
aaucaccgaaaacgu

SEQ ID NO: 2974261 - RNA, 14 nt, Human
aaucaccgaaaacg

SEQ ID NO: 2974262 - RNA, 15 nt, Human
aauauguuucacaca

SEQ ID NO: 2974263 - RNA, 13 nt, Human
aauauguuucaca

SEQ ID NO: 2974264 - RNA, 22 nt, Human
aauagaauugacauugaaaucu

SEQ ID NO: 2974265 - RNA, 21 nt, Human
aauagaauugacauugaaauc

SEQ ID NO: 2974266 - RNA, 15 nt, Human
aauagaauugacauu

SEQ ID NO: 2974267 - RNA, 13 nt, Human
aauagacaauuua

SEQ ID NO: 2974268 - RNA, 20 nt, Human
aauacucuacccucuuagaa

SEQ ID NO: 2974269 - RNA, 22 nt, Human
aauacucuacccucuuagaaaa

SEQ ID NO: 2974270 - RNA, 13 nt, Human
aauacucuuauau

SEQ ID NO: 2974271 - RNA, 22 nt, Human
aacagcaacacaaagcuuuugc

SEQ ID NO: 2974272 - RNA, 16 nt, Human
aacccgggaggcagag

SEQ ID NO: 2974273 - RNA, 21 nt, Human
aaccgaacugauguaaguaaa

SEQ ID NO: 2974274 - RNA, 22 nt, Human
aaccacuggaaaguuuaugguu

SEQ ID NO: 2974275 - RNA, 15 nt, Human
aaccacuucagcuga

SEQ ID NO: 2974276 - RNA, 13 nt, Human
aaccacgcuggac

SEQ ID NO: 2974277 - RNA, 15 nt, Human
aacacauuaaaggua

SEQ ID NO: 2974278 - RNA, 20 nt, Human
aacacauuaaagguacuuug

SEQ ID NO: 2974279 - RNA, 21 nt, Human
aacacaucuaguaguuguucu

SEQ ID NO: 2974280 - RNA, 18 nt, Human
aacaaauuuacagagaca

SEQ ID NO: 2974281 - RNA, 16 nt, Human
aacacaucagcuugcc

SEQ ID NO: 2974282 - RNA, 14 nt, Human
aaauguuuauuuaa

SEQ ID NO: 2974283 - RNA, 18 nt, Human
aaauguuuauuuaaaaga

SEQ ID NO: 2974284 - RNA, 17 nt, Human
aaauguuuauuuaaaag

SEQ ID NO: 2974285 - RNA, 15 nt, Human
aaauguuuauuuaaa

SEQ ID NO: 2974286 - RNA, 22 nt, Human
aaauguuuauuuaaaagagcag

SEQ ID NO: 2974287 - RNA, 22 nt, Human
aaauguuguucucuucuuuaaa

SEQ ID NO: 2974288 - RNA, 17 nt, Human
aaaucuuauaauuuaaa

SEQ ID NO: 2974289 - RNA, 23 nt, Human
aaaugccuuacccucauguucuu

SEQ ID NO: 2974290 - RNA, 18 nt, Human
aaauucuugcaaaguauc

SEQ ID NO: 2974291 - RNA, 21 nt, Human
aaauucuugcaaaguaucccu

SEQ ID NO: 2974292 - RNA, 13 nt, Human
aaauucuuucauu

SEQ ID NO: 2974293 - RNA, 19 nt, Human
aaauugacacuuaaaaaug

SEQ ID NO: 2974294 - RNA, 20 nt, Human
aacuuuaugcuaagugaaau

SEQ ID NO: 2974295 - RNA, 21 nt, Human
aacuuuaugcuaagugaaaua

SEQ ID NO: 2974296 - RNA, 16 nt, Human
aacuuaaucuaaaugg

SEQ ID NO: 2974297 - RNA, 15 nt, Human
aacuuaaucuaaaug

SEQ ID NO: 2974298 - RNA, 18 nt, Human
aacuuaaucuaaauggaa

SEQ ID NO: 2974299 - RNA, 13 nt, Human
aacuuaaugaaaa

SEQ ID NO: 2974300 - RNA, 20 nt, Human
aacugacucuuaagaagacu

SEQ ID NO: 2974301 - RNA, 19 nt, Human
aacugacucuuaagaagac

SEQ ID NO: 2974302 - RNA, 20 nt, Human
aacugagaugugaacacauc

SEQ ID NO: 2974303 - RNA, 18 nt, Human
aacugacucuuaagaaga

SEQ ID NO: 2974304 - RNA, 15 nt, Human
aacugacucuuaaga

SEQ ID NO: 2974305 - RNA, 19 nt, Human
aacuuaaauaaugugaaac

SEQ ID NO: 2974306 - RNA, 14 nt, Human
aacugauaaagaug

SEQ ID NO: 2974307 - RNA, 19 nt, Human
aaacacugguuuuaaauau

SEQ ID NO: 2974308 - RNA, 16 nt, Human
aaacacuguucucugc

SEQ ID NO: 2974309 - RNA, 22 nt, Human
aaaaucucaaauuucuaaaucu

SEQ ID NO: 2974310 - RNA, 19 nt, Human
aaaaucucaaauuucuaaa

SEQ ID NO: 2974311 - RNA, 16 nt, Human
aaaaucucaauauuuc

SEQ ID NO: 2974312 - RNA, 16 nt, Human
aaaaagaaacauuugg

SEQ ID NO: 2974313 - RNA, 15 nt, Human
aaaaagaaaggaggg

SEQ ID NO: 2974314 - RNA, 17 nt, Human
aaaauaaaacuuuuuaa

SEQ ID NO: 2974315 - RNA, 18 nt, Human
aaaaguucugcagauaaa

SEQ ID NO: 2974316 - RNA, 21 nt, Human
aaaaucuacacuccagugaga

SEQ ID NO: 2974317 - RNA, 22 nt, Human
aaaaucccuuaccucggugccu

SEQ ID NO: 2974318 - RNA, 13 nt, Human
aaacucugagugc

SEQ ID NO: 2974319 - RNA, 15 nt, Human
aaacucugagugcaa

SEQ ID NO: 2974320 - RNA, 21 nt, Human
aaacugagaugugaacacauc

SEQ ID NO: 2974321 - RNA, 23 nt, Human
aaacugagaugugaacacaucag

SEQ ID NO: 2974322 - RNA, 11 nt, Human
aaacugagcau

SEQ ID NO: 2974323 - RNA, 14 nt, Human
aaagaguaggaaga

SEQ ID NO: 2974324 - RNA, 23 nt, Human
aaagaaggcauggacuucuggau

SEQ ID NO: 2974325 - RNA, 16 nt, Human
aaagaagcagaccauu

SEQ ID NO: 2974326 - RNA, 13 nt, Human
aaagaagcagacc

SEQ ID NO: 2974327 - RNA, 15 nt, Human
aaagaaauguaaggg

SEQ ID NO: 2974328 - RNA, 17 nt, Human
aaagauauuuugcuuug

SEQ ID NO: 2974329 - RNA, 16 nt, Human
aaagauauuuugcuuu

SEQ ID NO: 2974330 - RNA, 12 nt, Human
aaagauauuuug

SEQ ID NO: 2974331 - RNA, 18 nt, Human
aaaccaucauugaaaucu

SEQ ID NO: 2974332 - RNA, 21 nt, Human
aaacccgucucuacuaaaaau

SEQ ID NO: 2974333 - RNA, 20 nt, Human
aaacccgucucuacuaaaaa

SEQ ID NO: 2974334 - RNA, 18 nt, Human
aaacucuccucugcugcu

SEQ ID NO: 2974335 - RNA, 13 nt, Human
aaacucuccucug

SEQ ID NO: 2974336 - RNA, 15 nt, Human
aaaucaaauaugcaa

SEQ ID NO: 2974337 - RNA, 12 nt, Human
aaaucaaauaug

SEQ ID NO: 2974338 - RNA, 14 nt, Human
aaaucaaauaugca

SEQ ID NO: 2974339 - RNA, 15 nt, Human
aaauauuuauuuuaa

SEQ ID NO: 2974340 - RNA, 13 nt, Human
aaauauuuauuuu

SEQ ID NO: 2974341 - RNA, 20 nt, Human
aaauauuuauuuuaauaaug

SEQ ID NO: 2974342 - RNA, 18 nt, Human
aaaucugcuuuuuaaaga

SEQ ID NO: 2974343 - RNA, 24 nt, Human
aaauagcucaggugucccugcacu

SEQ ID NO: 2974344 - RNA, 17 nt, Human
aaauagcuuuuuucucu

SEQ ID NO: 2974345 - RNA, 20 nt, Human
aaauagcuuuuuucucugau

SEQ ID NO: 2974346 - RNA, 19 nt, Human
aaauaguggugugauuugg

SEQ ID NO: 2974347 - RNA, 19 nt, Human
aaauaaaacuuuuuaaaau

SEQ ID NO: 2974348 - RNA, 16 nt, Human
aaauaaaacuuuuuaa

SEQ ID NO: 2974349 - RNA, 13 nt, Human
aaauaaaacuuuu

SEQ ID NO: 2974350 - RNA, 13 nt, Human
aaaguggaaaaau

SEQ ID NO: 2974351 - RNA, 19 nt, Human
aaaggcuccaggagcagcc

SEQ ID NO: 2974352 - RNA, 20 nt, Human
aaaggcuccaggagcagcca

SEQ ID NO: 2974353 - RNA, 14 nt, Human
aaaggcagaagcaa

SEQ ID NO: 2974354 - RNA, 15 nt, Human
aaaggcuccaggagc

SEQ ID NO: 2974355 - RNA, 16 nt, Human
aaaggcuccaggagca

SEQ ID NO: 2974356 - RNA, 22 nt, Human
acccaguguuuuaggagcauga

SEQ ID NO: 2974357 - RNA, 19 nt, Human
acccaguguuuuaggagca

SEQ ID NO: 2974358 - RNA, 16 nt, Human
acccaccucagccucc

SEQ ID NO: 2974359 - RNA, 11 nt, Human
acccccugaau

SEQ ID NO: 2974360 - RNA, 23 nt, Human
acccaagggccuggccugagcug

SEQ ID NO: 2974361 - RNA, 17 nt, Human
acccacaagaaaugaaa

SEQ ID NO: 2974362 - RNA, 21 nt, Human
acccacaagaaaugaaagcag

SEQ ID NO: 2974363 - RNA, 15 nt, Human
acccaccucagccuc

SEQ ID NO: 2974364 - RNA, 14 nt, Human
acccaccucagccu

SEQ ID NO: 2974365 - RNA, 13 nt, Human
acccaccucagcc

SEQ ID NO: 2974366 - RNA, 19 nt, Human
acccaagggccuggccuga

SEQ ID NO: 2974367 - RNA, 22 nt, Human
acccaagggccuggccugagcu

SEQ ID NO: 2974368 - RNA, 18 nt, Human
acccaagggccuggccug

SEQ ID NO: 2974369 - RNA, 20 nt, Human
accauauuaccacagacaua

SEQ ID NO: 2974370 - RNA, 20 nt, Human
accauccuggcuaacacggu

SEQ ID NO: 2974371 - RNA, 16 nt, Human
accauauuaccacaga

SEQ ID NO: 2974372 - RNA, 14 nt, Human
accauauuaccaca

SEQ ID NO: 2974373 - RNA, 19 nt, Human
accccuccaugugggcuag

SEQ ID NO: 2974374 - RNA, 16 nt, Human
accccuccaugugggc

SEQ ID NO: 2974375 - RNA, 23 nt, Human
acaggcaaugcuggcuguuggcu

SEQ ID NO: 2974376 - RNA, 19 nt, Human
acaggcaaugcuggcuguu

SEQ ID NO: 2974377 - RNA, 19 nt, Human
acaggguuuugccauguug

SEQ ID NO: 2974378 - RNA, 21 nt, Human
acauaaugcgugcauaccacu

SEQ ID NO: 2974379 - RNA, 22 nt, Human
acauaaugcgugcauaccacuu

SEQ ID NO: 2974380 - RNA, 23 nt, Human
acauaaugcgugcauaccacuuu

SEQ ID NO: 2974381 - RNA, 17 nt, Human
acaucagcacgauuucu

SEQ ID NO: 2974382 - RNA, 15 nt, Human
acaucagcacgauuu

SEQ ID NO: 2974383 - RNA, 18 nt, Human
acaucagcacgauuucug

SEQ ID NO: 2974384 - RNA, 19 nt, Human
acaugaucuucuuuauaau

SEQ ID NO: 2974385 - RNA, 18 nt, Human
acaugugcacaugcacgu

SEQ ID NO: 2974386 - RNA, 16 nt, Human
acaugugcacaugcac

SEQ ID NO: 2974387 - RNA, 14 nt, Human
acauuuauucugcu

SEQ ID NO: 2974388 - RNA, 15 nt, Human
acauuuauucugcuc

SEQ ID NO: 2974389 - RNA, 21 nt, Human
acauuuguauaaaauaauuuu

SEQ ID NO: 2974390 - RNA, 17 nt, Human
accagccaguaaauggg

SEQ ID NO: 2974391 - RNA, 13 nt, Human
accagcagaaaug

SEQ ID NO: 2974392 - RNA, 19 nt, Human
accagagcugccaccugcc

SEQ ID NO: 2974393 - RNA, 22 nt, Human
acagcaguugaaaagacuccaa

SEQ ID NO: 2974394 - RNA, 23 nt, Human
acagcaguugaaaagacuccaaa

SEQ ID NO: 2974395 - RNA, 21 nt, Human
acagcaguugaaaagacucca

SEQ ID NO: 2974396 - RNA, 19 nt, Human
acagagugagacucugucu

SEQ ID NO: 2974397 - RNA, 15 nt, Human
acagagugagacucu

SEQ ID NO: 2974398 - RNA, 23 nt, Human
acagagucucacuguugcccagg

SEQ ID NO: 2974399 - RNA, 11 nt, Human
acagacacagg

SEQ ID NO: 2974400 - RNA, 15 nt, Human
acacuguacugcaau

SEQ ID NO: 2974401 - RNA, 15 nt, Human
acagaggcagcccca

SEQ ID NO: 2974402 - RNA, 14 nt, Human
acagaggcagcccc

SEQ ID NO: 2974403 - RNA, 14 nt, Human
acagacacaggccc

SEQ ID NO: 2974404 - RNA, 13 nt, Human
acagacacaggcc

SEQ ID NO: 2974405 - RNA, 23 nt, Human
acagaggccaugggccuccugug

SEQ ID NO: 2974406 - RNA, 19 nt, Human
acagaggcagccccauucu

SEQ ID NO: 2974407 - RNA, 15 nt, Human
acacugcauguuugu

SEQ ID NO: 2974408 - RNA, 14 nt, Human
acacugcauguuug

SEQ ID NO: 2974409 - RNA, 20 nt, Human
acacuggcucacccaguccu

SEQ ID NO: 2974410 - RNA, 21 nt, Human
acacuggcucacccaguccug

SEQ ID NO: 2974411 - RNA, 12 nt, Human
acaggcaagcac

SEQ ID NO: 2974412 - RNA, 18 nt, Human
acaggcaaugcuggcugu

SEQ ID NO: 2974413 - RNA, 14 nt, Human
acaggauuauugga

SEQ ID NO: 2974414 - RNA, 15 nt, Human
acaggaucagucuga

SEQ ID NO: 2974415 - RNA, 17 nt, Human
acagcucuucuccaggc

SEQ ID NO: 2974416 - RNA, 16 nt, Human
acagcucuucuccagg

SEQ ID NO: 2974417 - RNA, 17 nt, Human
acagccacggccaggcc

SEQ ID NO: 2974418 - RNA, 16 nt, Human
acagccacggccaggc

SEQ ID NO: 2974419 - RNA, 15 nt, Human
acagccacggccagg

SEQ ID NO: 2974420 - RNA, 18 nt, Human
acagccacggccaggcca

SEQ ID NO: 2974421 - RNA, 22 nt, Human
acaaaauguaggguuauaauaa

SEQ ID NO: 2974422 - RNA, 12 nt, Human
acaaggcaaggc

SEQ ID NO: 2974423 - RNA, 14 nt, Human
acaaggcaaggcug

SEQ ID NO: 2974424 - RNA, 17 nt, Human
acaaggauugcuacugu

SEQ ID NO: 2974425 - RNA, 20 nt, Human
acaaggcaaggcugucaauu

SEQ ID NO: 2974426 - RNA, 21 nt, Human
acacgagcaggcuacugucag

SEQ ID NO: 2974427 - RNA, 17 nt, Human
acacgcgugcacacacc

SEQ ID NO: 2974428 - RNA, 15 nt, Human
acacgcgugcacaca

SEQ ID NO: 2974429 - RNA, 14 nt, Human
acacgagcaggcua

SEQ ID NO: 2974430 - RNA, 19 nt, Human
acacgagcaggcuacuguc

SEQ ID NO: 2974431 - RNA, 19 nt, Human
acacauuuuuuaaaugcac

SEQ ID NO: 2974432 - RNA, 12 nt, Human
acacauuuuucu

SEQ ID NO: 2974433 - RNA, 22 nt, Human
acacauuuuuuaaaugcaccug

SEQ ID NO: 2974434 - RNA, 20 nt, Human
acacauuuuuuaaaugcacc

SEQ ID NO: 2974435 - RNA, 13 nt, Human
acacagcucuucu

SEQ ID NO: 2974436 - RNA, 11 nt, Human
acacagcucuu

SEQ ID NO: 2974437 - RNA, 22 nt, Human
acacauuuuauuuuauuaugca

SEQ ID NO: 2974438 - RNA, 21 nt, Human
acacauuuuauuuuauuaugc

SEQ ID NO: 2974439 - RNA, 19 nt, Human
acacagaggcugccucucc

SEQ ID NO: 2974440 - RNA, 14 nt, Human
acacagcucugucc

SEQ ID NO: 2974441 - RNA, 20 nt, Human
acacagcucuguccugggag

SEQ ID NO: 2974442 - RNA, 16 nt, Human
acuuuauuucucucau

SEQ ID NO: 2974443 - RNA, 16 nt, Human
acuuuguucuggcucu

SEQ ID NO: 2974444 - RNA, 17 nt, Human
acuuuguucuggcucuu

SEQ ID NO: 2974445 - RNA, 22 nt, Human
acuuuauuuucuauaauuuaaa

SEQ ID NO: 2974446 - RNA, 13 nt, Human
acuuuuaagacuu

SEQ ID NO: 2974447 - RNA, 12 nt, Human
acuuuuaagacu

SEQ ID NO: 2974448 - RNA, 20 nt, Human
acuuuguucuggcucuucca

SEQ ID NO: 2974449 - RNA, 19 nt, Human
acuuuguucuggcucuucc

SEQ ID NO: 2974450 - RNA, 13 nt, Human
acuuuuauaaacu

SEQ ID NO: 2974451 - RNA, 15 nt, Human
agaaaauaccaagga

SEQ ID NO: 2974452 - RNA, 19 nt, Human
agaaaauaguggugugauu

SEQ ID NO: 2974453 - RNA, 16 nt, Human
agaaaaucaggcuggc

SEQ ID NO: 2974454 - RNA, 14 nt, Human
agaaaauaacaaua

SEQ ID NO: 2974455 - RNA, 14 nt, Human
acuuuucuuugugg

SEQ ID NO: 2974456 - RNA, 14 nt, Human
acuuuugcaaauaa

SEQ ID NO: 2974457 - RNA, 15 nt, Human
acuuuugcaaauaag

SEQ ID NO: 2974458 - RNA, 16 nt, Human
acuuuucuuucagcca

SEQ ID NO: 2974459 - RNA, 20 nt, Human
acuuuucauaaccuagccuu

SEQ ID NO: 2974460 - RNA, 22 nt, Human
agaaaguugcaaggcaaauguu

SEQ ID NO: 2974461 - RNA, 21 nt, Human
agaaauaacagaagaaaauag

SEQ ID NO: 2974462 - RNA, 13 nt, Human
agaaauaacagaa

SEQ ID NO: 2974463 - RNA, 22 nt, Human
agaaauaacagaagaaaauaga

SEQ ID NO: 2974464 - RNA, 23 nt, Human
agaaaguacuucuccacccugcu

SEQ ID NO: 2974465 - RNA, 22 nt, Human
agaaaguacuucuccacccugc

SEQ ID NO: 2974466 - RNA, 23 nt, Human
agaaaaucuucauggaauucaca

SEQ ID NO: 2974467 - RNA, 16 nt, Human
acuucacgcccuuggc

SEQ ID NO: 2974468 - RNA, 23 nt, Human
acuucacauauugauuuccguua

SEQ ID NO: 2974469 - RNA, 21 nt, Human
acuucugucuucacaacagau

SEQ ID NO: 2974470 - RNA, 22 nt, Human
acuucugucuucacaacagauu

SEQ ID NO: 2974471 - RNA, 14 nt, Human
acuugggccacugu

SEQ ID NO: 2974472 - RNA, 15 nt, Human
acuugggccacugug

SEQ ID NO: 2974473 - RNA, 16 nt, Human
acuugguuuuuaaaaa

SEQ ID NO: 2974474 - RNA, 21 nt, Human
acuuggucugugagaugcuag

SEQ ID NO: 2974475 - RNA, 20 nt, Human
acugugcugagucugaaggc

SEQ ID NO: 2974476 - RNA, 18 nt, Human
acugugcuccagccuggg

SEQ ID NO: 2974477 - RNA, 22 nt, Human
acugugcugagucugaaggcug

SEQ ID NO: 2974478 - RNA, 20 nt, Human
acugugcuccagccugggca

SEQ ID NO: 2974479 - RNA, 14 nt, Human
acugguuuuaaaua

SEQ ID NO: 2974480 - RNA, 22 nt, Human
acuguaagaaaauaucacuugu

SEQ ID NO: 2974481 - RNA, 13 nt, Human
acuguaagaaaau

SEQ ID NO: 2974482 - RNA, 19 nt, Human
acuguaagaaaauaucacu

SEQ ID NO: 2974483 - RNA, 17 nt, Human
acugguuuguucccugu

SEQ ID NO: 2974484 - RNA, 18 nt, Human
acugguuccauggccucu

SEQ ID NO: 2974485 - RNA, 15 nt, Human
acuggagaaaaugga

SEQ ID NO: 2974486 - RNA, 17 nt, Human
acuggaagcacagcuuc

SEQ ID NO: 2974487 - RNA, 19 nt, Human
acuggaagcacagcuucau

SEQ ID NO: 2974488 - RNA, 16 nt, Human
acuggaagcacagcuu

SEQ ID NO: 2974489 - RNA, 18 nt, Human
acucugucucaguccaug

SEQ ID NO: 2974490 - RNA, 20 nt, Human
acucugucucaguccaugaa

SEQ ID NO: 2974491 - RNA, 13 nt, Human
acugccagcaacg

SEQ ID NO: 2974492 - RNA, 22 nt, Human
acuauuuuuguuuuuauuaaaa

SEQ ID NO: 2974493 - RNA, 21 nt, Human
acuauuuuuguuuuuauuaaa

SEQ ID NO: 2974494 - RNA, 19 nt, Human
acucaguccauagcagaga

SEQ ID NO: 2974495 - RNA, 18 nt, Human
acuauucugagaugacua

SEQ ID NO: 2974496 - RNA, 19 nt, Human
acuauucugagaugacuau

SEQ ID NO: 2974497 - RNA, 21 nt, Human
acuauucaaacagucucagga

SEQ ID NO: 2974498 - RNA, 18 nt, Human
acuauucaaacagucuca

SEQ ID NO: 2974499 - RNA, 20 nt, Human
acuaguauuucuaugaaaua

SEQ ID NO: 2974500 - RNA, 20 nt, Human
acuauuuuuguuuuuauuaa

SEQ ID NO: 2974501 - RNA, 18 nt, Human
acuauuuauuuacaaaug

SEQ ID NO: 2974502 - RNA, 17 nt, Human
acuauuuauuuacaaau

SEQ ID NO: 2974503 - RNA, 16 nt, Human
acuauuuauuuacaaa

SEQ ID NO: 2974504 - RNA, 13 nt, Human
acucaaaagcugg

SEQ ID NO: 2974505 - RNA, 14 nt, Human
acucaaaucaagaa

SEQ ID NO: 2974506 - RNA, 15 nt, Human
acucuagggaaaaac

SEQ ID NO: 2974507 - RNA, 17 nt, Human
acucuagggaaaaacca

SEQ ID NO: 2974508 - RNA, 23 nt, Human
acucuaucaaguauuauaccuuu

SEQ ID NO: 2974509 - RNA, 17 nt, Human
acucuauguucuaagaa

SEQ ID NO: 2974510 - RNA, 21 nt, Human
acucuaucaaguauuauaccu

SEQ ID NO: 2974511 - RNA, 19 nt, Human
acucugucgcccagucugg

SEQ ID NO: 2974512 - RNA, 15 nt, Human
acucauauuuucaug

SEQ ID NO: 2974513 - RNA, 15 nt, Human
accucugcagcaaua

SEQ ID NO: 2974514 - RNA, 20 nt, Human
accucugcagcaauaaagca

SEQ ID NO: 2974515 - RNA, 18 nt, Human
accucugcagcaauaaag

SEQ ID NO: 2974516 - RNA, 21 nt, Human
accucugcagcaauaaagcag

SEQ ID NO: 2974517 - RNA, 12 nt, Human
accugucccccu

SEQ ID NO: 2974518 - RNA, 15 nt, Human
accugucccccugac

SEQ ID NO: 2974519 - RNA, 16 nt, Human
accugucccccugaca

SEQ ID NO: 2974520 - RNA, 15 nt, Human
accuuuaagagaaau

SEQ ID NO: 2974521 - RNA, 18 nt, Human
accuuucccaucuuccaa

SEQ ID NO: 2974522 - RNA, 13 nt, Human
accuuucccaucu

SEQ ID NO: 2974523 - RNA, 17 nt, Human
accuuggcugcagggag

SEQ ID NO: 2974524 - RNA, 18 nt, Human
accuuggcugcagggagu

SEQ ID NO: 2974525 - RNA, 19 nt, Human
acgcaggcccccaggugcc

SEQ ID NO: 2974526 - RNA, 22 nt, Human
acgcaggcccccaggugccagu

SEQ ID NO: 2974527 - RNA, 12 nt, Human
acgcugugcugc

SEQ ID NO: 2974528 - RNA, 14 nt, Human
acgcugugcugccc

SEQ ID NO: 2974529 - RNA, 11 nt, Human
acgcugugcug

SEQ ID NO: 2974530 - RNA, 14 nt, Human
acgucugacaggca

SEQ ID NO: 2974531 - RNA, 14 nt, Human
acggaacucaaaua

SEQ ID NO: 2974532 - RNA, 13 nt, Human
acgucugacaggc

SEQ ID NO: 2974533 - RNA, 13 nt, Human
acuaagagagaau

SEQ ID NO: 2974534 - RNA, 11 nt, Human
acgugaguccu

SEQ ID NO: 2974535 - RNA, 13 nt, Human
aaaaacacagcaa

SEQ ID NO: 2974536 - RNA, 18 nt, Human
aaaaacacagcaagggug

SEQ ID NO: 2974537 - RNA, 12 nt, Human
aaaaacacagca

SEQ ID NO: 2974538 - RNA, 15 nt, Human
aaaaaauauuuuccu

SEQ ID NO: 2974539 - RNA, 15 nt, Human
cacaaagcagauccu

SEQ ID NO: 2974540 - RNA, 23 nt, Human
cacaaagaaccaccaggaaagca

SEQ ID NO: 2974541 - RNA, 18 nt, Human
cacaaaaguuucucuuuu

SEQ ID NO: 2974542 - RNA, 16 nt, Human
cacaaaaguuucucuu

SEQ ID NO: 2974543 - RNA, 11 nt, Human
cacaacagauu

SEQ ID NO: 2974544 - RNA, 15 nt, Human
caauuuuaaacauau

SEQ ID NO: 2974545 - RNA, 13 nt, Human
caauuuuaaacau

SEQ ID NO: 2974546 - RNA, 12 nt, Human
caauuuuaaaca

SEQ ID NO: 2974547 - RNA, 22 nt, Human
caaugaaugaaugaauggcuaa

SEQ ID NO: 2974548 - RNA, 19 nt, Human
caaugcaaaccaucauuga

SEQ ID NO: 2974549 - RNA, 22 nt, Human
caaugcacuuuguucuggcucu

SEQ ID NO: 2974550 - RNA, 23 nt, Human
caaugcacuuuguucuggcucuu

SEQ ID NO: 2974551 - RNA, 17 nt, Human
caaugcaaaccaucauu

SEQ ID NO: 2974552 - RNA, 18 nt, Human
caaugcaaaccaucauug

SEQ ID NO: 2974553 - RNA, 21 nt, Human
caauaucuuuuuuuuaauaaa

SEQ ID NO: 2974554 - RNA, 22 nt, Human
caauaggugcugaguguacaga

SEQ ID NO: 2974555 - RNA, 21 nt, Human
caauaggaaaaacugauuuuu

SEQ ID NO: 2974556 - RNA, 20 nt, Human
caauaggaaaaacugauuuu

SEQ ID NO: 2974557 - RNA, 18 nt, Human
caauaggaaaaacugauu

SEQ ID NO: 2974558 - RNA, 19 nt, Human
cacacucaaaucaagaaac

SEQ ID NO: 2974559 - RNA, 14 nt, Human
cacacugaagaagc

SEQ ID NO: 2974560 - RNA, 12 nt, Human
cacacuggcuca

SEQ ID NO: 2974561 - RNA, 19 nt, Human
cacacuggcucacccaguc

SEQ ID NO: 2974562 - RNA, 16 nt, Human
cacacuggcucaccca

SEQ ID NO: 2974563 - RNA, 15 nt, Human
cacacuggcucaccc

SEQ ID NO: 2974564 - RNA, 17 nt, Human
cacagaguuguuacauu

SEQ ID NO: 2974565 - RNA, 16 nt, Human
cacagaguuguuacau

SEQ ID NO: 2974566 - RNA, 21 nt, Human
cacagagaaaguacuucucca

SEQ ID NO: 2974567 - RNA, 22 nt, Human
cacagacccugcccugugggcc

SEQ ID NO: 2974568 - RNA, 21 nt, Human
cacacuugacaucaacugcau

SEQ ID NO: 2974569 - RNA, 13 nt, Human
cacaacuauauug

SEQ ID NO: 2974570 - RNA, 14 nt, Human
cacacaccagagcc

SEQ ID NO: 2974571 - RNA, 19 nt, Human
cacacagaggcugccucuc

SEQ ID NO: 2974572 - RNA, 12 nt, Human
cacacagcucug

SEQ ID NO: 2974573 - RNA, 23 nt, Human
cacaccauaagcuacugccaucc

SEQ ID NO: 2974574 - RNA, 21 nt, Human
cacaccauaagcuacugccau

SEQ ID NO: 2974575 - RNA, 15 nt, Human
cacaccauaagcuac

SEQ ID NO: 2974576 - RNA, 13 nt, Human
cacaccagagccc

SEQ ID NO: 2974577 - RNA, 12 nt, Human
cacaccagagcc

SEQ ID NO: 2974578 - RNA, 15 nt, Human
cacaccagagcccac

SEQ ID NO: 2974579 - RNA, 15 nt, Human
cacauuaaaugacuc

SEQ ID NO: 2974580 - RNA, 13 nt, Human
cacauuaaaugac

SEQ ID NO: 2974581 - RNA, 17 nt, Human
cacauuaaagguacuuu

SEQ ID NO: 2974582 - RNA, 16 nt, Human
cacauuccugaugcuu

SEQ ID NO: 2974583 - RNA, 16 nt, Human
cacauuccugaacagg

SEQ ID NO: 2974584 - RNA, 15 nt, Human
cacaugugcacaugc

SEQ ID NO: 2974585 - RNA, 14 nt, Human
cacaugugcacaug

SEQ ID NO: 2974586 - RNA, 17 nt, Human
cacaugugcacaugcac

SEQ ID NO: 2974587 - RNA, 19 nt, Human
cacaugccucucucaggcc

SEQ ID NO: 2974588 - RNA, 23 nt, Human
cacauguccaagaagcccaggaa

SEQ ID NO: 2974589 - RNA, 19 nt, Human
cacaucagcacgauuucug

SEQ ID NO: 2974590 - RNA, 13 nt, Human
cacaugccucucu

SEQ ID NO: 2974591 - RNA, 17 nt, Human
cacaugccucucucagg

SEQ ID NO: 2974592 - RNA, 18 nt, Human
cacaugccucucucaggc

SEQ ID NO: 2974593 - RNA, 18 nt, Human
cacaucagcacgauuucu

SEQ ID NO: 2974594 - RNA, 12 nt, Human
cacauaucuguc

SEQ ID NO: 2974595 - RNA, 20 nt, Human
cacauauugauuuccguuaa

SEQ ID NO: 2974596 - RNA, 15 nt, Human
caccaagcccaguua

SEQ ID NO: 2974597 - RNA, 17 nt, Human
cacauuggaaacaaguc

SEQ ID NO: 2974598 - RNA, 15 nt, Human
caccacacccagccc

SEQ ID NO: 2974599 - RNA, 13 nt, Human
caccacacccagc

SEQ ID NO: 2974600 - RNA, 17 nt, Human
caccacacccagcccac

SEQ ID NO: 2974601 - RNA, 18 nt, Human
caccacuacauucuguua

SEQ ID NO: 2974602 - RNA, 17 nt, Human
caccacuacauucuguu

SEQ ID NO: 2974603 - RNA, 16 nt, Human
caccacuacauucugu

SEQ ID NO: 2974604 - RNA, 14 nt, Human
caccaccucuuugg

SEQ ID NO: 2974605 - RNA, 20 nt, Human
caccacuacauucuguuaau

SEQ ID NO: 2974606 - RNA, 19 nt, Human
caccacuacauucuguuaa

SEQ ID NO: 2974607 - RNA, 18 nt, Human
caccacaugugcacaugc

SEQ ID NO: 2974608 - RNA, 15 nt, Human
caccacaugugcaca

SEQ ID NO: 2974609 - RNA, 19 nt, Human
caccacaugugcacaugca

SEQ ID NO: 2974610 - RNA, 22 nt, Human
cacagcaguugaaaagacucca

SEQ ID NO: 2974611 - RNA, 20 nt, Human
cacagaugggugcuuggagg

SEQ ID NO: 2974612 - RNA, 14 nt, Human
cacagaugggugcu

SEQ ID NO: 2974613 - RNA, 18 nt, Human
cacagaugggugcuugga

SEQ ID NO: 2974614 - RNA, 20 nt, Human
cacagaguuguuacauuuuu

SEQ ID NO: 2974615 - RNA, 20 nt, Human
cacaggaaccacaagacugc

SEQ ID NO: 2974616 - RNA, 15 nt, Human
cacaggaaguagagg

SEQ ID NO: 2974617 - RNA, 19 nt, Human
cacaggaaccacaagacug

SEQ ID NO: 2974618 - RNA, 16 nt, Human
cacaggaucagucuga

SEQ ID NO: 2974619 - RNA, 15 nt, Human
cacaggaucagucug

SEQ ID NO: 2974620 - RNA, 12 nt, Human
cacaggaucagu

SEQ ID NO: 2974621 - RNA, 10 nt, Human
cacaggcagg

SEQ ID NO: 2974622 - RNA, 19 nt, Human
cacaggcccggcuccaggc

SEQ ID NO: 2974623 - RNA, 18 nt, Human
cacaggcccggcuccagg

SEQ ID NO: 2974624 - RNA, 17 nt, Human
cacaggcccggcuccag

SEQ ID NO: 2974625 - RNA, 16 nt, Human
cacaggcccggcucca

SEQ ID NO: 2974626 - RNA, 14 nt, Human
cacaguuuucugag

SEQ ID NO: 2974627 - RNA, 21 nt, Human
cacauaagccaaaacugagca

SEQ ID NO: 2974628 - RNA, 19 nt, Human
cacauaagccaaaacugag

SEQ ID NO: 2974629 - RNA, 22 nt, Human
cacauaagccaaaacugagcau

SEQ ID NO: 2974630 - RNA, 17 nt, Human
cacauacacacacacgc

SEQ ID NO: 2974631 - RNA, 23 nt, Human
cacaggcccggcuccaggcuccu

SEQ ID NO: 2974632 - RNA, 20 nt, Human
cacaggcccggcuccaggcu

SEQ ID NO: 2974633 - RNA, 18 nt, Human
cacagugagucgaggaca

SEQ ID NO: 2974634 - RNA, 20 nt, Human
cacagugagucgaggacagg

SEQ ID NO: 2974635 - RNA, 19 nt, Human
cacagugagucgaggacag

SEQ ID NO: 2974636 - RNA, 22 nt, Human
caacauuucucauguugaaacu

SEQ ID NO: 2974637 - RNA, 19 nt, Human
caaccccuucgcuccugug

SEQ ID NO: 2974638 - RNA, 18 nt, Human
caaccccuucgcuccugu

SEQ ID NO: 2974639 - RNA, 21 nt, Human
caaccccuucgcuccuguguc

SEQ ID NO: 2974640 - RNA, 23 nt, Human
caacaugccagccacugugauag

SEQ ID NO: 2974641 - RNA, 15 nt, Human
caaauugugugaaag

SEQ ID NO: 2974642 - RNA, 14 nt, Human
caaauuuacagaga

SEQ ID NO: 2974643 - RNA, 15 nt, Human
caaauuuacagagac

SEQ ID NO: 2974644 - RNA, 23 nt, Human
caacaggcugggcuucaguggca

SEQ ID NO: 2974645 - RNA, 24 nt, Human
caacaggcugggcuucaguggcag

SEQ ID NO: 2974646 - RNA, 19 nt, Human
caacagguuuuccugaaga

SEQ ID NO: 2974647 - RNA, 18 nt, Human
caacaggguuuuuuucca

SEQ ID NO: 2974648 - RNA, 15 nt, Human
caacagguuuuccug

SEQ ID NO: 2974649 - RNA, 22 nt, Human
caacaucuuggucagauuugaa

SEQ ID NO: 2974650 - RNA, 20 nt, Human
caacucuccuccagagucag

SEQ ID NO: 2974651 - RNA, 21 nt, Human
caacucugaaggguaauuaua

SEQ ID NO: 2974652 - RNA, 16 nt, Human
caacugcauuggcuuu

SEQ ID NO: 2974653 - RNA, 12 nt, Human
caacccucauca

SEQ ID NO: 2974654 - RNA, 15 nt, Human
caacccucaucacca

SEQ ID NO: 2974655 - RNA, 16 nt, Human
caaccugauugugucu

SEQ ID NO: 2974656 - RNA, 19 nt, Human
caacucuccuccagaguca

SEQ ID NO: 2974657 - RNA, 17 nt, Human
caagcacuaaacaaaga

SEQ ID NO: 2974658 - RNA, 18 nt, Human
caagcaccuccugccucg

SEQ ID NO: 2974659 - RNA, 21 nt, Human
caagccaccaacauacuccca

SEQ ID NO: 2974660 - RNA, 16 nt, Human
caagcgugagccacug

SEQ ID NO: 2974661 - RNA, 13 nt, Human
caaggauccugag

SEQ ID NO: 2974662 - RNA, 21 nt, Human
caaggaugaucuaggaagacu

SEQ ID NO: 2974663 - RNA, 22 nt, Human
caaggauccugagccagauuuc

SEQ ID NO: 2974664 - RNA, 22 nt, Human
caaggacccagccugagauggu

SEQ ID NO: 2974665 - RNA, 18 nt, Human
caagcgugagccacugca

SEQ ID NO: 2974666 - RNA, 17 nt, Human
caagcgugagccacugc

SEQ ID NO: 2974667 - RNA, 17 nt, Human
caagugauucuccugcc

SEQ ID NO: 2974668 - RNA, 16 nt, Human
caagugauucuccugc

SEQ ID NO: 2974669 - RNA, 19 nt, Human
caagugaaaaaggaggaag

SEQ ID NO: 2974670 - RNA, 21 nt, Human
caagugauucuccugccucag

SEQ ID NO: 2974671 - RNA, 22 nt, Human
caagugauucuccugccucagc

SEQ ID NO: 2974672 - RNA, 22 nt, Human
caagugugguagagugugccug

SEQ ID NO: 2974673 - RNA, 23 nt, Human
caaggugggaggauugcuugagc

SEQ ID NO: 2974674 - RNA, 12 nt, Human
caaggugggagg

SEQ ID NO: 2974675 - RNA, 19 nt, Human
caagggccuggccugagcu

SEQ ID NO: 2974676 - RNA, 16 nt, Human
caagggccuggccuga

SEQ ID NO: 2974677 - RNA, 15 nt, Human
caaggauugcuacug

SEQ ID NO: 2974678 - RNA, 17 nt, Human
caaagcuuuugcauauu

SEQ ID NO: 2974679 - RNA, 16 nt, Human
caaagcuuguuaagau

SEQ ID NO: 2974680 - RNA, 15 nt, Human
caaagcuaggccugg

SEQ ID NO: 2974681 - RNA, 21 nt, Human
caaagccaaagcuaggccugg

SEQ ID NO: 2974682 - RNA, 20 nt, Human
caaagccaaagcuaggccug

SEQ ID NO: 2974683 - RNA, 17 nt, Human
caaagcuaggccuggcc

SEQ ID NO: 2974684 - RNA, 16 nt, Human
caaagcuaggccuggc

SEQ ID NO: 2974685 - RNA, 18 nt, Human
caaagcuaggccuggcca

SEQ ID NO: 2974686 - RNA, 23 nt, Human
caaacuuuauugauucaccuccu

SEQ ID NO: 2974687 - RNA, 18 nt, Human
auuuuuuuacuaauagac

SEQ ID NO: 2974688 - RNA, 16 nt, Human
caaaggauacuuauuu

SEQ ID NO: 2974689 - RNA, 21 nt, Human
caaaggauacuuauuuaaaua

SEQ ID NO: 2974690 - RNA, 21 nt, Human
caaaggaugcccaaagaugca

SEQ ID NO: 2974691 - RNA, 13 nt, Human
caaauaaguguau

SEQ ID NO: 2974692 - RNA, 18 nt, Human
caaauaaguguauuuuga

SEQ ID NO: 2974693 - RNA, 17 nt, Human
caaauaaguguauuuug

SEQ ID NO: 2974694 - RNA, 16 nt, Human
caaauaaguguauuuu

SEQ ID NO: 2974695 - RNA, 14 nt, Human
caaauaugcaaagc

SEQ ID NO: 2974696 - RNA, 21 nt, Human
caaauaaguguauuuugaaau

SEQ ID NO: 2974697 - RNA, 20 nt, Human
caaauaaguguauuuugaaa

SEQ ID NO: 2974698 - RNA, 19 nt, Human
caaauaaguguauuuugaa

SEQ ID NO: 2974699 - RNA, 16 nt, Human
caaauaugcaaagcac

SEQ ID NO: 2974700 - RNA, 17 nt, Human
caaauaugcaaagcacu

SEQ ID NO: 2974701 - RNA, 18 nt, Human
caaauaugcaaagcacug

SEQ ID NO: 2974702 - RNA, 13 nt, Human
caaaucagcugcu

SEQ ID NO: 2974703 - RNA, 16 nt, Human
caaaucagcugcuacu

SEQ ID NO: 2974704 - RNA, 22 nt, Human
caaauucugcuugcuugcuuuu

SEQ ID NO: 2974705 - RNA, 20 nt, Human
caaauguucaucaaugaaug

SEQ ID NO: 2974706 - RNA, 21 nt, Human
caaauguucaucaaugaauga

SEQ ID NO: 2974707 - RNA, 22 nt, Human
cacccccacccaagggccuggc

SEQ ID NO: 2974708 - RNA, 14 nt, Human
caccccggccaccu

SEQ ID NO: 2974709 - RNA, 15 nt, Human
caccccggccaccug

SEQ ID NO: 2974710 - RNA, 16 nt, Human
caccccggccaccugc

SEQ ID NO: 2974711 - RNA, 17 nt, Human
caccccggccaccugcg

SEQ ID NO: 2974712 - RNA, 16 nt, Human
cacccaagggccuggc

SEQ ID NO: 2974713 - RNA, 17 nt, Human
cacccaagggccuggcc

SEQ ID NO: 2974714 - RNA, 18 nt, Human
cacccaagggccuggccu

SEQ ID NO: 2974715 - RNA, 19 nt, Human
cacccaagggccuggccug

SEQ ID NO: 2974716 - RNA, 20 nt, Human
cacccaagggccuggccuga

SEQ ID NO: 2974717 - RNA, 21 nt, Human
cacccaagggccuggccugag

SEQ ID NO: 2974718 - RNA, 23 nt, Human
cacccaagggccuggccugagcu

SEQ ID NO: 2974719 - RNA, 15 nt, Human
cacccacaccauaag

SEQ ID NO: 2974720 - RNA, 22 nt, Human
cacccaccaucaugucuggcua

SEQ ID NO: 2974721 - RNA, 20 nt, Human
cacccaccaucaugucuggc

SEQ ID NO: 2974722 - RNA, 16 nt, Human
cacccaccucagccuc

SEQ ID NO: 2974723 - RNA, 14 nt, Human
cacccaccucagcc

SEQ ID NO: 2974724 - RNA, 13 nt, Human
cacccaccucagc

SEQ ID NO: 2974725 - RNA, 12 nt, Human
cacccaccucag

SEQ ID NO: 2974726 - RNA, 12 nt, Human
caccccagcccc

SEQ ID NO: 2974727 - RNA, 13 nt, Human
caccccagcccca

SEQ ID NO: 2974728 - RNA, 14 nt, Human
uuuguguacuuuua

SEQ ID NO: 2974729 - RNA, 13 nt, Human
uuuguguacuuuu

SEQ ID NO: 2974730 - RNA, 17 nt, Human
uuuguguacuuuuaaga

SEQ ID NO: 2974731 - RNA, 23 nt, Human
uugcuaacagcaacacaaagcuu

SEQ ID NO: 2974732 - RNA, 16 nt, Human
uugcuaagcauuccaa

SEQ ID NO: 2974733 - RNA, 18 nt, Human
uugcuaagcauuccaacu

SEQ ID NO: 2974734 - RNA, 19 nt, Human
uugcugcugauuuaaacac

SEQ ID NO: 2974735 - RNA, 17 nt, Human
uugcugcugauuuaaac

SEQ ID NO: 2974736 - RNA, 21 nt, Human
uugcugcugauuuaaacacau

SEQ ID NO: 2974737 - RNA, 14 nt, Human
uugcugcuugaggc

SEQ ID NO: 2974738 - RNA, 16 nt, Human
uugcugcuugaggcaa

SEQ ID NO: 2974739 - RNA, 16 nt, Human
uugcugcuuguacacu

SEQ ID NO: 2974740 - RNA, 16 nt, Human
uugcugucccuuuucc

SEQ ID NO: 2974741 - RNA, 18 nt, Human
uugcugucccuuuuccuu

SEQ ID NO: 2974742 - RNA, 18 nt, Human
uugccuuggcugcaguuu

SEQ ID NO: 2974743 - RNA, 21 nt, Human
uugccauguuggccaggcugg

SEQ ID NO: 2974744 - RNA, 20 nt, Human
uugccauguuggccaggcug

SEQ ID NO: 2974745 - RNA, 17 nt, Human
uugccuuuuuauaacuu

SEQ ID NO: 2974746 - RNA, 15 nt, Human
uuggauuguccccga

SEQ ID NO: 2974747 - RNA, 15 nt, Human
uuggacccugaggcc

SEQ ID NO: 2974748 - RNA, 18 nt, Human
uuggacccugaggcccag

SEQ ID NO: 2974749 - RNA, 19 nt, Human
uuggacccugaggcccaga

SEQ ID NO: 2974750 - RNA, 21 nt, Human
uuggacccugaggcccagagg

SEQ ID NO: 2974751 - RNA, 19 nt, Human
uuggaagcuccgcuuucua

SEQ ID NO: 2974752 - RNA, 18 nt, Human
uuggacaaaauggaauac

SEQ ID NO: 2974753 - RNA, 20 nt, Human
uugggcacaucauuucaaga

SEQ ID NO: 2974754 - RNA, 18 nt, Human
uugguaacucuguaauuc

SEQ ID NO: 2974755 - RNA, 20 nt, Human
uugguaaggggaauugagga

SEQ ID NO: 2974756 - RNA, 13 nt, Human
uuguaaaauggug

SEQ ID NO: 2974757 - RNA, 12 nt, Human
uuguaaaauggu

SEQ ID NO: 2974758 - RNA, 20 nt, Human
uuggucugacccacugcuuu

SEQ ID NO: 2974759 - RNA, 13 nt, Human
uugguccugcugc

SEQ ID NO: 2974760 - RNA, 23 nt, Human
uuggcuucacggaagagccuugc

SEQ ID NO: 2974761 - RNA, 20 nt, Human
uuguaaaauggugugaccac

SEQ ID NO: 2974762 - RNA, 16 nt, Human
uuguaccgcaauguga

SEQ ID NO: 2974763 - RNA, 20 nt, Human
uuguaccacuuuugcaaaua

SEQ ID NO: 2974764 - RNA, 17 nt, Human
uuguagaagucacauuc

SEQ ID NO: 2974765 - RNA, 22 nt, Human
uuguagaagucacauuccugaa

SEQ ID NO: 2974766 - RNA, 15 nt, Human
uuguagcauccugga

SEQ ID NO: 2974767 - RNA, 20 nt, Human
uugucuaugggacucaaugc

SEQ ID NO: 2974768 - RNA, 22 nt, Human
uugucuuaaaaaguggaaaaau

SEQ ID NO: 2974769 - RNA, 22 nt, Human
uugucaaaguggugagaggcau

SEQ ID NO: 2974770 - RNA, 14 nt, Human
uugucuaugggacu

SEQ ID NO: 2974771 - RNA, 20 nt, Human
uuguauuuuacuaauaaaau

SEQ ID NO: 2974772 - RNA, 23 nt, Human
uugcagcucuccccuucucugua

SEQ ID NO: 2974773 - RNA, 23 nt, Human
uugcagacaggcaagcaccuccu

SEQ ID NO: 2974774 - RNA, 13 nt, Human
uugauucauaaug

SEQ ID NO: 2974775 - RNA, 17 nt, Human
uugauucauaaugacuu

SEQ ID NO: 2974776 - RNA, 22 nt, Human
uugcagacaggcaagcaccucc

SEQ ID NO: 2974777 - RNA, 18 nt, Human
uugccaucccucccucca

SEQ ID NO: 2974778 - RNA, 17 nt, Human
uugccaucccucccucc

SEQ ID NO: 2974779 - RNA, 16 nt, Human
uugccaucccucccuc

SEQ ID NO: 2974780 - RNA, 14 nt, Human
uugccaucccuccc

SEQ ID NO: 2974781 - RNA, 23 nt, Human
uugccaucccucccuccaccucc

SEQ ID NO: 2974782 - RNA, 22 nt, Human
uugccaucccucccuccaccuc

SEQ ID NO: 2974783 - RNA, 19 nt, Human
uugccauguuggccaggcu

SEQ ID NO: 2974784 - RNA, 18 nt, Human
uugccauguuggccaggc

SEQ ID NO: 2974785 - RNA, 17 nt, Human
uugccauguuggccagg

SEQ ID NO: 2974786 - RNA, 16 nt, Human
uugccauguuggccag

SEQ ID NO: 2974787 - RNA, 13 nt, Human
uugccaucccucc

SEQ ID NO: 2974788 - RNA, 20 nt, Human
uugauaugccuuuucccaac

SEQ ID NO: 2974789 - RNA, 16 nt, Human
uugauaugcuuauaca

SEQ ID NO: 2974790 - RNA, 16 nt, Human
uugauaugugaacagu

SEQ ID NO: 2974791 - RNA, 16 nt, Human
uugauucagcucugca

SEQ ID NO: 2974792 - RNA, 23 nt, Human
uugauucagacagcugccuggga

SEQ ID NO: 2974793 - RNA, 17 nt, Human
uugauucagacagcugc

SEQ ID NO: 2974794 - RNA, 21 nt, Human
uugauucagacagcugccugg

SEQ ID NO: 2974795 - RNA, 14 nt, Human
uugagccugggagg

SEQ ID NO: 2974796 - RNA, 14 nt, Human
uugagccuugaacu

SEQ ID NO: 2974797 - RNA, 16 nt, Human
uugagccuugaacuuu

SEQ ID NO: 2974798 - RNA, 15 nt, Human
uugagccuugaacuu

SEQ ID NO: 2974799 - RNA, 22 nt, Human
uugaauuccuaaaauuauggaa

SEQ ID NO: 2974800 - RNA, 19 nt, Human
uugagccuugaacuuugac

SEQ ID NO: 2974801 - RNA, 15 nt, Human
uugaaacacugguuu

SEQ ID NO: 2974802 - RNA, 15 nt, Human
uugaacuuugaccuc

SEQ ID NO: 2974803 - RNA, 21 nt, Human
uugaaaaucuuauaauuuaaa

SEQ ID NO: 2974804 - RNA, 21 nt, Human
uucuuuccugaggcugggcuc

SEQ ID NO: 2974805 - RNA, 18 nt, Human
uucuuuccacagaagcuc

SEQ ID NO: 2974806 - RNA, 22 nt, Human
uugaagauucuauguuaauauu

SEQ ID NO: 2974807 - RNA, 23 nt, Human
uugaagauucuauguuaauauuu

SEQ ID NO: 2974808 - RNA, 13 nt, Human
uugaagauucuau

SEQ ID NO: 2974809 - RNA, 21 nt, Human
uugaagagguuuuaaagcuuc

SEQ ID NO: 2974810 - RNA, 12 nt, Human
uugaagcagagu

SEQ ID NO: 2974811 - RNA, 14 nt, Human
uugaagcagagugg

SEQ ID NO: 2974812 - RNA, 20 nt, Human
uugaagcacagugaucaagu

SEQ ID NO: 2974813 - RNA, 18 nt, Human
uugaacuuugaccucugc

SEQ ID NO: 2974814 - RNA, 17 nt, Human
uugaacuuugaccucug

SEQ ID NO: 2974815 - RNA, 16 nt, Human
uugaagagguuuuaaa

SEQ ID NO: 2974816 - RNA, 12 nt, Human
uugaaugaugcc

SEQ ID NO: 2974817 - RNA, 16 nt, Human
uugaaugaugccauga

SEQ ID NO: 2974818 - RNA, 13 nt, Human
uucuuguauuuau

SEQ ID NO: 2974819 - RNA, 17 nt, Human
uucuuagggaaggauac

SEQ ID NO: 2974820 - RNA, 19 nt, Human
uucuuaggguuaugauuaa

SEQ ID NO: 2974821 - RNA, 13 nt, Human
uucuucagagacu

SEQ ID NO: 2974822 - RNA, 24 nt, Human
uucuaaguaaaaccacagcaguug

SEQ ID NO: 2974823 - RNA, 20 nt, Human
uucuggcagaguugaagaca

SEQ ID NO: 2974824 - RNA, 22 nt, Human
uuucacaguguguggucaacau

SEQ ID NO: 2974825 - RNA, 16 nt, Human
uuucacacaaacaagg

SEQ ID NO: 2974826 - RNA, 16 nt, Human
uuucagccaagaauuc

SEQ ID NO: 2974827 - RNA, 17 nt, Human
uuucagccaagaauucu

SEQ ID NO: 2974828 - RNA, 12 nt, Human
uuucucuaggaa

SEQ ID NO: 2974829 - RNA, 18 nt, Human
uuucuacccagcgagccc

SEQ ID NO: 2974830 - RNA, 15 nt, Human
uuucuacccagcgag

SEQ ID NO: 2974831 - RNA, 22 nt, Human
uuucuacccagcgagcccuggu

SEQ ID NO: 2974832 - RNA, 12 nt, Human
uuucugaaauuu

SEQ ID NO: 2974833 - RNA, 14 nt, Human
uuucugaaauaaca

SEQ ID NO: 2974834 - RNA, 19 nt, Human
uuuccuggcacugcuucca

SEQ ID NO: 2974835 - RNA, 23 nt, Human
uuuccuggcacugcuuccaguga

SEQ ID NO: 2974836 - RNA, 19 nt, Human
uuucuaaaucuccaaaaua

SEQ ID NO: 2974837 - RNA, 17 nt, Human
uuuggguuuauuuggaa

SEQ ID NO: 2974838 - RNA, 18 nt, Human
uuugguaaggggaauuga

SEQ ID NO: 2974839 - RNA, 14 nt, Human
uuugguuauuuuac

SEQ ID NO: 2974840 - RNA, 13 nt, Human
uuugguuauuuua

SEQ ID NO: 2974841 - RNA, 22 nt, Human
uuugguugguaacucuguaauu

SEQ ID NO: 2974842 - RNA, 15 nt, Human
uuugccaauuugcac

SEQ ID NO: 2974843 - RNA, 20 nt, Human
uuugccaauuugcacauuaa

SEQ ID NO: 2974844 - RNA, 17 nt, Human
uuugauaugugaacagu

SEQ ID NO: 2974845 - RNA, 15 nt, Human
uuugauaugugaaca

SEQ ID NO: 2974846 - RNA, 14 nt, Human
uuugauaugugaac

SEQ ID NO: 2974847 - RNA, 18 nt, Human
uuugauauggguaguauu

SEQ ID NO: 2974848 - RNA, 15 nt, Human
uuuggacccugaggc

SEQ ID NO: 2974849 - RNA, 19 nt, Human
uuuggacccugaggcccag

SEQ ID NO: 2974850 - RNA, 23 nt, Human
uuugcuuuauggguuuggcuugu

SEQ ID NO: 2974851 - RNA, 14 nt, Human
uuugcuugaaagaa

SEQ ID NO: 2974852 - RNA, 16 nt, Human
uuugcuugaaagaaaa

SEQ ID NO: 2974853 - RNA, 21 nt, Human
uuugaagguagaauguuuuca

SEQ ID NO: 2974854 - RNA, 16 nt, Human
uuugagaucagccugg

SEQ ID NO: 2974855 - RNA, 17 nt, Human
uuugagaucagccuggg

SEQ ID NO: 2974856 - RNA, 21 nt, Human
uuugaaauuguauuacaaauc

SEQ ID NO: 2974857 - RNA, 18 nt, Human
uuugaagcacagugauca

SEQ ID NO: 2974858 - RNA, 19 nt, Human
uuucuuguguguuuauugu

SEQ ID NO: 2974859 - RNA, 15 nt, Human
uuuaaacuacauuag

SEQ ID NO: 2974860 - RNA, 13 nt, Human
uuuaacagaaaug

SEQ ID NO: 2974861 - RNA, 15 nt, Human
uuuaaacacauuaaa

SEQ ID NO: 2974862 - RNA, 14 nt, Human
uuuaaacacauuaa

SEQ ID NO: 2974863 - RNA, 12 nt, Human
uuuaaacauauc

SEQ ID NO: 2974864 - RNA, 22 nt, Human
uuuaaacauauccaaguuugaa

SEQ ID NO: 2974865 - RNA, 13 nt, Human
uuuaaacauaucc

SEQ ID NO: 2974866 - RNA, 12 nt, Human
uuuaaaaugucu

SEQ ID NO: 2974867 - RNA, 13 nt, Human
uuuaaacaaaaua

SEQ ID NO: 2974868 - RNA, 16 nt, Human
uuuaaacaaaauagaa

SEQ ID NO: 2974869 - RNA, 19 nt, Human
uuuaaaauacacacucaaa

SEQ ID NO: 2974870 - RNA, 16 nt, Human
uuuaaaauaagucuga

SEQ ID NO: 2974871 - RNA, 16 nt, Human
uuuaaaaucauuucug

SEQ ID NO: 2974872 - RNA, 14 nt, Human
uuuaaaagaaugau

SEQ ID NO: 2974873 - RNA, 17 nt, Human
uuuaaaagaaugauuau

SEQ ID NO: 2974874 - RNA, 13 nt, Human
uuuaaaagauaca

SEQ ID NO: 2974875 - RNA, 14 nt, Human
uuuaaaagcauuuu

SEQ ID NO: 2974876 - RNA, 15 nt, Human
uuuaaaagcauuuuu

SEQ ID NO: 2974877 - RNA, 20 nt, Human
uuguuauuuauugaaaugau

SEQ ID NO: 2974878 - RNA, 15 nt, Human
uuguuauuuauugaa

SEQ ID NO: 2974879 - RNA, 18 nt, Human
uuguuuaaaaucauuucu

SEQ ID NO: 2974880 - RNA, 17 nt, Human
uuguuuaaaaucauuuc

SEQ ID NO: 2974881 - RNA, 12 nt, Human
uuguuuaauggu

SEQ ID NO: 2974882 - RNA, 23 nt, Human
uuguuuaaugguaguuuuacagu

SEQ ID NO: 2974883 - RNA, 15 nt, Human
uugucuuuggacccu

SEQ ID NO: 2974884 - RNA, 20 nt, Human
uugucuuuggacccugaggc

SEQ ID NO: 2974885 - RNA, 24 nt, Human
uugucuuuggacccugaggcccag

SEQ ID NO: 2974886 - RNA, 20 nt, Human
uuguuuggggaugagaaagg

SEQ ID NO: 2974887 - RNA, 22 nt, Human
uuuauccuagucauucuucccu

SEQ ID NO: 2974888 - RNA, 20 nt, Human
uuuauacauaaacaagacca

SEQ ID NO: 2974889 - RNA, 12 nt, Human
uuuauacauaaa

SEQ ID NO: 2974890 - RNA, 16 nt, Human
uuuaucuguucauaug

SEQ ID NO: 2974891 - RNA, 15 nt, Human
uuuaucuguucauau

SEQ ID NO: 2974892 - RNA, 22 nt, Human
uuuaugagaaacuggcaaagca

SEQ ID NO: 2974893 - RNA, 23 nt, Human
uuuauccuagucauucuucccua

SEQ ID NO: 2974894 - RNA, 18 nt, Human
uuuauaaacuuuaccuuu

SEQ ID NO: 2974895 - RNA, 22 nt, Human
uuuagacccuauugcugcuuga

SEQ ID NO: 2974896 - RNA, 19 nt, Human
uuuagacccuauugcugcu

SEQ ID NO: 2974897 - RNA, 17 nt, Human
uuuacaguguuucuggc

SEQ ID NO: 2974898 - RNA, 19 nt, Human
uuuacaguguuucuggcuu

SEQ ID NO: 2974899 - RNA, 13 nt, Human
uuuacagagacag

SEQ ID NO: 2974900 - RNA, 12 nt, Human
uuuaauaugcaa

SEQ ID NO: 2974901 - RNA, 16 nt, Human
uuuaauaugcaaaguc

SEQ ID NO: 2974902 - RNA, 15 nt, Human
uuuaauaauguuuca

SEQ ID NO: 2974903 - RNA, 14 nt, Human
uuuaauaauguuuc

SEQ ID NO: 2974904 - RNA, 13 nt, Human
uuuaauaaaccau

SEQ ID NO: 2974905 - RNA, 19 nt, Human
uuuaauaauguuucaaaca

SEQ ID NO: 2974906 - RNA, 14 nt, Human
uuuaaccucuaaau

SEQ ID NO: 2974907 - RNA, 15 nt, Human
uuuaacagaaaugua

SEQ ID NO: 2974908 - RNA, 14 nt, Human
uuuaacagaaaugu

SEQ ID NO: 2974909 - RNA, 12 nt, Human
uuauugaagcag

SEQ ID NO: 2974910 - RNA, 11 nt, Human
uuauucugcuc

SEQ ID NO: 2974911 - RNA, 17 nt, Human
uuauugaagcagagugg

SEQ ID NO: 2974912 - RNA, 16 nt, Human
uuauugaagcagagug

SEQ ID NO: 2974913 - RNA, 15 nt, Human
uuauugaagcagagu

SEQ ID NO: 2974914 - RNA, 13 nt, Human
uuauugaagcaga

SEQ ID NO: 2974915 - RNA, 15 nt, Human
uuauugauguuuuca

SEQ ID NO: 2974916 - RNA, 15 nt, Human
uuauugcccacgcug

SEQ ID NO: 2974917 - RNA, 18 nt, Human
uuauuacuguaagaaaau

SEQ ID NO: 2974918 - RNA, 17 nt, Human
uuauuacuguaagaaaa

SEQ ID NO: 2974919 - RNA, 16 nt, Human
uuauuacuguaagaaa

SEQ ID NO: 2974920 - RNA, 17 nt, Human
uuauggcuauaggugcu

SEQ ID NO: 2974921 - RNA, 16 nt, Human
uuauggaacacucuga

SEQ ID NO: 2974922 - RNA, 21 nt, Human
uuauggcacuaguauuucuau

SEQ ID NO: 2974923 - RNA, 22 nt, Human
uuaugcaugaaguaauaugcac

SEQ ID NO: 2974924 - RNA, 16 nt, Human
uuaugcaugaaguaau

SEQ ID NO: 2974925 - RNA, 17 nt, Human
uuaucuagauacuguau

SEQ ID NO: 2974926 - RNA, 16 nt, Human
uuaucuagauacugua

SEQ ID NO: 2974927 - RNA, 14 nt, Human
uuaucuagauacug

SEQ ID NO: 2974928 - RNA, 16 nt, Human
uuaguuccucauuagc

SEQ ID NO: 2974929 - RNA, 14 nt, Human
uuaguuccuugagu

SEQ ID NO: 2974930 - RNA, 13 nt, Human
uuauuuuacuuuu

SEQ ID NO: 2974931 - RNA, 15 nt, Human
uuauuuuacuuuuug

SEQ ID NO: 2974932 - RNA, 17 nt, Human
uuauuuuaauucaguug

SEQ ID NO: 2974933 - RNA, 18 nt, Human
uuauugucaaagugguga

SEQ ID NO: 2974934 - RNA, 15 nt, Human
uuauugucuagugaa

SEQ ID NO: 2974935 - RNA, 17 nt, Human
uuauugucaaaguggug

SEQ ID NO: 2974936 - RNA, 16 nt, Human
uuauuuuaauaauguu

SEQ ID NO: 2974937 - RNA, 15 nt, Human
uuauuuuaauaaugu

SEQ ID NO: 2974938 - RNA, 13 nt, Human
uucagagcugccc

SEQ ID NO: 2974939 - RNA, 21 nt, Human
uucagacagcugccugggauc

SEQ ID NO: 2974940 - RNA, 16 nt, Human
uucagacauagaauua

SEQ ID NO: 2974941 - RNA, 19 nt, Human
uucagagacuccugcaggc

SEQ ID NO: 2974942 - RNA, 20 nt, Human
uucagacauagaauuaacac

SEQ ID NO: 2974943 - RNA, 13 nt, Human
uucacucuccuug

SEQ ID NO: 2974944 - RNA, 15 nt, Human
uucacgugguccuaa

SEQ ID NO: 2974945 - RNA, 18 nt, Human
uucacggaagagccuugc

SEQ ID NO: 2974946 - RNA, 13 nt, Human
uucaauaggaaaa

SEQ ID NO: 2974947 - RNA, 15 nt, Human
uucaauaggaaaaac

SEQ ID NO: 2974948 - RNA, 18 nt, Human
uucaauaggaaaaacuga

SEQ ID NO: 2974949 - RNA, 20 nt, Human
uucaauaggaaaaacugauu

SEQ ID NO: 2974950 - RNA, 17 nt, Human
uucaauuuuaaacauau

SEQ ID NO: 2974951 - RNA, 17 nt, Human
uuccccaggaggccagc

SEQ ID NO: 2974952 - RNA, 18 nt, Human
uuccccaggaggccagcc

SEQ ID NO: 2974953 - RNA, 19 nt, Human
uuccccaggaggccagccu

SEQ ID NO: 2974954 - RNA, 20 nt, Human
uuccccaggaggccagccuu

SEQ ID NO: 2974955 - RNA, 21 nt, Human
uuccccaggaggccagccuug

SEQ ID NO: 2974956 - RNA, 20 nt, Human
uucccucccuuccucuuucc

SEQ ID NO: 2974957 - RNA, 17 nt, Human
uucccucccuuccucuu

SEQ ID NO: 2974958 - RNA, 11 nt, Human
uucccucccuu

SEQ ID NO: 2974959 - RNA, 16 nt, Human
uucccauuugcuccuu

SEQ ID NO: 2974960 - RNA, 15 nt, Human
uuccccaggaggcca

SEQ ID NO: 2974961 - RNA, 16 nt, Human
uuccccaggaggccag

SEQ ID NO: 2974962 - RNA, 16 nt, Human
uucauuuccugugucu

SEQ ID NO: 2974963 - RNA, 15 nt, Human
uucauuuccuguguc

SEQ ID NO: 2974964 - RNA, 11 nt, Human
uucaggaagcu

SEQ ID NO: 2974965 - RNA, 13 nt, Human
uucaggaagcuca

SEQ ID NO: 2974966 - RNA, 17 nt, Human
uucaucuugaauuguaa

SEQ ID NO: 2974967 - RNA, 15 nt, Human
uucaugaaagauuca

SEQ ID NO: 2974968 - RNA, 17 nt, Human
uucaugaaagauucaau

SEQ ID NO: 2974969 - RNA, 21 nt, Human
uucaucuugaauuguaaggaa

SEQ ID NO: 2974970 - RNA, 15 nt, Human
uuccaaauucugcuu

SEQ ID NO: 2974971 - RNA, 19 nt, Human
uuccagauccuggaaauca

SEQ ID NO: 2974972 - RNA, 20 nt, Human
uuccuuggacucauuuuaaa

SEQ ID NO: 2974973 - RNA, 17 nt, Human
uuccuuggacucauuuu

SEQ ID NO: 2974974 - RNA, 20 nt, Human
uucgggaggucgaggcagga

SEQ ID NO: 2974975 - RNA, 22 nt, Human
uucggccuccauccugaggcuc

SEQ ID NO: 2974976 - RNA, 13 nt, Human
uucuaaagcugcc

SEQ ID NO: 2974977 - RNA, 17 nt, Human
uucuaaagcugccagcc

SEQ ID NO: 2974978 - RNA, 18 nt, Human
uuccugaugcuucuucag

SEQ ID NO: 2974979 - RNA, 19 nt, Human
uuccugaugcuucuucaga

SEQ ID NO: 2974980 - RNA, 15 nt, Human
uuccugaugcuucuu

SEQ ID NO: 2974981 - RNA, 17 nt, Human
uuccugccaggcauggu

SEQ ID NO: 2974982 - RNA, 14 nt, Human
uuccuggcacugcu

SEQ ID NO: 2974983 - RNA, 20 nt, Human
uuccuugaguugauucagcu

SEQ ID NO: 2974984 - RNA, 20 nt, Human
uucccuuugacgccauccca

SEQ ID NO: 2974985 - RNA, 21 nt, Human
uucccuuugacgccaucccag

SEQ ID NO: 2974986 - RNA, 22 nt, Human
uucccuuugacgccaucccagc

SEQ ID NO: 2974987 - RNA, 13 nt, Human
uuccucauuagca

SEQ ID NO: 2974988 - RNA, 17 nt, Human
uucccuugaugaagaag

SEQ ID NO: 2974989 - RNA, 13 nt, Human
uuacuuuaaacua

SEQ ID NO: 2974990 - RNA, 18 nt, Human
uuacuuuaaaaggagcca

SEQ ID NO: 2974991 - RNA, 17 nt, Human
uuacuuuaaaaggagcc

SEQ ID NO: 2974992 - RNA, 15 nt, Human
uuagacagucccugc

SEQ ID NO: 2974993 - RNA, 14 nt, Human
uuacuuuguguuca

SEQ ID NO: 2974994 - RNA, 19 nt, Human
uuagacccucaugcugcca

SEQ ID NO: 2974995 - RNA, 20 nt, Human
uuagacccucaugcugccaa

SEQ ID NO: 2974996 - RNA, 16 nt, Human
uuagacagucccugcc

SEQ ID NO: 2974997 - RNA, 17 nt, Human
uuagacagucccugcca

SEQ ID NO: 2974998 - RNA, 18 nt, Human
uuagacagucccugccaa

SEQ ID NO: 2974999 - RNA, 14 nt, Human
uuagacagucccug

SEQ ID NO: 2975000 - RNA, 17 nt, Human
uuacuaguuucccuugc

SEQ ID NO: 2975001 - RNA, 16 nt, Human
uuacuaauagacaauu

SEQ ID NO: 2975002 - RNA, 14 nt, Human
uuacuaaguuuuua

SEQ ID NO: 2975003 - RNA, 13 nt, Human
uuacuaaguuuuu

SEQ ID NO: 2975004 - RNA, 23 nt, Human
uuacuucuuauacauuugauaaa

SEQ ID NO: 2975005 - RNA, 12 nt, Human
uuacuucugcua

SEQ ID NO: 2975006 - RNA, 11 nt, Human
uuacuucugcu

SEQ ID NO: 2975007 - RNA, 18 nt, Human
uuacuuagguguggggga

SEQ ID NO: 2975008 - RNA, 22 nt, Human
uuacuuaagacuuaaugagacu

SEQ ID NO: 2975009 - RNA, 21 nt, Human
uuacuuaaaccgccaaggcug

SEQ ID NO: 2975010 - RNA, 20 nt, Human
uuaggagaagucuucuauuu

SEQ ID NO: 2975011 - RNA, 18 nt, Human
uuaggauguugaaaaagu

SEQ ID NO: 2975012 - RNA, 23 nt, Human
uuaguagagguacacuugugaau

SEQ ID NO: 2975013 - RNA, 22 nt, Human
uuaguagagguacacuugugaa

SEQ ID NO: 2975014 - RNA, 17 nt, Human
uuaguagagacaggguu

SEQ ID NO: 2975015 - RNA, 16 nt, Human
uuaguaugaggcauuu

SEQ ID NO: 2975016 - RNA, 18 nt, Human
uuaguaugaggcauuugu

SEQ ID NO: 2975017 - RNA, 21 nt, Human
uuagaugcaguucugaagaag

SEQ ID NO: 2975018 - RNA, 20 nt, Human
uuagaugcaguucugaagaa

SEQ ID NO: 2975019 - RNA, 22 nt, Human
uuagauaauacaccacuacauu

SEQ ID NO: 2975020 - RNA, 14 nt, Human
uuagaguugauacu

SEQ ID NO: 2975021 - RNA, 13 nt, Human
uuagcuggaaaag

SEQ ID NO: 2975022 - RNA, 12 nt, Human
uuagcuggaaaa

SEQ ID NO: 2975023 - RNA, 19 nt, Human
uuaaugguaguuuuacagu

SEQ ID NO: 2975024 - RNA, 20 nt, Human
uuacaagcgugagccacugc

SEQ ID NO: 2975025 - RNA, 21 nt, Human
uuacaagcgugagccacugca

SEQ ID NO: 2975026 - RNA, 22 nt, Human
uuaauauugauaugcuuauaca

SEQ ID NO: 2975027 - RNA, 18 nt, Human
uuaauauugauaugcuua

SEQ ID NO: 2975028 - RNA, 17 nt, Human
uuaagcuguuacugucu

SEQ ID NO: 2975029 - RNA, 16 nt, Human
uuaacuucacauauug

SEQ ID NO: 2975030 - RNA, 15 nt, Human
uuaacuuuuauaaac

SEQ ID NO: 2975031 - RNA, 17 nt, Human
uuaacuuuuauaaacuu

SEQ ID NO: 2975032 - RNA, 16 nt, Human
uuaacuuuuauaaacu

SEQ ID NO: 2975033 - RNA, 17 nt, Human
uuaaccacuucagcuga

SEQ ID NO: 2975034 - RNA, 21 nt, Human
uuaaacucugagugcaaacuu

SEQ ID NO: 2975035 - RNA, 15 nt, Human
uuaaaagaugaaaau

SEQ ID NO: 2975036 - RNA, 18 nt, Human
uuaaaagaugaaaauauu

SEQ ID NO: 2975037 - RNA, 21 nt, Human
uuaaaauaccagccaguaaau

SEQ ID NO: 2975038 - RNA, 19 nt, Human
uuaaaauacacacucaaau

SEQ ID NO: 2975039 - RNA, 14 nt, Human
uuaaaagcauuuuu

SEQ ID NO: 2975040 - RNA, 17 nt, Human
uuaaaagauacaguuac

SEQ ID NO: 2975041 - RNA, 14 nt, Human
uuaaaagauacagu

SEQ ID NO: 2975042 - RNA, 21 nt, Human
uuaaaagaauauuuuaacuuc

SEQ ID NO: 2975043 - RNA, 22 nt, Human
uuaaaagaauauuuuaacuucc

SEQ ID NO: 2975044 - RNA, 18 nt, Human
uguuuuaaggaugcuugu

SEQ ID NO: 2975045 - RNA, 22 nt, Human
uguuuuaagaggcagggucuca

SEQ ID NO: 2975046 - RNA, 16 nt, Human
uguuuagauaauacac

SEQ ID NO: 2975047 - RNA, 19 nt, Human
uguuucaaacauauauaac

SEQ ID NO: 2975048 - RNA, 22 nt, Human
uguuucaaacauauauaacaau

SEQ ID NO: 2975049 - RNA, 21 nt, Human
uguuucaaacauauauaacaa

SEQ ID NO: 2975050 - RNA, 15 nt, Human
uguuucaaacuuuac

SEQ ID NO: 2975051 - RNA, 20 nt, Human
uguuuuaagaggcagggucu

SEQ ID NO: 2975052 - RNA, 13 nt, Human
uguuugugauuga

SEQ ID NO: 2975053 - RNA, 23 nt, Human
uguuuccuggcacugcuuccagu

SEQ ID NO: 2975054 - RNA, 19 nt, Human
uguuuggggaugagaaagg

SEQ ID NO: 2975055 - RNA, 15 nt, Human
ugguauuugaaacac

SEQ ID NO: 2975056 - RNA, 13 nt, Human
ugguauguuuuca

SEQ ID NO: 2975057 - RNA, 18 nt, Human
ugguaugaucacggcuca

SEQ ID NO: 2975058 - RNA, 14 nt, Human
uggucaacauuucu

SEQ ID NO: 2975059 - RNA, 22 nt, Human
uggucacaggaaguagaggagg

SEQ ID NO: 2975060 - RNA, 17 nt, Human
uggucacaggaaguaga

SEQ ID NO: 2975061 - RNA, 14 nt, Human
uggucccccuucca

SEQ ID NO: 2975062 - RNA, 16 nt, Human
uggucccagccagcag

SEQ ID NO: 2975063 - RNA, 13 nt, Human
uggucccacucag

SEQ ID NO: 2975064 - RNA, 15 nt, Human
uggucccccuuccau

SEQ ID NO: 2975065 - RNA, 16 nt, Human
uggucccccuuccaug

SEQ ID NO: 2975066 - RNA, 18 nt, Human
uggucccccuuccaugga

SEQ ID NO: 2975067 - RNA, 23 nt, Human
uggucccccuuccauggacuuug

SEQ ID NO: 2975068 - RNA, 13 nt, Human
ugguccugcugca

SEQ ID NO: 2975069 - RNA, 15 nt, Human
ugguccugcugcagu

SEQ ID NO: 2975070 - RNA, 23 nt, Human
ugguccugcugcaguugccaguc

SEQ ID NO: 2975071 - RNA, 17 nt, Human
ugguccuaaucuucuga

SEQ ID NO: 2975072 - RNA, 19 nt, Human
ugguccuaaucuucugaac

SEQ ID NO: 2975073 - RNA, 16 nt, Human
uggugauuuagcagga

SEQ ID NO: 2975074 - RNA, 22 nt, Human
uggugauuuagcaggaagcugu

SEQ ID NO: 2975075 - RNA, 21 nt, Human
uggugcaaugaccuuucaaua

SEQ ID NO: 2975076 - RNA, 20 nt, Human
uggugcaaugaccuuucaau

SEQ ID NO: 2975077 - RNA, 19 nt, Human
uggugacuuuccucuuugg

SEQ ID NO: 2975078 - RNA, 22 nt, Human
uggugaccucugccugaaguca

SEQ ID NO: 2975079 - RNA, 17 nt, Human
uggugaccucugccuga

SEQ ID NO: 2975080 - RNA, 16 nt, Human
uggugaccucugccug

SEQ ID NO: 2975081 - RNA, 15 nt, Human
uggugaccucugccu

SEQ ID NO: 2975082 - RNA, 15 nt, Human
uggucuacacugugc

SEQ ID NO: 2975083 - RNA, 16 nt, Human
uggucuacacugugcu

SEQ ID NO: 2975084 - RNA, 17 nt, Human
uggucuacacugugcug

SEQ ID NO: 2975085 - RNA, 18 nt, Human
uggucuacacugugcuga

SEQ ID NO: 2975086 - RNA, 19 nt, Human
uggucuacacugugcugag

SEQ ID NO: 2975087 - RNA, 14 nt, Human
uggugaccucugcc

SEQ ID NO: 2975088 - RNA, 13 nt, Human
uggugaccucugc

SEQ ID NO: 2975089 - RNA, 17 nt, Human
uggucggaaaacaugcu

SEQ ID NO: 2975090 - RNA, 14 nt, Human
uggucggaaaacau

SEQ ID NO: 2975091 - RNA, 14 nt, Human
uggguauagauguu

SEQ ID NO: 2975092 - RNA, 18 nt, Human
uggguauagauguugcua

SEQ ID NO: 2975093 - RNA, 18 nt, Human
uggguacuuguggacaca

SEQ ID NO: 2975094 - RNA, 17 nt, Human
uggguacuuguggacac

SEQ ID NO: 2975095 - RNA, 16 nt, Human
ugggggaguggccaca

SEQ ID NO: 2975096 - RNA, 20 nt, Human
uggggccaguuggucccccu

SEQ ID NO: 2975097 - RNA, 23 nt, Human
uggggaugagaaagguugaagca

SEQ ID NO: 2975098 - RNA, 15 nt, Human
uggggaugagaaagg

SEQ ID NO: 2975099 - RNA, 22 nt, Human
ugggcuucauccuccucagauc

SEQ ID NO: 2975100 - RNA, 19 nt, Human
ugggcagcugccuccccuc

SEQ ID NO: 2975101 - RNA, 17 nt, Human
ugggcagcugccucccc

SEQ ID NO: 2975102 - RNA, 15 nt, Human
ugggcagcugccucc

SEQ ID NO: 2975103 - RNA, 14 nt, Human
ugggcagcugccuc

SEQ ID NO: 2975104 - RNA, 13 nt, Human
ugggcagcugccu

SEQ ID NO: 2975105 - RNA, 12 nt, Human
ugggcagcugcc

SEQ ID NO: 2975106 - RNA, 23 nt, Human
ugggcagagcagagaccaucccu

SEQ ID NO: 2975107 - RNA, 14 nt, Human
ugggccuggcuccc

SEQ ID NO: 2975108 - RNA, 22 nt, Human
ugggcagagcagagaccauccc

SEQ ID NO: 2975109 - RNA, 18 nt, Human
ugggcagagcagagacca

SEQ ID NO: 2975110 - RNA, 22 nt, Human
ugggauuacaagcgugagccac

SEQ ID NO: 2975111 - RNA, 12 nt, Human
ugggauccucca

SEQ ID NO: 2975112 - RNA, 13 nt, Human
ugggauccuccag

SEQ ID NO: 2975113 - RNA, 17 nt, Human
uggcugggggccucagu

SEQ ID NO: 2975114 - RNA, 16 nt, Human
uggcugggggccucag

SEQ ID NO: 2975115 - RNA, 20 nt, Human
uggcugggggccucagugcc

SEQ ID NO: 2975116 - RNA, 14 nt, Human
ugggagugggccca

SEQ ID NO: 2975117 - RNA, 16 nt, Human
ugggagugggcccaau

SEQ ID NO: 2975118 - RNA, 19 nt, Human
uggaucuguauguguucua

SEQ ID NO: 2975119 - RNA, 21 nt, Human
uggaggaaggaaacccagcuc

SEQ ID NO: 2975120 - RNA, 23 nt, Human
uggaggaaggaaacccagcucug

SEQ ID NO: 2975121 - RNA, 15 nt, Human
uggcacuaguauuuc

SEQ ID NO: 2975122 - RNA, 20 nt, Human
uggcaauagucaaauugugu

SEQ ID NO: 2975123 - RNA, 16 nt, Human
uggcacuauaauguaa

SEQ ID NO: 2975124 - RNA, 15 nt, Human
uggcacuauaaugua

SEQ ID NO: 2975125 - RNA, 12 nt, Human
uggcaaaaaggc

SEQ ID NO: 2975126 - RNA, 16 nt, Human
uggcaaaaaggcagga

SEQ ID NO: 2975127 - RNA, 24 nt, Human
uggcaaacagggccucugcggagc

SEQ ID NO: 2975128 - RNA, 20 nt, Human
uggcaaacagggccucugcg

SEQ ID NO: 2975129 - RNA, 19 nt, Human
uggcaaacagggccucugc

SEQ ID NO: 2975130 - RNA, 18 nt, Human
uggcaaacagggccucug

SEQ ID NO: 2975131 - RNA, 16 nt, Human
uggcaaacagggccuc

SEQ ID NO: 2975132 - RNA, 15 nt, Human
uggcaaacagggccu

SEQ ID NO: 2975133 - RNA, 18 nt, Human
uggcaaagcagaauguga

SEQ ID NO: 2975134 - RNA, 13 nt, Human
uggcaaagcagaa

SEQ ID NO: 2975135 - RNA, 22 nt, Human
uggacugagggggccuggaugc

SEQ ID NO: 2975136 - RNA, 20 nt, Human
uggacugagggggccuggau

SEQ ID NO: 2975137 - RNA, 23 nt, Human
uggacugagggggccuggaugcc

SEQ ID NO: 2975138 - RNA, 19 nt, Human
uggacugagggggccugga

SEQ ID NO: 2975139 - RNA, 23 nt, Human
uggacaggcauguucucugagga

SEQ ID NO: 2975140 - RNA, 19 nt, Human
uggccagaugcaccagccc

SEQ ID NO: 2975141 - RNA, 15 nt, Human
uggcagaguugaaga

SEQ ID NO: 2975142 - RNA, 21 nt, Human
uggcagaguggauucuugaac

SEQ ID NO: 2975143 - RNA, 17 nt, Human
uggcagaguugaagaca

SEQ ID NO: 2975144 - RNA, 19 nt, Human
uggcagaguugaagacaga

SEQ ID NO: 2975145 - RNA, 18 nt, Human
uggccagaugcaccagcc

SEQ ID NO: 2975146 - RNA, 17 nt, Human
uggccagaugcaccagc

SEQ ID NO: 2975147 - RNA, 18 nt, Human
uggcccaggguggccaca

SEQ ID NO: 2975148 - RNA, 17 nt, Human
uggcccaggguggccac

SEQ ID NO: 2975149 - RNA, 16 nt, Human
uggcccaggguggcca

SEQ ID NO: 2975150 - RNA, 13 nt, Human
uggccaggcuggu

SEQ ID NO: 2975151 - RNA, 16 nt, Human
uggccccugcccggcu

SEQ ID NO: 2975152 - RNA, 15 nt, Human
uggccccugcccggc

SEQ ID NO: 2975153 - RNA, 14 nt, Human
uggccccugcccgg

SEQ ID NO: 2975154 - RNA, 15 nt, Human
uggcgcugccccugg

SEQ ID NO: 2975155 - RNA, 23 nt, Human
uggcgcugccccuggcagccccu

SEQ ID NO: 2975156 - RNA, 16 nt, Human
uggcgcugccccuggc

SEQ ID NO: 2975157 - RNA, 22 nt, Human
uggcgagccauuugucccaagu

SEQ ID NO: 2975158 - RNA, 23 nt, Human
uggcgagccauuugucccaagug

SEQ ID NO: 2975159 - RNA, 22 nt, Human
uggcgcagcauauucaggaagc

SEQ ID NO: 2975160 - RNA, 23 nt, Human
uggcgcagcauauucaggaagcu

SEQ ID NO: 2975161 - RNA, 23 nt, Human
uggccucccaacucaccccagcc

SEQ ID NO: 2975162 - RNA, 15 nt, Human
uggcugcuucaagga

SEQ ID NO: 2975163 - RNA, 15 nt, Human
uggcugggggccuca

SEQ ID NO: 2975164 - RNA, 11 nt, Human
uggcugcuuca

SEQ ID NO: 2975165 - RNA, 16 nt, Human
ugcagggacagagcau

SEQ ID NO: 2975166 - RNA, 13 nt, Human
ugcagggaguccg

SEQ ID NO: 2975167 - RNA, 15 nt, Human
ugauuuaauaugcaa

SEQ ID NO: 2975168 - RNA, 17 nt, Human
ugauuuaauaugcaaag

SEQ ID NO: 2975169 - RNA, 21 nt, Human
ugcaguuacacuaaaagguga

SEQ ID NO: 2975170 - RNA, 21 nt, Human
ugcaguggugcgaucuggguu

SEQ ID NO: 2975171 - RNA, 20 nt, Human
ugcaguggugcgaucugggu

SEQ ID NO: 2975172 - RNA, 23 nt, Human
ugcauauugcauacuauuaaaca

SEQ ID NO: 2975173 - RNA, 15 nt, Human
ugcauauugcauacu

SEQ ID NO: 2975174 - RNA, 22 nt, Human
ugcaucaauuuuucuuauuuca

SEQ ID NO: 2975175 - RNA, 12 nt, Human
ugcaguucugaa

SEQ ID NO: 2975176 - RNA, 16 nt, Human
ugcaguugccagucac

SEQ ID NO: 2975177 - RNA, 13 nt, Human
ugcaucagcugcu

SEQ ID NO: 2975178 - RNA, 21 nt, Human
ugcauuuggugguuucagaaa

SEQ ID NO: 2975179 - RNA, 23 nt, Human
ugcauuuggugguuucagaaaug

SEQ ID NO: 2975180 - RNA, 17 nt, Human
ugccaaagaagcagacc

SEQ ID NO: 2975181 - RNA, 20 nt, Human
ugccaggaagccagcaggcu

SEQ ID NO: 2975182 - RNA, 22 nt, Human
ugccaggaagccagcaggcucu

SEQ ID NO: 2975183 - RNA, 16 nt, Human
ugccacuaaauugaca

SEQ ID NO: 2975184 - RNA, 10 nt, Human
ugccaggcau

SEQ ID NO: 2975185 - RNA, 14 nt, Human
ugccaggcauggug

SEQ ID NO: 2975186 - RNA, 20 nt, Human
ugccacccuggggagaaagu

SEQ ID NO: 2975187 - RNA, 15 nt, Human
ugccucaagagaagg

SEQ ID NO: 2975188 - RNA, 14 nt, Human
ugccucaagagaag

SEQ ID NO: 2975189 - RNA, 16 nt, Human
ugcccugcccaccugg

SEQ ID NO: 2975190 - RNA, 20 nt, Human
ugcccugcccaccuggccuc

SEQ ID NO: 2975191 - RNA, 15 nt, Human
ugcccugcccaccug

SEQ ID NO: 2975192 - RNA, 14 nt, Human
ugcccugcccaccu

SEQ ID NO: 2975193 - RNA, 20 nt, Human
ugcccaggcuggcgugcagu

SEQ ID NO: 2975194 - RNA, 13 nt, Human
ugcccaggcuggc

SEQ ID NO: 2975195 - RNA, 19 nt, Human
ugcccaggcuggcgugcag

SEQ ID NO: 2975196 - RNA, 18 nt, Human
ugcccaggcuggcgugca

SEQ ID NO: 2975197 - RNA, 14 nt, Human
ugcccggcugcgga

SEQ ID NO: 2975198 - RNA, 12 nt, Human
ugcccggcugcg

SEQ ID NO: 2975199 - RNA, 16 nt, Human
ugccccuggcagcccc

SEQ ID NO: 2975200 - RNA, 21 nt, Human
ugcugccaauauccuaauaaa

SEQ ID NO: 2975201 - RNA, 15 nt, Human
ugcugccaauauccu

SEQ ID NO: 2975202 - RNA, 14 nt, Human
ugcugcauuuaaaa

SEQ ID NO: 2975203 - RNA, 23 nt, Human
ugcugcauuuaaaagauacaguu

SEQ ID NO: 2975204 - RNA, 16 nt, Human
ugcugccaauauccua

SEQ ID NO: 2975205 - RNA, 17 nt, Human
ugcugccaauauccuaa

SEQ ID NO: 2975206 - RNA, 18 nt, Human
ugcugccaauauccuaau

SEQ ID NO: 2975207 - RNA, 19 nt, Human
ugcugccaauauccuaaua

SEQ ID NO: 2975208 - RNA, 19 nt, Human
ugcugcauuuaaaagauac

SEQ ID NO: 2975209 - RNA, 18 nt, Human
ugcugcauuuaaaagaua

SEQ ID NO: 2975210 - RNA, 17 nt, Human
ugcugcauuuaaaagau

SEQ ID NO: 2975211 - RNA, 19 nt, Human
ugcugcuugaggcaacuca

SEQ ID NO: 2975212 - RNA, 20 nt, Human
ugcugggauuacagguguga

SEQ ID NO: 2975213 - RNA, 12 nt, Human
ugcugcuugagg

SEQ ID NO: 2975214 - RNA, 12 nt, Human
ugcugcugcccc

SEQ ID NO: 2975215 - RNA, 19 nt, Human
ugcugcugccccugcacag

SEQ ID NO: 2975216 - RNA, 21 nt, Human
ugcuguucacuggacacuuca

SEQ ID NO: 2975217 - RNA, 16 nt, Human
ugcuguucaugaaaga

SEQ ID NO: 2975218 - RNA, 17 nt, Human
ugcuguucaugaaagau

SEQ ID NO: 2975219 - RNA, 17 nt, Human
ugcugggcuugucugua

SEQ ID NO: 2975220 - RNA, 20 nt, Human
ugcugggggggauuguaaaa

SEQ ID NO: 2975221 - RNA, 13 nt, Human
ugcuggguguggc

SEQ ID NO: 2975222 - RNA, 17 nt, Human
ugcuagaacucccuuuc

SEQ ID NO: 2975223 - RNA, 15 nt, Human
ugcuagaacucccuu

SEQ ID NO: 2975224 - RNA, 14 nt, Human
ugcuagaacucccu

SEQ ID NO: 2975225 - RNA, 13 nt, Human
ugcuagaacuccc

SEQ ID NO: 2975226 - RNA, 21 nt, Human
ugcuaggaacacuccuucaca

SEQ ID NO: 2975227 - RNA, 20 nt, Human
ugcuaggaacacuccuucac

SEQ ID NO: 2975228 - RNA, 22 nt, Human
ugcuaggaacacuccuucacag

SEQ ID NO: 2975229 - RNA, 17 nt, Human
ugcucacauaucuguca

SEQ ID NO: 2975230 - RNA, 23 nt, Human
ugcucuccgaccagacaccuuga

SEQ ID NO: 2975231 - RNA, 22 nt, Human
ugcuacuguccuacccacccuc

SEQ ID NO: 2975232 - RNA, 21 nt, Human
ugcuacuguccuacccacccu

SEQ ID NO: 2975233 - RNA, 17 nt, Human
ugauugggcacaucauu

SEQ ID NO: 2975234 - RNA, 21 nt, Human
ugauugggcacaucauuucaa

SEQ ID NO: 2975235 - RNA, 20 nt, Human
ugauugggcacaucauuuca

SEQ ID NO: 2975236 - RNA, 18 nt, Human
ugauugggcacaucauuu

SEQ ID NO: 2975237 - RNA, 13 nt, Human
ugauuggaggggg

SEQ ID NO: 2975238 - RNA, 21 nt, Human
ugauuggaggggggagguggg

SEQ ID NO: 2975239 - RNA, 23 nt, Human
ugauugggcacaucauuucaaga

SEQ ID NO: 2975240 - RNA, 17 nt, Human
ugauuuaaacacauuaa

SEQ ID NO: 2975241 - RNA, 16 nt, Human
ugauuuaaacacauua

SEQ ID NO: 2975242 - RNA, 18 nt, Human
ugauuuaaacacauuaaa

SEQ ID NO: 2975243 - RNA, 15 nt, Human
ugauuuaaacacauu

SEQ ID NO: 2975244 - RNA, 16 nt, Human
ugauugugucucuugg

SEQ ID NO: 2975245 - RNA, 17 nt, Human
ugauugccuuuuuauaa

SEQ ID NO: 2975246 - RNA, 22 nt, Human
ugauugccuuuuuauaacuuuu

SEQ ID NO: 2975247 - RNA, 18 nt, Human
ugauucagacagcugccu

SEQ ID NO: 2975248 - RNA, 19 nt, Human
ugauucagacagcugccug

SEQ ID NO: 2975249 - RNA, 20 nt, Human
ugauucagacagcugccugg

SEQ ID NO: 2975250 - RNA, 21 nt, Human
ugauucagacagcugccuggg

SEQ ID NO: 2975251 - RNA, 23 nt, Human
ugauucagacagcugccugggau

SEQ ID NO: 2975252 - RNA, 21 nt, Human
ugauucuccugccucagccuc

SEQ ID NO: 2975253 - RNA, 16 nt, Human
ugauuaccagggacug

SEQ ID NO: 2975254 - RNA, 20 nt, Human
ugauguucuuucacccuuuu

SEQ ID NO: 2975255 - RNA, 19 nt, Human
ugauuaugaauuacauuug

SEQ ID NO: 2975256 - RNA, 17 nt, Human
ugauuaugaauuacauu

SEQ ID NO: 2975257 - RNA, 13 nt, Human
ugauuauauguca

SEQ ID NO: 2975258 - RNA, 22 nt, Human
ugauuaugaauuacauuuguau

SEQ ID NO: 2975259 - RNA, 21 nt, Human
ugauuaugaauuacauuugua

SEQ ID NO: 2975260 - RNA, 16 nt, Human
ugauuauuacuggcaa

SEQ ID NO: 2975261 - RNA, 20 nt, Human
ugauucaacagguuuuccug

SEQ ID NO: 2975262 - RNA, 13 nt, Human
ugauucagacagc

SEQ ID NO: 2975263 - RNA, 14 nt, Human
ugauucagacagcu

SEQ ID NO: 2975264 - RNA, 15 nt, Human
ugauucagacagcug

SEQ ID NO: 2975265 - RNA, 16 nt, Human
ugauucagacagcugc

SEQ ID NO: 2975266 - RNA, 21 nt, Human
ugauucaccuccuaaaacaac

SEQ ID NO: 2975267 - RNA, 16 nt, Human
ugaugcuucuucagag

SEQ ID NO: 2975268 - RNA, 17 nt, Human
ugaugcuucuucagaga

SEQ ID NO: 2975269 - RNA, 15 nt, Human
ugauggugguauguu

SEQ ID NO: 2975270 - RNA, 16 nt, Human
ugauguguuaucucuu

SEQ ID NO: 2975271 - RNA, 20 nt, Human
ugaugcuacaggauuugaaa

SEQ ID NO: 2975272 - RNA, 23 nt, Human
ugaugcuacaggauuugaaauug

SEQ ID NO: 2975273 - RNA, 17 nt, Human
ugaucuuuaaaauacac

SEQ ID NO: 2975274 - RNA, 16 nt, Human
ugaucuuugcagacag

SEQ ID NO: 2975275 - RNA, 20 nt, Human
ugaucuucuuuauaauucua

SEQ ID NO: 2975276 - RNA, 14 nt, Human
ugaucuuuaaaaua

SEQ ID NO: 2975277 - RNA, 19 nt, Human
ugauccacccaccucagcc

SEQ ID NO: 2975278 - RNA, 18 nt, Human
ugauccacccaccucagc

SEQ ID NO: 2975279 - RNA, 17 nt, Human
ugauccacccaccucag

SEQ ID NO: 2975280 - RNA, 17 nt, Human
ugaucucucgugauuga

SEQ ID NO: 2975281 - RNA, 16 nt, Human
ugauccacccaccuca

SEQ ID NO: 2975282 - RNA, 15 nt, Human
ugauccaagcugguc

SEQ ID NO: 2975283 - RNA, 14 nt, Human
ugauccaagcuggu

SEQ ID NO: 2975284 - RNA, 13 nt, Human
ugauccaagcugg

SEQ ID NO: 2975285 - RNA, 18 nt, Human
ugaucauguuuaugagaa

SEQ ID NO: 2975286 - RNA, 13 nt, Human
ugauagcacagac

SEQ ID NO: 2975287 - RNA, 14 nt, Human
ugauagcacagacc

SEQ ID NO: 2975288 - RNA, 24 nt, Human
ugaucagcuuauugucuagugaaa

SEQ ID NO: 2975289 - RNA, 17 nt, Human
ugaucagcuuauugucu

SEQ ID NO: 2975290 - RNA, 20 nt, Human
ugagacucgcgacaaugcaa

SEQ ID NO: 2975291 - RNA, 21 nt, Human
ugagacucgcgacaaugcaaa

SEQ ID NO: 2975292 - RNA, 22 nt, Human
ugagacucgcgacaaugcaaac

SEQ ID NO: 2975293 - RNA, 23 nt, Human
ugagacucgcgacaaugcaaacc

SEQ ID NO: 2975294 - RNA, 16 nt, Human
ugagagugaacaaauu

SEQ ID NO: 2975295 - RNA, 15 nt, Human
ugagaucaaaacggu

SEQ ID NO: 2975296 - RNA, 14 nt, Human
ugagaucagccugg

SEQ ID NO: 2975297 - RNA, 15 nt, Human
ugagcagggcucagc

SEQ ID NO: 2975298 - RNA, 14 nt, Human
ugagcagggcucag

SEQ ID NO: 2975299 - RNA, 13 nt, Human
ugagcagggcuca

SEQ ID NO: 2975300 - RNA, 12 nt, Human
ugagcagggcuc

SEQ ID NO: 2975301 - RNA, 21 nt, Human
ugaccucaggugauccaccca

SEQ ID NO: 2975302 - RNA, 20 nt, Human
ugaccucaggugauccaccc

SEQ ID NO: 2975303 - RNA, 19 nt, Human
ugagacucgcgacaaugca

SEQ ID NO: 2975304 - RNA, 18 nt, Human
ugagcaucaggccaggcc

SEQ ID NO: 2975305 - RNA, 19 nt, Human
ugagcaucaggccaggccc

SEQ ID NO: 2975306 - RNA, 20 nt, Human
ugagcaucaggccaggcccu

SEQ ID NO: 2975307 - RNA, 13 nt, Human
ugagccccaaaag

SEQ ID NO: 2975308 - RNA, 16 nt, Human
ugagcaucaggccagg

SEQ ID NO: 2975309 - RNA, 17 nt, Human
ugagcagggcucagcgg

SEQ ID NO: 2975310 - RNA, 16 nt, Human
ugagcagggcucagcg

SEQ ID NO: 2975311 - RNA, 19 nt, Human
ugagcagggcucagcgggg

SEQ ID NO: 2975312 - RNA, 17 nt, Human
ugagccucagcauccug

SEQ ID NO: 2975313 - RNA, 21 nt, Human
ugagccgagaucacgccacug

SEQ ID NO: 2975314 - RNA, 19 nt, Human
ugagccgagaucacgccac

SEQ ID NO: 2975315 - RNA, 21 nt, Human
ugagccucagcauccuggcac

SEQ ID NO: 2975316 - RNA, 18 nt, Human
ugagccucagcauccugg

SEQ ID NO: 2975317 - RNA, 22 nt, Human
ugagccucagcauccuggcacc

SEQ ID NO: 2975318 - RNA, 13 nt, Human
ugaggcucugccc

SEQ ID NO: 2975319 - RNA, 14 nt, Human
ugaggcucugcccu

SEQ ID NO: 2975320 - RNA, 20 nt, Human
ugaggcuccacuuggucugu

SEQ ID NO: 2975321 - RNA, 18 nt, Human
ugaggcuccacuuggucu

SEQ ID NO: 2975322 - RNA, 17 nt, Human
ugagggaacagagaggu

SEQ ID NO: 2975323 - RNA, 16 nt, Human
ugagggagaugccaug

SEQ ID NO: 2975324 - RNA, 12 nt, Human
ugaggugggagg

SEQ ID NO: 2975325 - RNA, 13 nt, Human
ugaggugggagga

SEQ ID NO: 2975326 - RNA, 21 nt, Human
ugaggcauuuguuugaacuga

SEQ ID NO: 2975327 - RNA, 17 nt, Human
ugaggcuaguguggugu

SEQ ID NO: 2975328 - RNA, 23 nt, Human
ugaggcuagugugguguuuccug

SEQ ID NO: 2975329 - RNA, 20 nt, Human
ugaggcauuuguuugaacug

SEQ ID NO: 2975330 - RNA, 19 nt, Human
ugaggcauuuguuugaacu

SEQ ID NO: 2975331 - RNA, 12 nt, Human
ugaggcauuugu

SEQ ID NO: 2975332 - RNA, 13 nt, Human
ugagcugggauga

SEQ ID NO: 2975333 - RNA, 13 nt, Human
ugagucugaaggc

SEQ ID NO: 2975334 - RNA, 15 nt, Human
ugagucugaaggcug

SEQ ID NO: 2975335 - RNA, 17 nt, Human
ugagucugaaggcuggg

SEQ ID NO: 2975336 - RNA, 18 nt, Human
ugagucugaaggcugggu

SEQ ID NO: 2975337 - RNA, 19 nt, Human
ugagucgaggacagggagg

SEQ ID NO: 2975338 - RNA, 18 nt, Human
ugagucgaggacagggag

SEQ ID NO: 2975339 - RNA, 13 nt, Human
ugaguccagaagu

SEQ ID NO: 2975340 - RNA, 19 nt, Human
ugaguccagaaguuugaga

SEQ ID NO: 2975341 - RNA, 16 nt, Human
ugaguugauagcacag

SEQ ID NO: 2975342 - RNA, 20 nt, Human
ugaguugauagcacagaccc

SEQ ID NO: 2975343 - RNA, 14 nt, Human
ugagugagcaugcc

SEQ ID NO: 2975344 - RNA, 16 nt, Human
ugauaacuggaaacuu

SEQ ID NO: 2975345 - RNA, 17 nt, Human
ugaacaguaacauagcu

SEQ ID NO: 2975346 - RNA, 19 nt, Human
ugaacaguuguguuugaag

SEQ ID NO: 2975347 - RNA, 16 nt, Human
ugaacuccuggccuca

SEQ ID NO: 2975348 - RNA, 20 nt, Human
ugaaccaccacacccagccc

SEQ ID NO: 2975349 - RNA, 17 nt, Human
ugaaccaccacacccag

SEQ ID NO: 2975350 - RNA, 23 nt, Human
ugaaccacaucuugcucugcuga

SEQ ID NO: 2975351 - RNA, 22 nt, Human
ugaaccaagaacuuuccaggaa

SEQ ID NO: 2975352 - RNA, 17 nt, Human
ugaacauuucauggugu

SEQ ID NO: 2975353 - RNA, 22 nt, Human
ugaacauuuggguuacuauuuc

SEQ ID NO: 2975354 - RNA, 13 nt, Human
ugaaaugucaacc

SEQ ID NO: 2975355 - RNA, 17 nt, Human
ugaaaugucaguucuga

SEQ ID NO: 2975356 - RNA, 13 nt, Human
ugaaaugucaguu

SEQ ID NO: 2975357 - RNA, 20 nt, Human
ugaaaugucaguucugauau

SEQ ID NO: 2975358 - RNA, 18 nt, Human
ugaaaugucaguucugau

SEQ ID NO: 2975359 - RNA, 19 nt, Human
ugaaauggacuuuuguaca

SEQ ID NO: 2975360 - RNA, 16 nt, Human
ugaaauauugacuuuu

SEQ ID NO: 2975361 - RNA, 18 nt, Human
ugaaauauuauguuaaaa

SEQ ID NO: 2975362 - RNA, 22 nt, Human
ugaaacaacaaauaggaauugu

SEQ ID NO: 2975363 - RNA, 14 nt, Human
ugaaacauuuuguc

SEQ ID NO: 2975364 - RNA, 13 nt, Human
ugaaaauuuugau

SEQ ID NO: 2975365 - RNA, 21 nt, Human
ugaaaauuuugauguuuuaag

SEQ ID NO: 2975366 - RNA, 19 nt, Human
ugaaaauuuugauguuuua

SEQ ID NO: 2975367 - RNA, 16 nt, Human
ugaaaagccucuguuu

SEQ ID NO: 2975368 - RNA, 19 nt, Human
ugaaaagccucuguuuuga

SEQ ID NO: 2975369 - RNA, 22 nt, Human
ugaaaagccucuguuuugauau

SEQ ID NO: 2975370 - RNA, 20 nt, Human
ugaaaagccucuguuuugau

SEQ ID NO: 2975371 - RNA, 18 nt, Human
ugaaagaggcagcuugaa

SEQ ID NO: 2975372 - RNA, 18 nt, Human
ugaaagcccugagcuuuc

SEQ ID NO: 2975373 - RNA, 23 nt, Human
ugaaagcagggacuugaacccau

SEQ ID NO: 2975374 - RNA, 15 nt, Human
ugaaagguacuucaa

SEQ ID NO: 2975375 - RNA, 18 nt, Human
ugaaagggcccagagagg

SEQ ID NO: 2975376 - RNA, 16 nt, Human
ugaaagguacuucaaa

SEQ ID NO: 2975377 - RNA, 23 nt, Human
ugaaagggaguauuacaaaaaca

SEQ ID NO: 2975378 - RNA, 13 nt, Human
ugaaagggcccag

SEQ ID NO: 2975379 - RNA, 19 nt, Human
ucuuuccacagaagcucca

SEQ ID NO: 2975380 - RNA, 16 nt, Human
ucuuucagccaagaau

SEQ ID NO: 2975381 - RNA, 19 nt, Human
ucuuucagccaagaauucu

SEQ ID NO: 2975382 - RNA, 20 nt, Human
ucuuucagccaagaauucuu

SEQ ID NO: 2975383 - RNA, 21 nt, Human
ucuuucagccaagaauucuua

SEQ ID NO: 2975384 - RNA, 14 nt, Human
ucuuuccaaaguac

SEQ ID NO: 2975385 - RNA, 13 nt, Human
ucuuuccaaagua

SEQ ID NO: 2975386 - RNA, 12 nt, Human
ucuuugccaagu

SEQ ID NO: 2975387 - RNA, 17 nt, Human
ucuuuggacacucacac

SEQ ID NO: 2975388 - RNA, 16 nt, Human
ucucccuucauccuuc

SEQ ID NO: 2975389 - RNA, 20 nt, Human
ucuccucugcugcuggcugg

SEQ ID NO: 2975390 - RNA, 23 nt, Human
ucuugcaauggcagccuuggcaa

SEQ ID NO: 2975391 - RNA, 16 nt, Human
ucuuguguguuuauug

SEQ ID NO: 2975392 - RNA, 21 nt, Human
ucuuguguguuuauugucaaa

SEQ ID NO: 2975393 - RNA, 17 nt, Human
ucuuucacauuuaaaua

SEQ ID NO: 2975394 - RNA, 23 nt, Human
ucuuucacccuuuucuguuugcu

SEQ ID NO: 2975395 - RNA, 12 nt, Human
ugacaagcucac

SEQ ID NO: 2975396 - RNA, 20 nt, Human
ugacaagcucacagaccuuu

SEQ ID NO: 2975397 - RNA, 15 nt, Human
ugacaagcucacaga

SEQ ID NO: 2975398 - RNA, 18 nt, Human
ugacaaggauugcuacug

SEQ ID NO: 2975399 - RNA, 17 nt, Human
ugacagaggcagcccca

SEQ ID NO: 2975400 - RNA, 16 nt, Human
ugacagaggcagcccc

SEQ ID NO: 2975401 - RNA, 15 nt, Human
ugacagaggcagccc

SEQ ID NO: 2975402 - RNA, 14 nt, Human
ugacagaggcagcc

SEQ ID NO: 2975403 - RNA, 23 nt, Human
ugacagacacaggcccggcucca

SEQ ID NO: 2975404 - RNA, 20 nt, Human
ugacagacacaggcccggcu

SEQ ID NO: 2975405 - RNA, 13 nt, Human
ugacagaggcagc

SEQ ID NO: 2975406 - RNA, 17 nt, Human
ugacagagugagacucu

SEQ ID NO: 2975407 - RNA, 14 nt, Human
ugacagagugagac

SEQ ID NO: 2975408 - RNA, 23 nt, Human
ugacagaggcagccccauucugc

SEQ ID NO: 2975409 - RNA, 18 nt, Human
ugacagaggcagccccau

SEQ ID NO: 2975410 - RNA, 19 nt, Human
ugacagagugagacucugu

SEQ ID NO: 2975411 - RNA, 19 nt, Human
ugaccagcaccaucucucc

SEQ ID NO: 2975412 - RNA, 20 nt, Human
ugaccacugcagaagacagu

SEQ ID NO: 2975413 - RNA, 18 nt, Human
ugaccacugcagaagaca

SEQ ID NO: 2975414 - RNA, 15 nt, Human
ugacaugucuuuucu

SEQ ID NO: 2975415 - RNA, 13 nt, Human
ugacaugucuuuu

SEQ ID NO: 2975416 - RNA, 18 nt, Human
ugacaugggacauuugcu

SEQ ID NO: 2975417 - RNA, 17 nt, Human
ugacaugggacauuugc

SEQ ID NO: 2975418 - RNA, 16 nt, Human
ugacaugggacauuug

SEQ ID NO: 2975419 - RNA, 18 nt, Human
ugacauauacauacuuac

SEQ ID NO: 2975420 - RNA, 13 nt, Human
ugacauauacaua

SEQ ID NO: 2975421 - RNA, 13 nt, Human
ugaccgugaggcc

SEQ ID NO: 2975422 - RNA, 14 nt, Human
ugaccgugaggcca

SEQ ID NO: 2975423 - RNA, 16 nt, Human
ugaccgugaggccaga

SEQ ID NO: 2975424 - RNA, 20 nt, Human
ugaccgugaggccagagaca

SEQ ID NO: 2975425 - RNA, 17 nt, Human
ugaccauucuccaccug

SEQ ID NO: 2975426 - RNA, 18 nt, Human
ugaccauucuccaccugc

SEQ ID NO: 2975427 - RNA, 16 nt, Human
ugaccauucuccaccu

SEQ ID NO: 2975428 - RNA, 20 nt, Human
ugaaugaauggcuaagcaaa

SEQ ID NO: 2975429 - RNA, 18 nt, Human
ugaauuacauuuguauaa

SEQ ID NO: 2975430 - RNA, 16 nt, Human
ugaauuacauuuguau

SEQ ID NO: 2975431 - RNA, 15 nt, Human
ugaauuacauuugua

SEQ ID NO: 2975432 - RNA, 14 nt, Human
ugaauuacauuugu

SEQ ID NO: 2975433 - RNA, 13 nt, Human
ugaauuaugaaac

SEQ ID NO: 2975434 - RNA, 17 nt, Human
ugaauuaugaaacuuuu

SEQ ID NO: 2975435 - RNA, 15 nt, Human
ugaauuaugaaacuu

SEQ ID NO: 2975436 - RNA, 23 nt, Human
ugaauuccuaaaauuauggaaac

SEQ ID NO: 2975437 - RNA, 17 nt, Human
ugaauuccuaaaauuau

SEQ ID NO: 2975438 - RNA, 16 nt, Human
ugaauuccuaaaauua

SEQ ID NO: 2975439 - RNA, 20 nt, Human
ugaaggacauugcggacagc

SEQ ID NO: 2975440 - RNA, 19 nt, Human
ugaaggacauugcggacag

SEQ ID NO: 2975441 - RNA, 22 nt, Human
ugaaggacauugcggacagcca

SEQ ID NO: 2975442 - RNA, 15 nt, Human
ugaaggccccgccca

SEQ ID NO: 2975443 - RNA, 16 nt, Human
ugaaggccccgcccag

SEQ ID NO: 2975444 - RNA, 14 nt, Human
ugaagauacugaaa

SEQ ID NO: 2975445 - RNA, 17 nt, Human
ugaacuccuggccucaa

SEQ ID NO: 2975446 - RNA, 23 nt, Human
ugaacauuuggguuacuauuucu

SEQ ID NO: 2975447 - RNA, 18 nt, Human
ugaagauacugaaauaaa

SEQ ID NO: 2975448 - RNA, 16 nt, Human
ugaagauacugaaaua

SEQ ID NO: 2975449 - RNA, 15 nt, Human
ugaagauacugaaau

SEQ ID NO: 2975450 - RNA, 11 nt, Human
ugaaguccaag

SEQ ID NO: 2975451 - RNA, 17 nt, Human
ugaaggccccgcccagg

SEQ ID NO: 2975452 - RNA, 13 nt, Human
ugaaguccaagca

SEQ ID NO: 2975453 - RNA, 22 nt, Human
uccugucggagcccugucuccu

SEQ ID NO: 2975454 - RNA, 13 nt, Human
uccuguagcccua

SEQ ID NO: 2975455 - RNA, 11 nt, Human
uccuguagccc

SEQ ID NO: 2975456 - RNA, 22 nt, Human
uccuguaccucuugagccuuga

SEQ ID NO: 2975457 - RNA, 12 nt, Human
uccuggccucaa

SEQ ID NO: 2975458 - RNA, 19 nt, Human
uccuggcccagggcaucug

SEQ ID NO: 2975459 - RNA, 16 nt, Human
uccuggcccagggcau

SEQ ID NO: 2975460 - RNA, 15 nt, Human
uccuggcccagggca

SEQ ID NO: 2975461 - RNA, 22 nt, Human
uccuggcccagggcaucuggga

SEQ ID NO: 2975462 - RNA, 13 nt, Human
uccuggcccaggg

SEQ ID NO: 2975463 - RNA, 13 nt, Human
uccuggcacugcu

SEQ ID NO: 2975464 - RNA, 16 nt, Human
uccuggcacugcuucc

SEQ ID NO: 2975465 - RNA, 22 nt, Human
uccuggcacccggccccugcug

SEQ ID NO: 2975466 - RNA, 23 nt, Human
uccuggcacccggccccugcugg

SEQ ID NO: 2975467 - RNA, 14 nt, Human
uccuggaguucugg

SEQ ID NO: 2975468 - RNA, 14 nt, Human
uccuggacugaggg

SEQ ID NO: 2975469 - RNA, 20 nt, Human
uccuggacugagggggccug

SEQ ID NO: 2975470 - RNA, 22 nt, Human
uccuggacugagggggccugga

SEQ ID NO: 2975471 - RNA, 17 nt, Human
uccugcccuuaccugcc

SEQ ID NO: 2975472 - RNA, 20 nt, Human
uccugcccuuaccugccagg

SEQ ID NO: 2975473 - RNA, 17 nt, Human
uccugccccugagccca

SEQ ID NO: 2975474 - RNA, 18 nt, Human
uccugccccugagcccau

SEQ ID NO: 2975475 - RNA, 20 nt, Human
uccugaggcuccacuugguc

SEQ ID NO: 2975476 - RNA, 19 nt, Human
uccugaggcuccacuuggu

SEQ ID NO: 2975477 - RNA, 17 nt, Human
uccugaggcuccacuug

SEQ ID NO: 2975478 - RNA, 13 nt, Human
uccugccaggcau

SEQ ID NO: 2975479 - RNA, 14 nt, Human
uccugccaggcaug

SEQ ID NO: 2975480 - RNA, 21 nt, Human
uccugagccagauuucacucu

SEQ ID NO: 2975481 - RNA, 20 nt, Human
ucccuucacaaacccagugu

SEQ ID NO: 2975482 - RNA, 15 nt, Human
ucccccuuccaugga

SEQ ID NO: 2975483 - RNA, 16 nt, Human
ucccuuccucuuucca

SEQ ID NO: 2975484 - RNA, 15 nt, Human
ucccuuccucuuucc

SEQ ID NO: 2975485 - RNA, 16 nt, Human
ucccuuggacauuuua

SEQ ID NO: 2975486 - RNA, 18 nt, Human
ucccuuggacauuuuaug

SEQ ID NO: 2975487 - RNA, 19 nt, Human
ucccuuggacauuuuaugu

SEQ ID NO: 2975488 - RNA, 21 nt, Human
ucccuuggacauuuuaugucu

SEQ ID NO: 2975489 - RNA, 15 nt, Human
ucccuuggacauuuu

SEQ ID NO: 2975490 - RNA, 14 nt, Human
uccgccucuugggu

SEQ ID NO: 2975491 - RNA, 21 nt, Human
uccuaagcuauucaguaauaa

SEQ ID NO: 2975492 - RNA, 20 nt, Human
uccuaagcuauucaguaaua

SEQ ID NO: 2975493 - RNA, 20 nt, Human
uccgcuuucuacccagcgag

SEQ ID NO: 2975494 - RNA, 18 nt, Human
uccgcuuucuacccagcg

SEQ ID NO: 2975495 - RNA, 16 nt, Human
uccgcuuucuacccag

SEQ ID NO: 2975496 - RNA, 17 nt, Human
uccuagucauucuuccc

SEQ ID NO: 2975497 - RNA, 14 nt, Human
uccuagugaaagag

SEQ ID NO: 2975498 - RNA, 23 nt, Human
uccuagugaaagaggcagcuuga

SEQ ID NO: 2975499 - RNA, 21 nt, Human
uccuauauuguuuucagugua

SEQ ID NO: 2975500 - RNA, 23 nt, Human
uccuauauuguuuucaguguaca

SEQ ID NO: 2975501 - RNA, 22 nt, Human
uccucauuuuuauaaugucccu

SEQ ID NO: 2975502 - RNA, 18 nt, Human
uccucauuagcauuuugc

SEQ ID NO: 2975503 - RNA, 13 nt, Human
uccuccacauuug

SEQ ID NO: 2975504 - RNA, 16 nt, Human
uccuccacauuuguuu

SEQ ID NO: 2975505 - RNA, 10 nt, Human
uccuccaggu

SEQ ID NO: 2975506 - RNA, 12 nt, Human
uccucccaccuc

SEQ ID NO: 2975507 - RNA, 22 nt, Human
ucuccagccccuggaugcagcc

SEQ ID NO: 2975508 - RNA, 16 nt, Human
ucuccagccccuggau

SEQ ID NO: 2975509 - RNA, 18 nt, Human
ucuccagccccuggaugc

SEQ ID NO: 2975510 - RNA, 15 nt, Human
ucuccagcugcugag

SEQ ID NO: 2975511 - RNA, 13 nt, Human
ucuccagcugcug

SEQ ID NO: 2975512 - RNA, 12 nt, Human
ucuccagccccu

SEQ ID NO: 2975513 - RNA, 13 nt, Human
ucuccagccccug

SEQ ID NO: 2975514 - RNA, 14 nt, Human
ucuccagccccugg

SEQ ID NO: 2975515 - RNA, 15 nt, Human
ucuccagccccugga

SEQ ID NO: 2975516 - RNA, 12 nt, Human
ucucccccagcc

SEQ ID NO: 2975517 - RNA, 23 nt, Human
ucucccucagucuggcccuuccu

SEQ ID NO: 2975518 - RNA, 18 nt, Human
ucucccucagucuggccc

SEQ ID NO: 2975519 - RNA, 20 nt, Human
ucucccugcugcuccuagga

SEQ ID NO: 2975520 - RNA, 18 nt, Human
ucucccugcugcuccuag

SEQ ID NO: 2975521 - RNA, 14 nt, Human
ucuccaccugccag

SEQ ID NO: 2975522 - RNA, 15 nt, Human
ucuccaccugccagg

SEQ ID NO: 2975523 - RNA, 16 nt, Human
ucuccaccugccaggg

SEQ ID NO: 2975524 - RNA, 17 nt, Human
ucuccaccugccaggga

SEQ ID NO: 2975525 - RNA, 19 nt, Human
ucuccaccugccagggaca

SEQ ID NO: 2975526 - RNA, 22 nt, Human
ucuccaccugccagggacagag

SEQ ID NO: 2975527 - RNA, 16 nt, Human
ucuccacccugcucuc

SEQ ID NO: 2975528 - RNA, 14 nt, Human
ucuccacccugcuc

SEQ ID NO: 2975529 - RNA, 17 nt, Human
ucuccacccugcucucc

SEQ ID NO: 2975530 - RNA, 12 nt, Human
ucuccacccugc

SEQ ID NO: 2975531 - RNA, 13 nt, Human
ucuccacccugcu

SEQ ID NO: 2975532 - RNA, 23 nt, Human
ucucaguccaugaagauguagag

SEQ ID NO: 2975533 - RNA, 13 nt, Human
ucuaugggacuca

SEQ ID NO: 2975534 - RNA, 12 nt, Human
ucuaugggacuc

SEQ ID NO: 2975535 - RNA, 19 nt, Human
ucuaugggacucaaugcac

SEQ ID NO: 2975536 - RNA, 18 nt, Human
ucucauacucaccucacc

SEQ ID NO: 2975537 - RNA, 16 nt, Human
ucucauacucaccuca

SEQ ID NO: 2975538 - RNA, 17 nt, Human
ucuaugacacaugcaag

SEQ ID NO: 2975539 - RNA, 14 nt, Human
ucuaugacacaugc

SEQ ID NO: 2975540 - RNA, 18 nt, Human
ucuaugaaauauuauguu

SEQ ID NO: 2975541 - RNA, 19 nt, Human
ucuaggaagacuuuggaaa

SEQ ID NO: 2975542 - RNA, 15 nt, Human
ucuaggaagacuuug

SEQ ID NO: 2975543 - RNA, 16 nt, Human
ucuaggaagacuuugg

SEQ ID NO: 2975544 - RNA, 14 nt, Human
ucuaccuuccugca

SEQ ID NO: 2975545 - RNA, 16 nt, Human
ucuacagaggccaugg

SEQ ID NO: 2975546 - RNA, 15 nt, Human
ucuacagaggccaug

SEQ ID NO: 2975547 - RNA, 21 nt, Human
ucuacacugugcugagucuga

SEQ ID NO: 2975548 - RNA, 20 nt, Human
ucuaaaggcuaccuuuguau

SEQ ID NO: 2975549 - RNA, 19 nt, Human
ucuaaaggcuaccuuugua

SEQ ID NO: 2975550 - RNA, 17 nt, Human
ucuaaaggcuaccuuug

SEQ ID NO: 2975551 - RNA, 18 nt, Human
ucuaaaggcuaccuuugu

SEQ ID NO: 2975552 - RNA, 14 nt, Human
ucggagaagagcug

SEQ ID NO: 2975553 - RNA, 16 nt, Human
ucggagaagagcuguu

SEQ ID NO: 2975554 - RNA, 12 nt, Human
ucggagaagagc

SEQ ID NO: 2975555 - RNA, 15 nt, Human
ucggccccaccagug

SEQ ID NO: 2975556 - RNA, 13 nt, Human
ucgugacaacacu

SEQ ID NO: 2975557 - RNA, 18 nt, Human
uccccagauugcaacagg

SEQ ID NO: 2975558 - RNA, 13 nt, Human
uccccagauugca

SEQ ID NO: 2975559 - RNA, 20 nt, Human
ucccaugagccucagcaucc

SEQ ID NO: 2975560 - RNA, 17 nt, Human
ucccaugagccucagca

SEQ ID NO: 2975561 - RNA, 22 nt, Human
uccccagcaagugagagcuggg

SEQ ID NO: 2975562 - RNA, 21 nt, Human
uccccagcaagugagagcugg

SEQ ID NO: 2975563 - RNA, 20 nt, Human
uccccagcaagugagagcug

SEQ ID NO: 2975564 - RNA, 23 nt, Human
uccccagauugcaacaggcuggg

SEQ ID NO: 2975565 - RNA, 22 nt, Human
uccccagauugcaacaggcugg

SEQ ID NO: 2975566 - RNA, 20 nt, Human
uccccagauugcaacaggcu

SEQ ID NO: 2975567 - RNA, 19 nt, Human
uccccagauugcaacaggc

SEQ ID NO: 2975568 - RNA, 13 nt, Human
uccccaggaggcc

SEQ ID NO: 2975569 - RNA, 17 nt, Human
ucccccagccccauccu

SEQ ID NO: 2975570 - RNA, 15 nt, Human
uccccaggaggccag

SEQ ID NO: 2975571 - RNA, 16 nt, Human
uccccaggaggccagc

SEQ ID NO: 2975572 - RNA, 20 nt, Human
ucccccagccccauccucug

SEQ ID NO: 2975573 - RNA, 21 nt, Human
ucccccagccccauccucugu

SEQ ID NO: 2975574 - RNA, 22 nt, Human
ucccccagccccauccucugua

SEQ ID NO: 2975575 - RNA, 14 nt, Human
uccccaggaggcca

SEQ ID NO: 2975576 - RNA, 19 nt, Human
ucccaugagccucagcauc

SEQ ID NO: 2975577 - RNA, 18 nt, Human
ucccaugagccucagcau

SEQ ID NO: 2975578 - RNA, 21 nt, Human
ucccaucugugaaaggaaaga

SEQ ID NO: 2975579 - RNA, 15 nt, Human
ucccaucuuccaagg

SEQ ID NO: 2975580 - RNA, 22 nt, Human
ucccagcugugcucuggacagg

SEQ ID NO: 2975581 - RNA, 21 nt, Human
ucccagcugugcucuggacag

SEQ ID NO: 2975582 - RNA, 23 nt, Human
ucccagcugugcucuggacaggc

SEQ ID NO: 2975583 - RNA, 20 nt, Human
ucccaccuggcucuguggcg

SEQ ID NO: 2975584 - RNA, 23 nt, Human
ucccaggcauuccccaggaggcc

SEQ ID NO: 2975585 - RNA, 24 nt, Human
ucccaggcauuccccaggaggcca

SEQ ID NO: 2975586 - RNA, 20 nt, Human
uccaugugggcuaguugggc

SEQ ID NO: 2975587 - RNA, 22 nt, Human
ucccaccucucucacuccuuga

SEQ ID NO: 2975588 - RNA, 20 nt, Human
ucccagcugugcucuggaca

SEQ ID NO: 2975589 - RNA, 17 nt, Human
ucccaccuuggcugcag

SEQ ID NO: 2975590 - RNA, 16 nt, Human
ucccaccuuggcugca

SEQ ID NO: 2975591 - RNA, 19 nt, Human
ucccaccuggcucuguggc

SEQ ID NO: 2975592 - RNA, 16 nt, Human
ucccaccuggcucugu

SEQ ID NO: 2975593 - RNA, 15 nt, Human
ucccaccuggcucug

SEQ ID NO: 2975594 - RNA, 14 nt, Human
ucccaccuggcucu

SEQ ID NO: 2975595 - RNA, 13 nt, Human
ucccaccuuggcu

SEQ ID NO: 2975596 - RNA, 16 nt, Human
uccaaaguacacuguu

SEQ ID NO: 2975597 - RNA, 14 nt, Human
uccaaaguacacug

SEQ ID NO: 2975598 - RNA, 17 nt, Human
uccacuuggucugugag

SEQ ID NO: 2975599 - RNA, 21 nt, Human
uccacuuggucugugagaugc

SEQ ID NO: 2975600 - RNA, 20 nt, Human
uccacuuucuagccagagga

SEQ ID NO: 2975601 - RNA, 21 nt, Human
uccacuuucuagccagaggag

SEQ ID NO: 2975602 - RNA, 23 nt, Human
uccacuuggucugugagaugcua

SEQ ID NO: 2975603 - RNA, 19 nt, Human
uccacuuucuagccagagg

SEQ ID NO: 2975604 - RNA, 12 nt, Human
uccaggagcagc

SEQ ID NO: 2975605 - RNA, 13 nt, Human
uccaggagcagcc

SEQ ID NO: 2975606 - RNA, 14 nt, Human
uccaggagcagcca

SEQ ID NO: 2975607 - RNA, 15 nt, Human
uccaggagcagccac

SEQ ID NO: 2975608 - RNA, 19 nt, Human
uccaggggugggacacccu

SEQ ID NO: 2975609 - RNA, 20 nt, Human
uccaggggugggacacccug

SEQ ID NO: 2975610 - RNA, 14 nt, Human
uccagcugcugaga

SEQ ID NO: 2975611 - RNA, 20 nt, Human
uccagguuuaagcuguuacu

SEQ ID NO: 2975612 - RNA, 19 nt, Human
uccagguagagggugugua

SEQ ID NO: 2975613 - RNA, 18 nt, Human
uccagguuuaagcuguua

SEQ ID NO: 2975614 - RNA, 12 nt, Human
uccauacauuug

SEQ ID NO: 2975615 - RNA, 20 nt, Human
uccaugggccauaugaaaag

SEQ ID NO: 2975616 - RNA, 14 nt, Human
uccauagagagcaa

SEQ ID NO: 2975617 - RNA, 15 nt, Human
uccauagagagcaag

SEQ ID NO: 2975618 - RNA, 15 nt, Human
uccauacauuugugu

SEQ ID NO: 2975619 - RNA, 23 nt, Human
ucaggaagcucagggccuggcuc

SEQ ID NO: 2975620 - RNA, 23 nt, Human
ucagcucugcaagaauugaagca

SEQ ID NO: 2975621 - RNA, 24 nt, Human
ucagcuccagcucaccagccccag

SEQ ID NO: 2975622 - RNA, 23 nt, Human
ucagcuccagcucaccagcccca

SEQ ID NO: 2975623 - RNA, 21 nt, Human
ucaggccugggggcugggcag

SEQ ID NO: 2975624 - RNA, 19 nt, Human
ucagguggggcagcuugag

SEQ ID NO: 2975625 - RNA, 18 nt, Human
ucagguggggcagcuuga

SEQ ID NO: 2975626 - RNA, 23 nt, Human
ucaggugauccacccaccucagc

SEQ ID NO: 2975627 - RNA, 23 nt, Human
ucaggugagaagcagaggaagga

SEQ ID NO: 2975628 - RNA, 16 nt, Human
ucaggugauccaccca

SEQ ID NO: 2975629 - RNA, 23 nt, Human
ucagucugauucccaagcucugc

SEQ ID NO: 2975630 - RNA, 22 nt, Human
ucagucugauucccaagcucug

SEQ ID NO: 2975631 - RNA, 21 nt, Human
ucagucugauucccaagcucu

SEQ ID NO: 2975632 - RNA, 19 nt, Human
ucagucugauucccaagcu

SEQ ID NO: 2975633 - RNA, 20 nt, Human
ucagguggggcagcuugagg

SEQ ID NO: 2975634 - RNA, 16 nt, Human
ucauuaggauggcuag

SEQ ID NO: 2975635 - RNA, 14 nt, Human
uccaaagaaaugua

SEQ ID NO: 2975636 - RNA, 17 nt, Human
uccaaagaaauguaagg

SEQ ID NO: 2975637 - RNA, 13 nt, Human
uccaaaguacacu

SEQ ID NO: 2975638 - RNA, 11 nt, Human
ucauagcagcu

SEQ ID NO: 2975639 - RNA, 12 nt, Human
ucauagcagcuu

SEQ ID NO: 2975640 - RNA, 20 nt, Human
ucaguguacauggaauaaca

SEQ ID NO: 2975641 - RNA, 17 nt, Human
ucaucaaugaaugaaug

SEQ ID NO: 2975642 - RNA, 14 nt, Human
ucaucauccuaagc

SEQ ID NO: 2975643 - RNA, 19 nt, Human
ucaucuugaauuguaagga

SEQ ID NO: 2975644 - RNA, 17 nt, Human
ucauccacugugccaug

SEQ ID NO: 2975645 - RNA, 14 nt, Human
ucauccacugugcc

SEQ ID NO: 2975646 - RNA, 17 nt, Human
ucaugcuguucaugaaa

SEQ ID NO: 2975647 - RNA, 20 nt, Human
uaugauugccuuuuuauaac

SEQ ID NO: 2975648 - RNA, 23 nt, Human
uaugauugccuuuuuauaacuuu

SEQ ID NO: 2975649 - RNA, 16 nt, Human
uaugauucccagccag

SEQ ID NO: 2975650 - RNA, 21 nt, Human
uaugauucaaaugucuauaaa

SEQ ID NO: 2975651 - RNA, 16 nt, Human
uaugauucaaaugucu

SEQ ID NO: 2975652 - RNA, 21 nt, Human
uaugagaaacuggcaaagcag

SEQ ID NO: 2975653 - RNA, 16 nt, Human
uaugacuccagaauuu

SEQ ID NO: 2975654 - RNA, 17 nt, Human
uaugacuccagaauuuc

SEQ ID NO: 2975655 - RNA, 23 nt, Human
uaugacuccagaauuucccaaag

SEQ ID NO: 2975656 - RNA, 13 nt, Human
uaugcaaagcacu

SEQ ID NO: 2975657 - RNA, 14 nt, Human
uaugcaaagcacug

SEQ ID NO: 2975658 - RNA, 12 nt, Human
uaugcaaagcac

SEQ ID NO: 2975659 - RNA, 18 nt, Human
uaugcaaucaaaucugcu

SEQ ID NO: 2975660 - RNA, 15 nt, Human
uaugcaaagcacuga

SEQ ID NO: 2975661 - RNA, 13 nt, Human
uaugcaaagucua

SEQ ID NO: 2975662 - RNA, 14 nt, Human
uaugcacacauuuu

SEQ ID NO: 2975663 - RNA, 16 nt, Human
uaugcacacacauaua

SEQ ID NO: 2975664 - RNA, 14 nt, Human
uaugcacacacaua

SEQ ID NO: 2975665 - RNA, 13 nt, Human
uaugcacacauuu

SEQ ID NO: 2975666 - RNA, 13 nt, Human
uauggaacacucu

SEQ ID NO: 2975667 - RNA, 16 nt, Human
uauggaacacucugag

SEQ ID NO: 2975668 - RNA, 17 nt, Human
uauggaacacucugaga

SEQ ID NO: 2975669 - RNA, 18 nt, Human
uauggaacacucugagac

SEQ ID NO: 2975670 - RNA, 19 nt, Human
uauggaacacucugagacu

SEQ ID NO: 2975671 - RNA, 16 nt, Human
uauggaagcacccauu

SEQ ID NO: 2975672 - RNA, 17 nt, Human
uauggacaaugacccag

SEQ ID NO: 2975673 - RNA, 22 nt, Human
uaugcuuauacacuuacacuuu

SEQ ID NO: 2975674 - RNA, 18 nt, Human
uaugcaugaaguaauaug

SEQ ID NO: 2975675 - RNA, 13 nt, Human
uaugcaugaagua

SEQ ID NO: 2975676 - RNA, 16 nt, Human
uaugcuucuguuuuau

SEQ ID NO: 2975677 - RNA, 15 nt, Human
uaugcuucuguuuua

SEQ ID NO: 2975678 - RNA, 18 nt, Human
uaucuguucauauggaua

SEQ ID NO: 2975679 - RNA, 16 nt, Human
uaucuuacgaaaaaau

SEQ ID NO: 2975680 - RNA, 13 nt, Human
uaucuuacgaaaa

SEQ ID NO: 2975681 - RNA, 23 nt, Human
uaucugucauuugagcagggcuc

SEQ ID NO: 2975682 - RNA, 21 nt, Human
uaucugucauuugagcagggc

SEQ ID NO: 2975683 - RNA, 20 nt, Human
uaucugucauuugagcaggg

SEQ ID NO: 2975684 - RNA, 23 nt, Human
uaugaauuacauuuguauaaaau

SEQ ID NO: 2975685 - RNA, 17 nt, Human
uaugaauuacauuugua

SEQ ID NO: 2975686 - RNA, 22 nt, Human
uaugacacaugcaaggucauuu

SEQ ID NO: 2975687 - RNA, 12 nt, Human
uaugacacaugc

SEQ ID NO: 2975688 - RNA, 21 nt, Human
uaucuaauauguaacaagcca

SEQ ID NO: 2975689 - RNA, 14 nt, Human
uauccuucagccug

SEQ ID NO: 2975690 - RNA, 15 nt, Human
uauccuucagccuga

SEQ ID NO: 2975691 - RNA, 16 nt, Human
uaucuaaauguugaaa

SEQ ID NO: 2975692 - RNA, 14 nt, Human
uauccucuguugau

SEQ ID NO: 2975693 - RNA, 19 nt, Human
uauauguuuuaagaggcag

SEQ ID NO: 2975694 - RNA, 13 nt, Human
uauaugcuucugu

SEQ ID NO: 2975695 - RNA, 21 nt, Human
uauaugcucugcauguuacau

SEQ ID NO: 2975696 - RNA, 20 nt, Human
uauaugcucugcauguuaca

SEQ ID NO: 2975697 - RNA, 21 nt, Human
uauaucuauauuuuacauaaa

SEQ ID NO: 2975698 - RNA, 18 nt, Human
uauaaacuuuaccuuuuu

SEQ ID NO: 2975699 - RNA, 13 nt, Human
uaguaucaaaaga

SEQ ID NO: 2975700 - RNA, 23 nt, Human
uaggugacagagugagacucugu

SEQ ID NO: 2975701 - RNA, 13 nt, Human
uaggugacauaua

SEQ ID NO: 2975702 - RNA, 16 nt, Human
uaguauuucuaugaaa

SEQ ID NO: 2975703 - RNA, 19 nt, Human
uaguauuucuaugaaauau

SEQ ID NO: 2975704 - RNA, 18 nt, Human
uaguauuucuaugaaaua

SEQ ID NO: 2975705 - RNA, 18 nt, Human
uaguauuuuuuacauuuu

SEQ ID NO: 2975706 - RNA, 15 nt, Human
uagugcaaauuguca

SEQ ID NO: 2975707 - RNA, 14 nt, Human
uagugcaaauuguc

SEQ ID NO: 2975708 - RNA, 13 nt, Human
uagucaaauugug

SEQ ID NO: 2975709 - RNA, 23 nt, Human
uaguauuuuuuacauuuuacaca

SEQ ID NO: 2975710 - RNA, 12 nt, Human
uaggaauugacc

SEQ ID NO: 2975711 - RNA, 16 nt, Human
uaggccaugggacagg

SEQ ID NO: 2975712 - RNA, 18 nt, Human
uaggccaugggacaggga

SEQ ID NO: 2975713 - RNA, 19 nt, Human
uaggacccgucuccagcug

SEQ ID NO: 2975714 - RNA, 15 nt, Human
uaggccuggccagau

SEQ ID NO: 2975715 - RNA, 18 nt, Human
uaggccuggccagaugca

SEQ ID NO: 2975716 - RNA, 16 nt, Human
uaggucagugcaaaua

SEQ ID NO: 2975717 - RNA, 20 nt, Human
uagggaaaaaccagcgugug

SEQ ID NO: 2975718 - RNA, 21 nt, Human
uagggaaaaaccagcguguga

SEQ ID NO: 2975719 - RNA, 19 nt, Human
uagggaaaaaccagcgugu

SEQ ID NO: 2975720 - RNA, 11 nt, Human
uagggaaaaac

SEQ ID NO: 2975721 - RNA, 17 nt, Human
uaggcuauuccugagag

SEQ ID NO: 2975722 - RNA, 15 nt, Human
uaggcuauuccugag

SEQ ID NO: 2975723 - RNA, 13 nt, Human
uauguuaauauuu

SEQ ID NO: 2975724 - RNA, 16 nt, Human
uauguuaauauuucug

SEQ ID NO: 2975725 - RNA, 14 nt, Human
uauguuaauauuuu

SEQ ID NO: 2975726 - RNA, 19 nt, Human
uauguuagugcaaauuguc

SEQ ID NO: 2975727 - RNA, 13 nt, Human
uauguguucuauu

SEQ ID NO: 2975728 - RNA, 12 nt, Human
uauguuaaaacu

SEQ ID NO: 2975729 - RNA, 19 nt, Human
uauggaggcuuugcauaga

SEQ ID NO: 2975730 - RNA, 22 nt, Human
uauguucuuaguggauguucug

SEQ ID NO: 2975731 - RNA, 17 nt, Human
uauguucuaagaaguga

SEQ ID NO: 2975732 - RNA, 21 nt, Human
uauguugcccaggcaggucuu

SEQ ID NO: 2975733 - RNA, 16 nt, Human
uauuaagaaagacuau

SEQ ID NO: 2975734 - RNA, 17 nt, Human
uauuaaaugcccagccc

SEQ ID NO: 2975735 - RNA, 19 nt, Human
uauuaaaugcccagccccu

SEQ ID NO: 2975736 - RNA, 15 nt, Human
uauuaaaugcccagc

SEQ ID NO: 2975737 - RNA, 13 nt, Human
uauuauauucauu

SEQ ID NO: 2975738 - RNA, 17 nt, Human
uauuauauucauucuuu

SEQ ID NO: 2975739 - RNA, 23 nt, Human
uauuauauucauucuuuuugaaa

SEQ ID NO: 2975740 - RNA, 17 nt, Human
uauuauauuuacaaaug

SEQ ID NO: 2975741 - RNA, 14 nt, Human
uauuauaccuuuuu

SEQ ID NO: 2975742 - RNA, 14 nt, Human
uauuaaggaagaca

SEQ ID NO: 2975743 - RNA, 13 nt, Human
uauuauaccuuuu

SEQ ID NO: 2975744 - RNA, 12 nt, Human
uauuauaccuuu

SEQ ID NO: 2975745 - RNA, 16 nt, Human
uauuauguuaaaacug

SEQ ID NO: 2975746 - RNA, 21 nt, Human
uauuauuugcagugcaguaua

SEQ ID NO: 2975747 - RNA, 20 nt, Human
uauuauuugcagugcaguau

SEQ ID NO: 2975748 - RNA, 12 nt, Human
uauuauuugcag

SEQ ID NO: 2975749 - RNA, 18 nt, Human
uauucauucuuuuugaaa

SEQ ID NO: 2975750 - RNA, 23 nt, Human
uauucauucuuuuugaaauguca

SEQ ID NO: 2975751 - RNA, 20 nt, Human
uauugauaugcuuauacacu

SEQ ID NO: 2975752 - RNA, 19 nt, Human
uauugcauacuauuaaaca

SEQ ID NO: 2975753 - RNA, 23 nt, Human
uauugcauacuauuaaacaugcu

SEQ ID NO: 2975754 - RNA, 16 nt, Human
uauuguuuaaaaucau

SEQ ID NO: 2975755 - RNA, 17 nt, Human
uauuguuuaaaaucauu

SEQ ID NO: 2975756 - RNA, 15 nt, Human
uauuguuuaaaauca

SEQ ID NO: 2975757 - RNA, 15 nt, Human
uauugcccacgcugg

SEQ ID NO: 2975758 - RNA, 14 nt, Human
uauugccaaugcua

SEQ ID NO: 2975759 - RNA, 14 nt, Human
uauugcccacgcug

SEQ ID NO: 2975760 - RNA, 13 nt, Human
uauugcccacgcu

SEQ ID NO: 2975761 - RNA, 23 nt, Human
uauugcugauggugcaaugaccu

SEQ ID NO: 2975762 - RNA, 22 nt, Human
uauugcugauggugcaaugacc

SEQ ID NO: 2975763 - RNA, 18 nt, Human
uauuugaaacacugguuu

SEQ ID NO: 2975764 - RNA, 15 nt, Human
uauuucuaugaaaua

SEQ ID NO: 2975765 - RNA, 14 nt, Human
uauuucuaugaaau

SEQ ID NO: 2975766 - RNA, 20 nt, Human
uauuucuugugguuauaacu

SEQ ID NO: 2975767 - RNA, 23 nt, Human
uauuucuugugguuauaacuuaa

SEQ ID NO: 2975768 - RNA, 22 nt, Human
uauuuauuaaaugcccagcccc

SEQ ID NO: 2975769 - RNA, 14 nt, Human
uauuuauuacugua

SEQ ID NO: 2975770 - RNA, 13 nt, Human
uauuucuaugaaa

SEQ ID NO: 2975771 - RNA, 13 nt, Human
uauuuauuacugu

SEQ ID NO: 2975772 - RNA, 17 nt, Human
uauuuaaauagaugaca

SEQ ID NO: 2975773 - RNA, 15 nt, Human
uauuuaaauagauga

SEQ ID NO: 2975774 - RNA, 20 nt, Human
uauuguuuaaaaucauuucu

SEQ ID NO: 2975775 - RNA, 17 nt, Human
uauuuaugggauccugg

SEQ ID NO: 2975776 - RNA, 12 nt, Human
ucaaauguguac

SEQ ID NO: 2975777 - RNA, 18 nt, Human
ucaaauaugcaaagcacu

SEQ ID NO: 2975778 - RNA, 19 nt, Human
ucaaauaugcaaagcacug

SEQ ID NO: 2975779 - RNA, 15 nt, Human
ucaaauccuugaaga

SEQ ID NO: 2975780 - RNA, 16 nt, Human
ucaaauccuugaagau

SEQ ID NO: 2975781 - RNA, 12 nt, Human
ucaaagagguuu

SEQ ID NO: 2975782 - RNA, 23 nt, Human
ucaaagagguuuuaaaaaaaucc

SEQ ID NO: 2975783 - RNA, 16 nt, Human
ucaaauaugcaaagca

SEQ ID NO: 2975784 - RNA, 17 nt, Human
ucaaauaugcaaagcac

SEQ ID NO: 2975785 - RNA, 22 nt, Human
ucaaacagucucaggaaaucaa

SEQ ID NO: 2975786 - RNA, 17 nt, Human
ucaaacauauauaacaa

SEQ ID NO: 2975787 - RNA, 22 nt, Human
uauuugcagugcaguauagaau

SEQ ID NO: 2975788 - RNA, 20 nt, Human
uauuugcagugcaguauaga

SEQ ID NO: 2975789 - RNA, 22 nt, Human
ucaacuccaaacugacucuuaa

SEQ ID NO: 2975790 - RNA, 19 nt, Human
ucaacuccaaacugacucu

SEQ ID NO: 2975791 - RNA, 20 nt, Human
ucaacucuccuccagaguca

SEQ ID NO: 2975792 - RNA, 19 nt, Human
ucaaccccuucgcuccugu

SEQ ID NO: 2975793 - RNA, 18 nt, Human
ucaaccccuucgcuccug

SEQ ID NO: 2975794 - RNA, 15 nt, Human
ucaaccuccugggcu

SEQ ID NO: 2975795 - RNA, 20 nt, Human
ucaaccccuucgcuccugug

SEQ ID NO: 2975796 - RNA, 16 nt, Human
ucaaccuccugggcua

SEQ ID NO: 2975797 - RNA, 15 nt, Human
ucaaggauccugagc

SEQ ID NO: 2975798 - RNA, 16 nt, Human
ucaaggauccugagcc

SEQ ID NO: 2975799 - RNA, 17 nt, Human
ucaaggauccugagcca

SEQ ID NO: 2975800 - RNA, 13 nt, Human
ucaaggauccuga

SEQ ID NO: 2975801 - RNA, 14 nt, Human
ucaaggauccugag

SEQ ID NO: 2975802 - RNA, 19 nt, Human
ucaagcgauucuucugcuu

SEQ ID NO: 2975803 - RNA, 18 nt, Human
ucaagcgauucuucugcu

SEQ ID NO: 2975804 - RNA, 21 nt, Human
ucaagcgauucuucugcuuca

SEQ ID NO: 2975805 - RNA, 12 nt, Human
ucaagccaccaa

SEQ ID NO: 2975806 - RNA, 20 nt, Human
ucaagccaccaacauacucc

SEQ ID NO: 2975807 - RNA, 17 nt, Human
ucaagcgauucuucugc

SEQ ID NO: 2975808 - RNA, 17 nt, Human
ucacauuggaaacaagu

SEQ ID NO: 2975809 - RNA, 12 nt, Human
ucacauuuaaau

SEQ ID NO: 2975810 - RNA, 17 nt, Human
ucaccaacgucugugcc

SEQ ID NO: 2975811 - RNA, 18 nt, Human
ucaccaacgucugugcca

SEQ ID NO: 2975812 - RNA, 21 nt, Human
ucaccaaaucagcugcuacua

SEQ ID NO: 2975813 - RNA, 14 nt, Human
ucacauuuauucug

SEQ ID NO: 2975814 - RNA, 13 nt, Human
ucaccaagcccag

SEQ ID NO: 2975815 - RNA, 16 nt, Human
ucaccacaugugcaca

SEQ ID NO: 2975816 - RNA, 18 nt, Human
ucacccgcuaagagggag

SEQ ID NO: 2975817 - RNA, 12 nt, Human
ucacccuuuucu

SEQ ID NO: 2975818 - RNA, 14 nt, Human
ucaccgaaaacgug

SEQ ID NO: 2975819 - RNA, 19 nt, Human
ucacccgcuaagagggagg

SEQ ID NO: 2975820 - RNA, 15 nt, Human
ucaccgaaaacgugg

SEQ ID NO: 2975821 - RNA, 19 nt, Human
ucaccgaaaacguggcugc

SEQ ID NO: 2975822 - RNA, 20 nt, Human
ucaccgaaaacguggcugcu

SEQ ID NO: 2975823 - RNA, 21 nt, Human
ucaccgaaaacguggcugcuu

SEQ ID NO: 2975824 - RNA, 22 nt, Human
ucaccgaaaacguggcugcuuc

SEQ ID NO: 2975825 - RNA, 23 nt, Human
ucaccgaaaacguggcugcuuca

SEQ ID NO: 2975826 - RNA, 22 nt, Human
ucacacaugagcaucaggccag

SEQ ID NO: 2975827 - RNA, 23 nt, Human
ucacacaugagcaucaggccagg

SEQ ID NO: 2975828 - RNA, 15 nt, Human
ucacacacuuuggcu

SEQ ID NO: 2975829 - RNA, 20 nt, Human
ucacauuccugaacaggaua

SEQ ID NO: 2975830 - RNA, 14 nt, Human
ucacauuggaaaca

SEQ ID NO: 2975831 - RNA, 22 nt, Human
ucacaagacccaaaaggcagaa

SEQ ID NO: 2975832 - RNA, 18 nt, Human
ucacaagacccaaaaggc

SEQ ID NO: 2975833 - RNA, 14 nt, Human
guggaaaauaacuc

SEQ ID NO: 2975834 - RNA, 18 nt, Human
guggaaaaauagccugcc

SEQ ID NO: 2975835 - RNA, 13 nt, Human
gugcuuggcccag

SEQ ID NO: 2975836 - RNA, 14 nt, Human
gugcuuggcccagg

SEQ ID NO: 2975837 - RNA, 15 nt, Human
gugcuuggcccagga

SEQ ID NO: 2975838 - RNA, 16 nt, Human
gugcuuggcccaggag

SEQ ID NO: 2975839 - RNA, 17 nt, Human
gugcuuggcccaggagu

SEQ ID NO: 2975840 - RNA, 19 nt, Human
gugcuuggcccaggaguuu

SEQ ID NO: 2975841 - RNA, 24 nt, Human
gugcuuggcccaggaguuuggcca

SEQ ID NO: 2975842 - RNA, 13 nt, Human
gugcuuggaggaa

SEQ ID NO: 2975843 - RNA, 15 nt, Human
gugcuuggaggaagg

SEQ ID NO: 2975844 - RNA, 12 nt, Human
gugcuuggagga

SEQ ID NO: 2975845 - RNA, 11 nt, Human
gugcugcccug

SEQ ID NO: 2975846 - RNA, 22 nt, Human
gugcugccauccagguucagcu

SEQ ID NO: 2975847 - RNA, 23 nt, Human
gugcugaaugguuuucaaaauaa

SEQ ID NO: 2975848 - RNA, 20 nt, Human
gugcugaaugguuuucaaaa

SEQ ID NO: 2975849 - RNA, 19 nt, Human
gugcugaaugguuuucaaa

SEQ ID NO: 2975850 - RNA, 18 nt, Human
gugcucuggacaggcaug

SEQ ID NO: 2975851 - RNA, 17 nt, Human
gugcucuggacaggcau

SEQ ID NO: 2975852 - RNA, 21 nt, Human
gugccuuggggacaagagcag

SEQ ID NO: 2975853 - RNA, 16 nt, Human
gugcucuggacaggca

SEQ ID NO: 2975854 - RNA, 15 nt, Human
gugcucuggacaggc

SEQ ID NO: 2975855 - RNA, 16 nt, Human
gugcugagucugaagg

SEQ ID NO: 2975856 - RNA, 17 nt, Human
gugcugagucugaaggc

SEQ ID NO: 2975857 - RNA, 18 nt, Human
gugcugagucugaaggcu

SEQ ID NO: 2975858 - RNA, 19 nt, Human
gugcugagucugaaggcug

SEQ ID NO: 2975859 - RNA, 12 nt, Human
gugcugagucug

SEQ ID NO: 2975860 - RNA, 19 nt, Human
gugcugccauccagguuca

SEQ ID NO: 2975861 - RNA, 18 nt, Human
gugcugccauccagguuc

SEQ ID NO: 2975862 - RNA, 15 nt, Human
gugcugccauccagg

SEQ ID NO: 2975863 - RNA, 20 nt, Human
gugcugcauuuaaaagauac

SEQ ID NO: 2975864 - RNA, 19 nt, Human
gugcugcauuuaaaagaua

SEQ ID NO: 2975865 - RNA, 12 nt, Human
gugcugcauuua

SEQ ID NO: 2975866 - RNA, 21 nt, Human
gugcugaguguacagagugga

SEQ ID NO: 2975867 - RNA, 21 nt, Human
guggcagugggagcugccugu

SEQ ID NO: 2975868 - RNA, 19 nt, Human
guggcagugggagcugccu

SEQ ID NO: 2975869 - RNA, 22 nt, Human
guggccacaccucuaucccggc

SEQ ID NO: 2975870 - RNA, 23 nt, Human
guggccacaccucuaucccggcu

SEQ ID NO: 2975871 - RNA, 19 nt, Human
guggcagcugcuuuugucu

SEQ ID NO: 2975872 - RNA, 13 nt, Human
guggcagcugcuu

SEQ ID NO: 2975873 - RNA, 12 nt, Human
guggcagcugcu

SEQ ID NO: 2975874 - RNA, 23 nt, Human
guggcagcugcgguccacccagg

SEQ ID NO: 2975875 - RNA, 22 nt, Human
guggcagcugcgguccacccag

SEQ ID NO: 2975876 - RNA, 21 nt, Human
guggcagcugcgguccaccca

SEQ ID NO: 2975877 - RNA, 20 nt, Human
guggaugccugguggcagcu

SEQ ID NO: 2975878 - RNA, 19 nt, Human
guggcagcugcgguccacc

SEQ ID NO: 2975879 - RNA, 17 nt, Human
guggcagugggagcugc

SEQ ID NO: 2975880 - RNA, 16 nt, Human
guggcagugggagcug

SEQ ID NO: 2975881 - RNA, 15 nt, Human
guggcagugggagcu

SEQ ID NO: 2975882 - RNA, 17 nt, Human
guggaguucaucuugaa

SEQ ID NO: 2975883 - RNA, 21 nt, Human
guggaucacgaggucaggaga

SEQ ID NO: 2975884 - RNA, 18 nt, Human
guggaugccugguggcag

SEQ ID NO: 2975885 - RNA, 16 nt, Human
guggaugccugguggc

SEQ ID NO: 2975886 - RNA, 20 nt, Human
guggagaagcggcuggcagc

SEQ ID NO: 2975887 - RNA, 18 nt, Human
gugcaaauugucacagga

SEQ ID NO: 2975888 - RNA, 19 nt, Human
gugcauaaguuaacuucca

SEQ ID NO: 2975889 - RNA, 20 nt, Human
gugcaguauagaauaggcac

SEQ ID NO: 2975890 - RNA, 14 nt, Human
gugcauaccacuuu

SEQ ID NO: 2975891 - RNA, 13 nt, Human
gugcauaccacuu

SEQ ID NO: 2975892 - RNA, 21 nt, Human
gugcauaccacuuuuguucuu

SEQ ID NO: 2975893 - RNA, 22 nt, Human
gugccagguuuuuggucugacc

SEQ ID NO: 2975894 - RNA, 20 nt, Human
gugccagguuuuuggucuga

SEQ ID NO: 2975895 - RNA, 20 nt, Human
gugcccacaggaucagucug

SEQ ID NO: 2975896 - RNA, 20 nt, Human
gugauccacccaccucagcc

SEQ ID NO: 2975897 - RNA, 18 nt, Human
gugauccacccaccucag

SEQ ID NO: 2975898 - RNA, 13 nt, Human
gugaggccagaga

SEQ ID NO: 2975899 - RNA, 15 nt, Human
gugauccacccaccu

SEQ ID NO: 2975900 - RNA, 11 nt, Human
gugaggccaga

SEQ ID NO: 2975901 - RNA, 18 nt, Human
gugauccucccaccucag

SEQ ID NO: 2975902 - RNA, 15 nt, Human
gugauccucccaccu

SEQ ID NO: 2975903 - RNA, 14 nt, Human
gugauccucccacc

SEQ ID NO: 2975904 - RNA, 22 nt, Human
gugauccucccaccucagccuc

SEQ ID NO: 2975905 - RNA, 20 nt, Human
gugauccucccaccucagcc

SEQ ID NO: 2975906 - RNA, 22 nt, Human
gugauucuccugccucagccuc

SEQ ID NO: 2975907 - RNA, 20 nt, Human
gugauucuccugccucagcc

SEQ ID NO: 2975908 - RNA, 19 nt, Human
gugauucuccugccucagc

SEQ ID NO: 2975909 - RNA, 18 nt, Human
gugauucuccugccucag

SEQ ID NO: 2975910 - RNA, 17 nt, Human
gugauucuccugccuca

SEQ ID NO: 2975911 - RNA, 16 nt, Human
gugauucuccugccuc

SEQ ID NO: 2975912 - RNA, 14 nt, Human
gugauucuccugcc

SEQ ID NO: 2975913 - RNA, 12 nt, Human
gugauuuucauu

SEQ ID NO: 2975914 - RNA, 23 nt, Human
gugauucuccugccucagccucc

SEQ ID NO: 2975915 - RNA, 16 nt, Human
gugagcagucaggaaa

SEQ ID NO: 2975916 - RNA, 17 nt, Human
gugacugaucucucgug

SEQ ID NO: 2975917 - RNA, 13 nt, Human
gugagccacugca

SEQ ID NO: 2975918 - RNA, 14 nt, Human
gugagcuacaaaug

SEQ ID NO: 2975919 - RNA, 16 nt, Human
gugaggaagccgcugg

SEQ ID NO: 2975920 - RNA, 19 nt, Human
gugaggaagccgcuggggc

SEQ ID NO: 2975921 - RNA, 11 nt, Human
gugaggaagcc

SEQ ID NO: 2975922 - RNA, 15 nt, Human
gugacugaauuucuu

SEQ ID NO: 2975923 - RNA, 18 nt, Human
gugacugaauuucuuuug

SEQ ID NO: 2975924 - RNA, 16 nt, Human
gugacugaauuucuuu

SEQ ID NO: 2975925 - RNA, 16 nt, Human
gugacaacacuugugu

SEQ ID NO: 2975926 - RNA, 15 nt, Human
gugaccucugccuga

SEQ ID NO: 2975927 - RNA, 20 nt, Human
gugaaacucguuaauuugua

SEQ ID NO: 2975928 - RNA, 12 nt, Human
gugaaacuggau

SEQ ID NO: 2975929 - RNA, 19 nt, Human
gugaaagaaaauaacaaua

SEQ ID NO: 2975930 - RNA, 14 nt, Human
gugaaaagaaaaau

SEQ ID NO: 2975931 - RNA, 23 nt, Human
gugaaaagaaaaaugagccuggc

SEQ ID NO: 2975932 - RNA, 23 nt, Human
gugaauaccccaagacucccaug

SEQ ID NO: 2975933 - RNA, 14 nt, Human
gugaauaccccaag

SEQ ID NO: 2975934 - RNA, 19 nt, Human
gugaaaggaaagagggagg

SEQ ID NO: 2975935 - RNA, 23 nt, Human
gugaauguaggcuggcuuucaga

SEQ ID NO: 2975936 - RNA, 18 nt, Human
guccugucggagcccugu

SEQ ID NO: 2975937 - RNA, 20 nt, Human
guccugucggagcccugucu

SEQ ID NO: 2975938 - RNA, 21 nt, Human
guccugucggagcccugucuc

SEQ ID NO: 2975939 - RNA, 18 nt, Human
guccugggagugagcugg

SEQ ID NO: 2975940 - RNA, 17 nt, Human
guccugggagugagcug

SEQ ID NO: 2975941 - RNA, 19 nt, Human
guccugggagugagcuggu

SEQ ID NO: 2975942 - RNA, 23 nt, Human
guccucccaucucacacaugagc

SEQ ID NO: 2975943 - RNA, 13 nt, Human
guccucccaucuc

SEQ ID NO: 2975944 - RNA, 14 nt, Human
guccucccaucuca

SEQ ID NO: 2975945 - RNA, 12 nt, Human
guccucccaucu

SEQ ID NO: 2975946 - RNA, 17 nt, Human
guccuggcaugggaaug

SEQ ID NO: 2975947 - RNA, 16 nt, Human
guccugggagugagcu

SEQ ID NO: 2975948 - RNA, 15 nt, Human
guccugggagugagc

SEQ ID NO: 2975949 - RNA, 21 nt, Human
guccuauuauauucauucuuu

SEQ ID NO: 2975950 - RNA, 19 nt, Human
guccuauuauauucauucu

SEQ ID NO: 2975951 - RNA, 23 nt, Human
guccuagaaauuccccacccuga

SEQ ID NO: 2975952 - RNA, 23 nt, Human
guccuacucugugucaggugggg

SEQ ID NO: 2975953 - RNA, 15 nt, Human
guccuacucuguguc

SEQ ID NO: 2975954 - RNA, 16 nt, Human
gucccugguggcagcu

SEQ ID NO: 2975955 - RNA, 17 nt, Human
gucccugguggcagcuc

SEQ ID NO: 2975956 - RNA, 13 nt, Human
guccuacucugug

SEQ ID NO: 2975957 - RNA, 12 nt, Human
gucccagugccg

SEQ ID NO: 2975958 - RNA, 15 nt, Human
gucuacacugugcug

SEQ ID NO: 2975959 - RNA, 23 nt, Human
gucuacacuaagagagaaugaga

SEQ ID NO: 2975960 - RNA, 17 nt, Human
gucuacacuaagagaga

SEQ ID NO: 2975961 - RNA, 16 nt, Human
guccuuaccagcagag

SEQ ID NO: 2975962 - RNA, 17 nt, Human
guccuuaccagcagagc

SEQ ID NO: 2975963 - RNA, 15 nt, Human
guccuuaccagcaga

SEQ ID NO: 2975964 - RNA, 23 nt, Human
gucucacuguugcccaggcuggc

SEQ ID NO: 2975965 - RNA, 22 nt, Human
gucucacuguugcccaggcugg

SEQ ID NO: 2975966 - RNA, 21 nt, Human
gucucacuguugcccaggcug

SEQ ID NO: 2975967 - RNA, 20 nt, Human
gucucacuguugcccaggcu

SEQ ID NO: 2975968 - RNA, 19 nt, Human
gucucacuguugcccaggc

SEQ ID NO: 2975969 - RNA, 18 nt, Human
gucucacuguugcccagg

SEQ ID NO: 2975970 - RNA, 17 nt, Human
gucucacuguugcccag

SEQ ID NO: 2975971 - RNA, 16 nt, Human
gucucacuguugccca

SEQ ID NO: 2975972 - RNA, 23 nt, Human
gucucacuauguugcccaggcag

SEQ ID NO: 2975973 - RNA, 13 nt, Human
gucucacuguugc

SEQ ID NO: 2975974 - RNA, 21 nt, Human
gucucacuauguugcccaggc

SEQ ID NO: 2975975 - RNA, 20 nt, Human
gucucacuauguugcccagg

SEQ ID NO: 2975976 - RNA, 19 nt, Human
gucugaggaauccagaccc

SEQ ID NO: 2975977 - RNA, 18 nt, Human
gucugaggaauccagacc

SEQ ID NO: 2975978 - RNA, 15 nt, Human
gucugacccacugcu

SEQ ID NO: 2975979 - RNA, 14 nt, Human
gucugacccacugc

SEQ ID NO: 2975980 - RNA, 13 nt, Human
gucugacccacug

SEQ ID NO: 2975981 - RNA, 21 nt, Human
gucugauucccaagcucugcu

SEQ ID NO: 2975982 - RNA, 20 nt, Human
gucugauucccaagcucugc

SEQ ID NO: 2975983 - RNA, 21 nt, Human
gucugaggaauccagacccgg

SEQ ID NO: 2975984 - RNA, 19 nt, Human
gucugauucccaagcucug

SEQ ID NO: 2975985 - RNA, 18 nt, Human
gucugauucccaagcucu

SEQ ID NO: 2975986 - RNA, 17 nt, Human
gucugauucccaagcuc

SEQ ID NO: 2975987 - RNA, 20 nt, Human
guagagguacacuugugaau

SEQ ID NO: 2975988 - RNA, 13 nt, Human
guagagugggagc

SEQ ID NO: 2975989 - RNA, 15 nt, Human
guagagugggagcug

SEQ ID NO: 2975990 - RNA, 20 nt, Human
guauuacaguggggaaugaa

SEQ ID NO: 2975991 - RNA, 15 nt, Human
guauuacuucugcua

SEQ ID NO: 2975992 - RNA, 14 nt, Human
guauuacuucugcu

SEQ ID NO: 2975993 - RNA, 13 nt, Human
guauuacuucugc

SEQ ID NO: 2975994 - RNA, 22 nt, Human
guauuacaguggggaaugaaga

SEQ ID NO: 2975995 - RNA, 14 nt, Human
guauuauaccuuuu

SEQ ID NO: 2975996 - RNA, 22 nt, Human
guauuucuaugaaauauuaugu

SEQ ID NO: 2975997 - RNA, 17 nt, Human
guauuucuaugaaauau

SEQ ID NO: 2975998 - RNA, 13 nt, Human
gucaaggcuuaga

SEQ ID NO: 2975999 - RNA, 19 nt, Human
gucaagugaaaaaggagga

SEQ ID NO: 2976000 - RNA, 16 nt, Human
gucaagugaaaaagga

SEQ ID NO: 2976001 - RNA, 18 nt, Human
gucaagugaaaaaggagg

SEQ ID NO: 2976002 - RNA, 16 nt, Human
gucaagcauguauuuu

SEQ ID NO: 2976003 - RNA, 14 nt, Human
gucaagcauguauu

SEQ ID NO: 2976004 - RNA, 19 nt, Human
gucaagagggucugaggaa

SEQ ID NO: 2976005 - RNA, 18 nt, Human
gucaagagggucugagga

SEQ ID NO: 2976006 - RNA, 17 nt, Human
guauuuuaaaagaauga

SEQ ID NO: 2976007 - RNA, 16 nt, Human
guauuuuaaaagaaug

SEQ ID NO: 2976008 - RNA, 14 nt, Human
gucaccucauggaa

SEQ ID NO: 2976009 - RNA, 20 nt, Human
gucaccugaagacucauucu

SEQ ID NO: 2976010 - RNA, 13 nt, Human
gucaccccggcca

SEQ ID NO: 2976011 - RNA, 15 nt, Human
gucaauaaaauccau

SEQ ID NO: 2976012 - RNA, 21 nt, Human
gucaauaaaauccauacauuu

SEQ ID NO: 2976013 - RNA, 13 nt, Human
gucaauuacagga

SEQ ID NO: 2976014 - RNA, 15 nt, Human
gucaauuacaggaag

SEQ ID NO: 2976015 - RNA, 16 nt, Human
gucaauuacaggaagu

SEQ ID NO: 2976016 - RNA, 21 nt, Human
gucauauaagauucauauuua

SEQ ID NO: 2976017 - RNA, 13 nt, Human
gucagcuaaagaa

SEQ ID NO: 2976018 - RNA, 20 nt, Human
gucccagccagcaguucaga

SEQ ID NO: 2976019 - RNA, 17 nt, Human
gucccagauacuugggg

SEQ ID NO: 2976020 - RNA, 14 nt, Human
gucccacucagucc

SEQ ID NO: 2976021 - RNA, 15 nt, Human
gucccacucagucca

SEQ ID NO: 2976022 - RNA, 16 nt, Human
guccacccaggagccc

SEQ ID NO: 2976023 - RNA, 15 nt, Human
guccacccaggagcc

SEQ ID NO: 2976024 - RNA, 13 nt, Human
guccacccaggag

SEQ ID NO: 2976025 - RNA, 14 nt, Human
guccacccaggagc

SEQ ID NO: 2976026 - RNA, 23 nt, Human
gguagaauguuuucaaauguucu

SEQ ID NO: 2976027 - RNA, 15 nt, Human
gguagacacacauga

SEQ ID NO: 2976028 - RNA, 22 nt, Human
gguagacacacaugaaguccaa

SEQ ID NO: 2976029 - RNA, 12 nt, Human
ggucacucuggc

SEQ ID NO: 2976030 - RNA, 16 nt, Human
ggucagagccugcagu

SEQ ID NO: 2976031 - RNA, 15 nt, Human
ggucagagccugcag

SEQ ID NO: 2976032 - RNA, 14 nt, Human
ggucagagccugca

SEQ ID NO: 2976033 - RNA, 13 nt, Human
ggucagagccugc

SEQ ID NO: 2976034 - RNA, 16 nt, Human
ggucacucuggcagcu

SEQ ID NO: 2976035 - RNA, 20 nt, Human
ggucacucuggcagcucaga

SEQ ID NO: 2976036 - RNA, 22 nt, Human
ggucacucuggcagcucagaga

SEQ ID NO: 2976037 - RNA, 12 nt, Human
ggucagagccug

SEQ ID NO: 2976038 - RNA, 18 nt, Human
ggucccccuuccauggac

SEQ ID NO: 2976039 - RNA, 23 nt, Human
ggucccccuuccauggacuuugu

SEQ ID NO: 2976040 - RNA, 13 nt, Human
ggucccccuucca

SEQ ID NO: 2976041 - RNA, 20 nt, Human
ggucccaucugcagggcccc

SEQ ID NO: 2976042 - RNA, 14 nt, Human
ggucccacucaguc

SEQ ID NO: 2976043 - RNA, 12 nt, Human
ggucccacucag

SEQ ID NO: 2976044 - RNA, 22 nt, Human
ggucccacucaguccauagcag

SEQ ID NO: 2976045 - RNA, 22 nt, Human
ggucccaccccacacacgccag

SEQ ID NO: 2976046 - RNA, 21 nt, Human
ggguagccacuggacugacga

SEQ ID NO: 2976047 - RNA, 19 nt, Human
ggguuggccccugcccggc

SEQ ID NO: 2976048 - RNA, 16 nt, Human
ggguuggccccugccc

SEQ ID NO: 2976049 - RNA, 17 nt, Human
ggguucuacccaggugc

SEQ ID NO: 2976050 - RNA, 22 nt, Human
ggguucuacccaggugcuagga

SEQ ID NO: 2976051 - RNA, 23 nt, Human
ggguucccuuuuuuggcugcuga

SEQ ID NO: 2976052 - RNA, 22 nt, Human
gguacuucaaauccuugaagau

SEQ ID NO: 2976053 - RNA, 21 nt, Human
gguacuuguggacacagcucu

SEQ ID NO: 2976054 - RNA, 22 nt, Human
gguacuuguggacacagcucuu

SEQ ID NO: 2976055 - RNA, 20 nt, Human
gguacuuguggacacagcuc

SEQ ID NO: 2976056 - RNA, 15 nt, Human
ggguugggcuggugu

SEQ ID NO: 2976057 - RNA, 16 nt, Human
gguacccacugcucug

SEQ ID NO: 2976058 - RNA, 17 nt, Human
gguacccacugcucugg

SEQ ID NO: 2976059 - RNA, 19 nt, Human
ggugcuacaaaaacacagc

SEQ ID NO: 2976060 - RNA, 15 nt, Human
ggugcgaucuggguu

SEQ ID NO: 2976061 - RNA, 23 nt, Human
ggugcuaucucccccagccccau

SEQ ID NO: 2976062 - RNA, 21 nt, Human
ggugcuaucucccccagcccc

SEQ ID NO: 2976063 - RNA, 22 nt, Human
ggugcuaucucccccagcccca

SEQ ID NO: 2976064 - RNA, 13 nt, Human
gguggcagcugcg

SEQ ID NO: 2976065 - RNA, 12 nt, Human
gguggcagcugc

SEQ ID NO: 2976066 - RNA, 13 nt, Human
gguggcagcucac

SEQ ID NO: 2976067 - RNA, 11 nt, Human
gguggcagcug

SEQ ID NO: 2976068 - RNA, 23 nt, Human
gguggcagcugcgguccacccag

SEQ ID NO: 2976069 - RNA, 15 nt, Human
gguggcagcugcggu

SEQ ID NO: 2976070 - RNA, 14 nt, Human
ggugaccucugccu

SEQ ID NO: 2976071 - RNA, 16 nt, Human
ggugaccucugccuga

SEQ ID NO: 2976072 - RNA, 18 nt, Human
ggugaagugaagacaaug

SEQ ID NO: 2976073 - RNA, 16 nt, Human
ggugaacuugguuccc

SEQ ID NO: 2976074 - RNA, 19 nt, Human
ggucugaggaauccagacc

SEQ ID NO: 2976075 - RNA, 12 nt, Human
ggucucacucug

SEQ ID NO: 2976076 - RNA, 21 nt, Human
ggucucacuauguugcccagg

SEQ ID NO: 2976077 - RNA, 16 nt, Human
ggucugacccacugcu

SEQ ID NO: 2976078 - RNA, 15 nt, Human
ggucugacccacugc

SEQ ID NO: 2976079 - RNA, 22 nt, Human
ggucccugguggcagcucaccu

SEQ ID NO: 2976080 - RNA, 22 nt, Human
ggucucacuauguugcccaggc

SEQ ID NO: 2976081 - RNA, 14 nt, Human
ggucccugguggca

SEQ ID NO: 2976082 - RNA, 18 nt, Human
ggguacccacugcucugg

SEQ ID NO: 2976083 - RNA, 15 nt, Human
ggguacccacugcuc

SEQ ID NO: 2976084 - RNA, 13 nt, Human
ggguacccacugc

SEQ ID NO: 2976085 - RNA, 23 nt, Human
ggguagagcggagaaaggaaggg

SEQ ID NO: 2976086 - RNA, 23 nt, Human
ggguacuuguggacacagcucuu

SEQ ID NO: 2976087 - RNA, 22 nt, Human
ggguacuuguggacacagcucu

SEQ ID NO: 2976088 - RNA, 19 nt, Human
ggguacuuguggacacagc

SEQ ID NO: 2976089 - RNA, 23 nt, Human
gggguucccuuuuuuggcugcug

SEQ ID NO: 2976090 - RNA, 13 nt, Human
ggggcugggacau

SEQ ID NO: 2976091 - RNA, 16 nt, Human
ggggcugggcagagga

SEQ ID NO: 2976092 - RNA, 17 nt, Human
ggggcugggcagaggaa

SEQ ID NO: 2976093 - RNA, 18 nt, Human
ggggcugcucccaccugg

SEQ ID NO: 2976094 - RNA, 14 nt, Human
ggggcugcucccac

SEQ ID NO: 2976095 - RNA, 17 nt, Human
ggggaucacagccucug

SEQ ID NO: 2976096 - RNA, 13 nt, Human
ggggaguggccac

SEQ ID NO: 2976097 - RNA, 21 nt, Human
gggcuuggggaccagagcugc

SEQ ID NO: 2976098 - RNA, 11 nt, Human
ggggagaaagu

SEQ ID NO: 2976099 - RNA, 18 nt, Human
gggcuucaguggcagcug

SEQ ID NO: 2976100 - RNA, 17 nt, Human
gggcuucaguggcagcu

SEQ ID NO: 2976101 - RNA, 16 nt, Human
gggcuucaguggcagc

SEQ ID NO: 2976102 - RNA, 15 nt, Human
gggcuucaguggcag

SEQ ID NO: 2976103 - RNA, 19 nt, Human
gggcuucauccuccucaga

SEQ ID NO: 2976104 - RNA, 20 nt, Human
gggcuucaguggcagcugcu

SEQ ID NO: 2976105 - RNA, 19 nt, Human
gggcuucaguggcagcugc

SEQ ID NO: 2976106 - RNA, 20 nt, Human
gggcuuggggaccagagcug

SEQ ID NO: 2976107 - RNA, 20 nt, Human
gggcuucauccuccucagau

SEQ ID NO: 2976108 - RNA, 14 nt, Human
gggcucccuuccca

SEQ ID NO: 2976109 - RNA, 17 nt, Human
gggcucccuucccaccu

SEQ ID NO: 2976110 - RNA, 18 nt, Human
gggcucccuucccaccuc

SEQ ID NO: 2976111 - RNA, 23 nt, Human
gggcucccuucccaccucucuca

SEQ ID NO: 2976112 - RNA, 13 nt, Human
gggcucccuuccc

SEQ ID NO: 2976113 - RNA, 16 nt, Human
gggcgcgguggcucac

SEQ ID NO: 2976114 - RNA, 18 nt, Human
gggccuggucguuuucaa

SEQ ID NO: 2976115 - RNA, 14 nt, Human
gggccuggcucagg

SEQ ID NO: 2976116 - RNA, 16 nt, Human
gggccuggcucaggug

SEQ ID NO: 2976117 - RNA, 12 nt, Human
gggccuggcuca

SEQ ID NO: 2976118 - RNA, 19 nt, Human
gggccuggccugagcuggg

SEQ ID NO: 2976119 - RNA, 12 nt, Human
gggccuggaugc

SEQ ID NO: 2976120 - RNA, 15 nt, Human
ggcucccagccaggc

SEQ ID NO: 2976121 - RNA, 14 nt, Human
ggcucccagccagg

SEQ ID NO: 2976122 - RNA, 17 nt, Human
ggcucccagccaggccc

SEQ ID NO: 2976123 - RNA, 16 nt, Human
ggcucccagccaggcc

SEQ ID NO: 2976124 - RNA, 18 nt, Human
ggcucccagccaggcccu

SEQ ID NO: 2976125 - RNA, 15 nt, Human
gggcucugccuccca

SEQ ID NO: 2976126 - RNA, 16 nt, Human
gggcucugccucccau

SEQ ID NO: 2976127 - RNA, 17 nt, Human
gggcucugccucccauc

SEQ ID NO: 2976128 - RNA, 20 nt, Human
gggcucugccucccaucacc

SEQ ID NO: 2976129 - RNA, 13 nt, Human
gggcucugccucc

SEQ ID NO: 2976130 - RNA, 16 nt, Human
gggcugaggugggagg

SEQ ID NO: 2976131 - RNA, 14 nt, Human
gggcugcaccggcu

SEQ ID NO: 2976132 - RNA, 14 nt, Human
gggcuucaguggca

SEQ ID NO: 2976133 - RNA, 14 nt, Human
guacacuugugaau

SEQ ID NO: 2976134 - RNA, 23 nt, Human
guacacugccuucucaacuccaa

SEQ ID NO: 2976135 - RNA, 21 nt, Human
guacacuguuucaaacuuuac

SEQ ID NO: 2976136 - RNA, 20 nt, Human
guacacuguuucaaacuuua

SEQ ID NO: 2976137 - RNA, 19 nt, Human
guacacuguuucaaacuuu

SEQ ID NO: 2976138 - RNA, 15 nt, Human
guacacuugugaaua

SEQ ID NO: 2976139 - RNA, 16 nt, Human
guacagacaacaaacc

SEQ ID NO: 2976140 - RNA, 12 nt, Human
guacagagccca

SEQ ID NO: 2976141 - RNA, 18 nt, Human
guacagagcccacgcccc

SEQ ID NO: 2976142 - RNA, 22 nt, Human
guacagagcccacgcccccacu

SEQ ID NO: 2976143 - RNA, 20 nt, Human
guacagcaaggagauuuaca

SEQ ID NO: 2976144 - RNA, 23 nt, Human
guacaggacauauauuuuuuaaa

SEQ ID NO: 2976145 - RNA, 17 nt, Human
guacaggacauauauuu

SEQ ID NO: 2976146 - RNA, 15 nt, Human
guacaggacauauau

SEQ ID NO: 2976147 - RNA, 19 nt, Human
guacagaguggaauaagac

SEQ ID NO: 2976148 - RNA, 14 nt, Human
guacauacuuuuug

SEQ ID NO: 2976149 - RNA, 13 nt, Human
guacauacuuuuu

SEQ ID NO: 2976150 - RNA, 19 nt, Human
guacauacuuuuuggguuu

SEQ ID NO: 2976151 - RNA, 15 nt, Human
guacccacugcucug

SEQ ID NO: 2976152 - RNA, 20 nt, Human
guacauaaugcgugcauacc

SEQ ID NO: 2976153 - RNA, 19 nt, Human
guaaugauaacuggaaacu

SEQ ID NO: 2976154 - RNA, 17 nt, Human
guaaugaccaugaaaga

SEQ ID NO: 2976155 - RNA, 15 nt, Human
guaauuggaaaggca

SEQ ID NO: 2976156 - RNA, 18 nt, Human
guacacuguuucaaacuu

SEQ ID NO: 2976157 - RNA, 21 nt, Human
guaauuaaguacuauguauca

SEQ ID NO: 2976158 - RNA, 20 nt, Human
guaauuaaguacuauguauc

SEQ ID NO: 2976159 - RNA, 17 nt, Human
guaauuaaguacuaugu

SEQ ID NO: 2976160 - RNA, 14 nt, Human
guaauuaaguacua

SEQ ID NO: 2976161 - RNA, 18 nt, Human
guacuaacauuuauuuga

SEQ ID NO: 2976162 - RNA, 15 nt, Human
guacuucaugcuguc

SEQ ID NO: 2976163 - RNA, 15 nt, Human
guacuucuccacccu

SEQ ID NO: 2976164 - RNA, 14 nt, Human
guacuucuccaccc

SEQ ID NO: 2976165 - RNA, 23 nt, Human
guacuaaggaaucuuucugcuuu

SEQ ID NO: 2976166 - RNA, 15 nt, Human
guacuaaggaaucuu

SEQ ID NO: 2976167 - RNA, 17 nt, Human
guacguugugcauuugg

SEQ ID NO: 2976168 - RNA, 16 nt, Human
guacguugugcauuug

SEQ ID NO: 2976169 - RNA, 15 nt, Human
guacguugugcauuu

SEQ ID NO: 2976170 - RNA, 14 nt, Human
guacguugugcauu

SEQ ID NO: 2976171 - RNA, 17 nt, Human
guacgucugacaggcaa

SEQ ID NO: 2976172 - RNA, 15 nt, Human
guacgucugacaggc

SEQ ID NO: 2976173 - RNA, 14 nt, Human
guacgucugacagg

SEQ ID NO: 2976174 - RNA, 15 nt, Human
guaccgcaaugugac

SEQ ID NO: 2976175 - RNA, 16 nt, Human
guacccacugcucugg

SEQ ID NO: 2976176 - RNA, 22 nt, Human
guaccucuugagccuugaacuu

SEQ ID NO: 2976177 - RNA, 21 nt, Human
guaccucuugagccuugaacu

SEQ ID NO: 2976178 - RNA, 13 nt, Human
guaccucuugagc

SEQ ID NO: 2976179 - RNA, 19 nt, Human
guagagguacacuugugaa

SEQ ID NO: 2976180 - RNA, 17 nt, Human
guagagguacacuugug

SEQ ID NO: 2976181 - RNA, 15 nt, Human
guagagguacacuug

SEQ ID NO: 2976182 - RNA, 15 nt, Human
guagaggagaaacug

SEQ ID NO: 2976183 - RNA, 18 nt, Human
guagagccagggucucac

SEQ ID NO: 2976184 - RNA, 16 nt, Human
guagagcggagaaagg

SEQ ID NO: 2976185 - RNA, 14 nt, Human
guacuuuuaagacu

SEQ ID NO: 2976186 - RNA, 23 nt, Human
guacuuuauuuucuauaauuuaa

SEQ ID NO: 2976187 - RNA, 21 nt, Human
guacuuguggacacagcucuu

SEQ ID NO: 2976188 - RNA, 19 nt, Human
guacuucuccacccugcuc

SEQ ID NO: 2976189 - RNA, 18 nt, Human
guacuucuccacccugcu

SEQ ID NO: 2976190 - RNA, 17 nt, Human
guacuucuccacccugc

SEQ ID NO: 2976191 - RNA, 16 nt, Human
guacuucuccacccug

SEQ ID NO: 2976192 - RNA, 21 nt, Human
guacuucuccacccugcucuc

SEQ ID NO: 2976193 - RNA, 20 nt, Human
guacuucuccacccugcucu

SEQ ID NO: 2976194 - RNA, 20 nt, Human
guacuuguggacacagcucu

SEQ ID NO: 2976195 - RNA, 16 nt, Human
guacuuguggacacag

SEQ ID NO: 2976196 - RNA, 16 nt, Human
guaaaaaaugguguuu

SEQ ID NO: 2976197 - RNA, 18 nt, Human
guaaaaaaugguguuuua

SEQ ID NO: 2976198 - RNA, 14 nt, Human
guaaaaccacagca

SEQ ID NO: 2976199 - RNA, 15 nt, Human
guaaaaccacagcag

SEQ ID NO: 2976200 - RNA, 16 nt, Human
guaaaaccacagcagu

SEQ ID NO: 2976201 - RNA, 18 nt, Human
guaaaaccacagcaguug

SEQ ID NO: 2976202 - RNA, 23 nt, Human
guaaaaccacagcaguugaaaag

SEQ ID NO: 2976203 - RNA, 13 nt, Human
gguuuucuguucu

SEQ ID NO: 2976204 - RNA, 12 nt, Human
gguuuucuguuc

SEQ ID NO: 2976205 - RNA, 15 nt, Human
gguuuucuguucuuu

SEQ ID NO: 2976206 - RNA, 16 nt, Human
gguuuucuuuuaagaa

SEQ ID NO: 2976207 - RNA, 20 nt, Human
gguuuucacauuggaaacaa

SEQ ID NO: 2976208 - RNA, 23 nt, Human
gguuuugccauguuggccaggcu

SEQ ID NO: 2976209 - RNA, 10 nt, Human
gguugugaau

SEQ ID NO: 2976210 - RNA, 13 nt, Human
gguuggugggggc

SEQ ID NO: 2976211 - RNA, 13 nt, Human
gguuuaagcuguu

SEQ ID NO: 2976212 - RNA, 14 nt, Human
gguugggcuggugu

SEQ ID NO: 2976213 - RNA, 14 nt, Human
gguugaagcaccaa

SEQ ID NO: 2976214 - RNA, 23 nt, Human
gguucaagcgauucuucugcuuc

SEQ ID NO: 2976215 - RNA, 22 nt, Human
gguucaagcgauucuucugcuu

SEQ ID NO: 2976216 - RNA, 20 nt, Human
gguucacugcaaccuccgcc

SEQ ID NO: 2976217 - RNA, 17 nt, Human
gguggccucccaacuca

SEQ ID NO: 2976218 - RNA, 21 nt, Human
gguucaagcgauucuucugcu

SEQ ID NO: 2976219 - RNA, 13 nt, Human
gguggccucccaa

SEQ ID NO: 2976220 - RNA, 22 nt, Human
guaacuguuuagaugaauguca

SEQ ID NO: 2976221 - RNA, 23 nt, Human
guaaauuaacuuuuauaaacuuu

SEQ ID NO: 2976222 - RNA, 18 nt, Human
guaagggaaacugccagc

SEQ ID NO: 2976223 - RNA, 17 nt, Human
guaagggaaacugccag

SEQ ID NO: 2976224 - RNA, 22 nt, Human
guaaguauucuuauuuaaugaa

SEQ ID NO: 2976225 - RNA, 20 nt, Human
guaaggaauaccuguccccc

SEQ ID NO: 2976226 - RNA, 21 nt, Human
guaaggaauaccugucccccu

SEQ ID NO: 2976227 - RNA, 23 nt, Human
guaaggaauaccugucccccuga

SEQ ID NO: 2976228 - RNA, 13 nt, Human
guaaggaaugauu

SEQ ID NO: 2976229 - RNA, 18 nt, Human
guaaggaauaccuguccc

SEQ ID NO: 2976230 - RNA, 20 nt, Human
guaaaugggggugcauuuga

SEQ ID NO: 2976231 - RNA, 19 nt, Human
guaaaugggggugcauuug

SEQ ID NO: 2976232 - RNA, 18 nt, Human
guaaaugggggugcauuu

SEQ ID NO: 2976233 - RNA, 22 nt, Human
guaaauuaacuuuuauaaacuu

SEQ ID NO: 2976234 - RNA, 21 nt, Human
guaaauuaacuuuuauaaacu

SEQ ID NO: 2976235 - RNA, 17 nt, Human
guaaauuaacuuuuaua

SEQ ID NO: 2976236 - RNA, 16 nt, Human
guaaauuaacuuuuau

SEQ ID NO: 2976237 - RNA, 15 nt, Human
guaaauuaacuuuua

SEQ ID NO: 2976238 - RNA, 16 nt, Human
gcugccaauauccuaa

SEQ ID NO: 2976239 - RNA, 17 nt, Human
gcugccaauauccuaau

SEQ ID NO: 2976240 - RNA, 18 nt, Human
gcugccaauauccuaaua

SEQ ID NO: 2976241 - RNA, 19 nt, Human
gcugccaauauccuaauaa

SEQ ID NO: 2976242 - RNA, 14 nt, Human
gcugccaauauccu

SEQ ID NO: 2976243 - RNA, 15 nt, Human
gcugccaauauccua

SEQ ID NO: 2976244 - RNA, 13 nt, Human
gcugcaguuuuuu

SEQ ID NO: 2976245 - RNA, 17 nt, Human
gcugcaguugccaguca

SEQ ID NO: 2976246 - RNA, 21 nt, Human
gcugcaguugccagucacccc

SEQ ID NO: 2976247 - RNA, 18 nt, Human
gcugcaguugccagucac

SEQ ID NO: 2976248 - RNA, 20 nt, Human
gcugcaguugccagucaccc

SEQ ID NO: 2976249 - RNA, 18 nt, Human
gcugauggugcaaugacc

SEQ ID NO: 2976250 - RNA, 21 nt, Human
gcugauggugcaaugaccuuu

SEQ ID NO: 2976251 - RNA, 19 nt, Human
gcugagucugaaggcuggg

SEQ ID NO: 2976252 - RNA, 16 nt, Human
gcugagucugaaggcu

SEQ ID NO: 2976253 - RNA, 18 nt, Human
gcugagucugaaggcugg

SEQ ID NO: 2976254 - RNA, 15 nt, Human
gcugagucugaaggc

SEQ ID NO: 2976255 - RNA, 15 nt, Human
gcugauggugcaaug

SEQ ID NO: 2976256 - RNA, 16 nt, Human
gcugauggugcaauga

SEQ ID NO: 2976257 - RNA, 22 nt, Human
gcugagugggggaucacagccu

SEQ ID NO: 2976258 - RNA, 23 nt, Human
gcugagugggggaucacagccuc

SEQ ID NO: 2976259 - RNA, 16 nt, Human
gcucuucuccaggcug

SEQ ID NO: 2976260 - RNA, 14 nt, Human
gcucuucuccaggc

SEQ ID NO: 2976261 - RNA, 19 nt, Human
gcucuuccaggcugggaga

SEQ ID NO: 2976262 - RNA, 18 nt, Human
gcucuuccaggcugggag

SEQ ID NO: 2976263 - RNA, 12 nt, Human
gcucuucuccag

SEQ ID NO: 2976264 - RNA, 22 nt, Human
gcucuuccaggcugggagagcc

SEQ ID NO: 2976265 - RNA, 20 nt, Human
gcugacagacacaggcccgg

SEQ ID NO: 2976266 - RNA, 21 nt, Human
gcugacagacacaggcccggc

SEQ ID NO: 2976267 - RNA, 11 nt, Human
gcucucuggcc

SEQ ID NO: 2976268 - RNA, 13 nt, Human
gcucucuggccuu

SEQ ID NO: 2976269 - RNA, 12 nt, Human
gcucucuggccu

SEQ ID NO: 2976270 - RNA, 17 nt, Human
gcucuccgaccagacac

SEQ ID NO: 2976271 - RNA, 13 nt, Human
gcucuccgaccag

SEQ ID NO: 2976272 - RNA, 19 nt, Human
gcucuccgaccagacaccu

SEQ ID NO: 2976273 - RNA, 21 nt, Human
gcuccuucuguccuacucugu

SEQ ID NO: 2976274 - RNA, 19 nt, Human
gcucccuucccaccucucu

SEQ ID NO: 2976275 - RNA, 15 nt, Human
gcuccuucuguccua

SEQ ID NO: 2976276 - RNA, 16 nt, Human
gcucccuucccaccuc

SEQ ID NO: 2976277 - RNA, 18 nt, Human
gcucccuucccaccucuc

SEQ ID NO: 2976278 - RNA, 15 nt, Human
gcucccuucccaccu

SEQ ID NO: 2976279 - RNA, 16 nt, Human
gcucgagcaugccugg

SEQ ID NO: 2976280 - RNA, 20 nt, Human
gcucucuggccuucggccuc

SEQ ID NO: 2976281 - RNA, 19 nt, Human
gcucucuggccuucggccu

SEQ ID NO: 2976282 - RNA, 15 nt, Human
gcucucuggccuucg

SEQ ID NO: 2976283 - RNA, 14 nt, Human
gcucucuggccuuc

SEQ ID NO: 2976284 - RNA, 23 nt, Human
gcucugcccuugguuaggcauug

SEQ ID NO: 2976285 - RNA, 11 nt, Human
gcucugccucc

SEQ ID NO: 2976286 - RNA, 14 nt, Human
gcucugcccuuggu

SEQ ID NO: 2976287 - RNA, 13 nt, Human
gcucugccuccca

SEQ ID NO: 2976288 - RNA, 14 nt, Human
gcucugccucccau

SEQ ID NO: 2976289 - RNA, 15 nt, Human
gcucugccucccauc

SEQ ID NO: 2976290 - RNA, 22 nt, Human
gcucugccucccaucacccgcu

SEQ ID NO: 2976291 - RNA, 14 nt, Human
gcucugcuccucuc

SEQ ID NO: 2976292 - RNA, 13 nt, Human
gcucugcuccucu

SEQ ID NO: 2976293 - RNA, 23 nt, Human
gcucugcugacagacacaggccc

SEQ ID NO: 2976294 - RNA, 20 nt, Human
gcucugcugacagacacagg

SEQ ID NO: 2976295 - RNA, 19 nt, Human
gcucugcugacagacacag

SEQ ID NO: 2976296 - RNA, 18 nt, Human
gcucugcugacagacaca

SEQ ID NO: 2976297 - RNA, 14 nt, Human
gcucugcugacaga

SEQ ID NO: 2976298 - RNA, 13 nt, Human
gcucugcugacag

SEQ ID NO: 2976299 - RNA, 21 nt, Human
gcucugcuccucuccccagca

SEQ ID NO: 2976300 - RNA, 19 nt, Human
gcucugcuccucuccccag

SEQ ID NO: 2976301 - RNA, 22 nt, Human
gcucuggacaggcauguucucu

SEQ ID NO: 2976302 - RNA, 21 nt, Human
gcucuggacaggcauguucuc

SEQ ID NO: 2976303 - RNA, 16 nt, Human
gcucuggacaggcaug

SEQ ID NO: 2976304 - RNA, 15 nt, Human
gcucuggacaggcau

SEQ ID NO: 2976305 - RNA, 14 nt, Human
gcucuggacaggca

SEQ ID NO: 2976306 - RNA, 19 nt, Human
gcucaccccaucaucccuu

SEQ ID NO: 2976307 - RNA, 17 nt, Human
gcucaccccaucauccc

SEQ ID NO: 2976308 - RNA, 15 nt, Human
gcucacccaguccug

SEQ ID NO: 2976309 - RNA, 19 nt, Human
gcucaccagccccagugcc

SEQ ID NO: 2976310 - RNA, 18 nt, Human
gcucaccagccccagugc

SEQ ID NO: 2976311 - RNA, 23 nt, Human
gcucaccagccccagugcccaca

SEQ ID NO: 2976312 - RNA, 20 nt, Human
gcucaccagccccagugccc

SEQ ID NO: 2976313 - RNA, 17 nt, Human
gcucagcaaaagaugcu

SEQ ID NO: 2976314 - RNA, 20 nt, Human
gcucagcaaaagaugcuucu

SEQ ID NO: 2976315 - RNA, 22 nt, Human
gcucagcaaaagaugcuucuca

SEQ ID NO: 2976316 - RNA, 23 nt, Human
gcucagcaaaagaugcuucucac

SEQ ID NO: 2976317 - RNA, 15 nt, Human
gcucagcggggacag

SEQ ID NO: 2976318 - RNA, 19 nt, Human
gcucagcggggacagcucc

SEQ ID NO: 2976319 - RNA, 20 nt, Human
gcucagcggggacagcuccu

SEQ ID NO: 2976320 - RNA, 17 nt, Human
gcucaggugucccugca

SEQ ID NO: 2976321 - RNA, 18 nt, Human
gcucaggugucccugcac

SEQ ID NO: 2976322 - RNA, 22 nt, Human
gcucagcggggacagcuccuuc

SEQ ID NO: 2976323 - RNA, 21 nt, Human
gcucagcggggacagcuccuu

SEQ ID NO: 2976324 - RNA, 19 nt, Human
gcucaggugucccugcacu

SEQ ID NO: 2976325 - RNA, 23 nt, Human
gcuccaggcuccuuuagcgccca

SEQ ID NO: 2976326 - RNA, 16 nt, Human
gcuccaggcuccuuua

SEQ ID NO: 2976327 - RNA, 11 nt, Human
gcuccagcugu

SEQ ID NO: 2976328 - RNA, 13 nt, Human
gcuccaggcuccu

SEQ ID NO: 2976329 - RNA, 17 nt, Human
gcuccauccuccuggga

SEQ ID NO: 2976330 - RNA, 16 nt, Human
gcuccaagcucccagg

SEQ ID NO: 2976331 - RNA, 17 nt, Human
gcuccaagcucccaggc

SEQ ID NO: 2976332 - RNA, 18 nt, Human
gcuccaagcucccaggca

SEQ ID NO: 2976333 - RNA, 19 nt, Human
gcuccaagcucccaggcau

SEQ ID NO: 2976334 - RNA, 21 nt, Human
gcuccaagcucccaggcauuc

SEQ ID NO: 2976335 - RNA, 14 nt, Human
gcuccaagaauuuc

SEQ ID NO: 2976336 - RNA, 14 nt, Human
gcuccaagcuccca

SEQ ID NO: 2976337 - RNA, 15 nt, Human
gcuccaagcucccag

SEQ ID NO: 2976338 - RNA, 13 nt, Human
gcuccaagcuccc

SEQ ID NO: 2976339 - RNA, 23 nt, Human
gcuaagagggagggagggcucca

SEQ ID NO: 2976340 - RNA, 17 nt, Human
gcuaagcaaaaugugau

SEQ ID NO: 2976341 - RNA, 14 nt, Human
gcuaagcauuccaa

SEQ ID NO: 2976342 - RNA, 14 nt, Human
gcuacccgggaagg

SEQ ID NO: 2976343 - RNA, 15 nt, Human
gcuacccgggaaggg

SEQ ID NO: 2976344 - RNA, 18 nt, Human
gcuagagguucaaagaua

SEQ ID NO: 2976345 - RNA, 21 nt, Human
gcuagagguucaaagauauuu

SEQ ID NO: 2976346 - RNA, 19 nt, Human
gcuagagguucaaagauau

SEQ ID NO: 2976347 - RNA, 21 nt, Human
gcuacccgggaagggggcugg

SEQ ID NO: 2976348 - RNA, 20 nt, Human
gcuaccuuuguauucucucc

SEQ ID NO: 2976349 - RNA, 16 nt, Human
gcuaucucccccagcc

SEQ ID NO: 2976350 - RNA, 17 nt, Human
gcuaucucccccagccc

SEQ ID NO: 2976351 - RNA, 18 nt, Human
gcuaucucccccagcccc

SEQ ID NO: 2976352 - RNA, 22 nt, Human
gcuagcagcagggagggcuucu

SEQ ID NO: 2976353 - RNA, 19 nt, Human
gcuaucucccccagcccca

SEQ ID NO: 2976354 - RNA, 20 nt, Human
gcuaucucccccagccccau

SEQ ID NO: 2976355 - RNA, 21 nt, Human
gcuaucucccccagccccauc

SEQ ID NO: 2976356 - RNA, 22 nt, Human
gcuaucucccccagccccaucc

SEQ ID NO: 2976357 - RNA, 23 nt, Human
gcuaucucccccagccccauccu

SEQ ID NO: 2976358 - RNA, 15 nt, Human
gcuaucucccccagc

SEQ ID NO: 2976359 - RNA, 16 nt, Human
gcgguccacccaggag

SEQ ID NO: 2976360 - RNA, 13 nt, Human
gcggggacagcuc

SEQ ID NO: 2976361 - RNA, 15 nt, Human
gcgggcuuccuccug

SEQ ID NO: 2976362 - RNA, 12 nt, Human
gcggggacagcu

SEQ ID NO: 2976363 - RNA, 19 nt, Human
gcgguccacccaggagccc

SEQ ID NO: 2976364 - RNA, 18 nt, Human
gcgguccacccaggagcc

SEQ ID NO: 2976365 - RNA, 23 nt, Human
gcgugagccacugcaccgggcca

SEQ ID NO: 2976366 - RNA, 18 nt, Human
gcgugagccacugcaccg

SEQ ID NO: 2976367 - RNA, 16 nt, Human
gcgugagccacugcac

SEQ ID NO: 2976368 - RNA, 20 nt, Human
gcgugaacccaggaggcgga

SEQ ID NO: 2976369 - RNA, 21 nt, Human
gcuaagagggagggagggcuc

SEQ ID NO: 2976370 - RNA, 22 nt, Human
gcuaagagggagggagggcucc

SEQ ID NO: 2976371 - RNA, 19 nt, Human
gcuaacacggugaaacccg

SEQ ID NO: 2976372 - RNA, 13 nt, Human
gcuaaaugugaau

SEQ ID NO: 2976373 - RNA, 16 nt, Human
gcuaaaugugaaugau

SEQ ID NO: 2976374 - RNA, 18 nt, Human
gccuaauaugaugacugu

SEQ ID NO: 2976375 - RNA, 22 nt, Human
gccuauauuuuuuguuaaauga

SEQ ID NO: 2976376 - RNA, 19 nt, Human
gccgagauagccaaggcca

SEQ ID NO: 2976377 - RNA, 17 nt, Human
gccuaagugcagccccg

SEQ ID NO: 2976378 - RNA, 21 nt, Human
gccucaagugauucuccugcc

SEQ ID NO: 2976379 - RNA, 20 nt, Human
gccucaagugauucuccugc

SEQ ID NO: 2976380 - RNA, 19 nt, Human
gccucaagugauucuccug

SEQ ID NO: 2976381 - RNA, 16 nt, Human
gccucaaccuccuggg

SEQ ID NO: 2976382 - RNA, 14 nt, Human
gccucaaccuccug

SEQ ID NO: 2976383 - RNA, 21 nt, Human
gccucacaguccuuaccagca

SEQ ID NO: 2976384 - RNA, 23 nt, Human
gccucagccucccaaagugcugg

SEQ ID NO: 2976385 - RNA, 14 nt, Human
gccucagugccacu

SEQ ID NO: 2976386 - RNA, 12 nt, Human
gccucagugcca

SEQ ID NO: 2976387 - RNA, 21 nt, Human
gccucccacgacugcccggca

SEQ ID NO: 2976388 - RNA, 23 nt, Human
gccuccccuccucugcuugccau

SEQ ID NO: 2976389 - RNA, 14 nt, Human
gccucccacgacug

SEQ ID NO: 2976390 - RNA, 21 nt, Human
gccucccgaauagcugggacu

SEQ ID NO: 2976391 - RNA, 22 nt, Human
gccucccaacucaccccagccc

SEQ ID NO: 2976392 - RNA, 23 nt, Human
gccucccaacucaccccagcccc

SEQ ID NO: 2976393 - RNA, 21 nt, Human
gccucccaacucaccccagcc

SEQ ID NO: 2976394 - RNA, 15 nt, Human
gccucagugccacua

SEQ ID NO: 2976395 - RNA, 15 nt, Human
gccucccgaguagcu

SEQ ID NO: 2976396 - RNA, 23 nt, Human
gccucccgaauagcugggacuac

SEQ ID NO: 2976397 - RNA, 21 nt, Human
gccucucccugcugcuccuag

SEQ ID NO: 2976398 - RNA, 20 nt, Human
gccucucccugcugcuccua

SEQ ID NO: 2976399 - RNA, 19 nt, Human
gccucucccugcugcuccu

SEQ ID NO: 2976400 - RNA, 18 nt, Human
gccucucccugcugcucc

SEQ ID NO: 2976401 - RNA, 22 nt, Human
gccucucccugcugcuccuagg

SEQ ID NO: 2976402 - RNA, 17 nt, Human
gccucucccugcugcuc

SEQ ID NO: 2976403 - RNA, 15 nt, Human
gccugcuccagcugu

SEQ ID NO: 2976404 - RNA, 16 nt, Human
gccugcuccagcuguu

SEQ ID NO: 2976405 - RNA, 18 nt, Human
gccugcuccagcuguuca

SEQ ID NO: 2976406 - RNA, 18 nt, Human
gccucugccucugacaca

SEQ ID NO: 2976407 - RNA, 22 nt, Human
gccugaagucacacagugaguc

SEQ ID NO: 2976408 - RNA, 24 nt, Human
gccucugcggagcacacuggcuca

SEQ ID NO: 2976409 - RNA, 21 nt, Human
gccucugcggagcacacuggc

SEQ ID NO: 2976410 - RNA, 19 nt, Human
gccucugcggagcacacug

SEQ ID NO: 2976411 - RNA, 15 nt, Human
gccuggauggggcug

SEQ ID NO: 2976412 - RNA, 14 nt, Human
gccuggauggggcu

SEQ ID NO: 2976413 - RNA, 22 nt, Human
gccuggccagaugcaccagccc

SEQ ID NO: 2976414 - RNA, 15 nt, Human
gccuggccagaugca

SEQ ID NO: 2976415 - RNA, 14 nt, Human
gccuggccagaugc

SEQ ID NO: 2976416 - RNA, 15 nt, Human
gccugggcagaagga

SEQ ID NO: 2976417 - RNA, 18 nt, Human
gccugggcagaaggaaga

SEQ ID NO: 2976418 - RNA, 16 nt, Human
gccugggcagaaggaa

SEQ ID NO: 2976419 - RNA, 17 nt, Human
gccugggcagaaggaag

SEQ ID NO: 2976420 - RNA, 20 nt, Human
gccugggggcugggcagagg

SEQ ID NO: 2976421 - RNA, 14 nt, Human
gcccuuuuucaaua

SEQ ID NO: 2976422 - RNA, 16 nt, Human
gccgagaucacgccac

SEQ ID NO: 2976423 - RNA, 18 nt, Human
gccgagauugcaccacug

SEQ ID NO: 2976424 - RNA, 17 nt, Human
gccgagauugcaccacu

SEQ ID NO: 2976425 - RNA, 19 nt, Human
gccgagaucacgccacugc

SEQ ID NO: 2976426 - RNA, 18 nt, Human
gccgagaucacgccacug

SEQ ID NO: 2976427 - RNA, 19 nt, Human
gcccuucucuccagccccu

SEQ ID NO: 2976428 - RNA, 21 nt, Human
gcccuucucuccagccccugg

SEQ ID NO: 2976429 - RNA, 22 nt, Human
gcccuucucuccagccccugga

SEQ ID NO: 2976430 - RNA, 23 nt, Human
gcccugguggcagugggagcugc

SEQ ID NO: 2976431 - RNA, 22 nt, Human
gcccugguggcagugggagcug

SEQ ID NO: 2976432 - RNA, 21 nt, Human
gcccugguggcagugggagcu

SEQ ID NO: 2976433 - RNA, 20 nt, Human
gcccugguggcagugggagc

SEQ ID NO: 2976434 - RNA, 19 nt, Human
gcccugguggcagugggag

SEQ ID NO: 2976435 - RNA, 18 nt, Human
gcccugguggcaguggga

SEQ ID NO: 2976436 - RNA, 17 nt, Human
gcccugguggcaguggg

SEQ ID NO: 2976437 - RNA, 14 nt, Human
gcccugguggcagu

SEQ ID NO: 2976438 - RNA, 13 nt, Human
gcccucuccuggg

SEQ ID NO: 2976439 - RNA, 12 nt, Human
gcccucuccugg

SEQ ID NO: 2976440 - RNA, 23 nt, Human
gcccucuccugggcagcugccuc

SEQ ID NO: 2976441 - RNA, 22 nt, Human
gcccucuccugggcagcugccu

SEQ ID NO: 2976442 - RNA, 12 nt, Human
gcccucugccca

SEQ ID NO: 2976443 - RNA, 16 nt, Human
gcccugagcuuucugc

SEQ ID NO: 2976444 - RNA, 14 nt, Human
gcccugagcuuucu

SEQ ID NO: 2976445 - RNA, 18 nt, Human
gcccggcuccaggcuccu

SEQ ID NO: 2976446 - RNA, 17 nt, Human
gcccggcuccaggcucc

SEQ ID NO: 2976447 - RNA, 15 nt, Human
gcagacucuacagag

SEQ ID NO: 2976448 - RNA, 21 nt, Human
gccccuguucuggcagaguug

SEQ ID NO: 2976449 - RNA, 17 nt, Human
gccccuguucuggcaga

SEQ ID NO: 2976450 - RNA, 15 nt, Human
gccccugccacccug

SEQ ID NO: 2976451 - RNA, 14 nt, Human
gccccugccacccu

SEQ ID NO: 2976452 - RNA, 13 nt, Human
gccccugccaccc

SEQ ID NO: 2976453 - RNA, 16 nt, Human
gcccggcuccaggcuc

SEQ ID NO: 2976454 - RNA, 20 nt, Human
gcugccaauauccuaauaaa

SEQ ID NO: 2976455 - RNA, 21 nt, Human
gcugccaauauccuaauaaaa

SEQ ID NO: 2976456 - RNA, 15 nt, Human
gcugccaaugggagc

SEQ ID NO: 2976457 - RNA, 16 nt, Human
gcugccaaugggagcu

SEQ ID NO: 2976458 - RNA, 19 nt, Human
gcugccaaugggagcucau

SEQ ID NO: 2976459 - RNA, 23 nt, Human
gcugccaauauccuaauaaaaag

SEQ ID NO: 2976460 - RNA, 20 nt, Human
gcugucuacacuaagagaga

SEQ ID NO: 2976461 - RNA, 14 nt, Human
gcuguucagcuggu

SEQ ID NO: 2976462 - RNA, 13 nt, Human
gcuguucagcugg

SEQ ID NO: 2976463 - RNA, 12 nt, Human
gcuguucaugaa

SEQ ID NO: 2976464 - RNA, 21 nt, Human
gcuguucaugaaagauucaau

SEQ ID NO: 2976465 - RNA, 21 nt, Human
gcuuaggagaagucuucuauu

SEQ ID NO: 2976466 - RNA, 21 nt, Human
gcuuagucacugagacagccc

SEQ ID NO: 2976467 - RNA, 19 nt, Human
gcuuagucacugagacagc

SEQ ID NO: 2976468 - RNA, 20 nt, Human
gcuuagucacugagacagcc

SEQ ID NO: 2976469 - RNA, 15 nt, Human
gcuuagucacugaga

SEQ ID NO: 2976470 - RNA, 17 nt, Human
gcuuagucacugagaca

SEQ ID NO: 2976471 - RNA, 16 nt, Human
gcuuccagugaggcuc

SEQ ID NO: 2976472 - RNA, 17 nt, Human
gcuucauuuccuguguc

SEQ ID NO: 2976473 - RNA, 15 nt, Human
gcuuccagugaggcu

SEQ ID NO: 2976474 - RNA, 16 nt, Human
gcuugaggguugggcu

SEQ ID NO: 2976475 - RNA, 22 nt, Human
gcuucucccccacccccuaggg

SEQ ID NO: 2976476 - RNA, 12 nt, Human
gcuucauccucc

SEQ ID NO: 2976477 - RNA, 15 nt, Human
gcuucauccuccuca

SEQ ID NO: 2976478 - RNA, 16 nt, Human
gcuucauuuccugugu

SEQ ID NO: 2976479 - RNA, 13 nt, Human
gcuucauuuccug

SEQ ID NO: 2976480 - RNA, 18 nt, Human
gcuucaguggcagcugcu

SEQ ID NO: 2976481 - RNA, 17 nt, Human
gcuucaguggcagcugc

SEQ ID NO: 2976482 - RNA, 12 nt, Human
gcuuauacacuu

SEQ ID NO: 2976483 - RNA, 13 nt, Human
gcuuaucucaggg

SEQ ID NO: 2976484 - RNA, 19 nt, Human
gcuuaucucaggggugugc

SEQ ID NO: 2976485 - RNA, 15 nt, Human
gcuucaguggcagcu

SEQ ID NO: 2976486 - RNA, 16 nt, Human
gcuucaguggcagcug

SEQ ID NO: 2976487 - RNA, 23 nt, Human
ggaaagggauuuucagcccucag

SEQ ID NO: 2976488 - RNA, 22 nt, Human
ggaaaggcuccaggagcagcca

SEQ ID NO: 2976489 - RNA, 17 nt, Human
ggaaaggcuccaggagc

SEQ ID NO: 2976490 - RNA, 19 nt, Human
ggaaaggcuccaggagcag

SEQ ID NO: 2976491 - RNA, 20 nt, Human
ggaaaggcuccaggagcagc

SEQ ID NO: 2976492 - RNA, 21 nt, Human
ggaaaggcuccaggagcagcc

SEQ ID NO: 2976493 - RNA, 23 nt, Human
ggaaaaucagccugcuccagcug

SEQ ID NO: 2976494 - RNA, 19 nt, Human
ggaaaaucagccugcucca

SEQ ID NO: 2976495 - RNA, 13 nt, Human
ggaaaggcuccag

SEQ ID NO: 2976496 - RNA, 14 nt, Human
ggaaaggcuccagg

SEQ ID NO: 2976497 - RNA, 12 nt, Human
ggaaaggcucca

SEQ ID NO: 2976498 - RNA, 16 nt, Human
ggaacaggaaacugau

SEQ ID NO: 2976499 - RNA, 14 nt, Human
ggaaaucaccgaaa

SEQ ID NO: 2976500 - RNA, 17 nt, Human
ggaaaucaaauaugcaa

SEQ ID NO: 2976501 - RNA, 21 nt, Human
ggaaaucaccgaaaacguggc

SEQ ID NO: 2976502 - RNA, 16 nt, Human
ggaaaucaaauaugca

SEQ ID NO: 2976503 - RNA, 20 nt, Human
ggaaaagcugcugacagugu

SEQ ID NO: 2976504 - RNA, 18 nt, Human
ggaaaagcugcugacagu

SEQ ID NO: 2976505 - RNA, 14 nt, Human
ggaaaagcugcuga

SEQ ID NO: 2976506 - RNA, 18 nt, Human
ggaaaacaugcuacacac

SEQ ID NO: 2976507 - RNA, 21 nt, Human
gcuuuguuuguugucagcuga

SEQ ID NO: 2976508 - RNA, 15 nt, Human
gcuuugugauuuuug

SEQ ID NO: 2976509 - RNA, 20 nt, Human
gcuugaggguugggcuggug

SEQ ID NO: 2976510 - RNA, 18 nt, Human
gcuugaggguugggcugg

SEQ ID NO: 2976511 - RNA, 13 nt, Human
ggaaugcaaagau

SEQ ID NO: 2976512 - RNA, 24 nt, Human
ggaaugauuaauuaaaacacaaca

SEQ ID NO: 2976513 - RNA, 12 nt, Human
ggaaugcagugg

SEQ ID NO: 2976514 - RNA, 19 nt, Human
ggaauguuugccucugccu

SEQ ID NO: 2976515 - RNA, 23 nt, Human
ggaauuucucccagucauuuaau

SEQ ID NO: 2976516 - RNA, 22 nt, Human
ggaauuggagcucgugggacag

SEQ ID NO: 2976517 - RNA, 16 nt, Human
ggaauuggagcucgug

SEQ ID NO: 2976518 - RNA, 17 nt, Human
ggacaaaauggaauacu

SEQ ID NO: 2976519 - RNA, 16 nt, Human
ggacaaaauggaauac

SEQ ID NO: 2976520 - RNA, 20 nt, Human
ggaagugacgguuuaauggg

SEQ ID NO: 2976521 - RNA, 14 nt, Human
ggaaugauuaauua

SEQ ID NO: 2976522 - RNA, 12 nt, Human
ggaaguacugga

SEQ ID NO: 2976523 - RNA, 16 nt, Human
ggaaguacuggagaaa

SEQ ID NO: 2976524 - RNA, 18 nt, Human
ggaaguacuggagaaaau

SEQ ID NO: 2976525 - RNA, 23 nt, Human
ggaaggggagauaaggguaucug

SEQ ID NO: 2976526 - RNA, 20 nt, Human
ggacauugcggacagccacg

SEQ ID NO: 2976527 - RNA, 14 nt, Human
ggacauggacaagg

SEQ ID NO: 2976528 - RNA, 21 nt, Human
ggacagccacggccaggccag

SEQ ID NO: 2976529 - RNA, 20 nt, Human
ggacagccacggccaggcca

SEQ ID NO: 2976530 - RNA, 19 nt, Human
ggacagccacggccaggcc

SEQ ID NO: 2976531 - RNA, 15 nt, Human
ggacagccacggcca

SEQ ID NO: 2976532 - RNA, 17 nt, Human
ggacacucaaaagcugg

SEQ ID NO: 2976533 - RNA, 19 nt, Human
ggacgcuacccgggaaggg

SEQ ID NO: 2976534 - RNA, 20 nt, Human
ggacgcuacccgggaagggg

SEQ ID NO: 2976535 - RNA, 17 nt, Human
ggacgcuacccgggaag

SEQ ID NO: 2976536 - RNA, 17 nt, Human
ggaccuugaacugggua

SEQ ID NO: 2976537 - RNA, 15 nt, Human
ggaccuugaacuggg

SEQ ID NO: 2976538 - RNA, 19 nt, Human
ggaccucaggugagaagca

SEQ ID NO: 2976539 - RNA, 20 nt, Human
ggaccucaggccugggggcu

SEQ ID NO: 2976540 - RNA, 23 nt, Human
ggaccucaggugagaagcagagg

SEQ ID NO: 2976541 - RNA, 13 nt, Human
ggaccagagcugc

SEQ ID NO: 2976542 - RNA, 14 nt, Human
ggacgcucucuggc

SEQ ID NO: 2976543 - RNA, 13 nt, Human
ggacgcucucugg

SEQ ID NO: 2976544 - RNA, 17 nt, Human
ggagaagcggcuggcag

SEQ ID NO: 2976545 - RNA, 18 nt, Human
ggagaagcggcuggcagc

SEQ ID NO: 2976546 - RNA, 19 nt, Human
ggagaaucacuugaacccg

SEQ ID NO: 2976547 - RNA, 15 nt, Human
ggagaaucacuugaa

SEQ ID NO: 2976548 - RNA, 13 nt, Human
ggauacuuauuua

SEQ ID NO: 2976549 - RNA, 18 nt, Human
ggauacaaaagcauguga

SEQ ID NO: 2976550 - RNA, 23 nt, Human
ggagugaguugauagcacagacc

SEQ ID NO: 2976551 - RNA, 21 nt, Human
ggagaugccaugagccgccca

SEQ ID NO: 2976552 - RNA, 12 nt, Human
ggagugcaguga

SEQ ID NO: 2976553 - RNA, 14 nt, Human
ggagugcagugagc

SEQ ID NO: 2976554 - RNA, 22 nt, Human
ggaucccucauccucauaccca

SEQ ID NO: 2976555 - RNA, 13 nt, Human
ggaucccucaucc

SEQ ID NO: 2976556 - RNA, 17 nt, Human
ggaucccucauccucau

SEQ ID NO: 2976557 - RNA, 12 nt, Human
ggauccuccagg

SEQ ID NO: 2976558 - RNA, 13 nt, Human
ggauccuccaggu

SEQ ID NO: 2976559 - RNA, 23 nt, Human
ggaugcacagaguuguuacauuu

SEQ ID NO: 2976560 - RNA, 21 nt, Human
ggaugauuggaggggggaggu

SEQ ID NO: 2976561 - RNA, 16 nt, Human
ggaugcagccucacag

SEQ ID NO: 2976562 - RNA, 17 nt, Human
ggaugcagccucacagu

SEQ ID NO: 2976563 - RNA, 19 nt, Human
ggauuacaagcgugagcca

SEQ ID NO: 2976564 - RNA, 15 nt, Human
ggaugcuuguacaua

SEQ ID NO: 2976565 - RNA, 17 nt, Human
ggaugcugcugccccug

SEQ ID NO: 2976566 - RNA, 19 nt, Human
ggaugcagccucacagucc

SEQ ID NO: 2976567 - RNA, 22 nt, Human
ggcacccggccccugcugguuc

SEQ ID NO: 2976568 - RNA, 23 nt, Human
ggcacccaccaucaugucuggcu

SEQ ID NO: 2976569 - RNA, 20 nt, Human
ggcacccaccaucaugucug

SEQ ID NO: 2976570 - RNA, 18 nt, Human
ggcaacccccagccugcu

SEQ ID NO: 2976571 - RNA, 23 nt, Human
ggcaaugcuggcuguuggcuggg

SEQ ID NO: 2976572 - RNA, 15 nt, Human
ggcaaugcuggcugu

SEQ ID NO: 2976573 - RNA, 14 nt, Human
ggcaaugcuggcug

SEQ ID NO: 2976574 - RNA, 15 nt, Human
ggauuguaaaauggu

SEQ ID NO: 2976575 - RNA, 17 nt, Human
ggcaacccccagccugc

SEQ ID NO: 2976576 - RNA, 16 nt, Human
ggcaacccccagccug

SEQ ID NO: 2976577 - RNA, 17 nt, Human
ggauugcuacuguccua

SEQ ID NO: 2976578 - RNA, 23 nt, Human
ggauuacaagcgugagccacugc

SEQ ID NO: 2976579 - RNA, 16 nt, Human
ggauucuuauggacaa

SEQ ID NO: 2976580 - RNA, 22 nt, Human
ggcaugggaaugaaugucagug

SEQ ID NO: 2976581 - RNA, 17 nt, Human
ggcauuccccaggaggc

SEQ ID NO: 2976582 - RNA, 18 nt, Human
ggcaugggaaugaauguc

SEQ ID NO: 2976583 - RNA, 14 nt, Human
ggcauggcugggaa

SEQ ID NO: 2976584 - RNA, 18 nt, Human
ggcauuccccaggaggcc

SEQ ID NO: 2976585 - RNA, 19 nt, Human
ggcauuccccaggaggcca

SEQ ID NO: 2976586 - RNA, 16 nt, Human
ggcauuccccaggagg

SEQ ID NO: 2976587 - RNA, 16 nt, Human
ggccaccgccuugccc

SEQ ID NO: 2976588 - RNA, 16 nt, Human
ggccaugggccuccug

SEQ ID NO: 2976589 - RNA, 17 nt, Human
ggccaugucagacacag

SEQ ID NO: 2976590 - RNA, 16 nt, Human
ggccaugucagacaca

SEQ ID NO: 2976591 - RNA, 23 nt, Human
ggccagcugcuugggcuucaucc

SEQ ID NO: 2976592 - RNA, 18 nt, Human
ggccaggcccucugccca

SEQ ID NO: 2976593 - RNA, 22 nt, Human
ggccagccuugaccauucucca

SEQ ID NO: 2976594 - RNA, 17 nt, Human
ggccagcugcuugggcu

SEQ ID NO: 2976595 - RNA, 20 nt, Human
ggccagccuugaccauucuc

SEQ ID NO: 2976596 - RNA, 12 nt, Human
ggcagcucaccu

SEQ ID NO: 2976597 - RNA, 14 nt, Human
ggcagcucaccucu

SEQ ID NO: 2976598 - RNA, 15 nt, Human
ggcacuauuuauuua

SEQ ID NO: 2976599 - RNA, 20 nt, Human
ggcaccuguagucccagcua

SEQ ID NO: 2976600 - RNA, 17 nt, Human
ggcagcuugaggguugg

SEQ ID NO: 2976601 - RNA, 22 nt, Human
ggcagcugcuuuugucuauggg

SEQ ID NO: 2976602 - RNA, 13 nt, Human
ggcagcucagaga

SEQ ID NO: 2976603 - RNA, 21 nt, Human
ggcagcucagagaggguggga

SEQ ID NO: 2976604 - RNA, 16 nt, Human
ggcagugggagcugcc

SEQ ID NO: 2976605 - RNA, 14 nt, Human
ggcagugggagcug

SEQ ID NO: 2976606 - RNA, 13 nt, Human
ggcagugggagcu

SEQ ID NO: 2976607 - RNA, 20 nt, Human
ggcagggucucacucugucg

SEQ ID NO: 2976608 - RNA, 19 nt, Human
ggcagggucucacucuguc

SEQ ID NO: 2976609 - RNA, 18 nt, Human
ggcaugacacgaauauug

SEQ ID NO: 2976610 - RNA, 15 nt, Human
ggcaugaagacagau

SEQ ID NO: 2976611 - RNA, 14 nt, Human
ggcauggacuucug

SEQ ID NO: 2976612 - RNA, 15 nt, Human
ggcauggacuucugg

SEQ ID NO: 2976613 - RNA, 20 nt, Human
ggccugggggcugggcagag

SEQ ID NO: 2976614 - RNA, 22 nt, Human
ggccugggggcugggcagagga

SEQ ID NO: 2976615 - RNA, 14 nt, Human
ggccugggggcugg

SEQ ID NO: 2976616 - RNA, 20 nt, Human
ggccugucagcuaaagaagu

SEQ ID NO: 2976617 - RNA, 19 nt, Human
ggccuggccugagcuggga

SEQ ID NO: 2976618 - RNA, 18 nt, Human
ggcgcugccccuggcagc

SEQ ID NO: 2976619 - RNA, 19 nt, Human
ggcgcugccccuggcagcc

SEQ ID NO: 2976620 - RNA, 21 nt, Human
ggcgcugccccuggcagcccc

SEQ ID NO: 2976621 - RNA, 23 nt, Human
ggcgcugccccuggcagccccug

SEQ ID NO: 2976622 - RNA, 21 nt, Human
ggcggaccuuguagugagccg

SEQ ID NO: 2976623 - RNA, 20 nt, Human
ggcggaccuuguagugagcc

SEQ ID NO: 2976624 - RNA, 16 nt, Human
ggcuccaggcuccuuu

SEQ ID NO: 2976625 - RNA, 18 nt, Human
ggcuccaggagcagccac

SEQ ID NO: 2976626 - RNA, 11 nt, Human
ggcuccaggcu

SEQ ID NO: 2976627 - RNA, 15 nt, Human
ggcuccaggcuccuu

SEQ ID NO: 2976628 - RNA, 13 nt, Human
ggcuccaggagca

SEQ ID NO: 2976629 - RNA, 19 nt, Human
ggcuccaggagcagccaca

SEQ ID NO: 2976630 - RNA, 12 nt, Human
ggcuccaggagc

SEQ ID NO: 2976631 - RNA, 21 nt, Human
ggcucaaguccucuuuucuga

SEQ ID NO: 2976632 - RNA, 15 nt, Human
ggcucaaguccucuu

SEQ ID NO: 2976633 - RNA, 16 nt, Human
ggcuagagguucaaag

SEQ ID NO: 2976634 - RNA, 17 nt, Human
ggcuagagguucaaaga

SEQ ID NO: 2976635 - RNA, 22 nt, Human
ggcuagagguucaaagauauuu

SEQ ID NO: 2976636 - RNA, 16 nt, Human
ggcuaggaccccucca

SEQ ID NO: 2976637 - RNA, 22 nt, Human
ggcuaggaccccuccauguggg

SEQ ID NO: 2976638 - RNA, 23 nt, Human
ggcuagugugguguuuccuggca

SEQ ID NO: 2976639 - RNA, 15 nt, Human
ggcuaguugggcuuc

SEQ ID NO: 2976640 - RNA, 16 nt, Human
ggcuaguugggcuucc

SEQ ID NO: 2976641 - RNA, 14 nt, Human
ggcuaugcauuuga

SEQ ID NO: 2976642 - RNA, 15 nt, Human
ggcuaugcauuugaa

SEQ ID NO: 2976643 - RNA, 13 nt, Human
ggcccugccuccu

SEQ ID NO: 2976644 - RNA, 14 nt, Human
ggcccugccuccuu

SEQ ID NO: 2976645 - RNA, 15 nt, Human
ggcccugccuccuuu

SEQ ID NO: 2976646 - RNA, 21 nt, Human
ggcccucugcccacucccugc

SEQ ID NO: 2976647 - RNA, 19 nt, Human
ggcccucugcccacucccu

SEQ ID NO: 2976648 - RNA, 20 nt, Human
ggcccucugcccacucccug

SEQ ID NO: 2976649 - RNA, 13 nt, Human
ggcccucugccca

SEQ ID NO: 2976650 - RNA, 15 nt, Human
ggcccucugcccacu

SEQ ID NO: 2976651 - RNA, 16 nt, Human
ggcccucugcccacuc

SEQ ID NO: 2976652 - RNA, 17 nt, Human
ggcccucugcccacucc

SEQ ID NO: 2976653 - RNA, 11 nt, Human
ggcccagagag

SEQ ID NO: 2976654 - RNA, 13 nt, Human
ggccucugcacuc

SEQ ID NO: 2976655 - RNA, 14 nt, Human
ggccucugcacucc

SEQ ID NO: 2976656 - RNA, 15 nt, Human
ggccucugcacuccc

SEQ ID NO: 2976657 - RNA, 20 nt, Human
ggccucugcggagcacacug

SEQ ID NO: 2976658 - RNA, 18 nt, Human
ggccucuuaugggcuggg

SEQ ID NO: 2976659 - RNA, 17 nt, Human
ggccucuuaugggcugg

SEQ ID NO: 2976660 - RNA, 23 nt, Human
ggccuagcauacguacacauuuu

SEQ ID NO: 2976661 - RNA, 22 nt, Human
gauugccuuuuuauaacuuuuu

SEQ ID NO: 2976662 - RNA, 21 nt, Human
gauugccuuuuuauaacuuuu

SEQ ID NO: 2976663 - RNA, 15 nt, Human
gauugccuuuuuaua

SEQ ID NO: 2976664 - RNA, 14 nt, Human
gauucuccugccuc

SEQ ID NO: 2976665 - RNA, 20 nt, Human
gauucaaugccccugaauuu

SEQ ID NO: 2976666 - RNA, 19 nt, Human
gauucaaugccccugaauu

SEQ ID NO: 2976667 - RNA, 21 nt, Human
gauucaaugccccugaauuua

SEQ ID NO: 2976668 - RNA, 22 nt, Human
gauuuccguuaaaauaccagcc

SEQ ID NO: 2976669 - RNA, 15 nt, Human
gauuuaacagaaaug

SEQ ID NO: 2976670 - RNA, 14 nt, Human
gauuuaacagaaau

SEQ ID NO: 2976671 - RNA, 13 nt, Human
gauuuaacagaaa

SEQ ID NO: 2976672 - RNA, 12 nt, Human
gauuuaaaucag

SEQ ID NO: 2976673 - RNA, 14 nt, Human
gcaaagaugaaggu

SEQ ID NO: 2976674 - RNA, 18 nt, Human
gcaaagaugaaggucugu

SEQ ID NO: 2976675 - RNA, 15 nt, Human
gcaaaccaucauuga

SEQ ID NO: 2976676 - RNA, 16 nt, Human
gcaaauugucacagga

SEQ ID NO: 2976677 - RNA, 17 nt, Human
gcaaauguuuauuuaaa

SEQ ID NO: 2976678 - RNA, 20 nt, Human
gcaaauguuuauuuaaaaga

SEQ ID NO: 2976679 - RNA, 19 nt, Human
gcaaauguuuauuuaaaag

SEQ ID NO: 2976680 - RNA, 12 nt, Human
gcaaaccaucau

SEQ ID NO: 2976681 - RNA, 21 nt, Human
gauuuugaaauuuuuauuaaa

SEQ ID NO: 2976682 - RNA, 19 nt, Human
gauuuugauccaagcuggu

SEQ ID NO: 2976683 - RNA, 16 nt, Human
gauguugcuaacagca

SEQ ID NO: 2976684 - RNA, 19 nt, Human
gauguugaaaaaguucugc

SEQ ID NO: 2976685 - RNA, 23 nt, Human
gauuacaagcgugagccacugca

SEQ ID NO: 2976686 - RNA, 15 nt, Human
gauuaaacuuaaucu

SEQ ID NO: 2976687 - RNA, 22 nt, Human
gauuacaagcgugagccacugc

SEQ ID NO: 2976688 - RNA, 17 nt, Human
gauggugcaaugaccuu

SEQ ID NO: 2976689 - RNA, 15 nt, Human
gauggugcaaugacc

SEQ ID NO: 2976690 - RNA, 16 nt, Human
gauggugcaaugaccu

SEQ ID NO: 2976691 - RNA, 12 nt, Human
gauggugcaaug

SEQ ID NO: 2976692 - RNA, 14 nt, Human
gauggugcaaugac

SEQ ID NO: 2976693 - RNA, 24 nt, Human
gauggggcccugccuccuuuguga

SEQ ID NO: 2976694 - RNA, 21 nt, Human
gaugggcaacccccagccugc

SEQ ID NO: 2976695 - RNA, 20 nt, Human
gaugggcaacccccagccug

SEQ ID NO: 2976696 - RNA, 22 nt, Human
gauggccgggcgcgguggcuca

SEQ ID NO: 2976697 - RNA, 15 nt, Human
gauggggcugcaccg

SEQ ID NO: 2976698 - RNA, 13 nt, Human
gauggggcugcac

SEQ ID NO: 2976699 - RNA, 19 nt, Human
gaugggugcuuggaggaag

SEQ ID NO: 2976700 - RNA, 20 nt, Human
gaugcuagaacucccuuuca

SEQ ID NO: 2976701 - RNA, 18 nt, Human
gaugcuagaacucccuuu

SEQ ID NO: 2976702 - RNA, 20 nt, Human
gaugcccaaagaugcagccg

SEQ ID NO: 2976703 - RNA, 22 nt, Human
gaugccaugagccgcccaaggc

SEQ ID NO: 2976704 - RNA, 19 nt, Human
gaugcccaaagaugcagcc

SEQ ID NO: 2976705 - RNA, 13 nt, Human
gcacacugucugc

SEQ ID NO: 2976706 - RNA, 19 nt, Human
gcacacuggcucacccagu

SEQ ID NO: 2976707 - RNA, 22 nt, Human
gcacacuggcucacccaguccu

SEQ ID NO: 2976708 - RNA, 20 nt, Human
gcacagaaaauggaagacag

SEQ ID NO: 2976709 - RNA, 16 nt, Human
gcacacuuuggcccag

SEQ ID NO: 2976710 - RNA, 18 nt, Human
gcacacuuuggcccaggg

SEQ ID NO: 2976711 - RNA, 20 nt, Human
gcacaccgggcacucagaag

SEQ ID NO: 2976712 - RNA, 13 nt, Human
gcacacuggcuca

SEQ ID NO: 2976713 - RNA, 18 nt, Human
gcacaagcuccaagcucc

SEQ ID NO: 2976714 - RNA, 15 nt, Human
gcacaagcuccaagc

SEQ ID NO: 2976715 - RNA, 17 nt, Human
gcacaagcuccaagcuc

SEQ ID NO: 2976716 - RNA, 18 nt, Human
gcacagacccugcccugu

SEQ ID NO: 2976717 - RNA, 19 nt, Human
gcacagacccugcccugug

SEQ ID NO: 2976718 - RNA, 20 nt, Human
gcacagacccugcccugugg

SEQ ID NO: 2976719 - RNA, 21 nt, Human
gcacagacccugcccuguggg

SEQ ID NO: 2976720 - RNA, 15 nt, Human
gcacagaguuguuac

SEQ ID NO: 2976721 - RNA, 22 nt, Human
gcacagacccugcccugugggc

SEQ ID NO: 2976722 - RNA, 14 nt, Human
gcacagacccugcc

SEQ ID NO: 2976723 - RNA, 15 nt, Human
gcacagacccugccc

SEQ ID NO: 2976724 - RNA, 16 nt, Human
gcacagacccugcccu

SEQ ID NO: 2976725 - RNA, 17 nt, Human
gcacagacccugcccug

SEQ ID NO: 2976726 - RNA, 21 nt, Human
gcacagaaaauggaagacagc

SEQ ID NO: 2976727 - RNA, 22 nt, Human
gcacagaaaauggaagacagcu

SEQ ID NO: 2976728 - RNA, 23 nt, Human
gcacagaaaauggaagacagcuc

SEQ ID NO: 2976729 - RNA, 14 nt, Human
gcacaaacagaggc

SEQ ID NO: 2976730 - RNA, 15 nt, Human
gcacaaacagaggcc

SEQ ID NO: 2976731 - RNA, 16 nt, Human
gcacaaacagaggccg

SEQ ID NO: 2976732 - RNA, 14 nt, Human
gcaaugugauaaaa

SEQ ID NO: 2976733 - RNA, 12 nt, Human
gcaauuaugaaa

SEQ ID NO: 2976734 - RNA, 16 nt, Human
gcaauuaugaaaauaa

SEQ ID NO: 2976735 - RNA, 14 nt, Human
gcaauuaugaaaau

SEQ ID NO: 2976736 - RNA, 19 nt, Human
gcaauuaugaaaauaaucu

SEQ ID NO: 2976737 - RNA, 14 nt, Human
gcaacucaucuuag

SEQ ID NO: 2976738 - RNA, 13 nt, Human
gcaacucugaagg

SEQ ID NO: 2976739 - RNA, 15 nt, Human
gcaauggcagccuug

SEQ ID NO: 2976740 - RNA, 14 nt, Human
gcacauuaaaugac

SEQ ID NO: 2976741 - RNA, 12 nt, Human
gcacauuaaaug

SEQ ID NO: 2976742 - RNA, 21 nt, Human
gcacauuaaaugacucuuccc

SEQ ID NO: 2976743 - RNA, 16 nt, Human
gcacauuaaaugacuc

SEQ ID NO: 2976744 - RNA, 21 nt, Human
gcacagaguuguuacauuuuu

SEQ ID NO: 2976745 - RNA, 19 nt, Human
gcacagaguuguuacauuu

SEQ ID NO: 2976746 - RNA, 18 nt, Human
gcacagaguuguuacauu

SEQ ID NO: 2976747 - RNA, 16 nt, Human
gcacagaguuguuaca

SEQ ID NO: 2976748 - RNA, 22 nt, Human
gcacagaguuguuacauuuuua

SEQ ID NO: 2976749 - RNA, 20 nt, Human
gcaccuuagacagucccugc

SEQ ID NO: 2976750 - RNA, 21 nt, Human
gcaccuuagacagucccugcc

SEQ ID NO: 2976751 - RNA, 15 nt, Human
gcacgauuucuguuu

SEQ ID NO: 2976752 - RNA, 13 nt, Human
gcacgauuucugu

SEQ ID NO: 2976753 - RNA, 19 nt, Human
gcaccuuagacagucccug

SEQ ID NO: 2976754 - RNA, 12 nt, Human
gcaccauaacuu

SEQ ID NO: 2976755 - RNA, 16 nt, Human
gcacgauuucuguuua

SEQ ID NO: 2976756 - RNA, 15 nt, Human
gcacugacuucuaag

SEQ ID NO: 2976757 - RNA, 18 nt, Human
gcacugacuucuaaguaa

SEQ ID NO: 2976758 - RNA, 23 nt, Human
gcacugcuuccagugaggcucug

SEQ ID NO: 2976759 - RNA, 22 nt, Human
gcacugcuuccagugaggcucu

SEQ ID NO: 2976760 - RNA, 17 nt, Human
gcacuggcaaacagggc

SEQ ID NO: 2976761 - RNA, 23 nt, Human
gcacuggcaaacagggccucugc

SEQ ID NO: 2976762 - RNA, 22 nt, Human
gcacuggcaaacagggccucug

SEQ ID NO: 2976763 - RNA, 20 nt, Human
gcacuggcaaacagggccuc

SEQ ID NO: 2976764 - RNA, 19 nt, Human
gcacuggcaaacagggccu

SEQ ID NO: 2976765 - RNA, 18 nt, Human
gcagacaggaccagggau

SEQ ID NO: 2976766 - RNA, 12 nt, Human
gcagacaggcaa

SEQ ID NO: 2976767 - RNA, 14 nt, Human
gcagacaggcaagc

SEQ ID NO: 2976768 - RNA, 13 nt, Human
gcagacaggcaag

SEQ ID NO: 2976769 - RNA, 18 nt, Human
gcagaaggaagacuucau

SEQ ID NO: 2976770 - RNA, 12 nt, Human
gagcccugucuc

SEQ ID NO: 2976771 - RNA, 13 nt, Human
gaggaucucuuga

SEQ ID NO: 2976772 - RNA, 16 nt, Human
gaggaucucuugagcc

SEQ ID NO: 2976773 - RNA, 19 nt, Human
gaggaucucuugagccugg

SEQ ID NO: 2976774 - RNA, 22 nt, Human
gaggaucucuugagccugggag

SEQ ID NO: 2976775 - RNA, 20 nt, Human
gaggauugcuugagcucagg

SEQ ID NO: 2976776 - RNA, 23 nt, Human
gaggccaugggccuccugugugu

SEQ ID NO: 2976777 - RNA, 21 nt, Human
gaggccaugggccuccugugu

SEQ ID NO: 2976778 - RNA, 20 nt, Human
gaggccaugggccuccugug

SEQ ID NO: 2976779 - RNA, 18 nt, Human
gaggccaugggccuccug

SEQ ID NO: 2976780 - RNA, 17 nt, Human
gaggccaugggccuccu

SEQ ID NO: 2976781 - RNA, 14 nt, Human
gaggccaugggccu

SEQ ID NO: 2976782 - RNA, 18 nt, Human
gaggcagccccauucugc

SEQ ID NO: 2976783 - RNA, 19 nt, Human
gaggcagccccauucugcc

SEQ ID NO: 2976784 - RNA, 9 nt, Human
gaggcaggg

SEQ ID NO: 2976785 - RNA, 20 nt, Human
gaggcagccccauucugccu

SEQ ID NO: 2976786 - RNA, 19 nt, Human
gaggccuucucugaaggac

SEQ ID NO: 2976787 - RNA, 18 nt, Human
gaggccuucucugaagga

SEQ ID NO: 2976788 - RNA, 16 nt, Human
gaggccuucucugaag

SEQ ID NO: 2976789 - RNA, 14 nt, Human
gaggcugccucucc

SEQ ID NO: 2976790 - RNA, 20 nt, Human
gaggcggaccuuguagugag

SEQ ID NO: 2976791 - RNA, 16 nt, Human
gaggcugggcucccuu

SEQ ID NO: 2976792 - RNA, 11 nt, Human
gaggcccagag

SEQ ID NO: 2976793 - RNA, 13 nt, Human
gaggcccagaggg

SEQ ID NO: 2976794 - RNA, 14 nt, Human
gaggcccagagggc

SEQ ID NO: 2976795 - RNA, 19 nt, Human
gaggcccagagggccugca

SEQ ID NO: 2976796 - RNA, 15 nt, Human
gaggcccagagggcc

SEQ ID NO: 2976797 - RNA, 16 nt, Human
gaggcccagagggccu

SEQ ID NO: 2976798 - RNA, 21 nt, Human
gaggcccuucucuccagcccc

SEQ ID NO: 2976799 - RNA, 15 nt, Human
gaggcccuucucucc

SEQ ID NO: 2976800 - RNA, 20 nt, Human
gaggcccuucucuccagccc

SEQ ID NO: 2976801 - RNA, 18 nt, Human
gagguacacuugugaaua

SEQ ID NO: 2976802 - RNA, 24 nt, Human
gagguaaggaauaccugucccccu

SEQ ID NO: 2976803 - RNA, 21 nt, Human
gagguaaggaauaccuguccc

SEQ ID NO: 2976804 - RNA, 14 nt, Human
gaggguugggcugg

SEQ ID NO: 2976805 - RNA, 15 nt, Human
gaggguugggcuggu

SEQ ID NO: 2976806 - RNA, 17 nt, Human
gaggucaaggcugcagu

SEQ ID NO: 2976807 - RNA, 13 nt, Human
gaggucagagccu

SEQ ID NO: 2976808 - RNA, 12 nt, Human
gaggucagagcc

SEQ ID NO: 2976809 - RNA, 22 nt, Human
gagggugucccaaaaagaaagg

SEQ ID NO: 2976810 - RNA, 21 nt, Human
gaggguggugaccucugccug

SEQ ID NO: 2976811 - RNA, 15 nt, Human
gagggugggaguggg

SEQ ID NO: 2976812 - RNA, 14 nt, Human
gaggguggugaccu

SEQ ID NO: 2976813 - RNA, 21 nt, Human
gagggugaagugaagacaaug

SEQ ID NO: 2976814 - RNA, 12 nt, Human
gaggguggaaua

SEQ ID NO: 2976815 - RNA, 14 nt, Human
gagggucugaggaa

SEQ ID NO: 2976816 - RNA, 13 nt, Human
gagggucugagga

SEQ ID NO: 2976817 - RNA, 19 nt, Human
gagggagggcuccagacac

SEQ ID NO: 2976818 - RNA, 20 nt, Human
gaggcugggcucccuuccca

SEQ ID NO: 2976819 - RNA, 20 nt, Human
gagggagggcuccagacaca

SEQ ID NO: 2976820 - RNA, 16 nt, Human
gagggagggcuccaga

SEQ ID NO: 2976821 - RNA, 16 nt, Human
gagggagugacagagg

SEQ ID NO: 2976822 - RNA, 18 nt, Human
gagggagugacagaggca

SEQ ID NO: 2976823 - RNA, 22 nt, Human
gagggagugacagaggcagccc

SEQ ID NO: 2976824 - RNA, 21 nt, Human
gagggagugacagaggcagcc

SEQ ID NO: 2976825 - RNA, 13 nt, Human
gaggguaaggcug

SEQ ID NO: 2976826 - RNA, 17 nt, Human
gaggggguggccuccca

SEQ ID NO: 2976827 - RNA, 15 nt, Human
gagggggccuggaug

SEQ ID NO: 2976828 - RNA, 15 nt, Human
gagggggcugcuccc

SEQ ID NO: 2976829 - RNA, 17 nt, Human
gagugaagcugggagaa

SEQ ID NO: 2976830 - RNA, 23 nt, Human
gagugaacaaauuuacagagaca

SEQ ID NO: 2976831 - RNA, 16 nt, Human
gagugacagaggcagc

SEQ ID NO: 2976832 - RNA, 15 nt, Human
gagugacagaggcag

SEQ ID NO: 2976833 - RNA, 14 nt, Human
gagugacagaggca

SEQ ID NO: 2976834 - RNA, 12 nt, Human
gagucugaaggc

SEQ ID NO: 2976835 - RNA, 13 nt, Human
gagucugaaggcu

SEQ ID NO: 2976836 - RNA, 21 nt, Human
gagucuauuuacggaacucaa

SEQ ID NO: 2976837 - RNA, 15 nt, Human
gagucugaaggcugg

SEQ ID NO: 2976838 - RNA, 14 nt, Human
gagucugaaggcug

SEQ ID NO: 2976839 - RNA, 14 nt, Human
gagucgaggacagg

SEQ ID NO: 2976840 - RNA, 19 nt, Human
gaguccgaaagggacuugg

SEQ ID NO: 2976841 - RNA, 15 nt, Human
gagucgaggacaggg

SEQ ID NO: 2976842 - RNA, 11 nt, Human
gaguauauguc

SEQ ID NO: 2976843 - RNA, 18 nt, Human
gaguaggaagacuuugga

SEQ ID NO: 2976844 - RNA, 19 nt, Human
gaguaggaagacuuuggaa

SEQ ID NO: 2976845 - RNA, 21 nt, Human
gaguacuacaguccucccauc

SEQ ID NO: 2976846 - RNA, 23 nt, Human
gaguacuacaguccucccaucuc

SEQ ID NO: 2976847 - RNA, 20 nt, Human
gaguacuacaguccucccau

SEQ ID NO: 2976848 - RNA, 13 nt, Human
gaguaggaagacu

SEQ ID NO: 2976849 - RNA, 17 nt, Human
gaguaggaagacuuugg

SEQ ID NO: 2976850 - RNA, 12 nt, Human
gaguaggaagac

SEQ ID NO: 2976851 - RNA, 22 nt, Human
gaguagcugggacuacaggcac

SEQ ID NO: 2976852 - RNA, 19 nt, Human
gaguagcugggacuacagg

SEQ ID NO: 2976853 - RNA, 16 nt, Human
gagguuucaaaccucc

SEQ ID NO: 2976854 - RNA, 15 nt, Human
gagguugggaggcca

SEQ ID NO: 2976855 - RNA, 17 nt, Human
gagguugggaggccauu

SEQ ID NO: 2976856 - RNA, 20 nt, Human
gaggucagagccugcaguua

SEQ ID NO: 2976857 - RNA, 17 nt, Human
gaggucagagccugcag

SEQ ID NO: 2976858 - RNA, 22 nt, Human
gauaugauucaaaugucuauaa

SEQ ID NO: 2976859 - RNA, 14 nt, Human
gauaugauucaaau

SEQ ID NO: 2976860 - RNA, 24 nt, Human
gauaugauucaaaugucuauaaac

SEQ ID NO: 2976861 - RNA, 16 nt, Human
gaucacggcucacugc

SEQ ID NO: 2976862 - RNA, 15 nt, Human
gaucacggcucacug

SEQ ID NO: 2976863 - RNA, 18 nt, Human
gaucacggcucacugcag

SEQ ID NO: 2976864 - RNA, 23 nt, Human
gauacaggaaaagcugcugacag

SEQ ID NO: 2976865 - RNA, 21 nt, Human
gauacaggaaaagcugcugac

SEQ ID NO: 2976866 - RNA, 19 nt, Human
gauacaggaaaagcugcug

SEQ ID NO: 2976867 - RNA, 22 nt, Human
gauaagaaccuuuugagugccu

SEQ ID NO: 2976868 - RNA, 20 nt, Human
gauacaggaaaagcugcuga

SEQ ID NO: 2976869 - RNA, 22 nt, Human
gauagccaaggccaaaggaagc

SEQ ID NO: 2976870 - RNA, 14 nt, Human
gauagccaaggcca

SEQ ID NO: 2976871 - RNA, 15 nt, Human
gauagcacagacccu

SEQ ID NO: 2976872 - RNA, 12 nt, Human
gaguuacagaca

SEQ ID NO: 2976873 - RNA, 20 nt, Human
gagugugccugaagucccag

SEQ ID NO: 2976874 - RNA, 16 nt, Human
gaguggucagaacaga

SEQ ID NO: 2976875 - RNA, 15 nt, Human
gaguguacagagugg

SEQ ID NO: 2976876 - RNA, 17 nt, Human
gagugacagaggcagcc

SEQ ID NO: 2976877 - RNA, 13 nt, Human
gagugggugaaua

SEQ ID NO: 2976878 - RNA, 13 nt, Human
gaguuacagacaa

SEQ ID NO: 2976879 - RNA, 15 nt, Human
gaguuacagacaaag

SEQ ID NO: 2976880 - RNA, 19 nt, Human
gaguucaucuugaauugua

SEQ ID NO: 2976881 - RNA, 20 nt, Human
gaguucaucuugaauuguaa

SEQ ID NO: 2976882 - RNA, 14 nt, Human
gaguucaucuugaa

SEQ ID NO: 2976883 - RNA, 20 nt, Human
gaguucauacccuguuacca

SEQ ID NO: 2976884 - RNA, 15 nt, Human
gaguugaagacagag

SEQ ID NO: 2976885 - RNA, 17 nt, Human
gaguugaagacagagcu

SEQ ID NO: 2976886 - RNA, 21 nt, Human
gaguugaagacagagcuacac

SEQ ID NO: 2976887 - RNA, 14 nt, Human
gaguugaagacaga

SEQ ID NO: 2976888 - RNA, 22 nt, Human
gauaaauggcuuccuggcaaua

SEQ ID NO: 2976889 - RNA, 19 nt, Human
gacagagccccacccucag

SEQ ID NO: 2976890 - RNA, 12 nt, Human
gacagaggcagc

SEQ ID NO: 2976891 - RNA, 16 nt, Human
gacagaggcagcccca

SEQ ID NO: 2976892 - RNA, 14 nt, Human
gacagaggcagccc

SEQ ID NO: 2976893 - RNA, 21 nt, Human
gacagagcaagugagacccug

SEQ ID NO: 2976894 - RNA, 21 nt, Human
gacagaggggguggccuccca

SEQ ID NO: 2976895 - RNA, 22 nt, Human
gacagaggggguggccucccaa

SEQ ID NO: 2976896 - RNA, 23 nt, Human
gacagaggggguggccucccaac

SEQ ID NO: 2976897 - RNA, 18 nt, Human
gacagaggggguggccuc

SEQ ID NO: 2976898 - RNA, 19 nt, Human
gacagaggggguggccucc

SEQ ID NO: 2976899 - RNA, 15 nt, Human
gacagaggggguggc

SEQ ID NO: 2976900 - RNA, 17 nt, Human
gacagaggcagccccau

SEQ ID NO: 2976901 - RNA, 16 nt, Human
gacagcugccugggau

SEQ ID NO: 2976902 - RNA, 17 nt, Human
gacagcugccugggauc

SEQ ID NO: 2976903 - RNA, 21 nt, Human
gacagccacggccaggccaga

SEQ ID NO: 2976904 - RNA, 20 nt, Human
gacagccacggccaggccag

SEQ ID NO: 2976905 - RNA, 18 nt, Human
gacagcugccugggaucc

SEQ ID NO: 2976906 - RNA, 21 nt, Human
gacagcugccugggaucccuc

SEQ ID NO: 2976907 - RNA, 19 nt, Human
gacagccacggccaggcca

SEQ ID NO: 2976908 - RNA, 18 nt, Human
gacagccacggccaggcc

SEQ ID NO: 2976909 - RNA, 17 nt, Human
gacagccacggccaggc

SEQ ID NO: 2976910 - RNA, 14 nt, Human
gacagccacggcca

SEQ ID NO: 2976911 - RNA, 22 nt, Human
gacagagugagacucugucuca

SEQ ID NO: 2976912 - RNA, 20 nt, Human
gacagagugagacucugucu

SEQ ID NO: 2976913 - RNA, 13 nt, Human
gacagagggggug

SEQ ID NO: 2976914 - RNA, 13 nt, Human
gacagccacggcc

SEQ ID NO: 2976915 - RNA, 20 nt, Human
gacauagaauuaacacauga

SEQ ID NO: 2976916 - RNA, 22 nt, Human
gacaguuaagagaaaugagcuu

SEQ ID NO: 2976917 - RNA, 14 nt, Human
gacaugaucuucuu

SEQ ID NO: 2976918 - RNA, 14 nt, Human
gacaugggaaaggg

SEQ ID NO: 2976919 - RNA, 15 nt, Human
gacaggaccagggau

SEQ ID NO: 2976920 - RNA, 23 nt, Human
gacaggaccagggauuuccauga

SEQ ID NO: 2976921 - RNA, 14 nt, Human
gacaggaccaggga

SEQ ID NO: 2976922 - RNA, 17 nt, Human
gacagggaggacgcucu

SEQ ID NO: 2976923 - RNA, 24 nt, Human
gacagggcacaccgggcacucaga

SEQ ID NO: 2976924 - RNA, 14 nt, Human
gacaguuaagagaa

SEQ ID NO: 2976925 - RNA, 18 nt, Human
gacagggaggacgcucuc

SEQ ID NO: 2976926 - RNA, 16 nt, Human
gacagggaggugaccc

SEQ ID NO: 2976927 - RNA, 23 nt, Human
gacagggcacaccgggcacucag

SEQ ID NO: 2976928 - RNA, 15 nt, Human
gacccacaagaaaug

SEQ ID NO: 2976929 - RNA, 16 nt, Human
gacccaaaaggcagaa

SEQ ID NO: 2976930 - RNA, 20 nt, Human
gacccaaaaggcagaagcaa

SEQ ID NO: 2976931 - RNA, 22 nt, Human
gacccugaggcccagagggccu

SEQ ID NO: 2976932 - RNA, 21 nt, Human
gaccccuccaugugggcuagu

SEQ ID NO: 2976933 - RNA, 18 nt, Human
gaccccuccaugugggcu

SEQ ID NO: 2976934 - RNA, 14 nt, Human
gaccccuccaugug

SEQ ID NO: 2976935 - RNA, 23 nt, Human
gacccugaggcccagagggccug

SEQ ID NO: 2976936 - RNA, 18 nt, Human
gaccgugaggccagagac

SEQ ID NO: 2976937 - RNA, 16 nt, Human
gaccgugaggccagag

SEQ ID NO: 2976938 - RNA, 17 nt, Human
gaccgugaggccagaga

SEQ ID NO: 2976939 - RNA, 15 nt, Human
gacccuugugguccc

SEQ ID NO: 2976940 - RNA, 21 nt, Human
gacccuuguggucccacccca

SEQ ID NO: 2976941 - RNA, 19 nt, Human
gacccuuguggucccaccc

SEQ ID NO: 2976942 - RNA, 20 nt, Human
gacccuuguggucccacccc

SEQ ID NO: 2976943 - RNA, 12 nt, Human
gacccugucuca

SEQ ID NO: 2976944 - RNA, 14 nt, Human
gaccacguuucuaa

SEQ ID NO: 2976945 - RNA, 21 nt, Human
gaccacugcagaagacaguau

SEQ ID NO: 2976946 - RNA, 11 nt, Human
gaccagagcug

SEQ ID NO: 2976947 - RNA, 24 nt, Human
gaccagacaccuugacagggcaca

SEQ ID NO: 2976948 - RNA, 18 nt, Human
gacaugggaaaggggaag

SEQ ID NO: 2976949 - RNA, 16 nt, Human
gacaugggacauuugc

SEQ ID NO: 2976950 - RNA, 13 nt, Human
gaccagagcugcc

SEQ ID NO: 2976951 - RNA, 14 nt, Human
gaccagagcugcca

SEQ ID NO: 2976952 - RNA, 15 nt, Human
gaccagagcugccac

SEQ ID NO: 2976953 - RNA, 17 nt, Human
gaccagagcugccaccu

SEQ ID NO: 2976954 - RNA, 18 nt, Human
gaccagagcugccaccug

SEQ ID NO: 2976955 - RNA, 19 nt, Human
gaccagagcugccaccugc

SEQ ID NO: 2976956 - RNA, 21 nt, Human
gaccauucuccaccugccagg

SEQ ID NO: 2976957 - RNA, 22 nt, Human
gaccauucuccaccugccaggg

SEQ ID NO: 2976958 - RNA, 21 nt, Human
gaccauuggggcucccagcca

SEQ ID NO: 2976959 - RNA, 20 nt, Human
gaccauuggggcucccagcc

SEQ ID NO: 2976960 - RNA, 19 nt, Human
gaccauuggggcucccagc

SEQ ID NO: 2976961 - RNA, 17 nt, Human
gaccauuggggcuccca

SEQ ID NO: 2976962 - RNA, 17 nt, Human
gaccauucuccaccugc

SEQ ID NO: 2976963 - RNA, 19 nt, Human
gaccauucuccaccugcca

SEQ ID NO: 2976964 - RNA, 20 nt, Human
gaccauucuccaccugccag

SEQ ID NO: 2976965 - RNA, 22 nt, Human
gaaugucaguuguuauuuauug

SEQ ID NO: 2976966 - RNA, 13 nt, Human
gaaugucagugug

SEQ ID NO: 2976967 - RNA, 13 nt, Human
gaauguaggcugg

SEQ ID NO: 2976968 - RNA, 22 nt, Human
gaauguaggcuggcuuucagag

SEQ ID NO: 2976969 - RNA, 15 nt, Human
gaaugucacuucugg

SEQ ID NO: 2976970 - RNA, 16 nt, Human
gaauuggagcucgugg

SEQ ID NO: 2976971 - RNA, 16 nt, Human
gaauugacauugaaau

SEQ ID NO: 2976972 - RNA, 21 nt, Human
gaauugacccacaagaaauga

SEQ ID NO: 2976973 - RNA, 16 nt, Human
gaauugacccacaaga

SEQ ID NO: 2976974 - RNA, 14 nt, Human
gaauugaagcagga

SEQ ID NO: 2976975 - RNA, 21 nt, Human
gaaugcacaaacagaggccgc

SEQ ID NO: 2976976 - RNA, 21 nt, Human
gaaugaaagggcccagagagg

SEQ ID NO: 2976977 - RNA, 20 nt, Human
gaaugcacaaacagaggccg

SEQ ID NO: 2976978 - RNA, 20 nt, Human
gaauccagacccggcugcgu

SEQ ID NO: 2976979 - RNA, 18 nt, Human
gaauccagacccggcugc

SEQ ID NO: 2976980 - RNA, 16 nt, Human
gacacaagccuucggc

SEQ ID NO: 2976981 - RNA, 19 nt, Human
gacacaggcccggcuccag

SEQ ID NO: 2976982 - RNA, 21 nt, Human
gacacaggcccggcuccaggc

SEQ ID NO: 2976983 - RNA, 20 nt, Human
gacacaggcccggcuccagg

SEQ ID NO: 2976984 - RNA, 14 nt, Human
gacacaugcaaggu

SEQ ID NO: 2976985 - RNA, 19 nt, Human
gacacaugcaaggucauuu

SEQ ID NO: 2976986 - RNA, 15 nt, Human
gacacauguccaaga

SEQ ID NO: 2976987 - RNA, 20 nt, Human
gacacauguccaagaagccc

SEQ ID NO: 2976988 - RNA, 23 nt, Human
gacacauguccaagaagcccagg

SEQ ID NO: 2976989 - RNA, 17 nt, Human
gacacaugccagggcca

SEQ ID NO: 2976990 - RNA, 16 nt, Human
gacaaggaaaaaauaa

SEQ ID NO: 2976991 - RNA, 19 nt, Human
gacaaggauugcuacuguc

SEQ ID NO: 2976992 - RNA, 21 nt, Human
gacaaggaugaucuaggaaga

SEQ ID NO: 2976993 - RNA, 18 nt, Human
gacaaggauugcuacugu

SEQ ID NO: 2976994 - RNA, 12 nt, Human
gacaaugugaaa

SEQ ID NO: 2976995 - RNA, 18 nt, Human
gacaaugugaaaagaaaa

SEQ ID NO: 2976996 - RNA, 22 nt, Human
gacaaugcaaaccaucauugaa

SEQ ID NO: 2976997 - RNA, 19 nt, Human
gacaaugugaaaagaaaaa

SEQ ID NO: 2976998 - RNA, 20 nt, Human
gacaaugugaaaagaaaaau

SEQ ID NO: 2976999 - RNA, 22 nt, Human
gaauuucuuuugccguuauuaa

SEQ ID NO: 2977000 - RNA, 20 nt, Human
gaauuugauaugugaacagu

SEQ ID NO: 2977001 - RNA, 20 nt, Human
gaauuucuaggacugaauua

SEQ ID NO: 2977002 - RNA, 19 nt, Human
gaauuucuaggacugaauu

SEQ ID NO: 2977003 - RNA, 15 nt, Human
gaauuguaaggaaug

SEQ ID NO: 2977004 - RNA, 22 nt, Human
gacaacacucauugaccugagg

SEQ ID NO: 2977005 - RNA, 23 nt, Human
gacaacacucauugaccugaggc

SEQ ID NO: 2977006 - RNA, 15 nt, Human
gacaagcucacagac

SEQ ID NO: 2977007 - RNA, 20 nt, Human
gagacagcucugcauacuca

SEQ ID NO: 2977008 - RNA, 20 nt, Human
gagaaugagagacacacuga

SEQ ID NO: 2977009 - RNA, 23 nt, Human
gagaaugcacaaacagaggccgc

SEQ ID NO: 2977010 - RNA, 18 nt, Human
gagaccaucccugaaggc

SEQ ID NO: 2977011 - RNA, 21 nt, Human
gagaccaucccugaaggcccc

SEQ ID NO: 2977012 - RNA, 14 nt, Human
gagaccaucccuga

SEQ ID NO: 2977013 - RNA, 12 nt, Human
gagaccaucccu

SEQ ID NO: 2977014 - RNA, 22 nt, Human
gagacaggguuuugccauguug

SEQ ID NO: 2977015 - RNA, 20 nt, Human
gagacucgcgacaaugcaaa

SEQ ID NO: 2977016 - RNA, 21 nt, Human
gagacucgcgacaaugcaaac

SEQ ID NO: 2977017 - RNA, 13 nt, Human
gagacucugucuc

SEQ ID NO: 2977018 - RNA, 20 nt, Human
gagacuccugcaggcagcca

SEQ ID NO: 2977019 - RNA, 21 nt, Human
gagacuccugcaggcagccag

SEQ ID NO: 2977020 - RNA, 19 nt, Human
gagacuccugcaggcagcc

SEQ ID NO: 2977021 - RNA, 18 nt, Human
gagacuccugcaggcagc

SEQ ID NO: 2977022 - RNA, 19 nt, Human
gagacuggcgugaacccag

SEQ ID NO: 2977023 - RNA, 22 nt, Human
gagacuggcgugaacccaggag

SEQ ID NO: 2977024 - RNA, 19 nt, Human
gagagacacacugaagaag

SEQ ID NO: 2977025 - RNA, 14 nt, Human
gagagggugggagu

SEQ ID NO: 2977026 - RNA, 16 nt, Human
gagagggugggagugg

SEQ ID NO: 2977027 - RNA, 13 nt, Human
gagaggggcacag

SEQ ID NO: 2977028 - RNA, 19 nt, Human
gagaggggaacagacugga

SEQ ID NO: 2977029 - RNA, 20 nt, Human
gagccagauuucacucuccu

SEQ ID NO: 2977030 - RNA, 19 nt, Human
gagccaauuuaaagaaaac

SEQ ID NO: 2977031 - RNA, 12 nt, Human
gagcagagacca

SEQ ID NO: 2977032 - RNA, 16 nt, Human
gagcagagaauucucu

SEQ ID NO: 2977033 - RNA, 23 nt, Human
gagccagauuucacucuccuugg

SEQ ID NO: 2977034 - RNA, 14 nt, Human
gagccagggucuca

SEQ ID NO: 2977035 - RNA, 19 nt, Human
gagccagggucucacuaug

SEQ ID NO: 2977036 - RNA, 18 nt, Human
gagcccugguggcagugg

SEQ ID NO: 2977037 - RNA, 21 nt, Human
gagcaccuuagacagucccug

SEQ ID NO: 2977038 - RNA, 22 nt, Human
gagcaccuuagacagucccugc

SEQ ID NO: 2977039 - RNA, 15 nt, Human
gagcacuaaggugug

SEQ ID NO: 2977040 - RNA, 19 nt, Human
gagcaccuuagacaguccc

SEQ ID NO: 2977041 - RNA, 21 nt, Human
gagcacuaaggugugcucuga

SEQ ID NO: 2977042 - RNA, 20 nt, Human
gagcaccuuagacagucccu

SEQ ID NO: 2977043 - RNA, 16 nt, Human
gagauagccaaggcca

SEQ ID NO: 2977044 - RNA, 23 nt, Human
gagaucaaccccuucgcuccugu

SEQ ID NO: 2977045 - RNA, 14 nt, Human
gagauagccaaggc

SEQ ID NO: 2977046 - RNA, 18 nt, Human
gagaucacgccacugcac

SEQ ID NO: 2977047 - RNA, 19 nt, Human
gagaucacgccacugcacu

SEQ ID NO: 2977048 - RNA, 17 nt, Human
gagcaaaguagaucaug

SEQ ID NO: 2977049 - RNA, 16 nt, Human
gacugcauuauauuua

SEQ ID NO: 2977050 - RNA, 14 nt, Human
gacugcauuauauu

SEQ ID NO: 2977051 - RNA, 23 nt, Human
gacugaguacguugugcauuugg

SEQ ID NO: 2977052 - RNA, 15 nt, Human
gacugcccggcaggg

SEQ ID NO: 2977053 - RNA, 13 nt, Human
gacugcccggcag

SEQ ID NO: 2977054 - RNA, 22 nt, Human
gacugaguacguugugcauuug

SEQ ID NO: 2977055 - RNA, 21 nt, Human
gacugaguacguugugcauuu

SEQ ID NO: 2977056 - RNA, 17 nt, Human
gacucgcgacaaugcaa

SEQ ID NO: 2977057 - RNA, 18 nt, Human
gacuggaagcacagcuuc

SEQ ID NO: 2977058 - RNA, 19 nt, Human
gacuggggccacuacauuu

SEQ ID NO: 2977059 - RNA, 16 nt, Human
gacuggaagcacagcu

SEQ ID NO: 2977060 - RNA, 15 nt, Human
gacuggaagcacagc

SEQ ID NO: 2977061 - RNA, 14 nt, Human
gacuggaagcacag

SEQ ID NO: 2977062 - RNA, 20 nt, Human
gacugcugggagguuaaaaa

SEQ ID NO: 2977063 - RNA, 21 nt, Human
gacucauuuuaaaaaauggaa

SEQ ID NO: 2977064 - RNA, 11 nt, Human
gacuccaaaga

SEQ ID NO: 2977065 - RNA, 12 nt, Human
gacuccaaagaa

SEQ ID NO: 2977066 - RNA, 15 nt, Human
gacuccaaagaaaug

SEQ ID NO: 2977067 - RNA, 16 nt, Human
gacuccaaagaaaugu

SEQ ID NO: 2977068 - RNA, 12 nt, Human
gacuccugcagg

SEQ ID NO: 2977069 - RNA, 13 nt, Human
gacuccugcaggc

SEQ ID NO: 2977070 - RNA, 13 nt, Human
gacucgcgacaau

SEQ ID NO: 2977071 - RNA, 15 nt, Human
gacucauucuucugu

SEQ ID NO: 2977072 - RNA, 14 nt, Human
gacucauucuucug

SEQ ID NO: 2977073 - RNA, 21 nt, Human
gacuacaggugugagucacca

SEQ ID NO: 2977074 - RNA, 18 nt, Human
gacuacaggugugaguca

SEQ ID NO: 2977075 - RNA, 13 nt, Human
gacuacaggugug

SEQ ID NO: 2977076 - RNA, 19 nt, Human
gacuucuaaguaaaaccac

SEQ ID NO: 2977077 - RNA, 23 nt, Human
gacuucuaaguaaaaccacagca

SEQ ID NO: 2977078 - RNA, 24 nt, Human
gacuucuaaguaaaaccacagcag

SEQ ID NO: 2977079 - RNA, 20 nt, Human
gacuucugucuucacaacag

SEQ ID NO: 2977080 - RNA, 23 nt, Human
gacuucugucuucacaacagauu

SEQ ID NO: 2977081 - RNA, 17 nt, Human
gacuucuaaguaaaacc

SEQ ID NO: 2977082 - RNA, 18 nt, Human
gacuucuaaguaaaacca

SEQ ID NO: 2977083 - RNA, 16 nt, Human
gacuucuaaguaaaac

SEQ ID NO: 2977084 - RNA, 19 nt, Human
gacuuaagcacacuugaca

SEQ ID NO: 2977085 - RNA, 19 nt, Human
gacuugcauaccugcuuuu

SEQ ID NO: 2977086 - RNA, 16 nt, Human
gagaaagguugaagca

SEQ ID NO: 2977087 - RNA, 14 nt, Human
gagaaaugagcuug

SEQ ID NO: 2977088 - RNA, 22 nt, Human
gagaaccuagggugauauuaac

SEQ ID NO: 2977089 - RNA, 21 nt, Human
gagaaccuagggugauauuaa

SEQ ID NO: 2977090 - RNA, 17 nt, Human
gagaaugagagacacac

SEQ ID NO: 2977091 - RNA, 16 nt, Human
gagaagagaaugcaca

SEQ ID NO: 2977092 - RNA, 16 nt, Human
gagaagcagaggaagg

SEQ ID NO: 2977093 - RNA, 14 nt, Human
gagaagagaaugca

SEQ ID NO: 2977094 - RNA, 23 nt, Human
gagaacuuccagauccuggaaau

SEQ ID NO: 2977095 - RNA, 22 nt, Human
gagaacuuccagauccuggaaa

SEQ ID NO: 2977096 - RNA, 18 nt, Human
cugugauggggcccugcc

SEQ ID NO: 2977097 - RNA, 17 nt, Human
cugugauggggcccugc

SEQ ID NO: 2977098 - RNA, 20 nt, Human
cugugaguacuacaguccuc

SEQ ID NO: 2977099 - RNA, 21 nt, Human
cugugaguacuacaguccucc

SEQ ID NO: 2977100 - RNA, 23 nt, Human
cugugaguacuacaguccuccca

SEQ ID NO: 2977101 - RNA, 18 nt, Human
cugucuccauguuugaug

SEQ ID NO: 2977102 - RNA, 21 nt, Human
cugugcaucuagccucaagcu

SEQ ID NO: 2977103 - RNA, 19 nt, Human
cugugauggggcccugccu

SEQ ID NO: 2977104 - RNA, 20 nt, Human
cugugauggggcccugccuc

SEQ ID NO: 2977105 - RNA, 18 nt, Human
cugugccaugugccaggu

SEQ ID NO: 2977106 - RNA, 16 nt, Human
cugugccaugugccag

SEQ ID NO: 2977107 - RNA, 14 nt, Human
cugugccauuuugu

SEQ ID NO: 2977108 - RNA, 16 nt, Human
cugugccucugggacu

SEQ ID NO: 2977109 - RNA, 14 nt, Human
cugugccucuggga

SEQ ID NO: 2977110 - RNA, 21 nt, Human
cugugcugcccugcccaccug

SEQ ID NO: 2977111 - RNA, 17 nt, Human
cugugccucugggacug

SEQ ID NO: 2977112 - RNA, 22 nt, Human
cugugcugcccugcccaccugg

SEQ ID NO: 2977113 - RNA, 14 nt, Human
cugugggcccccaa

SEQ ID NO: 2977114 - RNA, 23 nt, Human
cuguggcgagccauuugucccaa

SEQ ID NO: 2977115 - RNA, 22 nt, Human
cuguggcgagccauuuguccca

SEQ ID NO: 2977116 - RNA, 21 nt, Human
cuguggaugcugcugccccug

SEQ ID NO: 2977117 - RNA, 19 nt, Human
cuguggaugcugcugcccc

SEQ ID NO: 2977118 - RNA, 18 nt, Human
cuguggaugcugcugccc

SEQ ID NO: 2977119 - RNA, 16 nt, Human
cuguggaugcugcugc

SEQ ID NO: 2977120 - RNA, 23 nt, Human
cuguggaugcugcugccccugca

SEQ ID NO: 2977121 - RNA, 22 nt, Human
cuguggaugcugcugccccugc

SEQ ID NO: 2977122 - RNA, 14 nt, Human
cuguggaugcugcu

SEQ ID NO: 2977123 - RNA, 17 nt, Human
cuguggaugauaaaaca

SEQ ID NO: 2977124 - RNA, 20 nt, Human
cuguuaaaagaugaaaauau

SEQ ID NO: 2977125 - RNA, 21 nt, Human
cuguuaaaagaugaaaauauu

SEQ ID NO: 2977126 - RNA, 23 nt, Human
cuguuaaaagaugaaaauauuug

SEQ ID NO: 2977127 - RNA, 20 nt, Human
cugugugugcgccuacagga

SEQ ID NO: 2977128 - RNA, 18 nt, Human
cugugugugcgccuacag

SEQ ID NO: 2977129 - RNA, 22 nt, Human
cugugucuugcaauggcagccu

SEQ ID NO: 2977130 - RNA, 20 nt, Human
cugugucuugcaauggcagc

SEQ ID NO: 2977131 - RNA, 21 nt, Human
cugugucuugcaauggcagcc

SEQ ID NO: 2977132 - RNA, 17 nt, Human
cuguucaugaaagauuc

SEQ ID NO: 2977133 - RNA, 23 nt, Human
cuguucaugaaagauucaaugcc

SEQ ID NO: 2977134 - RNA, 18 nt, Human
cuguucaugaaagauuca

SEQ ID NO: 2977135 - RNA, 18 nt, Human
cuguucagcugguugagg

SEQ ID NO: 2977136 - RNA, 19 nt, Human
cuguucagcugguugaggu

SEQ ID NO: 2977137 - RNA, 21 nt, Human
cuguucagcugguugagguuu

SEQ ID NO: 2977138 - RNA, 14 nt, Human
cuguucucugcccu

SEQ ID NO: 2977139 - RNA, 15 nt, Human
cuguucucugcccuc

SEQ ID NO: 2977140 - RNA, 16 nt, Human
cuguucucugcccucc

SEQ ID NO: 2977141 - RNA, 17 nt, Human
cuguucucugcccucca

SEQ ID NO: 2977142 - RNA, 18 nt, Human
cuguucucugcccuccaa

SEQ ID NO: 2977143 - RNA, 19 nt, Human
cuguucucugcccuccaag

SEQ ID NO: 2977144 - RNA, 20 nt, Human
cuguucucugcccuccaaga

SEQ ID NO: 2977145 - RNA, 13 nt, Human
cuguucucugccc

SEQ ID NO: 2977146 - RNA, 22 nt, Human
cuguaauaaacucauuucuagc

SEQ ID NO: 2977147 - RNA, 23 nt, Human
cuguaaucacagcuacuugggag

SEQ ID NO: 2977148 - RNA, 16 nt, Human
cugguuccauggccuc

SEQ ID NO: 2977149 - RNA, 13 nt, Human
cuguacaaaguag

SEQ ID NO: 2977150 - RNA, 15 nt, Human
cuguacaaaguagaa

SEQ ID NO: 2977151 - RNA, 20 nt, Human
cuguaauccuagcacuuugg

SEQ ID NO: 2977152 - RNA, 14 nt, Human
cugguggcagcugc

SEQ ID NO: 2977153 - RNA, 13 nt, Human
cugguggcagcug

SEQ ID NO: 2977154 - RNA, 21 nt, Human
cugguggcagcucaccucucc

SEQ ID NO: 2977155 - RNA, 23 nt, Human
cugguggcagcucaccucucccu

SEQ ID NO: 2977156 - RNA, 19 nt, Human
cugggggcugggcagagga

SEQ ID NO: 2977157 - RNA, 22 nt, Human
cugggggggauuguaaaauggu

SEQ ID NO: 2977158 - RNA, 15 nt, Human
cugggggaagaagcu

SEQ ID NO: 2977159 - RNA, 24 nt, Human
cugggcuucaguggcagcugcuuu

SEQ ID NO: 2977160 - RNA, 13 nt, Human
cugggggaagaag

SEQ ID NO: 2977161 - RNA, 22 nt, Human
cuggguaacuagggaagauaau

SEQ ID NO: 2977162 - RNA, 20 nt, Human
cuggguaacuagggaagaua

SEQ ID NO: 2977163 - RNA, 14 nt, Human
cuggguucuaccca

SEQ ID NO: 2977164 - RNA, 15 nt, Human
cuggguucuacccag

SEQ ID NO: 2977165 - RNA, 16 nt, Human
cuggguucuacccagg

SEQ ID NO: 2977166 - RNA, 17 nt, Human
cuggguucuacccaggu

SEQ ID NO: 2977167 - RNA, 20 nt, Human
cugucuacacuaagagagaa

SEQ ID NO: 2977168 - RNA, 15 nt, Human
cuguccgagcuuuga

SEQ ID NO: 2977169 - RNA, 14 nt, Human
cuguccuacccacc

SEQ ID NO: 2977170 - RNA, 18 nt, Human
cugucucaaaaaaagaaa

SEQ ID NO: 2977171 - RNA, 16 nt, Human
cugucucaaaaaaaga

SEQ ID NO: 2977172 - RNA, 23 nt, Human
cugucucaaaaaaacacaaaagu

SEQ ID NO: 2977173 - RNA, 17 nt, Human
cuguccccgcacugggc

SEQ ID NO: 2977174 - RNA, 18 nt, Human
cuguccccgcacugggcu

SEQ ID NO: 2977175 - RNA, 19 nt, Human
cuguccccgcacugggcuu

SEQ ID NO: 2977176 - RNA, 22 nt, Human
cuguccccgcacugggcuuggg

SEQ ID NO: 2977177 - RNA, 14 nt, Human
cuguccgagcuuug

SEQ ID NO: 2977178 - RNA, 20 nt, Human
cugucccuuacgugaguccu

SEQ ID NO: 2977179 - RNA, 13 nt, Human
cuguacagagccc

SEQ ID NO: 2977180 - RNA, 22 nt, Human
cuguagucccagcuacucggga

SEQ ID NO: 2977181 - RNA, 19 nt, Human
cuguauuuuaaaagaauga

SEQ ID NO: 2977182 - RNA, 20 nt, Human
cuguauuuuaaaagaaugau

SEQ ID NO: 2977183 - RNA, 22 nt, Human
cuguauuuuaaaagaaugauua

SEQ ID NO: 2977184 - RNA, 23 nt, Human
cuguaucccaugagccucagcau

SEQ ID NO: 2977185 - RNA, 22 nt, Human
cuggcacugguuuguucccugu

SEQ ID NO: 2977186 - RNA, 18 nt, Human
cuggcacugcuuccagug

SEQ ID NO: 2977187 - RNA, 22 nt, Human
cuggcacuggcaaacagggccu

SEQ ID NO: 2977188 - RNA, 19 nt, Human
cuggcacugcuuccaguga

SEQ ID NO: 2977189 - RNA, 20 nt, Human
cuggcacugcuuccagugag

SEQ ID NO: 2977190 - RNA, 23 nt, Human
cuggcacugcuuccagugaggcu

SEQ ID NO: 2977191 - RNA, 21 nt, Human
cuggcacaguuuucugagaaa

SEQ ID NO: 2977192 - RNA, 22 nt, Human
cuggcacaguuuucugagaaag

SEQ ID NO: 2977193 - RNA, 20 nt, Human
cuggcacaguuuucugagaa

SEQ ID NO: 2977194 - RNA, 20 nt, Human
cuggagugcagugagccgag

SEQ ID NO: 2977195 - RNA, 19 nt, Human
cuggcacccggccccugcu

SEQ ID NO: 2977196 - RNA, 21 nt, Human
cuggcacccggccccugcugg

SEQ ID NO: 2977197 - RNA, 20 nt, Human
cuggcacccggccccugcug

SEQ ID NO: 2977198 - RNA, 15 nt, Human
cuggcccacugcauc

SEQ ID NO: 2977199 - RNA, 14 nt, Human
cuggccagaugcac

SEQ ID NO: 2977200 - RNA, 22 nt, Human
cuggccuucggccuccauccug

SEQ ID NO: 2977201 - RNA, 24 nt, Human
cuggccuggccccucagggucccu

SEQ ID NO: 2977202 - RNA, 19 nt, Human
cuggccuggccccucaggg

SEQ ID NO: 2977203 - RNA, 18 nt, Human
cuggccucugcacucccc

SEQ ID NO: 2977204 - RNA, 20 nt, Human
cuggccucugcacuccccug

SEQ ID NO: 2977205 - RNA, 21 nt, Human
cuggccucugcacuccccugc

SEQ ID NO: 2977206 - RNA, 16 nt, Human
cuggccucugcacucc

SEQ ID NO: 2977207 - RNA, 23 nt, Human
cuggccuucggccuccauccuga

SEQ ID NO: 2977208 - RNA, 15 nt, Human
cuggcgugcaguggu

SEQ ID NO: 2977209 - RNA, 14 nt, Human
cuggcgugcagugg

SEQ ID NO: 2977210 - RNA, 21 nt, Human
cuggcucuuccaggcugggag

SEQ ID NO: 2977211 - RNA, 22 nt, Human
cuggcucuuccaggcugggaga

SEQ ID NO: 2977212 - RNA, 22 nt, Human
cuggcgugaacccaggaggcgg

SEQ ID NO: 2977213 - RNA, 16 nt, Human
cuggcuaacacgguga

SEQ ID NO: 2977214 - RNA, 24 nt, Human
cuggcucuuccaggcugggagagc

SEQ ID NO: 2977215 - RNA, 16 nt, Human
cuggagcucugcccau

SEQ ID NO: 2977216 - RNA, 13 nt, Human
cuggagcucugcc

SEQ ID NO: 2977217 - RNA, 12 nt, Human
cuggagcucugc

SEQ ID NO: 2977218 - RNA, 17 nt, Human
cuggagugcagugagcc

SEQ ID NO: 2977219 - RNA, 16 nt, Human
cuggagugcagugagc

SEQ ID NO: 2977220 - RNA, 15 nt, Human
cuggagugcagugag

SEQ ID NO: 2977221 - RNA, 14 nt, Human
cuggagugcaguga

SEQ ID NO: 2977222 - RNA, 17 nt, Human
cuggagguacgaaaaga

SEQ ID NO: 2977223 - RNA, 22 nt, Human
cuggagguacgaaaagagggga

SEQ ID NO: 2977224 - RNA, 17 nt, Human
cuggacaggcauguucu

SEQ ID NO: 2977225 - RNA, 14 nt, Human
cuggacaggcaugu

SEQ ID NO: 2977226 - RNA, 23 nt, Human
cuggacaggcauguucucugagg

SEQ ID NO: 2977227 - RNA, 20 nt, Human
cuggaccuugaacuggguac

SEQ ID NO: 2977228 - RNA, 17 nt, Human
cuggaccuugaacuggg

SEQ ID NO: 2977229 - RNA, 21 nt, Human
cuggaccuugaacuggguacu

SEQ ID NO: 2977230 - RNA, 15 nt, Human
cuggacccuguggau

SEQ ID NO: 2977231 - RNA, 16 nt, Human
cuggaccuugaacugg

SEQ ID NO: 2977232 - RNA, 21 nt, Human
cugcccucuccugggcagcug

SEQ ID NO: 2977233 - RNA, 20 nt, Human
cugcccucuccugggcagcu

SEQ ID NO: 2977234 - RNA, 19 nt, Human
cugcccucuccugggcagc

SEQ ID NO: 2977235 - RNA, 18 nt, Human
cugcccucuccugggcag

SEQ ID NO: 2977236 - RNA, 16 nt, Human
cugcccucuccugggc

SEQ ID NO: 2977237 - RNA, 15 nt, Human
cugcccucuccuggg

SEQ ID NO: 2977238 - RNA, 14 nt, Human
cucccuucccaccu

SEQ ID NO: 2977239 - RNA, 15 nt, Human
cucccuucccaccuc

SEQ ID NO: 2977240 - RNA, 16 nt, Human
cucccuucccaccucu

SEQ ID NO: 2977241 - RNA, 17 nt, Human
cucccuucccaccucuc

SEQ ID NO: 2977242 - RNA, 12 nt, Human
cugcccuccaag

SEQ ID NO: 2977243 - RNA, 16 nt, Human
cugcccucaagagcaa

SEQ ID NO: 2977244 - RNA, 17 nt, Human
cugccgcagcccugcag

SEQ ID NO: 2977245 - RNA, 18 nt, Human
cugccgcagcccugcaga

SEQ ID NO: 2977246 - RNA, 14 nt, Human
cugccgcagcccug

SEQ ID NO: 2977247 - RNA, 15 nt, Human
cugccgcagcccugc

SEQ ID NO: 2977248 - RNA, 13 nt, Human
cugccuccccucc

SEQ ID NO: 2977249 - RNA, 23 nt, Human
cugccucugacacacagcucugu

SEQ ID NO: 2977250 - RNA, 22 nt, Human
cugccucugacacacagcucug

SEQ ID NO: 2977251 - RNA, 12 nt, Human
cugccucccauc

SEQ ID NO: 2977252 - RNA, 14 nt, Human
cugccucccaucac

SEQ ID NO: 2977253 - RNA, 16 nt, Human
cugccucccaucaccc

SEQ ID NO: 2977254 - RNA, 19 nt, Human
cugccucccaucacccgcu

SEQ ID NO: 2977255 - RNA, 11 nt, Human
cugccucccau

SEQ ID NO: 2977256 - RNA, 15 nt, Human
cugccucuucucuac

SEQ ID NO: 2977257 - RNA, 14 nt, Human
cugccucuucucua

SEQ ID NO: 2977258 - RNA, 17 nt, Human
cugccugcccaggcccc

SEQ ID NO: 2977259 - RNA, 16 nt, Human
cugccugcccaggccc

SEQ ID NO: 2977260 - RNA, 15 nt, Human
cugccugcccaggcc

SEQ ID NO: 2977261 - RNA, 15 nt, Human
cugccugaagucaca

SEQ ID NO: 2977262 - RNA, 21 nt, Human
cugccugggaucccucauccu

SEQ ID NO: 2977263 - RNA, 20 nt, Human
cugccugcccaggccccugc

SEQ ID NO: 2977264 - RNA, 11 nt, Human
cugcugaaggc

SEQ ID NO: 2977265 - RNA, 18 nt, Human
cugcugaaacaacaaaua

SEQ ID NO: 2977266 - RNA, 23 nt, Human
cugcugccccugcacagcaggcu

SEQ ID NO: 2977267 - RNA, 22 nt, Human
cugcugccccugcacagcaggc

SEQ ID NO: 2977268 - RNA, 14 nt, Human
cugcugccccugca

SEQ ID NO: 2977269 - RNA, 16 nt, Human
cugcugccccugcaca

SEQ ID NO: 2977270 - RNA, 19 nt, Human
cugcucuccgaccagacac

SEQ ID NO: 2977271 - RNA, 10 nt, Human
cugcucccac

SEQ ID NO: 2977272 - RNA, 15 nt, Human
cugcucccaccuggc

SEQ ID NO: 2977273 - RNA, 19 nt, Human
cugcuccagcuguucagcu

SEQ ID NO: 2977274 - RNA, 20 nt, Human
cugcuccagcuguucagcug

SEQ ID NO: 2977275 - RNA, 19 nt, Human
cugcgaccacaagaaggau

SEQ ID NO: 2977276 - RNA, 23 nt, Human
cugcugguucaggguuggccccu

SEQ ID NO: 2977277 - RNA, 15 nt, Human
cugcugguucagggu

SEQ ID NO: 2977278 - RNA, 13 nt, Human
cugcugguucagg

SEQ ID NO: 2977279 - RNA, 19 nt, Human
cugcuuccagugaggcucu

SEQ ID NO: 2977280 - RNA, 20 nt, Human
cugcuuccagugaggcucug

SEQ ID NO: 2977281 - RNA, 21 nt, Human
cugcuuccagugaggcucugc

SEQ ID NO: 2977282 - RNA, 23 nt, Human
cugcuuccagugaggcucugccc

SEQ ID NO: 2977283 - RNA, 16 nt, Human
cugcuuccagugaggc

SEQ ID NO: 2977284 - RNA, 18 nt, Human
cugcuuccagugaggcuc

SEQ ID NO: 2977285 - RNA, 15 nt, Human
cugcuuccagugagg

SEQ ID NO: 2977286 - RNA, 14 nt, Human
cugcugcuggcugg

SEQ ID NO: 2977287 - RNA, 15 nt, Human
cugcugcuggcuggu

SEQ ID NO: 2977288 - RNA, 18 nt, Human
cugcugcuccuaggaccc

SEQ ID NO: 2977289 - RNA, 15 nt, Human
cugcugcuccuagga

SEQ ID NO: 2977290 - RNA, 16 nt, Human
cuuagugauguaauua

SEQ ID NO: 2977291 - RNA, 15 nt, Human
cuuagugauguaauu

SEQ ID NO: 2977292 - RNA, 18 nt, Human
cuuagucacugagacagc

SEQ ID NO: 2977293 - RNA, 19 nt, Human
cuuagucacugagacagcc

SEQ ID NO: 2977294 - RNA, 14 nt, Human
cuuagucacugaga

SEQ ID NO: 2977295 - RNA, 20 nt, Human
cuuagaugcaguucugaaga

SEQ ID NO: 2977296 - RNA, 16 nt, Human
cuguucuggcagaguu

SEQ ID NO: 2977297 - RNA, 13 nt, Human
cuuagauguauau

SEQ ID NO: 2977298 - RNA, 22 nt, Human
cuuagaugcaguucugaagaag

SEQ ID NO: 2977299 - RNA, 16 nt, Human
cuuagucacugagaca

SEQ ID NO: 2977300 - RNA, 15 nt, Human
cuuauacauuugaua

SEQ ID NO: 2977301 - RNA, 19 nt, Human
cuuauaucuauauuuuaca

SEQ ID NO: 2977302 - RNA, 15 nt, Human
cuuauuuccucauuu

SEQ ID NO: 2977303 - RNA, 15 nt, Human
cuuauuucauuucuu

SEQ ID NO: 2977304 - RNA, 14 nt, Human
cuuauuucauuucu

SEQ ID NO: 2977305 - RNA, 18 nt, Human
cuuauuuaaugaaagacu

SEQ ID NO: 2977306 - RNA, 17 nt, Human
cuuauuuaaugaaagac

SEQ ID NO: 2977307 - RNA, 13 nt, Human
cuucaaggauccu

SEQ ID NO: 2977308 - RNA, 15 nt, Human
cuucaaggauccuga

SEQ ID NO: 2977309 - RNA, 16 nt, Human
cuucaaggauccugag

SEQ ID NO: 2977310 - RNA, 10 nt, Human
cuucaaggau

SEQ ID NO: 2977311 - RNA, 23 nt, Human
cuucacagaugggugcuuggagg

SEQ ID NO: 2977312 - RNA, 16 nt, Human
cuucaguaagccguga

SEQ ID NO: 2977313 - RNA, 23 nt, Human
cuucaguaagccgugauuuucau

SEQ ID NO: 2977314 - RNA, 16 nt, Human
cuucaguggcagcugc

SEQ ID NO: 2977315 - RNA, 15 nt, Human
cuucaguggcagcug

SEQ ID NO: 2977316 - RNA, 14 nt, Human
cuucaguggcagcu

SEQ ID NO: 2977317 - RNA, 13 nt, Human
cuucaguggcagc

SEQ ID NO: 2977318 - RNA, 18 nt, Human
cuucagugccuuauggaa

SEQ ID NO: 2977319 - RNA, 22 nt, Human
cuucagugccuuauggaacacu

SEQ ID NO: 2977320 - RNA, 15 nt, Human
cuucaguaagccgug

SEQ ID NO: 2977321 - RNA, 20 nt, Human
cuucauucaacccaccugcg

SEQ ID NO: 2977322 - RNA, 17 nt, Human
cuucaguggcagcugcu

SEQ ID NO: 2977323 - RNA, 19 nt, Human
cuuccacaagagcccaggc

SEQ ID NO: 2977324 - RNA, 21 nt, Human
cuuccacaagagcccaggccu

SEQ ID NO: 2977325 - RNA, 17 nt, Human
cuuccacaagagcccag

SEQ ID NO: 2977326 - RNA, 16 nt, Human
cuuccacaagagccca

SEQ ID NO: 2977327 - RNA, 12 nt, Human
cuuccaggcugg

SEQ ID NO: 2977328 - RNA, 14 nt, Human
cuuccaggcuggga

SEQ ID NO: 2977329 - RNA, 15 nt, Human
cuuccaggcugggag

SEQ ID NO: 2977330 - RNA, 16 nt, Human
cuuccaggcugggaga

SEQ ID NO: 2977331 - RNA, 19 nt, Human
cuuccaggcugggagagcc

SEQ ID NO: 2977332 - RNA, 14 nt, Human
cuuccagggguggg

SEQ ID NO: 2977333 - RNA, 15 nt, Human
cuuccagggguggga

SEQ ID NO: 2977334 - RNA, 17 nt, Human
cuuccaggggugggaca

SEQ ID NO: 2977335 - RNA, 21 nt, Human
cuuccaggggugggacacccu

SEQ ID NO: 2977336 - RNA, 17 nt, Human
cuuccccuggcacuggc

SEQ ID NO: 2977337 - RNA, 17 nt, Human
cuucccuacaguugaaa

SEQ ID NO: 2977338 - RNA, 21 nt, Human
cuucugucuucacaacagauu

SEQ ID NO: 2977339 - RNA, 22 nt, Human
cuucugucuucacaacagauua

SEQ ID NO: 2977340 - RNA, 18 nt, Human
cuucugucuucacaacag

SEQ ID NO: 2977341 - RNA, 21 nt, Human
cuucuguccuacucuguguca

SEQ ID NO: 2977342 - RNA, 19 nt, Human
cuucuguccuacucugugu

SEQ ID NO: 2977343 - RNA, 18 nt, Human
cuucuguccuacucugug

SEQ ID NO: 2977344 - RNA, 17 nt, Human
cuucuguccuacucugu

SEQ ID NO: 2977345 - RNA, 16 nt, Human
cuucuguccuacucug

SEQ ID NO: 2977346 - RNA, 20 nt, Human
cuucuguacgucugacaggc

SEQ ID NO: 2977347 - RNA, 18 nt, Human
cuucuguacgucugacag

SEQ ID NO: 2977348 - RNA, 15 nt, Human
cuucuguacgucuga

SEQ ID NO: 2977349 - RNA, 14 nt, Human
cuucuguacgucug

SEQ ID NO: 2977350 - RNA, 21 nt, Human
cuucuguacgucugacaggca

SEQ ID NO: 2977351 - RNA, 13 nt, Human
cuucugcuucagc

SEQ ID NO: 2977352 - RNA, 20 nt, Human
cuucugccauuucugagauc

SEQ ID NO: 2977353 - RNA, 13 nt, Human
cuucucugaagga

SEQ ID NO: 2977354 - RNA, 13 nt, Human
cuucucuccagcc

SEQ ID NO: 2977355 - RNA, 15 nt, Human
cuucucuccagcccc

SEQ ID NO: 2977356 - RNA, 17 nt, Human
cuucucuccagccccug

SEQ ID NO: 2977357 - RNA, 19 nt, Human
cuucucuccagccccugga

SEQ ID NO: 2977358 - RNA, 12 nt, Human
cuucucuccagc

SEQ ID NO: 2977359 - RNA, 11 nt, Human
cuucuccacuu

SEQ ID NO: 2977360 - RNA, 20 nt, Human
cuucuccacuuucuagccag

SEQ ID NO: 2977361 - RNA, 13 nt, Human
cuucuccaggcug

SEQ ID NO: 2977362 - RNA, 12 nt, Human
cuucuccaggcu

SEQ ID NO: 2977363 - RNA, 14 nt, Human
cuucuguggguuuc

SEQ ID NO: 2977364 - RNA, 21 nt, Human
cuucuguggguuucuaaagcu

SEQ ID NO: 2977365 - RNA, 13 nt, Human
cuucuguggguuu

SEQ ID NO: 2977366 - RNA, 14 nt, Human
cuugaaaacacugu

SEQ ID NO: 2977367 - RNA, 23 nt, Human
cuugaaaacacuguucucugccc

SEQ ID NO: 2977368 - RNA, 20 nt, Human
cuugaggguugggcuggugu

SEQ ID NO: 2977369 - RNA, 19 nt, Human
cuugaggguugggcuggug

SEQ ID NO: 2977370 - RNA, 21 nt, Human
cuugaguugauucagcucugc

SEQ ID NO: 2977371 - RNA, 21 nt, Human
cuugaggguugggcugguguc

SEQ ID NO: 2977372 - RNA, 13 nt, Human
cuugagcucagga

SEQ ID NO: 2977373 - RNA, 18 nt, Human
cuugagccuugaacuuug

SEQ ID NO: 2977374 - RNA, 17 nt, Human
cuugagccuugaacuuu

SEQ ID NO: 2977375 - RNA, 15 nt, Human
cuugagccuugaacu

SEQ ID NO: 2977376 - RNA, 16 nt, Human
cuugagccugggaggu

SEQ ID NO: 2977377 - RNA, 17 nt, Human
cuugaccgugaggccag

SEQ ID NO: 2977378 - RNA, 22 nt, Human
cuugaccauucuccaccugcca

SEQ ID NO: 2977379 - RNA, 23 nt, Human
cuugaccauucuccaccugccag

SEQ ID NO: 2977380 - RNA, 18 nt, Human
cuugaccgugaggccaga

SEQ ID NO: 2977381 - RNA, 20 nt, Human
cuugaccgugaggccagaga

SEQ ID NO: 2977382 - RNA, 21 nt, Human
cuugaccgugaggccagagac

SEQ ID NO: 2977383 - RNA, 13 nt, Human
cuugaccucaggu

SEQ ID NO: 2977384 - RNA, 13 nt, Human
cuugaacuccugg

SEQ ID NO: 2977385 - RNA, 21 nt, Human
cuugaacuuugaccucugcag

SEQ ID NO: 2977386 - RNA, 17 nt, Human
cuugaacuuugaccucu

SEQ ID NO: 2977387 - RNA, 14 nt, Human
cuuugcaggaaauc

SEQ ID NO: 2977388 - RNA, 20 nt, Human
cuuugcagacaggcaagcac

SEQ ID NO: 2977389 - RNA, 13 nt, Human
cuuugaccucugc

SEQ ID NO: 2977390 - RNA, 16 nt, Human
cuuugcagacaggcaa

SEQ ID NO: 2977391 - RNA, 24 nt, Human
cuuugaccucugcagcaauaaagc

SEQ ID NO: 2977392 - RNA, 20 nt, Human
cuuugaccucugcagcaaua

SEQ ID NO: 2977393 - RNA, 18 nt, Human
cuuugaccucugcagcaa

SEQ ID NO: 2977394 - RNA, 17 nt, Human
cuuugaccucugcagca

SEQ ID NO: 2977395 - RNA, 15 nt, Human
cuuugaccucugcag

SEQ ID NO: 2977396 - RNA, 14 nt, Human
cuuugaccucugca

SEQ ID NO: 2977397 - RNA, 15 nt, Human
cuuugugaggaagcc

SEQ ID NO: 2977398 - RNA, 15 nt, Human
cuuuguccccaccgc

SEQ ID NO: 2977399 - RNA, 19 nt, Human
cuuuggcuauuagagauca

SEQ ID NO: 2977400 - RNA, 15 nt, Human
cuuuggcccagggug

SEQ ID NO: 2977401 - RNA, 14 nt, Human
cuuuggcccagggu

SEQ ID NO: 2977402 - RNA, 16 nt, Human
cuuuggcccagggugg

SEQ ID NO: 2977403 - RNA, 13 nt, Human
cuuuggcccaggg

SEQ ID NO: 2977404 - RNA, 14 nt, Human
cuuuguccccaccg

SEQ ID NO: 2977405 - RNA, 13 nt, Human
cuuuccugaggcu

SEQ ID NO: 2977406 - RNA, 15 nt, Human
cuuuccugaggcugg

SEQ ID NO: 2977407 - RNA, 20 nt, Human
cuuucuggcuaugcauuuga

SEQ ID NO: 2977408 - RNA, 19 nt, Human
cuuucuggcuaugcauuug

SEQ ID NO: 2977409 - RNA, 18 nt, Human
cuuucuggcuaugcauuu

SEQ ID NO: 2977410 - RNA, 17 nt, Human
cuuucuggcuaugcauu

SEQ ID NO: 2977411 - RNA, 16 nt, Human
cuuucccucccuuccu

SEQ ID NO: 2977412 - RNA, 14 nt, Human
cuuucccucccuuc

SEQ ID NO: 2977413 - RNA, 13 nt, Human
cuuucccucccuu

SEQ ID NO: 2977414 - RNA, 11 nt, Human
cuuucccuccc

SEQ ID NO: 2977415 - RNA, 12 nt, Human
cuuuccugaggc

SEQ ID NO: 2977416 - RNA, 16 nt, Human
cuuuccucuuuggucu

SEQ ID NO: 2977417 - RNA, 15 nt, Human
cuuuccaucuacccu

SEQ ID NO: 2977418 - RNA, 15 nt, Human
cuuuccaggaaggcu

SEQ ID NO: 2977419 - RNA, 15 nt, Human
cuuuaugcacaaaau

SEQ ID NO: 2977420 - RNA, 19 nt, Human
cuuuauaauucuacuuuga

SEQ ID NO: 2977421 - RNA, 13 nt, Human
cuuuauaauucua

SEQ ID NO: 2977422 - RNA, 15 nt, Human
cuuuagcgcccaguu

SEQ ID NO: 2977423 - RNA, 14 nt, Human
cuuuagcgcccagu

SEQ ID NO: 2977424 - RNA, 22 nt, Human
cuuuaccuuuuuuauacauaaa

SEQ ID NO: 2977425 - RNA, 13 nt, Human
cuuuacuauggcc

SEQ ID NO: 2977426 - RNA, 22 nt, Human
cuuuaaaagcauuuuuuaaccu

SEQ ID NO: 2977427 - RNA, 15 nt, Human
cuuuaaaagcauuuu

SEQ ID NO: 2977428 - RNA, 23 nt, Human
cuuggggggcugaggugggagga

SEQ ID NO: 2977429 - RNA, 19 nt, Human
cuugaguuuaaauuguaau

SEQ ID NO: 2977430 - RNA, 22 nt, Human
cuuggggggcugaggugggagg

SEQ ID NO: 2977431 - RNA, 16 nt, Human
cuuguaaauagcucag

SEQ ID NO: 2977432 - RNA, 21 nt, Human
cuuguacauaaugcgugcaua

SEQ ID NO: 2977433 - RNA, 19 nt, Human
cuuguacauaaugcgugca

SEQ ID NO: 2977434 - RNA, 22 nt, Human
cuuguacauaaugcgugcauac

SEQ ID NO: 2977435 - RNA, 12 nt, Human
cuuguacauaau

SEQ ID NO: 2977436 - RNA, 15 nt, Human
cuuguacauaaugcg

SEQ ID NO: 2977437 - RNA, 18 nt, Human
cuuguaaauagcucaggu

SEQ ID NO: 2977438 - RNA, 17 nt, Human
cuuguaaauagcucagg

SEQ ID NO: 2977439 - RNA, 23 nt, Human
cuugucaauaaaauccauacauu

SEQ ID NO: 2977440 - RNA, 23 nt, Human
cuugugguuauaacuuaaugaaa

SEQ ID NO: 2977441 - RNA, 17 nt, Human
gaaaaggccuucuuccc

SEQ ID NO: 2977442 - RNA, 15 nt, Human
gaaaaguugaauuuu

SEQ ID NO: 2977443 - RNA, 14 nt, Human
gaaaaguugaauuu

SEQ ID NO: 2977444 - RNA, 20 nt, Human
gaaaacguggcugcuucaag

SEQ ID NO: 2977445 - RNA, 22 nt, Human
gaaaacguggcugcuucaagga

SEQ ID NO: 2977446 - RNA, 19 nt, Human
gaaaacguggcugcuucaa

SEQ ID NO: 2977447 - RNA, 19 nt, Human
gaaaagcugcugacagugu

SEQ ID NO: 2977448 - RNA, 22 nt, Human
gaaaacacuguucucugcccuc

SEQ ID NO: 2977449 - RNA, 24 nt, Human
gaaaacacuguucucugcccucca

SEQ ID NO: 2977450 - RNA, 20 nt, Human
gaaaaucagccugcuccagc

SEQ ID NO: 2977451 - RNA, 22 nt, Human
gaaaaucagccugcuccagcug

SEQ ID NO: 2977452 - RNA, 22 nt, Human
gaaaaucuacacuccagugaga

SEQ ID NO: 2977453 - RNA, 18 nt, Human
gaaaaucuuauaauuuaa

SEQ ID NO: 2977454 - RNA, 18 nt, Human
gaaaauauuuguaucaca

SEQ ID NO: 2977455 - RNA, 14 nt, Human
gaaaaguuuauaaa

SEQ ID NO: 2977456 - RNA, 13 nt, Human
gaaaaguuuauaa

SEQ ID NO: 2977457 - RNA, 21 nt, Human
cuuuuuggguuuauuuggaaa

SEQ ID NO: 2977458 - RNA, 20 nt, Human
cuuuuuuggcugcugaaggc

SEQ ID NO: 2977459 - RNA, 22 nt, Human
cuuuuuuggcugcugaaggcuc

SEQ ID NO: 2977460 - RNA, 17 nt, Human
cuuuuuuggcugcugaa

SEQ ID NO: 2977461 - RNA, 19 nt, Human
gaaaacacauuuuucuuag

SEQ ID NO: 2977462 - RNA, 18 nt, Human
gaaaacacauuuuucuua

SEQ ID NO: 2977463 - RNA, 14 nt, Human
gaaaacacauuuuu

SEQ ID NO: 2977464 - RNA, 12 nt, Human
gaaaaaggagga

SEQ ID NO: 2977465 - RNA, 15 nt, Human
gaaaaaggaggaaga

SEQ ID NO: 2977466 - RNA, 16 nt, Human
cuuuuuuggcugcuga

SEQ ID NO: 2977467 - RNA, 18 nt, Human
cuuuguuaguuucuccaa

SEQ ID NO: 2977468 - RNA, 12 nt, Human
cuuuuguucuug

SEQ ID NO: 2977469 - RNA, 11 nt, Human
cuuuuguucuu

SEQ ID NO: 2977470 - RNA, 16 nt, Human
gaaacacaacuauauu

SEQ ID NO: 2977471 - RNA, 11 nt, Human
gaaacauuugg

SEQ ID NO: 2977472 - RNA, 21 nt, Human
gaaacaagucagucauucaga

SEQ ID NO: 2977473 - RNA, 15 nt, Human
gaaacccagcucugg

SEQ ID NO: 2977474 - RNA, 16 nt, Human
gaaacccagcucuggu

SEQ ID NO: 2977475 - RNA, 18 nt, Human
gaaacccagcucuggucc

SEQ ID NO: 2977476 - RNA, 19 nt, Human
gaaacccagcucuggucca

SEQ ID NO: 2977477 - RNA, 13 nt, Human
gaaacccagcucu

SEQ ID NO: 2977478 - RNA, 14 nt, Human
gaaacccagcucug

SEQ ID NO: 2977479 - RNA, 23 nt, Human
gaaacucguuaauuuguaguguu

SEQ ID NO: 2977480 - RNA, 14 nt, Human
gaaacccugucucu

SEQ ID NO: 2977481 - RNA, 23 nt, Human
gaaacccagcucugguccauaga

SEQ ID NO: 2977482 - RNA, 22 nt, Human
gaaacccgucucuacuaaaaau

SEQ ID NO: 2977483 - RNA, 19 nt, Human
gaaagacuuuuccaacccu

SEQ ID NO: 2977484 - RNA, 17 nt, Human
gaaagagaacuuccaga

SEQ ID NO: 2977485 - RNA, 17 nt, Human
gaaagacuguacaaagu

SEQ ID NO: 2977486 - RNA, 22 nt, Human
gaaagacuucucuacccaucuu

SEQ ID NO: 2977487 - RNA, 20 nt, Human
gaaagaggcagcuugaaacu

SEQ ID NO: 2977488 - RNA, 21 nt, Human
gaaagaggaaugaaguacuca

SEQ ID NO: 2977489 - RNA, 15 nt, Human
gaaagaguaggaaga

SEQ ID NO: 2977490 - RNA, 16 nt, Human
gaaagaguaggaagac

SEQ ID NO: 2977491 - RNA, 17 nt, Human
gaaagcagaacagugau

SEQ ID NO: 2977492 - RNA, 14 nt, Human
gaaagcagaacagu

SEQ ID NO: 2977493 - RNA, 22 nt, Human
gaaagcagaacagugauuacca

SEQ ID NO: 2977494 - RNA, 14 nt, Human
gaaagcagggacuu

SEQ ID NO: 2977495 - RNA, 21 nt, Human
gaaagcccugagcuuucugcu

SEQ ID NO: 2977496 - RNA, 22 nt, Human
gaaagcccugagcuuucugcua

SEQ ID NO: 2977497 - RNA, 17 nt, Human
gaaagcccugagcuuuc

SEQ ID NO: 2977498 - RNA, 13 nt, Human
cuaccaauauuua

SEQ ID NO: 2977499 - RNA, 15 nt, Human
cuaccaauauuuaau

SEQ ID NO: 2977500 - RNA, 21 nt, Human
cuaccaauauuuaaucuuuua

SEQ ID NO: 2977501 - RNA, 18 nt, Human
cuaccauccccuguagag

SEQ ID NO: 2977502 - RNA, 17 nt, Human
cuacauuagguugugaa

SEQ ID NO: 2977503 - RNA, 18 nt, Human
cuacauuagguugugaau

SEQ ID NO: 2977504 - RNA, 22 nt, Human
cuacauuauaaaugucucuuua

SEQ ID NO: 2977505 - RNA, 17 nt, Human
cuacauugacagauuga

SEQ ID NO: 2977506 - RNA, 14 nt, Human
cuacauucuguuaa

SEQ ID NO: 2977507 - RNA, 13 nt, Human
cuacauucuguua

SEQ ID NO: 2977508 - RNA, 17 nt, Human
cuacccagcgagcccug

SEQ ID NO: 2977509 - RNA, 15 nt, Human
cuacccagcgagccc

SEQ ID NO: 2977510 - RNA, 12 nt, Human
cuacccaggugc

SEQ ID NO: 2977511 - RNA, 13 nt, Human
cuacccaggugcu

SEQ ID NO: 2977512 - RNA, 18 nt, Human
cuacccagcgagcccugg

SEQ ID NO: 2977513 - RNA, 17 nt, Human
cuacccucuuagaaaaa

SEQ ID NO: 2977514 - RNA, 13 nt, Human
cuacacugugcug

SEQ ID NO: 2977515 - RNA, 14 nt, Human
cuacacugugcuga

SEQ ID NO: 2977516 - RNA, 17 nt, Human
cuacacugugcugaguc

SEQ ID NO: 2977517 - RNA, 17 nt, Human
cuacagaggccaugggc

SEQ ID NO: 2977518 - RNA, 20 nt, Human
cuacagaggccaugggccuc

SEQ ID NO: 2977519 - RNA, 18 nt, Human
cuacagaggccaugggcc

SEQ ID NO: 2977520 - RNA, 22 nt, Human
cuacagaggccaugggccuccu

SEQ ID NO: 2977521 - RNA, 19 nt, Human
cuacagcuugaccgugagg

SEQ ID NO: 2977522 - RNA, 22 nt, Human
cuacagcuugaccgugaggcca

SEQ ID NO: 2977523 - RNA, 23 nt, Human
cuacagcuugaccgugaggccag

SEQ ID NO: 2977524 - RNA, 16 nt, Human
cuacaggagugagcac

SEQ ID NO: 2977525 - RNA, 15 nt, Human
cuacaggagugagca

SEQ ID NO: 2977526 - RNA, 14 nt, Human
cuacaggagugagc

SEQ ID NO: 2977527 - RNA, 17 nt, Human
cuacaggcacccaccau

SEQ ID NO: 2977528 - RNA, 15 nt, Human
cuacaggcacccacc

SEQ ID NO: 2977529 - RNA, 20 nt, Human
cuacauggaguauaugucaa

SEQ ID NO: 2977530 - RNA, 18 nt, Human
cuacauggaguauauguc

SEQ ID NO: 2977531 - RNA, 13 nt, Human
cuacaguccuccc

SEQ ID NO: 2977532 - RNA, 14 nt, Human
cuacaggugugagu

SEQ ID NO: 2977533 - RNA, 16 nt, Human
cuacaggugugaguca

SEQ ID NO: 2977534 - RNA, 13 nt, Human
cuacaguaauaaa

SEQ ID NO: 2977535 - RNA, 21 nt, Human
cuaauaugaugacuguuuuua

SEQ ID NO: 2977536 - RNA, 19 nt, Human
cuaauaugaugacuguuuu

SEQ ID NO: 2977537 - RNA, 13 nt, Human
cuaaugggacacu

SEQ ID NO: 2977538 - RNA, 12 nt, Human
cuaaugggacac

SEQ ID NO: 2977539 - RNA, 23 nt, Human
cuacacgagauacagaauuuuau

SEQ ID NO: 2977540 - RNA, 14 nt, Human
cuacacuaagagag

SEQ ID NO: 2977541 - RNA, 21 nt, Human
cuacacaggggaaaagaggag

SEQ ID NO: 2977542 - RNA, 21 nt, Human
cuacacacugcauguuuguga

SEQ ID NO: 2977543 - RNA, 14 nt, Human
cuaaguaaaaccac

SEQ ID NO: 2977544 - RNA, 18 nt, Human
cuaaguaaaaccacagca

SEQ ID NO: 2977545 - RNA, 19 nt, Human
cuaaguaaaaccacagcag

SEQ ID NO: 2977546 - RNA, 23 nt, Human
cuaauagacaauuuauuauggca

SEQ ID NO: 2977547 - RNA, 19 nt, Human
cuaauagacaauuuauuau

SEQ ID NO: 2977548 - RNA, 17 nt, Human
cuaauagacaauuuauu

SEQ ID NO: 2977549 - RNA, 21 nt, Human
cuaagcuucacuguaaaauaa

SEQ ID NO: 2977550 - RNA, 22 nt, Human
cuaagcuauucaguaauaacuc

SEQ ID NO: 2977551 - RNA, 20 nt, Human
cuaacagcaacacaaagcuu

SEQ ID NO: 2977552 - RNA, 14 nt, Human
cuaaccacgcugga

SEQ ID NO: 2977553 - RNA, 12 nt, Human
cuaaccacgcug

SEQ ID NO: 2977554 - RNA, 16 nt, Human
cuaaauucaugcugcu

SEQ ID NO: 2977555 - RNA, 19 nt, Human
cuaaauugacacuuaaaaa

SEQ ID NO: 2977556 - RNA, 19 nt, Human
cuaaauucuuucauuuuag

SEQ ID NO: 2977557 - RNA, 15 nt, Human
cuaagagagaaugag

SEQ ID NO: 2977558 - RNA, 14 nt, Human
cuaagagagaauga

SEQ ID NO: 2977559 - RNA, 15 nt, Human
cuaagagggagggag

SEQ ID NO: 2977560 - RNA, 22 nt, Human
cuaagagggagggagggcucca

SEQ ID NO: 2977561 - RNA, 13 nt, Human
cuaagagggaggg

SEQ ID NO: 2977562 - RNA, 23 nt, Human
cuaagagggagggagggcuccag

SEQ ID NO: 2977563 - RNA, 20 nt, Human
cgggaggcagagguugcagu

SEQ ID NO: 2977564 - RNA, 21 nt, Human
cgggaggauguucugggacac

SEQ ID NO: 2977565 - RNA, 23 nt, Human
cgggaggauguucugggacacag

SEQ ID NO: 2977566 - RNA, 21 nt, Human
cuaaaucuccaaaauaaaacu

SEQ ID NO: 2977567 - RNA, 22 nt, Human
cuaaaugaaaaucgugacaaca

SEQ ID NO: 2977568 - RNA, 12 nt, Human
cuauuuauuuau

SEQ ID NO: 2977569 - RNA, 19 nt, Human
cuauuuauuuauuuauuca

SEQ ID NO: 2977570 - RNA, 16 nt, Human
cuauuuauuuacaaau

SEQ ID NO: 2977571 - RNA, 15 nt, Human
cuauuuauuuacaaa

SEQ ID NO: 2977572 - RNA, 14 nt, Human
cucaaauuucuaaa

SEQ ID NO: 2977573 - RNA, 14 nt, Human
cucaacucuccucc

SEQ ID NO: 2977574 - RNA, 17 nt, Human
cucaaauuucuaaaucu

SEQ ID NO: 2977575 - RNA, 15 nt, Human
cucaaauuucuaaau

SEQ ID NO: 2977576 - RNA, 13 nt, Human
cucaaauuucuaa

SEQ ID NO: 2977577 - RNA, 15 nt, Human
cucacagaagaugaa

SEQ ID NO: 2977578 - RNA, 23 nt, Human
cucacacggacacucaaaagcug

SEQ ID NO: 2977579 - RNA, 16 nt, Human
cucaacucuccuccag

SEQ ID NO: 2977580 - RNA, 18 nt, Human
cucaacucuccuccagag

SEQ ID NO: 2977581 - RNA, 18 nt, Human
cuauuguuagucucuuga

SEQ ID NO: 2977582 - RNA, 14 nt, Human
cuauuuauuuacaa

SEQ ID NO: 2977583 - RNA, 16 nt, Human
cuauugcugcuugagg

SEQ ID NO: 2977584 - RNA, 16 nt, Human
cuauucugagaugacu

SEQ ID NO: 2977585 - RNA, 15 nt, Human
cuauucugagaugac

SEQ ID NO: 2977586 - RNA, 18 nt, Human
cuauucugagaugacuau

SEQ ID NO: 2977587 - RNA, 23 nt, Human
cuauucaguaauaacucuacccu

SEQ ID NO: 2977588 - RNA, 23 nt, Human
cuauucagcacaaggaaauaaaa

SEQ ID NO: 2977589 - RNA, 17 nt, Human
cuauucaguaauaacuc

SEQ ID NO: 2977590 - RNA, 13 nt, Human
cuauguaucaaug

SEQ ID NO: 2977591 - RNA, 18 nt, Human
cuauauaauuccuguuuu

SEQ ID NO: 2977592 - RNA, 20 nt, Human
cuauauaauuccuguuuuua

SEQ ID NO: 2977593 - RNA, 19 nt, Human
cuaugaaauauuauguuaa

SEQ ID NO: 2977594 - RNA, 18 nt, Human
cuaugaaauauuauguua

SEQ ID NO: 2977595 - RNA, 21 nt, Human
cuaugcauuugaaaauuuuga

SEQ ID NO: 2977596 - RNA, 15 nt, Human
cuaggaaaauuauuc

SEQ ID NO: 2977597 - RNA, 20 nt, Human
cuaggaacacuccuucacag

SEQ ID NO: 2977598 - RNA, 15 nt, Human
cuaggaagacuuugg

SEQ ID NO: 2977599 - RNA, 17 nt, Human
cuaggaagacuuuggaa

SEQ ID NO: 2977600 - RNA, 12 nt, Human
cuauaauuuaaa

SEQ ID NO: 2977601 - RNA, 21 nt, Human
cuauagccuaggugacagagu

SEQ ID NO: 2977602 - RNA, 20 nt, Human
cuauagccuaggugacagag

SEQ ID NO: 2977603 - RNA, 18 nt, Human
cuauagccuaggugacag

SEQ ID NO: 2977604 - RNA, 19 nt, Human
cuauagccuaggugacaga

SEQ ID NO: 2977605 - RNA, 15 nt, Human
cuagagguucaaaga

SEQ ID NO: 2977606 - RNA, 18 nt, Human
cuagaguuuagcuggaaa

SEQ ID NO: 2977607 - RNA, 19 nt, Human
cuagaguuuagcuggaaaa

SEQ ID NO: 2977608 - RNA, 21 nt, Human
cuagagguucaaagauauuuu

SEQ ID NO: 2977609 - RNA, 18 nt, Human
cuagagguucaaagauau

SEQ ID NO: 2977610 - RNA, 17 nt, Human
cuagagguucaaagaua

SEQ ID NO: 2977611 - RNA, 20 nt, Human
cuacuguccuacccacccuc

SEQ ID NO: 2977612 - RNA, 16 nt, Human
cuacucgaguuacaga

SEQ ID NO: 2977613 - RNA, 19 nt, Human
cuacucgaguuacagacaa

SEQ ID NO: 2977614 - RNA, 15 nt, Human
cuacucgaguuacag

SEQ ID NO: 2977615 - RNA, 12 nt, Human
cuacucuguguc

SEQ ID NO: 2977616 - RNA, 17 nt, Human
cuacucgggaggcugag

SEQ ID NO: 2977617 - RNA, 21 nt, Human
cuacuguaauuugugauacaa

SEQ ID NO: 2977618 - RNA, 19 nt, Human
cuacuguccuacccacccu

SEQ ID NO: 2977619 - RNA, 23 nt, Human
cuacugccauccuggcccagggc

SEQ ID NO: 2977620 - RNA, 22 nt, Human
cuacugccauccuggcccaggg

SEQ ID NO: 2977621 - RNA, 20 nt, Human
cuacugccauccuggcccag

SEQ ID NO: 2977622 - RNA, 19 nt, Human
cuacugccauccuggccca

SEQ ID NO: 2977623 - RNA, 18 nt, Human
cuacugccauccuggccc

SEQ ID NO: 2977624 - RNA, 17 nt, Human
cuacugccauccuggcc

SEQ ID NO: 2977625 - RNA, 16 nt, Human
cuacugccauccuggc

SEQ ID NO: 2977626 - RNA, 15 nt, Human
cuacugccauccugg

SEQ ID NO: 2977627 - RNA, 14 nt, Human
cuacugccauccug

SEQ ID NO: 2977628 - RNA, 19 nt, Human
cuagccugugccucuggga

SEQ ID NO: 2977629 - RNA, 21 nt, Human
cuagccugugccucugggacu

SEQ ID NO: 2977630 - RNA, 22 nt, Human
cuagccugugccucugggacug

SEQ ID NO: 2977631 - RNA, 21 nt, Human
cuagccuuagaagucacacag

SEQ ID NO: 2977632 - RNA, 16 nt, Human
cuagauacuguaucau

SEQ ID NO: 2977633 - RNA, 13 nt, Human
cuagauacuguau

SEQ ID NO: 2977634 - RNA, 24 nt, Human
cuagauacuguaucaugacaaaga

SEQ ID NO: 2977635 - RNA, 23 nt, Human
cuagccuuagaagucacacagua

SEQ ID NO: 2977636 - RNA, 22 nt, Human
cuagccuuagaagucacacagu

SEQ ID NO: 2977637 - RNA, 20 nt, Human
cuaggaaauauuuauuuuaa

SEQ ID NO: 2977638 - RNA, 19 nt, Human
cuaggaaauauuuauuuua

SEQ ID NO: 2977639 - RNA, 15 nt, Human
cuaggaaauauuuau

SEQ ID NO: 2977640 - RNA, 14 nt, Human
cuaggaaauauuua

SEQ ID NO: 2977641 - RNA, 23 nt, Human
cucauuuuuauaaugucccuuca

SEQ ID NO: 2977642 - RNA, 18 nt, Human
cuccaaaauaaaacuuuu

SEQ ID NO: 2977643 - RNA, 17 nt, Human
cuccaagcucccaggca

SEQ ID NO: 2977644 - RNA, 12 nt, Human
cucauuuccaag

SEQ ID NO: 2977645 - RNA, 14 nt, Human
cucauuuccaagca

SEQ ID NO: 2977646 - RNA, 13 nt, Human
cucauuuccaagc

SEQ ID NO: 2977647 - RNA, 17 nt, Human
cucauuuccaagcaagu

SEQ ID NO: 2977648 - RNA, 18 nt, Human
cucauuugucacacacuu

SEQ ID NO: 2977649 - RNA, 21 nt, Human
cucauuugucacacacuuugg

SEQ ID NO: 2977650 - RNA, 17 nt, Human
cucauugaccugaggcc

SEQ ID NO: 2977651 - RNA, 22 nt, Human
cucauucuccuuguguuacuaa

SEQ ID NO: 2977652 - RNA, 18 nt, Human
cucauucuccuuguguua

SEQ ID NO: 2977653 - RNA, 19 nt, Human
cucauugaccugaggcccu

SEQ ID NO: 2977654 - RNA, 21 nt, Human
cucauugaccugaggcccuuc

SEQ ID NO: 2977655 - RNA, 21 nt, Human
cuccagagccccacagcccca

SEQ ID NO: 2977656 - RNA, 18 nt, Human
cuccagagccccacagcc

SEQ ID NO: 2977657 - RNA, 16 nt, Human
cuccagagucagaagu

SEQ ID NO: 2977658 - RNA, 16 nt, Human
cuccagagccccacag

SEQ ID NO: 2977659 - RNA, 13 nt, Human
cuccagccccugg

SEQ ID NO: 2977660 - RNA, 14 nt, Human
cuccagccccugga

SEQ ID NO: 2977661 - RNA, 11 nt, Human
cuccagccccu

SEQ ID NO: 2977662 - RNA, 18 nt, Human
cuccagcucaccagcccc

SEQ ID NO: 2977663 - RNA, 16 nt, Human
cuccagcucaccagcc

SEQ ID NO: 2977664 - RNA, 15 nt, Human
cuccagcucaccagc

SEQ ID NO: 2977665 - RNA, 14 nt, Human
cuccagcucaccag

SEQ ID NO: 2977666 - RNA, 14 nt, Human
cuccccucggagaa

SEQ ID NO: 2977667 - RNA, 14 nt, Human
cuccccugcugggu

SEQ ID NO: 2977668 - RNA, 21 nt, Human
cuccccugcuggguguggcgc

SEQ ID NO: 2977669 - RNA, 23 nt, Human
cuccccugcuggguguggcgcag

SEQ ID NO: 2977670 - RNA, 15 nt, Human
cucccuucauccuuc

SEQ ID NO: 2977671 - RNA, 17 nt, Human
cucccugcugcuccuag

SEQ ID NO: 2977672 - RNA, 16 nt, Human
cucccugcugcuccua

SEQ ID NO: 2977673 - RNA, 14 nt, Human
cucccugcugcucc

SEQ ID NO: 2977674 - RNA, 19 nt, Human
cucccgaauagcugggacu

SEQ ID NO: 2977675 - RNA, 23 nt, Human
cucccgaauagcugggacuacag

SEQ ID NO: 2977676 - RNA, 20 nt, Human
cucccgaauagcugggacua

SEQ ID NO: 2977677 - RNA, 14 nt, Human
cuccagcugcugag

SEQ ID NO: 2977678 - RNA, 20 nt, Human
cuccagcugcugagauccug

SEQ ID NO: 2977679 - RNA, 23 nt, Human
cuccagcugcugagauccuggac

SEQ ID NO: 2977680 - RNA, 21 nt, Human
cuccagcugcugagauccugg

SEQ ID NO: 2977681 - RNA, 23 nt, Human
cucccaaagugcugggauuacag

SEQ ID NO: 2977682 - RNA, 16 nt, Human
cucccaaagugcuggg

SEQ ID NO: 2977683 - RNA, 14 nt, Human
cucccaacucaccc

SEQ ID NO: 2977684 - RNA, 15 nt, Human
cucccaacucacccc

SEQ ID NO: 2977685 - RNA, 15 nt, Human
cucccacaaaggaga

SEQ ID NO: 2977686 - RNA, 16 nt, Human
cucccaucacuucccu

SEQ ID NO: 2977687 - RNA, 14 nt, Human
cucccaucacccgc

SEQ ID NO: 2977688 - RNA, 24 nt, Human
cucccaugagggagaugccaugag

SEQ ID NO: 2977689 - RNA, 21 nt, Human
cucagaugcacaugagcuggc

SEQ ID NO: 2977690 - RNA, 16 nt, Human
cucagaucuucugugg

SEQ ID NO: 2977691 - RNA, 19 nt, Human
cucacuguugcccaggcug

SEQ ID NO: 2977692 - RNA, 18 nt, Human
cucacuguugcccaggcu

SEQ ID NO: 2977693 - RNA, 17 nt, Human
cucacuguugcccaggc

SEQ ID NO: 2977694 - RNA, 16 nt, Human
cucacuguugcccagg

SEQ ID NO: 2977695 - RNA, 23 nt, Human
cucagagagggugggagugggcc

SEQ ID NO: 2977696 - RNA, 19 nt, Human
cucagagagggugggagug

SEQ ID NO: 2977697 - RNA, 18 nt, Human
cucagagagggugggagu

SEQ ID NO: 2977698 - RNA, 15 nt, Human
cucacuguugcccag

SEQ ID NO: 2977699 - RNA, 14 nt, Human
cucacuguugccca

SEQ ID NO: 2977700 - RNA, 18 nt, Human
cucacagcagugagacug

SEQ ID NO: 2977701 - RNA, 14 nt, Human
cucacugcagccuc

SEQ ID NO: 2977702 - RNA, 16 nt, Human
cucacugcagccucaa

SEQ ID NO: 2977703 - RNA, 15 nt, Human
cucacugcagccuca

SEQ ID NO: 2977704 - RNA, 14 nt, Human
cucacagcagugag

SEQ ID NO: 2977705 - RNA, 21 nt, Human
cucagcggggacagcuccuuc

SEQ ID NO: 2977706 - RNA, 20 nt, Human
cucagcggggacagcuccuu

SEQ ID NO: 2977707 - RNA, 19 nt, Human
cucagcggggacagcuccu

SEQ ID NO: 2977708 - RNA, 18 nt, Human
cucagcggggacagcucc

SEQ ID NO: 2977709 - RNA, 16 nt, Human
cucagcggggacagcu

SEQ ID NO: 2977710 - RNA, 15 nt, Human
cucagcggggacagc

SEQ ID NO: 2977711 - RNA, 14 nt, Human
cucagcggggacag

SEQ ID NO: 2977712 - RNA, 23 nt, Human
cucagcggggacagcuccuucug

SEQ ID NO: 2977713 - RNA, 13 nt, Human
cucagcggggaca

SEQ ID NO: 2977714 - RNA, 19 nt, Human
cucagcaaaagaugcuucu

SEQ ID NO: 2977715 - RNA, 20 nt, Human
cucagcaaaagaugcuucuc

SEQ ID NO: 2977716 - RNA, 16 nt, Human
cucagcaggggagggu

SEQ ID NO: 2977717 - RNA, 22 nt, Human
cucagcauccuggcacccggcc

SEQ ID NO: 2977718 - RNA, 21 nt, Human
cucagcauccuggcacccggc

SEQ ID NO: 2977719 - RNA, 13 nt, Human
cucagcauccugg

SEQ ID NO: 2977720 - RNA, 19 nt, Human
cucagggccuggcucaggu

SEQ ID NO: 2977721 - RNA, 20 nt, Human
cucagggccuggcucaggug

SEQ ID NO: 2977722 - RNA, 18 nt, Human
cucagggccuggcucagg

SEQ ID NO: 2977723 - RNA, 18 nt, Human
cucaggcaggugggaugg

SEQ ID NO: 2977724 - RNA, 15 nt, Human
cucaggcagguggga

SEQ ID NO: 2977725 - RNA, 23 nt, Human
cucaggugauccacccaccucag

SEQ ID NO: 2977726 - RNA, 22 nt, Human
cucaggugauccacccaccuca

SEQ ID NO: 2977727 - RNA, 19 nt, Human
cucagguggggucacucug

SEQ ID NO: 2977728 - RNA, 20 nt, Human
cucagguggggucacucugg

SEQ ID NO: 2977729 - RNA, 21 nt, Human
cucagguggggucacucuggc

SEQ ID NO: 2977730 - RNA, 14 nt, Human
cucagggccugguc

SEQ ID NO: 2977731 - RNA, 20 nt, Human
cucagggucccugguggcag

SEQ ID NO: 2977732 - RNA, 21 nt, Human
cucagggucccugguggcagc

SEQ ID NO: 2977733 - RNA, 22 nt, Human
cucagggucccugguggcagcu

SEQ ID NO: 2977734 - RNA, 24 nt, Human
cucagggucccugguggcagcuca

SEQ ID NO: 2977735 - RNA, 18 nt, Human
cucagggucccugguggc

SEQ ID NO: 2977736 - RNA, 22 nt, Human
cucaggaaaucaaauaugcaaa

SEQ ID NO: 2977737 - RNA, 22 nt, Human
ccugccuguugggccaggagcc

SEQ ID NO: 2977738 - RNA, 17 nt, Human
ccugccccugagcccau

SEQ ID NO: 2977739 - RNA, 16 nt, Human
ccugcccggcugcgga

SEQ ID NO: 2977740 - RNA, 14 nt, Human
ccugcccggcugcg

SEQ ID NO: 2977741 - RNA, 12 nt, Human
ccugccaggcau

SEQ ID NO: 2977742 - RNA, 22 nt, Human
ccugccagggacagagggggug

SEQ ID NO: 2977743 - RNA, 15 nt, Human
ccugcccugugggcc

SEQ ID NO: 2977744 - RNA, 19 nt, Human
ccugcccuuaccugccagg

SEQ ID NO: 2977745 - RNA, 21 nt, Human
ccugcccuuaccugccaggaa

SEQ ID NO: 2977746 - RNA, 22 nt, Human
ccugcccuuaccugccaggaag

SEQ ID NO: 2977747 - RNA, 14 nt, Human
ccugccuguugggc

SEQ ID NO: 2977748 - RNA, 11 nt, Human
ccugccucagc

SEQ ID NO: 2977749 - RNA, 12 nt, Human
ccugccucagcc

SEQ ID NO: 2977750 - RNA, 14 nt, Human
ccugccucagccuc

SEQ ID NO: 2977751 - RNA, 13 nt, Human
ccugccucagccu

SEQ ID NO: 2977752 - RNA, 12 nt, Human
ccugcccugugg

SEQ ID NO: 2977753 - RNA, 14 nt, Human
ccugcccugugggc

SEQ ID NO: 2977754 - RNA, 11 nt, Human
ccugcccugug

SEQ ID NO: 2977755 - RNA, 15 nt, Human
ccugagcugggauga

SEQ ID NO: 2977756 - RNA, 22 nt, Human
ccugaaggccccgcccaggcuu

SEQ ID NO: 2977757 - RNA, 20 nt, Human
ccugaaggccccgcccaggc

SEQ ID NO: 2977758 - RNA, 21 nt, Human
ccugaaggccccgcccaggcu

SEQ ID NO: 2977759 - RNA, 18 nt, Human
ccugaaggccccgcccag

SEQ ID NO: 2977760 - RNA, 19 nt, Human
ccugaaggccccgcccagg

SEQ ID NO: 2977761 - RNA, 14 nt, Human
ccugaaggccccgc

SEQ ID NO: 2977762 - RNA, 21 nt, Human
ccugaagacucauucuucugu

SEQ ID NO: 2977763 - RNA, 18 nt, Human
ccugaaagcccugagcuu

SEQ ID NO: 2977764 - RNA, 13 nt, Human
ccugaaagcccug

SEQ ID NO: 2977765 - RNA, 14 nt, Human
ccugaaagcccuga

SEQ ID NO: 2977766 - RNA, 13 nt, Human
ccugccacccugg

SEQ ID NO: 2977767 - RNA, 12 nt, Human
ccugccacccug

SEQ ID NO: 2977768 - RNA, 14 nt, Human
ccugccacccuggg

SEQ ID NO: 2977769 - RNA, 22 nt, Human
ccugccacccuggggagaaagu

SEQ ID NO: 2977770 - RNA, 16 nt, Human
ccugccacccugggga

SEQ ID NO: 2977771 - RNA, 19 nt, Human
ccugccaauggacuaacuu

SEQ ID NO: 2977772 - RNA, 21 nt, Human
ccugcacagcaggcugccagu

SEQ ID NO: 2977773 - RNA, 20 nt, Human
ccugcacagcaggcugccag

SEQ ID NO: 2977774 - RNA, 19 nt, Human
ccugcacagcaggcugcca

SEQ ID NO: 2977775 - RNA, 17 nt, Human
ccugcacagcaggcugc

SEQ ID NO: 2977776 - RNA, 14 nt, Human
ccugcacagcaggc

SEQ ID NO: 2977777 - RNA, 23 nt, Human
ccugcacagcaggcugccagugc

SEQ ID NO: 2977778 - RNA, 15 nt, Human
ccugaggcccagagg

SEQ ID NO: 2977779 - RNA, 16 nt, Human
ccugaggcccagaggg

SEQ ID NO: 2977780 - RNA, 17 nt, Human
ccugaggcccagagggc

SEQ ID NO: 2977781 - RNA, 18 nt, Human
ccugaggcccagagggcc

SEQ ID NO: 2977782 - RNA, 12 nt, Human
ccugagcuggga

SEQ ID NO: 2977783 - RNA, 14 nt, Human
ccugaggcuccacu

SEQ ID NO: 2977784 - RNA, 13 nt, Human
ccugaggcuccac

SEQ ID NO: 2977785 - RNA, 13 nt, Human
ccugaggcugggc

SEQ ID NO: 2977786 - RNA, 14 nt, Human
ccugaggcugggcu

SEQ ID NO: 2977787 - RNA, 15 nt, Human
ccugaggcugggcuc

SEQ ID NO: 2977788 - RNA, 15 nt, Human
ccugagccagauuuc

SEQ ID NO: 2977789 - RNA, 12 nt, Human
ccugagccagau

SEQ ID NO: 2977790 - RNA, 16 nt, Human
ccugagccagauuuca

SEQ ID NO: 2977791 - RNA, 18 nt, Human
ccugagccagauuucacu

SEQ ID NO: 2977792 - RNA, 19 nt, Human
ccugaagucacacagugag

SEQ ID NO: 2977793 - RNA, 20 nt, Human
ccugaagucacacagugagu

SEQ ID NO: 2977794 - RNA, 22 nt, Human
ccugaagucuuuguacagacaa

SEQ ID NO: 2977795 - RNA, 18 nt, Human
ccugguggcagcugcggu

SEQ ID NO: 2977796 - RNA, 17 nt, Human
ccugguggcagcugcgg

SEQ ID NO: 2977797 - RNA, 16 nt, Human
ccugguggcagcugcg

SEQ ID NO: 2977798 - RNA, 15 nt, Human
ccugguggcagcugc

SEQ ID NO: 2977799 - RNA, 19 nt, Human
ccugguggcagcucaccuc

SEQ ID NO: 2977800 - RNA, 21 nt, Human
ccugguggcagcucaccucuc

SEQ ID NO: 2977801 - RNA, 22 nt, Human
ccugguggcagcucaccucucc

SEQ ID NO: 2977802 - RNA, 14 nt, Human
ccugguggcagcug

SEQ ID NO: 2977803 - RNA, 13 nt, Human
ccugucccccuga

SEQ ID NO: 2977804 - RNA, 14 nt, Human
ccugucccccugac

SEQ ID NO: 2977805 - RNA, 15 nt, Human
ccugucccccugaca

SEQ ID NO: 2977806 - RNA, 12 nt, Human
ccugucccccug

SEQ ID NO: 2977807 - RNA, 13 nt, Human
ccuguagcccuaa

SEQ ID NO: 2977808 - RNA, 15 nt, Human
ccuguagagugggag

SEQ ID NO: 2977809 - RNA, 16 nt, Human
ccuguagagugggagc

SEQ ID NO: 2977810 - RNA, 14 nt, Human
ccugguggcagugg

SEQ ID NO: 2977811 - RNA, 13 nt, Human
ccugguggcagug

SEQ ID NO: 2977812 - RNA, 10 nt, Human
ccuguaccuc

SEQ ID NO: 2977813 - RNA, 20 nt, Human
ccugggggcugggcagagga

SEQ ID NO: 2977814 - RNA, 21 nt, Human
ccugggggcugggcagaggaa

SEQ ID NO: 2977815 - RNA, 19 nt, Human
ccugggggcugggcagagg

SEQ ID NO: 2977816 - RNA, 14 nt, Human
ccugggcagcugcc

SEQ ID NO: 2977817 - RNA, 13 nt, Human
ccugggcagcugc

SEQ ID NO: 2977818 - RNA, 18 nt, Human
ccugggggcugggcagag

SEQ ID NO: 2977819 - RNA, 15 nt, Human
ccugggcagaaggaa

SEQ ID NO: 2977820 - RNA, 18 nt, Human
ccugggagugagcugguu

SEQ ID NO: 2977821 - RNA, 16 nt, Human
ccugggcagaaggaag

SEQ ID NO: 2977822 - RNA, 22 nt, Human
ccugggaggucaaggcugcagu

SEQ ID NO: 2977823 - RNA, 16 nt, Human
ccugggagugagcugg

SEQ ID NO: 2977824 - RNA, 16 nt, Human
ccuggcccacugcauc

SEQ ID NO: 2977825 - RNA, 12 nt, Human
ccuggcccaggg

SEQ ID NO: 2977826 - RNA, 15 nt, Human
ccuggcccagggcau

SEQ ID NO: 2977827 - RNA, 14 nt, Human
ccuggcccagggca

SEQ ID NO: 2977828 - RNA, 13 nt, Human
ccuggcccagggc

SEQ ID NO: 2977829 - RNA, 21 nt, Human
ccuggcccagggcaucuggga

SEQ ID NO: 2977830 - RNA, 16 nt, Human
ccuggcccagggcauc

SEQ ID NO: 2977831 - RNA, 13 nt, Human
ccuggcacugcuu

SEQ ID NO: 2977832 - RNA, 16 nt, Human
ccuggcacugcuucca

SEQ ID NO: 2977833 - RNA, 13 nt, Human
ccuggcaugggaa

SEQ ID NO: 2977834 - RNA, 23 nt, Human
ccuggcaugggaaugaaugucag

SEQ ID NO: 2977835 - RNA, 20 nt, Human
ccuggccagaugcaccagcc

SEQ ID NO: 2977836 - RNA, 23 nt, Human
ccuggccagaugcaccagcccuu

SEQ ID NO: 2977837 - RNA, 21 nt, Human
ccuggccagaugcaccagccc

SEQ ID NO: 2977838 - RNA, 13 nt, Human
ccuggcccacugc

SEQ ID NO: 2977839 - RNA, 14 nt, Human
ccuggcccacugca

SEQ ID NO: 2977840 - RNA, 12 nt, Human
ccuggcacugcu

SEQ ID NO: 2977841 - RNA, 22 nt, Human
ccuggcacuauaauguaagcuc

SEQ ID NO: 2977842 - RNA, 18 nt, Human
ccuggcacccggccccug

SEQ ID NO: 2977843 - RNA, 21 nt, Human
ccuggcacccggccccugcug

SEQ ID NO: 2977844 - RNA, 20 nt, Human
ccuggcacccggccccugcu

SEQ ID NO: 2977845 - RNA, 19 nt, Human
ccuggcacccggccccugc

SEQ ID NO: 2977846 - RNA, 18 nt, Human
ccugccuguugggccagg

SEQ ID NO: 2977847 - RNA, 19 nt, Human
ccugccuguugggccagga

SEQ ID NO: 2977848 - RNA, 20 nt, Human
ccugccuguugggccaggag

SEQ ID NO: 2977849 - RNA, 21 nt, Human
ccugcuaauuccccagauugc

SEQ ID NO: 2977850 - RNA, 17 nt, Human
ccugcuaauuccccaga

SEQ ID NO: 2977851 - RNA, 17 nt, Human
cgcuacccgggaagggg

SEQ ID NO: 2977852 - RNA, 18 nt, Human
cgcuacccgggaaggggg

SEQ ID NO: 2977853 - RNA, 21 nt, Human
cgcuacccgggaagggggcug

SEQ ID NO: 2977854 - RNA, 24 nt, Human
cgcuacccgggaagggggcuggga

SEQ ID NO: 2977855 - RNA, 19 nt, Human
cgcgguggcucacgccugu

SEQ ID NO: 2977856 - RNA, 14 nt, Human
cgcgacaaugcaaa

SEQ ID NO: 2977857 - RNA, 19 nt, Human
cgccuugcccagccuggau

SEQ ID NO: 2977858 - RNA, 16 nt, Human
cgccuugcccagccug

SEQ ID NO: 2977859 - RNA, 15 nt, Human
cgccuugcccagccu

SEQ ID NO: 2977860 - RNA, 12 nt, Human
cgcccagucugg

SEQ ID NO: 2977861 - RNA, 17 nt, Human
cgcccaaggccuucccc

SEQ ID NO: 2977862 - RNA, 21 nt, Human
cgcccagucuggaaugcagug

SEQ ID NO: 2977863 - RNA, 19 nt, Human
cgcccagucuggaaugcag

SEQ ID NO: 2977864 - RNA, 13 nt, Human
cgcccagucugga

SEQ ID NO: 2977865 - RNA, 12 nt, Human
cgcccaaggccu

SEQ ID NO: 2977866 - RNA, 18 nt, Human
cgcagcccugcagagggc

SEQ ID NO: 2977867 - RNA, 19 nt, Human
cgcagcccugcagagggca

SEQ ID NO: 2977868 - RNA, 13 nt, Human
cgcugugcugccc

SEQ ID NO: 2977869 - RNA, 14 nt, Human
cgcugugcugcccu

SEQ ID NO: 2977870 - RNA, 11 nt, Human
cgcugugcugc

SEQ ID NO: 2977871 - RNA, 21 nt, Human
cgcugugcugcccugcccacc

SEQ ID NO: 2977872 - RNA, 23 nt, Human
cgcugugcugcccugcccaccug

SEQ ID NO: 2977873 - RNA, 19 nt, Human
cgcugugcugcccugccca

SEQ ID NO: 2977874 - RNA, 22 nt, Human
cggacagccacggccaggccag

SEQ ID NO: 2977875 - RNA, 21 nt, Human
cggacagccacggccaggcca

SEQ ID NO: 2977876 - RNA, 17 nt, Human
cggagaaaggaagggcu

SEQ ID NO: 2977877 - RNA, 15 nt, Human
cggagaaaggaaggg

SEQ ID NO: 2977878 - RNA, 17 nt, Human
cggaauaguuggcuagg

SEQ ID NO: 2977879 - RNA, 16 nt, Human
cggaauaguuggcuag

SEQ ID NO: 2977880 - RNA, 14 nt, Human
cggaauaguuggcu

SEQ ID NO: 2977881 - RNA, 20 nt, Human
cggacagccacggccaggcc

SEQ ID NO: 2977882 - RNA, 16 nt, Human
cgcuuucuacccagcg

SEQ ID NO: 2977883 - RNA, 14 nt, Human
cgcuuucuacccag

SEQ ID NO: 2977884 - RNA, 19 nt, Human
cgggaagggggcugggaca

SEQ ID NO: 2977885 - RNA, 20 nt, Human
cgggaagggggcugggacau

SEQ ID NO: 2977886 - RNA, 16 nt, Human
cgggaagggggcuggg

SEQ ID NO: 2977887 - RNA, 23 nt, Human
cggcuggcagcccaccccucaac

SEQ ID NO: 2977888 - RNA, 13 nt, Human
cggcuggccuggc

SEQ ID NO: 2977889 - RNA, 14 nt, Human
cggcuggcagccca

SEQ ID NO: 2977890 - RNA, 20 nt, Human
cggcccuccagagccccaca

SEQ ID NO: 2977891 - RNA, 16 nt, Human
cggcccuccagagccc

SEQ ID NO: 2977892 - RNA, 11 nt, Human
cggccaggcca

SEQ ID NO: 2977893 - RNA, 20 nt, Human
cggccaggccagagggagug

SEQ ID NO: 2977894 - RNA, 12 nt, Human
cggccaggccag

SEQ ID NO: 2977895 - RNA, 13 nt, Human
cggcccuccagag

SEQ ID NO: 2977896 - RNA, 19 nt, Human
cgcagcauauucaggaagc

SEQ ID NO: 2977897 - RNA, 20 nt, Human
cgcagcauauucaggaagcu

SEQ ID NO: 2977898 - RNA, 15 nt, Human
cgcagcccugcagag

SEQ ID NO: 2977899 - RNA, 17 nt, Human
cgcagcccugcagaggg

SEQ ID NO: 2977900 - RNA, 17 nt, Human
cgcacugggcuugggga

SEQ ID NO: 2977901 - RNA, 13 nt, Human
cgcacugggcuug

SEQ ID NO: 2977902 - RNA, 23 nt, Human
cgauggaggacuccaggcagcag

SEQ ID NO: 2977903 - RNA, 19 nt, Human
cgagcccugguggcagugg

SEQ ID NO: 2977904 - RNA, 14 nt, Human
cgaggacagggagg

SEQ ID NO: 2977905 - RNA, 18 nt, Human
cgagcccugguggcagug

SEQ ID NO: 2977906 - RNA, 16 nt, Human
cgaggacagggaggug

SEQ ID NO: 2977907 - RNA, 23 nt, Human
ccuugucggccccaccagugccu

SEQ ID NO: 2977908 - RNA, 16 nt, Human
ccuuuguccccaccgc

SEQ ID NO: 2977909 - RNA, 18 nt, Human
ccuuuguccccaccgcag

SEQ ID NO: 2977910 - RNA, 14 nt, Human
ccuuuguccccacc

SEQ ID NO: 2977911 - RNA, 23 nt, Human
ccuuuguauucucuccuguaccu

SEQ ID NO: 2977912 - RNA, 22 nt, Human
ccuuuguauucucuccuguacc

SEQ ID NO: 2977913 - RNA, 24 nt, Human
ccuuuguauucucuccuguaccuc

SEQ ID NO: 2977914 - RNA, 15 nt, Human
ccuuugugaggaagc

SEQ ID NO: 2977915 - RNA, 16 nt, Human
ccuuugugaggaagcc

SEQ ID NO: 2977916 - RNA, 17 nt, Human
ccuuugugaggaagccg

SEQ ID NO: 2977917 - RNA, 23 nt, Human
ccuuugugaggaagccgcugggg

SEQ ID NO: 2977918 - RNA, 22 nt, Human
ccuuuguccccaccgcagacag

SEQ ID NO: 2977919 - RNA, 23 nt, Human
ccuuuguccccaccgcagacagg

SEQ ID NO: 2977920 - RNA, 14 nt, Human
ccuuugugaggaag

SEQ ID NO: 2977921 - RNA, 15 nt, Human
ccuuuuuuggcugcu

SEQ ID NO: 2977922 - RNA, 19 nt, Human
ccuuuuuuauacauaaaca

SEQ ID NO: 2977923 - RNA, 12 nt, Human
cgaauauugcug

SEQ ID NO: 2977924 - RNA, 14 nt, Human
cgaauauugcugau

SEQ ID NO: 2977925 - RNA, 11 nt, Human
cgaauauugcu

SEQ ID NO: 2977926 - RNA, 16 nt, Human
cgaauagcugggacua

SEQ ID NO: 2977927 - RNA, 15 nt, Human
cgaauagcugggacu

SEQ ID NO: 2977928 - RNA, 15 nt, Human
cgaauauugcugaug

SEQ ID NO: 2977929 - RNA, 17 nt, Human
cgaauauugcugauggu

SEQ ID NO: 2977930 - RNA, 23 nt, Human
cgaacauguuuuucuucucccuc

SEQ ID NO: 2977931 - RNA, 21 nt, Human
cgaacauguuuuucuucuccc

SEQ ID NO: 2977932 - RNA, 17 nt, Human
ccuuuuuuggcugcuga

SEQ ID NO: 2977933 - RNA, 18 nt, Human
ccuuuuuuggcugcugaa

SEQ ID NO: 2977934 - RNA, 20 nt, Human
ccuuuuuuggcugcugaagg

SEQ ID NO: 2977935 - RNA, 22 nt, Human
ccuuuuuuggcugcugaaggcu

SEQ ID NO: 2977936 - RNA, 23 nt, Human
cgaaagggacuuggaagcuccgc

SEQ ID NO: 2977937 - RNA, 19 nt, Human
ccuucucuccagccccugg

SEQ ID NO: 2977938 - RNA, 15 nt, Human
ccuuggauugucccc

SEQ ID NO: 2977939 - RNA, 15 nt, Human
ccuuggacucauuuu

SEQ ID NO: 2977940 - RNA, 22 nt, Human
ccuuggcucaaguccucuuuuc

SEQ ID NO: 2977941 - RNA, 17 nt, Human
ccuucucuccagccccu

SEQ ID NO: 2977942 - RNA, 18 nt, Human
ccuucucuccagccccug

SEQ ID NO: 2977943 - RNA, 21 nt, Human
ccuugacagggcacaccgggc

SEQ ID NO: 2977944 - RNA, 18 nt, Human
ccuugacagggcacaccg

SEQ ID NO: 2977945 - RNA, 14 nt, Human
ccuuggggagcagg

SEQ ID NO: 2977946 - RNA, 16 nt, Human
ccuuggcugcagggag

SEQ ID NO: 2977947 - RNA, 14 nt, Human
ccuuggcugcaggg

SEQ ID NO: 2977948 - RNA, 19 nt, Human
ccuuggugucgggcaugac

SEQ ID NO: 2977949 - RNA, 20 nt, Human
ccuuggugucgggcaugaca

SEQ ID NO: 2977950 - RNA, 18 nt, Human
ccuucggccuccauccug

SEQ ID NO: 2977951 - RNA, 17 nt, Human
ccuucggccuccauccu

SEQ ID NO: 2977952 - RNA, 16 nt, Human
ccuucggccuccaucc

SEQ ID NO: 2977953 - RNA, 17 nt, Human
ccuuccauggacuuugu

SEQ ID NO: 2977954 - RNA, 13 nt, Human
ccuuccaggggug

SEQ ID NO: 2977955 - RNA, 12 nt, Human
ccuucucuccag

SEQ ID NO: 2977956 - RNA, 13 nt, Human
ccuucucuccagc

SEQ ID NO: 2977957 - RNA, 15 nt, Human
ccuucucuccagccc

SEQ ID NO: 2977958 - RNA, 16 nt, Human
ccuucucuccagcccc

SEQ ID NO: 2977959 - RNA, 20 nt, Human
ccuguggaugauaaaacaca

SEQ ID NO: 2977960 - RNA, 19 nt, Human
ccuguggaugcugcugccc

SEQ ID NO: 2977961 - RNA, 17 nt, Human
ccuguggaugcugcugc

SEQ ID NO: 2977962 - RNA, 20 nt, Human
ccugugggcccccaaaugga

SEQ ID NO: 2977963 - RNA, 20 nt, Human
ccugugccucugggacugga

SEQ ID NO: 2977964 - RNA, 18 nt, Human
ccagugacagucagggaa

SEQ ID NO: 2977965 - RNA, 13 nt, Human
ccagugagacugu

SEQ ID NO: 2977966 - RNA, 12 nt, Human
ccaggugccagu

SEQ ID NO: 2977967 - RNA, 21 nt, Human
ccaggugcuaggaacacuccu

SEQ ID NO: 2977968 - RNA, 22 nt, Human
ccaguaaaugggggugcauuug

SEQ ID NO: 2977969 - RNA, 21 nt, Human
ccaguaaaugggggugcauuu

SEQ ID NO: 2977970 - RNA, 20 nt, Human
ccaguaaaugggggugcauu

SEQ ID NO: 2977971 - RNA, 13 nt, Human
ccagguuuaagcu

SEQ ID NO: 2977972 - RNA, 16 nt, Human
ccagguuucuaugugu

SEQ ID NO: 2977973 - RNA, 14 nt, Human
ccaucauugaaauc

SEQ ID NO: 2977974 - RNA, 16 nt, Human
ccaucauugaaaucuu

SEQ ID NO: 2977975 - RNA, 17 nt, Human
ccaucauugaaaucuuu

SEQ ID NO: 2977976 - RNA, 18 nt, Human
ccauccugaggcuccacu

SEQ ID NO: 2977977 - RNA, 20 nt, Human
ccauccugaggcuccacuug

SEQ ID NO: 2977978 - RNA, 16 nt, Human
ccauccugaggcucca

SEQ ID NO: 2977979 - RNA, 13 nt, Human
ccaucuacccucc

SEQ ID NO: 2977980 - RNA, 14 nt, Human
ccaucucacacaug

SEQ ID NO: 2977981 - RNA, 15 nt, Human
ccaucucacacauga

SEQ ID NO: 2977982 - RNA, 17 nt, Human
ccaucucacacaugagc

SEQ ID NO: 2977983 - RNA, 18 nt, Human
ccaucucacacaugagca

SEQ ID NO: 2977984 - RNA, 20 nt, Human
ccaucucacacaugagcauc

SEQ ID NO: 2977985 - RNA, 21 nt, Human
ccaucucacacaugagcauca

SEQ ID NO: 2977986 - RNA, 15 nt, Human
ccaucucuccuccuu

SEQ ID NO: 2977987 - RNA, 23 nt, Human
ccagugugacaaggauugcuacu

SEQ ID NO: 2977988 - RNA, 14 nt, Human
ccagugugacaagg

SEQ ID NO: 2977989 - RNA, 13 nt, Human
ccauaugccuggg

SEQ ID NO: 2977990 - RNA, 12 nt, Human
ccaucaagccac

SEQ ID NO: 2977991 - RNA, 15 nt, Human
ccauaugccugggca

SEQ ID NO: 2977992 - RNA, 16 nt, Human
ccaucaagccaccaac

SEQ ID NO: 2977993 - RNA, 13 nt, Human
ccaucaagccacc

SEQ ID NO: 2977994 - RNA, 14 nt, Human
ccaucaagccacca

SEQ ID NO: 2977995 - RNA, 12 nt, Human
ccaucauugaaa

SEQ ID NO: 2977996 - RNA, 13 nt, Human
ccaucaugucugg

SEQ ID NO: 2977997 - RNA, 12 nt, Human
ccaucaugucug

SEQ ID NO: 2977998 - RNA, 20 nt, Human
ccagguagaggguguguaag

SEQ ID NO: 2977999 - RNA, 24 nt, Human
ccaggguggccacaccucuauccc

SEQ ID NO: 2978000 - RNA, 18 nt, Human
ccaggguggccacaccuc

SEQ ID NO: 2978001 - RNA, 15 nt, Human
ccaggcccucugccc

SEQ ID NO: 2978002 - RNA, 23 nt, Human
ccaggcugggagagccuuccagg

SEQ ID NO: 2978003 - RNA, 22 nt, Human
ccaggcuuagucacugagacag

SEQ ID NO: 2978004 - RNA, 23 nt, Human
ccaggcuuagucacugagacagc

SEQ ID NO: 2978005 - RNA, 21 nt, Human
ccaggcuuagucacugagaca

SEQ ID NO: 2978006 - RNA, 22 nt, Human
ccaggaggcggaccuuguagug

SEQ ID NO: 2978007 - RNA, 21 nt, Human
ccaggccacaagacccuugug

SEQ ID NO: 2978008 - RNA, 20 nt, Human
ccaggaggccagccuugacc

SEQ ID NO: 2978009 - RNA, 15 nt, Human
ccaggaggccagccu

SEQ ID NO: 2978010 - RNA, 18 nt, Human
ccaggaggccagccuuga

SEQ ID NO: 2978011 - RNA, 14 nt, Human
ccaggaggccagcc

SEQ ID NO: 2978012 - RNA, 16 nt, Human
ccaggccccugccacc

SEQ ID NO: 2978013 - RNA, 15 nt, Human
ccaggccccugccac

SEQ ID NO: 2978014 - RNA, 14 nt, Human
ccaggccccugcca

SEQ ID NO: 2978015 - RNA, 12 nt, Human
ccaggccagagg

SEQ ID NO: 2978016 - RNA, 13 nt, Human
ccaggcccucugc

SEQ ID NO: 2978017 - RNA, 14 nt, Human
ccaggcccucugcc

SEQ ID NO: 2978018 - RNA, 15 nt, Human
cccaccuuggcugca

SEQ ID NO: 2978019 - RNA, 14 nt, Human
cccaccuuggcugc

SEQ ID NO: 2978020 - RNA, 22 nt, Human
cccaccuuggcucaaguccucu

SEQ ID NO: 2978021 - RNA, 15 nt, Human
cccaccuuggcucaa

SEQ ID NO: 2978022 - RNA, 17 nt, Human
cccacgcccccacuggu

SEQ ID NO: 2978023 - RNA, 19 nt, Human
cccacgcccccacugguga

SEQ ID NO: 2978024 - RNA, 14 nt, Human
cccaccucucucac

SEQ ID NO: 2978025 - RNA, 17 nt, Human
cccaccucucucacucc

SEQ ID NO: 2978026 - RNA, 13 nt, Human
cccaccucucuca

SEQ ID NO: 2978027 - RNA, 21 nt, Human
cccaccucagccucccaaagu

SEQ ID NO: 2978028 - RNA, 12 nt, Human
cccaccuuggcu

SEQ ID NO: 2978029 - RNA, 19 nt, Human
cccaccucucucacuccuu

SEQ ID NO: 2978030 - RNA, 14 nt, Human
cccaccuggcucug

SEQ ID NO: 2978031 - RNA, 15 nt, Human
cccaccucagccucc

SEQ ID NO: 2978032 - RNA, 14 nt, Human
cccaccucagccuc

SEQ ID NO: 2978033 - RNA, 12 nt, Human
cccaccucagcc

SEQ ID NO: 2978034 - RNA, 13 nt, Human
cccacaggaucag

SEQ ID NO: 2978035 - RNA, 17 nt, Human
cccacaggaucagucug

SEQ ID NO: 2978036 - RNA, 16 nt, Human
cccacagccccaucug

SEQ ID NO: 2978037 - RNA, 16 nt, Human
cccaagggccuggccu

SEQ ID NO: 2978038 - RNA, 15 nt, Human
cccaagugccaaaga

SEQ ID NO: 2978039 - RNA, 13 nt, Human
cccaagugccaaa

SEQ ID NO: 2978040 - RNA, 20 nt, Human
ccauuuugcugucccuuuuc

SEQ ID NO: 2978041 - RNA, 21 nt, Human
ccauuuuguauuuuacuaaua

SEQ ID NO: 2978042 - RNA, 12 nt, Human
cccaagggccug

SEQ ID NO: 2978043 - RNA, 14 nt, Human
cccaagggccuggc

SEQ ID NO: 2978044 - RNA, 18 nt, Human
ccauguuuuguuuacggu

SEQ ID NO: 2978045 - RNA, 16 nt, Human
ccaucuuaaaaacaac

SEQ ID NO: 2978046 - RNA, 13 nt, Human
ccauuugcuccuu

SEQ ID NO: 2978047 - RNA, 15 nt, Human
ccauucugccugccc

SEQ ID NO: 2978048 - RNA, 14 nt, Human
ccagcacaaagcag

SEQ ID NO: 2978049 - RNA, 19 nt, Human
ccagcaagugagagcuggg

SEQ ID NO: 2978050 - RNA, 18 nt, Human
ccagcaagugagagcugg

SEQ ID NO: 2978051 - RNA, 17 nt, Human
ccagcaagugagagcug

SEQ ID NO: 2978052 - RNA, 17 nt, Human
ccagcaggcucucaggc

SEQ ID NO: 2978053 - RNA, 18 nt, Human
ccagcaggcucucaggcc

SEQ ID NO: 2978054 - RNA, 16 nt, Human
ccagcaggcucucagg

SEQ ID NO: 2978055 - RNA, 17 nt, Human
ccagcaccaucucuccu

SEQ ID NO: 2978056 - RNA, 18 nt, Human
ccagcaccaucucuccuc

SEQ ID NO: 2978057 - RNA, 18 nt, Human
ccagauuucacucuccuu

SEQ ID NO: 2978058 - RNA, 19 nt, Human
ccagauuucacucuccuug

SEQ ID NO: 2978059 - RNA, 15 nt, Human
ccagauuucacucuc

SEQ ID NO: 2978060 - RNA, 22 nt, Human
ccagauugcaacaggcugggcu

SEQ ID NO: 2978061 - RNA, 23 nt, Human
ccagauugcaacaggcugggcuu

SEQ ID NO: 2978062 - RNA, 13 nt, Human
ccagagccccaca

SEQ ID NO: 2978063 - RNA, 16 nt, Human
ccagagccccacagcc

SEQ ID NO: 2978064 - RNA, 14 nt, Human
ccagagcccaccuu

SEQ ID NO: 2978065 - RNA, 16 nt, Human
ccagauugcaacaggc

SEQ ID NO: 2978066 - RNA, 14 nt, Human
ccagauugcaacag

SEQ ID NO: 2978067 - RNA, 23 nt, Human
ccagagccccacagccccaucug

SEQ ID NO: 2978068 - RNA, 17 nt, Human
ccagagccccacagccc

SEQ ID NO: 2978069 - RNA, 19 nt, Human
ccagccugagcgacaguga

SEQ ID NO: 2978070 - RNA, 13 nt, Human
ccagcgagcccug

SEQ ID NO: 2978071 - RNA, 23 nt, Human
ccagccuugaccauucuccaccu

SEQ ID NO: 2978072 - RNA, 13 nt, Human
ccagccuggguga

SEQ ID NO: 2978073 - RNA, 20 nt, Human
ccagccgagauagccaaggc

SEQ ID NO: 2978074 - RNA, 22 nt, Human
ccagccgagauagccaaggcca

SEQ ID NO: 2978075 - RNA, 17 nt, Human
ccagccgagauagccaa

SEQ ID NO: 2978076 - RNA, 19 nt, Human
ccagccccaaaacucuccu

SEQ ID NO: 2978077 - RNA, 19 nt, Human
ccagcaggcucucaggcca

SEQ ID NO: 2978078 - RNA, 20 nt, Human
ccagcaggcucucaggccag

SEQ ID NO: 2978079 - RNA, 21 nt, Human
ccagcaggcucucaggccagc

SEQ ID NO: 2978080 - RNA, 23 nt, Human
ccagcaggcucucaggccagcug

SEQ ID NO: 2978081 - RNA, 17 nt, Human
ccagcccacuucugcca

SEQ ID NO: 2978082 - RNA, 16 nt, Human
ccagcccacuucugcc

SEQ ID NO: 2978083 - RNA, 21 nt, Human
ccaccucccugcaauaaaaug

SEQ ID NO: 2978084 - RNA, 19 nt, Human
ccaccucccugcaauaaaa

SEQ ID NO: 2978085 - RNA, 14 nt, Human
ccaccucccugcaa

SEQ ID NO: 2978086 - RNA, 15 nt, Human
ccaccucccugcaau

SEQ ID NO: 2978087 - RNA, 12 nt, Human
ccacccugcucu

SEQ ID NO: 2978088 - RNA, 11 nt, Human
ccacccugcuc

SEQ ID NO: 2978089 - RNA, 14 nt, Human
ccaccucucucacu

SEQ ID NO: 2978090 - RNA, 16 nt, Human
ccaccucucucacucc

SEQ ID NO: 2978091 - RNA, 19 nt, Human
ccaccucucucacuccuug

SEQ ID NO: 2978092 - RNA, 20 nt, Human
ccaccucucucacuccuuga

SEQ ID NO: 2978093 - RNA, 13 nt, Human
ccaccuggccucu

SEQ ID NO: 2978094 - RNA, 18 nt, Human
ccaccuggccucugcacu

SEQ ID NO: 2978095 - RNA, 20 nt, Human
ccaccuggccucugcacucc

SEQ ID NO: 2978096 - RNA, 12 nt, Human
ccaccuggcucu

SEQ ID NO: 2978097 - RNA, 13 nt, Human
ccaccuggcucug

SEQ ID NO: 2978098 - RNA, 16 nt, Human
ccaccuggcucugugg

SEQ ID NO: 2978099 - RNA, 14 nt, Human
ccaccuggcucugu

SEQ ID NO: 2978100 - RNA, 13 nt, Human
ccaccugccaggg

SEQ ID NO: 2978101 - RNA, 14 nt, Human
ccaccugccaggga

SEQ ID NO: 2978102 - RNA, 12 nt, Human
ccaccugccagg

SEQ ID NO: 2978103 - RNA, 15 nt, Human
ccaccugccagggac

SEQ ID NO: 2978104 - RNA, 19 nt, Human
ccacccccacccaagggcc

SEQ ID NO: 2978105 - RNA, 12 nt, Human
ccacccccuagg

SEQ ID NO: 2978106 - RNA, 19 nt, Human
ccaccccucaacaccucug

SEQ ID NO: 2978107 - RNA, 14 nt, Human
ccacccuccuuuca

SEQ ID NO: 2978108 - RNA, 14 nt, Human
ccagacaucaacag

SEQ ID NO: 2978109 - RNA, 17 nt, Human
ccagacacauguccaag

SEQ ID NO: 2978110 - RNA, 20 nt, Human
ccagacacauguccaagaag

SEQ ID NO: 2978111 - RNA, 22 nt, Human
ccagacacauguccaagaagcc

SEQ ID NO: 2978112 - RNA, 15 nt, Human
ccagacccggcugcg

SEQ ID NO: 2978113 - RNA, 14 nt, Human
ccagacccggcugc

SEQ ID NO: 2978114 - RNA, 22 nt, Human
ccagaagaaaauagugguguga

SEQ ID NO: 2978115 - RNA, 16 nt, Human
ccacugugccaugugc

SEQ ID NO: 2978116 - RNA, 15 nt, Human
ccacugugccaugug

SEQ ID NO: 2978117 - RNA, 19 nt, Human
ccacugugccaugugccag

SEQ ID NO: 2978118 - RNA, 20 nt, Human
ccacugugcuccagccuggg

SEQ ID NO: 2978119 - RNA, 21 nt, Human
ccacugcaucguuucaucuuc

SEQ ID NO: 2978120 - RNA, 23 nt, Human
ccacugcaucguuucaucuucca

SEQ ID NO: 2978121 - RNA, 15 nt, Human
ccacugcucugguua

SEQ ID NO: 2978122 - RNA, 13 nt, Human
ccacugcucuggu

SEQ ID NO: 2978123 - RNA, 12 nt, Human
ccacugcucugg

SEQ ID NO: 2978124 - RNA, 11 nt, Human
ccacugcucug

SEQ ID NO: 2978125 - RNA, 20 nt, Human
ccacugcuuuuggucugugu

SEQ ID NO: 2978126 - RNA, 22 nt, Human
ccacugcuuuuggucuguguga

SEQ ID NO: 2978127 - RNA, 23 nt, Human
ccacuggugacaugucuuuucuu

SEQ ID NO: 2978128 - RNA, 15 nt, Human
ccacugguucuucuu

SEQ ID NO: 2978129 - RNA, 19 nt, Human
ccacuggguguaaacacau

SEQ ID NO: 2978130 - RNA, 14 nt, Human
ccacugugaagaga

SEQ ID NO: 2978131 - RNA, 15 nt, Human
ccacugugaagagaa

SEQ ID NO: 2978132 - RNA, 15 nt, Human
cccucugcccacucc

SEQ ID NO: 2978133 - RNA, 18 nt, Human
cccucugcccacucccug

SEQ ID NO: 2978134 - RNA, 11 nt, Human
cccucugccca

SEQ ID NO: 2978135 - RNA, 23 nt, Human
cccucuccugggcagcugccucc

SEQ ID NO: 2978136 - RNA, 19 nt, Human
cccucugcccacucccugc

SEQ ID NO: 2978137 - RNA, 22 nt, Human
cccucuccugggcagcugccuc

SEQ ID NO: 2978138 - RNA, 21 nt, Human
cccucuccugggcagcugccu

SEQ ID NO: 2978139 - RNA, 15 nt, Human
cccucuccugggcag

SEQ ID NO: 2978140 - RNA, 20 nt, Human
cccucuccugggcagcugcc

SEQ ID NO: 2978141 - RNA, 20 nt, Human
cccucuuucccucccuuccu

SEQ ID NO: 2978142 - RNA, 17 nt, Human
cccucuuucccucccuu

SEQ ID NO: 2978143 - RNA, 12 nt, Human
cccucuuucccu

SEQ ID NO: 2978144 - RNA, 23 nt, Human
cccucccucuuucccucccuucc

SEQ ID NO: 2978145 - RNA, 12 nt, Human
cccuuccaugga

SEQ ID NO: 2978146 - RNA, 15 nt, Human
cccuuacgugagucc

SEQ ID NO: 2978147 - RNA, 17 nt, Human
cccuuacgugaguccug

SEQ ID NO: 2978148 - RNA, 14 nt, Human
cccuuagcagggaa

SEQ ID NO: 2978149 - RNA, 23 nt, Human
cccuuagcagggaaacagcuaau

SEQ ID NO: 2978150 - RNA, 20 nt, Human
cccuuaccugccaggaagcc

SEQ ID NO: 2978151 - RNA, 23 nt, Human
cccuuaccugccaggaagccagc

SEQ ID NO: 2978152 - RNA, 17 nt, Human
cccuuaccugccaggaa

SEQ ID NO: 2978153 - RNA, 19 nt, Human
cccuuaccucggugccuuc

SEQ ID NO: 2978154 - RNA, 19 nt, Human
cccuguuuguuucugaaag

SEQ ID NO: 2978155 - RNA, 16 nt, Human
cccuguuuguuucuga

SEQ ID NO: 2978156 - RNA, 13 nt, Human
cccuguucuggca

SEQ ID NO: 2978157 - RNA, 14 nt, Human
cccuguucuggcag

SEQ ID NO: 2978158 - RNA, 21 nt, Human
cccuggugaccagcaccaucu

SEQ ID NO: 2978159 - RNA, 21 nt, Human
cccugguggcagcucaccucu

SEQ ID NO: 2978160 - RNA, 13 nt, Human
cccugguggcagu

SEQ ID NO: 2978161 - RNA, 21 nt, Human
cccuguagagugggagcugag

SEQ ID NO: 2978162 - RNA, 14 nt, Human
cccugguggcagug

SEQ ID NO: 2978163 - RNA, 21 nt, Human
cccugcucuccgaccagacac

SEQ ID NO: 2978164 - RNA, 22 nt, Human
cccugcucuccgaccagacacc

SEQ ID NO: 2978165 - RNA, 14 nt, Human
cccugcugcuccua

SEQ ID NO: 2978166 - RNA, 12 nt, Human
cccugcugcucc

SEQ ID NO: 2978167 - RNA, 11 nt, Human
cccugccuccu

SEQ ID NO: 2978168 - RNA, 12 nt, Human
cccugaggccca

SEQ ID NO: 2978169 - RNA, 20 nt, Human
cccugcagagggcacagaaa

SEQ ID NO: 2978170 - RNA, 18 nt, Human
ccuacaggagugagcacu

SEQ ID NO: 2978171 - RNA, 18 nt, Human
ccuaggugacagagugag

SEQ ID NO: 2978172 - RNA, 23 nt, Human
ccuaggcauuugcugaauacaga

SEQ ID NO: 2978173 - RNA, 21 nt, Human
ccuacaguugaaaaacagcug

SEQ ID NO: 2978174 - RNA, 14 nt, Human
ccgcuggggccagu

SEQ ID NO: 2978175 - RNA, 11 nt, Human
ccgcuggggcc

SEQ ID NO: 2978176 - RNA, 13 nt, Human
ccgggccacagag

SEQ ID NO: 2978177 - RNA, 22 nt, Human
ccgggcacucagaagacacuga

SEQ ID NO: 2978178 - RNA, 20 nt, Human
ccgggcacucagaagacacu

SEQ ID NO: 2978179 - RNA, 21 nt, Human
ccggcuccaggcuccuuuagc

SEQ ID NO: 2978180 - RNA, 16 nt, Human
ccggcuccaggcuccu

SEQ ID NO: 2978181 - RNA, 18 nt, Human
ccgggcucugccucccau

SEQ ID NO: 2978182 - RNA, 13 nt, Human
ccgggcucugccu

SEQ ID NO: 2978183 - RNA, 14 nt, Human
ccgggcucugccuc

SEQ ID NO: 2978184 - RNA, 15 nt, Human
ccgggcucugccucc

SEQ ID NO: 2978185 - RNA, 18 nt, Human
ccgugaggccagagacac

SEQ ID NO: 2978186 - RNA, 15 nt, Human
ccgagauugcaccac

SEQ ID NO: 2978187 - RNA, 19 nt, Human
ccgagauugcaccacugca

SEQ ID NO: 2978188 - RNA, 21 nt, Human
ccgagauugcaccacugcacu

SEQ ID NO: 2978189 - RNA, 23 nt, Human
ccgcacugggcuuggggaccaga

SEQ ID NO: 2978190 - RNA, 19 nt, Human
ccgcacugggcuuggggac

SEQ ID NO: 2978191 - RNA, 14 nt, Human
ccgaguagcuggga

SEQ ID NO: 2978192 - RNA, 19 nt, Human
ccgagcuuugaaaauucag

SEQ ID NO: 2978193 - RNA, 15 nt, Human
ccccucggagaagag

SEQ ID NO: 2978194 - RNA, 17 nt, Human
ccccuccucugcuugcc

SEQ ID NO: 2978195 - RNA, 14 nt, Human
ccccuccucugcuu

SEQ ID NO: 2978196 - RNA, 13 nt, Human
ccccuccucugcu

SEQ ID NO: 2978197 - RNA, 16 nt, Human
ccccucagggucccug

SEQ ID NO: 2978198 - RNA, 22 nt, Human
ccccucagggucccugguggca

SEQ ID NO: 2978199 - RNA, 12 nt, Human
ccccuccaugug

SEQ ID NO: 2978200 - RNA, 15 nt, Human
ccccucaacaccucu

SEQ ID NO: 2978201 - RNA, 16 nt, Human
ccccucaacaccucug

SEQ ID NO: 2978202 - RNA, 23 nt, Human
ccccucaacucuccuccagaguc

SEQ ID NO: 2978203 - RNA, 12 nt, Human
cccccagccugc

SEQ ID NO: 2978204 - RNA, 19 nt, Human
cccccugacaacacucauu

SEQ ID NO: 2978205 - RNA, 17 nt, Human
cccccugacaacacuca

SEQ ID NO: 2978206 - RNA, 20 nt, Human
ccccagugcccacaggauca

SEQ ID NO: 2978207 - RNA, 16 nt, Human
ccccagugcccacagg

SEQ ID NO: 2978208 - RNA, 15 nt, Human
ccccagugcccacag

SEQ ID NO: 2978209 - RNA, 14 nt, Human
ccccagugcccaca

SEQ ID NO: 2978210 - RNA, 15 nt, Human
cccccacuggugaca

SEQ ID NO: 2978211 - RNA, 11 nt, Human
cccccacuggu

SEQ ID NO: 2978212 - RNA, 13 nt, Human
cccccacugguga

SEQ ID NO: 2978213 - RNA, 14 nt, Human
ccccauccucugua

SEQ ID NO: 2978214 - RNA, 13 nt, Human
cccccacccaagg

SEQ ID NO: 2978215 - RNA, 24 nt, Human
cccccacccaagggccuggccuga

SEQ ID NO: 2978216 - RNA, 20 nt, Human
ccccugcugguucaggguug

SEQ ID NO: 2978217 - RNA, 15 nt, Human
ccccugcugguucag

SEQ ID NO: 2978218 - RNA, 13 nt, Human
ccccugcugguuc

SEQ ID NO: 2978219 - RNA, 11 nt, Human
ccccugcuggu

SEQ ID NO: 2978220 - RNA, 14 nt, Human
ccccugcugggugu

SEQ ID NO: 2978221 - RNA, 17 nt, Human
ccccugcuggguguggc

SEQ ID NO: 2978222 - RNA, 18 nt, Human
ccccuggaugcagccuca

SEQ ID NO: 2978223 - RNA, 19 nt, Human
ccccuggaugcagccucac

SEQ ID NO: 2978224 - RNA, 16 nt, Human
ccccuggcacuggcaa

SEQ ID NO: 2978225 - RNA, 14 nt, Human
ccccuggcacuggc

SEQ ID NO: 2978226 - RNA, 15 nt, Human
ccccuggaugcagcc

SEQ ID NO: 2978227 - RNA, 19 nt, Human
ccccugcccggcugcggaa

SEQ ID NO: 2978228 - RNA, 17 nt, Human
ccccugcccggcugcgg

SEQ ID NO: 2978229 - RNA, 20 nt, Human
cccgcccaggcuuagucacu

SEQ ID NO: 2978230 - RNA, 22 nt, Human
cccgcccaggcuuagucacuga

SEQ ID NO: 2978231 - RNA, 23 nt, Human
cccgcuaagagggagggagggcu

SEQ ID NO: 2978232 - RNA, 13 nt, Human
ccccuuccaugga

SEQ ID NO: 2978233 - RNA, 20 nt, Human
ccccuuccauggacuuuguu

SEQ ID NO: 2978234 - RNA, 22 nt, Human
cccgaauagcugggacuacagg

SEQ ID NO: 2978235 - RNA, 22 nt, Human
ccccuguggaugcugcugcccc

SEQ ID NO: 2978236 - RNA, 20 nt, Human
ccccuguggaugcugcugcc

SEQ ID NO: 2978237 - RNA, 19 nt, Human
ccccuguggaugcugcugc

SEQ ID NO: 2978238 - RNA, 21 nt, Human
ccccacccaagggccuggccu

SEQ ID NO: 2978239 - RNA, 15 nt, Human
ccccaccgcagacag

SEQ ID NO: 2978240 - RNA, 19 nt, Human
ccccaccgcagacaggacc

SEQ ID NO: 2978241 - RNA, 14 nt, Human
ccccacuggugaca

SEQ ID NO: 2978242 - RNA, 20 nt, Human
ccccacuccggcccuccaga

SEQ ID NO: 2978243 - RNA, 16 nt, Human
ccccacuccggcccuc

SEQ ID NO: 2978244 - RNA, 14 nt, Human
cccaguugggugga

SEQ ID NO: 2978245 - RNA, 19 nt, Human
cccaucucuacaaaaagca

SEQ ID NO: 2978246 - RNA, 17 nt, Human
cccaucugcagggcccc

SEQ ID NO: 2978247 - RNA, 21 nt, Human
cccaucugcgggggcagugcu

SEQ ID NO: 2978248 - RNA, 22 nt, Human
cccaucugcgggggcagugcuc

SEQ ID NO: 2978249 - RNA, 22 nt, Human
cccaugagccucagcauccugg

SEQ ID NO: 2978250 - RNA, 21 nt, Human
cccaugagggagaugccauga

SEQ ID NO: 2978251 - RNA, 20 nt, Human
cccaugagggagaugccaug

SEQ ID NO: 2978252 - RNA, 14 nt, Human
cccaugagccucag

SEQ ID NO: 2978253 - RNA, 19 nt, Human
aaaaauuuacuuuaaacua

SEQ ID NO: 2978254 - RNA, 18 nt, Human
aaaaauuuacuuuaaacu

SEQ ID NO: 2978255 - RNA, 13 nt, Human
aaaaauuuacuuu

SEQ ID NO: 2978256 - RNA, 14 nt, Human
aaaacaaggaugaa

SEQ ID NO: 2978257 - RNA, 12 nt, Human
aaaacacagcaa

SEQ ID NO: 2978258 - RNA, 13 nt, Human
aaaacacagcaag

SEQ ID NO: 2978259 - RNA, 12 nt, Human
aaaacacauuuu

SEQ ID NO: 2978260 - RNA, 18 nt, Human
aaaacacagcaaggguga

SEQ ID NO: 2978261 - RNA, 17 nt, Human
aaaacaaggaugaauua

SEQ ID NO: 2978262 - RNA, 12 nt, Human
aaaaagaggcua

SEQ ID NO: 2978263 - RNA, 13 nt, Human
aaaaacugauuuu

SEQ ID NO: 2978264 - RNA, 14 nt, Human
aaaaacauggccuu

SEQ ID NO: 2978265 - RNA, 15 nt, Human
aaaaacugauuuuuu

SEQ ID NO: 2978266 - RNA, 14 nt, Human
aaaaacacaaaagu

SEQ ID NO: 2978267 - RNA, 19 nt, Human
agccccacccucagaugca

SEQ ID NO: 2978268 - RNA, 20 nt, Human
agccgagaucacgccacugc

SEQ ID NO: 2978269 - RNA, 19 nt, Human
agccgagaucacgccacug

SEQ ID NO: 2978270 - RNA, 15 nt, Human
agcccugagcuuucu

SEQ ID NO: 2978271 - RNA, 18 nt, Human
agcccugaacauuucaug

SEQ ID NO: 2978272 - RNA, 20 nt, Human
agccccaucccaaacccuuc

SEQ ID NO: 2978273 - RNA, 11 nt, Human
agccccauccu

SEQ ID NO: 2978274 - RNA, 16 nt, Human
agccccagugcccaca

SEQ ID NO: 2978275 - RNA, 21 nt, Human
agccgggcgugguggugagug

SEQ ID NO: 2978276 - RNA, 19 nt, Human
agccucccaaagugcuggg

SEQ ID NO: 2978277 - RNA, 18 nt, Human
agccucccaaagugcugg

SEQ ID NO: 2978278 - RNA, 14 nt, Human
agccgcuggggcca

SEQ ID NO: 2978279 - RNA, 22 nt, Human
agccgcuggggccaguuggucc

SEQ ID NO: 2978280 - RNA, 20 nt, Human
agccgagauugcaccacugc

SEQ ID NO: 2978281 - RNA, 19 nt, Human
agccgagauugcaccacug

SEQ ID NO: 2978282 - RNA, 21 nt, Human
agccgagaucacgccacugca

SEQ ID NO: 2978283 - RNA, 17 nt, Human
agccucccgaguagcug

SEQ ID NO: 2978284 - RNA, 22 nt, Human
agccucccgaauagcugggacu

SEQ ID NO: 2978285 - RNA, 20 nt, Human
agccucccgaauagcuggga

SEQ ID NO: 2978286 - RNA, 19 nt, Human
agccucccgaauagcuggg

SEQ ID NO: 2978287 - RNA, 18 nt, Human
agccucccgaauagcugg

SEQ ID NO: 2978288 - RNA, 20 nt, Human
agccucccaaagugcuggga

SEQ ID NO: 2978289 - RNA, 17 nt, Human
agccucccaaagugcug

SEQ ID NO: 2978290 - RNA, 22 nt, Human
agccucccgaguagcugggacu

SEQ ID NO: 2978291 - RNA, 20 nt, Human
agauguagacaguuggguuu

SEQ ID NO: 2978292 - RNA, 18 nt, Human
agauguacgacuugcaua

SEQ ID NO: 2978293 - RNA, 14 nt, Human
agauguagaggaga

SEQ ID NO: 2978294 - RNA, 21 nt, Human
agaugggagaaucacuugaac

SEQ ID NO: 2978295 - RNA, 20 nt, Human
agcagcccucaauugugaaa

SEQ ID NO: 2978296 - RNA, 15 nt, Human
agcagccacauuccu

SEQ ID NO: 2978297 - RNA, 18 nt, Human
agcaguucagagcugccc

SEQ ID NO: 2978298 - RNA, 17 nt, Human
agcaguucagagcugcc

SEQ ID NO: 2978299 - RNA, 15 nt, Human
agcaguucagagcug

SEQ ID NO: 2978300 - RNA, 16 nt, Human
agcaguucagagcugc

SEQ ID NO: 2978301 - RNA, 23 nt, Human
agcaguugaaaagacuccaaaga

SEQ ID NO: 2978302 - RNA, 21 nt, Human
agcaguugaaaagacuccaaa

SEQ ID NO: 2978303 - RNA, 19 nt, Human
agcacuaaggugugcucug

SEQ ID NO: 2978304 - RNA, 21 nt, Human
agcagccacauuccugaugcu

SEQ ID NO: 2978305 - RNA, 12 nt, Human
agcaugaagaca

SEQ ID NO: 2978306 - RNA, 12 nt, Human
agcaugccugga

SEQ ID NO: 2978307 - RNA, 23 nt, Human
agccaaagcuaggccuggccaga

SEQ ID NO: 2978308 - RNA, 20 nt, Human
agccaaagcuaggccuggcc

SEQ ID NO: 2978309 - RNA, 19 nt, Human
agccaaagcuaggccuggc

SEQ ID NO: 2978310 - RNA, 18 nt, Human
agccaaagcuaggccugg

SEQ ID NO: 2978311 - RNA, 23 nt, Human
agccaaggccaaaggaagcacau

SEQ ID NO: 2978312 - RNA, 22 nt, Human
agccaaggccaaaggaagcaca

SEQ ID NO: 2978313 - RNA, 20 nt, Human
agccaaggccaaaggaagca

SEQ ID NO: 2978314 - RNA, 20 nt, Human
agccagaggagagaggaccc

SEQ ID NO: 2978315 - RNA, 19 nt, Human
agccagauuuuccugaaaa

SEQ ID NO: 2978316 - RNA, 15 nt, Human
agccagauuuuccug

SEQ ID NO: 2978317 - RNA, 14 nt, Human
agccauuuguccca

SEQ ID NO: 2978318 - RNA, 17 nt, Human
agccauuugucccaagu

SEQ ID NO: 2978319 - RNA, 18 nt, Human
agccauuugucccaagug

SEQ ID NO: 2978320 - RNA, 19 nt, Human
agcaguucagagcugcccu

SEQ ID NO: 2978321 - RNA, 16 nt, Human
agagguacacuuguga

SEQ ID NO: 2978322 - RNA, 17 nt, Human
agagguacacuugugaa

SEQ ID NO: 2978323 - RNA, 23 nt, Human
agaggguggugaccucugccuga

SEQ ID NO: 2978324 - RNA, 22 nt, Human
agauacuuggggggcugaggug

SEQ ID NO: 2978325 - RNA, 13 nt, Human
agauagccaaggc

SEQ ID NO: 2978326 - RNA, 16 nt, Human
agaggggaagagacuu

SEQ ID NO: 2978327 - RNA, 22 nt, Human
agaggggaacagacuggaagca

SEQ ID NO: 2978328 - RNA, 13 nt, Human
agaggagaggggc

SEQ ID NO: 2978329 - RNA, 15 nt, Human
agauagccaaggcca

SEQ ID NO: 2978330 - RNA, 16 nt, Human
agauagccaaggccaa

SEQ ID NO: 2978331 - RNA, 21 nt, Human
agauaggucagugcaaauacu

SEQ ID NO: 2978332 - RNA, 17 nt, Human
agacugcauuauauuua

SEQ ID NO: 2978333 - RNA, 10 nt, Human
agagaagaga

SEQ ID NO: 2978334 - RNA, 21 nt, Human
agagaagagauugugguuuca

SEQ ID NO: 2978335 - RNA, 23 nt, Human
agagaggguggugaccucugccu

SEQ ID NO: 2978336 - RNA, 15 nt, Human
agagccccacagccc

SEQ ID NO: 2978337 - RNA, 13 nt, Human
agagccccacagc

SEQ ID NO: 2978338 - RNA, 23 nt, Human
agacugaguacguugugcauuug

SEQ ID NO: 2978339 - RNA, 19 nt, Human
agacggagucccaccuugg

SEQ ID NO: 2978340 - RNA, 18 nt, Human
agacgggggcagagaggg

SEQ ID NO: 2978341 - RNA, 18 nt, Human
agacagcccgggcucugc

SEQ ID NO: 2978342 - RNA, 20 nt, Human
agacagcccgggcucugccu

SEQ ID NO: 2978343 - RNA, 17 nt, Human
agacagcccgggcucug

SEQ ID NO: 2978344 - RNA, 16 nt, Human
agacagcccgggcucu

SEQ ID NO: 2978345 - RNA, 14 nt, Human
agaccaucccugaa

SEQ ID NO: 2978346 - RNA, 17 nt, Human
agaccaucccugaaggc

SEQ ID NO: 2978347 - RNA, 18 nt, Human
agaccaucccugaaggcc

SEQ ID NO: 2978348 - RNA, 21 nt, Human
agaccaucccugaaggccccg

SEQ ID NO: 2978349 - RNA, 13 nt, Human
agaccaucccuga

SEQ ID NO: 2978350 - RNA, 15 nt, Human
agacaauuuauuaug

SEQ ID NO: 2978351 - RNA, 19 nt, Human
agacaaugacuuacuguac

SEQ ID NO: 2978352 - RNA, 21 nt, Human
agacaauuuauuauggcacau

SEQ ID NO: 2978353 - RNA, 17 nt, Human
agacaaugacuuacugu

SEQ ID NO: 2978354 - RNA, 13 nt, Human
agacaaugacuua

SEQ ID NO: 2978355 - RNA, 14 nt, Human
agguacacuuguga

SEQ ID NO: 2978356 - RNA, 17 nt, Human
agguaaggaauaccugu

SEQ ID NO: 2978357 - RNA, 16 nt, Human
agguacacuugugaau

SEQ ID NO: 2978358 - RNA, 17 nt, Human
agguacacuugugaaua

SEQ ID NO: 2978359 - RNA, 14 nt, Human
aggucgaggcagga

SEQ ID NO: 2978360 - RNA, 16 nt, Human
aggugcugccauccag

SEQ ID NO: 2978361 - RNA, 17 nt, Human
aggugcugccauccagg

SEQ ID NO: 2978362 - RNA, 13 nt, Human
agguucagcuugu

SEQ ID NO: 2978363 - RNA, 15 nt, Human
agguuaauaaaguaa

SEQ ID NO: 2978364 - RNA, 14 nt, Human
agguuaauguucau

SEQ ID NO: 2978365 - RNA, 17 nt, Human
agguucaaagauauuuu

SEQ ID NO: 2978366 - RNA, 15 nt, Human
agguucaaagauauu

SEQ ID NO: 2978367 - RNA, 12 nt, Human
agggacagaggg

SEQ ID NO: 2978368 - RNA, 13 nt, Human
agggacagagggg

SEQ ID NO: 2978369 - RNA, 20 nt, Human
agggacagaggggguggccu

SEQ ID NO: 2978370 - RNA, 21 nt, Human
agggacgcuacccgggaaggg

SEQ ID NO: 2978371 - RNA, 17 nt, Human
agggacgcuacccggga

SEQ ID NO: 2978372 - RNA, 18 nt, Human
aggcugccucucccauca

SEQ ID NO: 2978373 - RNA, 16 nt, Human
aggcugccagugccug

SEQ ID NO: 2978374 - RNA, 15 nt, Human
aggcugccagugccu

SEQ ID NO: 2978375 - RNA, 14 nt, Human
aggcugccagugcc

SEQ ID NO: 2978376 - RNA, 20 nt, Human
aggcugccagugccugggug

SEQ ID NO: 2978377 - RNA, 19 nt, Human
aggcugccagugccugggu

SEQ ID NO: 2978378 - RNA, 23 nt, Human
aggcuagugugguguuuccuggc

SEQ ID NO: 2978379 - RNA, 13 nt, Human
aggcugccagugc

SEQ ID NO: 2978380 - RNA, 15 nt, Human
aggggcacagggucu

SEQ ID NO: 2978381 - RNA, 21 nt, Human
aggggauagagagagaccacu

SEQ ID NO: 2978382 - RNA, 16 nt, Human
aggggauagagagaga

SEQ ID NO: 2978383 - RNA, 19 nt, Human
agggcgggaggauguucug

SEQ ID NO: 2978384 - RNA, 15 nt, Human
agggccuggccugag

SEQ ID NO: 2978385 - RNA, 16 nt, Human
agggccuggccugagc

SEQ ID NO: 2978386 - RNA, 17 nt, Human
agggccuggccugagcu

SEQ ID NO: 2978387 - RNA, 22 nt, Human
agggcacagaaaauggaagaca

SEQ ID NO: 2978388 - RNA, 21 nt, Human
agggcacaccgggcacucaga

SEQ ID NO: 2978389 - RNA, 20 nt, Human
agggcacaccgggcacucag

SEQ ID NO: 2978390 - RNA, 17 nt, Human
agggcacaccgggcacu

SEQ ID NO: 2978391 - RNA, 20 nt, Human
aggaccccuccaugugggcu

SEQ ID NO: 2978392 - RNA, 14 nt, Human
aggaccucagguga

SEQ ID NO: 2978393 - RNA, 20 nt, Human
aggaccucaggugagaagca

SEQ ID NO: 2978394 - RNA, 15 nt, Human
aggagagcuagcagc

SEQ ID NO: 2978395 - RNA, 14 nt, Human
aggagaggggcaca

SEQ ID NO: 2978396 - RNA, 16 nt, Human
aggagaggggcacagg

SEQ ID NO: 2978397 - RNA, 18 nt, Human
aggagaggggcacagggu

SEQ ID NO: 2978398 - RNA, 12 nt, Human
aggauucuuccu

SEQ ID NO: 2978399 - RNA, 14 nt, Human
aggauguugaaaaa

SEQ ID NO: 2978400 - RNA, 20 nt, Human
aggauguucugggacacagu

SEQ ID NO: 2978401 - RNA, 18 nt, Human
aggauguucugggacaca

SEQ ID NO: 2978402 - RNA, 17 nt, Human
aggaggggauagagaga

SEQ ID NO: 2978403 - RNA, 19 nt, Human
agcuggucccacucagucc

SEQ ID NO: 2978404 - RNA, 21 nt, Human
agcuggucccacucaguccau

SEQ ID NO: 2978405 - RNA, 22 nt, Human
agcugggugucaagagggucug

SEQ ID NO: 2978406 - RNA, 17 nt, Human
agcugggugucaagagg

SEQ ID NO: 2978407 - RNA, 18 nt, Human
agcuucacuguaaaauaa

SEQ ID NO: 2978408 - RNA, 13 nt, Human
aggaaaaacugau

SEQ ID NO: 2978409 - RNA, 15 nt, Human
aggaaaaacugauuu

SEQ ID NO: 2978410 - RNA, 22 nt, Human
augcuugcugcugauuuaaaca

SEQ ID NO: 2978411 - RNA, 16 nt, Human
augcuugcugcugauu

SEQ ID NO: 2978412 - RNA, 23 nt, Human
augcuugcugcugauuuaaacac

SEQ ID NO: 2978413 - RNA, 19 nt, Human
auggaaaugggcagagcag

SEQ ID NO: 2978414 - RNA, 20 nt, Human
auggaaaugggcagagcaga

SEQ ID NO: 2978415 - RNA, 22 nt, Human
augcuucuucagagacuccugc

SEQ ID NO: 2978416 - RNA, 23 nt, Human
auggcugccaaugggagcucaug

SEQ ID NO: 2978417 - RNA, 15 nt, Human
augggaaugaauguc

SEQ ID NO: 2978418 - RNA, 21 nt, Human
augccuggauggggcugcacc

SEQ ID NO: 2978419 - RNA, 23 nt, Human
augccuggauggggcugcaccgg

SEQ ID NO: 2978420 - RNA, 17 nt, Human
augccugggcagaagga

SEQ ID NO: 2978421 - RNA, 17 nt, Human
augccugguggcagcug

SEQ ID NO: 2978422 - RNA, 16 nt, Human
augccugguggcagcu

SEQ ID NO: 2978423 - RNA, 15 nt, Human
augccugguggcagc

SEQ ID NO: 2978424 - RNA, 12 nt, Human
augcauuugaaa

SEQ ID NO: 2978425 - RNA, 10 nt, Human
augcauuuga

SEQ ID NO: 2978426 - RNA, 18 nt, Human
augcauuugaaaauuuug

SEQ ID NO: 2978427 - RNA, 23 nt, Human
augcaugaaguaauaugcacaca

SEQ ID NO: 2978428 - RNA, 20 nt, Human
augcaugaaguaauaugcac

SEQ ID NO: 2978429 - RNA, 22 nt, Human
augcacacauuuuuuaaaugca

SEQ ID NO: 2978430 - RNA, 19 nt, Human
augcacacauuuuuuaaau

SEQ ID NO: 2978431 - RNA, 17 nt, Human
augcacacauuuuuuaa

SEQ ID NO: 2978432 - RNA, 23 nt, Human
augcacagaguuguuacauuuuu

SEQ ID NO: 2978433 - RNA, 14 nt, Human
augcacagcuaaca

SEQ ID NO: 2978434 - RNA, 21 nt, Human
augcacagcuaacauggaagu

SEQ ID NO: 2978435 - RNA, 21 nt, Human
auuaaaugacucuucccucaa

SEQ ID NO: 2978436 - RNA, 11 nt, Human
auuaaauuaug

SEQ ID NO: 2978437 - RNA, 16 nt, Human
auuaaaugcccagccc

SEQ ID NO: 2978438 - RNA, 13 nt, Human
auuaaauucuugc

SEQ ID NO: 2978439 - RNA, 14 nt, Human
auuaaaugacucuu

SEQ ID NO: 2978440 - RNA, 17 nt, Human
auuaaaugacucuuccc

SEQ ID NO: 2978441 - RNA, 14 nt, Human
auuaaaugcccagc

SEQ ID NO: 2978442 - RNA, 15 nt, Human
auuaaaugcccagcc

SEQ ID NO: 2978443 - RNA, 18 nt, Human
auguuuuaagaggcaggg

SEQ ID NO: 2978444 - RNA, 16 nt, Human
auguuuuaagaggcag

SEQ ID NO: 2978445 - RNA, 14 nt, Human
auguucuuaauucu

SEQ ID NO: 2978446 - RNA, 22 nt, Human
auguucugacccugcuucaaau

SEQ ID NO: 2978447 - RNA, 20 nt, Human
auguucuuaguggauguucu

SEQ ID NO: 2978448 - RNA, 15 nt, Human
auguucuuaauucuu

SEQ ID NO: 2978449 - RNA, 20 nt, Human
auguucuuucacccuuuucu

SEQ ID NO: 2978450 - RNA, 18 nt, Human
auguucucugaggacacu

SEQ ID NO: 2978451 - RNA, 20 nt, Human
augugggcuaguugggcuuc

SEQ ID NO: 2978452 - RNA, 14 nt, Human
auguguaaguauuc

SEQ ID NO: 2978453 - RNA, 22 nt, Human
auguguaauaaauauguuucac

SEQ ID NO: 2978454 - RNA, 17 nt, Human
auguguaauaaauaugu

SEQ ID NO: 2978455 - RNA, 13 nt, Human
auguguaauaaau

SEQ ID NO: 2978456 - RNA, 21 nt, Human
auguaagggaaacugccagca

SEQ ID NO: 2978457 - RNA, 22 nt, Human
auguaagggaaacugccagcaa

SEQ ID NO: 2978458 - RNA, 17 nt, Human
auguaagcucuacugag

SEQ ID NO: 2978459 - RNA, 20 nt, Human
auguaagggaaacugccagc

SEQ ID NO: 2978460 - RNA, 16 nt, Human
auguaaguaaacgguc

SEQ ID NO: 2978461 - RNA, 15 nt, Human
auggucggaaaacau

SEQ ID NO: 2978462 - RNA, 16 nt, Human
augucacaggcagguc

SEQ ID NO: 2978463 - RNA, 14 nt, Human
augucacaggcagg

SEQ ID NO: 2978464 - RNA, 15 nt, Human
augucacaggcaggu

SEQ ID NO: 2978465 - RNA, 20 nt, Human
augucagacacagauuggcc

SEQ ID NO: 2978466 - RNA, 15 nt, Human
augucagacacagau

SEQ ID NO: 2978467 - RNA, 13 nt, Human
augucagacacag

SEQ ID NO: 2978468 - RNA, 18 nt, Human
augucacuucuggauaua

SEQ ID NO: 2978469 - RNA, 15 nt, Human
augucacuucuggau

SEQ ID NO: 2978470 - RNA, 21 nt, Human
augucagacacagauuggcca

SEQ ID NO: 2978471 - RNA, 18 nt, Human
augacucuucccucaaau

SEQ ID NO: 2978472 - RNA, 12 nt, Human
augagccuggca

SEQ ID NO: 2978473 - RNA, 17 nt, Human
augacuccagaauuucc

SEQ ID NO: 2978474 - RNA, 12 nt, Human
augacuccagaa

SEQ ID NO: 2978475 - RNA, 16 nt, Human
augacuccagaauuuc

SEQ ID NO: 2978476 - RNA, 18 nt, Human
augacuauucaguggcua

SEQ ID NO: 2978477 - RNA, 12 nt, Human
augacccagugg

SEQ ID NO: 2978478 - RNA, 17 nt, Human
augaaaagccucuguuu

SEQ ID NO: 2978479 - RNA, 17 nt, Human
augaaaauaaucucuga

SEQ ID NO: 2978480 - RNA, 19 nt, Human
augaaaauaaucucugauu

SEQ ID NO: 2978481 - RNA, 13 nt, Human
augagccuggcaa

SEQ ID NO: 2978482 - RNA, 14 nt, Human
augagccuggcaag

SEQ ID NO: 2978483 - RNA, 23 nt, Human
aucuucuauauaauuccuguuuu

SEQ ID NO: 2978484 - RNA, 23 nt, Human
aucuucauggaauucacaaagua

SEQ ID NO: 2978485 - RNA, 22 nt, Human
aucuucauggaauucacaaagu

SEQ ID NO: 2978486 - RNA, 19 nt, Human
aucuuccaacucaaacucu

SEQ ID NO: 2978487 - RNA, 22 nt, Human
aucuuauaauuuaaaauaugcu

SEQ ID NO: 2978488 - RNA, 22 nt, Human
aucucucgugauugauaagaac

SEQ ID NO: 2978489 - RNA, 17 nt, Human
aucuugaagacuuuucu

SEQ ID NO: 2978490 - RNA, 17 nt, Human
aucuucuuuauaauucu

SEQ ID NO: 2978491 - RNA, 23 nt, Human
aucagcugcuacuacuccuguag

SEQ ID NO: 2978492 - RNA, 13 nt, Human
aucagcugcuacu

SEQ ID NO: 2978493 - RNA, 20 nt, Human
aucagccugcuccagcuguu

SEQ ID NO: 2978494 - RNA, 17 nt, Human
aucagcugcugaaacaa

SEQ ID NO: 2978495 - RNA, 19 nt, Human
aucauggagguuugaagau

SEQ ID NO: 2978496 - RNA, 11 nt, Human
aucagccuggg

SEQ ID NO: 2978497 - RNA, 20 nt, Human
aucagccugggcaaugugau

SEQ ID NO: 2978498 - RNA, 21 nt, Human
aucagccugggcaaugugaua

SEQ ID NO: 2978499 - RNA, 12 nt, Human
aucagcugcuac

SEQ ID NO: 2978500 - RNA, 16 nt, Human
auccacccaccucagc

SEQ ID NO: 2978501 - RNA, 20 nt, Human
auccacccaccucagccucc

SEQ ID NO: 2978502 - RNA, 18 nt, Human
auccacccaccucagccu

SEQ ID NO: 2978503 - RNA, 18 nt, Human
auccucauacccaccccc

SEQ ID NO: 2978504 - RNA, 19 nt, Human
auccucauacccaccccca

SEQ ID NO: 2978505 - RNA, 22 nt, Human
auccucauacccacccccaccc

SEQ ID NO: 2978506 - RNA, 15 nt, Human
aucccuacuguaauu

SEQ ID NO: 2978507 - RNA, 13 nt, Human
auccuccaggugc

SEQ ID NO: 2978508 - RNA, 14 nt, Human
auccuccaggugca

SEQ ID NO: 2978509 - RNA, 19 nt, Human
auccuccaggugcacaagc

SEQ ID NO: 2978510 - RNA, 22 nt, Human
auccuccaggugcacaagcucc

SEQ ID NO: 2978511 - RNA, 11 nt, Human
auccuccucag

SEQ ID NO: 2978512 - RNA, 14 nt, Human
auccuccucagauc

SEQ ID NO: 2978513 - RNA, 13 nt, Human
aucgaugcagugc

SEQ ID NO: 2978514 - RNA, 14 nt, Human
agucaaggcuuaga

SEQ ID NO: 2978515 - RNA, 16 nt, Human
agucaaggcuuagacc

SEQ ID NO: 2978516 - RNA, 16 nt, Human
agucaagugaaaaagg

SEQ ID NO: 2978517 - RNA, 17 nt, Human
agucaaauugugugaaa

SEQ ID NO: 2978518 - RNA, 15 nt, Human
agucaaauuguguga

SEQ ID NO: 2978519 - RNA, 13 nt, Human
agucaaauugugu

SEQ ID NO: 2978520 - RNA, 20 nt, Human
agucaagugaaaaaggagga

SEQ ID NO: 2978521 - RNA, 14 nt, Human
agucauucuucccu

SEQ ID NO: 2978522 - RNA, 13 nt, Human
agucauucuuuaa

SEQ ID NO: 2978523 - RNA, 11 nt, Human
aguccaagcau

SEQ ID NO: 2978524 - RNA, 16 nt, Human
aguccaagcauuuaga

SEQ ID NO: 2978525 - RNA, 21 nt, Human
aguccaagcauuuagauguau

SEQ ID NO: 2978526 - RNA, 18 nt, Human
agucauuauguuaauauu

SEQ ID NO: 2978527 - RNA, 23 nt, Human
agucauucagauaugauucaaau

SEQ ID NO: 2978528 - RNA, 20 nt, Human
agucauucagauaugauuca

SEQ ID NO: 2978529 - RNA, 15 nt, Human
agucauucagauaug

SEQ ID NO: 2978530 - RNA, 12 nt, Human
agucauuauguu

SEQ ID NO: 2978531 - RNA, 13 nt, Human
agugauccuccca

SEQ ID NO: 2978532 - RNA, 13 nt, Human
aguccugcccgcc

SEQ ID NO: 2978533 - RNA, 16 nt, Human
aguuguuacauuuuua

SEQ ID NO: 2978534 - RNA, 15 nt, Human
aguuguuacauuuuu

SEQ ID NO: 2978535 - RNA, 13 nt, Human
aguuguuacauuu

SEQ ID NO: 2978536 - RNA, 15 nt, Human
aguugaauuuuacau

SEQ ID NO: 2978537 - RNA, 18 nt, Human
aguuguaccgcaauguga

SEQ ID NO: 2978538 - RNA, 19 nt, Human
aguuguaccgcaaugugac

SEQ ID NO: 2978539 - RNA, 17 nt, Human
aguuacagacaaagcgu

SEQ ID NO: 2978540 - RNA, 18 nt, Human
aguuacagacaaagcgug

SEQ ID NO: 2978541 - RNA, 15 nt, Human
agugauuaccaggga

SEQ ID NO: 2978542 - RNA, 18 nt, Human
agugauuaccagggacug

SEQ ID NO: 2978543 - RNA, 21 nt, Human
agugucuuaauuaaaagaaua

SEQ ID NO: 2978544 - RNA, 23 nt, Human
agugugacaaggauugcuacugu

SEQ ID NO: 2978545 - RNA, 16 nt, Human
auauaauuccuguuuu

SEQ ID NO: 2978546 - RNA, 22 nt, Human
auauaauuccuguuuuuauuau

SEQ ID NO: 2978547 - RNA, 16 nt, Human
auaguaugguggcugg

SEQ ID NO: 2978548 - RNA, 21 nt, Human
auacuuauuuaaauagaugac

SEQ ID NO: 2978549 - RNA, 15 nt, Human
auacuuauuuaaaua

SEQ ID NO: 2978550 - RNA, 22 nt, Human
auacuuauuuaaauagaugaca

SEQ ID NO: 2978551 - RNA, 15 nt, Human
auaguaugguggcug

SEQ ID NO: 2978552 - RNA, 17 nt, Human
auauagcaagacauuau

SEQ ID NO: 2978553 - RNA, 23 nt, Human
auauagcuaggugacauauacau

SEQ ID NO: 2978554 - RNA, 22 nt, Human
auauacauacuuacaugugugu

SEQ ID NO: 2978555 - RNA, 15 nt, Human
auauacauacuuaca

SEQ ID NO: 2978556 - RNA, 16 nt, Human
auauaggaacuuaaau

SEQ ID NO: 2978557 - RNA, 11 nt, Human
auaucacuucc

SEQ ID NO: 2978558 - RNA, 18 nt, Human
auaucacuugucaauaaa

SEQ ID NO: 2978559 - RNA, 19 nt, Human
auaucccuuggacauuuua

SEQ ID NO: 2978560 - RNA, 23 nt, Human
auauccuaauaaaaaggugacca

SEQ ID NO: 2978561 - RNA, 15 nt, Human
auaucaauuuaaaaa

SEQ ID NO: 2978562 - RNA, 16 nt, Human
auaugcuuauacacuu

SEQ ID NO: 2978563 - RNA, 14 nt, Human
auaugcuuauacac

SEQ ID NO: 2978564 - RNA, 19 nt, Human
auaugcuuauacacuuaca

SEQ ID NO: 2978565 - RNA, 23 nt, Human
auaugcuucuguuuuauaauuuu

SEQ ID NO: 2978566 - RNA, 22 nt, Human
auaugccugggcagaaggaaga

SEQ ID NO: 2978567 - RNA, 19 nt, Human
auauccuaggagguaauga

SEQ ID NO: 2978568 - RNA, 19 nt, Human
auauuuauuacuguaagaa

SEQ ID NO: 2978569 - RNA, 14 nt, Human
auauuuauuacugu

SEQ ID NO: 2978570 - RNA, 18 nt, Human
auauuuauuuuaauaaug

SEQ ID NO: 2978571 - RNA, 14 nt, Human
auauucaggaagcu

SEQ ID NO: 2978572 - RNA, 16 nt, Human
auauucaggaagcuca

SEQ ID NO: 2978573 - RNA, 13 nt, Human
auauucaggaagc

SEQ ID NO: 2978574 - RNA, 13 nt, Human
auacuuauuuaaa

SEQ ID NO: 2978575 - RNA, 22 nt, Human
auacuuacauguguguauaugu

SEQ ID NO: 2978576 - RNA, 14 nt, Human
auaauuacuauguc

SEQ ID NO: 2978577 - RNA, 12 nt, Human
auaccugucccc

SEQ ID NO: 2978578 - RNA, 18 nt, Human
auaaugugaaacuggauu

SEQ ID NO: 2978579 - RNA, 21 nt, Human
auaaugugaaacuggauuaaa

SEQ ID NO: 2978580 - RNA, 19 nt, Human
auaaugugaaacuggauua

SEQ ID NO: 2978581 - RNA, 21 nt, Human
auaaguguauuuugaaauugu

SEQ ID NO: 2978582 - RNA, 13 nt, Human
auaaguguauuuu

SEQ ID NO: 2978583 - RNA, 14 nt, Human
auaagucugauuua

SEQ ID NO: 2978584 - RNA, 13 nt, Human
auaagucugauuu

SEQ ID NO: 2978585 - RNA, 11 nt, Human
auaagucugau

SEQ ID NO: 2978586 - RNA, 22 nt, Human
auaaguccucuagugaauguag

SEQ ID NO: 2978587 - RNA, 17 nt, Human
auaacagaagaaaauag

SEQ ID NO: 2978588 - RNA, 14 nt, Human
auaacagaagaaaa

SEQ ID NO: 2978589 - RNA, 21 nt, Human
auaacagaagaaaauagaauu

SEQ ID NO: 2978590 - RNA, 16 nt, Human
acgugcacgcacacug

SEQ ID NO: 2978591 - RNA, 18 nt, Human
acgcugugcugcccugcc

SEQ ID NO: 2978592 - RNA, 15 nt, Human
acgcugugcugcccu

SEQ ID NO: 2978593 - RNA, 16 nt, Human
acgcugugcugcccug

SEQ ID NO: 2978594 - RNA, 17 nt, Human
acgcugugcugcccugc

SEQ ID NO: 2978595 - RNA, 13 nt, Human
acguggcugcuuc

SEQ ID NO: 2978596 - RNA, 14 nt, Human
acguggcugcuuca

SEQ ID NO: 2978597 - RNA, 15 nt, Human
acguggcugcuucaa

SEQ ID NO: 2978598 - RNA, 11 nt, Human
acguggcugcu

SEQ ID NO: 2978599 - RNA, 16 nt, Human
acuaagagagaaugag

SEQ ID NO: 2978600 - RNA, 15 nt, Human
acuaagagagaauga

SEQ ID NO: 2978601 - RNA, 22 nt, Human
acuaaguuuuuauggcuuuugu

SEQ ID NO: 2978602 - RNA, 15 nt, Human
acuaaguuuuuaugg

SEQ ID NO: 2978603 - RNA, 17 nt, Human
acgauuucuguuuagau

SEQ ID NO: 2978604 - RNA, 14 nt, Human
acgauuucuguuua

SEQ ID NO: 2978605 - RNA, 18 nt, Human
acgccacugcacuauagc

SEQ ID NO: 2978606 - RNA, 13 nt, Human
acgauuucuguuu

SEQ ID NO: 2978607 - RNA, 12 nt, Human
acgauuucuguu

SEQ ID NO: 2978608 - RNA, 12 nt, Human
accuuggcugca

SEQ ID NO: 2978609 - RNA, 14 nt, Human
accuuggcucaagu

SEQ ID NO: 2978610 - RNA, 12 nt, Human
accuuggcucaa

SEQ ID NO: 2978611 - RNA, 16 nt, Human
accuuucaauaggaaa

SEQ ID NO: 2978612 - RNA, 14 nt, Human
accuuggcugcagg

SEQ ID NO: 2978613 - RNA, 17 nt, Human
accuuucaauaggaaaa

SEQ ID NO: 2978614 - RNA, 21 nt, Human
accuuucaauaggaaaaacug

SEQ ID NO: 2978615 - RNA, 23 nt, Human
accuuucaauaggaaaaacugau

SEQ ID NO: 2978616 - RNA, 16 nt, Human
accucugcacaagcug

SEQ ID NO: 2978617 - RNA, 18 nt, Human
accucugcacaagcugca

SEQ ID NO: 2978618 - RNA, 21 nt, Human
accucugcacaagcugcaccc

SEQ ID NO: 2978619 - RNA, 23 nt, Human
accugccccucaacucuccucca

SEQ ID NO: 2978620 - RNA, 20 nt, Human
accugccccucaacucuccu

SEQ ID NO: 2978621 - RNA, 16 nt, Human
acucuaccugcacacu

SEQ ID NO: 2978622 - RNA, 21 nt, Human
acucuacccucuuagaaaaac

SEQ ID NO: 2978623 - RNA, 13 nt, Human
acucuacccucuu

SEQ ID NO: 2978624 - RNA, 18 nt, Human
acucuacccucuuagaaa

SEQ ID NO: 2978625 - RNA, 22 nt, Human
acucuauaacaaaggauacuua

SEQ ID NO: 2978626 - RNA, 14 nt, Human
acucuaucaaguau

SEQ ID NO: 2978627 - RNA, 16 nt, Human
acucuaucaaguauua

SEQ ID NO: 2978628 - RNA, 16 nt, Human
acucugugucaggugg

SEQ ID NO: 2978629 - RNA, 11 nt, Human
acucuuaaaac

SEQ ID NO: 2978630 - RNA, 18 nt, Human
acucuuaaaacccaagug

SEQ ID NO: 2978631 - RNA, 13 nt, Human
acucccuuucaac

SEQ ID NO: 2978632 - RNA, 12 nt, Human
acucccuuucaa

SEQ ID NO: 2978633 - RNA, 14 nt, Human
acuagcuauggugu

SEQ ID NO: 2978634 - RNA, 13 nt, Human
acuccccugcugg

SEQ ID NO: 2978635 - RNA, 17 nt, Human
acuccccugcugggugu

SEQ ID NO: 2978636 - RNA, 14 nt, Human
acucccccaggugg

SEQ ID NO: 2978637 - RNA, 17 nt, Human
acucaaacucuuaaaac

SEQ ID NO: 2978638 - RNA, 16 nt, Human
acucaaacucuuaaaa

SEQ ID NO: 2978639 - RNA, 11 nt, Human
acuauaaugua

SEQ ID NO: 2978640 - RNA, 18 nt, Human
acucaaaagcugggcagg

SEQ ID NO: 2978641 - RNA, 13 nt, Human
acuuauuuaaaua

SEQ ID NO: 2978642 - RNA, 18 nt, Human
acuuauuuaaauagauga

SEQ ID NO: 2978643 - RNA, 19 nt, Human
acuucacauauugauuucc

SEQ ID NO: 2978644 - RNA, 20 nt, Human
acuuauuguagcauccugga

SEQ ID NO: 2978645 - RNA, 23 nt, Human
acuuauuguagcauccuggaaua

SEQ ID NO: 2978646 - RNA, 14 nt, Human
acuguuuagaugaa

SEQ ID NO: 2978647 - RNA, 19 nt, Human
acuuguaaaggaauuuaaa

SEQ ID NO: 2978648 - RNA, 20 nt, Human
acuuguaaaggaauuuaaaa

SEQ ID NO: 2978649 - RNA, 18 nt, Human
acuuguaaaggaauuuaa

SEQ ID NO: 2978650 - RNA, 15 nt, Human
acuuggucugugaga

SEQ ID NO: 2978651 - RNA, 13 nt, Human
acuuggucuguga

SEQ ID NO: 2978652 - RNA, 14 nt, Human
acuuggucugugag

SEQ ID NO: 2978653 - RNA, 18 nt, Human
acuucugccauauucugu

SEQ ID NO: 2978654 - RNA, 12 nt, Human
acugucuucagu

SEQ ID NO: 2978655 - RNA, 12 nt, Human
acuggaacucuc

SEQ ID NO: 2978656 - RNA, 14 nt, Human
acuggaagcacagc

SEQ ID NO: 2978657 - RNA, 15 nt, Human
acuggaagcacagcu

SEQ ID NO: 2978658 - RNA, 14 nt, Human
acuggagaaaaugg

SEQ ID NO: 2978659 - RNA, 16 nt, Human
acuggguguaaacaca

SEQ ID NO: 2978660 - RNA, 17 nt, Human
acuggguguaaacacau

SEQ ID NO: 2978661 - RNA, 22 nt, Human
acuuuuauaaacuuuaccuuuu

SEQ ID NO: 2978662 - RNA, 19 nt, Human
acuuuuauaaacuuuaccu

SEQ ID NO: 2978663 - RNA, 15 nt, Human
acuuuuauaaacuuu

SEQ ID NO: 2978664 - RNA, 20 nt, Human
acuuuuccguuucagcggaa

SEQ ID NO: 2978665 - RNA, 21 nt, Human
agaaaaguugaauuuuacaug

SEQ ID NO: 2978666 - RNA, 18 nt, Human
agaaaaguugaauuuuac

SEQ ID NO: 2978667 - RNA, 15 nt, Human
agaaaaguuuauaaa

SEQ ID NO: 2978668 - RNA, 22 nt, Human
agaaaauggacguguuaugacu

SEQ ID NO: 2978669 - RNA, 23 nt, Human
agaaaauggacguguuaugacuc

SEQ ID NO: 2978670 - RNA, 15 nt, Human
agaaaauggacgugu

SEQ ID NO: 2978671 - RNA, 20 nt, Human
agaaaauggacguguuauga

SEQ ID NO: 2978672 - RNA, 23 nt, Human
agaaaauggaagacagcucuuau

SEQ ID NO: 2978673 - RNA, 23 nt, Human
acuuuccuucauucaacccaccu

SEQ ID NO: 2978674 - RNA, 23 nt, Human
acuuuguucuggcucuuccaggc

SEQ ID NO: 2978675 - RNA, 18 nt, Human
agaaauaaaguuucuguu

SEQ ID NO: 2978676 - RNA, 15 nt, Human
agaaauaaaguuucu

SEQ ID NO: 2978677 - RNA, 23 nt, Human
agaaaggaggggauagagagaga

SEQ ID NO: 2978678 - RNA, 20 nt, Human
agaaaggaggggauagagag

SEQ ID NO: 2978679 - RNA, 11 nt, Human
acauuaaauga

SEQ ID NO: 2978680 - RNA, 12 nt, Human
acauuaaaugac

SEQ ID NO: 2978681 - RNA, 13 nt, Human
acauuaaagguac

SEQ ID NO: 2978682 - RNA, 13 nt, Human
acauguuacaaca

SEQ ID NO: 2978683 - RNA, 21 nt, Human
acauguuuuucuucucccuca

SEQ ID NO: 2978684 - RNA, 18 nt, Human
acaugcaaggucauuuuu

SEQ ID NO: 2978685 - RNA, 19 nt, Human
acaugcaaggucauuuuuu

SEQ ID NO: 2978686 - RNA, 20 nt, Human
acaugcacagcuaacaugga

SEQ ID NO: 2978687 - RNA, 23 nt, Human
acauaaacaagaccacguuucua

SEQ ID NO: 2978688 - RNA, 19 nt, Human
acaucagcacgauuucugu

SEQ ID NO: 2978689 - RNA, 21 nt, Human
acaucagcacgauuucuguuu

SEQ ID NO: 2978690 - RNA, 20 nt, Human
acaucagcacgauuucuguu

SEQ ID NO: 2978691 - RNA, 22 nt, Human
acaucagcacgauuucuguuua

SEQ ID NO: 2978692 - RNA, 16 nt, Human
acauuugcucauggaa

SEQ ID NO: 2978693 - RNA, 18 nt, Human
acauuugcucauggaauu

SEQ ID NO: 2978694 - RNA, 14 nt, Human
acauuuguauaaaa

SEQ ID NO: 2978695 - RNA, 21 nt, Human
acauuuggguuacuauuucuu

SEQ ID NO: 2978696 - RNA, 18 nt, Human
acauuuggguuacuauuu

SEQ ID NO: 2978697 - RNA, 14 nt, Human
accacuacauucug

SEQ ID NO: 2978698 - RNA, 19 nt, Human
accacguuucuaaaggcua

SEQ ID NO: 2978699 - RNA, 15 nt, Human
accacguuucuaaag

SEQ ID NO: 2978700 - RNA, 13 nt, Human
accagcagccugg

SEQ ID NO: 2978701 - RNA, 14 nt, Human
accagcagccugga

SEQ ID NO: 2978702 - RNA, 17 nt, Human
accagcagccuggaccc

SEQ ID NO: 2978703 - RNA, 15 nt, Human
acccacaagaaauga

SEQ ID NO: 2978704 - RNA, 14 nt, Human
acccaucuuaaaaa

SEQ ID NO: 2978705 - RNA, 13 nt, Human
acccaagggccug

SEQ ID NO: 2978706 - RNA, 16 nt, Human
acccaagggccuggcc

SEQ ID NO: 2978707 - RNA, 16 nt, Human
acccaaguccaagcau

SEQ ID NO: 2978708 - RNA, 17 nt, Human
acccaugcugcccugug

SEQ ID NO: 2978709 - RNA, 18 nt, Human
acccaugcugcccuguga

SEQ ID NO: 2978710 - RNA, 19 nt, Human
acccaugcugcccugugag

SEQ ID NO: 2978711 - RNA, 16 nt, Human
acccaugcugcccugu

SEQ ID NO: 2978712 - RNA, 15 nt, Human
accccggccaccugc

SEQ ID NO: 2978713 - RNA, 14 nt, Human
accaucaugucugg

SEQ ID NO: 2978714 - RNA, 18 nt, Human
accaucccugaaggcccc

SEQ ID NO: 2978715 - RNA, 16 nt, Human
accaucccugaaggcc

SEQ ID NO: 2978716 - RNA, 17 nt, Human
accaucaugucuggcua

SEQ ID NO: 2978717 - RNA, 16 nt, Human
accaucaugucuggcu

SEQ ID NO: 2978718 - RNA, 21 nt, Human
accaucccugaaggccccgcc

SEQ ID NO: 2978719 - RNA, 22 nt, Human
accaucccugaaggccccgccc

SEQ ID NO: 2978720 - RNA, 20 nt, Human
accccucaacaccucugcac

SEQ ID NO: 2978721 - RNA, 18 nt, Human
acacuguccuauuauauu

SEQ ID NO: 2978722 - RNA, 13 nt, Human
acagccagacugg

SEQ ID NO: 2978723 - RNA, 15 nt, Human
acagccagacuggca

SEQ ID NO: 2978724 - RNA, 16 nt, Human
acagccagacuggcac

SEQ ID NO: 2978725 - RNA, 19 nt, Human
acagccacggccaggccag

SEQ ID NO: 2978726 - RNA, 15 nt, Human
acagccaugauucuu

SEQ ID NO: 2978727 - RNA, 15 nt, Human
acagcaguugaaaag

SEQ ID NO: 2978728 - RNA, 18 nt, Human
acagcaguugaaaagacu

SEQ ID NO: 2978729 - RNA, 21 nt, Human
acagcagugagacuggggcca

SEQ ID NO: 2978730 - RNA, 14 nt, Human
acagcagugagacu

SEQ ID NO: 2978731 - RNA, 19 nt, Human
acagagucucacuguugcc

SEQ ID NO: 2978732 - RNA, 17 nt, Human
acagagucucacuguug

SEQ ID NO: 2978733 - RNA, 15 nt, Human
acagcaggcugccag

SEQ ID NO: 2978734 - RNA, 20 nt, Human
acagcaggcugccagugccu

SEQ ID NO: 2978735 - RNA, 18 nt, Human
acagcaggcugccagugc

SEQ ID NO: 2978736 - RNA, 16 nt, Human
acagcaggcugccagu

SEQ ID NO: 2978737 - RNA, 14 nt, Human
acagagucucacug

SEQ ID NO: 2978738 - RNA, 12 nt, Human
acagagucucac

SEQ ID NO: 2978739 - RNA, 22 nt, Human
acagaggggguggccucccaac

SEQ ID NO: 2978740 - RNA, 21 nt, Human
acagaggggguggccucccaa

SEQ ID NO: 2978741 - RNA, 20 nt, Human
acagcucugcauacucauua

SEQ ID NO: 2978742 - RNA, 14 nt, Human
acagcugccuggga

SEQ ID NO: 2978743 - RNA, 13 nt, Human
acagcugccuggg

SEQ ID NO: 2978744 - RNA, 23 nt, Human
acagcugccugggaucccucauc

SEQ ID NO: 2978745 - RNA, 14 nt, Human
acagcuccuucugu

SEQ ID NO: 2978746 - RNA, 13 nt, Human
acagcuccuucug

SEQ ID NO: 2978747 - RNA, 12 nt, Human
acagcuccuucu

SEQ ID NO: 2978748 - RNA, 16 nt, Human
acaggcaagcaccucc

SEQ ID NO: 2978749 - RNA, 15 nt, Human
acaggcaagcaccuc

SEQ ID NO: 2978750 - RNA, 18 nt, Human
acaggcaagcaccuccug

SEQ ID NO: 2978751 - RNA, 23 nt, Human
acaggugugaaccaccacaccca

SEQ ID NO: 2978752 - RNA, 20 nt, Human
acaggugugaaccaccacac

SEQ ID NO: 2978753 - RNA, 13 nt, Human
acacaaagcuuuu

SEQ ID NO: 2978754 - RNA, 18 nt, Human
acacaaacgggcucagca

SEQ ID NO: 2978755 - RNA, 15 nt, Human
acaauuuauuauggc

SEQ ID NO: 2978756 - RNA, 16 nt, Human
acaauuuauuauggca

SEQ ID NO: 2978757 - RNA, 12 nt, Human
acaccagagccc

SEQ ID NO: 2978758 - RNA, 21 nt, Human
acaccacuacauucuguuaau

SEQ ID NO: 2978759 - RNA, 12 nt, Human
acacagcucugu

SEQ ID NO: 2978760 - RNA, 11 nt, Human
acacagcucug

SEQ ID NO: 2978761 - RNA, 15 nt, Human
acacuaaccacgcug

SEQ ID NO: 2978762 - RNA, 14 nt, Human
acacuaaccacgcu

SEQ ID NO: 2978763 - RNA, 15 nt, Human
acacggacacucaaa

SEQ ID NO: 2978764 - RNA, 20 nt, Human
acaagucagucauucagaua

SEQ ID NO: 2978765 - RNA, 19 nt, Human
acaaaauggaauacucuua

SEQ ID NO: 2978766 - RNA, 15 nt, Human
acaaaauggaauacu

SEQ ID NO: 2978767 - RNA, 20 nt, Human
acaaaauguaggguuauaau

SEQ ID NO: 2978768 - RNA, 20 nt, Human
acaaaauggaauacucuuau

SEQ ID NO: 2978769 - RNA, 15 nt, Human
acaaacgggcucagc

SEQ ID NO: 2978770 - RNA, 21 nt, Human
acaaaccuguuucugcagcca

SEQ ID NO: 2978771 - RNA, 13 nt, Human
acaacuauauugu

SEQ ID NO: 2978772 - RNA, 13 nt, Human
acaaagacugagu

SEQ ID NO: 2978773 - RNA, 18 nt, Human
aaagaugaaggucuguuu

SEQ ID NO: 2978774 - RNA, 17 nt, Human
aaagaugaaaauauuug

SEQ ID NO: 2978775 - RNA, 13 nt, Human
aaagaugaaaaua

SEQ ID NO: 2978776 - RNA, 16 nt, Human
aaagaugaaaauauuu

SEQ ID NO: 2978777 - RNA, 19 nt, Human
aaacugccagcaacgcagg

SEQ ID NO: 2978778 - RNA, 16 nt, Human
aaacugacucuuaaga

SEQ ID NO: 2978779 - RNA, 14 nt, Human
aaacugccagcaac

SEQ ID NO: 2978780 - RNA, 15 nt, Human
aaacugccagcaacg

SEQ ID NO: 2978781 - RNA, 17 nt, Human
aaacugacucuuaagaa

SEQ ID NO: 2978782 - RNA, 11 nt, Human
aaagagguuuu

SEQ ID NO: 2978783 - RNA, 18 nt, Human
aaacacuguucucugccc

SEQ ID NO: 2978784 - RNA, 13 nt, Human
aaaauucagugga

SEQ ID NO: 2978785 - RNA, 15 nt, Human
aaaacacauuuuucu

SEQ ID NO: 2978786 - RNA, 13 nt, Human
aaaacacauuuuu

SEQ ID NO: 2978787 - RNA, 19 nt, Human
aaacacuguucucugcccu

SEQ ID NO: 2978788 - RNA, 22 nt, Human
aaacacuguucucugcccucca

SEQ ID NO: 2978789 - RNA, 17 nt, Human
aaacagaugaaaagccu

SEQ ID NO: 2978790 - RNA, 14 nt, Human
aaacagaugaaaag

SEQ ID NO: 2978791 - RNA, 18 nt, Human
aaaucaaauaugcaaagc

SEQ ID NO: 2978792 - RNA, 19 nt, Human
aaaucaaauaugcaaagca

SEQ ID NO: 2978793 - RNA, 16 nt, Human
aaaucaaauaugcaaa

SEQ ID NO: 2978794 - RNA, 22 nt, Human
aaaucuucauggaauucacaaa

SEQ ID NO: 2978795 - RNA, 20 nt, Human
aaaucuucauggaauucaca

SEQ ID NO: 2978796 - RNA, 16 nt, Human
aaaucuucauggaauu

SEQ ID NO: 2978797 - RNA, 21 nt, Human
aaauggacguguuaugacucc

SEQ ID NO: 2978798 - RNA, 22 nt, Human
aaauggacguguuaugacucca

SEQ ID NO: 2978799 - RNA, 20 nt, Human
aaauggacguguuaugacuc

SEQ ID NO: 2978800 - RNA, 16 nt, Human
aaauggaaaugggcag

SEQ ID NO: 2978801 - RNA, 18 nt, Human
aaauggaagacagcucuu

SEQ ID NO: 2978802 - RNA, 20 nt, Human
aaauagaauugacauugaaa

SEQ ID NO: 2978803 - RNA, 16 nt, Human
aaauagaaaguugcaa

SEQ ID NO: 2978804 - RNA, 22 nt, Human
aaauagaaaguugcaaggcaaa

SEQ ID NO: 2978805 - RNA, 12 nt, Human
aaauaacaauga

SEQ ID NO: 2978806 - RNA, 17 nt, Human
aaauaaacgucuuaaau

SEQ ID NO: 2978807 - RNA, 11 nt, Human
aaagugcuggg

SEQ ID NO: 2978808 - RNA, 14 nt, Human
aaagugcugggauu

SEQ ID NO: 2978809 - RNA, 15 nt, Human
aacaaaggauacuua

SEQ ID NO: 2978810 - RNA, 19 nt, Human
aacaaaggauacuuauuua

SEQ ID NO: 2978811 - RNA, 14 nt, Human
aacaacgaaagaag

SEQ ID NO: 2978812 - RNA, 15 nt, Human
aacacgagcaggcua

SEQ ID NO: 2978813 - RNA, 19 nt, Human
aacaccucugcacaagcug

SEQ ID NO: 2978814 - RNA, 19 nt, Human
aacacauuuuucuuaggga

SEQ ID NO: 2978815 - RNA, 15 nt, Human
aacaaaauagaaagu

SEQ ID NO: 2978816 - RNA, 14 nt, Human
aacccuggugacca

SEQ ID NO: 2978817 - RNA, 21 nt, Human
aacauguaauuaaguacuaug

SEQ ID NO: 2978818 - RNA, 14 nt, Human
aacauguaauuaag

SEQ ID NO: 2978819 - RNA, 23 nt, Human
aacauguaauuaaguacuaugua

SEQ ID NO: 2978820 - RNA, 22 nt, Human
aaccacucuaucaaguauuaua

SEQ ID NO: 2978821 - RNA, 16 nt, Human
aacuuuuuauauucuc

SEQ ID NO: 2978822 - RNA, 19 nt, Human
aacuuuuauaaacuuuacc

SEQ ID NO: 2978823 - RNA, 16 nt, Human
aacuuuuauaaacuuu

SEQ ID NO: 2978824 - RNA, 13 nt, Human
aagaaauguaagg

SEQ ID NO: 2978825 - RNA, 14 nt, Human
aagaaauguaaggg

SEQ ID NO: 2978826 - RNA, 17 nt, Human
aacuuugaccucugcag

SEQ ID NO: 2978827 - RNA, 14 nt, Human
aacuuugaccucug

SEQ ID NO: 2978828 - RNA, 13 nt, Human
aacuuugaccucu

SEQ ID NO: 2978829 - RNA, 20 nt, Human
aacuuugaccucugcagcaa

SEQ ID NO: 2978830 - RNA, 19 nt, Human
aacuuugaccucugcagca

SEQ ID NO: 2978831 - RNA, 15 nt, Human
aacuuuuauaaacuu

SEQ ID NO: 2978832 - RNA, 12 nt, Human
aacuuuuauaaa

SEQ ID NO: 2978833 - RNA, 23 nt, Human
aacugacacaugcugaacaucac

SEQ ID NO: 2978834 - RNA, 23 nt, Human
aacugaucauguuuaugagaaac

SEQ ID NO: 2978835 - RNA, 20 nt, Human
aacugaucauguuuaugaga

SEQ ID NO: 2978836 - RNA, 18 nt, Human
aacugaucauguuuauga

SEQ ID NO: 2978837 - RNA, 16 nt, Human
aacugaucauguuuau

SEQ ID NO: 2978838 - RNA, 14 nt, Human
aacugaucauguuu

SEQ ID NO: 2978839 - RNA, 17 nt, Human
aacugauuuuuuuuucc

SEQ ID NO: 2978840 - RNA, 19 nt, Human
aacugauuuuuuuuuccuu

SEQ ID NO: 2978841 - RNA, 19 nt, Human
aacuuauggggccaaaaua

SEQ ID NO: 2978842 - RNA, 17 nt, Human
aacuuaaauaaugugaa

SEQ ID NO: 2978843 - RNA, 20 nt, Human
aacucaccuggcaucuuaca

SEQ ID NO: 2978844 - RNA, 16 nt, Human
aacucaccugccccuc

SEQ ID NO: 2978845 - RNA, 15 nt, Human
aacucaccugccccu

SEQ ID NO: 2978846 - RNA, 12 nt, Human
aacucaccccag

SEQ ID NO: 2978847 - RNA, 15 nt, Human
aacugaacuucagag

SEQ ID NO: 2978848 - RNA, 13 nt, Human
aacuucacauauu

SEQ ID NO: 2978849 - RNA, 19 nt, Human
aaucacacugucuucugau

SEQ ID NO: 2978850 - RNA, 13 nt, Human
aaucacaauacau

SEQ ID NO: 2978851 - RNA, 15 nt, Human
aaucaagaaacuuaa

SEQ ID NO: 2978852 - RNA, 16 nt, Human
aauauuauguuaaaac

SEQ ID NO: 2978853 - RNA, 21 nt, Human
aauauaggaacuuaaauaaug

SEQ ID NO: 2978854 - RNA, 20 nt, Human
aauauaggaacuuaaauaau

SEQ ID NO: 2978855 - RNA, 18 nt, Human
aauauaggaacuuaaaua

SEQ ID NO: 2978856 - RNA, 12 nt, Human
aaugaagauacu

SEQ ID NO: 2978857 - RNA, 17 nt, Human
aaugauaacuggaaacu

SEQ ID NO: 2978858 - RNA, 20 nt, Human
aaugauaacuggaaacuuca

SEQ ID NO: 2978859 - RNA, 17 nt, Human
aaugaagauacugaaau

SEQ ID NO: 2978860 - RNA, 21 nt, Human
aaugaugauccuaggcauuug

SEQ ID NO: 2978861 - RNA, 23 nt, Human
aaugaaccacaucuugcucugcu

SEQ ID NO: 2978862 - RNA, 17 nt, Human
aaugaaccacaucuugc

SEQ ID NO: 2978863 - RNA, 16 nt, Human
aaugaaccacaucuug

SEQ ID NO: 2978864 - RNA, 22 nt, Human
aaucugcuuuuuaaagaaugcu

SEQ ID NO: 2978865 - RNA, 13 nt, Human
aauccauacauuu

SEQ ID NO: 2978866 - RNA, 13 nt, Human
aaucuccaaaaua

SEQ ID NO: 2978867 - RNA, 14 nt, Human
aaucuccaaaauaa

SEQ ID NO: 2978868 - RNA, 19 nt, Human
aaugaugccaugaggaaca

SEQ ID NO: 2978869 - RNA, 19 nt, Human
aaugucaguuguuauuuau

SEQ ID NO: 2978870 - RNA, 20 nt, Human
aaugucaguuguuauuuauu

SEQ ID NO: 2978871 - RNA, 23 nt, Human
aaugucaguucugauauggaagc

SEQ ID NO: 2978872 - RNA, 18 nt, Human
aaugucaguucugauaug

SEQ ID NO: 2978873 - RNA, 22 nt, Human
aaugucuaguuguaacaccaug

SEQ ID NO: 2978874 - RNA, 17 nt, Human
aaugucagugugacuga

SEQ ID NO: 2978875 - RNA, 21 nt, Human
aaugucagugugacugaucuc

SEQ ID NO: 2978876 - RNA, 22 nt, Human
aaugucaguuguuauuuauuga

SEQ ID NO: 2978877 - RNA, 20 nt, Human
aaugucucuuuaaugucaca

SEQ ID NO: 2978878 - RNA, 15 nt, Human
aaugucagugugacu

SEQ ID NO: 2978879 - RNA, 16 nt, Human
aaugucagugugacug

SEQ ID NO: 2978880 - RNA, 13 nt, Human
aaugucaguguga

SEQ ID NO: 2978881 - RNA, 14 nt, Human
aaugguaguuuuac

SEQ ID NO: 2978882 - RNA, 14 nt, Human
aaugguagcauuuu

SEQ ID NO: 2978883 - RNA, 21 nt, Human
aaugguagcauuuuaaacaaa

SEQ ID NO: 2978884 - RNA, 19 nt, Human
aaugguagcauuuuaaaca

SEQ ID NO: 2978885 - RNA, 16 nt, Human
aaugguagcauuuuaa

SEQ ID NO: 2978886 - RNA, 15 nt, Human
aaugggcagagcaga

SEQ ID NO: 2978887 - RNA, 13 nt, Human
aaugggcagagca

SEQ ID NO: 2978888 - RNA, 18 nt, Human
aauguuugccucugccuc

SEQ ID NO: 2978889 - RNA, 19 nt, Human
aauguuugccucugccucu

SEQ ID NO: 2978890 - RNA, 18 nt, Human
aauuaaaacacaacaucu

SEQ ID NO: 2978891 - RNA, 18 nt, Human
aauuaguggcacuugcuu

SEQ ID NO: 2978892 - RNA, 20 nt, Human
aauuaguuuuauaugcuucu

SEQ ID NO: 2978893 - RNA, 17 nt, Human
aauuaguuuuauaugcu

SEQ ID NO: 2978894 - RNA, 14 nt, Human
aauuaguuuuauau

SEQ ID NO: 2978895 - RNA, 20 nt, Human
aaguccccucuccuccacau

SEQ ID NO: 2978896 - RNA, 21 nt, Human
aaguccccucuccuccacauu

SEQ ID NO: 2978897 - RNA, 16 nt, Human
aagucuuagauguaua

SEQ ID NO: 2978898 - RNA, 16 nt, Human
aaguaucccuacugua

SEQ ID NO: 2978899 - RNA, 11 nt, Human
aaguacuucuu

SEQ ID NO: 2978900 - RNA, 19 nt, Human
aaguaucaaguauagaaaa

SEQ ID NO: 2978901 - RNA, 18 nt, Human
aaguaucaaguauagaaa

SEQ ID NO: 2978902 - RNA, 17 nt, Human
aaguaucaaguauagaa

SEQ ID NO: 2978903 - RNA, 21 nt, Human
aaguaucaaguauagaaaauc

SEQ ID NO: 2978904 - RNA, 11 nt, Human
aaggugggagg

SEQ ID NO: 2978905 - RNA, 16 nt, Human
aagguuaauaaaguaa

SEQ ID NO: 2978906 - RNA, 15 nt, Human
aagguuaauaaagua

SEQ ID NO: 2978907 - RNA, 20 nt, Human
aagguuaauguucaucaucc

SEQ ID NO: 2978908 - RNA, 22 nt, Human
aagugcugggauuacaggugug

SEQ ID NO: 2978909 - RNA, 19 nt, Human
aauaaaauggguuuuacug

SEQ ID NO: 2978910 - RNA, 16 nt, Human
aauaaacgucuuaaau

SEQ ID NO: 2978911 - RNA, 17 nt, Human
aauaaacgucuuaaaua

SEQ ID NO: 2978912 - RNA, 14 nt, Human
aauaaguguauuuu

SEQ ID NO: 2978913 - RNA, 14 nt, Human
aauaaaauggguuu

SEQ ID NO: 2978914 - RNA, 22 nt, Human
aaguuguaggcauaaagucagg

SEQ ID NO: 2978915 - RNA, 21 nt, Human
aauaauccuaaacauaugaau

SEQ ID NO: 2978916 - RNA, 16 nt, Human
aauaaugugaaacugg

SEQ ID NO: 2978917 - RNA, 13 nt, Human
aagaaauuugugg

SEQ ID NO: 2978918 - RNA, 16 nt, Human
aagauuuaccacuugu

SEQ ID NO: 2978919 - RNA, 13 nt, Human
aagccagauuuuc

SEQ ID NO: 2978920 - RNA, 22 nt, Human
aagcagaccauuggggcuccca

SEQ ID NO: 2978921 - RNA, 23 nt, Human
aagcagaccauuggggcucccag

SEQ ID NO: 2978922 - RNA, 14 nt, Human
aagcagaggaagga

SEQ ID NO: 2978923 - RNA, 18 nt, Human
aagccauaauuguucuua

SEQ ID NO: 2978924 - RNA, 12 nt, Human
aagcguggugga

SEQ ID NO: 2978925 - RNA, 22 nt, Human
aagcugcacccucaggcaggug

SEQ ID NO: 2978926 - RNA, 21 nt, Human
aagcugcacccucaggcaggu

SEQ ID NO: 2978927 - RNA, 20 nt, Human
aagcugcacccucaggcagg

SEQ ID NO: 2978928 - RNA, 18 nt, Human
aaggacauugcggacagc

SEQ ID NO: 2978929 - RNA, 13 nt, Human
aagcugggcaggu

SEQ ID NO: 2978930 - RNA, 11 nt, Human
aagcugggcag

SEQ ID NO: 2978931 - RNA, 17 nt, Human
aaggcaaggcugucaau

SEQ ID NO: 2978932 - RNA, 18 nt, Human
aaggcaaggcugucaauu

SEQ ID NO: 2978933 - RNA, 16 nt, Human
aaggcaaggcugucaa

SEQ ID NO: 2978934 - RNA, 17 nt, Human
auucucagcagagugcu

SEQ ID NO: 2978935 - RNA, 19 nt, Human
auucuccaccugccaggga

SEQ ID NO: 2978936 - RNA, 20 nt, Human
auucuccaccugccagggac

SEQ ID NO: 2978937 - RNA, 15 nt, Human
auucuauguuaauau

SEQ ID NO: 2978938 - RNA, 18 nt, Human
auucuauguuaauauuuu

SEQ ID NO: 2978939 - RNA, 12 nt, Human
auucuauaauuu

SEQ ID NO: 2978940 - RNA, 21 nt, Human
auucuccaccugccagggaca

SEQ ID NO: 2978941 - RNA, 13 nt, Human
auucuccugccuc

SEQ ID NO: 2978942 - RNA, 14 nt, Human
auucuccugccuca

SEQ ID NO: 2978943 - RNA, 11 nt, Human
auucuccugcc

SEQ ID NO: 2978944 - RNA, 17 nt, Human
auucuccugccucagcc

SEQ ID NO: 2978945 - RNA, 15 nt, Human
auucuccugccucag

SEQ ID NO: 2978946 - RNA, 19 nt, Human
auucuccugccucagccuc

SEQ ID NO: 2978947 - RNA, 20 nt, Human
auucuccugccucagccucc

SEQ ID NO: 2978948 - RNA, 16 nt, Human
auucuccuuguguuac

SEQ ID NO: 2978949 - RNA, 17 nt, Human
auuauauagcaguaaaa

SEQ ID NO: 2978950 - RNA, 14 nt, Human
auucaggaagcuca

SEQ ID NO: 2978951 - RNA, 17 nt, Human
auucaggaagcucaggg

SEQ ID NO: 2978952 - RNA, 19 nt, Human
auucaggaagcucagggcc

SEQ ID NO: 2978953 - RNA, 20 nt, Human
auucaggaagcucagggccu

SEQ ID NO: 2978954 - RNA, 18 nt, Human
auucagauaugauucaaa

SEQ ID NO: 2978955 - RNA, 19 nt, Human
auucaguaauaacucuacc

SEQ ID NO: 2978956 - RNA, 15 nt, Human
auucaguaauaacuc

SEQ ID NO: 2978957 - RNA, 15 nt, Human
auucccaagcucugc

SEQ ID NO: 2978958 - RNA, 14 nt, Human
auucccaagcucug

SEQ ID NO: 2978959 - RNA, 16 nt, Human
auucccaagcucugcu

SEQ ID NO: 2978960 - RNA, 17 nt, Human
auucccugauuuaauau

SEQ ID NO: 2978961 - RNA, 20 nt, Human
auucagauaugauucaaaug

SEQ ID NO: 2978962 - RNA, 16 nt, Human
uuuugccaauuugcac

SEQ ID NO: 2978963 - RNA, 19 nt, Human
uuuugccaauuugcacauu

SEQ ID NO: 2978964 - RNA, 18 nt, Human
uuuugccaauuugcacau

SEQ ID NO: 2978965 - RNA, 23 nt, Human
uuuugccauguuggccaggcugg

SEQ ID NO: 2978966 - RNA, 15 nt, Human
uuuugcauauugcau

SEQ ID NO: 2978967 - RNA, 18 nt, Human
uuuugcauauugcauacu

SEQ ID NO: 2978968 - RNA, 18 nt, Human
uuuugcaaauaaguguau

SEQ ID NO: 2978969 - RNA, 17 nt, Human
uuuugauccaagcuggu

SEQ ID NO: 2978970 - RNA, 17 nt, Human
uuuugagugccuuacac

SEQ ID NO: 2978971 - RNA, 17 nt, Human
uuuuuauauuugaaaua

SEQ ID NO: 2978972 - RNA, 19 nt, Human
uuuuuauauuugaaauauu

SEQ ID NO: 2978973 - RNA, 20 nt, Human
uuuuuaucgucacugcuuaa

SEQ ID NO: 2978974 - RNA, 12 nt, Human
uuuuuauggcuu

SEQ ID NO: 2978975 - RNA, 11 nt, Human
uuuuuacuaau

SEQ ID NO: 2978976 - RNA, 22 nt, Human
uuuuuagacagagucucacugu

SEQ ID NO: 2978977 - RNA, 21 nt, Human
uuuuguuccacaaguuaaaua

SEQ ID NO: 2978978 - RNA, 15 nt, Human
uuuuguuccacaagu

SEQ ID NO: 2978979 - RNA, 20 nt, Human
uuuugugcauuaucuagaua

SEQ ID NO: 2978980 - RNA, 17 nt, Human
uuuugugcauuaucuag

SEQ ID NO: 2978981 - RNA, 19 nt, Human
uuuuugugaaaagcuccau

SEQ ID NO: 2978982 - RNA, 20 nt, Human
uuuuuguagagccagggucu

SEQ ID NO: 2978983 - RNA, 19 nt, Human
uuuuuguagagccaggguc

SEQ ID NO: 2978984 - RNA, 23 nt, Human
auuaaguaaugauaacuggaaac

SEQ ID NO: 2978985 - RNA, 21 nt, Human
auuaaguaaugauaacuggaa

SEQ ID NO: 2978986 - RNA, 21 nt, Human
uuuuuauggcuuuugugcauu

SEQ ID NO: 2978987 - RNA, 20 nt, Human
uuuuuauggcuuuugugcau

SEQ ID NO: 2978988 - RNA, 22 nt, Human
uuuuuauggcuuuugugcauua

SEQ ID NO: 2978989 - RNA, 14 nt, Human
auuaaguacuaugu

SEQ ID NO: 2978990 - RNA, 21 nt, Human
auuacaguggggaaugaagau

SEQ ID NO: 2978991 - RNA, 18 nt, Human
auuacauuuguauaaaau

SEQ ID NO: 2978992 - RNA, 17 nt, Human
auuacauuuguauaaaa

SEQ ID NO: 2978993 - RNA, 12 nt, Human
auuaccagggac

SEQ ID NO: 2978994 - RNA, 16 nt, Human
auuacauuuguauaaa

SEQ ID NO: 2978995 - RNA, 14 nt, Human
auguguucuauuca

SEQ ID NO: 2978996 - RNA, 13 nt, Human
auguuaauauuuc

SEQ ID NO: 2978997 - RNA, 13 nt, Human
auguuaauauuuu

SEQ ID NO: 2978998 - RNA, 22 nt, Human
auguuaauauuuuagguguaaa

SEQ ID NO: 2978999 - RNA, 18 nt, Human
auguucaucaaugaauga

SEQ ID NO: 2979000 - RNA, 12 nt, Human
auguugcccagg

SEQ ID NO: 2979001 - RNA, 17 nt, Human
auguugcccaggcaggu

SEQ ID NO: 2979002 - RNA, 16 nt, Human
auguugcccaggcagg

SEQ ID NO: 2979003 - RNA, 20 nt, Human
auguugcccaggcaggucuu

SEQ ID NO: 2979004 - RNA, 20 nt, Human
auguggaguucaucuugaau

SEQ ID NO: 2979005 - RNA, 24 nt, Human
auguggaguucaucuugaauugua

SEQ ID NO: 2979006 - RNA, 14 nt, Human
uuuuaauaauguuu

SEQ ID NO: 2979007 - RNA, 13 nt, Human
uuuuaauaauguu

SEQ ID NO: 2979008 - RNA, 12 nt, Human
uuuuaauaaugu

SEQ ID NO: 2979009 - RNA, 20 nt, Human
auggggcccugccuccuuug

SEQ ID NO: 2979010 - RNA, 16 nt, Human
uuuuaauaauguuuca

SEQ ID NO: 2979011 - RNA, 22 nt, Human
augugccagguuuuuggucuga

SEQ ID NO: 2979012 - RNA, 21 nt, Human
augugccagguuuuuggucug

SEQ ID NO: 2979013 - RNA, 19 nt, Human
augugcuaguaauuggaaa

SEQ ID NO: 2979014 - RNA, 16 nt, Human
auuaaacaugcuguac

SEQ ID NO: 2979015 - RNA, 22 nt, Human
auuaaaaaucucaaauuucuaa

SEQ ID NO: 2979016 - RNA, 20 nt, Human
auuaaaaaucucaaauuucu

SEQ ID NO: 2979017 - RNA, 23 nt, Human
auuaaaacacaacaucuuuuucu

SEQ ID NO: 2979018 - RNA, 19 nt, Human
auuaaaaaucucaaauuuc

SEQ ID NO: 2979019 - RNA, 15 nt, Human
auuaaaaaucucaaa

SEQ ID NO: 2979020 - RNA, 21 nt, Human
auguuuucaggcuagauguau

SEQ ID NO: 2979021 - RNA, 17 nt, Human
auguuuucaggcuagau

SEQ ID NO: 2979022 - RNA, 15 nt, Human
auguuuucaggcuag

SEQ ID NO: 2979023 - RNA, 13 nt, Human
uuuuauuaugcau

SEQ ID NO: 2979024 - RNA, 11 nt, Human
uuuuauuuuau

SEQ ID NO: 2979025 - RNA, 14 nt, Human
uuuucaguguacau

SEQ ID NO: 2979026 - RNA, 15 nt, Human
uuuucugagaaagac

SEQ ID NO: 2979027 - RNA, 18 nt, Human
uuuucugagaaagacuau

SEQ ID NO: 2979028 - RNA, 14 nt, Human
uuuucucuaggaaa

SEQ ID NO: 2979029 - RNA, 20 nt, Human
uuuucauuuaggugaggaag

SEQ ID NO: 2979030 - RNA, 14 nt, Human
auuuuacuuuuugg

SEQ ID NO: 2979031 - RNA, 17 nt, Human
auuuuacuuuuuggaaa

SEQ ID NO: 2979032 - RNA, 21 nt, Human
auuuuacuuuaaaaggagcca

SEQ ID NO: 2979033 - RNA, 15 nt, Human
auuuuaauucaguug

SEQ ID NO: 2979034 - RNA, 17 nt, Human
auuuuacauaaauuuag

SEQ ID NO: 2979035 - RNA, 16 nt, Human
auuuuacauaaauuua

SEQ ID NO: 2979036 - RNA, 13 nt, Human
auuuuacauaaau

SEQ ID NO: 2979037 - RNA, 22 nt, Human
auuuuaaaagaaugauuaugaa

SEQ ID NO: 2979038 - RNA, 18 nt, Human
auuuuaaaagaaugauua

SEQ ID NO: 2979039 - RNA, 15 nt, Human
auuuuaaacaaaaua

SEQ ID NO: 2979040 - RNA, 21 nt, Human
auuuuaaacaaaauagaaagu

SEQ ID NO: 2979041 - RNA, 21 nt, Human
auuuuaaacauauccaaguuu

SEQ ID NO: 2979042 - RNA, 18 nt, Human
auuugaagguagaauguu

SEQ ID NO: 2979043 - RNA, 23 nt, Human
auuugaagguagaauguuuucaa

SEQ ID NO: 2979044 - RNA, 18 nt, Human
auuuguauaaaauaauuu

SEQ ID NO: 2979045 - RNA, 15 nt, Human
auuuguauaaaauaa

SEQ ID NO: 2979046 - RNA, 19 nt, Human
auuuguauaaaauaauuuu

SEQ ID NO: 2979047 - RNA, 23 nt, Human
auuuguuuugccaauuugcacau

SEQ ID NO: 2979048 - RNA, 21 nt, Human
auuuguuuugccaauuugcac

SEQ ID NO: 2979049 - RNA, 17 nt, Human
auuuuaaaagaaugauu

SEQ ID NO: 2979050 - RNA, 14 nt, Human
auuugugagacugu

SEQ ID NO: 2979051 - RNA, 14 nt, Human
auuugugauacaau

SEQ ID NO: 2979052 - RNA, 12 nt, Human
auuugugagacu

SEQ ID NO: 2979053 - RNA, 22 nt, Human
auuuucaguuauuauauuuaca

SEQ ID NO: 2979054 - RNA, 23 nt, Human
auugggcacaucauuucaagaag

SEQ ID NO: 2979055 - RNA, 21 nt, Human
auugggcacaucauuucaaga

SEQ ID NO: 2979056 - RNA, 19 nt, Human
auugggcacaucauuucaa

SEQ ID NO: 2979057 - RNA, 18 nt, Human
auugggcacaucauuuca

SEQ ID NO: 2979058 - RNA, 17 nt, Human
auugggcacaucauuuc

SEQ ID NO: 2979059 - RNA, 21 nt, Human
auugggcacuauuuauuuaca

SEQ ID NO: 2979060 - RNA, 15 nt, Human
auuggggcucccagc

SEQ ID NO: 2979061 - RNA, 23 nt, Human
auuggggcucccagccaggcccu

SEQ ID NO: 2979062 - RNA, 22 nt, Human
auuggggcucccagccaggccc

SEQ ID NO: 2979063 - RNA, 21 nt, Human
auuggggcucccagccaggcc

SEQ ID NO: 2979064 - RNA, 20 nt, Human
auuggggcucccagccaggc

SEQ ID NO: 2979065 - RNA, 16 nt, Human
auucuuuuugaaaugu

SEQ ID NO: 2979066 - RNA, 15 nt, Human
auugaaaaaccauuu

SEQ ID NO: 2979067 - RNA, 18 nt, Human
auugacccacaagaaaug

SEQ ID NO: 2979068 - RNA, 22 nt, Human
auugacauugaaaucuaggaaa

SEQ ID NO: 2979069 - RNA, 18 nt, Human
auugacauugaaaucuag

SEQ ID NO: 2979070 - RNA, 17 nt, Human
auugacauugaaaucua

SEQ ID NO: 2979071 - RNA, 15 nt, Human
auugacauugaaauc

SEQ ID NO: 2979072 - RNA, 17 nt, Human
auugaaaucuaggaaaa

SEQ ID NO: 2979073 - RNA, 22 nt, Human
auucuuccucccucccucuuuc

SEQ ID NO: 2979074 - RNA, 13 nt, Human
auucuuccucccu

SEQ ID NO: 2979075 - RNA, 13 nt, Human
auucuucuccacu

SEQ ID NO: 2979076 - RNA, 18 nt, Human
auucuuauuuaaugaaag

SEQ ID NO: 2979077 - RNA, 14 nt, Human
auucuuauuuaaug

SEQ ID NO: 2979078 - RNA, 13 nt, Human
auucuuauuuaau

SEQ ID NO: 2979079 - RNA, 18 nt, Human
auugugucucuugguccu

SEQ ID NO: 2979080 - RNA, 14 nt, Human
auugugucucuugg

SEQ ID NO: 2979081 - RNA, 17 nt, Human
auuguccccgacccuug

SEQ ID NO: 2979082 - RNA, 19 nt, Human
auuguccccgacccuugcc

SEQ ID NO: 2979083 - RNA, 20 nt, Human
auuguccccgacccuugccg

SEQ ID NO: 2979084 - RNA, 15 nt, Human
auuguauuacaaauc

SEQ ID NO: 2979085 - RNA, 14 nt, Human
auuuauuuauucau

SEQ ID NO: 2979086 - RNA, 17 nt, Human
auuuauuuuaauaaugu

SEQ ID NO: 2979087 - RNA, 18 nt, Human
auuuauuuacaaauguuu

SEQ ID NO: 2979088 - RNA, 14 nt, Human
auuuauucauuagu

SEQ ID NO: 2979089 - RNA, 13 nt, Human
auuuauucugcuc

SEQ ID NO: 2979090 - RNA, 16 nt, Human
auuuauuuacaaaugu

SEQ ID NO: 2979091 - RNA, 15 nt, Human
auuuauuuacaaaug

SEQ ID NO: 2979092 - RNA, 13 nt, Human
auuuauuuacaaa

SEQ ID NO: 2979093 - RNA, 23 nt, Human
auuucaaacagucucccuuccua

SEQ ID NO: 2979094 - RNA, 20 nt, Human
auuuauuuuaauaauguuuc

SEQ ID NO: 2979095 - RNA, 19 nt, Human
auuuauuuuaauaauguuu

SEQ ID NO: 2979096 - RNA, 12 nt, Human
auuucauuucuu

SEQ ID NO: 2979097 - RNA, 17 nt, Human
auuuccagccaaagccu

SEQ ID NO: 2979098 - RNA, 14 nt, Human
auuugaaauauuga

SEQ ID NO: 2979099 - RNA, 14 nt, Human
auuugaaaauuuug

SEQ ID NO: 2979100 - RNA, 16 nt, Human
auuuccguuaaaauac

SEQ ID NO: 2979101 - RNA, 15 nt, Human
auuuccguuaaaaua

SEQ ID NO: 2979102 - RNA, 14 nt, Human
auuuauucugcuca

SEQ ID NO: 2979103 - RNA, 19 nt, Human
auuuacuuaagacuuaaug

SEQ ID NO: 2979104 - RNA, 15 nt, Human
auuuagaaauauaau

SEQ ID NO: 2979105 - RNA, 16 nt, Human
auuuacuucuuauaca

SEQ ID NO: 2979106 - RNA, 14 nt, Human
auuuacuucuuaua

SEQ ID NO: 2979107 - RNA, 17 nt, Human
auuuacuucuuauacau

SEQ ID NO: 2979108 - RNA, 13 nt, Human
auuuacuuaagac

SEQ ID NO: 2979109 - RNA, 14 nt, Human
auuuaacagaaaug

SEQ ID NO: 2979110 - RNA, 12 nt, Human
auuuaacagaaa

SEQ ID NO: 2979111 - RNA, 13 nt, Human
auuuagauguaua

SEQ ID NO: 2979112 - RNA, 18 nt, Human
auuuaguauuuuguuuca

SEQ ID NO: 2979113 - RNA, 22 nt, Human
auuuauuaaaugcccagccccu

SEQ ID NO: 2979114 - RNA, 13 nt, Human
aucuuuuaugauu

SEQ ID NO: 2979115 - RNA, 20 nt, Human
augaaauauuauguuaaaac

SEQ ID NO: 2979116 - RNA, 21 nt, Human
augaaauauuauguuaaaacu

SEQ ID NO: 2979117 - RNA, 20 nt, Human
augaaagacuguacaaagua

SEQ ID NO: 2979118 - RNA, 23 nt, Human
uuggccugucuuuggauuguuaa

SEQ ID NO: 2979119 - RNA, 18 nt, Human
uuggaaagaguaggaaga

SEQ ID NO: 2979120 - RNA, 11 nt, Human
uuggcugcuga

SEQ ID NO: 2979121 - RNA, 15 nt, Human
uuggcugcugaaggc

SEQ ID NO: 2979122 - RNA, 14 nt, Human
uuggcugcagggag

SEQ ID NO: 2979123 - RNA, 13 nt, Human
uuggcugcaggga

SEQ ID NO: 2979124 - RNA, 22 nt, Human
uuggcuagagguucaaagauau

SEQ ID NO: 2979125 - RNA, 22 nt, Human
uuggcuaggaccccuccaugug

SEQ ID NO: 2979126 - RNA, 21 nt, Human
uuggcuagagguucaaagaua

SEQ ID NO: 2979127 - RNA, 12 nt, Human
uugcucauggaa

SEQ ID NO: 2979128 - RNA, 11 nt, Human
uugcucaugga

SEQ ID NO: 2979129 - RNA, 19 nt, Human
uugcugaauacagaggcaa

SEQ ID NO: 2979130 - RNA, 20 nt, Human
uugcuaagugaggaugaaaa

SEQ ID NO: 2979131 - RNA, 17 nt, Human
uugcugauggugcaaug

SEQ ID NO: 2979132 - RNA, 18 nt, Human
uugcugauggugcaauga

SEQ ID NO: 2979133 - RNA, 17 nt, Human
uuggaaagaguaggaag

SEQ ID NO: 2979134 - RNA, 22 nt, Human
uuguaacuguuuagaugaaugu

SEQ ID NO: 2979135 - RNA, 21 nt, Human
uuguaacuguuuagaugaaug

SEQ ID NO: 2979136 - RNA, 14 nt, Human
uuguaaggaaugau

SEQ ID NO: 2979137 - RNA, 19 nt, Human
uugguuaggcauuguggga

SEQ ID NO: 2979138 - RNA, 22 nt, Human
uugggguacccacugcucuggu

SEQ ID NO: 2979139 - RNA, 19 nt, Human
augaauuacauuuguauaa

SEQ ID NO: 2979140 - RNA, 18 nt, Human
augaauuacauuuguaua

SEQ ID NO: 2979141 - RNA, 17 nt, Human
augaauuacauuuguau

SEQ ID NO: 2979142 - RNA, 20 nt, Human
augaaccacaucuugcucug

SEQ ID NO: 2979143 - RNA, 13 nt, Human
augaaccacaucu

SEQ ID NO: 2979144 - RNA, 19 nt, Human
uuggggaagaacgaagcca

SEQ ID NO: 2979145 - RNA, 17 nt, Human
uugggguacccacugcu

SEQ ID NO: 2979146 - RNA, 16 nt, Human
uugggcacuauuuauu

SEQ ID NO: 2979147 - RNA, 23 nt, Human
uugggcacuauuuauuuacaaau

SEQ ID NO: 2979148 - RNA, 19 nt, Human
augacacgaauauugcuga

SEQ ID NO: 2979149 - RNA, 20 nt, Human
augacacgaauauugcugau

SEQ ID NO: 2979150 - RNA, 21 nt, Human
augaauuaguuuuauaugcuu

SEQ ID NO: 2979151 - RNA, 22 nt, Human
augaauuacauuuguauaaaau

SEQ ID NO: 2979152 - RNA, 23 nt, Human
augaauuaguuuuauaugcuucu

SEQ ID NO: 2979153 - RNA, 23 nt, Human
uuguaguguuggagaagaacuga

SEQ ID NO: 2979154 - RNA, 20 nt, Human
uuguaaggaaugauuaauua

SEQ ID NO: 2979155 - RNA, 19 nt, Human
uuguauaaaauaauuuuua

SEQ ID NO: 2979156 - RNA, 13 nt, Human
uuguauaaaauaa

SEQ ID NO: 2979157 - RNA, 16 nt, Human
uuguuuuuauuaaaag

SEQ ID NO: 2979158 - RNA, 19 nt, Human
augcaccuggaauauauaa

SEQ ID NO: 2979159 - RNA, 20 nt, Human
uuuaaaaaagaaacauuugg

SEQ ID NO: 2979160 - RNA, 18 nt, Human
augaucuucuuuauaauu

SEQ ID NO: 2979161 - RNA, 15 nt, Human
augaucuucuuuaua

SEQ ID NO: 2979162 - RNA, 16 nt, Human
augcaaaccaucauug

SEQ ID NO: 2979163 - RNA, 18 nt, Human
augcaaaccaucauugaa

SEQ ID NO: 2979164 - RNA, 19 nt, Human
augcaaaccaucauugaaa

SEQ ID NO: 2979165 - RNA, 20 nt, Human
augcaaaccaucauugaaau

SEQ ID NO: 2979166 - RNA, 21 nt, Human
augcaaaccaucauugaaauc

SEQ ID NO: 2979167 - RNA, 22 nt, Human
augcaaaccaucauugaaaucu

SEQ ID NO: 2979168 - RNA, 16 nt, Human
augcaaggucauuuuu

SEQ ID NO: 2979169 - RNA, 14 nt, Human
augcaaggucauuu

SEQ ID NO: 2979170 - RNA, 14 nt, Human
augcaccuggaaua

SEQ ID NO: 2979171 - RNA, 16 nt, Human
augcaccuggaauaua

SEQ ID NO: 2979172 - RNA, 22 nt, Human
augcaaggucauuuuuuuuaag

SEQ ID NO: 2979173 - RNA, 22 nt, Human
uuguucccugugucauuucaaa

SEQ ID NO: 2979174 - RNA, 19 nt, Human
uuguugaggguauguuuua

SEQ ID NO: 2979175 - RNA, 14 nt, Human
uugugaauaaagag

SEQ ID NO: 2979176 - RNA, 22 nt, Human
uugugaaggcaggggaauguau

SEQ ID NO: 2979177 - RNA, 18 nt, Human
uugugaagcaaaauuuuu

SEQ ID NO: 2979178 - RNA, 14 nt, Human
augaucuucuuuau

SEQ ID NO: 2979179 - RNA, 16 nt, Human
augauccuaggcauuu

SEQ ID NO: 2979180 - RNA, 23 nt, Human
augaucacggcucacugcagccu

SEQ ID NO: 2979181 - RNA, 15 nt, Human
augaucacggcucac

SEQ ID NO: 2979182 - RNA, 19 nt, Human
augaucacggcucacugca

SEQ ID NO: 2979183 - RNA, 18 nt, Human
augaucacggcucacugc

SEQ ID NO: 2979184 - RNA, 14 nt, Human
augauaacuggaaa

SEQ ID NO: 2979185 - RNA, 18 nt, Human
uugucacacacuuuggcu

SEQ ID NO: 2979186 - RNA, 15 nt, Human
augauaaaacacaaa

SEQ ID NO: 2979187 - RNA, 18 nt, Human
augagccucagcauccug

SEQ ID NO: 2979188 - RNA, 17 nt, Human
augagccucagcauccu

SEQ ID NO: 2979189 - RNA, 22 nt, Human
augaggucagagccugcaguua

SEQ ID NO: 2979190 - RNA, 21 nt, Human
uugucggccccaccagugccu

SEQ ID NO: 2979191 - RNA, 12 nt, Human
augagaggaaau

SEQ ID NO: 2979192 - RNA, 13 nt, Human
augagaggaaauc

SEQ ID NO: 2979193 - RNA, 23 nt, Human
augagagacacacugaagaagca

SEQ ID NO: 2979194 - RNA, 14 nt, Human
augagaggaaauca

SEQ ID NO: 2979195 - RNA, 15 nt, Human
augagaggaaaucac

SEQ ID NO: 2979196 - RNA, 16 nt, Human
augagaggaaaucacc

SEQ ID NO: 2979197 - RNA, 16 nt, Human
augagccucagcaucc

SEQ ID NO: 2979198 - RNA, 15 nt, Human
augagccucagcauc

SEQ ID NO: 2979199 - RNA, 12 nt, Human
augagccucagc

SEQ ID NO: 2979200 - RNA, 22 nt, Human
augagccgcccaaggccuuccc

SEQ ID NO: 2979201 - RNA, 21 nt, Human
augagccgcccaaggccuucc

SEQ ID NO: 2979202 - RNA, 19 nt, Human
augagccgcccaaggccuu

SEQ ID NO: 2979203 - RNA, 18 nt, Human
augagccgcccaaggccu

SEQ ID NO: 2979204 - RNA, 16 nt, Human
augagccgcccaaggc

SEQ ID NO: 2979205 - RNA, 22 nt, Human
augagcaucaggccaggcccuc

SEQ ID NO: 2979206 - RNA, 15 nt, Human
augagccgcccaagg

SEQ ID NO: 2979207 - RNA, 18 nt, Human
augagcaucaggccaggc

SEQ ID NO: 2979208 - RNA, 19 nt, Human
augagcaucaggccaggcc

SEQ ID NO: 2979209 - RNA, 20 nt, Human
augagcaucaggccaggccc

SEQ ID NO: 2979210 - RNA, 21 nt, Human
augagcaucaggccaggcccu

SEQ ID NO: 2979211 - RNA, 16 nt, Human
augagcaucaggccag

SEQ ID NO: 2979212 - RNA, 17 nt, Human
augagcaucaggccagg

SEQ ID NO: 2979213 - RNA, 15 nt, Human
augagcaucaggcca

SEQ ID NO: 2979214 - RNA, 22 nt, Human
uuuauauagcaagacauuauau

SEQ ID NO: 2979215 - RNA, 18 nt, Human
uuuauauagcaagacauu

SEQ ID NO: 2979216 - RNA, 16 nt, Human
uuuagcccugaacauu

SEQ ID NO: 2979217 - RNA, 15 nt, Human
uuuagauaauacacc

SEQ ID NO: 2979218 - RNA, 13 nt, Human
uuuagauaauaca

SEQ ID NO: 2979219 - RNA, 18 nt, Human
uuuagaguugauacuaca

SEQ ID NO: 2979220 - RNA, 16 nt, Human
uuuauuacuguaagaa

SEQ ID NO: 2979221 - RNA, 19 nt, Human
uuuauuaaaugcccagccc

SEQ ID NO: 2979222 - RNA, 17 nt, Human
uuuauaugcuucuguuu

SEQ ID NO: 2979223 - RNA, 16 nt, Human
augccuaccaauauuu

SEQ ID NO: 2979224 - RNA, 17 nt, Human
augccuaccaauauuua

SEQ ID NO: 2979225 - RNA, 23 nt, Human
augccuaccaauauuuaaucuuu

SEQ ID NO: 2979226 - RNA, 13 nt, Human
augcuaagugaaa

SEQ ID NO: 2979227 - RNA, 14 nt, Human
augcgcuguggcca

SEQ ID NO: 2979228 - RNA, 16 nt, Human
uuuaaagcuuccauug

SEQ ID NO: 2979229 - RNA, 24 nt, Human
uuuaaagcuuauuaaaacucauuu

SEQ ID NO: 2979230 - RNA, 21 nt, Human
uuuaccuuuuuuauacauaaa

SEQ ID NO: 2979231 - RNA, 17 nt, Human
uuuacuaauagacaauu

SEQ ID NO: 2979232 - RNA, 14 nt, Human
uuuacuaauagaca

SEQ ID NO: 2979233 - RNA, 18 nt, Human
uuuacuaauagacaauuu

SEQ ID NO: 2979234 - RNA, 18 nt, Human
augcuacacacugcaugu

SEQ ID NO: 2979235 - RNA, 22 nt, Human
uuuaccugaagucuuuguacag

SEQ ID NO: 2979236 - RNA, 17 nt, Human
augcuacacacugcaug

SEQ ID NO: 2979237 - RNA, 20 nt, Human
uuuaccuuuuuuauacauaa

SEQ ID NO: 2979238 - RNA, 19 nt, Human
uuuaccuuuuuuauacaua

SEQ ID NO: 2979239 - RNA, 14 nt, Human
uuuaccuuuuuuau

SEQ ID NO: 2979240 - RNA, 23 nt, Human
auggaauuggagcucgugggaca

SEQ ID NO: 2979241 - RNA, 19 nt, Human
uuuccagguuuaagcuguu

SEQ ID NO: 2979242 - RNA, 15 nt, Human
uuucacucuccuugg

SEQ ID NO: 2979243 - RNA, 24 nt, Human
uuucacucuuauugcccacgcugg

SEQ ID NO: 2979244 - RNA, 14 nt, Human
uuucacucuccuug

SEQ ID NO: 2979245 - RNA, 15 nt, Human
auggaauaacaugua

SEQ ID NO: 2979246 - RNA, 14 nt, Human
auggaauaacaugu

SEQ ID NO: 2979247 - RNA, 16 nt, Human
uuuauuuuaauaaugu

SEQ ID NO: 2979248 - RNA, 16 nt, Human
auggaacauaaaauac

SEQ ID NO: 2979249 - RNA, 21 nt, Human
auggaaguacuauaauuuacc

SEQ ID NO: 2979250 - RNA, 18 nt, Human
auggaacacucugagacu

SEQ ID NO: 2979251 - RNA, 17 nt, Human
auggaacacucugagac

SEQ ID NO: 2979252 - RNA, 19 nt, Human
uuuauuacuguaagaaaau

SEQ ID NO: 2979253 - RNA, 22 nt, Human
augcuggcuguuggcugggggc

SEQ ID NO: 2979254 - RNA, 19 nt, Human
augcugugcccuaaagugu

SEQ ID NO: 2979255 - RNA, 14 nt, Human
augcuguauuuuaa

SEQ ID NO: 2979256 - RNA, 23 nt, Human
augcugucuacacuaagagagaa

SEQ ID NO: 2979257 - RNA, 23 nt, Human
uuugaaacacugguuuuaaauau

SEQ ID NO: 2979258 - RNA, 14 nt, Human
uuugaaauauugac

SEQ ID NO: 2979259 - RNA, 23 nt, Human
augggcuggguucuacccaggug

SEQ ID NO: 2979260 - RNA, 14 nt, Human
auggggcccugccu

SEQ ID NO: 2979261 - RNA, 13 nt, Human
auggggcccugcc

SEQ ID NO: 2979262 - RNA, 13 nt, Human
uuucuuuguggcu

SEQ ID NO: 2979263 - RNA, 13 nt, Human
uuucucauguuga

SEQ ID NO: 2979264 - RNA, 15 nt, Human
uuucucauguugaaa

SEQ ID NO: 2979265 - RNA, 14 nt, Human
uuucugcaucagcu

SEQ ID NO: 2979266 - RNA, 14 nt, Human
uuucugccgcagcc

SEQ ID NO: 2979267 - RNA, 16 nt, Human
uuucugccgcagcccu

SEQ ID NO: 2979268 - RNA, 22 nt, Human
uuucucacagaagaugaagcac

SEQ ID NO: 2979269 - RNA, 18 nt, Human
uuucucacagaagaugaa

SEQ ID NO: 2979270 - RNA, 20 nt, Human
uuucuaugaaauauuauguu

SEQ ID NO: 2979271 - RNA, 14 nt, Human
uuucuaugaaauau

SEQ ID NO: 2979272 - RNA, 13 nt, Human
uuucuaugaaaua

SEQ ID NO: 2979273 - RNA, 21 nt, Human
uuucuaugacacaugcaaggu

SEQ ID NO: 2979274 - RNA, 15 nt, Human
uuucuaugacacaug

SEQ ID NO: 2979275 - RNA, 17 nt, Human
uuucuaggacugaauua

SEQ ID NO: 2979276 - RNA, 21 nt, Human
uuucuaggacugaauuaugaa

SEQ ID NO: 2979277 - RNA, 22 nt, Human
uuucuaggacugaauuaugaaa

SEQ ID NO: 2979278 - RNA, 20 nt, Human
uuuccuucaagaaugcagua

SEQ ID NO: 2979279 - RNA, 11 nt, Human
uuuccuucagu

SEQ ID NO: 2979280 - RNA, 12 nt, Human
uuuccuucagug

SEQ ID NO: 2979281 - RNA, 15 nt, Human
uuuccuucagugccu

SEQ ID NO: 2979282 - RNA, 12 nt, Human
uuuccugugucu

SEQ ID NO: 2979283 - RNA, 17 nt, Human
augggccuccugugugu

SEQ ID NO: 2979284 - RNA, 22 nt, Human
augggccaccgccuugcccagc

SEQ ID NO: 2979285 - RNA, 21 nt, Human
uuuccuucauucaacccaccu

SEQ ID NO: 2979286 - RNA, 22 nt, Human
uuuccuucagugccuuauggaa

SEQ ID NO: 2979287 - RNA, 18 nt, Human
uuuccuucagugccuuau

SEQ ID NO: 2979288 - RNA, 21 nt, Human
uuuccuucagugccuuaugga

SEQ ID NO: 2979289 - RNA, 23 nt, Human
uuuccuucauucaacccaccugc

SEQ ID NO: 2979290 - RNA, 18 nt, Human
uuucgcaggauucuuccu

SEQ ID NO: 2979291 - RNA, 22 nt, Human
uuucgcaggauucuuccucccu

SEQ ID NO: 2979292 - RNA, 18 nt, Human
auggccucuucagaucuc

SEQ ID NO: 2979293 - RNA, 16 nt, Human
auggcuauaggugcua

SEQ ID NO: 2979294 - RNA, 19 nt, Human
auggcuauaggugcuacaa

SEQ ID NO: 2979295 - RNA, 21 nt, Human
augggacauuugcucauggaa

SEQ ID NO: 2979296 - RNA, 22 nt, Human
augggacauuugcucauggaau

SEQ ID NO: 2979297 - RNA, 21 nt, Human
auggcuauaggugcuacaaaa

SEQ ID NO: 2979298 - RNA, 17 nt, Human
auggaauuucucccagu

SEQ ID NO: 2979299 - RNA, 19 nt, Human
auggacaugaucuucuuua

SEQ ID NO: 2979300 - RNA, 21 nt, Human
auggacccaauauuuaccaga

SEQ ID NO: 2979301 - RNA, 13 nt, Human
augggcagagcag

SEQ ID NO: 2979302 - RNA, 14 nt, Human
augggcagagcaga

SEQ ID NO: 2979303 - RNA, 15 nt, Human
augggcagagcagag

SEQ ID NO: 2979304 - RNA, 15 nt, Human
augggccuccugugu

SEQ ID NO: 2979305 - RNA, 18 nt, Human
augggccaccgccuugcc

SEQ ID NO: 2979306 - RNA, 17 nt, Human
augggccaccgccuugc

SEQ ID NO: 2979307 - RNA, 21 nt, Human
augggcaacccccagccugcu

SEQ ID NO: 2979308 - RNA, 19 nt, Human
augggcaacccccagccug

SEQ ID NO: 2979309 - RNA, 18 nt, Human
augggcaacccccagccu

SEQ ID NO: 2979310 - RNA, 13 nt, Human
augggagcucaug

SEQ ID NO: 2979311 - RNA, 19 nt, Human
uucauuaguuuugaagauu

SEQ ID NO: 2979312 - RNA, 14 nt, Human
uucauuaucucaaa

SEQ ID NO: 2979313 - RNA, 14 nt, Human
uucauuaguuuuga

SEQ ID NO: 2979314 - RNA, 19 nt, Human
uucauucuuuuugaaaugu

SEQ ID NO: 2979315 - RNA, 22 nt, Human
uuccaauuuacauacucugcuu

SEQ ID NO: 2979316 - RNA, 16 nt, Human
uuccaguaaugagcuu

SEQ ID NO: 2979317 - RNA, 18 nt, Human
uuccagguuuaagcuguu

SEQ ID NO: 2979318 - RNA, 17 nt, Human
uuccagguuuaagcugu

SEQ ID NO: 2979319 - RNA, 13 nt, Human
uuccaggcuggga

SEQ ID NO: 2979320 - RNA, 15 nt, Human
uuccaggcugggaga

SEQ ID NO: 2979321 - RNA, 17 nt, Human
uuccaggcugggagagc

SEQ ID NO: 2979322 - RNA, 21 nt, Human
uuccacaagagcccaggccuc

SEQ ID NO: 2979323 - RNA, 23 nt, Human
auauguaccuaacgaaguauccu

SEQ ID NO: 2979324 - RNA, 16 nt, Human
auauggguaguauuuu

SEQ ID NO: 2979325 - RNA, 20 nt, Human
auauguggaguucaucuuga

SEQ ID NO: 2979326 - RNA, 21 nt, Human
auauguggaguucaucuugaa

SEQ ID NO: 2979327 - RNA, 23 nt, Human
auauguagauguaugcacacaca

SEQ ID NO: 2979328 - RNA, 20 nt, Human
auauguagauguaugcacac

SEQ ID NO: 2979329 - RNA, 18 nt, Human
auauguagauguaugcac

SEQ ID NO: 2979330 - RNA, 16 nt, Human
auauguagauguaugc

SEQ ID NO: 2979331 - RNA, 22 nt, Human
uucaugcuguucaugaaagauu

SEQ ID NO: 2979332 - RNA, 20 nt, Human
uucaugcuguucaugaaaga

SEQ ID NO: 2979333 - RNA, 13 nt, Human
auaugcaaagcac

SEQ ID NO: 2979334 - RNA, 14 nt, Human
auaugcaaagcacu

SEQ ID NO: 2979335 - RNA, 14 nt, Human
uucaguaagccgug

SEQ ID NO: 2979336 - RNA, 17 nt, Human
uucagguaacaggcaga

SEQ ID NO: 2979337 - RNA, 22 nt, Human
auauauguuuuaagaggcaggg

SEQ ID NO: 2979338 - RNA, 21 nt, Human
auauauguuuuaagaggcagg

SEQ ID NO: 2979339 - RNA, 13 nt, Human
auauaugcuaagu

SEQ ID NO: 2979340 - RNA, 15 nt, Human
uucaucaaugaauga

SEQ ID NO: 2979341 - RNA, 19 nt, Human
uucagauaugauucaaaug

SEQ ID NO: 2979342 - RNA, 18 nt, Human
uucagauaugauucaaau

SEQ ID NO: 2979343 - RNA, 17 nt, Human
uucagauaugauucaaa

SEQ ID NO: 2979344 - RNA, 16 nt, Human
uucagauaugauucaa

SEQ ID NO: 2979345 - RNA, 16 nt, Human
uucagaaauguguuau

SEQ ID NO: 2979346 - RNA, 17 nt, Human
uucagcgguuuauauaa

SEQ ID NO: 2979347 - RNA, 16 nt, Human
uucagguaacaggcag

SEQ ID NO: 2979348 - RNA, 15 nt, Human
uucagguaacaggca

SEQ ID NO: 2979349 - RNA, 22 nt, Human
uucaggguuggccccugcccgg

SEQ ID NO: 2979350 - RNA, 19 nt, Human
uucaggguuggccccugcc

SEQ ID NO: 2979351 - RNA, 17 nt, Human
uucaggguuggccccug

SEQ ID NO: 2979352 - RNA, 16 nt, Human
uucaggguuggccccu

SEQ ID NO: 2979353 - RNA, 14 nt, Human
uucaggguuggccc

SEQ ID NO: 2979354 - RNA, 22 nt, Human
uuccuguuuuuauuauuaacaa

SEQ ID NO: 2979355 - RNA, 20 nt, Human
uuccuggcacugcuuccagu

SEQ ID NO: 2979356 - RNA, 22 nt, Human
uuccuggcacugcuuccaguga

SEQ ID NO: 2979357 - RNA, 22 nt, Human
uuccucuuuuuauuuaguuccu

SEQ ID NO: 2979358 - RNA, 19 nt, Human
uuccuggcacugcuuccag

SEQ ID NO: 2979359 - RNA, 12 nt, Human
uuccugaacagg

SEQ ID NO: 2979360 - RNA, 14 nt, Human
aucaauuuuucuua

SEQ ID NO: 2979361 - RNA, 17 nt, Human
aucacgccacugcacua

SEQ ID NO: 2979362 - RNA, 15 nt, Human
aucacgccacugcac

SEQ ID NO: 2979363 - RNA, 14 nt, Human
aucacgccacugca

SEQ ID NO: 2979364 - RNA, 13 nt, Human
aucaauuuaaaaa

SEQ ID NO: 2979365 - RNA, 21 nt, Human
aucaaggguacacugccuucu

SEQ ID NO: 2979366 - RNA, 16 nt, Human
aucaaauaugcaaagc

SEQ ID NO: 2979367 - RNA, 17 nt, Human
aucaaauaugcaaagca

SEQ ID NO: 2979368 - RNA, 18 nt, Human
aucaaauaugcaaagcac

SEQ ID NO: 2979369 - RNA, 23 nt, Human
auauuuuuuaaaauaagucugau

SEQ ID NO: 2979370 - RNA, 16 nt, Human
aucaaggguacacugc

SEQ ID NO: 2979371 - RNA, 21 nt, Human
aucaacugcaucaagauguga

SEQ ID NO: 2979372 - RNA, 17 nt, Human
auauuuuuuaaaauaag

SEQ ID NO: 2979373 - RNA, 15 nt, Human
auauuuuuuaaaaua

SEQ ID NO: 2979374 - RNA, 15 nt, Human
aucaaauaugcaaag

SEQ ID NO: 2979375 - RNA, 19 nt, Human
auauugguugggaugacuu

SEQ ID NO: 2979376 - RNA, 22 nt, Human
auauugcugauggugcaaugac

SEQ ID NO: 2979377 - RNA, 20 nt, Human
auauugguugggaugacuug

SEQ ID NO: 2979378 - RNA, 18 nt, Human
auauucucacagcuccaa

SEQ ID NO: 2979379 - RNA, 15 nt, Human
auauugauaugcuua

SEQ ID NO: 2979380 - RNA, 13 nt, Human
auauuuaaucuuu

SEQ ID NO: 2979381 - RNA, 13 nt, Human
auauuuacaaaug

SEQ ID NO: 2979382 - RNA, 13 nt, Human
auauuguuuucag

SEQ ID NO: 2979383 - RNA, 14 nt, Human
auauuguuugcuaa

SEQ ID NO: 2979384 - RNA, 22 nt, Human
auauuaagaaagacuaucuaaa

SEQ ID NO: 2979385 - RNA, 17 nt, Human
auauuaagaaagacuau

SEQ ID NO: 2979386 - RNA, 15 nt, Human
auauuaagaaagacu

SEQ ID NO: 2979387 - RNA, 16 nt, Human
auauuaagaaagacua

SEQ ID NO: 2979388 - RNA, 17 nt, Human
auauuaccacagacaua

SEQ ID NO: 2979389 - RNA, 15 nt, Human
uuccagugaggcucu

SEQ ID NO: 2979390 - RNA, 16 nt, Human
uuccagugaggcucug

SEQ ID NO: 2979391 - RNA, 14 nt, Human
uucugaagaagaug

SEQ ID NO: 2979392 - RNA, 21 nt, Human
uucucuaguuugauuaaauuc

SEQ ID NO: 2979393 - RNA, 20 nt, Human
uucucuaguuugauuaaauu

SEQ ID NO: 2979394 - RNA, 19 nt, Human
uucugcagccacuauuguu

SEQ ID NO: 2979395 - RNA, 12 nt, Human
aucauugaaauc

SEQ ID NO: 2979396 - RNA, 14 nt, Human
aucacuuccaugac

SEQ ID NO: 2979397 - RNA, 23 nt, Human
aucacuugaacccgggaggcaga

SEQ ID NO: 2979398 - RNA, 15 nt, Human
aucaggugcugccau

SEQ ID NO: 2979399 - RNA, 19 nt, Human
aucaggugcugccauccag

SEQ ID NO: 2979400 - RNA, 17 nt, Human
aucaggugcugccaucc

SEQ ID NO: 2979401 - RNA, 19 nt, Human
aucagucugauucccaagc

SEQ ID NO: 2979402 - RNA, 14 nt, Human
aucaggugcugcca

SEQ ID NO: 2979403 - RNA, 23 nt, Human
aucauccacugugccaugugcca

SEQ ID NO: 2979404 - RNA, 21 nt, Human
aucauccacugugccaugugc

SEQ ID NO: 2979405 - RNA, 16 nt, Human
aucauuaggugugacu

SEQ ID NO: 2979406 - RNA, 15 nt, Human
aucauaaaacuugau

SEQ ID NO: 2979407 - RNA, 23 nt, Human
aucauaguggcuuaaaacaacac

SEQ ID NO: 2979408 - RNA, 16 nt, Human
auccaauugcugcuug

SEQ ID NO: 2979409 - RNA, 16 nt, Human
uucugccugcccaggc

SEQ ID NO: 2979410 - RNA, 15 nt, Human
uucugccugcccagg

SEQ ID NO: 2979411 - RNA, 14 nt, Human
auccaguaucuuga

SEQ ID NO: 2979412 - RNA, 17 nt, Human
auccagguucagcuugu

SEQ ID NO: 2979413 - RNA, 18 nt, Human
aucccucccuccaccucc

SEQ ID NO: 2979414 - RNA, 17 nt, Human
aucccucccuccaccuc

SEQ ID NO: 2979415 - RNA, 16 nt, Human
aucccucccuccaccu

SEQ ID NO: 2979416 - RNA, 14 nt, Human
aucccucccuccac

SEQ ID NO: 2979417 - RNA, 18 nt, Human
aucccaugagccucagca

SEQ ID NO: 2979418 - RNA, 17 nt, Human
aucccaugagccucagc

SEQ ID NO: 2979419 - RNA, 17 nt, Human
aucccugaaggccccgc

SEQ ID NO: 2979420 - RNA, 20 nt, Human
aucccucccuccaccucccu

SEQ ID NO: 2979421 - RNA, 22 nt, Human
aucccugaaggccccgcccagg

SEQ ID NO: 2979422 - RNA, 16 nt, Human
aucccaugagccucag

SEQ ID NO: 2979423 - RNA, 13 nt, Human
aucccaugagccu

SEQ ID NO: 2979424 - RNA, 11 nt, Human
aucccagcccc

SEQ ID NO: 2979425 - RNA, 20 nt, Human
uucuuucuggcuaugcauuu

SEQ ID NO: 2979426 - RNA, 17 nt, Human
uucuuucuggcuaugca

SEQ ID NO: 2979427 - RNA, 12 nt, Human
uucuuucuggcu

SEQ ID NO: 2979428 - RNA, 22 nt, Human
uucuucuccacuuucuagccag

SEQ ID NO: 2979429 - RNA, 18 nt, Human
uucuguuuagauaauaca

SEQ ID NO: 2979430 - RNA, 13 nt, Human
uucuguuuagaua

SEQ ID NO: 2979431 - RNA, 21 nt, Human
uucuguuggccagugugacaa

SEQ ID NO: 2979432 - RNA, 16 nt, Human
uucuguuuuauaauuu

SEQ ID NO: 2979433 - RNA, 17 nt, Human
uucuguuuuauaauuuu

SEQ ID NO: 2979434 - RNA, 14 nt, Human
uugaaggaugcugu

SEQ ID NO: 2979435 - RNA, 16 nt, Human
uugaaggaugcugucu

SEQ ID NO: 2979436 - RNA, 14 nt, Human
uugaaguaaaaugu

SEQ ID NO: 2979437 - RNA, 16 nt, Human
uugaagguagaauguu

SEQ ID NO: 2979438 - RNA, 19 nt, Human
uugaagguagaauguuuuc

SEQ ID NO: 2979439 - RNA, 15 nt, Human
uugaagguagaaugu

SEQ ID NO: 2979440 - RNA, 17 nt, Human
uugacacuuaaaaaugg

SEQ ID NO: 2979441 - RNA, 14 nt, Human
aucgucacugcuua

SEQ ID NO: 2979442 - RNA, 18 nt, Human
aucgucacugcuuaacuu

SEQ ID NO: 2979443 - RNA, 15 nt, Human
aucgugacaacacuu

SEQ ID NO: 2979444 - RNA, 14 nt, Human
aucgugacaacacu

SEQ ID NO: 2979445 - RNA, 19 nt, Human
aucuaaauggaaccacucu

SEQ ID NO: 2979446 - RNA, 15 nt, Human
aucuaaauguugaaa

SEQ ID NO: 2979447 - RNA, 16 nt, Human
uugaggucuguucuuu

SEQ ID NO: 2979448 - RNA, 15 nt, Human
uugaggucuguucuu

SEQ ID NO: 2979449 - RNA, 12 nt, Human
uugauaaaguaa

SEQ ID NO: 2979450 - RNA, 19 nt, Human
uugacacuuaaaaaugguu

SEQ ID NO: 2979451 - RNA, 19 nt, Human
uugacagggcacaccgggc

SEQ ID NO: 2979452 - RNA, 18 nt, Human
uugaccauucuccaccug

SEQ ID NO: 2979453 - RNA, 19 nt, Human
uugaccauucuccaccugc

SEQ ID NO: 2979454 - RNA, 17 nt, Human
uugaccauucuccaccu

SEQ ID NO: 2979455 - RNA, 24 nt, Human
uugaccauucuccaccugccaggg

SEQ ID NO: 2979456 - RNA, 14 nt, Human
auccugagccagau

SEQ ID NO: 2979457 - RNA, 15 nt, Human
auccugagccagauu

SEQ ID NO: 2979458 - RNA, 17 nt, Human
auccugagccagauuuc

SEQ ID NO: 2979459 - RNA, 21 nt, Human
auccugagccagauuucacuc

SEQ ID NO: 2979460 - RNA, 18 nt, Human
auccugaggcuccacuug

SEQ ID NO: 2979461 - RNA, 16 nt, Human
auccugaggcuccacu

SEQ ID NO: 2979462 - RNA, 13 nt, Human
auccugaggcucc

SEQ ID NO: 2979463 - RNA, 11 nt, Human
auccugaggcu

SEQ ID NO: 2979464 - RNA, 16 nt, Human
auccugcaauuccacu

SEQ ID NO: 2979465 - RNA, 22 nt, Human
auccugaggcuccacuuggucu

SEQ ID NO: 2979466 - RNA, 13 nt, Human
auccugccccuga

SEQ ID NO: 2979467 - RNA, 18 nt, Human
auccucuguacagagccc

SEQ ID NO: 2979468 - RNA, 20 nt, Human
auccucuguacagagcccac

SEQ ID NO: 2979469 - RNA, 13 nt, Human
auccucuguugau

SEQ ID NO: 2979470 - RNA, 20 nt, Human
uucuuuugccguuauuaaaa

SEQ ID NO: 2979471 - RNA, 17 nt, Human
auccucuuugagugaag

SEQ ID NO: 2979472 - RNA, 12 nt, Human
auccugagccag

SEQ ID NO: 2979473 - RNA, 13 nt, Human
auccugagccaga

SEQ ID NO: 2979474 - RNA, 11 nt, Human
auccugagcca

SEQ ID NO: 2979475 - RNA, 21 nt, Human
auccuggcacccggccccugc

SEQ ID NO: 2979476 - RNA, 20 nt, Human
auccuggcacccggccccug

SEQ ID NO: 2979477 - RNA, 19 nt, Human
auccuggcacccggccccu

SEQ ID NO: 2979478 - RNA, 17 nt, Human
auccuggcacccggccc

SEQ ID NO: 2979479 - RNA, 15 nt, Human
auccuggaguucugg

SEQ ID NO: 2979480 - RNA, 16 nt, Human
auccuggacugagggg

SEQ ID NO: 2979481 - RNA, 23 nt, Human
auccuggcacccggccccugcug

SEQ ID NO: 2979482 - RNA, 22 nt, Human
auccuggcacccggccccugcu

SEQ ID NO: 2979483 - RNA, 17 nt, Human
auccuggcccagggcau

SEQ ID NO: 2979484 - RNA, 23 nt, Human
auccuggacugagggggccugga

SEQ ID NO: 2979485 - RNA, 21 nt, Human
auccuggcccagggcaucugg

SEQ ID NO: 2979486 - RNA, 18 nt, Human
auccuggcccagggcauc

SEQ ID NO: 2979487 - RNA, 22 nt, Human
uggaguuauugaagcagagugg

SEQ ID NO: 2979488 - RNA, 15 nt, Human
aggccacaagacccu

SEQ ID NO: 2979489 - RNA, 19 nt, Human
uggaugccugguggcagcu

SEQ ID NO: 2979490 - RNA, 18 nt, Human
uggaugccugguggcagc

SEQ ID NO: 2979491 - RNA, 16 nt, Human
uggaguucaucuugaa

SEQ ID NO: 2979492 - RNA, 17 nt, Human
uggaguucaucuugaau

SEQ ID NO: 2979493 - RNA, 20 nt, Human
uggaguucaucuugaauugu

SEQ ID NO: 2979494 - RNA, 15 nt, Human
uggaugccugguggc

SEQ ID NO: 2979495 - RNA, 18 nt, Human
uggacgagaaaacaauaa

SEQ ID NO: 2979496 - RNA, 16 nt, Human
aggccaaacucaccug

SEQ ID NO: 2979497 - RNA, 18 nt, Human
aggcauuuguuugaacug

SEQ ID NO: 2979498 - RNA, 14 nt, Human
aggccaaaggaagc

SEQ ID NO: 2979499 - RNA, 20 nt, Human
aggccaaacucaccugcccc

SEQ ID NO: 2979500 - RNA, 23 nt, Human
aggccaaaggaagcacaugccuc

SEQ ID NO: 2979501 - RNA, 20 nt, Human
aggccaaaggaagcacaugc

SEQ ID NO: 2979502 - RNA, 18 nt, Human
aggccaaggugggaggau

SEQ ID NO: 2979503 - RNA, 18 nt, Human
uggcaccagcagccugga

SEQ ID NO: 2979504 - RNA, 20 nt, Human
uggcacaucagcacgauuuc

SEQ ID NO: 2979505 - RNA, 22 nt, Human
uggcacaguuuucugagaaaga

SEQ ID NO: 2979506 - RNA, 22 nt, Human
uggauuaaacuuaaucuaaaug

SEQ ID NO: 2979507 - RNA, 20 nt, Human
uggcacaguuuucugagaaa

SEQ ID NO: 2979508 - RNA, 12 nt, Human
uggauguucuga

SEQ ID NO: 2979509 - RNA, 21 nt, Human
uggcagaguugaagacagagc

SEQ ID NO: 2979510 - RNA, 15 nt, Human
uggcacccggccccu

SEQ ID NO: 2979511 - RNA, 22 nt, Human
uggcagaguugaagacagagcu

SEQ ID NO: 2979512 - RNA, 12 nt, Human
aggccagagaca

SEQ ID NO: 2979513 - RNA, 20 nt, Human
aggccacaagacccuugugg

SEQ ID NO: 2979514 - RNA, 12 nt, Human
uggcagccccug

SEQ ID NO: 2979515 - RNA, 13 nt, Human
aggcccucugccc

SEQ ID NO: 2979516 - RNA, 14 nt, Human
aggcccucugccca

SEQ ID NO: 2979517 - RNA, 12 nt, Human
uggcaugggaau

SEQ ID NO: 2979518 - RNA, 15 nt, Human
uggcaugggaaugaa

SEQ ID NO: 2979519 - RNA, 17 nt, Human
uggccaggcuggucuca

SEQ ID NO: 2979520 - RNA, 15 nt, Human
uggccaggcuggucu

SEQ ID NO: 2979521 - RNA, 14 nt, Human
uggccucugcacuc

SEQ ID NO: 2979522 - RNA, 15 nt, Human
uggccucugcacucc

SEQ ID NO: 2979523 - RNA, 17 nt, Human
uggccucugcacucccc

SEQ ID NO: 2979524 - RNA, 13 nt, Human
uggccucugcacu

SEQ ID NO: 2979525 - RNA, 21 nt, Human
aggccuggccagaugcaccag

SEQ ID NO: 2979526 - RNA, 17 nt, Human
aggccuggccagaugca

SEQ ID NO: 2979527 - RNA, 16 nt, Human
aggccuggccagaugc

SEQ ID NO: 2979528 - RNA, 15 nt, Human
aggccuggccagaug

SEQ ID NO: 2979529 - RNA, 23 nt, Human
aggccugggggcugggcagagga

SEQ ID NO: 2979530 - RNA, 23 nt, Human
aggccuggccagaugcaccagcc

SEQ ID NO: 2979531 - RNA, 22 nt, Human
aggccuggccagaugcaccagc

SEQ ID NO: 2979532 - RNA, 20 nt, Human
uggccccugcccggcugcgg

SEQ ID NO: 2979533 - RNA, 21 nt, Human
uggccccugcccggcugcgga

SEQ ID NO: 2979534 - RNA, 20 nt, Human
ugggaaagggauuuucagcc

SEQ ID NO: 2979535 - RNA, 16 nt, Human
ugggaaaggggaaguu

SEQ ID NO: 2979536 - RNA, 21 nt, Human
ugggaaagcauuguaaaugug

SEQ ID NO: 2979537 - RNA, 17 nt, Human
uggcuuaaaacaacacu

SEQ ID NO: 2979538 - RNA, 15 nt, Human
uggcuguuggcuggg

SEQ ID NO: 2979539 - RNA, 14 nt, Human
uggcugugucuccc

SEQ ID NO: 2979540 - RNA, 13 nt, Human
uggcuguuggcug

SEQ ID NO: 2979541 - RNA, 22 nt, Human
uggcuucacggaagagccuugc

SEQ ID NO: 2979542 - RNA, 23 nt, Human
uggcuucacggaagagccuugcg

SEQ ID NO: 2979543 - RNA, 18 nt, Human
uggcugccaaugggagcu

SEQ ID NO: 2979544 - RNA, 20 nt, Human
uggcugccaaugggagcuca

SEQ ID NO: 2979545 - RNA, 14 nt, Human
uggcugcagggagu

SEQ ID NO: 2979546 - RNA, 13 nt, Human
uggcugcagggag

SEQ ID NO: 2979547 - RNA, 15 nt, Human
uggcugcagggaguc

SEQ ID NO: 2979548 - RNA, 20 nt, Human
uggcucuuccaggcugggag

SEQ ID NO: 2979549 - RNA, 21 nt, Human
uggcucuuccaggcugggaga

SEQ ID NO: 2979550 - RNA, 19 nt, Human
uggcucuuccaggcuggga

SEQ ID NO: 2979551 - RNA, 18 nt, Human
uggcucaaguccucuuuu

SEQ ID NO: 2979552 - RNA, 12 nt, Human
uggcugcaaagg

SEQ ID NO: 2979553 - RNA, 20 nt, Human
aggcuggcgugcaguggugc

SEQ ID NO: 2979554 - RNA, 18 nt, Human
aggcuggcgugcaguggu

SEQ ID NO: 2979555 - RNA, 17 nt, Human
aggcuggcuuucagagu

SEQ ID NO: 2979556 - RNA, 22 nt, Human
uggcuagagguucaaagauauu

SEQ ID NO: 2979557 - RNA, 14 nt, Human
aggcugggagagcc

SEQ ID NO: 2979558 - RNA, 19 nt, Human
aggcuggcuuucagaguag

SEQ ID NO: 2979559 - RNA, 14 nt, Human
uggcuaugcauuug

SEQ ID NO: 2979560 - RNA, 17 nt, Human
uggcuaugcauuugaaa

SEQ ID NO: 2979561 - RNA, 15 nt, Human
uggcuaugcauuuga

SEQ ID NO: 2979562 - RNA, 19 nt, Human
uggcuaugcauuugaaaau

SEQ ID NO: 2979563 - RNA, 22 nt, Human
uggcuauuagagaucaaccccu

SEQ ID NO: 2979564 - RNA, 12 nt, Human
aggcucgagcau

SEQ ID NO: 2979565 - RNA, 19 nt, Human
aggcuccuuuagcgcccag

SEQ ID NO: 2979566 - RNA, 15 nt, Human
aggcucgagcaugcc

SEQ ID NO: 2979567 - RNA, 17 nt, Human
aggcucgagcaugccug

SEQ ID NO: 2979568 - RNA, 18 nt, Human
aggcucgagcaugccugg

SEQ ID NO: 2979569 - RNA, 19 nt, Human
aggcucgagcaugccugga

SEQ ID NO: 2979570 - RNA, 21 nt, Human
aggcucgagcaugccuggaug

SEQ ID NO: 2979571 - RNA, 11 nt, Human
aggcucucagg

SEQ ID NO: 2979572 - RNA, 12 nt, Human
aggcucucaggc

SEQ ID NO: 2979573 - RNA, 14 nt, Human
aggcucucaggcca

SEQ ID NO: 2979574 - RNA, 15 nt, Human
aggcucucaggccag

SEQ ID NO: 2979575 - RNA, 16 nt, Human
aggcucucaggccagc

SEQ ID NO: 2979576 - RNA, 18 nt, Human
aggcucucaggccagcug

SEQ ID NO: 2979577 - RNA, 19 nt, Human
aggcucucaggccagcugc

SEQ ID NO: 2979578 - RNA, 20 nt, Human
aggcucucaggccagcugcu

SEQ ID NO: 2979579 - RNA, 14 nt, Human
aggcucugcccuug

SEQ ID NO: 2979580 - RNA, 15 nt, Human
aggcucugcccuugg

SEQ ID NO: 2979581 - RNA, 13 nt, Human
aggcucugcccuu

SEQ ID NO: 2979582 - RNA, 12 nt, Human
aggcucugcccu

SEQ ID NO: 2979583 - RNA, 11 nt, Human
aggcucugccc

SEQ ID NO: 2979584 - RNA, 21 nt, Human
aggcucucaggccagcugcuu

SEQ ID NO: 2979585 - RNA, 16 nt, Human
aggcucugcccuuggu

SEQ ID NO: 2979586 - RNA, 17 nt, Human
aggcuggcgugcagugg

SEQ ID NO: 2979587 - RNA, 13 nt, Human
aggcuggcgugca

SEQ ID NO: 2979588 - RNA, 17 nt, Human
aggaagcuuacaugccu

SEQ ID NO: 2979589 - RNA, 18 nt, Human
aggaagcugugagagcag

SEQ ID NO: 2979590 - RNA, 18 nt, Human
aggaaggaaacccagcuc

SEQ ID NO: 2979591 - RNA, 17 nt, Human
aggaagccagcaggcuc

SEQ ID NO: 2979592 - RNA, 13 nt, Human
aggaagccagcag

SEQ ID NO: 2979593 - RNA, 19 nt, Human
aggaaggaaacccagcucu

SEQ ID NO: 2979594 - RNA, 15 nt, Human
aggaaggagaggaga

SEQ ID NO: 2979595 - RNA, 11 nt, Human
aggaauuuaaa

SEQ ID NO: 2979596 - RNA, 23 nt, Human
aggaauugacccacaagaaauga

SEQ ID NO: 2979597 - RNA, 16 nt, Human
ugcugagucugaaggc

SEQ ID NO: 2979598 - RNA, 17 nt, Human
ugcugagucugaaggcu

SEQ ID NO: 2979599 - RNA, 18 nt, Human
ugcugagucugaaggcug

SEQ ID NO: 2979600 - RNA, 21 nt, Human
ugcugagucugaaggcugggu

SEQ ID NO: 2979601 - RNA, 22 nt, Human
ugcugagucugaaggcuggguu

SEQ ID NO: 2979602 - RNA, 23 nt, Human
ugcugagucugaaggcuggguuc

SEQ ID NO: 2979603 - RNA, 13 nt, Human
aggaagacuucau

SEQ ID NO: 2979604 - RNA, 19 nt, Human
aggaagacuucaucccucu

SEQ ID NO: 2979605 - RNA, 13 nt, Human
aggaagacuuugg

SEQ ID NO: 2979606 - RNA, 14 nt, Human
aggaagacuuugga

SEQ ID NO: 2979607 - RNA, 23 nt, Human
aggaagcacaugccucucucagg

SEQ ID NO: 2979608 - RNA, 24 nt, Human
aggaagcacaugccucucucaggc

SEQ ID NO: 2979609 - RNA, 14 nt, Human
aggaagccagcagg

SEQ ID NO: 2979610 - RNA, 15 nt, Human
aggaagccagcaggc

SEQ ID NO: 2979611 - RNA, 22 nt, Human
aggaagcacaugccucucucag

SEQ ID NO: 2979612 - RNA, 18 nt, Human
agcugggacuacaggcac

SEQ ID NO: 2979613 - RNA, 16 nt, Human
agcugggacuacaggc

SEQ ID NO: 2979614 - RNA, 19 nt, Human
agcugggacuacaggcacc

SEQ ID NO: 2979615 - RNA, 17 nt, Human
ugcucccaccuggcucu

SEQ ID NO: 2979616 - RNA, 18 nt, Human
ugcucccaccuggcucug

SEQ ID NO: 2979617 - RNA, 16 nt, Human
ugcucccaccuggcuc

SEQ ID NO: 2979618 - RNA, 16 nt, Human
ugcuccagcuguucag

SEQ ID NO: 2979619 - RNA, 19 nt, Human
ugcuccagcuguucagcug

SEQ ID NO: 2979620 - RNA, 13 nt, Human
ugcuccagccugg

SEQ ID NO: 2979621 - RNA, 15 nt, Human
ugcugagucugaagg

SEQ ID NO: 2979622 - RNA, 14 nt, Human
ugcugagucugaag

SEQ ID NO: 2979623 - RNA, 16 nt, Human
ugcucugcugacagac

SEQ ID NO: 2979624 - RNA, 22 nt, Human
ugcucugcugacagacacaggc

SEQ ID NO: 2979625 - RNA, 21 nt, Human
ugcucugcugacagacacagg

SEQ ID NO: 2979626 - RNA, 11 nt, Human
ugcuguacaua

SEQ ID NO: 2979627 - RNA, 18 nt, Human
ugcuguaacuuucugaaa

SEQ ID NO: 2979628 - RNA, 22 nt, Human
ugcuguacauacuuuuuggguu

SEQ ID NO: 2979629 - RNA, 17 nt, Human
ugcuguacauacuuuuu

SEQ ID NO: 2979630 - RNA, 15 nt, Human
ugcuguacauacuuu

SEQ ID NO: 2979631 - RNA, 23 nt, Human
ugcuguauuuuaaaagaaugauu

SEQ ID NO: 2979632 - RNA, 14 nt, Human
ugcuggagcucugc

SEQ ID NO: 2979633 - RNA, 13 nt, Human
ugcuggagcucug

SEQ ID NO: 2979634 - RNA, 15 nt, Human
ugcugcccugugagu

SEQ ID NO: 2979635 - RNA, 13 nt, Human
ugcugcccuguga

SEQ ID NO: 2979636 - RNA, 14 nt, Human
ugcugcccugugag

SEQ ID NO: 2979637 - RNA, 12 nt, Human
ugcugcccugug

SEQ ID NO: 2979638 - RNA, 16 nt, Human
ugcuggcugguuagag

SEQ ID NO: 2979639 - RNA, 14 nt, Human
aggacacugauaug

SEQ ID NO: 2979640 - RNA, 19 nt, Human
aggacacuaaccacgcugg

SEQ ID NO: 2979641 - RNA, 23 nt, Human
aggacacuaaccacgcuggaccu

SEQ ID NO: 2979642 - RNA, 23 nt, Human
aggacagcccuucuuuccacaga

SEQ ID NO: 2979643 - RNA, 22 nt, Human
aggacagggaggugaccccagg

SEQ ID NO: 2979644 - RNA, 16 nt, Human
ugcuucaaggauccug

SEQ ID NO: 2979645 - RNA, 18 nt, Human
ugcuucaaggauccugag

SEQ ID NO: 2979646 - RNA, 19 nt, Human
ugcuucaaggauccugagc

SEQ ID NO: 2979647 - RNA, 14 nt, Human
ugcuucagccuccc

SEQ ID NO: 2979648 - RNA, 13 nt, Human
ugcuucagccucc

SEQ ID NO: 2979649 - RNA, 12 nt, Human
ugcuucaaggau

SEQ ID NO: 2979650 - RNA, 13 nt, Human
ugcuuauacacuu

SEQ ID NO: 2979651 - RNA, 18 nt, Human
ugcuuggcccaggaguuu

SEQ ID NO: 2979652 - RNA, 23 nt, Human
ugcuuggcccaggaguuuggcca

SEQ ID NO: 2979653 - RNA, 12 nt, Human
ugcuugggcuuc

SEQ ID NO: 2979654 - RNA, 16 nt, Human
ugcuugggcuucaucc

SEQ ID NO: 2979655 - RNA, 15 nt, Human
ugcuuggcccaggag

SEQ ID NO: 2979656 - RNA, 16 nt, Human
ugcuuggcccaggagu

SEQ ID NO: 2979657 - RNA, 12 nt, Human
ugcuuggcccag

SEQ ID NO: 2979658 - RNA, 21 nt, Human
ugcuuggaggaaggaaaccca

SEQ ID NO: 2979659 - RNA, 16 nt, Human
ugcuugccaucccucc

SEQ ID NO: 2979660 - RNA, 15 nt, Human
ugcuugccaucccuc

SEQ ID NO: 2979661 - RNA, 22 nt, Human
uggaaaggaaugcaaagaugaa

SEQ ID NO: 2979662 - RNA, 21 nt, Human
uggaaaggaaugcaaagauga

SEQ ID NO: 2979663 - RNA, 15 nt, Human
uggaaaggaaugcaa

SEQ ID NO: 2979664 - RNA, 12 nt, Human
uggaaaggaaug

SEQ ID NO: 2979665 - RNA, 15 nt, Human
uggaaauauuaagaa

SEQ ID NO: 2979666 - RNA, 19 nt, Human
ugcuugggcuucauccucc

SEQ ID NO: 2979667 - RNA, 17 nt, Human
ugcuuuuaaaaaaaaau

SEQ ID NO: 2979668 - RNA, 18 nt, Human
aggacauugcggacagcc

SEQ ID NO: 2979669 - RNA, 17 nt, Human
aggacauugcggacagc

SEQ ID NO: 2979670 - RNA, 15 nt, Human
aggacauugcggaca

SEQ ID NO: 2979671 - RNA, 23 nt, Human
aggacauugcggacagccacggc

SEQ ID NO: 2979672 - RNA, 19 nt, Human
aggacauugcggacagcca

SEQ ID NO: 2979673 - RNA, 20 nt, Human
aggacugaauuaugaaacuu

SEQ ID NO: 2979674 - RNA, 19 nt, Human
aggacugaauuaugaaacu

SEQ ID NO: 2979675 - RNA, 11 nt, Human
aggagaaacug

SEQ ID NO: 2979676 - RNA, 23 nt, Human
aggacuuuucuuuguggcuuccu

SEQ ID NO: 2979677 - RNA, 17 nt, Human
aggagauuggaaggaac

SEQ ID NO: 2979678 - RNA, 22 nt, Human
aggagccccgaggccuucucug

SEQ ID NO: 2979679 - RNA, 14 nt, Human
aggagcagccacau

SEQ ID NO: 2979680 - RNA, 15 nt, Human
aggaguuuggccaga

SEQ ID NO: 2979681 - RNA, 16 nt, Human
aggaguuuggccagaa

SEQ ID NO: 2979682 - RNA, 17 nt, Human
aggaguuuggccagaag

SEQ ID NO: 2979683 - RNA, 18 nt, Human
aggaguuuggccagaagu

SEQ ID NO: 2979684 - RNA, 14 nt, Human
aggaguuuggccag

SEQ ID NO: 2979685 - RNA, 15 nt, Human
aggauccugagccag

SEQ ID NO: 2979686 - RNA, 16 nt, Human
aggauccugagccaga

SEQ ID NO: 2979687 - RNA, 21 nt, Human
aggauacaaaagcaugugaga

SEQ ID NO: 2979688 - RNA, 21 nt, Human
aggaucucuugagccugggag

SEQ ID NO: 2979689 - RNA, 22 nt, Human
aggaucucuugagccugggagg

SEQ ID NO: 2979690 - RNA, 17 nt, Human
aggauccugagccagau

SEQ ID NO: 2979691 - RNA, 18 nt, Human
aggauccugagccagauu

SEQ ID NO: 2979692 - RNA, 16 nt, Human
aggaugaucuaggaag

SEQ ID NO: 2979693 - RNA, 17 nt, Human
aggaugaucuaggaaga

SEQ ID NO: 2979694 - RNA, 21 nt, Human
uggaaauuagguugaaacaua

SEQ ID NO: 2979695 - RNA, 20 nt, Human
uggaaauuagguugaaacau

SEQ ID NO: 2979696 - RNA, 19 nt, Human
uggaaauuagguugaaaca

SEQ ID NO: 2979697 - RNA, 23 nt, Human
uggaaaugggcagagcagagacc

SEQ ID NO: 2979698 - RNA, 20 nt, Human
uggaaauauuaagaaagacu

SEQ ID NO: 2979699 - RNA, 22 nt, Human
uggaaauuagguugaaacauau

SEQ ID NO: 2979700 - RNA, 18 nt, Human
uggaauuggagcucgugg

SEQ ID NO: 2979701 - RNA, 17 nt, Human
aggcaacucaucuuagg

SEQ ID NO: 2979702 - RNA, 14 nt, Human
aggcaaauguuuau

SEQ ID NO: 2979703 - RNA, 20 nt, Human
aggaugaucuaggaagacuu

SEQ ID NO: 2979704 - RNA, 14 nt, Human
aggaugcccaaaga

SEQ ID NO: 2979705 - RNA, 19 nt, Human
aggaugcccaaagaugcag

SEQ ID NO: 2979706 - RNA, 19 nt, Human
aggauuuugauccaagcug

SEQ ID NO: 2979707 - RNA, 14 nt, Human
uggacccugaggcc

SEQ ID NO: 2979708 - RNA, 12 nt, Human
uggacccugagg

SEQ ID NO: 2979709 - RNA, 13 nt, Human
uggacccugaggc

SEQ ID NO: 2979710 - RNA, 16 nt, Human
uggacacagcucuucu

SEQ ID NO: 2979711 - RNA, 15 nt, Human
uggacacagcucuuc

SEQ ID NO: 2979712 - RNA, 18 nt, Human
uggacacagcucuucucc

SEQ ID NO: 2979713 - RNA, 13 nt, Human
ugaugacuguuuu

SEQ ID NO: 2979714 - RNA, 15 nt, Human
ugaugacauucccug

SEQ ID NO: 2979715 - RNA, 18 nt, Human
ugaugacauucccugcua

SEQ ID NO: 2979716 - RNA, 12 nt, Human
ugaugaagaagu

SEQ ID NO: 2979717 - RNA, 11 nt, Human
ugaugaagaag

SEQ ID NO: 2979718 - RNA, 16 nt, Human
ugauccuaguuccacc

SEQ ID NO: 2979719 - RNA, 15 nt, Human
ugauccucccaccuc

SEQ ID NO: 2979720 - RNA, 21 nt, Human
ugauccucccaccucagccuc

SEQ ID NO: 2979721 - RNA, 22 nt, Human
ugauccucccaccucagccucc

SEQ ID NO: 2979722 - RNA, 14 nt, Human
ugauggggcccugc

SEQ ID NO: 2979723 - RNA, 15 nt, Human
ugauggggcccugcc

SEQ ID NO: 2979724 - RNA, 16 nt, Human
ugauggggcccugccu

SEQ ID NO: 2979725 - RNA, 19 nt, Human
ugauggggcccugccuccu

SEQ ID NO: 2979726 - RNA, 19 nt, Human
ugaugggaaagcauuguaa

SEQ ID NO: 2979727 - RNA, 13 nt, Human
ugaugagaggaaa

SEQ ID NO: 2979728 - RNA, 14 nt, Human
ugaugagaggaaau

SEQ ID NO: 2979729 - RNA, 15 nt, Human
ugaugagaggaaauc

SEQ ID NO: 2979730 - RNA, 16 nt, Human
ugaugagaggaaauca

SEQ ID NO: 2979731 - RNA, 14 nt, Human
ugaugggaaagcau

SEQ ID NO: 2979732 - RNA, 23 nt, Human
ugaugcuucuucagagacuccug

SEQ ID NO: 2979733 - RNA, 23 nt, Human
ugauuaaguaaugauaacuggaa

SEQ ID NO: 2979734 - RNA, 16 nt, Human
agccacugcaccgggc

SEQ ID NO: 2979735 - RNA, 19 nt, Human
ugauuaaccacuucagcug

SEQ ID NO: 2979736 - RNA, 18 nt, Human
ugauuaaguaaugauaac

SEQ ID NO: 2979737 - RNA, 20 nt, Human
ugauuaaauucuugcaaagu

SEQ ID NO: 2979738 - RNA, 19 nt, Human
ugauuaaauucuugcaaag

SEQ ID NO: 2979739 - RNA, 15 nt, Human
ugauggugcaaugac

SEQ ID NO: 2979740 - RNA, 13 nt, Human
ugauggugcaaug

SEQ ID NO: 2979741 - RNA, 21 nt, Human
agccagcaguucagagcugcc

SEQ ID NO: 2979742 - RNA, 20 nt, Human
agccagcaguucagagcugc

SEQ ID NO: 2979743 - RNA, 22 nt, Human
agccagcaguucagagcugccc

SEQ ID NO: 2979744 - RNA, 10 nt, Human
agccagagga

SEQ ID NO: 2979745 - RNA, 11 nt, Human
agccagaggag

SEQ ID NO: 2979746 - RNA, 19 nt, Human
agccagcaguucagagcug

SEQ ID NO: 2979747 - RNA, 17 nt, Human
agccagcaguucagagc

SEQ ID NO: 2979748 - RNA, 15 nt, Human
agccagcaguucaga

SEQ ID NO: 2979749 - RNA, 19 nt, Human
agccacugcaccgggccac

SEQ ID NO: 2979750 - RNA, 18 nt, Human
agccacugcaccgggcca

SEQ ID NO: 2979751 - RNA, 19 nt, Human
agccagacuggcacaguuu

SEQ ID NO: 2979752 - RNA, 20 nt, Human
ugauuuagcaggaagcugug

SEQ ID NO: 2979753 - RNA, 17 nt, Human
ugauuuagcaggaagcu

SEQ ID NO: 2979754 - RNA, 22 nt, Human
ugauuuccguuaaaauaccagc

SEQ ID NO: 2979755 - RNA, 18 nt, Human
ugauuuccguuaaaauac

SEQ ID NO: 2979756 - RNA, 17 nt, Human
ugauuuggggauauuuu

SEQ ID NO: 2979757 - RNA, 14 nt, Human
agcccaggaaaggc

SEQ ID NO: 2979758 - RNA, 15 nt, Human
ugauucauaaugacu

SEQ ID NO: 2979759 - RNA, 16 nt, Human
ugauucauaaugacuu

SEQ ID NO: 2979760 - RNA, 21 nt, Human
ugauucauaaugacuuaagca

SEQ ID NO: 2979761 - RNA, 23 nt, Human
ugauucccaagcucugcuccucu

SEQ ID NO: 2979762 - RNA, 22 nt, Human
ugauucccaagcucugcuccuc

SEQ ID NO: 2979763 - RNA, 16 nt, Human
ugauucccugauuuaa

SEQ ID NO: 2979764 - RNA, 15 nt, Human
ugauucccugauuua

SEQ ID NO: 2979765 - RNA, 15 nt, Human
agcccacuucugcca

SEQ ID NO: 2979766 - RNA, 14 nt, Human
agcccacuucugcc

SEQ ID NO: 2979767 - RNA, 13 nt, Human
agcccacuucugc

SEQ ID NO: 2979768 - RNA, 13 nt, Human
agccaguaaaugg

SEQ ID NO: 2979769 - RNA, 21 nt, Human
agccaguaaaugggggugcau

SEQ ID NO: 2979770 - RNA, 11 nt, Human
agcccugucuc

SEQ ID NO: 2979771 - RNA, 18 nt, Human
agcccugucuccucucuc

SEQ ID NO: 2979772 - RNA, 16 nt, Human
agcccuuagcagggaa

SEQ ID NO: 2979773 - RNA, 17 nt, Human
ugcagacucuacagagg

SEQ ID NO: 2979774 - RNA, 16 nt, Human
ugcagacucuacagag

SEQ ID NO: 2979775 - RNA, 20 nt, Human
agccgagauagccaaggcca

SEQ ID NO: 2979776 - RNA, 21 nt, Human
agccgagauagccaaggccaa

SEQ ID NO: 2979777 - RNA, 17 nt, Human
agccgagaucacgccac

SEQ ID NO: 2979778 - RNA, 21 nt, Human
agcccuuagcagggaaacagc

SEQ ID NO: 2979779 - RNA, 14 nt, Human
ugcagaagacagua

SEQ ID NO: 2979780 - RNA, 15 nt, Human
ugcagaagacaguau

SEQ ID NO: 2979781 - RNA, 22 nt, Human
ugcagacaggcaagcaccuccu

SEQ ID NO: 2979782 - RNA, 15 nt, Human
ugcacacauuuuuua

SEQ ID NO: 2979783 - RNA, 13 nt, Human
ugcacacauuuuu

SEQ ID NO: 2979784 - RNA, 12 nt, Human
ugcacacauuuu

SEQ ID NO: 2979785 - RNA, 11 nt, Human
ugcacacauuu

SEQ ID NO: 2979786 - RNA, 16 nt, Human
ugcacuccccugcugg

SEQ ID NO: 2979787 - RNA, 17 nt, Human
ugcacuccccugcuggg

SEQ ID NO: 2979788 - RNA, 19 nt, Human
ugcacuccccugcugggug

SEQ ID NO: 2979789 - RNA, 18 nt, Human
agccgagaucacgccacu

SEQ ID NO: 2979790 - RNA, 19 nt, Human
agccucaaccuccugggcu

SEQ ID NO: 2979791 - RNA, 20 nt, Human
agccucaaccuccugggcua

SEQ ID NO: 2979792 - RNA, 18 nt, Human
agccucacagcagugaga

SEQ ID NO: 2979793 - RNA, 14 nt, Human
agccucacagcagu

SEQ ID NO: 2979794 - RNA, 17 nt, Human
agccucacaguccuuac

SEQ ID NO: 2979795 - RNA, 18 nt, Human
agccucacaguccuuacc

SEQ ID NO: 2979796 - RNA, 22 nt, Human
agccucacagcagugagacugg

SEQ ID NO: 2979797 - RNA, 23 nt, Human
agccucugaaaaccaauguucuc

SEQ ID NO: 2979798 - RNA, 21 nt, Human
ugcagccucaaccuccugggc

SEQ ID NO: 2979799 - RNA, 20 nt, Human
ugcagccucaaccuccuggg

SEQ ID NO: 2979800 - RNA, 22 nt, Human
ugcagccucaaccuccugggcu

SEQ ID NO: 2979801 - RNA, 18 nt, Human
ugcacacaccagagccca

SEQ ID NO: 2979802 - RNA, 17 nt, Human
ugcacacaccagagccc

SEQ ID NO: 2979803 - RNA, 21 nt, Human
ugcacacaccagagcccaccu

SEQ ID NO: 2979804 - RNA, 16 nt, Human
agcccugguggcagug

SEQ ID NO: 2979805 - RNA, 15 nt, Human
agcccugguggcagu

SEQ ID NO: 2979806 - RNA, 14 nt, Human
agcccugguggcag

SEQ ID NO: 2979807 - RNA, 22 nt, Human
agccccauucugccugcccagg

SEQ ID NO: 2979808 - RNA, 21 nt, Human
agccccauucugccugcccag

SEQ ID NO: 2979809 - RNA, 18 nt, Human
agccccaaaacucuccuc

SEQ ID NO: 2979810 - RNA, 20 nt, Human
agccccauucugccugccca

SEQ ID NO: 2979811 - RNA, 16 nt, Human
agccccaaaacucucc

SEQ ID NO: 2979812 - RNA, 17 nt, Human
agccccaaaacucuccu

SEQ ID NO: 2979813 - RNA, 21 nt, Human
agcccaggccuccuacagcuu

SEQ ID NO: 2979814 - RNA, 21 nt, Human
ugcaaaccaucauugaaaucu

SEQ ID NO: 2979815 - RNA, 22 nt, Human
ugcagcucuccccuucucugua

SEQ ID NO: 2979816 - RNA, 20 nt, Human
ugcagcucuccccuucucug

SEQ ID NO: 2979817 - RNA, 18 nt, Human
agccuuccagggguggga

SEQ ID NO: 2979818 - RNA, 15 nt, Human
agccuugaacuuuga

SEQ ID NO: 2979819 - RNA, 22 nt, Human
agccuugaacuuugaccucugc

SEQ ID NO: 2979820 - RNA, 16 nt, Human
agccuugaacuuugac

SEQ ID NO: 2979821 - RNA, 13 nt, Human
agccuugaacuuu

SEQ ID NO: 2979822 - RNA, 22 nt, Human
agccuugaccauucuccaccug

SEQ ID NO: 2979823 - RNA, 23 nt, Human
agccuugaccauucuccaccugc

SEQ ID NO: 2979824 - RNA, 22 nt, Human
agcgauucuucugcuucagccu

SEQ ID NO: 2979825 - RNA, 20 nt, Human
ugcauuuaaaagauacaguu

SEQ ID NO: 2979826 - RNA, 18 nt, Human
ugcauuugaggucuguuc

SEQ ID NO: 2979827 - RNA, 19 nt, Human
ugcauuugaggucuguucu

SEQ ID NO: 2979828 - RNA, 17 nt, Human
ugccagccacugugaua

SEQ ID NO: 2979829 - RNA, 21 nt, Human
ugcauuugaggucuguucuuu

SEQ ID NO: 2979830 - RNA, 20 nt, Human
ugcauuugaggucuguucuu

SEQ ID NO: 2979831 - RNA, 20 nt, Human
agcggggacagcuccuucug

SEQ ID NO: 2979832 - RNA, 19 nt, Human
agcggggacagcuccuucu

SEQ ID NO: 2979833 - RNA, 23 nt, Human
agcggcuggcagcccaccccuca

SEQ ID NO: 2979834 - RNA, 22 nt, Human
agcggggacagcuccuucuguc

SEQ ID NO: 2979835 - RNA, 15 nt, Human
ugccagugccugggu

SEQ ID NO: 2979836 - RNA, 12 nt, Human
ugccagugccug

SEQ ID NO: 2979837 - RNA, 16 nt, Human
ugccagugccugggug

SEQ ID NO: 2979838 - RNA, 13 nt, Human
agcggcuggcagc

SEQ ID NO: 2979839 - RNA, 18 nt, Human
ugccagcuuaucucaggg

SEQ ID NO: 2979840 - RNA, 16 nt, Human
ugccccauucaacauc

SEQ ID NO: 2979841 - RNA, 20 nt, Human
ugcccuaaaguguauuuuuu

SEQ ID NO: 2979842 - RNA, 23 nt, Human
ugccccgaacauguuuuucuucu

SEQ ID NO: 2979843 - RNA, 18 nt, Human
ugcccaggccccugccac

SEQ ID NO: 2979844 - RNA, 17 nt, Human
ugcccaggccccugcca

SEQ ID NO: 2979845 - RNA, 15 nt, Human
ugcccaggccccugc

SEQ ID NO: 2979846 - RNA, 14 nt, Human
ugcccaggccccug

SEQ ID NO: 2979847 - RNA, 13 nt, Human
ugcccagccccuu

SEQ ID NO: 2979848 - RNA, 12 nt, Human
ugcccagccccu

SEQ ID NO: 2979849 - RNA, 16 nt, Human
ugcccagccccuucug

SEQ ID NO: 2979850 - RNA, 17 nt, Human
ugcccagccccuucuga

SEQ ID NO: 2979851 - RNA, 17 nt, Human
ugcccaaagaugcagcc

SEQ ID NO: 2979852 - RNA, 20 nt, Human
ugcccaaagaugcagccggu

SEQ ID NO: 2979853 - RNA, 22 nt, Human
ugccauuuaaagcuuauuaaaa

SEQ ID NO: 2979854 - RNA, 18 nt, Human
agcuccaagaauuucuag

SEQ ID NO: 2979855 - RNA, 15 nt, Human
agcuccaagcuccca

SEQ ID NO: 2979856 - RNA, 15 nt, Human
agcuccaagaauuuc

SEQ ID NO: 2979857 - RNA, 20 nt, Human
agcucagggccuggcucagg

SEQ ID NO: 2979858 - RNA, 18 nt, Human
agcucagggccuggcuca

SEQ ID NO: 2979859 - RNA, 19 nt, Human
agcucagggccuggcucag

SEQ ID NO: 2979860 - RNA, 12 nt, Human
agcucagggccu

SEQ ID NO: 2979861 - RNA, 13 nt, Human
agcucagggccug

SEQ ID NO: 2979862 - RNA, 19 nt, Human
agcuauucaguaauaacuc

SEQ ID NO: 2979863 - RNA, 19 nt, Human
agcuauggugucauaggcu

SEQ ID NO: 2979864 - RNA, 21 nt, Human
agcuaggccuggccagaugca

SEQ ID NO: 2979865 - RNA, 20 nt, Human
agcuaggugacauauacaua

SEQ ID NO: 2979866 - RNA, 19 nt, Human
agcuaggugacauauacau

SEQ ID NO: 2979867 - RNA, 14 nt, Human
agcuaggugacaua

SEQ ID NO: 2979868 - RNA, 18 nt, Human
ugccucagaaaacaagga

SEQ ID NO: 2979869 - RNA, 22 nt, Human
ugccucccaucacccgcuaaga

SEQ ID NO: 2979870 - RNA, 17 nt, Human
ugccucucucaggccaa

SEQ ID NO: 2979871 - RNA, 16 nt, Human
ugccucucucaggcca

SEQ ID NO: 2979872 - RNA, 15 nt, Human
ugccuccccuccucu

SEQ ID NO: 2979873 - RNA, 14 nt, Human
ugccuccccuccuc

SEQ ID NO: 2979874 - RNA, 13 nt, Human
ugccuccccuccu

SEQ ID NO: 2979875 - RNA, 12 nt, Human
ugccuccccucc

SEQ ID NO: 2979876 - RNA, 11 nt, Human
ugccuccccuc

SEQ ID NO: 2979877 - RNA, 15 nt, Human
ugccucaccccuugc

SEQ ID NO: 2979878 - RNA, 20 nt, Human
ugccgcagcccugcagaggg

SEQ ID NO: 2979879 - RNA, 19 nt, Human
ugcccuuaccugccaggaa

SEQ ID NO: 2979880 - RNA, 23 nt, Human
ugcccugugaguacuacaguccu

SEQ ID NO: 2979881 - RNA, 16 nt, Human
agcucuucuccaggcu

SEQ ID NO: 2979882 - RNA, 15 nt, Human
agcucuucuccaggc

SEQ ID NO: 2979883 - RNA, 15 nt, Human
ugcccugugggcccc

SEQ ID NO: 2979884 - RNA, 18 nt, Human
ugcccugugggcccccaa

SEQ ID NO: 2979885 - RNA, 22 nt, Human
ugcccuuaccugccaggaagcc

SEQ ID NO: 2979886 - RNA, 18 nt, Human
agcugcccucuccugggc

SEQ ID NO: 2979887 - RNA, 17 nt, Human
agcugcccucuccuggg

SEQ ID NO: 2979888 - RNA, 20 nt, Human
agcugcccucuccugggcag

SEQ ID NO: 2979889 - RNA, 19 nt, Human
agcugcccucuccugggca

SEQ ID NO: 2979890 - RNA, 21 nt, Human
agcugcccucuccugggcagc

SEQ ID NO: 2979891 - RNA, 10 nt, Human
agcugccugu

SEQ ID NO: 2979892 - RNA, 16 nt, Human
agcugcccucuccugg

SEQ ID NO: 2979893 - RNA, 22 nt, Human
agcugcuuuugucuaugggacu

SEQ ID NO: 2979894 - RNA, 13 nt, Human
agcugccuguuca

SEQ ID NO: 2979895 - RNA, 24 nt, Human
agcugcuuuugucuaugggacuca

SEQ ID NO: 2979896 - RNA, 23 nt, Human
agcugcuuuugucuaugggacuc

SEQ ID NO: 2979897 - RNA, 15 nt, Human
agcugggacuacagg

SEQ ID NO: 2979898 - RNA, 11 nt, Human
ugccucugccu

SEQ ID NO: 2979899 - RNA, 16 nt, Human
ugccucugacacacag

SEQ ID NO: 2979900 - RNA, 14 nt, Human
ugccucugacacac

SEQ ID NO: 2979901 - RNA, 19 nt, Human
ugccugcccaggccccugc

SEQ ID NO: 2979902 - RNA, 18 nt, Human
ugccugcccaggccccug

SEQ ID NO: 2979903 - RNA, 17 nt, Human
ugccugcccaggccccu

SEQ ID NO: 2979904 - RNA, 23 nt, Human
agcucugcccauccugccccuga

SEQ ID NO: 2979905 - RNA, 23 nt, Human
agcucuguccugggagugagcug

SEQ ID NO: 2979906 - RNA, 19 nt, Human
agcuccagcucaccagccc

SEQ ID NO: 2979907 - RNA, 18 nt, Human
agcuccagcucaccagcc

SEQ ID NO: 2979908 - RNA, 21 nt, Human
agcuccagcucaccagcccca

SEQ ID NO: 2979909 - RNA, 23 nt, Human
agcuccuucuguccuacucugug

SEQ ID NO: 2979910 - RNA, 22 nt, Human
agcuccuucuguccuacucugu

SEQ ID NO: 2979911 - RNA, 12 nt, Human
ugcccucuccug

SEQ ID NO: 2979912 - RNA, 15 nt, Human
ugcccucuccugggc

SEQ ID NO: 2979913 - RNA, 14 nt, Human
ugcccucuccuggg

SEQ ID NO: 2979914 - RNA, 13 nt, Human
ugcccucuccugg

SEQ ID NO: 2979915 - RNA, 20 nt, Human
ugcccucuccugggcagcug

SEQ ID NO: 2979916 - RNA, 18 nt, Human
ugcccucuccugggcagc

SEQ ID NO: 2979917 - RNA, 17 nt, Human
ugcccucuccugggcag

SEQ ID NO: 2979918 - RNA, 16 nt, Human
ugcccucuccugggca

SEQ ID NO: 2979919 - RNA, 23 nt, Human
ugcccucuccugggcagcugccu

SEQ ID NO: 2979920 - RNA, 22 nt, Human
ugcccucuccugggcagcugcc

SEQ ID NO: 2979921 - RNA, 17 nt, Human
agcuccaagcucccagg

SEQ ID NO: 2979922 - RNA, 16 nt, Human
agcuccaagcucccag

SEQ ID NO: 2979923 - RNA, 18 nt, Human
agcuccaagcucccaggc

SEQ ID NO: 2979924 - RNA, 19 nt, Human
agcuccaagcucccaggca

SEQ ID NO: 2979925 - RNA, 17 nt, Human
agcuccagcucaccagc

SEQ ID NO: 2979926 - RNA, 13 nt, Human
agcuccagcucac

SEQ ID NO: 2979927 - RNA, 13 nt, Human
aguuuggccagaa

SEQ ID NO: 2979928 - RNA, 14 nt, Human
aguuuggccagaag

SEQ ID NO: 2979929 - RNA, 16 nt, Human
aguuugguuucuagca

SEQ ID NO: 2979930 - RNA, 22 nt, Human
aguuuucacucuuauugcccac

SEQ ID NO: 2979931 - RNA, 12 nt, Human
aguuuggccaga

SEQ ID NO: 2979932 - RNA, 21 nt, Human
aguuucuccaagcaggacaug

SEQ ID NO: 2979933 - RNA, 13 nt, Human
aguuucuccaagc

SEQ ID NO: 2979934 - RNA, 15 nt, Human
aguuucuccaagcag

SEQ ID NO: 2979935 - RNA, 13 nt, Human
uuaaauucuugca

SEQ ID NO: 2979936 - RNA, 16 nt, Human
uuaaauucuugcaaag

SEQ ID NO: 2979937 - RNA, 17 nt, Human
uuaaaccgccaaggcug

SEQ ID NO: 2979938 - RNA, 21 nt, Human
uuaaauaaugugaaacuggau

SEQ ID NO: 2979939 - RNA, 20 nt, Human
uuaaauaaugugaaacugga

SEQ ID NO: 2979940 - RNA, 22 nt, Human
uuaaauaaugugaaacuggauu

SEQ ID NO: 2979941 - RNA, 19 nt, Human
uuaaauaaugugaaacugg

SEQ ID NO: 2979942 - RNA, 15 nt, Human
uuaaauaaaucauaa

SEQ ID NO: 2979943 - RNA, 13 nt, Human
uuaaauaaaucau

SEQ ID NO: 2979944 - RNA, 18 nt, Human
uuaaaaaagaaacauuug

SEQ ID NO: 2979945 - RNA, 15 nt, Human
uuaaaaaagaaacau

SEQ ID NO: 2979946 - RNA, 20 nt, Human
aguugccagucaccccggcc

SEQ ID NO: 2979947 - RNA, 22 nt, Human
aguugcauagguuuaauaauuu

SEQ ID NO: 2979948 - RNA, 20 nt, Human
uuaaaaaugguuuaaauggu

SEQ ID NO: 2979949 - RNA, 17 nt, Human
uuaaaacaacacucaca

SEQ ID NO: 2979950 - RNA, 18 nt, Human
uuaaaaaguggaaaaaua

SEQ ID NO: 2979951 - RNA, 13 nt, Human
uguuuucaaaugu

SEQ ID NO: 2979952 - RNA, 14 nt, Human
uguuuucaaauguu

SEQ ID NO: 2979953 - RNA, 18 nt, Human
uguuuucaauuuuaaaca

SEQ ID NO: 2979954 - RNA, 21 nt, Human
uguuuucaauuuuaaacauau

SEQ ID NO: 2979955 - RNA, 15 nt, Human
uguuuucaguguaca

SEQ ID NO: 2979956 - RNA, 17 nt, Human
uguuuuauauagcaaga

SEQ ID NO: 2979957 - RNA, 14 nt, Human
uguuuuaggagcau

SEQ ID NO: 2979958 - RNA, 20 nt, Human
uguuuuauaauuuugugaag

SEQ ID NO: 2979959 - RNA, 13 nt, Human
uguuuuauaauuu

SEQ ID NO: 2979960 - RNA, 16 nt, Human
aguucucuccuucuuc

SEQ ID NO: 2979961 - RNA, 13 nt, Human
aguucucuccuuc

SEQ ID NO: 2979962 - RNA, 12 nt, Human
aguucucuccuu

SEQ ID NO: 2979963 - RNA, 15 nt, Human
uguuuucucuugaga

SEQ ID NO: 2979964 - RNA, 17 nt, Human
uguuuucaguguacaug

SEQ ID NO: 2979965 - RNA, 15 nt, Human
uguuugcuaagcauu

SEQ ID NO: 2979966 - RNA, 16 nt, Human
uguuugccucugccuc

SEQ ID NO: 2979967 - RNA, 14 nt, Human
uguuugccucugcc

SEQ ID NO: 2979968 - RNA, 14 nt, Human
uguugucagcugaa

SEQ ID NO: 2979969 - RNA, 19 nt, Human
uguuugcuaagcauuccaa

SEQ ID NO: 2979970 - RNA, 15 nt, Human
uguuuggggaugaga

SEQ ID NO: 2979971 - RNA, 22 nt, Human
aguucuugccuuggcugcaguu

SEQ ID NO: 2979972 - RNA, 14 nt, Human
aguugauagcacag

SEQ ID NO: 2979973 - RNA, 15 nt, Human
aguugauagcacaga

SEQ ID NO: 2979974 - RNA, 19 nt, Human
aguugauagcacagacccu

SEQ ID NO: 2979975 - RNA, 20 nt, Human
aguugauagcacagacccug

SEQ ID NO: 2979976 - RNA, 21 nt, Human
aguugauagcacagacccugc

SEQ ID NO: 2979977 - RNA, 14 nt, Human
aguucugaagaaga

SEQ ID NO: 2979978 - RNA, 13 nt, Human
aguucugaagaag

SEQ ID NO: 2979979 - RNA, 15 nt, Human
aguucugaagaagau

SEQ ID NO: 2979980 - RNA, 22 nt, Human
aguugauagcacagacccugcc

SEQ ID NO: 2979981 - RNA, 23 nt, Human
aguugauagcacagacccugccc

SEQ ID NO: 2979982 - RNA, 21 nt, Human
aguugauaugccuuuucccaa

SEQ ID NO: 2979983 - RNA, 13 nt, Human
aguugauucagcu

SEQ ID NO: 2979984 - RNA, 14 nt, Human
aguugauucagcuc

SEQ ID NO: 2979985 - RNA, 15 nt, Human
aguugauucagcucu

SEQ ID NO: 2979986 - RNA, 17 nt, Human
aguugauucagcucugc

SEQ ID NO: 2979987 - RNA, 18 nt, Human
aguugauucagcucugca

SEQ ID NO: 2979988 - RNA, 23 nt, Human
aguugauucagcucugcaagaau

SEQ ID NO: 2979989 - RNA, 20 nt, Human
aguugcaaggcaaauguuua

SEQ ID NO: 2979990 - RNA, 19 nt, Human
aguugcaaggcaaauguuu

SEQ ID NO: 2979991 - RNA, 23 nt, Human
aguggcagucuucaguuugcaga

SEQ ID NO: 2979992 - RNA, 19 nt, Human
agugggggaguggccacag

SEQ ID NO: 2979993 - RNA, 20 nt, Human
agugggggaguggccacaga

SEQ ID NO: 2979994 - RNA, 13 nt, Human
agugggugaauaa

SEQ ID NO: 2979995 - RNA, 18 nt, Human
agugggugaauaauacag

SEQ ID NO: 2979996 - RNA, 20 nt, Human
aguggcagcugcuuuugucu

SEQ ID NO: 2979997 - RNA, 14 nt, Human
aguggcagcugcuu

SEQ ID NO: 2979998 - RNA, 13 nt, Human
aguggcagcugcu

SEQ ID NO: 2979999 - RNA, 12 nt, Human
aguggcagcugc

SEQ ID NO: 2980000 - RNA, 11 nt, Human
aguggcagcug

SEQ ID NO: 2980001 - RNA, 22 nt, Human
aguguacauggaauaacaugua

SEQ ID NO: 2980002 - RNA, 21 nt, Human
aguguacauggaauaacaugu

SEQ ID NO: 2980003 - RNA, 21 nt, Human
agugguuccuaauccucuagg

SEQ ID NO: 2980004 - RNA, 19 nt, Human
agugggugaauaauacagu

SEQ ID NO: 2980005 - RNA, 13 nt, Human
uguucugggacac

SEQ ID NO: 2980006 - RNA, 12 nt, Human
uguucugggaca

SEQ ID NO: 2980007 - RNA, 16 nt, Human
uguucuuaauucuuag

SEQ ID NO: 2980008 - RNA, 14 nt, Human
uguucuuaauucuu

SEQ ID NO: 2980009 - RNA, 15 nt, Human
uguucugggacacag

SEQ ID NO: 2980010 - RNA, 14 nt, Human
uguucugggacaca

SEQ ID NO: 2980011 - RNA, 18 nt, Human
uguucuugguuuguaaau

SEQ ID NO: 2980012 - RNA, 17 nt, Human
uguucuugguuuguaaa

SEQ ID NO: 2980013 - RNA, 14 nt, Human
uguucuuuccaaag

SEQ ID NO: 2980014 - RNA, 13 nt, Human
uguucuuuccaaa

SEQ ID NO: 2980015 - RNA, 19 nt, Human
uguucuugguuuguaaauu

SEQ ID NO: 2980016 - RNA, 23 nt, Human
aguguacauggaauaacauguaa

SEQ ID NO: 2980017 - RNA, 14 nt, Human
aguuauugaagcag

SEQ ID NO: 2980018 - RNA, 21 nt, Human
aguuauuaagagguaagacuu

SEQ ID NO: 2980019 - RNA, 18 nt, Human
aguuauugaagcagagug

SEQ ID NO: 2980020 - RNA, 17 nt, Human
aguuauugaagcagagu

SEQ ID NO: 2980021 - RNA, 16 nt, Human
aguuauugaagcagag

SEQ ID NO: 2980022 - RNA, 23 nt, Human
aguuauugaagcagaguggcagu

SEQ ID NO: 2980023 - RNA, 19 nt, Human
aguuauugaagcagagugg

SEQ ID NO: 2980024 - RNA, 19 nt, Human
aguuauggcuauaggugcu

SEQ ID NO: 2980025 - RNA, 20 nt, Human
aguuauuauauuuacaaaug

SEQ ID NO: 2980026 - RNA, 18 nt, Human
uguucuuuccaaaguaca

SEQ ID NO: 2980027 - RNA, 17 nt, Human
aguuacccaaauuaaga

SEQ ID NO: 2980028 - RNA, 18 nt, Human
aguuacccaaauuaagag

SEQ ID NO: 2980029 - RNA, 13 nt, Human
uguugucagcuga

SEQ ID NO: 2980030 - RNA, 13 nt, Human
uguugggccagga

SEQ ID NO: 2980031 - RNA, 16 nt, Human
uguugggccaggagcc

SEQ ID NO: 2980032 - RNA, 18 nt, Human
aguucagagcugcccucu

SEQ ID NO: 2980033 - RNA, 17 nt, Human
aguucagagcugcccuc

SEQ ID NO: 2980034 - RNA, 16 nt, Human
aguucagagcugcccu

SEQ ID NO: 2980035 - RNA, 15 nt, Human
aguucagagcugccc

SEQ ID NO: 2980036 - RNA, 14 nt, Human
aguucagagcugcc

SEQ ID NO: 2980037 - RNA, 21 nt, Human
aguuauuuuuauuuauuuaaa

SEQ ID NO: 2980038 - RNA, 20 nt, Human
aguucggugagcuacaaaug

SEQ ID NO: 2980039 - RNA, 20 nt, Human
auacuauuaaacaugcugua

SEQ ID NO: 2980040 - RNA, 20 nt, Human
auacuacaguuuguuaguau

SEQ ID NO: 2980041 - RNA, 16 nt, Human
auacuacaguuuguua

SEQ ID NO: 2980042 - RNA, 15 nt, Human
auacuacaguuuguu

SEQ ID NO: 2980043 - RNA, 13 nt, Human
auacuacaguuug

SEQ ID NO: 2980044 - RNA, 19 nt, Human
auaccagccaguaaauggg

SEQ ID NO: 2980045 - RNA, 17 nt, Human
auaccagccaguaaaug

SEQ ID NO: 2980046 - RNA, 21 nt, Human
auacuaaccagcagaaaugcc

SEQ ID NO: 2980047 - RNA, 15 nt, Human
uuaucagaacuaugu

SEQ ID NO: 2980048 - RNA, 20 nt, Human
auacaucccuuaccugggaa

SEQ ID NO: 2980049 - RNA, 16 nt, Human
auacauuugauaaagu

SEQ ID NO: 2980050 - RNA, 21 nt, Human
auacaguucggugagcuacaa

SEQ ID NO: 2980051 - RNA, 20 nt, Human
auacaggaaaagcugcugac

SEQ ID NO: 2980052 - RNA, 19 nt, Human
auacaggaaaagcugcuga

SEQ ID NO: 2980053 - RNA, 14 nt, Human
auacaggaaaagcu

SEQ ID NO: 2980054 - RNA, 13 nt, Human
uuauauagcaaga

SEQ ID NO: 2980055 - RNA, 18 nt, Human
uuauauaagcuuguauuc

SEQ ID NO: 2980056 - RNA, 19 nt, Human
uuauauagcaagacauuau

SEQ ID NO: 2980057 - RNA, 22 nt, Human
uuauauauauuuuuuucugaaa

SEQ ID NO: 2980058 - RNA, 20 nt, Human
auaauuuugugaagcaaaau

SEQ ID NO: 2980059 - RNA, 15 nt, Human
auaauuuugugaagc

SEQ ID NO: 2980060 - RNA, 14 nt, Human
auaauuuugugaag

SEQ ID NO: 2980061 - RNA, 13 nt, Human
auaauuuugugaa

SEQ ID NO: 2980062 - RNA, 19 nt, Human
auaauuuuuauauuugaaa

SEQ ID NO: 2980063 - RNA, 16 nt, Human
auaauuuuuauauuug

SEQ ID NO: 2980064 - RNA, 14 nt, Human
auaauuuuuauauu

SEQ ID NO: 2980065 - RNA, 15 nt, Human
auacaaaagcaugug

SEQ ID NO: 2980066 - RNA, 13 nt, Human
auacaaaagcaug

SEQ ID NO: 2980067 - RNA, 12 nt, Human
auacaaaagcau

SEQ ID NO: 2980068 - RNA, 22 nt, Human
auacaaaaaaaaaaaaaaauua

SEQ ID NO: 2980069 - RNA, 22 nt, Human
auaauuuuuauauuugaaauau

SEQ ID NO: 2980070 - RNA, 21 nt, Human
auaauuuuuauauuugaaaua

SEQ ID NO: 2980071 - RNA, 16 nt, Human
uuauaacuuuuuauau

SEQ ID NO: 2980072 - RNA, 14 nt, Human
uuauaacuuuuuau

SEQ ID NO: 2980073 - RNA, 15 nt, Human
uuauaacuuaaugaa

SEQ ID NO: 2980074 - RNA, 21 nt, Human
uuauaacuuaaugaaaacaau

SEQ ID NO: 2980075 - RNA, 21 nt, Human
uuagccguggugauuuagcag

SEQ ID NO: 2980076 - RNA, 16 nt, Human
uuagcccugaacauuu

SEQ ID NO: 2980077 - RNA, 15 nt, Human
uuagcccugaacauu

SEQ ID NO: 2980078 - RNA, 15 nt, Human
auaaacucauuucua

SEQ ID NO: 2980079 - RNA, 16 nt, Human
auaaacgucuuaaaua

SEQ ID NO: 2980080 - RNA, 15 nt, Human
auaaacgucuuaaau

SEQ ID NO: 2980081 - RNA, 18 nt, Human
auaaacgucuuaaauauu

SEQ ID NO: 2980082 - RNA, 15 nt, Human
auaaacuuuaccuuu

SEQ ID NO: 2980083 - RNA, 13 nt, Human
auaaacuuuaccu

SEQ ID NO: 2980084 - RNA, 16 nt, Human
auaaaccgaacugaug

SEQ ID NO: 2980085 - RNA, 12 nt, Human
aguuuucugaga

SEQ ID NO: 2980086 - RNA, 13 nt, Human
aguuuucugagaa

SEQ ID NO: 2980087 - RNA, 14 nt, Human
aguuuucugagaaa

SEQ ID NO: 2980088 - RNA, 17 nt, Human
aguuuucugagaaagac

SEQ ID NO: 2980089 - RNA, 23 nt, Human
auaacuggaacacucuauaacaa

SEQ ID NO: 2980090 - RNA, 21 nt, Human
auaacuggaacacucuauaac

SEQ ID NO: 2980091 - RNA, 15 nt, Human
uuacaggaaguacug

SEQ ID NO: 2980092 - RNA, 16 nt, Human
uuacaggaaguacugg

SEQ ID NO: 2980093 - RNA, 18 nt, Human
uuacaggaaguacuggag

SEQ ID NO: 2980094 - RNA, 22 nt, Human
uuacaggaaguacuggagaaaa

SEQ ID NO: 2980095 - RNA, 23 nt, Human
uuaccauuuugggguacccacug

SEQ ID NO: 2980096 - RNA, 18 nt, Human
auaacuggaacacucuau

SEQ ID NO: 2980097 - RNA, 16 nt, Human
auaacuggaacacucu

SEQ ID NO: 2980098 - RNA, 12 nt, Human
auaacuggaaac

SEQ ID NO: 2980099 - RNA, 19 nt, Human
auaaaugugccuucauuuu

SEQ ID NO: 2980100 - RNA, 18 nt, Human
uuagcaggaagcugugag

SEQ ID NO: 2980101 - RNA, 22 nt, Human
uuagaugcaguucugaagaaga

SEQ ID NO: 2980102 - RNA, 23 nt, Human
uuagaugcaguucugaagaagau

SEQ ID NO: 2980103 - RNA, 14 nt, Human
auaaugaauacuuu

SEQ ID NO: 2980104 - RNA, 14 nt, Human
auaauucuacuuug

SEQ ID NO: 2980105 - RNA, 21 nt, Human
auaaucuuucacaggggacag

SEQ ID NO: 2980106 - RNA, 19 nt, Human
auaauacaguaucucaggg

SEQ ID NO: 2980107 - RNA, 21 nt, Human
auaauacaccacuacauucug

SEQ ID NO: 2980108 - RNA, 23 nt, Human
auaauacaccacuacauucuguu

SEQ ID NO: 2980109 - RNA, 22 nt, Human
auaaguuaacuuccaauuuaca

SEQ ID NO: 2980110 - RNA, 22 nt, Human
auaagaaccuuuugagugccuu

SEQ ID NO: 2980111 - RNA, 17 nt, Human
auaaguuaacuuccaau

SEQ ID NO: 2980112 - RNA, 23 nt, Human
auaagaaccuuuugagugccuua

SEQ ID NO: 2980113 - RNA, 21 nt, Human
aguccccucuccuccacauuu

SEQ ID NO: 2980114 - RNA, 14 nt, Human
aguccccuguuugu

SEQ ID NO: 2980115 - RNA, 19 nt, Human
aguccccuguuuguuucug

SEQ ID NO: 2980116 - RNA, 20 nt, Human
agucccaccuuggcugcagg

SEQ ID NO: 2980117 - RNA, 23 nt, Human
agucccaccuuggcugcagggag

SEQ ID NO: 2980118 - RNA, 21 nt, Human
agucccaccuuggcugcaggg

SEQ ID NO: 2980119 - RNA, 19 nt, Human
agucagggguucccuuuuu

SEQ ID NO: 2980120 - RNA, 21 nt, Human
agucagucauucagauaugau

SEQ ID NO: 2980121 - RNA, 15 nt, Human
agucagucauucaga

SEQ ID NO: 2980122 - RNA, 20 nt, Human
ugucagcuccccucggagaa

SEQ ID NO: 2980123 - RNA, 21 nt, Human
ugucagcuccccucggagaag

SEQ ID NO: 2980124 - RNA, 23 nt, Human
ugucagcuccccucggagaagag

SEQ ID NO: 2980125 - RNA, 16 nt, Human
ugucagccauuccugu

SEQ ID NO: 2980126 - RNA, 20 nt, Human
ugucagcuaaagaaguuuga

SEQ ID NO: 2980127 - RNA, 12 nt, Human
ugucccuuuucc

SEQ ID NO: 2980128 - RNA, 20 nt, Human
ugucaaccccaaguuaguuc

SEQ ID NO: 2980129 - RNA, 16 nt, Human
ugucaaaguggugaga

SEQ ID NO: 2980130 - RNA, 19 nt, Human
ugucaaaguggugagaggc

SEQ ID NO: 2980131 - RNA, 14 nt, Human
aguagcugggacua

SEQ ID NO: 2980132 - RNA, 13 nt, Human
aguagcugggacu

SEQ ID NO: 2980133 - RNA, 14 nt, Human
ugucaaagugguga

SEQ ID NO: 2980134 - RNA, 15 nt, Human
ugucaaaguggugag

SEQ ID NO: 2980135 - RNA, 17 nt, Human
uguauguguaauaaaua

SEQ ID NO: 2980136 - RNA, 16 nt, Human
uguauguguaauaaau

SEQ ID NO: 2980137 - RNA, 14 nt, Human
uguauguguaagua

SEQ ID NO: 2980138 - RNA, 15 nt, Human
uguaucccaugagcc

SEQ ID NO: 2980139 - RNA, 15 nt, Human
uguagagccaggguc

SEQ ID NO: 2980140 - RNA, 12 nt, Human
uguagagccagg

SEQ ID NO: 2980141 - RNA, 23 nt, Human
agguuuggacaaaauggaauacu

SEQ ID NO: 2980142 - RNA, 21 nt, Human
aguauguuagugcaaauuguc

SEQ ID NO: 2980143 - RNA, 18 nt, Human
aguauguuagugcaaauu

SEQ ID NO: 2980144 - RNA, 21 nt, Human
aguauuagaauaccacaggaa

SEQ ID NO: 2980145 - RNA, 21 nt, Human
aguagcugggacuacaggcac

SEQ ID NO: 2980146 - RNA, 19 nt, Human
aguagcugggacuacaggc

SEQ ID NO: 2980147 - RNA, 22 nt, Human
aguagcugggacuacaggcacc

SEQ ID NO: 2980148 - RNA, 14 nt, Human
aguauuauaccuuu

SEQ ID NO: 2980149 - RNA, 15 nt, Human
aguauuauaccuuuu

SEQ ID NO: 2980150 - RNA, 15 nt, Human
ugucagcauagaagu

SEQ ID NO: 2980151 - RNA, 17 nt, Human
agucacugagacagccc

SEQ ID NO: 2980152 - RNA, 15 nt, Human
agucacugagacagc

SEQ ID NO: 2980153 - RNA, 16 nt, Human
agucacugagacagcc

SEQ ID NO: 2980154 - RNA, 20 nt, Human
agucacauuccaagccucau

SEQ ID NO: 2980155 - RNA, 16 nt, Human
aguauuguccaggucu

SEQ ID NO: 2980156 - RNA, 15 nt, Human
aguauuguccagguc

SEQ ID NO: 2980157 - RNA, 22 nt, Human
aguccccucuccuccacauuug

SEQ ID NO: 2980158 - RNA, 15 nt, Human
ugucuccucucucug

SEQ ID NO: 2980159 - RNA, 23 nt, Human
aguccccuguuuguuucugaaag

SEQ ID NO: 2980160 - RNA, 13 nt, Human
agucccugccaau

SEQ ID NO: 2980161 - RNA, 14 nt, Human
agucccugccaaug

SEQ ID NO: 2980162 - RNA, 16 nt, Human
agucccugccaaugga

SEQ ID NO: 2980163 - RNA, 17 nt, Human
ugucucuacuaaaaaua

SEQ ID NO: 2980164 - RNA, 13 nt, Human
ugucucugagagu

SEQ ID NO: 2980165 - RNA, 14 nt, Human
ugucuuaauuaaaa

SEQ ID NO: 2980166 - RNA, 12 nt, Human
ugucuuaauuaa

SEQ ID NO: 2980167 - RNA, 22 nt, Human
ugucucuugguccugcugcagu

SEQ ID NO: 2980168 - RNA, 21 nt, Human
ugucucuuuaaugucacaggc

SEQ ID NO: 2980169 - RNA, 22 nt, Human
ugucucuuuaaugucacaggca

SEQ ID NO: 2980170 - RNA, 18 nt, Human
ugucucuugguccugcug

SEQ ID NO: 2980171 - RNA, 19 nt, Human
ugucucuugguccugcugc

SEQ ID NO: 2980172 - RNA, 20 nt, Human
ugucucuugguccugcugca

SEQ ID NO: 2980173 - RNA, 21 nt, Human
ugucucuugguccugcugcag

SEQ ID NO: 2980174 - RNA, 15 nt, Human
ugugaaccaccacac

SEQ ID NO: 2980175 - RNA, 22 nt, Human
ugugaacaguuguguuugaagc

SEQ ID NO: 2980176 - RNA, 23 nt, Human
ugugaaccaccacacccagccca

SEQ ID NO: 2980177 - RNA, 22 nt, Human
ugugaaccaccacacccagccc

SEQ ID NO: 2980178 - RNA, 16 nt, Human
ugugaaccaccacacc

SEQ ID NO: 2980179 - RNA, 21 nt, Human
ugucuugcaauggcagccuug

SEQ ID NO: 2980180 - RNA, 20 nt, Human
ugucuugcaauggcagccuu

SEQ ID NO: 2980181 - RNA, 18 nt, Human
ugucuugcaauggcagcc

SEQ ID NO: 2980182 - RNA, 17 nt, Human
ugucuugcaauggcagc

SEQ ID NO: 2980183 - RNA, 15 nt, Human
ugucuugcaauggca

SEQ ID NO: 2980184 - RNA, 14 nt, Human
ugucuucacaacag

SEQ ID NO: 2980185 - RNA, 20 nt, Human
ugugauuuuugguauuugaa

SEQ ID NO: 2980186 - RNA, 21 nt, Human
ugugauuuuugguauuugaaa

SEQ ID NO: 2980187 - RNA, 19 nt, Human
ugugauuuuugguauuuga

SEQ ID NO: 2980188 - RNA, 17 nt, Human
ugugauggggcccugcc

SEQ ID NO: 2980189 - RNA, 21 nt, Human
agugagcagucaggaaagaga

SEQ ID NO: 2980190 - RNA, 14 nt, Human
agugagagcugggu

SEQ ID NO: 2980191 - RNA, 15 nt, Human
ugugauggggcccug

SEQ ID NO: 2980192 - RNA, 16 nt, Human
ugugauggggcccugc

SEQ ID NO: 2980193 - RNA, 16 nt, Human
agugagccgagauugu

SEQ ID NO: 2980194 - RNA, 22 nt, Human
agugaaagaggcagcuugaaac

SEQ ID NO: 2980195 - RNA, 14 nt, Human
agugagacagcucu

SEQ ID NO: 2980196 - RNA, 16 nt, Human
agugaaagaggcagcu

SEQ ID NO: 2980197 - RNA, 17 nt, Human
agugaaagaaaauaaca

SEQ ID NO: 2980198 - RNA, 17 nt, Human
agugagacucugucuca

SEQ ID NO: 2980199 - RNA, 16 nt, Human
agugagacucugucuc

SEQ ID NO: 2980200 - RNA, 22 nt, Human
agugagacucugucucaaaaaa

SEQ ID NO: 2980201 - RNA, 22 nt, Human
agugagacuggggccacuacau

SEQ ID NO: 2980202 - RNA, 17 nt, Human
agugagacccugucuca

SEQ ID NO: 2980203 - RNA, 21 nt, Human
agugagacccugucucaaaaa

SEQ ID NO: 2980204 - RNA, 13 nt, Human
agugagacucugu

SEQ ID NO: 2980205 - RNA, 14 nt, Human
agucuucuauuuau

SEQ ID NO: 2980206 - RNA, 11 nt, Human
agugaaaaagg

SEQ ID NO: 2980207 - RNA, 17 nt, Human
agugaaaaaggaggaag

SEQ ID NO: 2980208 - RNA, 20 nt, Human
agugaaaaaggaggaagaga

SEQ ID NO: 2980209 - RNA, 23 nt, Human
agugaaaaaggaggaagagaaaa

SEQ ID NO: 2980210 - RNA, 22 nt, Human
ugugagaugcuagaacucccuu

SEQ ID NO: 2980211 - RNA, 19 nt, Human
ugugagcacaaagguagcu

SEQ ID NO: 2980212 - RNA, 14 nt, Human
ugugaagcaaaauu

SEQ ID NO: 2980213 - RNA, 14 nt, Human
ugugaagagaacca

SEQ ID NO: 2980214 - RNA, 14 nt, Human
aggguuuaaagaug

SEQ ID NO: 2980215 - RNA, 20 nt, Human
aggguuuauguuuaggaugu

SEQ ID NO: 2980216 - RNA, 17 nt, Human
aggguugggcugguguc

SEQ ID NO: 2980217 - RNA, 17 nt, Human
agguaugcaaucaaauc

SEQ ID NO: 2980218 - RNA, 21 nt, Human
aggucaaggcugcagugagcc

SEQ ID NO: 2980219 - RNA, 15 nt, Human
aggucagugcaaaua

SEQ ID NO: 2980220 - RNA, 23 nt, Human
aggucauuuuuuuuaagaaaaag

SEQ ID NO: 2980221 - RNA, 22 nt, Human
aggucauuuuuuuuaagaaaaa

SEQ ID NO: 2980222 - RNA, 21 nt, Human
aggucuugaacuccuggccuc

SEQ ID NO: 2980223 - RNA, 20 nt, Human
aggucuugaacuccuggccu

SEQ ID NO: 2980224 - RNA, 22 nt, Human
aggucuugaacuccuggccuca

SEQ ID NO: 2980225 - RNA, 18 nt, Human
aggucuugaacuccuggc

SEQ ID NO: 2980226 - RNA, 22 nt, Human
ugguccaugggccauaugaaaa

SEQ ID NO: 2980227 - RNA, 19 nt, Human
ugguccauagagagcaaga

SEQ ID NO: 2980228 - RNA, 16 nt, Human
uggucuuauuuguaaa

SEQ ID NO: 2980229 - RNA, 22 nt, Human
uggucugugagaugcuagaacu

SEQ ID NO: 2980230 - RNA, 12 nt, Human
uggucuguguga

SEQ ID NO: 2980231 - RNA, 18 nt, Human
uggucugacccacugcuu

SEQ ID NO: 2980232 - RNA, 17 nt, Human
aggguuaugauuaagua

SEQ ID NO: 2980233 - RNA, 19 nt, Human
aggguggugaccucugccu

SEQ ID NO: 2980234 - RNA, 18 nt, Human
aggguggugaccucugcc

SEQ ID NO: 2980235 - RNA, 17 nt, Human
aggguggugaccucugc

SEQ ID NO: 2980236 - RNA, 19 nt, Human
uggugaacagaacaaaagg

SEQ ID NO: 2980237 - RNA, 15 nt, Human
aggguugggcuggug

SEQ ID NO: 2980238 - RNA, 13 nt, Human
aggguugggcugg

SEQ ID NO: 2980239 - RNA, 14 nt, Human
aggguuggccccug

SEQ ID NO: 2980240 - RNA, 13 nt, Human
aggguuggccccu

SEQ ID NO: 2980241 - RNA, 21 nt, Human
aggggcuuaauuauugauguu

SEQ ID NO: 2980242 - RNA, 13 nt, Human
agggggcugggac

SEQ ID NO: 2980243 - RNA, 16 nt, Human
aggggaauugaggaca

SEQ ID NO: 2980244 - RNA, 19 nt, Human
aggguacuaaggaaucuuu

SEQ ID NO: 2980245 - RNA, 16 nt, Human
aggguaucaggugcug

SEQ ID NO: 2980246 - RNA, 15 nt, Human
ugguccauagagagc

SEQ ID NO: 2980247 - RNA, 16 nt, Human
ugguccauagagagca

SEQ ID NO: 2980248 - RNA, 21 nt, Human
uggucaccaaaucagcugcua

SEQ ID NO: 2980249 - RNA, 23 nt, Human
uggucaccaaaucagcugcuacu

SEQ ID NO: 2980250 - RNA, 20 nt, Human
uggucaccaaaucagcugcu

SEQ ID NO: 2980251 - RNA, 23 nt, Human
uggguggaugccugguggcagcu

SEQ ID NO: 2980252 - RNA, 14 nt, Human
uggguggaugccug

SEQ ID NO: 2980253 - RNA, 21 nt, Human
agggugaugggaaagcauugu

SEQ ID NO: 2980254 - RNA, 22 nt, Human
agggugaugggaaagcauugua

SEQ ID NO: 2980255 - RNA, 18 nt, Human
ugguuauuuuacuuuuug

SEQ ID NO: 2980256 - RNA, 15 nt, Human
ugguuauuuuacuuu

SEQ ID NO: 2980257 - RNA, 16 nt, Human
ugguuauuuuacuuuu

SEQ ID NO: 2980258 - RNA, 15 nt, Human
ugguguuuccuggca

SEQ ID NO: 2980259 - RNA, 17 nt, Human
ugguguuuccuggcacu

SEQ ID NO: 2980260 - RNA, 23 nt, Human
ugguucaggguuggccccugccc

SEQ ID NO: 2980261 - RNA, 22 nt, Human
ugguucaggguuggccccugcc

SEQ ID NO: 2980262 - RNA, 20 nt, Human
ugguucaggguuggccccug

SEQ ID NO: 2980263 - RNA, 15 nt, Human
ugguggcagagugga

SEQ ID NO: 2980264 - RNA, 12 nt, Human
ugguggcagcuc

SEQ ID NO: 2980265 - RNA, 16 nt, Human
ugguggcagcucaccu

SEQ ID NO: 2980266 - RNA, 19 nt, Human
ugguggcagcucaccucuc

SEQ ID NO: 2980267 - RNA, 20 nt, Human
ugguggcagcucaccucucc

SEQ ID NO: 2980268 - RNA, 23 nt, Human
ugguggcagcucaccucucccuu

SEQ ID NO: 2980269 - RNA, 23 nt, Human
uggugugaccacugcagaagaca

SEQ ID NO: 2980270 - RNA, 12 nt, Human
ugguggcagcug

SEQ ID NO: 2980271 - RNA, 15 nt, Human
ugguuucuagcauga

SEQ ID NO: 2980272 - RNA, 15 nt, Human
ugguuucagaaaugu

SEQ ID NO: 2980273 - RNA, 14 nt, Human
ugguuucagaaaug

SEQ ID NO: 2980274 - RNA, 15 nt, Human
ugguuuguucccugu

SEQ ID NO: 2980275 - RNA, 21 nt, Human
ugguuuguaaauuaacuuuua

SEQ ID NO: 2980276 - RNA, 12 nt, Human
ugguuuucuguu

SEQ ID NO: 2980277 - RNA, 23 nt, Human
aggugauccacccaccucagccu

SEQ ID NO: 2980278 - RNA, 21 nt, Human
aggugauccacccaccucagc

SEQ ID NO: 2980279 - RNA, 15 nt, Human
ugguuuucuguucuu

SEQ ID NO: 2980280 - RNA, 13 nt, Human
ugguuuucuguuc

SEQ ID NO: 2980281 - RNA, 12 nt, Human
agguugugaaug

SEQ ID NO: 2980282 - RNA, 22 nt, Human
uguaagcucuacugaggugcua

SEQ ID NO: 2980283 - RNA, 18 nt, Human
uguaagaaaauaucacuu

SEQ ID NO: 2980284 - RNA, 17 nt, Human
uguaagaaaauaucacu

SEQ ID NO: 2980285 - RNA, 14 nt, Human
uguaaggaaugauu

SEQ ID NO: 2980286 - RNA, 15 nt, Human
uguaaggaaugauua

SEQ ID NO: 2980287 - RNA, 13 nt, Human
uguaaggaaugau

SEQ ID NO: 2980288 - RNA, 20 nt, Human
aggugugagucaccaagccc

SEQ ID NO: 2980289 - RNA, 14 nt, Human
aggugugagucacc

SEQ ID NO: 2980290 - RNA, 20 nt, Human
aggugugacugaauuucuuu

SEQ ID NO: 2980291 - RNA, 22 nt, Human
aggugugaaccaccacacccag

SEQ ID NO: 2980292 - RNA, 18 nt, Human
aggugugacugaauuucu

SEQ ID NO: 2980293 - RNA, 23 nt, Human
aggugugaaccaccacacccagc

SEQ ID NO: 2980294 - RNA, 13 nt, Human
agguggggcagcu

SEQ ID NO: 2980295 - RNA, 23 nt, Human
agguggggucacucuggcagcuc

SEQ ID NO: 2980296 - RNA, 14 nt, Human
agguggggcagcuu

SEQ ID NO: 2980297 - RNA, 17 nt, Human
uguagacaguuggguuu

SEQ ID NO: 2980298 - RNA, 21 nt, Human
uguagaagucacauuccugaa

SEQ ID NO: 2980299 - RNA, 18 nt, Human
uguacaugaaaacacauu

SEQ ID NO: 2980300 - RNA, 17 nt, Human
uguacaugaaaacacau

SEQ ID NO: 2980301 - RNA, 19 nt, Human
uguacaugaaaacacauuu

SEQ ID NO: 2980302 - RNA, 23 nt, Human
uguacaaaguagaagucuuagau

SEQ ID NO: 2980303 - RNA, 19 nt, Human
uguacaaaguagaagucuu

SEQ ID NO: 2980304 - RNA, 18 nt, Human
uguaaggaaugauuaauu

SEQ ID NO: 2980305 - RNA, 16 nt, Human
uguaauuugugauaca

SEQ ID NO: 2980306 - RNA, 21 nt, Human
uguaauuugugauacaaugcu

SEQ ID NO: 2980307 - RNA, 17 nt, Human
uguaauuugugauacaa

SEQ ID NO: 2980308 - RNA, 18 nt, Human
ugaaguaaaauguggcag

SEQ ID NO: 2980309 - RNA, 19 nt, Human
ugaaguaaaauguggcagg

SEQ ID NO: 2980310 - RNA, 15 nt, Human
ugaaguaauaugcac

SEQ ID NO: 2980311 - RNA, 22 nt, Human
ugaaguaauaugcacacauuuu

SEQ ID NO: 2980312 - RNA, 21 nt, Human
ugaaguaauaugcacacauuu

SEQ ID NO: 2980313 - RNA, 20 nt, Human
ugaaguaauaugcacacauu

SEQ ID NO: 2980314 - RNA, 16 nt, Human
ugaaguaauaugcaca

SEQ ID NO: 2980315 - RNA, 20 nt, Human
ugaagauuuaccacuugugu

SEQ ID NO: 2980316 - RNA, 17 nt, Human
ugaagauuuaccacuug

SEQ ID NO: 2980317 - RNA, 13 nt, Human
ugaauaauacagu

SEQ ID NO: 2980318 - RNA, 21 nt, Human
ugaauaaccugaggauucuau

SEQ ID NO: 2980319 - RNA, 12 nt, Human
ugaauaauacag

SEQ ID NO: 2980320 - RNA, 13 nt, Human
ugaagucacacag

SEQ ID NO: 2980321 - RNA, 17 nt, Human
ugaaguacucauacaug

SEQ ID NO: 2980322 - RNA, 18 nt, Human
agagcuguucacagccag

SEQ ID NO: 2980323 - RNA, 23 nt, Human
agaggcagccccauucugccugc

SEQ ID NO: 2980324 - RNA, 21 nt, Human
agaggcagggucucacucugu

SEQ ID NO: 2980325 - RNA, 22 nt, Human
agaggcagccccauucugccug

SEQ ID NO: 2980326 - RNA, 21 nt, Human
agaggcagccccauucugccu

SEQ ID NO: 2980327 - RNA, 22 nt, Human
agaggcugccucucccaucacu

SEQ ID NO: 2980328 - RNA, 13 nt, Human
agagguucaaaga

SEQ ID NO: 2980329 - RNA, 20 nt, Human
agagggagugacagaggcag

SEQ ID NO: 2980330 - RNA, 15 nt, Human
agagggagugacaga

SEQ ID NO: 2980331 - RNA, 15 nt, Human
agagggagguaagga

SEQ ID NO: 2980332 - RNA, 19 nt, Human
agagguucaaagauauuuu

SEQ ID NO: 2980333 - RNA, 16 nt, Human
agagguucaaagauau

SEQ ID NO: 2980334 - RNA, 20 nt, Human
agagguucaaagauauuuug

SEQ ID NO: 2980335 - RNA, 18 nt, Human
agagcugcccucuccugg

SEQ ID NO: 2980336 - RNA, 17 nt, Human
agagcugcccucuccug

SEQ ID NO: 2980337 - RNA, 16 nt, Human
agagcugcccucuccu

SEQ ID NO: 2980338 - RNA, 20 nt, Human
agagcugcccucuccugggc

SEQ ID NO: 2980339 - RNA, 19 nt, Human
agagcugcccucuccuggg

SEQ ID NO: 2980340 - RNA, 15 nt, Human
agagcugcccucucc

SEQ ID NO: 2980341 - RNA, 16 nt, Human
ugaaauaacauggccu

SEQ ID NO: 2980342 - RNA, 17 nt, Human
ugaaauaacauggccuu

SEQ ID NO: 2980343 - RNA, 23 nt, Human
ugaaauaaacgucuuaaauauuc

SEQ ID NO: 2980344 - RNA, 22 nt, Human
ugaaauaaacgucuuaaauauu

SEQ ID NO: 2980345 - RNA, 18 nt, Human
ugaaauaaacgucuuaaa

SEQ ID NO: 2980346 - RNA, 13 nt, Human
ugaaauaaacguc

SEQ ID NO: 2980347 - RNA, 20 nt, Human
ugaaauuuuuauuaaauuau

SEQ ID NO: 2980348 - RNA, 21 nt, Human
ugaaauuuccugggagcuuuu

SEQ ID NO: 2980349 - RNA, 19 nt, Human
ugaaauuuuuauuaaauua

SEQ ID NO: 2980350 - RNA, 15 nt, Human
ugaaauuuccuggga

SEQ ID NO: 2980351 - RNA, 18 nt, Human
ugaacccgggaggcagag

SEQ ID NO: 2980352 - RNA, 22 nt, Human
ugaacccauauuuguacaccaa

SEQ ID NO: 2980353 - RNA, 13 nt, Human
ugaacaaauuuac

SEQ ID NO: 2980354 - RNA, 21 nt, Human
ugaaccaccacacccagccca

SEQ ID NO: 2980355 - RNA, 22 nt, Human
ugaaccaccacacccagcccac

SEQ ID NO: 2980356 - RNA, 21 nt, Human
ugaagacaaugacuuacugua

SEQ ID NO: 2980357 - RNA, 23 nt, Human
ugaagacaaugacuuacuguaca

SEQ ID NO: 2980358 - RNA, 22 nt, Human
ugaagacaaugacuuacuguac

SEQ ID NO: 2980359 - RNA, 13 nt, Human
ugaagacagagcu

SEQ ID NO: 2980360 - RNA, 22 nt, Human
ugaagaagcaccaaucaugaau

SEQ ID NO: 2980361 - RNA, 23 nt, Human
agacuuugguuauuuuacuuuuu

SEQ ID NO: 2980362 - RNA, 17 nt, Human
agacuuugguuauuuua

SEQ ID NO: 2980363 - RNA, 15 nt, Human
agagacacaagccuu

SEQ ID NO: 2980364 - RNA, 16 nt, Human
agagacacaagccuuc

SEQ ID NO: 2980365 - RNA, 19 nt, Human
agagacacaagccuucggc

SEQ ID NO: 2980366 - RNA, 15 nt, Human
agacuuuuccaaccc

SEQ ID NO: 2980367 - RNA, 19 nt, Human
agacuuuggaaagaguagg

SEQ ID NO: 2980368 - RNA, 20 nt, Human
agacugguuccauggccucu

SEQ ID NO: 2980369 - RNA, 14 nt, Human
agacuggggccacu

SEQ ID NO: 2980370 - RNA, 17 nt, Human
agacuuuggaaagacuu

SEQ ID NO: 2980371 - RNA, 15 nt, Human
agacuuuggaaagag

SEQ ID NO: 2980372 - RNA, 15 nt, Human
agacuuuggaaagac

SEQ ID NO: 2980373 - RNA, 14 nt, Human
ucuuuguacagaca

SEQ ID NO: 2980374 - RNA, 15 nt, Human
ucuuuguacagacaa

SEQ ID NO: 2980375 - RNA, 20 nt, Human
ucuuuguacagacaacaaac

SEQ ID NO: 2980376 - RNA, 16 nt, Human
agagacacacugaaga

SEQ ID NO: 2980377 - RNA, 14 nt, Human
agagacagaaagca

SEQ ID NO: 2980378 - RNA, 14 nt, Human
ucuuuguggcuucc

SEQ ID NO: 2980379 - RNA, 22 nt, Human
agacuccaaagaaauguaaggg

SEQ ID NO: 2980380 - RNA, 20 nt, Human
agacaggcaagcaccuccug

SEQ ID NO: 2980381 - RNA, 15 nt, Human
ucuuuaaugucacag

SEQ ID NO: 2980382 - RNA, 19 nt, Human
ucuuuaaugucacaggcag

SEQ ID NO: 2980383 - RNA, 18 nt, Human
ucuuuaaugucacaggca

SEQ ID NO: 2980384 - RNA, 20 nt, Human
agacuggcacaguuuucuga

SEQ ID NO: 2980385 - RNA, 21 nt, Human
agacuggcacaguuuucugag

SEQ ID NO: 2980386 - RNA, 18 nt, Human
agacuggcacaguuuucu

SEQ ID NO: 2980387 - RNA, 23 nt, Human
agacuggcacaguuuucugagaa

SEQ ID NO: 2980388 - RNA, 22 nt, Human
agacuggcgugaacccaggagg

SEQ ID NO: 2980389 - RNA, 18 nt, Human
agacuggcgugaacccag

SEQ ID NO: 2980390 - RNA, 17 nt, Human
agacuggcgugaaccca

SEQ ID NO: 2980391 - RNA, 23 nt, Human
agacuggcgugaacccaggaggc

SEQ ID NO: 2980392 - RNA, 13 nt, Human
agacuccugcagg

SEQ ID NO: 2980393 - RNA, 16 nt, Human
agacuccauaguuugg

SEQ ID NO: 2980394 - RNA, 14 nt, Human
agacuccauaguuu

SEQ ID NO: 2980395 - RNA, 16 nt, Human
agacucccaugaggga

SEQ ID NO: 2980396 - RNA, 22 nt, Human
ugaaagaaaauaccaaggaaca

SEQ ID NO: 2980397 - RNA, 12 nt, Human
ugaaacuuuugg

SEQ ID NO: 2980398 - RNA, 16 nt, Human
ugaaagacuguacaaa

SEQ ID NO: 2980399 - RNA, 19 nt, Human
ugaaagacuguacaaagua

SEQ ID NO: 2980400 - RNA, 18 nt, Human
ugaaagacuguacaaagu

SEQ ID NO: 2980401 - RNA, 22 nt, Human
ugaaagacuguacaaaguagaa

SEQ ID NO: 2980402 - RNA, 17 nt, Human
ugaaagaggaaugaagu

SEQ ID NO: 2980403 - RNA, 19 nt, Human
agagaccaucccugaaggc

SEQ ID NO: 2980404 - RNA, 21 nt, Human
agagaccaucccugaaggccc

SEQ ID NO: 2980405 - RNA, 18 nt, Human
ugaaagaggaaugaagua

SEQ ID NO: 2980406 - RNA, 18 nt, Human
agagaccaucccugaagg

SEQ ID NO: 2980407 - RNA, 22 nt, Human
agagaccaucccugaaggcccc

SEQ ID NO: 2980408 - RNA, 23 nt, Human
agagaccaucccugaaggccccg

SEQ ID NO: 2980409 - RNA, 13 nt, Human
agagacuccugca

SEQ ID NO: 2980410 - RNA, 14 nt, Human
agagacuccugcag

SEQ ID NO: 2980411 - RNA, 12 nt, Human
agagacuccugc

SEQ ID NO: 2980412 - RNA, 11 nt, Human
agagacuccug

SEQ ID NO: 2980413 - RNA, 18 nt, Human
ugaaacuggauuaaacuu

SEQ ID NO: 2980414 - RNA, 17 nt, Human
ugaaacuggauuaaacu

SEQ ID NO: 2980415 - RNA, 13 nt, Human
ugaaagaaaauaa

SEQ ID NO: 2980416 - RNA, 22 nt, Human
ugaaacugagaugugaacacau

SEQ ID NO: 2980417 - RNA, 21 nt, Human
ugaaaauauuuguaucacaaa

SEQ ID NO: 2980418 - RNA, 22 nt, Human
ugaaaauauuuguaucacaaau

SEQ ID NO: 2980419 - RNA, 20 nt, Human
ugaaaaucuuauaauuuaaa

SEQ ID NO: 2980420 - RNA, 19 nt, Human
ugaaaacacauuuuucuua

SEQ ID NO: 2980421 - RNA, 17 nt, Human
ugaaaacacauuuuucu

SEQ ID NO: 2980422 - RNA, 15 nt, Human
ugaaaacacauuuuu

SEQ ID NO: 2980423 - RNA, 22 nt, Human
ugaaaauaaucucugauucccu

SEQ ID NO: 2980424 - RNA, 18 nt, Human
ugaaaauaaucucugauu

SEQ ID NO: 2980425 - RNA, 17 nt, Human
ugaaaauauuuguauca

SEQ ID NO: 2980426 - RNA, 17 nt, Human
ugaaaauaaucucugau

SEQ ID NO: 2980427 - RNA, 13 nt, Human
ugaaaacacauuu

SEQ ID NO: 2980428 - RNA, 12 nt, Human
ugaaaacacauu

SEQ ID NO: 2980429 - RNA, 14 nt, Human
ugaaaacacauuuu

SEQ ID NO: 2980430 - RNA, 21 nt, Human
ugagagcaguuugguuucuag

SEQ ID NO: 2980431 - RNA, 23 nt, Human
ugagagcaguuugguuucuagca

SEQ ID NO: 2980432 - RNA, 22 nt, Human
ugagagacacacugaagaagca

SEQ ID NO: 2980433 - RNA, 21 nt, Human
ugagagacacacugaagaagc

SEQ ID NO: 2980434 - RNA, 11 nt, Human
ugagaggaaau

SEQ ID NO: 2980435 - RNA, 12 nt, Human
ugagaggaaauc

SEQ ID NO: 2980436 - RNA, 13 nt, Human
ugagaggaaauca

SEQ ID NO: 2980437 - RNA, 14 nt, Human
ugagaggaaaucac

SEQ ID NO: 2980438 - RNA, 16 nt, Human
ugagagcugcaugugu

SEQ ID NO: 2980439 - RNA, 10 nt, Human
ugagaggaaa

SEQ ID NO: 2980440 - RNA, 14 nt, Human
ugagagcugggugu

SEQ ID NO: 2980441 - RNA, 13 nt, Human
ugagaugugaaca

SEQ ID NO: 2980442 - RNA, 17 nt, Human
ugagaggaaaucaccga

SEQ ID NO: 2980443 - RNA, 23 nt, Human
ugagaggacuuuucuuuguggcu

SEQ ID NO: 2980444 - RNA, 18 nt, Human
ugagaugugaacacauca

SEQ ID NO: 2980445 - RNA, 19 nt, Human
ugagaugugaacacaucag

SEQ ID NO: 2980446 - RNA, 24 nt, Human
ugagaugugaacacaucagcuugc

SEQ ID NO: 2980447 - RNA, 17 nt, Human
ugagacagcccgggcuc

SEQ ID NO: 2980448 - RNA, 18 nt, Human
ugagacagcccgggcucu

SEQ ID NO: 2980449 - RNA, 19 nt, Human
ugagacagcccgggcucug

SEQ ID NO: 2980450 - RNA, 20 nt, Human
ugagacagcccgggcucugc

SEQ ID NO: 2980451 - RNA, 22 nt, Human
ugagacagcccgggcucugccu

SEQ ID NO: 2980452 - RNA, 20 nt, Human
ugagacucugucucagucca

SEQ ID NO: 2980453 - RNA, 20 nt, Human
ugagacucugucucaaaaaa

SEQ ID NO: 2980454 - RNA, 20 nt, Human
ugagagacacacugaagaag

SEQ ID NO: 2980455 - RNA, 19 nt, Human
ugagagacacacugaagaa

SEQ ID NO: 2980456 - RNA, 17 nt, Human
ugagagacacacugaag

SEQ ID NO: 2980457 - RNA, 16 nt, Human
ugagagacacacugaa

SEQ ID NO: 2980458 - RNA, 23 nt, Human
ugagacuggggccacuacauuug

SEQ ID NO: 2980459 - RNA, 22 nt, Human
ugagacuggggccacuacauuu

SEQ ID NO: 2980460 - RNA, 13 nt, Human
ugagacuuuaaaa

SEQ ID NO: 2980461 - RNA, 12 nt, Human
ugagacuuuaaa

SEQ ID NO: 2980462 - RNA, 18 nt, Human
ugagacuuuaaaagcauu

SEQ ID NO: 2980463 - RNA, 14 nt, Human
ugagacuuuaaaag

SEQ ID NO: 2980464 - RNA, 20 nt, Human
ugagacuuuaaaagcauuuu

SEQ ID NO: 2980465 - RNA, 13 nt, Human
ugagacagcccgg

SEQ ID NO: 2980466 - RNA, 21 nt, Human
ugagacagaguuuucacucuu

SEQ ID NO: 2980467 - RNA, 11 nt, Human
ugagacagagu

SEQ ID NO: 2980468 - RNA, 14 nt, Human
agauuuuccugaaa

SEQ ID NO: 2980469 - RNA, 15 nt, Human
agauuuuccugaaaa

SEQ ID NO: 2980470 - RNA, 20 nt, Human
ugagaagcagaggaaggaga

SEQ ID NO: 2980471 - RNA, 16 nt, Human
agauuuuccugaaaac

SEQ ID NO: 2980472 - RNA, 16 nt, Human
agcaagggugauggga

SEQ ID NO: 2980473 - RNA, 19 nt, Human
agcaaggagauuuacaacu

SEQ ID NO: 2980474 - RNA, 17 nt, Human
agcaaggagauuuacaa

SEQ ID NO: 2980475 - RNA, 14 nt, Human
agcaaggagauuua

SEQ ID NO: 2980476 - RNA, 20 nt, Human
agcaagggugaugggaaagc

SEQ ID NO: 2980477 - RNA, 22 nt, Human
agcaagggugaugggaaagcau

SEQ ID NO: 2980478 - RNA, 16 nt, Human
agcaagugagagcugg

SEQ ID NO: 2980479 - RNA, 15 nt, Human
agcaagugagagcug

SEQ ID NO: 2980480 - RNA, 16 nt, Human
agcaagugagacccug

SEQ ID NO: 2980481 - RNA, 18 nt, Human
ugagccagauuucacucu

SEQ ID NO: 2980482 - RNA, 19 nt, Human
ugagccagauuucacucuc

SEQ ID NO: 2980483 - RNA, 14 nt, Human
ugagccacugcacc

SEQ ID NO: 2980484 - RNA, 20 nt, Human
ugagccagauuucacucucc

SEQ ID NO: 2980485 - RNA, 21 nt, Human
ugagccagauuucacucuccu

SEQ ID NO: 2980486 - RNA, 13 nt, Human
ugagccacugcac

SEQ ID NO: 2980487 - RNA, 12 nt, Human
ugagccacugca

SEQ ID NO: 2980488 - RNA, 16 nt, Human
agcaccuccugccucg

SEQ ID NO: 2980489 - RNA, 14 nt, Human
agcaccuccugccu

SEQ ID NO: 2980490 - RNA, 13 nt, Human
agcaccuccugcc

SEQ ID NO: 2980491 - RNA, 16 nt, Human
agcaccaucucuccuc

SEQ ID NO: 2980492 - RNA, 23 nt, Human
agcacaugccucucucaggccaa

SEQ ID NO: 2980493 - RNA, 19 nt, Human
agcacaugccucucucagg

SEQ ID NO: 2980494 - RNA, 20 nt, Human
agcacaugccucucucaggc

SEQ ID NO: 2980495 - RNA, 21 nt, Human
agcacaugccucucucaggcc

SEQ ID NO: 2980496 - RNA, 22 nt, Human
agcacaugccucucucaggcca

SEQ ID NO: 2980497 - RNA, 18 nt, Human
agcacaugccucucucag

SEQ ID NO: 2980498 - RNA, 16 nt, Human
agcacaugccucucuc

SEQ ID NO: 2980499 - RNA, 21 nt, Human
agcacagcuucauuuccugug

SEQ ID NO: 2980500 - RNA, 17 nt, Human
agcaagugagagcuggg

SEQ ID NO: 2980501 - RNA, 16 nt, Human
agaugcacaugagcug

SEQ ID NO: 2980502 - RNA, 20 nt, Human
agaugcaguucugaagaaga

SEQ ID NO: 2980503 - RNA, 13 nt, Human
agaugcacaugag

SEQ ID NO: 2980504 - RNA, 19 nt, Human
agaugcuagaacucccuuu

SEQ ID NO: 2980505 - RNA, 21 nt, Human
agaugcaguucugaagaagau

SEQ ID NO: 2980506 - RNA, 15 nt, Human
agaugcuagaacucc

SEQ ID NO: 2980507 - RNA, 21 nt, Human
agaugcuagaacucccuuuca

SEQ ID NO: 2980508 - RNA, 13 nt, Human
agauguaugcaca

SEQ ID NO: 2980509 - RNA, 13 nt, Human
agauccuggaaau

SEQ ID NO: 2980510 - RNA, 18 nt, Human
agaucucuaacuucacca

SEQ ID NO: 2980511 - RNA, 14 nt, Human
ugacagauugaauu

SEQ ID NO: 2980512 - RNA, 15 nt, Human
ugacacuuaaaaaug

SEQ ID NO: 2980513 - RNA, 22 nt, Human
ugacagagugagacucugucuc

SEQ ID NO: 2980514 - RNA, 19 nt, Human
ugacacgaauauugcugau

SEQ ID NO: 2980515 - RNA, 16 nt, Human
ugacacgaauauugcu

SEQ ID NO: 2980516 - RNA, 20 nt, Human
ugaaugcccagugagacugu

SEQ ID NO: 2980517 - RNA, 13 nt, Human
ugacauucccugc

SEQ ID NO: 2980518 - RNA, 13 nt, Human
ugacauguuuuau

SEQ ID NO: 2980519 - RNA, 19 nt, Human
ugacaggcaaugcuggcug

SEQ ID NO: 2980520 - RNA, 17 nt, Human
ugacaggcaaugcuggc

SEQ ID NO: 2980521 - RNA, 22 nt, Human
ugacagggcacaccgggcacuc

SEQ ID NO: 2980522 - RNA, 21 nt, Human
ugacagggcacaccgggcacu

SEQ ID NO: 2980523 - RNA, 22 nt, Human
ugacuauucugagaugacuauu

SEQ ID NO: 2980524 - RNA, 21 nt, Human
ugacuauucugagaugacuau

SEQ ID NO: 2980525 - RNA, 19 nt, Human
ugacuauucugagaugacu

SEQ ID NO: 2980526 - RNA, 16 nt, Human
ugacuauaaccuuguu

SEQ ID NO: 2980527 - RNA, 12 nt, Human
ugaccuuucaau

SEQ ID NO: 2980528 - RNA, 11 nt, Human
ugacuguuuuu

SEQ ID NO: 2980529 - RNA, 21 nt, Human
ugacuguuuucucuugagagg

SEQ ID NO: 2980530 - RNA, 22 nt, Human
ugacuauuuuuguuuuuauuaa

SEQ ID NO: 2980531 - RNA, 18 nt, Human
ugacuauuuuuguuuuua

SEQ ID NO: 2980532 - RNA, 20 nt, Human
agauguaugcacacacauau

SEQ ID NO: 2980533 - RNA, 18 nt, Human
agauguaugcacacacau

SEQ ID NO: 2980534 - RNA, 14 nt, Human
agauguaugcacac

SEQ ID NO: 2980535 - RNA, 23 nt, Human
agauguaugcacacacauauauu

SEQ ID NO: 2980536 - RNA, 22 nt, Human
agauguauguacuucaugcugu

SEQ ID NO: 2980537 - RNA, 17 nt, Human
agaugugaacacaucag

SEQ ID NO: 2980538 - RNA, 22 nt, Human
agaugugaacacaucagcuugc

SEQ ID NO: 2980539 - RNA, 15 nt, Human
ugaccuuuaagagaa

SEQ ID NO: 2980540 - RNA, 20 nt, Human
ugacuuacuguacaugaaaa

SEQ ID NO: 2980541 - RNA, 12 nt, Human
ugacuuacugua

SEQ ID NO: 2980542 - RNA, 16 nt, Human
agauucauauuuacuu

SEQ ID NO: 2980543 - RNA, 13 nt, Human
agauucauauuua

SEQ ID NO: 2980544 - RNA, 21 nt, Human
agauugugccccugcacucca

SEQ ID NO: 2980545 - RNA, 19 nt, Human
agauuucacucuccuuggu

SEQ ID NO: 2980546 - RNA, 17 nt, Human
agauuucacucuccuug

SEQ ID NO: 2980547 - RNA, 14 nt, Human
ucugagugcaaacu

SEQ ID NO: 2980548 - RNA, 21 nt, Human
ucugagacucgcgacaaugca

SEQ ID NO: 2980549 - RNA, 23 nt, Human
ucugagugcaaacuucagaguuc

SEQ ID NO: 2980550 - RNA, 22 nt, Human
ucugagugcaaacuucagaguu

SEQ ID NO: 2980551 - RNA, 17 nt, Human
ucugaucauccacugug

SEQ ID NO: 2980552 - RNA, 21 nt, Human
ucugaucauccacugugccau

SEQ ID NO: 2980553 - RNA, 15 nt, Human
ucugcagauaaacag

SEQ ID NO: 2980554 - RNA, 18 nt, Human
ucugcagauaaacaguag

SEQ ID NO: 2980555 - RNA, 17 nt, Human
ucugcagcaauaaagca

SEQ ID NO: 2980556 - RNA, 14 nt, Human
ucugcacuccccug

SEQ ID NO: 2980557 - RNA, 15 nt, Human
ucugcacuccccugc

SEQ ID NO: 2980558 - RNA, 16 nt, Human
ucugcacuccccugcu

SEQ ID NO: 2980559 - RNA, 15 nt, Human
agaaauguacagcaa

SEQ ID NO: 2980560 - RNA, 14 nt, Human
agaaauguacagca

SEQ ID NO: 2980561 - RNA, 14 nt, Human
agaaaugaaagcag

SEQ ID NO: 2980562 - RNA, 21 nt, Human
ucugaaggacauugcggacag

SEQ ID NO: 2980563 - RNA, 14 nt, Human
ucugacacacagcu

SEQ ID NO: 2980564 - RNA, 13 nt, Human
ucugacacacagc

SEQ ID NO: 2980565 - RNA, 12 nt, Human
ucugacacacag

SEQ ID NO: 2980566 - RNA, 15 nt, Human
ucugacacacagcuc

SEQ ID NO: 2980567 - RNA, 13 nt, Human
agaagaacugaaa

SEQ ID NO: 2980568 - RNA, 14 nt, Human
agaagaacugaaau

SEQ ID NO: 2980569 - RNA, 18 nt, Human
agaagaugguaccaccag

SEQ ID NO: 2980570 - RNA, 12 nt, Human
agaagcccagga

SEQ ID NO: 2980571 - RNA, 16 nt, Human
agaagcccaggaaagg

SEQ ID NO: 2980572 - RNA, 18 nt, Human
agaagcccaggaaaggcu

SEQ ID NO: 2980573 - RNA, 20 nt, Human
agaagcccaggaaaggcucc

SEQ ID NO: 2980574 - RNA, 21 nt, Human
agaagcccaggaaaggcucca

SEQ ID NO: 2980575 - RNA, 22 nt, Human
agaagcccaggaaaggcuccag

SEQ ID NO: 2980576 - RNA, 16 nt, Human
ucugcccacucccugc

SEQ ID NO: 2980577 - RNA, 17 nt, Human
ucugcccacucccugca

SEQ ID NO: 2980578 - RNA, 18 nt, Human
agaagauuuugaaauuuu

SEQ ID NO: 2980579 - RNA, 16 nt, Human
ucugcuugccaucccu

SEQ ID NO: 2980580 - RNA, 20 nt, Human
ucugcuugccaucccucccu

SEQ ID NO: 2980581 - RNA, 17 nt, Human
ucugcuugccaucccuc

SEQ ID NO: 2980582 - RNA, 23 nt, Human
ucugcuugccaucccucccucca

SEQ ID NO: 2980583 - RNA, 14 nt, Human
ucugcuugccaucc

SEQ ID NO: 2980584 - RNA, 15 nt, Human
ucugcuucagccucc

SEQ ID NO: 2980585 - RNA, 14 nt, Human
ucugcuucagccuc

SEQ ID NO: 2980586 - RNA, 13 nt, Human
ucugcuucagccu

SEQ ID NO: 2980587 - RNA, 20 nt, Human
ucugcucacauaucugucau

SEQ ID NO: 2980588 - RNA, 19 nt, Human
ucugcucacauaucuguca

SEQ ID NO: 2980589 - RNA, 17 nt, Human
ucugcucacauaucugu

SEQ ID NO: 2980590 - RNA, 22 nt, Human
ucugccgcagcccugcagaggg

SEQ ID NO: 2980591 - RNA, 22 nt, Human
ucugccugcccaggccccugcc

SEQ ID NO: 2980592 - RNA, 21 nt, Human
ucugccugcccaggccccugc

SEQ ID NO: 2980593 - RNA, 14 nt, Human
ucugcggagcacac

SEQ ID NO: 2980594 - RNA, 21 nt, Human
ucugcggagcacacuggcuca

SEQ ID NO: 2980595 - RNA, 22 nt, Human
ucugcggagcacacuggcucac

SEQ ID NO: 2980596 - RNA, 20 nt, Human
ucugcgggggcagugcucac

SEQ ID NO: 2980597 - RNA, 18 nt, Human
ucugcgggggcagugcuc

SEQ ID NO: 2980598 - RNA, 18 nt, Human
ucugcccacucccugcaa

SEQ ID NO: 2980599 - RNA, 21 nt, Human
ucugcccacucccugcaaccu

SEQ ID NO: 2980600 - RNA, 18 nt, Human
ucugcccuccaagaccuu

SEQ ID NO: 2980601 - RNA, 19 nt, Human
ucugcccuccaagaccuuc

SEQ ID NO: 2980602 - RNA, 14 nt, Human
ucugccgcagcccu

SEQ ID NO: 2980603 - RNA, 15 nt, Human
ucugccgcagcccug

SEQ ID NO: 2980604 - RNA, 24 nt, Human
agaauugauugggcacaucauuuc

SEQ ID NO: 2980605 - RNA, 21 nt, Human
agaauuugauaugugaacagu

SEQ ID NO: 2980606 - RNA, 22 nt, Human
agaauuugauaugugaacaguu

SEQ ID NO: 2980607 - RNA, 23 nt, Human
agaauugauugggcacaucauuu

SEQ ID NO: 2980608 - RNA, 22 nt, Human
agaauugauugggcacaucauu

SEQ ID NO: 2980609 - RNA, 16 nt, Human
agaauugauugggcac

SEQ ID NO: 2980610 - RNA, 19 nt, Human
agaauugacauugaaaucu

SEQ ID NO: 2980611 - RNA, 18 nt, Human
agaauugacauugaaauc

SEQ ID NO: 2980612 - RNA, 17 nt, Human
agaauugacauugaaau

SEQ ID NO: 2980613 - RNA, 16 nt, Human
agaauugacauugaaa

SEQ ID NO: 2980614 - RNA, 15 nt, Human
agaauugacauugaa

SEQ ID NO: 2980615 - RNA, 12 nt, Human
agacacacauga

SEQ ID NO: 2980616 - RNA, 13 nt, Human
agacacaggcccg

SEQ ID NO: 2980617 - RNA, 12 nt, Human
agacacaggccc

SEQ ID NO: 2980618 - RNA, 16 nt, Human
agacacaggcccggcu

SEQ ID NO: 2980619 - RNA, 22 nt, Human
agacagagccccacccucagau

SEQ ID NO: 2980620 - RNA, 24 nt, Human
agacagagccccacccucagaugc

SEQ ID NO: 2980621 - RNA, 16 nt, Human
agacaggaccagggau

SEQ ID NO: 2980622 - RNA, 13 nt, Human
agacagagaccug

SEQ ID NO: 2980623 - RNA, 21 nt, Human
agacacaugccagggccaugu

SEQ ID NO: 2980624 - RNA, 14 nt, Human
agacacaugccagg

SEQ ID NO: 2980625 - RNA, 16 nt, Human
agacacauguccaaga

SEQ ID NO: 2980626 - RNA, 20 nt, Human
agacacauguccaagaagcc

SEQ ID NO: 2980627 - RNA, 18 nt, Human
agacaccuugacagggca

SEQ ID NO: 2980628 - RNA, 17 nt, Human
agacaccuugacagggc

SEQ ID NO: 2980629 - RNA, 13 nt, Human
ucuguucuuucca

SEQ ID NO: 2980630 - RNA, 22 nt, Human
ucuguucuuuccaaaguacacu

SEQ ID NO: 2980631 - RNA, 17 nt, Human
ucuguuggccaguguga

SEQ ID NO: 2980632 - RNA, 12 nt, Human
ucuguuggccag

SEQ ID NO: 2980633 - RNA, 22 nt, Human
ucugugagaugcuagaacuccc

SEQ ID NO: 2980634 - RNA, 17 nt, Human
ucugugagaugcuagaa

SEQ ID NO: 2980635 - RNA, 23 nt, Human
ucugugagaugcuagaacucccu

SEQ ID NO: 2980636 - RNA, 14 nt, Human
ucugugagaugcua

SEQ ID NO: 2980637 - RNA, 22 nt, Human
ucugugaaaggaaagagggagg

SEQ ID NO: 2980638 - RNA, 15 nt, Human
agaauguuuucaaau

SEQ ID NO: 2980639 - RNA, 21 nt, Human
agaauguuuucaaauguucuc

SEQ ID NO: 2980640 - RNA, 15 nt, Human
agaauuaacacauga

SEQ ID NO: 2980641 - RNA, 19 nt, Human
agaaggcauggacuucugg

SEQ ID NO: 2980642 - RNA, 21 nt, Human
agaaguuucugccgcagcccu

SEQ ID NO: 2980643 - RNA, 22 nt, Human
agaaguuucugccgcagcccug

SEQ ID NO: 2980644 - RNA, 23 nt, Human
agaaguuucugccgcagcccugc

SEQ ID NO: 2980645 - RNA, 23 nt, Human
ucuauaacaaaggauacuuauuu

SEQ ID NO: 2980646 - RNA, 22 nt, Human
ucuauaacaaaggauacuuauu

SEQ ID NO: 2980647 - RNA, 13 nt, Human
ucuauaaaccgaa

SEQ ID NO: 2980648 - RNA, 21 nt, Human
ucuaguuugauuaaauucuug

SEQ ID NO: 2980649 - RNA, 23 nt, Human
ucuaguuguuugauucagacagc

SEQ ID NO: 2980650 - RNA, 22 nt, Human
ucuaguuguuugauucagacag

SEQ ID NO: 2980651 - RNA, 12 nt, Human
ucuaggaagacu

SEQ ID NO: 2980652 - RNA, 13 nt, Human
ucuagccagagga

SEQ ID NO: 2980653 - RNA, 16 nt, Human
ucuaggaaauauuuau

SEQ ID NO: 2980654 - RNA, 17 nt, Human
ucuaggaaauauuuauu

SEQ ID NO: 2980655 - RNA, 16 nt, Human
acuucaucccucuggg

SEQ ID NO: 2980656 - RNA, 18 nt, Human
ucuagcauggcugccaau

SEQ ID NO: 2980657 - RNA, 13 nt, Human
ucuagauacugua

SEQ ID NO: 2980658 - RNA, 14 nt, Human
ucuauguuaauauu

SEQ ID NO: 2980659 - RNA, 16 nt, Human
ucuauguuaauauuuu

SEQ ID NO: 2980660 - RNA, 23 nt, Human
ucuaugggacucaaugcacugac

SEQ ID NO: 2980661 - RNA, 13 nt, Human
ucuauuuauuuau

SEQ ID NO: 2980662 - RNA, 14 nt, Human
ucuauuuauuuauu

SEQ ID NO: 2980663 - RNA, 16 nt, Human
ucucacuauguugccc

SEQ ID NO: 2980664 - RNA, 19 nt, Human
ucucacuauguugcccagg

SEQ ID NO: 2980665 - RNA, 17 nt, Human
ucucacuauguugccca

SEQ ID NO: 2980666 - RNA, 12 nt, Human
uccugggcagcu

SEQ ID NO: 2980667 - RNA, 13 nt, Human
uccugggcagcug

SEQ ID NO: 2980668 - RNA, 18 nt, Human
uccugggagugagcuggu

SEQ ID NO: 2980669 - RNA, 14 nt, Human
ucuaaguaaaacca

SEQ ID NO: 2980670 - RNA, 15 nt, Human
ucuaaguaaaaccac

SEQ ID NO: 2980671 - RNA, 19 nt, Human
ucuaaguaaaaccacagca

SEQ ID NO: 2980672 - RNA, 19 nt, Human
ucuacccagcgagcccugg

SEQ ID NO: 2980673 - RNA, 21 nt, Human
ucuacagaggccaugggccuc

SEQ ID NO: 2980674 - RNA, 14 nt, Human
ucuacccuggcacu

SEQ ID NO: 2980675 - RNA, 19 nt, Human
ucuacccuggcacuauaau

SEQ ID NO: 2980676 - RNA, 14 nt, Human
ucuacccaggugcu

SEQ ID NO: 2980677 - RNA, 20 nt, Human
ucuacccagcgagcccuggu

SEQ ID NO: 2980678 - RNA, 21 nt, Human
ucuacccuggcacuauaaugu

SEQ ID NO: 2980679 - RNA, 16 nt, Human
acuguucucugcccuc

SEQ ID NO: 2980680 - RNA, 17 nt, Human
acuguucucugcccucc

SEQ ID NO: 2980681 - RNA, 18 nt, Human
acuguucucugcccucca

SEQ ID NO: 2980682 - RNA, 16 nt, Human
acuuacuguacaugaa

SEQ ID NO: 2980683 - RNA, 21 nt, Human
acuuacuguacaugaaaacac

SEQ ID NO: 2980684 - RNA, 17 nt, Human
acuuacacuuuaugcac

SEQ ID NO: 2980685 - RNA, 19 nt, Human
acuuaaugagacuuuaaaa

SEQ ID NO: 2980686 - RNA, 22 nt, Human
acuuacuguacaugaaaacaca

SEQ ID NO: 2980687 - RNA, 15 nt, Human
acuuagguguggggg

SEQ ID NO: 2980688 - RNA, 16 nt, Human
acuuacacuuuaugca

SEQ ID NO: 2980689 - RNA, 22 nt, Human
acuuaaucuaaauggaaccacu

SEQ ID NO: 2980690 - RNA, 15 nt, Human
acuuaaugaaaacaa

SEQ ID NO: 2980691 - RNA, 18 nt, Human
acuuaaugaaaacaaugc

SEQ ID NO: 2980692 - RNA, 16 nt, Human
acuuaaugaaaacaau

SEQ ID NO: 2980693 - RNA, 16 nt, Human
acuuaaugagacuuua

SEQ ID NO: 2980694 - RNA, 19 nt, Human
acuuaaucuaaauggaacc

SEQ ID NO: 2980695 - RNA, 17 nt, Human
acuuaaucuaaauggaa

SEQ ID NO: 2980696 - RNA, 13 nt, Human
acuuaagcacacu

SEQ ID NO: 2980697 - RNA, 11 nt, Human
acuuaagacuu

SEQ ID NO: 2980698 - RNA, 20 nt, Human
acuuaaauaaugugaaacug

SEQ ID NO: 2980699 - RNA, 14 nt, Human
ucucagcagagugc

SEQ ID NO: 2980700 - RNA, 13 nt, Human
ucucagcagagug

SEQ ID NO: 2980701 - RNA, 12 nt, Human
ucucagcagagu

SEQ ID NO: 2980702 - RNA, 12 nt, Human
ucucaggaaauc

SEQ ID NO: 2980703 - RNA, 14 nt, Human
ucucaggaaaucaa

SEQ ID NO: 2980704 - RNA, 21 nt, Human
ucucaggaaaucaaauaugca

SEQ ID NO: 2980705 - RNA, 23 nt, Human
ucucaggaaaucaaauaugcaaa

SEQ ID NO: 2980706 - RNA, 12 nt, Human
ucucaggccagc

SEQ ID NO: 2980707 - RNA, 13 nt, Human
ucucaggccagcu

SEQ ID NO: 2980708 - RNA, 12 nt, Human
ucucaggccaaa

SEQ ID NO: 2980709 - RNA, 10 nt, Human
ucucaggcca

SEQ ID NO: 2980710 - RNA, 15 nt, Human
ucucauuuccaagca

SEQ ID NO: 2980711 - RNA, 14 nt, Human
ucucauuugucaca

SEQ ID NO: 2980712 - RNA, 15 nt, Human
ucuccaagcaggaca

SEQ ID NO: 2980713 - RNA, 16 nt, Human
ucuccaagcaggacau

SEQ ID NO: 2980714 - RNA, 16 nt, Human
ucucauuugucacaca

SEQ ID NO: 2980715 - RNA, 17 nt, Human
ucucaggccagcugcuu

SEQ ID NO: 2980716 - RNA, 18 nt, Human
ucucaggccagcugcuug

SEQ ID NO: 2980717 - RNA, 21 nt, Human
ucucaggccagcugcuugggc

SEQ ID NO: 2980718 - RNA, 15 nt, Human
acuugugaauaaaga

SEQ ID NO: 2980719 - RNA, 21 nt, Human
acuugucuuuggacccugagg

SEQ ID NO: 2980720 - RNA, 20 nt, Human
acuugucuuuggacccugag

SEQ ID NO: 2980721 - RNA, 18 nt, Human
acuugucuuuggacccug

SEQ ID NO: 2980722 - RNA, 22 nt, Human
acuuguggacacagcucuucuc

SEQ ID NO: 2980723 - RNA, 19 nt, Human
acuuguggacacagcucuu

SEQ ID NO: 2980724 - RNA, 15 nt, Human
acuugucaauaaaau

SEQ ID NO: 2980725 - RNA, 22 nt, Human
acuugcagacucuacagaggcc

SEQ ID NO: 2980726 - RNA, 19 nt, Human
acuugcagacucuacagag

SEQ ID NO: 2980727 - RNA, 23 nt, Human
acuugcagacucuacagaggcca

SEQ ID NO: 2980728 - RNA, 23 nt, Human
ucucacuauguugcccaggcagg

SEQ ID NO: 2980729 - RNA, 22 nt, Human
ucucacuauguugcccaggcag

SEQ ID NO: 2980730 - RNA, 21 nt, Human
ucucacuauguugcccaggca

SEQ ID NO: 2980731 - RNA, 20 nt, Human
ucucacuauguugcccaggc

SEQ ID NO: 2980732 - RNA, 21 nt, Human
acuuugguuauuuuacuuuuu

SEQ ID NO: 2980733 - RNA, 13 nt, Human
acuuugguuauuu

SEQ ID NO: 2980734 - RNA, 10 nt, Human
acuuugguua

SEQ ID NO: 2980735 - RNA, 13 nt, Human
acuuugaccucug

SEQ ID NO: 2980736 - RNA, 12 nt, Human
acuuugaccucu

SEQ ID NO: 2980737 - RNA, 23 nt, Human
acuuugguuauuuuacuuuuugg

SEQ ID NO: 2980738 - RNA, 22 nt, Human
acuuugguuauuuuacuuuuug

SEQ ID NO: 2980739 - RNA, 20 nt, Human
acuuuguuaguuucuccaag

SEQ ID NO: 2980740 - RNA, 18 nt, Human
acuuuguguucaccuugu

SEQ ID NO: 2980741 - RNA, 13 nt, Human
acuuuuguucuug

SEQ ID NO: 2980742 - RNA, 12 nt, Human
acuuuuguucuu

SEQ ID NO: 2980743 - RNA, 21 nt, Human
acuuuguuaguuucuccaagc

SEQ ID NO: 2980744 - RNA, 14 nt, Human
acuuuguucuggcu

SEQ ID NO: 2980745 - RNA, 16 nt, Human
acuuuuuauauucuca

SEQ ID NO: 2980746 - RNA, 15 nt, Human
acuuuuuauauucuc

SEQ ID NO: 2980747 - RNA, 12 nt, Human
acuuuuuauauu

SEQ ID NO: 2980748 - RNA, 22 nt, Human
acuuuuuauauucucagcagag

SEQ ID NO: 2980749 - RNA, 23 nt, Human
acuuuuguucuugguuuguaaau

SEQ ID NO: 2980750 - RNA, 15 nt, Human
acuuuuguucuuggu

SEQ ID NO: 2980751 - RNA, 21 nt, Human
ucuccuuguguuacuaaguuu

SEQ ID NO: 2980752 - RNA, 13 nt, Human
ucuccuuguguua

SEQ ID NO: 2980753 - RNA, 16 nt, Human
ucuccuucaccuuugu

SEQ ID NO: 2980754 - RNA, 14 nt, Human
ucuccuucaccuuu

SEQ ID NO: 2980755 - RNA, 15 nt, Human
ucuccuucaccuuug

SEQ ID NO: 2980756 - RNA, 17 nt, Human
agaaaaaauauuuuccc

SEQ ID NO: 2980757 - RNA, 23 nt, Human
ucuccgaccagacaccuugacag

SEQ ID NO: 2980758 - RNA, 17 nt, Human
ucuccgaccagacaccu

SEQ ID NO: 2980759 - RNA, 21 nt, Human
ucucccuuggauuguccccga

SEQ ID NO: 2980760 - RNA, 23 nt, Human
ucuccccagcaagugagagcugg

SEQ ID NO: 2980761 - RNA, 18 nt, Human
ucuccaagcaggacaugg

SEQ ID NO: 2980762 - RNA, 19 nt, Human
ucuccaagcaggacaugga

SEQ ID NO: 2980763 - RNA, 12 nt, Human
acuuuaccuuuu

SEQ ID NO: 2980764 - RNA, 20 nt, Human
acuuucugaaauaacauggc

SEQ ID NO: 2980765 - RNA, 14 nt, Human
acuuucugaaauaa

SEQ ID NO: 2980766 - RNA, 17 nt, Human
ucuccucugcugcuggc

SEQ ID NO: 2980767 - RNA, 18 nt, Human
ucuccucugcugcuggcu

SEQ ID NO: 2980768 - RNA, 15 nt, Human
ucuccucugcugcug

SEQ ID NO: 2980769 - RNA, 16 nt, Human
ucuccucugcugcugg

SEQ ID NO: 2980770 - RNA, 15 nt, Human
ucuccuccagaguca

SEQ ID NO: 2980771 - RNA, 14 nt, Human
uccagucauuaugu

SEQ ID NO: 2980772 - RNA, 15 nt, Human
uccagucauuauguu

SEQ ID NO: 2980773 - RNA, 21 nt, Human
uccagucauuauguuaauauu

SEQ ID NO: 2980774 - RNA, 23 nt, Human
uccagucauuauguuaauauuuc

SEQ ID NO: 2980775 - RNA, 16 nt, Human
uccaguaucuugaaga

SEQ ID NO: 2980776 - RNA, 18 nt, Human
uccaguaucuugaagacu

SEQ ID NO: 2980777 - RNA, 15 nt, Human
uccagugaggcucug

SEQ ID NO: 2980778 - RNA, 18 nt, Human
uccagugagacagcucug

SEQ ID NO: 2980779 - RNA, 16 nt, Human
uccagugaggcucugc

SEQ ID NO: 2980780 - RNA, 22 nt, Human
uccagugaggcucugcccuugg

SEQ ID NO: 2980781 - RNA, 23 nt, Human
uccagugaggcucugcccuuggu

SEQ ID NO: 2980782 - RNA, 12 nt, Human
acggccaggcca

SEQ ID NO: 2980783 - RNA, 18 nt, Human
acggcucacugcagccuc

SEQ ID NO: 2980784 - RNA, 17 nt, Human
acggcucacugcagccu

SEQ ID NO: 2980785 - RNA, 15 nt, Human
acggcucacugcagc

SEQ ID NO: 2980786 - RNA, 16 nt, Human
acggcucacugcagcc

SEQ ID NO: 2980787 - RNA, 18 nt, Human
acggcuuuuacuuaaacc

SEQ ID NO: 2980788 - RNA, 14 nt, Human
uccaguaucuugaa

SEQ ID NO: 2980789 - RNA, 15 nt, Human
uccaguaucuugaag

SEQ ID NO: 2980790 - RNA, 11 nt, Human
acgcucucugg

SEQ ID NO: 2980791 - RNA, 13 nt, Human
acgcuggaccuug

SEQ ID NO: 2980792 - RNA, 16 nt, Human
acgcuggagugcagug

SEQ ID NO: 2980793 - RNA, 15 nt, Human
acgcuggagugcagu

SEQ ID NO: 2980794 - RNA, 23 nt, Human
acgcuggaccuugaacuggguac

SEQ ID NO: 2980795 - RNA, 20 nt, Human
acgcuggaccuugaacuggg

SEQ ID NO: 2980796 - RNA, 17 nt, Human
acgcuggagugcaguga

SEQ ID NO: 2980797 - RNA, 21 nt, Human
acggagucccaccuuggcugc

SEQ ID NO: 2980798 - RNA, 23 nt, Human
acggagucccaccuuggcugcag

SEQ ID NO: 2980799 - RNA, 21 nt, Human
acgaauauugcugauggugca

SEQ ID NO: 2980800 - RNA, 14 nt, Human
acgaauauugcuga

SEQ ID NO: 2980801 - RNA, 21 nt, Human
acgcuacccgggaagggggcu

SEQ ID NO: 2980802 - RNA, 20 nt, Human
uccaggcugggagagccuuc

SEQ ID NO: 2980803 - RNA, 21 nt, Human
uccaggcugggagagccuucc

SEQ ID NO: 2980804 - RNA, 12 nt, Human
uccaggcuccuu

SEQ ID NO: 2980805 - RNA, 10 nt, Human
uccaggcucc

SEQ ID NO: 2980806 - RNA, 23 nt, Human
uccaggcugggagagccuuccag

SEQ ID NO: 2980807 - RNA, 13 nt, Human
acgaaagaaggca

SEQ ID NO: 2980808 - RNA, 13 nt, Human
acgaaaaaauggu

SEQ ID NO: 2980809 - RNA, 22 nt, Human
accuuuuuuauacauaaacaag

SEQ ID NO: 2980810 - RNA, 15 nt, Human
acgaauauugcugau

SEQ ID NO: 2980811 - RNA, 18 nt, Human
acgaauauugcugauggu

SEQ ID NO: 2980812 - RNA, 14 nt, Human
uccagaauuuccca

SEQ ID NO: 2980813 - RNA, 15 nt, Human
uccagaauuucccaa

SEQ ID NO: 2980814 - RNA, 13 nt, Human
uccagacacaugu

SEQ ID NO: 2980815 - RNA, 19 nt, Human
accuugaaaacuuuaugcu

SEQ ID NO: 2980816 - RNA, 20 nt, Human
accuugaacuggguacuugu

SEQ ID NO: 2980817 - RNA, 17 nt, Human
accuuuguccccaccgc

SEQ ID NO: 2980818 - RNA, 18 nt, Human
accuuuguccccaccgca

SEQ ID NO: 2980819 - RNA, 20 nt, Human
accuuuuggucuggagggaa

SEQ ID NO: 2980820 - RNA, 13 nt, Human
accuuuuuuauac

SEQ ID NO: 2980821 - RNA, 22 nt, Human
uccacugguucuucuuggucuc

SEQ ID NO: 2980822 - RNA, 21 nt, Human
uccacugugccaugugccagg

SEQ ID NO: 2980823 - RNA, 17 nt, Human
uccacuggguguaaaca

SEQ ID NO: 2980824 - RNA, 20 nt, Human
uccacuggguguaaacacau

SEQ ID NO: 2980825 - RNA, 11 nt, Human
uccauccugag

SEQ ID NO: 2980826 - RNA, 15 nt, Human
uccauccugaggcuc

SEQ ID NO: 2980827 - RNA, 12 nt, Human
uccauccugagg

SEQ ID NO: 2980828 - RNA, 19 nt, Human
acguggcugcuucaaggau

SEQ ID NO: 2980829 - RNA, 21 nt, Human
acguggcugcuucaaggaucc

SEQ ID NO: 2980830 - RNA, 17 nt, Human
acguggcugcuucaagg

SEQ ID NO: 2980831 - RNA, 18 nt, Human
acguggcugcuucaagga

SEQ ID NO: 2980832 - RNA, 15 nt, Human
acguugugcauuugg

SEQ ID NO: 2980833 - RNA, 14 nt, Human
acguugugcauuug

SEQ ID NO: 2980834 - RNA, 16 nt, Human
acguuucuaaaggcua

SEQ ID NO: 2980835 - RNA, 15 nt, Human
acguuucuaaaggcu

SEQ ID NO: 2980836 - RNA, 13 nt, Human
acguugugcauuu

SEQ ID NO: 2980837 - RNA, 15 nt, Human
acuaauuuuaaaaug

SEQ ID NO: 2980838 - RNA, 22 nt, Human
acguuucuaaaggcuaccuuug

SEQ ID NO: 2980839 - RNA, 16 nt, Human
ucccagauacuugggg

SEQ ID NO: 2980840 - RNA, 18 nt, Human
ucccagauacuugggggg

SEQ ID NO: 2980841 - RNA, 17 nt, Human
acuaucucauuuccaag

SEQ ID NO: 2980842 - RNA, 16 nt, Human
acuaucucauuuccaa

SEQ ID NO: 2980843 - RNA, 21 nt, Human
acuaucuaaauguugaaagau

SEQ ID NO: 2980844 - RNA, 16 nt, Human
acuaucuaaauguuga

SEQ ID NO: 2980845 - RNA, 15 nt, Human
acuaucucauuucca

SEQ ID NO: 2980846 - RNA, 22 nt, Human
acuauauuguuugcuaagcauu

SEQ ID NO: 2980847 - RNA, 17 nt, Human
acuauauuguuugcuaa

SEQ ID NO: 2980848 - RNA, 18 nt, Human
acuauagccuaggugaca

SEQ ID NO: 2980849 - RNA, 22 nt, Human
acuauagccuaggugacagagu

SEQ ID NO: 2980850 - RNA, 20 nt, Human
acuauagccuaggugacaga

SEQ ID NO: 2980851 - RNA, 16 nt, Human
acucaaugcacugaca

SEQ ID NO: 2980852 - RNA, 16 nt, Human
acuauguugcccaggc

SEQ ID NO: 2980853 - RNA, 15 nt, Human
acuauguugcccagg

SEQ ID NO: 2980854 - RNA, 22 nt, Human
acuauggcccuggccuagcaua

SEQ ID NO: 2980855 - RNA, 14 nt, Human
acuauguugcccag

SEQ ID NO: 2980856 - RNA, 23 nt, Human
uccccacccugaaagcccugagc

SEQ ID NO: 2980857 - RNA, 15 nt, Human
uccccaccgcagaca

SEQ ID NO: 2980858 - RNA, 16 nt, Human
uccccaccgcagacag

SEQ ID NO: 2980859 - RNA, 18 nt, Human
uccccaggaggccagccu

SEQ ID NO: 2980860 - RNA, 12 nt, Human
uccccacccuga

SEQ ID NO: 2980861 - RNA, 23 nt, Human
ucccagcuacucgggaggcugag

SEQ ID NO: 2980862 - RNA, 22 nt, Human
ucccagcuacucgggaggcuga

SEQ ID NO: 2980863 - RNA, 17 nt, Human
uccccaggaggccagcc

SEQ ID NO: 2980864 - RNA, 20 nt, Human
uccccaggaggccagccuug

SEQ ID NO: 2980865 - RNA, 21 nt, Human
uccccaggaggccagccuuga

SEQ ID NO: 2980866 - RNA, 11 nt, Human
ucccccagccc

SEQ ID NO: 2980867 - RNA, 13 nt, Human
ucccccagcccca

SEQ ID NO: 2980868 - RNA, 15 nt, Human
ucccccagccccauc

SEQ ID NO: 2980869 - RNA, 16 nt, Human
ucccccagccccaucc

SEQ ID NO: 2980870 - RNA, 15 nt, Human
acugaacaguaacau

SEQ ID NO: 2980871 - RNA, 21 nt, Human
acugaacaguaacauagcugu

SEQ ID NO: 2980872 - RNA, 22 nt, Human
uccucuuuggucuacacugugc

SEQ ID NO: 2980873 - RNA, 22 nt, Human
uccugaaaacccuugccaugug

SEQ ID NO: 2980874 - RNA, 12 nt, Human
uccucuuuccau

SEQ ID NO: 2980875 - RNA, 11 nt, Human
uccucuuucca

SEQ ID NO: 2980876 - RNA, 14 nt, Human
uccucccucccucu

SEQ ID NO: 2980877 - RNA, 11 nt, Human
uccucccuccc

SEQ ID NO: 2980878 - RNA, 19 nt, Human
uccucuuuggucuacacug

SEQ ID NO: 2980879 - RNA, 21 nt, Human
uccucuuuggucuacacugug

SEQ ID NO: 2980880 - RNA, 19 nt, Human
uccucuuuccaucuacccu

SEQ ID NO: 2980881 - RNA, 22 nt, Human
acugagacagcccgggcucugc

SEQ ID NO: 2980882 - RNA, 23 nt, Human
acugagacagcccgggcucugcc

SEQ ID NO: 2980883 - RNA, 18 nt, Human
acugagagugaacaaauu

SEQ ID NO: 2980884 - RNA, 17 nt, Human
acugagaugugaacaca

SEQ ID NO: 2980885 - RNA, 22 nt, Human
acugagaugugaacacaucagc

SEQ ID NO: 2980886 - RNA, 15 nt, Human
acugagacagcccgg

SEQ ID NO: 2980887 - RNA, 18 nt, Human
acugagacagcccgggcu

SEQ ID NO: 2980888 - RNA, 21 nt, Human
acugagacagcccgggcucug

SEQ ID NO: 2980889 - RNA, 20 nt, Human
acugacucuuaagaagacug

SEQ ID NO: 2980890 - RNA, 18 nt, Human
acugacucuuaagaagac

SEQ ID NO: 2980891 - RNA, 17 nt, Human
acugacucuuaagaaga

SEQ ID NO: 2980892 - RNA, 13 nt, Human
acugacuucuaag

SEQ ID NO: 2980893 - RNA, 15 nt, Human
acugacuucuaagua

SEQ ID NO: 2980894 - RNA, 16 nt, Human
acugacuucuaaguaa

SEQ ID NO: 2980895 - RNA, 22 nt, Human
acugacuucuaaguaaaaccac

SEQ ID NO: 2980896 - RNA, 16 nt, Human
acugacucuuaagaag

SEQ ID NO: 2980897 - RNA, 15 nt, Human
acugacucuuaagaa

SEQ ID NO: 2980898 - RNA, 14 nt, Human
acugacucuuaaga

SEQ ID NO: 2980899 - RNA, 13 nt, Human
acugacucuuaag

SEQ ID NO: 2980900 - RNA, 15 nt, Human
uccuggaaauauuaa

SEQ ID NO: 2980901 - RNA, 16 nt, Human
uccuggaaaucagggu

SEQ ID NO: 2980902 - RNA, 22 nt, Human
uccuggaauaucuccgucaacu

SEQ ID NO: 2980903 - RNA, 17 nt, Human
uccugggagugagcugg

SEQ ID NO: 2980904 - RNA, 14 nt, Human
uccugggagugagc

SEQ ID NO: 2980905 - RNA, 12 nt, Human
uccugggaguga

SEQ ID NO: 2980906 - RNA, 15 nt, Human
uccugggagcuuuug

SEQ ID NO: 2980907 - RNA, 21 nt, Human
uccugcugcaguugccaguca

SEQ ID NO: 2980908 - RNA, 12 nt, Human
uccugcaggcag

SEQ ID NO: 2980909 - RNA, 13 nt, Human
uccugcaggcagc

SEQ ID NO: 2980910 - RNA, 14 nt, Human
uccugcaggcagcc

SEQ ID NO: 2980911 - RNA, 21 nt, Human
uccugccucgaacuggcugca

SEQ ID NO: 2980912 - RNA, 19 nt, Human
acugcacuccagccugggu

SEQ ID NO: 2980913 - RNA, 20 nt, Human
acugcacuccagccugggug

SEQ ID NO: 2980914 - RNA, 18 nt, Human
acugcacuccagccuggg

SEQ ID NO: 2980915 - RNA, 17 nt, Human
acugcacuccagccugg

SEQ ID NO: 2980916 - RNA, 14 nt, Human
acugcacuccagcc

SEQ ID NO: 2980917 - RNA, 21 nt, Human
acugcacuauagccuagguga

SEQ ID NO: 2980918 - RNA, 20 nt, Human
uccugaugcuucuucagaga

SEQ ID NO: 2980919 - RNA, 21 nt, Human
uccugaugcuucuucagagac

SEQ ID NO: 2980920 - RNA, 19 nt, Human
uccugaugcuucuucagag

SEQ ID NO: 2980921 - RNA, 20 nt, Human
acugcacuauagccuaggug

SEQ ID NO: 2980922 - RNA, 16 nt, Human
acugcaccgggccaca

SEQ ID NO: 2980923 - RNA, 14 nt, Human
acugcaccgggcca

SEQ ID NO: 2980924 - RNA, 21 nt, Human
acugauaaagaugagugagca

SEQ ID NO: 2980925 - RNA, 13 nt, Human
acugauaaagaug

SEQ ID NO: 2980926 - RNA, 15 nt, Human
acugagcauaagucc

SEQ ID NO: 2980927 - RNA, 22 nt, Human
acucugagugcaaacuucagag

SEQ ID NO: 2980928 - RNA, 11 nt, Human
acucugagacu

SEQ ID NO: 2980929 - RNA, 22 nt, Human
acucugagacucgcgacaaugc

SEQ ID NO: 2980930 - RNA, 16 nt, Human
acucuccuuggugucg

SEQ ID NO: 2980931 - RNA, 23 nt, Human
acucuccuuggugucgggcauga

SEQ ID NO: 2980932 - RNA, 17 nt, Human
acucugccacuuuauuu

SEQ ID NO: 2980933 - RNA, 16 nt, Human
acucugccacuuuauu

SEQ ID NO: 2980934 - RNA, 13 nt, Human
acucuggcagcuc

SEQ ID NO: 2980935 - RNA, 15 nt, Human
acucuggcagcucag

SEQ ID NO: 2980936 - RNA, 23 nt, Human
acuccuugaaaacacuguucucu

SEQ ID NO: 2980937 - RNA, 24 nt, Human
acuccuugaaaacacuguucucug

SEQ ID NO: 2980938 - RNA, 14 nt, Human
acucuccuccagag

SEQ ID NO: 2980939 - RNA, 17 nt, Human
acucuccuccagaguca

SEQ ID NO: 2980940 - RNA, 18 nt, Human
acucuccuggaaauauua

SEQ ID NO: 2980941 - RNA, 15 nt, Human
acucuccuugguguc

SEQ ID NO: 2980942 - RNA, 16 nt, Human
acucuccucugcugcu

SEQ ID NO: 2980943 - RNA, 21 nt, Human
acucuccucugcugcuggcug

SEQ ID NO: 2980944 - RNA, 13 nt, Human
acucuccucugcu

SEQ ID NO: 2980945 - RNA, 14 nt, Human
acucuccucugcug

SEQ ID NO: 2980946 - RNA, 12 nt, Human
acucuccucugc

SEQ ID NO: 2980947 - RNA, 22 nt, Human
uccucauaguaugguggcuggg

SEQ ID NO: 2980948 - RNA, 23 nt, Human
uccucauacccacccccacccaa

SEQ ID NO: 2980949 - RNA, 16 nt, Human
acucuugaccucaggu

SEQ ID NO: 2980950 - RNA, 15 nt, Human
acucuugaccucagg

SEQ ID NO: 2980951 - RNA, 19 nt, Human
acucuuauaucuauauuuu

SEQ ID NO: 2980952 - RNA, 14 nt, Human
acucuugaccucag

SEQ ID NO: 2980953 - RNA, 18 nt, Human
acucuuauaucuauauuu

SEQ ID NO: 2980954 - RNA, 17 nt, Human
acucuuauaucuauauu

SEQ ID NO: 2980955 - RNA, 16 nt, Human
acucuuauaucuauau

SEQ ID NO: 2980956 - RNA, 21 nt, Human
acucuuaagaagacugcauua

SEQ ID NO: 2980957 - RNA, 19 nt, Human
acuccagugagacagcucu

SEQ ID NO: 2980958 - RNA, 14 nt, Human
acucaccccagccc

SEQ ID NO: 2980959 - RNA, 15 nt, Human
acucaccccagcccc

SEQ ID NO: 2980960 - RNA, 16 nt, Human
acucaccccagcccca

SEQ ID NO: 2980961 - RNA, 13 nt, Human
acucaccccagcc

SEQ ID NO: 2980962 - RNA, 18 nt, Human
ucccugguggcagcucac

SEQ ID NO: 2980963 - RNA, 19 nt, Human
ucccugguggcagcucacc

SEQ ID NO: 2980964 - RNA, 20 nt, Human
ucccugguggcagcucaccu

SEQ ID NO: 2980965 - RNA, 21 nt, Human
ucccugguggcagcucaccuc

SEQ ID NO: 2980966 - RNA, 16 nt, Human
ucccugguggcagcuc

SEQ ID NO: 2980967 - RNA, 17 nt, Human
ucccugguggcagcuca

SEQ ID NO: 2980968 - RNA, 11 nt, Human
acuccuggccu

SEQ ID NO: 2980969 - RNA, 15 nt, Human
acuccugcaggcagc

SEQ ID NO: 2980970 - RNA, 16 nt, Human
acuccugcaggcagcc

SEQ ID NO: 2980971 - RNA, 22 nt, Human
acuccugcaggcagccaggcca

SEQ ID NO: 2980972 - RNA, 12 nt, Human
acuccugcaggc

SEQ ID NO: 2980973 - RNA, 14 nt, Human
acuccugcaggcag

SEQ ID NO: 2980974 - RNA, 14 nt, Human
uccuacucuguguc

SEQ ID NO: 2980975 - RNA, 13 nt, Human
uccuacucugugu

SEQ ID NO: 2980976 - RNA, 12 nt, Human
uccuacucugug

SEQ ID NO: 2980977 - RNA, 15 nt, Human
uccuacucuguguca

SEQ ID NO: 2980978 - RNA, 20 nt, Human
uccuaggagguaaugaccau

SEQ ID NO: 2980979 - RNA, 18 nt, Human
uccuaggagguaaugacc

SEQ ID NO: 2980980 - RNA, 20 nt, Human
uccuaggacccgucuccagc

SEQ ID NO: 2980981 - RNA, 14 nt, Human
acuccuggccucaa

SEQ ID NO: 2980982 - RNA, 13 nt, Human
acuccuggccuca

SEQ ID NO: 2980983 - RNA, 13 nt, Human
uccuaggcauuug

SEQ ID NO: 2980984 - RNA, 12 nt, Human
acuccuggccuc

SEQ ID NO: 2980985 - RNA, 23 nt, Human
ucccuuuuuuggcugcugaaggc

SEQ ID NO: 2980986 - RNA, 20 nt, Human
ucccuuuuuuggcugcugaa

SEQ ID NO: 2980987 - RNA, 22 nt, Human
ucccuuuuuuggcugcugaagg

SEQ ID NO: 2980988 - RNA, 19 nt, Human
ucccuuugacgccauccca

SEQ ID NO: 2980989 - RNA, 17 nt, Human
ucccuuuuuuggcugcu

SEQ ID NO: 2980990 - RNA, 19 nt, Human
ucccuuuuuuggcugcuga

SEQ ID NO: 2980991 - RNA, 22 nt, Human
ucccugguggcagcucaccucu

SEQ ID NO: 2980992 - RNA, 19 nt, Human
ucccuuggauuguccccga

SEQ ID NO: 2980993 - RNA, 20 nt, Human
ucccuuggauuguccccgac

SEQ ID NO: 2980994 - RNA, 16 nt, Human
ucccuuugacgccauc

SEQ ID NO: 2980995 - RNA, 18 nt, Human
ucccuuugacgccauccc

SEQ ID NO: 2980996 - RNA, 14 nt, Human
ucagcccucagaau

SEQ ID NO: 2980997 - RNA, 23 nt, Human
acccaggagccccgaggccuucu

SEQ ID NO: 2980998 - RNA, 19 nt, Human
acccaggagccccgaggcc

SEQ ID NO: 2980999 - RNA, 12 nt, Human
acccaggaggcg

SEQ ID NO: 2981000 - RNA, 13 nt, Human
accccagccccaa

SEQ ID NO: 2981001 - RNA, 20 nt, Human
accccagcaauuaugaaaau

SEQ ID NO: 2981002 - RNA, 22 nt, Human
accccagccccaaaacucuccu

SEQ ID NO: 2981003 - RNA, 17 nt, Human
accccacacacgccaga

SEQ ID NO: 2981004 - RNA, 15 nt, Human
ucagcaaaagaugcu

SEQ ID NO: 2981005 - RNA, 18 nt, Human
accaguguuguggauuua

SEQ ID NO: 2981006 - RNA, 16 nt, Human
accauaagcuacugcc

SEQ ID NO: 2981007 - RNA, 18 nt, Human
accauaagcuacugccau

SEQ ID NO: 2981008 - RNA, 17 nt, Human
accauaagcuacugcca

SEQ ID NO: 2981009 - RNA, 22 nt, Human
accauaagcuacugccauccug

SEQ ID NO: 2981010 - RNA, 21 nt, Human
ucagauuugaacucuucaauc

SEQ ID NO: 2981011 - RNA, 12 nt, Human
ucagauuugaac

SEQ ID NO: 2981012 - RNA, 15 nt, Human
accccaucaucccuu

SEQ ID NO: 2981013 - RNA, 18 nt, Human
accccaucucuacaaaaa

SEQ ID NO: 2981014 - RNA, 18 nt, Human
ucagcggggacagcuccu

SEQ ID NO: 2981015 - RNA, 23 nt, Human
ucagcggggacagcuccuucugu

SEQ ID NO: 2981016 - RNA, 21 nt, Human
ucagcggggacagcuccuucu

SEQ ID NO: 2981017 - RNA, 20 nt, Human
ucagcggggacagcuccuuc

SEQ ID NO: 2981018 - RNA, 19 nt, Human
ucagcggggacagcuccuu

SEQ ID NO: 2981019 - RNA, 12 nt, Human
ucagcuccagcu

SEQ ID NO: 2981020 - RNA, 18 nt, Human
ucagcuaaagaaguuuga

SEQ ID NO: 2981021 - RNA, 15 nt, Human
ucagcuaaagaaguu

SEQ ID NO: 2981022 - RNA, 23 nt, Human
ucagcuaaagaaguuugaacauu

SEQ ID NO: 2981023 - RNA, 14 nt, Human
acccucucaaacua

SEQ ID NO: 2981024 - RNA, 16 nt, Human
acccgucuccagcugc

SEQ ID NO: 2981025 - RNA, 14 nt, Human
acccgucuccagcu

SEQ ID NO: 2981026 - RNA, 13 nt, Human
acccugaggccca

SEQ ID NO: 2981027 - RNA, 14 nt, Human
acccugaggcccag

SEQ ID NO: 2981028 - RNA, 16 nt, Human
acccugaaagcccuga

SEQ ID NO: 2981029 - RNA, 18 nt, Human
acccugaaagcccugagc

SEQ ID NO: 2981030 - RNA, 20 nt, Human
acccuuguggucccacccca

SEQ ID NO: 2981031 - RNA, 23 nt, Human
acccuuguggucccaccccacac

SEQ ID NO: 2981032 - RNA, 17 nt, Human
acccuugccgucuaccu

SEQ ID NO: 2981033 - RNA, 15 nt, Human
accgaaaacguggcu

SEQ ID NO: 2981034 - RNA, 15 nt, Human
acccugaggcccaga

SEQ ID NO: 2981035 - RNA, 16 nt, Human
acccugaggcccagag

SEQ ID NO: 2981036 - RNA, 15 nt, Human
acccugcccuguggg

SEQ ID NO: 2981037 - RNA, 14 nt, Human
acccugcccugugg

SEQ ID NO: 2981038 - RNA, 17 nt, Human
acccugcccugugggcc

SEQ ID NO: 2981039 - RNA, 22 nt, Human
acccugcccugugggcccccaa

SEQ ID NO: 2981040 - RNA, 12 nt, Human
acccgggaaggg

SEQ ID NO: 2981041 - RNA, 13 nt, Human
acccgggaagggg

SEQ ID NO: 2981042 - RNA, 17 nt, Human
acccgggaggcagaggu

SEQ ID NO: 2981043 - RNA, 15 nt, Human
acccgggaggcagag

SEQ ID NO: 2981044 - RNA, 20 nt, Human
acccggccccugcugguuca

SEQ ID NO: 2981045 - RNA, 17 nt, Human
acccggccccugcuggu

SEQ ID NO: 2981046 - RNA, 22 nt, Human
acccggccccugcugguucagg

SEQ ID NO: 2981047 - RNA, 16 nt, Human
acccggccccugcugg

SEQ ID NO: 2981048 - RNA, 15 nt, Human
acccggccccugcug

SEQ ID NO: 2981049 - RNA, 14 nt, Human
acccggccccugcu

SEQ ID NO: 2981050 - RNA, 22 nt, Human
ucagguaacaggcagauacagg

SEQ ID NO: 2981051 - RNA, 21 nt, Human
ucagguaacaggcagauacag

SEQ ID NO: 2981052 - RNA, 23 nt, Human
ucagguaacaggcagauacagga

SEQ ID NO: 2981053 - RNA, 22 nt, Human
ucagcuuguaaauagcucaggu

SEQ ID NO: 2981054 - RNA, 21 nt, Human
ucagcuuguaaauagcucagg

SEQ ID NO: 2981055 - RNA, 14 nt, Human
ucagcuccagcuca

SEQ ID NO: 2981056 - RNA, 21 nt, Human
ucaggccaggcccucugccca

SEQ ID NO: 2981057 - RNA, 22 nt, Human
ucaggccaggcccucugcccac

SEQ ID NO: 2981058 - RNA, 20 nt, Human
ucaggccaggcccucugccc

SEQ ID NO: 2981059 - RNA, 23 nt, Human
ucaggccaggcccucugcccacu

SEQ ID NO: 2981060 - RNA, 19 nt, Human
ucagggucccugguggcag

SEQ ID NO: 2981061 - RNA, 16 nt, Human
ucaggguuggccccug

SEQ ID NO: 2981062 - RNA, 15 nt, Human
ucauauggauaaaua

SEQ ID NO: 2981063 - RNA, 23 nt, Human
ucauauuuacuucuuauacauuu

SEQ ID NO: 2981064 - RNA, 15 nt, Human
ucauauuuacuucuu

SEQ ID NO: 2981065 - RNA, 15 nt, Human
ucauauuuucaugcu

SEQ ID NO: 2981066 - RNA, 20 nt, Human
accgagggggcugcucccac

SEQ ID NO: 2981067 - RNA, 19 nt, Human
accgagggggcugcuccca

SEQ ID NO: 2981068 - RNA, 21 nt, Human
ucauaguaugguggcuggguu

SEQ ID NO: 2981069 - RNA, 18 nt, Human
ucauauaagauucauauu

SEQ ID NO: 2981070 - RNA, 14 nt, Human
ucauaaccuagccu

SEQ ID NO: 2981071 - RNA, 19 nt, Human
ucauaguaugguggcuggg

SEQ ID NO: 2981072 - RNA, 18 nt, Human
ucauaguaugguggcugg

SEQ ID NO: 2981073 - RNA, 15 nt, Human
ucauaguaugguggc

SEQ ID NO: 2981074 - RNA, 17 nt, Human
ucaguuuuugugaaaag

SEQ ID NO: 2981075 - RNA, 15 nt, Human
ucaguuuuugugaaa

SEQ ID NO: 2981076 - RNA, 16 nt, Human
ucagugccuuauggaa

SEQ ID NO: 2981077 - RNA, 11 nt, Human
ucaguggcagc

SEQ ID NO: 2981078 - RNA, 12 nt, Human
ucaguggcagcu

SEQ ID NO: 2981079 - RNA, 16 nt, Human
ucagugccaaaaacaa

SEQ ID NO: 2981080 - RNA, 12 nt, Human
ucagugccacua

SEQ ID NO: 2981081 - RNA, 17 nt, Human
accgaaaacguggcugc

SEQ ID NO: 2981082 - RNA, 19 nt, Human
accgaaaacguggcugcuu

SEQ ID NO: 2981083 - RNA, 11 nt, Human
ucagugccuua

SEQ ID NO: 2981084 - RNA, 12 nt, Human
ucagugccuuau

SEQ ID NO: 2981085 - RNA, 14 nt, Human
ucagugccuuaugg

SEQ ID NO: 2981086 - RNA, 15 nt, Human
ucagugccuuaugga

SEQ ID NO: 2981087 - RNA, 9 nt, Human
ucagugccu

SEQ ID NO: 2981088 - RNA, 10 nt, Human
ucagugccuu

SEQ ID NO: 2981089 - RNA, 20 nt, Human
accucccacaaaggagagcu

SEQ ID NO: 2981090 - RNA, 12 nt, Human
accgcagacagg

SEQ ID NO: 2981091 - RNA, 16 nt, Human
accgcagacaggacca

SEQ ID NO: 2981092 - RNA, 17 nt, Human
ucaugaaagauucaaug

SEQ ID NO: 2981093 - RNA, 16 nt, Human
ucaugaaagauucaau

SEQ ID NO: 2981094 - RNA, 15 nt, Human
ucaugaaagauucaa

SEQ ID NO: 2981095 - RNA, 17 nt, Human
ucauguuuaugagaaac

SEQ ID NO: 2981096 - RNA, 19 nt, Human
ucaaucuggauucauauuu

SEQ ID NO: 2981097 - RNA, 15 nt, Human
ucaauauuucagaua

SEQ ID NO: 2981098 - RNA, 19 nt, Human
ucaauauuucagauaauca

SEQ ID NO: 2981099 - RNA, 23 nt, Human
ucaaugaaugaaugaauggcuaa

SEQ ID NO: 2981100 - RNA, 23 nt, Human
acauugaaaucuaggaaaauuau

SEQ ID NO: 2981101 - RNA, 20 nt, Human
acauugaaaucuaggaaaau

SEQ ID NO: 2981102 - RNA, 19 nt, Human
acauugaaaucuaggaaaa

SEQ ID NO: 2981103 - RNA, 17 nt, Human
acauugaaaucuaggaa

SEQ ID NO: 2981104 - RNA, 13 nt, Human
acauugaaaucua

SEQ ID NO: 2981105 - RNA, 22 nt, Human
ucaauaucuuuuuuuuaauaaa

SEQ ID NO: 2981106 - RNA, 22 nt, Human
ucaaguccucuuuucugagagg

SEQ ID NO: 2981107 - RNA, 14 nt, Human
acauugacuauuuu

SEQ ID NO: 2981108 - RNA, 17 nt, Human
acauugacuauuuuugu

SEQ ID NO: 2981109 - RNA, 20 nt, Human
acauuuuauuuuauuaugca

SEQ ID NO: 2981110 - RNA, 19 nt, Human
acauuuuauuuuauuaugc

SEQ ID NO: 2981111 - RNA, 14 nt, Human
acauuuuauuuuau

SEQ ID NO: 2981112 - RNA, 18 nt, Human
acauuuuauuuuauuaug

SEQ ID NO: 2981113 - RNA, 19 nt, Human
acauuuuuaagugcugcau

SEQ ID NO: 2981114 - RNA, 23 nt, Human
acauuuuuaagugcugcauuuaa

SEQ ID NO: 2981115 - RNA, 22 nt, Human
acauuuuuaagugcugcauuua

SEQ ID NO: 2981116 - RNA, 21 nt, Human
acauuuuuaagugcugcauuu

SEQ ID NO: 2981117 - RNA, 16 nt, Human
acauuuuuuaaaugca

SEQ ID NO: 2981118 - RNA, 14 nt, Human
acauuuuuuaaaug

SEQ ID NO: 2981119 - RNA, 17 nt, Human
acauuuuuuaaaugcac

SEQ ID NO: 2981120 - RNA, 23 nt, Human
accaaaaaucucaauauuucaga

SEQ ID NO: 2981121 - RNA, 11 nt, Human
acauucccugc

SEQ ID NO: 2981122 - RNA, 15 nt, Human
acauguccaagaagc

SEQ ID NO: 2981123 - RNA, 23 nt, Human
acauguaauuaaguacuauguau

SEQ ID NO: 2981124 - RNA, 18 nt, Human
ucaaauugugugaaaggu

SEQ ID NO: 2981125 - RNA, 15 nt, Human
ucaaauugugugaaa

SEQ ID NO: 2981126 - RNA, 14 nt, Human
acauuccugaugcu

SEQ ID NO: 2981127 - RNA, 15 nt, Human
acauuccugaacagg

SEQ ID NO: 2981128 - RNA, 14 nt, Human
acauuccugaacag

SEQ ID NO: 2981129 - RNA, 17 nt, Human
ucaacauuucucauguu

SEQ ID NO: 2981130 - RNA, 13 nt, Human
ucaaauuucuaaa

SEQ ID NO: 2981131 - RNA, 14 nt, Human
ucaaccagcagaug

SEQ ID NO: 2981132 - RNA, 20 nt, Human
ucaacugcaucaagauguga

SEQ ID NO: 2981133 - RNA, 21 nt, Human
acaugcuguacauacuuuuug

SEQ ID NO: 2981134 - RNA, 20 nt, Human
acaugcuguacauacuuuuu

SEQ ID NO: 2981135 - RNA, 21 nt, Human
acaugcuacacacugcauguu

SEQ ID NO: 2981136 - RNA, 15 nt, Human
acaugcuacacacug

SEQ ID NO: 2981137 - RNA, 23 nt, Human
acaugagguacugagagugaaca

SEQ ID NO: 2981138 - RNA, 20 nt, Human
acaugagguacugagaguga

SEQ ID NO: 2981139 - RNA, 16 nt, Human
acaugagguacugaga

SEQ ID NO: 2981140 - RNA, 16 nt, Human
acaugaaguccaagca

SEQ ID NO: 2981141 - RNA, 20 nt, Human
acaugggacauuugcucaug

SEQ ID NO: 2981142 - RNA, 15 nt, Human
acaugggacauuugc

SEQ ID NO: 2981143 - RNA, 21 nt, Human
acaugggacauuugcucaugg

SEQ ID NO: 2981144 - RNA, 14 nt, Human
acaugggacauuug

SEQ ID NO: 2981145 - RNA, 11 nt, Human
acaugggacau

SEQ ID NO: 2981146 - RNA, 22 nt, Human
acauggcuggagcuagaauuug

SEQ ID NO: 2981147 - RNA, 22 nt, Human
acauguaauuaaguacuaugua

SEQ ID NO: 2981148 - RNA, 21 nt, Human
acauguaauuaaguacuaugu

SEQ ID NO: 2981149 - RNA, 19 nt, Human
acauguaauuaaguacuau

SEQ ID NO: 2981150 - RNA, 17 nt, Human
acauguaauuaaguacu

SEQ ID NO: 2981151 - RNA, 15 nt, Human
acauguaauuaagua

SEQ ID NO: 2981152 - RNA, 16 nt, Human
ucacacugucuucuga

SEQ ID NO: 2981153 - RNA, 20 nt, Human
ucacagaugggugcuuggag

SEQ ID NO: 2981154 - RNA, 16 nt, Human
ucacaguucucuccuu

SEQ ID NO: 2981155 - RNA, 20 nt, Human
ucacaguucucuccuucuuc

SEQ ID NO: 2981156 - RNA, 13 nt, Human
ucacagccucuga

SEQ ID NO: 2981157 - RNA, 12 nt, Human
ucaauugugaaa

SEQ ID NO: 2981158 - RNA, 16 nt, Human
ucaauucuugccaaau

SEQ ID NO: 2981159 - RNA, 17 nt, Human
ucacaaaggaugcccaa

SEQ ID NO: 2981160 - RNA, 21 nt, Human
ucacaacagauuauuaccuua

SEQ ID NO: 2981161 - RNA, 16 nt, Human
ucaauuuuaaacauau

SEQ ID NO: 2981162 - RNA, 15 nt, Human
ucaauuuuaaacaua

SEQ ID NO: 2981163 - RNA, 14 nt, Human
ucaauuuuaaacau

SEQ ID NO: 2981164 - RNA, 13 nt, Human
ucaauuuuaaaca

SEQ ID NO: 2981165 - RNA, 20 nt, Human
accaccacacccagcccacu

SEQ ID NO: 2981166 - RNA, 15 nt, Human
accaccacacccagc

SEQ ID NO: 2981167 - RNA, 16 nt, Human
accacaucuugcucug

SEQ ID NO: 2981168 - RNA, 18 nt, Human
accacaugugcacaugca

SEQ ID NO: 2981169 - RNA, 19 nt, Human
accacaucuugcucugcug

SEQ ID NO: 2981170 - RNA, 18 nt, Human
accacaucuugcucugcu

SEQ ID NO: 2981171 - RNA, 17 nt, Human
accacaucuugcucugc

SEQ ID NO: 2981172 - RNA, 13 nt, Human
ucaccucauggaa

SEQ ID NO: 2981173 - RNA, 12 nt, Human
ucaccucaugga

SEQ ID NO: 2981174 - RNA, 14 nt, Human
ucaccucauggaau

SEQ ID NO: 2981175 - RNA, 15 nt, Human
accacuacauucugu

SEQ ID NO: 2981176 - RNA, 16 nt, Human
accacuacauucuguu

SEQ ID NO: 2981177 - RNA, 17 nt, Human
accacuacauucuguua

SEQ ID NO: 2981178 - RNA, 22 nt, Human
accagcgugugacuacuccccc

SEQ ID NO: 2981179 - RNA, 17 nt, Human
ucacugagacagcccgg

SEQ ID NO: 2981180 - RNA, 21 nt, Human
ucacugagacagcccgggcuc

SEQ ID NO: 2981181 - RNA, 22 nt, Human
ucacugagacagcccgggcucu

SEQ ID NO: 2981182 - RNA, 14 nt, Human
ucacugcagccuca

SEQ ID NO: 2981183 - RNA, 16 nt, Human
ucacugagacagcccg

SEQ ID NO: 2981184 - RNA, 13 nt, Human
ucacugcagccuc

SEQ ID NO: 2981185 - RNA, 15 nt, Human
ucacugcagccucaa

SEQ ID NO: 2981186 - RNA, 19 nt, Human
ucacuguugcccaggcugg

SEQ ID NO: 2981187 - RNA, 23 nt, Human
ucacuguugcccaggcuggcgug

SEQ ID NO: 2981188 - RNA, 14 nt, Human
accagucugacugu

SEQ ID NO: 2981189 - RNA, 17 nt, Human
accaguguuguggauuu

SEQ ID NO: 2981190 - RNA, 15 nt, Human
accaguguuguggau

SEQ ID NO: 2981191 - RNA, 10 nt, Human
ucacuugagu

SEQ ID NO: 2981192 - RNA, 23 nt, Human
ucacuugaacccgggaggcagag

SEQ ID NO: 2981193 - RNA, 16 nt, Human
aaucuggauucauauu

SEQ ID NO: 2981194 - RNA, 17 nt, Human
aaucuggauucauauuu

SEQ ID NO: 2981195 - RNA, 19 nt, Human
aaucuacacuccagugaga

SEQ ID NO: 2981196 - RNA, 18 nt, Human
aaucuggauucauauuua

SEQ ID NO: 2981197 - RNA, 19 nt, Human
aaucuggauucauauuuaa

SEQ ID NO: 2981198 - RNA, 19 nt, Human
aaucuuauaauuuaaaaua

SEQ ID NO: 2981199 - RNA, 23 nt, Human
aaucgcuccaccuugcagcucuc

SEQ ID NO: 2981200 - RNA, 23 nt, Human
aaucauuaggugugacugaauuu

SEQ ID NO: 2981201 - RNA, 17 nt, Human
aaucauuaggugugacu

SEQ ID NO: 2981202 - RNA, 15 nt, Human
aaucauuagguguga

SEQ ID NO: 2981203 - RNA, 12 nt, Human
uaauaaacucau

SEQ ID NO: 2981204 - RNA, 15 nt, Human
aaucaugaauuaguu

SEQ ID NO: 2981205 - RNA, 12 nt, Human
aaucaugaauua

SEQ ID NO: 2981206 - RNA, 19 nt, Human
uaaguaaugauaacuggaa

SEQ ID NO: 2981207 - RNA, 19 nt, Human
uaaguaaaaccacagcagu

SEQ ID NO: 2981208 - RNA, 16 nt, Human
uaagcuuguauuccuu

SEQ ID NO: 2981209 - RNA, 16 nt, Human
uaaguacuauguauca

SEQ ID NO: 2981210 - RNA, 13 nt, Human
uaaguacuaugua

SEQ ID NO: 2981211 - RNA, 17 nt, Human
uaaguacuauguaucaa

SEQ ID NO: 2981212 - RNA, 20 nt, Human
uaaguauucuuauuuaauga

SEQ ID NO: 2981213 - RNA, 19 nt, Human
uaaguauucuuauuuaaug

SEQ ID NO: 2981214 - RNA, 11 nt, Human
uaaucuuuuau

SEQ ID NO: 2981215 - RNA, 13 nt, Human
uaaucuuucacag

SEQ ID NO: 2981216 - RNA, 17 nt, Human
uaaugaaugaaacauuu

SEQ ID NO: 2981217 - RNA, 16 nt, Human
uaaugaaaacaaugca

SEQ ID NO: 2981218 - RNA, 13 nt, Human
uaaugaaaacaau

SEQ ID NO: 2981219 - RNA, 16 nt, Human
uaauagacaauuuauu

SEQ ID NO: 2981220 - RNA, 14 nt, Human
uaauagacaauuua

SEQ ID NO: 2981221 - RNA, 19 nt, Human
uaauacaccacuacauucu

SEQ ID NO: 2981222 - RNA, 18 nt, Human
uaauacaccacuacauuc

SEQ ID NO: 2981223 - RNA, 14 nt, Human
uaauacaccacuac

SEQ ID NO: 2981224 - RNA, 16 nt, Human
uaauacaccacuacau

SEQ ID NO: 2981225 - RNA, 16 nt, Human
aaucuuauaauuuaaa

SEQ ID NO: 2981226 - RNA, 22 nt, Human
uaauagacaauuuauuauggca

SEQ ID NO: 2981227 - RNA, 18 nt, Human
uaauagacaauuuauuau

SEQ ID NO: 2981228 - RNA, 17 nt, Human
uaaugucaguauuucaa

SEQ ID NO: 2981229 - RNA, 18 nt, Human
uaaugucacaggcagguc

SEQ ID NO: 2981230 - RNA, 13 nt, Human
uaauguacugcau

SEQ ID NO: 2981231 - RNA, 22 nt, Human
aaugaauggcuaagcaaaaugu

SEQ ID NO: 2981232 - RNA, 13 nt, Human
aaugaaugucagu

SEQ ID NO: 2981233 - RNA, 13 nt, Human
aaugaaugucacu

SEQ ID NO: 2981234 - RNA, 22 nt, Human
aaugaaugucagugugacugau

SEQ ID NO: 2981235 - RNA, 15 nt, Human
aaugaccuuucaaua

SEQ ID NO: 2981236 - RNA, 17 nt, Human
aaugaaagacuguacaa

SEQ ID NO: 2981237 - RNA, 16 nt, Human
aaugaaagacuguaca

SEQ ID NO: 2981238 - RNA, 17 nt, Human
aaugaaaccugugucuc

SEQ ID NO: 2981239 - RNA, 17 nt, Human
aaugaaacauuuuguca

SEQ ID NO: 2981240 - RNA, 13 nt, Human
aauauuuaaucuu

SEQ ID NO: 2981241 - RNA, 18 nt, Human
aauauuuauuuuaauaau

SEQ ID NO: 2981242 - RNA, 19 nt, Human
aauauuuauuuuaauaaug

SEQ ID NO: 2981243 - RNA, 15 nt, Human
aauauuuauuuuaau

SEQ ID NO: 2981244 - RNA, 24 nt, Human
aauaugccccauucaacaucuagu

SEQ ID NO: 2981245 - RNA, 21 nt, Human
aauaugccccauucaacaucu

SEQ ID NO: 2981246 - RNA, 15 nt, Human
uaagagaaaugagcu

SEQ ID NO: 2981247 - RNA, 21 nt, Human
uaagacuuaguacuaucugug

SEQ ID NO: 2981248 - RNA, 17 nt, Human
aauaugcacacauuuuu

SEQ ID NO: 2981249 - RNA, 16 nt, Human
aauaugcacacauuuu

SEQ ID NO: 2981250 - RNA, 22 nt, Human
aauaugcacacauuuuuuaaau

SEQ ID NO: 2981251 - RNA, 22 nt, Human
aaucaggguuaguauuguccag

SEQ ID NO: 2981252 - RNA, 21 nt, Human
aaucaggguuaguauugucca

SEQ ID NO: 2981253 - RNA, 16 nt, Human
aaucaggguuaguauu

SEQ ID NO: 2981254 - RNA, 22 nt, Human
uaagcuguuacugucuucagua

SEQ ID NO: 2981255 - RNA, 18 nt, Human
uaagcacacuugacauca

SEQ ID NO: 2981256 - RNA, 21 nt, Human
uaagcaaaaugugauauguac

SEQ ID NO: 2981257 - RNA, 20 nt, Human
aauaucacuugucaauaaaa

SEQ ID NO: 2981258 - RNA, 22 nt, Human
aauaucacuugucaauaaaauc

SEQ ID NO: 2981259 - RNA, 23 nt, Human
uaacauggacaugaucuucuuua

SEQ ID NO: 2981260 - RNA, 18 nt, Human
uaacauggacaugaucuu

SEQ ID NO: 2981261 - RNA, 16 nt, Human
uaacauggaaguacua

SEQ ID NO: 2981262 - RNA, 16 nt, Human
aauagucaaauugugu

SEQ ID NO: 2981263 - RNA, 16 nt, Human
aauaguggugugauuu

SEQ ID NO: 2981264 - RNA, 22 nt, Human
aauaguggugugauuuggggau

SEQ ID NO: 2981265 - RNA, 13 nt, Human
aauaguuggcuag

SEQ ID NO: 2981266 - RNA, 21 nt, Human
aauaguucagguaacaggcag

SEQ ID NO: 2981267 - RNA, 18 nt, Human
uaagaagugaaaaucuac

SEQ ID NO: 2981268 - RNA, 13 nt, Human
uaagacagagacc

SEQ ID NO: 2981269 - RNA, 16 nt, Human
uaacuuucugaaauaa

SEQ ID NO: 2981270 - RNA, 20 nt, Human
uaacgauaaaagacagugaa

SEQ ID NO: 2981271 - RNA, 17 nt, Human
uaacuuccaauuuacau

SEQ ID NO: 2981272 - RNA, 14 nt, Human
uaacuucaccauau

SEQ ID NO: 2981273 - RNA, 21 nt, Human
uaacuucacauauugauuucc

SEQ ID NO: 2981274 - RNA, 13 nt, Human
uaacuucacauau

SEQ ID NO: 2981275 - RNA, 21 nt, Human
aauuaaugucaguauuucaac

SEQ ID NO: 2981276 - RNA, 13 nt, Human
uacauucuguuaa

SEQ ID NO: 2981277 - RNA, 18 nt, Human
uaccaccagucugacugu

SEQ ID NO: 2981278 - RNA, 16 nt, Human
uacauguguguauaug

SEQ ID NO: 2981279 - RNA, 20 nt, Human
uacauguguguauauguaga

SEQ ID NO: 2981280 - RNA, 11 nt, Human
aauuaacuuuu

SEQ ID NO: 2981281 - RNA, 21 nt, Human
aauguucucucuucuccaccu

SEQ ID NO: 2981282 - RNA, 22 nt, Human
aauguauuacaguggggaauga

SEQ ID NO: 2981283 - RNA, 17 nt, Human
aaugugaaaagaaaaau

SEQ ID NO: 2981284 - RNA, 20 nt, Human
aauguauguguaaguauucu

SEQ ID NO: 2981285 - RNA, 19 nt, Human
aauguauguguaaguauuc

SEQ ID NO: 2981286 - RNA, 19 nt, Human
aaugugaaaagaaaaauga

SEQ ID NO: 2981287 - RNA, 14 nt, Human
aaugugaaacugga

SEQ ID NO: 2981288 - RNA, 15 nt, Human
aaugugaaacuggau

SEQ ID NO: 2981289 - RNA, 20 nt, Human
uacaucccuuaccugggaaa

SEQ ID NO: 2981290 - RNA, 23 nt, Human
uacauaaugcgugcauaccacuu

SEQ ID NO: 2981291 - RNA, 21 nt, Human
uacauaaugcgugcauaccac

SEQ ID NO: 2981292 - RNA, 24 nt, Human
uacauaaugcgugcauaccacuuu

SEQ ID NO: 2981293 - RNA, 16 nt, Human
uacaggugugagucac

SEQ ID NO: 2981294 - RNA, 16 nt, Human
aaugcuguauuuuaaa

SEQ ID NO: 2981295 - RNA, 11 nt, Human
aaugcccagcc

SEQ ID NO: 2981296 - RNA, 12 nt, Human
aaugcccagccc

SEQ ID NO: 2981297 - RNA, 20 nt, Human
aauggaaaugggcagagcag

SEQ ID NO: 2981298 - RNA, 21 nt, Human
aauggaaaugggcagagcaga

SEQ ID NO: 2981299 - RNA, 23 nt, Human
aauggacguguuaugacuccaga

SEQ ID NO: 2981300 - RNA, 20 nt, Human
aauggacuaacuugucuuug

SEQ ID NO: 2981301 - RNA, 14 nt, Human
aauggaaccacucu

SEQ ID NO: 2981302 - RNA, 21 nt, Human
aauggacguguuaugacucca

SEQ ID NO: 2981303 - RNA, 22 nt, Human
aaugcacuuuguucuggcucuu

SEQ ID NO: 2981304 - RNA, 21 nt, Human
uacaaugcugugcccuaaagu

SEQ ID NO: 2981305 - RNA, 18 nt, Human
aaugaccuuucaauagga

SEQ ID NO: 2981306 - RNA, 16 nt, Human
aaugaccuuucaauag

SEQ ID NO: 2981307 - RNA, 17 nt, Human
aaugaccuuucaauagg

SEQ ID NO: 2981308 - RNA, 21 nt, Human
aaugcacuuuguucuggcucu

SEQ ID NO: 2981309 - RNA, 15 nt, Human
uacacuaaaagguga

SEQ ID NO: 2981310 - RNA, 23 nt, Human
uacacauuuuauuuuauuaugca

SEQ ID NO: 2981311 - RNA, 14 nt, Human
uacacuaagagaga

SEQ ID NO: 2981312 - RNA, 22 nt, Human
uacacauuuuauuuuauuaugc

SEQ ID NO: 2981313 - RNA, 21 nt, Human
uacacauuuuauuuuauuaug

SEQ ID NO: 2981314 - RNA, 19 nt, Human
uacacauuuuauuuuauua

SEQ ID NO: 2981315 - RNA, 22 nt, Human
uacagacaacaaaccuguuucu

SEQ ID NO: 2981316 - RNA, 19 nt, Human
uacagacaaagcguggugg

SEQ ID NO: 2981317 - RNA, 20 nt, Human
uacagaguggaauaagacag

SEQ ID NO: 2981318 - RNA, 22 nt, Human
uacagaguggaauaagacagag

SEQ ID NO: 2981319 - RNA, 18 nt, Human
uacagaggccaugggccu

SEQ ID NO: 2981320 - RNA, 16 nt, Human
aauggcagccuuggca

SEQ ID NO: 2981321 - RNA, 12 nt, Human
aauggcagccuu

SEQ ID NO: 2981322 - RNA, 17 nt, Human
aauuauugauguuuuca

SEQ ID NO: 2981323 - RNA, 23 nt, Human
aauuauucuauaauuuccauuua

SEQ ID NO: 2981324 - RNA, 20 nt, Human
aauuauucuauaauuuccau

SEQ ID NO: 2981325 - RNA, 14 nt, Human
aauuagguugaaac

SEQ ID NO: 2981326 - RNA, 18 nt, Human
aauuagguugaaacauau

SEQ ID NO: 2981327 - RNA, 17 nt, Human
aauuagguugaaacaua

SEQ ID NO: 2981328 - RNA, 15 nt, Human
aauuagguugaaaca

SEQ ID NO: 2981329 - RNA, 22 nt, Human
aauuagguugaaacauaucucu

SEQ ID NO: 2981330 - RNA, 22 nt, Human
aauuccacuuauaggaauugac

SEQ ID NO: 2981331 - RNA, 14 nt, Human
aauuccccacccug

SEQ ID NO: 2981332 - RNA, 12 nt, Human
aauuccccagau

SEQ ID NO: 2981333 - RNA, 18 nt, Human
aauuccaagugauugaaa

SEQ ID NO: 2981334 - RNA, 17 nt, Human
aauucacaaaguaauuu

SEQ ID NO: 2981335 - RNA, 13 nt, Human
aauucacaaagua

SEQ ID NO: 2981336 - RNA, 15 nt, Human
aauuagccaagugug

SEQ ID NO: 2981337 - RNA, 11 nt, Human
aauuacaggaa

SEQ ID NO: 2981338 - RNA, 13 nt, Human
uaccugucccccu

SEQ ID NO: 2981339 - RNA, 14 nt, Human
uaccugucccccug

SEQ ID NO: 2981340 - RNA, 16 nt, Human
uaccugucccccugac

SEQ ID NO: 2981341 - RNA, 17 nt, Human
uaccugucccccugaca

SEQ ID NO: 2981342 - RNA, 10 nt, Human
uaccuguccc

SEQ ID NO: 2981343 - RNA, 18 nt, Human
uaccugccaggaagccag

SEQ ID NO: 2981344 - RNA, 20 nt, Human
uaccugccaggaagccagca

SEQ ID NO: 2981345 - RNA, 23 nt, Human
uaccugccaggaagccagcaggc

SEQ ID NO: 2981346 - RNA, 20 nt, Human
uacucugccacuuuauuucu

SEQ ID NO: 2981347 - RNA, 16 nt, Human
uacuggagaaaaugga

SEQ ID NO: 2981348 - RNA, 12 nt, Human
uacucuguguca

SEQ ID NO: 2981349 - RNA, 18 nt, Human
uacuguaauuugugauac

SEQ ID NO: 2981350 - RNA, 20 nt, Human
uacuguaauuugugauacaa

SEQ ID NO: 2981351 - RNA, 19 nt, Human
uacuguaauuugugauaca

SEQ ID NO: 2981352 - RNA, 14 nt, Human
uacuguaagaaaau

SEQ ID NO: 2981353 - RNA, 13 nt, Human
uacuguaagaaaa

SEQ ID NO: 2981354 - RNA, 21 nt, Human
aauugacccacaagaaaugaa

SEQ ID NO: 2981355 - RNA, 22 nt, Human
aauugacccacaagaaaugaaa

SEQ ID NO: 2981356 - RNA, 21 nt, Human
uacuguacaugaaaacacauu

SEQ ID NO: 2981357 - RNA, 22 nt, Human
uacuguacaugaaaacacauuu

SEQ ID NO: 2981358 - RNA, 18 nt, Human
uacuguacaugaaaacac

SEQ ID NO: 2981359 - RNA, 15 nt, Human
aauuccuaaaauuau

SEQ ID NO: 2981360 - RNA, 22 nt, Human
uacgccaggggaaaaucagccu

SEQ ID NO: 2981361 - RNA, 16 nt, Human
uacguugugcauuugg

SEQ ID NO: 2981362 - RNA, 15 nt, Human
uacguugugcauuug

SEQ ID NO: 2981363 - RNA, 13 nt, Human
uacguacacauuu

SEQ ID NO: 2981364 - RNA, 12 nt, Human
uacguacacauu

SEQ ID NO: 2981365 - RNA, 18 nt, Human
uacgggaggguaaggcug

SEQ ID NO: 2981366 - RNA, 23 nt, Human
uacucuccuggaaauauuaagaa

SEQ ID NO: 2981367 - RNA, 22 nt, Human
uacucuccuggaaauauuaaga

SEQ ID NO: 2981368 - RNA, 14 nt, Human
uacuauguaucaau

SEQ ID NO: 2981369 - RNA, 13 nt, Human
uacuauguaucaa

SEQ ID NO: 2981370 - RNA, 12 nt, Human
uacuauguauca

SEQ ID NO: 2981371 - RNA, 23 nt, Human
uacuauggcccuggccuagcaua

SEQ ID NO: 2981372 - RNA, 17 nt, Human
uacuacuccuguaggaa

SEQ ID NO: 2981373 - RNA, 13 nt, Human
uacuacuccugua

SEQ ID NO: 2981374 - RNA, 23 nt, Human
uauguuuuuguucaguuuaucug

SEQ ID NO: 2981375 - RNA, 16 nt, Human
uauuaaaacucauuuu

SEQ ID NO: 2981376 - RNA, 21 nt, Human
uauguuuucaggcuagaugua

SEQ ID NO: 2981377 - RNA, 16 nt, Human
uauguguaauaaauau

SEQ ID NO: 2981378 - RNA, 13 nt, Human
uauguguaauaaa

SEQ ID NO: 2981379 - RNA, 22 nt, Human
uaugugaacaguuguguuugaa

SEQ ID NO: 2981380 - RNA, 12 nt, Human
uaugugaacagu

SEQ ID NO: 2981381 - RNA, 20 nt, Human
uauguggaguucaucuugaa

SEQ ID NO: 2981382 - RNA, 20 nt, Human
acaggcauguucucugagga

SEQ ID NO: 2981383 - RNA, 19 nt, Human
acaggcauguucucugagg

SEQ ID NO: 2981384 - RNA, 18 nt, Human
acaggcauguucucugag

SEQ ID NO: 2981385 - RNA, 15 nt, Human
acaggcauguucucu

SEQ ID NO: 2981386 - RNA, 22 nt, Human
acaggcauguucucugaggaca

SEQ ID NO: 2981387 - RNA, 23 nt, Human
acaggaccagggauuuccaugau

SEQ ID NO: 2981388 - RNA, 17 nt, Human
acaggacauauauuuuu

SEQ ID NO: 2981389 - RNA, 14 nt, Human
acaggacauauauu

SEQ ID NO: 2981390 - RNA, 13 nt, Human
acaggcaggucca

SEQ ID NO: 2981391 - RNA, 14 nt, Human
acaggaucagucug

SEQ ID NO: 2981392 - RNA, 16 nt, Human
acaggagugagcacua

SEQ ID NO: 2981393 - RNA, 16 nt, Human
acaggcagguccaggg

SEQ ID NO: 2981394 - RNA, 14 nt, Human
acaggcagguccag

SEQ ID NO: 2981395 - RNA, 14 nt, Human
acaggcauguucuc

SEQ ID NO: 2981396 - RNA, 13 nt, Human
acagcuaacaugg

SEQ ID NO: 2981397 - RNA, 22 nt, Human
acaggaaccacaagacugcaca

SEQ ID NO: 2981398 - RNA, 17 nt, Human
acaggaaaagcugcuga

SEQ ID NO: 2981399 - RNA, 16 nt, Human
acaggaaaagcugcug

SEQ ID NO: 2981400 - RNA, 15 nt, Human
acaggaaaagcugcu

SEQ ID NO: 2981401 - RNA, 13 nt, Human
acaggaaguacug

SEQ ID NO: 2981402 - RNA, 17 nt, Human
acaggaaguagaggagg

SEQ ID NO: 2981403 - RNA, 18 nt, Human
uauucaguggcuaacuug

SEQ ID NO: 2981404 - RNA, 20 nt, Human
uauucaguaauaacucuacc

SEQ ID NO: 2981405 - RNA, 14 nt, Human
uauucaggaagcuc

SEQ ID NO: 2981406 - RNA, 14 nt, Human
uauuacuguaagaa

SEQ ID NO: 2981407 - RNA, 14 nt, Human
uauuacuucugcua

SEQ ID NO: 2981408 - RNA, 13 nt, Human
uauuacuucugcu

SEQ ID NO: 2981409 - RNA, 15 nt, Human
uauucaaacagucuc

SEQ ID NO: 2981410 - RNA, 23 nt, Human
uauucaaacagucucaggaaauc

SEQ ID NO: 2981411 - RNA, 14 nt, Human
acaggcuuagugau

SEQ ID NO: 2981412 - RNA, 23 nt, Human
acaggcugggcuucaguggcagc

SEQ ID NO: 2981413 - RNA, 22 nt, Human
acaggcugggcuucaguggcag

SEQ ID NO: 2981414 - RNA, 20 nt, Human
acaggcuuagugauguaauu

SEQ ID NO: 2981415 - RNA, 19 nt, Human
acaggcuuagugauguaau

SEQ ID NO: 2981416 - RNA, 21 nt, Human
acagggaggacgcucucuggc

SEQ ID NO: 2981417 - RNA, 20 nt, Human
acagggaggacgcucucugg

SEQ ID NO: 2981418 - RNA, 18 nt, Human
acagucaccucauggaau

SEQ ID NO: 2981419 - RNA, 17 nt, Human
acagucaccucauggaa

SEQ ID NO: 2981420 - RNA, 16 nt, Human
acagucaccucaugga

SEQ ID NO: 2981421 - RNA, 12 nt, Human
acagggcacacc

SEQ ID NO: 2981422 - RNA, 13 nt, Human
acaguaauaaaug

SEQ ID NO: 2981423 - RNA, 12 nt, Human
acagauugaauu

SEQ ID NO: 2981424 - RNA, 18 nt, Human
acagauugaauuugccua

SEQ ID NO: 2981425 - RNA, 12 nt, Human
acagaugaaaag

SEQ ID NO: 2981426 - RNA, 17 nt, Human
acagcaaggagauuuac

SEQ ID NO: 2981427 - RNA, 18 nt, Human
acagagcccacgccccca

SEQ ID NO: 2981428 - RNA, 19 nt, Human
acagagcccacgcccccac

SEQ ID NO: 2981429 - RNA, 15 nt, Human
acagagcccacgccc

SEQ ID NO: 2981430 - RNA, 14 nt, Human
acagagcccacgcc

SEQ ID NO: 2981431 - RNA, 21 nt, Human
uaugaaauauuauguuaaaac

SEQ ID NO: 2981432 - RNA, 18 nt, Human
acagcccgggcucugccu

SEQ ID NO: 2981433 - RNA, 19 nt, Human
acagcccgggcucugccuc

SEQ ID NO: 2981434 - RNA, 17 nt, Human
acagcccgggcucugcc

SEQ ID NO: 2981435 - RNA, 21 nt, Human
acagcaaggagauuuacaacu

SEQ ID NO: 2981436 - RNA, 16 nt, Human
acagcaaggagauuua

SEQ ID NO: 2981437 - RNA, 16 nt, Human
acagccucuuagaugc

SEQ ID NO: 2981438 - RNA, 13 nt, Human
uauggguuuggcu

SEQ ID NO: 2981439 - RNA, 17 nt, Human
uauggcuuuugugcauu

SEQ ID NO: 2981440 - RNA, 21 nt, Human
uauggcuuuugugcauuaucu

SEQ ID NO: 2981441 - RNA, 18 nt, Human
uauggcuuuugugcauua

SEQ ID NO: 2981442 - RNA, 15 nt, Human
uaugcuuauacacuu

SEQ ID NO: 2981443 - RNA, 15 nt, Human
uaugccccauucaac

SEQ ID NO: 2981444 - RNA, 19 nt, Human
uaugccccauucaacaucu

SEQ ID NO: 2981445 - RNA, 17 nt, Human
uaugccugggcagaagg

SEQ ID NO: 2981446 - RNA, 24 nt, Human
uaugcauuugaaaauuuugauguu

SEQ ID NO: 2981447 - RNA, 23 nt, Human
uaugcauuugaaaauuuugaugu

SEQ ID NO: 2981448 - RNA, 11 nt, Human
uaugcauuuga

SEQ ID NO: 2981449 - RNA, 21 nt, Human
uaugauuaaguaaugauaacu

SEQ ID NO: 2981450 - RNA, 20 nt, Human
uaugauuaaguaaugauaac

SEQ ID NO: 2981451 - RNA, 16 nt, Human
uaugauuaaguaauga

SEQ ID NO: 2981452 - RNA, 22 nt, Human
uauccuaauaaaaaggugacca

SEQ ID NO: 2981453 - RNA, 15 nt, Human
uaucuauauuuuaca

SEQ ID NO: 2981454 - RNA, 19 nt, Human
uauccuaauaaaaagguga

SEQ ID NO: 2981455 - RNA, 15 nt, Human
uauccuaauaaaaag

SEQ ID NO: 2981456 - RNA, 18 nt, Human
uauccuaauaaaaaggug

SEQ ID NO: 2981457 - RNA, 12 nt, Human
uauccuaauaaa

SEQ ID NO: 2981458 - RNA, 18 nt, Human
uaucccuuggacauuuua

SEQ ID NO: 2981459 - RNA, 19 nt, Human
uaucccuuggacauuuuau

SEQ ID NO: 2981460 - RNA, 17 nt, Human
uaucccuuggacauuuu

SEQ ID NO: 2981461 - RNA, 19 nt, Human
uaucaaguauagaaaaucu

SEQ ID NO: 2981462 - RNA, 16 nt, Human
uaucaaguauagaaaa

SEQ ID NO: 2981463 - RNA, 15 nt, Human
uaucaaguauagaaa

SEQ ID NO: 2981464 - RNA, 23 nt, Human
uaucuauauuuuacauaaauuua

SEQ ID NO: 2981465 - RNA, 14 nt, Human
uaucucccccagcc

SEQ ID NO: 2981466 - RNA, 13 nt, Human
uaucucccccagc

SEQ ID NO: 2981467 - RNA, 18 nt, Human
acagagaaaguacuucuc

SEQ ID NO: 2981468 - RNA, 11 nt, Human
acagagaaagu

SEQ ID NO: 2981469 - RNA, 19 nt, Human
uauaauuuugugaagcaaa

SEQ ID NO: 2981470 - RNA, 20 nt, Human
acagaaaauggaagacagcu

SEQ ID NO: 2981471 - RNA, 13 nt, Human
acagaaauguaca

SEQ ID NO: 2981472 - RNA, 17 nt, Human
acagaaaauucuucucc

SEQ ID NO: 2981473 - RNA, 16 nt, Human
acagaaauguacagca

SEQ ID NO: 2981474 - RNA, 14 nt, Human
acagaaauguacag

SEQ ID NO: 2981475 - RNA, 17 nt, Human
acagaaauguacagcaa

SEQ ID NO: 2981476 - RNA, 15 nt, Human
uauauuguuugcuaa

SEQ ID NO: 2981477 - RNA, 13 nt, Human
acagacccugccc

SEQ ID NO: 2981478 - RNA, 14 nt, Human
acagacccugcccu

SEQ ID NO: 2981479 - RNA, 15 nt, Human
acagacccugcccug

SEQ ID NO: 2981480 - RNA, 17 nt, Human
uauaacuuuuuauauuc

SEQ ID NO: 2981481 - RNA, 12 nt, Human
uauaacuuuuua

SEQ ID NO: 2981482 - RNA, 20 nt, Human
uauaacuuuuuauauucuca

SEQ ID NO: 2981483 - RNA, 18 nt, Human
acacucaaaucaagaaac

SEQ ID NO: 2981484 - RNA, 20 nt, Human
acacucacauuuauucugcu

SEQ ID NO: 2981485 - RNA, 19 nt, Human
uauaacuuaaugaaaacaa

SEQ ID NO: 2981486 - RNA, 18 nt, Human
uauaacuuaaugaaaaca

SEQ ID NO: 2981487 - RNA, 14 nt, Human
uauaacuuaaugaa

SEQ ID NO: 2981488 - RNA, 16 nt, Human
uauaacuuaaugaaaa

SEQ ID NO: 2981489 - RNA, 15 nt, Human
acacucaaaagcugg

SEQ ID NO: 2981490 - RNA, 19 nt, Human
acacucaaaucaagaaacu

SEQ ID NO: 2981491 - RNA, 13 nt, Human
acacuaagagaga

SEQ ID NO: 2981492 - RNA, 20 nt, Human
acacuaaccacgcuggaccu

SEQ ID NO: 2981493 - RNA, 19 nt, Human
acacccugugauggggccc

SEQ ID NO: 2981494 - RNA, 16 nt, Human
acaccgggcacucaga

SEQ ID NO: 2981495 - RNA, 19 nt, Human
acaccucugcacaagcugc

SEQ ID NO: 2981496 - RNA, 21 nt, Human
acaccucugcacaagcugcac

SEQ ID NO: 2981497 - RNA, 20 nt, Human
acacauuuuauuuuauuaug

SEQ ID NO: 2981498 - RNA, 19 nt, Human
acacauuuuauuuuauuau

SEQ ID NO: 2981499 - RNA, 14 nt, Human
acacauuuuauuuu

SEQ ID NO: 2981500 - RNA, 13 nt, Human
acacauuuuauuu

SEQ ID NO: 2981501 - RNA, 15 nt, Human
acacaucagcuugcc

SEQ ID NO: 2981502 - RNA, 15 nt, Human
acacaugaaguccaa

SEQ ID NO: 2981503 - RNA, 21 nt, Human
acacaugagcaucaggccagg

SEQ ID NO: 2981504 - RNA, 18 nt, Human
acacaugauccugcaauu

SEQ ID NO: 2981505 - RNA, 22 nt, Human
acaccauaagcuacugccaucc

SEQ ID NO: 2981506 - RNA, 21 nt, Human
acaccauaagcuacugccauc

SEQ ID NO: 2981507 - RNA, 23 nt, Human
acaccauaagcuacugccauccu

SEQ ID NO: 2981508 - RNA, 20 nt, Human
uaguuccaccaucaagccac

SEQ ID NO: 2981509 - RNA, 18 nt, Human
uaguucagguaacaggca

SEQ ID NO: 2981510 - RNA, 22 nt, Human
uagugaaacucguuaauuugua

SEQ ID NO: 2981511 - RNA, 17 nt, Human
uaguguuggagaagaac

SEQ ID NO: 2981512 - RNA, 21 nt, Human
uaguguuuucaauuuuaaaca

SEQ ID NO: 2981513 - RNA, 23 nt, Human
uaguguuuucaauuuuaaacaua

SEQ ID NO: 2981514 - RNA, 22 nt, Human
uaguguuuucaauuuuaaacau

SEQ ID NO: 2981515 - RNA, 23 nt, Human
uaguguuggagaagaacugaaau

SEQ ID NO: 2981516 - RNA, 16 nt, Human
acacaguauuacuucu

SEQ ID NO: 2981517 - RNA, 18 nt, Human
acacaguauuacuucugc

SEQ ID NO: 2981518 - RNA, 17 nt, Human
acacacuguacacauaa

SEQ ID NO: 2981519 - RNA, 20 nt, Human
acacacuguacacauaagcc

SEQ ID NO: 2981520 - RNA, 19 nt, Human
acacaguauuacuucugcu

SEQ ID NO: 2981521 - RNA, 13 nt, Human
acacagugagucg

SEQ ID NO: 2981522 - RNA, 19 nt, Human
acacauaagccaaaacuga

SEQ ID NO: 2981523 - RNA, 15 nt, Human
acacacucaaaucaa

SEQ ID NO: 2981524 - RNA, 21 nt, Human
acacacugcauguuugugauu

SEQ ID NO: 2981525 - RNA, 21 nt, Human
acacacgcgugcacacaccag

SEQ ID NO: 2981526 - RNA, 20 nt, Human
acacaccagagcccaccuug

SEQ ID NO: 2981527 - RNA, 15 nt, Human
acacaccagagccca

SEQ ID NO: 2981528 - RNA, 14 nt, Human
acacaccagagccc

SEQ ID NO: 2981529 - RNA, 14 nt, Human
acacacagcucugu

SEQ ID NO: 2981530 - RNA, 13 nt, Human
acacacagcucug

SEQ ID NO: 2981531 - RNA, 17 nt, Human
acacacagcucuguccu

SEQ ID NO: 2981532 - RNA, 22 nt, Human
acacacacgcgugcacacacca

SEQ ID NO: 2981533 - RNA, 24 nt, Human
acaaugcugugcccuaaaguguau

SEQ ID NO: 2981534 - RNA, 23 nt, Human
acaaugcugugcccuaaagugua

SEQ ID NO: 2981535 - RNA, 22 nt, Human
acaaugcugugcccuaaagugu

SEQ ID NO: 2981536 - RNA, 21 nt, Human
acaaugcugugcccuaaagug

SEQ ID NO: 2981537 - RNA, 22 nt, Human
acaaugcuguauuuuaaaagaa

SEQ ID NO: 2981538 - RNA, 18 nt, Human
acaaugcuguauuuuaaa

SEQ ID NO: 2981539 - RNA, 14 nt, Human
acacacacauacac

SEQ ID NO: 2981540 - RNA, 19 nt, Human
acaaugugaaaagaaaaau

SEQ ID NO: 2981541 - RNA, 17 nt, Human
acaaugugaaaagaaaa

SEQ ID NO: 2981542 - RNA, 12 nt, Human
uaggagcaugag

SEQ ID NO: 2981543 - RNA, 20 nt, Human
uaggagaagucuucuauuua

SEQ ID NO: 2981544 - RNA, 18 nt, Human
uaggaaauauuuauuuua

SEQ ID NO: 2981545 - RNA, 19 nt, Human
uaggaaauauuuauuuuaa

SEQ ID NO: 2981546 - RNA, 14 nt, Human
uagggagagaagau

SEQ ID NO: 2981547 - RNA, 15 nt, Human
uagggagagaagaua

SEQ ID NO: 2981548 - RNA, 21 nt, Human
uagggaaggauacaaaagcau

SEQ ID NO: 2981549 - RNA, 16 nt, Human
uaggcauuugcugaau

SEQ ID NO: 2981550 - RNA, 20 nt, Human
uaggcauuugcugaauacag

SEQ ID NO: 2981551 - RNA, 14 nt, Human
uaggcauuguggga

SEQ ID NO: 2981552 - RNA, 16 nt, Human
uaggcacuuuaaaaca

SEQ ID NO: 2981553 - RNA, 17 nt, Human
uaggcacuuuaaaacac

SEQ ID NO: 2981554 - RNA, 23 nt, Human
acaauacaucccuuaccugggaa

SEQ ID NO: 2981555 - RNA, 14 nt, Human
acaagacugcacau

SEQ ID NO: 2981556 - RNA, 13 nt, Human
acaagacugcaca

SEQ ID NO: 2981557 - RNA, 18 nt, Human
acaagaccacguuucuaa

SEQ ID NO: 2981558 - RNA, 17 nt, Human
uagcuaggugacauaua

SEQ ID NO: 2981559 - RNA, 15 nt, Human
uagcuaggugacaua

SEQ ID NO: 2981560 - RNA, 18 nt, Human
acaaugacuuacuguaca

SEQ ID NO: 2981561 - RNA, 17 nt, Human
acaaugacuuacuguac

SEQ ID NO: 2981562 - RNA, 12 nt, Human
acaaugacuuac

SEQ ID NO: 2981563 - RNA, 18 nt, Human
uagcauguccuaaugcuu

SEQ ID NO: 2981564 - RNA, 19 nt, Human
uagcauuuguguugaagag

SEQ ID NO: 2981565 - RNA, 23 nt, Human
uagcauuuuaaacaaaauagaaa

SEQ ID NO: 2981566 - RNA, 18 nt, Human
uagcauuuuaaacaaaau

SEQ ID NO: 2981567 - RNA, 16 nt, Human
uagcauuuuaaacaaa

SEQ ID NO: 2981568 - RNA, 15 nt, Human
uagcauuuuaaacaa

SEQ ID NO: 2981569 - RNA, 14 nt, Human
uagcauuuuaaaca

SEQ ID NO: 2981570 - RNA, 16 nt, Human
uagcauuuugcuaaau

SEQ ID NO: 2981571 - RNA, 21 nt, Human
uagccaaggccaaaggaagca

SEQ ID NO: 2981572 - RNA, 22 nt, Human
uagcauuuugcuaaaugugaau

SEQ ID NO: 2981573 - RNA, 14 nt, Human
uagccaaggccaaa

SEQ ID NO: 2981574 - RNA, 15 nt, Human
uagaugcaguucuga

SEQ ID NO: 2981575 - RNA, 19 nt, Human
uagcauggcugccaauggg

SEQ ID NO: 2981576 - RNA, 19 nt, Human
acaaauuuacagagacaga

SEQ ID NO: 2981577 - RNA, 18 nt, Human
acaaauuuacagagacag

SEQ ID NO: 2981578 - RNA, 11 nt, Human
uagccagagga

SEQ ID NO: 2981579 - RNA, 15 nt, Human
uagccagaggagaga

SEQ ID NO: 2981580 - RNA, 23 nt, Human
acaacacucauugaccugaggcc

SEQ ID NO: 2981581 - RNA, 21 nt, Human
acaacacucauugaccugagg

SEQ ID NO: 2981582 - RNA, 19 nt, Human
acaagacccuugugguccc

SEQ ID NO: 2981583 - RNA, 20 nt, Human
acaagacccaaaaggcagaa

SEQ ID NO: 2981584 - RNA, 19 nt, Human
acaagaccacguuucuaaa

SEQ ID NO: 2981585 - RNA, 19 nt, Human
uagaugacauugacuauuu

SEQ ID NO: 2981586 - RNA, 18 nt, Human
uagaugacauugacuauu

SEQ ID NO: 2981587 - RNA, 19 nt, Human
uagauauaugcucugcaug

SEQ ID NO: 2981588 - RNA, 22 nt, Human
uagaggagaaacuggaacucuc

SEQ ID NO: 2981589 - RNA, 15 nt, Human
uagauauaugcucug

SEQ ID NO: 2981590 - RNA, 19 nt, Human
uagaggagaaacuggaacu

SEQ ID NO: 2981591 - RNA, 24 nt, Human
acaaaggauacuuauuuaaauaga

SEQ ID NO: 2981592 - RNA, 22 nt, Human
acaaaggaugcccaaagaugca

SEQ ID NO: 2981593 - RNA, 17 nt, Human
acaaaggggcuuaauua

SEQ ID NO: 2981594 - RNA, 22 nt, Human
acaaaagcaugugagacugguu

SEQ ID NO: 2981595 - RNA, 11 nt, Human
acaaaagcaug

SEQ ID NO: 2981596 - RNA, 14 nt, Human
aacuucagaguucu

SEQ ID NO: 2981597 - RNA, 13 nt, Human
aacuucagacaua

SEQ ID NO: 2981598 - RNA, 22 nt, Human
aacuuccuuggacucauuuuaa

SEQ ID NO: 2981599 - RNA, 18 nt, Human
aacuucagcgguuuauau

SEQ ID NO: 2981600 - RNA, 23 nt, Human
aacuuccuuggacucauuuuaaa

SEQ ID NO: 2981601 - RNA, 22 nt, Human
aacuucaccauauuaccacaga

SEQ ID NO: 2981602 - RNA, 22 nt, Human
aacuucacauauugauuuccgu

SEQ ID NO: 2981603 - RNA, 14 nt, Human
aacuucacauauug

SEQ ID NO: 2981604 - RNA, 18 nt, Human
gugcacgcacacugucug

SEQ ID NO: 2981605 - RNA, 19 nt, Human
gugcauuugaggucuguuc

SEQ ID NO: 2981606 - RNA, 17 nt, Human
gugcauuugaggucugu

SEQ ID NO: 2981607 - RNA, 21 nt, Human
gugcauuuggugguuucagaa

SEQ ID NO: 2981608 - RNA, 23 nt, Human
gugccaaaaacaacaacaaaaug

SEQ ID NO: 2981609 - RNA, 18 nt, Human
gugcaaugaccuuucaau

SEQ ID NO: 2981610 - RNA, 13 nt, Human
gugcacaagcucc

SEQ ID NO: 2981611 - RNA, 16 nt, Human
gugcacaagcuccaag

SEQ ID NO: 2981612 - RNA, 21 nt, Human
gugcacaagcuccaagcuccc

SEQ ID NO: 2981613 - RNA, 21 nt, Human
gugcacaugcacgugugugca

SEQ ID NO: 2981614 - RNA, 17 nt, Human
gugcacaucuguuuugu

SEQ ID NO: 2981615 - RNA, 16 nt, Human
gugauuaccagggacu

SEQ ID NO: 2981616 - RNA, 11 nt, Human
gugauuaccag

SEQ ID NO: 2981617 - RNA, 17 nt, Human
gugauuaccagggacug

SEQ ID NO: 2981618 - RNA, 23 nt, Human
gugauccucccaccucagccucc

SEQ ID NO: 2981619 - RNA, 19 nt, Human
gugauguauguguaauaaa

SEQ ID NO: 2981620 - RNA, 15 nt, Human
gugcuaucuccccca

SEQ ID NO: 2981621 - RNA, 18 nt, Human
gugcuaucucccccagcc

SEQ ID NO: 2981622 - RNA, 18 nt, Human
gugcuaguaauuggaaag

SEQ ID NO: 2981623 - RNA, 21 nt, Human
gugcuacaaaaacacagcaag

SEQ ID NO: 2981624 - RNA, 22 nt, Human
gugcuacaaaaacacagcaagg

SEQ ID NO: 2981625 - RNA, 12 nt, Human
gugcugcccugc

SEQ ID NO: 2981626 - RNA, 13 nt, Human
gugcugcccugcc

SEQ ID NO: 2981627 - RNA, 14 nt, Human
gugcugcccugccc

SEQ ID NO: 2981628 - RNA, 15 nt, Human
gugcugcccugccca

SEQ ID NO: 2981629 - RNA, 14 nt, Human
gugcucuggacagg

SEQ ID NO: 2981630 - RNA, 13 nt, Human
gugcucuggacag

SEQ ID NO: 2981631 - RNA, 16 nt, Human
gugcucugaucaucca

SEQ ID NO: 2981632 - RNA, 16 nt, Human
aagaaagaaaaucagg

SEQ ID NO: 2981633 - RNA, 13 nt, Human
aagaaagaaaauc

SEQ ID NO: 2981634 - RNA, 14 nt, Human
aagaaagaaaauca

SEQ ID NO: 2981635 - RNA, 22 nt, Human
aagaaaauaguggugugauuug

SEQ ID NO: 2981636 - RNA, 21 nt, Human
aagaaaauaguggugugauuu

SEQ ID NO: 2981637 - RNA, 16 nt, Human
aagaaaauaccaagga

SEQ ID NO: 2981638 - RNA, 15 nt, Human
aagaaaauaguggug

SEQ ID NO: 2981639 - RNA, 11 nt, Human
aagaaacauuu

SEQ ID NO: 2981640 - RNA, 23 nt, Human
aacuuuaccuuuuuuauacauaa

SEQ ID NO: 2981641 - RNA, 22 nt, Human
aacuuuaccuuuuuuauacaua

SEQ ID NO: 2981642 - RNA, 21 nt, Human
aacuuuaccuuuuuuauacau

SEQ ID NO: 2981643 - RNA, 13 nt, Human
aagaaaaagaaaa

SEQ ID NO: 2981644 - RNA, 18 nt, Human
aagaaaaagaaaaagaaa

SEQ ID NO: 2981645 - RNA, 19 nt, Human
aagaaaaaauauuuucccu

SEQ ID NO: 2981646 - RNA, 17 nt, Human
aagaaaaaugagccugg

SEQ ID NO: 2981647 - RNA, 18 nt, Human
aagaaaaaugagccuggc

SEQ ID NO: 2981648 - RNA, 15 nt, Human
aacuaaaauguucua

SEQ ID NO: 2981649 - RNA, 17 nt, Human
aacuagggaagauaaua

SEQ ID NO: 2981650 - RNA, 12 nt, Human
aacguggcugcu

SEQ ID NO: 2981651 - RNA, 13 nt, Human
aacguggcugcuu

SEQ ID NO: 2981652 - RNA, 21 nt, Human
aacucauuuuuguuuucauua

SEQ ID NO: 2981653 - RNA, 24 nt, Human
aacucauuuuuguuuucauuaucu

SEQ ID NO: 2981654 - RNA, 15 nt, Human
aacgucuuaaauauu

SEQ ID NO: 2981655 - RNA, 14 nt, Human
aacgucuuaaauau

SEQ ID NO: 2981656 - RNA, 12 nt, Human
aacgucuuaaau

SEQ ID NO: 2981657 - RNA, 13 nt, Human
aacgucugugcca

SEQ ID NO: 2981658 - RNA, 14 nt, Human
gucuuaauuaaaag

SEQ ID NO: 2981659 - RNA, 19 nt, Human
gucuuauauauuguagaua

SEQ ID NO: 2981660 - RNA, 16 nt, Human
gucuggaaugcagugg

SEQ ID NO: 2981661 - RNA, 15 nt, Human
gucuggaaugcagug

SEQ ID NO: 2981662 - RNA, 13 nt, Human
gucugcuuagaaa

SEQ ID NO: 2981663 - RNA, 14 nt, Human
gucugacaggcaau

SEQ ID NO: 2981664 - RNA, 13 nt, Human
gucugacaggcaa

SEQ ID NO: 2981665 - RNA, 12 nt, Human
gucugacaggca

SEQ ID NO: 2981666 - RNA, 18 nt, Human
gucugacaggcaaugcug

SEQ ID NO: 2981667 - RNA, 15 nt, Human
gucugacaggcaaug

SEQ ID NO: 2981668 - RNA, 20 nt, Human
gucugacaggcaaugcuggc

SEQ ID NO: 2981669 - RNA, 14 nt, Human
gucugcuuagaaau

SEQ ID NO: 2981670 - RNA, 23 nt, Human
gucucuuuaaugucacaggcagg

SEQ ID NO: 2981671 - RNA, 17 nt, Human
gucucaaaaaaagaaaa

SEQ ID NO: 2981672 - RNA, 14 nt, Human
gucucaaaaaaaca

SEQ ID NO: 2981673 - RNA, 14 nt, Human
gugaggcucugccc

SEQ ID NO: 2981674 - RNA, 15 nt, Human
gugaggcucugcccu

SEQ ID NO: 2981675 - RNA, 16 nt, Human
gugaggcucugcccuu

SEQ ID NO: 2981676 - RNA, 17 nt, Human
gugaggcucugcccuug

SEQ ID NO: 2981677 - RNA, 12 nt, Human
gugaggcucugc

SEQ ID NO: 2981678 - RNA, 13 nt, Human
gugaggcucugcc

SEQ ID NO: 2981679 - RNA, 18 nt, Human
gugagacucugucucaaa

SEQ ID NO: 2981680 - RNA, 19 nt, Human
aacucuccucugcugcugg

SEQ ID NO: 2981681 - RNA, 21 nt, Human
aacucuccucugcugcuggcu

SEQ ID NO: 2981682 - RNA, 21 nt, Human
gugaguacuacaguccuccca

SEQ ID NO: 2981683 - RNA, 17 nt, Human
aacucuccucugcugcu

SEQ ID NO: 2981684 - RNA, 19 nt, Human
gugagucaccaagcccagu

SEQ ID NO: 2981685 - RNA, 23 nt, Human
gugaguacuacaguccucccauc

SEQ ID NO: 2981686 - RNA, 17 nt, Human
gugagucaccaagccca

SEQ ID NO: 2981687 - RNA, 18 nt, Human
gugaggcucugcccuugg

SEQ ID NO: 2981688 - RNA, 22 nt, Human
aacucuccucugcugcuggcug

SEQ ID NO: 2981689 - RNA, 23 nt, Human
aacucuccucugcugcuggcugg

SEQ ID NO: 2981690 - RNA, 20 nt, Human
aacugauuuuuuuuuccuuc

SEQ ID NO: 2981691 - RNA, 21 nt, Human
aacugauuuuuuuuuccuuca

SEQ ID NO: 2981692 - RNA, 22 nt, Human
aacugauuuuuuuuuccuucag

SEQ ID NO: 2981693 - RNA, 23 nt, Human
aacugauuuuuuuuuccuucagu

SEQ ID NO: 2981694 - RNA, 16 nt, Human
aacugcauuggcuuug

SEQ ID NO: 2981695 - RNA, 19 nt, Human
gugacaugucuuuucuugc

SEQ ID NO: 2981696 - RNA, 16 nt, Human
gugagacucugucuca

SEQ ID NO: 2981697 - RNA, 14 nt, Human
gugagacucugucu

SEQ ID NO: 2981698 - RNA, 22 nt, Human
gugagacccugucucaaaaaaa

SEQ ID NO: 2981699 - RNA, 23 nt, Human
gugaauaauacaguaucucaggg

SEQ ID NO: 2981700 - RNA, 22 nt, Human
gugacagagugagacucugucu

SEQ ID NO: 2981701 - RNA, 20 nt, Human
gugacagagugagacucugu

SEQ ID NO: 2981702 - RNA, 23 nt, Human
gugacagaggcagccccauucug

SEQ ID NO: 2981703 - RNA, 18 nt, Human
gugaauaaccugaggauu

SEQ ID NO: 2981704 - RNA, 20 nt, Human
aacacaaagcuuuugcauau

SEQ ID NO: 2981705 - RNA, 19 nt, Human
aacacaaagcuuuugcaua

SEQ ID NO: 2981706 - RNA, 18 nt, Human
aacacaaagcuuuugcau

SEQ ID NO: 2981707 - RNA, 12 nt, Human
aacacaaagcuu

SEQ ID NO: 2981708 - RNA, 17 nt, Human
aacacaacuauauuguu

SEQ ID NO: 2981709 - RNA, 18 nt, Human
aacacagcaagggugaug

SEQ ID NO: 2981710 - RNA, 20 nt, Human
aacacagcaagggugauggg

SEQ ID NO: 2981711 - RNA, 19 nt, Human
aaauuucuaaaucuccaaa

SEQ ID NO: 2981712 - RNA, 19 nt, Human
aacacaaacgggcucagca

SEQ ID NO: 2981713 - RNA, 16 nt, Human
aacacugguuuuaaau

SEQ ID NO: 2981714 - RNA, 16 nt, Human
aacacuguucucugcc

SEQ ID NO: 2981715 - RNA, 17 nt, Human
aacacuguucucugccc

SEQ ID NO: 2981716 - RNA, 18 nt, Human
aacacuguucucugcccu

SEQ ID NO: 2981717 - RNA, 19 nt, Human
aacacuguucucugcccuc

SEQ ID NO: 2981718 - RNA, 17 nt, Human
gucauuugagcagggcu

SEQ ID NO: 2981719 - RNA, 21 nt, Human
aacacucacauuuauucugcu

SEQ ID NO: 2981720 - RNA, 22 nt, Human
guccaugaagauguagaggaga

SEQ ID NO: 2981721 - RNA, 19 nt, Human
gucauuugagcagggcuca

SEQ ID NO: 2981722 - RNA, 18 nt, Human
guccccaccgcagacagg

SEQ ID NO: 2981723 - RNA, 22 nt, Human
guccccaccgcagacaggacca

SEQ ID NO: 2981724 - RNA, 15 nt, Human
gucccaccccacaca

SEQ ID NO: 2981725 - RNA, 14 nt, Human
gucccaagugccaa

SEQ ID NO: 2981726 - RNA, 13 nt, Human
gucccaagugcca

SEQ ID NO: 2981727 - RNA, 19 nt, Human
gucccugguggcagcucac

SEQ ID NO: 2981728 - RNA, 18 nt, Human
gucccugguggcagcuca

SEQ ID NO: 2981729 - RNA, 18 nt, Human
gucccuuacgugaguccu

SEQ ID NO: 2981730 - RNA, 19 nt, Human
gucccuuacgugaguccug

SEQ ID NO: 2981731 - RNA, 22 nt, Human
guccccuguuuguuucugaaag

SEQ ID NO: 2981732 - RNA, 18 nt, Human
guccccuguuuguuucug

SEQ ID NO: 2981733 - RNA, 15 nt, Human
aacauagcugugauu

SEQ ID NO: 2981734 - RNA, 12 nt, Human
aacauauauaac

SEQ ID NO: 2981735 - RNA, 14 nt, Human
aacauaaaauacaa

SEQ ID NO: 2981736 - RNA, 14 nt, Human
aacagucucaggaa

SEQ ID NO: 2981737 - RNA, 18 nt, Human
aacaguccauugaaaggg

SEQ ID NO: 2981738 - RNA, 13 nt, Human
aacagucucagga

SEQ ID NO: 2981739 - RNA, 14 nt, Human
gucuaccugagggg

SEQ ID NO: 2981740 - RNA, 13 nt, Human
gucuaccugaggg

SEQ ID NO: 2981741 - RNA, 15 nt, Human
gucuaccugaggggc

SEQ ID NO: 2981742 - RNA, 16 nt, Human
gucuaccugaggggcc

SEQ ID NO: 2981743 - RNA, 22 nt, Human
gucuaugggacucaaugcacug

SEQ ID NO: 2981744 - RNA, 15 nt, Human
gucuaugggacucaa

SEQ ID NO: 2981745 - RNA, 20 nt, Human
gucuauuuacggaacucaaa

SEQ ID NO: 2981746 - RNA, 16 nt, Human
gucgaggacagggagg

SEQ ID NO: 2981747 - RNA, 12 nt, Human
gucgaggcagga

SEQ ID NO: 2981748 - RNA, 19 nt, Human
guccugcugcaguugccag

SEQ ID NO: 2981749 - RNA, 17 nt, Human
guccugcugcaguugcc

SEQ ID NO: 2981750 - RNA, 16 nt, Human
guccuggcaugggaau

SEQ ID NO: 2981751 - RNA, 14 nt, Human
guccucuuuucuga

SEQ ID NO: 2981752 - RNA, 17 nt, Human
gucacugagacagcccg

SEQ ID NO: 2981753 - RNA, 18 nt, Human
gucacugagacagcccgg

SEQ ID NO: 2981754 - RNA, 21 nt, Human
gucacugagacagcccgggcu

SEQ ID NO: 2981755 - RNA, 23 nt, Human
gucacugagacagcccgggcucu

SEQ ID NO: 2981756 - RNA, 10 nt, Human
gucacugcuu

SEQ ID NO: 2981757 - RNA, 22 nt, Human
gucacucuggcagcucagagag

SEQ ID NO: 2981758 - RNA, 14 nt, Human
gucacugagacagc

SEQ ID NO: 2981759 - RNA, 15 nt, Human
gucacugagacagcc

SEQ ID NO: 2981760 - RNA, 16 nt, Human
gucacugagacagccc

SEQ ID NO: 2981761 - RNA, 23 nt, Human
gucacucuggcagcucagagagg

SEQ ID NO: 2981762 - RNA, 15 nt, Human
gucaccaagcccagu

SEQ ID NO: 2981763 - RNA, 12 nt, Human
gucaccaagccc

SEQ ID NO: 2981764 - RNA, 15 nt, Human
gucacaggaaguaga

SEQ ID NO: 2981765 - RNA, 13 nt, Human
gucacaggaagua

SEQ ID NO: 2981766 - RNA, 21 nt, Human
gucaauuuuguuauguauauu

SEQ ID NO: 2981767 - RNA, 22 nt, Human
gucaauuacaggaaguacugga

SEQ ID NO: 2981768 - RNA, 21 nt, Human
gucaauuaccagaaagauaac

SEQ ID NO: 2981769 - RNA, 20 nt, Human
gucaauuaccagaaagauaa

SEQ ID NO: 2981770 - RNA, 20 nt, Human
gucacaggaaguagaggagg

SEQ ID NO: 2981771 - RNA, 12 nt, Human
gucacaggcagg

SEQ ID NO: 2981772 - RNA, 22 nt, Human
gucaccaaaucagcugcuacua

SEQ ID NO: 2981773 - RNA, 18 nt, Human
gucacauuccugaacagg

SEQ ID NO: 2981774 - RNA, 15 nt, Human
aaauuucuaaaucuc

SEQ ID NO: 2981775 - RNA, 13 nt, Human
aaauuucuaaauc

SEQ ID NO: 2981776 - RNA, 12 nt, Human
aaauuucuaaau

SEQ ID NO: 2981777 - RNA, 19 nt, Human
gucagucugcuuagaaaua

SEQ ID NO: 2981778 - RNA, 22 nt, Human
gucagguggggcagcuugaggg

SEQ ID NO: 2981779 - RNA, 18 nt, Human
gucagguggggcagcuug

SEQ ID NO: 2981780 - RNA, 17 nt, Human
gucagguggggcagcuu

SEQ ID NO: 2981781 - RNA, 16 nt, Human
gucagguggggcagcu

SEQ ID NO: 2981782 - RNA, 21 nt, Human
gucacugcuuaacuucacaua

SEQ ID NO: 2981783 - RNA, 15 nt, Human
gucacugcuuaacuu

SEQ ID NO: 2981784 - RNA, 13 nt, Human
gucaggaaagaga

SEQ ID NO: 2981785 - RNA, 14 nt, Human
gucaggaaagagaa

SEQ ID NO: 2981786 - RNA, 21 nt, Human
gucagaaguuucugccgcagc

SEQ ID NO: 2981787 - RNA, 21 nt, Human
aaaugucucuuuaaugucaca

SEQ ID NO: 2981788 - RNA, 24 nt, Human
aaaugucuaguuguaacaccauga

SEQ ID NO: 2981789 - RNA, 18 nt, Human
guauucucuccuguaccu

SEQ ID NO: 2981790 - RNA, 18 nt, Human
aaaugugccuucauuuuu

SEQ ID NO: 2981791 - RNA, 15 nt, Human
aaaugugcuuuuaaa

SEQ ID NO: 2981792 - RNA, 21 nt, Human
aaauuauggaaacagaugaaa

SEQ ID NO: 2981793 - RNA, 14 nt, Human
aaauuauggaaaca

SEQ ID NO: 2981794 - RNA, 17 nt, Human
aaauuguauuacaaauc

SEQ ID NO: 2981795 - RNA, 23 nt, Human
aaauuguuugacggcaagguuua

SEQ ID NO: 2981796 - RNA, 17 nt, Human
aaauuccaagugauuga

SEQ ID NO: 2981797 - RNA, 19 nt, Human
aagcuuuugcauauugcau

SEQ ID NO: 2981798 - RNA, 15 nt, Human
aagcuuuugcauauu

SEQ ID NO: 2981799 - RNA, 22 nt, Human
aagcuuuugcauauugcauacu

SEQ ID NO: 2981800 - RNA, 13 nt, Human
aagcuuuugcaua

SEQ ID NO: 2981801 - RNA, 18 nt, Human
guucccuugaugaagaag

SEQ ID NO: 2981802 - RNA, 21 nt, Human
guucccuuuuuuggcugcuga

SEQ ID NO: 2981803 - RNA, 22 nt, Human
guucccuuuuuuggcugcugaa

SEQ ID NO: 2981804 - RNA, 17 nt, Human
aagcucugcuccucucc

SEQ ID NO: 2981805 - RNA, 13 nt, Human
guucuuaauucuu

SEQ ID NO: 2981806 - RNA, 17 nt, Human
guucucugcccuccaag

SEQ ID NO: 2981807 - RNA, 18 nt, Human
guucucugcccuccaaga

SEQ ID NO: 2981808 - RNA, 17 nt, Human
guucuuaauucuuagcu

SEQ ID NO: 2981809 - RNA, 14 nt, Human
guucuuaauucuua

SEQ ID NO: 2981810 - RNA, 19 nt, Human
guucuagcauggcugccaa

SEQ ID NO: 2981811 - RNA, 17 nt, Human
guucuaguguuuucaau

SEQ ID NO: 2981812 - RNA, 13 nt, Human
guucucuccuucu

SEQ ID NO: 2981813 - RNA, 14 nt, Human
guucuaguguuuuc

SEQ ID NO: 2981814 - RNA, 13 nt, Human
guucucugcccuc

SEQ ID NO: 2981815 - RNA, 15 nt, Human
guucucugcccucca

SEQ ID NO: 2981816 - RNA, 15 nt, Human
guucucucuucucca

SEQ ID NO: 2981817 - RNA, 12 nt, Human
guucucugagga

SEQ ID NO: 2981818 - RNA, 14 nt, Human
guucuugguuugua

SEQ ID NO: 2981819 - RNA, 18 nt, Human
guucuugguuuguaaauu

SEQ ID NO: 2981820 - RNA, 15 nt, Human
guucuugguuuguaa

SEQ ID NO: 2981821 - RNA, 14 nt, Human
guugauagcacaga

SEQ ID NO: 2981822 - RNA, 19 nt, Human
guugauagcacagacccug

SEQ ID NO: 2981823 - RNA, 19 nt, Human
aaggaaaaaauaacaauga

SEQ ID NO: 2981824 - RNA, 15 nt, Human
guuauuuuacuuuuu

SEQ ID NO: 2981825 - RNA, 16 nt, Human
guuauuuuacuuuuug

SEQ ID NO: 2981826 - RNA, 21 nt, Human
guuauuuuauugauuauuacu

SEQ ID NO: 2981827 - RNA, 17 nt, Human
guuauuauauuuacaaa

SEQ ID NO: 2981828 - RNA, 19 nt, Human
guuauuauauuuacaaaug

SEQ ID NO: 2981829 - RNA, 19 nt, Human
guuagagguucccuuugac

SEQ ID NO: 2981830 - RNA, 18 nt, Human
guuaaucauuagguguga

SEQ ID NO: 2981831 - RNA, 21 nt, Human
aagccuuggggcugaugcagu

SEQ ID NO: 2981832 - RNA, 15 nt, Human
aagccuccuccagcc

SEQ ID NO: 2981833 - RNA, 16 nt, Human
aagccucccacgacug

SEQ ID NO: 2981834 - RNA, 18 nt, Human
guucagguaacaggcaga

SEQ ID NO: 2981835 - RNA, 17 nt, Human
guucagguaacaggcag

SEQ ID NO: 2981836 - RNA, 21 nt, Human
aagccgugauuuucauugcug

SEQ ID NO: 2981837 - RNA, 22 nt, Human
guucaggguuggccccugcccg

SEQ ID NO: 2981838 - RNA, 21 nt, Human
guucaggguuggccccugccc

SEQ ID NO: 2981839 - RNA, 20 nt, Human
guucaggguuggccccugcc

SEQ ID NO: 2981840 - RNA, 23 nt, Human
guucagcuuguaaauagcucagg

SEQ ID NO: 2981841 - RNA, 17 nt, Human
aagagggugggugggua

SEQ ID NO: 2981842 - RNA, 22 nt, Human
aagagggucugaggaauccaga

SEQ ID NO: 2981843 - RNA, 15 nt, Human
aagauagcagggcau

SEQ ID NO: 2981844 - RNA, 14 nt, Human
aagauagcagggca

SEQ ID NO: 2981845 - RNA, 21 nt, Human
aagagggagggagggcuccag

SEQ ID NO: 2981846 - RNA, 22 nt, Human
aagagggagggagggcuccaga

SEQ ID NO: 2981847 - RNA, 11 nt, Human
aagaggcaggg

SEQ ID NO: 2981848 - RNA, 14 nt, Human
aagaggcagggucu

SEQ ID NO: 2981849 - RNA, 23 nt, Human
gugcugcccugcccaccuggccu

SEQ ID NO: 2981850 - RNA, 15 nt, Human
gugguuucagaaaug

SEQ ID NO: 2981851 - RNA, 14 nt, Human
guguaaacacaucu

SEQ ID NO: 2981852 - RNA, 15 nt, Human
guguaaacacaucua

SEQ ID NO: 2981853 - RNA, 22 nt, Human
gugucuuaauuaaaagaauauu

SEQ ID NO: 2981854 - RNA, 19 nt, Human
gugucagguggggcagcuu

SEQ ID NO: 2981855 - RNA, 23 nt, Human
gugugaaccaccacacccagccc

SEQ ID NO: 2981856 - RNA, 14 nt, Human
gugucaccugaaga

SEQ ID NO: 2981857 - RNA, 18 nt, Human
gugucagguggggcagcu

SEQ ID NO: 2981858 - RNA, 14 nt, Human
gugucagguggggc

SEQ ID NO: 2981859 - RNA, 22 nt, Human
gugucaccugaagacucauucu

SEQ ID NO: 2981860 - RNA, 20 nt, Human
aagaucaaaagguuaauaaa

SEQ ID NO: 2981861 - RNA, 23 nt, Human
aagaucaaaagguuaauaaagua

SEQ ID NO: 2981862 - RNA, 17 nt, Human
aagcaacccaaauguuc

SEQ ID NO: 2981863 - RNA, 19 nt, Human
aagcauuguaaaugugcuu

SEQ ID NO: 2981864 - RNA, 18 nt, Human
aagccaaagcuaggccug

SEQ ID NO: 2981865 - RNA, 17 nt, Human
aagccaaagcuaggccu

SEQ ID NO: 2981866 - RNA, 19 nt, Human
aagcacugacuucuaagua

SEQ ID NO: 2981867 - RNA, 20 nt, Human
aagcacugacuucuaaguaa

SEQ ID NO: 2981868 - RNA, 12 nt, Human
aagcaugugaga

SEQ ID NO: 2981869 - RNA, 18 nt, Human
aagcauuguaaaugugcu

SEQ ID NO: 2981870 - RNA, 16 nt, Human
aagcacuaaacaaaga

SEQ ID NO: 2981871 - RNA, 17 nt, Human
aagcaccuccugccucg

SEQ ID NO: 2981872 - RNA, 16 nt, Human
aagcacugacuucuaa

SEQ ID NO: 2981873 - RNA, 17 nt, Human
aagcacugacuucuaag

SEQ ID NO: 2981874 - RNA, 16 nt, Human
aagcaccuccugccuc

SEQ ID NO: 2981875 - RNA, 15 nt, Human
aagcaccuccugccu

SEQ ID NO: 2981876 - RNA, 14 nt, Human
aagcaccuccugcc

SEQ ID NO: 2981877 - RNA, 13 nt, Human
aagcaccuccugc

SEQ ID NO: 2981878 - RNA, 21 nt, Human
aagcacaugccucucucaggc

SEQ ID NO: 2981879 - RNA, 12 nt, Human
guguuugaagca

SEQ ID NO: 2981880 - RNA, 16 nt, Human
aagcacacuugacauc

SEQ ID NO: 2981881 - RNA, 17 nt, Human
gugugaauaccccaaga

SEQ ID NO: 2981882 - RNA, 15 nt, Human
aagcacaugccucuc

SEQ ID NO: 2981883 - RNA, 16 nt, Human
aagcacaugccucucu

SEQ ID NO: 2981884 - RNA, 19 nt, Human
aagcacaugccucucucag

SEQ ID NO: 2981885 - RNA, 20 nt, Human
aagcacaugccucucucagg

SEQ ID NO: 2981886 - RNA, 14 nt, Human
aagcacaugccucu

SEQ ID NO: 2981887 - RNA, 13 nt, Human
uaaaaaggugacc

SEQ ID NO: 2981888 - RNA, 15 nt, Human
uaaaaaggugaccau

SEQ ID NO: 2981889 - RNA, 21 nt, Human
uaaaaaaaaaccugagcccca

SEQ ID NO: 2981890 - RNA, 22 nt, Human
uaaaaaugagguacucuccugg

SEQ ID NO: 2981891 - RNA, 14 nt, Human
uaaaaccacagcag

SEQ ID NO: 2981892 - RNA, 15 nt, Human
uaaaaccacagcagu

SEQ ID NO: 2981893 - RNA, 13 nt, Human
uaaaaccacagca

SEQ ID NO: 2981894 - RNA, 23 nt, Human
uaaaaaucucaaauuucuaaauc

SEQ ID NO: 2981895 - RNA, 15 nt, Human
uaaaaaugagguacu

SEQ ID NO: 2981896 - RNA, 15 nt, Human
uaaaacuuuuuaaaa

SEQ ID NO: 2981897 - RNA, 12 nt, Human
uaaaacuuuuua

SEQ ID NO: 2981898 - RNA, 13 nt, Human
uaaaacccaagug

SEQ ID NO: 2981899 - RNA, 21 nt, Human
uaaaauacacacucaaaucaa

SEQ ID NO: 2981900 - RNA, 22 nt, Human
uaaaauaauuuuuauauuugaa

SEQ ID NO: 2981901 - RNA, 19 nt, Human
uaaaauaagucugauuuaa

SEQ ID NO: 2981902 - RNA, 18 nt, Human
uaaaauaagucugauuua

SEQ ID NO: 2981903 - RNA, 17 nt, Human
uaaaauaagucugauuu

SEQ ID NO: 2981904 - RNA, 15 nt, Human
uaaaauaagucugau

SEQ ID NO: 2981905 - RNA, 20 nt, Human
uaaaauaauuuuuauauuug

SEQ ID NO: 2981906 - RNA, 14 nt, Human
uaaaauaagucuga

SEQ ID NO: 2981907 - RNA, 19 nt, Human
uaaaaggugaccaaugaug

SEQ ID NO: 2981908 - RNA, 13 nt, Human
uaaaagaauauuu

SEQ ID NO: 2981909 - RNA, 13 nt, Human
uaaaagucuugug

SEQ ID NO: 2981910 - RNA, 20 nt, Human
aagugauccucccaccucag

SEQ ID NO: 2981911 - RNA, 19 nt, Human
aagugauccucccaccuca

SEQ ID NO: 2981912 - RNA, 13 nt, Human
aagugauccuccc

SEQ ID NO: 2981913 - RNA, 20 nt, Human
aagugauucuccugccucag

SEQ ID NO: 2981914 - RNA, 23 nt, Human
aagugauccucccaccucagccu

SEQ ID NO: 2981915 - RNA, 23 nt, Human
aaguguauuuuuuuacuaauaga

SEQ ID NO: 2981916 - RNA, 13 nt, Human
aagugugguagag

SEQ ID NO: 2981917 - RNA, 22 nt, Human
aaguuauuaagagguaagacuu

SEQ ID NO: 2981918 - RNA, 21 nt, Human
aaguuauuaagagguaagacu

SEQ ID NO: 2981919 - RNA, 23 nt, Human
aaguuauuaagagguaagacuua

SEQ ID NO: 2981920 - RNA, 21 nt, Human
aaguuugaauuccuaaaauua

SEQ ID NO: 2981921 - RNA, 13 nt, Human
aaguuugaacauu

SEQ ID NO: 2981922 - RNA, 19 nt, Human
aaguuucugccgcagcccu

SEQ ID NO: 2981923 - RNA, 21 nt, Human
aaguuucugccgcagcccugc

SEQ ID NO: 2981924 - RNA, 19 nt, Human
aaguuauuuuuaauuuggu

SEQ ID NO: 2981925 - RNA, 9 nt, Human
uaaaauggu

SEQ ID NO: 2981926 - RNA, 20 nt, Human
aaguuugagaucagccuggg

SEQ ID NO: 2981927 - RNA, 14 nt, Human
aagguagaauguuu

SEQ ID NO: 2981928 - RNA, 13 nt, Human
aagguagaauguu

SEQ ID NO: 2981929 - RNA, 12 nt, Human
aagggggcuggg

SEQ ID NO: 2981930 - RNA, 23 nt, Human
aagggggcugggacaugggaaag

SEQ ID NO: 2981931 - RNA, 13 nt, Human
aaggggagaguaa

SEQ ID NO: 2981932 - RNA, 17 nt, Human
aaggggaauugaggaca

SEQ ID NO: 2981933 - RNA, 17 nt, Human
aagggcuguuauaaucu

SEQ ID NO: 2981934 - RNA, 15 nt, Human
aagggcuguuauaau

SEQ ID NO: 2981935 - RNA, 16 nt, Human
aaggcugggggaagaa

SEQ ID NO: 2981936 - RNA, 14 nt, Human
aaggcugggggaag

SEQ ID NO: 2981937 - RNA, 13 nt, Human
guuucagaaaugu

SEQ ID NO: 2981938 - RNA, 11 nt, Human
guuucagaaau

SEQ ID NO: 2981939 - RNA, 19 nt, Human
aaggcugggggaagaagcu

SEQ ID NO: 2981940 - RNA, 22 nt, Human
aaggcugggggaagaagcucuc

SEQ ID NO: 2981941 - RNA, 20 nt, Human
aaggcugucaauuacaggaa

SEQ ID NO: 2981942 - RNA, 14 nt, Human
guuuaugauuccac

SEQ ID NO: 2981943 - RNA, 16 nt, Human
guuuaugagaaacugg

SEQ ID NO: 2981944 - RNA, 17 nt, Human
guuucaaacuuuacuau

SEQ ID NO: 2981945 - RNA, 15 nt, Human
guuucacacaaacaa

SEQ ID NO: 2981946 - RNA, 21 nt, Human
guuuaagugacugauggcuaa

SEQ ID NO: 2981947 - RNA, 17 nt, Human
aaggaaacccagcucug

SEQ ID NO: 2981948 - RNA, 22 nt, Human
aaggaaacccagcucuggucca

SEQ ID NO: 2981949 - RNA, 23 nt, Human
guuguuugauucagacagcugcc

SEQ ID NO: 2981950 - RNA, 20 nt, Human
guuguuugauucagacagcu

SEQ ID NO: 2981951 - RNA, 16 nt, Human
aaggaaacccagcucu

SEQ ID NO: 2981952 - RNA, 19 nt, Human
aaguauguuagugcaaauu

SEQ ID NO: 2981953 - RNA, 18 nt, Human
aaguauguuagugcaaau

SEQ ID NO: 2981954 - RNA, 15 nt, Human
aaguauuauaccuuu

SEQ ID NO: 2981955 - RNA, 18 nt, Human
aaguacuucuccacccug

SEQ ID NO: 2981956 - RNA, 19 nt, Human
aaguacuucuccacccugc

SEQ ID NO: 2981957 - RNA, 19 nt, Human
aaguaaugauaacuggaaa

SEQ ID NO: 2981958 - RNA, 16 nt, Human
aaguaauuuggaaauu

SEQ ID NO: 2981959 - RNA, 13 nt, Human
aaguacuauguau

SEQ ID NO: 2981960 - RNA, 17 nt, Human
aaguacuauaauuuacc

SEQ ID NO: 2981961 - RNA, 14 nt, Human
aaguacuauaauuu

SEQ ID NO: 2981962 - RNA, 19 nt, Human
aaguauuauaccuuuuuua

SEQ ID NO: 2981963 - RNA, 16 nt, Human
aaguauuauaccuuuu

SEQ ID NO: 2981964 - RNA, 21 nt, Human
aaguauucuuauuuaaugaaa

SEQ ID NO: 2981965 - RNA, 23 nt, Human
aaguauucuuauuuaaugaaaga

SEQ ID NO: 2981966 - RNA, 22 nt, Human
guuuuaaggaugcuuguacaua

SEQ ID NO: 2981967 - RNA, 18 nt, Human
guuuuaaggaugcuugua

SEQ ID NO: 2981968 - RNA, 16 nt, Human
guuuucuguucuuucu

SEQ ID NO: 2981969 - RNA, 15 nt, Human
guuuucuguucuuuc

SEQ ID NO: 2981970 - RNA, 14 nt, Human
guuuucuguucuuu

SEQ ID NO: 2981971 - RNA, 12 nt, Human
guuuucuguucu

SEQ ID NO: 2981972 - RNA, 17 nt, Human
aaguaauaugcacacau

SEQ ID NO: 2981973 - RNA, 20 nt, Human
aaguaauaugcacacauuuu

SEQ ID NO: 2981974 - RNA, 18 nt, Human
aaguaauaugcacacauu

SEQ ID NO: 2981975 - RNA, 21 nt, Human
aaguaauaugcacacauuuuu

SEQ ID NO: 2981976 - RNA, 19 nt, Human
guuuggacaaaauggaaua

SEQ ID NO: 2981977 - RNA, 15 nt, Human
guuuuaaagcuucca

SEQ ID NO: 2981978 - RNA, 22 nt, Human
cuucucuguauuccuagaaacu

SEQ ID NO: 2981979 - RNA, 15 nt, Human
cuucugacccaugcu

SEQ ID NO: 2981980 - RNA, 22 nt, Human
cuucugaacuuggcgcugcccc

SEQ ID NO: 2981981 - RNA, 19 nt, Human
cuucugaacuuggcgcugc

SEQ ID NO: 2981982 - RNA, 16 nt, Human
cuucuauuuauuuauu

SEQ ID NO: 2981983 - RNA, 14 nt, Human
cuucuauauaauuc

SEQ ID NO: 2981984 - RNA, 14 nt, Human
cuuccucccucccu

SEQ ID NO: 2981985 - RNA, 13 nt, Human
cuuccucccuccc

SEQ ID NO: 2981986 - RNA, 12 nt, Human
cuuccucccucc

SEQ ID NO: 2981987 - RNA, 18 nt, Human
cuucugacccaugcugcc

SEQ ID NO: 2981988 - RNA, 16 nt, Human
cuucugacccaugcug

SEQ ID NO: 2981989 - RNA, 17 nt, Human
cuucugacccaugcugc

SEQ ID NO: 2981990 - RNA, 16 nt, Human
cuucuuauacauuuga

SEQ ID NO: 2981991 - RNA, 13 nt, Human
cuucuuauacauu

SEQ ID NO: 2981992 - RNA, 15 nt, Human
cuuuaagaacuaaaa

SEQ ID NO: 2981993 - RNA, 21 nt, Human
cuugucuuuggacccugaggc

SEQ ID NO: 2981994 - RNA, 22 nt, Human
cuugucuuuggacccugaggcc

SEQ ID NO: 2981995 - RNA, 20 nt, Human
cuuuaaugucacaggcaggu

SEQ ID NO: 2981996 - RNA, 19 nt, Human
cuuuaaugucacaggcagg

SEQ ID NO: 2981997 - RNA, 18 nt, Human
cuuuaaugucacaggcag

SEQ ID NO: 2981998 - RNA, 17 nt, Human
cuuuaaugucacaggca

SEQ ID NO: 2981999 - RNA, 14 nt, Human
cuuucaauaggaaa

SEQ ID NO: 2982000 - RNA, 15 nt, Human
cuuucaauaggaaaa

SEQ ID NO: 2982001 - RNA, 22 nt, Human
cuuuaaugucacaggcaggucc

SEQ ID NO: 2982002 - RNA, 17 nt, Human
cuuucaauaggaaaaac

SEQ ID NO: 2982003 - RNA, 20 nt, Human
cuugguucccauuugcuccu

SEQ ID NO: 2982004 - RNA, 16 nt, Human
cuugguucccauuugc

SEQ ID NO: 2982005 - RNA, 22 nt, Human
cuugguccugcugcaguugcca

SEQ ID NO: 2982006 - RNA, 23 nt, Human
cuuggucucagugucaaugcagc

SEQ ID NO: 2982007 - RNA, 20 nt, Human
cuuggugucgggcaugacac

SEQ ID NO: 2982008 - RNA, 19 nt, Human
cuugucuuuggacccugag

SEQ ID NO: 2982009 - RNA, 20 nt, Human
cuugucuuuggacccugagg

SEQ ID NO: 2982010 - RNA, 13 nt, Human
cuugucuguagau

SEQ ID NO: 2982011 - RNA, 16 nt, Human
cuugguccugcugcag

SEQ ID NO: 2982012 - RNA, 17 nt, Human
cuugguccugcugcagu

SEQ ID NO: 2982013 - RNA, 18 nt, Human
cuugguccugcugcaguu

SEQ ID NO: 2982014 - RNA, 20 nt, Human
cuugguccugcugcaguugc

SEQ ID NO: 2982015 - RNA, 15 nt, Human
cuugguccugcugca

SEQ ID NO: 2982016 - RNA, 16 nt, Human
cuuggcccaggaguuu

SEQ ID NO: 2982017 - RNA, 20 nt, Human
cuuggcccaggaguuuggcc

SEQ ID NO: 2982018 - RNA, 22 nt, Human
cuuggcccaggaguuuggccag

SEQ ID NO: 2982019 - RNA, 23 nt, Human
cuuggcccaggaguuuggccaga

SEQ ID NO: 2982020 - RNA, 23 nt, Human
cuuggcgcugccccuggcagccc

SEQ ID NO: 2982021 - RNA, 21 nt, Human
cuuggcgcugccccuggcagc

SEQ ID NO: 2982022 - RNA, 22 nt, Human
cuuggcgcugccccuggcagcc

SEQ ID NO: 2982023 - RNA, 14 nt, Human
cuuggcccaggagu

SEQ ID NO: 2982024 - RNA, 15 nt, Human
cuuggcccaggaguu

SEQ ID NO: 2982025 - RNA, 18 nt, Human
cuuggauuguccccgacc

SEQ ID NO: 2982026 - RNA, 20 nt, Human
cuuggauuguccccgacccu

SEQ ID NO: 2982027 - RNA, 15 nt, Human
cuuggauuguccccg

SEQ ID NO: 2982028 - RNA, 18 nt, Human
cuugccgucuaccugagg

SEQ ID NO: 2982029 - RNA, 19 nt, Human
cuugccgucuaccugaggg

SEQ ID NO: 2982030 - RNA, 19 nt, Human
cuugauucauaaugacuua

SEQ ID NO: 2982031 - RNA, 15 nt, Human
cuugauguguuaucu

SEQ ID NO: 2982032 - RNA, 19 nt, Human
gaaaaaauauuuuccugcc

SEQ ID NO: 2982033 - RNA, 21 nt, Human
cuuuuuuuuuuuuuuugacaa

SEQ ID NO: 2982034 - RNA, 18 nt, Human
cuuuugugcauuaucuag

SEQ ID NO: 2982035 - RNA, 14 nt, Human
cuuuugugcauuau

SEQ ID NO: 2982036 - RNA, 19 nt, Human
cuuuuguagaagucacauu

SEQ ID NO: 2982037 - RNA, 17 nt, Human
cuuuugucuaugggacu

SEQ ID NO: 2982038 - RNA, 16 nt, Human
cuuuuggucuguguga

SEQ ID NO: 2982039 - RNA, 15 nt, Human
cuuuuggucugugug

SEQ ID NO: 2982040 - RNA, 16 nt, Human
cuuuugccguuauuaa

SEQ ID NO: 2982041 - RNA, 18 nt, Human
cuuuugccguuauuaaaa

SEQ ID NO: 2982042 - RNA, 20 nt, Human
gaaaagacuccaaagaaaug

SEQ ID NO: 2982043 - RNA, 18 nt, Human
gaaaagacuccaaagaaa

SEQ ID NO: 2982044 - RNA, 21 nt, Human
gaaaagacuccaaagaaaugu

SEQ ID NO: 2982045 - RNA, 22 nt, Human
gaaaaaaugguagcauuuuaaa

SEQ ID NO: 2982046 - RNA, 19 nt, Human
gaaaaaaugguagcauuuu

SEQ ID NO: 2982047 - RNA, 17 nt, Human
gaaaaaaugguagcauu

SEQ ID NO: 2982048 - RNA, 15 nt, Human
gaaaagccucuguuu

SEQ ID NO: 2982049 - RNA, 19 nt, Human
gaaaagccucuguuuugau

SEQ ID NO: 2982050 - RNA, 14 nt, Human
gaaaauuuuaaaaa

SEQ ID NO: 2982051 - RNA, 18 nt, Human
gaaaauuuugauguuuua

SEQ ID NO: 2982052 - RNA, 21 nt, Human
gaaaucaaauaugcaaagcac

SEQ ID NO: 2982053 - RNA, 16 nt, Human
gaaaucaaauaugcaa

SEQ ID NO: 2982054 - RNA, 21 nt, Human
gaaaguacuucuccacccugc

SEQ ID NO: 2982055 - RNA, 17 nt, Human
gaaaggcuccaggagca

SEQ ID NO: 2982056 - RNA, 18 nt, Human
gaaaggcuccaggagcag

SEQ ID NO: 2982057 - RNA, 19 nt, Human
gaaaggcuccaggagcagc

SEQ ID NO: 2982058 - RNA, 16 nt, Human
gaaaggcuccaggagc

SEQ ID NO: 2982059 - RNA, 18 nt, Human
gaaagacuaucuaaaugu

SEQ ID NO: 2982060 - RNA, 17 nt, Human
gaaaucaccgaaaacgu

SEQ ID NO: 2982061 - RNA, 17 nt, Human
gaaaugaaagcagggac

SEQ ID NO: 2982062 - RNA, 23 nt, Human
gaaaucaaauaugcaaagcacug

SEQ ID NO: 2982063 - RNA, 18 nt, Human
gaaaugaaagcagggacu

SEQ ID NO: 2982064 - RNA, 18 nt, Human
gaaauuuuuauuaaauua

SEQ ID NO: 2982065 - RNA, 18 nt, Human
gaacaaauuuacagagac

SEQ ID NO: 2982066 - RNA, 17 nt, Human
gaacaaauuuacagaga

SEQ ID NO: 2982067 - RNA, 19 nt, Human
gaaauuuuuauuaaauuau

SEQ ID NO: 2982068 - RNA, 23 nt, Human
gaacaaauuuacagagacagaaa

SEQ ID NO: 2982069 - RNA, 23 nt, Human
gaaacuucagcgguuuauauaag

SEQ ID NO: 2982070 - RNA, 14 nt, Human
gaacaaggcaaggc

SEQ ID NO: 2982071 - RNA, 15 nt, Human
gaacaaggcaaggcu

SEQ ID NO: 2982072 - RNA, 17 nt, Human
gaacaaggcaaggcugu

SEQ ID NO: 2982073 - RNA, 18 nt, Human
gaacaaggcaaggcuguc

SEQ ID NO: 2982074 - RNA, 21 nt, Human
gaacaaggcaaggcugucaau

SEQ ID NO: 2982075 - RNA, 24 nt, Human
cuggaguuauugaagcagaguggc

SEQ ID NO: 2982076 - RNA, 23 nt, Human
cuggaguuauugaagcagagugg

SEQ ID NO: 2982077 - RNA, 21 nt, Human
cuggaguuauugaagcagagu

SEQ ID NO: 2982078 - RNA, 22 nt, Human
cuggaguuauugaagcagagug

SEQ ID NO: 2982079 - RNA, 21 nt, Human
cuggagaaaauggacguguua

SEQ ID NO: 2982080 - RNA, 23 nt, Human
cuggaaaaguauguuagugcaaa

SEQ ID NO: 2982081 - RNA, 14 nt, Human
cugcuuccagugag

SEQ ID NO: 2982082 - RNA, 23 nt, Human
cugcuucagccucccgaguagcu

SEQ ID NO: 2982083 - RNA, 19 nt, Human
cugcuucaaggauccugag

SEQ ID NO: 2982084 - RNA, 14 nt, Human
cugcuucaaggauc

SEQ ID NO: 2982085 - RNA, 16 nt, Human
cugcuucaaggauccu

SEQ ID NO: 2982086 - RNA, 16 nt, Human
cuggaugcagccucac

SEQ ID NO: 2982087 - RNA, 17 nt, Human
cuggaugcagccucaca

SEQ ID NO: 2982088 - RNA, 18 nt, Human
cuggaugcagccucacag

SEQ ID NO: 2982089 - RNA, 15 nt, Human
cuggaugcagccuca

SEQ ID NO: 2982090 - RNA, 13 nt, Human
cuggcagccccug

SEQ ID NO: 2982091 - RNA, 22 nt, Human
cuggcagaguugaagacagagc

SEQ ID NO: 2982092 - RNA, 23 nt, Human
cuggcagccccuguucuggcaga

SEQ ID NO: 2982093 - RNA, 20 nt, Human
cuggcagaguugaagacaga

SEQ ID NO: 2982094 - RNA, 21 nt, Human
cuggcagaguugaagacagag

SEQ ID NO: 2982095 - RNA, 19 nt, Human
cuggcagaguugaagacag

SEQ ID NO: 2982096 - RNA, 17 nt, Human
cuggcagcucagagagg

SEQ ID NO: 2982097 - RNA, 19 nt, Human
cuggcagcucagagagggu

SEQ ID NO: 2982098 - RNA, 16 nt, Human
cuggcagcucagagag

SEQ ID NO: 2982099 - RNA, 17 nt, Human
cugggacuacaggugug

SEQ ID NO: 2982100 - RNA, 21 nt, Human
cugggacuacaggcacccacc

SEQ ID NO: 2982101 - RNA, 17 nt, Human
cugggacuacaggcacc

SEQ ID NO: 2982102 - RNA, 16 nt, Human
cugggacuacaggcac

SEQ ID NO: 2982103 - RNA, 23 nt, Human
cuggcucuguggcgagccauuug

SEQ ID NO: 2982104 - RNA, 14 nt, Human
cuggcucuguggcg

SEQ ID NO: 2982105 - RNA, 13 nt, Human
cuggcucuguggc

SEQ ID NO: 2982106 - RNA, 14 nt, Human
cuggcucuuccagg

SEQ ID NO: 2982107 - RNA, 15 nt, Human
cuggcucuuccaggc

SEQ ID NO: 2982108 - RNA, 13 nt, Human
cuggcucuuccag

SEQ ID NO: 2982109 - RNA, 12 nt, Human
cuggcucugugg

SEQ ID NO: 2982110 - RNA, 24 nt, Human
cugcugaaggcucgagcaugccug

SEQ ID NO: 2982111 - RNA, 23 nt, Human
cugcugaaggcucgagcaugccu

SEQ ID NO: 2982112 - RNA, 18 nt, Human
cugcugaaggcucgagca

SEQ ID NO: 2982113 - RNA, 17 nt, Human
cugcuaucaaagagguu

SEQ ID NO: 2982114 - RNA, 23 nt, Human
cugccuguucagcuccagcucac

SEQ ID NO: 2982115 - RNA, 20 nt, Human
cugccuguucagcuccagcu

SEQ ID NO: 2982116 - RNA, 22 nt, Human
cugcugagccucacagcaguga

SEQ ID NO: 2982117 - RNA, 23 nt, Human
cugcugagauccuggacugaggg

SEQ ID NO: 2982118 - RNA, 19 nt, Human
cugcugagauccuggacug

SEQ ID NO: 2982119 - RNA, 18 nt, Human
cugcugagauccuggacu

SEQ ID NO: 2982120 - RNA, 17 nt, Human
cugcugagauccuggac

SEQ ID NO: 2982121 - RNA, 16 nt, Human
cugcugagauccugga

SEQ ID NO: 2982122 - RNA, 20 nt, Human
cugccuccccuccucugcuu

SEQ ID NO: 2982123 - RNA, 19 nt, Human
cugccuccccuccucugcu

SEQ ID NO: 2982124 - RNA, 14 nt, Human
cugccuccuuugug

SEQ ID NO: 2982125 - RNA, 17 nt, Human
cugccuccuuugugagg

SEQ ID NO: 2982126 - RNA, 21 nt, Human
cugccuccuuugugaggaagc

SEQ ID NO: 2982127 - RNA, 23 nt, Human
cugccuccuuugugaggaagccg

SEQ ID NO: 2982128 - RNA, 14 nt, Human
cugccucgaacugg

SEQ ID NO: 2982129 - RNA, 20 nt, Human
cugccucgaacuggcugcaa

SEQ ID NO: 2982130 - RNA, 19 nt, Human
cugccucgaacuggcugca

SEQ ID NO: 2982131 - RNA, 14 nt, Human
cugccuccccuccu

SEQ ID NO: 2982132 - RNA, 18 nt, Human
cugccuccccuccucugc

SEQ ID NO: 2982133 - RNA, 17 nt, Human
cugccuccccuccucug

SEQ ID NO: 2982134 - RNA, 24 nt, Human
cugcccugugaguacuacaguccu

SEQ ID NO: 2982135 - RNA, 19 nt, Human
cugcccuuaccugccagga

SEQ ID NO: 2982136 - RNA, 12 nt, Human
cugcccuguggg

SEQ ID NO: 2982137 - RNA, 11 nt, Human
cugcccugugg

SEQ ID NO: 2982138 - RNA, 22 nt, Human
cugcccuuaccugccaggaagc

SEQ ID NO: 2982139 - RNA, 23 nt, Human
cugcccuuaccugccaggaagcc

SEQ ID NO: 2982140 - RNA, 23 nt, Human
cugucggagcccugucuccucuc

SEQ ID NO: 2982141 - RNA, 22 nt, Human
cugucuaaugaaaccugugucu

SEQ ID NO: 2982142 - RNA, 14 nt, Human
cugucauuugagca

SEQ ID NO: 2982143 - RNA, 14 nt, Human
cuguccugggagug

SEQ ID NO: 2982144 - RNA, 13 nt, Human
cuguccugggagu

SEQ ID NO: 2982145 - RNA, 20 nt, Human
cuguccugggagugagcugg

SEQ ID NO: 2982146 - RNA, 20 nt, Human
cuguaagaaaauaucacuug

SEQ ID NO: 2982147 - RNA, 15 nt, Human
cuguagagugggagc

SEQ ID NO: 2982148 - RNA, 22 nt, Human
cuggugacaugucuuuucuugc

SEQ ID NO: 2982149 - RNA, 18 nt, Human
cuggucuuauuuguaaag

SEQ ID NO: 2982150 - RNA, 12 nt, Human
cuuaaaaauggu

SEQ ID NO: 2982151 - RNA, 20 nt, Human
cuuaaaaaugguuuaaaugg

SEQ ID NO: 2982152 - RNA, 13 nt, Human
cuuaaaaaugguu

SEQ ID NO: 2982153 - RNA, 19 nt, Human
cuuaaauaaugugaaacug

SEQ ID NO: 2982154 - RNA, 16 nt, Human
cuuaaauaaugugaaa

SEQ ID NO: 2982155 - RNA, 14 nt, Human
cuuaaauaauguga

SEQ ID NO: 2982156 - RNA, 13 nt, Human
cuuaaauaaugug

SEQ ID NO: 2982157 - RNA, 12 nt, Human
cuguuggccagu

SEQ ID NO: 2982158 - RNA, 15 nt, Human
cuguuggccagugug

SEQ ID NO: 2982159 - RNA, 18 nt, Human
cuguugcccaggcuggcg

SEQ ID NO: 2982160 - RNA, 21 nt, Human
cugugagaugcuagaacuccc

SEQ ID NO: 2982161 - RNA, 23 nt, Human
cugugagaugcuagaacucccuu

SEQ ID NO: 2982162 - RNA, 15 nt, Human
cugugcucuggacag

SEQ ID NO: 2982163 - RNA, 17 nt, Human
cugugcucuggacaggc

SEQ ID NO: 2982164 - RNA, 19 nt, Human
cuguuauaaucuuucacag

SEQ ID NO: 2982165 - RNA, 13 nt, Human
cuguuacugucuu

SEQ ID NO: 2982166 - RNA, 17 nt, Human
cuguuacugucuucagu

SEQ ID NO: 2982167 - RNA, 22 nt, Human
cugugucagguggggcagcuug

SEQ ID NO: 2982168 - RNA, 19 nt, Human
cugugcucuggacaggcau

SEQ ID NO: 2982169 - RNA, 18 nt, Human
cugugcucuggacaggca

SEQ ID NO: 2982170 - RNA, 12 nt, Human
cuguucacagcc

SEQ ID NO: 2982171 - RNA, 19 nt, Human
cuguucacagccagacugg

SEQ ID NO: 2982172 - RNA, 22 nt, Human
cuguucacagccagacuggcac

SEQ ID NO: 2982173 - RNA, 15 nt, Human
cuguucagcuccagc

SEQ ID NO: 2982174 - RNA, 14 nt, Human
cuguucagcuccag

SEQ ID NO: 2982175 - RNA, 22 nt, Human
cuguucagcuccagcucaccag

SEQ ID NO: 2982176 - RNA, 19 nt, Human
cuguucagcuccagcucac

SEQ ID NO: 2982177 - RNA, 18 nt, Human
cuguucagcuccagcuca

SEQ ID NO: 2982178 - RNA, 16 nt, Human
cuguucagcuccagcu

SEQ ID NO: 2982179 - RNA, 12 nt, Human
cuguucagcugg

SEQ ID NO: 2982180 - RNA, 19 nt, Human
gacacuucacgcccuuggc

SEQ ID NO: 2982181 - RNA, 14 nt, Human
gacagcccgggcuc

SEQ ID NO: 2982182 - RNA, 18 nt, Human
gacagcuccuucuguccu

SEQ ID NO: 2982183 - RNA, 17 nt, Human
gacagcuccuucugucc

SEQ ID NO: 2982184 - RNA, 16 nt, Human
gacagcccgggcucug

SEQ ID NO: 2982185 - RNA, 16 nt, Human
gacagcuccuucuguc

SEQ ID NO: 2982186 - RNA, 12 nt, Human
gacagcucugca

SEQ ID NO: 2982187 - RNA, 19 nt, Human
gacagcuccuucuguccua

SEQ ID NO: 2982188 - RNA, 10 nt, Human
gacagcucuu

SEQ ID NO: 2982189 - RNA, 11 nt, Human
gacagcucuua

SEQ ID NO: 2982190 - RNA, 18 nt, Human
gacagucaccucauggaa

SEQ ID NO: 2982191 - RNA, 12 nt, Human
gacagucccugc

SEQ ID NO: 2982192 - RNA, 14 nt, Human
gacagucccugcca

SEQ ID NO: 2982193 - RNA, 15 nt, Human
gacagucccugccaa

SEQ ID NO: 2982194 - RNA, 16 nt, Human
gacagucccugccaau

SEQ ID NO: 2982195 - RNA, 20 nt, Human
gacagucccugccaauggac

SEQ ID NO: 2982196 - RNA, 16 nt, Human
gacauuuuaugucuuu

SEQ ID NO: 2982197 - RNA, 20 nt, Human
gacauuuuaugucuuucuug

SEQ ID NO: 2982198 - RNA, 23 nt, Human
gacauugcggacagccacggcca

SEQ ID NO: 2982199 - RNA, 17 nt, Human
gacauugcggacagcca

SEQ ID NO: 2982200 - RNA, 18 nt, Human
gacccucaugcugccaau

SEQ ID NO: 2982201 - RNA, 21 nt, Human
gacccucaugcugccaauauc

SEQ ID NO: 2982202 - RNA, 22 nt, Human
gacccucaugcugccaauaucc

SEQ ID NO: 2982203 - RNA, 23 nt, Human
gacccucaugcugccaauauccu

SEQ ID NO: 2982204 - RNA, 14 nt, Human
gaccucaggccugg

SEQ ID NO: 2982205 - RNA, 18 nt, Human
gaccucaggugagaagca

SEQ ID NO: 2982206 - RNA, 19 nt, Human
gaccucaggugagaagcag

SEQ ID NO: 2982207 - RNA, 19 nt, Human
gaccucaggccugggggcu

SEQ ID NO: 2982208 - RNA, 21 nt, Human
gaccucaggugauccacccac

SEQ ID NO: 2982209 - RNA, 20 nt, Human
gaccucaggugauccaccca

SEQ ID NO: 2982210 - RNA, 21 nt, Human
gaccucaggugagaagcagag

SEQ ID NO: 2982211 - RNA, 19 nt, Human
gaccucaggugauccaccc

SEQ ID NO: 2982212 - RNA, 12 nt, Human
gacccucaugcu

SEQ ID NO: 2982213 - RNA, 14 nt, Human
gacccucaugcugc

SEQ ID NO: 2982214 - RNA, 16 nt, Human
gacccucaugcugcca

SEQ ID NO: 2982215 - RNA, 17 nt, Human
gacccucaugcugccaa

SEQ ID NO: 2982216 - RNA, 22 nt, Human
gaccucugcagcaauaaagcag

SEQ ID NO: 2982217 - RNA, 18 nt, Human
gaccucugcagcaauaaa

SEQ ID NO: 2982218 - RNA, 16 nt, Human
gaccucugcagcaaua

SEQ ID NO: 2982219 - RNA, 12 nt, Human
gacgccauccca

SEQ ID NO: 2982220 - RNA, 13 nt, Human
gacgccaucccag

SEQ ID NO: 2982221 - RNA, 19 nt, Human
gacgccaucccagccccaa

SEQ ID NO: 2982222 - RNA, 21 nt, Human
gacgccaucccagccccaaug

SEQ ID NO: 2982223 - RNA, 22 nt, Human
gacgcuacccgggaagggggcu

SEQ ID NO: 2982224 - RNA, 23 nt, Human
gacgcuacccgggaagggggcug

SEQ ID NO: 2982225 - RNA, 14 nt, Human
gacgcucucuggcc

SEQ ID NO: 2982226 - RNA, 16 nt, Human
gacgcugugcugcccu

SEQ ID NO: 2982227 - RNA, 17 nt, Human
gacgcugugcugcccug

SEQ ID NO: 2982228 - RNA, 18 nt, Human
gacgcugugcugcccugc

SEQ ID NO: 2982229 - RNA, 15 nt, Human
gacgcugugcugccc

SEQ ID NO: 2982230 - RNA, 17 nt, Human
gaauguuuucaaauguu

SEQ ID NO: 2982231 - RNA, 15 nt, Human
gaauuaacacaugau

SEQ ID NO: 2982232 - RNA, 14 nt, Human
gaauuaacacauga

SEQ ID NO: 2982233 - RNA, 19 nt, Human
gaauguuugccucugccuc

SEQ ID NO: 2982234 - RNA, 18 nt, Human
gaauguuugccucugccu

SEQ ID NO: 2982235 - RNA, 13 nt, Human
gaauuacauuugu

SEQ ID NO: 2982236 - RNA, 18 nt, Human
gaauuacauuuguauaaa

SEQ ID NO: 2982237 - RNA, 15 nt, Human
gaauuacauuuguau

SEQ ID NO: 2982238 - RNA, 20 nt, Human
gaauuacauuuguauaaaau

SEQ ID NO: 2982239 - RNA, 22 nt, Human
gaaugauuaugaauuacauuug

SEQ ID NO: 2982240 - RNA, 18 nt, Human
gaaugcacaaacagaggc

SEQ ID NO: 2982241 - RNA, 17 nt, Human
gaauguuugccucugcc

SEQ ID NO: 2982242 - RNA, 16 nt, Human
gaauguuugccucugc

SEQ ID NO: 2982243 - RNA, 19 nt, Human
gaaugcacaaacagaggcc

SEQ ID NO: 2982244 - RNA, 15 nt, Human
gaauguuugccucug

SEQ ID NO: 2982245 - RNA, 20 nt, Human
gaaugaugauccuaggcauu

SEQ ID NO: 2982246 - RNA, 14 nt, Human
gaaugaugccauga

SEQ ID NO: 2982247 - RNA, 14 nt, Human
gaaugauuaauuaa

SEQ ID NO: 2982248 - RNA, 14 nt, Human
gaaugauuaugaau

SEQ ID NO: 2982249 - RNA, 15 nt, Human
gaaugaauggcuaag

SEQ ID NO: 2982250 - RNA, 19 nt, Human
gacaaacugcauauguacu

SEQ ID NO: 2982251 - RNA, 14 nt, Human
gaauuaugaaacuu

SEQ ID NO: 2982252 - RNA, 20 nt, Human
gacacagcucuucuccaggc

SEQ ID NO: 2982253 - RNA, 19 nt, Human
gacacagcucuucuccagg

SEQ ID NO: 2982254 - RNA, 12 nt, Human
gacacagcucuu

SEQ ID NO: 2982255 - RNA, 15 nt, Human
gacacagauuggcca

SEQ ID NO: 2982256 - RNA, 21 nt, Human
gacacagcucuucuccaggcu

SEQ ID NO: 2982257 - RNA, 17 nt, Human
gacacagcucuucucca

SEQ ID NO: 2982258 - RNA, 14 nt, Human
gaaugaauggcuaa

SEQ ID NO: 2982259 - RNA, 22 nt, Human
gaauauugcugauggugcaaug

SEQ ID NO: 2982260 - RNA, 23 nt, Human
gaauauugcugauggugcaauga

SEQ ID NO: 2982261 - RNA, 24 nt, Human
gaauauugcugauggugcaaugac

SEQ ID NO: 2982262 - RNA, 22 nt, Human
gaauaucuccgucaacucauau

SEQ ID NO: 2982263 - RNA, 12 nt, Human
gaauauugcuga

SEQ ID NO: 2982264 - RNA, 13 nt, Human
gaauauugcugau

SEQ ID NO: 2982265 - RNA, 11 nt, Human
gaauauugcug

SEQ ID NO: 2982266 - RNA, 13 nt, Human
gaauauugccaau

SEQ ID NO: 2982267 - RNA, 15 nt, Human
gaauauauaaccagu

SEQ ID NO: 2982268 - RNA, 16 nt, Human
gagccccacccucaga

SEQ ID NO: 2982269 - RNA, 14 nt, Human
gagccccacagccc

SEQ ID NO: 2982270 - RNA, 13 nt, Human
gagccccacagcc

SEQ ID NO: 2982271 - RNA, 12 nt, Human
gagccccacagc

SEQ ID NO: 2982272 - RNA, 14 nt, Human
gagccccgaggccu

SEQ ID NO: 2982273 - RNA, 13 nt, Human
gagccccgaggcc

SEQ ID NO: 2982274 - RNA, 17 nt, Human
gagccccacccucagau

SEQ ID NO: 2982275 - RNA, 20 nt, Human
gagccccacagccccaucug

SEQ ID NO: 2982276 - RNA, 17 nt, Human
gagccccgaggccuucu

SEQ ID NO: 2982277 - RNA, 14 nt, Human
gagcagucaggaaa

SEQ ID NO: 2982278 - RNA, 14 nt, Human
gagcaucaggccag

SEQ ID NO: 2982279 - RNA, 21 nt, Human
gagcagggcucagcggggaca

SEQ ID NO: 2982280 - RNA, 13 nt, Human
gagcaugccugga

SEQ ID NO: 2982281 - RNA, 15 nt, Human
gagcaucaggccagg

SEQ ID NO: 2982282 - RNA, 16 nt, Human
gagcaucaggccaggc

SEQ ID NO: 2982283 - RNA, 13 nt, Human
gagcaucaggcca

SEQ ID NO: 2982284 - RNA, 17 nt, Human
gagcuguucacagccag

SEQ ID NO: 2982285 - RNA, 20 nt, Human
gagcuguucacagccagacu

SEQ ID NO: 2982286 - RNA, 14 nt, Human
gagcccugguggca

SEQ ID NO: 2982287 - RNA, 13 nt, Human
gagcccugguggc

SEQ ID NO: 2982288 - RNA, 22 nt, Human
gagcuguucacagccagacugg

SEQ ID NO: 2982289 - RNA, 14 nt, Human
gaggagaaacugga

SEQ ID NO: 2982290 - RNA, 12 nt, Human
gaggagaaacug

SEQ ID NO: 2982291 - RNA, 14 nt, Human
gaggagagaggacc

SEQ ID NO: 2982292 - RNA, 15 nt, Human
gaggagagaggaccc

SEQ ID NO: 2982293 - RNA, 12 nt, Human
gaggagagagga

SEQ ID NO: 2982294 - RNA, 20 nt, Human
gaggcagggucucacucugu

SEQ ID NO: 2982295 - RNA, 19 nt, Human
gaggcagggucucacucug

SEQ ID NO: 2982296 - RNA, 18 nt, Human
gaggcagggucucacucu

SEQ ID NO: 2982297 - RNA, 23 nt, Human
gaggacuuuucuuuguggcuucc

SEQ ID NO: 2982298 - RNA, 20 nt, Human
gaggacuuuucuuuguggcu

SEQ ID NO: 2982299 - RNA, 16 nt, Human
gaggacuuuucuuugu

SEQ ID NO: 2982300 - RNA, 18 nt, Human
gaggacuccaggcagcag

SEQ ID NO: 2982301 - RNA, 23 nt, Human
gaggacuccaggcagcagacaca

SEQ ID NO: 2982302 - RNA, 20 nt, Human
gaggacgcucucuggccuuc

SEQ ID NO: 2982303 - RNA, 21 nt, Human
gaggacgcucucuggccuucg

SEQ ID NO: 2982304 - RNA, 17 nt, Human
gaggcuccacuuggucu

SEQ ID NO: 2982305 - RNA, 18 nt, Human
gaggcugagaugggagaa

SEQ ID NO: 2982306 - RNA, 13 nt, Human
gaggcugaggcag

SEQ ID NO: 2982307 - RNA, 19 nt, Human
gaggcauuuguuugaacug

SEQ ID NO: 2982308 - RNA, 22 nt, Human
gaggcaugugaugagaggaaau

SEQ ID NO: 2982309 - RNA, 20 nt, Human
gaggcaugugaugagaggaa

SEQ ID NO: 2982310 - RNA, 21 nt, Human
gaggcaugugaugagaggaaa

SEQ ID NO: 2982311 - RNA, 12 nt, Human
gaggcuccacuu

SEQ ID NO: 2982312 - RNA, 15 nt, Human
gaggcuccacuuggu

SEQ ID NO: 2982313 - RNA, 21 nt, Human
gaggcauuuguuugaacugau

SEQ ID NO: 2982314 - RNA, 17 nt, Human
gagggccugcaagggag

SEQ ID NO: 2982315 - RNA, 21 nt, Human
gagggccugcaagggagugag

SEQ ID NO: 2982316 - RNA, 14 nt, Human
gagggccugcaagg

SEQ ID NO: 2982317 - RNA, 14 nt, Human
gagacggaguccca

SEQ ID NO: 2982318 - RNA, 19 nt, Human
gagacggagucccaccuug

SEQ ID NO: 2982319 - RNA, 16 nt, Human
gagacggagucccacc

SEQ ID NO: 2982320 - RNA, 18 nt, Human
gagacgggggcagagagg

SEQ ID NO: 2982321 - RNA, 18 nt, Human
gagaccugcccucaagag

SEQ ID NO: 2982322 - RNA, 21 nt, Human
gagacccugucucaaaaaaag

SEQ ID NO: 2982323 - RNA, 23 nt, Human
gagaaugaaagggcccagagagg

SEQ ID NO: 2982324 - RNA, 15 nt, Human
gagaaugaaagggcc

SEQ ID NO: 2982325 - RNA, 19 nt, Human
gacuuuuccaacccucauc

SEQ ID NO: 2982326 - RNA, 22 nt, Human
gacuuuuuauggcacuaguauu

SEQ ID NO: 2982327 - RNA, 14 nt, Human
gacuuuuccaaccc

SEQ ID NO: 2982328 - RNA, 13 nt, Human
gagacuccugcag

SEQ ID NO: 2982329 - RNA, 14 nt, Human
gagacuccugcagg

SEQ ID NO: 2982330 - RNA, 15 nt, Human
gagagccuuccaggg

SEQ ID NO: 2982331 - RNA, 16 nt, Human
gagagccuuccagggg

SEQ ID NO: 2982332 - RNA, 15 nt, Human
gagacuccauaguuu

SEQ ID NO: 2982333 - RNA, 18 nt, Human
gagagccuuccaggggug

SEQ ID NO: 2982334 - RNA, 20 nt, Human
gagagccuuccagggguggg

SEQ ID NO: 2982335 - RNA, 15 nt, Human
gagagcuagcagcag

SEQ ID NO: 2982336 - RNA, 21 nt, Human
gagagcuagcagcagggaggg

SEQ ID NO: 2982337 - RNA, 13 nt, Human
gagagcugggugu

SEQ ID NO: 2982338 - RNA, 20 nt, Human
gagagcugggugucaagagg

SEQ ID NO: 2982339 - RNA, 12 nt, Human
gagaggaaauca

SEQ ID NO: 2982340 - RNA, 15 nt, Human
gagaggacccccuga

SEQ ID NO: 2982341 - RNA, 16 nt, Human
gagaugcuagaacucc

SEQ ID NO: 2982342 - RNA, 20 nt, Human
gagaugcuagaacucccuuu

SEQ ID NO: 2982343 - RNA, 21 nt, Human
gagauugcaccacugcacucc

SEQ ID NO: 2982344 - RNA, 14 nt, Human
gagauuggaaggaa

SEQ ID NO: 2982345 - RNA, 21 nt, Human
gagauugugccccugcacucc

SEQ ID NO: 2982346 - RNA, 15 nt, Human
gcagcucuccccuuc

SEQ ID NO: 2982347 - RNA, 15 nt, Human
gcagccacauuccug

SEQ ID NO: 2982348 - RNA, 16 nt, Human
gcagccaggccacaag

SEQ ID NO: 2982349 - RNA, 18 nt, Human
gcagcccaccccucaaca

SEQ ID NO: 2982350 - RNA, 22 nt, Human
gcagaacagugauuaccaggga

SEQ ID NO: 2982351 - RNA, 18 nt, Human
gcagaacagugauuacca

SEQ ID NO: 2982352 - RNA, 13 nt, Human
gcagaggaaagca

SEQ ID NO: 2982353 - RNA, 14 nt, Human
gcagaggaaagcaa

SEQ ID NO: 2982354 - RNA, 18 nt, Human
gcagaggaaagcaaagga

SEQ ID NO: 2982355 - RNA, 20 nt, Human
gcagaggaaagcaaaggaga

SEQ ID NO: 2982356 - RNA, 21 nt, Human
gcagaggaaagcaaaggagau

SEQ ID NO: 2982357 - RNA, 14 nt, Human
gcagagggcacaga

SEQ ID NO: 2982358 - RNA, 17 nt, Human
gcagcauauucaggaag

SEQ ID NO: 2982359 - RNA, 18 nt, Human
gcagcauauucaggaagc

SEQ ID NO: 2982360 - RNA, 19 nt, Human
gcagcauauucaggaagcu

SEQ ID NO: 2982361 - RNA, 23 nt, Human
gcagcauauucaggaagcucagg

SEQ ID NO: 2982362 - RNA, 13 nt, Human
gcagaacagugau

SEQ ID NO: 2982363 - RNA, 12 nt, Human
gcagaacaguga

SEQ ID NO: 2982364 - RNA, 22 nt, Human
gcacuuuguucuggcucuucca

SEQ ID NO: 2982365 - RNA, 12 nt, Human
gcacuccccugc

SEQ ID NO: 2982366 - RNA, 15 nt, Human
gcacuccccugcugg

SEQ ID NO: 2982367 - RNA, 18 nt, Human
gcacuuuguucuggcucu

SEQ ID NO: 2982368 - RNA, 19 nt, Human
gcacuuuguucuggcucuu

SEQ ID NO: 2982369 - RNA, 13 nt, Human
gcacuccccugcu

SEQ ID NO: 2982370 - RNA, 14 nt, Human
gcacuccccugcug

SEQ ID NO: 2982371 - RNA, 14 nt, Human
gcacuccagccugg

SEQ ID NO: 2982372 - RNA, 18 nt, Human
gcaagugagagcugggug

SEQ ID NO: 2982373 - RNA, 17 nt, Human
gcacucagaagacacug

SEQ ID NO: 2982374 - RNA, 20 nt, Human
gcacucagaagacacugaug

SEQ ID NO: 2982375 - RNA, 14 nt, Human
gcagucuucaguuu

SEQ ID NO: 2982376 - RNA, 13 nt, Human
gcagugagacugg

SEQ ID NO: 2982377 - RNA, 14 nt, Human
gcagugagacuggg

SEQ ID NO: 2982378 - RNA, 22 nt, Human
gcaguuguugcccacagcugua

SEQ ID NO: 2982379 - RNA, 13 nt, Human
gcagugaugucac

SEQ ID NO: 2982380 - RNA, 17 nt, Human
gcauacguacacauuuu

SEQ ID NO: 2982381 - RNA, 16 nt, Human
gcauacguacacauuu

SEQ ID NO: 2982382 - RNA, 15 nt, Human
gcauacguacacauu

SEQ ID NO: 2982383 - RNA, 17 nt, Human
gcauuuaaaagauacag

SEQ ID NO: 2982384 - RNA, 16 nt, Human
gcauuuaaaagauaca

SEQ ID NO: 2982385 - RNA, 16 nt, Human
gcauugugggaagggg

SEQ ID NO: 2982386 - RNA, 18 nt, Human
gcauugugggaaggggag

SEQ ID NO: 2982387 - RNA, 22 nt, Human
gcauuuaaaagauacaguuacu

SEQ ID NO: 2982388 - RNA, 18 nt, Human
gcauuuaaaagauacagu

SEQ ID NO: 2982389 - RNA, 15 nt, Human
gcauuuacuuugugu

SEQ ID NO: 2982390 - RNA, 13 nt, Human
gcauugugggaag

SEQ ID NO: 2982391 - RNA, 15 nt, Human
gcauugugggaaggg

SEQ ID NO: 2982392 - RNA, 21 nt, Human
gcaugugaugagaggaaauca

SEQ ID NO: 2982393 - RNA, 18 nt, Human
gcaugugaugagaggaaa

SEQ ID NO: 2982394 - RNA, 19 nt, Human
gcaugugaugagaggaaau

SEQ ID NO: 2982395 - RNA, 16 nt, Human
gcaugguuuggagcug

SEQ ID NO: 2982396 - RNA, 21 nt, Human
gcauggcugccaaugggagcu

SEQ ID NO: 2982397 - RNA, 13 nt, Human
gcauccuggcacc

SEQ ID NO: 2982398 - RNA, 14 nt, Human
gcauccaguaucuu

SEQ ID NO: 2982399 - RNA, 17 nt, Human
gcauccaguaucuugaa

SEQ ID NO: 2982400 - RNA, 18 nt, Human
gcauccaguaucuugaag

SEQ ID NO: 2982401 - RNA, 21 nt, Human
gauuuuuuuuuccuucagugc

SEQ ID NO: 2982402 - RNA, 14 nt, Human
gcaaaaaggcagga

SEQ ID NO: 2982403 - RNA, 22 nt, Human
gcaaaagaugcuucucacugcc

SEQ ID NO: 2982404 - RNA, 17 nt, Human
gcaaaagaugcuucuca

SEQ ID NO: 2982405 - RNA, 16 nt, Human
gauuuuuuuuuccuuc

SEQ ID NO: 2982406 - RNA, 12 nt, Human
gauuucacucuc

SEQ ID NO: 2982407 - RNA, 17 nt, Human
gauuuuuuuuuccuuca

SEQ ID NO: 2982408 - RNA, 18 nt, Human
gauuuuuuuuuccuucag

SEQ ID NO: 2982409 - RNA, 11 nt, Human
gauuucacucu

SEQ ID NO: 2982410 - RNA, 18 nt, Human
gauuuaacagaaauguac

SEQ ID NO: 2982411 - RNA, 17 nt, Human
gauuuaacagaaaugua

SEQ ID NO: 2982412 - RNA, 16 nt, Human
gauuuaacagaaaugu

SEQ ID NO: 2982413 - RNA, 20 nt, Human
gauucuucugcuucagccuc

SEQ ID NO: 2982414 - RNA, 19 nt, Human
gauuuaacagaaauguaca

SEQ ID NO: 2982415 - RNA, 14 nt, Human
gauuuaauaugcaa

SEQ ID NO: 2982416 - RNA, 15 nt, Human
gauucuucugcuuca

SEQ ID NO: 2982417 - RNA, 13 nt, Human
gauucuucugcuu

SEQ ID NO: 2982418 - RNA, 12 nt, Human
gauucuucugcu

SEQ ID NO: 2982419 - RNA, 13 nt, Human
gcaacaggcuggg

SEQ ID NO: 2982420 - RNA, 15 nt, Human
gcaacaggcugggcu

SEQ ID NO: 2982421 - RNA, 14 nt, Human
gcaacaggcugggc

SEQ ID NO: 2982422 - RNA, 19 nt, Human
gcaacaggcugggcuucag

SEQ ID NO: 2982423 - RNA, 16 nt, Human
gcaacaggcugggcuu

SEQ ID NO: 2982424 - RNA, 16 nt, Human
gcaaccaccaccaacc

SEQ ID NO: 2982425 - RNA, 18 nt, Human
gcaaccaccaccaaccac

SEQ ID NO: 2982426 - RNA, 13 nt, Human
gcaaccaccacca

SEQ ID NO: 2982427 - RNA, 19 nt, Human
gcaaccuccgccucuuggg

SEQ ID NO: 2982428 - RNA, 16 nt, Human
gcaacccccagccugc

SEQ ID NO: 2982429 - RNA, 15 nt, Human
gcaacccccagccug

SEQ ID NO: 2982430 - RNA, 14 nt, Human
gcaacccccagccu

SEQ ID NO: 2982431 - RNA, 20 nt, Human
gcaaccuccgccucuugggu

SEQ ID NO: 2982432 - RNA, 15 nt, Human
gcaagugagagcugg

SEQ ID NO: 2982433 - RNA, 16 nt, Human
gcaagugagagcuggg

SEQ ID NO: 2982434 - RNA, 20 nt, Human
gaucaaaagguuaauaaagu

SEQ ID NO: 2982435 - RNA, 17 nt, Human
gauauuuuuuucuuuuc

SEQ ID NO: 2982436 - RNA, 23 nt, Human
gaucaaaagguuaauaaaguaau

SEQ ID NO: 2982437 - RNA, 19 nt, Human
gauccacccaccucagccu

SEQ ID NO: 2982438 - RNA, 18 nt, Human
gauccacccaccucagcc

SEQ ID NO: 2982439 - RNA, 21 nt, Human
gauccaagcuggucccacuca

SEQ ID NO: 2982440 - RNA, 21 nt, Human
gauccacccaccucagccucc

SEQ ID NO: 2982441 - RNA, 20 nt, Human
gauccacccaccucagccuc

SEQ ID NO: 2982442 - RNA, 22 nt, Human
gauccacccaccucagccuccc

SEQ ID NO: 2982443 - RNA, 19 nt, Human
gauccaagcuggucccacu

SEQ ID NO: 2982444 - RNA, 17 nt, Human
gauccaagcugguccca

SEQ ID NO: 2982445 - RNA, 16 nt, Human
gauccaagcugguccc

SEQ ID NO: 2982446 - RNA, 12 nt, Human
gauccaagcugg

SEQ ID NO: 2982447 - RNA, 21 nt, Human
gauacuguaucaugacaaaga

SEQ ID NO: 2982448 - RNA, 17 nt, Human
gauacuguaucaugaca

SEQ ID NO: 2982449 - RNA, 12 nt, Human
gauacugaaaua

SEQ ID NO: 2982450 - RNA, 23 nt, Human
gauacaguuacucagaauucucu

SEQ ID NO: 2982451 - RNA, 19 nt, Human
gauacaguuacucagaauu

SEQ ID NO: 2982452 - RNA, 16 nt, Human
gauacaguuacucaga

SEQ ID NO: 2982453 - RNA, 17 nt, Human
gaugcuucuucagagac

SEQ ID NO: 2982454 - RNA, 20 nt, Human
gaugcuucuucagagacucc

SEQ ID NO: 2982455 - RNA, 21 nt, Human
gaugcuucuucagagacuccu

SEQ ID NO: 2982456 - RNA, 23 nt, Human
gaugcuucucacugccaugccag

SEQ ID NO: 2982457 - RNA, 22 nt, Human
gaugauuggaggggggaggugg

SEQ ID NO: 2982458 - RNA, 13 nt, Human
gaugauccuaggc

SEQ ID NO: 2982459 - RNA, 14 nt, Human
gaugauccuaggca

SEQ ID NO: 2982460 - RNA, 15 nt, Human
gaucucuaacuucac

SEQ ID NO: 2982461 - RNA, 18 nt, Human
gaucucuugagccuggga

SEQ ID NO: 2982462 - RNA, 19 nt, Human
gaucucuugagccugggag

SEQ ID NO: 2982463 - RNA, 20 nt, Human
ggaaugauauaagguuuuuu

SEQ ID NO: 2982464 - RNA, 12 nt, Human
ggacacagcucu

SEQ ID NO: 2982465 - RNA, 19 nt, Human
ggaaugaaugucaguguga

SEQ ID NO: 2982466 - RNA, 12 nt, Human
ggacacccugug

SEQ ID NO: 2982467 - RNA, 13 nt, Human
ggacacagcucuu

SEQ ID NO: 2982468 - RNA, 16 nt, Human
ggaagcucagggccug

SEQ ID NO: 2982469 - RNA, 17 nt, Human
ggaagcucagggccugg

SEQ ID NO: 2982470 - RNA, 21 nt, Human
ggaagcucagggccuggcuca

SEQ ID NO: 2982471 - RNA, 15 nt, Human
ggaauaccugucccc

SEQ ID NO: 2982472 - RNA, 16 nt, Human
ggaauaccuguccccc

SEQ ID NO: 2982473 - RNA, 19 nt, Human
ggaauaccugucccccuga

SEQ ID NO: 2982474 - RNA, 19 nt, Human
ggaauacucuuauaucuau

SEQ ID NO: 2982475 - RNA, 16 nt, Human
ggaauauauaaccagu

SEQ ID NO: 2982476 - RNA, 18 nt, Human
ggacagucaccucaugga

SEQ ID NO: 2982477 - RNA, 17 nt, Human
ggacagucaccucaugg

SEQ ID NO: 2982478 - RNA, 21 nt, Human
ggacagucaccucauggaauu

SEQ ID NO: 2982479 - RNA, 17 nt, Human
ggacagggaggugaccc

SEQ ID NO: 2982480 - RNA, 23 nt, Human
ggacaggcauguucucugaggac

SEQ ID NO: 2982481 - RNA, 13 nt, Human
ggacacccuguga

SEQ ID NO: 2982482 - RNA, 23 nt, Human
ggacacccugugauggggcccug

SEQ ID NO: 2982483 - RNA, 19 nt, Human
ggacauauauuuuuuaaaa

SEQ ID NO: 2982484 - RNA, 13 nt, Human
ggacauggacaag

SEQ ID NO: 2982485 - RNA, 18 nt, Human
ggaagccgcuggggccag

SEQ ID NO: 2982486 - RNA, 22 nt, Human
ggaagccagcaggcucucaggc

SEQ ID NO: 2982487 - RNA, 23 nt, Human
ggaagccagcaggcucucaggcc

SEQ ID NO: 2982488 - RNA, 21 nt, Human
ggaagccagcaggcucucagg

SEQ ID NO: 2982489 - RNA, 23 nt, Human
ggaaaucaccgaaaacguggcug

SEQ ID NO: 2982490 - RNA, 19 nt, Human
ggaaaucaggguuaguauu

SEQ ID NO: 2982491 - RNA, 13 nt, Human
ggaaaggaaugca

SEQ ID NO: 2982492 - RNA, 24 nt, Human
ggaaaggaagugggacuggcacua

SEQ ID NO: 2982493 - RNA, 17 nt, Human
ggaaaggaaugcaaaga

SEQ ID NO: 2982494 - RNA, 19 nt, Human
ggaaagcaaaggagauugg

SEQ ID NO: 2982495 - RNA, 16 nt, Human
ggaaagaguaggaaga

SEQ ID NO: 2982496 - RNA, 17 nt, Human
ggaaagaguaggaagac

SEQ ID NO: 2982497 - RNA, 20 nt, Human
ggaaagacuuuuccaacccu

SEQ ID NO: 2982498 - RNA, 14 nt, Human
ggaaagaggcucug

SEQ ID NO: 2982499 - RNA, 16 nt, Human
ggaaaaaauaacaaug

SEQ ID NO: 2982500 - RNA, 19 nt, Human
gcuuuugugcauuaucuag

SEQ ID NO: 2982501 - RNA, 13 nt, Human
gcuuuugugcauu

SEQ ID NO: 2982502 - RNA, 15 nt, Human
gcuuuuuaauauuga

SEQ ID NO: 2982503 - RNA, 13 nt, Human
ggaaacugccagc

SEQ ID NO: 2982504 - RNA, 15 nt, Human
ggaaacccagcucug

SEQ ID NO: 2982505 - RNA, 20 nt, Human
ggaaacagcuaaugggacac

SEQ ID NO: 2982506 - RNA, 17 nt, Human
ggaaacagaugaaaagc

SEQ ID NO: 2982507 - RNA, 13 nt, Human
gcuuuugcauauu

SEQ ID NO: 2982508 - RNA, 19 nt, Human
gcuucuucagagacuccug

SEQ ID NO: 2982509 - RNA, 21 nt, Human
gcuucuucagagacuccugca

SEQ ID NO: 2982510 - RNA, 16 nt, Human
gcuugaccgugaggcc

SEQ ID NO: 2982511 - RNA, 17 nt, Human
gcuugaccgugaggcca

SEQ ID NO: 2982512 - RNA, 18 nt, Human
gcuugaccgugaggccag

SEQ ID NO: 2982513 - RNA, 19 nt, Human
gcuugaccgugaggccaga

SEQ ID NO: 2982514 - RNA, 23 nt, Human
gcuugggcuucauccuccucaga

SEQ ID NO: 2982515 - RNA, 16 nt, Human
gcuuggggaccagagc

SEQ ID NO: 2982516 - RNA, 16 nt, Human
gcuuaacuucacauau

SEQ ID NO: 2982517 - RNA, 16 nt, Human
gcuucuucagagacuc

SEQ ID NO: 2982518 - RNA, 17 nt, Human
gcuuaacuucacauauu

SEQ ID NO: 2982519 - RNA, 14 nt, Human
gcuuaacuucacau

SEQ ID NO: 2982520 - RNA, 22 nt, Human
gcuuucuacccagcgagcccug

SEQ ID NO: 2982521 - RNA, 19 nt, Human
gcuuucuacccagcgagcc

SEQ ID NO: 2982522 - RNA, 13 nt, Human
gcuuucuacccag

SEQ ID NO: 2982523 - RNA, 17 nt, Human
gcuuggggaccagagcu

SEQ ID NO: 2982524 - RNA, 18 nt, Human
gcuuggggaccagagcug

SEQ ID NO: 2982525 - RNA, 20 nt, Human
gcuuggggaccagagcugcc

SEQ ID NO: 2982526 - RNA, 21 nt, Human
gcuuggggaccagagcugcca

SEQ ID NO: 2982527 - RNA, 22 nt, Human
gcuuggggaccagagcugccac

SEQ ID NO: 2982528 - RNA, 19 nt, Human
gcuugggcuucauccuccu

SEQ ID NO: 2982529 - RNA, 15 nt, Human
gcugugcugcccugc

SEQ ID NO: 2982530 - RNA, 16 nt, Human
gcugugcugcccugcc

SEQ ID NO: 2982531 - RNA, 17 nt, Human
gcugugcugcccugccc

SEQ ID NO: 2982532 - RNA, 15 nt, Human
gcuguuggcuggggg

SEQ ID NO: 2982533 - RNA, 20 nt, Human
gcuguuggcugggggccuca

SEQ ID NO: 2982534 - RNA, 16 nt, Human
gcuguuggcugggggc

SEQ ID NO: 2982535 - RNA, 14 nt, Human
gcuguuggcugggg

SEQ ID NO: 2982536 - RNA, 16 nt, Human
gcugugcucuggacag

SEQ ID NO: 2982537 - RNA, 15 nt, Human
gcugugcucuggaca

SEQ ID NO: 2982538 - RNA, 14 nt, Human
gcugugcugcccug

SEQ ID NO: 2982539 - RNA, 13 nt, Human
gcugugcucugga

SEQ ID NO: 2982540 - RNA, 18 nt, Human
gcuguauuuuaaaagaau

SEQ ID NO: 2982541 - RNA, 20 nt, Human
gcuguauuuuaaaagaauga

SEQ ID NO: 2982542 - RNA, 21 nt, Human
gcuguauuuuaaaagaaugau

SEQ ID NO: 2982543 - RNA, 17 nt, Human
gcuguaucccaugagcc

SEQ ID NO: 2982544 - RNA, 12 nt, Human
gcugcugaaggc

SEQ ID NO: 2982545 - RNA, 13 nt, Human
gcugcugaaacaa

SEQ ID NO: 2982546 - RNA, 19 nt, Human
gcuggcuguuggcuggggg

SEQ ID NO: 2982547 - RNA, 18 nt, Human
gcuggcuguuggcugggg

SEQ ID NO: 2982548 - RNA, 18 nt, Human
gcuggcgugcaguggugc

SEQ ID NO: 2982549 - RNA, 15 nt, Human
gcuggcgugcagugg

SEQ ID NO: 2982550 - RNA, 14 nt, Human
gcuggcgugcagug

SEQ ID NO: 2982551 - RNA, 17 nt, Human
gcugggguggggaccuc

SEQ ID NO: 2982552 - RNA, 19 nt, Human
gcugggguggggaccucag

SEQ ID NO: 2982553 - RNA, 23 nt, Human
gcuggcuguuggcugggggccuc

SEQ ID NO: 2982554 - RNA, 20 nt, Human
gcuggcuguuggcugggggc

SEQ ID NO: 2982555 - RNA, 17 nt, Human
gcuggcuguuggcuggg

SEQ ID NO: 2982556 - RNA, 14 nt, Human
gcugggcagguugg

SEQ ID NO: 2982557 - RNA, 22 nt, Human
gcugggguggggaccucaggcc

SEQ ID NO: 2982558 - RNA, 23 nt, Human
gcugggguggggaccucaggccu

SEQ ID NO: 2982559 - RNA, 18 nt, Human
gcuggguucuacccaggu

SEQ ID NO: 2982560 - RNA, 17 nt, Human
gcuggguucuacccagg

SEQ ID NO: 2982561 - RNA, 20 nt, Human
gcuggguucuacccaggugc

SEQ ID NO: 2982562 - RNA, 21 nt, Human
gcuggguucuacccaggugcu

SEQ ID NO: 2982563 - RNA, 16 nt, Human
gcugccucucccauca

SEQ ID NO: 2982564 - RNA, 20 nt, Human
gcugccugggaucccucauc

SEQ ID NO: 2982565 - RNA, 13 nt, Human
gcugccuguucag

SEQ ID NO: 2982566 - RNA, 12 nt, Human
gcugccuguuca

SEQ ID NO: 2982567 - RNA, 17 nt, Human
gcugccuguucagcucc

SEQ ID NO: 2982568 - RNA, 21 nt, Human
gcugccugggaucccucaucc

SEQ ID NO: 2982569 - RNA, 17 nt, Human
gcugccccuggcagccc

SEQ ID NO: 2982570 - RNA, 20 nt, Human
gcugccccuggcagccccug

SEQ ID NO: 2982571 - RNA, 18 nt, Human
gcugccccuggcagcccc

SEQ ID NO: 2982572 - RNA, 19 nt, Human
gcugccccuggcagccccu

SEQ ID NO: 2982573 - RNA, 16 nt, Human
gcugccccugcacagc

SEQ ID NO: 2982574 - RNA, 18 nt, Human
gcugcacccucaggcagg

SEQ ID NO: 2982575 - RNA, 19 nt, Human
gcugcacccucaggcaggu

SEQ ID NO: 2982576 - RNA, 13 nt, Human
gcugcaccggcug

SEQ ID NO: 2982577 - RNA, 16 nt, Human
gcugcacccucaggca

SEQ ID NO: 2982578 - RNA, 18 nt, Human
gcugagggugagugggug

SEQ ID NO: 2982579 - RNA, 23 nt, Human
gcugagggugagugggugaauaa

SEQ ID NO: 2982580 - RNA, 14 nt, Human
gcugaggugggagg

SEQ ID NO: 2982581 - RNA, 13 nt, Human
gcugaggcaggag

SEQ ID NO: 2982582 - RNA, 14 nt, Human
gcugaggcaggaga

SEQ ID NO: 2982583 - RNA, 21 nt, Human
gcugaggcaggagacuggcgu

SEQ ID NO: 2982584 - RNA, 16 nt, Human
gcugaggcaggagacu

SEQ ID NO: 2982585 - RNA, 22 nt, Human
gcugagauccuggacugagggg

SEQ ID NO: 2982586 - RNA, 14 nt, Human
gcugagauccugga

SEQ ID NO: 2982587 - RNA, 16 nt, Human
gcugagauccuggacu

SEQ ID NO: 2982588 - RNA, 19 nt, Human
gcccaggaguuuggccaga

SEQ ID NO: 2982589 - RNA, 20 nt, Human
gcccaggaguuuggccagaa

SEQ ID NO: 2982590 - RNA, 11 nt, Human
gcccaggcagg

SEQ ID NO: 2982591 - RNA, 18 nt, Human
gcccaggaguuuggccag

SEQ ID NO: 2982592 - RNA, 12 nt, Human
gcccaggccccu

SEQ ID NO: 2982593 - RNA, 11 nt, Human
gcccaggcccc

SEQ ID NO: 2982594 - RNA, 21 nt, Human
gcccaggccccugccacccug

SEQ ID NO: 2982595 - RNA, 20 nt, Human
gcccaggccccugccacccu

SEQ ID NO: 2982596 - RNA, 22 nt, Human
gcccaggccccugccacccugg

SEQ ID NO: 2982597 - RNA, 18 nt, Human
gcccaggccccugccacc

SEQ ID NO: 2982598 - RNA, 13 nt, Human
gcauuuagaugua

SEQ ID NO: 2982599 - RNA, 19 nt, Human
gcauuuaggccaugggaca

SEQ ID NO: 2982600 - RNA, 12 nt, Human
gcauuuagaugu

SEQ ID NO: 2982601 - RNA, 18 nt, Human
gcauuuacuuuguguuca

SEQ ID NO: 2982602 - RNA, 15 nt, Human
gcccacgcccccacu

SEQ ID NO: 2982603 - RNA, 16 nt, Human
gcccacgcccccacug

SEQ ID NO: 2982604 - RNA, 17 nt, Human
gcccacgcccccacugg

SEQ ID NO: 2982605 - RNA, 21 nt, Human
gcccacgcccccacuggugac

SEQ ID NO: 2982606 - RNA, 24 nt, Human
gcccaggaaaggcuccaggagcag

SEQ ID NO: 2982607 - RNA, 22 nt, Human
gcccaggaaaggcuccaggagc

SEQ ID NO: 2982608 - RNA, 23 nt, Human
gcccaggaaaggcuccaggagca

SEQ ID NO: 2982609 - RNA, 13 nt, Human
gcccacuucugcc

SEQ ID NO: 2982610 - RNA, 21 nt, Human
gcccacgcuggagugcaguga

SEQ ID NO: 2982611 - RNA, 19 nt, Human
gcccacgcuggagugcagu

SEQ ID NO: 2982612 - RNA, 23 nt, Human
gcccacgcuggagugcagugagc

SEQ ID NO: 2982613 - RNA, 12 nt, Human
gccccuggcagc

SEQ ID NO: 2982614 - RNA, 15 nt, Human
gccccuggcagcccc

SEQ ID NO: 2982615 - RNA, 16 nt, Human
gccccugcugguucag

SEQ ID NO: 2982616 - RNA, 15 nt, Human
gccccugcugguuca

SEQ ID NO: 2982617 - RNA, 12 nt, Human
gccccugcuggu

SEQ ID NO: 2982618 - RNA, 18 nt, Human
gccccacagccccaucug

SEQ ID NO: 2982619 - RNA, 15 nt, Human
gccccaccagugccu

SEQ ID NO: 2982620 - RNA, 14 nt, Human
gccccaccagugcc

SEQ ID NO: 2982621 - RNA, 13 nt, Human
gccccaccagugc

SEQ ID NO: 2982622 - RNA, 22 nt, Human
gccccaccagugccucucccug

SEQ ID NO: 2982623 - RNA, 18 nt, Human
gccccaccagugccucuc

SEQ ID NO: 2982624 - RNA, 17 nt, Human
gccccaccagugccucu

SEQ ID NO: 2982625 - RNA, 16 nt, Human
gccccaccagugccuc

SEQ ID NO: 2982626 - RNA, 20 nt, Human
gccccaaaacucuccucugc

SEQ ID NO: 2982627 - RNA, 21 nt, Human
gccccaaaacucuccucugcu

SEQ ID NO: 2982628 - RNA, 11 nt, Human
gccccaaaagg

SEQ ID NO: 2982629 - RNA, 14 nt, Human
gccuccauccugag

SEQ ID NO: 2982630 - RNA, 13 nt, Human
gccuccauccuga

SEQ ID NO: 2982631 - RNA, 22 nt, Human
gccuccuuugugaggaagccgc

SEQ ID NO: 2982632 - RNA, 13 nt, Human
gccucgaacuggc

SEQ ID NO: 2982633 - RNA, 16 nt, Human
gccucgaacuggcugc

SEQ ID NO: 2982634 - RNA, 14 nt, Human
gccucugggacugg

SEQ ID NO: 2982635 - RNA, 12 nt, Human
gccuccauccug

SEQ ID NO: 2982636 - RNA, 22 nt, Human
gccucauguccacugguucuuc

SEQ ID NO: 2982637 - RNA, 17 nt, Human
gccuacaggagugagca

SEQ ID NO: 2982638 - RNA, 19 nt, Human
gccuagcauacguacacau

SEQ ID NO: 2982639 - RNA, 12 nt, Human
gccuagcauacg

SEQ ID NO: 2982640 - RNA, 16 nt, Human
gccuacaggagugagc

SEQ ID NO: 2982641 - RNA, 16 nt, Human
gcccugugggccccca

SEQ ID NO: 2982642 - RNA, 17 nt, Human
gcccugugggcccccaa

SEQ ID NO: 2982643 - RNA, 21 nt, Human
gcccuuaccugccaggaagcc

SEQ ID NO: 2982644 - RNA, 22 nt, Human
gcccuuaccugccaggaagcca

SEQ ID NO: 2982645 - RNA, 23 nt, Human
gcccuuaccugccaggaagccag

SEQ ID NO: 2982646 - RNA, 14 nt, Human
gcccugcccaccug

SEQ ID NO: 2982647 - RNA, 15 nt, Human
gcccugcccaccugg

SEQ ID NO: 2982648 - RNA, 16 nt, Human
gccccuggcagccccu

SEQ ID NO: 2982649 - RNA, 17 nt, Human
gccccuggcagccccug

SEQ ID NO: 2982650 - RNA, 16 nt, Human
gcuaguugggcuuccu

SEQ ID NO: 2982651 - RNA, 14 nt, Human
gcuaguugggcuuc

SEQ ID NO: 2982652 - RNA, 22 nt, Human
gcuaggugacauauacauacuu

SEQ ID NO: 2982653 - RNA, 20 nt, Human
gcuaggaccccuccaugugg

SEQ ID NO: 2982654 - RNA, 22 nt, Human
gcuaagugauccucccaccuca

SEQ ID NO: 2982655 - RNA, 18 nt, Human
gcuaagugauccucccac

SEQ ID NO: 2982656 - RNA, 18 nt, Human
gcucagggccuggcucag

SEQ ID NO: 2982657 - RNA, 19 nt, Human
gcucagggccuggcucagg

SEQ ID NO: 2982658 - RNA, 13 nt, Human
gcucaggaguuug

SEQ ID NO: 2982659 - RNA, 17 nt, Human
gcucagggccuggcuca

SEQ ID NO: 2982660 - RNA, 20 nt, Human
gcucagggccuggcucaggu

SEQ ID NO: 2982661 - RNA, 23 nt, Human
gccuucggccuccauccugaggc

SEQ ID NO: 2982662 - RNA, 16 nt, Human
gccuucucugaaggac

SEQ ID NO: 2982663 - RNA, 15 nt, Human
gccuucucugaagga

SEQ ID NO: 2982664 - RNA, 17 nt, Human
gccuguucagcuccagc

SEQ ID NO: 2982665 - RNA, 16 nt, Human
gccuguucagcuccag

SEQ ID NO: 2982666 - RNA, 14 nt, Human
gccuguucagcucc

SEQ ID NO: 2982667 - RNA, 15 nt, Human
gccuguucagcucca

SEQ ID NO: 2982668 - RNA, 14 nt, Human
gccuugaacuuuga

SEQ ID NO: 2982669 - RNA, 19 nt, Human
gccugugccucugggacug

SEQ ID NO: 2982670 - RNA, 23 nt, Human
gccugggaucccucauccucaua

SEQ ID NO: 2982671 - RNA, 21 nt, Human
gccugggaucccucauccuca

SEQ ID NO: 2982672 - RNA, 11 nt, Human
gccugggcaga

SEQ ID NO: 2982673 - RNA, 21 nt, Human
gccugggcaacagagcaagac

SEQ ID NO: 2982674 - RNA, 20 nt, Human
gccugggcaacagagcaaga

SEQ ID NO: 2982675 - RNA, 18 nt, Human
gccugggcaacagagcaa

SEQ ID NO: 2982676 - RNA, 16 nt, Human
gccuugaccauucucc

SEQ ID NO: 2982677 - RNA, 21 nt, Human
gccuugaccauucuccaccug

SEQ ID NO: 2982678 - RNA, 22 nt, Human
gccuugaccauucuccaccugc

SEQ ID NO: 2982679 - RNA, 23 nt, Human
gccuugaacuuugaccucugcag

SEQ ID NO: 2982680 - RNA, 17 nt, Human
gcgauucuucugcuuca

SEQ ID NO: 2982681 - RNA, 22 nt, Human
gcgauucuucugcuucagccuc

SEQ ID NO: 2982682 - RNA, 23 nt, Human
gccuugaccauucuccaccugcc

SEQ ID NO: 2982683 - RNA, 23 nt, Human
gcgauucuucugcuucagccucc

SEQ ID NO: 2982684 - RNA, 20 nt, Human
gcgcagcauauucaggaagc

SEQ ID NO: 2982685 - RNA, 21 nt, Human
gcgcagcauauucaggaagcu

SEQ ID NO: 2982686 - RNA, 15 nt, Human
gcggcuggcagccca

SEQ ID NO: 2982687 - RNA, 16 nt, Human
gcggccuuuggcuuca

SEQ ID NO: 2982688 - RNA, 19 nt, Human
aaaauaauuagguauuuuc

SEQ ID NO: 2982689 - RNA, 14 nt, Human
aaaauaaucucuga

SEQ ID NO: 2982690 - RNA, 11 nt, Human
aaaauaauuuu

SEQ ID NO: 2982691 - RNA, 13 nt, Human
aaaauaagucuga

SEQ ID NO: 2982692 - RNA, 17 nt, Human
aaaauaauuuuuauauu

SEQ ID NO: 2982693 - RNA, 16 nt, Human
aaaauaauuuuuauau

SEQ ID NO: 2982694 - RNA, 14 nt, Human
aaaauacacacuca

SEQ ID NO: 2982695 - RNA, 13 nt, Human
aaaauaccaagga

SEQ ID NO: 2982696 - RNA, 21 nt, Human
aaaaggaagcuuacaugccua

SEQ ID NO: 2982697 - RNA, 13 nt, Human
aaaaggaugcaca

SEQ ID NO: 2982698 - RNA, 22 nt, Human
aaaaggagccaauuuaaagaaa

SEQ ID NO: 2982699 - RNA, 22 nt, Human
aaaaggaugcacagaguuguua

SEQ ID NO: 2982700 - RNA, 19 nt, Human
aaaaggaugcacagaguug

SEQ ID NO: 2982701 - RNA, 15 nt, Human
aaaaggaugcacaga

SEQ ID NO: 2982702 - RNA, 14 nt, Human
aaaaggaugcacag

SEQ ID NO: 2982703 - RNA, 16 nt, Human
aaaagguuaauaaagu

SEQ ID NO: 2982704 - RNA, 17 nt, Human
aaaagguuaauaaagua

SEQ ID NO: 2982705 - RNA, 11 nt, Human
aaaaggcagga

SEQ ID NO: 2982706 - RNA, 19 nt, Human
aaaagguaugcaaucaaau

SEQ ID NO: 2982707 - RNA, 16 nt, Human
aaaauauuuuccugcc

SEQ ID NO: 2982708 - RNA, 17 nt, Human
aaaaucucaauauuuca

SEQ ID NO: 2982709 - RNA, 13 nt, Human
aaaauagaaaguu

SEQ ID NO: 2982710 - RNA, 17 nt, Human
aaaauagaauugacauu

SEQ ID NO: 2982711 - RNA, 20 nt, Human
aaaaugguguuuuaucuucu

SEQ ID NO: 2982712 - RNA, 22 nt, Human
aaaaugguagcauuuuaaacaa

SEQ ID NO: 2982713 - RNA, 18 nt, Human
aaaaugguuuaaaugguc

SEQ ID NO: 2982714 - RNA, 16 nt, Human
aaaaugguuuaaaugg

SEQ ID NO: 2982715 - RNA, 22 nt, Human
gggcugggccucggaccccacu

SEQ ID NO: 2982716 - RNA, 17 nt, Human
gggcuggguucuaccca

SEQ ID NO: 2982717 - RNA, 16 nt, Human
aaaauggguuuuacug

SEQ ID NO: 2982718 - RNA, 12 nt, Human
gggcugggcaga

SEQ ID NO: 2982719 - RNA, 15 nt, Human
gggcugggcagagga

SEQ ID NO: 2982720 - RNA, 23 nt, Human
gggcugcucccaccuggcucugu

SEQ ID NO: 2982721 - RNA, 22 nt, Human
gggcugcucccaccuggcucug

SEQ ID NO: 2982722 - RNA, 21 nt, Human
gggcugcucccaccuggcucu

SEQ ID NO: 2982723 - RNA, 18 nt, Human
gggcugcucccaccuggc

SEQ ID NO: 2982724 - RNA, 20 nt, Human
gggcugcaccggcuggccug

SEQ ID NO: 2982725 - RNA, 21 nt, Human
gggcugcaccggcuggccugg

SEQ ID NO: 2982726 - RNA, 13 nt, Human
gggcugcucccac

SEQ ID NO: 2982727 - RNA, 19 nt, Human
gggcucagcggggacagcu

SEQ ID NO: 2982728 - RNA, 17 nt, Human
gggcucagcggggacag

SEQ ID NO: 2982729 - RNA, 15 nt, Human
gggcuaguugggcuu

SEQ ID NO: 2982730 - RNA, 22 nt, Human
gggcucagcaaaagaugcuucu

SEQ ID NO: 2982731 - RNA, 10 nt, Human
gggcuccaga

SEQ ID NO: 2982732 - RNA, 13 nt, Human
gggcuccagacac

SEQ ID NO: 2982733 - RNA, 21 nt, Human
gggcucagcggggacagcucc

SEQ ID NO: 2982734 - RNA, 17 nt, Human
gggcugcaccggcuggc

SEQ ID NO: 2982735 - RNA, 19 nt, Human
gggcugcaccggcuggccu

SEQ ID NO: 2982736 - RNA, 19 nt, Human
gggcucccagccaggcccu

SEQ ID NO: 2982737 - RNA, 17 nt, Human
gggcucccagccaggcc

SEQ ID NO: 2982738 - RNA, 15 nt, Human
gggcucccagccagg

SEQ ID NO: 2982739 - RNA, 22 nt, Human
gggccucgguguggagaagcgg

SEQ ID NO: 2982740 - RNA, 23 nt, Human
gggccucugcggagcacacuggc

SEQ ID NO: 2982741 - RNA, 21 nt, Human
gggccucugcggagcacacug

SEQ ID NO: 2982742 - RNA, 18 nt, Human
gggccucuuaugggcugg

SEQ ID NO: 2982743 - RNA, 15 nt, Human
gggccucagugccac

SEQ ID NO: 2982744 - RNA, 14 nt, Human
gggccucagugcca

SEQ ID NO: 2982745 - RNA, 13 nt, Human
gggccucagugcc

SEQ ID NO: 2982746 - RNA, 21 nt, Human
gggcggugagaggggaacaga

SEQ ID NO: 2982747 - RNA, 15 nt, Human
gggcgugguggcagg

SEQ ID NO: 2982748 - RNA, 12 nt, Human
gggccaggagcc

SEQ ID NO: 2982749 - RNA, 13 nt, Human
gggccaggagccu

SEQ ID NO: 2982750 - RNA, 14 nt, Human
gggccaggagccuc

SEQ ID NO: 2982751 - RNA, 17 nt, Human
gggccaugucagacaca

SEQ ID NO: 2982752 - RNA, 16 nt, Human
gggguaaggugcaucu

SEQ ID NO: 2982753 - RNA, 13 nt, Human
ggggguggccucc

SEQ ID NO: 2982754 - RNA, 15 nt, Human
gggggcugggcagag

SEQ ID NO: 2982755 - RNA, 21 nt, Human
ggggucacucuggcagcucag

SEQ ID NO: 2982756 - RNA, 11 nt, Human
gggggcuggga

SEQ ID NO: 2982757 - RNA, 14 nt, Human
gggggcugcuccca

SEQ ID NO: 2982758 - RNA, 21 nt, Human
gggggcagugcucacccacac

SEQ ID NO: 2982759 - RNA, 17 nt, Human
gggggaucacagccucu

SEQ ID NO: 2982760 - RNA, 19 nt, Human
ggggccaguuggucccccu

SEQ ID NO: 2982761 - RNA, 14 nt, Human
ggggaccagagcug

SEQ ID NO: 2982762 - RNA, 18 nt, Human
aaaauguauguguaagua

SEQ ID NO: 2982763 - RNA, 12 nt, Human
ggggaccagagc

SEQ ID NO: 2982764 - RNA, 13 nt, Human
ggggaccagagcu

SEQ ID NO: 2982765 - RNA, 15 nt, Human
aaacauuucauuucc

SEQ ID NO: 2982766 - RNA, 19 nt, Human
aaacauuuugucauauaag

SEQ ID NO: 2982767 - RNA, 14 nt, Human
gggucacucuggca

SEQ ID NO: 2982768 - RNA, 20 nt, Human
gggucacucuggcagcucag

SEQ ID NO: 2982769 - RNA, 22 nt, Human
aaaccugugucucugagaguag

SEQ ID NO: 2982770 - RNA, 16 nt, Human
gguauagauguugcua

SEQ ID NO: 2982771 - RNA, 20 nt, Human
gguaggguaagugagagagg

SEQ ID NO: 2982772 - RNA, 14 nt, Human
gguaucaggugcug

SEQ ID NO: 2982773 - RNA, 20 nt, Human
gguaaggaauaccugucccc

SEQ ID NO: 2982774 - RNA, 14 nt, Human
ggucagugcaaaua

SEQ ID NO: 2982775 - RNA, 19 nt, Human
gguaucaggugcugccauc

SEQ ID NO: 2982776 - RNA, 22 nt, Human
aaacuugauguguuaucucuua

SEQ ID NO: 2982777 - RNA, 18 nt, Human
aaacuuuacuauggcccu

SEQ ID NO: 2982778 - RNA, 19 nt, Human
aaacuuaaucuaaauggaa

SEQ ID NO: 2982779 - RNA, 15 nt, Human
gggugggacacccug

SEQ ID NO: 2982780 - RNA, 18 nt, Human
gggugggacacccuguga

SEQ ID NO: 2982781 - RNA, 19 nt, Human
aaacuguuaauaguucagg

SEQ ID NO: 2982782 - RNA, 20 nt, Human
aaacguggcugcuucaagga

SEQ ID NO: 2982783 - RNA, 21 nt, Human
aaacguggcugcuucaaggau

SEQ ID NO: 2982784 - RNA, 20 nt, Human
ggguuuuauuguuuaaaauc

SEQ ID NO: 2982785 - RNA, 20 nt, Human
ggguuuugccauguuggcca

SEQ ID NO: 2982786 - RNA, 23 nt, Human
ggguuuugccauguuggccaggc

SEQ ID NO: 2982787 - RNA, 18 nt, Human
gguaacuagggaagauaa

SEQ ID NO: 2982788 - RNA, 22 nt, Human
aaauaucccuuggacauuuuau

SEQ ID NO: 2982789 - RNA, 23 nt, Human
aaauaucccuuggacauuuuaug

SEQ ID NO: 2982790 - RNA, 22 nt, Human
aaauaucacuugucaauaaaau

SEQ ID NO: 2982791 - RNA, 18 nt, Human
aaauauaugcuaagucuu

SEQ ID NO: 2982792 - RNA, 21 nt, Human
aaauaccagccaguaaauggg

SEQ ID NO: 2982793 - RNA, 20 nt, Human
aaauaccagccaguaaaugg

SEQ ID NO: 2982794 - RNA, 21 nt, Human
aaauaccaugccauuuaaagc

SEQ ID NO: 2982795 - RNA, 19 nt, Human
aaauaccagccaguaaaug

SEQ ID NO: 2982796 - RNA, 16 nt, Human
guacacacacauacac

SEQ ID NO: 2982797 - RNA, 21 nt, Human
aaauacgugggcauucaaaug

SEQ ID NO: 2982798 - RNA, 20 nt, Human
aaauacgugggcauucaaau

SEQ ID NO: 2982799 - RNA, 15 nt, Human
aaauauaggaacuua

SEQ ID NO: 2982800 - RNA, 21 nt, Human
aaauauugguugggaugacuu

SEQ ID NO: 2982801 - RNA, 19 nt, Human
aaaucagccugcuccagcu

SEQ ID NO: 2982802 - RNA, 21 nt, Human
aaaucagccugcuccagcugu

SEQ ID NO: 2982803 - RNA, 23 nt, Human
aaaucagccugcuccagcuguuc

SEQ ID NO: 2982804 - RNA, 22 nt, Human
aaauauguuucacacaaacaag

SEQ ID NO: 2982805 - RNA, 14 nt, Human
aaauauguuucaca

SEQ ID NO: 2982806 - RNA, 23 nt, Human
aaauaucugaaaauguaugugua

SEQ ID NO: 2982807 - RNA, 22 nt, Human
aaauaucugaaaauguaugugu

SEQ ID NO: 2982808 - RNA, 21 nt, Human
aaauaucugaaaauguaugug

SEQ ID NO: 2982809 - RNA, 19 nt, Human
aaauaucugaaaauguaug

SEQ ID NO: 2982810 - RNA, 18 nt, Human
aaauaucugaaaauguau

SEQ ID NO: 2982811 - RNA, 17 nt, Human
aaauaucugaaaaugua

SEQ ID NO: 2982812 - RNA, 14 nt, Human
aaauaucugaaaau

SEQ ID NO: 2982813 - RNA, 12 nt, Human
aaauaucugaaa

SEQ ID NO: 2982814 - RNA, 13 nt, Human
aaauaugcaaagc

SEQ ID NO: 2982815 - RNA, 15 nt, Human
aaauaugcaaagcac

SEQ ID NO: 2982816 - RNA, 16 nt, Human
aaauaugcaaagcacu

SEQ ID NO: 2982817 - RNA, 17 nt, Human
aaauaugcaaagcacug

SEQ ID NO: 2982818 - RNA, 17 nt, Human
guaacauagcugugauu

SEQ ID NO: 2982819 - RNA, 16 nt, Human
guaacaagccacccca

SEQ ID NO: 2982820 - RNA, 19 nt, Human
guaacaggaaaauuuuaaa

SEQ ID NO: 2982821 - RNA, 17 nt, Human
aaauaauuagguauuuu

SEQ ID NO: 2982822 - RNA, 13 nt, Human
guaaacacaucua

SEQ ID NO: 2982823 - RNA, 22 nt, Human
aaaguguauuuuuuuacuaaua

SEQ ID NO: 2982824 - RNA, 22 nt, Human
aaauaaugugaaacuggauuaa

SEQ ID NO: 2982825 - RNA, 14 nt, Human
aaauaaugugaaac

SEQ ID NO: 2982826 - RNA, 13 nt, Human
guaauaaacucau

SEQ ID NO: 2982827 - RNA, 21 nt, Human
guaauuuuuuuaucgucacug

SEQ ID NO: 2982828 - RNA, 20 nt, Human
guaauuugugauacaaugcu

SEQ ID NO: 2982829 - RNA, 17 nt, Human
guaauuugugauacaau

SEQ ID NO: 2982830 - RNA, 15 nt, Human
guaauuugugauaca

SEQ ID NO: 2982831 - RNA, 23 nt, Human
guaauccuagcacuuugggaggc

SEQ ID NO: 2982832 - RNA, 21 nt, Human
aaagggguaggguuuaaagau

SEQ ID NO: 2982833 - RNA, 22 nt, Human
aaagggcuguuauaaucuuuca

SEQ ID NO: 2982834 - RNA, 20 nt, Human
aaagggcuguuauaaucuuu

SEQ ID NO: 2982835 - RNA, 20 nt, Human
aaagggcccagagagggugg

SEQ ID NO: 2982836 - RNA, 20 nt, Human
aaagggauggcaagaugugg

SEQ ID NO: 2982837 - RNA, 12 nt, Human
gguggcuggguu

SEQ ID NO: 2982838 - RNA, 18 nt, Human
gguggcuggguuggaggg

SEQ ID NO: 2982839 - RNA, 17 nt, Human
ggugggacacccuguga

SEQ ID NO: 2982840 - RNA, 13 nt, Human
ggugggacacccu

SEQ ID NO: 2982841 - RNA, 16 nt, Human
ggugggacacccugug

SEQ ID NO: 2982842 - RNA, 19 nt, Human
gguggggaccucaggccug

SEQ ID NO: 2982843 - RNA, 22 nt, Human
aaagcugccagccgagauagcc

SEQ ID NO: 2982844 - RNA, 12 nt, Human
aaagcugccagc

SEQ ID NO: 2982845 - RNA, 13 nt, Human
aaagcugccagcc

SEQ ID NO: 2982846 - RNA, 13 nt, Human
aaagcagugcaug

SEQ ID NO: 2982847 - RNA, 16 nt, Human
aaagcuaggccuggcc

SEQ ID NO: 2982848 - RNA, 14 nt, Human
aaagcuaggccugg

SEQ ID NO: 2982849 - RNA, 19 nt, Human
aaacuuuaugcuaagugaa

SEQ ID NO: 2982850 - RNA, 12 nt, Human
aaacuuuaugcu

SEQ ID NO: 2982851 - RNA, 21 nt, Human
ggugcugccauccagguucag

SEQ ID NO: 2982852 - RNA, 14 nt, Human
gguggcaccagcag

SEQ ID NO: 2982853 - RNA, 20 nt, Human
gguggcaccagcagccugga

SEQ ID NO: 2982854 - RNA, 16 nt, Human
aaagcagaacagugau

SEQ ID NO: 2982855 - RNA, 11 nt, Human
gguguggggga

SEQ ID NO: 2982856 - RNA, 13 nt, Human
ggugugggggaag

SEQ ID NO: 2982857 - RNA, 14 nt, Human
gguguggagaagcg

SEQ ID NO: 2982858 - RNA, 23 nt, Human
gguguggagaagcggcuggcagc

SEQ ID NO: 2982859 - RNA, 12 nt, Human
gguguggagaag

SEQ ID NO: 2982860 - RNA, 13 nt, Human
ggugggggccucg

SEQ ID NO: 2982861 - RNA, 17 nt, Human
gguguuuccuggcacug

SEQ ID NO: 2982862 - RNA, 19 nt, Human
gguguuuccuggcacugcu

SEQ ID NO: 2982863 - RNA, 17 nt, Human
gguucccauuugcuccu

SEQ ID NO: 2982864 - RNA, 22 nt, Human
gguucccuuuuuuggcugcuga

SEQ ID NO: 2982865 - RNA, 23 nt, Human
gguucccuuugacgccaucccag

SEQ ID NO: 2982866 - RNA, 22 nt, Human
gguucccuuugacgccauccca

SEQ ID NO: 2982867 - RNA, 19 nt, Human
aaaguacacuguuucaaac

SEQ ID NO: 2982868 - RNA, 18 nt, Human
aaaguacacuguuucaaa

SEQ ID NO: 2982869 - RNA, 22 nt, Human
aaaguaauuuggaaauuagguu

SEQ ID NO: 2982870 - RNA, 14 nt, Human
aaaguaauuuggaa

SEQ ID NO: 2982871 - RNA, 22 nt, Human
aaaguagaagucuuagauguau

SEQ ID NO: 2982872 - RNA, 20 nt, Human
aaaguagaagucuuagaugu

SEQ ID NO: 2982873 - RNA, 21 nt, Human
aaaguaucccuacuguaauuu

SEQ ID NO: 2982874 - RNA, 22 nt, Human
aaaguagaucaugcauagagug

SEQ ID NO: 2982875 - RNA, 21 nt, Human
aaaguguauuuuuuuacuaau

SEQ ID NO: 2982876 - RNA, 14 nt, Human
aaaguguauuuuuu

SEQ ID NO: 2982877 - RNA, 15 nt, Human
gguuucagaaaugug

SEQ ID NO: 2982878 - RNA, 16 nt, Human
gguuucuaaagcugcc

SEQ ID NO: 2982879 - RNA, 22 nt, Human
gguuucuaaagcugccagccga

SEQ ID NO: 2982880 - RNA, 19 nt, Human
gguuuuauuguuuaaaauc

SEQ ID NO: 2982881 - RNA, 17 nt, Human
gguuuucacauuggaaa

SEQ ID NO: 2982882 - RNA, 20 nt, Human
gguuuguaaauuaacuuuua

SEQ ID NO: 2982883 - RNA, 15 nt, Human
ggcacaucauuucaa

SEQ ID NO: 2982884 - RNA, 14 nt, Human
ggcacaucauuuca

SEQ ID NO: 2982885 - RNA, 18 nt, Human
ggcacaucagcacgauuu

SEQ ID NO: 2982886 - RNA, 16 nt, Human
ggcacugcuuccagug

SEQ ID NO: 2982887 - RNA, 18 nt, Human
ggcacaccgggcacucag

SEQ ID NO: 2982888 - RNA, 15 nt, Human
ggcaaaaaggcagga

SEQ ID NO: 2982889 - RNA, 20 nt, Human
ggcacugcuuccagugaggc

SEQ ID NO: 2982890 - RNA, 13 nt, Human
ggcagccaggcca

SEQ ID NO: 2982891 - RNA, 22 nt, Human
ggcagccccauucugccugccc

SEQ ID NO: 2982892 - RNA, 21 nt, Human
ggcagccccauucugccugcc

SEQ ID NO: 2982893 - RNA, 20 nt, Human
ggcagccccauucugccugc

SEQ ID NO: 2982894 - RNA, 16 nt, Human
ggcagccccauucugc

SEQ ID NO: 2982895 - RNA, 18 nt, Human
ggcaggaggaucacuuga

SEQ ID NO: 2982896 - RNA, 17 nt, Human
ggccagagacacaagcc

SEQ ID NO: 2982897 - RNA, 18 nt, Human
ggccagagacacaagccu

SEQ ID NO: 2982898 - RNA, 19 nt, Human
ggccagagggagugacaga

SEQ ID NO: 2982899 - RNA, 17 nt, Human
ggccagagggagugaca

SEQ ID NO: 2982900 - RNA, 13 nt, Human
ggccaaaggaagc

SEQ ID NO: 2982901 - RNA, 17 nt, Human
ggcauuuguuugaacug

SEQ ID NO: 2982902 - RNA, 14 nt, Human
ggccaaaggaagca

SEQ ID NO: 2982903 - RNA, 16 nt, Human
ggccaaaggaagcaca

SEQ ID NO: 2982904 - RNA, 19 nt, Human
ggccaaaggaagcacaugc

SEQ ID NO: 2982905 - RNA, 14 nt, Human
ggcauuugcugaau

SEQ ID NO: 2982906 - RNA, 23 nt, Human
ggauugugccuaauguguuugag

SEQ ID NO: 2982907 - RNA, 12 nt, Human
ggauuuaacaga

SEQ ID NO: 2982908 - RNA, 16 nt, Human
ggauuguccccgaccc

SEQ ID NO: 2982909 - RNA, 20 nt, Human
ggauuguccccgacccuugc

SEQ ID NO: 2982910 - RNA, 17 nt, Human
ggauuuaacagaaaugu

SEQ ID NO: 2982911 - RNA, 16 nt, Human
ggauuuaacagaaaug

SEQ ID NO: 2982912 - RNA, 22 nt, Human
ggauuuaacagaaauguacagc

SEQ ID NO: 2982913 - RNA, 13 nt, Human
ggauuguccccga

SEQ ID NO: 2982914 - RNA, 14 nt, Human
ggaugaaaaaauaa

SEQ ID NO: 2982915 - RNA, 16 nt, Human
ggaguucaucuugaau

SEQ ID NO: 2982916 - RNA, 15 nt, Human
ggauccugagccaga

SEQ ID NO: 2982917 - RNA, 16 nt, Human
ggauccugagccagau

SEQ ID NO: 2982918 - RNA, 18 nt, Human
ggauccugagccagauuu

SEQ ID NO: 2982919 - RNA, 19 nt, Human
ggauccugagccagauuuc

SEQ ID NO: 2982920 - RNA, 20 nt, Human
ggauccugagccagauuuca

SEQ ID NO: 2982921 - RNA, 23 nt, Human
ggauccugagccagauuucacuc

SEQ ID NO: 2982922 - RNA, 18 nt, Human
ggaucucuugagccuggg

SEQ ID NO: 2982923 - RNA, 19 nt, Human
ggaguuauugaagcagagu

SEQ ID NO: 2982924 - RNA, 16 nt, Human
ggaguggccacagaaa

SEQ ID NO: 2982925 - RNA, 12 nt, Human
ggagugggccca

SEQ ID NO: 2982926 - RNA, 22 nt, Human
ggagugggcccaaugcacuuug

SEQ ID NO: 2982927 - RNA, 15 nt, Human
ggaguggccacagaa

SEQ ID NO: 2982928 - RNA, 13 nt, Human
ggaggggggaggu

SEQ ID NO: 2982929 - RNA, 14 nt, Human
ggaggggggaggug

SEQ ID NO: 2982930 - RNA, 20 nt, Human
ggaggcggaccuuguaguga

SEQ ID NO: 2982931 - RNA, 22 nt, Human
ggaggugggauccuccaggugc

SEQ ID NO: 2982932 - RNA, 23 nt, Human
ggaggugggauccuccaggugca

SEQ ID NO: 2982933 - RNA, 21 nt, Human
ggagggugacgggggugaacu

SEQ ID NO: 2982934 - RNA, 22 nt, Human
ggagguaaggaauaccuguccc

SEQ ID NO: 2982935 - RNA, 15 nt, Human
ggcuaacuuggguua

SEQ ID NO: 2982936 - RNA, 20 nt, Human
ggcuaagcuucacuguaaaa

SEQ ID NO: 2982937 - RNA, 15 nt, Human
ggcgugaacccagga

SEQ ID NO: 2982938 - RNA, 14 nt, Human
ggccuuccccuggc

SEQ ID NO: 2982939 - RNA, 16 nt, Human
ggccuucggccuccau

SEQ ID NO: 2982940 - RNA, 18 nt, Human
ggccuucggccuccaucc

SEQ ID NO: 2982941 - RNA, 20 nt, Human
ggccuuccccuggcacuggc

SEQ ID NO: 2982942 - RNA, 21 nt, Human
ggcgagccauuugucccaagu

SEQ ID NO: 2982943 - RNA, 14 nt, Human
ggcuaccuuuguau

SEQ ID NO: 2982944 - RNA, 13 nt, Human
ggcuaccuuugua

SEQ ID NO: 2982945 - RNA, 16 nt, Human
ggcuaauguacugcau

SEQ ID NO: 2982946 - RNA, 20 nt, Human
ggcuaagugauccucccacc

SEQ ID NO: 2982947 - RNA, 15 nt, Human
ggccuggccagaugc

SEQ ID NO: 2982948 - RNA, 12 nt, Human
ggccuggccaga

SEQ ID NO: 2982949 - RNA, 16 nt, Human
ggccuggccagaugca

SEQ ID NO: 2982950 - RNA, 20 nt, Human
ggccuggaugcccccugugg

SEQ ID NO: 2982951 - RNA, 11 nt, Human
ggccuggaugc

SEQ ID NO: 2982952 - RNA, 16 nt, Human
ggccugcaagggagug

SEQ ID NO: 2982953 - RNA, 16 nt, Human
ggccagaugcaccagc

SEQ ID NO: 2982954 - RNA, 15 nt, Human
ggccagaugcaccag

SEQ ID NO: 2982955 - RNA, 18 nt, Human
ggccucccaacucacccc

SEQ ID NO: 2982956 - RNA, 19 nt, Human
ggccucccaacucacccca

SEQ ID NO: 2982957 - RNA, 17 nt, Human
ggccucccaacucaccc

SEQ ID NO: 2982958 - RNA, 13 nt, Human
ggccucagugcca

SEQ ID NO: 2982959 - RNA, 20 nt, Human
ggccucccaacucaccccag

SEQ ID NO: 2982960 - RNA, 22 nt, Human
ggccucccaacucaccccagcc

SEQ ID NO: 2982961 - RNA, 23 nt, Human
ggccucccaacucaccccagccc

SEQ ID NO: 2982962 - RNA, 13 nt, Human
aaaaauacaaaaa

SEQ ID NO: 2982963 - RNA, 22 nt, Human
ggcuggguucuacccaggugcu

SEQ ID NO: 2982964 - RNA, 14 nt, Human
ggcuggguuggagg

SEQ ID NO: 2982965 - RNA, 12 nt, Human
aaaaaggcagga

SEQ ID NO: 2982966 - RNA, 21 nt, Human
aaaaaggaugcacagaguugu

SEQ ID NO: 2982967 - RNA, 14 nt, Human
aaaaaggaggaaga

SEQ ID NO: 2982968 - RNA, 22 nt, Human
aaaaaacugcugacuguuuucu

SEQ ID NO: 2982969 - RNA, 14 nt, Human
ggcuggccuggccc

SEQ ID NO: 2982970 - RNA, 15 nt, Human
ggcuggccuggcccc

SEQ ID NO: 2982971 - RNA, 13 nt, Human
ggcuggccuggcc

SEQ ID NO: 2982972 - RNA, 13 nt, Human
ggcucccuuccca

SEQ ID NO: 2982973 - RNA, 17 nt, Human
ggcucuuccaggcuggg

SEQ ID NO: 2982974 - RNA, 18 nt, Human
ggcucuuccaggcuggga

SEQ ID NO: 2982975 - RNA, 15 nt, Human
ggcucuuccaggcug

SEQ ID NO: 2982976 - RNA, 14 nt, Human
ggcucuuccaggcu

SEQ ID NO: 2982977 - RNA, 15 nt, Human
ggcucacugcagccu

SEQ ID NO: 2982978 - RNA, 14 nt, Human
ggcucacugcagcc

SEQ ID NO: 2982979 - RNA, 13 nt, Human
ggcucacugcagc

SEQ ID NO: 2982980 - RNA, 19 nt, Human
caauaaacauuucauuucc

SEQ ID NO: 2982981 - RNA, 14 nt, Human
caaguauuagaaua

SEQ ID NO: 2982982 - RNA, 20 nt, Human
caaguauuagaauaccacag

SEQ ID NO: 2982983 - RNA, 20 nt, Human
caauauuucagauaaucaca

SEQ ID NO: 2982984 - RNA, 12 nt, Human
caauauuucaga

SEQ ID NO: 2982985 - RNA, 23 nt, Human
caaugcuguauuuuaaaagaaug

SEQ ID NO: 2982986 - RNA, 14 nt, Human
caaugcuguauuuu

SEQ ID NO: 2982987 - RNA, 23 nt, Human
caaugcuggcuguuggcuggggg

SEQ ID NO: 2982988 - RNA, 22 nt, Human
caaugcuggcuguuggcugggg

SEQ ID NO: 2982989 - RNA, 22 nt, Human
caaugcugugcccuaaagugua

SEQ ID NO: 2982990 - RNA, 14 nt, Human
cacaagacccuugu

SEQ ID NO: 2982991 - RNA, 16 nt, Human
cacaagacccuugugg

SEQ ID NO: 2982992 - RNA, 12 nt, Human
caauuuaaaaaa

SEQ ID NO: 2982993 - RNA, 16 nt, Human
cacaagacugcacauc

SEQ ID NO: 2982994 - RNA, 14 nt, Human
cacaagccuucggc

SEQ ID NO: 2982995 - RNA, 19 nt, Human
cacaguauuacuucugcua

SEQ ID NO: 2982996 - RNA, 18 nt, Human
cacaguauuacuucugcu

SEQ ID NO: 2982997 - RNA, 16 nt, Human
cacaguauuacuucug

SEQ ID NO: 2982998 - RNA, 20 nt, Human
cacagacccugcccuguggg

SEQ ID NO: 2982999 - RNA, 21 nt, Human
cacagacccugcccugugggc

SEQ ID NO: 2983000 - RNA, 19 nt, Human
cacagacccugcccugugg

SEQ ID NO: 2983001 - RNA, 15 nt, Human
cacagcuaacaugga

SEQ ID NO: 2983002 - RNA, 16 nt, Human
cacagcuaacauggaa

SEQ ID NO: 2983003 - RNA, 19 nt, Human
cacagcucuguccugggag

SEQ ID NO: 2983004 - RNA, 10 nt, Human
cacagcucuu

SEQ ID NO: 2983005 - RNA, 23 nt, Human
cacagcucuguccugggagugag

SEQ ID NO: 2983006 - RNA, 20 nt, Human
cacagcucuguccugggagu

SEQ ID NO: 2983007 - RNA, 22 nt, Human
cacagcuaacauggaaguacua

SEQ ID NO: 2983008 - RNA, 17 nt, Human
cacccagcccacuucug

SEQ ID NO: 2983009 - RNA, 16 nt, Human
cacccagcccacuucu

SEQ ID NO: 2983010 - RNA, 23 nt, Human
caccaacauacucccaucuguga

SEQ ID NO: 2983011 - RNA, 14 nt, Human
caccagcagccugg

SEQ ID NO: 2983012 - RNA, 12 nt, Human
caccagcagccu

SEQ ID NO: 2983013 - RNA, 15 nt, Human
caccagcagccugga

SEQ ID NO: 2983014 - RNA, 21 nt, Human
caccagcccuuagcagggaaa

SEQ ID NO: 2983015 - RNA, 23 nt, Human
cacccaggagccccgaggccuuc

SEQ ID NO: 2983016 - RNA, 20 nt, Human
cacccaggagccccgaggcc

SEQ ID NO: 2983017 - RNA, 19 nt, Human
cacccagcccacuucugcc

SEQ ID NO: 2983018 - RNA, 24 nt, Human
cacccaggagccccgaggccuucu

SEQ ID NO: 2983019 - RNA, 21 nt, Human
cacauuuuuuaaaugcaccug

SEQ ID NO: 2983020 - RNA, 17 nt, Human
cacauuuuuuaaaugca

SEQ ID NO: 2983021 - RNA, 14 nt, Human
cacauuuuucuuag

SEQ ID NO: 2983022 - RNA, 13 nt, Human
cacauuuuucuua

SEQ ID NO: 2983023 - RNA, 20 nt, Human
caccaacauacucccaucug

SEQ ID NO: 2983024 - RNA, 21 nt, Human
caccaacauacucccaucugu

SEQ ID NO: 2983025 - RNA, 17 nt, Human
caccaacauacucccau

SEQ ID NO: 2983026 - RNA, 15 nt, Human
cacauuuuauuuuau

SEQ ID NO: 2983027 - RNA, 18 nt, Human
cacaucuugcucugcuga

SEQ ID NO: 2983028 - RNA, 21 nt, Human
cacaucagcacgauuucuguu

SEQ ID NO: 2983029 - RNA, 20 nt, Human
cacaucagcacgauuucugu

SEQ ID NO: 2983030 - RNA, 22 nt, Human
cacaucagcacgauuucuguuu

SEQ ID NO: 2983031 - RNA, 17 nt, Human
cacaucuugcucugcug

SEQ ID NO: 2983032 - RNA, 16 nt, Human
cacaucuugcucugcu

SEQ ID NO: 2983033 - RNA, 13 nt, Human
caccuugcagcuc

SEQ ID NO: 2983034 - RNA, 15 nt, Human
caccuugcagcucuc

SEQ ID NO: 2983035 - RNA, 18 nt, Human
caccuugacagggcacac

SEQ ID NO: 2983036 - RNA, 17 nt, Human
caccugccagggacaga

SEQ ID NO: 2983037 - RNA, 19 nt, Human
caccuugacagggcacacc

SEQ ID NO: 2983038 - RNA, 22 nt, Human
caccuugcagcucuccccuucu

SEQ ID NO: 2983039 - RNA, 13 nt, Human
caccuuggcucaa

SEQ ID NO: 2983040 - RNA, 14 nt, Human
caccuuugucccca

SEQ ID NO: 2983041 - RNA, 15 nt, Human
caccuuuguccccac

SEQ ID NO: 2983042 - RNA, 17 nt, Human
caccuuuguccccaccg

SEQ ID NO: 2983043 - RNA, 14 nt, Human
caccuuugaagaag

SEQ ID NO: 2983044 - RNA, 16 nt, Human
caccguuaucgguguc

SEQ ID NO: 2983045 - RNA, 21 nt, Human
caccuacaugagguacugaga

SEQ ID NO: 2983046 - RNA, 14 nt, Human
caccugccagggac

SEQ ID NO: 2983047 - RNA, 16 nt, Human
caccugccagggacag

SEQ ID NO: 2983048 - RNA, 23 nt, Human
caccucaaaauaccaugccauuu

SEQ ID NO: 2983049 - RNA, 13 nt, Human
caccugccaggga

SEQ ID NO: 2983050 - RNA, 19 nt, Human
cacucuuauugcccacgcu

SEQ ID NO: 2983051 - RNA, 18 nt, Human
cacucuuauugcccacgc

SEQ ID NO: 2983052 - RNA, 17 nt, Human
cacucuuauugcccacg

SEQ ID NO: 2983053 - RNA, 23 nt, Human
cacuacggaauaguuggcuagga

SEQ ID NO: 2983054 - RNA, 16 nt, Human
cacggccaggccagag

SEQ ID NO: 2983055 - RNA, 15 nt, Human
cacggccaggccaga

SEQ ID NO: 2983056 - RNA, 14 nt, Human
cacggccaggccag

SEQ ID NO: 2983057 - RNA, 20 nt, Human
cacggagggugacgggggug

SEQ ID NO: 2983058 - RNA, 12 nt, Human
cacuugugaaua

SEQ ID NO: 2983059 - RNA, 11 nt, Human
cacuugugaau

SEQ ID NO: 2983060 - RNA, 20 nt, Human
cacuuggucugugagaugcu

SEQ ID NO: 2983061 - RNA, 17 nt, Human
cacuuggucugugagau

SEQ ID NO: 2983062 - RNA, 19 nt, Human
cacuguuucaaacuuuacu

SEQ ID NO: 2983063 - RNA, 17 nt, Human
cacuguugcccaggcug

SEQ ID NO: 2983064 - RNA, 22 nt, Human
cacugggcuuggggaccagagc

SEQ ID NO: 2983065 - RNA, 20 nt, Human
cacugggcuuggggaccaga

SEQ ID NO: 2983066 - RNA, 23 nt, Human
cacugggcuuggggaccagagcu

SEQ ID NO: 2983067 - RNA, 16 nt, Human
cacuguugcccaggcu

SEQ ID NO: 2983068 - RNA, 15 nt, Human
cacuguugcccaggc

SEQ ID NO: 2983069 - RNA, 14 nt, Human
cacuguugcccagg

SEQ ID NO: 2983070 - RNA, 17 nt, Human
cacuggugacaugucuu

SEQ ID NO: 2983071 - RNA, 22 nt, Human
cagaaguuucugccgcagcccu

SEQ ID NO: 2983072 - RNA, 20 nt, Human
cagaaguuucugccgcagcc

SEQ ID NO: 2983073 - RNA, 21 nt, Human
cagaaguuucugccgcagccc

SEQ ID NO: 2983074 - RNA, 17 nt, Human
cagaaauguguuaucac

SEQ ID NO: 2983075 - RNA, 19 nt, Human
cagaaguuucugccgcagc

SEQ ID NO: 2983076 - RNA, 20 nt, Human
caagaaguccccucuccucc

SEQ ID NO: 2983077 - RNA, 20 nt, Human
caagaauuucuaggacugaa

SEQ ID NO: 2983078 - RNA, 16 nt, Human
caacucaccccagccc

SEQ ID NO: 2983079 - RNA, 13 nt, Human
caacucaccccag

SEQ ID NO: 2983080 - RNA, 15 nt, Human
caacucaccccagcc

SEQ ID NO: 2983081 - RNA, 23 nt, Human
caagaauuucuaggacugaauua

SEQ ID NO: 2983082 - RNA, 18 nt, Human
caagacccuugugguccc

SEQ ID NO: 2983083 - RNA, 19 nt, Human
caagacccuugugguccca

SEQ ID NO: 2983084 - RNA, 22 nt, Human
caagacccuuguggucccaccc

SEQ ID NO: 2983085 - RNA, 19 nt, Human
caacccaaauguucaucaa

SEQ ID NO: 2983086 - RNA, 21 nt, Human
caacuaucucauuuccaagca

SEQ ID NO: 2983087 - RNA, 17 nt, Human
caacccccagccugcua

SEQ ID NO: 2983088 - RNA, 16 nt, Human
caacccccagccugcu

SEQ ID NO: 2983089 - RNA, 15 nt, Human
caacccccagccugc

SEQ ID NO: 2983090 - RNA, 18 nt, Human
caaccacugcgaccacaa

SEQ ID NO: 2983091 - RNA, 22 nt, Human
caacaccucugcacaagcugca

SEQ ID NO: 2983092 - RNA, 20 nt, Human
caacaccuuguuucccucuc

SEQ ID NO: 2983093 - RNA, 15 nt, Human
caaauccuugaagau

SEQ ID NO: 2983094 - RNA, 23 nt, Human
caaaucagguuuucuuuuaagaa

SEQ ID NO: 2983095 - RNA, 17 nt, Human
caaaucagcugcuacua

SEQ ID NO: 2983096 - RNA, 20 nt, Human
caaaguacacuguuucaaac

SEQ ID NO: 2983097 - RNA, 16 nt, Human
caaaguacacuguuuc

SEQ ID NO: 2983098 - RNA, 21 nt, Human
caaaguacacuguuucaaacu

SEQ ID NO: 2983099 - RNA, 13 nt, Human
caaagaugcagcc

SEQ ID NO: 2983100 - RNA, 14 nt, Human
caaagaugcagccg

SEQ ID NO: 2983101 - RNA, 20 nt, Human
caaaguaauuuggaaauuag

SEQ ID NO: 2983102 - RNA, 18 nt, Human
caaaguaauuuggaaauu

SEQ ID NO: 2983103 - RNA, 23 nt, Human
caacaaaccuguuucugcagcca

SEQ ID NO: 2983104 - RNA, 13 nt, Human
auuuguuugaacu

SEQ ID NO: 2983105 - RNA, 16 nt, Human
auuuguuugaacugau

SEQ ID NO: 2983106 - RNA, 14 nt, Human
auuuguuugaacug

SEQ ID NO: 2983107 - RNA, 15 nt, Human
caaaagcugggcagg

SEQ ID NO: 2983108 - RNA, 17 nt, Human
auuuuuuuuuccuucag

SEQ ID NO: 2983109 - RNA, 18 nt, Human
caaaaaaaauuagccggg

SEQ ID NO: 2983110 - RNA, 13 nt, Human
caaaaaaaauuag

SEQ ID NO: 2983111 - RNA, 13 nt, Human
auuuuuaagugcu

SEQ ID NO: 2983112 - RNA, 13 nt, Human
auuuuuuuuuccu

SEQ ID NO: 2983113 - RNA, 16 nt, Human
auuuuuuuuuccuuca

SEQ ID NO: 2983114 - RNA, 12 nt, Human
auuuuuuuuucc

SEQ ID NO: 2983115 - RNA, 19 nt, Human
auucugagaugacuauuca

SEQ ID NO: 2983116 - RNA, 17 nt, Human
auucuugccaaauauaa

SEQ ID NO: 2983117 - RNA, 16 nt, Human
auucucuccuguaccu

SEQ ID NO: 2983118 - RNA, 13 nt, Human
auuccugaacagg

SEQ ID NO: 2983119 - RNA, 21 nt, Human
auucucuccuguaccucuuga

SEQ ID NO: 2983120 - RNA, 19 nt, Human
auucucuccuguaccucuu

SEQ ID NO: 2983121 - RNA, 21 nt, Human
auuccugaugcuucuucagag

SEQ ID NO: 2983122 - RNA, 17 nt, Human
auucuuuccugaggcug

SEQ ID NO: 2983123 - RNA, 22 nt, Human
auucuuuccugaggcugggcuc

SEQ ID NO: 2983124 - RNA, 13 nt, Human
auucuuuccugag

SEQ ID NO: 2983125 - RNA, 18 nt, Human
auugacuuuuuauggcac

SEQ ID NO: 2983126 - RNA, 18 nt, Human
auucacaagacccaaaag

SEQ ID NO: 2983127 - RNA, 16 nt, Human
auucacaaaguaauuu

SEQ ID NO: 2983128 - RNA, 18 nt, Human
auuaaauucuugcaaagu

SEQ ID NO: 2983129 - RNA, 14 nt, Human
auuaaauucuugca

SEQ ID NO: 2983130 - RNA, 20 nt, Human
auuaaauucuugcaaaguau

SEQ ID NO: 2983131 - RNA, 21 nt, Human
auucacaaaguaauuuggaaa

SEQ ID NO: 2983132 - RNA, 17 nt, Human
auucacaaaguaauuug

SEQ ID NO: 2983133 - RNA, 19 nt, Human
auucauauuuacuucuuau

SEQ ID NO: 2983134 - RNA, 18 nt, Human
auucauauuuacuucuua

SEQ ID NO: 2983135 - RNA, 20 nt, Human
auucauauuuacuucuuaua

SEQ ID NO: 2983136 - RNA, 15 nt, Human
auuucucauguugaa

SEQ ID NO: 2983137 - RNA, 20 nt, Human
auuucuaugaaauauuaugu

SEQ ID NO: 2983138 - RNA, 18 nt, Human
auuucuaugaaauauuau

SEQ ID NO: 2983139 - RNA, 15 nt, Human
auuucuaugaaauau

SEQ ID NO: 2983140 - RNA, 12 nt, Human
auuucuguuuag

SEQ ID NO: 2983141 - RNA, 16 nt, Human
auuucuguuuagauaa

SEQ ID NO: 2983142 - RNA, 14 nt, Human
auuucuguuuagau

SEQ ID NO: 2983143 - RNA, 12 nt, Human
auuucaagaagu

SEQ ID NO: 2983144 - RNA, 23 nt, Human
auuucaagaaguccccucuccuc

SEQ ID NO: 2983145 - RNA, 14 nt, Human
auuuaaucuuuuau

SEQ ID NO: 2983146 - RNA, 17 nt, Human
auuuaaucuuuuaugau

SEQ ID NO: 2983147 - RNA, 14 nt, Human
auuuaaugaaagac

SEQ ID NO: 2983148 - RNA, 16 nt, Human
auuuaauaugcaaagu

SEQ ID NO: 2983149 - RNA, 15 nt, Human
auuuaauaugcaaag

SEQ ID NO: 2983150 - RNA, 14 nt, Human
auuuaauaugcaaa

SEQ ID NO: 2983151 - RNA, 19 nt, Human
auuguuuaaaaucauuucu

SEQ ID NO: 2983152 - RNA, 19 nt, Human
auuguucuuaguuugcagu

SEQ ID NO: 2983153 - RNA, 15 nt, Human
auuguaaggaaugau

SEQ ID NO: 2983154 - RNA, 16 nt, Human
auuguaaggaaugauu

SEQ ID NO: 2983155 - RNA, 14 nt, Human
auuguaaaugugcu

SEQ ID NO: 2983156 - RNA, 15 nt, Human
auuguaaaugugcuu

SEQ ID NO: 2983157 - RNA, 17 nt, Human
auuguaaaugugcuuuu

SEQ ID NO: 2983158 - RNA, 20 nt, Human
cauuauauagcaguaaaaaa

SEQ ID NO: 2983159 - RNA, 16 nt, Human
cauuaguuuugaagau

SEQ ID NO: 2983160 - RNA, 17 nt, Human
cauuauauagcaguaaa

SEQ ID NO: 2983161 - RNA, 14 nt, Human
cauuaguuuugaag

SEQ ID NO: 2983162 - RNA, 15 nt, Human
cauuaguuuugaaga

SEQ ID NO: 2983163 - RNA, 14 nt, Human
cauucuccaccugc

SEQ ID NO: 2983164 - RNA, 16 nt, Human
cauucuccaccugcca

SEQ ID NO: 2983165 - RNA, 13 nt, Human
cauucuccaccug

SEQ ID NO: 2983166 - RNA, 15 nt, Human
cauguuggccaggcu

SEQ ID NO: 2983167 - RNA, 14 nt, Human
cauguuggccaggc

SEQ ID NO: 2983168 - RNA, 16 nt, Human
cauguuggccaggcug

SEQ ID NO: 2983169 - RNA, 19 nt, Human
cauguuggccaggcugguc

SEQ ID NO: 2983170 - RNA, 14 nt, Human
caugauguuuagaa

SEQ ID NO: 2983171 - RNA, 23 nt, Human
caugcuacacacugcauguuugu

SEQ ID NO: 2983172 - RNA, 20 nt, Human
caugcuacacacugcauguu

SEQ ID NO: 2983173 - RNA, 14 nt, Human
caugcuacacacug

SEQ ID NO: 2983174 - RNA, 13 nt, Human
caugauguuuucc

SEQ ID NO: 2983175 - RNA, 20 nt, Human
caugcuccuggcccacugca

SEQ ID NO: 2983176 - RNA, 14 nt, Human
caugggaaugaaug

SEQ ID NO: 2983177 - RNA, 15 nt, Human
caugggaaugaaugu

SEQ ID NO: 2983178 - RNA, 16 nt, Human
caugggaaugaauguc

SEQ ID NO: 2983179 - RNA, 17 nt, Human
caugggaaugaauguca

SEQ ID NO: 2983180 - RNA, 18 nt, Human
caucuguuacacaaagaa

SEQ ID NO: 2983181 - RNA, 14 nt, Human
caucuuaaaaacaa

SEQ ID NO: 2983182 - RNA, 15 nt, Human
cauccuggcacccgg

SEQ ID NO: 2983183 - RNA, 14 nt, Human
caucacuucccuac

SEQ ID NO: 2983184 - RNA, 12 nt, Human
caucacuucccu

SEQ ID NO: 2983185 - RNA, 21 nt, Human
cauccccuguagagugggagc

SEQ ID NO: 2983186 - RNA, 12 nt, Human
cauccuggaaua

SEQ ID NO: 2983187 - RNA, 22 nt, Human
cauccuggcacccggccccugc

SEQ ID NO: 2983188 - RNA, 14 nt, Human
cauauggauaaaua

SEQ ID NO: 2983189 - RNA, 22 nt, Human
caguggugguuuucuguucuuu

SEQ ID NO: 2983190 - RNA, 21 nt, Human
caguggugguuuucuguucuu

SEQ ID NO: 2983191 - RNA, 20 nt, Human
caguggugguuuucuguucu

SEQ ID NO: 2983192 - RNA, 19 nt, Human
caguggugguuuucuguuc

SEQ ID NO: 2983193 - RNA, 18 nt, Human
cauauucuguuggccagu

SEQ ID NO: 2983194 - RNA, 17 nt, Human
cauauucuguuggccag

SEQ ID NO: 2983195 - RNA, 22 nt, Human
cauauucaggaagcucagggcc

SEQ ID NO: 2983196 - RNA, 23 nt, Human
ccaaauggaaaugggcagagcag

SEQ ID NO: 2983197 - RNA, 14 nt, Human
ccaacucaccccag

SEQ ID NO: 2983198 - RNA, 17 nt, Human
ccaaauguucaucaaug

SEQ ID NO: 2983199 - RNA, 16 nt, Human
ccaacucaccccagcc

SEQ ID NO: 2983200 - RNA, 17 nt, Human
ccaacucaccccagccc

SEQ ID NO: 2983201 - RNA, 18 nt, Human
ccaacucaccccagcccc

SEQ ID NO: 2983202 - RNA, 13 nt, Human
ccaagcucugcuc

SEQ ID NO: 2983203 - RNA, 17 nt, Human
ccaagcucugcuccucu

SEQ ID NO: 2983204 - RNA, 12 nt, Human
ccaagcucugcu

SEQ ID NO: 2983205 - RNA, 18 nt, Human
ccaagcucugcuccucuc

SEQ ID NO: 2983206 - RNA, 14 nt, Human
ccaaugcacuuugu

SEQ ID NO: 2983207 - RNA, 15 nt, Human
ccaaugauggucacc

SEQ ID NO: 2983208 - RNA, 17 nt, Human
ccaauauuuaccagacc

SEQ ID NO: 2983209 - RNA, 21 nt, Human
ccaauauuuaaucuuuuauga

SEQ ID NO: 2983210 - RNA, 17 nt, Human
ccaaugggagcucaugg

SEQ ID NO: 2983211 - RNA, 14 nt, Human
ccaaugggagcuca

SEQ ID NO: 2983212 - RNA, 17 nt, Human
cauuuguauaaaauaau

SEQ ID NO: 2983213 - RNA, 20 nt, Human
cauuuguauaaaauaauuuu

SEQ ID NO: 2983214 - RNA, 19 nt, Human
cauuuguauaaaauaauuu

SEQ ID NO: 2983215 - RNA, 16 nt, Human
cauuuguguugaagag

SEQ ID NO: 2983216 - RNA, 22 nt, Human
cauuuuuuuuaagaaaaaggau

SEQ ID NO: 2983217 - RNA, 20 nt, Human
ccaaaacucuccucugcugc

SEQ ID NO: 2983218 - RNA, 21 nt, Human
ccaaaacucuccucugcugcu

SEQ ID NO: 2983219 - RNA, 17 nt, Human
ccaaaacugagcauaag

SEQ ID NO: 2983220 - RNA, 12 nt, Human
ccacagcaguug

SEQ ID NO: 2983221 - RNA, 17 nt, Human
ccacagcaguugaaaag

SEQ ID NO: 2983222 - RNA, 18 nt, Human
ccacagcaguugaaaaga

SEQ ID NO: 2983223 - RNA, 23 nt, Human
ccacagcaguugaaaagacucca

SEQ ID NO: 2983224 - RNA, 13 nt, Human
ccaccaucaagcc

SEQ ID NO: 2983225 - RNA, 14 nt, Human
ccaccaucaagcca

SEQ ID NO: 2983226 - RNA, 24 nt, Human
ccaccagugccucucccugcugcu

SEQ ID NO: 2983227 - RNA, 20 nt, Human
ccaccagugccucucccugc

SEQ ID NO: 2983228 - RNA, 17 nt, Human
ccaccaccaauugccaa

SEQ ID NO: 2983229 - RNA, 17 nt, Human
ccaccacacccagccca

SEQ ID NO: 2983230 - RNA, 15 nt, Human
ccaccaucaagccac

SEQ ID NO: 2983231 - RNA, 22 nt, Human
ccaccgcagacaggaccaggga

SEQ ID NO: 2983232 - RNA, 19 nt, Human
ccaccgcagacaggaccag

SEQ ID NO: 2983233 - RNA, 21 nt, Human
ccaccuuugaagaaguaagga

SEQ ID NO: 2983234 - RNA, 16 nt, Human
ccacgcccccacuggu

SEQ ID NO: 2983235 - RNA, 17 nt, Human
ccacgcccccacuggug

SEQ ID NO: 2983236 - RNA, 18 nt, Human
ccacgcccccacugguga

SEQ ID NO: 2983237 - RNA, 19 nt, Human
ccacgcccccacuggugac

SEQ ID NO: 2983238 - RNA, 13 nt, Human
ccacgcccccacu

SEQ ID NO: 2983239 - RNA, 17 nt, Human
ccacucccugcaaccug

SEQ ID NO: 2983240 - RNA, 20 nt, Human
ccacuccggcccuccagagc

SEQ ID NO: 2983241 - RNA, 21 nt, Human
ccacuccggcccuccagagcc

SEQ ID NO: 2983242 - RNA, 22 nt, Human
ccacuccggcccuccagagccc

SEQ ID NO: 2983243 - RNA, 21 nt, Human
cagcuccccucggagaagagc

SEQ ID NO: 2983244 - RNA, 22 nt, Human
cagcuccccucggagaagagcu

SEQ ID NO: 2983245 - RNA, 20 nt, Human
cagcuccccucggagaagag

SEQ ID NO: 2983246 - RNA, 19 nt, Human
cagcuguucagcugguuga

SEQ ID NO: 2983247 - RNA, 24 nt, Human
cagcugugcucuggacaggcaugu

SEQ ID NO: 2983248 - RNA, 20 nt, Human
cagcugugcucuggacaggc

SEQ ID NO: 2983249 - RNA, 19 nt, Human
cagcugugcucuggacagg

SEQ ID NO: 2983250 - RNA, 13 nt, Human
cagcugccuggga

SEQ ID NO: 2983251 - RNA, 14 nt, Human
cagcugccugggau

SEQ ID NO: 2983252 - RNA, 12 nt, Human
cagcugccuggg

SEQ ID NO: 2983253 - RNA, 19 nt, Human
cagcugagggugagugggu

SEQ ID NO: 2983254 - RNA, 16 nt, Human
caggaaaagcugcuga

SEQ ID NO: 2983255 - RNA, 15 nt, Human
caggaaaagcugcug

SEQ ID NO: 2983256 - RNA, 18 nt, Human
caggaaaagcugcugaca

SEQ ID NO: 2983257 - RNA, 17 nt, Human
cagccucugaaaaccaa

SEQ ID NO: 2983258 - RNA, 19 nt, Human
cagccgagauagccaaggc

SEQ ID NO: 2983259 - RNA, 12 nt, Human
cagccugcucca

SEQ ID NO: 2983260 - RNA, 19 nt, Human
cagccugcuaauuccccag

SEQ ID NO: 2983261 - RNA, 21 nt, Human
cagcggggacagcuccuucug

SEQ ID NO: 2983262 - RNA, 19 nt, Human
cagcggggacagcuccuuc

SEQ ID NO: 2983263 - RNA, 18 nt, Human
cagcggggacagcuccuu

SEQ ID NO: 2983264 - RNA, 15 nt, Human
cagauucuuuccuga

SEQ ID NO: 2983265 - RNA, 17 nt, Human
cagauucuuuccugagg

SEQ ID NO: 2983266 - RNA, 18 nt, Human
cagauucuuuccugaggc

SEQ ID NO: 2983267 - RNA, 19 nt, Human
cagauucuuuccugaggcu

SEQ ID NO: 2983268 - RNA, 12 nt, Human
cagauccuggaa

SEQ ID NO: 2983269 - RNA, 16 nt, Human
cagagguugcagugag

SEQ ID NO: 2983270 - RNA, 17 nt, Human
cagagguugcagugagc

SEQ ID NO: 2983271 - RNA, 22 nt, Human
cagaggggguggccucccaacu

SEQ ID NO: 2983272 - RNA, 23 nt, Human
cagaggggguggccucccaacuc

SEQ ID NO: 2983273 - RNA, 22 nt, Human
cagcaguugaaaagacuccaaa

SEQ ID NO: 2983274 - RNA, 13 nt, Human
cagcaguucagag

SEQ ID NO: 2983275 - RNA, 16 nt, Human
cagcagugagacuggg

SEQ ID NO: 2983276 - RNA, 15 nt, Human
cagcagugagacugg

SEQ ID NO: 2983277 - RNA, 19 nt, Human
cagcacgauuucuguuuag

SEQ ID NO: 2983278 - RNA, 18 nt, Human
cagcacgauuucuguuua

SEQ ID NO: 2983279 - RNA, 16 nt, Human
cagcacgauuucuguu

SEQ ID NO: 2983280 - RNA, 20 nt, Human
cagauucuuuccugaggcug

SEQ ID NO: 2983281 - RNA, 22 nt, Human
cagauucuuuccugaggcuggg

SEQ ID NO: 2983282 - RNA, 17 nt, Human
cagauugcaacaggcug

SEQ ID NO: 2983283 - RNA, 20 nt, Human
cagcaucauggagguuugaa

SEQ ID NO: 2983284 - RNA, 20 nt, Human
cagucugacuguuuccauca

SEQ ID NO: 2983285 - RNA, 17 nt, Human
cagucuggaaugcagug

SEQ ID NO: 2983286 - RNA, 16 nt, Human
cagucugcuuagaaau

SEQ ID NO: 2983287 - RNA, 15 nt, Human
cagucugcuuagaaa

SEQ ID NO: 2983288 - RNA, 17 nt, Human
cagucugcuuagaaaua

SEQ ID NO: 2983289 - RNA, 14 nt, Human
cagucugcuuagaa

SEQ ID NO: 2983290 - RNA, 15 nt, Human
cagucuggaaugcag

SEQ ID NO: 2983291 - RNA, 13 nt, Human
cagugcaugcugu

SEQ ID NO: 2983292 - RNA, 14 nt, Human
cagugcaugcuguc

SEQ ID NO: 2983293 - RNA, 23 nt, Human
cagugggagcugccuguucagcu

SEQ ID NO: 2983294 - RNA, 20 nt, Human
cagugggagcugccuguuca

SEQ ID NO: 2983295 - RNA, 17 nt, Human
cagugcccacaggauca

SEQ ID NO: 2983296 - RNA, 16 nt, Human
cagugcaugcuguccc

SEQ ID NO: 2983297 - RNA, 17 nt, Human
cagugcaugcugucccu

SEQ ID NO: 2983298 - RNA, 15 nt, Human
cagugcccacaggau

SEQ ID NO: 2983299 - RNA, 13 nt, Human
cagugcccacagg

SEQ ID NO: 2983300 - RNA, 14 nt, Human
caguggggaaugaa

SEQ ID NO: 2983301 - RNA, 18 nt, Human
caguggugguuuucuguu

SEQ ID NO: 2983302 - RNA, 21 nt, Human
caguggugcgaucuggguuca

SEQ ID NO: 2983303 - RNA, 20 nt, Human
caguggugcgaucuggguuc

SEQ ID NO: 2983304 - RNA, 16 nt, Human
cagucaccucauggaa

SEQ ID NO: 2983305 - RNA, 15 nt, Human
cagucacauuccaag

SEQ ID NO: 2983306 - RNA, 19 nt, Human
cagucaccucauggaauug

SEQ ID NO: 2983307 - RNA, 15 nt, Human
cagucaccucaugga

SEQ ID NO: 2983308 - RNA, 21 nt, Human
caggugcacaagcuccaagcu

SEQ ID NO: 2983309 - RNA, 19 nt, Human
caggugccaguuauggcua

SEQ ID NO: 2983310 - RNA, 21 nt, Human
cagguuggugggggccucggu

SEQ ID NO: 2983311 - RNA, 14 nt, Human
cagguuuaagcugu

SEQ ID NO: 2983312 - RNA, 12 nt, Human
cagguuuuccug

SEQ ID NO: 2983313 - RNA, 18 nt, Human
cagguuuucuuuuaagaa

SEQ ID NO: 2983314 - RNA, 16 nt, Human
cagguuuuccugaaga

SEQ ID NO: 2983315 - RNA, 19 nt, Human
cagguuuucuuuuaagaau

SEQ ID NO: 2983316 - RNA, 20 nt, Human
caggugauccacccaccuca

SEQ ID NO: 2983317 - RNA, 21 nt, Human
caggugauccacccaccucag

SEQ ID NO: 2983318 - RNA, 17 nt, Human
caggugcacaagcucca

SEQ ID NO: 2983319 - RNA, 18 nt, Human
caggugcacaagcuccaa

SEQ ID NO: 2983320 - RNA, 19 nt, Human
caggugcacaagcuccaag

SEQ ID NO: 2983321 - RNA, 20 nt, Human
caggugcacaagcuccaagc

SEQ ID NO: 2983322 - RNA, 23 nt, Human
caggugauccacccaccucagcc

SEQ ID NO: 2983323 - RNA, 22 nt, Human
caggugauccacccaccucagc

SEQ ID NO: 2983324 - RNA, 15 nt, Human
caggugcacaagcuc

SEQ ID NO: 2983325 - RNA, 20 nt, Human
caggccaggcccucugccca

SEQ ID NO: 2983326 - RNA, 19 nt, Human
caggccaggcccucugccc

SEQ ID NO: 2983327 - RNA, 17 nt, Human
caggccaggcccucugc

SEQ ID NO: 2983328 - RNA, 18 nt, Human
caggccaggcccucugcc

SEQ ID NO: 2983329 - RNA, 17 nt, Human
caggccagcugcuuggg

SEQ ID NO: 2983330 - RNA, 19 nt, Human
caggccagcugcuugggcu

SEQ ID NO: 2983331 - RNA, 21 nt, Human
caggccagcugcuugggcuuc

SEQ ID NO: 2983332 - RNA, 23 nt, Human
caggccagcugcuugggcuucau

SEQ ID NO: 2983333 - RNA, 15 nt, Human
caggccagagggagu

SEQ ID NO: 2983334 - RNA, 13 nt, Human
caggccagaggga

SEQ ID NO: 2983335 - RNA, 18 nt, Human
caggcagauacaggaaaa

SEQ ID NO: 2983336 - RNA, 23 nt, Human
cagggcucagcggggacagcucc

SEQ ID NO: 2983337 - RNA, 21 nt, Human
cagggcucagcggggacagcu

SEQ ID NO: 2983338 - RNA, 19 nt, Human
caggggaaaaucagccugc

SEQ ID NO: 2983339 - RNA, 17 nt, Human
caggggaaaaucagccu

SEQ ID NO: 2983340 - RNA, 20 nt, Human
caggggaaaaucagccugcu

SEQ ID NO: 2983341 - RNA, 12 nt, Human
caggcugggaga

SEQ ID NO: 2983342 - RNA, 14 nt, Human
caggcugggagagc

SEQ ID NO: 2983343 - RNA, 15 nt, Human
caggcugggagagcc

SEQ ID NO: 2983344 - RNA, 20 nt, Human
caggcugggcuucaguggca

SEQ ID NO: 2983345 - RNA, 22 nt, Human
caggcugggcuucaguggcagc

SEQ ID NO: 2983346 - RNA, 21 nt, Human
caggcugggcuucaguggcag

SEQ ID NO: 2983347 - RNA, 20 nt, Human
ccaggauuauugucaaagaa

SEQ ID NO: 2983348 - RNA, 13 nt, Human
ccaggcugggaga

SEQ ID NO: 2983349 - RNA, 14 nt, Human
ccaggcugggagag

SEQ ID NO: 2983350 - RNA, 22 nt, Human
ccaggcugggagagccuuccag

SEQ ID NO: 2983351 - RNA, 15 nt, Human
ccaggcugggagagc

SEQ ID NO: 2983352 - RNA, 17 nt, Human
ccaggcugggagagccu

SEQ ID NO: 2983353 - RNA, 18 nt, Human
ccaggcugggagagccuu

SEQ ID NO: 2983354 - RNA, 21 nt, Human
ccaggcugggagagccuucca

SEQ ID NO: 2983355 - RNA, 12 nt, Human
ccagucaccccg

SEQ ID NO: 2983356 - RNA, 13 nt, Human
ccagucaccccgg

SEQ ID NO: 2983357 - RNA, 20 nt, Human
ccagucaccccggccaccug

SEQ ID NO: 2983358 - RNA, 21 nt, Human
ccagucaccccggccaccugc

SEQ ID NO: 2983359 - RNA, 19 nt, Human
ccagucaccccggccaccu

SEQ ID NO: 2983360 - RNA, 19 nt, Human
ccagcagccuggacccugu

SEQ ID NO: 2983361 - RNA, 20 nt, Human
ccagcagccuggacccugug

SEQ ID NO: 2983362 - RNA, 15 nt, Human
ccagcagccuggacc

SEQ ID NO: 2983363 - RNA, 14 nt, Human
ccagcagccuggac

SEQ ID NO: 2983364 - RNA, 10 nt, Human
ccagccccuu

SEQ ID NO: 2983365 - RNA, 21 nt, Human
ccagccccuggaugcagccuc

SEQ ID NO: 2983366 - RNA, 22 nt, Human
ccaggaaaggcuccaggagcag

SEQ ID NO: 2983367 - RNA, 23 nt, Human
ccaggaaaggcuccaggagcagc

SEQ ID NO: 2983368 - RNA, 21 nt, Human
ccaggaaaggcuccaggagca

SEQ ID NO: 2983369 - RNA, 16 nt, Human
ccagcuuaucucaggg

SEQ ID NO: 2983370 - RNA, 23 nt, Human
ccagcagagcaccuuagacaguc

SEQ ID NO: 2983371 - RNA, 19 nt, Human
ccagcagagcaccuuagac

SEQ ID NO: 2983372 - RNA, 22 nt, Human
ccauuuaaagcuuauuaaaacu

SEQ ID NO: 2983373 - RNA, 23 nt, Human
ccauuuacuuaagacuuaaugag

SEQ ID NO: 2983374 - RNA, 17 nt, Human
ccauuuacuuaagacuu

SEQ ID NO: 2983375 - RNA, 15 nt, Human
ccaugggccuccugu

SEQ ID NO: 2983376 - RNA, 14 nt, Human
ccaugggccuccug

SEQ ID NO: 2983377 - RNA, 14 nt, Human
ccauacauuugugu

SEQ ID NO: 2983378 - RNA, 13 nt, Human
ccauacauuugug

SEQ ID NO: 2983379 - RNA, 12 nt, Human
ccaucccagccc

SEQ ID NO: 2983380 - RNA, 23 nt, Human
ccaucccaaacccuucagugcca

SEQ ID NO: 2983381 - RNA, 14 nt, Human
ccaugaguccccug

SEQ ID NO: 2983382 - RNA, 15 nt, Human
ccaugaguccccugu

SEQ ID NO: 2983383 - RNA, 16 nt, Human
ccaugaguccccuguu

SEQ ID NO: 2983384 - RNA, 13 nt, Human
ccaugggccuccu

SEQ ID NO: 2983385 - RNA, 13 nt, Human
ccaugaguccccu

SEQ ID NO: 2983386 - RNA, 19 nt, Human
ccaugagccucagcauccu

SEQ ID NO: 2983387 - RNA, 18 nt, Human
ccaugagccucagcaucc

SEQ ID NO: 2983388 - RNA, 14 nt, Human
ccaugagccucagc

SEQ ID NO: 2983389 - RNA, 13 nt, Human
ccaugagccucag

SEQ ID NO: 2983390 - RNA, 16 nt, Human
ccauccccuguagagu

SEQ ID NO: 2983391 - RNA, 21 nt, Human
cccaggcuggcgugcaguggu

SEQ ID NO: 2983392 - RNA, 20 nt, Human
cccaggcuuagucacugaga

SEQ ID NO: 2983393 - RNA, 15 nt, Human
cccaggcuuagucac

SEQ ID NO: 2983394 - RNA, 19 nt, Human
cccaggaaaggcuccagga

SEQ ID NO: 2983395 - RNA, 23 nt, Human
cccagcugugcucuggacaggca

SEQ ID NO: 2983396 - RNA, 21 nt, Human
cccagcugugcucuggacagg

SEQ ID NO: 2983397 - RNA, 21 nt, Human
cccaggaaaggcuccaggagc

SEQ ID NO: 2983398 - RNA, 22 nt, Human
cccaggaaaggcuccaggagca

SEQ ID NO: 2983399 - RNA, 23 nt, Human
cccaggaaaggcuccaggagcag

SEQ ID NO: 2983400 - RNA, 14 nt, Human
cccagcccacuucu

SEQ ID NO: 2983401 - RNA, 20 nt, Human
cccagcacuuugggaggcug

SEQ ID NO: 2983402 - RNA, 22 nt, Human
cccauucugccugcccaggccc

SEQ ID NO: 2983403 - RNA, 21 nt, Human
cccauucugccugcccaggcc

SEQ ID NO: 2983404 - RNA, 20 nt, Human
cccauucugccugcccaggc

SEQ ID NO: 2983405 - RNA, 19 nt, Human
ccccauccucuguacagag

SEQ ID NO: 2983406 - RNA, 21 nt, Human
ccccauccucuguacagagcc

SEQ ID NO: 2983407 - RNA, 22 nt, Human
ccccauccucuguacagagccc

SEQ ID NO: 2983408 - RNA, 24 nt, Human
ccccaucugcgggggcagugcuca

SEQ ID NO: 2983409 - RNA, 17 nt, Human
ccccauccucuguacag

SEQ ID NO: 2983410 - RNA, 20 nt, Human
ccccagcaagugagagcugg

SEQ ID NO: 2983411 - RNA, 19 nt, Human
ccccagcaagugagagcug

SEQ ID NO: 2983412 - RNA, 17 nt, Human
ccccagcaagugagagc

SEQ ID NO: 2983413 - RNA, 23 nt, Human
ccccagauugcaacaggcugggc

SEQ ID NO: 2983414 - RNA, 22 nt, Human
ccccagauugcaacaggcuggg

SEQ ID NO: 2983415 - RNA, 21 nt, Human
ccccagauugcaacaggcugg

SEQ ID NO: 2983416 - RNA, 18 nt, Human
ccccugcacuccagccug

SEQ ID NO: 2983417 - RNA, 17 nt, Human
ccccuucgcuccugugu

SEQ ID NO: 2983418 - RNA, 15 nt, Human
ccccuucgcuccugu

SEQ ID NO: 2983419 - RNA, 14 nt, Human
ccccuucgcuccug

SEQ ID NO: 2983420 - RNA, 19 nt, Human
ccccuucgcuccugugucu

SEQ ID NO: 2983421 - RNA, 14 nt, Human
ccccauucugccug

SEQ ID NO: 2983422 - RNA, 13 nt, Human
ccccauucugccu

SEQ ID NO: 2983423 - RNA, 15 nt, Human
ccccauucugccugc

SEQ ID NO: 2983424 - RNA, 12 nt, Human
cccggcugcgga

SEQ ID NO: 2983425 - RNA, 18 nt, Human
cccggcuuuggugcgggg

SEQ ID NO: 2983426 - RNA, 16 nt, Human
ccccuucugacccaug

SEQ ID NO: 2983427 - RNA, 17 nt, Human
ccccuucugacccaugc

SEQ ID NO: 2983428 - RNA, 20 nt, Human
cccucaagagcaaaguagau

SEQ ID NO: 2983429 - RNA, 20 nt, Human
cccucaacucuccuccagag

SEQ ID NO: 2983430 - RNA, 20 nt, Human
ccucaugcugccaauauccu

SEQ ID NO: 2983431 - RNA, 21 nt, Human
ccucaugcugccaauauccua

SEQ ID NO: 2983432 - RNA, 23 nt, Human
ccucauggaauuggagcucgugg

SEQ ID NO: 2983433 - RNA, 21 nt, Human
ccucauuuuuauaaugucccu

SEQ ID NO: 2983434 - RNA, 17 nt, Human
ccucccaccucagccuc

SEQ ID NO: 2983435 - RNA, 15 nt, Human
ccucccaccucagcc

SEQ ID NO: 2983436 - RNA, 13 nt, Human
ccucccaucucac

SEQ ID NO: 2983437 - RNA, 16 nt, Human
ccucccaucucacaca

SEQ ID NO: 2983438 - RNA, 14 nt, Human
ccggccccugcugg

SEQ ID NO: 2983439 - RNA, 19 nt, Human
cccugucuccucucucugu

SEQ ID NO: 2983440 - RNA, 17 nt, Human
cccugugauggggcccu

SEQ ID NO: 2983441 - RNA, 18 nt, Human
cccugugauggggcccug

SEQ ID NO: 2983442 - RNA, 19 nt, Human
cccugugauggggcccugc

SEQ ID NO: 2983443 - RNA, 20 nt, Human
cccugugauggggcccugcc

SEQ ID NO: 2983444 - RNA, 13 nt, Human
cccuucgcuccug

SEQ ID NO: 2983445 - RNA, 20 nt, Human
cccugucucaaaaaaagaaa

SEQ ID NO: 2983446 - RNA, 23 nt, Human
cccugucucaaaaaaagaaaaag

SEQ ID NO: 2983447 - RNA, 16 nt, Human
cccugucuaaugaaac

SEQ ID NO: 2983448 - RNA, 13 nt, Human
cccugucuaauga

SEQ ID NO: 2983449 - RNA, 13 nt, Human
ccggccccugcug

SEQ ID NO: 2983450 - RNA, 22 nt, Human
cccuucucuccagccccuggau

SEQ ID NO: 2983451 - RNA, 21 nt, Human
cccuucucuccagccccugga

SEQ ID NO: 2983452 - RNA, 15 nt, Human
cccuucgcuccugug

SEQ ID NO: 2983453 - RNA, 14 nt, Human
cccuucgcuccugu

SEQ ID NO: 2983454 - RNA, 17 nt, Human
ccugucggagcccuguc

SEQ ID NO: 2983455 - RNA, 21 nt, Human
ccugucggagcccugucuccu

SEQ ID NO: 2983456 - RNA, 16 nt, Human
ccugucggagcccugu

SEQ ID NO: 2983457 - RNA, 15 nt, Human
ccuguaaucacagcu

SEQ ID NO: 2983458 - RNA, 21 nt, Human
ccugguggcagugggagcugc

SEQ ID NO: 2983459 - RNA, 22 nt, Human
ccugucggagcccugucuccuc

SEQ ID NO: 2983460 - RNA, 15 nt, Human
ccugucuaaugaaac

SEQ ID NO: 2983461 - RNA, 22 nt, Human
ccugucuaaugaaaccuguguc

SEQ ID NO: 2983462 - RNA, 16 nt, Human
ccuggccucugcacuc

SEQ ID NO: 2983463 - RNA, 22 nt, Human
ccuggccuagcauacguacaca

SEQ ID NO: 2983464 - RNA, 20 nt, Human
ccuggccucugcacuccccu

SEQ ID NO: 2983465 - RNA, 21 nt, Human
ccuggccucugcacuccccug

SEQ ID NO: 2983466 - RNA, 22 nt, Human
ccuggccucugcacuccccugc

SEQ ID NO: 2983467 - RNA, 11 nt, Human
ccucuuucccu

SEQ ID NO: 2983468 - RNA, 13 nt, Human
ccucuuucccucc

SEQ ID NO: 2983469 - RNA, 17 nt, Human
ccugcacuugcagacuc

SEQ ID NO: 2983470 - RNA, 16 nt, Human
ccugcacuugcagacu

SEQ ID NO: 2983471 - RNA, 14 nt, Human
ccugcagagggcac

SEQ ID NO: 2983472 - RNA, 18 nt, Human
ccugcacuugcagacucu

SEQ ID NO: 2983473 - RNA, 17 nt, Human
ccugcugcaguugccag

SEQ ID NO: 2983474 - RNA, 19 nt, Human
ccugcugcaguugccaguc

SEQ ID NO: 2983475 - RNA, 23 nt, Human
ccugccucgaacuggcugcaaag

SEQ ID NO: 2983476 - RNA, 21 nt, Human
ccugccucgaacuggcugcaa

SEQ ID NO: 2983477 - RNA, 19 nt, Human
ccugccucgaacuggcugc

SEQ ID NO: 2983478 - RNA, 17 nt, Human
ccugcugcuccuaggac

SEQ ID NO: 2983479 - RNA, 16 nt, Human
ccugcugcuccuagga

SEQ ID NO: 2983480 - RNA, 15 nt, Human
ccugcugcuccuagg

SEQ ID NO: 2983481 - RNA, 13 nt, Human
ccugcugcuccua

SEQ ID NO: 2983482 - RNA, 20 nt, Human
ccugcugcaguugccaguca

SEQ ID NO: 2983483 - RNA, 12 nt, Human
ccugcccaccug

SEQ ID NO: 2983484 - RNA, 14 nt, Human
ccugcccaccuggc

SEQ ID NO: 2983485 - RNA, 20 nt, Human
ccugcccaccuggccucugc

SEQ ID NO: 2983486 - RNA, 13 nt, Human
ccugcccaccugg

SEQ ID NO: 2983487 - RNA, 13 nt, Human
ccugcccaggccc

SEQ ID NO: 2983488 - RNA, 21 nt, Human
cuauuaaacaugcuguacaua

SEQ ID NO: 2983489 - RNA, 16 nt, Human
cuaucucccccagccc

SEQ ID NO: 2983490 - RNA, 17 nt, Human
cuaucucccccagcccc

SEQ ID NO: 2983491 - RNA, 21 nt, Human
cuauuuuuguuuuuauuaaaa

SEQ ID NO: 2983492 - RNA, 15 nt, Human
cuauuuuuguuuuua

SEQ ID NO: 2983493 - RNA, 18 nt, Human
cucaaaagcugggcaggu

SEQ ID NO: 2983494 - RNA, 23 nt, Human
cucaaaauaccaugccauuuaaa

SEQ ID NO: 2983495 - RNA, 17 nt, Human
cucaaaacugcacuguc

SEQ ID NO: 2983496 - RNA, 21 nt, Human
cucaaacuaacaggcuuagug

SEQ ID NO: 2983497 - RNA, 20 nt, Human
cucaaacucuugaccucagg

SEQ ID NO: 2983498 - RNA, 21 nt, Human
cucaauaaacauuucauuucc

SEQ ID NO: 2983499 - RNA, 17 nt, Human
cucaauaaacauuucau

SEQ ID NO: 2983500 - RNA, 13 nt, Human
cucaauugugaaa

SEQ ID NO: 2983501 - RNA, 12 nt, Human
cucaauugugaa

SEQ ID NO: 2983502 - RNA, 15 nt, Human
cucaaugcacugaca

SEQ ID NO: 2983503 - RNA, 13 nt, Human
cucaaugcacuga

SEQ ID NO: 2983504 - RNA, 14 nt, Human
cuaucuaaauguug

SEQ ID NO: 2983505 - RNA, 15 nt, Human
cuaucucccccagcc

SEQ ID NO: 2983506 - RNA, 22 nt, Human
cuaguuugauuaaauucuugca

SEQ ID NO: 2983507 - RNA, 21 nt, Human
cuaguuugauuaaauucuugc

SEQ ID NO: 2983508 - RNA, 13 nt, Human
cuaguuugauuaa

SEQ ID NO: 2983509 - RNA, 22 nt, Human
cuaguuguuugauucagacagc

SEQ ID NO: 2983510 - RNA, 23 nt, Human
cuaguuguuugauucagacagcu

SEQ ID NO: 2983511 - RNA, 13 nt, Human
cuagccagaggag

SEQ ID NO: 2983512 - RNA, 15 nt, Human
cuagccagaggagag

SEQ ID NO: 2983513 - RNA, 12 nt, Human
cuagccagagga

SEQ ID NO: 2983514 - RNA, 20 nt, Human
cgugugugugcguccugucg

SEQ ID NO: 2983515 - RNA, 20 nt, Human
cuaaguaaaaccacagcagu

SEQ ID NO: 2983516 - RNA, 15 nt, Human
cuaauaaaaagguga

SEQ ID NO: 2983517 - RNA, 14 nt, Human
cuaauaaaaaggug

SEQ ID NO: 2983518 - RNA, 13 nt, Human
cuaauaaaaaggu

SEQ ID NO: 2983519 - RNA, 11 nt, Human
cuaauaaaaag

SEQ ID NO: 2983520 - RNA, 23 nt, Human
cuaaguuuuuauggcuuuugugc

SEQ ID NO: 2983521 - RNA, 20 nt, Human
cuaaguuuuuauggcuuuug

SEQ ID NO: 2983522 - RNA, 21 nt, Human
cuaagugguacuaacuuuccu

SEQ ID NO: 2983523 - RNA, 22 nt, Human
cuaaguaaaaccacagcaguug

SEQ ID NO: 2983524 - RNA, 23 nt, Human
cuaaguaaaaccacagcaguuga

SEQ ID NO: 2983525 - RNA, 23 nt, Human
cuaagugauccucccaccucagc

SEQ ID NO: 2983526 - RNA, 16 nt, Human
cuacaaaaacacagca

SEQ ID NO: 2983527 - RNA, 17 nt, Human
cuacaaaaacacagcaa

SEQ ID NO: 2983528 - RNA, 19 nt, Human
cuacaguccucccaucuca

SEQ ID NO: 2983529 - RNA, 18 nt, Human
cuacaaaaacacagcaag

SEQ ID NO: 2983530 - RNA, 15 nt, Human
cuacaaaaacacagc

SEQ ID NO: 2983531 - RNA, 22 nt, Human
cuacaguugaaaaacagcugag

SEQ ID NO: 2983532 - RNA, 18 nt, Human
cuacauacuauggaauuu

SEQ ID NO: 2983533 - RNA, 19 nt, Human
cuacaguugaaaaacagcu

SEQ ID NO: 2983534 - RNA, 21 nt, Human
cuacaguugaaaaacagcuga

SEQ ID NO: 2983535 - RNA, 20 nt, Human
cuacaguccucccaucucac

SEQ ID NO: 2983536 - RNA, 18 nt, Human
cuacaugagguacugaga

SEQ ID NO: 2983537 - RNA, 20 nt, Human
cuacaugagguacugagagu

SEQ ID NO: 2983538 - RNA, 17 nt, Human
cuaccuuuguauucucu

SEQ ID NO: 2983539 - RNA, 13 nt, Human
cuagaacucccuu

SEQ ID NO: 2983540 - RNA, 12 nt, Human
cuagaacucccu

SEQ ID NO: 2983541 - RNA, 22 nt, Human
cuagaagauuuugaaauuuuua

SEQ ID NO: 2983542 - RNA, 23 nt, Human
cuagcauacguacacauuuuauu

SEQ ID NO: 2983543 - RNA, 21 nt, Human
cuagcauacguacacauuuua

SEQ ID NO: 2983544 - RNA, 23 nt, Human
cuagaauuugauaugugaacagu

SEQ ID NO: 2983545 - RNA, 16 nt, Human
ccuuuuucaauaacug

SEQ ID NO: 2983546 - RNA, 21 nt, Human
ccuuuuuauaacuuuuuauau

SEQ ID NO: 2983547 - RNA, 15 nt, Human
ccuuuuuauaacuuu

SEQ ID NO: 2983548 - RNA, 12 nt, Human
ccuuuuuauaac

SEQ ID NO: 2983549 - RNA, 21 nt, Human
ccuuuuuuagaguugauacua

SEQ ID NO: 2983550 - RNA, 12 nt, Human
cgacaaugcaaa

SEQ ID NO: 2983551 - RNA, 13 nt, Human
cgacaaugcaaac

SEQ ID NO: 2983552 - RNA, 19 nt, Human
cgacccuugccgucuaccu

SEQ ID NO: 2983553 - RNA, 20 nt, Human
cgacccuugccgucuaccug

SEQ ID NO: 2983554 - RNA, 17 nt, Human
cgacugcccggcagggu

SEQ ID NO: 2983555 - RNA, 14 nt, Human
ccuuuaagagaaau

SEQ ID NO: 2983556 - RNA, 16 nt, Human
ccuugccgucuaccug

SEQ ID NO: 2983557 - RNA, 15 nt, Human
ccuuuugagugccuu

SEQ ID NO: 2983558 - RNA, 17 nt, Human
ccuuuugagugccuuac

SEQ ID NO: 2983559 - RNA, 21 nt, Human
ccuuucaauaggaaaaacuga

SEQ ID NO: 2983560 - RNA, 18 nt, Human
ccuuucaauaggaaaaac

SEQ ID NO: 2983561 - RNA, 22 nt, Human
cgcaggauucuuccucccuccc

SEQ ID NO: 2983562 - RNA, 18 nt, Human
cgcaggcccccaggugcc

SEQ ID NO: 2983563 - RNA, 14 nt, Human
cgauagugguggug

SEQ ID NO: 2983564 - RNA, 16 nt, Human
cgaguagcugggacua

SEQ ID NO: 2983565 - RNA, 14 nt, Human
cgccuacaggagug

SEQ ID NO: 2983566 - RNA, 22 nt, Human
cguggugauuuagcaggaagcu

SEQ ID NO: 2983567 - RNA, 15 nt, Human
cguggugauuuagca

SEQ ID NO: 2983568 - RNA, 14 nt, Human
cgugguggcaggca

SEQ ID NO: 2983569 - RNA, 20 nt, Human
cguguaaccauggacccaau

SEQ ID NO: 2983570 - RNA, 17 nt, Human
cgugaggccagagacac

SEQ ID NO: 2983571 - RNA, 16 nt, Human
cgugaguccuggcaug

SEQ ID NO: 2983572 - RNA, 17 nt, Human
cgugaguccuggcaugg

SEQ ID NO: 2983573 - RNA, 16 nt, Human
cgugaggccagagaca

SEQ ID NO: 2983574 - RNA, 16 nt, Human
cgguuuuacugcagcu

SEQ ID NO: 2983575 - RNA, 11 nt, Human
cgggcucagca

SEQ ID NO: 2983576 - RNA, 14 nt, Human
cgggcucugccucc

SEQ ID NO: 2983577 - RNA, 16 nt, Human
cgggcucugccuccca

SEQ ID NO: 2983578 - RNA, 15 nt, Human
cgggcucagcaaaag

SEQ ID NO: 2983579 - RNA, 13 nt, Human
cgggcucugccuc

SEQ ID NO: 2983580 - RNA, 17 nt, Human
cgggcucugccucccau

SEQ ID NO: 2983581 - RNA, 14 nt, Human
cggggacagcuccu

SEQ ID NO: 2983582 - RNA, 18 nt, Human
cgguguggagaagcggcu

SEQ ID NO: 2983583 - RNA, 18 nt, Human
cgguguuauuccaaggga

SEQ ID NO: 2983584 - RNA, 13 nt, Human
cgguguggagaag

SEQ ID NO: 2983585 - RNA, 15 nt, Human
cggggacagcuccuu

SEQ ID NO: 2983586 - RNA, 14 nt, Human
cggcucacugcagc

SEQ ID NO: 2983587 - RNA, 15 nt, Human
cggcucacugcagcc

SEQ ID NO: 2983588 - RNA, 20 nt, Human
cggagucccaccuuggcugc

SEQ ID NO: 2983589 - RNA, 18 nt, Human
cggagucccaccuuggcu

SEQ ID NO: 2983590 - RNA, 16 nt, Human
cggcucacugcagccu

SEQ ID NO: 2983591 - RNA, 12 nt, Human
cggcuccaggcu

SEQ ID NO: 2983592 - RNA, 16 nt, Human
cggcuccaggcuccuu

SEQ ID NO: 2983593 - RNA, 15 nt, Human
cggcuccaggcuccu

SEQ ID NO: 2983594 - RNA, 14 nt, Human
cggcuccaggcucc

SEQ ID NO: 2983595 - RNA, 13 nt, Human
cggcuccaggcuc

SEQ ID NO: 2983596 - RNA, 14 nt, Human
cgggccacagagaa

SEQ ID NO: 2983597 - RNA, 12 nt, Human
cgggccacagag

SEQ ID NO: 2983598 - RNA, 16 nt, Human
cggagucccaccuugg

SEQ ID NO: 2983599 - RNA, 16 nt, Human
cucuccccuucucugu

SEQ ID NO: 2983600 - RNA, 21 nt, Human
cucugcacuccccugcugggu

SEQ ID NO: 2983601 - RNA, 20 nt, Human
cucugcacuccccugcuggg

SEQ ID NO: 2983602 - RNA, 18 nt, Human
cucugcacuccccugcug

SEQ ID NO: 2983603 - RNA, 18 nt, Human
cucugcuccucuccccag

SEQ ID NO: 2983604 - RNA, 13 nt, Human
cucugcuccucuc

SEQ ID NO: 2983605 - RNA, 14 nt, Human
cucugguccauaga

SEQ ID NO: 2983606 - RNA, 16 nt, Human
cucugcugacagacac

SEQ ID NO: 2983607 - RNA, 14 nt, Human
cucugcugacagac

SEQ ID NO: 2983608 - RNA, 13 nt, Human
cucugcugacaga

SEQ ID NO: 2983609 - RNA, 21 nt, Human
cucuuagaugcaguucugaag

SEQ ID NO: 2983610 - RNA, 22 nt, Human
cucuuagaugcaguucugaaga

SEQ ID NO: 2983611 - RNA, 13 nt, Human
cucuuauugccca

SEQ ID NO: 2983612 - RNA, 20 nt, Human
cucuuauugcccacgcugga

SEQ ID NO: 2983613 - RNA, 19 nt, Human
cucuuauugcccacgcugg

SEQ ID NO: 2983614 - RNA, 15 nt, Human
cucuuauugcccacg

SEQ ID NO: 2983615 - RNA, 14 nt, Human
cucuuauugcccac

SEQ ID NO: 2983616 - RNA, 19 nt, Human
cucuucagaucucuaacuu

SEQ ID NO: 2983617 - RNA, 18 nt, Human
cucuucagaucucuaacu

SEQ ID NO: 2983618 - RNA, 14 nt, Human
cucuucaaucucuu

SEQ ID NO: 2983619 - RNA, 15 nt, Human
cugaaacaacaaaua

SEQ ID NO: 2983620 - RNA, 23 nt, Human
cugaaggacauugcggacagcca

SEQ ID NO: 2983621 - RNA, 18 nt, Human
cugaaggccccgcccagg

SEQ ID NO: 2983622 - RNA, 19 nt, Human
cugaaggccccgcccaggc

SEQ ID NO: 2983623 - RNA, 21 nt, Human
cugaaggccccgcccaggcuu

SEQ ID NO: 2983624 - RNA, 22 nt, Human
cugacaacacucauugaccuga

SEQ ID NO: 2983625 - RNA, 23 nt, Human
cugacaacacucauugaccugag

SEQ ID NO: 2983626 - RNA, 17 nt, Human
cucuugagccuugaacu

SEQ ID NO: 2983627 - RNA, 16 nt, Human
cucuugagccuugaac

SEQ ID NO: 2983628 - RNA, 18 nt, Human
cucuugagccuugaacuu

SEQ ID NO: 2983629 - RNA, 23 nt, Human
cugagacagcccgggcucugccu

SEQ ID NO: 2983630 - RNA, 21 nt, Human
cugagacucgcgacaaugcaa

SEQ ID NO: 2983631 - RNA, 20 nt, Human
cugagacucgcgacaaugca

SEQ ID NO: 2983632 - RNA, 21 nt, Human
cugacccaugcugcccuguga

SEQ ID NO: 2983633 - RNA, 22 nt, Human
cugacccaugcugcccugugag

SEQ ID NO: 2983634 - RNA, 22 nt, Human
cugagacucgcgacaaugcaaa

SEQ ID NO: 2983635 - RNA, 17 nt, Human
cugagaguagagucacu

SEQ ID NO: 2983636 - RNA, 22 nt, Human
cugagaggacuuuucuuugugg

SEQ ID NO: 2983637 - RNA, 21 nt, Human
cugagaggacuuuucuuugug

SEQ ID NO: 2983638 - RNA, 20 nt, Human
cugaguacguugugcauuug

SEQ ID NO: 2983639 - RNA, 19 nt, Human
cugaguacguugugcauuu

SEQ ID NO: 2983640 - RNA, 17 nt, Human
cugaguacguugugcau

SEQ ID NO: 2983641 - RNA, 18 nt, Human
cugaguacguugugcauu

SEQ ID NO: 2983642 - RNA, 21 nt, Human
cugaguacguugugcauuugg

SEQ ID NO: 2983643 - RNA, 14 nt, Human
cugaggaauccaga

SEQ ID NO: 2983644 - RNA, 20 nt, Human
cugaggaauccagacccggc

SEQ ID NO: 2983645 - RNA, 17 nt, Human
cugaggaauccagaccc

SEQ ID NO: 2983646 - RNA, 20 nt, Human
cugaggacacuaaccacgcu

SEQ ID NO: 2983647 - RNA, 21 nt, Human
cugaggaauccagacccggcu

SEQ ID NO: 2983648 - RNA, 23 nt, Human
cugaggacacuaaccacgcugga

SEQ ID NO: 2983649 - RNA, 14 nt, Human
cugagcuuucugcu

SEQ ID NO: 2983650 - RNA, 15 nt, Human
cugagcuuucugcua

SEQ ID NO: 2983651 - RNA, 21 nt, Human
cugagaucaaaacgguuuuac

SEQ ID NO: 2983652 - RNA, 17 nt, Human
cugagauccuggacuga

SEQ ID NO: 2983653 - RNA, 15 nt, Human
cugagauccuggacu

SEQ ID NO: 2983654 - RNA, 13 nt, Human
cugagauccugga

SEQ ID NO: 2983655 - RNA, 21 nt, Human
cugagauccuggacugagggg

SEQ ID NO: 2983656 - RNA, 16 nt, Human
cuccacuuucuagcca

SEQ ID NO: 2983657 - RNA, 19 nt, Human
cuccacuuucuagccagag

SEQ ID NO: 2983658 - RNA, 23 nt, Human
cuccacuuggucugugagaugcu

SEQ ID NO: 2983659 - RNA, 19 nt, Human
cuccccaugauguuuagaa

SEQ ID NO: 2983660 - RNA, 14 nt, Human
cucccaccuggcuc

SEQ ID NO: 2983661 - RNA, 13 nt, Human
cucccaccuggcu

SEQ ID NO: 2983662 - RNA, 22 nt, Human
cucccaccuggcucuguggcga

SEQ ID NO: 2983663 - RNA, 15 nt, Human
cucccaccuggcucu

SEQ ID NO: 2983664 - RNA, 22 nt, Human
cuccacuuggucugugagaugc

SEQ ID NO: 2983665 - RNA, 21 nt, Human
cuccacuuggucugugagaug

SEQ ID NO: 2983666 - RNA, 17 nt, Human
cuccacuuggucuguga

SEQ ID NO: 2983667 - RNA, 16 nt, Human
cuccacuuggucugug

SEQ ID NO: 2983668 - RNA, 15 nt, Human
cuccacuuggucugu

SEQ ID NO: 2983669 - RNA, 13 nt, Human
cuccacuuggucu

SEQ ID NO: 2983670 - RNA, 13 nt, Human
cuccaagcuccca

SEQ ID NO: 2983671 - RNA, 14 nt, Human
cuccaagcucccag

SEQ ID NO: 2983672 - RNA, 15 nt, Human
cuccaagcucccagg

SEQ ID NO: 2983673 - RNA, 16 nt, Human
cuccaagcucccaggc

SEQ ID NO: 2983674 - RNA, 13 nt, Human
cuccaagcaggac

SEQ ID NO: 2983675 - RNA, 14 nt, Human
cuccaagcaggaca

SEQ ID NO: 2983676 - RNA, 22 nt, Human
cuccaagcaggacauggacaag

SEQ ID NO: 2983677 - RNA, 24 nt, Human
cuccaagcaggacauggacaagga

SEQ ID NO: 2983678 - RNA, 22 nt, Human
cuccaagaccuucuccuucacc

SEQ ID NO: 2983679 - RNA, 21 nt, Human
cuccaagaccuucuccuucac

SEQ ID NO: 2983680 - RNA, 14 nt, Human
cuccaagaauuucu

SEQ ID NO: 2983681 - RNA, 13 nt, Human
cuccaagaauuuc

SEQ ID NO: 2983682 - RNA, 15 nt, Human
cucccccagccccau

SEQ ID NO: 2983683 - RNA, 20 nt, Human
cucccccagccccauccucu

SEQ ID NO: 2983684 - RNA, 22 nt, Human
cucccccagccccauccucugu

SEQ ID NO: 2983685 - RNA, 20 nt, Human
cuccucugcuugccaucccu

SEQ ID NO: 2983686 - RNA, 17 nt, Human
cuccucugcuugccauc

SEQ ID NO: 2983687 - RNA, 16 nt, Human
cuccucugcuugccau

SEQ ID NO: 2983688 - RNA, 15 nt, Human
cuccucugcuugcca

SEQ ID NO: 2983689 - RNA, 21 nt, Human
cuccucugcuugccaucccuc

SEQ ID NO: 2983690 - RNA, 17 nt, Human
cuccugggcagcugccu

SEQ ID NO: 2983691 - RNA, 16 nt, Human
cuccugggcagcugcc

SEQ ID NO: 2983692 - RNA, 15 nt, Human
cuccugggcagcugc

SEQ ID NO: 2983693 - RNA, 14 nt, Human
cuccugggcagcug

SEQ ID NO: 2983694 - RNA, 19 nt, Human
cuccugggcagcugccucc

SEQ ID NO: 2983695 - RNA, 18 nt, Human
cuccugggcagcugccuc

SEQ ID NO: 2983696 - RNA, 18 nt, Human
cuccugggauuggcugug

SEQ ID NO: 2983697 - RNA, 23 nt, Human
cuccugggauuggcugugaacug

SEQ ID NO: 2983698 - RNA, 22 nt, Human
cuccugggcagcugccuccccu

SEQ ID NO: 2983699 - RNA, 16 nt, Human
cuccuggcccacugca

SEQ ID NO: 2983700 - RNA, 18 nt, Human
cuccuggcccacugcauc

SEQ ID NO: 2983701 - RNA, 12 nt, Human
cuccugggcagc

SEQ ID NO: 2983702 - RNA, 18 nt, Human
cuccucugcugcuggcug

SEQ ID NO: 2983703 - RNA, 14 nt, Human
cuccucugcuugcc

SEQ ID NO: 2983704 - RNA, 12 nt, Human
cuccucugcuug

SEQ ID NO: 2983705 - RNA, 16 nt, Human
cuccucugcugcuggc

SEQ ID NO: 2983706 - RNA, 13 nt, Human
cuccuaaaacaac

SEQ ID NO: 2983707 - RNA, 20 nt, Human
cuccuaaaacaacagaugua

SEQ ID NO: 2983708 - RNA, 12 nt, Human
cuccuaaaacaa

SEQ ID NO: 2983709 - RNA, 14 nt, Human
cucgaacuggcugc

SEQ ID NO: 2983710 - RNA, 13 nt, Human
cucgaacuggcug

SEQ ID NO: 2983711 - RNA, 15 nt, Human
cucgaacuggcugca

SEQ ID NO: 2983712 - RNA, 14 nt, Human
cucguuaauuugua

SEQ ID NO: 2983713 - RNA, 21 nt, Human
cacaguguguggucaacauuu

SEQ ID NO: 2983714 - RNA, 14 nt, Human
cacaguucucuccu

SEQ ID NO: 2983715 - RNA, 15 nt, Human
cacaguucucuccuu

SEQ ID NO: 2983716 - RNA, 13 nt, Human
cacaguccuuacc

SEQ ID NO: 2983717 - RNA, 15 nt, Human
cacaguccuuaccag

SEQ ID NO: 2983718 - RNA, 21 nt, Human
cacaguccuuaccagcagagc

SEQ ID NO: 2983719 - RNA, 22 nt, Human
cacaguccuuaccagcagagca

SEQ ID NO: 2983720 - RNA, 21 nt, Human
cacagugagucgaggacaggg

SEQ ID NO: 2983721 - RNA, 22 nt, Human
cacagugagucgaggacaggga

SEQ ID NO: 2983722 - RNA, 19 nt, Human
cacagugaucaaguuauuu

SEQ ID NO: 2983723 - RNA, 22 nt, Human
cacagcuucauuuccugugucu

SEQ ID NO: 2983724 - RNA, 21 nt, Human
cacagcuucauuuccuguguc

SEQ ID NO: 2983725 - RNA, 22 nt, Human
cacagcugggguggggaccuca

SEQ ID NO: 2983726 - RNA, 23 nt, Human
cacagcugggguggggaccucag

SEQ ID NO: 2983727 - RNA, 15 nt, Human
cacaggcagguccag

SEQ ID NO: 2983728 - RNA, 14 nt, Human
cacaggcaggucca

SEQ ID NO: 2983729 - RNA, 11 nt, Human
cacaggcaggu

SEQ ID NO: 2983730 - RNA, 16 nt, Human
cacaguuuucugagaa

SEQ ID NO: 2983731 - RNA, 17 nt, Human
cacaguuuucugagaaa

SEQ ID NO: 2983732 - RNA, 19 nt, Human
cacaguuuucugagaaaga

SEQ ID NO: 2983733 - RNA, 15 nt, Human
cacaguuuucugaga

SEQ ID NO: 2983734 - RNA, 14 nt, Human
cacauaucugucau

SEQ ID NO: 2983735 - RNA, 20 nt, Human
caaacuaacaggcuuaguga

SEQ ID NO: 2983736 - RNA, 16 nt, Human
caaacuaacaggcuua

SEQ ID NO: 2983737 - RNA, 17 nt, Human
caaacucaccugccccu

SEQ ID NO: 2983738 - RNA, 17 nt, Human
caaagccuccuccagcc

SEQ ID NO: 2983739 - RNA, 18 nt, Human
caaagccuccuccagccg

SEQ ID NO: 2983740 - RNA, 22 nt, Human
caaagccaaagcuaggccuggc

SEQ ID NO: 2983741 - RNA, 18 nt, Human
caaaggguaucaggugcu

SEQ ID NO: 2983742 - RNA, 16 nt, Human
caaaggguaucaggug

SEQ ID NO: 2983743 - RNA, 14 nt, Human
caaaggaagcacau

SEQ ID NO: 2983744 - RNA, 19 nt, Human
caaagcuaggccuggccag

SEQ ID NO: 2983745 - RNA, 14 nt, Human
caaagcuaggccug

SEQ ID NO: 2983746 - RNA, 13 nt, Human
caaagcuaggccu

SEQ ID NO: 2983747 - RNA, 12 nt, Human
caaaggaagcac

SEQ ID NO: 2983748 - RNA, 13 nt, Human
caaaggaagcaca

SEQ ID NO: 2983749 - RNA, 14 nt, Human
caaacuaacaggcu

SEQ ID NO: 2983750 - RNA, 14 nt, Human
caaacccuucagug

SEQ ID NO: 2983751 - RNA, 20 nt, Human
caaacccuucagugccaaaa

SEQ ID NO: 2983752 - RNA, 15 nt, Human
caaacacauacagga

SEQ ID NO: 2983753 - RNA, 22 nt, Human
caaaauuuuuucucuaggaaau

SEQ ID NO: 2983754 - RNA, 21 nt, Human
caaaauuuuuucucuaggaaa

SEQ ID NO: 2983755 - RNA, 16 nt, Human
caaaauuuuuucucua

SEQ ID NO: 2983756 - RNA, 15 nt, Human
caaaauguaggguua

SEQ ID NO: 2983757 - RNA, 12 nt, Human
caaaauaaaacu

SEQ ID NO: 2983758 - RNA, 14 nt, Human
caaauuucuaaauc

SEQ ID NO: 2983759 - RNA, 12 nt, Human
caaauuucuaaa

SEQ ID NO: 2983760 - RNA, 11 nt, Human
caaauuucuaa

SEQ ID NO: 2983761 - RNA, 14 nt, Human
caaaugucuauaaa

SEQ ID NO: 2983762 - RNA, 15 nt, Human
caaaugucuauaaac

SEQ ID NO: 2983763 - RNA, 19 nt, Human
caaauaugcaaagcacuga

SEQ ID NO: 2983764 - RNA, 21 nt, Human
caaauaugcaaagcacugacu

SEQ ID NO: 2983765 - RNA, 19 nt, Human
caaaggguaucaggugcug

SEQ ID NO: 2983766 - RNA, 19 nt, Human
caaagugcugggauuacag

SEQ ID NO: 2983767 - RNA, 23 nt, Human
caaagugcugggauuacaggugu

SEQ ID NO: 2983768 - RNA, 20 nt, Human
caaauacgugggcauucaaa

SEQ ID NO: 2983769 - RNA, 22 nt, Human
caaauacgugggcauucaaaug

SEQ ID NO: 2983770 - RNA, 21 nt, Human
caaauacgugggcauucaaau

SEQ ID NO: 2983771 - RNA, 23 nt, Human
caaaacuucagacauagaauuaa

SEQ ID NO: 2983772 - RNA, 17 nt, Human
caaaauaaaaaugaggu

SEQ ID NO: 2983773 - RNA, 20 nt, Human
caaaacucuccucugcugcu

SEQ ID NO: 2983774 - RNA, 21 nt, Human
caaaacucuccucugcugcug

SEQ ID NO: 2983775 - RNA, 22 nt, Human
caaaacucuccucugcugcugg

SEQ ID NO: 2983776 - RNA, 19 nt, Human
caaaaaucucaauauuuca

SEQ ID NO: 2983777 - RNA, 13 nt, Human
auuuuccugaaaa

SEQ ID NO: 2983778 - RNA, 21 nt, Human
auuuugggguacccacugcuc

SEQ ID NO: 2983779 - RNA, 16 nt, Human
caaaaaaugcuugcuu

SEQ ID NO: 2983780 - RNA, 23 nt, Human
auuuugggguacccacugcucug

SEQ ID NO: 2983781 - RNA, 22 nt, Human
auuuugggguacccacugcucu

SEQ ID NO: 2983782 - RNA, 15 nt, Human
caaaaacacagcaag

SEQ ID NO: 2983783 - RNA, 17 nt, Human
caaaaacacagcaaggg

SEQ ID NO: 2983784 - RNA, 20 nt, Human
caaaaacauggccuuugcuu

SEQ ID NO: 2983785 - RNA, 13 nt, Human
caaaaacacagca

SEQ ID NO: 2983786 - RNA, 14 nt, Human
caaaaacacagcaa

SEQ ID NO: 2983787 - RNA, 13 nt, Human
caaaaaggcagga

SEQ ID NO: 2983788 - RNA, 18 nt, Human
caaggcuuagacccucau

SEQ ID NO: 2983789 - RNA, 15 nt, Human
caaggcugugcaucu

SEQ ID NO: 2983790 - RNA, 21 nt, Human
caaggcugucaauuacaggaa

SEQ ID NO: 2983791 - RNA, 23 nt, Human
caaggcugucaauuacaggaagu

SEQ ID NO: 2983792 - RNA, 12 nt, Human
caaggcugcagu

SEQ ID NO: 2983793 - RNA, 15 nt, Human
caaggcugcagugag

SEQ ID NO: 2983794 - RNA, 15 nt, Human
caaggcuuagacccu

SEQ ID NO: 2983795 - RNA, 18 nt, Human
caaggggcccaaauucuu

SEQ ID NO: 2983796 - RNA, 14 nt, Human
caaggcuuagaccc

SEQ ID NO: 2983797 - RNA, 17 nt, Human
caaggggcccaaauucu

SEQ ID NO: 2983798 - RNA, 14 nt, Human
caaguccucuuuuc

SEQ ID NO: 2983799 - RNA, 20 nt, Human
caaggucauuuuuuuuaaga

SEQ ID NO: 2983800 - RNA, 14 nt, Human
caaggucauuuuuu

SEQ ID NO: 2983801 - RNA, 13 nt, Human
caaggucauuuuu

SEQ ID NO: 2983802 - RNA, 17 nt, Human
caagugagagcugggug

SEQ ID NO: 2983803 - RNA, 15 nt, Human
caagugagagcuggg

SEQ ID NO: 2983804 - RNA, 14 nt, Human
caagugagagcugg

SEQ ID NO: 2983805 - RNA, 21 nt, Human
caaguccucuuuucugagagg

SEQ ID NO: 2983806 - RNA, 18 nt, Human
caagugagagcugggugu

SEQ ID NO: 2983807 - RNA, 14 nt, Human
caaguuaaauaaau

SEQ ID NO: 2983808 - RNA, 17 nt, Human
caaggcugauuaaacca

SEQ ID NO: 2983809 - RNA, 19 nt, Human
caagcuggucccacucagu

SEQ ID NO: 2983810 - RNA, 17 nt, Human
caagcuggucccacuca

SEQ ID NO: 2983811 - RNA, 21 nt, Human
caagccagauuuuccugaaaa

SEQ ID NO: 2983812 - RNA, 22 nt, Human
caagccaccaacauacucccau

SEQ ID NO: 2983813 - RNA, 14 nt, Human
caagcaggacaugg

SEQ ID NO: 2983814 - RNA, 18 nt, Human
caagcaggacauggacaa

SEQ ID NO: 2983815 - RNA, 19 nt, Human
caagcgauucuucugcuuc

SEQ ID NO: 2983816 - RNA, 22 nt, Human
caagcgauucuucugcuucagc

SEQ ID NO: 2983817 - RNA, 20 nt, Human
caagcgauucuucugcuuca

SEQ ID NO: 2983818 - RNA, 20 nt, Human
caacacucauugaccugagg

SEQ ID NO: 2983819 - RNA, 22 nt, Human
caacacucauugaccugaggcc

SEQ ID NO: 2983820 - RNA, 18 nt, Human
caacacucauugaccuga

SEQ ID NO: 2983821 - RNA, 22 nt, Human
caacacucacauuuauucugcu

SEQ ID NO: 2983822 - RNA, 22 nt, Human
caaccccuucgcuccugugucu

SEQ ID NO: 2983823 - RNA, 14 nt, Human
caaccuccugggcu

SEQ ID NO: 2983824 - RNA, 15 nt, Human
caaccuccugggcua

SEQ ID NO: 2983825 - RNA, 13 nt, Human
caacgucugugcc

SEQ ID NO: 2983826 - RNA, 14 nt, Human
caacgucugugcca

SEQ ID NO: 2983827 - RNA, 17 nt, Human
caagaccuucuccuuca

SEQ ID NO: 2983828 - RNA, 18 nt, Human
caagaccuucuccuucac

SEQ ID NO: 2983829 - RNA, 16 nt, Human
caagacgcugugcugc

SEQ ID NO: 2983830 - RNA, 17 nt, Human
caagacgcugugcugcc

SEQ ID NO: 2983831 - RNA, 14 nt, Human
caagaccuucuccu

SEQ ID NO: 2983832 - RNA, 16 nt, Human
caagaccuucuccuuc

SEQ ID NO: 2983833 - RNA, 20 nt, Human
caagaacuuuccaggaaggc

SEQ ID NO: 2983834 - RNA, 17 nt, Human
caagcaccuccugccuc

SEQ ID NO: 2983835 - RNA, 16 nt, Human
caagcaccuccugccu

SEQ ID NO: 2983836 - RNA, 15 nt, Human
caagcaccuccugcc

SEQ ID NO: 2983837 - RNA, 16 nt, Human
caagagcccaggccuc

SEQ ID NO: 2983838 - RNA, 18 nt, Human
caagacucuuuggacacu

SEQ ID NO: 2983839 - RNA, 13 nt, Human
caagagcccaggc

SEQ ID NO: 2983840 - RNA, 14 nt, Human
caagagcccaggcc

SEQ ID NO: 2983841 - RNA, 15 nt, Human
caagagcccaggccu

SEQ ID NO: 2983842 - RNA, 14 nt, Human
caagacucccauga

SEQ ID NO: 2983843 - RNA, 23 nt, Human
caagacgcugugcugcccugccc

SEQ ID NO: 2983844 - RNA, 18 nt, Human
caagacucccaugaggga

SEQ ID NO: 2983845 - RNA, 18 nt, Human
caagacgcugugcugccc

SEQ ID NO: 2983846 - RNA, 19 nt, Human
caaugagaucauugugaag

SEQ ID NO: 2983847 - RNA, 17 nt, Human
caaugcacuuuguucug

SEQ ID NO: 2983848 - RNA, 20 nt, Human
caaugcacuuuguucuggcu

SEQ ID NO: 2983849 - RNA, 21 nt, Human
caaugcacuuuguucuggcuc

SEQ ID NO: 2983850 - RNA, 22 nt, Human
caaugugacuuaaugccacuaa

SEQ ID NO: 2983851 - RNA, 22 nt, Human
caauuugcacauuaaaugacuc

SEQ ID NO: 2983852 - RNA, 15 nt, Human
caauuugcacauuaa

SEQ ID NO: 2983853 - RNA, 14 nt, Human
caauuugcacauua

SEQ ID NO: 2983854 - RNA, 16 nt, Human
caauuacaggaaguac

SEQ ID NO: 2983855 - RNA, 23 nt, Human
caauucucauuugucacacacuu

SEQ ID NO: 2983856 - RNA, 15 nt, Human
caaugugauaaaacc

SEQ ID NO: 2983857 - RNA, 17 nt, Human
caaugugauaaaacccc

SEQ ID NO: 2983858 - RNA, 16 nt, Human
caaguuaguucaaucu

SEQ ID NO: 2983859 - RNA, 23 nt, Human
caauacaucccuuaccugggaaa

SEQ ID NO: 2983860 - RNA, 12 nt, Human
caauaggaaaaa

SEQ ID NO: 2983861 - RNA, 13 nt, Human
caauaggaaaaac

SEQ ID NO: 2983862 - RNA, 23 nt, Human
caaucugugaugacauucccugc

SEQ ID NO: 2983863 - RNA, 23 nt, Human
caaugaccuuucaauaggaaaaa

SEQ ID NO: 2983864 - RNA, 20 nt, Human
caaucuggauucauauuuaa

SEQ ID NO: 2983865 - RNA, 16 nt, Human
caaucuggauucauau

SEQ ID NO: 2983866 - RNA, 21 nt, Human
caaugaccuuucaauaggaaa

SEQ ID NO: 2983867 - RNA, 15 nt, Human
caaugacuuacugua

SEQ ID NO: 2983868 - RNA, 18 nt, Human
caaugacuuacuguacau

SEQ ID NO: 2983869 - RNA, 17 nt, Human
caaugacuuacuguaca

SEQ ID NO: 2983870 - RNA, 17 nt, Human
caauauucgcuguguca

SEQ ID NO: 2983871 - RNA, 14 nt, Human
caauaggaaaaacu

SEQ ID NO: 2983872 - RNA, 20 nt, Human
uucuucccaauagcaaggcu

SEQ ID NO: 2983873 - RNA, 21 nt, Human
uucuuccacaagagcccaggc

SEQ ID NO: 2983874 - RNA, 21 nt, Human
uucuuauacauuugauaaagu

SEQ ID NO: 2983875 - RNA, 14 nt, Human
uucuuguguguuua

SEQ ID NO: 2983876 - RNA, 13 nt, Human
uucuuccucccuc

SEQ ID NO: 2983877 - RNA, 21 nt, Human
uucuuguguguuuauugucaa

SEQ ID NO: 2983878 - RNA, 14 nt, Human
uucuuuccaaagua

SEQ ID NO: 2983879 - RNA, 12 nt, Human
uucuuucagcca

SEQ ID NO: 2983880 - RNA, 22 nt, Human
uugaaaacacuguucucugccc

SEQ ID NO: 2983881 - RNA, 23 nt, Human
uugaaaacacuguucucugcccu

SEQ ID NO: 2983882 - RNA, 20 nt, Human
uugaaaaaccauuuugcugu

SEQ ID NO: 2983883 - RNA, 21 nt, Human
uucuuuccaaaguacacuguu

SEQ ID NO: 2983884 - RNA, 16 nt, Human
uugaacuccuggccuc

SEQ ID NO: 2983885 - RNA, 15 nt, Human
uugaacuccuggccu

SEQ ID NO: 2983886 - RNA, 15 nt, Human
uucuggacuaaaacu

SEQ ID NO: 2983887 - RNA, 14 nt, Human
uucugcuucagccu

SEQ ID NO: 2983888 - RNA, 16 nt, Human
uucugcuucagccucc

SEQ ID NO: 2983889 - RNA, 15 nt, Human
uucugcuucagccuc

SEQ ID NO: 2983890 - RNA, 19 nt, Human
uucugcuucagccucccga

SEQ ID NO: 2983891 - RNA, 18 nt, Human
uucuguauuuuguuuuug

SEQ ID NO: 2983892 - RNA, 15 nt, Human
uucuggauauagcua

SEQ ID NO: 2983893 - RNA, 19 nt, Human
uucuguccuacucuguguc

SEQ ID NO: 2983894 - RNA, 17 nt, Human
uucugucuucacaacag

SEQ ID NO: 2983895 - RNA, 22 nt, Human
uugauugggcacaucauuucaa

SEQ ID NO: 2983896 - RNA, 17 nt, Human
uugauugggcacaucau

SEQ ID NO: 2983897 - RNA, 16 nt, Human
uugauugggcacauca

SEQ ID NO: 2983898 - RNA, 16 nt, Human
uugaugaucuuugcag

SEQ ID NO: 2983899 - RNA, 21 nt, Human
uugcaaaguaucccuacugua

SEQ ID NO: 2983900 - RNA, 22 nt, Human
uugcaaauaaguguauuuugaa

SEQ ID NO: 2983901 - RNA, 14 nt, Human
uugaugaagaaguu

SEQ ID NO: 2983902 - RNA, 13 nt, Human
uugaugaagaagu

SEQ ID NO: 2983903 - RNA, 23 nt, Human
uugaugaagaaguugauaugccu

SEQ ID NO: 2983904 - RNA, 23 nt, Human
uugauauccucuuugagugaagc

SEQ ID NO: 2983905 - RNA, 23 nt, Human
uugauagcacagacccugcccug

SEQ ID NO: 2983906 - RNA, 16 nt, Human
uugaggguugggcugg

SEQ ID NO: 2983907 - RNA, 13 nt, Human
uugaggguugggc

SEQ ID NO: 2983908 - RNA, 11 nt, Human
uugagccuggg

SEQ ID NO: 2983909 - RNA, 19 nt, Human
uugacuauuuuuguuuuua

SEQ ID NO: 2983910 - RNA, 15 nt, Human
uugacgccaucccag

SEQ ID NO: 2983911 - RNA, 21 nt, Human
uugacuauuuuuguuuuuauu

SEQ ID NO: 2983912 - RNA, 16 nt, Human
uugaccucugcagcaa

SEQ ID NO: 2983913 - RNA, 17 nt, Human
uugacgccaucccagcc

SEQ ID NO: 2983914 - RNA, 18 nt, Human
uugacgccaucccagccc

SEQ ID NO: 2983915 - RNA, 19 nt, Human
uugacgccaucccagcccc

SEQ ID NO: 2983916 - RNA, 17 nt, Human
uugaccgugaggccaga

SEQ ID NO: 2983917 - RNA, 17 nt, Human
uugacccacaagaaaug

SEQ ID NO: 2983918 - RNA, 14 nt, Human
uugacccacaagaa

SEQ ID NO: 2983919 - RNA, 15 nt, Human
uugaccucugcagca

SEQ ID NO: 2983920 - RNA, 14 nt, Human
uugaccucugcagc

SEQ ID NO: 2983921 - RNA, 21 nt, Human
uugaccucaggugauccaccc

SEQ ID NO: 2983922 - RNA, 12 nt, Human
uugaauuuuaca

SEQ ID NO: 2983923 - RNA, 14 nt, Human
uugaauuguaagga

SEQ ID NO: 2983924 - RNA, 13 nt, Human
uugaacuuugacc

SEQ ID NO: 2983925 - RNA, 18 nt, Human
uugaacuggguacuugug

SEQ ID NO: 2983926 - RNA, 22 nt, Human
uucucauguugaaacuuuaaga

SEQ ID NO: 2983927 - RNA, 21 nt, Human
uucuaugaaauauuauguuaa

SEQ ID NO: 2983928 - RNA, 14 nt, Human
uucuaugaaauauu

SEQ ID NO: 2983929 - RNA, 16 nt, Human
uucuccacccugcucu

SEQ ID NO: 2983930 - RNA, 21 nt, Human
uucuccaccucccacaaagga

SEQ ID NO: 2983931 - RNA, 12 nt, Human
uucuccaccugc

SEQ ID NO: 2983932 - RNA, 14 nt, Human
uucuccaccugcca

SEQ ID NO: 2983933 - RNA, 15 nt, Human
uucuccaccugccag

SEQ ID NO: 2983934 - RNA, 16 nt, Human
uucuccaccugccagg

SEQ ID NO: 2983935 - RNA, 18 nt, Human
uucuccaccugccaggga

SEQ ID NO: 2983936 - RNA, 20 nt, Human
uucuccaccugccagggaca

SEQ ID NO: 2983937 - RNA, 23 nt, Human
uucucuccucuccccaugauguu

SEQ ID NO: 2983938 - RNA, 19 nt, Human
uucucuccuguaccucuug

SEQ ID NO: 2983939 - RNA, 14 nt, Human
uucucucaucuguu

SEQ ID NO: 2983940 - RNA, 11 nt, Human
uucucugcccu

SEQ ID NO: 2983941 - RNA, 12 nt, Human
uucucugcccuc

SEQ ID NO: 2983942 - RNA, 20 nt, Human
uucucugaggacacuaacca

SEQ ID NO: 2983943 - RNA, 14 nt, Human
uucucugaggacac

SEQ ID NO: 2983944 - RNA, 18 nt, Human
uucucuccuguaccucuu

SEQ ID NO: 2983945 - RNA, 14 nt, Human
uucucuccuguacc

SEQ ID NO: 2983946 - RNA, 15 nt, Human
uucucuccagccccu

SEQ ID NO: 2983947 - RNA, 16 nt, Human
uucucuccagccccug

SEQ ID NO: 2983948 - RNA, 13 nt, Human
uucucuccagccc

SEQ ID NO: 2983949 - RNA, 14 nt, Human
uucucuccagcccc

SEQ ID NO: 2983950 - RNA, 16 nt, Human
uucucugcccuccaag

SEQ ID NO: 2983951 - RNA, 17 nt, Human
uucucugcccuccaaga

SEQ ID NO: 2983952 - RNA, 23 nt, Human
uucugacccaugcugcccuguga

SEQ ID NO: 2983953 - RNA, 22 nt, Human
uucugacccaugcugcccugug

SEQ ID NO: 2983954 - RNA, 18 nt, Human
uucugacccugcuucaaa

SEQ ID NO: 2983955 - RNA, 16 nt, Human
uucugagaaagacuau

SEQ ID NO: 2983956 - RNA, 21 nt, Human
uucugagaaagacuauucaaa

SEQ ID NO: 2983957 - RNA, 19 nt, Human
uucugcucacauaucuguc

SEQ ID NO: 2983958 - RNA, 19 nt, Human
uucugauccuaguuccacc

SEQ ID NO: 2983959 - RNA, 21 nt, Human
uucuauauaauuccuguuuuu

SEQ ID NO: 2983960 - RNA, 21 nt, Human
uucuauaauuuccauuuacuu

SEQ ID NO: 2983961 - RNA, 22 nt, Human
uucuacucgaguuacagacaaa

SEQ ID NO: 2983962 - RNA, 14 nt, Human
uucuacccaggugc

SEQ ID NO: 2983963 - RNA, 21 nt, Human
uucuacccagcgagcccuggu

SEQ ID NO: 2983964 - RNA, 20 nt, Human
uucuacccagcgagcccugg

SEQ ID NO: 2983965 - RNA, 13 nt, Human
uucuacgccaggg

SEQ ID NO: 2983966 - RNA, 15 nt, Human
uucuacauacuaugg

SEQ ID NO: 2983967 - RNA, 19 nt, Human
uucuacccagcgagcccug

SEQ ID NO: 2983968 - RNA, 12 nt, Human
uucuacccagcg

SEQ ID NO: 2983969 - RNA, 18 nt, Human
uucggugagcuacaaaug

SEQ ID NO: 2983970 - RNA, 21 nt, Human
uuccuugaguugauucagcuc

SEQ ID NO: 2983971 - RNA, 14 nt, Human
uuccugcugagccu

SEQ ID NO: 2983972 - RNA, 23 nt, Human
uuccugaugcuucuucagagacu

SEQ ID NO: 2983973 - RNA, 20 nt, Human
uuccugaggcugggcucccu

SEQ ID NO: 2983974 - RNA, 15 nt, Human
uuccugaggcugggc

SEQ ID NO: 2983975 - RNA, 12 nt, Human
uuccauggccuc

SEQ ID NO: 2983976 - RNA, 16 nt, Human
uuccauggccucuuca

SEQ ID NO: 2983977 - RNA, 18 nt, Human
uuccugaagaauugaaaa

SEQ ID NO: 2983978 - RNA, 14 nt, Human
uucacgcccuuggc

SEQ ID NO: 2983979 - RNA, 13 nt, Human
uucacggaagagc

SEQ ID NO: 2983980 - RNA, 22 nt, Human
uucaccuuuguccccaccgcag

SEQ ID NO: 2983981 - RNA, 17 nt, Human
uucaccuccuaaaacaa

SEQ ID NO: 2983982 - RNA, 17 nt, Human
uucacggaagagccuug

SEQ ID NO: 2983983 - RNA, 14 nt, Human
uucagacagcugcc

SEQ ID NO: 2983984 - RNA, 15 nt, Human
uucagacagcugccu

SEQ ID NO: 2983985 - RNA, 16 nt, Human
uucagacagcugccug

SEQ ID NO: 2983986 - RNA, 20 nt, Human
uucagauaaucacaauacau

SEQ ID NO: 2983987 - RNA, 20 nt, Human
uucagagcugcccucuccug

SEQ ID NO: 2983988 - RNA, 19 nt, Human
uucagagcugcccucuccu

SEQ ID NO: 2983989 - RNA, 18 nt, Human
uucagagcugcccucucc

SEQ ID NO: 2983990 - RNA, 17 nt, Human
uucagacagcugccugg

SEQ ID NO: 2983991 - RNA, 17 nt, Human
uucagagcugcccucuc

SEQ ID NO: 2983992 - RNA, 15 nt, Human
uucagagcugcccuc

SEQ ID NO: 2983993 - RNA, 14 nt, Human
uucagagcugcccu

SEQ ID NO: 2983994 - RNA, 22 nt, Human
uucaauaggaaaaacugauuuu

SEQ ID NO: 2983995 - RNA, 21 nt, Human
uucaauaggaaaaacugauuu

SEQ ID NO: 2983996 - RNA, 18 nt, Human
uucacaaaguaauuugga

SEQ ID NO: 2983997 - RNA, 16 nt, Human
uucacaaaguaauuug

SEQ ID NO: 2983998 - RNA, 19 nt, Human
uucaccuuuguccccaccg

SEQ ID NO: 2983999 - RNA, 20 nt, Human
uucaccuuuguccccaccgc

SEQ ID NO: 2984000 - RNA, 14 nt, Human
uucaccuuuguccc

SEQ ID NO: 2984001 - RNA, 13 nt, Human
uucacccuuuucu

SEQ ID NO: 2984002 - RNA, 16 nt, Human
uuauuuggaaaggaau

SEQ ID NO: 2984003 - RNA, 22 nt, Human
uuauuugaguggaguuacugaa

SEQ ID NO: 2984004 - RNA, 20 nt, Human
uuauuuggaaaggaaugcaa

SEQ ID NO: 2984005 - RNA, 21 nt, Human
uuauuugcagugcaguauaga

SEQ ID NO: 2984006 - RNA, 18 nt, Human
uuauuuuauuaugcauga

SEQ ID NO: 2984007 - RNA, 20 nt, Human
uuauuuuaauaauguuucaa

SEQ ID NO: 2984008 - RNA, 19 nt, Human
uuauuuuaauaauguuuca

SEQ ID NO: 2984009 - RNA, 17 nt, Human
uuauuuuaauaauguuu

SEQ ID NO: 2984010 - RNA, 22 nt, Human
uucaauaacuggaacacucuau

SEQ ID NO: 2984011 - RNA, 16 nt, Human
uucaauaacuggaaca

SEQ ID NO: 2984012 - RNA, 12 nt, Human
uucaauaacugg

SEQ ID NO: 2984013 - RNA, 21 nt, Human
uucaacagguuuuccugaaga

SEQ ID NO: 2984014 - RNA, 18 nt, Human
uucaaauguauuacagug

SEQ ID NO: 2984015 - RNA, 18 nt, Human
uucaaaugcuguaacuuu

SEQ ID NO: 2984016 - RNA, 17 nt, Human
uucaaauccuugaagau

SEQ ID NO: 2984017 - RNA, 22 nt, Human
uuauuuuggaaaauaaauuauu

SEQ ID NO: 2984018 - RNA, 23 nt, Human
uucaguuauuauauuuacaaaug

SEQ ID NO: 2984019 - RNA, 15 nt, Human
uucauccuccucaga

SEQ ID NO: 2984020 - RNA, 19 nt, Human
uucauccuccucagaucuu

SEQ ID NO: 2984021 - RNA, 15 nt, Human
uucauaaccuagccu

SEQ ID NO: 2984022 - RNA, 16 nt, Human
uucaguggcagcugcu

SEQ ID NO: 2984023 - RNA, 15 nt, Human
uucaguggcagcugc

SEQ ID NO: 2984024 - RNA, 17 nt, Human
uucaguggcagcugcuu

SEQ ID NO: 2984025 - RNA, 12 nt, Human
uucaguguacau

SEQ ID NO: 2984026 - RNA, 13 nt, Human
uucaguguacaug

SEQ ID NO: 2984027 - RNA, 13 nt, Human
uucaguggcagcu

SEQ ID NO: 2984028 - RNA, 14 nt, Human
uucaguggcagcug

SEQ ID NO: 2984029 - RNA, 22 nt, Human
uucagcuuguaaauagcucagg

SEQ ID NO: 2984030 - RNA, 15 nt, Human
uucagcuccagcuca

SEQ ID NO: 2984031 - RNA, 12 nt, Human
uucagcuccagc

SEQ ID NO: 2984032 - RNA, 21 nt, Human
uucagcugguugagguuucaa

SEQ ID NO: 2984033 - RNA, 18 nt, Human
uuccagauccuggaaauc

SEQ ID NO: 2984034 - RNA, 19 nt, Human
uuccaacccucaucaccaa

SEQ ID NO: 2984035 - RNA, 14 nt, Human
uuccauggacuuug

SEQ ID NO: 2984036 - RNA, 15 nt, Human
uuccauggacuuugu

SEQ ID NO: 2984037 - RNA, 13 nt, Human
uuccaaaguacac

SEQ ID NO: 2984038 - RNA, 16 nt, Human
uuccaaaguacacugu

SEQ ID NO: 2984039 - RNA, 14 nt, Human
uuagugauguaauu

SEQ ID NO: 2984040 - RNA, 13 nt, Human
ugugaaaagaaaa

SEQ ID NO: 2984041 - RNA, 15 nt, Human
ugugaaaagaaaaau

SEQ ID NO: 2984042 - RNA, 17 nt, Human
ugugaaaagaaaaauga

SEQ ID NO: 2984043 - RNA, 17 nt, Human
uuauaacuuuuuauauu

SEQ ID NO: 2984044 - RNA, 12 nt, Human
uuauaauuuaaa

SEQ ID NO: 2984045 - RNA, 15 nt, Human
uuauaauuuugugaa

SEQ ID NO: 2984046 - RNA, 14 nt, Human
uuauaauuuuguga

SEQ ID NO: 2984047 - RNA, 15 nt, Human
uuauaaugaaugaaa

SEQ ID NO: 2984048 - RNA, 11 nt, Human
uuauaaucuuu

SEQ ID NO: 2984049 - RNA, 15 nt, Human
uuauaauaauguuaa

SEQ ID NO: 2984050 - RNA, 18 nt, Human
uuauaauaauguuaacau

SEQ ID NO: 2984051 - RNA, 21 nt, Human
uuauauucucagcagagugcu

SEQ ID NO: 2984052 - RNA, 20 nt, Human
uuauauucucagcagagugc

SEQ ID NO: 2984053 - RNA, 19 nt, Human
uuauauucucagcagagug

SEQ ID NO: 2984054 - RNA, 18 nt, Human
uuauauucucagcagagu

SEQ ID NO: 2984055 - RNA, 16 nt, Human
uuauauucucagcaga

SEQ ID NO: 2984056 - RNA, 17 nt, Human
uuauaauuuugugaagc

SEQ ID NO: 2984057 - RNA, 16 nt, Human
uuauaauuuugugaag

SEQ ID NO: 2984058 - RNA, 18 nt, Human
uuauaauuuugugaagca

SEQ ID NO: 2984059 - RNA, 11 nt, Human
uuauacauaaa

SEQ ID NO: 2984060 - RNA, 13 nt, Human
uuauacauaaaca

SEQ ID NO: 2984061 - RNA, 23 nt, Human
uuauaucuauauuuuacauaaau

SEQ ID NO: 2984062 - RNA, 19 nt, Human
uuauaucuauauuuuacau

SEQ ID NO: 2984063 - RNA, 15 nt, Human
uuaugauugccuuuu

SEQ ID NO: 2984064 - RNA, 22 nt, Human
uuaugauuaaguaaugauaacu

SEQ ID NO: 2984065 - RNA, 11 nt, Human
uuaucucaaaa

SEQ ID NO: 2984066 - RNA, 13 nt, Human
uuaucuuacgaaa

SEQ ID NO: 2984067 - RNA, 16 nt, Human
uuauauuuacaaaugg

SEQ ID NO: 2984068 - RNA, 20 nt, Human
uuauauuuauuacuguaaga

SEQ ID NO: 2984069 - RNA, 12 nt, Human
uuauauuugaaa

SEQ ID NO: 2984070 - RNA, 13 nt, Human
uuauauuugaaau

SEQ ID NO: 2984071 - RNA, 11 nt, Human
uuauccucugu

SEQ ID NO: 2984072 - RNA, 21 nt, Human
uuaugauugccuuuuuauaac

SEQ ID NO: 2984073 - RNA, 17 nt, Human
uuauggaacacucugag

SEQ ID NO: 2984074 - RNA, 18 nt, Human
uuauggaacacucugaga

SEQ ID NO: 2984075 - RNA, 20 nt, Human
uuauggaacacucugagacu

SEQ ID NO: 2984076 - RNA, 21 nt, Human
uuauggacaaugacccagugg

SEQ ID NO: 2984077 - RNA, 16 nt, Human
uuauggcuuuugugca

SEQ ID NO: 2984078 - RNA, 18 nt, Human
uuauggcuauaggugcua

SEQ ID NO: 2984079 - RNA, 14 nt, Human
uuauggcacaucag

SEQ ID NO: 2984080 - RNA, 17 nt, Human
uuauggcuuuugugcau

SEQ ID NO: 2984081 - RNA, 16 nt, Human
uuauuaacaaaacagu

SEQ ID NO: 2984082 - RNA, 18 nt, Human
uuauuaagagguaagacu

SEQ ID NO: 2984083 - RNA, 19 nt, Human
uuauuaagagguaagacuu

SEQ ID NO: 2984084 - RNA, 23 nt, Human
uuauuaaaaaucucaaauuucua

SEQ ID NO: 2984085 - RNA, 19 nt, Human
uuauuaaaugcccagcccc

SEQ ID NO: 2984086 - RNA, 21 nt, Human
uuauuaaaugcccagccccuu

SEQ ID NO: 2984087 - RNA, 20 nt, Human
uugugaaaaaauuuacuuua

SEQ ID NO: 2984088 - RNA, 20 nt, Human
uugugaaaggaaagaggcuc

SEQ ID NO: 2984089 - RNA, 17 nt, Human
uugugauuuuuguaauu

SEQ ID NO: 2984090 - RNA, 16 nt, Human
uugugauuuuuguaau

SEQ ID NO: 2984091 - RNA, 12 nt, Human
uugugauuuuug

SEQ ID NO: 2984092 - RNA, 15 nt, Human
uugucuagugaaacu

SEQ ID NO: 2984093 - RNA, 15 nt, Human
uugucuuaaaaagug

SEQ ID NO: 2984094 - RNA, 19 nt, Human
uuguauucucuccuguacc

SEQ ID NO: 2984095 - RNA, 16 nt, Human
uuguauucucuccugu

SEQ ID NO: 2984096 - RNA, 15 nt, Human
uuguauucucuccug

SEQ ID NO: 2984097 - RNA, 15 nt, Human
uugguauuugaaaca

SEQ ID NO: 2984098 - RNA, 15 nt, Human
uuggucugugagaug

SEQ ID NO: 2984099 - RNA, 16 nt, Human
uuggucugugagaugc

SEQ ID NO: 2984100 - RNA, 13 nt, Human
uuggucuguguga

SEQ ID NO: 2984101 - RNA, 18 nt, Human
uuggguuacuauuucuug

SEQ ID NO: 2984102 - RNA, 22 nt, Human
uuggguucaagcgauucuucug

SEQ ID NO: 2984103 - RNA, 17 nt, Human
uuguaaauagcucaggu

SEQ ID NO: 2984104 - RNA, 23 nt, Human
uuguaaauuaacuuuuauaaacu

SEQ ID NO: 2984105 - RNA, 18 nt, Human
uuguaaauuaacuuuuau

SEQ ID NO: 2984106 - RNA, 16 nt, Human
uuguaaauuaacuuuu

SEQ ID NO: 2984107 - RNA, 15 nt, Human
uuguaaauuaacuuu

SEQ ID NO: 2984108 - RNA, 14 nt, Human
uuguacauaaugcg

SEQ ID NO: 2984109 - RNA, 18 nt, Human
uuguacauaaugcgugca

SEQ ID NO: 2984110 - RNA, 15 nt, Human
uugugccuaaugugu

SEQ ID NO: 2984111 - RNA, 18 nt, Human
uugugccuaauguguuug

SEQ ID NO: 2984112 - RNA, 12 nt, Human
uugugccccugc

SEQ ID NO: 2984113 - RNA, 23 nt, Human
uugugcauuaucuagauacugua

SEQ ID NO: 2984114 - RNA, 22 nt, Human
uugugcauuaucuagauacugu

SEQ ID NO: 2984115 - RNA, 12 nt, Human
uugugcauuugg

SEQ ID NO: 2984116 - RNA, 17 nt, Human
uugugcauuaucuagau

SEQ ID NO: 2984117 - RNA, 16 nt, Human
uuguggacacagcucu

SEQ ID NO: 2984118 - RNA, 17 nt, Human
uuguggacacagcucuu

SEQ ID NO: 2984119 - RNA, 21 nt, Human
uuguggauuuaacagaaaugu

SEQ ID NO: 2984120 - RNA, 20 nt, Human
uuguggauuuaacagaaaug

SEQ ID NO: 2984121 - RNA, 21 nt, Human
uuguguuuauauauaagccaa

SEQ ID NO: 2984122 - RNA, 20 nt, Human
uuguguugaagagguuuuaa

SEQ ID NO: 2984123 - RNA, 23 nt, Human
uuguggauuuaacagaaauguac

SEQ ID NO: 2984124 - RNA, 22 nt, Human
uuguggauuuaacagaaaugua

SEQ ID NO: 2984125 - RNA, 13 nt, Human
uuguguucaccuu

SEQ ID NO: 2984126 - RNA, 18 nt, Human
uuguguuuugcaagccag

SEQ ID NO: 2984127 - RNA, 21 nt, Human
uuguuaguaugaggcauuugu

SEQ ID NO: 2984128 - RNA, 19 nt, Human
uuguuaguaugaggcauuu

SEQ ID NO: 2984129 - RNA, 14 nt, Human
uuguuacauuuuua

SEQ ID NO: 2984130 - RNA, 14 nt, Human
uuguuuaaaaucau

SEQ ID NO: 2984131 - RNA, 22 nt, Human
uuguuaguaugaggcauuuguu

SEQ ID NO: 2984132 - RNA, 20 nt, Human
uuguuagugugucuuagugu

SEQ ID NO: 2984133 - RNA, 13 nt, Human
uuuauaacuuuuu

SEQ ID NO: 2984134 - RNA, 16 nt, Human
uuuauaacuuuuuaua

SEQ ID NO: 2984135 - RNA, 22 nt, Human
uuuauaauuuugugaagcaaaa

SEQ ID NO: 2984136 - RNA, 16 nt, Human
uuuauggcuuuugugc

SEQ ID NO: 2984137 - RNA, 14 nt, Human
uuuauggcuuuugu

SEQ ID NO: 2984138 - RNA, 17 nt, Human
uuuauggcacuaguauu

SEQ ID NO: 2984139 - RNA, 13 nt, Human
uuuauuauggcac

SEQ ID NO: 2984140 - RNA, 13 nt, Human
uuuauuaugcaug

SEQ ID NO: 2984141 - RNA, 22 nt, Human
uuuauuguuuaaaaucauuucu

SEQ ID NO: 2984142 - RNA, 12 nt, Human
uuuauuuaaaag

SEQ ID NO: 2984143 - RNA, 16 nt, Human
uuuauuuacaaauguu

SEQ ID NO: 2984144 - RNA, 14 nt, Human
uuuauuuacaaaug

SEQ ID NO: 2984145 - RNA, 18 nt, Human
uuucaauuuuaaacauau

SEQ ID NO: 2984146 - RNA, 16 nt, Human
uuucaauuuuaaacau

SEQ ID NO: 2984147 - RNA, 21 nt, Human
uuucagauaaucacaauacau

SEQ ID NO: 2984148 - RNA, 15 nt, Human
uuucaauuuuaaaca

SEQ ID NO: 2984149 - RNA, 17 nt, Human
uuucaauaggaaaaacu

SEQ ID NO: 2984150 - RNA, 12 nt, Human
uuucaauaggaa

SEQ ID NO: 2984151 - RNA, 14 nt, Human
uuucaauaggaaaa

SEQ ID NO: 2984152 - RNA, 14 nt, Human
uuucaguguacaug

SEQ ID NO: 2984153 - RNA, 13 nt, Human
uuucaguguacau

SEQ ID NO: 2984154 - RNA, 18 nt, Human
uuucauuuaggugaggaa

SEQ ID NO: 2984155 - RNA, 14 nt, Human
uuucauuuagguga

SEQ ID NO: 2984156 - RNA, 14 nt, Human
uuuacuuuaaacua

SEQ ID NO: 2984157 - RNA, 15 nt, Human
uuuacuucuuauaca

SEQ ID NO: 2984158 - RNA, 22 nt, Human
uuuacuucuuauacauuugaua

SEQ ID NO: 2984159 - RNA, 19 nt, Human
uuuacuucuuauacauuug

SEQ ID NO: 2984160 - RNA, 14 nt, Human
uuuagaaauauaau

SEQ ID NO: 2984161 - RNA, 12 nt, Human
uuuagacagagu

SEQ ID NO: 2984162 - RNA, 13 nt, Human
uuuaccacuugug

SEQ ID NO: 2984163 - RNA, 13 nt, Human
uuuacauuuuaca

SEQ ID NO: 2984164 - RNA, 21 nt, Human
uuuaauagguuuggacaaaau

SEQ ID NO: 2984165 - RNA, 22 nt, Human
uuuacacacuguacacauaagc

SEQ ID NO: 2984166 - RNA, 21 nt, Human
uuuacacacuguacacauaag

SEQ ID NO: 2984167 - RNA, 23 nt, Human
uuuacacacuguacacauaagcc

SEQ ID NO: 2984168 - RNA, 19 nt, Human
uuuacacacuguacacaua

SEQ ID NO: 2984169 - RNA, 18 nt, Human
uuuacacacuguacacau

SEQ ID NO: 2984170 - RNA, 17 nt, Human
uuuaagaacuaaaaugu

SEQ ID NO: 2984171 - RNA, 16 nt, Human
uuuaagacccucucaa

SEQ ID NO: 2984172 - RNA, 22 nt, Human
uuuaagaaaaaggaugcacaga

SEQ ID NO: 2984173 - RNA, 18 nt, Human
uuuaagaaaaaggaugca

SEQ ID NO: 2984174 - RNA, 13 nt, Human
uuuaauaauguuu

SEQ ID NO: 2984175 - RNA, 16 nt, Human
uuuaaguuauuaagag

SEQ ID NO: 2984176 - RNA, 19 nt, Human
uuuaacucuauaauguguu

SEQ ID NO: 2984177 - RNA, 18 nt, Human
uuuaacagaaauguacag

SEQ ID NO: 2984178 - RNA, 21 nt, Human
uuuugaagauucuauguuaau

SEQ ID NO: 2984179 - RNA, 11 nt, Human
uuuuuaaaugc

SEQ ID NO: 2984180 - RNA, 23 nt, Human
uuuuuaagugcugcauuuaaaag

SEQ ID NO: 2984181 - RNA, 22 nt, Human
uuuuuaagugcugcauuuaaaa

SEQ ID NO: 2984182 - RNA, 19 nt, Human
uuuuuaagugcugcauuua

SEQ ID NO: 2984183 - RNA, 18 nt, Human
uuuuuaagugcugcauuu

SEQ ID NO: 2984184 - RNA, 17 nt, Human
uuuuuaagugcugcauu

SEQ ID NO: 2984185 - RNA, 16 nt, Human
uuuuuaagugcugcau

SEQ ID NO: 2984186 - RNA, 12 nt, Human
uuuuuaagaaaa

SEQ ID NO: 2984187 - RNA, 18 nt, Human
uuuuuuaaaauaagucug

SEQ ID NO: 2984188 - RNA, 12 nt, Human
uuuuuuuuaaga

SEQ ID NO: 2984189 - RNA, 11 nt, Human
uuuuuuuacua

SEQ ID NO: 2984190 - RNA, 13 nt, Human
uuugguauuugaa

SEQ ID NO: 2984191 - RNA, 18 nt, Human
uuuguauaaaauaauuuu

SEQ ID NO: 2984192 - RNA, 17 nt, Human
uuuggucuacacugugc

SEQ ID NO: 2984193 - RNA, 16 nt, Human
uuuguauaaaauaauu

SEQ ID NO: 2984194 - RNA, 17 nt, Human
uuuguauaaaauaauuu

SEQ ID NO: 2984195 - RNA, 15 nt, Human
uuuguauucucuccu

SEQ ID NO: 2984196 - RNA, 22 nt, Human
uuuguuaguaugaggcauuugu

SEQ ID NO: 2984197 - RNA, 15 nt, Human
uuuguugucagcuga

SEQ ID NO: 2984198 - RNA, 22 nt, Human
uuuuaaaauaagucugauuuaa

SEQ ID NO: 2984199 - RNA, 15 nt, Human
uuuuaaaauaagucu

SEQ ID NO: 2984200 - RNA, 18 nt, Human
uuuggaaaggaaugcaaa

SEQ ID NO: 2984201 - RNA, 17 nt, Human
uuuggaaaggaaugcaa

SEQ ID NO: 2984202 - RNA, 16 nt, Human
uuuggaaaggaaugca

SEQ ID NO: 2984203 - RNA, 19 nt, Human
uuuggaaaggaaugcaaag

SEQ ID NO: 2984204 - RNA, 12 nt, Human
uuuggaaaauaa

SEQ ID NO: 2984205 - RNA, 13 nt, Human
uuuggacccugag

SEQ ID NO: 2984206 - RNA, 19 nt, Human
uuuggacaaaauggaauac

SEQ ID NO: 2984207 - RNA, 15 nt, Human
uuugcaggaaauccu

SEQ ID NO: 2984208 - RNA, 19 nt, Human
uuugcagugcaguauagaa

SEQ ID NO: 2984209 - RNA, 22 nt, Human
uuugaguggaguuacugaacag

SEQ ID NO: 2984210 - RNA, 21 nt, Human
uuugagugccuuacacaaugg

SEQ ID NO: 2984211 - RNA, 15 nt, Human
uuuccguuaaaauac

SEQ ID NO: 2984212 - RNA, 13 nt, Human
uuugagugccuua

SEQ ID NO: 2984213 - RNA, 17 nt, Human
uuuccguuaaaauacca

SEQ ID NO: 2984214 - RNA, 15 nt, Human
uuuccacagaagcuc

SEQ ID NO: 2984215 - RNA, 13 nt, Human
uuuugaaauguca

SEQ ID NO: 2984216 - RNA, 16 nt, Human
uuuucuuucagccaag

SEQ ID NO: 2984217 - RNA, 22 nt, Human
uuuucuuguguguuuauuguca

SEQ ID NO: 2984218 - RNA, 13 nt, Human
uuuucuucucccu

SEQ ID NO: 2984219 - RNA, 20 nt, Human
uuuucuacucgaguuacaga

SEQ ID NO: 2984220 - RNA, 22 nt, Human
uuuucuacucgaguuacagaca

SEQ ID NO: 2984221 - RNA, 23 nt, Human
uuuucuacucgaguuacagacaa

SEQ ID NO: 2984222 - RNA, 13 nt, Human
uuuucuuauuuca

SEQ ID NO: 2984223 - RNA, 13 nt, Human
uuuucuacucgag

SEQ ID NO: 2984224 - RNA, 15 nt, Human
uuuucaaauguucuc

SEQ ID NO: 2984225 - RNA, 16 nt, Human
uuuucacauuggaaac

SEQ ID NO: 2984226 - RNA, 18 nt, Human
uuuucccuauuagagaag

SEQ ID NO: 2984227 - RNA, 22 nt, Human
uuuucccuauuagagaagagau

SEQ ID NO: 2984228 - RNA, 13 nt, Human
uuuuaucuucuau

SEQ ID NO: 2984229 - RNA, 19 nt, Human
uuuuaucgucacugcuuaa

SEQ ID NO: 2984230 - RNA, 18 nt, Human
uuuuauuuuuagacagag

SEQ ID NO: 2984231 - RNA, 17 nt, Human
uuuucaaaauaaaaaug

SEQ ID NO: 2984232 - RNA, 18 nt, Human
uuuuauauuugaaauauu

SEQ ID NO: 2984233 - RNA, 13 nt, Human
uuuuauauuugaa

SEQ ID NO: 2984234 - RNA, 21 nt, Human
uuuuauacauaaacaagacca

SEQ ID NO: 2984235 - RNA, 13 nt, Human
uuuuauacauaaa

SEQ ID NO: 2984236 - RNA, 15 nt, Human
uuuuacuaauagaca

SEQ ID NO: 2984237 - RNA, 21 nt, Human
uuuuauaauuuugugaagcaa

SEQ ID NO: 2984238 - RNA, 23 nt, Human
uuuuauaauuuugugaagcaaaa

SEQ ID NO: 2984239 - RNA, 21 nt, Human
uuuuaaaguaacccuacaaaa

SEQ ID NO: 2984240 - RNA, 13 nt, Human
uuuuuuuugacaa

SEQ ID NO: 2984241 - RNA, 21 nt, Human
ugcacugacauuguuggccaa

SEQ ID NO: 2984242 - RNA, 18 nt, Human
ugcacugacauuguuggc

SEQ ID NO: 2984243 - RNA, 16 nt, Human
ugcacugucaagauga

SEQ ID NO: 2984244 - RNA, 16 nt, Human
ugcacgcacacugucu

SEQ ID NO: 2984245 - RNA, 22 nt, Human
ugcaccuggaauauauaaccag

SEQ ID NO: 2984246 - RNA, 20 nt, Human
ugcaccuggaauauauaacc

SEQ ID NO: 2984247 - RNA, 17 nt, Human
ugcaccuggaauauaua

SEQ ID NO: 2984248 - RNA, 21 nt, Human
ugcaccggcuggccuggcccc

SEQ ID NO: 2984249 - RNA, 19 nt, Human
ugcaccggcuggccuggcc

SEQ ID NO: 2984250 - RNA, 20 nt, Human
ugcaccggcuggccuggccc

SEQ ID NO: 2984251 - RNA, 18 nt, Human
ugcaccggcuggccuggc

SEQ ID NO: 2984252 - RNA, 15 nt, Human
ugcacaaacagaggc

SEQ ID NO: 2984253 - RNA, 16 nt, Human
ugcacaaacagaggcc

SEQ ID NO: 2984254 - RNA, 17 nt, Human
ugcacaaacagaggccg

SEQ ID NO: 2984255 - RNA, 19 nt, Human
ugcacaaacagaggccgcc

SEQ ID NO: 2984256 - RNA, 20 nt, Human
ugcacaaacagaggccgcca

SEQ ID NO: 2984257 - RNA, 19 nt, Human
ugcacagaguuguuacauu

SEQ ID NO: 2984258 - RNA, 18 nt, Human
ugcacagaguuguuacau

SEQ ID NO: 2984259 - RNA, 17 nt, Human
ugcacagaguuguuaca

SEQ ID NO: 2984260 - RNA, 17 nt, Human
ugcaaugaccuuucaau

SEQ ID NO: 2984261 - RNA, 19 nt, Human
ugcaaugaccuuucaauag

SEQ ID NO: 2984262 - RNA, 22 nt, Human
ugcaaugaccuuucaauaggaa

SEQ ID NO: 2984263 - RNA, 23 nt, Human
ugcaaugaccuuucaauaggaaa

SEQ ID NO: 2984264 - RNA, 13 nt, Human
ugcaaugaccuuu

SEQ ID NO: 2984265 - RNA, 16 nt, Human
ugcaaugaccuuucaa

SEQ ID NO: 2984266 - RNA, 16 nt, Human
ugcaauggcagccuug

SEQ ID NO: 2984267 - RNA, 15 nt, Human
ugcaauggcagccuu

SEQ ID NO: 2984268 - RNA, 14 nt, Human
ugcaauggcagccu

SEQ ID NO: 2984269 - RNA, 13 nt, Human
ugcaauggcagcc

SEQ ID NO: 2984270 - RNA, 14 nt, Human
ugcaaccuccgccu

SEQ ID NO: 2984271 - RNA, 13 nt, Human
ugcaaccuccgcc

SEQ ID NO: 2984272 - RNA, 20 nt, Human
ugcaacaggcugggcuucag

SEQ ID NO: 2984273 - RNA, 19 nt, Human
ugcaacaggcugggcuuca

SEQ ID NO: 2984274 - RNA, 17 nt, Human
ugcaacaggcugggcuu

SEQ ID NO: 2984275 - RNA, 16 nt, Human
ugcaacaggcugggcu

SEQ ID NO: 2984276 - RNA, 15 nt, Human
ugcaacaggcugggc

SEQ ID NO: 2984277 - RNA, 14 nt, Human
ugcaacaggcuggg

SEQ ID NO: 2984278 - RNA, 21 nt, Human
ugcaaccuccgccucuugggu

SEQ ID NO: 2984279 - RNA, 20 nt, Human
ugcaaccuccgccucuuggg

SEQ ID NO: 2984280 - RNA, 18 nt, Human
ugcaaccuccgccucuug

SEQ ID NO: 2984281 - RNA, 19 nt, Human
ugcaaccugauugugucuc

SEQ ID NO: 2984282 - RNA, 20 nt, Human
ugcaaccugauugugucucu

SEQ ID NO: 2984283 - RNA, 22 nt, Human
ugcaaccugauugugucucuug

SEQ ID NO: 2984284 - RNA, 22 nt, Human
ugcaacucugaaggguaauuau

SEQ ID NO: 2984285 - RNA, 16 nt, Human
ugauuuuuuuuuccuu

SEQ ID NO: 2984286 - RNA, 17 nt, Human
ugauuuuuuuuuccuuc

SEQ ID NO: 2984287 - RNA, 19 nt, Human
ugauuuuuuuuuccuucag

SEQ ID NO: 2984288 - RNA, 20 nt, Human
ugauuuuuuuuuccuucagu

SEQ ID NO: 2984289 - RNA, 22 nt, Human
ugauuuuuuuuuccuucagugc

SEQ ID NO: 2984290 - RNA, 23 nt, Human
ugauuuuuuuuuccuucagugcc

SEQ ID NO: 2984291 - RNA, 15 nt, Human
ugcaaaaaaaauuag

SEQ ID NO: 2984292 - RNA, 20 nt, Human
ugcaaaaaaaauuagccggg

SEQ ID NO: 2984293 - RNA, 13 nt, Human
ugauuuucauugc

SEQ ID NO: 2984294 - RNA, 15 nt, Human
ugauuuucauugcug

SEQ ID NO: 2984295 - RNA, 22 nt, Human
ugcagaguaggggucugucuuu

SEQ ID NO: 2984296 - RNA, 19 nt, Human
ugcagauaaacaguaguga

SEQ ID NO: 2984297 - RNA, 17 nt, Human
ugcagauaaacaguagu

SEQ ID NO: 2984298 - RNA, 17 nt, Human
ugcaugguuuagaaagc

SEQ ID NO: 2984299 - RNA, 17 nt, Human
ugcaugguuuggagcug

SEQ ID NO: 2984300 - RNA, 15 nt, Human
ugcauguuugugauu

SEQ ID NO: 2984301 - RNA, 17 nt, Human
ugcauuaucuagauacu

SEQ ID NO: 2984302 - RNA, 12 nt, Human
ugcauuaucuag

SEQ ID NO: 2984303 - RNA, 21 nt, Human
ugcauuauauuuauuacugua

SEQ ID NO: 2984304 - RNA, 18 nt, Human
ugccaugagccgcccaag

SEQ ID NO: 2984305 - RNA, 19 nt, Human
ugccaugagccgcccaagg

SEQ ID NO: 2984306 - RNA, 20 nt, Human
ugccaugaggaacaaggcaa

SEQ ID NO: 2984307 - RNA, 23 nt, Human
ugccaugaggaacaaggcaaggc

SEQ ID NO: 2984308 - RNA, 21 nt, Human
ugccaugagccgcccaaggcc

SEQ ID NO: 2984309 - RNA, 20 nt, Human
ugccaugagccgcccaaggc

SEQ ID NO: 2984310 - RNA, 23 nt, Human
ugccaugagccgcccaaggccuu

SEQ ID NO: 2984311 - RNA, 14 nt, Human
ugccaugugccagg

SEQ ID NO: 2984312 - RNA, 15 nt, Human
ugccaugugccaggu

SEQ ID NO: 2984313 - RNA, 21 nt, Human
ugcccacucccugcaaccuga

SEQ ID NO: 2984314 - RNA, 19 nt, Human
ugcccaccuggccucugca

SEQ ID NO: 2984315 - RNA, 18 nt, Human
ugcccacgcuggagugca

SEQ ID NO: 2984316 - RNA, 20 nt, Human
ugcccaccuggccucugcac

SEQ ID NO: 2984317 - RNA, 16 nt, Human
ugccauguuggccagg

SEQ ID NO: 2984318 - RNA, 12 nt, Human
ugccauguuggc

SEQ ID NO: 2984319 - RNA, 15 nt, Human
ugccauguuggccag

SEQ ID NO: 2984320 - RNA, 12 nt, Human
ugccaggaagcc

SEQ ID NO: 2984321 - RNA, 16 nt, Human
ugccaggaagccagca

SEQ ID NO: 2984322 - RNA, 18 nt, Human
ugccaggaagccagcagg

SEQ ID NO: 2984323 - RNA, 19 nt, Human
ugccaggaagccagcaggc

SEQ ID NO: 2984324 - RNA, 23 nt, Human
ugccagggccaugucagacacag

SEQ ID NO: 2984325 - RNA, 17 nt, Human
ugccagguuuuuggucu

SEQ ID NO: 2984326 - RNA, 15 nt, Human
ugccauccagguuca

SEQ ID NO: 2984327 - RNA, 12 nt, Human
ugccauccaagu

SEQ ID NO: 2984328 - RNA, 12 nt, Human
ugccauccaggu

SEQ ID NO: 2984329 - RNA, 15 nt, Human
ugccgucuaccugag

SEQ ID NO: 2984330 - RNA, 16 nt, Human
ugccgucuaccugagg

SEQ ID NO: 2984331 - RNA, 17 nt, Human
ugccgucuaccugaggg

SEQ ID NO: 2984332 - RNA, 19 nt, Human
ugccgucuaccugaggggc

SEQ ID NO: 2984333 - RNA, 19 nt, Human
ugcccuaaaguguauuuuu

SEQ ID NO: 2984334 - RNA, 17 nt, Human
ugcccuaaaguguauuu

SEQ ID NO: 2984335 - RNA, 22 nt, Human
ugcccugcccaccuggccucug

SEQ ID NO: 2984336 - RNA, 23 nt, Human
ugcccugcccaccuggccucugc

SEQ ID NO: 2984337 - RNA, 21 nt, Human
ugcccugcccaccuggccucu

SEQ ID NO: 2984338 - RNA, 21 nt, Human
ugccuccuuugugaggaagcc

SEQ ID NO: 2984339 - RNA, 20 nt, Human
ugccuccuuugugaggaagc

SEQ ID NO: 2984340 - RNA, 22 nt, Human
ugccuccuuugugaggaagccg

SEQ ID NO: 2984341 - RNA, 13 nt, Human
ugccucugggacu

SEQ ID NO: 2984342 - RNA, 21 nt, Human
ugccucuucucuacucuaggg

SEQ ID NO: 2984343 - RNA, 19 nt, Human
ugccuggguggaugggcca

SEQ ID NO: 2984344 - RNA, 19 nt, Human
ugccugguggcagcugcgg

SEQ ID NO: 2984345 - RNA, 18 nt, Human
ugccugguggcagcugcg

SEQ ID NO: 2984346 - RNA, 17 nt, Human
ugccugguggcagcugc

SEQ ID NO: 2984347 - RNA, 16 nt, Human
ugauguaauuaugguu

SEQ ID NO: 2984348 - RNA, 18 nt, Human
ugaugcuucuucagagac

SEQ ID NO: 2984349 - RNA, 19 nt, Human
ugaugcuucuucagagacu

SEQ ID NO: 2984350 - RNA, 21 nt, Human
ugaugcuucuucagagacucc

SEQ ID NO: 2984351 - RNA, 22 nt, Human
ugaugcuucuucagagacuccu

SEQ ID NO: 2984352 - RNA, 20 nt, Human
ugaucuuugcagacaggcaa

SEQ ID NO: 2984353 - RNA, 19 nt, Human
ugaucuuugcagacaggca

SEQ ID NO: 2984354 - RNA, 23 nt, Human
ugaucuuugcagacaggcaagca

SEQ ID NO: 2984355 - RNA, 21 nt, Human
ugaucuuugcagacaggcaag

SEQ ID NO: 2984356 - RNA, 18 nt, Human
ugaucuuugcagacaggc

SEQ ID NO: 2984357 - RNA, 20 nt, Human
ugaugaugaaaugaggucag

SEQ ID NO: 2984358 - RNA, 23 nt, Human
ugaugaucuuugcagacaggcaa

SEQ ID NO: 2984359 - RNA, 22 nt, Human
ugaugaucuuugcagacaggca

SEQ ID NO: 2984360 - RNA, 14 nt, Human
ugaugccaugagga

SEQ ID NO: 2984361 - RNA, 20 nt, Human
ugauccacccaccucagccu

SEQ ID NO: 2984362 - RNA, 15 nt, Human
ugauccacccaccuc

SEQ ID NO: 2984363 - RNA, 21 nt, Human
ugauccaagcuggucccacuc

SEQ ID NO: 2984364 - RNA, 17 nt, Human
ugauccaagcugguccc

SEQ ID NO: 2984365 - RNA, 24 nt, Human
ugaucauccacugugccaugugcc

SEQ ID NO: 2984366 - RNA, 13 nt, Human
ugaucauccacug

SEQ ID NO: 2984367 - RNA, 19 nt, Human
ugaucuaggaagacuuugg

SEQ ID NO: 2984368 - RNA, 21 nt, Human
ugaucuaggaagacuuuggaa

SEQ ID NO: 2984369 - RNA, 22 nt, Human
ugauccacccaccucagccucc

SEQ ID NO: 2984370 - RNA, 21 nt, Human
ugauccacccaccucagccuc

SEQ ID NO: 2984371 - RNA, 22 nt, Human
ugaucacggcucacugcagccu

SEQ ID NO: 2984372 - RNA, 24 nt, Human
ugauaguuguaccgcaaugugacu

SEQ ID NO: 2984373 - RNA, 11 nt, Human
ugaggcugggc

SEQ ID NO: 2984374 - RNA, 15 nt, Human
ugaggucuguucuuu

SEQ ID NO: 2984375 - RNA, 14 nt, Human
ugaggucuguucuu

SEQ ID NO: 2984376 - RNA, 20 nt, Human
ugaggucuguucuuuccaaa

SEQ ID NO: 2984377 - RNA, 19 nt, Human
ugaguccuggcaugggaau

SEQ ID NO: 2984378 - RNA, 22 nt, Human
ugaguccuggcaugggaaugaa

SEQ ID NO: 2984379 - RNA, 14 nt, Human
ugagucgaggacag

SEQ ID NO: 2984380 - RNA, 11 nt, Human
ugaguccuggc

SEQ ID NO: 2984381 - RNA, 18 nt, Human
ugaguccuggcaugggaa

SEQ ID NO: 2984382 - RNA, 20 nt, Human
ugaguccccuguuuguuucu

SEQ ID NO: 2984383 - RNA, 15 nt, Human
ugaggugcuauguuc

SEQ ID NO: 2984384 - RNA, 16 nt, Human
ugaggugcuauguucu

SEQ ID NO: 2984385 - RNA, 19 nt, Human
ugagguuucaaaccucccu

SEQ ID NO: 2984386 - RNA, 21 nt, Human
ugaguccccuguuuguuucug

SEQ ID NO: 2984387 - RNA, 21 nt, Human
ugaguugauagcacagacccu

SEQ ID NO: 2984388 - RNA, 23 nt, Human
ugaguugauagcacagacccugc

SEQ ID NO: 2984389 - RNA, 16 nt, Human
ugagucgaggacaggg

SEQ ID NO: 2984390 - RNA, 15 nt, Human
ugagucgaggacagg

SEQ ID NO: 2984391 - RNA, 16 nt, Human
ugaguugauucagcuc

SEQ ID NO: 2984392 - RNA, 19 nt, Human
ugaguugauucagcucugc

SEQ ID NO: 2984393 - RNA, 17 nt, Human
ugauagcacagacccug

SEQ ID NO: 2984394 - RNA, 18 nt, Human
ugauagcacagacccugc

SEQ ID NO: 2984395 - RNA, 20 nt, Human
ugauagcacagacccugccc

SEQ ID NO: 2984396 - RNA, 21 nt, Human
ugauagcacagacccugcccu

SEQ ID NO: 2984397 - RNA, 15 nt, Human
ugauagcacagaccc

SEQ ID NO: 2984398 - RNA, 16 nt, Human
ugauagcacagacccu

SEQ ID NO: 2984399 - RNA, 22 nt, Human
ugauagcacagacccugcccug

SEQ ID NO: 2984400 - RNA, 23 nt, Human
ugauagcacagacccugcccugu

SEQ ID NO: 2984401 - RNA, 16 nt, Human
ugagaaagacuauuca

SEQ ID NO: 2984402 - RNA, 17 nt, Human
ugagaaagacuauucaa

SEQ ID NO: 2984403 - RNA, 18 nt, Human
ugagaaagacuauucaaa

SEQ ID NO: 2984404 - RNA, 16 nt, Human
ugagacagcucugcau

SEQ ID NO: 2984405 - RNA, 14 nt, Human
ugagacagcucugc

SEQ ID NO: 2984406 - RNA, 12 nt, Human
ugagacccuguc

SEQ ID NO: 2984407 - RNA, 12 nt, Human
ugagacagcucu

SEQ ID NO: 2984408 - RNA, 17 nt, Human
ugagaguagagucacug

SEQ ID NO: 2984409 - RNA, 19 nt, Human
ugagaggggaacagacugg

SEQ ID NO: 2984410 - RNA, 15 nt, Human
ugagaucagccuggg

SEQ ID NO: 2984411 - RNA, 23 nt, Human
ugagaggcauccaguaucuugaa

SEQ ID NO: 2984412 - RNA, 22 nt, Human
ugagaggcauccaguaucuuga

SEQ ID NO: 2984413 - RNA, 14 nt, Human
ugagacucugucuc

SEQ ID NO: 2984414 - RNA, 13 nt, Human
ugagacucugucu

SEQ ID NO: 2984415 - RNA, 12 nt, Human
ugagacucuguc

SEQ ID NO: 2984416 - RNA, 15 nt, Human
ugagcagucaggaaa

SEQ ID NO: 2984417 - RNA, 17 nt, Human
ugagcagucaggaaaga

SEQ ID NO: 2984418 - RNA, 13 nt, Human
ugagcaucaggcc

SEQ ID NO: 2984419 - RNA, 20 nt, Human
ugagcagucaggaaagagaa

SEQ ID NO: 2984420 - RNA, 20 nt, Human
ugagaugcuagaacucccuu

SEQ ID NO: 2984421 - RNA, 16 nt, Human
ugagaugcuagaacuc

SEQ ID NO: 2984422 - RNA, 14 nt, Human
ugagaugcuagaac

SEQ ID NO: 2984423 - RNA, 14 nt, Human
ugagcaucaggcca

SEQ ID NO: 2984424 - RNA, 15 nt, Human
ugagcaucaggccag

SEQ ID NO: 2984425 - RNA, 16 nt, Human
ugagccucacagcagu

SEQ ID NO: 2984426 - RNA, 15 nt, Human
ugagccucagcaucc

SEQ ID NO: 2984427 - RNA, 13 nt, Human
ugagccucagcau

SEQ ID NO: 2984428 - RNA, 15 nt, Human
ugagccucacagcag

SEQ ID NO: 2984429 - RNA, 14 nt, Human
ugagccucacagca

SEQ ID NO: 2984430 - RNA, 21 nt, Human
ugaccucugcagcaauaaagc

SEQ ID NO: 2984431 - RNA, 18 nt, Human
ugaccucugcagcaauaa

SEQ ID NO: 2984432 - RNA, 23 nt, Human
ugaccucugcagcaauaaagcag

SEQ ID NO: 2984433 - RNA, 12 nt, Human
ugaccucugccu

SEQ ID NO: 2984434 - RNA, 15 nt, Human
ugaccuuucaauagg

SEQ ID NO: 2984435 - RNA, 16 nt, Human
ugaccuuucaauagga

SEQ ID NO: 2984436 - RNA, 14 nt, Human
ugaccuuucaauag

SEQ ID NO: 2984437 - RNA, 13 nt, Human
ugaccuuucaaua

SEQ ID NO: 2984438 - RNA, 22 nt, Human
ugaccucaggugauccacccac

SEQ ID NO: 2984439 - RNA, 16 nt, Human
ugaccucugcagcaau

SEQ ID NO: 2984440 - RNA, 13 nt, Human
ugaccucugcagc

SEQ ID NO: 2984441 - RNA, 17 nt, Human
ucuugaauuguaaggaa

SEQ ID NO: 2984442 - RNA, 20 nt, Human
ugaccauucuccaccugcca

SEQ ID NO: 2984443 - RNA, 21 nt, Human
ugaccauucuccaccugccag

SEQ ID NO: 2984444 - RNA, 22 nt, Human
ugaccauucuccaccugccagg

SEQ ID NO: 2984445 - RNA, 15 nt, Human
ucuugaacuccuggc

SEQ ID NO: 2984446 - RNA, 19 nt, Human
ugaccauucuccaccugcc

SEQ ID NO: 2984447 - RNA, 13 nt, Human
ugacugaauuucu

SEQ ID NO: 2984448 - RNA, 12 nt, Human
ugacucuuaaga

SEQ ID NO: 2984449 - RNA, 15 nt, Human
ugacugaauuucuuu

SEQ ID NO: 2984450 - RNA, 14 nt, Human
ugacugaauuucuu

SEQ ID NO: 2984451 - RNA, 13 nt, Human
ugacgccauccca

SEQ ID NO: 2984452 - RNA, 14 nt, Human
ugacgccaucccag

SEQ ID NO: 2984453 - RNA, 15 nt, Human
ugacgccaucccagc

SEQ ID NO: 2984454 - RNA, 16 nt, Human
ugacgccaucccagcc

SEQ ID NO: 2984455 - RNA, 18 nt, Human
ugaccuuucaauaggaaa

SEQ ID NO: 2984456 - RNA, 22 nt, Human
ugaccuuucaauaggaaaaacu

SEQ ID NO: 2984457 - RNA, 17 nt, Human
ugacgccaucccagccc

SEQ ID NO: 2984458 - RNA, 18 nt, Human
ugacgccaucccagcccc

SEQ ID NO: 2984459 - RNA, 19 nt, Human
ugacgccaucccagcccca

SEQ ID NO: 2984460 - RNA, 20 nt, Human
ugacgccaucccagccccaa

SEQ ID NO: 2984461 - RNA, 16 nt, Human
uggacauuuuaugucu

SEQ ID NO: 2984462 - RNA, 17 nt, Human
uggacauuuuaugucuu

SEQ ID NO: 2984463 - RNA, 11 nt, Human
uggacauuuua

SEQ ID NO: 2984464 - RNA, 13 nt, Human
uggacauuuuaug

SEQ ID NO: 2984465 - RNA, 17 nt, Human
uggacaggcauguucuc

SEQ ID NO: 2984466 - RNA, 22 nt, Human
uggacaggcauguucucugagg

SEQ ID NO: 2984467 - RNA, 18 nt, Human
uggacaggcauguucucu

SEQ ID NO: 2984468 - RNA, 19 nt, Human
uggacuaacuugucuuugg

SEQ ID NO: 2984469 - RNA, 20 nt, Human
uggacuaacuugucuuugga

SEQ ID NO: 2984470 - RNA, 19 nt, Human
uggacguguuaugacucca

SEQ ID NO: 2984471 - RNA, 23 nt, Human
uggacguguuaugacuccagaau

SEQ ID NO: 2984472 - RNA, 20 nt, Human
uggauugugccuaauguguu

SEQ ID NO: 2984473 - RNA, 23 nt, Human
uggauugugccuaauguguuuga

SEQ ID NO: 2984474 - RNA, 19 nt, Human
uggauugugccuaaugugu

SEQ ID NO: 2984475 - RNA, 15 nt, Human
uggauuuaacagaaa

SEQ ID NO: 2984476 - RNA, 17 nt, Human
uggauuuaacagaaaug

SEQ ID NO: 2984477 - RNA, 21 nt, Human
uggcacuauaauguaagcucu

SEQ ID NO: 2984478 - RNA, 18 nt, Human
uggcagcucagagagggu

SEQ ID NO: 2984479 - RNA, 22 nt, Human
uggcacuggcaaacagggccuc

SEQ ID NO: 2984480 - RNA, 21 nt, Human
uggcacuggcaaacagggccu

SEQ ID NO: 2984481 - RNA, 13 nt, Human
uggcacuggcaaa

SEQ ID NO: 2984482 - RNA, 22 nt, Human
uggcacugcuuccagugaggcu

SEQ ID NO: 2984483 - RNA, 19 nt, Human
uggcacugcuuccagugag

SEQ ID NO: 2984484 - RNA, 22 nt, Human
uggcacuauaauguaagcucua

SEQ ID NO: 2984485 - RNA, 23 nt, Human
uggaggggggaggugggauccuc

SEQ ID NO: 2984486 - RNA, 13 nt, Human
uggaugcagccuc

SEQ ID NO: 2984487 - RNA, 21 nt, Human
uggaugcagccucacaguccu

SEQ ID NO: 2984488 - RNA, 22 nt, Human
uggaugcagccucacaguccuu

SEQ ID NO: 2984489 - RNA, 21 nt, Human
uggauuguccccgacccuugc

SEQ ID NO: 2984490 - RNA, 14 nt, Human
uggaaaagaauaaa

SEQ ID NO: 2984491 - RNA, 13 nt, Human
ugcuucuucagag

SEQ ID NO: 2984492 - RNA, 22 nt, Human
ugcuucuguuuuauaauuuugu

SEQ ID NO: 2984493 - RNA, 18 nt, Human
ugcuugugaaaggaaaga

SEQ ID NO: 2984494 - RNA, 15 nt, Human
uggaacacucugaga

SEQ ID NO: 2984495 - RNA, 17 nt, Human
uggaacacucugagacu

SEQ ID NO: 2984496 - RNA, 14 nt, Human
uggaacacucugag

SEQ ID NO: 2984497 - RNA, 18 nt, Human
ugcuuaacuucacauauu

SEQ ID NO: 2984498 - RNA, 17 nt, Human
ugcuuaacuucacauau

SEQ ID NO: 2984499 - RNA, 14 nt, Human
ugcuuaacuucaca

SEQ ID NO: 2984500 - RNA, 13 nt, Human
ugcuuaacuucac

SEQ ID NO: 2984501 - RNA, 19 nt, Human
ugcuuaacuucacauauug

SEQ ID NO: 2984502 - RNA, 22 nt, Human
ugcuuccagugaggcucugccc

SEQ ID NO: 2984503 - RNA, 23 nt, Human
ugcuuccagugaggcucugcccu

SEQ ID NO: 2984504 - RNA, 21 nt, Human
ugcuuccagugaggcucugcc

SEQ ID NO: 2984505 - RNA, 12 nt, Human
ugcuucucacug

SEQ ID NO: 2984506 - RNA, 17 nt, Human
ugcuucuguuuuauaau

SEQ ID NO: 2984507 - RNA, 19 nt, Human
uggggggcugaggugggag

SEQ ID NO: 2984508 - RNA, 19 nt, Human
ugggggcugggcagaggaa

SEQ ID NO: 2984509 - RNA, 16 nt, Human
ugggggccucagugcc

SEQ ID NO: 2984510 - RNA, 17 nt, Human
ugggcuugucuguagau

SEQ ID NO: 2984511 - RNA, 23 nt, Human
ugggcuuggggaccagagcugcc

SEQ ID NO: 2984512 - RNA, 21 nt, Human
ugggcuugucuguagauuuua

SEQ ID NO: 2984513 - RNA, 22 nt, Human
ugggcuuggggaccagagcugc

SEQ ID NO: 2984514 - RNA, 15 nt, Human
ugggcuucauccucc

SEQ ID NO: 2984515 - RNA, 21 nt, Human
ugggcuucaguggcagcugcu

SEQ ID NO: 2984516 - RNA, 22 nt, Human
ugggcuucaguggcagcugcuu

SEQ ID NO: 2984517 - RNA, 22 nt, Human
ugggcagcugccuccccuccuc

SEQ ID NO: 2984518 - RNA, 20 nt, Human
ugggcagcugccuccccucc

SEQ ID NO: 2984519 - RNA, 23 nt, Human
ugggcagcugccuccccuccucu

SEQ ID NO: 2984520 - RNA, 15 nt, Human
ugggcagagcagaga

SEQ ID NO: 2984521 - RNA, 17 nt, Human
ugggcagagcagagacc

SEQ ID NO: 2984522 - RNA, 14 nt, Human
ugggcagagcagag

SEQ ID NO: 2984523 - RNA, 13 nt, Human
ugggcagagcaga

SEQ ID NO: 2984524 - RNA, 18 nt, Human
ugggaugauuggaggggg

SEQ ID NO: 2984525 - RNA, 16 nt, Human
ugggaaugaaugucag

SEQ ID NO: 2984526 - RNA, 21 nt, Human
ugggaaugaaugucaguguga

SEQ ID NO: 2984527 - RNA, 13 nt, Human
ugggacacccugu

SEQ ID NO: 2984528 - RNA, 14 nt, Human
ugggacacccugug

SEQ ID NO: 2984529 - RNA, 15 nt, Human
ugggacacccuguga

SEQ ID NO: 2984530 - RNA, 16 nt, Human
ugggaggaucucuuga

SEQ ID NO: 2984531 - RNA, 14 nt, Human
ugggacagggagga

SEQ ID NO: 2984532 - RNA, 20 nt, Human
uggccuagcauacguacaca

SEQ ID NO: 2984533 - RNA, 21 nt, Human
uggccccucagggucccuggu

SEQ ID NO: 2984534 - RNA, 22 nt, Human
uggccccucagggucccuggug

SEQ ID NO: 2984535 - RNA, 13 nt, Human
uggccccucaggg

SEQ ID NO: 2984536 - RNA, 20 nt, Human
uggccccucagggucccugg

SEQ ID NO: 2984537 - RNA, 17 nt, Human
uggcagcugcgguccac

SEQ ID NO: 2984538 - RNA, 23 nt, Human
uggccuagcauacguacacauuu

SEQ ID NO: 2984539 - RNA, 23 nt, Human
uggccucaagugauucuccugcc

SEQ ID NO: 2984540 - RNA, 18 nt, Human
uggccucaagugauucuc

SEQ ID NO: 2984541 - RNA, 11 nt, Human
uggccucccaa

SEQ ID NO: 2984542 - RNA, 14 nt, Human
uggccucccaacuc

SEQ ID NO: 2984543 - RNA, 19 nt, Human
uggccucccaacucacccc

SEQ ID NO: 2984544 - RNA, 20 nt, Human
uggccucccaacucacccca

SEQ ID NO: 2984545 - RNA, 21 nt, Human
uggccucccaacucaccccag

SEQ ID NO: 2984546 - RNA, 22 nt, Human
uggccucccaacucaccccagc

SEQ ID NO: 2984547 - RNA, 23 nt, Human
uggccuucggccuccauccugag

SEQ ID NO: 2984548 - RNA, 20 nt, Human
uggccuucggccuccauccu

SEQ ID NO: 2984549 - RNA, 22 nt, Human
uggccuucggccuccauccuga

SEQ ID NO: 2984550 - RNA, 11 nt, Human
uggcugcugaa

SEQ ID NO: 2984551 - RNA, 13 nt, Human
uggcugcugaagg

SEQ ID NO: 2984552 - RNA, 14 nt, Human
uggcugcugaaggc

SEQ ID NO: 2984553 - RNA, 16 nt, Human
uggcugcugaaggcuc

SEQ ID NO: 2984554 - RNA, 21 nt, Human
uggcuugaguuuaaauuguaa

SEQ ID NO: 2984555 - RNA, 14 nt, Human
ugucuuuuaaacuc

SEQ ID NO: 2984556 - RNA, 16 nt, Human
ugucuuuucuugcaug

SEQ ID NO: 2984557 - RNA, 23 nt, Human
ugucuuuggacccugaggcccag

SEQ ID NO: 2984558 - RNA, 21 nt, Human
ugucucaaaaaaagaaaaaga

SEQ ID NO: 2984559 - RNA, 15 nt, Human
ugucuaguuguuuga

SEQ ID NO: 2984560 - RNA, 23 nt, Human
ugucuaguuguuugauucagaca

SEQ ID NO: 2984561 - RNA, 16 nt, Human
ugucuaugggacucaa

SEQ ID NO: 2984562 - RNA, 15 nt, Human
ugucuaugggacuca

SEQ ID NO: 2984563 - RNA, 14 nt, Human
ugucuaugggacuc

SEQ ID NO: 2984564 - RNA, 15 nt, Human
uguccuauuauauuc

SEQ ID NO: 2984565 - RNA, 17 nt, Human
uguccccgcacugggcu

SEQ ID NO: 2984566 - RNA, 19 nt, Human
uguccccgcacugggcuug

SEQ ID NO: 2984567 - RNA, 22 nt, Human
ugucuacacuaagagagaauga

SEQ ID NO: 2984568 - RNA, 17 nt, Human
ugucuacacuaagagag

SEQ ID NO: 2984569 - RNA, 14 nt, Human
ugucuaaugaaacc

SEQ ID NO: 2984570 - RNA, 20 nt, Human
uguccugggagugagcuggu

SEQ ID NO: 2984571 - RNA, 19 nt, Human
uguccugggagugagcugg

SEQ ID NO: 2984572 - RNA, 12 nt, Human
uguccugggagu

SEQ ID NO: 2984573 - RNA, 21 nt, Human
ugucacaggcagguccagggu

SEQ ID NO: 2984574 - RNA, 17 nt, Human
ugucacaggcaggucca

SEQ ID NO: 2984575 - RNA, 16 nt, Human
ugucacaggcaggucc

SEQ ID NO: 2984576 - RNA, 15 nt, Human
ugucacaggcagguc

SEQ ID NO: 2984577 - RNA, 13 nt, Human
ugucacaggcagg

SEQ ID NO: 2984578 - RNA, 16 nt, Human
ugucagugugacugau

SEQ ID NO: 2984579 - RNA, 19 nt, Human
ugucagugugacugaucuc

SEQ ID NO: 2984580 - RNA, 15 nt, Human
ugucagugugacuga

SEQ ID NO: 2984581 - RNA, 14 nt, Human
ugucagugugacug

SEQ ID NO: 2984582 - RNA, 12 nt, Human
ugucacuucugg

SEQ ID NO: 2984583 - RNA, 19 nt, Human
ugucaauuacaggaaguac

SEQ ID NO: 2984584 - RNA, 19 nt, Human
uguauuuuaaaagaaugau

SEQ ID NO: 2984585 - RNA, 18 nt, Human
uguauuuuaaaagaauga

SEQ ID NO: 2984586 - RNA, 14 nt, Human
ugucacaggcaggu

SEQ ID NO: 2984587 - RNA, 21 nt, Human
ugucaauuacaggaaguacug

SEQ ID NO: 2984588 - RNA, 16 nt, Human
ugucaauuaccagaaa

SEQ ID NO: 2984589 - RNA, 21 nt, Human
uguaguguuggagaagaacug

SEQ ID NO: 2984590 - RNA, 20 nt, Human
uguaguguuggagaagaacu

SEQ ID NO: 2984591 - RNA, 19 nt, Human
uguaguguuggagaagaac

SEQ ID NO: 2984592 - RNA, 14 nt, Human
uguauaaaauaauu

SEQ ID NO: 2984593 - RNA, 13 nt, Human
uguauaaaauaau

SEQ ID NO: 2984594 - RNA, 21 nt, Human
uguacagagcccacgccccca

SEQ ID NO: 2984595 - RNA, 12 nt, Human
uguacagagccc

SEQ ID NO: 2984596 - RNA, 22 nt, Human
uguacagcaaggagauuuacaa

SEQ ID NO: 2984597 - RNA, 21 nt, Human
uguacagaguggaauaagaca

SEQ ID NO: 2984598 - RNA, 23 nt, Human
uguacagcaaggagauuuacaac

SEQ ID NO: 2984599 - RNA, 13 nt, Human
uguaucugagcag

SEQ ID NO: 2984600 - RNA, 14 nt, Human
uggguagacacaca

SEQ ID NO: 2984601 - RNA, 23 nt, Human
uggguacuuguggacacagcucu

SEQ ID NO: 2984602 - RNA, 20 nt, Human
uggguacuuguggacacagc

SEQ ID NO: 2984603 - RNA, 14 nt, Human
uggugagaggcauc

SEQ ID NO: 2984604 - RNA, 18 nt, Human
ugguggcagugggagcug

SEQ ID NO: 2984605 - RNA, 13 nt, Human
ugguggcaguggg

SEQ ID NO: 2984606 - RNA, 20 nt, Human
ugguggcagugggagcugcc

SEQ ID NO: 2984607 - RNA, 14 nt, Human
uggugcaaugaccu

SEQ ID NO: 2984608 - RNA, 19 nt, Human
uggugcaaugaccuuucaa

SEQ ID NO: 2984609 - RNA, 12 nt, Human
ugguggcagugg

SEQ ID NO: 2984610 - RNA, 13 nt, Human
ugguggcuggguu

SEQ ID NO: 2984611 - RNA, 16 nt, Human
uggugggggccucggu

SEQ ID NO: 2984612 - RNA, 18 nt, Human
uggugggggccucggugu

SEQ ID NO: 2984613 - RNA, 18 nt, Human
uggugguuucagaaaugu

SEQ ID NO: 2984614 - RNA, 17 nt, Human
uggugguuucagaaaug

SEQ ID NO: 2984615 - RNA, 19 nt, Human
uggugguuuucuguucuuu

SEQ ID NO: 2984616 - RNA, 20 nt, Human
ugguucccuugaugaagaag

SEQ ID NO: 2984617 - RNA, 17 nt, Human
ugguucccuugaugaag

SEQ ID NO: 2984618 - RNA, 16 nt, Human
ugguucccuugaugaa

SEQ ID NO: 2984619 - RNA, 18 nt, Human
ugguugaugaucuuugca

SEQ ID NO: 2984620 - RNA, 18 nt, Human
uggugucgggcaugacac

SEQ ID NO: 2984621 - RNA, 15 nt, Human
uggugucgggcauga

SEQ ID NO: 2984622 - RNA, 16 nt, Human
uggugucaccugaaga

SEQ ID NO: 2984623 - RNA, 11 nt, Human
uguaaaauggu

SEQ ID NO: 2984624 - RNA, 12 nt, Human
uguaaaauggug

SEQ ID NO: 2984625 - RNA, 23 nt, Human
ugguuuuuaaaaaacugcugacu

SEQ ID NO: 2984626 - RNA, 21 nt, Human
ugguuuuuaaaaaacugcuga

SEQ ID NO: 2984627 - RNA, 19 nt, Human
ugguuuucuuguguguuua

SEQ ID NO: 2984628 - RNA, 16 nt, Human
ugguuuucuguucuuu

SEQ ID NO: 2984629 - RNA, 14 nt, Human
uguacagacaacaa

SEQ ID NO: 2984630 - RNA, 11 nt, Human
uguacagagcc

SEQ ID NO: 2984631 - RNA, 14 nt, Human
uguaacaagccacc

SEQ ID NO: 2984632 - RNA, 17 nt, Human
uguaacaagccacccca

SEQ ID NO: 2984633 - RNA, 21 nt, Human
uguaauaaauauguuucacac

SEQ ID NO: 2984634 - RNA, 22 nt, Human
uguaauaaauauguuucacaca

SEQ ID NO: 2984635 - RNA, 14 nt, Human
uguaauaaauaugu

SEQ ID NO: 2984636 - RNA, 19 nt, Human
ucuguuuuguguacuuuua

SEQ ID NO: 2984637 - RNA, 13 nt, Human
ucuguuuugugua

SEQ ID NO: 2984638 - RNA, 13 nt, Human
ucuuaaaaacaac

SEQ ID NO: 2984639 - RNA, 22 nt, Human
ucuuaaaaacaacgaaagaagg

SEQ ID NO: 2984640 - RNA, 15 nt, Human
ucugucuucacaaca

SEQ ID NO: 2984641 - RNA, 22 nt, Human
ucuuaaauauguggaguucauc

SEQ ID NO: 2984642 - RNA, 12 nt, Human
ucuuaagaagac

SEQ ID NO: 2984643 - RNA, 18 nt, Human
ucuuaagaagacugcauu

SEQ ID NO: 2984644 - RNA, 23 nt, Human
ucuucagaucucuaacuucacca

SEQ ID NO: 2984645 - RNA, 18 nt, Human
ucuucagaucucuaacuu

SEQ ID NO: 2984646 - RNA, 15 nt, Human
ucuucagaucucuaa

SEQ ID NO: 2984647 - RNA, 18 nt, Human
ucuucauggaauucacaa

SEQ ID NO: 2984648 - RNA, 22 nt, Human
ucuucauggaauucacaaagua

SEQ ID NO: 2984649 - RNA, 12 nt, Human
ucuugaacuccu

SEQ ID NO: 2984650 - RNA, 15 nt, Human
ucuucuccaggcugu

SEQ ID NO: 2984651 - RNA, 17 nt, Human
ucuggcuaugcauuuga

SEQ ID NO: 2984652 - RNA, 18 nt, Human
ucuggccuucggccucca

SEQ ID NO: 2984653 - RNA, 17 nt, Human
ucuggccuucggccucc

SEQ ID NO: 2984654 - RNA, 22 nt, Human
ucuggcuaugcauuugaaaauu

SEQ ID NO: 2984655 - RNA, 19 nt, Human
ucuggcuaugcauuugaaa

SEQ ID NO: 2984656 - RNA, 10 nt, Human
ucuggccuuc

SEQ ID NO: 2984657 - RNA, 18 nt, Human
ucuggcucuuccaggcug

SEQ ID NO: 2984658 - RNA, 23 nt, Human
ucuggcucuuccaggcugggaga

SEQ ID NO: 2984659 - RNA, 23 nt, Human
ucuggugacuuuccucuuugguc

SEQ ID NO: 2984660 - RNA, 13 nt, Human
ucugggacacagu

SEQ ID NO: 2984661 - RNA, 14 nt, Human
ucugggacacaguu

SEQ ID NO: 2984662 - RNA, 14 nt, Human
ucuguccuacucug

SEQ ID NO: 2984663 - RNA, 19 nt, Human
ucuguccuacucuguguca

SEQ ID NO: 2984664 - RNA, 15 nt, Human
ucuguccuacucugu

SEQ ID NO: 2984665 - RNA, 21 nt, Human
ucuguccugggagugagcugg

SEQ ID NO: 2984666 - RNA, 14 nt, Human
ucugucgcccaguc

SEQ ID NO: 2984667 - RNA, 13 nt, Human
ucugccugcccag

SEQ ID NO: 2984668 - RNA, 14 nt, Human
ucugccugcccagg

SEQ ID NO: 2984669 - RNA, 17 nt, Human
ucugcugacagacacag

SEQ ID NO: 2984670 - RNA, 18 nt, Human
ucugcugacagacacagg

SEQ ID NO: 2984671 - RNA, 18 nt, Human
ucugcuccucuccccagc

SEQ ID NO: 2984672 - RNA, 15 nt, Human
ucugccugcccaggc

SEQ ID NO: 2984673 - RNA, 22 nt, Human
ucugcugacagacacaggcccg

SEQ ID NO: 2984674 - RNA, 21 nt, Human
ucugcugacagacacaggccc

SEQ ID NO: 2984675 - RNA, 20 nt, Human
ucugcugacagacacaggcc

SEQ ID NO: 2984676 - RNA, 19 nt, Human
ucugcugacagacacaggc

SEQ ID NO: 2984677 - RNA, 19 nt, Human
ucuggaauaaggagaauga

SEQ ID NO: 2984678 - RNA, 15 nt, Human
ucuggaaugcagugg

SEQ ID NO: 2984679 - RNA, 14 nt, Human
ucuggacaggcaug

SEQ ID NO: 2984680 - RNA, 21 nt, Human
ucuggacaggcauguucucug

SEQ ID NO: 2984681 - RNA, 22 nt, Human
ucucuguaauaaacucauuucu

SEQ ID NO: 2984682 - RNA, 18 nt, Human
ucucuguaauaaacucau

SEQ ID NO: 2984683 - RNA, 20 nt, Human
ucucugauucccugauuuaa

SEQ ID NO: 2984684 - RNA, 23 nt, Human
ucucuggccuucggccuccaucc

SEQ ID NO: 2984685 - RNA, 15 nt, Human
ucucugauacagaaa

SEQ ID NO: 2984686 - RNA, 17 nt, Human
ucucugaggacacuaac

SEQ ID NO: 2984687 - RNA, 14 nt, Human
ucucugaggacacu

SEQ ID NO: 2984688 - RNA, 15 nt, Human
ucucuaguuugauua

SEQ ID NO: 2984689 - RNA, 21 nt, Human
ucuccuggaaauauuaagaaa

SEQ ID NO: 2984690 - RNA, 15 nt, Human
ucuccuguaccucuu

SEQ ID NO: 2984691 - RNA, 15 nt, Human
ucuccugccucagcc

SEQ ID NO: 2984692 - RNA, 17 nt, Human
ucuccugccucagccuc

SEQ ID NO: 2984693 - RNA, 17 nt, Human
ucuccuguaccucuuga

SEQ ID NO: 2984694 - RNA, 16 nt, Human
ucuccuguaccucuug

SEQ ID NO: 2984695 - RNA, 13 nt, Human
ucuccuguaccuc

SEQ ID NO: 2984696 - RNA, 14 nt, Human
ucucgugauugaua

SEQ ID NO: 2984697 - RNA, 22 nt, Human
ucucgugauugauaagaaccuu

SEQ ID NO: 2984698 - RNA, 12 nt, Human
ucucuaacuuca

SEQ ID NO: 2984699 - RNA, 19 nt, Human
ucucuaggaaauauuuauu

SEQ ID NO: 2984700 - RNA, 19 nt, Human
ucucuaacuucaccauauu

SEQ ID NO: 2984701 - RNA, 13 nt, Human
ucugacccacugc

SEQ ID NO: 2984702 - RNA, 22 nt, Human
ucugacaggcaaugcuggcugu

SEQ ID NO: 2984703 - RNA, 21 nt, Human
ucugacaggcaaugcuggcug

SEQ ID NO: 2984704 - RNA, 12 nt, Human
ucugacaggcaa

SEQ ID NO: 2984705 - RNA, 19 nt, Human
ucugacacacagcucuguc

SEQ ID NO: 2984706 - RNA, 18 nt, Human
ucugacacacagcucugu

SEQ ID NO: 2984707 - RNA, 17 nt, Human
ucugacacacagcucug

SEQ ID NO: 2984708 - RNA, 16 nt, Human
ucugacacacagcucu

SEQ ID NO: 2984709 - RNA, 20 nt, Human
ucugaaauuuccugggagcu

SEQ ID NO: 2984710 - RNA, 18 nt, Human
ucugaaauuuccugggag

SEQ ID NO: 2984711 - RNA, 17 nt, Human
ucugaaauuuccuggga

SEQ ID NO: 2984712 - RNA, 13 nt, Human
ucugaaaauguau

SEQ ID NO: 2984713 - RNA, 16 nt, Human
ucucuuaucuuacgaa

SEQ ID NO: 2984714 - RNA, 21 nt, Human
ucucuuaucuuacgaaaaaau

SEQ ID NO: 2984715 - RNA, 19 nt, Human
ucugcaucagcugcugaaa

SEQ ID NO: 2984716 - RNA, 21 nt, Human
ucugcaucagcugcugaaaca

SEQ ID NO: 2984717 - RNA, 14 nt, Human
ucugcaucagcugc

SEQ ID NO: 2984718 - RNA, 23 nt, Human
ucugaggaauccagacccggcug

SEQ ID NO: 2984719 - RNA, 15 nt, Human
ucugacccacugcuu

SEQ ID NO: 2984720 - RNA, 14 nt, Human
ucugacccacugcu

SEQ ID NO: 2984721 - RNA, 20 nt, Human
ucugcaagaauugaagcagg

SEQ ID NO: 2984722 - RNA, 21 nt, Human
ucugcaagaauugaagcagga

SEQ ID NO: 2984723 - RNA, 15 nt, Human
ucugcaacucugaag

SEQ ID NO: 2984724 - RNA, 14 nt, Human
ucugcaacucugaa

SEQ ID NO: 2984725 - RNA, 18 nt, Human
uccuaauaaaaaggugac

SEQ ID NO: 2984726 - RNA, 16 nt, Human
uccuaauaaaaaggug

SEQ ID NO: 2984727 - RNA, 17 nt, Human
uccuaauaaaaagguga

SEQ ID NO: 2984728 - RNA, 16 nt, Human
uccuaaucuucugaac

SEQ ID NO: 2984729 - RNA, 12 nt, Human
uccuaauaaaaa

SEQ ID NO: 2984730 - RNA, 13 nt, Human
uccuaauaaaaag

SEQ ID NO: 2984731 - RNA, 14 nt, Human
uccuaauaaaaagg

SEQ ID NO: 2984732 - RNA, 15 nt, Human
uccuaauaaaaaggu

SEQ ID NO: 2984733 - RNA, 21 nt, Human
uccuaaguaucaaguauagaa

SEQ ID NO: 2984734 - RNA, 13 nt, Human
uccgaccagacac

SEQ ID NO: 2984735 - RNA, 18 nt, Human
uccuacccacccuccuuu

SEQ ID NO: 2984736 - RNA, 12 nt, Human
uccuauuauauu

SEQ ID NO: 2984737 - RNA, 17 nt, Human
uccucauuagcauuuug

SEQ ID NO: 2984738 - RNA, 18 nt, Human
uccuauauuguuuucagu

SEQ ID NO: 2984739 - RNA, 22 nt, Human
uccuaguuccaccaucaagcca

SEQ ID NO: 2984740 - RNA, 12 nt, Human
uccucugcugcu

SEQ ID NO: 2984741 - RNA, 14 nt, Human
uccucugcugcugg

SEQ ID NO: 2984742 - RNA, 15 nt, Human
uccucugcugcuggc

SEQ ID NO: 2984743 - RNA, 16 nt, Human
uccucugcugcuggcu

SEQ ID NO: 2984744 - RNA, 19 nt, Human
uccucugcuugccaucccu

SEQ ID NO: 2984745 - RNA, 20 nt, Human
uccucugcuugccaucccuc

SEQ ID NO: 2984746 - RNA, 22 nt, Human
uccucugcuugccaucccuccc

SEQ ID NO: 2984747 - RNA, 21 nt, Human
uccucugcuugccaucccucc

SEQ ID NO: 2984748 - RNA, 16 nt, Human
uccucuguacagagcc

SEQ ID NO: 2984749 - RNA, 17 nt, Human
uccucuguacagagccc

SEQ ID NO: 2984750 - RNA, 18 nt, Human
uccucuguacagagccca

SEQ ID NO: 2984751 - RNA, 15 nt, Human
uccucuguacagagc

SEQ ID NO: 2984752 - RNA, 14 nt, Human
uccucuaggagguc

SEQ ID NO: 2984753 - RNA, 19 nt, Human
uccuccuuuucacaguucu

SEQ ID NO: 2984754 - RNA, 15 nt, Human
ucccuugaugaagaa

SEQ ID NO: 2984755 - RNA, 16 nt, Human
ucccuugaugaagaag

SEQ ID NO: 2984756 - RNA, 13 nt, Human
ucccuucccaccu

SEQ ID NO: 2984757 - RNA, 16 nt, Human
ucccugcaauaaaaug

SEQ ID NO: 2984758 - RNA, 13 nt, Human
ucccugcacuugc

SEQ ID NO: 2984759 - RNA, 14 nt, Human
ucccugcacuugca

SEQ ID NO: 2984760 - RNA, 18 nt, Human
ucccugcugcuccuagga

SEQ ID NO: 2984761 - RNA, 21 nt, Human
uccccuguuuguuucugaaag

SEQ ID NO: 2984762 - RNA, 18 nt, Human
uccccuguuuguuucuga

SEQ ID NO: 2984763 - RNA, 20 nt, Human
uccccuguuuguuucugaaa

SEQ ID NO: 2984764 - RNA, 17 nt, Human
uccagguuuaagcuguu

SEQ ID NO: 2984765 - RNA, 16 nt, Human
ucccuauuagagaaga

SEQ ID NO: 2984766 - RNA, 22 nt, Human
ucuaaauaucccuuggacauuu

SEQ ID NO: 2984767 - RNA, 21 nt, Human
ucuaaaucuccaaaauaaaac

SEQ ID NO: 2984768 - RNA, 13 nt, Human
ucguuaauuugua

SEQ ID NO: 2984769 - RNA, 22 nt, Human
ucgugggacagucaccucaugg

SEQ ID NO: 2984770 - RNA, 21 nt, Human
ucguggaacaguuaccucugc

SEQ ID NO: 2984771 - RNA, 17 nt, Human
ucggccuccauccugag

SEQ ID NO: 2984772 - RNA, 18 nt, Human
ucggccuccauccugagg

SEQ ID NO: 2984773 - RNA, 16 nt, Human
ucgugauugauaagaa

SEQ ID NO: 2984774 - RNA, 22 nt, Human
ucuaucaaguauuauaccuuuu

SEQ ID NO: 2984775 - RNA, 21 nt, Human
ucuaucaaguauuauaccuuu

SEQ ID NO: 2984776 - RNA, 15 nt, Human
ucuaucaaguauuau

SEQ ID NO: 2984777 - RNA, 14 nt, Human
ucuaugaaauauua

SEQ ID NO: 2984778 - RNA, 13 nt, Human
ucuaugaaauauu

SEQ ID NO: 2984779 - RNA, 17 nt, Human
ucuaugaaauauuaugu

SEQ ID NO: 2984780 - RNA, 17 nt, Human
ucucaaauaacuaaaag

SEQ ID NO: 2984781 - RNA, 15 nt, Human
ucucaacuccaaacu

SEQ ID NO: 2984782 - RNA, 19 nt, Human
ucuagugagcagucaggaa

SEQ ID NO: 2984783 - RNA, 22 nt, Human
ucuagugagcagucaggaaaga

SEQ ID NO: 2984784 - RNA, 11 nt, Human
ucuagugaaug

SEQ ID NO: 2984785 - RNA, 21 nt, Human
ucuaggaagacuuuggaaaga

SEQ ID NO: 2984786 - RNA, 23 nt, Human
ucuaggacugaauuaugaaacuu

SEQ ID NO: 2984787 - RNA, 16 nt, Human
ucuaggacugaauuau

SEQ ID NO: 2984788 - RNA, 14 nt, Human
ucuaauauguaaca

SEQ ID NO: 2984789 - RNA, 19 nt, Human
uccugucggagcccugucu

SEQ ID NO: 2984790 - RNA, 14 nt, Human
uccuuaccagcaga

SEQ ID NO: 2984791 - RNA, 20 nt, Human
uccuguaccucuugagccuu

SEQ ID NO: 2984792 - RNA, 18 nt, Human
uccuggcacugcuuccag

SEQ ID NO: 2984793 - RNA, 22 nt, Human
uccuggcacugcuuccagugag

SEQ ID NO: 2984794 - RNA, 17 nt, Human
uccuggcacugcuucca

SEQ ID NO: 2984795 - RNA, 21 nt, Human
uccuggcacccggccccugcu

SEQ ID NO: 2984796 - RNA, 20 nt, Human
uccuggcacccggccccugc

SEQ ID NO: 2984797 - RNA, 14 nt, Human
uccugagccagauu

SEQ ID NO: 2984798 - RNA, 20 nt, Human
uccugccuaagugcagcccc

SEQ ID NO: 2984799 - RNA, 14 nt, Human
uccugccucagccu

SEQ ID NO: 2984800 - RNA, 13 nt, Human
uccugagccagau

SEQ ID NO: 2984801 - RNA, 13 nt, Human
uccugagagcugc

SEQ ID NO: 2984802 - RNA, 18 nt, Human
uccugagagcugcaugug

SEQ ID NO: 2984803 - RNA, 19 nt, Human
uccugagagcugcaugugu

SEQ ID NO: 2984804 - RNA, 17 nt, Human
uccuggcaauagucaaa

SEQ ID NO: 2984805 - RNA, 14 nt, Human
uccuggcacccggc

SEQ ID NO: 2984806 - RNA, 19 nt, Human
uccuggcacccggccccug

SEQ ID NO: 2984807 - RNA, 16 nt, Human
uccuggcacccggccc

SEQ ID NO: 2984808 - RNA, 15 nt, Human
uccugccucagccuc

SEQ ID NO: 2984809 - RNA, 13 nt, Human
uccugccucagcc

SEQ ID NO: 2984810 - RNA, 16 nt, Human
uccugccucagccucc

SEQ ID NO: 2984811 - RNA, 16 nt, Human
uccuuggacucauuuu

SEQ ID NO: 2984812 - RNA, 23 nt, Human
uccuuuucacaguucucuccuuc

SEQ ID NO: 2984813 - RNA, 21 nt, Human
uccuucaccuuuguccccacc

SEQ ID NO: 2984814 - RNA, 22 nt, Human
uccuucaccuuuguccccaccg

SEQ ID NO: 2984815 - RNA, 16 nt, Human
uccuuaccagcagagc

SEQ ID NO: 2984816 - RNA, 17 nt, Human
uccuuaccagcagagca

SEQ ID NO: 2984817 - RNA, 18 nt, Human
uccuuaccagcagagcac

SEQ ID NO: 2984818 - RNA, 18 nt, Human
uccuucacagaugggugc

SEQ ID NO: 2984819 - RNA, 18 nt, Human
uccuucaccuuugucccc

SEQ ID NO: 2984820 - RNA, 20 nt, Human
uccuucaccuuuguccccac

SEQ ID NO: 2984821 - RNA, 19 nt, Human
uccuucacagaugggugcu

SEQ ID NO: 2984822 - RNA, 17 nt, Human
uauuuucuccaaauguu

SEQ ID NO: 2984823 - RNA, 22 nt, Human
uauuuucccuauuagagaagag

SEQ ID NO: 2984824 - RNA, 14 nt, Human
ucaaaaaaagaaaa

SEQ ID NO: 2984825 - RNA, 15 nt, Human
ucaaaaaaagaaaaa

SEQ ID NO: 2984826 - RNA, 14 nt, Human
uauuuuuuuacuaa

SEQ ID NO: 2984827 - RNA, 17 nt, Human
uauuuuuuucuuuucuu

SEQ ID NO: 2984828 - RNA, 17 nt, Human
uauuuuauuaugcauga

SEQ ID NO: 2984829 - RNA, 14 nt, Human
uauuuuauuaugca

SEQ ID NO: 2984830 - RNA, 14 nt, Human
ucaaauugugugaa

SEQ ID NO: 2984831 - RNA, 23 nt, Human
ucaaccccuucgcuccugugucu

SEQ ID NO: 2984832 - RNA, 14 nt, Human
ucaaauaugcaaag

SEQ ID NO: 2984833 - RNA, 20 nt, Human
ucaaaucaagaaacuuaagg

SEQ ID NO: 2984834 - RNA, 16 nt, Human
ucaaaucagguuuucu

SEQ ID NO: 2984835 - RNA, 22 nt, Human
ucaaaucagguuuucuuuuaag

SEQ ID NO: 2984836 - RNA, 21 nt, Human
ucaauuaccagaaagauaaca

SEQ ID NO: 2984837 - RNA, 17 nt, Human
ucaauuaccagaaagau

SEQ ID NO: 2984838 - RNA, 20 nt, Human
ucaauuacaggaaguacugg

SEQ ID NO: 2984839 - RNA, 13 nt, Human
ucacaagacccaa

SEQ ID NO: 2984840 - RNA, 17 nt, Human
ucacaagacccaaaagg

SEQ ID NO: 2984841 - RNA, 22 nt, Human
ucacaguccuuaccagcagagc

SEQ ID NO: 2984842 - RNA, 23 nt, Human
ucacaguccuuaccagcagagca

SEQ ID NO: 2984843 - RNA, 19 nt, Human
ucacaguccuuaccagcag

SEQ ID NO: 2984844 - RNA, 16 nt, Human
ucacagucacauucca

SEQ ID NO: 2984845 - RNA, 18 nt, Human
ucacaggcagguccaggg

SEQ ID NO: 2984846 - RNA, 17 nt, Human
ucacaggcagguccagg

SEQ ID NO: 2984847 - RNA, 16 nt, Human
ucacaggcagguccag

SEQ ID NO: 2984848 - RNA, 20 nt, Human
ucaccaaaucagcugcuacu

SEQ ID NO: 2984849 - RNA, 19 nt, Human
ucaccaaaucagcugcuac

SEQ ID NO: 2984850 - RNA, 14 nt, Human
ucaccaaggcugau

SEQ ID NO: 2984851 - RNA, 17 nt, Human
ucacauuuauucugcuc

SEQ ID NO: 2984852 - RNA, 19 nt, Human
ucacauuuauucugcucac

SEQ ID NO: 2984853 - RNA, 18 nt, Human
ucacauuuauucugcuca

SEQ ID NO: 2984854 - RNA, 13 nt, Human
ucaaugcagcccc

SEQ ID NO: 2984855 - RNA, 20 nt, Human
ucaaugccccugaauuuaaa

SEQ ID NO: 2984856 - RNA, 18 nt, Human
ucaaugccccugaauuua

SEQ ID NO: 2984857 - RNA, 17 nt, Human
ucaaugccccugaauuu

SEQ ID NO: 2984858 - RNA, 21 nt, Human
ucaauuacaggaaguacugga

SEQ ID NO: 2984859 - RNA, 23 nt, Human
ucaauuacaggaaguacuggaga

SEQ ID NO: 2984860 - RNA, 20 nt, Human
ucaagugauucuccugccuc

SEQ ID NO: 2984861 - RNA, 18 nt, Human
ucaagugauucuccugcc

SEQ ID NO: 2984862 - RNA, 21 nt, Human
ucaagugauucuccugccuca

SEQ ID NO: 2984863 - RNA, 21 nt, Human
ucaauaaaauccauacauuug

SEQ ID NO: 2984864 - RNA, 14 nt, Human
ucaauaaaauccau

SEQ ID NO: 2984865 - RNA, 15 nt, Human
uauucucagcagagu

SEQ ID NO: 2984866 - RNA, 16 nt, Human
uauuauucccauucua

SEQ ID NO: 2984867 - RNA, 21 nt, Human
uauucucagcagagugcuuua

SEQ ID NO: 2984868 - RNA, 17 nt, Human
uauucucagcagagugc

SEQ ID NO: 2984869 - RNA, 17 nt, Human
uauucucuccuguaccu

SEQ ID NO: 2984870 - RNA, 21 nt, Human
uauugauaugcuuauacacuu

SEQ ID NO: 2984871 - RNA, 13 nt, Human
uauugauguuuuc

SEQ ID NO: 2984872 - RNA, 14 nt, Human
uauugauguuuuca

SEQ ID NO: 2984873 - RNA, 23 nt, Human
uauugauucaccuccuaaaacaa

SEQ ID NO: 2984874 - RNA, 22 nt, Human
uauuggaaauuuguuauaauga

SEQ ID NO: 2984875 - RNA, 17 nt, Human
uauugcugauggugcaa

SEQ ID NO: 2984876 - RNA, 20 nt, Human
uauuguuuucaguguacaug

SEQ ID NO: 2984877 - RNA, 18 nt, Human
uauuguuuucaguguaca

SEQ ID NO: 2984878 - RNA, 22 nt, Human
uauuguuuucaguguacaugga

SEQ ID NO: 2984879 - RNA, 12 nt, Human
uauuguuuucag

SEQ ID NO: 2984880 - RNA, 13 nt, Human
uauuaacaaaaca

SEQ ID NO: 2984881 - RNA, 24 nt, Human
uauuaagaaagacuaucuaaaugu

SEQ ID NO: 2984882 - RNA, 20 nt, Human
uauuaagagguaagacuuag

SEQ ID NO: 2984883 - RNA, 12 nt, Human
uauuaaauuaug

SEQ ID NO: 2984884 - RNA, 19 nt, Human
uauguugcccaggcagguc

SEQ ID NO: 2984885 - RNA, 16 nt, Human
uauguugcccaggcag

SEQ ID NO: 2984886 - RNA, 13 nt, Human
uauguugcccagg

SEQ ID NO: 2984887 - RNA, 20 nt, Human
uauguugcccaggcaggucu

SEQ ID NO: 2984888 - RNA, 13 nt, Human
gggaguggccaca

SEQ ID NO: 2984889 - RNA, 15 nt, Human
gggaguggccacaga

SEQ ID NO: 2984890 - RNA, 20 nt, Human
uauguagauguaugcacaca

SEQ ID NO: 2984891 - RNA, 17 nt, Human
uauguacuucaugcugu

SEQ ID NO: 2984892 - RNA, 13 nt, Human
uauguacuucaug

SEQ ID NO: 2984893 - RNA, 14 nt, Human
ucauuaguuuugaa

SEQ ID NO: 2984894 - RNA, 23 nt, Human
ucauuaguuuugaagauucuaug

SEQ ID NO: 2984895 - RNA, 13 nt, Human
ucauuaucucaaa

SEQ ID NO: 2984896 - RNA, 21 nt, Human
ucaugcugccaauauccuaau

SEQ ID NO: 2984897 - RNA, 23 nt, Human
ucaugcugccaauauccuaauaa

SEQ ID NO: 2984898 - RNA, 16 nt, Human
ucauuauguuaauauu

SEQ ID NO: 2984899 - RNA, 17 nt, Human
ucauuauguuaauauuu

SEQ ID NO: 2984900 - RNA, 19 nt, Human
ucauuaucucaaaacugca

SEQ ID NO: 2984901 - RNA, 20 nt, Human
ucauuaucucaaaacugcac

SEQ ID NO: 2984902 - RNA, 21 nt, Human
ucauucaacccaccugcgucu

SEQ ID NO: 2984903 - RNA, 13 nt, Human
ucauuuccaagca

SEQ ID NO: 2984904 - RNA, 16 nt, Human
ucauuuccaagcaagu

SEQ ID NO: 2984905 - RNA, 16 nt, Human
ucauuuccugugucuu

SEQ ID NO: 2984906 - RNA, 13 nt, Human
ucauuuccugugu

SEQ ID NO: 2984907 - RNA, 13 nt, Human
ucaugcugccaau

SEQ ID NO: 2984908 - RNA, 17 nt, Human
ucaugcugccaauaucc

SEQ ID NO: 2984909 - RNA, 19 nt, Human
ucaugcugccaauauccua

SEQ ID NO: 2984910 - RNA, 20 nt, Human
ucaugcugccaauauccuaa

SEQ ID NO: 2984911 - RNA, 23 nt, Human
ucaucuuagguuggcaaaaaggc

SEQ ID NO: 2984912 - RNA, 18 nt, Human
ucauaccuaucaucuuaa

SEQ ID NO: 2984913 - RNA, 21 nt, Human
ucauacccacccccacccaag

SEQ ID NO: 2984914 - RNA, 15 nt, Human
ucaggugcugccauc

SEQ ID NO: 2984915 - RNA, 21 nt, Human
ucaggugagaagcagaggaag

SEQ ID NO: 2984916 - RNA, 23 nt, Human
ucaggugccucaagagaaggcaa

SEQ ID NO: 2984917 - RNA, 14 nt, Human
ucaggugcugccau

SEQ ID NO: 2984918 - RNA, 13 nt, Human
ucaggugcugcca

SEQ ID NO: 2984919 - RNA, 19 nt, Human
ucaucaccaacgucugugc

SEQ ID NO: 2984920 - RNA, 20 nt, Human
ucaucaccaacgucugugcc

SEQ ID NO: 2984921 - RNA, 21 nt, Human
ucaucaccaacgucugugcca

SEQ ID NO: 2984922 - RNA, 19 nt, Human
uccacagaagcuccaggua

SEQ ID NO: 2984923 - RNA, 14 nt, Human
uccaccucccugca

SEQ ID NO: 2984924 - RNA, 13 nt, Human
uccaccucccugc

SEQ ID NO: 2984925 - RNA, 12 nt, Human
uccaccucccug

SEQ ID NO: 2984926 - RNA, 12 nt, Human
uccacccugcuc

SEQ ID NO: 2984927 - RNA, 17 nt, Human
uccaccugccagggaca

SEQ ID NO: 2984928 - RNA, 15 nt, Human
uccaccugccaggga

SEQ ID NO: 2984929 - RNA, 17 nt, Human
uccaccucccugcaaua

SEQ ID NO: 2984930 - RNA, 16 nt, Human
uccaccucccugcaau

SEQ ID NO: 2984931 - RNA, 15 nt, Human
uccaccucccugcaa

SEQ ID NO: 2984932 - RNA, 18 nt, Human
uccaccugccagggacag

SEQ ID NO: 2984933 - RNA, 21 nt, Human
uccaccugccagggacagagg

SEQ ID NO: 2984934 - RNA, 18 nt, Human
uccaaaauaaaacuuuuu

SEQ ID NO: 2984935 - RNA, 20 nt, Human
uccaaaauaaaacuuuuuaa

SEQ ID NO: 2984936 - RNA, 18 nt, Human
uccaauuuacauacucug

SEQ ID NO: 2984937 - RNA, 17 nt, Human
uccaauuuacauacucu

SEQ ID NO: 2984938 - RNA, 16 nt, Human
uccacaagagcccagg

SEQ ID NO: 2984939 - RNA, 17 nt, Human
uccacaagagcccaggc

SEQ ID NO: 2984940 - RNA, 18 nt, Human
uccacaagagcccaggcc

SEQ ID NO: 2984941 - RNA, 15 nt, Human
uccacaagagcccag

SEQ ID NO: 2984942 - RNA, 18 nt, Human
uccacaaguuaaauaaau

SEQ ID NO: 2984943 - RNA, 17 nt, Human
uccacaaguuaaauaaa

SEQ ID NO: 2984944 - RNA, 16 nt, Human
uccacuuggucuguga

SEQ ID NO: 2984945 - RNA, 15 nt, Human
uccacuuggucugug

SEQ ID NO: 2984946 - RNA, 14 nt, Human
uccacuuggucugu

SEQ ID NO: 2984947 - RNA, 23 nt, Human
uccagccaaagccuccuccagcc

SEQ ID NO: 2984948 - RNA, 17 nt, Human
uccagcucaccagcccc

SEQ ID NO: 2984949 - RNA, 16 nt, Human
uccagcucaccagccc

SEQ ID NO: 2984950 - RNA, 18 nt, Human
uccagcucaccagcccca

SEQ ID NO: 2984951 - RNA, 15 nt, Human
uccagcucaccagcc

SEQ ID NO: 2984952 - RNA, 17 nt, Human
uccagcuguucagcugg

SEQ ID NO: 2984953 - RNA, 16 nt, Human
uccaggagcagccaca

SEQ ID NO: 2984954 - RNA, 18 nt, Human
uccaggugcacaagcucc

SEQ ID NO: 2984955 - RNA, 20 nt, Human
uccaggugcacaagcuccaa

SEQ ID NO: 2984956 - RNA, 21 nt, Human
uccaggugcacaagcuccaag

SEQ ID NO: 2984957 - RNA, 22 nt, Human
uccaggugcacaagcuccaagc

SEQ ID NO: 2984958 - RNA, 16 nt, Human
uccagguucagcuugu

SEQ ID NO: 2984959 - RNA, 15 nt, Human
uccagguucagcuug

SEQ ID NO: 2984960 - RNA, 23 nt, Human
uccaggggugggacacccuguga

SEQ ID NO: 2984961 - RNA, 15 nt, Human
uccaggugcacaagc

SEQ ID NO: 2984962 - RNA, 17 nt, Human
uccaggagcagccacau

SEQ ID NO: 2984963 - RNA, 18 nt, Human
uccaggagcagccacauu

SEQ ID NO: 2984964 - RNA, 22 nt, Human
uccaggagcagccacauuccug

SEQ ID NO: 2984965 - RNA, 22 nt, Human
uccaggggugggacacccugug

SEQ ID NO: 2984966 - RNA, 17 nt, Human
ucacugguacucugcca

SEQ ID NO: 2984967 - RNA, 14 nt, Human
ucacugcuuaacuu

SEQ ID NO: 2984968 - RNA, 20 nt, Human
ucacucuuauugcccacgcu

SEQ ID NO: 2984969 - RNA, 18 nt, Human
ucacugccaugccagcuu

SEQ ID NO: 2984970 - RNA, 22 nt, Human
ucacucugucgcccagucugga

SEQ ID NO: 2984971 - RNA, 17 nt, Human
ucacucuuauugcccac

SEQ ID NO: 2984972 - RNA, 22 nt, Human
ucaccccggccaccugcggugc

SEQ ID NO: 2984973 - RNA, 13 nt, Human
ucaccagccccag

SEQ ID NO: 2984974 - RNA, 21 nt, Human
ucagagcugcccucuccuggg

SEQ ID NO: 2984975 - RNA, 20 nt, Human
ucagagcugcccucuccugg

SEQ ID NO: 2984976 - RNA, 19 nt, Human
ucagagcugcccucuccug

SEQ ID NO: 2984977 - RNA, 18 nt, Human
ucagagcugcccucuccu

SEQ ID NO: 2984978 - RNA, 22 nt, Human
ucagagcugcccucuccugggc

SEQ ID NO: 2984979 - RNA, 13 nt, Human
ucagacagcugcc

SEQ ID NO: 2984980 - RNA, 16 nt, Human
ucagaauucucuaguu

SEQ ID NO: 2984981 - RNA, 13 nt, Human
ucagacacagauu

SEQ ID NO: 2984982 - RNA, 15 nt, Human
ucagaaauguguuau

SEQ ID NO: 2984983 - RNA, 23 nt, Human
ucagaauucucuaguuugauuaa

SEQ ID NO: 2984984 - RNA, 20 nt, Human
ucacuuguuuuauuuaaccu

SEQ ID NO: 2984985 - RNA, 10 nt, Human
ucagaaaugu

SEQ ID NO: 2984986 - RNA, 17 nt, Human
ucagcuccccucggaga

SEQ ID NO: 2984987 - RNA, 15 nt, Human
ucagcugaaccuggg

SEQ ID NO: 2984988 - RNA, 16 nt, Human
ucagcugaaccugggu

SEQ ID NO: 2984989 - RNA, 18 nt, Human
ucagcuccccucggagaa

SEQ ID NO: 2984990 - RNA, 22 nt, Human
ucagccucccgaguagcuggga

SEQ ID NO: 2984991 - RNA, 21 nt, Human
ucagccucccgaguagcuggg

SEQ ID NO: 2984992 - RNA, 18 nt, Human
ucagccugcuccagcugu

SEQ ID NO: 2984993 - RNA, 19 nt, Human
ucagccugcuccagcuguu

SEQ ID NO: 2984994 - RNA, 21 nt, Human
ucagccucccaaagugcuggg

SEQ ID NO: 2984995 - RNA, 19 nt, Human
ucagccucccaaagugcug

SEQ ID NO: 2984996 - RNA, 14 nt, Human
ucagccucccaaag

SEQ ID NO: 2984997 - RNA, 13 nt, Human
ucagccucccaaa

SEQ ID NO: 2984998 - RNA, 22 nt, Human
ucagccucccgaauagcuggga

SEQ ID NO: 2984999 - RNA, 21 nt, Human
ucagccucccgaauagcuggg

SEQ ID NO: 2985000 - RNA, 18 nt, Human
ucagccucccgaguagcu

SEQ ID NO: 2985001 - RNA, 20 nt, Human
ucagccucccgaguagcugg

SEQ ID NO: 2985002 - RNA, 15 nt, Human
ucagauaugauucaa

SEQ ID NO: 2985003 - RNA, 17 nt, Human
ucaggcuagauguaugu

SEQ ID NO: 2985004 - RNA, 13 nt, Human
ucaggcuagaugu

SEQ ID NO: 2985005 - RNA, 15 nt, Human
ucaggugagaagcag

SEQ ID NO: 2985006 - RNA, 16 nt, Human
ucaggugagaagcaga

SEQ ID NO: 2985007 - RNA, 14 nt, Human
ucagggccuggcuc

SEQ ID NO: 2985008 - RNA, 16 nt, Human
ucagggccuggcucag

SEQ ID NO: 2985009 - RNA, 22 nt, Human
ggcuuagacccucaugcugcca

SEQ ID NO: 2985010 - RNA, 23 nt, Human
ggcuuagacccucaugcugccaa

SEQ ID NO: 2985011 - RNA, 14 nt, Human
ggcuuagucacuga

SEQ ID NO: 2985012 - RNA, 20 nt, Human
ggcuucacggaagagccuug

SEQ ID NO: 2985013 - RNA, 15 nt, Human
ggcuuagucacugag

SEQ ID NO: 2985014 - RNA, 21 nt, Human
ggcuucacggaagagccuugc

SEQ ID NO: 2985015 - RNA, 17 nt, Human
ggcuuggggaccagagc

SEQ ID NO: 2985016 - RNA, 18 nt, Human
ggcuuggggaccagagcu

SEQ ID NO: 2985017 - RNA, 20 nt, Human
ggcuuagacccucaugcugc

SEQ ID NO: 2985018 - RNA, 18 nt, Human
ggcuuagacccucaugcu

SEQ ID NO: 2985019 - RNA, 20 nt, Human
ggcuguuggcugggggccuc

SEQ ID NO: 2985020 - RNA, 16 nt, Human
ggcuguuggcuggggg

SEQ ID NO: 2985021 - RNA, 15 nt, Human
ggcuguuggcugggg

SEQ ID NO: 2985022 - RNA, 14 nt, Human
ggcuguuggcuggg

SEQ ID NO: 2985023 - RNA, 15 nt, Human
ggcuggaguuauuga

SEQ ID NO: 2985024 - RNA, 23 nt, Human
ggcuggaguuauugaagcagagu

SEQ ID NO: 2985025 - RNA, 20 nt, Human
ggcugggcucccuucccacc

SEQ ID NO: 2985026 - RNA, 21 nt, Human
ggcugggcucccuucccaccu

SEQ ID NO: 2985027 - RNA, 18 nt, Human
ggcugggcucccuuccca

SEQ ID NO: 2985028 - RNA, 18 nt, Human
ggcugggcuucaguggca

SEQ ID NO: 2985029 - RNA, 22 nt, Human
ggcugggcuucaguggcagcug

SEQ ID NO: 2985030 - RNA, 21 nt, Human
ggcugggcuucaguggcagcu

SEQ ID NO: 2985031 - RNA, 11 nt, Human
ggcugggcuuc

SEQ ID NO: 2985032 - RNA, 14 nt, Human
ggcugggggccuca

SEQ ID NO: 2985033 - RNA, 16 nt, Human
ggcugggggaagaagc

SEQ ID NO: 2985034 - RNA, 18 nt, Human
ggcuggagcuagaauuug

SEQ ID NO: 2985035 - RNA, 20 nt, Human
ggcugcuucaaggauccuga

SEQ ID NO: 2985036 - RNA, 15 nt, Human
ggcugcuucaaggau

SEQ ID NO: 2985037 - RNA, 19 nt, Human
ggcugcuucaaggauccug

SEQ ID NO: 2985038 - RNA, 20 nt, Human
ggcugaggcaggagacuggc

SEQ ID NO: 2985039 - RNA, 21 nt, Human
gggacugaggggaggggagca

SEQ ID NO: 2985040 - RNA, 23 nt, Human
gggacucaaugcacugacauugu

SEQ ID NO: 2985041 - RNA, 19 nt, Human
gggacucaaugcacugaca

SEQ ID NO: 2985042 - RNA, 17 nt, Human
gggacucaaugcacuga

SEQ ID NO: 2985043 - RNA, 14 nt, Human
gggacacccuguga

SEQ ID NO: 2985044 - RNA, 21 nt, Human
gggaauguuugccucugccuc

SEQ ID NO: 2985045 - RNA, 19 nt, Human
gggaauguuugccucugcc

SEQ ID NO: 2985046 - RNA, 20 nt, Human
gggaggacgcucucuggccu

SEQ ID NO: 2985047 - RNA, 17 nt, Human
gggaggacgcucucugg

SEQ ID NO: 2985048 - RNA, 23 nt, Human
gggaggaucucuugagccuggga

SEQ ID NO: 2985049 - RNA, 21 nt, Human
gggaggauugcuugagcucag

SEQ ID NO: 2985050 - RNA, 22 nt, Human
gggaggauguucugggacacag

SEQ ID NO: 2985051 - RNA, 21 nt, Human
gggagugaguugauagcacag

SEQ ID NO: 2985052 - RNA, 23 nt, Human
gggaggauugcuugagcucagga

SEQ ID NO: 2985053 - RNA, 20 nt, Human
gggaggugggauccuccagg

SEQ ID NO: 2985054 - RNA, 22 nt, Human
gggagcugccuguucagcucca

SEQ ID NO: 2985055 - RNA, 21 nt, Human
gggagcugccuguucagcucc

SEQ ID NO: 2985056 - RNA, 13 nt, Human
gggagcugccugu

SEQ ID NO: 2985057 - RNA, 9 nt, Human
ggcuccaga

SEQ ID NO: 2985058 - RNA, 16 nt, Human
ggcuccacuuggucug

SEQ ID NO: 2985059 - RNA, 16 nt, Human
ggcucacccaguccug

SEQ ID NO: 2985060 - RNA, 13 nt, Human
ggcuaugcauuug

SEQ ID NO: 2985061 - RNA, 12 nt, Human
ggcuaugcauuu

SEQ ID NO: 2985062 - RNA, 13 nt, Human
ggcucacccaguc

SEQ ID NO: 2985063 - RNA, 10 nt, Human
ggcuccagac

SEQ ID NO: 2985064 - RNA, 14 nt, Human
ggcuccaggagcag

SEQ ID NO: 2985065 - RNA, 16 nt, Human
ggcuccaggagcagcc

SEQ ID NO: 2985066 - RNA, 17 nt, Human
ggcuccaggagcagcca

SEQ ID NO: 2985067 - RNA, 13 nt, Human
ggcuccaggcucc

SEQ ID NO: 2985068 - RNA, 12 nt, Human
ggcuccaggcuc

SEQ ID NO: 2985069 - RNA, 20 nt, Human
ggcuaguaucaaaagaaaga

SEQ ID NO: 2985070 - RNA, 23 nt, Human
ggcuauaggugcuacaaaaacac

SEQ ID NO: 2985071 - RNA, 20 nt, Human
ggcggguggaucacgagguc

SEQ ID NO: 2985072 - RNA, 11 nt, Human
ggcgcugcccc

SEQ ID NO: 2985073 - RNA, 17 nt, Human
ggcgcugccccuggcag

SEQ ID NO: 2985074 - RNA, 15 nt, Human
ggcgcgguggcucac

SEQ ID NO: 2985075 - RNA, 14 nt, Human
ggcucucaggccag

SEQ ID NO: 2985076 - RNA, 17 nt, Human
ggcucucaggccagcug

SEQ ID NO: 2985077 - RNA, 18 nt, Human
ggcucucaggccagcugc

SEQ ID NO: 2985078 - RNA, 19 nt, Human
ggcucucaggccagcugcu

SEQ ID NO: 2985079 - RNA, 20 nt, Human
ggcucucaggccagcugcuu

SEQ ID NO: 2985080 - RNA, 15 nt, Human
ggcucucaggccagc

SEQ ID NO: 2985081 - RNA, 16 nt, Human
ggcucucaggccagcu

SEQ ID NO: 2985082 - RNA, 14 nt, Human
ggcuccaggcuccu

SEQ ID NO: 2985083 - RNA, 16 nt, Human
ggcucugccucccauc

SEQ ID NO: 2985084 - RNA, 14 nt, Human
ggcucugcccuugg

SEQ ID NO: 2985085 - RNA, 15 nt, Human
ggcucugcccuuggu

SEQ ID NO: 2985086 - RNA, 13 nt, Human
ggcucugccuccc

SEQ ID NO: 2985087 - RNA, 15 nt, Human
ggcucugccucccau

SEQ ID NO: 2985088 - RNA, 12 nt, Human
ggcucugcccuu

SEQ ID NO: 2985089 - RNA, 14 nt, Human
ggccuccugugugu

SEQ ID NO: 2985090 - RNA, 20 nt, Human
ggccucgguguggagaagcg

SEQ ID NO: 2985091 - RNA, 16 nt, Human
ggccucugcacucccc

SEQ ID NO: 2985092 - RNA, 22 nt, Human
ggccuagcauacguacacauuu

SEQ ID NO: 2985093 - RNA, 20 nt, Human
ggccuagcauacguacacau

SEQ ID NO: 2985094 - RNA, 22 nt, Human
ggccucaagugauucuccugcc

SEQ ID NO: 2985095 - RNA, 14 nt, Human
ggccucaagugauu

SEQ ID NO: 2985096 - RNA, 14 nt, Human
ggcccagagggccu

SEQ ID NO: 2985097 - RNA, 17 nt, Human
ggcccagagggccugca

SEQ ID NO: 2985098 - RNA, 19 nt, Human
ggcccagagggccugcaag

SEQ ID NO: 2985099 - RNA, 20 nt, Human
ggcccagagggccugcaagg

SEQ ID NO: 2985100 - RNA, 14 nt, Human
ggccuggccccuca

SEQ ID NO: 2985101 - RNA, 15 nt, Human
ggccuggccccucag

SEQ ID NO: 2985102 - RNA, 17 nt, Human
ggccuggccccucaggg

SEQ ID NO: 2985103 - RNA, 18 nt, Human
ggccuggccccucagggu

SEQ ID NO: 2985104 - RNA, 23 nt, Human
ggccuggccccucagggucccug

SEQ ID NO: 2985105 - RNA, 10 nt, Human
ggccuggccu

SEQ ID NO: 2985106 - RNA, 13 nt, Human
ggccuggccugag

SEQ ID NO: 2985107 - RNA, 14 nt, Human
ggccuggccugagc

SEQ ID NO: 2985108 - RNA, 13 nt, Human
ggccuggccccuc

SEQ ID NO: 2985109 - RNA, 18 nt, Human
ggccucugcacuccccug

SEQ ID NO: 2985110 - RNA, 19 nt, Human
ggccucugcacuccccugc

SEQ ID NO: 2985111 - RNA, 22 nt, Human
ggccucugcacuccccugcugg

SEQ ID NO: 2985112 - RNA, 19 nt, Human
ggccucugcggagcacacu

SEQ ID NO: 2985113 - RNA, 23 nt, Human
ggcgcagcauauucaggaagcuc

SEQ ID NO: 2985114 - RNA, 24 nt, Human
ggcgcagcauauucaggaagcuca

SEQ ID NO: 2985115 - RNA, 15 nt, Human
ggccuggccugagcu

SEQ ID NO: 2985116 - RNA, 16 nt, Human
ggccuggccugagcug

SEQ ID NO: 2985117 - RNA, 23 nt, Human
ggccugggggcugggcagaggaa

SEQ ID NO: 2985118 - RNA, 19 nt, Human
ggauugaaggaugcugucu

SEQ ID NO: 2985119 - RNA, 17 nt, Human
ggcaagcaccuccugcc

SEQ ID NO: 2985120 - RNA, 16 nt, Human
ggauucuuccucccuc

SEQ ID NO: 2985121 - RNA, 21 nt, Human
ggauucuuccucccucccucu

SEQ ID NO: 2985122 - RNA, 17 nt, Human
ggcaccagcagccugga

SEQ ID NO: 2985123 - RNA, 19 nt, Human
ggcaagcaccuccugccuc

SEQ ID NO: 2985124 - RNA, 18 nt, Human
ggcaagcaccuccugccu

SEQ ID NO: 2985125 - RNA, 21 nt, Human
ggcagagguugcagugagccg

SEQ ID NO: 2985126 - RNA, 22 nt, Human
ggcagagcagagaccaucccug

SEQ ID NO: 2985127 - RNA, 19 nt, Human
ggcacucagaagacacuga

SEQ ID NO: 2985128 - RNA, 18 nt, Human
ggcacucagaagacacug

SEQ ID NO: 2985129 - RNA, 19 nt, Human
ggcacuauuuauuuacaaa

SEQ ID NO: 2985130 - RNA, 18 nt, Human
ggcacuauuuauuuacaa

SEQ ID NO: 2985131 - RNA, 17 nt, Human
ggcacccggccccugcu

SEQ ID NO: 2985132 - RNA, 20 nt, Human
ggcacccggccccugcuggu

SEQ ID NO: 2985133 - RNA, 19 nt, Human
ggcacccggccccugcugg

SEQ ID NO: 2985134 - RNA, 18 nt, Human
ggcacccggccccugcug

SEQ ID NO: 2985135 - RNA, 17 nt, Human
ggauuagggagagaaga

SEQ ID NO: 2985136 - RNA, 21 nt, Human
ggaugccugguggcagcugcg

SEQ ID NO: 2985137 - RNA, 20 nt, Human
ggaugccugguggcagcugc

SEQ ID NO: 2985138 - RNA, 19 nt, Human
ggaugccugguggcagcug

SEQ ID NO: 2985139 - RNA, 18 nt, Human
ggaugccugguggcagcu

SEQ ID NO: 2985140 - RNA, 23 nt, Human
ggagucccaccuuggcugcaggg

SEQ ID NO: 2985141 - RNA, 18 nt, Human
ggaugaucuaggaagacu

SEQ ID NO: 2985142 - RNA, 22 nt, Human
ggaugaucuaggaagacuuugg

SEQ ID NO: 2985143 - RNA, 16 nt, Human
ggaugaucuaggaaga

SEQ ID NO: 2985144 - RNA, 17 nt, Human
ggaugccugguggcagc

SEQ ID NO: 2985145 - RNA, 13 nt, Human
ggaugccuggugg

SEQ ID NO: 2985146 - RNA, 19 nt, Human
ggaugcccaaagaugcagc

SEQ ID NO: 2985147 - RNA, 18 nt, Human
ggaugcccaaagaugcag

SEQ ID NO: 2985148 - RNA, 15 nt, Human
ggaugccauccaagu

SEQ ID NO: 2985149 - RNA, 17 nt, Human
ggcagugcuuggcccag

SEQ ID NO: 2985150 - RNA, 18 nt, Human
ggcagugcuuggcccagg

SEQ ID NO: 2985151 - RNA, 19 nt, Human
ggcagugcuuggcccagga

SEQ ID NO: 2985152 - RNA, 20 nt, Human
ggcagugcuuggcccaggag

SEQ ID NO: 2985153 - RNA, 21 nt, Human
ggcagugcuuggcccaggagu

SEQ ID NO: 2985154 - RNA, 22 nt, Human
ggcagugcuuggcccaggaguu

SEQ ID NO: 2985155 - RNA, 23 nt, Human
ggcagugcuuggcccaggaguuu

SEQ ID NO: 2985156 - RNA, 16 nt, Human
ggcagugcuuggccca

SEQ ID NO: 2985157 - RNA, 22 nt, Human
ggcaugacacgaauauugcuga

SEQ ID NO: 2985158 - RNA, 18 nt, Human
ggcaugugaugagaggaa

SEQ ID NO: 2985159 - RNA, 23 nt, Human
ggcaugugaugagaggaaaucac

SEQ ID NO: 2985160 - RNA, 19 nt, Human
ggcagaguugaagacagag

SEQ ID NO: 2985161 - RNA, 21 nt, Human
ggcagaguugaagacagagcu

SEQ ID NO: 2985162 - RNA, 17 nt, Human
ggcagaguugaagacag

SEQ ID NO: 2985163 - RNA, 11 nt, Human
ggcagcugccu

SEQ ID NO: 2985164 - RNA, 13 nt, Human
ggcagcugccucc

SEQ ID NO: 2985165 - RNA, 12 nt, Human
ggcagcugccuc

SEQ ID NO: 2985166 - RNA, 21 nt, Human
ggcagcugcgguccacccagg

SEQ ID NO: 2985167 - RNA, 12 nt, Human
ggcaggguccua

SEQ ID NO: 2985168 - RNA, 24 nt, Human
ggcagcugcgguccacccaggagc

SEQ ID NO: 2985169 - RNA, 23 nt, Human
ggcagcugcgguccacccaggag

SEQ ID NO: 2985170 - RNA, 17 nt, Human
ggcagguuggugggggc

SEQ ID NO: 2985171 - RNA, 18 nt, Human
ggcagggucucacucugu

SEQ ID NO: 2985172 - RNA, 17 nt, Human
ggcagggucucacucug

SEQ ID NO: 2985173 - RNA, 12 nt, Human
ggcccagagagg

SEQ ID NO: 2985174 - RNA, 15 nt, Human
ggccaggcccucugc

SEQ ID NO: 2985175 - RNA, 16 nt, Human
ggccaggcccucugcc

SEQ ID NO: 2985176 - RNA, 17 nt, Human
ggccaggcccucugccc

SEQ ID NO: 2985177 - RNA, 13 nt, Human
ggccaggagccuc

SEQ ID NO: 2985178 - RNA, 14 nt, Human
ggccaggcccucug

SEQ ID NO: 2985179 - RNA, 11 nt, Human
ggccaggagcc

SEQ ID NO: 2985180 - RNA, 20 nt, Human
ggccacugugaagagaacca

SEQ ID NO: 2985181 - RNA, 21 nt, Human
ggccagaaaccuuccugcuga

SEQ ID NO: 2985182 - RNA, 22 nt, Human
ggccacagaaaauucuucucca

SEQ ID NO: 2985183 - RNA, 20 nt, Human
ggcauguucucugaggacac

SEQ ID NO: 2985184 - RNA, 20 nt, Human
ggccaccgccuugcccagcc

SEQ ID NO: 2985185 - RNA, 18 nt, Human
ggccaccgccuugcccag

SEQ ID NO: 2985186 - RNA, 15 nt, Human
ggacauuuuaugucu

SEQ ID NO: 2985187 - RNA, 19 nt, Human
ggaccagagcugccaccug

SEQ ID NO: 2985188 - RNA, 14 nt, Human
ggaccagagcugcc

SEQ ID NO: 2985189 - RNA, 20 nt, Human
ggacauuugcucauggaauu

SEQ ID NO: 2985190 - RNA, 17 nt, Human
ggacauuugcucaugga

SEQ ID NO: 2985191 - RNA, 16 nt, Human
ggacauuugcucaugg

SEQ ID NO: 2985192 - RNA, 16 nt, Human
ggacagcuccuucugu

SEQ ID NO: 2985193 - RNA, 15 nt, Human
ggacagcuccuucug

SEQ ID NO: 2985194 - RNA, 11 nt, Human
ggacagcuccu

SEQ ID NO: 2985195 - RNA, 20 nt, Human
ggacagaggggguggccucc

SEQ ID NO: 2985196 - RNA, 22 nt, Human
ggacagccacggccaggccaga

SEQ ID NO: 2985197 - RNA, 16 nt, Human
ggacagaggggguggc

SEQ ID NO: 2985198 - RNA, 22 nt, Human
ggacacucaaaagcugggcagg

SEQ ID NO: 2985199 - RNA, 19 nt, Human
ggagaagucuucuauuuau

SEQ ID NO: 2985200 - RNA, 20 nt, Human
ggagaagucuucuauuuauu

SEQ ID NO: 2985201 - RNA, 23 nt, Human
ggagaagagcuguucacagccag

SEQ ID NO: 2985202 - RNA, 14 nt, Human
ggagaagaacugaa

SEQ ID NO: 2985203 - RNA, 11 nt, Human
ggagaagaacu

SEQ ID NO: 2985204 - RNA, 15 nt, Human
ggagaagagcuguuc

SEQ ID NO: 2985205 - RNA, 20 nt, Human
ggacugagggggccuggaug

SEQ ID NO: 2985206 - RNA, 16 nt, Human
ggacgcucucuggccu

SEQ ID NO: 2985207 - RNA, 15 nt, Human
ggacgcucucuggcc

SEQ ID NO: 2985208 - RNA, 19 nt, Human
ggacgcucucuggccuucg

SEQ ID NO: 2985209 - RNA, 19 nt, Human
ggacugaauuaugaaacuu

SEQ ID NO: 2985210 - RNA, 17 nt, Human
ggacugaauuaugaaac

SEQ ID NO: 2985211 - RNA, 18 nt, Human
ggaccuugaacuggguac

SEQ ID NO: 2985212 - RNA, 18 nt, Human
ggagcccugucuccucuc

SEQ ID NO: 2985213 - RNA, 14 nt, Human
ggagccuccugccc

SEQ ID NO: 2985214 - RNA, 16 nt, Human
ggagcacacuggcuca

SEQ ID NO: 2985215 - RNA, 14 nt, Human
ggagcuagaauuug

SEQ ID NO: 2985216 - RNA, 15 nt, Human
ggagccuccugcccu

SEQ ID NO: 2985217 - RNA, 19 nt, Human
ggaggggagcaugggaagu

SEQ ID NO: 2985218 - RNA, 22 nt, Human
ggagucccaccuuggcugcagg

SEQ ID NO: 2985219 - RNA, 21 nt, Human
ggagucccaccuuggcugcag

SEQ ID NO: 2985220 - RNA, 16 nt, Human
ggaggacgcucucugg

SEQ ID NO: 2985221 - RNA, 21 nt, Human
ggaggauguucugggacacag

SEQ ID NO: 2985222 - RNA, 18 nt, Human
ggaggauguucugggaca

SEQ ID NO: 2985223 - RNA, 13 nt, Human
ggagggagggcuc

SEQ ID NO: 2985224 - RNA, 16 nt, Human
ggagggagggcuccag

SEQ ID NO: 2985225 - RNA, 17 nt, Human
ggagggagggcuccaga

SEQ ID NO: 2985226 - RNA, 23 nt, Human
gccuuguuuaaugguaguuuuac

SEQ ID NO: 2985227 - RNA, 15 nt, Human
gccuuguuuaauggu

SEQ ID NO: 2985228 - RNA, 18 nt, Human
gccuuggggcugaugcag

SEQ ID NO: 2985229 - RNA, 15 nt, Human
gccuuacacaauggu

SEQ ID NO: 2985230 - RNA, 12 nt, Human
gcgacaaugcaa

SEQ ID NO: 2985231 - RNA, 13 nt, Human
gcgacaaugcaaa

SEQ ID NO: 2985232 - RNA, 20 nt, Human
gcgacaaugcaaaccaucau

SEQ ID NO: 2985233 - RNA, 21 nt, Human
gcgacaaugcaaaccaucauu

SEQ ID NO: 2985234 - RNA, 23 nt, Human
gcgcccaguuggguggaugccug

SEQ ID NO: 2985235 - RNA, 21 nt, Human
gcgccuuaaggauguucuagc

SEQ ID NO: 2985236 - RNA, 14 nt, Human
gcggggacagcucc

SEQ ID NO: 2985237 - RNA, 19 nt, Human
gcggagacggagucccacc

SEQ ID NO: 2985238 - RNA, 16 nt, Human
gcggagaaaggaaggg

SEQ ID NO: 2985239 - RNA, 18 nt, Human
gcgcugccccuggcagcc

SEQ ID NO: 2985240 - RNA, 21 nt, Human
gcgcugccccuggcagccccu

SEQ ID NO: 2985241 - RNA, 14 nt, Human
gcgguccacccagg

SEQ ID NO: 2985242 - RNA, 13 nt, Human
gcgguccacccag

SEQ ID NO: 2985243 - RNA, 19 nt, Human
gcggugagaggggaacaga

SEQ ID NO: 2985244 - RNA, 17 nt, Human
gcggggacagcuccuuc

SEQ ID NO: 2985245 - RNA, 15 nt, Human
gcggggacagcuccu

SEQ ID NO: 2985246 - RNA, 20 nt, Human
gccugagcgacagugagacu

SEQ ID NO: 2985247 - RNA, 17 nt, Human
gccugagcgacagugag

SEQ ID NO: 2985248 - RNA, 18 nt, Human
gccugaagucacacagug

SEQ ID NO: 2985249 - RNA, 17 nt, Human
gccugaagucacacagu

SEQ ID NO: 2985250 - RNA, 16 nt, Human
gccugaagucacacag

SEQ ID NO: 2985251 - RNA, 15 nt, Human
gccugaagucacaca

SEQ ID NO: 2985252 - RNA, 21 nt, Human
gcccaguuggguggaugccug

SEQ ID NO: 2985253 - RNA, 19 nt, Human
gcccaguuggguggaugcc

SEQ ID NO: 2985254 - RNA, 12 nt, Human
gccugagcuggg

SEQ ID NO: 2985255 - RNA, 20 nt, Human
gccuggauggggcugcaccg

SEQ ID NO: 2985256 - RNA, 16 nt, Human
gccuggauggggcugc

SEQ ID NO: 2985257 - RNA, 18 nt, Human
gccuggauggggcugcac

SEQ ID NO: 2985258 - RNA, 15 nt, Human
gccuguaauccuagc

SEQ ID NO: 2985259 - RNA, 20 nt, Human
gccuguaauccuagcacuuu

SEQ ID NO: 2985260 - RNA, 21 nt, Human
gccuggccagaugcaccagcc

SEQ ID NO: 2985261 - RNA, 16 nt, Human
gccuggccagaugcac

SEQ ID NO: 2985262 - RNA, 20 nt, Human
gccuggccagaugcaccagc

SEQ ID NO: 2985263 - RNA, 13 nt, Human
gccuggccccuca

SEQ ID NO: 2985264 - RNA, 14 nt, Human
gccuggccccucag

SEQ ID NO: 2985265 - RNA, 20 nt, Human
gcuccauuuuuagugaaaua

SEQ ID NO: 2985266 - RNA, 23 nt, Human
gcuccgcuuucuacccagcgagc

SEQ ID NO: 2985267 - RNA, 22 nt, Human
gcuccgcuuucuacccagcgag

SEQ ID NO: 2985268 - RNA, 21 nt, Human
gcuccgcuuucuacccagcga

SEQ ID NO: 2985269 - RNA, 18 nt, Human
gcuccgcuuucuacccag

SEQ ID NO: 2985270 - RNA, 20 nt, Human
gcucccuucccaccucucuc

SEQ ID NO: 2985271 - RNA, 15 nt, Human
gcuccaggagcagcc

SEQ ID NO: 2985272 - RNA, 16 nt, Human
gcuccaggagcagcca

SEQ ID NO: 2985273 - RNA, 17 nt, Human
gcuccaggagcagccac

SEQ ID NO: 2985274 - RNA, 18 nt, Human
gcuccaggagcagccaca

SEQ ID NO: 2985275 - RNA, 24 nt, Human
gcuccaggcuccuuuagcgcccag

SEQ ID NO: 2985276 - RNA, 12 nt, Human
gcuccaggcucc

SEQ ID NO: 2985277 - RNA, 12 nt, Human
gcuccaggagca

SEQ ID NO: 2985278 - RNA, 14 nt, Human
gcuccaggagcagc

SEQ ID NO: 2985279 - RNA, 11 nt, Human
gcuccaggagc

SEQ ID NO: 2985280 - RNA, 21 nt, Human
gcuccagcuguucagcugguu

SEQ ID NO: 2985281 - RNA, 20 nt, Human
gcuccagcuguucagcuggu

SEQ ID NO: 2985282 - RNA, 24 nt, Human
gcuccgcuuucuacccagcgagcc

SEQ ID NO: 2985283 - RNA, 22 nt, Human
gcuccuaggacccgucuccagc

SEQ ID NO: 2985284 - RNA, 21 nt, Human
gcuccuaggacccgucuccag

SEQ ID NO: 2985285 - RNA, 19 nt, Human
gcucgagcaugccuggaug

SEQ ID NO: 2985286 - RNA, 21 nt, Human
gcucgagcaugccuggauggg

SEQ ID NO: 2985287 - RNA, 17 nt, Human
gcucgagcaugccugga

SEQ ID NO: 2985288 - RNA, 17 nt, Human
gcuccuuuagcgcccag

SEQ ID NO: 2985289 - RNA, 13 nt, Human
gcuccuucugucc

SEQ ID NO: 2985290 - RNA, 13 nt, Human
gcuccugugucuu

SEQ ID NO: 2985291 - RNA, 12 nt, Human
gcuccugugucu

SEQ ID NO: 2985292 - RNA, 21 nt, Human
gcuauaggugcuacaaaaaca

SEQ ID NO: 2985293 - RNA, 19 nt, Human
gcuauaggugcuacaaaaa

SEQ ID NO: 2985294 - RNA, 19 nt, Human
gcggugcuaucucccccag

SEQ ID NO: 2985295 - RNA, 22 nt, Human
gcggugcuaucucccccagccc

SEQ ID NO: 2985296 - RNA, 13 nt, Human
gcuagauguaugu

SEQ ID NO: 2985297 - RNA, 14 nt, Human
gcuagauguaugua

SEQ ID NO: 2985298 - RNA, 21 nt, Human
gcuaguugggcuuccucauag

SEQ ID NO: 2985299 - RNA, 22 nt, Human
gcucaaguccucuuuucugaga

SEQ ID NO: 2985300 - RNA, 19 nt, Human
gcucaaguccucuuuucug

SEQ ID NO: 2985301 - RNA, 23 nt, Human
gcucaauagauugcucaaaucag

SEQ ID NO: 2985302 - RNA, 13 nt, Human
gcuaucuccccca

SEQ ID NO: 2985303 - RNA, 18 nt, Human
gcucaaguccucuuuucu

SEQ ID NO: 2985304 - RNA, 14 nt, Human
gcuaucucccccag

SEQ ID NO: 2985305 - RNA, 15 nt, Human
gcucaccagccccag

SEQ ID NO: 2985306 - RNA, 14 nt, Human
gcucaccagcccca

SEQ ID NO: 2985307 - RNA, 13 nt, Human
gcucaccagcccc

SEQ ID NO: 2985308 - RNA, 12 nt, Human
gcucaccagccc

SEQ ID NO: 2985309 - RNA, 16 nt, Human
gcucacauaucuguca

SEQ ID NO: 2985310 - RNA, 14 nt, Human
gcucaccucucccu

SEQ ID NO: 2985311 - RNA, 16 nt, Human
gcucaccucucccuug

SEQ ID NO: 2985312 - RNA, 17 nt, Human
gcucaccucucccuugg

SEQ ID NO: 2985313 - RNA, 18 nt, Human
gcucaccucucccuugga

SEQ ID NO: 2985314 - RNA, 23 nt, Human
gcucagcggggacagcuccuucu

SEQ ID NO: 2985315 - RNA, 18 nt, Human
gcucagcggggacagcuc

SEQ ID NO: 2985316 - RNA, 17 nt, Human
gcucagcggggacagcu

SEQ ID NO: 2985317 - RNA, 16 nt, Human
gcucagcggggacagc

SEQ ID NO: 2985318 - RNA, 14 nt, Human
gcugaccuugcuga

SEQ ID NO: 2985319 - RNA, 22 nt, Human
gcugacuguuuucucuugagag

SEQ ID NO: 2985320 - RNA, 19 nt, Human
gcugacagacacaggcccg

SEQ ID NO: 2985321 - RNA, 18 nt, Human
gcugacagacacaggccc

SEQ ID NO: 2985322 - RNA, 17 nt, Human
gcugacagacacaggcc

SEQ ID NO: 2985323 - RNA, 21 nt, Human
gcucucaggccagcugcuugg

SEQ ID NO: 2985324 - RNA, 20 nt, Human
gcucucaggccagcugcuug

SEQ ID NO: 2985325 - RNA, 19 nt, Human
gcugauuuaaacacauuaa

SEQ ID NO: 2985326 - RNA, 23 nt, Human
gcugcaaaggguaucaggugcug

SEQ ID NO: 2985327 - RNA, 22 nt, Human
gcugcaaaggguaucaggugcu

SEQ ID NO: 2985328 - RNA, 21 nt, Human
gcugauuaaaccaaggcuaga

SEQ ID NO: 2985329 - RNA, 15 nt, Human
gcugaucgcuucucc

SEQ ID NO: 2985330 - RNA, 12 nt, Human
gcugcccucucc

SEQ ID NO: 2985331 - RNA, 13 nt, Human
gcugccaccugcc

SEQ ID NO: 2985332 - RNA, 12 nt, Human
gcugccaccugc

SEQ ID NO: 2985333 - RNA, 20 nt, Human
gcugccaaugggagcucaug

SEQ ID NO: 2985334 - RNA, 18 nt, Human
gcugcauuuaaaagauac

SEQ ID NO: 2985335 - RNA, 17 nt, Human
gcugcauuuaaaagaua

SEQ ID NO: 2985336 - RNA, 19 nt, Human
gcugcauuuaaaagauaca

SEQ ID NO: 2985337 - RNA, 13 nt, Human
gcugcaguugcca

SEQ ID NO: 2985338 - RNA, 14 nt, Human
gcugcaguugccag

SEQ ID NO: 2985339 - RNA, 22 nt, Human
gcugcccucuccugggcagcug

SEQ ID NO: 2985340 - RNA, 20 nt, Human
gcugcccucuccugggcagc

SEQ ID NO: 2985341 - RNA, 18 nt, Human
gcugcccucuccugggca

SEQ ID NO: 2985342 - RNA, 17 nt, Human
gcugcccucuccugggc

SEQ ID NO: 2985343 - RNA, 16 nt, Human
gcugcccucuccuggg

SEQ ID NO: 2985344 - RNA, 15 nt, Human
gcugcccucuccugg

SEQ ID NO: 2985345 - RNA, 14 nt, Human
gcugcccucuccug

SEQ ID NO: 2985346 - RNA, 13 nt, Human
gcugcccucuccu

SEQ ID NO: 2985347 - RNA, 13 nt, Human
gcugcccugccca

SEQ ID NO: 2985348 - RNA, 14 nt, Human
gcugcccugcccac

SEQ ID NO: 2985349 - RNA, 12 nt, Human
gcugcccugccc

SEQ ID NO: 2985350 - RNA, 23 nt, Human
gcugcccucuccugggcagcugc

SEQ ID NO: 2985351 - RNA, 16 nt, Human
gcugcccugcccaccu

SEQ ID NO: 2985352 - RNA, 18 nt, Human
gcugcccugcccaccugg

SEQ ID NO: 2985353 - RNA, 20 nt, Human
gcugcccugcccaccuggcc

SEQ ID NO: 2985354 - RNA, 21 nt, Human
gcugcccugcccaccuggccu

SEQ ID NO: 2985355 - RNA, 22 nt, Human
gcugcccugcccaccuggccuc

SEQ ID NO: 2985356 - RNA, 23 nt, Human
gcugcccugcccaccuggccucu

SEQ ID NO: 2985357 - RNA, 24 nt, Human
gcugcccugcccaccuggccucug

SEQ ID NO: 2985358 - RNA, 19 nt, Human
gcugccuguucagcuccag

SEQ ID NO: 2985359 - RNA, 18 nt, Human
gcugccuguucagcucca

SEQ ID NO: 2985360 - RNA, 22 nt, Human
gcugccuguucagcuccagcuc

SEQ ID NO: 2985361 - RNA, 20 nt, Human
gcugccuguucagcuccagc

SEQ ID NO: 2985362 - RNA, 15 nt, Human
gcugcgguccaccca

SEQ ID NO: 2985363 - RNA, 14 nt, Human
gcugcgguccaccc

SEQ ID NO: 2985364 - RNA, 21 nt, Human
gcugcgguccacccaggagcc

SEQ ID NO: 2985365 - RNA, 19 nt, Human
gcugcgguccacccaggag

SEQ ID NO: 2985366 - RNA, 22 nt, Human
gcugcgguccacccaggagccc

SEQ ID NO: 2985367 - RNA, 15 nt, Human
gcuggaccuugaacu

SEQ ID NO: 2985368 - RNA, 21 nt, Human
gcuggaaaaguauguuagugc

SEQ ID NO: 2985369 - RNA, 23 nt, Human
gcuggaaaaguauguuagugcaa

SEQ ID NO: 2985370 - RNA, 22 nt, Human
gcugcuuuugucuaugggacuc

SEQ ID NO: 2985371 - RNA, 22 nt, Human
gcuuacaugccuaccaauauuu

SEQ ID NO: 2985372 - RNA, 15 nt, Human
gcugugucucccuuc

SEQ ID NO: 2985373 - RNA, 15 nt, Human
gcuggugucaccuga

SEQ ID NO: 2985374 - RNA, 14 nt, Human
gcuggugucaccug

SEQ ID NO: 2985375 - RNA, 17 nt, Human
gcugucagccauuccug

SEQ ID NO: 2985376 - RNA, 23 nt, Human
gcugucccuuacgugaguccugg

SEQ ID NO: 2985377 - RNA, 22 nt, Human
gcugucccuuacgugaguccug

SEQ ID NO: 2985378 - RNA, 16 nt, Human
gcugucccuuuuccuu

SEQ ID NO: 2985379 - RNA, 23 nt, Human
gcuggucccagccagcaguucag

SEQ ID NO: 2985380 - RNA, 13 nt, Human
gcugggggccuca

SEQ ID NO: 2985381 - RNA, 18 nt, Human
gcugggggccucagugcc

SEQ ID NO: 2985382 - RNA, 15 nt, Human
gcugggggccucagu

SEQ ID NO: 2985383 - RNA, 14 nt, Human
gcugggggccucag

SEQ ID NO: 2985384 - RNA, 20 nt, Human
gcugggcuucaguggcagcu

SEQ ID NO: 2985385 - RNA, 22 nt, Human
gcugggcuucaguggcagcugc

SEQ ID NO: 2985386 - RNA, 21 nt, Human
gcugggcuucaguggcagcug

SEQ ID NO: 2985387 - RNA, 13 nt, Human
gcuggccuggccc

SEQ ID NO: 2985388 - RNA, 12 nt, Human
gcuggccuggcc

SEQ ID NO: 2985389 - RNA, 14 nt, Human
gcuggccuggcccc

SEQ ID NO: 2985390 - RNA, 15 nt, Human
gcuggccuggccccu

SEQ ID NO: 2985391 - RNA, 19 nt, Human
gcugggaugauuggagggg

SEQ ID NO: 2985392 - RNA, 21 nt, Human
gcugggcucccuucccaccuc

SEQ ID NO: 2985393 - RNA, 16 nt, Human
gcuuagacccucaugc

SEQ ID NO: 2985394 - RNA, 21 nt, Human
gcuuagacccucaugcugcca

SEQ ID NO: 2985395 - RNA, 19 nt, Human
gcuuagaaauaacagaaga

SEQ ID NO: 2985396 - RNA, 12 nt, Human
gcuuagaaauaa

SEQ ID NO: 2985397 - RNA, 20 nt, Human
gcuuauacacuuacacuuua

SEQ ID NO: 2985398 - RNA, 20 nt, Human
gcuucaguggcagcugcuuu

SEQ ID NO: 2985399 - RNA, 19 nt, Human
gcuucaguggcagcugcuu

SEQ ID NO: 2985400 - RNA, 21 nt, Human
gcuucauccuccucagaucuu

SEQ ID NO: 2985401 - RNA, 19 nt, Human
gcuucuguuuuauaauuuu

SEQ ID NO: 2985402 - RNA, 18 nt, Human
gcuucauuuccugugucu

SEQ ID NO: 2985403 - RNA, 22 nt, Human
gcuucucacugccaugccagcu

SEQ ID NO: 2985404 - RNA, 17 nt, Human
gcuucucacugccaugc

SEQ ID NO: 2985405 - RNA, 18 nt, Human
gcuugcccuguuaaaaga

SEQ ID NO: 2985406 - RNA, 22 nt, Human
gcagaguaggggucugucuuuu

SEQ ID NO: 2985407 - RNA, 23 nt, Human
gcagagguugcagugagccgaga

SEQ ID NO: 2985408 - RNA, 18 nt, Human
gcagagguugcagugagc

SEQ ID NO: 2985409 - RNA, 13 nt, Human
gcagcagacacau

SEQ ID NO: 2985410 - RNA, 17 nt, Human
gcagcagacacaugcca

SEQ ID NO: 2985411 - RNA, 18 nt, Human
gcagauggagaccccuug

SEQ ID NO: 2985412 - RNA, 22 nt, Human
gcagagaccaucccugaaggcc

SEQ ID NO: 2985413 - RNA, 20 nt, Human
gcagagaccaucccugaagg

SEQ ID NO: 2985414 - RNA, 21 nt, Human
gcagagaccaucccugaaggc

SEQ ID NO: 2985415 - RNA, 19 nt, Human
gcagagaccaucccugaag

SEQ ID NO: 2985416 - RNA, 22 nt, Human
gcagacucuacagaggccaugg

SEQ ID NO: 2985417 - RNA, 19 nt, Human
gcagacucuacagaggcca

SEQ ID NO: 2985418 - RNA, 18 nt, Human
gcagacucuacagaggcc

SEQ ID NO: 2985419 - RNA, 17 nt, Human
gcagacucuacagaggc

SEQ ID NO: 2985420 - RNA, 16 nt, Human
gcacuugcagacucua

SEQ ID NO: 2985421 - RNA, 14 nt, Human
gcacuugcagacuc

SEQ ID NO: 2985422 - RNA, 22 nt, Human
gcacuucgggaggucgaggcag

SEQ ID NO: 2985423 - RNA, 16 nt, Human
gcaggaagcugugaga

SEQ ID NO: 2985424 - RNA, 18 nt, Human
gcagcucagagagggugg

SEQ ID NO: 2985425 - RNA, 19 nt, Human
gcagcucagagaggguggg

SEQ ID NO: 2985426 - RNA, 17 nt, Human
gcagcucaccucucccu

SEQ ID NO: 2985427 - RNA, 20 nt, Human
gcagcucaccucucccuugg

SEQ ID NO: 2985428 - RNA, 21 nt, Human
gcagcucaccucucccuugga

SEQ ID NO: 2985429 - RNA, 14 nt, Human
gcagcucagagagg

SEQ ID NO: 2985430 - RNA, 16 nt, Human
gcagcucaccucuccc

SEQ ID NO: 2985431 - RNA, 18 nt, Human
gcagcagggagggcuucu

SEQ ID NO: 2985432 - RNA, 19 nt, Human
gcagcagggagggcuucug

SEQ ID NO: 2985433 - RNA, 19 nt, Human
gcagccucacaguccuuac

SEQ ID NO: 2985434 - RNA, 15 nt, Human
gcagccucacagucc

SEQ ID NO: 2985435 - RNA, 17 nt, Human
gcagccucacaguccuu

SEQ ID NO: 2985436 - RNA, 15 nt, Human
gcacgcacacugucu

SEQ ID NO: 2985437 - RNA, 16 nt, Human
gcacgcacacugucug

SEQ ID NO: 2985438 - RNA, 16 nt, Human
gcacccucaggcaggu

SEQ ID NO: 2985439 - RNA, 19 nt, Human
gcacccucaggcagguggg

SEQ ID NO: 2985440 - RNA, 14 nt, Human
gcacgugugugcac

SEQ ID NO: 2985441 - RNA, 20 nt, Human
gcacuaaggugugcucugau

SEQ ID NO: 2985442 - RNA, 19 nt, Human
gcacuaaggugugcucuga

SEQ ID NO: 2985443 - RNA, 19 nt, Human
gcacuguggguagacacac

SEQ ID NO: 2985444 - RNA, 19 nt, Human
gcacuguuuuauuuuaauu

SEQ ID NO: 2985445 - RNA, 12 nt, Human
gcacugggcuug

SEQ ID NO: 2985446 - RNA, 12 nt, Human
gcacugcuucca

SEQ ID NO: 2985447 - RNA, 13 nt, Human
gcacugcuuccag

SEQ ID NO: 2985448 - RNA, 14 nt, Human
gcacugcuuccagu

SEQ ID NO: 2985449 - RNA, 15 nt, Human
gcacugcuuccagug

SEQ ID NO: 2985450 - RNA, 15 nt, Human
gcacuauaauguaag

SEQ ID NO: 2985451 - RNA, 14 nt, Human
gcacuauaauguaa

SEQ ID NO: 2985452 - RNA, 20 nt, Human
gcacuauaauguaagcucua

SEQ ID NO: 2985453 - RNA, 22 nt, Human
gcacagcaggcugccagugccu

SEQ ID NO: 2985454 - RNA, 18 nt, Human
gcacagcaggcugccagu

SEQ ID NO: 2985455 - RNA, 23 nt, Human
gcacagcaggcugccagugccug

SEQ ID NO: 2985456 - RNA, 17 nt, Human
gcacagcaggcugccag

SEQ ID NO: 2985457 - RNA, 15 nt, Human
gcacagccucuuaga

SEQ ID NO: 2985458 - RNA, 20 nt, Human
gauugugucucuugguccug

SEQ ID NO: 2985459 - RNA, 12 nt, Human
gcacagcaggcu

SEQ ID NO: 2985460 - RNA, 21 nt, Human
gcacagcuucauuuccugugu

SEQ ID NO: 2985461 - RNA, 23 nt, Human
gcacagcuucauuuccugugucu

SEQ ID NO: 2985462 - RNA, 17 nt, Human
gcaccaucucuccuccu

SEQ ID NO: 2985463 - RNA, 14 nt, Human
gcaccaucucuccu

SEQ ID NO: 2985464 - RNA, 15 nt, Human
gcaccaucucuccuc

SEQ ID NO: 2985465 - RNA, 13 nt, Human
gcaccagcagccu

SEQ ID NO: 2985466 - RNA, 21 nt, Human
gcauacuauuaaacaugcugu

SEQ ID NO: 2985467 - RNA, 17 nt, Human
gcauacuauuaaacaug

SEQ ID NO: 2985468 - RNA, 14 nt, Human
gcauacuauuaaac

SEQ ID NO: 2985469 - RNA, 13 nt, Human
gcauacuauuaaa

SEQ ID NO: 2985470 - RNA, 18 nt, Human
gcauacguacacauuuua

SEQ ID NO: 2985471 - RNA, 19 nt, Human
gcauacguacacauuuuau

SEQ ID NO: 2985472 - RNA, 21 nt, Human
gcaguugaaaagacuccaaag

SEQ ID NO: 2985473 - RNA, 16 nt, Human
gcaguugaaaagacuc

SEQ ID NO: 2985474 - RNA, 19 nt, Human
gcaguugaaaagacuccaa

SEQ ID NO: 2985475 - RNA, 15 nt, Human
gcaguugaaaagacu

SEQ ID NO: 2985476 - RNA, 21 nt, Human
gcaguggugguuuucuguucu

SEQ ID NO: 2985477 - RNA, 20 nt, Human
gcaguggugguuuucuguuc

SEQ ID NO: 2985478 - RNA, 23 nt, Human
gcaguucagagcugcccucuccu

SEQ ID NO: 2985479 - RNA, 22 nt, Human
gcaguucagagcugcccucucc

SEQ ID NO: 2985480 - RNA, 20 nt, Human
gcaguucagagcugcccucu

SEQ ID NO: 2985481 - RNA, 19 nt, Human
gcaguucagagcugcccuc

SEQ ID NO: 2985482 - RNA, 21 nt, Human
gcaguggugcgaucuggguuc

SEQ ID NO: 2985483 - RNA, 20 nt, Human
gcaguggugcgaucuggguu

SEQ ID NO: 2985484 - RNA, 19 nt, Human
gcaguggugguuuucuguu

SEQ ID NO: 2985485 - RNA, 22 nt, Human
gcaguggugcgaucuggguuca

SEQ ID NO: 2985486 - RNA, 19 nt, Human
gcaguggugcgaucugggu

SEQ ID NO: 2985487 - RNA, 18 nt, Human
gcaguggugcgaucuggg

SEQ ID NO: 2985488 - RNA, 11 nt, Human
gcagugggagc

SEQ ID NO: 2985489 - RNA, 22 nt, Human
gcaggggaggguagagcggaga

SEQ ID NO: 2985490 - RNA, 19 nt, Human
gcaggguccuagaaauucc

SEQ ID NO: 2985491 - RNA, 16 nt, Human
gcagggucucacucug

SEQ ID NO: 2985492 - RNA, 22 nt, Human
gcagggcucagcggggacagcu

SEQ ID NO: 2985493 - RNA, 18 nt, Human
gcaggcagccaggccaca

SEQ ID NO: 2985494 - RNA, 17 nt, Human
gcaggcagccaggccac

SEQ ID NO: 2985495 - RNA, 22 nt, Human
gcauacugccuuguuuaauggu

SEQ ID NO: 2985496 - RNA, 22 nt, Human
gcaucagcugcugaaacaacaa

SEQ ID NO: 2985497 - RNA, 12 nt, Human
gcaucaggccag

SEQ ID NO: 2985498 - RNA, 23 nt, Human
gcaucagcugcugaaacaacaaa

SEQ ID NO: 2985499 - RNA, 18 nt, Human
gcaucaggccaggcccuc

SEQ ID NO: 2985500 - RNA, 23 nt, Human
gcaucaggccaggcccucugccc

SEQ ID NO: 2985501 - RNA, 20 nt, Human
gcaucuagcaugucgucaaa

SEQ ID NO: 2985502 - RNA, 20 nt, Human
gcaugacacgaauauugcug

SEQ ID NO: 2985503 - RNA, 21 nt, Human
gcaugacacgaauauugcuga

SEQ ID NO: 2985504 - RNA, 22 nt, Human
gcaugacacgaauauugcugau

SEQ ID NO: 2985505 - RNA, 22 nt, Human
gcaugaaguaauaugcacacau

SEQ ID NO: 2985506 - RNA, 21 nt, Human
gcaugaaguaauaugcacaca

SEQ ID NO: 2985507 - RNA, 20 nt, Human
gcaugaaguaauaugcacac

SEQ ID NO: 2985508 - RNA, 13 nt, Human
gcauguuacauaa

SEQ ID NO: 2985509 - RNA, 14 nt, Human
gcaugccuggaugg

SEQ ID NO: 2985510 - RNA, 24 nt, Human
gcauuaucuagauacuguaucaug

SEQ ID NO: 2985511 - RNA, 22 nt, Human
gcauuaucuagauacuguauca

SEQ ID NO: 2985512 - RNA, 19 nt, Human
gcauuaucuagauacugua

SEQ ID NO: 2985513 - RNA, 12 nt, Human
gcauuccccagg

SEQ ID NO: 2985514 - RNA, 14 nt, Human
gcauuccccaggag

SEQ ID NO: 2985515 - RNA, 15 nt, Human
gcauuccccaggagg

SEQ ID NO: 2985516 - RNA, 16 nt, Human
gcauuccccaggaggc

SEQ ID NO: 2985517 - RNA, 17 nt, Human
gcauuccccaggaggcc

SEQ ID NO: 2985518 - RNA, 18 nt, Human
gcauuccccaggaggcca

SEQ ID NO: 2985519 - RNA, 19 nt, Human
gcauuccccaggaggccag

SEQ ID NO: 2985520 - RNA, 20 nt, Human
gcauuccccaggaggccagc

SEQ ID NO: 2985521 - RNA, 21 nt, Human
gcauuccccaggaggccagcc

SEQ ID NO: 2985522 - RNA, 22 nt, Human
gcauuccccaggaggccagccu

SEQ ID NO: 2985523 - RNA, 18 nt, Human
gcauuugaggucuguucu

SEQ ID NO: 2985524 - RNA, 12 nt, Human
gccaauuugcac

SEQ ID NO: 2985525 - RNA, 16 nt, Human
gccacaagacccuugu

SEQ ID NO: 2985526 - RNA, 22 nt, Human
gccacaagacccuugugguccc

SEQ ID NO: 2985527 - RNA, 20 nt, Human
gccacagagaaaguacuucu

SEQ ID NO: 2985528 - RNA, 14 nt, Human
gccacagagaaagu

SEQ ID NO: 2985529 - RNA, 13 nt, Human
gccacagagaaag

SEQ ID NO: 2985530 - RNA, 19 nt, Human
gccacaccucuaucccggc

SEQ ID NO: 2985531 - RNA, 23 nt, Human
gccacagagaaaguacuucucca

SEQ ID NO: 2985532 - RNA, 14 nt, Human
gccaauauccuaau

SEQ ID NO: 2985533 - RNA, 15 nt, Human
gccaauauccuaaua

SEQ ID NO: 2985534 - RNA, 16 nt, Human
gccaauauccuaauaa

SEQ ID NO: 2985535 - RNA, 17 nt, Human
gccaauauccuaauaaa

SEQ ID NO: 2985536 - RNA, 13 nt, Human
gccaauauccuaa

SEQ ID NO: 2985537 - RNA, 18 nt, Human
gccaauauccuaauaaaa

SEQ ID NO: 2985538 - RNA, 19 nt, Human
gccaauauccuaauaaaaa

SEQ ID NO: 2985539 - RNA, 20 nt, Human
gccaauauccuaauaaaaag

SEQ ID NO: 2985540 - RNA, 22 nt, Human
gccaauauccuaauaaaaaggu

SEQ ID NO: 2985541 - RNA, 23 nt, Human
gccaauauccuaauaaaaaggug

SEQ ID NO: 2985542 - RNA, 21 nt, Human
gccaaugcuacaguaauaaau

SEQ ID NO: 2985543 - RNA, 23 nt, Human
gcauuuggugguuucagaaaugu

SEQ ID NO: 2985544 - RNA, 22 nt, Human
gcauuuggugguuucagaaaug

SEQ ID NO: 2985545 - RNA, 20 nt, Human
gcauuugaggucuguucuuu

SEQ ID NO: 2985546 - RNA, 19 nt, Human
gcauuugaggucuguucuu

SEQ ID NO: 2985547 - RNA, 21 nt, Human
gccaaggcugggggaagaagc

SEQ ID NO: 2985548 - RNA, 23 nt, Human
gccaaggugggaggauugcuuga

SEQ ID NO: 2985549 - RNA, 14 nt, Human
gccaaggugggagg

SEQ ID NO: 2985550 - RNA, 15 nt, Human
gccaaggugggagga

SEQ ID NO: 2985551 - RNA, 15 nt, Human
gccagacuggcacag

SEQ ID NO: 2985552 - RNA, 18 nt, Human
gccagacuggcacaguuu

SEQ ID NO: 2985553 - RNA, 23 nt, Human
gccacuacauuugcuccauccuc

SEQ ID NO: 2985554 - RNA, 17 nt, Human
gccagagacacaagccu

SEQ ID NO: 2985555 - RNA, 19 nt, Human
gccagagacacaagccuuc

SEQ ID NO: 2985556 - RNA, 16 nt, Human
gccagagacacaagcc

SEQ ID NO: 2985557 - RNA, 19 nt, Human
gccagacuggcacaguuuu

SEQ ID NO: 2985558 - RNA, 20 nt, Human
gccagagacacaagccuucg

SEQ ID NO: 2985559 - RNA, 10 nt, Human
gccagaggag

SEQ ID NO: 2985560 - RNA, 18 nt, Human
gccagaugcaccagcccu

SEQ ID NO: 2985561 - RNA, 17 nt, Human
gccagaugcaccagccc

SEQ ID NO: 2985562 - RNA, 16 nt, Human
gccagaugcaccagcc

SEQ ID NO: 2985563 - RNA, 23 nt, Human
gccagagggagugacagaggcag

SEQ ID NO: 2985564 - RNA, 12 nt, Human
gccagaggagag

SEQ ID NO: 2985565 - RNA, 13 nt, Human
gccagaggagaga

SEQ ID NO: 2985566 - RNA, 15 nt, Human
gccagaggagagagg

SEQ ID NO: 2985567 - RNA, 17 nt, Human
gccagaggagagaggac

SEQ ID NO: 2985568 - RNA, 19 nt, Human
gccagaggagagaggaccc

SEQ ID NO: 2985569 - RNA, 22 nt, Human
gccagaggagagaggacccccu

SEQ ID NO: 2985570 - RNA, 22 nt, Human
gccagagggagugacagaggca

SEQ ID NO: 2985571 - RNA, 21 nt, Human
gccagagggagugacagaggc

SEQ ID NO: 2985572 - RNA, 17 nt, Human
gccaccugccuguuggg

SEQ ID NO: 2985573 - RNA, 13 nt, Human
gccaccgccuugc

SEQ ID NO: 2985574 - RNA, 20 nt, Human
gccaccgccuugcccagccu

SEQ ID NO: 2985575 - RNA, 16 nt, Human
gccaccgccuugccca

SEQ ID NO: 2985576 - RNA, 14 nt, Human
gccaccugcggugc

SEQ ID NO: 2985577 - RNA, 20 nt, Human
gccaccugcggugcuaucuc

SEQ ID NO: 2985578 - RNA, 22 nt, Human
gccaccugcggugcuaucuccc

SEQ ID NO: 2985579 - RNA, 19 nt, Human
gccacggccaggccagagg

SEQ ID NO: 2985580 - RNA, 17 nt, Human
gccacggccaggccaga

SEQ ID NO: 2985581 - RNA, 18 nt, Human
gccacggccaggccagag

SEQ ID NO: 2985582 - RNA, 20 nt, Human
gcccagagggccugcaaggg

SEQ ID NO: 2985583 - RNA, 21 nt, Human
gcccagagggccugcaaggga

SEQ ID NO: 2985584 - RNA, 22 nt, Human
gcccagagggccugcaagggag

SEQ ID NO: 2985585 - RNA, 11 nt, Human
gcccagccccu

SEQ ID NO: 2985586 - RNA, 12 nt, Human
gcccagccccuu

SEQ ID NO: 2985587 - RNA, 9 nt, Human
gcccagccc

SEQ ID NO: 2985588 - RNA, 14 nt, Human
gcccagagggccug

SEQ ID NO: 2985589 - RNA, 15 nt, Human
gcccagagggccugc

SEQ ID NO: 2985590 - RNA, 18 nt, Human
gcccagagggccugcaag

SEQ ID NO: 2985591 - RNA, 19 nt, Human
gcccagagggccugcaagg

SEQ ID NO: 2985592 - RNA, 12 nt, Human
gcccagagggcc

SEQ ID NO: 2985593 - RNA, 21 nt, Human
gcccaaugcacuuuguucugg

SEQ ID NO: 2985594 - RNA, 18 nt, Human
gcccaggaaaggcuccag

SEQ ID NO: 2985595 - RNA, 19 nt, Human
gcccaggaaaggcuccagg

SEQ ID NO: 2985596 - RNA, 20 nt, Human
gcccaggaaaggcuccagga

SEQ ID NO: 2985597 - RNA, 21 nt, Human
gcccaggaaaggcuccaggag

SEQ ID NO: 2985598 - RNA, 20 nt, Human
gcccaggcuggcgugcagug

SEQ ID NO: 2985599 - RNA, 19 nt, Human
gcccaggcuggcgugcagu

SEQ ID NO: 2985600 - RNA, 22 nt, Human
gcccaggcuggcgugcaguggu

SEQ ID NO: 2985601 - RNA, 19 nt, Human
gcccaggcuuagucacuga

SEQ ID NO: 2985602 - RNA, 21 nt, Human
gcccaggcuuagucacugaga

SEQ ID NO: 2985603 - RNA, 23 nt, Human
gcccaggcuuagucacugagaca

SEQ ID NO: 2985604 - RNA, 19 nt, Human
gcccagucuggaaugcagu

SEQ ID NO: 2985605 - RNA, 15 nt, Human
gcccaguugggugga

SEQ ID NO: 2985606 - RNA, 13 nt, Human
gcccagccccuuc

SEQ ID NO: 2985607 - RNA, 14 nt, Human
gcccagccccuucu

SEQ ID NO: 2985608 - RNA, 16 nt, Human
gcccagccccuucuga

SEQ ID NO: 2985609 - RNA, 17 nt, Human
gcccagccccuucugac

SEQ ID NO: 2985610 - RNA, 20 nt, Human
gcccagccccuucugaccca

SEQ ID NO: 2985611 - RNA, 24 nt, Human
gcccagccccuucugacccaugcu

SEQ ID NO: 2985612 - RNA, 16 nt, Human
gcccagccuggaugcc

SEQ ID NO: 2985613 - RNA, 14 nt, Human
gcccagccuggaug

SEQ ID NO: 2985614 - RNA, 22 nt, Human
gccaugggacagggaggacgcu

SEQ ID NO: 2985615 - RNA, 23 nt, Human
gccaugggacagggaggacgcuc

SEQ ID NO: 2985616 - RNA, 16 nt, Human
gccauuuguguuuaua

SEQ ID NO: 2985617 - RNA, 18 nt, Human
gccaugagccgcccaagg

SEQ ID NO: 2985618 - RNA, 21 nt, Human
gccaugagccgcccaaggccu

SEQ ID NO: 2985619 - RNA, 19 nt, Human
gccaugagccgcccaaggc

SEQ ID NO: 2985620 - RNA, 18 nt, Human
gccaugaggaacaaggca

SEQ ID NO: 2985621 - RNA, 13 nt, Human
gccaugccagcuu

SEQ ID NO: 2985622 - RNA, 18 nt, Human
gccaugccagcuuaucuc

SEQ ID NO: 2985623 - RNA, 19 nt, Human
gccaugccagcuuaucuca

SEQ ID NO: 2985624 - RNA, 24 nt, Human
gccaugcuccuggcccacugcauc

SEQ ID NO: 2985625 - RNA, 12 nt, Human
gccagugccugg

SEQ ID NO: 2985626 - RNA, 13 nt, Human
gccagugccuggg

SEQ ID NO: 2985627 - RNA, 14 nt, Human
gccagugccugggu

SEQ ID NO: 2985628 - RNA, 23 nt, Human
gccauccuggcccagggcaucug

SEQ ID NO: 2985629 - RNA, 23 nt, Human
gccagggacagaggggguggccu

SEQ ID NO: 2985630 - RNA, 16 nt, Human
gccagggacagagggg

SEQ ID NO: 2985631 - RNA, 18 nt, Human
gccagggacagagggggu

SEQ ID NO: 2985632 - RNA, 13 nt, Human
gccagggacagag

SEQ ID NO: 2985633 - RNA, 16 nt, Human
gccagauuucacucuc

SEQ ID NO: 2985634 - RNA, 18 nt, Human
gccagauuucacucuccu

SEQ ID NO: 2985635 - RNA, 21 nt, Human
gccagauuucacucuccuugg

SEQ ID NO: 2985636 - RNA, 21 nt, Human
gccagggccaugucagacaca

SEQ ID NO: 2985637 - RNA, 17 nt, Human
gccagucaccccggcca

SEQ ID NO: 2985638 - RNA, 18 nt, Human
gccagucaccccggccac

SEQ ID NO: 2985639 - RNA, 20 nt, Human
gccagucaccccggccaccu

SEQ ID NO: 2985640 - RNA, 17 nt, Human
gccagguuuuuggucug

SEQ ID NO: 2985641 - RNA, 17 nt, Human
gaguuauugaagcagag

SEQ ID NO: 2985642 - RNA, 23 nt, Human
gaguucaucuugaauuguaagga

SEQ ID NO: 2985643 - RNA, 17 nt, Human
gagugugccugaagucc

SEQ ID NO: 2985644 - RNA, 21 nt, Human
gaguugaaaaucuuauaauuu

SEQ ID NO: 2985645 - RNA, 13 nt, Human
gaguucugguucc

SEQ ID NO: 2985646 - RNA, 19 nt, Human
gagugaacaaauuuacaga

SEQ ID NO: 2985647 - RNA, 22 nt, Human
gagugaacaaauuuacagagac

SEQ ID NO: 2985648 - RNA, 23 nt, Human
gagugggggaucacagccucuga

SEQ ID NO: 2985649 - RNA, 12 nt, Human
gagugggcccaa

SEQ ID NO: 2985650 - RNA, 19 nt, Human
gagugucuuaauuaaaaga

SEQ ID NO: 2985651 - RNA, 17 nt, Human
gauacaaaagcauguga

SEQ ID NO: 2985652 - RNA, 17 nt, Human
gauagcacagacccugc

SEQ ID NO: 2985653 - RNA, 18 nt, Human
gauagcacagacccugcc

SEQ ID NO: 2985654 - RNA, 18 nt, Human
gauacaaugcugugcccu

SEQ ID NO: 2985655 - RNA, 13 nt, Human
gauacaaugcugu

SEQ ID NO: 2985656 - RNA, 16 nt, Human
gauagcacagacccug

SEQ ID NO: 2985657 - RNA, 12 nt, Human
gauagccaaggc

SEQ ID NO: 2985658 - RNA, 19 nt, Human
gauagcacagacccugccc

SEQ ID NO: 2985659 - RNA, 13 nt, Human
gauagcagggcau

SEQ ID NO: 2985660 - RNA, 13 nt, Human
gauagccaaggcc

SEQ ID NO: 2985661 - RNA, 22 nt, Human
gaucaaccccuucgcuccugug

SEQ ID NO: 2985662 - RNA, 21 nt, Human
gaucaaccccuucgcuccugu

SEQ ID NO: 2985663 - RNA, 23 nt, Human
gauauaugcucugcauguuacau

SEQ ID NO: 2985664 - RNA, 14 nt, Human
gagguucccuuuga

SEQ ID NO: 2985665 - RNA, 19 nt, Human
gagguucaaagauauuuug

SEQ ID NO: 2985666 - RNA, 16 nt, Human
gagguuaaaaagaaaa

SEQ ID NO: 2985667 - RNA, 16 nt, Human
gaguacguugugcauu

SEQ ID NO: 2985668 - RNA, 19 nt, Human
gagguuuuaaaaaaauccc

SEQ ID NO: 2985669 - RNA, 20 nt, Human
gaguacguugugcauuuggu

SEQ ID NO: 2985670 - RNA, 15 nt, Human
gaguacuacaguccu

SEQ ID NO: 2985671 - RNA, 18 nt, Human
gaguacguugugcauuug

SEQ ID NO: 2985672 - RNA, 17 nt, Human
gaguacguugugcauuu

SEQ ID NO: 2985673 - RNA, 18 nt, Human
gaguacuacaguccuccc

SEQ ID NO: 2985674 - RNA, 19 nt, Human
gaguacuacaguccuccca

SEQ ID NO: 2985675 - RNA, 21 nt, Human
gaggugggauccuccaggugc

SEQ ID NO: 2985676 - RNA, 22 nt, Human
gaggugggauccuccaggugca

SEQ ID NO: 2985677 - RNA, 18 nt, Human
gaggugggauccuccagg

SEQ ID NO: 2985678 - RNA, 15 nt, Human
gaggggggagguggg

SEQ ID NO: 2985679 - RNA, 15 nt, Human
gaggggguggccucc

SEQ ID NO: 2985680 - RNA, 22 nt, Human
gaggggggaggugggauccucc

SEQ ID NO: 2985681 - RNA, 23 nt, Human
gagucucacuguugcccaggcug

SEQ ID NO: 2985682 - RNA, 22 nt, Human
gagucucacuguugcccaggcu

SEQ ID NO: 2985683 - RNA, 21 nt, Human
gagucugaaggcuggguucug

SEQ ID NO: 2985684 - RNA, 21 nt, Human
gagucucacuguugcccaggc

SEQ ID NO: 2985685 - RNA, 20 nt, Human
gagucucacuguugcccagg

SEQ ID NO: 2985686 - RNA, 19 nt, Human
gagucucacuguugcccag

SEQ ID NO: 2985687 - RNA, 17 nt, Human
gagucgaggacagggag

SEQ ID NO: 2985688 - RNA, 16 nt, Human
gagucgaggacaggga

SEQ ID NO: 2985689 - RNA, 12 nt, Human
gaguccccuguu

SEQ ID NO: 2985690 - RNA, 14 nt, Human
gaguccccuguuug

SEQ ID NO: 2985691 - RNA, 23 nt, Human
gaguccccuguuuguuucugaaa

SEQ ID NO: 2985692 - RNA, 14 nt, Human
gaguagcugggacu

SEQ ID NO: 2985693 - RNA, 12 nt, Human
gaguagcuggga

SEQ ID NO: 2985694 - RNA, 21 nt, Human
gagucccaccuuggcugcagg

SEQ ID NO: 2985695 - RNA, 18 nt, Human
gauugugccuaauguguu

SEQ ID NO: 2985696 - RNA, 13 nt, Human
gauugugccccug

SEQ ID NO: 2985697 - RNA, 20 nt, Human
gauuguccccgacccuugcc

SEQ ID NO: 2985698 - RNA, 15 nt, Human
gauuguccccgaccc

SEQ ID NO: 2985699 - RNA, 20 nt, Human
gauucuauguuaauauuuua

SEQ ID NO: 2985700 - RNA, 17 nt, Human
gauucuauguuaauauu

SEQ ID NO: 2985701 - RNA, 23 nt, Human
gauugacgggacuguugguauug

SEQ ID NO: 2985702 - RNA, 18 nt, Human
gauugcuugagcucagga

SEQ ID NO: 2985703 - RNA, 12 nt, Human
gauucagacagc

SEQ ID NO: 2985704 - RNA, 19 nt, Human
gauucaccuccuaaaacaa

SEQ ID NO: 2985705 - RNA, 22 nt, Human
gauucccaagcucugcuccucu

SEQ ID NO: 2985706 - RNA, 21 nt, Human
gauucccaagcucugcuccuc

SEQ ID NO: 2985707 - RNA, 15 nt, Human
gauucccugauuuaa

SEQ ID NO: 2985708 - RNA, 23 nt, Human
gauggugcaaugaccuuucaaua

SEQ ID NO: 2985709 - RNA, 20 nt, Human
gauggugcaaugaccuuuca

SEQ ID NO: 2985710 - RNA, 18 nt, Human
gaugggccaccgccuugc

SEQ ID NO: 2985711 - RNA, 16 nt, Human
gauguucugggacaca

SEQ ID NO: 2985712 - RNA, 14 nt, Human
gauguucugggaca

SEQ ID NO: 2985713 - RNA, 19 nt, Human
gauuaaauucuugcaaagu

SEQ ID NO: 2985714 - RNA, 12 nt, Human
gauuaaauucuu

SEQ ID NO: 2985715 - RNA, 15 nt, Human
gauguuuuccaugag

SEQ ID NO: 2985716 - RNA, 23 nt, Human
gauguuuuccaugaguccccugu

SEQ ID NO: 2985717 - RNA, 14 nt, Human
gauguuuuccauga

SEQ ID NO: 2985718 - RNA, 21 nt, Human
gauguuuuaaggaugcuugua

SEQ ID NO: 2985719 - RNA, 21 nt, Human
gauguucuuucacccuuuucu

SEQ ID NO: 2985720 - RNA, 19 nt, Human
gauuaaccacuucagcuga

SEQ ID NO: 2985721 - RNA, 21 nt, Human
gauuaaccacuucagcugacu

SEQ ID NO: 2985722 - RNA, 18 nt, Human
gauuaaccacuucagcug

SEQ ID NO: 2985723 - RNA, 19 nt, Human
gauucaacagguuuuccug

SEQ ID NO: 2985724 - RNA, 15 nt, Human
gaugacuguuuuuaa

SEQ ID NO: 2985725 - RNA, 22 nt, Human
gaugagaaagguugaagcacca

SEQ ID NO: 2985726 - RNA, 11 nt, Human
gaugagaaagg

SEQ ID NO: 2985727 - RNA, 18 nt, Human
gaugcaguucugaagaag

SEQ ID NO: 2985728 - RNA, 22 nt, Human
gaugcuagaacucccuuucaac

SEQ ID NO: 2985729 - RNA, 16 nt, Human
gaugggaaagcauugu

SEQ ID NO: 2985730 - RNA, 22 nt, Human
gaugggcaacccccagccugcu

SEQ ID NO: 2985731 - RNA, 13 nt, Human
gaucuuuaaaaua

SEQ ID NO: 2985732 - RNA, 14 nt, Human
gaucuuuaaaauac

SEQ ID NO: 2985733 - RNA, 16 nt, Human
gaucuuugcagacagg

SEQ ID NO: 2985734 - RNA, 15 nt, Human
gaugaaaaaauaaca

SEQ ID NO: 2985735 - RNA, 18 nt, Human
gauccucccaccucagcc

SEQ ID NO: 2985736 - RNA, 19 nt, Human
gaucgagaccauccuggcu

SEQ ID NO: 2985737 - RNA, 16 nt, Human
gaucgagaccauccug

SEQ ID NO: 2985738 - RNA, 13 nt, Human
gauccugagccag

SEQ ID NO: 2985739 - RNA, 14 nt, Human
gauccugagccaga

SEQ ID NO: 2985740 - RNA, 15 nt, Human
gauccugagccagau

SEQ ID NO: 2985741 - RNA, 19 nt, Human
gauccugagccagauuuca

SEQ ID NO: 2985742 - RNA, 20 nt, Human
gauccucccaccucagccuc

SEQ ID NO: 2985743 - RNA, 12 nt, Human
gauccuccaggu

SEQ ID NO: 2985744 - RNA, 19 nt, Human
gauccucccaccucagccu

SEQ ID NO: 2985745 - RNA, 11 nt, Human
gauccuccagg

SEQ ID NO: 2985746 - RNA, 18 nt, Human
gauccuaggcauuugcug

SEQ ID NO: 2985747 - RNA, 18 nt, Human
gauccuaguuccaccauc

SEQ ID NO: 2985748 - RNA, 15 nt, Human
gaucacgccacugca

SEQ ID NO: 2985749 - RNA, 14 nt, Human
gaucacgccacugc

SEQ ID NO: 2985750 - RNA, 13 nt, Human
gaucacgccacug

SEQ ID NO: 2985751 - RNA, 23 nt, Human
gaucaaccccuucgcuccugugu

SEQ ID NO: 2985752 - RNA, 15 nt, Human
gaucacgaggucagg

SEQ ID NO: 2985753 - RNA, 19 nt, Human
gaggcagagguugcaguga

SEQ ID NO: 2985754 - RNA, 13 nt, Human
gaggcagccccau

SEQ ID NO: 2985755 - RNA, 22 nt, Human
gaggcagccccauucugccugc

SEQ ID NO: 2985756 - RNA, 21 nt, Human
gaggcagccccauucugccug

SEQ ID NO: 2985757 - RNA, 16 nt, Human
gaggcaggagacuggc

SEQ ID NO: 2985758 - RNA, 23 nt, Human
gaggcagccccauucugccugcc

SEQ ID NO: 2985759 - RNA, 13 nt, Human
gaggccagccuug

SEQ ID NO: 2985760 - RNA, 12 nt, Human
gaggccagccuu

SEQ ID NO: 2985761 - RNA, 23 nt, Human
gaggaguuugggguaugggagag

SEQ ID NO: 2985762 - RNA, 12 nt, Human
gaggauguucug

SEQ ID NO: 2985763 - RNA, 20 nt, Human
gaggauguucugggacacag

SEQ ID NO: 2985764 - RNA, 17 nt, Human
gaggauguucugggaca

SEQ ID NO: 2985765 - RNA, 16 nt, Human
gaggauugcuugagcu

SEQ ID NO: 2985766 - RNA, 15 nt, Human
gaggaauccagaccc

SEQ ID NO: 2985767 - RNA, 22 nt, Human
gaggaaggaaacccagcucugg

SEQ ID NO: 2985768 - RNA, 14 nt, Human
gaggaauccagacc

SEQ ID NO: 2985769 - RNA, 23 nt, Human
gaggacagggaggugaccccagg

SEQ ID NO: 2985770 - RNA, 22 nt, Human
gaggacagggaggugaccccag

SEQ ID NO: 2985771 - RNA, 13 nt, Human
gaggacagggagg

SEQ ID NO: 2985772 - RNA, 14 nt, Human
gaggcccuucucuc

SEQ ID NO: 2985773 - RNA, 23 nt, Human
gaggcccuucucuccagccccug

SEQ ID NO: 2985774 - RNA, 24 nt, Human
gaggcccuucucuccagccccugg

SEQ ID NO: 2985775 - RNA, 22 nt, Human
gaggcccuucucuccagccccu

SEQ ID NO: 2985776 - RNA, 14 nt, Human
gaggccuucucuga

SEQ ID NO: 2985777 - RNA, 13 nt, Human
gaggcugggcucc

SEQ ID NO: 2985778 - RNA, 14 nt, Human
gaggcugggcuccc

SEQ ID NO: 2985779 - RNA, 15 nt, Human
gaggcugggcucccu

SEQ ID NO: 2985780 - RNA, 15 nt, Human
gagggagggagggcu

SEQ ID NO: 2985781 - RNA, 15 nt, Human
gagggagggcuccag

SEQ ID NO: 2985782 - RNA, 14 nt, Human
gagggagggagggc

SEQ ID NO: 2985783 - RNA, 14 nt, Human
gagggagugacaga

SEQ ID NO: 2985784 - RNA, 14 nt, Human
gagggagguaagga

SEQ ID NO: 2985785 - RNA, 13 nt, Human
gagggagugacag

SEQ ID NO: 2985786 - RNA, 14 nt, Human
gagggcacagaaaa

SEQ ID NO: 2985787 - RNA, 22 nt, Human
gagggcacagaaaauggaagac

SEQ ID NO: 2985788 - RNA, 23 nt, Human
gagggcacagaaaauggaagaca

SEQ ID NO: 2985789 - RNA, 22 nt, Human
gaggggccucuuaugggcuggg

SEQ ID NO: 2985790 - RNA, 12 nt, Human
gaggggccucuu

SEQ ID NO: 2985791 - RNA, 15 nt, Human
gagcugccaccugcc

SEQ ID NO: 2985792 - RNA, 16 nt, Human
gagcugccaccugccu

SEQ ID NO: 2985793 - RNA, 14 nt, Human
gagcugcccucucc

SEQ ID NO: 2985794 - RNA, 13 nt, Human
gagcugccaccug

SEQ ID NO: 2985795 - RNA, 16 nt, Human
gagcugcccucuccug

SEQ ID NO: 2985796 - RNA, 15 nt, Human
gagcugcccucuccu

SEQ ID NO: 2985797 - RNA, 14 nt, Human
gagcuacaaaugca

SEQ ID NO: 2985798 - RNA, 23 nt, Human
gagcuacacaggggaaaagagga

SEQ ID NO: 2985799 - RNA, 12 nt, Human
gagcuacaaaug

SEQ ID NO: 2985800 - RNA, 13 nt, Human
gagcuacaaaugc

SEQ ID NO: 2985801 - RNA, 13 nt, Human
gagccugggaggu

SEQ ID NO: 2985802 - RNA, 21 nt, Human
gagccugggaggucaaggcug

SEQ ID NO: 2985803 - RNA, 10 nt, Human
gagccuggca

SEQ ID NO: 2985804 - RNA, 15 nt, Human
gagccuggcaagaau

SEQ ID NO: 2985805 - RNA, 20 nt, Human
gagccuccugcccuuaccug

SEQ ID NO: 2985806 - RNA, 22 nt, Human
gagccuccugcccuuaccugcc

SEQ ID NO: 2985807 - RNA, 17 nt, Human
gagcccugguggcagug

SEQ ID NO: 2985808 - RNA, 19 nt, Human
gagccucagcauccuggca

SEQ ID NO: 2985809 - RNA, 16 nt, Human
gagcccugguggcagu

SEQ ID NO: 2985810 - RNA, 15 nt, Human
gagcccugguggcag

SEQ ID NO: 2985811 - RNA, 14 nt, Human
gagccuccugcccu

SEQ ID NO: 2985812 - RNA, 21 nt, Human
gagccucagcauccuggcacc

SEQ ID NO: 2985813 - RNA, 20 nt, Human
gagccucagcauccuggcac

SEQ ID NO: 2985814 - RNA, 15 nt, Human
gagcacacuggcuca

SEQ ID NO: 2985815 - RNA, 17 nt, Human
gagcaccuuagacaguc

SEQ ID NO: 2985816 - RNA, 21 nt, Human
gagcaagacgcugugcugccc

SEQ ID NO: 2985817 - RNA, 18 nt, Human
gagcaagacgcugugcug

SEQ ID NO: 2985818 - RNA, 22 nt, Human
gagcaagacgcugugcugcccu

SEQ ID NO: 2985819 - RNA, 23 nt, Human
gagcaagacgcugugcugcccug

SEQ ID NO: 2985820 - RNA, 19 nt, Human
gagcaaaaucgaugcagug

SEQ ID NO: 2985821 - RNA, 20 nt, Human
gagaucaaccccuucgcucc

SEQ ID NO: 2985822 - RNA, 14 nt, Human
gagaucagccuggg

SEQ ID NO: 2985823 - RNA, 16 nt, Human
gagaucagccugggca

SEQ ID NO: 2985824 - RNA, 13 nt, Human
gagaucagccugg

SEQ ID NO: 2985825 - RNA, 13 nt, Human
gagauccuggacu

SEQ ID NO: 2985826 - RNA, 14 nt, Human
gagaucgagaccau

SEQ ID NO: 2985827 - RNA, 21 nt, Human
gagcaggcuacugucagcucc

SEQ ID NO: 2985828 - RNA, 18 nt, Human
gagcagccacauuccuga

SEQ ID NO: 2985829 - RNA, 12 nt, Human
gagcccacgccc

SEQ ID NO: 2985830 - RNA, 15 nt, Human
gagcccacgccccca

SEQ ID NO: 2985831 - RNA, 16 nt, Human
gagcccacgcccccac

SEQ ID NO: 2985832 - RNA, 12 nt, Human
gagcccaggccu

SEQ ID NO: 2985833 - RNA, 13 nt, Human
gagcccaggccuc

SEQ ID NO: 2985834 - RNA, 14 nt, Human
gagcccaggccucc

SEQ ID NO: 2985835 - RNA, 11 nt, Human
gagcccacgcc

SEQ ID NO: 2985836 - RNA, 22 nt, Human
gagccauuugucccaagugcca

SEQ ID NO: 2985837 - RNA, 20 nt, Human
gagccauuugucccaagugc

SEQ ID NO: 2985838 - RNA, 19 nt, Human
gagccauuugucccaagug

SEQ ID NO: 2985839 - RNA, 18 nt, Human
gagccauuugucccaagu

SEQ ID NO: 2985840 - RNA, 23 nt, Human
gagccauuugucccaagugccaa

SEQ ID NO: 2985841 - RNA, 17 nt, Human
gagccauuugucccaag

SEQ ID NO: 2985842 - RNA, 16 nt, Human
gagccauuugucccaa

SEQ ID NO: 2985843 - RNA, 15 nt, Human
gagccauuuguccca

SEQ ID NO: 2985844 - RNA, 22 nt, Human
gagccacugcaccgggccacag

SEQ ID NO: 2985845 - RNA, 23 nt, Human
cugacgacuugagugcucaguag

SEQ ID NO: 2985846 - RNA, 18 nt, Human
cugacagacacaggcccg

SEQ ID NO: 2985847 - RNA, 17 nt, Human
cugacagacacaggccc

SEQ ID NO: 2985848 - RNA, 15 nt, Human
cugacagacacaggc

SEQ ID NO: 2985849 - RNA, 14 nt, Human
cugaauuucuuuug

SEQ ID NO: 2985850 - RNA, 16 nt, Human
cugaauuaugaaacuu

SEQ ID NO: 2985851 - RNA, 16 nt, Human
cugacagacacaggcc

SEQ ID NO: 2985852 - RNA, 12 nt, Human
cugagaaagacu

SEQ ID NO: 2985853 - RNA, 13 nt, Human
cugagaaagacua

SEQ ID NO: 2985854 - RNA, 15 nt, Human
cugagaaagacuauu

SEQ ID NO: 2985855 - RNA, 18 nt, Human
cugagaaagacuauucaa

SEQ ID NO: 2985856 - RNA, 21 nt, Human
cugagacagcccgggcucugc

SEQ ID NO: 2985857 - RNA, 22 nt, Human
cugagacagcccgggcucugcc

SEQ ID NO: 2985858 - RNA, 16 nt, Human
cugagaugugaacaca

SEQ ID NO: 2985859 - RNA, 20 nt, Human
cugagaugugaacacaucag

SEQ ID NO: 2985860 - RNA, 20 nt, Human
cugagacagcccgggcucug

SEQ ID NO: 2985861 - RNA, 19 nt, Human
cugagacagcccgggcucu

SEQ ID NO: 2985862 - RNA, 19 nt, Human
cugagaaagacuauucaaa

SEQ ID NO: 2985863 - RNA, 20 nt, Human
cugagaaagacuauucaaac

SEQ ID NO: 2985864 - RNA, 21 nt, Human
cugagaugugaacacaucagc

SEQ ID NO: 2985865 - RNA, 16 nt, Human
cugagcaggauuuuaa

SEQ ID NO: 2985866 - RNA, 13 nt, Human
cugagccagauuu

SEQ ID NO: 2985867 - RNA, 14 nt, Human
cugagccagauuuc

SEQ ID NO: 2985868 - RNA, 19 nt, Human
cugagcauaaguccucuag

SEQ ID NO: 2985869 - RNA, 17 nt, Human
cugaacaucacagcuua

SEQ ID NO: 2985870 - RNA, 19 nt, Human
cugaaaugucaguucugau

SEQ ID NO: 2985871 - RNA, 18 nt, Human
cugaaaugucaguucuga

SEQ ID NO: 2985872 - RNA, 20 nt, Human
cugaaaugucaguucugaua

SEQ ID NO: 2985873 - RNA, 13 nt, Human
cugaaaugucagu

SEQ ID NO: 2985874 - RNA, 20 nt, Human
cugaaauaaacgucuuaaau

SEQ ID NO: 2985875 - RNA, 21 nt, Human
cugaacaaacuaucagaggaa

SEQ ID NO: 2985876 - RNA, 23 nt, Human
cugaaagggacgcuacccgggaa

SEQ ID NO: 2985877 - RNA, 14 nt, Human
cucuuuucaaaaca

SEQ ID NO: 2985878 - RNA, 22 nt, Human
cucuuuggucuacacugugcug

SEQ ID NO: 2985879 - RNA, 23 nt, Human
cucuuuggucuacacugugcuga

SEQ ID NO: 2985880 - RNA, 16 nt, Human
cucuucuccaggcugu

SEQ ID NO: 2985881 - RNA, 13 nt, Human
cugaauuaugaaa

SEQ ID NO: 2985882 - RNA, 15 nt, Human
cugaauuaugaaacu

SEQ ID NO: 2985883 - RNA, 14 nt, Human
cugaauuaugaaac

SEQ ID NO: 2985884 - RNA, 12 nt, Human
cugaauuucuuu

SEQ ID NO: 2985885 - RNA, 20 nt, Human
cugaaugguuuucaaaauaa

SEQ ID NO: 2985886 - RNA, 19 nt, Human
cugaaugguuuucaaaaua

SEQ ID NO: 2985887 - RNA, 18 nt, Human
cugaauggacuuugcaca

SEQ ID NO: 2985888 - RNA, 17 nt, Human
cugaagucacacaguga

SEQ ID NO: 2985889 - RNA, 19 nt, Human
cugaagucacacagugagu

SEQ ID NO: 2985890 - RNA, 18 nt, Human
cugaagucacacagugag

SEQ ID NO: 2985891 - RNA, 21 nt, Human
cugaagucacacagugagucg

SEQ ID NO: 2985892 - RNA, 16 nt, Human
cugaagucacacagug

SEQ ID NO: 2985893 - RNA, 22 nt, Human
cugaagucccagauacuugggg

SEQ ID NO: 2985894 - RNA, 17 nt, Human
cugaagucuuuguacag

SEQ ID NO: 2985895 - RNA, 20 nt, Human
cugaagucuuuguacagaca

SEQ ID NO: 2985896 - RNA, 17 nt, Human
cugaaguucagcugcau

SEQ ID NO: 2985897 - RNA, 13 nt, Human
cucugcccacucc

SEQ ID NO: 2985898 - RNA, 15 nt, Human
cucugcccacucccu

SEQ ID NO: 2985899 - RNA, 16 nt, Human
cucugcccacucccug

SEQ ID NO: 2985900 - RNA, 17 nt, Human
cucugcccacucccugc

SEQ ID NO: 2985901 - RNA, 18 nt, Human
cucugcccacucccugca

SEQ ID NO: 2985902 - RNA, 20 nt, Human
cucugcccacucccugcaac

SEQ ID NO: 2985903 - RNA, 13 nt, Human
cucugccucccau

SEQ ID NO: 2985904 - RNA, 14 nt, Human
cucugccucccauc

SEQ ID NO: 2985905 - RNA, 16 nt, Human
cucugccucccaucac

SEQ ID NO: 2985906 - RNA, 17 nt, Human
cucugccucccaucacc

SEQ ID NO: 2985907 - RNA, 12 nt, Human
cucugcccuugg

SEQ ID NO: 2985908 - RNA, 14 nt, Human
cucugcacaagcug

SEQ ID NO: 2985909 - RNA, 15 nt, Human
cucugcacaagcugc

SEQ ID NO: 2985910 - RNA, 10 nt, Human
cucugcacaa

SEQ ID NO: 2985911 - RNA, 13 nt, Human
cucugcacaagcu

SEQ ID NO: 2985912 - RNA, 15 nt, Human
cucugauacagaaaa

SEQ ID NO: 2985913 - RNA, 14 nt, Human
cucugaggacacua

SEQ ID NO: 2985914 - RNA, 12 nt, Human
cucugaggacac

SEQ ID NO: 2985915 - RNA, 16 nt, Human
cucugaggacacuaac

SEQ ID NO: 2985916 - RNA, 20 nt, Human
cucugagacucgcgacaaug

SEQ ID NO: 2985917 - RNA, 23 nt, Human
cucugagacucgcgacaaugcaa

SEQ ID NO: 2985918 - RNA, 21 nt, Human
cucugagacucgcgacaaugc

SEQ ID NO: 2985919 - RNA, 23 nt, Human
cucugacagaagaaccccagggu

SEQ ID NO: 2985920 - RNA, 19 nt, Human
cucugacacacagcucugu

SEQ ID NO: 2985921 - RNA, 18 nt, Human
cucugacacacagcucug

SEQ ID NO: 2985922 - RNA, 17 nt, Human
cucugacacacagcucu

SEQ ID NO: 2985923 - RNA, 16 nt, Human
cucugacacacagcuc

SEQ ID NO: 2985924 - RNA, 15 nt, Human
cucugacacacagcu

SEQ ID NO: 2985925 - RNA, 14 nt, Human
cucugacacacagc

SEQ ID NO: 2985926 - RNA, 19 nt, Human
cucugaaggguaauuauau

SEQ ID NO: 2985927 - RNA, 22 nt, Human
cucugaaggacauugcggacag

SEQ ID NO: 2985928 - RNA, 13 nt, Human
cucuucuccaggc

SEQ ID NO: 2985929 - RNA, 15 nt, Human
cucuucuccaggcug

SEQ ID NO: 2985930 - RNA, 23 nt, Human
cucugugucagguggggcagcuu

SEQ ID NO: 2985931 - RNA, 22 nt, Human
cucugugucagguggggcagcu

SEQ ID NO: 2985932 - RNA, 21 nt, Human
cucugugucagguggggcagc

SEQ ID NO: 2985933 - RNA, 20 nt, Human
cucugugucagguggggcag

SEQ ID NO: 2985934 - RNA, 19 nt, Human
cucugugucagguggggca

SEQ ID NO: 2985935 - RNA, 13 nt, Human
cucuuaagaagac

SEQ ID NO: 2985936 - RNA, 19 nt, Human
cucuuaagaagacugcauu

SEQ ID NO: 2985937 - RNA, 22 nt, Human
cucuggccuucggccuccaucc

SEQ ID NO: 2985938 - RNA, 21 nt, Human
cucuggccuucggccuccauc

SEQ ID NO: 2985939 - RNA, 23 nt, Human
cucuggcagcucagagagggugg

SEQ ID NO: 2985940 - RNA, 20 nt, Human
cucuggcagcucagagaggg

SEQ ID NO: 2985941 - RNA, 20 nt, Human
cucugccucugacacacagc

SEQ ID NO: 2985942 - RNA, 19 nt, Human
cucugccucugacacacag

SEQ ID NO: 2985943 - RNA, 21 nt, Human
cucugccucccaucacccgcu

SEQ ID NO: 2985944 - RNA, 16 nt, Human
cucugccucugacaca

SEQ ID NO: 2985945 - RNA, 13 nt, Human
cucugucgcccag

SEQ ID NO: 2985946 - RNA, 17 nt, Human
cucugucgcccagucug

SEQ ID NO: 2985947 - RNA, 19 nt, Human
cucugucgcccagucugga

SEQ ID NO: 2985948 - RNA, 18 nt, Human
cucugucgcccagucugg

SEQ ID NO: 2985949 - RNA, 22 nt, Human
cucuguccugggagugagcugg

SEQ ID NO: 2985950 - RNA, 15 nt, Human
cucuguccugggagu

SEQ ID NO: 2985951 - RNA, 13 nt, Human
cucuguccuggga

SEQ ID NO: 2985952 - RNA, 14 nt, Human
cucuguccugggag

SEQ ID NO: 2985953 - RNA, 22 nt, Human
cugauuuaaacacauuaaaggu

SEQ ID NO: 2985954 - RNA, 16 nt, Human
cugauuuaauaugcaa

SEQ ID NO: 2985955 - RNA, 21 nt, Human
cugauugugucucuugguccu

SEQ ID NO: 2985956 - RNA, 17 nt, Human
cugauggugcaaugacc

SEQ ID NO: 2985957 - RNA, 19 nt, Human
cugauggugcaaugaccuu

SEQ ID NO: 2985958 - RNA, 20 nt, Human
cugauggugcaaugaccuuu

SEQ ID NO: 2985959 - RNA, 21 nt, Human
cugauggugcaaugaccuuuc

SEQ ID NO: 2985960 - RNA, 17 nt, Human
cugauugugucucuugg

SEQ ID NO: 2985961 - RNA, 16 nt, Human
cugauuuuuuuuuccu

SEQ ID NO: 2985962 - RNA, 18 nt, Human
cugauuuuuuuuuccuuc

SEQ ID NO: 2985963 - RNA, 19 nt, Human
cugauuuuuuuuuccuuca

SEQ ID NO: 2985964 - RNA, 20 nt, Human
cugauuuuuuuuuccuucag

SEQ ID NO: 2985965 - RNA, 21 nt, Human
cugauuuuuuuuuccuucagu

SEQ ID NO: 2985966 - RNA, 22 nt, Human
cugauuuuuuuuuccuucagug

SEQ ID NO: 2985967 - RNA, 23 nt, Human
cugauuuuuuuuuccuucagugc

SEQ ID NO: 2985968 - RNA, 15 nt, Human
cugcaauaaaauggg

SEQ ID NO: 2985969 - RNA, 18 nt, Human
cugcaauaaggggagagu

SEQ ID NO: 2985970 - RNA, 22 nt, Human
cugcaauaaaauggguuuuacu

SEQ ID NO: 2985971 - RNA, 22 nt, Human
cugcacaagcugcacccucagg

SEQ ID NO: 2985972 - RNA, 18 nt, Human
cugcacaagcugcacccu

SEQ ID NO: 2985973 - RNA, 18 nt, Human
cugcacagcaggcugcca

SEQ ID NO: 2985974 - RNA, 19 nt, Human
cugcacagcaggcugccag

SEQ ID NO: 2985975 - RNA, 16 nt, Human
cugcacuccccugcug

SEQ ID NO: 2985976 - RNA, 17 nt, Human
cugcacuccccugcugg

SEQ ID NO: 2985977 - RNA, 18 nt, Human
cugcacuugcagacucua

SEQ ID NO: 2985978 - RNA, 13 nt, Human
cugcacccucagg

SEQ ID NO: 2985979 - RNA, 14 nt, Human
cugcacccucaggc

SEQ ID NO: 2985980 - RNA, 20 nt, Human
cugcaccggcuggccuggcc

SEQ ID NO: 2985981 - RNA, 22 nt, Human
cugcaccggcuggccuggcccc

SEQ ID NO: 2985982 - RNA, 14 nt, Human
cugcacuccccugc

SEQ ID NO: 2985983 - RNA, 15 nt, Human
cugcacuccccugcu

SEQ ID NO: 2985984 - RNA, 23 nt, Human
cugcaccggcuggccuggccccu

SEQ ID NO: 2985985 - RNA, 12 nt, Human
cugcaccgggcc

SEQ ID NO: 2985986 - RNA, 21 nt, Human
cugaggcuccacuuggucugu

SEQ ID NO: 2985987 - RNA, 15 nt, Human
cugaggcuccacuug

SEQ ID NO: 2985988 - RNA, 24 nt, Human
cugaggcccuucucuccagccccu

SEQ ID NO: 2985989 - RNA, 15 nt, Human
cugaggcugggcucc

SEQ ID NO: 2985990 - RNA, 16 nt, Human
cugaggcugggcuccc

SEQ ID NO: 2985991 - RNA, 17 nt, Human
cugaggcugggcucccu

SEQ ID NO: 2985992 - RNA, 22 nt, Human
cugaggcugggcucccuuccca

SEQ ID NO: 2985993 - RNA, 13 nt, Human
cugaggcugggcu

SEQ ID NO: 2985994 - RNA, 17 nt, Human
cugaguguacagagugg

SEQ ID NO: 2985995 - RNA, 18 nt, Human
cugagucugaaggcuggg

SEQ ID NO: 2985996 - RNA, 19 nt, Human
cugagucugaaggcugggu

SEQ ID NO: 2985997 - RNA, 17 nt, Human
cugagucugaaggcugg

SEQ ID NO: 2985998 - RNA, 21 nt, Human
cugauaaagaugagugagcau

SEQ ID NO: 2985999 - RNA, 20 nt, Human
cugauccuaguuccaccauc

SEQ ID NO: 2986000 - RNA, 21 nt, Human
cugauccuaguuccaccauca

SEQ ID NO: 2986001 - RNA, 15 nt, Human
cugauggugcaauga

SEQ ID NO: 2986002 - RNA, 16 nt, Human
cugauggugcaaugac

SEQ ID NO: 2986003 - RNA, 14 nt, Human
cugauggugcaaug

SEQ ID NO: 2986004 - RNA, 16 nt, Human
cugauauggaagcacc

SEQ ID NO: 2986005 - RNA, 22 nt, Human
cugauacagaaaaguugaauuu

SEQ ID NO: 2986006 - RNA, 21 nt, Human
cugcaguugccagucaccccg

SEQ ID NO: 2986007 - RNA, 22 nt, Human
cugcaguugccagucaccccgg

SEQ ID NO: 2986008 - RNA, 17 nt, Human
cugcaguugccagucac

SEQ ID NO: 2986009 - RNA, 20 nt, Human
cugcaucagcugcugaaaca

SEQ ID NO: 2986010 - RNA, 19 nt, Human
cugcaguugccagucaccc

SEQ ID NO: 2986011 - RNA, 23 nt, Human
cugcacuugcagacucuacagag

SEQ ID NO: 2986012 - RNA, 16 nt, Human
cugcaucguuucaucu

SEQ ID NO: 2986013 - RNA, 22 nt, Human
cugcaucguuucaucuuccaac

SEQ ID NO: 2986014 - RNA, 18 nt, Human
cugccaaugggagcucau

SEQ ID NO: 2986015 - RNA, 19 nt, Human
cugccaaugggagcucaug

SEQ ID NO: 2986016 - RNA, 18 nt, Human
cugcaugcgggcuuccuc

SEQ ID NO: 2986017 - RNA, 22 nt, Human
cugcaugcgggcuuccuccugg

SEQ ID NO: 2986018 - RNA, 17 nt, Human
cugcccaccuggccucu

SEQ ID NO: 2986019 - RNA, 18 nt, Human
cugcccaccuggccucug

SEQ ID NO: 2986020 - RNA, 19 nt, Human
cugcccaccuggccucugc

SEQ ID NO: 2986021 - RNA, 20 nt, Human
cugcccaccuggccucugca

SEQ ID NO: 2986022 - RNA, 22 nt, Human
cugcccaccuggccucugcacu

SEQ ID NO: 2986023 - RNA, 14 nt, Human
cugcccacucccug

SEQ ID NO: 2986024 - RNA, 15 nt, Human
cugcccacucccugc

SEQ ID NO: 2986025 - RNA, 16 nt, Human
cugcccacucccugca

SEQ ID NO: 2986026 - RNA, 18 nt, Human
cugcccacucccugcaac

SEQ ID NO: 2986027 - RNA, 14 nt, Human
cugcccaccuggcc

SEQ ID NO: 2986028 - RNA, 15 nt, Human
cugcccaccuggccu

SEQ ID NO: 2986029 - RNA, 13 nt, Human
cugcccaccuggc

SEQ ID NO: 2986030 - RNA, 14 nt, Human
cugccaugccagcu

SEQ ID NO: 2986031 - RNA, 11 nt, Human
cugccaggcau

SEQ ID NO: 2986032 - RNA, 13 nt, Human
cugccaggcaugg

SEQ ID NO: 2986033 - RNA, 15 nt, Human
cugccucagccuccc

SEQ ID NO: 2986034 - RNA, 19 nt, Human
cugccucagccucccaaag

SEQ ID NO: 2986035 - RNA, 19 nt, Human
cugccgcagcccugcagag

SEQ ID NO: 2986036 - RNA, 20 nt, Human
cugccgcagcccugcagagg

SEQ ID NO: 2986037 - RNA, 21 nt, Human
cugccgcagcccugcagaggg

SEQ ID NO: 2986038 - RNA, 22 nt, Human
cugccgcagcccugcagagggc

SEQ ID NO: 2986039 - RNA, 23 nt, Human
cugccgcagcccugcagagggca

SEQ ID NO: 2986040 - RNA, 12 nt, Human
cugccgcagccc

SEQ ID NO: 2986041 - RNA, 13 nt, Human
cugccgcagcccu

SEQ ID NO: 2986042 - RNA, 19 nt, Human
cugccccugcacagcaggc

SEQ ID NO: 2986043 - RNA, 15 nt, Human
cugccccugcacagc

SEQ ID NO: 2986044 - RNA, 14 nt, Human
cugccccugcacag

SEQ ID NO: 2986045 - RNA, 21 nt, Human
cugccucugacacacagcucu

SEQ ID NO: 2986046 - RNA, 18 nt, Human
cugccucugacacacagc

SEQ ID NO: 2986047 - RNA, 15 nt, Human
cugccucugacacac

SEQ ID NO: 2986048 - RNA, 17 nt, Human
cugccucugacacacag

SEQ ID NO: 2986049 - RNA, 22 nt, Human
cugccugcccaggccccugcca

SEQ ID NO: 2986050 - RNA, 21 nt, Human
cugccugcccaggccccugcc

SEQ ID NO: 2986051 - RNA, 18 nt, Human
cugcgguccacccaggag

SEQ ID NO: 2986052 - RNA, 17 nt, Human
cugcgguccacccagga

SEQ ID NO: 2986053 - RNA, 20 nt, Human
cugcgguccacccaggagcc

SEQ ID NO: 2986054 - RNA, 19 nt, Human
cugcgguccacccaggagc

SEQ ID NO: 2986055 - RNA, 20 nt, Human
cugcggagcacacuggcuca

SEQ ID NO: 2986056 - RNA, 19 nt, Human
cugcggagcacacuggcuc

SEQ ID NO: 2986057 - RNA, 13 nt, Human
cucagcagagugc

SEQ ID NO: 2986058 - RNA, 12 nt, Human
cucagcagagug

SEQ ID NO: 2986059 - RNA, 11 nt, Human
cucagcagagu

SEQ ID NO: 2986060 - RNA, 16 nt, Human
cucagcagagugcuuu

SEQ ID NO: 2986061 - RNA, 17 nt, Human
cucagcauccuggcacc

SEQ ID NO: 2986062 - RNA, 16 nt, Human
cucagcauccuggcac

SEQ ID NO: 2986063 - RNA, 21 nt, Human
cucagcaaaagaugcuucuca

SEQ ID NO: 2986064 - RNA, 15 nt, Human
cucagaucuucugug

SEQ ID NO: 2986065 - RNA, 14 nt, Human
cucagagagggugg

SEQ ID NO: 2986066 - RNA, 22 nt, Human
cucacuguugcccaggcuggcg

SEQ ID NO: 2986067 - RNA, 21 nt, Human
cucacuguugcccaggcuggc

SEQ ID NO: 2986068 - RNA, 19 nt, Human
cucacugccaugccagcuu

SEQ ID NO: 2986069 - RNA, 22 nt, Human
cucacugccaugccagcuuauc

SEQ ID NO: 2986070 - RNA, 20 nt, Human
cucacuguugcccaggcugg

SEQ ID NO: 2986071 - RNA, 21 nt, Human
cucacucugucgcccagucug

SEQ ID NO: 2986072 - RNA, 13 nt, Human
cucacucugucgc

SEQ ID NO: 2986073 - RNA, 22 nt, Human
cucacucugucgcccagucugg

SEQ ID NO: 2986074 - RNA, 12 nt, Human
cucacugcagcc

SEQ ID NO: 2986075 - RNA, 13 nt, Human
cucacugcagccu

SEQ ID NO: 2986076 - RNA, 13 nt, Human
cucacuccuugaa

SEQ ID NO: 2986077 - RNA, 12 nt, Human
cucacucugucg

SEQ ID NO: 2986078 - RNA, 11 nt, Human
cucacucuguc

SEQ ID NO: 2986079 - RNA, 20 nt, Human
cucacuauguugcccaggca

SEQ ID NO: 2986080 - RNA, 19 nt, Human
cucacuauguugcccaggc

SEQ ID NO: 2986081 - RNA, 15 nt, Human
cucacccaguccugc

SEQ ID NO: 2986082 - RNA, 15 nt, Human
cucaccccagcccca

SEQ ID NO: 2986083 - RNA, 12 nt, Human
cucacccagucc

SEQ ID NO: 2986084 - RNA, 13 nt, Human
cucacccacacca

SEQ ID NO: 2986085 - RNA, 22 nt, Human
cucacuauguugcccaggcagg

SEQ ID NO: 2986086 - RNA, 21 nt, Human
cucacuauguugcccaggcag

SEQ ID NO: 2986087 - RNA, 23 nt, Human
cucacuauguugcccaggcaggu

SEQ ID NO: 2986088 - RNA, 15 nt, Human
cucaagucuggcaga

SEQ ID NO: 2986089 - RNA, 17 nt, Human
cucaagugauucuccug

SEQ ID NO: 2986090 - RNA, 14 nt, Human
cucaaguccucuuu

SEQ ID NO: 2986091 - RNA, 21 nt, Human
cucaaguccucuuuucugaga

SEQ ID NO: 2986092 - RNA, 22 nt, Human
cucacacaugagcaucaggcca

SEQ ID NO: 2986093 - RNA, 24 nt, Human
cucacacaugagcaucaggccagg

SEQ ID NO: 2986094 - RNA, 15 nt, Human
cucacaguccuuacc

SEQ ID NO: 2986095 - RNA, 19 nt, Human
cucacagcagugagacugg

SEQ ID NO: 2986096 - RNA, 17 nt, Human
cucacaguccuuaccag

SEQ ID NO: 2986097 - RNA, 19 nt, Human
cucacaguccuuaccagca

SEQ ID NO: 2986098 - RNA, 22 nt, Human
cucacaguccuuaccagcagag

SEQ ID NO: 2986099 - RNA, 13 nt, Human
cucacauuuauau

SEQ ID NO: 2986100 - RNA, 22 nt, Human
cucacauuuauucugcucacau

SEQ ID NO: 2986101 - RNA, 19 nt, Human
cucacauuuauucugcuca

SEQ ID NO: 2986102 - RNA, 15 nt, Human
cucacauuuauucug

SEQ ID NO: 2986103 - RNA, 18 nt, Human
cucaccagccccagugcc

SEQ ID NO: 2986104 - RNA, 17 nt, Human
cucaccagccccagugc

SEQ ID NO: 2986105 - RNA, 15 nt, Human
cucaccagccccagu

SEQ ID NO: 2986106 - RNA, 14 nt, Human
cucaccagccccag

SEQ ID NO: 2986107 - RNA, 13 nt, Human
cucaccagcccca

SEQ ID NO: 2986108 - RNA, 23 nt, Human
cucaaauacgugggcauucaaau

SEQ ID NO: 2986109 - RNA, 17 nt, Human
cucaaccuccugggcua

SEQ ID NO: 2986110 - RNA, 15 nt, Human
cucaaccuccugggc

SEQ ID NO: 2986111 - RNA, 13 nt, Human
cucaaccuccugg

SEQ ID NO: 2986112 - RNA, 21 nt, Human
cucaacaccucugcacaagcu

SEQ ID NO: 2986113 - RNA, 13 nt, Human
cuauuccugagag

SEQ ID NO: 2986114 - RNA, 17 nt, Human
cuauuccugagagcugc

SEQ ID NO: 2986115 - RNA, 22 nt, Human
cuaugcuguucacuggacacuu

SEQ ID NO: 2986116 - RNA, 22 nt, Human
cuaugggguaaaagggguaggg

SEQ ID NO: 2986117 - RNA, 23 nt, Human
cuaugggacucaaugcacugaca

SEQ ID NO: 2986118 - RNA, 22 nt, Human
cuaugggacucaaugcacugac

SEQ ID NO: 2986119 - RNA, 18 nt, Human
cuaugggacucaaugcac

SEQ ID NO: 2986120 - RNA, 15 nt, Human
cuauuagagaagaga

SEQ ID NO: 2986121 - RNA, 18 nt, Human
cuauucaaacagucucag

SEQ ID NO: 2986122 - RNA, 16 nt, Human
cuauucaaacagucuc

SEQ ID NO: 2986123 - RNA, 23 nt, Human
cuauucaaacagucucaggaaau

SEQ ID NO: 2986124 - RNA, 15 nt, Human
cuauaggugcuacaa

SEQ ID NO: 2986125 - RNA, 21 nt, Human
cuauaggugcuacaaaaacac

SEQ ID NO: 2986126 - RNA, 22 nt, Human
cuauaggugcuacaaaaacaca

SEQ ID NO: 2986127 - RNA, 20 nt, Human
cuauaggugcuacaaaaaca

SEQ ID NO: 2986128 - RNA, 17 nt, Human
cuauagccuaggugaca

SEQ ID NO: 2986129 - RNA, 17 nt, Human
cuauauuuuacauaaau

SEQ ID NO: 2986130 - RNA, 21 nt, Human
cuauaauguaagcucuacuga

SEQ ID NO: 2986131 - RNA, 13 nt, Human
cuauaauuuaaau

SEQ ID NO: 2986132 - RNA, 22 nt, Human
cuauaauuuaccugaagucuuu

SEQ ID NO: 2986133 - RNA, 19 nt, Human
cuauaauuuccauuuacuu

SEQ ID NO: 2986134 - RNA, 16 nt, Human
cuauaauguaagcucu

SEQ ID NO: 2986135 - RNA, 21 nt, Human
cuagugagcagucaggaaaga

SEQ ID NO: 2986136 - RNA, 19 nt, Human
cuagugaauguaggcuggc

SEQ ID NO: 2986137 - RNA, 21 nt, Human
cuagugaauguaggcuggcuu

SEQ ID NO: 2986138 - RNA, 18 nt, Human
cuagugaaagaggcagcu

SEQ ID NO: 2986139 - RNA, 19 nt, Human
cuagugaaagaggcagcuu

SEQ ID NO: 2986140 - RNA, 20 nt, Human
cuagugaaacucguuaauuu

SEQ ID NO: 2986141 - RNA, 16 nt, Human
cuaguaauuggaaagg

SEQ ID NO: 2986142 - RNA, 18 nt, Human
cuaggugacagagugaga

SEQ ID NO: 2986143 - RNA, 14 nt, Human
cuaggugacagagu

SEQ ID NO: 2986144 - RNA, 24 nt, Human
cuaggugacagagugagacucugu

SEQ ID NO: 2986145 - RNA, 15 nt, Human
cuaggugacauauac

SEQ ID NO: 2986146 - RNA, 16 nt, Human
cuaggugacauauaca

SEQ ID NO: 2986147 - RNA, 15 nt, Human
cgccaugcuccuggc

SEQ ID NO: 2986148 - RNA, 20 nt, Human
cgccaucccagccccaauga

SEQ ID NO: 2986149 - RNA, 17 nt, Human
cgccaucccagccccaa

SEQ ID NO: 2986150 - RNA, 22 nt, Human
cgcccaguuggguggaugccug

SEQ ID NO: 2986151 - RNA, 23 nt, Human
cgcccaguuggguggaugccugg

SEQ ID NO: 2986152 - RNA, 17 nt, Human
cuccaccuugcagcucu

SEQ ID NO: 2986153 - RNA, 15 nt, Human
cuccagccccuggau

SEQ ID NO: 2986154 - RNA, 12 nt, Human
cuccaccugcca

SEQ ID NO: 2986155 - RNA, 13 nt, Human
cuccaccugccag

SEQ ID NO: 2986156 - RNA, 14 nt, Human
cuccaccugccagg

SEQ ID NO: 2986157 - RNA, 20 nt, Human
cuccagccccuggaugcagc

SEQ ID NO: 2986158 - RNA, 16 nt, Human
cuccagccccuggaug

SEQ ID NO: 2986159 - RNA, 17 nt, Human
cuccagccccuggaugc

SEQ ID NO: 2986160 - RNA, 12 nt, Human
cuccagccuggg

SEQ ID NO: 2986161 - RNA, 11 nt, Human
cuccauccuga

SEQ ID NO: 2986162 - RNA, 12 nt, Human
cuccauccugag

SEQ ID NO: 2986163 - RNA, 18 nt, Human
cuccaggagcagccacau

SEQ ID NO: 2986164 - RNA, 23 nt, Human
cuccaggagcagccacauuccug

SEQ ID NO: 2986165 - RNA, 19 nt, Human
cuccaggcagcagacacau

SEQ ID NO: 2986166 - RNA, 14 nt, Human
cuccaggagcagcc

SEQ ID NO: 2986167 - RNA, 15 nt, Human
cuccaggagcagcca

SEQ ID NO: 2986168 - RNA, 16 nt, Human
cuccaggagcagccac

SEQ ID NO: 2986169 - RNA, 17 nt, Human
cuccaggagcagccaca

SEQ ID NO: 2986170 - RNA, 11 nt, Human
cuccaggagca

SEQ ID NO: 2986171 - RNA, 13 nt, Human
cuccaggagcagc

SEQ ID NO: 2986172 - RNA, 13 nt, Human
cuccacauuuguu

SEQ ID NO: 2986173 - RNA, 15 nt, Human
cuccacauuuguuuu

SEQ ID NO: 2986174 - RNA, 13 nt, Human
cuccacccugcuc

SEQ ID NO: 2986175 - RNA, 23 nt, Human
cuccaccucccugcaauaaaaug

SEQ ID NO: 2986176 - RNA, 15 nt, Human
cuccacccugcucuc

SEQ ID NO: 2986177 - RNA, 14 nt, Human
cucauuucuagcag

SEQ ID NO: 2986178 - RNA, 17 nt, Human
cucauuugucacacacu

SEQ ID NO: 2986179 - RNA, 21 nt, Human
cucauuuccaagcaaguauua

SEQ ID NO: 2986180 - RNA, 17 nt, Human
cucauguugaaacuuua

SEQ ID NO: 2986181 - RNA, 13 nt, Human
cuccaaagaaaug

SEQ ID NO: 2986182 - RNA, 12 nt, Human
cuccaaagaaau

SEQ ID NO: 2986183 - RNA, 21 nt, Human
cuccaaacugacucuuaagaa

SEQ ID NO: 2986184 - RNA, 16 nt, Human
cuccaaaauaaaacuu

SEQ ID NO: 2986185 - RNA, 15 nt, Human
cuccaaaauaaaacu

SEQ ID NO: 2986186 - RNA, 16 nt, Human
cucaggugagaagcag

SEQ ID NO: 2986187 - RNA, 14 nt, Human
cucaggugagaagc

SEQ ID NO: 2986188 - RNA, 19 nt, Human
cucaggugagaagcagagg

SEQ ID NO: 2986189 - RNA, 20 nt, Human
cucaggugagaagcagagga

SEQ ID NO: 2986190 - RNA, 15 nt, Human
cucagggucccuggu

SEQ ID NO: 2986191 - RNA, 16 nt, Human
cucagggucccuggug

SEQ ID NO: 2986192 - RNA, 17 nt, Human
cucagggucccuggugg

SEQ ID NO: 2986193 - RNA, 15 nt, Human
cucagggccuggucg

SEQ ID NO: 2986194 - RNA, 16 nt, Human
cucagggccuggcuca

SEQ ID NO: 2986195 - RNA, 14 nt, Human
cucagggccuggcu

SEQ ID NO: 2986196 - RNA, 15 nt, Human
cucagggccuggcuc

SEQ ID NO: 2986197 - RNA, 13 nt, Human
cucagggccuggc

SEQ ID NO: 2986198 - RNA, 18 nt, Human
cucaggaguuugagacca

SEQ ID NO: 2986199 - RNA, 23 nt, Human
cucaggaguuugagaccaaccug

SEQ ID NO: 2986200 - RNA, 18 nt, Human
cucagcauccuggcaccc

SEQ ID NO: 2986201 - RNA, 15 nt, Human
cucagcauccuggca

SEQ ID NO: 2986202 - RNA, 15 nt, Human
cucauccucauaccc

SEQ ID NO: 2986203 - RNA, 21 nt, Human
cucaucaccaacgucugugcc

SEQ ID NO: 2986204 - RNA, 23 nt, Human
cucauaguaugguggcuggguug

SEQ ID NO: 2986205 - RNA, 20 nt, Human
cucauaguaugguggcuggg

SEQ ID NO: 2986206 - RNA, 22 nt, Human
cucaucaccaacgucugugcca

SEQ ID NO: 2986207 - RNA, 16 nt, Human
cucauacccaccccca

SEQ ID NO: 2986208 - RNA, 18 nt, Human
cucauacccacccccacc

SEQ ID NO: 2986209 - RNA, 19 nt, Human
cucauacccacccccaccc

SEQ ID NO: 2986210 - RNA, 21 nt, Human
cucauacccacccccacccaa

SEQ ID NO: 2986211 - RNA, 19 nt, Human
cucaggugauccacccacc

SEQ ID NO: 2986212 - RNA, 18 nt, Human
cucaggugauccacccac

SEQ ID NO: 2986213 - RNA, 20 nt, Human
cucaggugauccacccaccu

SEQ ID NO: 2986214 - RNA, 22 nt, Human
cucauacucaccucaccccacu

SEQ ID NO: 2986215 - RNA, 14 nt, Human
cucauacucaccuc

SEQ ID NO: 2986216 - RNA, 15 nt, Human
cucauacccaccccc

SEQ ID NO: 2986217 - RNA, 21 nt, Human
cucauaguaugguggcugggu

SEQ ID NO: 2986218 - RNA, 24 nt, Human
cuccugugugugcgccuacaggag

SEQ ID NO: 2986219 - RNA, 23 nt, Human
cuccugugugugcgccuacagga

SEQ ID NO: 2986220 - RNA, 21 nt, Human
cuccugugugugcgccuacag

SEQ ID NO: 2986221 - RNA, 14 nt, Human
cuccuggaaauauu

SEQ ID NO: 2986222 - RNA, 15 nt, Human
cuccucuccccagca

SEQ ID NO: 2986223 - RNA, 13 nt, Human
cuccucuccccag

SEQ ID NO: 2986224 - RNA, 11 nt, Human
cuccugccuca

SEQ ID NO: 2986225 - RNA, 12 nt, Human
cuccugccucag

SEQ ID NO: 2986226 - RNA, 16 nt, Human
cuccugccucagccuc

SEQ ID NO: 2986227 - RNA, 17 nt, Human
cuccugccucagccucc

SEQ ID NO: 2986228 - RNA, 21 nt, Human
cuccugccucgaacuggcugc

SEQ ID NO: 2986229 - RNA, 20 nt, Human
cuccugccucgaacuggcug

SEQ ID NO: 2986230 - RNA, 18 nt, Human
cuccugccucgaacuggc

SEQ ID NO: 2986231 - RNA, 23 nt, Human
cuccuuggugucgggcaugacac

SEQ ID NO: 2986232 - RNA, 13 nt, Human
cucgagcaugccu

SEQ ID NO: 2986233 - RNA, 15 nt, Human
cucgagcaugccugg

SEQ ID NO: 2986234 - RNA, 16 nt, Human
cucgagcaugccugga

SEQ ID NO: 2986235 - RNA, 19 nt, Human
cucgagcaugccuggaugg

SEQ ID NO: 2986236 - RNA, 22 nt, Human
cucgagcaugccuggauggggc

SEQ ID NO: 2986237 - RNA, 20 nt, Human
cuccccuccucugcuugcca

SEQ ID NO: 2986238 - RNA, 13 nt, Human
cuccauccugagg

SEQ ID NO: 2986239 - RNA, 23 nt, Human
cuccccagcaagugagagcuggg

SEQ ID NO: 2986240 - RNA, 22 nt, Human
cuccccagcaagugagagcugg

SEQ ID NO: 2986241 - RNA, 11 nt, Human
cuccccuccuc

SEQ ID NO: 2986242 - RNA, 21 nt, Human
cuccccagcaagugagagcug

SEQ ID NO: 2986243 - RNA, 13 nt, Human
cuccccuccucug

SEQ ID NO: 2986244 - RNA, 20 nt, Human
cucccgaguagcugggacua

SEQ ID NO: 2986245 - RNA, 19 nt, Human
cucccgaguagcugggacu

SEQ ID NO: 2986246 - RNA, 18 nt, Human
cucccgaguagcugggac

SEQ ID NO: 2986247 - RNA, 15 nt, Human
cuccuccagccgcca

SEQ ID NO: 2986248 - RNA, 13 nt, Human
cuccuccagaguc

SEQ ID NO: 2986249 - RNA, 15 nt, Human
cuccuccagagucag

SEQ ID NO: 2986250 - RNA, 20 nt, Human
cucccuuggauuguccccga

SEQ ID NO: 2986251 - RNA, 18 nt, Human
cuccucagaucuucugug

SEQ ID NO: 2986252 - RNA, 16 nt, Human
cuuguuuaaugguagu

SEQ ID NO: 2986253 - RNA, 21 nt, Human
cuuguguguuuauugucaaag

SEQ ID NO: 2986254 - RNA, 20 nt, Human
cuuguguguuuauugucaaa

SEQ ID NO: 2986255 - RNA, 19 nt, Human
cuuuaaacuacauuagguu

SEQ ID NO: 2986256 - RNA, 18 nt, Human
cuuuaaagggauggcaag

SEQ ID NO: 2986257 - RNA, 18 nt, Human
cuuuccaaaugcccagcu

SEQ ID NO: 2986258 - RNA, 19 nt, Human
cuuuccaaaugcccagcuu

SEQ ID NO: 2986259 - RNA, 22 nt, Human
cuuuccaaaugcccagcuuaaa

SEQ ID NO: 2986260 - RNA, 13 nt, Human
cuuuccacagaag

SEQ ID NO: 2986261 - RNA, 18 nt, Human
cuuguaaaggaauuuaaa

SEQ ID NO: 2986262 - RNA, 16 nt, Human
cuuggggggcugaggu

SEQ ID NO: 2986263 - RNA, 19 nt, Human
cuuguaaaggaauuuaaaa

SEQ ID NO: 2986264 - RNA, 15 nt, Human
cuuggggggcugagg

SEQ ID NO: 2986265 - RNA, 22 nt, Human
cuuggggaccagagcugccacc

SEQ ID NO: 2986266 - RNA, 22 nt, Human
cuugggcuucauccuccucaga

SEQ ID NO: 2986267 - RNA, 20 nt, Human
cuuggggaccagagcugcca

SEQ ID NO: 2986268 - RNA, 21 nt, Human
cuuggggaccagagcugccac

SEQ ID NO: 2986269 - RNA, 14 nt, Human
cuugggccacugug

SEQ ID NO: 2986270 - RNA, 13 nt, Human
cuugggcuucauc

SEQ ID NO: 2986271 - RNA, 17 nt, Human
cuuggcugcagggaguc

SEQ ID NO: 2986272 - RNA, 14 nt, Human
cuuggcugcaggga

SEQ ID NO: 2986273 - RNA, 12 nt, Human
cuuggagggcau

SEQ ID NO: 2986274 - RNA, 23 nt, Human
cuuggagggcaugaagacagaua

SEQ ID NO: 2986275 - RNA, 22 nt, Human
cuuggaggaaggaaacccagcu

SEQ ID NO: 2986276 - RNA, 16 nt, Human
cuuggcugcagggagu

SEQ ID NO: 2986277 - RNA, 22 nt, Human
cuugccaucccucccuccaccu

SEQ ID NO: 2986278 - RNA, 16 nt, Human
cuugcccagccuggau

SEQ ID NO: 2986279 - RNA, 17 nt, Human
cuugcccagccuggaug

SEQ ID NO: 2986280 - RNA, 13 nt, Human
cuugcccagccug

SEQ ID NO: 2986281 - RNA, 15 nt, Human
cuugcccagccugga

SEQ ID NO: 2986282 - RNA, 14 nt, Human
cuugcucugcugac

SEQ ID NO: 2986283 - RNA, 13 nt, Human
cuugcucugcuga

SEQ ID NO: 2986284 - RNA, 21 nt, Human
cuugccaucccucccuccacc

SEQ ID NO: 2986285 - RNA, 19 nt, Human
cuugccaucccucccucca

SEQ ID NO: 2986286 - RNA, 21 nt, Human
cuucuccacccugcucuccga

SEQ ID NO: 2986287 - RNA, 16 nt, Human
cuucuccacccugcuc

SEQ ID NO: 2986288 - RNA, 18 nt, Human
cuucuccacccugcucuc

SEQ ID NO: 2986289 - RNA, 17 nt, Human
cuucuccacccugcucu

SEQ ID NO: 2986290 - RNA, 16 nt, Human
cuuggaaaugggagac

SEQ ID NO: 2986291 - RNA, 13 nt, Human
cuuggaggaagga

SEQ ID NO: 2986292 - RNA, 13 nt, Human
cuuggaagcuccg

SEQ ID NO: 2986293 - RNA, 17 nt, Human
cuugcucugcugacaga

SEQ ID NO: 2986294 - RNA, 16 nt, Human
cuugcucugcugacag

SEQ ID NO: 2986295 - RNA, 20 nt, Human
cuugcuucaaccccaugaga

SEQ ID NO: 2986296 - RNA, 13 nt, Human
gaaacacugguuu

SEQ ID NO: 2986297 - RNA, 20 nt, Human
gaaaaucuuauaauuuaaaa

SEQ ID NO: 2986298 - RNA, 22 nt, Human
gaaacacugguuuuaaauauuu

SEQ ID NO: 2986299 - RNA, 18 nt, Human
gaaacagcuaaugggaca

SEQ ID NO: 2986300 - RNA, 18 nt, Human
gaaacagaugaaaagccu

SEQ ID NO: 2986301 - RNA, 19 nt, Human
gaaaauaacgauaaaagac

SEQ ID NO: 2986302 - RNA, 17 nt, Human
gaaaagcugcugacagu

SEQ ID NO: 2986303 - RNA, 13 nt, Human
gaaaagcugcuga

SEQ ID NO: 2986304 - RNA, 16 nt, Human
gaaaaucagccugcuc

SEQ ID NO: 2986305 - RNA, 18 nt, Human
gaaaaucagccugcucca

SEQ ID NO: 2986306 - RNA, 19 nt, Human
gaaaaucuuauaauuuaaa

SEQ ID NO: 2986307 - RNA, 12 nt, Human
gaaaauaucacu

SEQ ID NO: 2986308 - RNA, 14 nt, Human
gaaaaucagccugc

SEQ ID NO: 2986309 - RNA, 22 nt, Human
gaaaacaauaacgauaaaagac

SEQ ID NO: 2986310 - RNA, 13 nt, Human
gaaaacacauuuu

SEQ ID NO: 2986311 - RNA, 12 nt, Human
gaaaacaaugca

SEQ ID NO: 2986312 - RNA, 14 nt, Human
gaaaacaaggauga

SEQ ID NO: 2986313 - RNA, 15 nt, Human
gaaaacaugcuacac

SEQ ID NO: 2986314 - RNA, 14 nt, Human
gaaaacaugcuaca

SEQ ID NO: 2986315 - RNA, 12 nt, Human
gaaaacaugcua

SEQ ID NO: 2986316 - RNA, 15 nt, Human
gaaaacguggcugcu

SEQ ID NO: 2986317 - RNA, 16 nt, Human
gaaaacguggcugcuu

SEQ ID NO: 2986318 - RNA, 18 nt, Human
gaaaacguggcugcuuca

SEQ ID NO: 2986319 - RNA, 14 nt, Human
gaaaacguggcugc

SEQ ID NO: 2986320 - RNA, 16 nt, Human
cuuuugagcauuuaga

SEQ ID NO: 2986321 - RNA, 21 nt, Human
cuuuugagugccuuacacaau

SEQ ID NO: 2986322 - RNA, 20 nt, Human
cuuuuuucucugauacagaa

SEQ ID NO: 2986323 - RNA, 15 nt, Human
cuuuuuucacuacau

SEQ ID NO: 2986324 - RNA, 14 nt, Human
cuuuuuuggcugcu

SEQ ID NO: 2986325 - RNA, 15 nt, Human
cuuuuuuggcugcug

SEQ ID NO: 2986326 - RNA, 22 nt, Human
cuuuuuucucugauacagaaaa

SEQ ID NO: 2986327 - RNA, 17 nt, Human
gaaaaaggaugcacaga

SEQ ID NO: 2986328 - RNA, 23 nt, Human
gaaaaaggaugcacagaguuguu

SEQ ID NO: 2986329 - RNA, 19 nt, Human
cuuuggacccugaggccca

SEQ ID NO: 2986330 - RNA, 17 nt, Human
cuuuggacccugaggcc

SEQ ID NO: 2986331 - RNA, 18 nt, Human
cuuuggacccugaggccc

SEQ ID NO: 2986332 - RNA, 15 nt, Human
cuuuggacccugagg

SEQ ID NO: 2986333 - RNA, 16 nt, Human
cuuuggacccugaggc

SEQ ID NO: 2986334 - RNA, 16 nt, Human
cuuucccaucuuccaa

SEQ ID NO: 2986335 - RNA, 18 nt, Human
cuuugugauuuuuguaau

SEQ ID NO: 2986336 - RNA, 17 nt, Human
cuuugugauuuuuguaa

SEQ ID NO: 2986337 - RNA, 19 nt, Human
cuuugugauuuuuguaauu

SEQ ID NO: 2986338 - RNA, 14 nt, Human
cuuuguucuggcuc

SEQ ID NO: 2986339 - RNA, 15 nt, Human
cuuuguucuggcucu

SEQ ID NO: 2986340 - RNA, 13 nt, Human
cuuugggaggcca

SEQ ID NO: 2986341 - RNA, 18 nt, Human
cuuuguccccaccgcaga

SEQ ID NO: 2986342 - RNA, 22 nt, Human
cuuuguccccaccgcagacagg

SEQ ID NO: 2986343 - RNA, 14 nt, Human
cuuugugauuuuug

SEQ ID NO: 2986344 - RNA, 18 nt, Human
cuuuucuguccgagcuuu

SEQ ID NO: 2986345 - RNA, 23 nt, Human
cuuuucuguccgagcuuugaaaa

SEQ ID NO: 2986346 - RNA, 18 nt, Human
cuuuucuugcaugaggcu

SEQ ID NO: 2986347 - RNA, 23 nt, Human
cuuuucuugcaugaggcuagugu

SEQ ID NO: 2986348 - RNA, 16 nt, Human
cuuuucuuucagccaa

SEQ ID NO: 2986349 - RNA, 20 nt, Human
cuuuucauaaccuagccuua

SEQ ID NO: 2986350 - RNA, 22 nt, Human
cuuuucauaaccuagccuuaga

SEQ ID NO: 2986351 - RNA, 18 nt, Human
cuuuguuuguugucagcu

SEQ ID NO: 2986352 - RNA, 20 nt, Human
cuuuguuuguugucagcuga

SEQ ID NO: 2986353 - RNA, 18 nt, Human
gaaguaaaauguggcagg

SEQ ID NO: 2986354 - RNA, 17 nt, Human
gaaguaaaauguggcag

SEQ ID NO: 2986355 - RNA, 12 nt, Human
gaaguuucugcc

SEQ ID NO: 2986356 - RNA, 20 nt, Human
gaauaauccuaaacauauga

SEQ ID NO: 2986357 - RNA, 14 nt, Human
gaauaacauguaau

SEQ ID NO: 2986358 - RNA, 14 nt, Human
gaauacuuuauaaa

SEQ ID NO: 2986359 - RNA, 16 nt, Human
gaaucucaaauaacua

SEQ ID NO: 2986360 - RNA, 14 nt, Human
gaaugaaagggccc

SEQ ID NO: 2986361 - RNA, 19 nt, Human
gaaugaaagggcccagaga

SEQ ID NO: 2986362 - RNA, 14 nt, Human
gaauagcugggacu

SEQ ID NO: 2986363 - RNA, 15 nt, Human
gaauagcugggacua

SEQ ID NO: 2986364 - RNA, 16 nt, Human
gaagguagaauguuuu

SEQ ID NO: 2986365 - RNA, 17 nt, Human
gaagguagaauguuuuc

SEQ ID NO: 2986366 - RNA, 15 nt, Human
gaagguagaauguuu

SEQ ID NO: 2986367 - RNA, 14 nt, Human
gaaggccccgccca

SEQ ID NO: 2986368 - RNA, 15 nt, Human
gaaggccccgcccag

SEQ ID NO: 2986369 - RNA, 16 nt, Human
gaaggccccgcccagg

SEQ ID NO: 2986370 - RNA, 21 nt, Human
gaaggauacaaaagcauguga

SEQ ID NO: 2986371 - RNA, 19 nt, Human
gaaggauacaaaagcaugu

SEQ ID NO: 2986372 - RNA, 12 nt, Human
gaaggauacaaa

SEQ ID NO: 2986373 - RNA, 14 nt, Human
gaaggaaacccagc

SEQ ID NO: 2986374 - RNA, 17 nt, Human
gaaggaaacccagcucu

SEQ ID NO: 2986375 - RNA, 18 nt, Human
gaaggaaacccagcucug

SEQ ID NO: 2986376 - RNA, 15 nt, Human
gaagccagcaggcuc

SEQ ID NO: 2986377 - RNA, 16 nt, Human
gaagccagcaggcucu

SEQ ID NO: 2986378 - RNA, 21 nt, Human
gaagacucauucuucuguacg

SEQ ID NO: 2986379 - RNA, 19 nt, Human
gaagacucauucuucugua

SEQ ID NO: 2986380 - RNA, 23 nt, Human
gaagccagcaggcucucaggcca

SEQ ID NO: 2986381 - RNA, 20 nt, Human
gaagcccaggaaaggcucca

SEQ ID NO: 2986382 - RNA, 21 nt, Human
gaagcccaggaaaggcuccag

SEQ ID NO: 2986383 - RNA, 22 nt, Human
gaagcccaggaaaggcuccagg

SEQ ID NO: 2986384 - RNA, 21 nt, Human
gaagccgcuggggccaguugg

SEQ ID NO: 2986385 - RNA, 21 nt, Human
gaagccuuggggcugaugcag

SEQ ID NO: 2986386 - RNA, 14 nt, Human
gaagaaaauaauua

SEQ ID NO: 2986387 - RNA, 21 nt, Human
gaagaaaauagaauugacauu

SEQ ID NO: 2986388 - RNA, 15 nt, Human
gaagaaaauagaauu

SEQ ID NO: 2986389 - RNA, 21 nt, Human
gaagaagcaccaaucaugaau

SEQ ID NO: 2986390 - RNA, 23 nt, Human
gaacuugguucccauuugcuccu

SEQ ID NO: 2986391 - RNA, 12 nt, Human
gaacuugguucc

SEQ ID NO: 2986392 - RNA, 21 nt, Human
gaacuuguaaaggaauuuaaa

SEQ ID NO: 2986393 - RNA, 15 nt, Human
gaacuuggcgcugcc

SEQ ID NO: 2986394 - RNA, 16 nt, Human
gaacuuggcgcugccc

SEQ ID NO: 2986395 - RNA, 13 nt, Human
gaacuuggcgcug

SEQ ID NO: 2986396 - RNA, 14 nt, Human
gaacucccuuucaa

SEQ ID NO: 2986397 - RNA, 22 nt, Human
gaacuggguacuuguggacaca

SEQ ID NO: 2986398 - RNA, 22 nt, Human
gaacuuccagauccuggaaauc

SEQ ID NO: 2986399 - RNA, 21 nt, Human
gaaccacaucuugcucugcug

SEQ ID NO: 2986400 - RNA, 20 nt, Human
gaaccacaucuugcucugcu

SEQ ID NO: 2986401 - RNA, 16 nt, Human
gaacagacuggaagca

SEQ ID NO: 2986402 - RNA, 15 nt, Human
gaacagacuggaagc

SEQ ID NO: 2986403 - RNA, 17 nt, Human
gaaccaccacacccagc

SEQ ID NO: 2986404 - RNA, 16 nt, Human
gaaccaccacacccag

SEQ ID NO: 2986405 - RNA, 22 nt, Human
gaacuagaguuuagcuggaaaa

SEQ ID NO: 2986406 - RNA, 21 nt, Human
gaacuagaguuuagcuggaaa

SEQ ID NO: 2986407 - RNA, 21 nt, Human
gaaauaucugaaaauguaugu

SEQ ID NO: 2986408 - RNA, 13 nt, Human
gaaauauaauuga

SEQ ID NO: 2986409 - RNA, 20 nt, Human
gaaauaucugaaaauguaug

SEQ ID NO: 2986410 - RNA, 19 nt, Human
gaaauaacagaagaaaaua

SEQ ID NO: 2986411 - RNA, 18 nt, Human
gaaauaacagaagaaaau

SEQ ID NO: 2986412 - RNA, 17 nt, Human
gaaauaacagaagaaaa

SEQ ID NO: 2986413 - RNA, 22 nt, Human
gaaauaacagaagaaaauagaa

SEQ ID NO: 2986414 - RNA, 20 nt, Human
gaaauaacagaagaaaauag

SEQ ID NO: 2986415 - RNA, 16 nt, Human
gaaauauuauguuaaa

SEQ ID NO: 2986416 - RNA, 13 nt, Human
gaaauauuauguu

SEQ ID NO: 2986417 - RNA, 20 nt, Human
gaaaugggcagagcagagac

SEQ ID NO: 2986418 - RNA, 14 nt, Human
gaaaugggcagagc

SEQ ID NO: 2986419 - RNA, 18 nt, Human
gaaauuguauuacaaauc

SEQ ID NO: 2986420 - RNA, 17 nt, Human
gaaauuuguuauaauga

SEQ ID NO: 2986421 - RNA, 23 nt, Human
cugggguggguggggcagugcuu

SEQ ID NO: 2986422 - RNA, 18 nt, Human
cugggcuugucuguagau

SEQ ID NO: 2986423 - RNA, 22 nt, Human
cugggcuuggggaccagagcug

SEQ ID NO: 2986424 - RNA, 15 nt, Human
cugggcuucaguggc

SEQ ID NO: 2986425 - RNA, 18 nt, Human
cugggggcugggcagagg

SEQ ID NO: 2986426 - RNA, 14 nt, Human
cugggggcugggca

SEQ ID NO: 2986427 - RNA, 21 nt, Human
cugggauuacaagcgugagcc

SEQ ID NO: 2986428 - RNA, 19 nt, Human
cugggcaacagagcaagac

SEQ ID NO: 2986429 - RNA, 14 nt, Human
cugggauuggcugu

SEQ ID NO: 2986430 - RNA, 18 nt, Human
cugggcaacagagcaaga

SEQ ID NO: 2986431 - RNA, 15 nt, Human
cugggcaacagagca

SEQ ID NO: 2986432 - RNA, 21 nt, Human
cugggauuggcugugaacuga

SEQ ID NO: 2986433 - RNA, 17 nt, Human
cugggauuggcugugaa

SEQ ID NO: 2986434 - RNA, 17 nt, Human
cugggccucggacccca

SEQ ID NO: 2986435 - RNA, 19 nt, Human
cugggccucggaccccacu

SEQ ID NO: 2986436 - RNA, 18 nt, Human
cugguggcagugggagcu

SEQ ID NO: 2986437 - RNA, 14 nt, Human
cugguggcaguggg

SEQ ID NO: 2986438 - RNA, 20 nt, Human
cugguggcagcucaccucuc

SEQ ID NO: 2986439 - RNA, 15 nt, Human
cugguggcagcugcg

SEQ ID NO: 2986440 - RNA, 17 nt, Human
cugguggcagcucaccu

SEQ ID NO: 2986441 - RNA, 18 nt, Human
cugguggcagcucaccuc

SEQ ID NO: 2986442 - RNA, 16 nt, Human
cugguggcagcucacc

SEQ ID NO: 2986443 - RNA, 21 nt, Human
cugguuagagguucccuuuga

SEQ ID NO: 2986444 - RNA, 22 nt, Human
cugguuagagguucccuuugac

SEQ ID NO: 2986445 - RNA, 19 nt, Human
cuguaauccuagcacuuug

SEQ ID NO: 2986446 - RNA, 14 nt, Human
cuguacagagccca

SEQ ID NO: 2986447 - RNA, 15 nt, Human
cuguacagagcccac

SEQ ID NO: 2986448 - RNA, 18 nt, Human
cuguacagagcccacgcc

SEQ ID NO: 2986449 - RNA, 22 nt, Human
cuguacagagcccacgccccca

SEQ ID NO: 2986450 - RNA, 15 nt, Human
cuguaauuugugaua

SEQ ID NO: 2986451 - RNA, 14 nt, Human
cuguaauuugugau

SEQ ID NO: 2986452 - RNA, 18 nt, Human
cuguacgucugacaggca

SEQ ID NO: 2986453 - RNA, 16 nt, Human
cuguacgucugacagg

SEQ ID NO: 2986454 - RNA, 15 nt, Human
cuguacgucugacag

SEQ ID NO: 2986455 - RNA, 14 nt, Human
cuguacgucugaca

SEQ ID NO: 2986456 - RNA, 21 nt, Human
cuguacaugaaaacacauuuu

SEQ ID NO: 2986457 - RNA, 20 nt, Human
cuguacaugaaaacacauuu

SEQ ID NO: 2986458 - RNA, 17 nt, Human
cuguacaugaaaacaca

SEQ ID NO: 2986459 - RNA, 20 nt, Human
cuguacgucugacaggcaau

SEQ ID NO: 2986460 - RNA, 19 nt, Human
cuguacgucugacaggcaa

SEQ ID NO: 2986461 - RNA, 19 nt, Human
cuguaucccaugagccuca

SEQ ID NO: 2986462 - RNA, 20 nt, Human
cuguaucccaugagccucag

SEQ ID NO: 2986463 - RNA, 22 nt, Human
cuguaucccaugagccucagca

SEQ ID NO: 2986464 - RNA, 21 nt, Human
cuguaucccaugagccucagc

SEQ ID NO: 2986465 - RNA, 15 nt, Human
cugucaauuacagga

SEQ ID NO: 2986466 - RNA, 16 nt, Human
cugucaauuacaggaa

SEQ ID NO: 2986467 - RNA, 13 nt, Human
cugucaauuacag

SEQ ID NO: 2986468 - RNA, 20 nt, Human
cuguauuuuguuuuugucuu

SEQ ID NO: 2986469 - RNA, 15 nt, Human
cugucuuuuaaacuc

SEQ ID NO: 2986470 - RNA, 14 nt, Human
cugucuuuuaaacu

SEQ ID NO: 2986471 - RNA, 15 nt, Human
cugugaaaggaaaga

SEQ ID NO: 2986472 - RNA, 18 nt, Human
cugucuucacaacagauu

SEQ ID NO: 2986473 - RNA, 18 nt, Human
cugucuucaguaagccgu

SEQ ID NO: 2986474 - RNA, 18 nt, Human
cugucaauuacaggaagu

SEQ ID NO: 2986475 - RNA, 20 nt, Human
cugucauuugagcagggcuc

SEQ ID NO: 2986476 - RNA, 22 nt, Human
cugucauuugagcagggcucag

SEQ ID NO: 2986477 - RNA, 21 nt, Human
cugucauuugagcagggcuca

SEQ ID NO: 2986478 - RNA, 22 nt, Human
cugugauuuuugguauuugaaa

SEQ ID NO: 2986479 - RNA, 23 nt, Human
cugugauggggcccugccuccuu

SEQ ID NO: 2986480 - RNA, 16 nt, Human
cugugauggggcccug

SEQ ID NO: 2986481 - RNA, 21 nt, Human
cugugauggggcccugccucc

SEQ ID NO: 2986482 - RNA, 15 nt, Human
cugugauggggcccu

SEQ ID NO: 2986483 - RNA, 19 nt, Human
cugugaugacauucccugc

SEQ ID NO: 2986484 - RNA, 16 nt, Human
cugugaaaggaaagag

SEQ ID NO: 2986485 - RNA, 22 nt, Human
cugugaaaggaaagagggaggu

SEQ ID NO: 2986486 - RNA, 14 nt, Human
cugugccaugugcc

SEQ ID NO: 2986487 - RNA, 19 nt, Human
cugugcccuaaaguguauu

SEQ ID NO: 2986488 - RNA, 22 nt, Human
cugugccauuuuguauuuuacu

SEQ ID NO: 2986489 - RNA, 15 nt, Human
cugugccaugugcca

SEQ ID NO: 2986490 - RNA, 15 nt, Human
cuguguuguacagcu

SEQ ID NO: 2986491 - RNA, 15 nt, Human
cuguuaaaagaugaa

SEQ ID NO: 2986492 - RNA, 16 nt, Human
cuguuaaaagaugaaa

SEQ ID NO: 2986493 - RNA, 19 nt, Human
cuguuaaaagaugaaaaua

SEQ ID NO: 2986494 - RNA, 20 nt, Human
cugugucuuuuuucacuaca

SEQ ID NO: 2986495 - RNA, 23 nt, Human
cugugucuugcaauggcagccuu

SEQ ID NO: 2986496 - RNA, 22 nt, Human
cuguggguuucuaaagcugcca

SEQ ID NO: 2986497 - RNA, 21 nt, Human
cuguggguuucuaaagcugcc

SEQ ID NO: 2986498 - RNA, 23 nt, Human
cuuagacccucaugcugccaaua

SEQ ID NO: 2986499 - RNA, 19 nt, Human
cuuagacccucaugcugcc

SEQ ID NO: 2986500 - RNA, 20 nt, Human
cuuagacccucaugcugcca

SEQ ID NO: 2986501 - RNA, 21 nt, Human
cuuagacccucaugcugccaa

SEQ ID NO: 2986502 - RNA, 22 nt, Human
cuuagacccucaugcugccaau

SEQ ID NO: 2986503 - RNA, 19 nt, Human
cuuagaauuaguggcacuu

SEQ ID NO: 2986504 - RNA, 18 nt, Human
cuuagacccucaugcugc

SEQ ID NO: 2986505 - RNA, 23 nt, Human
cuuagguuggcaaaaaggcagga

SEQ ID NO: 2986506 - RNA, 21 nt, Human
cuuagguuggcaaaaaggcag

SEQ ID NO: 2986507 - RNA, 20 nt, Human
cuuagaagucacacaguauu

SEQ ID NO: 2986508 - RNA, 17 nt, Human
cuuagaagucacacagu

SEQ ID NO: 2986509 - RNA, 20 nt, Human
cuuagaaaaaccaccaccau

SEQ ID NO: 2986510 - RNA, 21 nt, Human
cuuagaaauaacagaagaaaa

SEQ ID NO: 2986511 - RNA, 23 nt, Human
cuuagaaauaacagaagaaaaua

SEQ ID NO: 2986512 - RNA, 13 nt, Human
cuuaccugccagg

SEQ ID NO: 2986513 - RNA, 20 nt, Human
cuuaccugccaggaagccag

SEQ ID NO: 2986514 - RNA, 10 nt, Human
cuuaauuauu

SEQ ID NO: 2986515 - RNA, 19 nt, Human
cuuaauuaaaagaauauuu

SEQ ID NO: 2986516 - RNA, 20 nt, Human
cuuaauuaaaagaauauuuu

SEQ ID NO: 2986517 - RNA, 16 nt, Human
cuuaauuauugauguu

SEQ ID NO: 2986518 - RNA, 20 nt, Human
cuuaauucuuagcucauucu

SEQ ID NO: 2986519 - RNA, 16 nt, Human
cuuaauuaaaagaaua

SEQ ID NO: 2986520 - RNA, 17 nt, Human
cuuaauuaaaagaauau

SEQ ID NO: 2986521 - RNA, 19 nt, Human
cuuaaugagacuuuaaaag

SEQ ID NO: 2986522 - RNA, 15 nt, Human
cuuaaugaaaacaau

SEQ ID NO: 2986523 - RNA, 16 nt, Human
cuuaaucuaaauggaa

SEQ ID NO: 2986524 - RNA, 17 nt, Human
cuuaagacuuaaugaga

SEQ ID NO: 2986525 - RNA, 15 nt, Human
cuuaagacuuaauga

SEQ ID NO: 2986526 - RNA, 21 nt, Human
cuuaagaagacugcauuauau

SEQ ID NO: 2986527 - RNA, 23 nt, Human
cuuaagaagacugcauuauauuu

SEQ ID NO: 2986528 - RNA, 20 nt, Human
cuguuuuuauuauuaacaaa

SEQ ID NO: 2986529 - RNA, 12 nt, Human
cuuaaaaacaac

SEQ ID NO: 2986530 - RNA, 14 nt, Human
cuuaaaaacaacga

SEQ ID NO: 2986531 - RNA, 16 nt, Human
cuuaaaaaguggaaaa

SEQ ID NO: 2986532 - RNA, 17 nt, Human
cuuaaaaaguggaaaaa

SEQ ID NO: 2986533 - RNA, 18 nt, Human
cuguuuuuauuauuaaca

SEQ ID NO: 2986534 - RNA, 15 nt, Human
cuguuuuauaauuuu

SEQ ID NO: 2986535 - RNA, 14 nt, Human
cuguuuuauaauuu

SEQ ID NO: 2986536 - RNA, 17 nt, Human
cuguuugcuaagugagg

SEQ ID NO: 2986537 - RNA, 19 nt, Human
cuguuugcuaagugaggau

SEQ ID NO: 2986538 - RNA, 18 nt, Human
cuguuuagauaauacacc

SEQ ID NO: 2986539 - RNA, 17 nt, Human
cuguuucaaacuuuacu

SEQ ID NO: 2986540 - RNA, 15 nt, Human
cuguuucaaacuuua

SEQ ID NO: 2986541 - RNA, 17 nt, Human
cuguuuagauaauacac

SEQ ID NO: 2986542 - RNA, 14 nt, Human
cuguuuagauaaua

SEQ ID NO: 2986543 - RNA, 17 nt, Human
cuguugcccaggcuggc

SEQ ID NO: 2986544 - RNA, 23 nt, Human
cuguucuuucuggcuaugcauuu

SEQ ID NO: 2986545 - RNA, 16 nt, Human
cuguugcccaggcugg

SEQ ID NO: 2986546 - RNA, 15 nt, Human
cuguugcccaggcug

SEQ ID NO: 2986547 - RNA, 14 nt, Human
cuguugcccaggcu

SEQ ID NO: 2986548 - RNA, 13 nt, Human
cuguugcccaggc

SEQ ID NO: 2986549 - RNA, 12 nt, Human
cuguugcccagg

SEQ ID NO: 2986550 - RNA, 21 nt, Human
cuguucuuucuggcuaugcau

SEQ ID NO: 2986551 - RNA, 14 nt, Human
cuguucuuucuggc

SEQ ID NO: 2986552 - RNA, 13 nt, Human
cuguucuuucugg

SEQ ID NO: 2986553 - RNA, 21 nt, Human
cuguucuuuccaaaguacacu

SEQ ID NO: 2986554 - RNA, 19 nt, Human
cuguucuuuccaaaguaca

SEQ ID NO: 2986555 - RNA, 16 nt, Human
cuguucuuuccaaagu

SEQ ID NO: 2986556 - RNA, 15 nt, Human
cuguucuuuccaaag

SEQ ID NO: 2986557 - RNA, 16 nt, Human
cuguuaauaguucagg

SEQ ID NO: 2986558 - RNA, 14 nt, Human
cuucaagaaugcag

SEQ ID NO: 2986559 - RNA, 17 nt, Human
cuucaaggauccugagc

SEQ ID NO: 2986560 - RNA, 18 nt, Human
cuucaaggauccugagcc

SEQ ID NO: 2986561 - RNA, 19 nt, Human
cuucaaggauccugagcca

SEQ ID NO: 2986562 - RNA, 20 nt, Human
cuucaaggauccugagccag

SEQ ID NO: 2986563 - RNA, 21 nt, Human
cuuagucacugagacagcccg

SEQ ID NO: 2986564 - RNA, 20 nt, Human
cuuagucacugagacagccc

SEQ ID NO: 2986565 - RNA, 22 nt, Human
cuuagucacugagacagcccgg

SEQ ID NO: 2986566 - RNA, 15 nt, Human
cuucaaauauuuccc

SEQ ID NO: 2986567 - RNA, 17 nt, Human
cuucaaauccuugaaga

SEQ ID NO: 2986568 - RNA, 12 nt, Human
cuucacaacaga

SEQ ID NO: 2986569 - RNA, 14 nt, Human
cuucacaacagauu

SEQ ID NO: 2986570 - RNA, 21 nt, Human
cuucaaggauccugagccaga

SEQ ID NO: 2986571 - RNA, 22 nt, Human
cuucaaggauccugagccagau

SEQ ID NO: 2986572 - RNA, 23 nt, Human
cuucaaggauccugagccagauu

SEQ ID NO: 2986573 - RNA, 23 nt, Human
cuucacauauugauuuccguuaa

SEQ ID NO: 2986574 - RNA, 14 nt, Human
cuucacauauugau

SEQ ID NO: 2986575 - RNA, 24 nt, Human
cuucagagacuccugcaggcagcc

SEQ ID NO: 2986576 - RNA, 15 nt, Human
cuucagccugaaaga

SEQ ID NO: 2986577 - RNA, 20 nt, Human
cuucagccucccgaguagcu

SEQ ID NO: 2986578 - RNA, 16 nt, Human
cuucagccucccgagu

SEQ ID NO: 2986579 - RNA, 14 nt, Human
cuucagccucccga

SEQ ID NO: 2986580 - RNA, 14 nt, Human
cuucaguaagccgu

SEQ ID NO: 2986581 - RNA, 15 nt, Human
cuucagcugacuuuu

SEQ ID NO: 2986582 - RNA, 19 nt, Human
cuucagcugacuuuucugu

SEQ ID NO: 2986583 - RNA, 14 nt, Human
cuucagugccaaaa

SEQ ID NO: 2986584 - RNA, 14 nt, Human
cuuccacaagagcc

SEQ ID NO: 2986585 - RNA, 15 nt, Human
cuuccacaagagccc

SEQ ID NO: 2986586 - RNA, 13 nt, Human
cuuccacaagagc

SEQ ID NO: 2986587 - RNA, 16 nt, Human
cuuccacuugaguguc

SEQ ID NO: 2986588 - RNA, 20 nt, Human
cuuccuuggacucauuuuaa

SEQ ID NO: 2986589 - RNA, 17 nt, Human
cuucgcuccugugucuu

SEQ ID NO: 2986590 - RNA, 16 nt, Human
cuucgcuccugugucu

SEQ ID NO: 2986591 - RNA, 21 nt, Human
cuucucacugccaugccagcu

SEQ ID NO: 2986592 - RNA, 16 nt, Human
cuucucacugccaugc

SEQ ID NO: 2986593 - RNA, 19 nt, Human
cuucgggaggucgaggcag

SEQ ID NO: 2986594 - RNA, 20 nt, Human
cuucggccuccauccugagg

SEQ ID NO: 2986595 - RNA, 19 nt, Human
cuucggccuccauccugag

SEQ ID NO: 2986596 - RNA, 12 nt, Human
cccuaaucuucc

SEQ ID NO: 2986597 - RNA, 20 nt, Human
cccuacaguugaaaaacagc

SEQ ID NO: 2986598 - RNA, 15 nt, Human
cccgugggguuccuc

SEQ ID NO: 2986599 - RNA, 17 nt, Human
cccgucuccagcugcug

SEQ ID NO: 2986600 - RNA, 16 nt, Human
cccgucuccagcugcu

SEQ ID NO: 2986601 - RNA, 13 nt, Human
cccgucuccagcu

SEQ ID NO: 2986602 - RNA, 16 nt, Human
cccgggcucugccucc

SEQ ID NO: 2986603 - RNA, 21 nt, Human
cccgaguagcugggacuacag

SEQ ID NO: 2986604 - RNA, 18 nt, Human
cccgaguagcugggacua

SEQ ID NO: 2986605 - RNA, 17 nt, Human
cccgaguagcugggacu

SEQ ID NO: 2986606 - RNA, 16 nt, Human
cccgaguagcugggac

SEQ ID NO: 2986607 - RNA, 15 nt, Human
cccgaguagcuggga

SEQ ID NO: 2986608 - RNA, 14 nt, Human
cccgaguagcuggg

SEQ ID NO: 2986609 - RNA, 13 nt, Human
cccgaguagcugg

SEQ ID NO: 2986610 - RNA, 15 nt, Human
cccagagggccugca

SEQ ID NO: 2986611 - RNA, 21 nt, Human
cccgaggccuucucugaagga

SEQ ID NO: 2986612 - RNA, 14 nt, Human
cccagagggccugc

SEQ ID NO: 2986613 - RNA, 19 nt, Human
cccgcugucagccauuccu

SEQ ID NO: 2986614 - RNA, 20 nt, Human
cccgcugucagccauuccug

SEQ ID NO: 2986615 - RNA, 22 nt, Human
cccgaguagcugggacuacagg

SEQ ID NO: 2986616 - RNA, 14 nt, Human
cccgggcucugccu

SEQ ID NO: 2986617 - RNA, 15 nt, Human
cccgggcucugccuc

SEQ ID NO: 2986618 - RNA, 12 nt, Human
cccgggcucugc

SEQ ID NO: 2986619 - RNA, 13 nt, Human
cccucuccugggc

SEQ ID NO: 2986620 - RNA, 12 nt, Human
cccucuccuggg

SEQ ID NO: 2986621 - RNA, 11 nt, Human
cccucuccugg

SEQ ID NO: 2986622 - RNA, 14 nt, Human
cccucuccugggca

SEQ ID NO: 2986623 - RNA, 12 nt, Human
cccucuggggcu

SEQ ID NO: 2986624 - RNA, 17 nt, Human
cccuccaccucccugca

SEQ ID NO: 2986625 - RNA, 15 nt, Human
cccuccaccucccug

SEQ ID NO: 2986626 - RNA, 19 nt, Human
cccuccaccucccugcaau

SEQ ID NO: 2986627 - RNA, 13 nt, Human
cccuccagagccc

SEQ ID NO: 2986628 - RNA, 12 nt, Human
cccuccaccucc

SEQ ID NO: 2986629 - RNA, 14 nt, Human
cccuccaccucccu

SEQ ID NO: 2986630 - RNA, 14 nt, Human
cccugaggcccaga

SEQ ID NO: 2986631 - RNA, 15 nt, Human
cccugaggcccagag

SEQ ID NO: 2986632 - RNA, 16 nt, Human
cccugaggcccagagg

SEQ ID NO: 2986633 - RNA, 17 nt, Human
cccugaggcccagaggg

SEQ ID NO: 2986634 - RNA, 18 nt, Human
cccugaggcccagagggc

SEQ ID NO: 2986635 - RNA, 19 nt, Human
cccugaggcccagagggcc

SEQ ID NO: 2986636 - RNA, 20 nt, Human
cccugaggcccagagggccu

SEQ ID NO: 2986637 - RNA, 23 nt, Human
cccugaggcccagagggccugca

SEQ ID NO: 2986638 - RNA, 16 nt, Human
cccucuggggcuguuc

SEQ ID NO: 2986639 - RNA, 13 nt, Human
cccugaggcccag

SEQ ID NO: 2986640 - RNA, 15 nt, Human
cccugaaagcccuga

SEQ ID NO: 2986641 - RNA, 19 nt, Human
cccugcacuugcagacucu

SEQ ID NO: 2986642 - RNA, 12 nt, Human
cccugcacuugc

SEQ ID NO: 2986643 - RNA, 21 nt, Human
cccugcacagcaggcugccag

SEQ ID NO: 2986644 - RNA, 20 nt, Human
cccugcacagcaggcugcca

SEQ ID NO: 2986645 - RNA, 15 nt, Human
cccugcacagcaggc

SEQ ID NO: 2986646 - RNA, 14 nt, Human
cccugcacagcagg

SEQ ID NO: 2986647 - RNA, 22 nt, Human
cccugcacagcaggcugccagu

SEQ ID NO: 2986648 - RNA, 13 nt, Human
cccugcacagcag

SEQ ID NO: 2986649 - RNA, 18 nt, Human
cccugcccaccuggccuc

SEQ ID NO: 2986650 - RNA, 16 nt, Human
cccugcuggguguggc

SEQ ID NO: 2986651 - RNA, 21 nt, Human
cccugcuggguguggcgcagc

SEQ ID NO: 2986652 - RNA, 13 nt, Human
cccugcccaccug

SEQ ID NO: 2986653 - RNA, 14 nt, Human
cccugcccaccugg

SEQ ID NO: 2986654 - RNA, 17 nt, Human
cccugcccaccuggccu

SEQ ID NO: 2986655 - RNA, 22 nt, Human
cccugcuggguguggcgcagca

SEQ ID NO: 2986656 - RNA, 16 nt, Human
cccugguggcagcuca

SEQ ID NO: 2986657 - RNA, 17 nt, Human
cccugguggcagcucac

SEQ ID NO: 2986658 - RNA, 15 nt, Human
cccugguggcagcuc

SEQ ID NO: 2986659 - RNA, 16 nt, Human
cccaaugcacuuuguu

SEQ ID NO: 2986660 - RNA, 20 nt, Human
cccaaugcacuuuguucugg

SEQ ID NO: 2986661 - RNA, 21 nt, Human
cccacaaaggagagcuagcag

SEQ ID NO: 2986662 - RNA, 13 nt, Human
cccacaagaaaug

SEQ ID NO: 2986663 - RNA, 20 nt, Human
cccacaagaaaugaaagcag

SEQ ID NO: 2986664 - RNA, 22 nt, Human
cccaccucucucacuccuugaa

SEQ ID NO: 2986665 - RNA, 17 nt, Human
cccaccucagccucccg

SEQ ID NO: 2986666 - RNA, 16 nt, Human
cccaccagugccucuc

SEQ ID NO: 2986667 - RNA, 15 nt, Human
cccaccagugccucu

SEQ ID NO: 2986668 - RNA, 23 nt, Human
cccaccagugccucucccugcug

SEQ ID NO: 2986669 - RNA, 20 nt, Human
cccaccgcagacaggaccag

SEQ ID NO: 2986670 - RNA, 19 nt, Human
cccaccgcagacaggacca

SEQ ID NO: 2986671 - RNA, 14 nt, Human
cccaccagugccuc

SEQ ID NO: 2986672 - RNA, 13 nt, Human
cccaccagugccu

SEQ ID NO: 2986673 - RNA, 21 nt, Human
cccacgcuggagugcagugag

SEQ ID NO: 2986674 - RNA, 20 nt, Human
cccacgcuggagugcaguga

SEQ ID NO: 2986675 - RNA, 19 nt, Human
cccacgcuggagugcagug

SEQ ID NO: 2986676 - RNA, 14 nt, Human
cccacgcuggagug

SEQ ID NO: 2986677 - RNA, 23 nt, Human
cccacuugagaauuacccuuuug

SEQ ID NO: 2986678 - RNA, 12 nt, Human
cccacuucugcc

SEQ ID NO: 2986679 - RNA, 20 nt, Human
cccacgacugcccggcaggg

SEQ ID NO: 2986680 - RNA, 21 nt, Human
cccacgacugcccggcagggu

SEQ ID NO: 2986681 - RNA, 20 nt, Human
cccaccuuggcugcagggag

SEQ ID NO: 2986682 - RNA, 16 nt, Human
cccaccuggccucugc

SEQ ID NO: 2986683 - RNA, 19 nt, Human
cccaccuggccucugcacu

SEQ ID NO: 2986684 - RNA, 21 nt, Human
cccaccuggccucugcacucc

SEQ ID NO: 2986685 - RNA, 17 nt, Human
cccaccuggccucugca

SEQ ID NO: 2986686 - RNA, 15 nt, Human
ccuccacauuuguuu

SEQ ID NO: 2986687 - RNA, 13 nt, Human
ccucauccucaua

SEQ ID NO: 2986688 - RNA, 20 nt, Human
ccucauccucauacccaccc

SEQ ID NO: 2986689 - RNA, 13 nt, Human
ccucaucaccaac

SEQ ID NO: 2986690 - RNA, 14 nt, Human
ccucaucaccaacg

SEQ ID NO: 2986691 - RNA, 22 nt, Human
ccucauaguaugguggcugggu

SEQ ID NO: 2986692 - RNA, 21 nt, Human
ccucauaguaugguggcuggg

SEQ ID NO: 2986693 - RNA, 13 nt, Human
ccucauacccacc

SEQ ID NO: 2986694 - RNA, 20 nt, Human
ccucauaguaugguggcugg

SEQ ID NO: 2986695 - RNA, 20 nt, Human
ccucagucuggcccuuccuu

SEQ ID NO: 2986696 - RNA, 12 nt, Human
ccucauacccac

SEQ ID NO: 2986697 - RNA, 11 nt, Human
ccucagugcca

SEQ ID NO: 2986698 - RNA, 19 nt, Human
ccucagucuggcccuuccu

SEQ ID NO: 2986699 - RNA, 15 nt, Human
ccuccaccucccugc

SEQ ID NO: 2986700 - RNA, 14 nt, Human
ccuccaccucccug

SEQ ID NO: 2986701 - RNA, 13 nt, Human
ccuccaccucccu

SEQ ID NO: 2986702 - RNA, 22 nt, Human
ccuccaccucccugcaauaaaa

SEQ ID NO: 2986703 - RNA, 17 nt, Human
ccuccaccucccugcaa

SEQ ID NO: 2986704 - RNA, 20 nt, Human
ccuccagagccccacagccc

SEQ ID NO: 2986705 - RNA, 19 nt, Human
ccuccagagccccacagcc

SEQ ID NO: 2986706 - RNA, 18 nt, Human
ccuccagagccccacagc

SEQ ID NO: 2986707 - RNA, 15 nt, Human
ccuccagagccccac

SEQ ID NO: 2986708 - RNA, 12 nt, Human
ccuccagagccc

SEQ ID NO: 2986709 - RNA, 13 nt, Human
ccuccagagcccc

SEQ ID NO: 2986710 - RNA, 19 nt, Human
ccuccaggugcacaagcuc

SEQ ID NO: 2986711 - RNA, 21 nt, Human
ccuccaggugcacaagcucca

SEQ ID NO: 2986712 - RNA, 22 nt, Human
ccuccaggugcacaagcuccaa

SEQ ID NO: 2986713 - RNA, 14 nt, Human
ccuccauccugagg

SEQ ID NO: 2986714 - RNA, 15 nt, Human
ccucccaaagugcug

SEQ ID NO: 2986715 - RNA, 23 nt, Human
ccuccaugugggcuaguugggcu

SEQ ID NO: 2986716 - RNA, 16 nt, Human
ccucccaaagugcugg

SEQ ID NO: 2986717 - RNA, 17 nt, Human
ccucccgaauagcuggg

SEQ ID NO: 2986718 - RNA, 16 nt, Human
ccucggugccuuccuc

SEQ ID NO: 2986719 - RNA, 14 nt, Human
ccucgguguggaga

SEQ ID NO: 2986720 - RNA, 16 nt, Human
ccucuaggaggucucu

SEQ ID NO: 2986721 - RNA, 21 nt, Human
ccucuagugaauguaggcugg

SEQ ID NO: 2986722 - RNA, 18 nt, Human
ccucuaucccggcuuugg

SEQ ID NO: 2986723 - RNA, 10 nt, Human
ccucccuccc

SEQ ID NO: 2986724 - RNA, 17 nt, Human
ccucccuccaccucccu

SEQ ID NO: 2986725 - RNA, 20 nt, Human
ccucccuccaccucccugca

SEQ ID NO: 2986726 - RNA, 14 nt, Human
ccuccucagaucuu

SEQ ID NO: 2986727 - RNA, 21 nt, Human
ccucccgaguagcugggacua

SEQ ID NO: 2986728 - RNA, 20 nt, Human
ccucccgaguagcugggacu

SEQ ID NO: 2986729 - RNA, 19 nt, Human
ccucccgaguagcugggac

SEQ ID NO: 2986730 - RNA, 13 nt, Human
ccuccucugcuug

SEQ ID NO: 2986731 - RNA, 16 nt, Human
ccuccucugcuugcca

SEQ ID NO: 2986732 - RNA, 18 nt, Human
ccuccucugcuugccauc

SEQ ID NO: 2986733 - RNA, 14 nt, Human
ccuccugggcuaag

SEQ ID NO: 2986734 - RNA, 23 nt, Human
ccuccugccucgaacuggcugca

SEQ ID NO: 2986735 - RNA, 13 nt, Human
ccuccugccucga

SEQ ID NO: 2986736 - RNA, 14 nt, Human
ccuaaaguguauuu

SEQ ID NO: 2986737 - RNA, 16 nt, Human
ccuaaaauuauggaaa

SEQ ID NO: 2986738 - RNA, 13 nt, Human
ccuaguuccacca

SEQ ID NO: 2986739 - RNA, 21 nt, Human
ccuaguuccaccaucaagcca

SEQ ID NO: 2986740 - RNA, 23 nt, Human
ccuaguuccaccaucaagccacc

SEQ ID NO: 2986741 - RNA, 18 nt, Human
ccuauauuguuuucagug

SEQ ID NO: 2986742 - RNA, 22 nt, Human
ccuauauuguuuucaguguaca

SEQ ID NO: 2986743 - RNA, 20 nt, Human
ccgggcgcgguggcucacgc

SEQ ID NO: 2986744 - RNA, 16 nt, Human
ccgggcguggugguga

SEQ ID NO: 2986745 - RNA, 22 nt, Human
ccgggcucugccucccaucacc

SEQ ID NO: 2986746 - RNA, 17 nt, Human
ccggcuggccuggcccc

SEQ ID NO: 2986747 - RNA, 18 nt, Human
ccggcuggccuggccccu

SEQ ID NO: 2986748 - RNA, 15 nt, Human
ccggcuggccuggcc

SEQ ID NO: 2986749 - RNA, 19 nt, Human
ccgcuuucuacccagcgag

SEQ ID NO: 2986750 - RNA, 20 nt, Human
ccgggaagggggcugggaca

SEQ ID NO: 2986751 - RNA, 12 nt, Human
ccgcuuucuacc

SEQ ID NO: 2986752 - RNA, 14 nt, Human
ccgaggccuucucu

SEQ ID NO: 2986753 - RNA, 20 nt, Human
cccugguggcagcucaccuc

SEQ ID NO: 2986754 - RNA, 17 nt, Human
ccgaguagcugggacua

SEQ ID NO: 2986755 - RNA, 16 nt, Human
ccgaguagcugggacu

SEQ ID NO: 2986756 - RNA, 20 nt, Human
ccgaguagcugggacuacag

SEQ ID NO: 2986757 - RNA, 14 nt, Human
ccgcacugggcuug

SEQ ID NO: 2986758 - RNA, 22 nt, Human
ccgccuugcccagccuggaugc

SEQ ID NO: 2986759 - RNA, 17 nt, Human
ccgccuugcccagccug

SEQ ID NO: 2986760 - RNA, 16 nt, Human
ccgccuugcccagccu

SEQ ID NO: 2986761 - RNA, 15 nt, Human
ccgccuugcccagcc

SEQ ID NO: 2986762 - RNA, 23 nt, Human
ccgcuaagagggagggagggcuc

SEQ ID NO: 2986763 - RNA, 21 nt, Human
ccgcuaagagggagggagggc

SEQ ID NO: 2986764 - RNA, 15 nt, Human
ccuguuuuuauuauu

SEQ ID NO: 2986765 - RNA, 14 nt, Human
ccuguuuuuauuau

SEQ ID NO: 2986766 - RNA, 14 nt, Human
ccuuacacaauggu

SEQ ID NO: 2986767 - RNA, 20 nt, Human
ccuuacacaaugguuuucuu

SEQ ID NO: 2986768 - RNA, 13 nt, Human
ccuuaccagcaga

SEQ ID NO: 2986769 - RNA, 20 nt, Human
ccuuaccagcagagcaccuu

SEQ ID NO: 2986770 - RNA, 15 nt, Human
ccuuacccucauguu

SEQ ID NO: 2986771 - RNA, 19 nt, Human
ccuuaccugccaggaagcc

SEQ ID NO: 2986772 - RNA, 18 nt, Human
ccuuagaagucacacagu

SEQ ID NO: 2986773 - RNA, 17 nt, Human
ccuuagaagucacacag

SEQ ID NO: 2986774 - RNA, 21 nt, Human
ccugugugugcgccuacagga

SEQ ID NO: 2986775 - RNA, 20 nt, Human
ccugugugugcgccuacagg

SEQ ID NO: 2986776 - RNA, 22 nt, Human
ccugugucuugcaauggcagcc

SEQ ID NO: 2986777 - RNA, 21 nt, Human
ccugugucuugcaauggcagc

SEQ ID NO: 2986778 - RNA, 19 nt, Human
ccugugucuugcaauggca

SEQ ID NO: 2986779 - RNA, 17 nt, Human
ccugugucuugcaaugg

SEQ ID NO: 2986780 - RNA, 14 nt, Human
ccuguuuguuucug

SEQ ID NO: 2986781 - RNA, 18 nt, Human
ccuguuuguuucugaaag

SEQ ID NO: 2986782 - RNA, 16 nt, Human
ccuguuucugcagcca

SEQ ID NO: 2986783 - RNA, 20 nt, Human
ccuguuaaaagaugaaaaua

SEQ ID NO: 2986784 - RNA, 21 nt, Human
ccuguuaaaagaugaaaauau

SEQ ID NO: 2986785 - RNA, 23 nt, Human
ccuguugggccaggagccuccug

SEQ ID NO: 2986786 - RNA, 13 nt, Human
ccuuguuuaaugg

SEQ ID NO: 2986787 - RNA, 21 nt, Human
ccuugucggccccaccagugc

SEQ ID NO: 2986788 - RNA, 15 nt, Human
ccuugucggccccac

SEQ ID NO: 2986789 - RNA, 16 nt, Human
ccuuugacgccauccc

SEQ ID NO: 2986790 - RNA, 17 nt, Human
ccuuugacgccauccca

SEQ ID NO: 2986791 - RNA, 18 nt, Human
ccuuugacgccaucccag

SEQ ID NO: 2986792 - RNA, 19 nt, Human
ccuuggggcugaugcaguu

SEQ ID NO: 2986793 - RNA, 21 nt, Human
ccuugguuaggcauuguggga

SEQ ID NO: 2986794 - RNA, 22 nt, Human
ccuugguuaggcauugugggaa

SEQ ID NO: 2986795 - RNA, 22 nt, Human
ccuuggugucgggcaugacacg

SEQ ID NO: 2986796 - RNA, 21 nt, Human
ccuuggugucgggcaugacac

SEQ ID NO: 2986797 - RNA, 14 nt, Human
ccuugaugaagaag

SEQ ID NO: 2986798 - RNA, 23 nt, Human
ccuucuucccaauagcaaggcug

SEQ ID NO: 2986799 - RNA, 15 nt, Human
ccuucuccuucaccu

SEQ ID NO: 2986800 - RNA, 19 nt, Human
ccuucuccuucaccuuugu

SEQ ID NO: 2986801 - RNA, 15 nt, Human
ccuucggcgccuuaa

SEQ ID NO: 2986802 - RNA, 20 nt, Human
ccuugaaaacuuuaugcuaa

SEQ ID NO: 2986803 - RNA, 19 nt, Human
ccuugaacuuugaccucug

SEQ ID NO: 2986804 - RNA, 13 nt, Human
ccuugacucuuuc

SEQ ID NO: 2986805 - RNA, 22 nt, Human
ccuugaccauucuccaccugcc

SEQ ID NO: 2986806 - RNA, 23 nt, Human
ccuugaccauucuccaccugcca

SEQ ID NO: 2986807 - RNA, 20 nt, Human
ccuucggccuccauccugag

SEQ ID NO: 2986808 - RNA, 19 nt, Human
ccuucggccuccauccuga

SEQ ID NO: 2986809 - RNA, 14 nt, Human
ccuucggccuccau

SEQ ID NO: 2986810 - RNA, 22 nt, Human
ccuucauuuggcauuccccacu

SEQ ID NO: 2986811 - RNA, 19 nt, Human
ccuucauuuggcauucccc

SEQ ID NO: 2986812 - RNA, 14 nt, Human
ccuucagugccaaa

SEQ ID NO: 2986813 - RNA, 11 nt, Human
ccuucagugcc

SEQ ID NO: 2986814 - RNA, 10 nt, Human
ccuucagugc

SEQ ID NO: 2986815 - RNA, 21 nt, Human
ccuucaccuuuguccccaccg

SEQ ID NO: 2986816 - RNA, 19 nt, Human
ccuucaccuuuguccccac

SEQ ID NO: 2986817 - RNA, 20 nt, Human
ccuucaccuuuguccccacc

SEQ ID NO: 2986818 - RNA, 17 nt, Human
ccuucacagaugggugc

SEQ ID NO: 2986819 - RNA, 14 nt, Human
ccuuagacaguccc

SEQ ID NO: 2986820 - RNA, 17 nt, Human
cgccaugcuccuggccc

SEQ ID NO: 2986821 - RNA, 17 nt, Human
cgccagauucuuuccug

SEQ ID NO: 2986822 - RNA, 19 nt, Human
cgccagauucuuuccugag

SEQ ID NO: 2986823 - RNA, 20 nt, Human
cgccagauucuuuccugagg

SEQ ID NO: 2986824 - RNA, 21 nt, Human
cgccagauucuuuccugaggc

SEQ ID NO: 2986825 - RNA, 22 nt, Human
cgccaggggaaaaucagccugc

SEQ ID NO: 2986826 - RNA, 15 nt, Human
cgcagacaggaccag

SEQ ID NO: 2986827 - RNA, 16 nt, Human
cgcagacaggaccagg

SEQ ID NO: 2986828 - RNA, 14 nt, Human
cgcagcccugcaga

SEQ ID NO: 2986829 - RNA, 20 nt, Human
cgauuucuguuuagauaaua

SEQ ID NO: 2986830 - RNA, 21 nt, Human
cgagccauuugucccaagugc

SEQ ID NO: 2986831 - RNA, 20 nt, Human
cgagccauuugucccaagug

SEQ ID NO: 2986832 - RNA, 19 nt, Human
cgagccauuugucccaagu

SEQ ID NO: 2986833 - RNA, 16 nt, Human
cgagccauuuguccca

SEQ ID NO: 2986834 - RNA, 18 nt, Human
cgagcaugccuggauggg

SEQ ID NO: 2986835 - RNA, 16 nt, Human
cgagcccugguggcag

SEQ ID NO: 2986836 - RNA, 15 nt, Human
cgagcccugguggca

SEQ ID NO: 2986837 - RNA, 23 nt, Human
cgagccauuugucccaagugcca

SEQ ID NO: 2986838 - RNA, 22 nt, Human
cgagccauuugucccaagugcc

SEQ ID NO: 2986839 - RNA, 14 nt, Human
cgagcaugccugga

SEQ ID NO: 2986840 - RNA, 13 nt, Human
cgagcaugccugg

SEQ ID NO: 2986841 - RNA, 16 nt, Human
cgagcaugccuggaug

SEQ ID NO: 2986842 - RNA, 17 nt, Human
cgagcaugccuggaugg

SEQ ID NO: 2986843 - RNA, 20 nt, Human
cgagcaggcuucuucccccc

SEQ ID NO: 2986844 - RNA, 18 nt, Human
cgagcaggcuacugucag

SEQ ID NO: 2986845 - RNA, 20 nt, Human
cgagaucacgccacugcacu

SEQ ID NO: 2986846 - RNA, 18 nt, Human
cgagaucacgccacugca

SEQ ID NO: 2986847 - RNA, 20 nt, Human
cgagauugcaccacugcacu

SEQ ID NO: 2986848 - RNA, 18 nt, Human
cgagauagccaaggccaa

SEQ ID NO: 2986849 - RNA, 17 nt, Human
cgagaucacgccacugc

SEQ ID NO: 2986850 - RNA, 14 nt, Human
cgaauagcugggac

SEQ ID NO: 2986851 - RNA, 13 nt, Human
cgaauagcuggga

SEQ ID NO: 2986852 - RNA, 17 nt, Human
cgacuugcauaccugcu

SEQ ID NO: 2986853 - RNA, 14 nt, Human
cgaacuggcugcaa

SEQ ID NO: 2986854 - RNA, 12 nt, Human
cgaacuggcugc

SEQ ID NO: 2986855 - RNA, 22 nt, Human
cgaaagggacuuggaagcuccg

SEQ ID NO: 2986856 - RNA, 20 nt, Human
cgaaaggaugaaagugacca

SEQ ID NO: 2986857 - RNA, 19 nt, Human
cgaaagggacuuggaagcu

SEQ ID NO: 2986858 - RNA, 12 nt, Human
cgaaagaacagu

SEQ ID NO: 2986859 - RNA, 21 nt, Human
cgaaagaacaguccauugaaa

SEQ ID NO: 2986860 - RNA, 23 nt, Human
cgaaagaaggcauggacuucugg

SEQ ID NO: 2986861 - RNA, 19 nt, Human
cgaaagaaggcauggacuu

SEQ ID NO: 2986862 - RNA, 12 nt, Human
cgaaagaaggca

SEQ ID NO: 2986863 - RNA, 18 nt, Human
cgaaaacguggcugcuuc

SEQ ID NO: 2986864 - RNA, 19 nt, Human
cgaaaacguggcugcuuca

SEQ ID NO: 2986865 - RNA, 15 nt, Human
cgaaaacguggcugc

SEQ ID NO: 2986866 - RNA, 20 nt, Human
cgaaaacguggcugcuucaa

SEQ ID NO: 2986867 - RNA, 20 nt, Human
ccuuugacgccaucccagcc

SEQ ID NO: 2986868 - RNA, 21 nt, Human
ccuuugacgccaucccagccc

SEQ ID NO: 2986869 - RNA, 22 nt, Human
ccuuugacgccaucccagcccc

SEQ ID NO: 2986870 - RNA, 16 nt, Human
ccugcaauaaaauggg

SEQ ID NO: 2986871 - RNA, 14 nt, Human
ccugcaagaacaag

SEQ ID NO: 2986872 - RNA, 22 nt, Human
ccugcaaccugauugugucucu

SEQ ID NO: 2986873 - RNA, 21 nt, Human
ccugcaaccugauugugucuc

SEQ ID NO: 2986874 - RNA, 17 nt, Human
ccugauugugucucuug

SEQ ID NO: 2986875 - RNA, 19 nt, Human
ccugauugugucucuuggu

SEQ ID NO: 2986876 - RNA, 11 nt, Human
ccugaggcccu

SEQ ID NO: 2986877 - RNA, 12 nt, Human
ccugaggcccuu

SEQ ID NO: 2986878 - RNA, 19 nt, Human
ccugaugcuucuucagaga

SEQ ID NO: 2986879 - RNA, 20 nt, Human
ccugaugcuucuucagagac

SEQ ID NO: 2986880 - RNA, 21 nt, Human
ccugaugcuucuucagagacu

SEQ ID NO: 2986881 - RNA, 22 nt, Human
ccugaugcuucuucagagacuc

SEQ ID NO: 2986882 - RNA, 15 nt, Human
ccugauugugucucu

SEQ ID NO: 2986883 - RNA, 13 nt, Human
ccugccaggaagc

SEQ ID NO: 2986884 - RNA, 14 nt, Human
ccugccaggaagcc

SEQ ID NO: 2986885 - RNA, 15 nt, Human
ccugccaggaagcca

SEQ ID NO: 2986886 - RNA, 17 nt, Human
ccugccaggaagccagc

SEQ ID NO: 2986887 - RNA, 15 nt, Human
ccugccaggcauggu

SEQ ID NO: 2986888 - RNA, 23 nt, Human
ccugccaggaagccagcaggcuc

SEQ ID NO: 2986889 - RNA, 16 nt, Human
ccugccaggcauggug

SEQ ID NO: 2986890 - RNA, 11 nt, Human
ccugccaggga

SEQ ID NO: 2986891 - RNA, 18 nt, Human
ccugccaggaagccagca

SEQ ID NO: 2986892 - RNA, 19 nt, Human
ccugccaggaagccagcag

SEQ ID NO: 2986893 - RNA, 21 nt, Human
ccugccaggaagccagcaggc

SEQ ID NO: 2986894 - RNA, 22 nt, Human
ccugccaggaagccagcaggcu

SEQ ID NO: 2986895 - RNA, 12 nt, Human
ccugccagggac

SEQ ID NO: 2986896 - RNA, 13 nt, Human
ccugccagggaca

SEQ ID NO: 2986897 - RNA, 14 nt, Human
ccugccagggacag

SEQ ID NO: 2986898 - RNA, 15 nt, Human
ccugccagggacaga

SEQ ID NO: 2986899 - RNA, 16 nt, Human
ccugccagggacagag

SEQ ID NO: 2986900 - RNA, 14 nt, Human
ccugagcuuucugc

SEQ ID NO: 2986901 - RNA, 11 nt, Human
ccugagcccca

SEQ ID NO: 2986902 - RNA, 20 nt, Human
ccugagccagauuucacucu

SEQ ID NO: 2986903 - RNA, 21 nt, Human
ccugaggcccagagggccugc

SEQ ID NO: 2986904 - RNA, 16 nt, Human
ccugagcuuucugcua

SEQ ID NO: 2986905 - RNA, 23 nt, Human
ccugacaacacucauugaccuga

SEQ ID NO: 2986906 - RNA, 23 nt, Human
ccuggaaaucaggguuaguauug

SEQ ID NO: 2986907 - RNA, 14 nt, Human
ccugcuucaaauau

SEQ ID NO: 2986908 - RNA, 22 nt, Human
ccugcucuccgaccagacaccu

SEQ ID NO: 2986909 - RNA, 20 nt, Human
ccugcugagccucacagcag

SEQ ID NO: 2986910 - RNA, 22 nt, Human
ccugcggugcuaucucccccag

SEQ ID NO: 2986911 - RNA, 21 nt, Human
ccugcucuccgaccagacacc

SEQ ID NO: 2986912 - RNA, 23 nt, Human
ccugccuguugggccaggagccu

SEQ ID NO: 2986913 - RNA, 22 nt, Human
ccugccccucaacucuccucca

SEQ ID NO: 2986914 - RNA, 16 nt, Human
ccugcggugcuaucuc

SEQ ID NO: 2986915 - RNA, 17 nt, Human
ccugcggugcuaucucc

SEQ ID NO: 2986916 - RNA, 22 nt, Human
ccugggcagcugccuccccucc

SEQ ID NO: 2986917 - RNA, 15 nt, Human
ccuggccagaugcac

SEQ ID NO: 2986918 - RNA, 18 nt, Human
ccuggaauauauaaccag

SEQ ID NO: 2986919 - RNA, 12 nt, Human
ccuggcagcccc

SEQ ID NO: 2986920 - RNA, 13 nt, Human
ccuggcagccccu

SEQ ID NO: 2986921 - RNA, 23 nt, Human
ccuggcacccggccccugcuggu

SEQ ID NO: 2986922 - RNA, 22 nt, Human
ccuggcacccggccccugcugg

SEQ ID NO: 2986923 - RNA, 19 nt, Human
ccaguguuuuaggagcaug

SEQ ID NO: 2986924 - RNA, 22 nt, Human
ccaguguuguggauuuaacaga

SEQ ID NO: 2986925 - RNA, 11 nt, Human
ccagugccucu

SEQ ID NO: 2986926 - RNA, 14 nt, Human
ccaguuauggcuau

SEQ ID NO: 2986927 - RNA, 21 nt, Human
ccaguuauggcuauaggugcu

SEQ ID NO: 2986928 - RNA, 23 nt, Human
ccauauucuguuggccaguguga

SEQ ID NO: 2986929 - RNA, 20 nt, Human
ccagugccgagaaggaagcc

SEQ ID NO: 2986930 - RNA, 22 nt, Human
ccagugguuccuaauccucuag

SEQ ID NO: 2986931 - RNA, 14 nt, Human
ccagugaggcucug

SEQ ID NO: 2986932 - RNA, 15 nt, Human
ccagugaggcucugc

SEQ ID NO: 2986933 - RNA, 16 nt, Human
ccagugaggcucugcc

SEQ ID NO: 2986934 - RNA, 23 nt, Human
ccagugcccacaggaucagucug

SEQ ID NO: 2986935 - RNA, 17 nt, Human
ccaggcuuagucacuga

SEQ ID NO: 2986936 - RNA, 24 nt, Human
ccaggcuguaucccaugagccuca

SEQ ID NO: 2986937 - RNA, 20 nt, Human
ccaggcccucugcccacucc

SEQ ID NO: 2986938 - RNA, 21 nt, Human
ccaggcccucugcccacuccc

SEQ ID NO: 2986939 - RNA, 22 nt, Human
ccaggcccucugcccacucccu

SEQ ID NO: 2986940 - RNA, 23 nt, Human
ccaggcccucugcccacucccug

SEQ ID NO: 2986941 - RNA, 17 nt, Human
ccaggcauuccccagga

SEQ ID NO: 2986942 - RNA, 18 nt, Human
ccaggcauuccccaggag

SEQ ID NO: 2986943 - RNA, 19 nt, Human
ccaggcauuccccaggagg

SEQ ID NO: 2986944 - RNA, 21 nt, Human
ccaggcauuccccaggaggcc

SEQ ID NO: 2986945 - RNA, 19 nt, Human
ccaggagccccgaggccuu

SEQ ID NO: 2986946 - RNA, 16 nt, Human
ccaggagccccgaggc

SEQ ID NO: 2986947 - RNA, 20 nt, Human
ccaggagccccgaggccuuc

SEQ ID NO: 2986948 - RNA, 19 nt, Human
ccaggagccuccugcccuu

SEQ ID NO: 2986949 - RNA, 22 nt, Human
ccagggacagaggggguggccu

SEQ ID NO: 2986950 - RNA, 20 nt, Human
ccaggcuuagucacugagac

SEQ ID NO: 2986951 - RNA, 14 nt, Human
ccagggacagaggg

SEQ ID NO: 2986952 - RNA, 15 nt, Human
ccagggacagagggg

SEQ ID NO: 2986953 - RNA, 21 nt, Human
ccagggacagaggggguggcc

SEQ ID NO: 2986954 - RNA, 19 nt, Human
ccaggugcacaagcuccaa

SEQ ID NO: 2986955 - RNA, 20 nt, Human
ccaggugcacaagcuccaag

SEQ ID NO: 2986956 - RNA, 18 nt, Human
ccaggugcacaagcucca

SEQ ID NO: 2986957 - RNA, 16 nt, Human
ccagggccaugucaga

SEQ ID NO: 2986958 - RNA, 18 nt, Human
ccagucuggaaugcagug

SEQ ID NO: 2986959 - RNA, 13 nt, Human
ccagugaggcucu

SEQ ID NO: 2986960 - RNA, 20 nt, Human
ccagucuggaaugcaguggu

SEQ ID NO: 2986961 - RNA, 19 nt, Human
ccagucuggaaugcagugg

SEQ ID NO: 2986962 - RNA, 17 nt, Human
ccagguuuuuggucuga

SEQ ID NO: 2986963 - RNA, 24 nt, Human
ccaggugcacaagcuccaagcucc

SEQ ID NO: 2986964 - RNA, 15 nt, Human
ccagguucagcuugu

SEQ ID NO: 2986965 - RNA, 19 nt, Human
ccaugggacagggaggacg

SEQ ID NO: 2986966 - RNA, 16 nt, Human
ccaugggacagggagg

SEQ ID NO: 2986967 - RNA, 16 nt, Human
ccauguuggccaggcu

SEQ ID NO: 2986968 - RNA, 17 nt, Human
ccauguuggccaggcug

SEQ ID NO: 2986969 - RNA, 18 nt, Human
ccauucuccaccugccag

SEQ ID NO: 2986970 - RNA, 19 nt, Human
ccauauucuguuggccagu

SEQ ID NO: 2986971 - RNA, 21 nt, Human
ccaucugcgggggcagugcuc

SEQ ID NO: 2986972 - RNA, 20 nt, Human
ccaucugcgggggcagugcu

SEQ ID NO: 2986973 - RNA, 22 nt, Human
ccaucugcgggggcagugcuca

SEQ ID NO: 2986974 - RNA, 16 nt, Human
cccaaagugcugggau

SEQ ID NO: 2986975 - RNA, 18 nt, Human
cccaaauggaaaugggca

SEQ ID NO: 2986976 - RNA, 22 nt, Human
cccaaauggaaaugggcagagc

SEQ ID NO: 2986977 - RNA, 23 nt, Human
cccaaggccuuccccuggcacug

SEQ ID NO: 2986978 - RNA, 19 nt, Human
ccauucuccaccugccagg

SEQ ID NO: 2986979 - RNA, 20 nt, Human
ccauucuccaccugccaggg

SEQ ID NO: 2986980 - RNA, 14 nt, Human
ccauuuguguuuau

SEQ ID NO: 2986981 - RNA, 17 nt, Human
ccauuugucccaagugc

SEQ ID NO: 2986982 - RNA, 15 nt, Human
ccauuugucccaagu

SEQ ID NO: 2986983 - RNA, 13 nt, Human
ccauuugucccaa

SEQ ID NO: 2986984 - RNA, 16 nt, Human
cccaaaacucuccucu

SEQ ID NO: 2986985 - RNA, 18 nt, Human
cccaaaacucuccucugc

SEQ ID NO: 2986986 - RNA, 15 nt, Human
cccaaagugcuggga

SEQ ID NO: 2986987 - RNA, 13 nt, Human
cccaaagugcugg

SEQ ID NO: 2986988 - RNA, 17 nt, Human
ccaccucccacaaagga

SEQ ID NO: 2986989 - RNA, 17 nt, Human
ccaccugccuguugggc

SEQ ID NO: 2986990 - RNA, 20 nt, Human
ccaccugccuguugggccag

SEQ ID NO: 2986991 - RNA, 16 nt, Human
ccaccugccagggaca

SEQ ID NO: 2986992 - RNA, 17 nt, Human
ccaccuggccucugcac

SEQ ID NO: 2986993 - RNA, 14 nt, Human
ccaccuggccucug

SEQ ID NO: 2986994 - RNA, 22 nt, Human
ccaccugcggugcuaucucccc

SEQ ID NO: 2986995 - RNA, 15 nt, Human
ccaccuggccucugc

SEQ ID NO: 2986996 - RNA, 16 nt, Human
ccaccuggccucugca

SEQ ID NO: 2986997 - RNA, 14 nt, Human
ccacggccaggcca

SEQ ID NO: 2986998 - RNA, 13 nt, Human
ccacggccaggcc

SEQ ID NO: 2986999 - RNA, 12 nt, Human
ccacggccaggc

SEQ ID NO: 2987000 - RNA, 15 nt, Human
ccacggccaggccag

SEQ ID NO: 2987001 - RNA, 14 nt, Human
ccacccaggagccc

SEQ ID NO: 2987002 - RNA, 12 nt, Human
ccacccaggagc

SEQ ID NO: 2987003 - RNA, 15 nt, Human
ccaccucagccuccc

SEQ ID NO: 2987004 - RNA, 14 nt, Human
ccaccucagccucc

SEQ ID NO: 2987005 - RNA, 13 nt, Human
ccaccucagccuc

SEQ ID NO: 2987006 - RNA, 16 nt, Human
ccacccugaaagcccu

SEQ ID NO: 2987007 - RNA, 17 nt, Human
ccacccugaaagcccug

SEQ ID NO: 2987008 - RNA, 18 nt, Human
ccacccugaaagcccuga

SEQ ID NO: 2987009 - RNA, 12 nt, Human
ccaccucagccu

SEQ ID NO: 2987010 - RNA, 18 nt, Human
ccacuacauucuguuaau

SEQ ID NO: 2987011 - RNA, 22 nt, Human
ccacuacggaauaguuggcuag

SEQ ID NO: 2987012 - RNA, 23 nt, Human
ccacuacggaauaguuggcuagg

SEQ ID NO: 2987013 - RNA, 12 nt, Human
ccacucccugca

SEQ ID NO: 2987014 - RNA, 13 nt, Human
ccacucccugcaa

SEQ ID NO: 2987015 - RNA, 18 nt, Human
ccacucaguccauagcag

SEQ ID NO: 2987016 - RNA, 16 nt, Human
ccacugcgaccacaag

SEQ ID NO: 2987017 - RNA, 20 nt, Human
ccacugcacuccagccuggg

SEQ ID NO: 2987018 - RNA, 19 nt, Human
ccacugcacuccagccugg

SEQ ID NO: 2987019 - RNA, 15 nt, Human
ccacucccugcaacc

SEQ ID NO: 2987020 - RNA, 18 nt, Human
ccacugcacuccagccug

SEQ ID NO: 2987021 - RNA, 13 nt, Human
ccacguuucuaaa

SEQ ID NO: 2987022 - RNA, 20 nt, Human
ccacccaagggccuggccug

SEQ ID NO: 2987023 - RNA, 21 nt, Human
ccacccaagggccuggccuga

SEQ ID NO: 2987024 - RNA, 22 nt, Human
ccacccaagggccuggccugag

SEQ ID NO: 2987025 - RNA, 13 nt, Human
ccacccaccucag

SEQ ID NO: 2987026 - RNA, 15 nt, Human
ccacccaccucagcc

SEQ ID NO: 2987027 - RNA, 14 nt, Human
ccacccaccucagc

SEQ ID NO: 2987028 - RNA, 16 nt, Human
ccacccaccucagccu

SEQ ID NO: 2987029 - RNA, 17 nt, Human
ccacccaagggccuggc

SEQ ID NO: 2987030 - RNA, 19 nt, Human
ccacccaagggccuggccu

SEQ ID NO: 2987031 - RNA, 16 nt, Human
ccacccaagggccugg

SEQ ID NO: 2987032 - RNA, 20 nt, Human
ccaccaacauacucccaucu

SEQ ID NO: 2987033 - RNA, 16 nt, Human
ccaccacacccagccc

SEQ ID NO: 2987034 - RNA, 14 nt, Human
ccaccacacccagc

SEQ ID NO: 2987035 - RNA, 14 nt, Human
ccacaucuugcucu

SEQ ID NO: 2987036 - RNA, 23 nt, Human
ccacaucuugcucugcugacaga

SEQ ID NO: 2987037 - RNA, 22 nt, Human
ccacaucuugcucugcugacag

SEQ ID NO: 2987038 - RNA, 20 nt, Human
ccacaucuugcucugcugac

SEQ ID NO: 2987039 - RNA, 16 nt, Human
ccacaucuugcucugc

SEQ ID NO: 2987040 - RNA, 14 nt, Human
ccaccaacauacuc

SEQ ID NO: 2987041 - RNA, 18 nt, Human
ccaccaacauacucccau

SEQ ID NO: 2987042 - RNA, 23 nt, Human
ccacaccauaagcuacugccauc

SEQ ID NO: 2987043 - RNA, 12 nt, Human
ccacacccagcc

SEQ ID NO: 2987044 - RNA, 14 nt, Human
ccacacccagccca

SEQ ID NO: 2987045 - RNA, 13 nt, Human
ccacacccagccc

SEQ ID NO: 2987046 - RNA, 22 nt, Human
ccagcaguucagagcugcccuc

SEQ ID NO: 2987047 - RNA, 21 nt, Human
ccagcaguucagagcugcccu

SEQ ID NO: 2987048 - RNA, 20 nt, Human
ccagcaguucagagcugccc

SEQ ID NO: 2987049 - RNA, 19 nt, Human
ccagcaguucagagcugcc

SEQ ID NO: 2987050 - RNA, 18 nt, Human
ccagcaguucagagcugc

SEQ ID NO: 2987051 - RNA, 13 nt, Human
ccagcaguucaga

SEQ ID NO: 2987052 - RNA, 23 nt, Human
ccagcaguucagagcugcccucu

SEQ ID NO: 2987053 - RNA, 13 nt, Human
ccagccaggcccu

SEQ ID NO: 2987054 - RNA, 22 nt, Human
ccagccagcaguucagagcugc

SEQ ID NO: 2987055 - RNA, 18 nt, Human
ccagccaaagccuccucc

SEQ ID NO: 2987056 - RNA, 19 nt, Human
ccagccaaagccuccucca

SEQ ID NO: 2987057 - RNA, 15 nt, Human
ccagccaaagccucc

SEQ ID NO: 2987058 - RNA, 18 nt, Human
ccagccgccaugcuccug

SEQ ID NO: 2987059 - RNA, 19 nt, Human
ccagccgccaugcuccugg

SEQ ID NO: 2987060 - RNA, 14 nt, Human
ccagccgccaugcu

SEQ ID NO: 2987061 - RNA, 23 nt, Human
ccagccgagauagccaaggccaa

SEQ ID NO: 2987062 - RNA, 17 nt, Human
ccagcccuuagcaggga

SEQ ID NO: 2987063 - RNA, 16 nt, Human
ccagcccuuagcaggg

SEQ ID NO: 2987064 - RNA, 16 nt, Human
ccagccccagugccca

SEQ ID NO: 2987065 - RNA, 23 nt, Human
ccagccccaaaacucuccucugc

SEQ ID NO: 2987066 - RNA, 15 nt, Human
ccagccccagugccc

SEQ ID NO: 2987067 - RNA, 13 nt, Human
ccagccccagugc

SEQ ID NO: 2987068 - RNA, 15 nt, Human
ccagcaauuaugaaa

SEQ ID NO: 2987069 - RNA, 22 nt, Human
ccagcaagugagagcugggugu

SEQ ID NO: 2987070 - RNA, 21 nt, Human
ccagcaagugagagcugggug

SEQ ID NO: 2987071 - RNA, 20 nt, Human
ccagcaagugagagcugggu

SEQ ID NO: 2987072 - RNA, 16 nt, Human
ccagcaagugagagcu

SEQ ID NO: 2987073 - RNA, 14 nt, Human
ccagauuucacucu

SEQ ID NO: 2987074 - RNA, 15 nt, Human
ccagcaagugagagc

SEQ ID NO: 2987075 - RNA, 22 nt, Human
ccagaggagagaggacccccug

SEQ ID NO: 2987076 - RNA, 21 nt, Human
ccagaggagagaggacccccu

SEQ ID NO: 2987077 - RNA, 21 nt, Human
ccagagggagugacagaggca

SEQ ID NO: 2987078 - RNA, 20 nt, Human
ccagagggagugacagaggc

SEQ ID NO: 2987079 - RNA, 19 nt, Human
ccagagggagugacagagg

SEQ ID NO: 2987080 - RNA, 18 nt, Human
ccagagggagugacagag

SEQ ID NO: 2987081 - RNA, 17 nt, Human
ccagagggagugacaga

SEQ ID NO: 2987082 - RNA, 16 nt, Human
ccagagggagugacag

SEQ ID NO: 2987083 - RNA, 14 nt, Human
ccagagcugccacc

SEQ ID NO: 2987084 - RNA, 15 nt, Human
ccagagcugccaccu

SEQ ID NO: 2987085 - RNA, 16 nt, Human
ccagagcugccaccug

SEQ ID NO: 2987086 - RNA, 19 nt, Human
ccagagcugccaccugccu

SEQ ID NO: 2987087 - RNA, 12 nt, Human
ccagagcugcca

SEQ ID NO: 2987088 - RNA, 13 nt, Human
ccagagcugccac

SEQ ID NO: 2987089 - RNA, 11 nt, Human
ccagagcugcc

SEQ ID NO: 2987090 - RNA, 14 nt, Human
ccagagaggguggu

SEQ ID NO: 2987091 - RNA, 23 nt, Human
ccagagaggguggugaccucugc

SEQ ID NO: 2987092 - RNA, 21 nt, Human
ccagagaggguggugaccucu

SEQ ID NO: 2987093 - RNA, 19 nt, Human
ccagacaccuugacagggc

SEQ ID NO: 2987094 - RNA, 17 nt, Human
ccagacaccuugacagg

SEQ ID NO: 2987095 - RNA, 12 nt, Human
ccagauuucacu

SEQ ID NO: 2987096 - RNA, 21 nt, Human
ccagauugcaacaggcugggc

SEQ ID NO: 2987097 - RNA, 18 nt, Human
ccagauugcaacaggcug

SEQ ID NO: 2987098 - RNA, 23 nt, Human
ccagauucuuuccugaggcuggg

SEQ ID NO: 2987099 - RNA, 20 nt, Human
ccagauugcaacaggcuggg

SEQ ID NO: 2987100 - RNA, 19 nt, Human
ccagauugcaacaggcugg

SEQ ID NO: 2987101 - RNA, 15 nt, Human
ccagagggccugcaa

SEQ ID NO: 2987102 - RNA, 16 nt, Human
ccagagggccugcaag

SEQ ID NO: 2987103 - RNA, 23 nt, Human
ccagaugcaccagcccuuagcag

SEQ ID NO: 2987104 - RNA, 23 nt, Human
ccagagggagugacagaggcagc

SEQ ID NO: 2987105 - RNA, 22 nt, Human
ccagagggagugacagaggcag

SEQ ID NO: 2987106 - RNA, 13 nt, Human
ccagagggccugc

SEQ ID NO: 2987107 - RNA, 19 nt, Human
ccagauucuuuccugaggc

SEQ ID NO: 2987108 - RNA, 20 nt, Human
ccagauucuuuccugaggcu

SEQ ID NO: 2987109 - RNA, 21 nt, Human
ccagauucuuuccugaggcug

SEQ ID NO: 2987110 - RNA, 22 nt, Human
ccagauucuuuccugaggcugg

SEQ ID NO: 2987111 - RNA, 18 nt, Human
ccagauucuuuccugagg

SEQ ID NO: 2987112 - RNA, 21 nt, Human
cauauugcauacuauuaaaca

SEQ ID NO: 2987113 - RNA, 19 nt, Human
cauauugcauacuauuaaa

SEQ ID NO: 2987114 - RNA, 21 nt, Human
cauauugauuuccguuaaaau

SEQ ID NO: 2987115 - RNA, 22 nt, Human
cauauugcauacuauuaaacau

SEQ ID NO: 2987116 - RNA, 17 nt, Human
cauauugauuuccguua

SEQ ID NO: 2987117 - RNA, 22 nt, Human
cauauucuguuggccaguguga

SEQ ID NO: 2987118 - RNA, 20 nt, Human
cauaucucuuaucuuacgaa

SEQ ID NO: 2987119 - RNA, 23 nt, Human
cauaucucuuaucuuacgaaaaa

SEQ ID NO: 2987120 - RNA, 17 nt, Human
cauauuuaauuugaagg

SEQ ID NO: 2987121 - RNA, 16 nt, Human
cauagguuuaauaauu

SEQ ID NO: 2987122 - RNA, 19 nt, Human
cagugcucacccacaccau

SEQ ID NO: 2987123 - RNA, 15 nt, Human
cauaguaugguggcu

SEQ ID NO: 2987124 - RNA, 16 nt, Human
cauaguaugguggcug

SEQ ID NO: 2987125 - RNA, 23 nt, Human
cauauaagauucauauuuacuuc

SEQ ID NO: 2987126 - RNA, 13 nt, Human
cauauauaacaau

SEQ ID NO: 2987127 - RNA, 15 nt, Human
cauauauaacaaugc

SEQ ID NO: 2987128 - RNA, 23 nt, Human
cauauauauguuuuaagaggcag

SEQ ID NO: 2987129 - RNA, 14 nt, Human
caucaacaucuugg

SEQ ID NO: 2987130 - RNA, 14 nt, Human
caucccuuucccuu

SEQ ID NO: 2987131 - RNA, 17 nt, Human
caucccuuucccuuggu

SEQ ID NO: 2987132 - RNA, 18 nt, Human
caucccuuaccugggaaa

SEQ ID NO: 2987133 - RNA, 23 nt, Human
caucccucccuccaccucccugc

SEQ ID NO: 2987134 - RNA, 22 nt, Human
caucccucccuccaccucccug

SEQ ID NO: 2987135 - RNA, 15 nt, Human
caucccucuggggcu

SEQ ID NO: 2987136 - RNA, 22 nt, Human
caucccugaaggccccgcccag

SEQ ID NO: 2987137 - RNA, 20 nt, Human
caucccucccuccaccuccc

SEQ ID NO: 2987138 - RNA, 17 nt, Human
cauccagguucagcuug

SEQ ID NO: 2987139 - RNA, 23 nt, Human
cauccacugugccaugugccagg

SEQ ID NO: 2987140 - RNA, 17 nt, Human
cauccacugugccaugu

SEQ ID NO: 2987141 - RNA, 14 nt, Human
cauccacugugcca

SEQ ID NO: 2987142 - RNA, 11 nt, Human
caucaucccuu

SEQ ID NO: 2987143 - RNA, 16 nt, Human
caucauccuaagcuau

SEQ ID NO: 2987144 - RNA, 15 nt, Human
caucaugucuggcua

SEQ ID NO: 2987145 - RNA, 14 nt, Human
caucaugucuggcu

SEQ ID NO: 2987146 - RNA, 13 nt, Human
caucaugucuggc

SEQ ID NO: 2987147 - RNA, 20 nt, Human
caucaccaacgucugugcca

SEQ ID NO: 2987148 - RNA, 12 nt, Human
caucacccgcua

SEQ ID NO: 2987149 - RNA, 17 nt, Human
caucuugcucugcugac

SEQ ID NO: 2987150 - RNA, 16 nt, Human
caucuugcucugcuga

SEQ ID NO: 2987151 - RNA, 19 nt, Human
caucuugcucugcugacag

SEQ ID NO: 2987152 - RNA, 15 nt, Human
caucuugcucugcug

SEQ ID NO: 2987153 - RNA, 16 nt, Human
caucuugaauuguaag

SEQ ID NO: 2987154 - RNA, 21 nt, Human
caucuugaauuguaaggaaug

SEQ ID NO: 2987155 - RNA, 15 nt, Human
caucucuccuccuuu

SEQ ID NO: 2987156 - RNA, 16 nt, Human
caucucuacaaaaagc

SEQ ID NO: 2987157 - RNA, 21 nt, Human
caugaaaacacauuuuucuua

SEQ ID NO: 2987158 - RNA, 19 nt, Human
caugaaaacacauuuuucu

SEQ ID NO: 2987159 - RNA, 14 nt, Human
caugaaagauucaa

SEQ ID NO: 2987160 - RNA, 17 nt, Human
caugaaagacuucucua

SEQ ID NO: 2987161 - RNA, 12 nt, Human
caugaagacaga

SEQ ID NO: 2987162 - RNA, 17 nt, Human
caugaaaacacauuuuu

SEQ ID NO: 2987163 - RNA, 16 nt, Human
caugaaaacacauuuu

SEQ ID NO: 2987164 - RNA, 15 nt, Human
caugaaaacacauuu

SEQ ID NO: 2987165 - RNA, 14 nt, Human
caugaaaacacauu

SEQ ID NO: 2987166 - RNA, 13 nt, Human
caugaaaacacau

SEQ ID NO: 2987167 - RNA, 18 nt, Human
caugagggagaugccaug

SEQ ID NO: 2987168 - RNA, 16 nt, Human
caugagguacugagag

SEQ ID NO: 2987169 - RNA, 23 nt, Human
caugaggaacaaggcaaggcugu

SEQ ID NO: 2987170 - RNA, 16 nt, Human
caugaggaacaaggca

SEQ ID NO: 2987171 - RNA, 17 nt, Human
caugaggaacaaggcaa

SEQ ID NO: 2987172 - RNA, 20 nt, Human
caugaggaacaaggcaaggc

SEQ ID NO: 2987173 - RNA, 21 nt, Human
caugaggaacaaggcaaggcu

SEQ ID NO: 2987174 - RNA, 23 nt, Human
caugagccucagcauccuggcac

SEQ ID NO: 2987175 - RNA, 22 nt, Human
caugagccucagcauccuggca

SEQ ID NO: 2987176 - RNA, 13 nt, Human
caugaguccccug

SEQ ID NO: 2987177 - RNA, 19 nt, Human
caugagguacugagaguga

SEQ ID NO: 2987178 - RNA, 14 nt, Human
caugaguccccugu

SEQ ID NO: 2987179 - RNA, 15 nt, Human
caugaguccccuguu

SEQ ID NO: 2987180 - RNA, 23 nt, Human
caugaguccccuguuuguuucug

SEQ ID NO: 2987181 - RNA, 15 nt, Human
caugagcaucaggcc

SEQ ID NO: 2987182 - RNA, 16 nt, Human
caugagcaucaggcca

SEQ ID NO: 2987183 - RNA, 17 nt, Human
caugagcaucaggccag

SEQ ID NO: 2987184 - RNA, 18 nt, Human
caugagcaucaggccagg

SEQ ID NO: 2987185 - RNA, 20 nt, Human
caugagcaucaggccaggcc

SEQ ID NO: 2987186 - RNA, 21 nt, Human
caugagcaucaggccaggccc

SEQ ID NO: 2987187 - RNA, 22 nt, Human
caugagcaucaggccaggcccu

SEQ ID NO: 2987188 - RNA, 23 nt, Human
caugagcaucaggccaggcccuc

SEQ ID NO: 2987189 - RNA, 21 nt, Human
caugagccucagcauccuggc

SEQ ID NO: 2987190 - RNA, 20 nt, Human
caugagccucagcauccugg

SEQ ID NO: 2987191 - RNA, 19 nt, Human
caugagccucagcauccug

SEQ ID NO: 2987192 - RNA, 18 nt, Human
caugagccucagcauccu

SEQ ID NO: 2987193 - RNA, 17 nt, Human
caugagccucagcaucc

SEQ ID NO: 2987194 - RNA, 15 nt, Human
caugagccucagcau

SEQ ID NO: 2987195 - RNA, 12 nt, Human
caugagccucag

SEQ ID NO: 2987196 - RNA, 22 nt, Human
caugagccgcccaaggccuucc

SEQ ID NO: 2987197 - RNA, 21 nt, Human
caugagccgcccaaggccuuc

SEQ ID NO: 2987198 - RNA, 19 nt, Human
caugagccgcccaaggccu

SEQ ID NO: 2987199 - RNA, 17 nt, Human
caugagccgcccaaggc

SEQ ID NO: 2987200 - RNA, 16 nt, Human
caugagccgcccaagg

SEQ ID NO: 2987201 - RNA, 19 nt, Human
caugaagauguagaggaga

SEQ ID NO: 2987202 - RNA, 18 nt, Human
caugaagauguagaggag

SEQ ID NO: 2987203 - RNA, 13 nt, Human
caugagcaucagg

SEQ ID NO: 2987204 - RNA, 13 nt, Human
caugcuguacaua

SEQ ID NO: 2987205 - RNA, 21 nt, Human
caugcuguacauacuuuuugg

SEQ ID NO: 2987206 - RNA, 19 nt, Human
caugcuguacauacuuuuu

SEQ ID NO: 2987207 - RNA, 16 nt, Human
caugcuguacauacuu

SEQ ID NO: 2987208 - RNA, 15 nt, Human
caugcuguucaugaa

SEQ ID NO: 2987209 - RNA, 13 nt, Human
caugcugucccuu

SEQ ID NO: 2987210 - RNA, 15 nt, Human
caugcugucccuuac

SEQ ID NO: 2987211 - RNA, 15 nt, Human
cauggacuuccacug

SEQ ID NO: 2987212 - RNA, 18 nt, Human
caugcuguucaugaaaga

SEQ ID NO: 2987213 - RNA, 16 nt, Human
caugcuguucaugaaa

SEQ ID NO: 2987214 - RNA, 20 nt, Human
cauggaauuggagcucgugg

SEQ ID NO: 2987215 - RNA, 19 nt, Human
cauggaauucacaaaguaa

SEQ ID NO: 2987216 - RNA, 23 nt, Human
caugggacagggaggacgcucuc

SEQ ID NO: 2987217 - RNA, 18 nt, Human
caugggccuccugugugu

SEQ ID NO: 2987218 - RNA, 20 nt, Human
cauguuuuucuucucccuca

SEQ ID NO: 2987219 - RNA, 19 nt, Human
cauguuuuucuucucccuc

SEQ ID NO: 2987220 - RNA, 14 nt, Human
cauguuugugauug

SEQ ID NO: 2987221 - RNA, 12 nt, Human
cauguuugugau

SEQ ID NO: 2987222 - RNA, 19 nt, Human
cauggucggaaaacaugcu

SEQ ID NO: 2987223 - RNA, 17 nt, Human
cauggucggaaaacaug

SEQ ID NO: 2987224 - RNA, 23 nt, Human
cauggucggaaaacaugcuacac

SEQ ID NO: 2987225 - RNA, 16 nt, Human
caugguuuggagcuga

SEQ ID NO: 2987226 - RNA, 15 nt, Human
caugguuuggagcug

SEQ ID NO: 2987227 - RNA, 14 nt, Human
caugguuuggagcu

SEQ ID NO: 2987228 - RNA, 18 nt, Human
caugguuuggagcugauc

SEQ ID NO: 2987229 - RNA, 12 nt, Human
caugucuggcua

SEQ ID NO: 2987230 - RNA, 21 nt, Human
caugugaugagaggaaaucac

SEQ ID NO: 2987231 - RNA, 18 nt, Human
caugugaugagaggaaau

SEQ ID NO: 2987232 - RNA, 20 nt, Human
caugugaugagaggaaauca

SEQ ID NO: 2987233 - RNA, 16 nt, Human
caugugaugagaggaa

SEQ ID NO: 2987234 - RNA, 17 nt, Human
caugugaugagaggaaa

SEQ ID NO: 2987235 - RNA, 15 nt, Human
caugugaugagagga

SEQ ID NO: 2987236 - RNA, 14 nt, Human
caugugcacaugca

SEQ ID NO: 2987237 - RNA, 22 nt, Human
caugugccagguuuuuggucug

SEQ ID NO: 2987238 - RNA, 20 nt, Human
caugugcuaguaauuggaaa

SEQ ID NO: 2987239 - RNA, 14 nt, Human
cauucuuuuugaaa

SEQ ID NO: 2987240 - RNA, 16 nt, Human
cauucuuuuugaaaug

SEQ ID NO: 2987241 - RNA, 13 nt, Human
cauucuuuuugaa

SEQ ID NO: 2987242 - RNA, 15 nt, Human
cauugaccugaggcc

SEQ ID NO: 2987243 - RNA, 17 nt, Human
cauugaccugaggcccu

SEQ ID NO: 2987244 - RNA, 14 nt, Human
cauugaccugaggc

SEQ ID NO: 2987245 - RNA, 18 nt, Human
cauugaccugaggcccuu

SEQ ID NO: 2987246 - RNA, 21 nt, Human
cauuguaaaugugcuuuuaaa

SEQ ID NO: 2987247 - RNA, 15 nt, Human
cauugugggaagggg

SEQ ID NO: 2987248 - RNA, 13 nt, Human
cauugugggaagg

SEQ ID NO: 2987249 - RNA, 15 nt, Human
cauuuaaaaaaaauc

SEQ ID NO: 2987250 - RNA, 19 nt, Human
cauuugaaaauuuugaugu

SEQ ID NO: 2987251 - RNA, 17 nt, Human
cauuugaaaauuuugau

SEQ ID NO: 2987252 - RNA, 16 nt, Human
ccaaacccuucagugc

SEQ ID NO: 2987253 - RNA, 21 nt, Human
cauuuuuaagugcugcauuua

SEQ ID NO: 2987254 - RNA, 17 nt, Human
cauuuuuaguagagaca

SEQ ID NO: 2987255 - RNA, 19 nt, Human
cauuuuacacacuguacac

SEQ ID NO: 2987256 - RNA, 23 nt, Human
cauuuuauuuuauuaugcaugaa

SEQ ID NO: 2987257 - RNA, 22 nt, Human
cauuuuauuuuauuaugcauga

SEQ ID NO: 2987258 - RNA, 13 nt, Human
cauuugcugaaua

SEQ ID NO: 2987259 - RNA, 22 nt, Human
cauuugaggucuguucuuucca

SEQ ID NO: 2987260 - RNA, 13 nt, Human
cauucuuggccca

SEQ ID NO: 2987261 - RNA, 16 nt, Human
cauucuuggcccagga

SEQ ID NO: 2987262 - RNA, 23 nt, Human
cauucuucuguacgucugacagg

SEQ ID NO: 2987263 - RNA, 14 nt, Human
cauuccugaugcuu

SEQ ID NO: 2987264 - RNA, 16 nt, Human
cauuccugaugcuucu

SEQ ID NO: 2987265 - RNA, 19 nt, Human
cauuccugaugcuucuuca

SEQ ID NO: 2987266 - RNA, 22 nt, Human
cauuccugaugcuucuucagag

SEQ ID NO: 2987267 - RNA, 14 nt, Human
cauuccugaacagg

SEQ ID NO: 2987268 - RNA, 23 nt, Human
cauuccugaugcuucuucagaga

SEQ ID NO: 2987269 - RNA, 20 nt, Human
cauucugccugcccaggccc

SEQ ID NO: 2987270 - RNA, 19 nt, Human
cauucugccugcccaggcc

SEQ ID NO: 2987271 - RNA, 18 nt, Human
cauucugccugcccaggc

SEQ ID NO: 2987272 - RNA, 17 nt, Human
cauucugccugcccagg

SEQ ID NO: 2987273 - RNA, 16 nt, Human
cauucugccugcccag

SEQ ID NO: 2987274 - RNA, 15 nt, Human
cauucugccugccca

SEQ ID NO: 2987275 - RNA, 13 nt, Human
cauucugccugcc

SEQ ID NO: 2987276 - RNA, 12 nt, Human
cauucugccugc

SEQ ID NO: 2987277 - RNA, 17 nt, Human
cauucuguuaaucauua

SEQ ID NO: 2987278 - RNA, 13 nt, Human
cauucuggaauaa

SEQ ID NO: 2987279 - RNA, 20 nt, Human
cauucaaauguauuacagug

SEQ ID NO: 2987280 - RNA, 18 nt, Human
cauuccccaggaggccag

SEQ ID NO: 2987281 - RNA, 19 nt, Human
cauuccccaggaggccagc

SEQ ID NO: 2987282 - RNA, 20 nt, Human
cauuccccaggaggccagcc

SEQ ID NO: 2987283 - RNA, 15 nt, Human
cauuccccaggaggc

SEQ ID NO: 2987284 - RNA, 17 nt, Human
cauuccccaggaggcca

SEQ ID NO: 2987285 - RNA, 13 nt, Human
cauuccccaggag

SEQ ID NO: 2987286 - RNA, 21 nt, Human
cauucagauaugauucaaaug

SEQ ID NO: 2987287 - RNA, 22 nt, Human
cauuccaacuaucucauuucca

SEQ ID NO: 2987288 - RNA, 18 nt, Human
caguacuaacauuuauuu

SEQ ID NO: 2987289 - RNA, 21 nt, Human
caguaaugagcuuaagaaauu

SEQ ID NO: 2987290 - RNA, 17 nt, Human
caguaauaaaugaaugu

SEQ ID NO: 2987291 - RNA, 21 nt, Human
caguaauaaaugaaugucacu

SEQ ID NO: 2987292 - RNA, 13 nt, Human
caguaauaacucu

SEQ ID NO: 2987293 - RNA, 12 nt, Human
caguaauaacuc

SEQ ID NO: 2987294 - RNA, 13 nt, Human
caguaacauagcu

SEQ ID NO: 2987295 - RNA, 22 nt, Human
caguaaaugggggugcauuuga

SEQ ID NO: 2987296 - RNA, 21 nt, Human
caguaaaugggggugcauuug

SEQ ID NO: 2987297 - RNA, 20 nt, Human
caguaaaugggggugcauuu

SEQ ID NO: 2987298 - RNA, 12 nt, Human
cagguucagcuu

SEQ ID NO: 2987299 - RNA, 13 nt, Human
cagguucagcuug

SEQ ID NO: 2987300 - RNA, 12 nt, Human
caggugugaacc

SEQ ID NO: 2987301 - RNA, 19 nt, Human
caggugucccugcacuugc

SEQ ID NO: 2987302 - RNA, 18 nt, Human
caggugucccugcacuug

SEQ ID NO: 2987303 - RNA, 16 nt, Human
caggugucccugcacu

SEQ ID NO: 2987304 - RNA, 15 nt, Human
caggugucccugcac

SEQ ID NO: 2987305 - RNA, 16 nt, Human
caggugugagucacca

SEQ ID NO: 2987306 - RNA, 21 nt, Human
caggugugagucaccaagccc

SEQ ID NO: 2987307 - RNA, 20 nt, Human
caggugugagucaccaagcc

SEQ ID NO: 2987308 - RNA, 23 nt, Human
caggugugaaccaccacacccag

SEQ ID NO: 2987309 - RNA, 22 nt, Human
caggugugaaccaccacaccca

SEQ ID NO: 2987310 - RNA, 19 nt, Human
caggugugaaccaccacac

SEQ ID NO: 2987311 - RNA, 16 nt, Human
caggugugaaccacca

SEQ ID NO: 2987312 - RNA, 23 nt, Human
caggugugagucaccaagcccag

SEQ ID NO: 2987313 - RNA, 22 nt, Human
caggugugagucaccaagccca

SEQ ID NO: 2987314 - RNA, 18 nt, Human
cagguggggucacucugg

SEQ ID NO: 2987315 - RNA, 17 nt, Human
cagguggggcagcuuga

SEQ ID NO: 2987316 - RNA, 16 nt, Human
cagguggggcagcuug

SEQ ID NO: 2987317 - RNA, 15 nt, Human
cagguggggcagcuu

SEQ ID NO: 2987318 - RNA, 14 nt, Human
cagguggggcagcu

SEQ ID NO: 2987319 - RNA, 13 nt, Human
cagguggggcagc

SEQ ID NO: 2987320 - RNA, 19 nt, Human
cagguggggucacucuggc

SEQ ID NO: 2987321 - RNA, 20 nt, Human
cagguggggucacucuggca

SEQ ID NO: 2987322 - RNA, 21 nt, Human
cagguggggucacucuggcag

SEQ ID NO: 2987323 - RNA, 22 nt, Human
cagguggggucacucuggcagc

SEQ ID NO: 2987324 - RNA, 23 nt, Human
cagguggggucacucuggcagcu

SEQ ID NO: 2987325 - RNA, 18 nt, Human
caggugguuauggagagg

SEQ ID NO: 2987326 - RNA, 14 nt, Human
caggugucccugca

SEQ ID NO: 2987327 - RNA, 11 nt, Human
caggugucccu

SEQ ID NO: 2987328 - RNA, 20 nt, Human
caggugguuauggagagggu

SEQ ID NO: 2987329 - RNA, 23 nt, Human
cagggucccugguggcagcucac

SEQ ID NO: 2987330 - RNA, 18 nt, Human
caggguccuguagcccua

SEQ ID NO: 2987331 - RNA, 15 nt, Human
cagggucucacucug

SEQ ID NO: 2987332 - RNA, 23 nt, Human
cagggucucacuauguugcccag

SEQ ID NO: 2987333 - RNA, 22 nt, Human
cagggucucacuauguugccca

SEQ ID NO: 2987334 - RNA, 21 nt, Human
cagggucucacuauguugccc

SEQ ID NO: 2987335 - RNA, 16 nt, Human
cagggucucacucugu

SEQ ID NO: 2987336 - RNA, 16 nt, Human
caggguuuugccaugu

SEQ ID NO: 2987337 - RNA, 17 nt, Human
cagguaacaggcagaua

SEQ ID NO: 2987338 - RNA, 16 nt, Human
cagguaacaggcagau

SEQ ID NO: 2987339 - RNA, 15 nt, Human
cagguaacaggcaga

SEQ ID NO: 2987340 - RNA, 14 nt, Human
cagguaacaggcag

SEQ ID NO: 2987341 - RNA, 15 nt, Human
cagggucccuggugg

SEQ ID NO: 2987342 - RNA, 18 nt, Human
cagggucccugguggcag

SEQ ID NO: 2987343 - RNA, 19 nt, Human
cagggucccugguggcagc

SEQ ID NO: 2987344 - RNA, 22 nt, Human
cagggucccugguggcagcuca

SEQ ID NO: 2987345 - RNA, 14 nt, Human
cagggucccuggug

SEQ ID NO: 2987346 - RNA, 12 nt, Human
cagggucccugg

SEQ ID NO: 2987347 - RNA, 20 nt, Human
caggguauuccagagugggg

SEQ ID NO: 2987348 - RNA, 21 nt, Human
caggguauuccagagugggga

SEQ ID NO: 2987349 - RNA, 14 nt, Human
caggggugggacac

SEQ ID NO: 2987350 - RNA, 15 nt, Human
caggggugggacacc

SEQ ID NO: 2987351 - RNA, 20 nt, Human
caggggugggacacccugug

SEQ ID NO: 2987352 - RNA, 21 nt, Human
caggggugggacacccuguga

SEQ ID NO: 2987353 - RNA, 23 nt, Human
caggucuugaacuccuggccuca

SEQ ID NO: 2987354 - RNA, 22 nt, Human
caggucuugaacuccuggccuc

SEQ ID NO: 2987355 - RNA, 21 nt, Human
caggucuugaacuccuggccu

SEQ ID NO: 2987356 - RNA, 20 nt, Human
caggucuugaacuccuggcc

SEQ ID NO: 2987357 - RNA, 19 nt, Human
caggucuugaacuccuggc

SEQ ID NO: 2987358 - RNA, 18 nt, Human
caggucuugaacuccugg

SEQ ID NO: 2987359 - RNA, 13 nt, Human
caggugagaagca

SEQ ID NO: 2987360 - RNA, 20 nt, Human
caggugagaagcagaggaag

SEQ ID NO: 2987361 - RNA, 21 nt, Human
caggugagaagcagaggaagg

SEQ ID NO: 2987362 - RNA, 21 nt, Human
cagguaacaggcagauacagg

SEQ ID NO: 2987363 - RNA, 20 nt, Human
cagguaacaggcagauacag

SEQ ID NO: 2987364 - RNA, 23 nt, Human
cagucagggaaggugccucugga

SEQ ID NO: 2987365 - RNA, 18 nt, Human
cagucaggaaagagaacu

SEQ ID NO: 2987366 - RNA, 15 nt, Human
cagucaggaaagaga

SEQ ID NO: 2987367 - RNA, 22 nt, Human
cagucaggaaagagaacuucca

SEQ ID NO: 2987368 - RNA, 16 nt, Human
caguauuacuucugcu

SEQ ID NO: 2987369 - RNA, 18 nt, Human
caguauuacuucugcuac

SEQ ID NO: 2987370 - RNA, 19 nt, Human
cagucauuauguuaauauu

SEQ ID NO: 2987371 - RNA, 20 nt, Human
cagucauucagauaugauuc

SEQ ID NO: 2987372 - RNA, 17 nt, Human
cagucauucagauauga

SEQ ID NO: 2987373 - RNA, 14 nt, Human
caguccauugaaag

SEQ ID NO: 2987374 - RNA, 13 nt, Human
caguccaugaaga

SEQ ID NO: 2987375 - RNA, 16 nt, Human
caguccauagcagaga

SEQ ID NO: 2987376 - RNA, 15 nt, Human
caguaucucagggcc

SEQ ID NO: 2987377 - RNA, 12 nt, Human
caguaucuugaa

SEQ ID NO: 2987378 - RNA, 18 nt, Human
caguaucuugaagacuuu

SEQ ID NO: 2987379 - RNA, 12 nt, Human
caguauggcagc

SEQ ID NO: 2987380 - RNA, 21 nt, Human
caguaucuugaagacuuuucu

SEQ ID NO: 2987381 - RNA, 13 nt, Human
caguaucucaggg

SEQ ID NO: 2987382 - RNA, 18 nt, Human
caguauagaauaggcacu

SEQ ID NO: 2987383 - RNA, 12 nt, Human
caguauagaaua

SEQ ID NO: 2987384 - RNA, 22 nt, Human
caguauagaauaggcacuuuaa

SEQ ID NO: 2987385 - RNA, 12 nt, Human
caguagugauag

SEQ ID NO: 2987386 - RNA, 13 nt, Human
cagucccugccaa

SEQ ID NO: 2987387 - RNA, 14 nt, Human
cagucccugccaau

SEQ ID NO: 2987388 - RNA, 15 nt, Human
cagucccugccaaug

SEQ ID NO: 2987389 - RNA, 16 nt, Human
cagucccugccaaugg

SEQ ID NO: 2987390 - RNA, 12 nt, Human
cagucccugcca

SEQ ID NO: 2987391 - RNA, 12 nt, Human
caguccucccau

SEQ ID NO: 2987392 - RNA, 13 nt, Human
caguccucccauc

SEQ ID NO: 2987393 - RNA, 14 nt, Human
caguccucccaucu

SEQ ID NO: 2987394 - RNA, 15 nt, Human
caguccucccaucuc

SEQ ID NO: 2987395 - RNA, 17 nt, Human
cagucccugccaaugga

SEQ ID NO: 2987396 - RNA, 23 nt, Human
cagugccuuauggaacacucuga

SEQ ID NO: 2987397 - RNA, 18 nt, Human
cagugcucacccacacca

SEQ ID NO: 2987398 - RNA, 17 nt, Human
cagugcucacccacacc

SEQ ID NO: 2987399 - RNA, 12 nt, Human
cagugcucaccc

SEQ ID NO: 2987400 - RNA, 13 nt, Human
cagugcucaccca

SEQ ID NO: 2987401 - RNA, 17 nt, Human
cagugauuaccagggac

SEQ ID NO: 2987402 - RNA, 18 nt, Human
cagugauuaccagggacu

SEQ ID NO: 2987403 - RNA, 23 nt, Human
cagugagucgaggacagggaggu

SEQ ID NO: 2987404 - RNA, 22 nt, Human
cagugagucgaggacagggagg

SEQ ID NO: 2987405 - RNA, 20 nt, Human
cagugagucgaggacaggga

SEQ ID NO: 2987406 - RNA, 19 nt, Human
cagugagucgaggacaggg

SEQ ID NO: 2987407 - RNA, 15 nt, Human
cagugccuuauggaa

SEQ ID NO: 2987408 - RNA, 16 nt, Human
cagugccuuauggaac

SEQ ID NO: 2987409 - RNA, 17 nt, Human
cagugccuuauggaaca

SEQ ID NO: 2987410 - RNA, 18 nt, Human
cagugccuuauggaacac

SEQ ID NO: 2987411 - RNA, 19 nt, Human
cagugccuuauggaacacu

SEQ ID NO: 2987412 - RNA, 20 nt, Human
cagugccuuauggaacacuc

SEQ ID NO: 2987413 - RNA, 21 nt, Human
cagugccuuauggaacacucu

SEQ ID NO: 2987414 - RNA, 22 nt, Human
cagugccuuauggaacacucug

SEQ ID NO: 2987415 - RNA, 22 nt, Human
cagugccucucccugcugcucc

SEQ ID NO: 2987416 - RNA, 21 nt, Human
cagugccucucccugcugcuc

SEQ ID NO: 2987417 - RNA, 20 nt, Human
cagugccucucccugcugcu

SEQ ID NO: 2987418 - RNA, 12 nt, Human
cagugccucucc

SEQ ID NO: 2987419 - RNA, 15 nt, Human
cagugccgagaagga

SEQ ID NO: 2987420 - RNA, 18 nt, Human
cagugccgagaaggaagc

SEQ ID NO: 2987421 - RNA, 11 nt, Human
cagugccuuau

SEQ ID NO: 2987422 - RNA, 13 nt, Human
cagugccuuaugg

SEQ ID NO: 2987423 - RNA, 22 nt, Human
cagugccuggguggaugggcca

SEQ ID NO: 2987424 - RNA, 15 nt, Human
cagugagacagcucu

SEQ ID NO: 2987425 - RNA, 17 nt, Human
cagugaggcucugcccu

SEQ ID NO: 2987426 - RNA, 18 nt, Human
cagugaggcucugcccuu

SEQ ID NO: 2987427 - RNA, 19 nt, Human
cagugaggcucugcccuug

SEQ ID NO: 2987428 - RNA, 20 nt, Human
cagugaggcucugcccuugg

SEQ ID NO: 2987429 - RNA, 18 nt, Human
cagugagucgaggacagg

SEQ ID NO: 2987430 - RNA, 17 nt, Human
cagugagucgaggacag

SEQ ID NO: 2987431 - RNA, 21 nt, Human
cagugaggcucugcccuuggu

SEQ ID NO: 2987432 - RNA, 13 nt, Human
cagugaggcucug

SEQ ID NO: 2987433 - RNA, 14 nt, Human
cagugaggcucugc

SEQ ID NO: 2987434 - RNA, 15 nt, Human
cagugaggcucugcc

SEQ ID NO: 2987435 - RNA, 16 nt, Human
cagugaggcucugccc

SEQ ID NO: 2987436 - RNA, 12 nt, Human
cagugaggcucu

SEQ ID NO: 2987437 - RNA, 24 nt, Human
cagugagccgagauugcaccacug

SEQ ID NO: 2987438 - RNA, 16 nt, Human
cagugaaagaaaauaa

SEQ ID NO: 2987439 - RNA, 20 nt, Human
cagugaaagaaaauaacaau

SEQ ID NO: 2987440 - RNA, 19 nt, Human
cagucuggaaugcaguggu

SEQ ID NO: 2987441 - RNA, 15 nt, Human
caguccuuaccagca

SEQ ID NO: 2987442 - RNA, 18 nt, Human
caguccuuaccagcagag

SEQ ID NO: 2987443 - RNA, 15 nt, Human
caguccugcccgcca

SEQ ID NO: 2987444 - RNA, 19 nt, Human
caguccuuaccagcagagc

SEQ ID NO: 2987445 - RNA, 20 nt, Human
caguccuuaccagcagagca

SEQ ID NO: 2987446 - RNA, 21 nt, Human
caguccuuaccagcagagcac

SEQ ID NO: 2987447 - RNA, 18 nt, Human
cagucuggaaugcagugg

SEQ ID NO: 2987448 - RNA, 14 nt, Human
caguccugcccgcc

SEQ ID NO: 2987449 - RNA, 16 nt, Human
caguccucccaucuca

SEQ ID NO: 2987450 - RNA, 17 nt, Human
caguccucccaucucac

SEQ ID NO: 2987451 - RNA, 15 nt, Human
caggaguuuggccag

SEQ ID NO: 2987452 - RNA, 16 nt, Human
caggaguuuggccaga

SEQ ID NO: 2987453 - RNA, 17 nt, Human
caggaguuuggccagaa

SEQ ID NO: 2987454 - RNA, 13 nt, Human
caggaguuuggcc

SEQ ID NO: 2987455 - RNA, 14 nt, Human
caggaguuuggcca

SEQ ID NO: 2987456 - RNA, 22 nt, Human
caggaguuugagaccaaccugg

SEQ ID NO: 2987457 - RNA, 23 nt, Human
caggaguuugagaccaaccuggg

SEQ ID NO: 2987458 - RNA, 21 nt, Human
caggaguuugagaccaaccug

SEQ ID NO: 2987459 - RNA, 12 nt, Human
caggagugagca

SEQ ID NO: 2987460 - RNA, 14 nt, Human
caggagccuccugc

SEQ ID NO: 2987461 - RNA, 17 nt, Human
caggagccuccugcccu

SEQ ID NO: 2987462 - RNA, 20 nt, Human
caggagccuccugcccuuac

SEQ ID NO: 2987463 - RNA, 12 nt, Human
caggagcagcca

SEQ ID NO: 2987464 - RNA, 13 nt, Human
caggagcagccac

SEQ ID NO: 2987465 - RNA, 14 nt, Human
caggagcagccaca

SEQ ID NO: 2987466 - RNA, 19 nt, Human
caggagcagccacauuccu

SEQ ID NO: 2987467 - RNA, 18 nt, Human
caggagccccgaggccuu

SEQ ID NO: 2987468 - RNA, 16 nt, Human
caggagccccgaggcc

SEQ ID NO: 2987469 - RNA, 15 nt, Human
caggagccccgaggc

SEQ ID NO: 2987470 - RNA, 22 nt, Human
caggagccccgaggccuucucu

SEQ ID NO: 2987471 - RNA, 20 nt, Human
caggagccccgaggccuucu

SEQ ID NO: 2987472 - RNA, 23 nt, Human
caggagccccgaggccuucucug

SEQ ID NO: 2987473 - RNA, 22 nt, Human
caggagacuggcgugaacccag

SEQ ID NO: 2987474 - RNA, 23 nt, Human
caggagacuggcgugaacccagg

SEQ ID NO: 2987475 - RNA, 23 nt, Human
caggagaucgagaccauccuggc

SEQ ID NO: 2987476 - RNA, 14 nt, Human
caggcccccaggug

SEQ ID NO: 2987477 - RNA, 19 nt, Human
caggcccccaggugccagu

SEQ ID NO: 2987478 - RNA, 20 nt, Human
caggcccccaggugccaguu

SEQ ID NO: 2987479 - RNA, 13 nt, Human
caggccccugcca

SEQ ID NO: 2987480 - RNA, 21 nt, Human
caggccaggcccucugcccac

SEQ ID NO: 2987481 - RNA, 22 nt, Human
caggccaggcccucugcccacu

SEQ ID NO: 2987482 - RNA, 20 nt, Human
caggccacaagacccuugug

SEQ ID NO: 2987483 - RNA, 17 nt, Human
caggccacaagacccuu

SEQ ID NO: 2987484 - RNA, 18 nt, Human
caggccacaagacccuug

SEQ ID NO: 2987485 - RNA, 13 nt, Human
caggccacaagac

SEQ ID NO: 2987486 - RNA, 18 nt, Human
caggccaaacucaccugc

SEQ ID NO: 2987487 - RNA, 23 nt, Human
caggccaaacucaccugccccuc

SEQ ID NO: 2987488 - RNA, 20 nt, Human
caggccccugccacccuggg

SEQ ID NO: 2987489 - RNA, 19 nt, Human
caggccccugccacccugg

SEQ ID NO: 2987490 - RNA, 17 nt, Human
caggccccugccacccu

SEQ ID NO: 2987491 - RNA, 15 nt, Human
caggccccugccacc

SEQ ID NO: 2987492 - RNA, 15 nt, Human
caggcccggcuccag

SEQ ID NO: 2987493 - RNA, 14 nt, Human
caggcccggcucca

SEQ ID NO: 2987494 - RNA, 13 nt, Human
caggcccggcucc

SEQ ID NO: 2987495 - RNA, 16 nt, Human
caggauuuuaaucuuu

SEQ ID NO: 2987496 - RNA, 20 nt, Human
caggauucuuccucccuccc

SEQ ID NO: 2987497 - RNA, 14 nt, Human
caggcagccaggcc

SEQ ID NO: 2987498 - RNA, 15 nt, Human
caggcagccaggcca

SEQ ID NO: 2987499 - RNA, 21 nt, Human
caggcaagcaccuccugccuc

SEQ ID NO: 2987500 - RNA, 16 nt, Human
caggcaagcaccuccu

SEQ ID NO: 2987501 - RNA, 15 nt, Human
caggcaagcaccucc

SEQ ID NO: 2987502 - RNA, 14 nt, Human
caggcaagcaccuc

SEQ ID NO: 2987503 - RNA, 13 nt, Human
caggcagguccag

SEQ ID NO: 2987504 - RNA, 16 nt, Human
caggcagccaggccac

SEQ ID NO: 2987505 - RNA, 17 nt, Human
caggcagccaggccaca

SEQ ID NO: 2987506 - RNA, 13 nt, Human
caggcauucccca

SEQ ID NO: 2987507 - RNA, 15 nt, Human
caggcauuccccagg

SEQ ID NO: 2987508 - RNA, 16 nt, Human
caggcauuccccagga

SEQ ID NO: 2987509 - RNA, 17 nt, Human
caggcauuccccaggag

SEQ ID NO: 2987510 - RNA, 20 nt, Human
caggcauguucucugaggac

SEQ ID NO: 2987511 - RNA, 19 nt, Human
caggcauguucucugagga

SEQ ID NO: 2987512 - RNA, 18 nt, Human
caggcauguucucugagg

SEQ ID NO: 2987513 - RNA, 15 nt, Human
caggcauguucucug

SEQ ID NO: 2987514 - RNA, 18 nt, Human
caggcauuccccaggagg

SEQ ID NO: 2987515 - RNA, 19 nt, Human
caggcauuccccaggaggc

SEQ ID NO: 2987516 - RNA, 20 nt, Human
caggcauuccccaggaggcc

SEQ ID NO: 2987517 - RNA, 21 nt, Human
caggcauuccccaggaggcca

SEQ ID NO: 2987518 - RNA, 22 nt, Human
caggcauuccccaggaggccag

SEQ ID NO: 2987519 - RNA, 23 nt, Human
caggcauuccccaggaggccagc

SEQ ID NO: 2987520 - RNA, 24 nt, Human
caggcauuccccaggaggccagcc

SEQ ID NO: 2987521 - RNA, 12 nt, Human
caggcaggucuu

SEQ ID NO: 2987522 - RNA, 19 nt, Human
caggcagguccaggguuug

SEQ ID NO: 2987523 - RNA, 15 nt, Human
caggcagguccaggg

SEQ ID NO: 2987524 - RNA, 14 nt, Human
caggcagguccagg

SEQ ID NO: 2987525 - RNA, 22 nt, Human
caggcaggucuugaacuccugg

SEQ ID NO: 2987526 - RNA, 13 nt, Human
caggcaggucuug

SEQ ID NO: 2987527 - RNA, 15 nt, Human
caggcaggugggaug

SEQ ID NO: 2987528 - RNA, 23 nt, Human
caggcaggucuugaacuccuggc

SEQ ID NO: 2987529 - RNA, 17 nt, Human
caggcaugguggcccac

SEQ ID NO: 2987530 - RNA, 23 nt, Human
caggaugguucccuugaugaaga

SEQ ID NO: 2987531 - RNA, 21 nt, Human
caggaugguucccuugaugaa

SEQ ID NO: 2987532 - RNA, 18 nt, Human
caggauucuuccucccuc

SEQ ID NO: 2987533 - RNA, 17 nt, Human
caggauucuuccucccu

SEQ ID NO: 2987534 - RNA, 23 nt, Human
caggauggccgggcgcgguggcu

SEQ ID NO: 2987535 - RNA, 21 nt, Human
caggauauucucacagcucca

SEQ ID NO: 2987536 - RNA, 13 nt, Human
caggaucagucug

SEQ ID NO: 2987537 - RNA, 14 nt, Human
caggaucagucuga

SEQ ID NO: 2987538 - RNA, 13 nt, Human
caggcuggaguua

SEQ ID NO: 2987539 - RNA, 16 nt, Human
caggcuggaguuauug

SEQ ID NO: 2987540 - RNA, 23 nt, Human
caggcugggcuucaguggcagcu

SEQ ID NO: 2987541 - RNA, 17 nt, Human
caggcugccagugccug

SEQ ID NO: 2987542 - RNA, 16 nt, Human
caggcugccagugccu

SEQ ID NO: 2987543 - RNA, 14 nt, Human
caggcugccagugc

SEQ ID NO: 2987544 - RNA, 20 nt, Human
caggcugccagugccugggu

SEQ ID NO: 2987545 - RNA, 19 nt, Human
caggcugccagugccuggg

SEQ ID NO: 2987546 - RNA, 21 nt, Human
caggcugccagugccugggug

SEQ ID NO: 2987547 - RNA, 12 nt, Human
caggcugccagu

SEQ ID NO: 2987548 - RNA, 16 nt, Human
caggcuuagucacuga

SEQ ID NO: 2987549 - RNA, 17 nt, Human
caggcuuagucacugag

SEQ ID NO: 2987550 - RNA, 20 nt, Human
caggcuuagucacugagaca

SEQ ID NO: 2987551 - RNA, 21 nt, Human
caggcuuagucacugagacag

SEQ ID NO: 2987552 - RNA, 23 nt, Human
caggcuguaucccaugagccuca

SEQ ID NO: 2987553 - RNA, 22 nt, Human
caggcuguaucccaugagccuc

SEQ ID NO: 2987554 - RNA, 21 nt, Human
caggcuguaucccaugagccu

SEQ ID NO: 2987555 - RNA, 20 nt, Human
caggcuguaucccaugagcc

SEQ ID NO: 2987556 - RNA, 14 nt, Human
caggcuguauccca

SEQ ID NO: 2987557 - RNA, 19 nt, Human
caggcuggucucaaacucu

SEQ ID NO: 2987558 - RNA, 12 nt, Human
caggcuggucuc

SEQ ID NO: 2987559 - RNA, 22 nt, Human
caggcuuagucacugagacagc

SEQ ID NO: 2987560 - RNA, 23 nt, Human
caggcuuagucacugagacagcc

SEQ ID NO: 2987561 - RNA, 19 nt, Human
caggcuagauguauguacu

SEQ ID NO: 2987562 - RNA, 13 nt, Human
caggcuagaugua

SEQ ID NO: 2987563 - RNA, 14 nt, Human
caggcuacugucag

SEQ ID NO: 2987564 - RNA, 20 nt, Human
caggcuccuuuagcgcccag

SEQ ID NO: 2987565 - RNA, 19 nt, Human
caggcuccuuuagcgccca

SEQ ID NO: 2987566 - RNA, 14 nt, Human
caggcuccuuuagc

SEQ ID NO: 2987567 - RNA, 13 nt, Human
caggcucucaggc

SEQ ID NO: 2987568 - RNA, 14 nt, Human
caggcucucaggcc

SEQ ID NO: 2987569 - RNA, 15 nt, Human
caggcucucaggcca

SEQ ID NO: 2987570 - RNA, 16 nt, Human
caggcucucaggccag

SEQ ID NO: 2987571 - RNA, 20 nt, Human
caggcucgggcuccccagcc

SEQ ID NO: 2987572 - RNA, 12 nt, Human
caggcucucagg

SEQ ID NO: 2987573 - RNA, 21 nt, Human
caggcuccuuuagcgcccagu

SEQ ID NO: 2987574 - RNA, 17 nt, Human
caggcucucaggccagc

SEQ ID NO: 2987575 - RNA, 18 nt, Human
caggcucucaggccagcu

SEQ ID NO: 2987576 - RNA, 19 nt, Human
caggcucucaggccagcug

SEQ ID NO: 2987577 - RNA, 20 nt, Human
caggcucucaggccagcugc

SEQ ID NO: 2987578 - RNA, 21 nt, Human
caggcucucaggccagcugcu

SEQ ID NO: 2987579 - RNA, 23 nt, Human
caggcucucaggccagcugcuug

SEQ ID NO: 2987580 - RNA, 19 nt, Human
caggcccggcuccaggcuc

SEQ ID NO: 2987581 - RNA, 18 nt, Human
caggcccggcuccaggcu

SEQ ID NO: 2987582 - RNA, 16 nt, Human
caggcccggcuccagg

SEQ ID NO: 2987583 - RNA, 17 nt, Human
caggcccggcuccaggc

SEQ ID NO: 2987584 - RNA, 13 nt, Human
caggcccucugcc

SEQ ID NO: 2987585 - RNA, 14 nt, Human
caggcccucugccc

SEQ ID NO: 2987586 - RNA, 15 nt, Human
caggcccucugccca

SEQ ID NO: 2987587 - RNA, 21 nt, Human
caggcccggcuccaggcuccu

SEQ ID NO: 2987588 - RNA, 20 nt, Human
caggcccggcuccaggcucc

SEQ ID NO: 2987589 - RNA, 22 nt, Human
caggcccggcuccaggcuccuu

SEQ ID NO: 2987590 - RNA, 16 nt, Human
caggcccucugcccac

SEQ ID NO: 2987591 - RNA, 17 nt, Human
caggcccucugcccacu

SEQ ID NO: 2987592 - RNA, 19 nt, Human
caggcccucugcccacucc

SEQ ID NO: 2987593 - RNA, 20 nt, Human
caggcccucugcccacuccc

SEQ ID NO: 2987594 - RNA, 21 nt, Human
caggcccucugcccacucccu

SEQ ID NO: 2987595 - RNA, 22 nt, Human
caggcccucugcccacucccug

SEQ ID NO: 2987596 - RNA, 20 nt, Human
caggcccuugucggccccac

SEQ ID NO: 2987597 - RNA, 22 nt, Human
cagggaaacagcuaaugggaca

SEQ ID NO: 2987598 - RNA, 16 nt, Human
cagggaaacagcuaau

SEQ ID NO: 2987599 - RNA, 14 nt, Human
cagggacagagggg

SEQ ID NO: 2987600 - RNA, 20 nt, Human
cagggacagaggggguggcc

SEQ ID NO: 2987601 - RNA, 13 nt, Human
cagggacagaggg

SEQ ID NO: 2987602 - RNA, 16 nt, Human
caggggacaggauggu

SEQ ID NO: 2987603 - RNA, 11 nt, Human
caggggacagg

SEQ ID NO: 2987604 - RNA, 14 nt, Human
cagggccuggcuca

SEQ ID NO: 2987605 - RNA, 15 nt, Human
cagggccuggcucag

SEQ ID NO: 2987606 - RNA, 13 nt, Human
cagggccuggcuc

SEQ ID NO: 2987607 - RNA, 21 nt, Human
cagggccucugcggagcacac

SEQ ID NO: 2987608 - RNA, 16 nt, Human
cagggccuggcucagg

SEQ ID NO: 2987609 - RNA, 19 nt, Human
cagggccuggcucaggugg

SEQ ID NO: 2987610 - RNA, 19 nt, Human
caggggaggguagagcgga

SEQ ID NO: 2987611 - RNA, 18 nt, Human
cagggacaggauaagagg

SEQ ID NO: 2987612 - RNA, 23 nt, Human
cagggacagaggggguggccucc

SEQ ID NO: 2987613 - RNA, 14 nt, Human
cagggcacaccggg

SEQ ID NO: 2987614 - RNA, 21 nt, Human
cagggcacaccgggcacucag

SEQ ID NO: 2987615 - RNA, 19 nt, Human
cagggcacaccgggcacuc

SEQ ID NO: 2987616 - RNA, 17 nt, Human
cagggcacaccgggcac

SEQ ID NO: 2987617 - RNA, 15 nt, Human
cagggcacaccgggc

SEQ ID NO: 2987618 - RNA, 23 nt, Human
cagggcacaccgggcacucagaa

SEQ ID NO: 2987619 - RNA, 22 nt, Human
cagggcacaccgggcacucaga

SEQ ID NO: 2987620 - RNA, 17 nt, Human
cagggcauggcugggaa

SEQ ID NO: 2987621 - RNA, 14 nt, Human
cagggcaucuggga

SEQ ID NO: 2987622 - RNA, 17 nt, Human
cagggccaugucagaca

SEQ ID NO: 2987623 - RNA, 21 nt, Human
cagggccaugucagacacaga

SEQ ID NO: 2987624 - RNA, 20 nt, Human
cagggccaugucagacacag

SEQ ID NO: 2987625 - RNA, 17 nt, Human
cagggccucugcggagc

SEQ ID NO: 2987626 - RNA, 15 nt, Human
cagggccucugcgga

SEQ ID NO: 2987627 - RNA, 14 nt, Human
cagggccucugcgg

SEQ ID NO: 2987628 - RNA, 13 nt, Human
cagggccucugcg

SEQ ID NO: 2987629 - RNA, 12 nt, Human
cagggccucugc

SEQ ID NO: 2987630 - RNA, 19 nt, Human
cagcacaaggaaauaaaau

SEQ ID NO: 2987631 - RNA, 21 nt, Human
cagcaauaaagcagcguuucu

SEQ ID NO: 2987632 - RNA, 13 nt, Human
cagcaauaaagca

SEQ ID NO: 2987633 - RNA, 21 nt, Human
cagcaagugagagcugggugu

SEQ ID NO: 2987634 - RNA, 19 nt, Human
cagcaagugagagcugggu

SEQ ID NO: 2987635 - RNA, 22 nt, Human
cagcaauaaagcagcguuucua

SEQ ID NO: 2987636 - RNA, 16 nt, Human
cagcaauuaugaaaau

SEQ ID NO: 2987637 - RNA, 19 nt, Human
cagcaauuaugaaaauaau

SEQ ID NO: 2987638 - RNA, 22 nt, Human
cagcaagggugaugggaaagca

SEQ ID NO: 2987639 - RNA, 23 nt, Human
cagcaagggugaugggaaagcau

SEQ ID NO: 2987640 - RNA, 12 nt, Human
cagcaagugaga

SEQ ID NO: 2987641 - RNA, 17 nt, Human
cagcaagugagagcugg

SEQ ID NO: 2987642 - RNA, 16 nt, Human
cagcaagugagagcug

SEQ ID NO: 2987643 - RNA, 15 nt, Human
cagcaagugagagcu

SEQ ID NO: 2987644 - RNA, 14 nt, Human
cagcaagugagagc

SEQ ID NO: 2987645 - RNA, 19 nt, Human
cagcaagggugaugggaaa

SEQ ID NO: 2987646 - RNA, 18 nt, Human
cagcaaggagauuuacaa

SEQ ID NO: 2987647 - RNA, 17 nt, Human
cagcaaggagauuuaca

SEQ ID NO: 2987648 - RNA, 10 nt, Human
cagcagagug

SEQ ID NO: 2987649 - RNA, 9 nt, Human
cagcagagu

SEQ ID NO: 2987650 - RNA, 15 nt, Human
cagcagagugcuuua

SEQ ID NO: 2987651 - RNA, 11 nt, Human
cagcagagugc

SEQ ID NO: 2987652 - RNA, 11 nt, Human
cagcagagcac

SEQ ID NO: 2987653 - RNA, 13 nt, Human
cagcagagcaccu

SEQ ID NO: 2987654 - RNA, 22 nt, Human
cagcagaaaugccuuacccuca

SEQ ID NO: 2987655 - RNA, 19 nt, Human
cagcagaaaugccuuaccc

SEQ ID NO: 2987656 - RNA, 12 nt, Human
cagcagacacau

SEQ ID NO: 2987657 - RNA, 17 nt, Human
cagcagaaaugccuuac

SEQ ID NO: 2987658 - RNA, 15 nt, Human
cagcagaaaugccuu

SEQ ID NO: 2987659 - RNA, 17 nt, Human
cagcacuuugggaggcu

SEQ ID NO: 2987660 - RNA, 18 nt, Human
cagcacuuugggaggcug

SEQ ID NO: 2987661 - RNA, 20 nt, Human
cagcacuuugggaggcugag

SEQ ID NO: 2987662 - RNA, 15 nt, Human
cagcaacacaaagcu

SEQ ID NO: 2987663 - RNA, 23 nt, Human
cagcaacacaaagcuuuugcaua

SEQ ID NO: 2987664 - RNA, 18 nt, Human
cagcaaaagaugcuucuc

SEQ ID NO: 2987665 - RNA, 23 nt, Human
cagcaacgcaggcccccaggugc

SEQ ID NO: 2987666 - RNA, 15 nt, Human
cagauuuuccugaaa

SEQ ID NO: 2987667 - RNA, 14 nt, Human
cagauuuuccugaa

SEQ ID NO: 2987668 - RNA, 14 nt, Human
cagauucuuuccug

SEQ ID NO: 2987669 - RNA, 23 nt, Human
cagaugggugcuuggaggaagga

SEQ ID NO: 2987670 - RNA, 18 nt, Human
cagaugggugcuuggagg

SEQ ID NO: 2987671 - RNA, 20 nt, Human
cagccccaaaacucuccucu

SEQ ID NO: 2987672 - RNA, 21 nt, Human
cagccccaaaacucuccucug

SEQ ID NO: 2987673 - RNA, 22 nt, Human
cagccccaaaacucuccucugc

SEQ ID NO: 2987674 - RNA, 18 nt, Human
cagcccacuucugccaua

SEQ ID NO: 2987675 - RNA, 15 nt, Human
cagcccaccccucaa

SEQ ID NO: 2987676 - RNA, 15 nt, Human
cagcccacuucugcc

SEQ ID NO: 2987677 - RNA, 22 nt, Human
cagccacggccaggccagaggg

SEQ ID NO: 2987678 - RNA, 21 nt, Human
cagccacggccaggccagagg

SEQ ID NO: 2987679 - RNA, 19 nt, Human
cagccacggccaggccaga

SEQ ID NO: 2987680 - RNA, 18 nt, Human
cagccacggccaggccag

SEQ ID NO: 2987681 - RNA, 17 nt, Human
cagccacggccaggcca

SEQ ID NO: 2987682 - RNA, 16 nt, Human
cagccacggccaggcc

SEQ ID NO: 2987683 - RNA, 15 nt, Human
cagccacggccaggc

SEQ ID NO: 2987684 - RNA, 14 nt, Human
cagccacggccagg

SEQ ID NO: 2987685 - RNA, 13 nt, Human
cagccaguaaaug

SEQ ID NO: 2987686 - RNA, 22 nt, Human
cagccaguaaaugggggugcau

SEQ ID NO: 2987687 - RNA, 23 nt, Human
cagccacggccaggccagaggga

SEQ ID NO: 2987688 - RNA, 15 nt, Human
cagccacauuccuga

SEQ ID NO: 2987689 - RNA, 17 nt, Human
cagccacauuccugaug

SEQ ID NO: 2987690 - RNA, 19 nt, Human
cagccacauuccugaugcu

SEQ ID NO: 2987691 - RNA, 14 nt, Human
cagccacauuccug

SEQ ID NO: 2987692 - RNA, 12 nt, Human
cagcagccugga

SEQ ID NO: 2987693 - RNA, 14 nt, Human
cagcagccuggacc

SEQ ID NO: 2987694 - RNA, 15 nt, Human
cagcagccuggaccc

SEQ ID NO: 2987695 - RNA, 18 nt, Human
cagcagccuggacccugu

SEQ ID NO: 2987696 - RNA, 19 nt, Human
cagcagccuggacccugug

SEQ ID NO: 2987697 - RNA, 22 nt, Human
cagcagccuggacccuguggau

SEQ ID NO: 2987698 - RNA, 14 nt, Human
cagcaggcucucag

SEQ ID NO: 2987699 - RNA, 15 nt, Human
cagcaggcucucagg

SEQ ID NO: 2987700 - RNA, 12 nt, Human
cagcaggcucuc

SEQ ID NO: 2987701 - RNA, 19 nt, Human
cagcaggcugccagugccu

SEQ ID NO: 2987702 - RNA, 18 nt, Human
cagcaggcugccagugcc

SEQ ID NO: 2987703 - RNA, 15 nt, Human
cagcaggcugccagu

SEQ ID NO: 2987704 - RNA, 14 nt, Human
cagcaggcugccag

SEQ ID NO: 2987705 - RNA, 13 nt, Human
cagcaggcugcca

SEQ ID NO: 2987706 - RNA, 18 nt, Human
cagcagggagggcuucug

SEQ ID NO: 2987707 - RNA, 20 nt, Human
cagcaggcucucaggccagc

SEQ ID NO: 2987708 - RNA, 22 nt, Human
cagcaggcucucaggccagcug

SEQ ID NO: 2987709 - RNA, 16 nt, Human
cagcaggcucucaggc

SEQ ID NO: 2987710 - RNA, 17 nt, Human
cagcaggcucucaggcc

SEQ ID NO: 2987711 - RNA, 18 nt, Human
cagcaggcucucaggcca

SEQ ID NO: 2987712 - RNA, 19 nt, Human
cagcaggcucucaggccag

SEQ ID NO: 2987713 - RNA, 20 nt, Human
cagcaggcugccagugccug

SEQ ID NO: 2987714 - RNA, 20 nt, Human
cagcagggagggcuucugcc

SEQ ID NO: 2987715 - RNA, 17 nt, Human
cagcauccuggcacccg

SEQ ID NO: 2987716 - RNA, 16 nt, Human
cagcauccuggcaccc

SEQ ID NO: 2987717 - RNA, 15 nt, Human
cagcauccuggcacc

SEQ ID NO: 2987718 - RNA, 14 nt, Human
cagcauccuggcac

SEQ ID NO: 2987719 - RNA, 20 nt, Human
cagcauccuggcacccggcc

SEQ ID NO: 2987720 - RNA, 19 nt, Human
cagcauccuggcacccggc

SEQ ID NO: 2987721 - RNA, 21 nt, Human
cagcauccuggcacccggccc

SEQ ID NO: 2987722 - RNA, 15 nt, Human
cagccaaagccuccu

SEQ ID NO: 2987723 - RNA, 16 nt, Human
cagccaaagccuccuc

SEQ ID NO: 2987724 - RNA, 18 nt, Human
cagccaaagccuccucca

SEQ ID NO: 2987725 - RNA, 21 nt, Human
cagccaaagccuccuccagcc

SEQ ID NO: 2987726 - RNA, 14 nt, Human
cagcucaccagccc

SEQ ID NO: 2987727 - RNA, 13 nt, Human
cagcccucagaau

SEQ ID NO: 2987728 - RNA, 18 nt, Human
cagcccucaauugugaaa

SEQ ID NO: 2987729 - RNA, 17 nt, Human
cagcccgggcucugccu

SEQ ID NO: 2987730 - RNA, 18 nt, Human
cagcccgggcucugccuc

SEQ ID NO: 2987731 - RNA, 19 nt, Human
cagcccgggcucugccucc

SEQ ID NO: 2987732 - RNA, 20 nt, Human
cagcccgggcucugccuccc

SEQ ID NO: 2987733 - RNA, 21 nt, Human
cagcccgggcucugccuccca

SEQ ID NO: 2987734 - RNA, 22 nt, Human
cagcccgggcucugccucccau

SEQ ID NO: 2987735 - RNA, 16 nt, Human
cagccccuucugaccc

SEQ ID NO: 2987736 - RNA, 17 nt, Human
cagccccuucugaccca

SEQ ID NO: 2987737 - RNA, 19 nt, Human
cagccccuucugacccaug

SEQ ID NO: 2987738 - RNA, 21 nt, Human
cagccccuucugacccaugcu

SEQ ID NO: 2987739 - RNA, 22 nt, Human
cagccccuucugacccaugcug

SEQ ID NO: 2987740 - RNA, 23 nt, Human
cagccccuucugacccaugcugc

SEQ ID NO: 2987741 - RNA, 24 nt, Human
cagccccuucugacccaugcugcc

SEQ ID NO: 2987742 - RNA, 13 nt, Human
cagcccgggcucu

SEQ ID NO: 2987743 - RNA, 14 nt, Human
cagcccgggcucug

SEQ ID NO: 2987744 - RNA, 15 nt, Human
cagcccgggcucugc

SEQ ID NO: 2987745 - RNA, 16 nt, Human
cagcccgggcucugcc

SEQ ID NO: 2987746 - RNA, 22 nt, Human
cagccccaucccaaacccuuca

SEQ ID NO: 2987747 - RNA, 12 nt, Human
cagccccauccu

SEQ ID NO: 2987748 - RNA, 13 nt, Human
cagccccauccuc

SEQ ID NO: 2987749 - RNA, 14 nt, Human
cagccccauccucu

SEQ ID NO: 2987750 - RNA, 16 nt, Human
cagccccauccucugu

SEQ ID NO: 2987751 - RNA, 22 nt, Human
cagccccauccucuguacagag

SEQ ID NO: 2987752 - RNA, 14 nt, Human
cagccccauucugc

SEQ ID NO: 2987753 - RNA, 13 nt, Human
cagccccauucug

SEQ ID NO: 2987754 - RNA, 23 nt, Human
cagccccuggaugcagccucaca

SEQ ID NO: 2987755 - RNA, 18 nt, Human
cagccccauucugccugc

SEQ ID NO: 2987756 - RNA, 17 nt, Human
cagccccauucugccug

SEQ ID NO: 2987757 - RNA, 16 nt, Human
cagccccauucugccu

SEQ ID NO: 2987758 - RNA, 20 nt, Human
cagccccuguucuggcagag

SEQ ID NO: 2987759 - RNA, 22 nt, Human
cagccccuggaugcagccucac

SEQ ID NO: 2987760 - RNA, 21 nt, Human
cagccccuguucuggcagagu

SEQ ID NO: 2987761 - RNA, 11 nt, Human
cagccccaucc

SEQ ID NO: 2987762 - RNA, 21 nt, Human
cagccccaucccaaacccuuc

SEQ ID NO: 2987763 - RNA, 18 nt, Human
cagccccagugcccacag

SEQ ID NO: 2987764 - RNA, 17 nt, Human
cagccccagugcccaca

SEQ ID NO: 2987765 - RNA, 16 nt, Human
cagccccagugcccac

SEQ ID NO: 2987766 - RNA, 15 nt, Human
cagccccagugccca

SEQ ID NO: 2987767 - RNA, 14 nt, Human
cagccccagugccc

SEQ ID NO: 2987768 - RNA, 13 nt, Human
cagccccagugcc

SEQ ID NO: 2987769 - RNA, 16 nt, Human
cagccuaguugaucag

SEQ ID NO: 2987770 - RNA, 18 nt, Human
cagccucaaccuccuggg

SEQ ID NO: 2987771 - RNA, 17 nt, Human
cagccucaaccuccugg

SEQ ID NO: 2987772 - RNA, 21 nt, Human
cagccucaaccuccugggcua

SEQ ID NO: 2987773 - RNA, 20 nt, Human
cagccucaaccuccugggcu

SEQ ID NO: 2987774 - RNA, 19 nt, Human
cagccucaaccuccugggc

SEQ ID NO: 2987775 - RNA, 14 nt, Human
cagccucacagucc

SEQ ID NO: 2987776 - RNA, 15 nt, Human
cagccucacaguccu

SEQ ID NO: 2987777 - RNA, 20 nt, Human
cagccucacaguccuuacca

SEQ ID NO: 2987778 - RNA, 22 nt, Human
cagccucccgaauagcugggac

SEQ ID NO: 2987779 - RNA, 21 nt, Human
cagccucccgaauagcuggga

SEQ ID NO: 2987780 - RNA, 20 nt, Human
cagccucccgaauagcuggg

SEQ ID NO: 2987781 - RNA, 23 nt, Human
cagccucccaaagugcugggauu

SEQ ID NO: 2987782 - RNA, 21 nt, Human
cagccucccaaagugcuggga

SEQ ID NO: 2987783 - RNA, 20 nt, Human
cagccucccaaagugcuggg

SEQ ID NO: 2987784 - RNA, 19 nt, Human
cagccucccaaagugcugg

SEQ ID NO: 2987785 - RNA, 21 nt, Human
cagccguguaaccauggaccc

SEQ ID NO: 2987786 - RNA, 18 nt, Human
cagcccugcagagggcac

SEQ ID NO: 2987787 - RNA, 20 nt, Human
cagcccugcagagggcacag

SEQ ID NO: 2987788 - RNA, 13 nt, Human
cagcccugcagag

SEQ ID NO: 2987789 - RNA, 14 nt, Human
cagcccugcagagg

SEQ ID NO: 2987790 - RNA, 15 nt, Human
cagcccugcagaggg

SEQ ID NO: 2987791 - RNA, 16 nt, Human
cagcccugcagagggc

SEQ ID NO: 2987792 - RNA, 19 nt, Human
cagcuacuugggaggcuga

SEQ ID NO: 2987793 - RNA, 24 nt, Human
cagcuacucgggaggcugaggcag

SEQ ID NO: 2987794 - RNA, 23 nt, Human
cagcuacucgggaggcugaggca

SEQ ID NO: 2987795 - RNA, 17 nt, Human
cagcuacucgggaggcu

SEQ ID NO: 2987796 - RNA, 19 nt, Human
cagcuacucgggaggcuga

SEQ ID NO: 2987797 - RNA, 16 nt, Human
cagcuaaugggacacu

SEQ ID NO: 2987798 - RNA, 15 nt, Human
cagcuaaugggacac

SEQ ID NO: 2987799 - RNA, 20 nt, Human
cagcuaacauggaaguacua

SEQ ID NO: 2987800 - RNA, 20 nt, Human
cagcgagcccugguggcagu

SEQ ID NO: 2987801 - RNA, 19 nt, Human
cagcgagcccugguggcag

SEQ ID NO: 2987802 - RNA, 17 nt, Human
cagcgagcccugguggc

SEQ ID NO: 2987803 - RNA, 16 nt, Human
cagcgagcccuggugg

SEQ ID NO: 2987804 - RNA, 13 nt, Human
cagcgagcccugg

SEQ ID NO: 2987805 - RNA, 19 nt, Human
cagcuaacauggaaguacu

SEQ ID NO: 2987806 - RNA, 18 nt, Human
cagcuaacauggaaguac

SEQ ID NO: 2987807 - RNA, 21 nt, Human
cagcgagcccugguggcagug

SEQ ID NO: 2987808 - RNA, 19 nt, Human
cagcucaccagccccagug

SEQ ID NO: 2987809 - RNA, 17 nt, Human
cagcucaccagccccag

SEQ ID NO: 2987810 - RNA, 16 nt, Human
cagcucaccagcccca

SEQ ID NO: 2987811 - RNA, 15 nt, Human
cagcucaccagcccc

SEQ ID NO: 2987812 - RNA, 13 nt, Human
cagcucaccagcc

SEQ ID NO: 2987813 - RNA, 13 nt, Human
cagcucaccucuc

SEQ ID NO: 2987814 - RNA, 15 nt, Human
cagcucaccucuccc

SEQ ID NO: 2987815 - RNA, 16 nt, Human
cagcucaccucucccu

SEQ ID NO: 2987816 - RNA, 17 nt, Human
cagcucaccucucccuu

SEQ ID NO: 2987817 - RNA, 21 nt, Human
cagcucaccagccccagugcc

SEQ ID NO: 2987818 - RNA, 20 nt, Human
cagcucaccagccccagugc

SEQ ID NO: 2987819 - RNA, 22 nt, Human
cagcucaccagccccagugccc

SEQ ID NO: 2987820 - RNA, 19 nt, Human
cagcucaccucucccuugg

SEQ ID NO: 2987821 - RNA, 20 nt, Human
cagcucaccucucccuugga

SEQ ID NO: 2987822 - RNA, 12 nt, Human
cagcucagagag

SEQ ID NO: 2987823 - RNA, 20 nt, Human
cagccuugaccauucuccac

SEQ ID NO: 2987824 - RNA, 21 nt, Human
cagccuugaccauucuccacc

SEQ ID NO: 2987825 - RNA, 17 nt, Human
cagccuugaccauucuc

SEQ ID NO: 2987826 - RNA, 22 nt, Human
cagccuugaccauucuccaccu

SEQ ID NO: 2987827 - RNA, 23 nt, Human
cagccuugaccauucuccaccug

SEQ ID NO: 2987828 - RNA, 24 nt, Human
cagccuugaccauucuccaccugc

SEQ ID NO: 2987829 - RNA, 16 nt, Human
cagccugggcaaugug

SEQ ID NO: 2987830 - RNA, 19 nt, Human
cagccugggcaaugugaua

SEQ ID NO: 2987831 - RNA, 20 nt, Human
cagccugggcaacagagcaa

SEQ ID NO: 2987832 - RNA, 19 nt, Human
cagccugggcaacagagca

SEQ ID NO: 2987833 - RNA, 15 nt, Human
cagccuggacccugu

SEQ ID NO: 2987834 - RNA, 19 nt, Human
cagccuggacccuguggau

SEQ ID NO: 2987835 - RNA, 21 nt, Human
cagccuggaugccauccaagu

SEQ ID NO: 2987836 - RNA, 17 nt, Human
cagccuggaugccaucc

SEQ ID NO: 2987837 - RNA, 11 nt, Human
cagccuggaug

SEQ ID NO: 2987838 - RNA, 16 nt, Human
cagccuggaugccauc

SEQ ID NO: 2987839 - RNA, 15 nt, Human
cagccuggaugccau

SEQ ID NO: 2987840 - RNA, 12 nt, Human
cagccuggaugc

SEQ ID NO: 2987841 - RNA, 23 nt, Human
cagccucccgaguagcugggacu

SEQ ID NO: 2987842 - RNA, 22 nt, Human
cagccucccgaguagcugggac

SEQ ID NO: 2987843 - RNA, 21 nt, Human
cagccucccgaguagcuggga

SEQ ID NO: 2987844 - RNA, 20 nt, Human
cagccucccgaguagcuggg

SEQ ID NO: 2987845 - RNA, 19 nt, Human
cagccucccgaguagcugg

SEQ ID NO: 2987846 - RNA, 23 nt, Human
cagccucccgaauagcugggacu

SEQ ID NO: 2987847 - RNA, 20 nt, Human
cagccugcuccagcuguuca

SEQ ID NO: 2987848 - RNA, 16 nt, Human
cagcucuccccuucuc

SEQ ID NO: 2987849 - RNA, 21 nt, Human
cagcucugcaagaauugaagc

SEQ ID NO: 2987850 - RNA, 20 nt, Human
cagcucugcauacucauuag

SEQ ID NO: 2987851 - RNA, 15 nt, Human
cagcucugcaagaau

SEQ ID NO: 2987852 - RNA, 16 nt, Human
cagcucugcaagaauu

SEQ ID NO: 2987853 - RNA, 23 nt, Human
cagcuccuucuguccuacucugu

SEQ ID NO: 2987854 - RNA, 21 nt, Human
cagcuccuucuguccuacucu

SEQ ID NO: 2987855 - RNA, 17 nt, Human
cagcuccuucuguccua

SEQ ID NO: 2987856 - RNA, 16 nt, Human
cagcuccuucuguccu

SEQ ID NO: 2987857 - RNA, 13 nt, Human
cagcucagagagg

SEQ ID NO: 2987858 - RNA, 17 nt, Human
cagcucagagagggugg

SEQ ID NO: 2987859 - RNA, 19 nt, Human
cagcucagagaggguggga

SEQ ID NO: 2987860 - RNA, 20 nt, Human
cagcucagagagggugggag

SEQ ID NO: 2987861 - RNA, 23 nt, Human
cagcucuucuccaggcuguaucc

SEQ ID NO: 2987862 - RNA, 19 nt, Human
cagcucuucuccaggcugu

SEQ ID NO: 2987863 - RNA, 18 nt, Human
cagcucuucuccaggcug

SEQ ID NO: 2987864 - RNA, 17 nt, Human
cagcucuucuccaggcu

SEQ ID NO: 2987865 - RNA, 16 nt, Human
cagcucuucuccaggc

SEQ ID NO: 2987866 - RNA, 15 nt, Human
cagcucuucuccagg

SEQ ID NO: 2987867 - RNA, 14 nt, Human
cagcucuucuccag

SEQ ID NO: 2987868 - RNA, 13 nt, Human
cagcucuucucca

SEQ ID NO: 2987869 - RNA, 10 nt, Human
cagcucuuau

SEQ ID NO: 2987870 - RNA, 21 nt, Human
cagcucuuauauugccauuuc

SEQ ID NO: 2987871 - RNA, 23 nt, Human
cagcucuguccugggagugagcu

SEQ ID NO: 2987872 - RNA, 18 nt, Human
cagcucuguccugggagu

SEQ ID NO: 2987873 - RNA, 17 nt, Human
cagcucuguccugggag

SEQ ID NO: 2987874 - RNA, 16 nt, Human
cagcucuguccuggga

SEQ ID NO: 2987875 - RNA, 14 nt, Human
cagcucuguccugg

SEQ ID NO: 2987876 - RNA, 22 nt, Human
cagcucugguccauagagagca

SEQ ID NO: 2987877 - RNA, 23 nt, Human
cagcucugguccauagagagcaa

SEQ ID NO: 2987878 - RNA, 13 nt, Human
cagcucuguccug

SEQ ID NO: 2987879 - RNA, 12 nt, Human
cagcucuguccu

SEQ ID NO: 2987880 - RNA, 16 nt, Human
cagcucugguccauag

SEQ ID NO: 2987881 - RNA, 17 nt, Human
cagcucugguccauaga

SEQ ID NO: 2987882 - RNA, 18 nt, Human
cagcucugguccauagag

SEQ ID NO: 2987883 - RNA, 21 nt, Human
cagcucugguccauagagagc

SEQ ID NO: 2987884 - RNA, 10 nt, Human
cagcucuggu

SEQ ID NO: 2987885 - RNA, 13 nt, Human
cagcucuggucca

SEQ ID NO: 2987886 - RNA, 18 nt, Human
cagcugguugagguuuca

SEQ ID NO: 2987887 - RNA, 18 nt, Human
cagcuguaugauucccag

SEQ ID NO: 2987888 - RNA, 21 nt, Human
cagcugggguggggaccucag

SEQ ID NO: 2987889 - RNA, 22 nt, Human
cagcugggguggggaccucagg

SEQ ID NO: 2987890 - RNA, 23 nt, Human
cagcugggguggggaccucaggc

SEQ ID NO: 2987891 - RNA, 22 nt, Human
cagcugcuuuugucuaugggac

SEQ ID NO: 2987892 - RNA, 23 nt, Human
cagcugcuuuugucuaugggacu

SEQ ID NO: 2987893 - RNA, 13 nt, Human
cagcugcuugggc

SEQ ID NO: 2987894 - RNA, 14 nt, Human
cagcugcuugggcu

SEQ ID NO: 2987895 - RNA, 15 nt, Human
cagcugcuugggcuu

SEQ ID NO: 2987896 - RNA, 16 nt, Human
cagcugcuugggcuuc

SEQ ID NO: 2987897 - RNA, 18 nt, Human
cagcugcuugggcuucau

SEQ ID NO: 2987898 - RNA, 19 nt, Human
cagcugcuugggcuucauc

SEQ ID NO: 2987899 - RNA, 21 nt, Human
cagcugcuugggcuucauccu

SEQ ID NO: 2987900 - RNA, 22 nt, Human
cagcugcuugggcuucauccuc

SEQ ID NO: 2987901 - RNA, 20 nt, Human
cagcugcugaaacaacaaau

SEQ ID NO: 2987902 - RNA, 21 nt, Human
cagcugcugaaacaacaaaua

SEQ ID NO: 2987903 - RNA, 19 nt, Human
cagcugcugagauccugga

SEQ ID NO: 2987904 - RNA, 12 nt, Human
cagcugcugaga

SEQ ID NO: 2987905 - RNA, 21 nt, Human
cagcugcugagauccuggacu

SEQ ID NO: 2987906 - RNA, 17 nt, Human
cagcugcuacuacuccu

SEQ ID NO: 2987907 - RNA, 18 nt, Human
cagcugccugggaucccu

SEQ ID NO: 2987908 - RNA, 23 nt, Human
cagcugccugggaucccucaucc

SEQ ID NO: 2987909 - RNA, 24 nt, Human
cagcugcgguccacccaggagccc

SEQ ID NO: 2987910 - RNA, 23 nt, Human
cagcugcgguccacccaggagcc

SEQ ID NO: 2987911 - RNA, 22 nt, Human
cagcugcgguccacccaggagc

SEQ ID NO: 2987912 - RNA, 21 nt, Human
cagcugcgguccacccaggag

SEQ ID NO: 2987913 - RNA, 20 nt, Human
cagcugcgguccacccagga

SEQ ID NO: 2987914 - RNA, 19 nt, Human
cagcugcgguccacccagg

SEQ ID NO: 2987915 - RNA, 15 nt, Human
cagcugccugggauc

SEQ ID NO: 2987916 - RNA, 18 nt, Human
cagcugcgguccacccag

SEQ ID NO: 2987917 - RNA, 22 nt, Human
caggaagcugugagagcaguuu

SEQ ID NO: 2987918 - RNA, 13 nt, Human
caggaagcuguga

SEQ ID NO: 2987919 - RNA, 14 nt, Human
caggaagcugugag

SEQ ID NO: 2987920 - RNA, 20 nt, Human
caggaagcucagggccuggc

SEQ ID NO: 2987921 - RNA, 21 nt, Human
caggaagcucagggccuggcu

SEQ ID NO: 2987922 - RNA, 23 nt, Human
caggaagcucagggccuggcuca

SEQ ID NO: 2987923 - RNA, 16 nt, Human
caggaagcucagggcc

SEQ ID NO: 2987924 - RNA, 17 nt, Human
caggaagcucagggccu

SEQ ID NO: 2987925 - RNA, 18 nt, Human
caggaagcucagggccug

SEQ ID NO: 2987926 - RNA, 19 nt, Human
caggaagcucagggccugg

SEQ ID NO: 2987927 - RNA, 14 nt, Human
caggaagcucaggg

SEQ ID NO: 2987928 - RNA, 15 nt, Human
caggaagcucagggc

SEQ ID NO: 2987929 - RNA, 13 nt, Human
caggaagcucagg

SEQ ID NO: 2987930 - RNA, 14 nt, Human
caggaagccagcag

SEQ ID NO: 2987931 - RNA, 16 nt, Human
caggaagccagcaggc

SEQ ID NO: 2987932 - RNA, 17 nt, Human
caggaagccagcaggcu

SEQ ID NO: 2987933 - RNA, 18 nt, Human
caggaagccagcaggcuc

SEQ ID NO: 2987934 - RNA, 19 nt, Human
caggaagccagcaggcucu

SEQ ID NO: 2987935 - RNA, 21 nt, Human
caggaagccagcaggcucuca

SEQ ID NO: 2987936 - RNA, 22 nt, Human
caggaagccagcaggcucucag

SEQ ID NO: 2987937 - RNA, 14 nt, Human
caggacgagaugac

SEQ ID NO: 2987938 - RNA, 15 nt, Human
caggaaggcuaaagg

SEQ ID NO: 2987939 - RNA, 14 nt, Human
caggaaguacugga

SEQ ID NO: 2987940 - RNA, 16 nt, Human
caggaaguacuggaga

SEQ ID NO: 2987941 - RNA, 12 nt, Human
caggaaguacug

SEQ ID NO: 2987942 - RNA, 17 nt, Human
caggaaguacuggagaa

SEQ ID NO: 2987943 - RNA, 18 nt, Human
caggaaguacuggagaaa

SEQ ID NO: 2987944 - RNA, 20 nt, Human
caggaaguacuggagaaaau

SEQ ID NO: 2987945 - RNA, 15 nt, Human
caggaaguagaggag

SEQ ID NO: 2987946 - RNA, 16 nt, Human
caggaaguagaggagg

SEQ ID NO: 2987947 - RNA, 18 nt, Human
cagcuugaaacugagaug

SEQ ID NO: 2987948 - RNA, 21 nt, Human
cagcuucauuuccugugucuu

SEQ ID NO: 2987949 - RNA, 20 nt, Human
cagcuucauuuccugugucu

SEQ ID NO: 2987950 - RNA, 19 nt, Human
cagcuucauuuccuguguc

SEQ ID NO: 2987951 - RNA, 21 nt, Human
cagcuugaggguugggcuggu

SEQ ID NO: 2987952 - RNA, 20 nt, Human
cagcuugaggguugggcugg

SEQ ID NO: 2987953 - RNA, 19 nt, Human
cagcuugaggguugggcug

SEQ ID NO: 2987954 - RNA, 18 nt, Human
cagcuugaggguugggcu

SEQ ID NO: 2987955 - RNA, 18 nt, Human
cagcuugaccgugaggcc

SEQ ID NO: 2987956 - RNA, 19 nt, Human
cagcuugaccgugaggcca

SEQ ID NO: 2987957 - RNA, 20 nt, Human
cagcuugaccgugaggccag

SEQ ID NO: 2987958 - RNA, 21 nt, Human
cagcuugaccgugaggccaga

SEQ ID NO: 2987959 - RNA, 15 nt, Human
cagcuugaggguugg

SEQ ID NO: 2987960 - RNA, 14 nt, Human
cagcuugaggguug

SEQ ID NO: 2987961 - RNA, 23 nt, Human
cagcuuuccucaaaacuucagac

SEQ ID NO: 2987962 - RNA, 22 nt, Human
cagcuuguaaauagcucaggug

SEQ ID NO: 2987963 - RNA, 21 nt, Human
cagcuuguaaauagcucaggu

SEQ ID NO: 2987964 - RNA, 20 nt, Human
cagcuuguaaauagcucagg

SEQ ID NO: 2987965 - RNA, 19 nt, Human
cagcuuguaaauagcucag

SEQ ID NO: 2987966 - RNA, 18 nt, Human
cagcuuguaaauagcuca

SEQ ID NO: 2987967 - RNA, 18 nt, Human
caggaaccacaagacugc

SEQ ID NO: 2987968 - RNA, 12 nt, Human
cagcuuuguuug

SEQ ID NO: 2987969 - RNA, 21 nt, Human
cagcuuuguuuguugucagcu

SEQ ID NO: 2987970 - RNA, 22 nt, Human
cagcuuuguuuguugucagcug

SEQ ID NO: 2987971 - RNA, 23 nt, Human
cagcuuuguuuguugucagcuga

SEQ ID NO: 2987972 - RNA, 22 nt, Human
caggaagcucagggccuggcuc

SEQ ID NO: 2987973 - RNA, 20 nt, Human
cagagccccacccucagaug

SEQ ID NO: 2987974 - RNA, 12 nt, Human
cagagccugcag

SEQ ID NO: 2987975 - RNA, 20 nt, Human
cagaggaaagcaaaggagau

SEQ ID NO: 2987976 - RNA, 13 nt, Human
cagagccugcagu

SEQ ID NO: 2987977 - RNA, 13 nt, Human
cagaggaaggaga

SEQ ID NO: 2987978 - RNA, 13 nt, Human
cagagccccacag

SEQ ID NO: 2987979 - RNA, 22 nt, Human
cagagccccacagccccaucug

SEQ ID NO: 2987980 - RNA, 16 nt, Human
cagagccccacagccc

SEQ ID NO: 2987981 - RNA, 15 nt, Human
cagagccccacagcc

SEQ ID NO: 2987982 - RNA, 23 nt, Human
cagagcccacgcccccacuggug

SEQ ID NO: 2987983 - RNA, 17 nt, Human
cagagcccacgccccca

SEQ ID NO: 2987984 - RNA, 19 nt, Human
cagagcccacgcccccacu

SEQ ID NO: 2987985 - RNA, 20 nt, Human
cagagcccacgcccccacug

SEQ ID NO: 2987986 - RNA, 21 nt, Human
cagagcccacgcccccacugg

SEQ ID NO: 2987987 - RNA, 20 nt, Human
cagaggagagaggacccccu

SEQ ID NO: 2987988 - RNA, 11 nt, Human
cagaggcagcc

SEQ ID NO: 2987989 - RNA, 15 nt, Human
cagaggagagaggac

SEQ ID NO: 2987990 - RNA, 19 nt, Human
cagaggagagaggaccccc

SEQ ID NO: 2987991 - RNA, 13 nt, Human
cagaggagagagg

SEQ ID NO: 2987992 - RNA, 16 nt, Human
cagagcccacgccccc

SEQ ID NO: 2987993 - RNA, 20 nt, Human
cagagcccaccuuggcucaa

SEQ ID NO: 2987994 - RNA, 19 nt, Human
cagagcccaccuuggcuca

SEQ ID NO: 2987995 - RNA, 17 nt, Human
cagagcccaccuuggcu

SEQ ID NO: 2987996 - RNA, 15 nt, Human
cagagcccaccuugg

SEQ ID NO: 2987997 - RNA, 13 nt, Human
cagagcagagacc

SEQ ID NO: 2987998 - RNA, 14 nt, Human
cagagcagagacca

SEQ ID NO: 2987999 - RNA, 15 nt, Human
cagagcagagaccau

SEQ ID NO: 2988000 - RNA, 17 nt, Human
cagagcagagaccaucc

SEQ ID NO: 2988001 - RNA, 18 nt, Human
cagagcagagaccauccc

SEQ ID NO: 2988002 - RNA, 19 nt, Human
cagagcagagaccaucccu

SEQ ID NO: 2988003 - RNA, 21 nt, Human
cagagcagagaccaucccuga

SEQ ID NO: 2988004 - RNA, 18 nt, Human
cagagcaccuuagacagu

SEQ ID NO: 2988005 - RNA, 19 nt, Human
cagagcaccuuagacaguc

SEQ ID NO: 2988006 - RNA, 21 nt, Human
cagagcaccuuagacaguccc

SEQ ID NO: 2988007 - RNA, 22 nt, Human
cagagcaccuuagacagucccu

SEQ ID NO: 2988008 - RNA, 11 nt, Human
cagagcagaga

SEQ ID NO: 2988009 - RNA, 12 nt, Human
cagagcagagac

SEQ ID NO: 2988010 - RNA, 23 nt, Human
cagagcaccuuagacagucccug

SEQ ID NO: 2988011 - RNA, 21 nt, Human
cagagaagauucuuguauuua

SEQ ID NO: 2988012 - RNA, 21 nt, Human
cagagaaugaaagggcccaga

SEQ ID NO: 2988013 - RNA, 20 nt, Human
cagagaaugaaagggcccag

SEQ ID NO: 2988014 - RNA, 15 nt, Human
cagagaauucucuua

SEQ ID NO: 2988015 - RNA, 19 nt, Human
cagagaaugaaagggccca

SEQ ID NO: 2988016 - RNA, 16 nt, Human
cagagacacaagccuu

SEQ ID NO: 2988017 - RNA, 17 nt, Human
cagagacacaagccuuc

SEQ ID NO: 2988018 - RNA, 14 nt, Human
cagagacacaagcc

SEQ ID NO: 2988019 - RNA, 15 nt, Human
cagagacacaagccu

SEQ ID NO: 2988020 - RNA, 14 nt, Human
cagagaccaucccu

SEQ ID NO: 2988021 - RNA, 16 nt, Human
cagagaccaucccuga

SEQ ID NO: 2988022 - RNA, 13 nt, Human
cagagaccauccc

SEQ ID NO: 2988023 - RNA, 16 nt, Human
cagagacuccugcagg

SEQ ID NO: 2988024 - RNA, 17 nt, Human
cagagacuccugcaggc

SEQ ID NO: 2988025 - RNA, 18 nt, Human
cagagacuccugcaggca

SEQ ID NO: 2988026 - RNA, 19 nt, Human
cagagacuccugcaggcag

SEQ ID NO: 2988027 - RNA, 14 nt, Human
cagagacuccugca

SEQ ID NO: 2988028 - RNA, 15 nt, Human
cagagacuccugcag

SEQ ID NO: 2988029 - RNA, 13 nt, Human
cagagacuccugc

SEQ ID NO: 2988030 - RNA, 17 nt, Human
cagagaccaucccugaa

SEQ ID NO: 2988031 - RNA, 18 nt, Human
cagagaccaucccugaag

SEQ ID NO: 2988032 - RNA, 19 nt, Human
cagagaccaucccugaagg

SEQ ID NO: 2988033 - RNA, 20 nt, Human
cagagaccaucccugaaggc

SEQ ID NO: 2988034 - RNA, 21 nt, Human
cagagaccaucccugaaggcc

SEQ ID NO: 2988035 - RNA, 14 nt, Human
cagagcaagugaga

SEQ ID NO: 2988036 - RNA, 20 nt, Human
cagagcaagugagacccugu

SEQ ID NO: 2988037 - RNA, 16 nt, Human
cagagcaccuuagaca

SEQ ID NO: 2988038 - RNA, 21 nt, Human
cagagugcuuuaccaauugaa

SEQ ID NO: 2988039 - RNA, 20 nt, Human
cagagugagacucugucuca

SEQ ID NO: 2988040 - RNA, 19 nt, Human
cagagugagacucugucuc

SEQ ID NO: 2988041 - RNA, 12 nt, Human
cagaguggcagu

SEQ ID NO: 2988042 - RNA, 18 nt, Human
cagaguggaauaagacag

SEQ ID NO: 2988043 - RNA, 17 nt, Human
cagaguggaauaagaca

SEQ ID NO: 2988044 - RNA, 20 nt, Human
cagaguggaauaagacagag

SEQ ID NO: 2988045 - RNA, 18 nt, Human
cagagugagacucugucu

SEQ ID NO: 2988046 - RNA, 17 nt, Human
cagagugagacucuguc

SEQ ID NO: 2988047 - RNA, 16 nt, Human
cagagugagacucugu

SEQ ID NO: 2988048 - RNA, 23 nt, Human
cagagucucacuguugcccaggc

SEQ ID NO: 2988049 - RNA, 22 nt, Human
cagagucucacuguugcccagg

SEQ ID NO: 2988050 - RNA, 23 nt, Human
cagagggagugacagaggcagcc

SEQ ID NO: 2988051 - RNA, 22 nt, Human
cagagggagugacagaggcagc

SEQ ID NO: 2988052 - RNA, 21 nt, Human
cagagggagugacagaggcag

SEQ ID NO: 2988053 - RNA, 20 nt, Human
cagagggagugacagaggca

SEQ ID NO: 2988054 - RNA, 15 nt, Human
cagagggccugcaag

SEQ ID NO: 2988055 - RNA, 19 nt, Human
cagagggccugcaagggag

SEQ ID NO: 2988056 - RNA, 21 nt, Human
cagagucucacuguugcccag

SEQ ID NO: 2988057 - RNA, 20 nt, Human
cagagucucacuguugccca

SEQ ID NO: 2988058 - RNA, 19 nt, Human
cagagucucacuguugccc

SEQ ID NO: 2988059 - RNA, 17 nt, Human
cagagucucacuguugc

SEQ ID NO: 2988060 - RNA, 13 nt, Human
cagagucucacug

SEQ ID NO: 2988061 - RNA, 13 nt, Human
cagaggcugccuc

SEQ ID NO: 2988062 - RNA, 19 nt, Human
cagagggagugacagaggc

SEQ ID NO: 2988063 - RNA, 18 nt, Human
cagagggagugacagagg

SEQ ID NO: 2988064 - RNA, 16 nt, Human
cagagggagugacaga

SEQ ID NO: 2988065 - RNA, 14 nt, Human
cagagggagugaca

SEQ ID NO: 2988066 - RNA, 23 nt, Human
cagaggcugccucucccaucacu

SEQ ID NO: 2988067 - RNA, 22 nt, Human
cagaggcagccccauucugccu

SEQ ID NO: 2988068 - RNA, 20 nt, Human
cagaggcagccccauucugc

SEQ ID NO: 2988069 - RNA, 19 nt, Human
cagaggcagccccauucug

SEQ ID NO: 2988070 - RNA, 18 nt, Human
cagaggcagccccauucu

SEQ ID NO: 2988071 - RNA, 15 nt, Human
cagaggcagccccau

SEQ ID NO: 2988072 - RNA, 14 nt, Human
cagaggcagcccca

SEQ ID NO: 2988073 - RNA, 13 nt, Human
cagaggcagcccc

SEQ ID NO: 2988074 - RNA, 12 nt, Human
cagaggcagccc

SEQ ID NO: 2988075 - RNA, 16 nt, Human
cagaggccaugggccu

SEQ ID NO: 2988076 - RNA, 19 nt, Human
cagaggccaugggccuccu

SEQ ID NO: 2988077 - RNA, 23 nt, Human
cagaggcagccccauucugccug

SEQ ID NO: 2988078 - RNA, 21 nt, Human
cagaggccaugggccuccugu

SEQ ID NO: 2988079 - RNA, 20 nt, Human
cagaggccaugggccuccug

SEQ ID NO: 2988080 - RNA, 17 nt, Human
cagaugcacaugagcug

SEQ ID NO: 2988081 - RNA, 13 nt, Human
cagaugcaccagc

SEQ ID NO: 2988082 - RNA, 16 nt, Human
cagaugcaccagcccu

SEQ ID NO: 2988083 - RNA, 14 nt, Human
cagaugcaccagcc

SEQ ID NO: 2988084 - RNA, 22 nt, Human
cagaugcaccagcccuuagcag

SEQ ID NO: 2988085 - RNA, 17 nt, Human
cagaugcaccagcccuu

SEQ ID NO: 2988086 - RNA, 14 nt, Human
cagauccuggaaau

SEQ ID NO: 2988087 - RNA, 20 nt, Human
cagaucucuaacuucaccau

SEQ ID NO: 2988088 - RNA, 13 nt, Human
cagauccuggaaa

SEQ ID NO: 2988089 - RNA, 22 nt, Human
cagauacaggaaaagcugcuga

SEQ ID NO: 2988090 - RNA, 21 nt, Human
cagauacaggaaaagcugcug

SEQ ID NO: 2988091 - RNA, 20 nt, Human
cagauacaggaaaagcugcu

SEQ ID NO: 2988092 - RNA, 15 nt, Human
cagaguugaagacag

SEQ ID NO: 2988093 - RNA, 16 nt, Human
cagaguugaagacaga

SEQ ID NO: 2988094 - RNA, 14 nt, Human
cagaguugaagaca

SEQ ID NO: 2988095 - RNA, 17 nt, Human
cagaguugaagacagag

SEQ ID NO: 2988096 - RNA, 18 nt, Human
cagaguugaagacagagc

SEQ ID NO: 2988097 - RNA, 19 nt, Human
cagaguugaagacagagcu

SEQ ID NO: 2988098 - RNA, 20 nt, Human
cagaguugaagacagagcua

SEQ ID NO: 2988099 - RNA, 14 nt, Human
cagaguuguuacau

SEQ ID NO: 2988100 - RNA, 22 nt, Human
cagaguugaagacagagcuaca

SEQ ID NO: 2988101 - RNA, 14 nt, Human
cagauaaucacaau

SEQ ID NO: 2988102 - RNA, 18 nt, Human
cagaguuguuacauuuuu

SEQ ID NO: 2988103 - RNA, 15 nt, Human
cagaguuguuacauu

SEQ ID NO: 2988104 - RNA, 19 nt, Human
cagaguuguuacauuuuua

SEQ ID NO: 2988105 - RNA, 23 nt, Human
cagauaaauaguuuaugauucca

SEQ ID NO: 2988106 - RNA, 14 nt, Human
cagauaaacaguag

SEQ ID NO: 2988107 - RNA, 17 nt, Human
cagaacuauguuuuugu

SEQ ID NO: 2988108 - RNA, 20 nt, Human
cagaagcaacccaaauguuc

SEQ ID NO: 2988109 - RNA, 19 nt, Human
cagaagcaacccaaauguu

SEQ ID NO: 2988110 - RNA, 21 nt, Human
cagaagacacugaugggcaac

SEQ ID NO: 2988111 - RNA, 22 nt, Human
cagaagaaaauagaauugacau

SEQ ID NO: 2988112 - RNA, 19 nt, Human
cagaagaaaauagaauuga

SEQ ID NO: 2988113 - RNA, 13 nt, Human
cagaagaaaauag

SEQ ID NO: 2988114 - RNA, 18 nt, Human
cagaagucaaggcuuaga

SEQ ID NO: 2988115 - RNA, 16 nt, Human
cagaagucaaggcuua

SEQ ID NO: 2988116 - RNA, 17 nt, Human
cagaagucaaggcuuag

SEQ ID NO: 2988117 - RNA, 23 nt, Human
cagaaucgcuccaccuugcagcu

SEQ ID NO: 2988118 - RNA, 21 nt, Human
cagaaucgcuccaccuugcag

SEQ ID NO: 2988119 - RNA, 18 nt, Human
cagaaucucaaauaacua

SEQ ID NO: 2988120 - RNA, 17 nt, Human
cagaaucucaaauaacu

SEQ ID NO: 2988121 - RNA, 16 nt, Human
cagaaggaagacuuca

SEQ ID NO: 2988122 - RNA, 17 nt, Human
cagaaggaagacuucau

SEQ ID NO: 2988123 - RNA, 18 nt, Human
cagaaggaagacuucauc

SEQ ID NO: 2988124 - RNA, 19 nt, Human
cagaaggaagacuucaucc

SEQ ID NO: 2988125 - RNA, 22 nt, Human
cacuuucuagccagaggagaga

SEQ ID NO: 2988126 - RNA, 16 nt, Human
cacuuuggcccagggu

SEQ ID NO: 2988127 - RNA, 13 nt, Human
cacuuuggcccag

SEQ ID NO: 2988128 - RNA, 13 nt, Human
cacuuuguucugg

SEQ ID NO: 2988129 - RNA, 14 nt, Human
cacuuuguucuggc

SEQ ID NO: 2988130 - RNA, 16 nt, Human
cacuuuguucuggcuc

SEQ ID NO: 2988131 - RNA, 23 nt, Human
cacuuuguucuggcucuuccagg

SEQ ID NO: 2988132 - RNA, 12 nt, Human
cacuuugggagg

SEQ ID NO: 2988133 - RNA, 13 nt, Human
cacuuugggaggc

SEQ ID NO: 2988134 - RNA, 16 nt, Human
cacuuugggaggccaa

SEQ ID NO: 2988135 - RNA, 14 nt, Human
cacuuuuguucuug

SEQ ID NO: 2988136 - RNA, 22 nt, Human
cacuuuuguucuugguuuguaa

SEQ ID NO: 2988137 - RNA, 22 nt, Human
cagaaaaguugaauuuuacaug

SEQ ID NO: 2988138 - RNA, 20 nt, Human
cagaaaaguugaauuuuaca

SEQ ID NO: 2988139 - RNA, 17 nt, Human
cagaaaaguugaauuuu

SEQ ID NO: 2988140 - RNA, 16 nt, Human
cagaaaauggaagaca

SEQ ID NO: 2988141 - RNA, 20 nt, Human
cagaaaauggaagacagcuc

SEQ ID NO: 2988142 - RNA, 21 nt, Human
cagaaaauggaagacagcucu

SEQ ID NO: 2988143 - RNA, 22 nt, Human
cagaaaauggaagacagcucuu

SEQ ID NO: 2988144 - RNA, 23 nt, Human
cagaaaauggaagacagcucuua

SEQ ID NO: 2988145 - RNA, 23 nt, Human
cagaacagugauuaccagggacu

SEQ ID NO: 2988146 - RNA, 18 nt, Human
cagaacagugauuaccag

SEQ ID NO: 2988147 - RNA, 19 nt, Human
cagaaagcagaacagugau

SEQ ID NO: 2988148 - RNA, 18 nt, Human
cagaaagcagaacaguga

SEQ ID NO: 2988149 - RNA, 18 nt, Human
cagaaaccuuccugcuga

SEQ ID NO: 2988150 - RNA, 23 nt, Human
cagagaaaguacuucuccacccu

SEQ ID NO: 2988151 - RNA, 19 nt, Human
cagagaaaguacuucucca

SEQ ID NO: 2988152 - RNA, 14 nt, Human
cagaccacaaaacu

SEQ ID NO: 2988153 - RNA, 20 nt, Human
cagaccacaaaacuuuucua

SEQ ID NO: 2988154 - RNA, 19 nt, Human
cagaccauuggggcuccca

SEQ ID NO: 2988155 - RNA, 21 nt, Human
cagaccauuggggcucccagc

SEQ ID NO: 2988156 - RNA, 20 nt, Human
cagaccauuggggcucccag

SEQ ID NO: 2988157 - RNA, 23 nt, Human
cagaccauuggggcucccagcca

SEQ ID NO: 2988158 - RNA, 22 nt, Human
cagaccauuggggcucccagcc

SEQ ID NO: 2988159 - RNA, 22 nt, Human
cagacccugcccugugggcccc

SEQ ID NO: 2988160 - RNA, 15 nt, Human
cagacccugcccugu

SEQ ID NO: 2988161 - RNA, 16 nt, Human
cagacccugcccugug

SEQ ID NO: 2988162 - RNA, 17 nt, Human
cagacccugcccugugg

SEQ ID NO: 2988163 - RNA, 21 nt, Human
cagacccugcccugugggccc

SEQ ID NO: 2988164 - RNA, 14 nt, Human
cagacccggcugcg

SEQ ID NO: 2988165 - RNA, 12 nt, Human
cagacccggcug

SEQ ID NO: 2988166 - RNA, 13 nt, Human
cagacccugcccu

SEQ ID NO: 2988167 - RNA, 14 nt, Human
cagacccugcccug

SEQ ID NO: 2988168 - RNA, 12 nt, Human
cagacccugccc

SEQ ID NO: 2988169 - RNA, 16 nt, Human
cagacccggcugcgug

SEQ ID NO: 2988170 - RNA, 14 nt, Human
cagaauuucccaaa

SEQ ID NO: 2988171 - RNA, 18 nt, Human
cagaauucucuaguuuga

SEQ ID NO: 2988172 - RNA, 15 nt, Human
cagaauucucuaguu

SEQ ID NO: 2988173 - RNA, 11 nt, Human
cagaauucuca

SEQ ID NO: 2988174 - RNA, 17 nt, Human
cagaauuucccaaagca

SEQ ID NO: 2988175 - RNA, 18 nt, Human
cagaauuucccaaagcag

SEQ ID NO: 2988176 - RNA, 19 nt, Human
cagaauuucccaaagcagu

SEQ ID NO: 2988177 - RNA, 20 nt, Human
cagaauuucccaaagcagug

SEQ ID NO: 2988178 - RNA, 24 nt, Human
cagaauuucccaaagcagugcaug

SEQ ID NO: 2988179 - RNA, 12 nt, Human
cagacaaagcgu

SEQ ID NO: 2988180 - RNA, 20 nt, Human
cagacaacaaaccuguuucu

SEQ ID NO: 2988181 - RNA, 22 nt, Human
cagacaaagcgugguggacaug

SEQ ID NO: 2988182 - RNA, 14 nt, Human
cagacacaugucca

SEQ ID NO: 2988183 - RNA, 17 nt, Human
cagacacauguccaaga

SEQ ID NO: 2988184 - RNA, 21 nt, Human
cagacacauguccaagaagcc

SEQ ID NO: 2988185 - RNA, 22 nt, Human
cagacacauguccaagaagccc

SEQ ID NO: 2988186 - RNA, 23 nt, Human
cagacacauguccaagaagccca

SEQ ID NO: 2988187 - RNA, 23 nt, Human
cagacacaggcccggcuccaggc

SEQ ID NO: 2988188 - RNA, 22 nt, Human
cagacacaggcccggcuccagg

SEQ ID NO: 2988189 - RNA, 21 nt, Human
cagacacaggcccggcuccag

SEQ ID NO: 2988190 - RNA, 18 nt, Human
cagacacaggcccggcuc

SEQ ID NO: 2988191 - RNA, 17 nt, Human
cagacacaggcccggcu

SEQ ID NO: 2988192 - RNA, 15 nt, Human
cagacacaggcccgg

SEQ ID NO: 2988193 - RNA, 14 nt, Human
cagacacaggcccg

SEQ ID NO: 2988194 - RNA, 13 nt, Human
cagacacaggccc

SEQ ID NO: 2988195 - RNA, 19 nt, Human
cagacauagaauuaacaca

SEQ ID NO: 2988196 - RNA, 17 nt, Human
cagacauagaauuaaca

SEQ ID NO: 2988197 - RNA, 19 nt, Human
cagacauacuaaccagcag

SEQ ID NO: 2988198 - RNA, 22 nt, Human
cagacaccuugacagggcacac

SEQ ID NO: 2988199 - RNA, 20 nt, Human
cagacaccuugacagggcac

SEQ ID NO: 2988200 - RNA, 19 nt, Human
cagacaccuugacagggca

SEQ ID NO: 2988201 - RNA, 20 nt, Human
cagacaguuaagagaaauga

SEQ ID NO: 2988202 - RNA, 16 nt, Human
cagacaacaaaccugu

SEQ ID NO: 2988203 - RNA, 20 nt, Human
cacccucagaugcacaugag

SEQ ID NO: 2988204 - RNA, 21 nt, Human
cacccggccccugcugguuca

SEQ ID NO: 2988205 - RNA, 18 nt, Human
cacccggccccugcuggu

SEQ ID NO: 2988206 - RNA, 17 nt, Human
cacccggccccugcugg

SEQ ID NO: 2988207 - RNA, 16 nt, Human
cacccggccccugcug

SEQ ID NO: 2988208 - RNA, 14 nt, Human
cacccggccccugc

SEQ ID NO: 2988209 - RNA, 13 nt, Human
cacccggccccug

SEQ ID NO: 2988210 - RNA, 19 nt, Human
cacccgcuaagagggaggg

SEQ ID NO: 2988211 - RNA, 12 nt, Human
cacccggccccu

SEQ ID NO: 2988212 - RNA, 20 nt, Human
caccccucaacaccucugca

SEQ ID NO: 2988213 - RNA, 13 nt, Human
cacauauugauuu

SEQ ID NO: 2988214 - RNA, 11 nt, Human
cacccugugau

SEQ ID NO: 2988215 - RNA, 12 nt, Human
cacccugugaug

SEQ ID NO: 2988216 - RNA, 15 nt, Human
cacccugugaugggg

SEQ ID NO: 2988217 - RNA, 18 nt, Human
cacccugugauggggccc

SEQ ID NO: 2988218 - RNA, 20 nt, Human
cacccugugauggggcccug

SEQ ID NO: 2988219 - RNA, 21 nt, Human
cacccugugauggggcccugc

SEQ ID NO: 2988220 - RNA, 22 nt, Human
cacccugugauggggcccugcc

SEQ ID NO: 2988221 - RNA, 23 nt, Human
cacccugugauggggcccugccu

SEQ ID NO: 2988222 - RNA, 15 nt, Human
caccgaaaacguggc

SEQ ID NO: 2988223 - RNA, 18 nt, Human
caccgaaaacguggcugc

SEQ ID NO: 2988224 - RNA, 19 nt, Human
caccgaaaacguggcugcu

SEQ ID NO: 2988225 - RNA, 21 nt, Human
caccgaaaacguggcugcuuc

SEQ ID NO: 2988226 - RNA, 22 nt, Human
caccgaaaacguggcugcuuca

SEQ ID NO: 2988227 - RNA, 14 nt, Human
caccgcagacagga

SEQ ID NO: 2988228 - RNA, 15 nt, Human
caccgcagacaggac

SEQ ID NO: 2988229 - RNA, 17 nt, Human
caccgcagacaggacca

SEQ ID NO: 2988230 - RNA, 18 nt, Human
caccgcagacaggaccag

SEQ ID NO: 2988231 - RNA, 12 nt, Human
caccgcagacag

SEQ ID NO: 2988232 - RNA, 13 nt, Human
caccgcagacagg

SEQ ID NO: 2988233 - RNA, 13 nt, Human
caccucccugcaa

SEQ ID NO: 2988234 - RNA, 14 nt, Human
caccucccugcaau

SEQ ID NO: 2988235 - RNA, 16 nt, Human
caccuccuaaaacaac

SEQ ID NO: 2988236 - RNA, 11 nt, Human
caccuccugcc

SEQ ID NO: 2988237 - RNA, 13 nt, Human
caccuccugccuc

SEQ ID NO: 2988238 - RNA, 14 nt, Human
caccuccugccucg

SEQ ID NO: 2988239 - RNA, 13 nt, Human
caccucucccuug

SEQ ID NO: 2988240 - RNA, 14 nt, Human
caccucucccuugg

SEQ ID NO: 2988241 - RNA, 17 nt, Human
caccucucccuuggauu

SEQ ID NO: 2988242 - RNA, 22 nt, Human
caccucuaucccggcuuuggug

SEQ ID NO: 2988243 - RNA, 10 nt, Human
caccucccug

SEQ ID NO: 2988244 - RNA, 14 nt, Human
caccucauggaauu

SEQ ID NO: 2988245 - RNA, 12 nt, Human
caccucauggaa

SEQ ID NO: 2988246 - RNA, 11 nt, Human
caccucaugga

SEQ ID NO: 2988247 - RNA, 18 nt, Human
caccgggccacagagaaa

SEQ ID NO: 2988248 - RNA, 15 nt, Human
caccgggccacagag

SEQ ID NO: 2988249 - RNA, 22 nt, Human
caccgggcacucagaagacacu

SEQ ID NO: 2988250 - RNA, 15 nt, Human
caccgggcacucaga

SEQ ID NO: 2988251 - RNA, 15 nt, Human
caccggcuggccugg

SEQ ID NO: 2988252 - RNA, 16 nt, Human
caccggcuggccuggc

SEQ ID NO: 2988253 - RNA, 14 nt, Human
caccggcuggccug

SEQ ID NO: 2988254 - RNA, 17 nt, Human
caccggcuggccuggcc

SEQ ID NO: 2988255 - RNA, 18 nt, Human
caccggcuggccuggccc

SEQ ID NO: 2988256 - RNA, 20 nt, Human
caccggcuggccuggccccu

SEQ ID NO: 2988257 - RNA, 14 nt, Human
caccgggcacucag

SEQ ID NO: 2988258 - RNA, 21 nt, Human
caccgcagacaggaccaggga

SEQ ID NO: 2988259 - RNA, 17 nt, Human
caccgccuugcccagcc

SEQ ID NO: 2988260 - RNA, 15 nt, Human
caccgccuugcccag

SEQ ID NO: 2988261 - RNA, 23 nt, Human
caccgccuugcccagccuggaug

SEQ ID NO: 2988262 - RNA, 18 nt, Human
caccgccuugcccagccu

SEQ ID NO: 2988263 - RNA, 12 nt, Human
caccuggccucu

SEQ ID NO: 2988264 - RNA, 13 nt, Human
caccuggccucug

SEQ ID NO: 2988265 - RNA, 14 nt, Human
caccuggccucugc

SEQ ID NO: 2988266 - RNA, 15 nt, Human
caccuggccucugca

SEQ ID NO: 2988267 - RNA, 17 nt, Human
caccuggccucugcacu

SEQ ID NO: 2988268 - RNA, 18 nt, Human
caccuggccucugcacuc

SEQ ID NO: 2988269 - RNA, 19 nt, Human
caccuggccucugcacucc

SEQ ID NO: 2988270 - RNA, 20 nt, Human
caccuggccucugcacuccc

SEQ ID NO: 2988271 - RNA, 12 nt, Human
caccuggcucug

SEQ ID NO: 2988272 - RNA, 23 nt, Human
caccuggccucugcacuccccug

SEQ ID NO: 2988273 - RNA, 23 nt, Human
caccuggcucuguggcgagccau

SEQ ID NO: 2988274 - RNA, 15 nt, Human
caccuggcucugugg

SEQ ID NO: 2988275 - RNA, 14 nt, Human
caccuggcucugug

SEQ ID NO: 2988276 - RNA, 13 nt, Human
caccuggcucugu

SEQ ID NO: 2988277 - RNA, 15 nt, Human
caccuguagucccag

SEQ ID NO: 2988278 - RNA, 23 nt, Human
caccugaagacucauucuucugu

SEQ ID NO: 2988279 - RNA, 15 nt, Human
caccugaagacucau

SEQ ID NO: 2988280 - RNA, 14 nt, Human
caccugaagacuca

SEQ ID NO: 2988281 - RNA, 15 nt, Human
caccucucucacucc

SEQ ID NO: 2988282 - RNA, 17 nt, Human
caccucucucacuccuu

SEQ ID NO: 2988283 - RNA, 18 nt, Human
caccucucucacuccuug

SEQ ID NO: 2988284 - RNA, 19 nt, Human
caccucucucacuccuuga

SEQ ID NO: 2988285 - RNA, 18 nt, Human
caccucugcacaagcugc

SEQ ID NO: 2988286 - RNA, 19 nt, Human
caccucugcacaagcugca

SEQ ID NO: 2988287 - RNA, 20 nt, Human
caccuggaauauauaaccag

SEQ ID NO: 2988288 - RNA, 23 nt, Human
caccugcggugcuaucuccccca

SEQ ID NO: 2988289 - RNA, 20 nt, Human
caccugcggugcuaucuccc

SEQ ID NO: 2988290 - RNA, 16 nt, Human
cacgccagauucuuuc

SEQ ID NO: 2988291 - RNA, 15 nt, Human
cacgcacacugucug

SEQ ID NO: 2988292 - RNA, 17 nt, Human
cacgcacuucgggaggu

SEQ ID NO: 2988293 - RNA, 14 nt, Human
cacgauuucuguuu

SEQ ID NO: 2988294 - RNA, 12 nt, Human
cacgauuucugu

SEQ ID NO: 2988295 - RNA, 16 nt, Human
cacgauuucuguuuag

SEQ ID NO: 2988296 - RNA, 19 nt, Human
cacgagcaggcuacuguca

SEQ ID NO: 2988297 - RNA, 20 nt, Human
cacgagcaggcuacugucag

SEQ ID NO: 2988298 - RNA, 17 nt, Human
cacgagcaggcuacugu

SEQ ID NO: 2988299 - RNA, 22 nt, Human
cacgagcaggcuacugucagcu

SEQ ID NO: 2988300 - RNA, 20 nt, Human
cacgccagauucuuuccuga

SEQ ID NO: 2988301 - RNA, 22 nt, Human
cacgccagauucuuuccugagg

SEQ ID NO: 2988302 - RNA, 19 nt, Human
cacgccagauucuuuccug

SEQ ID NO: 2988303 - RNA, 15 nt, Human
cacgccacugcacua

SEQ ID NO: 2988304 - RNA, 13 nt, Human
cacgccacugcac

SEQ ID NO: 2988305 - RNA, 13 nt, Human
cacgcccccacug

SEQ ID NO: 2988306 - RNA, 15 nt, Human
cacgcccccacuggu

SEQ ID NO: 2988307 - RNA, 23 nt, Human
cacgccagauucuuuccugaggc

SEQ ID NO: 2988308 - RNA, 17 nt, Human
cacgcccccacugguga

SEQ ID NO: 2988309 - RNA, 18 nt, Human
cacgcccccacuggugac

SEQ ID NO: 2988310 - RNA, 14 nt, Human
caccuuagacaguc

SEQ ID NO: 2988311 - RNA, 16 nt, Human
caccuuagacaguccc

SEQ ID NO: 2988312 - RNA, 18 nt, Human
caccuuagacagucccug

SEQ ID NO: 2988313 - RNA, 19 nt, Human
caccuuagacagucccugc

SEQ ID NO: 2988314 - RNA, 21 nt, Human
caccuuagacagucccugcca

SEQ ID NO: 2988315 - RNA, 23 nt, Human
caccuuagacagucccugccaau

SEQ ID NO: 2988316 - RNA, 16 nt, Human
cacgaauauugcugau

SEQ ID NO: 2988317 - RNA, 19 nt, Human
cacgaauauugcugauggu

SEQ ID NO: 2988318 - RNA, 22 nt, Human
cacgaauauugcugauggugca

SEQ ID NO: 2988319 - RNA, 16 nt, Human
cacgacugcccggcag

SEQ ID NO: 2988320 - RNA, 17 nt, Human
cacgacugcccggcagg

SEQ ID NO: 2988321 - RNA, 13 nt, Human
caccuugacaggg

SEQ ID NO: 2988322 - RNA, 16 nt, Human
caccuugacagggcac

SEQ ID NO: 2988323 - RNA, 15 nt, Human
caccuugacagggca

SEQ ID NO: 2988324 - RNA, 22 nt, Human
cacguucuuacuaguuucccuu

SEQ ID NO: 2988325 - RNA, 16 nt, Human
cacgugguccuaaucu

SEQ ID NO: 2988326 - RNA, 19 nt, Human
cacgugguccuaaucuucu

SEQ ID NO: 2988327 - RNA, 13 nt, Human
cacuaaacaaaga

SEQ ID NO: 2988328 - RNA, 14 nt, Human
cacguuucuaaagg

SEQ ID NO: 2988329 - RNA, 12 nt, Human
cacguuucuaaa

SEQ ID NO: 2988330 - RNA, 23 nt, Human
cacguuucuaaaggcuaccuuug

SEQ ID NO: 2988331 - RNA, 14 nt, Human
cacguacacacaca

SEQ ID NO: 2988332 - RNA, 19 nt, Human
cacguacacacacauacac

SEQ ID NO: 2988333 - RNA, 18 nt, Human
cacguacacacacauaca

SEQ ID NO: 2988334 - RNA, 20 nt, Human
cacggcucacugcagccuca

SEQ ID NO: 2988335 - RNA, 19 nt, Human
cacggcucacugcagccuc

SEQ ID NO: 2988336 - RNA, 17 nt, Human
cacggcucacugcagcc

SEQ ID NO: 2988337 - RNA, 16 nt, Human
cacggcucacugcagc

SEQ ID NO: 2988338 - RNA, 17 nt, Human
cacgcuggaccuugaac

SEQ ID NO: 2988339 - RNA, 20 nt, Human
cacgcuggaccuugaacugg

SEQ ID NO: 2988340 - RNA, 15 nt, Human
cacggcucacugcag

SEQ ID NO: 2988341 - RNA, 23 nt, Human
cacgcgugcacacaccagagccc

SEQ ID NO: 2988342 - RNA, 21 nt, Human
cacgcgugcacacaccagagc

SEQ ID NO: 2988343 - RNA, 16 nt, Human
cacgcgugcacacacc

SEQ ID NO: 2988344 - RNA, 15 nt, Human
cacgcgugcacacac

SEQ ID NO: 2988345 - RNA, 19 nt, Human
cacgccuguaauccuagca

SEQ ID NO: 2988346 - RNA, 20 nt, Human
cacgccuguaauccuagcac

SEQ ID NO: 2988347 - RNA, 13 nt, Human
cacucuauaacaa

SEQ ID NO: 2988348 - RNA, 12 nt, Human
cacucugagacu

SEQ ID NO: 2988349 - RNA, 23 nt, Human
cacucugagacucgcgacaaugc

SEQ ID NO: 2988350 - RNA, 12 nt, Human
cacucuccuugg

SEQ ID NO: 2988351 - RNA, 12 nt, Human
cacucuggcagc

SEQ ID NO: 2988352 - RNA, 13 nt, Human
cacucuggcagcu

SEQ ID NO: 2988353 - RNA, 14 nt, Human
cacucuggcagcuc

SEQ ID NO: 2988354 - RNA, 16 nt, Human
cacucaguccauagca

SEQ ID NO: 2988355 - RNA, 15 nt, Human
cacucauugaccuga

SEQ ID NO: 2988356 - RNA, 18 nt, Human
cacucauugaccugaggc

SEQ ID NO: 2988357 - RNA, 19 nt, Human
cacucauugaccugaggcc

SEQ ID NO: 2988358 - RNA, 20 nt, Human
cacucauugaccugaggccc

SEQ ID NO: 2988359 - RNA, 22 nt, Human
cacucauugaccugaggcccuu

SEQ ID NO: 2988360 - RNA, 13 nt, Human
cacucccugcaac

SEQ ID NO: 2988361 - RNA, 16 nt, Human
cacucccugcaaccug

SEQ ID NO: 2988362 - RNA, 12 nt, Human
cacucccugcaa

SEQ ID NO: 2988363 - RNA, 15 nt, Human
cacuccccugcuggg

SEQ ID NO: 2988364 - RNA, 14 nt, Human
cacuccuucacaga

SEQ ID NO: 2988365 - RNA, 21 nt, Human
cacuccuucacagaugggugc

SEQ ID NO: 2988366 - RNA, 17 nt, Human
cacucccugcaaccuga

SEQ ID NO: 2988367 - RNA, 17 nt, Human
cacuccggcccuccaga

SEQ ID NO: 2988368 - RNA, 21 nt, Human
cacuccggcccuccagagccc

SEQ ID NO: 2988369 - RNA, 20 nt, Human
cacuccggcccuccagagcc

SEQ ID NO: 2988370 - RNA, 18 nt, Human
cacuccggcccuccagag

SEQ ID NO: 2988371 - RNA, 20 nt, Human
cacucaaaagcugggcaggu

SEQ ID NO: 2988372 - RNA, 16 nt, Human
cacucaaaucaagaaa

SEQ ID NO: 2988373 - RNA, 15 nt, Human
cacucaaaagcuggg

SEQ ID NO: 2988374 - RNA, 17 nt, Human
cacucaaaagcugggca

SEQ ID NO: 2988375 - RNA, 18 nt, Human
cacucaaaagcugggcag

SEQ ID NO: 2988376 - RNA, 19 nt, Human
cacucaaaagcugggcagg

SEQ ID NO: 2988377 - RNA, 21 nt, Human
cacuauguugcccaggcaggu

SEQ ID NO: 2988378 - RNA, 20 nt, Human
cacuauguugcccaggcagg

SEQ ID NO: 2988379 - RNA, 22 nt, Human
cacuauuuauuuacaaauguuu

SEQ ID NO: 2988380 - RNA, 18 nt, Human
cacuauuuauuuacaaau

SEQ ID NO: 2988381 - RNA, 19 nt, Human
cacucagaagacacugaug

SEQ ID NO: 2988382 - RNA, 18 nt, Human
cacucagaagacacugau

SEQ ID NO: 2988383 - RNA, 22 nt, Human
cacucagaagacacugaugggc

SEQ ID NO: 2988384 - RNA, 20 nt, Human
cacucacauuuauucugcuc

SEQ ID NO: 2988385 - RNA, 19 nt, Human
cacucacauuuauucugcu

SEQ ID NO: 2988386 - RNA, 17 nt, Human
cacucagaagacacuga

SEQ ID NO: 2988387 - RNA, 16 nt, Human
cacucagaagacacug

SEQ ID NO: 2988388 - RNA, 12 nt, Human
cacucagaagac

SEQ ID NO: 2988389 - RNA, 21 nt, Human
cacuaaauugacacuuaaaaa

SEQ ID NO: 2988390 - RNA, 16 nt, Human
cacuaaccacgcugga

SEQ ID NO: 2988391 - RNA, 15 nt, Human
cacuaaccacgcugg

SEQ ID NO: 2988392 - RNA, 14 nt, Human
cacuaaccacgcug

SEQ ID NO: 2988393 - RNA, 17 nt, Human
cacuaagagagaaugag

SEQ ID NO: 2988394 - RNA, 18 nt, Human
cacuaaccacgcuggacc

SEQ ID NO: 2988395 - RNA, 18 nt, Human
cacuaaggugugcucuga

SEQ ID NO: 2988396 - RNA, 17 nt, Human
cacuaaggugugcucug

SEQ ID NO: 2988397 - RNA, 19 nt, Human
cacuaguauuucuaugaaa

SEQ ID NO: 2988398 - RNA, 14 nt, Human
cacuaguauuucua

SEQ ID NO: 2988399 - RNA, 14 nt, Human
cacuauaauguaag

SEQ ID NO: 2988400 - RNA, 21 nt, Human
cacuauagccuaggugacaga

SEQ ID NO: 2988401 - RNA, 18 nt, Human
cacuauaauguaagcucu

SEQ ID NO: 2988402 - RNA, 14 nt, Human
cacuauagccuagg

SEQ ID NO: 2988403 - RNA, 19 nt, Human
cacuauguugcccaggcag

SEQ ID NO: 2988404 - RNA, 18 nt, Human
cacuauguugcccaggca

SEQ ID NO: 2988405 - RNA, 17 nt, Human
cacuauguugcccaggc

SEQ ID NO: 2988406 - RNA, 16 nt, Human
cacuauguugcccagg

SEQ ID NO: 2988407 - RNA, 15 nt, Human
cacuauguugcccag

SEQ ID NO: 2988408 - RNA, 19 nt, Human
cacuucacgcccuuggcca

SEQ ID NO: 2988409 - RNA, 17 nt, Human
cacuucacgcccuuggc

SEQ ID NO: 2988410 - RNA, 21 nt, Human
cacuucacgcccuuggccaug

SEQ ID NO: 2988411 - RNA, 20 nt, Human
cacuucacgcccuuggccau

SEQ ID NO: 2988412 - RNA, 12 nt, Human
cacuucagcuga

SEQ ID NO: 2988413 - RNA, 21 nt, Human
cacuucagcugacuuuucugu

SEQ ID NO: 2988414 - RNA, 23 nt, Human
cacuucuggauauagcuagguga

SEQ ID NO: 2988415 - RNA, 22 nt, Human
cacuucuggauauagcuaggug

SEQ ID NO: 2988416 - RNA, 22 nt, Human
cacuucugccauauucuguugg

SEQ ID NO: 2988417 - RNA, 21 nt, Human
cacuucgggaggucgaggcag

SEQ ID NO: 2988418 - RNA, 23 nt, Human
cacuucgggaggucgaggcagga

SEQ ID NO: 2988419 - RNA, 16 nt, Human
cacuucccuacaugga

SEQ ID NO: 2988420 - RNA, 16 nt, Human
cacuugacaucaacug

SEQ ID NO: 2988421 - RNA, 23 nt, Human
cacuugaacccgggaggcagagg

SEQ ID NO: 2988422 - RNA, 21 nt, Human
cacuugaacccgggaggcaga

SEQ ID NO: 2988423 - RNA, 20 nt, Human
cacuugaacccgggaggcag

SEQ ID NO: 2988424 - RNA, 13 nt, Human
cacuugcagacuc

SEQ ID NO: 2988425 - RNA, 13 nt, Human
cacuugaguccag

SEQ ID NO: 2988426 - RNA, 17 nt, Human
cacuugagaauuacccu

SEQ ID NO: 2988427 - RNA, 19 nt, Human
cacuugacaucaacugcau

SEQ ID NO: 2988428 - RNA, 20 nt, Human
cacuugagaauuacccuuuu

SEQ ID NO: 2988429 - RNA, 19 nt, Human
cacuuucuagccagaggag

SEQ ID NO: 2988430 - RNA, 20 nt, Human
cacuuucuagccagaggaga

SEQ ID NO: 2988431 - RNA, 18 nt, Human
cacuuucuagccagagga

SEQ ID NO: 2988432 - RNA, 15 nt, Human
cacuuggucugugag

SEQ ID NO: 2988433 - RNA, 22 nt, Human
cacuugcagacucuacagaggc

SEQ ID NO: 2988434 - RNA, 19 nt, Human
cacuugcagacucuacaga

SEQ ID NO: 2988435 - RNA, 18 nt, Human
cacuugcagacucuacag

SEQ ID NO: 2988436 - RNA, 14 nt, Human
cacuugcagacucu

SEQ ID NO: 2988437 - RNA, 24 nt, Human
cacuugcagacucuacagaggcca

SEQ ID NO: 2988438 - RNA, 18 nt, Human
cacugguuuguucccugu

SEQ ID NO: 2988439 - RNA, 16 nt, Human
cacugguuuuaaauau

SEQ ID NO: 2988440 - RNA, 15 nt, Human
cacugguuuuaaaua

SEQ ID NO: 2988441 - RNA, 13 nt, Human
cacugguuuuaaa

SEQ ID NO: 2988442 - RNA, 12 nt, Human
cacugguuuuaa

SEQ ID NO: 2988443 - RNA, 18 nt, Human
cacuggcucacccagucc

SEQ ID NO: 2988444 - RNA, 17 nt, Human
cacuggcucacccaguc

SEQ ID NO: 2988445 - RNA, 15 nt, Human
cacuggcucacccag

SEQ ID NO: 2988446 - RNA, 14 nt, Human
cacuggcucaccca

SEQ ID NO: 2988447 - RNA, 13 nt, Human
cacuggcucaccc

SEQ ID NO: 2988448 - RNA, 14 nt, Human
cacuguacacauaa

SEQ ID NO: 2988449 - RNA, 16 nt, Human
cacuguccuauuauau

SEQ ID NO: 2988450 - RNA, 14 nt, Human
cacugucaagauga

SEQ ID NO: 2988451 - RNA, 14 nt, Human
cacugugccaugug

SEQ ID NO: 2988452 - RNA, 13 nt, Human
cacugugaagaga

SEQ ID NO: 2988453 - RNA, 17 nt, Human
cacugugcugagucuga

SEQ ID NO: 2988454 - RNA, 20 nt, Human
cacugugcugagucugaagg

SEQ ID NO: 2988455 - RNA, 21 nt, Human
cacugugcugagucugaaggc

SEQ ID NO: 2988456 - RNA, 22 nt, Human
cacugugcugagucugaaggcu

SEQ ID NO: 2988457 - RNA, 19 nt, Human
cacuguggguagacacaca

SEQ ID NO: 2988458 - RNA, 16 nt, Human
cacugugccaugugcc

SEQ ID NO: 2988459 - RNA, 15 nt, Human
cacugugccaugugc

SEQ ID NO: 2988460 - RNA, 18 nt, Human
cacugugccaugugccag

SEQ ID NO: 2988461 - RNA, 13 nt, Human
cacugugcugagu

SEQ ID NO: 2988462 - RNA, 15 nt, Human
cacugugcugagucu

SEQ ID NO: 2988463 - RNA, 13 nt, Human
cacuguucucugc

SEQ ID NO: 2988464 - RNA, 14 nt, Human
cacuguucucugcc

SEQ ID NO: 2988465 - RNA, 15 nt, Human
cacuguucucugccc

SEQ ID NO: 2988466 - RNA, 16 nt, Human
cacuguucucugcccu

SEQ ID NO: 2988467 - RNA, 17 nt, Human
cacuguucucugcccuc

SEQ ID NO: 2988468 - RNA, 19 nt, Human
cacuguucucugcccucca

SEQ ID NO: 2988469 - RNA, 21 nt, Human
cacuguucucugcccuccaag

SEQ ID NO: 2988470 - RNA, 22 nt, Human
cacuguucucugcccuccaaga

SEQ ID NO: 2988471 - RNA, 24 nt, Human
cacuguggguagacacacaugaag

SEQ ID NO: 2988472 - RNA, 22 nt, Human
cacuguggguagacacacauga

SEQ ID NO: 2988473 - RNA, 14 nt, Human
cacugagacagccc

SEQ ID NO: 2988474 - RNA, 17 nt, Human
cacugagacagcccggg

SEQ ID NO: 2988475 - RNA, 19 nt, Human
cacugagacagcccgggcu

SEQ ID NO: 2988476 - RNA, 22 nt, Human
cacugagacagcccgggcucug

SEQ ID NO: 2988477 - RNA, 12 nt, Human
cacugagacagc

SEQ ID NO: 2988478 - RNA, 13 nt, Human
cacugagacagcc

SEQ ID NO: 2988479 - RNA, 21 nt, Human
cacugacuucuaaguaaaacc

SEQ ID NO: 2988480 - RNA, 14 nt, Human
cacugacuucuaag

SEQ ID NO: 2988481 - RNA, 15 nt, Human
cacugacuucuaagu

SEQ ID NO: 2988482 - RNA, 16 nt, Human
cacugacuucuaagua

SEQ ID NO: 2988483 - RNA, 20 nt, Human
cacugacuucuaaguaaaac

SEQ ID NO: 2988484 - RNA, 23 nt, Human
cacugacauuguuggccaaagcc

SEQ ID NO: 2988485 - RNA, 19 nt, Human
cacucugucgcccagucug

SEQ ID NO: 2988486 - RNA, 16 nt, Human
cacucugucgcccagu

SEQ ID NO: 2988487 - RNA, 15 nt, Human
cacucugucgcccag

SEQ ID NO: 2988488 - RNA, 15 nt, Human
cacucuggcagcuca

SEQ ID NO: 2988489 - RNA, 16 nt, Human
cacucuggcagcucag

SEQ ID NO: 2988490 - RNA, 17 nt, Human
cacucuggcagcucaga

SEQ ID NO: 2988491 - RNA, 19 nt, Human
cacucuggcagcucagaga

SEQ ID NO: 2988492 - RNA, 20 nt, Human
cacucuggcagcucagagag

SEQ ID NO: 2988493 - RNA, 21 nt, Human
cacucuggcagcucagagagg

SEQ ID NO: 2988494 - RNA, 23 nt, Human
cacucuggcagcucagagagggu

SEQ ID NO: 2988495 - RNA, 13 nt, Human
cacugcaaccucc

SEQ ID NO: 2988496 - RNA, 23 nt, Human
cacugcaaccuccgccucuuggg

SEQ ID NO: 2988497 - RNA, 16 nt, Human
cacugcaaccuccgcc

SEQ ID NO: 2988498 - RNA, 14 nt, Human
cacugcaaccuccg

SEQ ID NO: 2988499 - RNA, 24 nt, Human
cacugaugggcaacccccagccug

SEQ ID NO: 2988500 - RNA, 18 nt, Human
cacugaugggcaaccccc

SEQ ID NO: 2988501 - RNA, 14 nt, Human
cacugaugggcaac

SEQ ID NO: 2988502 - RNA, 23 nt, Human
cacugagacagcccgggcucugc

SEQ ID NO: 2988503 - RNA, 20 nt, Human
cacugccuucucaacuccaa

SEQ ID NO: 2988504 - RNA, 12 nt, Human
cacugcucuggu

SEQ ID NO: 2988505 - RNA, 18 nt, Human
cacugcacuauagccuag

SEQ ID NO: 2988506 - RNA, 19 nt, Human
cacugcaccgggccacaga

SEQ ID NO: 2988507 - RNA, 18 nt, Human
cacugcaccgggccacag

SEQ ID NO: 2988508 - RNA, 16 nt, Human
cacugcaccgggccac

SEQ ID NO: 2988509 - RNA, 15 nt, Human
cacugcaccgggcca

SEQ ID NO: 2988510 - RNA, 14 nt, Human
cacugcaccgggcc

SEQ ID NO: 2988511 - RNA, 18 nt, Human
cacugcuuccagugaggc

SEQ ID NO: 2988512 - RNA, 19 nt, Human
cacugcuuccagugaggcu

SEQ ID NO: 2988513 - RNA, 20 nt, Human
cacugcuuccagugaggcuc

SEQ ID NO: 2988514 - RNA, 21 nt, Human
cacugcuuccagugaggcucu

SEQ ID NO: 2988515 - RNA, 22 nt, Human
cacugcuuccagugaggcucug

SEQ ID NO: 2988516 - RNA, 20 nt, Human
cacugcuuuuggucugugug

SEQ ID NO: 2988517 - RNA, 13 nt, Human
cacugcuuaacuu

SEQ ID NO: 2988518 - RNA, 14 nt, Human
cacugcuuccagug

SEQ ID NO: 2988519 - RNA, 15 nt, Human
cacugcuuccaguga

SEQ ID NO: 2988520 - RNA, 16 nt, Human
cacugcuuccagugag

SEQ ID NO: 2988521 - RNA, 17 nt, Human
cacuggaacacuaauga

SEQ ID NO: 2988522 - RNA, 21 nt, Human
cacugcuuuuggucuguguga

SEQ ID NO: 2988523 - RNA, 19 nt, Human
cacuggcaaacagggccuc

SEQ ID NO: 2988524 - RNA, 18 nt, Human
cacuggcaaacagggccu

SEQ ID NO: 2988525 - RNA, 17 nt, Human
cacuggcaaacagggcc

SEQ ID NO: 2988526 - RNA, 21 nt, Human
cacuggcaaacagggccucug

SEQ ID NO: 2988527 - RNA, 20 nt, Human
cacuggcaaacagggccucu

SEQ ID NO: 2988528 - RNA, 22 nt, Human
cacuggcaaacagggccucugc

SEQ ID NO: 2988529 - RNA, 18 nt, Human
cugccaauauccuaauaa

SEQ ID NO: 2988530 - RNA, 19 nt, Human
cugccaauauccuaauaaa

SEQ ID NO: 2988531 - RNA, 20 nt, Human
cugccaauauccuaauaaaa

SEQ ID NO: 2988532 - RNA, 22 nt, Human
cugccaauauccuaauaaaaag

SEQ ID NO: 2988533 - RNA, 15 nt, Human
cugccaaugggagcu

SEQ ID NO: 2988534 - RNA, 17 nt, Human
cugccaaugggagcuca

SEQ ID NO: 2988535 - RNA, 13 nt, Human
cugccaauauccu

SEQ ID NO: 2988536 - RNA, 14 nt, Human
cugccaauauccua

SEQ ID NO: 2988537 - RNA, 16 nt, Human
cugccaauauccuaau

SEQ ID NO: 2988538 - RNA, 17 nt, Human
cugccaauauccuaaua

SEQ ID NO: 2988539 - RNA, 22 nt, Human
cugcauuuaaaagauacaguua

SEQ ID NO: 2988540 - RNA, 20 nt, Human
cugcauuuaaaagauacagu

SEQ ID NO: 2988541 - RNA, 13 nt, Human
cugcauguuacau

SEQ ID NO: 2988542 - RNA, 15 nt, Human
cugcauguuugugau

SEQ ID NO: 2988543 - RNA, 14 nt, Human
cugccccucaacuc

SEQ ID NO: 2988544 - RNA, 22 nt, Human
cugccccucaacucuccuccag

SEQ ID NO: 2988545 - RNA, 13 nt, Human
cugcccugugagu

SEQ ID NO: 2988546 - RNA, 15 nt, Human
cugcccugugggccc

SEQ ID NO: 2988547 - RNA, 16 nt, Human
cugcccugugggcccc

SEQ ID NO: 2988548 - RNA, 18 nt, Human
cugcccugugggccccca

SEQ ID NO: 2988549 - RNA, 12 nt, Human
cugcccugugag

SEQ ID NO: 2988550 - RNA, 23 nt, Human
cugccauauucuguuggccagug

SEQ ID NO: 2988551 - RNA, 22 nt, Human
cugccauauucuguuggccagu

SEQ ID NO: 2988552 - RNA, 21 nt, Human
cugccauauucuguuggccag

SEQ ID NO: 2988553 - RNA, 20 nt, Human
cugccauauucuguuggcca

SEQ ID NO: 2988554 - RNA, 12 nt, Human
cugccagggaca

SEQ ID NO: 2988555 - RNA, 15 nt, Human
cugccagggacagag

SEQ ID NO: 2988556 - RNA, 11 nt, Human
cugccagggac

SEQ ID NO: 2988557 - RNA, 17 nt, Human
cugagacucgcgacaau

SEQ ID NO: 2988558 - RNA, 19 nt, Human
cugagacucgcgacaaugc

SEQ ID NO: 2988559 - RNA, 22 nt, Human
cugccugggaucccucauccuc

SEQ ID NO: 2988560 - RNA, 18 nt, Human
cugccucgaacuggcugc

SEQ ID NO: 2988561 - RNA, 17 nt, Human
cugccucgaacuggcug

SEQ ID NO: 2988562 - RNA, 15 nt, Human
cugccucgaacuggc

SEQ ID NO: 2988563 - RNA, 15 nt, Human
cugccuguucagcuc

SEQ ID NO: 2988564 - RNA, 14 nt, Human
cugccuguucagcu

SEQ ID NO: 2988565 - RNA, 23 nt, Human
cugccugggaucccucauccuca

SEQ ID NO: 2988566 - RNA, 15 nt, Human
cugcuacagagcaga

SEQ ID NO: 2988567 - RNA, 16 nt, Human
cugccuguugggccag

SEQ ID NO: 2988568 - RNA, 14 nt, Human
cugccuguugggcc

SEQ ID NO: 2988569 - RNA, 18 nt, Human
cugccuguugggccagga

SEQ ID NO: 2988570 - RNA, 19 nt, Human
cugccuguugggccaggag

SEQ ID NO: 2988571 - RNA, 16 nt, Human
cugcuaauuccccaga

SEQ ID NO: 2988572 - RNA, 14 nt, Human
cugcccugugggcc

SEQ ID NO: 2988573 - RNA, 16 nt, Human
cuggaaauauuaagaa

SEQ ID NO: 2988574 - RNA, 21 nt, Human
cuggaaaucaggguuaguauu

SEQ ID NO: 2988575 - RNA, 17 nt, Human
cuggaacacuaaugagg

SEQ ID NO: 2988576 - RNA, 22 nt, Human
cugcuuuuuaaagaaugcucuu

SEQ ID NO: 2988577 - RNA, 16 nt, Human
cugcuucagccucccg

SEQ ID NO: 2988578 - RNA, 14 nt, Human
cugcuucagccucc

SEQ ID NO: 2988579 - RNA, 17 nt, Human
cugcuuaacuucacaua

SEQ ID NO: 2988580 - RNA, 15 nt, Human
cugcuuaacuucaca

SEQ ID NO: 2988581 - RNA, 13 nt, Human
cugcuucagccuc

SEQ ID NO: 2988582 - RNA, 13 nt, Human
cugcuuaacuuca

SEQ ID NO: 2988583 - RNA, 20 nt, Human
cugcugacagacacaggccc

SEQ ID NO: 2988584 - RNA, 19 nt, Human
cugcugacagacacaggcc

SEQ ID NO: 2988585 - RNA, 18 nt, Human
cugcugacagacacaggc

SEQ ID NO: 2988586 - RNA, 15 nt, Human
cugcugacagacaca

SEQ ID NO: 2988587 - RNA, 23 nt, Human
cugcugacagacacaggcccggc

SEQ ID NO: 2988588 - RNA, 21 nt, Human
cugcugacagacacaggcccg

SEQ ID NO: 2988589 - RNA, 22 nt, Human
cugguuuuaaauauuuugacuu

SEQ ID NO: 2988590 - RNA, 21 nt, Human
cuguaggaagguuaauguuca

SEQ ID NO: 2988591 - RNA, 18 nt, Human
cuguaggaagguuaaugu

SEQ ID NO: 2988592 - RNA, 23 nt, Human
cugucagcuccccucggagaaga

SEQ ID NO: 2988593 - RNA, 16 nt, Human
cugucauuugagcagg

SEQ ID NO: 2988594 - RNA, 18 nt, Human
cugucauuugagcagggc

SEQ ID NO: 2988595 - RNA, 17 nt, Human
cugucauuugagcaggg

SEQ ID NO: 2988596 - RNA, 22 nt, Human
cugucagcuaaagaaguuugaa

SEQ ID NO: 2988597 - RNA, 18 nt, Human
cugucagccauuccuguu

SEQ ID NO: 2988598 - RNA, 21 nt, Human
cugucagcuccccucggagaa

SEQ ID NO: 2988599 - RNA, 16 nt, Human
cugguuuguucccugu

SEQ ID NO: 2988600 - RNA, 16 nt, Human
cugugagaugcuagaa

SEQ ID NO: 2988601 - RNA, 14 nt, Human
cugugcucuggaca

SEQ ID NO: 2988602 - RNA, 15 nt, Human
cugugaagagaacca

SEQ ID NO: 2988603 - RNA, 13 nt, Human
cugucgcccaguc

SEQ ID NO: 2988604 - RNA, 16 nt, Human
cugggcagaaggaaga

SEQ ID NO: 2988605 - RNA, 18 nt, Human
cugggcagaaggaagacu

SEQ ID NO: 2988606 - RNA, 19 nt, Human
cugggcagcugccuccccu

SEQ ID NO: 2988607 - RNA, 16 nt, Human
cugggcagcugccucc

SEQ ID NO: 2988608 - RNA, 21 nt, Human
cugggcagcugccuccccucc

SEQ ID NO: 2988609 - RNA, 20 nt, Human
cugggcagcugccuccccuc

SEQ ID NO: 2988610 - RNA, 22 nt, Human
cugggcagcugccuccccuccu

SEQ ID NO: 2988611 - RNA, 16 nt, Human
cuggggccgaaagaac

SEQ ID NO: 2988612 - RNA, 17 nt, Human
cugggcagaaggaagac

SEQ ID NO: 2988613 - RNA, 20 nt, Human
cuggugacuuuccucuuugg

SEQ ID NO: 2988614 - RNA, 21 nt, Human
cuggugacuuuccucuuuggu

SEQ ID NO: 2988615 - RNA, 15 nt, Human
cuggugacuuuccuc

SEQ ID NO: 2988616 - RNA, 14 nt, Human
cuggguucacugca

SEQ ID NO: 2988617 - RNA, 23 nt, Human
cuggguggcaccagcagccugga

SEQ ID NO: 2988618 - RNA, 22 nt, Human
cuggguggcaccagcagccugg

SEQ ID NO: 2988619 - RNA, 17 nt, Human
cuggguguggcgcagca

SEQ ID NO: 2988620 - RNA, 16 nt, Human
cuggguguggcgcagc

SEQ ID NO: 2988621 - RNA, 23 nt, Human
cuggugacuuuccucuuuggucu

SEQ ID NO: 2988622 - RNA, 10 nt, Human
cugggacagg

SEQ ID NO: 2988623 - RNA, 13 nt, Human
cugggacacaguu

SEQ ID NO: 2988624 - RNA, 12 nt, Human
cugggacacagu

SEQ ID NO: 2988625 - RNA, 17 nt, Human
cuggccccucagggucc

SEQ ID NO: 2988626 - RNA, 18 nt, Human
cuggccccucaggguccc

SEQ ID NO: 2988627 - RNA, 20 nt, Human
cuggccccucagggucccug

SEQ ID NO: 2988628 - RNA, 21 nt, Human
cuggccccucagggucccugg

SEQ ID NO: 2988629 - RNA, 17 nt, Human
cuggcucacccaguccu

SEQ ID NO: 2988630 - RNA, 13 nt, Human
cuggcagcucaga

SEQ ID NO: 2988631 - RNA, 14 nt, Human
cuggcagcucagag

SEQ ID NO: 2988632 - RNA, 12 nt, Human
cuggcagcucag

SEQ ID NO: 2988633 - RNA, 15 nt, Human
cuggcagcucagaga

SEQ ID NO: 2988634 - RNA, 13 nt, Human
cuggccccucagg

SEQ ID NO: 2988635 - RNA, 15 nt, Human
cuucacgcccuuggc

SEQ ID NO: 2988636 - RNA, 17 nt, Human
cuucacgcccuuggcca

SEQ ID NO: 2988637 - RNA, 15 nt, Human
cuucacuguaaaaua

SEQ ID NO: 2988638 - RNA, 17 nt, Human
cuucagagacuccugca

SEQ ID NO: 2988639 - RNA, 16 nt, Human
cuucaguuugcagagu

SEQ ID NO: 2988640 - RNA, 17 nt, Human
cuucaguuugcagagua

SEQ ID NO: 2988641 - RNA, 18 nt, Human
cuucagagacuccugcag

SEQ ID NO: 2988642 - RNA, 19 nt, Human
cuucagagacuccugcagg

SEQ ID NO: 2988643 - RNA, 20 nt, Human
cuucagagacuccugcaggc

SEQ ID NO: 2988644 - RNA, 22 nt, Human
cuuccagugaggcucugcccuu

SEQ ID NO: 2988645 - RNA, 23 nt, Human
cuuccagugaggcucugcccuug

SEQ ID NO: 2988646 - RNA, 21 nt, Human
cuuccagugaggcucugcccu

SEQ ID NO: 2988647 - RNA, 11 nt, Human
cuucccaccuc

SEQ ID NO: 2988648 - RNA, 21 nt, Human
cuucccaccucucucacuccu

SEQ ID NO: 2988649 - RNA, 23 nt, Human
cuucccaccucucucacuccuug

SEQ ID NO: 2988650 - RNA, 14 nt, Human
cugugcugagucug

SEQ ID NO: 2988651 - RNA, 12 nt, Human
cugugcugaguc

SEQ ID NO: 2988652 - RNA, 15 nt, Human
cuucacggaagagcc

SEQ ID NO: 2988653 - RNA, 19 nt, Human
cuucacggaagagccuugc

SEQ ID NO: 2988654 - RNA, 20 nt, Human
cuuauuguagcauccuggaa

SEQ ID NO: 2988655 - RNA, 22 nt, Human
cuucaccuuuguccccaccgca

SEQ ID NO: 2988656 - RNA, 21 nt, Human
cuucaccuuuguccccaccgc

SEQ ID NO: 2988657 - RNA, 23 nt, Human
cuuauuguagcauccuggaauau

SEQ ID NO: 2988658 - RNA, 17 nt, Human
cuuauggaacacucuga

SEQ ID NO: 2988659 - RNA, 19 nt, Human
cuuauggaacacucugaga

SEQ ID NO: 2988660 - RNA, 20 nt, Human
cuuauggaacacucugagac

SEQ ID NO: 2988661 - RNA, 13 nt, Human
cuuauggaacacu

SEQ ID NO: 2988662 - RNA, 16 nt, Human
cuuauggaacacucug

SEQ ID NO: 2988663 - RNA, 13 nt, Human
cuugaugaagaag

SEQ ID NO: 2988664 - RNA, 14 nt, Human
cuuggcgcugcccc

SEQ ID NO: 2988665 - RNA, 17 nt, Human
cuuggcgcugccccugg

SEQ ID NO: 2988666 - RNA, 12 nt, Human
cuuggcgcugcc

SEQ ID NO: 2988667 - RNA, 20 nt, Human
cuuggcgcugccccuggcag

SEQ ID NO: 2988668 - RNA, 12 nt, Human
cuugaugaagaa

SEQ ID NO: 2988669 - RNA, 13 nt, Human
cuugacagggcac

SEQ ID NO: 2988670 - RNA, 15 nt, Human
cuugacagggcacac

SEQ ID NO: 2988671 - RNA, 14 nt, Human
cuugacagggcaca

SEQ ID NO: 2988672 - RNA, 19 nt, Human
cuugaauuguaaggaauga

SEQ ID NO: 2988673 - RNA, 18 nt, Human
cuugaauuguaaggaaug

SEQ ID NO: 2988674 - RNA, 16 nt, Human
cuugaagacuuuucuu

SEQ ID NO: 2988675 - RNA, 22 nt, Human
cuucuaaguaaaaccacagcag

SEQ ID NO: 2988676 - RNA, 23 nt, Human
cuucuaaguaaaaccacagcagu

SEQ ID NO: 2988677 - RNA, 17 nt, Human
cuuccugcaacaccuug

SEQ ID NO: 2988678 - RNA, 22 nt, Human
cuucuauuuauuuauuuauuca

SEQ ID NO: 2988679 - RNA, 18 nt, Human
cuuccucccucccucuuu

SEQ ID NO: 2988680 - RNA, 23 nt, Human
cuucuucagagacuccugcaggc

SEQ ID NO: 2988681 - RNA, 21 nt, Human
cuucugacccaugcugcccug

SEQ ID NO: 2988682 - RNA, 22 nt, Human
cuucugacccaugcugcccugu

SEQ ID NO: 2988683 - RNA, 20 nt, Human
cuucugacccaugcugcccu

SEQ ID NO: 2988684 - RNA, 23 nt, Human
cuucugacccaugcugcccugug

SEQ ID NO: 2988685 - RNA, 20 nt, Human
gaaaaaauuuacuuuaaacu

SEQ ID NO: 2988686 - RNA, 13 nt, Human
cuuuugugcauua

SEQ ID NO: 2988687 - RNA, 12 nt, Human
cuuuugugcauu

SEQ ID NO: 2988688 - RNA, 23 nt, Human
cuuuuuuggcugcugaaggcucg

SEQ ID NO: 2988689 - RNA, 23 nt, Human
cuuuugcccacacuugggagcaa

SEQ ID NO: 2988690 - RNA, 18 nt, Human
cuuuuggaagguauuuaa

SEQ ID NO: 2988691 - RNA, 23 nt, Human
cuuuugcauauugcauacuauua

SEQ ID NO: 2988692 - RNA, 18 nt, Human
cuuuugucuaugggacuc

SEQ ID NO: 2988693 - RNA, 15 nt, Human
gaaaauguaugugua

SEQ ID NO: 2988694 - RNA, 19 nt, Human
gaaaauggacguguuauga

SEQ ID NO: 2988695 - RNA, 23 nt, Human
gaaaauggacguguuaugacucc

SEQ ID NO: 2988696 - RNA, 14 nt, Human
gaaaaacugauuuu

SEQ ID NO: 2988697 - RNA, 21 nt, Human
gaaaauggaagacagcucuua

SEQ ID NO: 2988698 - RNA, 18 nt, Human
gaaaagaaaaaugagccu

SEQ ID NO: 2988699 - RNA, 17 nt, Human
gaaauauuuauuuuaau

SEQ ID NO: 2988700 - RNA, 22 nt, Human
gaaagggacuuggaagcuccgc

SEQ ID NO: 2988701 - RNA, 20 nt, Human
gaaagggacgcuacccggga

SEQ ID NO: 2988702 - RNA, 19 nt, Human
gaaagggacuuggaagcuc

SEQ ID NO: 2988703 - RNA, 22 nt, Human
gaaauauuuauuuuaauaaugu

SEQ ID NO: 2988704 - RNA, 18 nt, Human
gaaauauuuauuuuaaua

SEQ ID NO: 2988705 - RNA, 18 nt, Human
gaaaucaaauaugcaaag

SEQ ID NO: 2988706 - RNA, 17 nt, Human
gaaaucaaauaugcaaa

SEQ ID NO: 2988707 - RNA, 19 nt, Human
gaaaucaaauaugcaaagc

SEQ ID NO: 2988708 - RNA, 20 nt, Human
gaaaucaaauaugcaaagca

SEQ ID NO: 2988709 - RNA, 19 nt, Human
gaaaucaccgaaaacgugg

SEQ ID NO: 2988710 - RNA, 20 nt, Human
gaaaggcuccaggagcagcc

SEQ ID NO: 2988711 - RNA, 22 nt, Human
gaaaggcuccaggagcagccac

SEQ ID NO: 2988712 - RNA, 21 nt, Human
gaaaggcuccaggagcagcca

SEQ ID NO: 2988713 - RNA, 17 nt, Human
gaaagacuauucaaaca

SEQ ID NO: 2988714 - RNA, 14 nt, Human
gaaagacuauucaa

SEQ ID NO: 2988715 - RNA, 15 nt, Human
gaaagacuauucaaa

SEQ ID NO: 2988716 - RNA, 20 nt, Human
gaaagacuaucuaaauguug

SEQ ID NO: 2988717 - RNA, 21 nt, Human
gaaagaaaauaccaaggaaca

SEQ ID NO: 2988718 - RNA, 15 nt, Human
gaaacuuuuggaagg

SEQ ID NO: 2988719 - RNA, 13 nt, Human
gaaacuuuuggaa

SEQ ID NO: 2988720 - RNA, 22 nt, Human
cuuuuaugauugccuuuuuaua

SEQ ID NO: 2988721 - RNA, 13 nt, Human
cuuuuauaaacuu

SEQ ID NO: 2988722 - RNA, 16 nt, Human
cuuucuagccagagga

SEQ ID NO: 2988723 - RNA, 15 nt, Human
cuuucuagccagagg

SEQ ID NO: 2988724 - RNA, 17 nt, Human
cuuucuacccagcgagc

SEQ ID NO: 2988725 - RNA, 17 nt, Human
cuuugggccuggcuccc

SEQ ID NO: 2988726 - RNA, 23 nt, Human
cuuucaauaggaaaaacugauuu

SEQ ID NO: 2988727 - RNA, 23 nt, Human
cuuucagccaagaauucuuaaau

SEQ ID NO: 2988728 - RNA, 20 nt, Human
cuuucagccaagaauucuua

SEQ ID NO: 2988729 - RNA, 22 nt, Human
cuuuccugaggcugggcucccu

SEQ ID NO: 2988730 - RNA, 20 nt, Human
gagaagucuucuauuuauuu

SEQ ID NO: 2988731 - RNA, 21 nt, Human
gagaagucuucuauuuauuua

SEQ ID NO: 2988732 - RNA, 14 nt, Human
gagaaucacuugaa

SEQ ID NO: 2988733 - RNA, 15 nt, Human
gagaaucacuugaac

SEQ ID NO: 2988734 - RNA, 12 nt, Human
gagaaggaagcc

SEQ ID NO: 2988735 - RNA, 13 nt, Human
gagaagcggcugg

SEQ ID NO: 2988736 - RNA, 15 nt, Human
gagaagcggcuggca

SEQ ID NO: 2988737 - RNA, 23 nt, Human
gacuuuucuuucagccaagaauu

SEQ ID NO: 2988738 - RNA, 21 nt, Human
gacuuuucuuuguggcuuccu

SEQ ID NO: 2988739 - RNA, 23 nt, Human
gacuuuucuguccgagcuuugaa

SEQ ID NO: 2988740 - RNA, 22 nt, Human
gacuauuuuuguuuuuauuaaa

SEQ ID NO: 2988741 - RNA, 21 nt, Human
gacuauuuuuguuuuuauuaa

SEQ ID NO: 2988742 - RNA, 12 nt, Human
gacucugucuca

SEQ ID NO: 2988743 - RNA, 16 nt, Human
gacucuuaagaagacu

SEQ ID NO: 2988744 - RNA, 15 nt, Human
gacucuuaagaagac

SEQ ID NO: 2988745 - RNA, 17 nt, Human
gacucuuaagaagacug

SEQ ID NO: 2988746 - RNA, 18 nt, Human
gacuauuuuuguuuuuau

SEQ ID NO: 2988747 - RNA, 17 nt, Human
gacuauuuuuguuuuua

SEQ ID NO: 2988748 - RNA, 13 nt, Human
gacuauuuuuguu

SEQ ID NO: 2988749 - RNA, 22 nt, Human
gacuauucaaacagucucagga

SEQ ID NO: 2988750 - RNA, 22 nt, Human
gacuaucuaaauguugaaagau

SEQ ID NO: 2988751 - RNA, 22 nt, Human
gagcaugccuggauggggcugc

SEQ ID NO: 2988752 - RNA, 21 nt, Human
gagcaugccuggauggggcug

SEQ ID NO: 2988753 - RNA, 12 nt, Human
gagcaucaggcc

SEQ ID NO: 2988754 - RNA, 14 nt, Human
gagcagggcucagc

SEQ ID NO: 2988755 - RNA, 14 nt, Human
gagccuuccagggg

SEQ ID NO: 2988756 - RNA, 15 nt, Human
gagccuuccaggggu

SEQ ID NO: 2988757 - RNA, 16 nt, Human
gagccuuccaggggug

SEQ ID NO: 2988758 - RNA, 17 nt, Human
gagccuuccaggggugg

SEQ ID NO: 2988759 - RNA, 19 nt, Human
gagccuugaacuuugaccu

SEQ ID NO: 2988760 - RNA, 22 nt, Human
gagccuugaacuuugaccucug

SEQ ID NO: 2988761 - RNA, 22 nt, Human
gagcugccuguucagcuccagc

SEQ ID NO: 2988762 - RNA, 21 nt, Human
gagcugccuguucagcuccag

SEQ ID NO: 2988763 - RNA, 20 nt, Human
gagcugccuguucagcucca

SEQ ID NO: 2988764 - RNA, 18 nt, Human
gagcggagaaaggaaggg

SEQ ID NO: 2988765 - RNA, 21 nt, Human
gagcggagaaaggaagggcug

SEQ ID NO: 2988766 - RNA, 17 nt, Human
gagcggagaaaggaagg

SEQ ID NO: 2988767 - RNA, 18 nt, Human
gagcugggugucaagagg

SEQ ID NO: 2988768 - RNA, 15 nt, Human
gagacuccugcaggc

SEQ ID NO: 2988769 - RNA, 16 nt, Human
gagacuccugcaggca

SEQ ID NO: 2988770 - RNA, 17 nt, Human
gagacuccugcaggcag

SEQ ID NO: 2988771 - RNA, 14 nt, Human
gagaggcauccagu

SEQ ID NO: 2988772 - RNA, 22 nt, Human
gagaggcauccaguaucuugaa

SEQ ID NO: 2988773 - RNA, 21 nt, Human
gagaugaugccaugggcccuc

SEQ ID NO: 2988774 - RNA, 18 nt, Human
gagauugcaccacugcac

SEQ ID NO: 2988775 - RNA, 13 nt, Human
gagauuuacaacu

SEQ ID NO: 2988776 - RNA, 16 nt, Human
gaaggcucgagcaugc

SEQ ID NO: 2988777 - RNA, 17 nt, Human
gaaggcucgagcaugcc

SEQ ID NO: 2988778 - RNA, 19 nt, Human
gaagucuuuguacagacaa

SEQ ID NO: 2988779 - RNA, 20 nt, Human
gaagucuuuguacagacaac

SEQ ID NO: 2988780 - RNA, 18 nt, Human
gaagucuuuguacagaca

SEQ ID NO: 2988781 - RNA, 16 nt, Human
gaagcucagggccugg

SEQ ID NO: 2988782 - RNA, 17 nt, Human
gaagcucagggccuggc

SEQ ID NO: 2988783 - RNA, 18 nt, Human
gaagcucagggccuggcu

SEQ ID NO: 2988784 - RNA, 19 nt, Human
gaagcucagggccuggcuc

SEQ ID NO: 2988785 - RNA, 20 nt, Human
gaagcucagggccuggcuca

SEQ ID NO: 2988786 - RNA, 21 nt, Human
gaagcucagggccuggcucag

SEQ ID NO: 2988787 - RNA, 23 nt, Human
gaagcucagggccuggcucaggu

SEQ ID NO: 2988788 - RNA, 14 nt, Human
gaagcucagggccu

SEQ ID NO: 2988789 - RNA, 15 nt, Human
gaagcucagggccug

SEQ ID NO: 2988790 - RNA, 23 nt, Human
gaaugagagacacacugaagaag

SEQ ID NO: 2988791 - RNA, 22 nt, Human
gaaugagagacacacugaagaa

SEQ ID NO: 2988792 - RNA, 20 nt, Human
gaaugagagacacacugaag

SEQ ID NO: 2988793 - RNA, 20 nt, Human
gaaugaauggcuaagcaaaa

SEQ ID NO: 2988794 - RNA, 11 nt, Human
gaaugaauguc

SEQ ID NO: 2988795 - RNA, 14 nt, Human
gaaugaaugucagu

SEQ ID NO: 2988796 - RNA, 18 nt, Human
gaaugaaugucaguguga

SEQ ID NO: 2988797 - RNA, 22 nt, Human
gaaugaaugucagugugacuga

SEQ ID NO: 2988798 - RNA, 11 nt, Human
gaauuaguuuu

SEQ ID NO: 2988799 - RNA, 12 nt, Human
gaauuaugaaac

SEQ ID NO: 2988800 - RNA, 19 nt, Human
gaauuuuggcugugucucc

SEQ ID NO: 2988801 - RNA, 19 nt, Human
gacacacagcucuguccug

SEQ ID NO: 2988802 - RNA, 18 nt, Human
gacacacagcucuguccu

SEQ ID NO: 2988803 - RNA, 17 nt, Human
gacacacagcucugucc

SEQ ID NO: 2988804 - RNA, 15 nt, Human
gacacacagcucugu

SEQ ID NO: 2988805 - RNA, 13 nt, Human
gacacacagcucu

SEQ ID NO: 2988806 - RNA, 14 nt, Human
gacacacagcucug

SEQ ID NO: 2988807 - RNA, 15 nt, Human
gacaaaauggaauac

SEQ ID NO: 2988808 - RNA, 20 nt, Human
gaauuuugugcccccaugua

SEQ ID NO: 2988809 - RNA, 23 nt, Human
gaauuuuggcugugucucccuuc

SEQ ID NO: 2988810 - RNA, 21 nt, Human
gaauuuugugcccccauguaa

SEQ ID NO: 2988811 - RNA, 14 nt, Human
gacaaaaagcuacu

SEQ ID NO: 2988812 - RNA, 13 nt, Human
gacacacugaaga

SEQ ID NO: 2988813 - RNA, 12 nt, Human
gacacacaugaa

SEQ ID NO: 2988814 - RNA, 21 nt, Human
gacacacagcucuguccuggg

SEQ ID NO: 2988815 - RNA, 16 nt, Human
gacacuuaaaaauggu

SEQ ID NO: 2988816 - RNA, 15 nt, Human
gacacugaugggcaa

SEQ ID NO: 2988817 - RNA, 13 nt, Human
gacacugaugggc

SEQ ID NO: 2988818 - RNA, 21 nt, Human
gacagcccgggcucugccucc

SEQ ID NO: 2988819 - RNA, 22 nt, Human
gacagcccgggcucugccuccc

SEQ ID NO: 2988820 - RNA, 23 nt, Human
gacagcccgggcucugccuccca

SEQ ID NO: 2988821 - RNA, 20 nt, Human
gacaguauggcagcuuuccu

SEQ ID NO: 2988822 - RNA, 17 nt, Human
gacagucaccucaugga

SEQ ID NO: 2988823 - RNA, 11 nt, Human
gacagcuccuu

SEQ ID NO: 2988824 - RNA, 22 nt, Human
gacaggguuuugccauguuggc

SEQ ID NO: 2988825 - RNA, 20 nt, Human
gacaggguuuugccauguug

SEQ ID NO: 2988826 - RNA, 15 nt, Human
gcacaucuguuuugu

SEQ ID NO: 2988827 - RNA, 21 nt, Human
gcacaugagcuggcgggauug

SEQ ID NO: 2988828 - RNA, 13 nt, Human
gcacaugccucuc

SEQ ID NO: 2988829 - RNA, 20 nt, Human
gcacaucagcacgauuucug

SEQ ID NO: 2988830 - RNA, 19 nt, Human
gcacaucagcacgauuucu

SEQ ID NO: 2988831 - RNA, 21 nt, Human
gcacaucagcacgauuucugu

SEQ ID NO: 2988832 - RNA, 14 nt, Human
gcacaguuuucuga

SEQ ID NO: 2988833 - RNA, 17 nt, Human
gcacaguuuucugagaa

SEQ ID NO: 2988834 - RNA, 18 nt, Human
gcacaguuuucugagaaa

SEQ ID NO: 2988835 - RNA, 14 nt, Human
gcacaugccucucu

SEQ ID NO: 2988836 - RNA, 17 nt, Human
gcacaugccucucucag

SEQ ID NO: 2988837 - RNA, 18 nt, Human
gcacaugccucucucagg

SEQ ID NO: 2988838 - RNA, 19 nt, Human
gcacaugccucucucaggc

SEQ ID NO: 2988839 - RNA, 20 nt, Human
gcacaugccucucucaggcc

SEQ ID NO: 2988840 - RNA, 21 nt, Human
gcacaugccucucucaggcca

SEQ ID NO: 2988841 - RNA, 19 nt, Human
gcaccggcuggccuggccc

SEQ ID NO: 2988842 - RNA, 21 nt, Human
gcaccggcuggccuggccccu

SEQ ID NO: 2988843 - RNA, 23 nt, Human
gcaccggcuggccuggccccuca

SEQ ID NO: 2988844 - RNA, 18 nt, Human
gcaccggcuggccuggcc

SEQ ID NO: 2988845 - RNA, 13 nt, Human
gcaagugagagcu

SEQ ID NO: 2988846 - RNA, 14 nt, Human
gcacaagcugcacc

SEQ ID NO: 2988847 - RNA, 23 nt, Human
gcacaagcuccaagcucccaggc

SEQ ID NO: 2988848 - RNA, 21 nt, Human
gcacaagcuccaagcucccag

SEQ ID NO: 2988849 - RNA, 22 nt, Human
gcacaagcuccaagcucccagg

SEQ ID NO: 2988850 - RNA, 21 nt, Human
gcaauaaagcagcguuucuau

SEQ ID NO: 2988851 - RNA, 22 nt, Human
gcagagcaccuuagacaguccc

SEQ ID NO: 2988852 - RNA, 23 nt, Human
gcagagcaccuuagacagucccu

SEQ ID NO: 2988853 - RNA, 19 nt, Human
gcagagcaccuuagacagu

SEQ ID NO: 2988854 - RNA, 24 nt, Human
gcagagcaccuuagacagucccug

SEQ ID NO: 2988855 - RNA, 12 nt, Human
gcagagcagaga

SEQ ID NO: 2988856 - RNA, 14 nt, Human
gcagagcagagacc

SEQ ID NO: 2988857 - RNA, 15 nt, Human
gcagagcagagacca

SEQ ID NO: 2988858 - RNA, 19 nt, Human
gcagagcagagaccauccc

SEQ ID NO: 2988859 - RNA, 20 nt, Human
gcagagcagagaccaucccu

SEQ ID NO: 2988860 - RNA, 13 nt, Human
gcacuuuaaaaca

SEQ ID NO: 2988861 - RNA, 12 nt, Human
gcacugacauug

SEQ ID NO: 2988862 - RNA, 19 nt, Human
gcaguaaaaaaugguguuu

SEQ ID NO: 2988863 - RNA, 19 nt, Human
gcagggacuugaacccaua

SEQ ID NO: 2988864 - RNA, 22 nt, Human
gcaguaaaaaaugguguuuuau

SEQ ID NO: 2988865 - RNA, 21 nt, Human
gcaguacuaacauuuauuuga

SEQ ID NO: 2988866 - RNA, 15 nt, Human
gcaguacuaacauuu

SEQ ID NO: 2988867 - RNA, 22 nt, Human
gcagcugccuccccuccucugc

SEQ ID NO: 2988868 - RNA, 18 nt, Human
gcagcugccuccccuccu

SEQ ID NO: 2988869 - RNA, 17 nt, Human
gcagcugccuccccucc

SEQ ID NO: 2988870 - RNA, 16 nt, Human
gcagcugccuccccuc

SEQ ID NO: 2988871 - RNA, 15 nt, Human
gcagcugccuccccu

SEQ ID NO: 2988872 - RNA, 13 nt, Human
gcagcugccuccc

SEQ ID NO: 2988873 - RNA, 12 nt, Human
gcagcugccucc

SEQ ID NO: 2988874 - RNA, 11 nt, Human
gcagcugccuc

SEQ ID NO: 2988875 - RNA, 20 nt, Human
gcaggcucucaggccagcug

SEQ ID NO: 2988876 - RNA, 22 nt, Human
gcaggcucucaggccagcugcu

SEQ ID NO: 2988877 - RNA, 19 nt, Human
gcagcugcgguccacccag

SEQ ID NO: 2988878 - RNA, 17 nt, Human
gcagcugcgguccaccc

SEQ ID NO: 2988879 - RNA, 23 nt, Human
gcaggcucucaggccagcugcuu

SEQ ID NO: 2988880 - RNA, 18 nt, Human
gcaggcucucaggccagc

SEQ ID NO: 2988881 - RNA, 20 nt, Human
gcauaccacuuuuguucuug

SEQ ID NO: 2988882 - RNA, 17 nt, Human
gcauaccacuuuuguuc

SEQ ID NO: 2988883 - RNA, 22 nt, Human
gcauaaguccucuagugaaugu

SEQ ID NO: 2988884 - RNA, 15 nt, Human
gcauaaguccucuag

SEQ ID NO: 2988885 - RNA, 14 nt, Human
gcauacguacacau

SEQ ID NO: 2988886 - RNA, 16 nt, Human
gcauaccacuuuuguu

SEQ ID NO: 2988887 - RNA, 12 nt, Human
gcagccaggcca

SEQ ID NO: 2988888 - RNA, 14 nt, Human
gcagccacuauugu

SEQ ID NO: 2988889 - RNA, 16 nt, Human
gcagccacauuccuga

SEQ ID NO: 2988890 - RNA, 13 nt, Human
gcagccaggccac

SEQ ID NO: 2988891 - RNA, 14 nt, Human
gcagccaggccaca

SEQ ID NO: 2988892 - RNA, 21 nt, Human
gagugcucaguagucagacug

SEQ ID NO: 2988893 - RNA, 18 nt, Human
gagugccuuacacaaugg

SEQ ID NO: 2988894 - RNA, 20 nt, Human
gaguuguuacauuuuuaagu

SEQ ID NO: 2988895 - RNA, 16 nt, Human
gaguuguuacauuuuu

SEQ ID NO: 2988896 - RNA, 23 nt, Human
gaguugugugaauaccccaagac

SEQ ID NO: 2988897 - RNA, 18 nt, Human
gaguuuagcccugaacau

SEQ ID NO: 2988898 - RNA, 16 nt, Human
gaguuuagcuggaaaa

SEQ ID NO: 2988899 - RNA, 16 nt, Human
gaguuuaaauuguaau

SEQ ID NO: 2988900 - RNA, 12 nt, Human
gaguuuggccag

SEQ ID NO: 2988901 - RNA, 13 nt, Human
gaguuuggccaga

SEQ ID NO: 2988902 - RNA, 20 nt, Human
gaguuugggguaugggagag

SEQ ID NO: 2988903 - RNA, 14 nt, Human
gaguuuggccagaa

SEQ ID NO: 2988904 - RNA, 12 nt, Human
gagugagcuggu

SEQ ID NO: 2988905 - RNA, 13 nt, Human
gagucccaccuug

SEQ ID NO: 2988906 - RNA, 24 nt, Human
gagugagcacuaaggugugcucug

SEQ ID NO: 2988907 - RNA, 12 nt, Human
gagugcagugag

SEQ ID NO: 2988908 - RNA, 11 nt, Human
gagugcaguga

SEQ ID NO: 2988909 - RNA, 20 nt, Human
gagucccaccuuggcugcag

SEQ ID NO: 2988910 - RNA, 16 nt, Human
gagucccaccuuggcu

SEQ ID NO: 2988911 - RNA, 14 nt, Human
gagucaccaagccc

SEQ ID NO: 2988912 - RNA, 13 nt, Human
gagucaccaagcc

SEQ ID NO: 2988913 - RNA, 12 nt, Human
gaggugggaucc

SEQ ID NO: 2988914 - RNA, 11 nt, Human
gaggugggagg

SEQ ID NO: 2988915 - RNA, 14 nt, Human
gaggucuguucuuu

SEQ ID NO: 2988916 - RNA, 13 nt, Human
gaggucuguucuu

SEQ ID NO: 2988917 - RNA, 16 nt, Human
gauacuuauuuaaaua

SEQ ID NO: 2988918 - RNA, 19 nt, Human
gauacuuauuuaaauagau

SEQ ID NO: 2988919 - RNA, 13 nt, Human
gauacuuauuuaa

SEQ ID NO: 2988920 - RNA, 14 nt, Human
gauaugugaacagu

SEQ ID NO: 2988921 - RNA, 13 nt, Human
gauaugugaacag

SEQ ID NO: 2988922 - RNA, 20 nt, Human
gauauguaccuaacgaagua

SEQ ID NO: 2988923 - RNA, 18 nt, Human
gauauggguaguauuuuu

SEQ ID NO: 2988924 - RNA, 17 nt, Human
gauauggguaguauuuu

SEQ ID NO: 2988925 - RNA, 11 nt, Human
gauacuacagu

SEQ ID NO: 2988926 - RNA, 16 nt, Human
gauacuacaguuuguu

SEQ ID NO: 2988927 - RNA, 13 nt, Human
gauacccauccca

SEQ ID NO: 2988928 - RNA, 14 nt, Human
gauacccaucccau

SEQ ID NO: 2988929 - RNA, 17 nt, Human
gauuagggagagaagau

SEQ ID NO: 2988930 - RNA, 14 nt, Human
gaugugaacacauc

SEQ ID NO: 2988931 - RNA, 16 nt, Human
gaugugaacacaucag

SEQ ID NO: 2988932 - RNA, 20 nt, Human
gauuacaggugugaaccacc

SEQ ID NO: 2988933 - RNA, 14 nt, Human
gauuaccagggacu

SEQ ID NO: 2988934 - RNA, 15 nt, Human
gauauuuuuuucuuu

SEQ ID NO: 2988935 - RNA, 16 nt, Human
gauauuuugcuuugug

SEQ ID NO: 2988936 - RNA, 15 nt, Human
gauauuuugcuuugu

SEQ ID NO: 2988937 - RNA, 12 nt, Human
gaucucuugagc

SEQ ID NO: 2988938 - RNA, 16 nt, Human
gaucucuugagccugg

SEQ ID NO: 2988939 - RNA, 17 nt, Human
gaucucuugagccuggg

SEQ ID NO: 2988940 - RNA, 14 nt, Human
gaugaucuuugcag

SEQ ID NO: 2988941 - RNA, 21 nt, Human
gaugaucuuugcagacaggca

SEQ ID NO: 2988942 - RNA, 20 nt, Human
gaugaucuuugcagacaggc

SEQ ID NO: 2988943 - RNA, 16 nt, Human
gaugagaggaaaucac

SEQ ID NO: 2988944 - RNA, 12 nt, Human
gcugaacaucac

SEQ ID NO: 2988945 - RNA, 16 nt, Human
gcugaaacaacaaaua

SEQ ID NO: 2988946 - RNA, 20 nt, Human
gcucuguggcgagccauuug

SEQ ID NO: 2988947 - RNA, 23 nt, Human
gcucugguccauagagagcaaga

SEQ ID NO: 2988948 - RNA, 13 nt, Human
gcugacagacaca

SEQ ID NO: 2988949 - RNA, 17 nt, Human
gcugagccucacagcag

SEQ ID NO: 2988950 - RNA, 21 nt, Human
gcugagccucacagcagugag

SEQ ID NO: 2988951 - RNA, 19 nt, Human
gcugagccucacagcagug

SEQ ID NO: 2988952 - RNA, 22 nt, Human
gcugagccucacagcagugaga

SEQ ID NO: 2988953 - RNA, 23 nt, Human
gcugaaggcucgagcaugccugg

SEQ ID NO: 2988954 - RNA, 17 nt, Human
gcugaauacagaggcaa

SEQ ID NO: 2988955 - RNA, 21 nt, Human
gcucugcccauccugccccug

SEQ ID NO: 2988956 - RNA, 15 nt, Human
gcucugcccauccug

SEQ ID NO: 2988957 - RNA, 22 nt, Human
gcucugaucauccacugugcca

SEQ ID NO: 2988958 - RNA, 21 nt, Human
gcucugaucauccacugugcc

SEQ ID NO: 2988959 - RNA, 20 nt, Human
gcucugaucauccacugugc

SEQ ID NO: 2988960 - RNA, 15 nt, Human
gcuccucuccccagc

SEQ ID NO: 2988961 - RNA, 23 nt, Human
gcucccaggcauuccccaggagg

SEQ ID NO: 2988962 - RNA, 14 nt, Human
gcuccagcucacca

SEQ ID NO: 2988963 - RNA, 13 nt, Human
gcuccagcucacc

SEQ ID NO: 2988964 - RNA, 18 nt, Human
gcuccagacacaugucca

SEQ ID NO: 2988965 - RNA, 21 nt, Human
gcuccagacacauguccaaga

SEQ ID NO: 2988966 - RNA, 23 nt, Human
gcuccagacacauguccaagaag

SEQ ID NO: 2988967 - RNA, 9 nt, Human
gcuccagac

SEQ ID NO: 2988968 - RNA, 20 nt, Human
gcuccacuuggucugugaga

SEQ ID NO: 2988969 - RNA, 18 nt, Human
gcucucaaguuaucaggg

SEQ ID NO: 2988970 - RNA, 19 nt, Human
gcuccucuccccagcaagu

SEQ ID NO: 2988971 - RNA, 16 nt, Human
gcuccucuccccagca

SEQ ID NO: 2988972 - RNA, 19 nt, Human
gcucuacugaggugcuaug

SEQ ID NO: 2988973 - RNA, 17 nt, Human
gcucucaggccagcugc

SEQ ID NO: 2988974 - RNA, 18 nt, Human
gcucucaggccagcugcu

SEQ ID NO: 2988975 - RNA, 19 nt, Human
gcucucaggccagcugcuu

SEQ ID NO: 2988976 - RNA, 15 nt, Human
gcugaggugggagga

SEQ ID NO: 2988977 - RNA, 13 nt, Human
gcugccauccagg

SEQ ID NO: 2988978 - RNA, 12 nt, Human
gcugccauccag

SEQ ID NO: 2988979 - RNA, 14 nt, Human
gcugccagugccug

SEQ ID NO: 2988980 - RNA, 13 nt, Human
gcugccagugccu

SEQ ID NO: 2988981 - RNA, 13 nt, Human
gcugcacccucag

SEQ ID NO: 2988982 - RNA, 15 nt, Human
gcugcacccucaggc

SEQ ID NO: 2988983 - RNA, 20 nt, Human
gcugccccugcacagcaggc

SEQ ID NO: 2988984 - RNA, 15 nt, Human
gcugcucccaccugg

SEQ ID NO: 2988985 - RNA, 11 nt, Human
gcugcucccac

SEQ ID NO: 2988986 - RNA, 22 nt, Human
gcugcucccaccuggcucugug

SEQ ID NO: 2988987 - RNA, 20 nt, Human
gcugcucccaccuggcucug

SEQ ID NO: 2988988 - RNA, 24 nt, Human
gcugcucccaccuggcucuguggc

SEQ ID NO: 2988989 - RNA, 15 nt, Human
gcugccccuggcagc

SEQ ID NO: 2988990 - RNA, 16 nt, Human
gcugccccuggcagcc

SEQ ID NO: 2988991 - RNA, 13 nt, Human
gcugccccuggca

SEQ ID NO: 2988992 - RNA, 17 nt, Human
gcugccauccagguuca

SEQ ID NO: 2988993 - RNA, 18 nt, Human
gcugcugagauccuggac

SEQ ID NO: 2988994 - RNA, 20 nt, Human
gcugcugagauccuggacug

SEQ ID NO: 2988995 - RNA, 12 nt, Human
gcugcugacagu

SEQ ID NO: 2988996 - RNA, 18 nt, Human
gcugcugaaggcucgagc

SEQ ID NO: 2988997 - RNA, 17 nt, Human
gcuuauuuccucauuuu

SEQ ID NO: 2988998 - RNA, 22 nt, Human
gcuuaauuauugauguuuucau

SEQ ID NO: 2988999 - RNA, 13 nt, Human
gcuguuggcuggg

SEQ ID NO: 2989000 - RNA, 14 nt, Human
gcuucaaggauccu

SEQ ID NO: 2989001 - RNA, 14 nt, Human
gcuucaguggcagc

SEQ ID NO: 2989002 - RNA, 22 nt, Human
gcuguacauacuuuuuggguuu

SEQ ID NO: 2989003 - RNA, 13 nt, Human
gcuguauuuuaaa

SEQ ID NO: 2989004 - RNA, 12 nt, Human
gcuguauuuuaa

SEQ ID NO: 2989005 - RNA, 23 nt, Human
gcugguucaggguuggccccugc

SEQ ID NO: 2989006 - RNA, 22 nt, Human
gcuggaguuauugaagcagagu

SEQ ID NO: 2989007 - RNA, 23 nt, Human
gcuugaccgugaggccagagaca

SEQ ID NO: 2989008 - RNA, 18 nt, Human
gcuugaccuuuaagagaa

SEQ ID NO: 2989009 - RNA, 22 nt, Human
gcuugaccuuuaagagaaauga

SEQ ID NO: 2989010 - RNA, 17 nt, Human
gcuuguaaauagcucag

SEQ ID NO: 2989011 - RNA, 19 nt, Human
gcuuguaaauagcucaggu

SEQ ID NO: 2989012 - RNA, 18 nt, Human
gcuuguaaauagcucagg

SEQ ID NO: 2989013 - RNA, 23 nt, Human
gcuuucuacccagcgagcccugg

SEQ ID NO: 2989014 - RNA, 12 nt, Human
gcuucuucagag

SEQ ID NO: 2989015 - RNA, 15 nt, Human
gcuucuucagagacu

SEQ ID NO: 2989016 - RNA, 20 nt, Human
gcuugaccgugaggccagag

SEQ ID NO: 2989017 - RNA, 19 nt, Human
gcuuccuggcaauagucaa

SEQ ID NO: 2989018 - RNA, 23 nt, Human
gcuuccagugaggcucugcccuu

SEQ ID NO: 2989019 - RNA, 22 nt, Human
gcuuccagugaggcucugcccu

SEQ ID NO: 2989020 - RNA, 12 nt, Human
gcuuuugugcau

SEQ ID NO: 2989021 - RNA, 16 nt, Human
ggaaacccagcucugg

SEQ ID NO: 2989022 - RNA, 18 nt, Human
ggaaaauuuuaaaaauac

SEQ ID NO: 2989023 - RNA, 22 nt, Human
gcuuuuuucucugauacagaaa

SEQ ID NO: 2989024 - RNA, 18 nt, Human
gcuuuugucuaugggacu

SEQ ID NO: 2989025 - RNA, 15 nt, Human
gcuuuuggucugugu

SEQ ID NO: 2989026 - RNA, 14 nt, Human
gcuuugaucccuuc

SEQ ID NO: 2989027 - RNA, 17 nt, Human
gcuuugaucccuucuua

SEQ ID NO: 2989028 - RNA, 14 nt, Human
ggaagacaauguga

SEQ ID NO: 2989029 - RNA, 16 nt, Human
ggaagacaaugugaaa

SEQ ID NO: 2989030 - RNA, 15 nt, Human
ggaacacuccuucac

SEQ ID NO: 2989031 - RNA, 23 nt, Human
ggaacaaggcaaggcugucaauu

SEQ ID NO: 2989032 - RNA, 13 nt, Human
ggaacaccuccuc

SEQ ID NO: 2989033 - RNA, 17 nt, Human
ggaacaaggcaaggcug

SEQ ID NO: 2989034 - RNA, 21 nt, Human
ggaacaaggcaaggcugucaa

SEQ ID NO: 2989035 - RNA, 15 nt, Human
ggaacaaggcaaggc

SEQ ID NO: 2989036 - RNA, 20 nt, Human
ggaaauuagguugaaacaua

SEQ ID NO: 2989037 - RNA, 16 nt, Human
ggaaaugggcagagca

SEQ ID NO: 2989038 - RNA, 17 nt, Human
ggaaaugggcagagcag

SEQ ID NO: 2989039 - RNA, 18 nt, Human
ggaaaugggcagagcaga

SEQ ID NO: 2989040 - RNA, 22 nt, Human
ggaaaugggcagagcagagacc

SEQ ID NO: 2989041 - RNA, 14 nt, Human
ggaaaugggcagag

SEQ ID NO: 2989042 - RNA, 17 nt, Human
ggaagacuucaucccuc

SEQ ID NO: 2989043 - RNA, 20 nt, Human
ggaagacuucaucccucugg

SEQ ID NO: 2989044 - RNA, 15 nt, Human
gcccaggaguuuggc

SEQ ID NO: 2989045 - RNA, 16 nt, Human
gcccaggaguuuggcc

SEQ ID NO: 2989046 - RNA, 13 nt, Human
gcccaggaguuug

SEQ ID NO: 2989047 - RNA, 12 nt, Human
gcccaggcaggu

SEQ ID NO: 2989048 - RNA, 13 nt, Human
gcccaggcagguc

SEQ ID NO: 2989049 - RNA, 13 nt, Human
gcccaggccccug

SEQ ID NO: 2989050 - RNA, 15 nt, Human
gcccaggccccugcc

SEQ ID NO: 2989051 - RNA, 16 nt, Human
gcccaggcaggucuug

SEQ ID NO: 2989052 - RNA, 14 nt, Human
gcccaggcaggucu

SEQ ID NO: 2989053 - RNA, 22 nt, Human
gccaugugcuaguaauuggaaa

SEQ ID NO: 2989054 - RNA, 14 nt, Human
gccaugugccaggu

SEQ ID NO: 2989055 - RNA, 17 nt, Human
gcccaggaguuuggcca

SEQ ID NO: 2989056 - RNA, 17 nt, Human
gcccaggccccugccac

SEQ ID NO: 2989057 - RNA, 15 nt, Human
gccccacccucagau

SEQ ID NO: 2989058 - RNA, 18 nt, Human
gccccacccucagaugca

SEQ ID NO: 2989059 - RNA, 22 nt, Human
gccccugcugguucaggguugg

SEQ ID NO: 2989060 - RNA, 21 nt, Human
gccccugcugguucaggguug

SEQ ID NO: 2989061 - RNA, 15 nt, Human
gccccugcccggcug

SEQ ID NO: 2989062 - RNA, 15 nt, Human
gccccuggaugcagc

SEQ ID NO: 2989063 - RNA, 20 nt, Human
gccagcaguucagagcugcc

SEQ ID NO: 2989064 - RNA, 19 nt, Human
gccagcaguucagagcugc

SEQ ID NO: 2989065 - RNA, 14 nt, Human
gccagcaguucaga

SEQ ID NO: 2989066 - RNA, 13 nt, Human
gccagcaguucag

SEQ ID NO: 2989067 - RNA, 21 nt, Human
gccaggccacaagacccuugu

SEQ ID NO: 2989068 - RNA, 15 nt, Human
gccaggccagaggga

SEQ ID NO: 2989069 - RNA, 22 nt, Human
gccaggccagagggagugacag

SEQ ID NO: 2989070 - RNA, 13 nt, Human
gccaggccacaag

SEQ ID NO: 2989071 - RNA, 18 nt, Human
gccaggccacaagacccu

SEQ ID NO: 2989072 - RNA, 13 nt, Human
gccaggcccucug

SEQ ID NO: 2989073 - RNA, 14 nt, Human
gccaggcccucugc

SEQ ID NO: 2989074 - RNA, 16 nt, Human
gccaguuggucccccu

SEQ ID NO: 2989075 - RNA, 18 nt, Human
gccaguuggucccccuuc

SEQ ID NO: 2989076 - RNA, 20 nt, Human
gccaguuggucccccuucca

SEQ ID NO: 2989077 - RNA, 21 nt, Human
gccaguuggucccccuuccau

SEQ ID NO: 2989078 - RNA, 22 nt, Human
gccaguuggucccccuuccaug

SEQ ID NO: 2989079 - RNA, 23 nt, Human
gccaguuggucccccuuccaugg

SEQ ID NO: 2989080 - RNA, 13 nt, Human
gccaguugguccc

SEQ ID NO: 2989081 - RNA, 22 nt, Human
gccaguuauggcuauaggugcu

SEQ ID NO: 2989082 - RNA, 13 nt, Human
gccagugugacaa

SEQ ID NO: 2989083 - RNA, 14 nt, Human
gcgauucuucugcu

SEQ ID NO: 2989084 - RNA, 20 nt, Human
gcgagccauuugucccaagu

SEQ ID NO: 2989085 - RNA, 24 nt, Human
gcgagccauuugucccaagugcca

SEQ ID NO: 2989086 - RNA, 13 nt, Human
gcgauucuucugc

SEQ ID NO: 2989087 - RNA, 17 nt, Human
gcguuucuaugacacau

SEQ ID NO: 2989088 - RNA, 16 nt, Human
gcuaauuuuucauuuu

SEQ ID NO: 2989089 - RNA, 18 nt, Human
gcuacaaaaacacagcaa

SEQ ID NO: 2989090 - RNA, 19 nt, Human
gcuacaaaaacacagcaag

SEQ ID NO: 2989091 - RNA, 17 nt, Human
gcuacaaaaacacagca

SEQ ID NO: 2989092 - RNA, 20 nt, Human
gcuacugccauccuggccca

SEQ ID NO: 2989093 - RNA, 18 nt, Human
gcuacugccauccuggcc

SEQ ID NO: 2989094 - RNA, 21 nt, Human
gcuacugccauccuggcccag

SEQ ID NO: 2989095 - RNA, 17 nt, Human
gcuacugccauccuggc

SEQ ID NO: 2989096 - RNA, 15 nt, Human
gcuacugucagcucc

SEQ ID NO: 2989097 - RNA, 20 nt, Human
gcuacuguccuacccacccu

SEQ ID NO: 2989098 - RNA, 19 nt, Human
gcuacuguccuacccaccc

SEQ ID NO: 2989099 - RNA, 17 nt, Human
gcuacuugggaggcuga

SEQ ID NO: 2989100 - RNA, 20 nt, Human
gcgugguggacaugcacagc

SEQ ID NO: 2989101 - RNA, 18 nt, Human
gcgugcacacaccagagc

SEQ ID NO: 2989102 - RNA, 14 nt, Human
gcgugcacacacca

SEQ ID NO: 2989103 - RNA, 17 nt, Human
gcggagcacacuggcuc

SEQ ID NO: 2989104 - RNA, 20 nt, Human
gccuccauccugaggcucca

SEQ ID NO: 2989105 - RNA, 16 nt, Human
gccuccauccugaggc

SEQ ID NO: 2989106 - RNA, 15 nt, Human
gccuccauccugagg

SEQ ID NO: 2989107 - RNA, 20 nt, Human
gccuccuuugugaggaagcc

SEQ ID NO: 2989108 - RNA, 21 nt, Human
gccuccuuugugaggaagccg

SEQ ID NO: 2989109 - RNA, 19 nt, Human
gccuccuuugugaggaagc

SEQ ID NO: 2989110 - RNA, 23 nt, Human
gccugcuaauuccccagauugca

SEQ ID NO: 2989111 - RNA, 17 nt, Human
gccugcuaauuccccag

SEQ ID NO: 2989112 - RNA, 13 nt, Human
gccugcuccagcu

SEQ ID NO: 2989113 - RNA, 15 nt, Human
gguacacuugugaau

SEQ ID NO: 2989114 - RNA, 13 nt, Human
gguaacaggcaga

SEQ ID NO: 2989115 - RNA, 20 nt, Human
gguaacaggcagauacagga

SEQ ID NO: 2989116 - RNA, 14 nt, Human
gguaacaggcagau

SEQ ID NO: 2989117 - RNA, 17 nt, Human
ggguuucuaaagcugcc

SEQ ID NO: 2989118 - RNA, 20 nt, Human
ggguggggaccucaggccug

SEQ ID NO: 2989119 - RNA, 19 nt, Human
gggugggacacccugugau

SEQ ID NO: 2989120 - RNA, 13 nt, Human
ggguggaugccug

SEQ ID NO: 2989121 - RNA, 15 nt, Human
ggguggcaccagcag

SEQ ID NO: 2989122 - RNA, 17 nt, Human
ggguggaugccuggugg

SEQ ID NO: 2989123 - RNA, 12 nt, Human
ggguggugaccu

SEQ ID NO: 2989124 - RNA, 17 nt, Human
ggguguggcgcagcaua

SEQ ID NO: 2989125 - RNA, 16 nt, Human
gguccacccaggagcc

SEQ ID NO: 2989126 - RNA, 15 nt, Human
gguccacccaggagc

SEQ ID NO: 2989127 - RNA, 13 nt, Human
gguccacccagga

SEQ ID NO: 2989128 - RNA, 12 nt, Human
gguccacccagg

SEQ ID NO: 2989129 - RNA, 17 nt, Human
gguccacccaggagccc

SEQ ID NO: 2989130 - RNA, 14 nt, Human
gguaugcaaucaaa

SEQ ID NO: 2989131 - RNA, 22 nt, Human
gguaugaucacggcucacugca

SEQ ID NO: 2989132 - RNA, 22 nt, Human
aaacuuuaccuuuuuuauacau

SEQ ID NO: 2989133 - RNA, 17 nt, Human
aaacuuuaccuuuuuua

SEQ ID NO: 2989134 - RNA, 15 nt, Human
gguccauagagagca

SEQ ID NO: 2989135 - RNA, 12 nt, Human
aaacuuuacuau

SEQ ID NO: 2989136 - RNA, 17 nt, Human
aaagaaguuugaacauu

SEQ ID NO: 2989137 - RNA, 17 nt, Human
aaagacuaucuaaaugu

SEQ ID NO: 2989138 - RNA, 14 nt, Human
aaagacuauucaaa

SEQ ID NO: 2989139 - RNA, 21 nt, Human
ggucuguuuuguguacuuuua

SEQ ID NO: 2989140 - RNA, 19 nt, Human
ggugcaaugaccuuucaau

SEQ ID NO: 2989141 - RNA, 20 nt, Human
ggugcaaugaccuuucaaua

SEQ ID NO: 2989142 - RNA, 18 nt, Human
ggugcaaugaccuuucaa

SEQ ID NO: 2989143 - RNA, 21 nt, Human
ggugcauuugaggucuguucu

SEQ ID NO: 2989144 - RNA, 16 nt, Human
ggugcaaugaccuuuc

SEQ ID NO: 2989145 - RNA, 17 nt, Human
aaagcagggacuugaac

SEQ ID NO: 2989146 - RNA, 15 nt, Human
aaagcagcguuucua

SEQ ID NO: 2989147 - RNA, 22 nt, Human
aaagcagcguuucuaugacaca

SEQ ID NO: 2989148 - RNA, 18 nt, Human
aaagcagcguuucuauga

SEQ ID NO: 2989149 - RNA, 16 nt, Human
aaagcagcguuucuau

SEQ ID NO: 2989150 - RNA, 14 nt, Human
gguggaugccuggu

SEQ ID NO: 2989151 - RNA, 21 nt, Human
gguggaugccugguggcagcu

SEQ ID NO: 2989152 - RNA, 14 nt, Human
gguccugcugcagu

SEQ ID NO: 2989153 - RNA, 13 nt, Human
ggucggaaaacau

SEQ ID NO: 2989154 - RNA, 17 nt, Human
ggucuacacugugcuga

SEQ ID NO: 2989155 - RNA, 14 nt, Human
ggucggaaaacaug

SEQ ID NO: 2989156 - RNA, 21 nt, Human
gguccugcugcaguugccagu

SEQ ID NO: 2989157 - RNA, 23 nt, Human
gguccugcugcaguugccaguca

SEQ ID NO: 2989158 - RNA, 23 nt, Human
gguccuagaaauuccccacccug

SEQ ID NO: 2989159 - RNA, 15 nt, Human
aaagacuauucaaac

SEQ ID NO: 2989160 - RNA, 13 nt, Human
aaagcaaaggaga

SEQ ID NO: 2989161 - RNA, 11 nt, Human
gguuuauuugg

SEQ ID NO: 2989162 - RNA, 16 nt, Human
gguuuagaaagcuugc

SEQ ID NO: 2989163 - RNA, 12 nt, Human
gguuucuagcau

SEQ ID NO: 2989164 - RNA, 14 nt, Human
gguuucagaaaugu

SEQ ID NO: 2989165 - RNA, 13 nt, Human
gguuucagaaaug

SEQ ID NO: 2989166 - RNA, 12 nt, Human
gguuucagaaau

SEQ ID NO: 2989167 - RNA, 21 nt, Human
ggugugcggccuuuggcuuca

SEQ ID NO: 2989168 - RNA, 13 nt, Human
ggugugcucugau

SEQ ID NO: 2989169 - RNA, 12 nt, Human
gguguggaagag

SEQ ID NO: 2989170 - RNA, 12 nt, Human
gguucagcuugu

SEQ ID NO: 2989171 - RNA, 21 nt, Human
gguucaggguuggccccugcc

SEQ ID NO: 2989172 - RNA, 18 nt, Human
gguucaggguuggccccu

SEQ ID NO: 2989173 - RNA, 22 nt, Human
gguucaggguuggccccugccc

SEQ ID NO: 2989174 - RNA, 21 nt, Human
gguucccuuugacgccauccc

SEQ ID NO: 2989175 - RNA, 18 nt, Human
gguggggcagugcuuggc

SEQ ID NO: 2989176 - RNA, 17 nt, Human
gguggggcagcuugagg

SEQ ID NO: 2989177 - RNA, 13 nt, Human
gguggggcagcuu

SEQ ID NO: 2989178 - RNA, 19 nt, Human
ggugggauccuccaggugc

SEQ ID NO: 2989179 - RNA, 14 nt, Human
ggugggauccucca

SEQ ID NO: 2989180 - RNA, 15 nt, Human
ggugggauccuccag

SEQ ID NO: 2989181 - RNA, 20 nt, Human
ggugggaggauugcuugagc

SEQ ID NO: 2989182 - RNA, 20 nt, Human
ggugggaggaucucuugagc

SEQ ID NO: 2989183 - RNA, 16 nt, Human
ggugugaccacugcag

SEQ ID NO: 2989184 - RNA, 16 nt, Human
ggugugacugaauuuc

SEQ ID NO: 2989185 - RNA, 18 nt, Human
ggugugagucaccaagcc

SEQ ID NO: 2989186 - RNA, 13 nt, Human
ggugucgggcaug

SEQ ID NO: 2989187 - RNA, 16 nt, Human
ggugucgggcaugaca

SEQ ID NO: 2989188 - RNA, 15 nt, Human
gguggggucacucug

SEQ ID NO: 2989189 - RNA, 23 nt, Human
gguggggucacucuggcagcuca

SEQ ID NO: 2989190 - RNA, 22 nt, Human
aaauaaggaaugauauaagguu

SEQ ID NO: 2989191 - RNA, 20 nt, Human
aaauaauuuuuauauuugaa

SEQ ID NO: 2989192 - RNA, 18 nt, Human
aaauaauuuuuauauuug

SEQ ID NO: 2989193 - RNA, 13 nt, Human
aaauaaugugaaa

SEQ ID NO: 2989194 - RNA, 15 nt, Human
aaauaauuuuuauau

SEQ ID NO: 2989195 - RNA, 12 nt, Human
aaauaaugugaa

SEQ ID NO: 2989196 - RNA, 17 nt, Human
aaauaagucugauuuaa

SEQ ID NO: 2989197 - RNA, 16 nt, Human
aaauaagucugauuua

SEQ ID NO: 2989198 - RNA, 14 nt, Human
aaauaagucugauu

SEQ ID NO: 2989199 - RNA, 12 nt, Human
aaauaagucuga

SEQ ID NO: 2989200 - RNA, 15 nt, Human
aaauaaucucugauu

SEQ ID NO: 2989201 - RNA, 15 nt, Human
aaaguugcaaggcaa

SEQ ID NO: 2989202 - RNA, 21 nt, Human
aaaguugcaaggcaaauguuu

SEQ ID NO: 2989203 - RNA, 14 nt, Human
aaaguugcaaggca

SEQ ID NO: 2989204 - RNA, 16 nt, Human
aaaguugaauuuuaca

SEQ ID NO: 2989205 - RNA, 23 nt, Human
aaaguuucucuuuucaaaacauu

SEQ ID NO: 2989206 - RNA, 21 nt, Human
aaaguuucucuuuucaaaaca

SEQ ID NO: 2989207 - RNA, 18 nt, Human
aaaguuuauaaaagugaa

SEQ ID NO: 2989208 - RNA, 13 nt, Human
gguuuggagcuga

SEQ ID NO: 2989209 - RNA, 20 nt, Human
gguuuggacaaaauggaaua

SEQ ID NO: 2989210 - RNA, 12 nt, Human
aaaguggugaga

SEQ ID NO: 2989211 - RNA, 15 nt, Human
gguuuggagcugauc

SEQ ID NO: 2989212 - RNA, 16 nt, Human
aaacagucucccuucc

SEQ ID NO: 2989213 - RNA, 20 nt, Human
aaacagucucaggaaaucaa

SEQ ID NO: 2989214 - RNA, 23 nt, Human
aaacauaucucuuaucuuacgaa

SEQ ID NO: 2989215 - RNA, 20 nt, Human
aaacaagcacuaaacaaaga

SEQ ID NO: 2989216 - RNA, 16 nt, Human
aaacacauuuuucuua

SEQ ID NO: 2989217 - RNA, 12 nt, Human
aaacacauuuuu

SEQ ID NO: 2989218 - RNA, 20 nt, Human
aaacaagaccacguuucuaa

SEQ ID NO: 2989219 - RNA, 18 nt, Human
aaacaagaccacguuucu

SEQ ID NO: 2989220 - RNA, 12 nt, Human
ggggccuggaug

SEQ ID NO: 2989221 - RNA, 15 nt, Human
ggggccucagugcca

SEQ ID NO: 2989222 - RNA, 20 nt, Human
ggggacagcuccuucugucc

SEQ ID NO: 2989223 - RNA, 14 nt, Human
ggggacagcuccuu

SEQ ID NO: 2989224 - RNA, 12 nt, Human
ggggacagcucc

SEQ ID NO: 2989225 - RNA, 22 nt, Human
aaaauuuuuucucuaggaaaua

SEQ ID NO: 2989226 - RNA, 15 nt, Human
aaaaugugauaugua

SEQ ID NO: 2989227 - RNA, 22 nt, Human
gggcuggguucuacccaggugc

SEQ ID NO: 2989228 - RNA, 20 nt, Human
gggcuggguucuacccaggu

SEQ ID NO: 2989229 - RNA, 18 nt, Human
gggcucagcaaaagaugc

SEQ ID NO: 2989230 - RNA, 22 nt, Human
gggcugcaccggcuggccuggc

SEQ ID NO: 2989231 - RNA, 10 nt, Human
gggcucagca

SEQ ID NO: 2989232 - RNA, 18 nt, Human
gggcugcaugcgggcuuc

SEQ ID NO: 2989233 - RNA, 21 nt, Human
gggcugcaugcgggcuuccuc

SEQ ID NO: 2989234 - RNA, 19 nt, Human
gggcccuuuuucaauaacu

SEQ ID NO: 2989235 - RNA, 14 nt, Human
gggccaguuggucc

SEQ ID NO: 2989236 - RNA, 18 nt, Human
gggccaguuggucccccu

SEQ ID NO: 2989237 - RNA, 22 nt, Human
gggccaguuggucccccuucca

SEQ ID NO: 2989238 - RNA, 23 nt, Human
gggccaguuggucccccuuccau

SEQ ID NO: 2989239 - RNA, 18 nt, Human
gggcuaguugggcuuccu

SEQ ID NO: 2989240 - RNA, 15 nt, Human
gggcuacaaggaccc

SEQ ID NO: 2989241 - RNA, 15 nt, Human
gggcgugguggugag

SEQ ID NO: 2989242 - RNA, 15 nt, Human
gggcgggaggauguu

SEQ ID NO: 2989243 - RNA, 13 nt, Human
gggccuccugugu

SEQ ID NO: 2989244 - RNA, 15 nt, Human
gggccuccugugugu

SEQ ID NO: 2989245 - RNA, 23 nt, Human
gggccucggaccccacuccggcc

SEQ ID NO: 2989246 - RNA, 20 nt, Human
gggccucuuaugggcugggu

SEQ ID NO: 2989247 - RNA, 19 nt, Human
gggccucuuaugggcuggg

SEQ ID NO: 2989248 - RNA, 19 nt, Human
aaaaguauguuagugcaaa

SEQ ID NO: 2989249 - RNA, 16 nt, Human
aaaaucuucauggaau

SEQ ID NO: 2989250 - RNA, 15 nt, Human
aaaaucuucauggaa

SEQ ID NO: 2989251 - RNA, 23 nt, Human
aaaaucuucauggaauucacaaa

SEQ ID NO: 2989252 - RNA, 17 nt, Human
aaaaucuucauggaauu

SEQ ID NO: 2989253 - RNA, 14 nt, Human
aaaaugagccuggc

SEQ ID NO: 2989254 - RNA, 21 nt, Human
aaaaugagccuggcaagaaug

SEQ ID NO: 2989255 - RNA, 11 nt, Human
gggccaggagc

SEQ ID NO: 2989256 - RNA, 22 nt, Human
aaaagggguaggguuuaaagau

SEQ ID NO: 2989257 - RNA, 17 nt, Human
gggcagagcagagacca

SEQ ID NO: 2989258 - RNA, 22 nt, Human
gggcagagcagagaccaucccu

SEQ ID NO: 2989259 - RNA, 14 nt, Human
gggcagaggaaagc

SEQ ID NO: 2989260 - RNA, 16 nt, Human
gggcagagcagagacc

SEQ ID NO: 2989261 - RNA, 12 nt, Human
gggcagagcaga

SEQ ID NO: 2989262 - RNA, 18 nt, Human
gggcaacccccagccugc

SEQ ID NO: 2989263 - RNA, 16 nt, Human
gggcaacccccagccu

SEQ ID NO: 2989264 - RNA, 16 nt, Human
gggauuguaaaauggu

SEQ ID NO: 2989265 - RNA, 17 nt, Human
gggauuguaaaauggug

SEQ ID NO: 2989266 - RNA, 13 nt, Human
gggauuggcugug

SEQ ID NO: 2989267 - RNA, 15 nt, Human
gggauuacaggugug

SEQ ID NO: 2989268 - RNA, 19 nt, Human
gggaggccaaggugggagg

SEQ ID NO: 2989269 - RNA, 17 nt, Human
gggaggucgaggcagga

SEQ ID NO: 2989270 - RNA, 18 nt, Human
gggagggcuccagacaca

SEQ ID NO: 2989271 - RNA, 18 nt, Human
gggaggucgaggcaggag

SEQ ID NO: 2989272 - RNA, 19 nt, Human
gggaggucgaggcaggagg

SEQ ID NO: 2989273 - RNA, 14 nt, Human
gggagggcuccaga

SEQ ID NO: 2989274 - RNA, 15 nt, Human
gggagggcuccagac

SEQ ID NO: 2989275 - RNA, 17 nt, Human
gggagggcuccagacac

SEQ ID NO: 2989276 - RNA, 15 nt, Human
gggaggucgaggcag

SEQ ID NO: 2989277 - RNA, 21 nt, Human
aaaaccaauguucucucuucu

SEQ ID NO: 2989278 - RNA, 12 nt, Human
aaaaccacagca

SEQ ID NO: 2989279 - RNA, 15 nt, Human
aaaacaugcuacaca

SEQ ID NO: 2989280 - RNA, 22 nt, Human
aaaaauggaacauaaaauacaa

SEQ ID NO: 2989281 - RNA, 14 nt, Human
aaaaaucucaaauu

SEQ ID NO: 2989282 - RNA, 13 nt, Human
aaaaccacagcag

SEQ ID NO: 2989283 - RNA, 13 nt, Human
aaaagaugcuucu

SEQ ID NO: 2989284 - RNA, 17 nt, Human
aaaagaugaaaauauuu

SEQ ID NO: 2989285 - RNA, 23 nt, Human
aaaacugcugacuguuuucucuu

SEQ ID NO: 2989286 - RNA, 20 nt, Human
aaaacugcugacuguuuucu

SEQ ID NO: 2989287 - RNA, 22 nt, Human
aaaacugcugacuguuuucucu

SEQ ID NO: 2989288 - RNA, 13 nt, Human
aaaacucauuuuu

SEQ ID NO: 2989289 - RNA, 21 nt, Human
gggacauuugcucauggaauu

SEQ ID NO: 2989290 - RNA, 20 nt, Human
gggacauuugcucauggaau

SEQ ID NO: 2989291 - RNA, 19 nt, Human
gggacauuugcucauggaa

SEQ ID NO: 2989292 - RNA, 21 nt, Human
gggacagcuccuucuguccua

SEQ ID NO: 2989293 - RNA, 13 nt, Human
gggacagaggggg

SEQ ID NO: 2989294 - RNA, 22 nt, Human
gggacagaggggguggccuccc

SEQ ID NO: 2989295 - RNA, 23 nt, Human
gggacagaggggguggccuccca

SEQ ID NO: 2989296 - RNA, 16 nt, Human
gggacagcuccuucug

SEQ ID NO: 2989297 - RNA, 13 nt, Human
gggaaggauacaa

SEQ ID NO: 2989298 - RNA, 14 nt, Human
ggaguuuggccaga

SEQ ID NO: 2989299 - RNA, 15 nt, Human
ggaguuuggccagaa

SEQ ID NO: 2989300 - RNA, 13 nt, Human
ggaguuuggccag

SEQ ID NO: 2989301 - RNA, 14 nt, Human
ggaguggccacaga

SEQ ID NO: 2989302 - RNA, 15 nt, Human
ggaguucugguuccu

SEQ ID NO: 2989303 - RNA, 19 nt, Human
ggaucuguauguguucuau

SEQ ID NO: 2989304 - RNA, 18 nt, Human
ggaucuguauguguucua

SEQ ID NO: 2989305 - RNA, 15 nt, Human
ggauccuccaggugc

SEQ ID NO: 2989306 - RNA, 14 nt, Human
ggauccuccaggug

SEQ ID NO: 2989307 - RNA, 13 nt, Human
ggauccugagcca

SEQ ID NO: 2989308 - RNA, 14 nt, Human
ggauccugagccag

SEQ ID NO: 2989309 - RNA, 18 nt, Human
ggauggauuuccagccaa

SEQ ID NO: 2989310 - RNA, 12 nt, Human
ggauggcaagau

SEQ ID NO: 2989311 - RNA, 16 nt, Human
ggauggggcugcaccg

SEQ ID NO: 2989312 - RNA, 15 nt, Human
ggagugcagugagcc

SEQ ID NO: 2989313 - RNA, 13 nt, Human
ggauguucuggga

SEQ ID NO: 2989314 - RNA, 16 nt, Human
ggauguucugggacac

SEQ ID NO: 2989315 - RNA, 15 nt, Human
ggauguucugggaca

SEQ ID NO: 2989316 - RNA, 24 nt, Human
ggcacagaaaauggaagacagcuc

SEQ ID NO: 2989317 - RNA, 22 nt, Human
ggagccccgaggccuucucuga

SEQ ID NO: 2989318 - RNA, 16 nt, Human
ggagccccgaggccuu

SEQ ID NO: 2989319 - RNA, 12 nt, Human
ggagcugccugu

SEQ ID NO: 2989320 - RNA, 22 nt, Human
ggagcugaucgcuucuccccca

SEQ ID NO: 2989321 - RNA, 21 nt, Human
ggagcugccuguucagcucca

SEQ ID NO: 2989322 - RNA, 20 nt, Human
ggaggccaaggugggaggau

SEQ ID NO: 2989323 - RNA, 11 nt, Human
ggaggccagcc

SEQ ID NO: 2989324 - RNA, 20 nt, Human
ggaggaaggaaacccagcuc

SEQ ID NO: 2989325 - RNA, 23 nt, Human
ggaggaaggaaacccagcucugg

SEQ ID NO: 2989326 - RNA, 19 nt, Human
ggaggaaggaaacccagcu

SEQ ID NO: 2989327 - RNA, 16 nt, Human
ggaggggggagguggg

SEQ ID NO: 2989328 - RNA, 14 nt, Human
ggagguaaugacca

SEQ ID NO: 2989329 - RNA, 20 nt, Human
ggaggucaaggcugcaguga

SEQ ID NO: 2989330 - RNA, 14 nt, Human
ggaggugaccccag

SEQ ID NO: 2989331 - RNA, 11 nt, Human
ggcccaggagu

SEQ ID NO: 2989332 - RNA, 13 nt, Human
ggcccaggaguuu

SEQ ID NO: 2989333 - RNA, 18 nt, Human
ggcccaggaguuuggcca

SEQ ID NO: 2989334 - RNA, 19 nt, Human
ggcccaggaguuuggccag

SEQ ID NO: 2989335 - RNA, 20 nt, Human
ggcccaggaguuuggccaga

SEQ ID NO: 2989336 - RNA, 18 nt, Human
ggccccaccagugccucu

SEQ ID NO: 2989337 - RNA, 17 nt, Human
ggccccaccagugccuc

SEQ ID NO: 2989338 - RNA, 19 nt, Human
ggcccaggguggccacacc

SEQ ID NO: 2989339 - RNA, 16 nt, Human
ggcccuucucuccagc

SEQ ID NO: 2989340 - RNA, 17 nt, Human
ggcccuucucuccagcc

SEQ ID NO: 2989341 - RNA, 14 nt, Human
ggcccuuccuuuuc

SEQ ID NO: 2989342 - RNA, 18 nt, Human
ggcccuucucuccagccc

SEQ ID NO: 2989343 - RNA, 14 nt, Human
ggccaggcuggucu

SEQ ID NO: 2989344 - RNA, 12 nt, Human
ggccaggcuggu

SEQ ID NO: 2989345 - RNA, 18 nt, Human
ggccaggcuggucucaaa

SEQ ID NO: 2989346 - RNA, 16 nt, Human
ggccaggcuggucuca

SEQ ID NO: 2989347 - RNA, 17 nt, Human
ggccaaacucaccugcc

SEQ ID NO: 2989348 - RNA, 16 nt, Human
ggccagugugacaagg

SEQ ID NO: 2989349 - RNA, 15 nt, Human
ggcaccagcagccug

SEQ ID NO: 2989350 - RNA, 16 nt, Human
ggcaccagcagccugg

SEQ ID NO: 2989351 - RNA, 22 nt, Human
ggcacugcuuccagugaggcuc

SEQ ID NO: 2989352 - RNA, 24 nt, Human
ggcacugcuuccagugaggcucug

SEQ ID NO: 2989353 - RNA, 23 nt, Human
ggcacuggcaaacagggccucug

SEQ ID NO: 2989354 - RNA, 22 nt, Human
ggcacuggcaaacagggccucu

SEQ ID NO: 2989355 - RNA, 17 nt, Human
ggcagugggagcugccu

SEQ ID NO: 2989356 - RNA, 18 nt, Human
ggcauccaguaucuugaa

SEQ ID NO: 2989357 - RNA, 19 nt, Human
ggcagugggagcugccugu

SEQ ID NO: 2989358 - RNA, 18 nt, Human
ggcagugggagcugccug

SEQ ID NO: 2989359 - RNA, 22 nt, Human
ggccuucggccuccauccugag

SEQ ID NO: 2989360 - RNA, 23 nt, Human
ggccuucggccuccauccugagg

SEQ ID NO: 2989361 - RNA, 12 nt, Human
ggccuucucuga

SEQ ID NO: 2989362 - RNA, 21 nt, Human
ggccugugucuaguuguuuga

SEQ ID NO: 2989363 - RNA, 21 nt, Human
ggccuggccagaugcaccagc

SEQ ID NO: 2989364 - RNA, 13 nt, Human
ggccuuuggcuuc

SEQ ID NO: 2989365 - RNA, 16 nt, Human
ggccuucucugaagga

SEQ ID NO: 2989366 - RNA, 15 nt, Human
ggccuucucugaagg

SEQ ID NO: 2989367 - RNA, 14 nt, Human
ggccuuuggcuuca

SEQ ID NO: 2989368 - RNA, 15 nt, Human
ggccugagcugggau

SEQ ID NO: 2989369 - RNA, 12 nt, Human
ggccugagcugg

SEQ ID NO: 2989370 - RNA, 23 nt, Human
ggcucagcaaaagaugcuucuca

SEQ ID NO: 2989371 - RNA, 19 nt, Human
ggcucagcaaaagaugcuu

SEQ ID NO: 2989372 - RNA, 23 nt, Human
ggcucagcggggacagcuccuuc

SEQ ID NO: 2989373 - RNA, 22 nt, Human
ggcucagcggggacagcuccuu

SEQ ID NO: 2989374 - RNA, 21 nt, Human
ggcucagcggggacagcuccu

SEQ ID NO: 2989375 - RNA, 17 nt, Human
ggcucacugcagccuca

SEQ ID NO: 2989376 - RNA, 16 nt, Human
ggcucacugcagccuc

SEQ ID NO: 2989377 - RNA, 14 nt, Human
ggcgugcaguggug

SEQ ID NO: 2989378 - RNA, 19 nt, Human
ggcgugcaguggugcgauc

SEQ ID NO: 2989379 - RNA, 21 nt, Human
caguaaaaaaugguguuuuau

SEQ ID NO: 2989380 - RNA, 18 nt, Human
caguaaaugggggugcau

SEQ ID NO: 2989381 - RNA, 19 nt, Human
caguaaaugggggugcauu

SEQ ID NO: 2989382 - RNA, 19 nt, Human
caguauuacuucugcuaca

SEQ ID NO: 2989383 - RNA, 16 nt, Human
cagucaccccggccac

SEQ ID NO: 2989384 - RNA, 17 nt, Human
cagucaccccggccacc

SEQ ID NO: 2989385 - RNA, 14 nt, Human
cagucaccccggcc

SEQ ID NO: 2989386 - RNA, 20 nt, Human
caguaaaaaaugguguuuua

SEQ ID NO: 2989387 - RNA, 23 nt, Human
cagguuuuuggucugacccacug

SEQ ID NO: 2989388 - RNA, 21 nt, Human
caggguuggccccugcccggc

SEQ ID NO: 2989389 - RNA, 17 nt, Human
caggguuggccccugcc

SEQ ID NO: 2989390 - RNA, 14 nt, Human
caggguuggccccu

SEQ ID NO: 2989391 - RNA, 22 nt, Human
caggguggccacaccucuaucc

SEQ ID NO: 2989392 - RNA, 14 nt, Human
caggugcugccauc

SEQ ID NO: 2989393 - RNA, 13 nt, Human
caggugcugccau

SEQ ID NO: 2989394 - RNA, 23 nt, Human
cagggucucacucugucgcccag

SEQ ID NO: 2989395 - RNA, 22 nt, Human
cagggucucacucugucgccca

SEQ ID NO: 2989396 - RNA, 21 nt, Human
cagggucucuaccauccccug

SEQ ID NO: 2989397 - RNA, 16 nt, Human
caggguuggccccugc

SEQ ID NO: 2989398 - RNA, 15 nt, Human
caggguuggccccug

SEQ ID NO: 2989399 - RNA, 14 nt, Human
caggguggccacac

SEQ ID NO: 2989400 - RNA, 19 nt, Human
cagggaggacgcucucugg

SEQ ID NO: 2989401 - RNA, 22 nt, Human
cagggaggacgcucucuggccu

SEQ ID NO: 2989402 - RNA, 14 nt, Human
caggcugggcuuca

SEQ ID NO: 2989403 - RNA, 16 nt, Human
cagggagggcuucugc

SEQ ID NO: 2989404 - RNA, 20 nt, Human
cagggcucagcggggacagc

SEQ ID NO: 2989405 - RNA, 15 nt, Human
cagggcucagcgggg

SEQ ID NO: 2989406 - RNA, 12 nt, Human
cagggcucagcg

SEQ ID NO: 2989407 - RNA, 20 nt, Human
caggccugggggcugggcag

SEQ ID NO: 2989408 - RNA, 22 nt, Human
caggccugggggcugggcagag

SEQ ID NO: 2989409 - RNA, 19 nt, Human
caggcuggcgugcaguggu

SEQ ID NO: 2989410 - RNA, 18 nt, Human
caggcuggcgugcagugg

SEQ ID NO: 2989411 - RNA, 23 nt, Human
caggccugggggcugggcagagg

SEQ ID NO: 2989412 - RNA, 17 nt, Human
caggcuggcgugcagug

SEQ ID NO: 2989413 - RNA, 16 nt, Human
caggcugggagagccu

SEQ ID NO: 2989414 - RNA, 18 nt, Human
caggcugggagagccuuc

SEQ ID NO: 2989415 - RNA, 19 nt, Human
caggcugggagagccuucc

SEQ ID NO: 2989416 - RNA, 15 nt, Human
caggcuggcgugcag

SEQ ID NO: 2989417 - RNA, 24 nt, Human
caggacagcccuucuuuccacaga

SEQ ID NO: 2989418 - RNA, 23 nt, Human
caggacagcccuucuuuccacag

SEQ ID NO: 2989419 - RNA, 13 nt, Human
caggaccagggau

SEQ ID NO: 2989420 - RNA, 13 nt, Human
caggaccucaggu

SEQ ID NO: 2989421 - RNA, 13 nt, Human
caggccaggcccu

SEQ ID NO: 2989422 - RNA, 14 nt, Human
caggccaggcccuc

SEQ ID NO: 2989423 - RNA, 15 nt, Human
caggccaggcccucu

SEQ ID NO: 2989424 - RNA, 16 nt, Human
caggccaggcccucug

SEQ ID NO: 2989425 - RNA, 12 nt, Human
caggaggccagc

SEQ ID NO: 2989426 - RNA, 13 nt, Human
caggaggccagcc

SEQ ID NO: 2989427 - RNA, 20 nt, Human
caggcaaugcuggcuguugg

SEQ ID NO: 2989428 - RNA, 19 nt, Human
caggcaaugcuggcuguug

SEQ ID NO: 2989429 - RNA, 21 nt, Human
caggcaaugcuggcuguuggc

SEQ ID NO: 2989430 - RNA, 17 nt, Human
caggcaaugcuggcugu

SEQ ID NO: 2989431 - RNA, 13 nt, Human
caggccagcugcu

SEQ ID NO: 2989432 - RNA, 15 nt, Human
caggccagcugcuug

SEQ ID NO: 2989433 - RNA, 21 nt, Human
caggaaaucaaauaugcaaag

SEQ ID NO: 2989434 - RNA, 19 nt, Human
caggaaaucaaauaugcaa

SEQ ID NO: 2989435 - RNA, 16 nt, Human
cagcuguucagcuggu

SEQ ID NO: 2989436 - RNA, 15 nt, Human
cagcuguucagcugg

SEQ ID NO: 2989437 - RNA, 16 nt, Human
cagcuuauucacaaga

SEQ ID NO: 2989438 - RNA, 20 nt, Human
caggaaaagcugcugacagu

SEQ ID NO: 2989439 - RNA, 19 nt, Human
caggaaaagcugcugacag

SEQ ID NO: 2989440 - RNA, 21 nt, Human
caggaaaggcuccaggagcag

SEQ ID NO: 2989441 - RNA, 22 nt, Human
caggaaaggcuccaggagcagc

SEQ ID NO: 2989442 - RNA, 23 nt, Human
caggaaaggcuccaggagcagcc

SEQ ID NO: 2989443 - RNA, 23 nt, Human
cagccugagcgacagugagacuc

SEQ ID NO: 2989444 - RNA, 22 nt, Human
cagccugagcgacagugagacu

SEQ ID NO: 2989445 - RNA, 13 nt, Human
cagcccuuagcag

SEQ ID NO: 2989446 - RNA, 23 nt, Human
cagccgccaugcuccuggcccac

SEQ ID NO: 2989447 - RNA, 14 nt, Human
cagcguuucuauga

SEQ ID NO: 2989448 - RNA, 16 nt, Human
cagcguuucuaugaca

SEQ ID NO: 2989449 - RNA, 19 nt, Human
cagccccgugggguuccuc

SEQ ID NO: 2989450 - RNA, 22 nt, Human
cagccccauucugccugcccag

SEQ ID NO: 2989451 - RNA, 20 nt, Human
cagccccauucugccugccc

SEQ ID NO: 2989452 - RNA, 19 nt, Human
cagccccauucugccugcc

SEQ ID NO: 2989453 - RNA, 24 nt, Human
cagccccauucugccugcccaggc

SEQ ID NO: 2989454 - RNA, 23 nt, Human
cagccccauucugccugcccagg

SEQ ID NO: 2989455 - RNA, 20 nt, Human
cagcaguucagagcugcccu

SEQ ID NO: 2989456 - RNA, 19 nt, Human
cagcaguucagagcugccc

SEQ ID NO: 2989457 - RNA, 18 nt, Human
cagcaguucagagcugcc

SEQ ID NO: 2989458 - RNA, 22 nt, Human
cagcaguucagagcugcccucu

SEQ ID NO: 2989459 - RNA, 21 nt, Human
cagcaguucagagcugcccuc

SEQ ID NO: 2989460 - RNA, 17 nt, Human
cagcauagaaguaacuu

SEQ ID NO: 2989461 - RNA, 16 nt, Human
cagcauauucaggaag

SEQ ID NO: 2989462 - RNA, 17 nt, Human
cagcauauucaggaagc

SEQ ID NO: 2989463 - RNA, 18 nt, Human
cagcauauucaggaagcu

SEQ ID NO: 2989464 - RNA, 20 nt, Human
cagccagacuggcacaguuu

SEQ ID NO: 2989465 - RNA, 15 nt, Human
cagauuucacucucc

SEQ ID NO: 2989466 - RNA, 16 nt, Human
cagauuucacucuccu

SEQ ID NO: 2989467 - RNA, 19 nt, Human
cagauuugaacucuucaau

SEQ ID NO: 2989468 - RNA, 18 nt, Human
cagauuucacucuccuug

SEQ ID NO: 2989469 - RNA, 13 nt, Human
cagauuucacucu

SEQ ID NO: 2989470 - RNA, 21 nt, Human
cagauugcaacaggcugggcu

SEQ ID NO: 2989471 - RNA, 17 nt, Human
cagagcuacacagggga

SEQ ID NO: 2989472 - RNA, 22 nt, Human
cagagcuacacaggggaaaaga

SEQ ID NO: 2989473 - RNA, 23 nt, Human
cagagcugcccucuccugggcag

SEQ ID NO: 2989474 - RNA, 20 nt, Human
cagagagggugggagugggc

SEQ ID NO: 2989475 - RNA, 22 nt, Human
cagagagggugggagugggccc

SEQ ID NO: 2989476 - RNA, 14 nt, Human
cagagccugcaguu

SEQ ID NO: 2989477 - RNA, 16 nt, Human
cagagagggugggagu

SEQ ID NO: 2989478 - RNA, 13 nt, Human
cagagaggguggg

SEQ ID NO: 2989479 - RNA, 20 nt, Human
cagagacuccugcaggcagc

SEQ ID NO: 2989480 - RNA, 21 nt, Human
cagagacuccugcaggcagcc

SEQ ID NO: 2989481 - RNA, 22 nt, Human
cagagacuccugcaggcagcca

SEQ ID NO: 2989482 - RNA, 23 nt, Human
cagauacaggaaaagcugcugac

SEQ ID NO: 2989483 - RNA, 14 nt, Human
cauuucaagaaguc

SEQ ID NO: 2989484 - RNA, 16 nt, Human
cauuuauucugcucac

SEQ ID NO: 2989485 - RNA, 17 nt, Human
ccaaaaaaugcuugcuu

SEQ ID NO: 2989486 - RNA, 17 nt, Human
ccaaaacucuccucugc

SEQ ID NO: 2989487 - RNA, 23 nt, Human
cauuuuucuuagggaaggauaca

SEQ ID NO: 2989488 - RNA, 23 nt, Human
cauuuggugguuucagaaaugug

SEQ ID NO: 2989489 - RNA, 22 nt, Human
cauuuggugguuucagaaaugu

SEQ ID NO: 2989490 - RNA, 21 nt, Human
cauuuggugguuucagaaaug

SEQ ID NO: 2989491 - RNA, 21 nt, Human
cauugcggacagccacggcca

SEQ ID NO: 2989492 - RNA, 17 nt, Human
cauugcggacagccacg

SEQ ID NO: 2989493 - RNA, 15 nt, Human
cauugcggacagcca

SEQ ID NO: 2989494 - RNA, 14 nt, Human
cauugcggacagcc

SEQ ID NO: 2989495 - RNA, 18 nt, Human
cauugcugggcuugucug

SEQ ID NO: 2989496 - RNA, 17 nt, Human
cauuaucuagauacugu

SEQ ID NO: 2989497 - RNA, 16 nt, Human
cauuaucuagauacug

SEQ ID NO: 2989498 - RNA, 12 nt, Human
cauuaucuagau

SEQ ID NO: 2989499 - RNA, 15 nt, Human
cauuaggauggcuag

SEQ ID NO: 2989500 - RNA, 15 nt, Human
cauguucucugagga

SEQ ID NO: 2989501 - RNA, 17 nt, Human
cauggcugccaauggga

SEQ ID NO: 2989502 - RNA, 22 nt, Human
cauggcuggagcuagaauuuga

SEQ ID NO: 2989503 - RNA, 22 nt, Human
cauggcugccaaugggagcuca

SEQ ID NO: 2989504 - RNA, 22 nt, Human
cauggccucuucagaucucuaa

SEQ ID NO: 2989505 - RNA, 16 nt, Human
cauucuccuuguguua

SEQ ID NO: 2989506 - RNA, 18 nt, Human
cauuaucuagauacugua

SEQ ID NO: 2989507 - RNA, 18 nt, Human
ccaaauguucaucaauga

SEQ ID NO: 2989508 - RNA, 12 nt, Human
ccaaauuaagag

SEQ ID NO: 2989509 - RNA, 16 nt, Human
ccaaaucauaguggcu

SEQ ID NO: 2989510 - RNA, 16 nt, Human
ccaacgucugugccau

SEQ ID NO: 2989511 - RNA, 14 nt, Human
ccaaagugcuggga

SEQ ID NO: 2989512 - RNA, 20 nt, Human
ccaaugcacuuuguucuggc

SEQ ID NO: 2989513 - RNA, 22 nt, Human
ccaaugcacuuuguucuggcuc

SEQ ID NO: 2989514 - RNA, 23 nt, Human
ccaaugcacuuuguucuggcucu

SEQ ID NO: 2989515 - RNA, 20 nt, Human
ccaagcuggucccacucagu

SEQ ID NO: 2989516 - RNA, 20 nt, Human
ccaauguucucucuucucca

SEQ ID NO: 2989517 - RNA, 14 nt, Human
ccaccgcagacagg

SEQ ID NO: 2989518 - RNA, 17 nt, Human
ccaccgcagacaggacc

SEQ ID NO: 2989519 - RNA, 20 nt, Human
ccaccaucaagccaccaaca

SEQ ID NO: 2989520 - RNA, 13 nt, Human
ccacccugcucuc

SEQ ID NO: 2989521 - RNA, 18 nt, Human
ccaccgcagacaggacca

SEQ ID NO: 2989522 - RNA, 13 nt, Human
ccaccgcagacag

SEQ ID NO: 2989523 - RNA, 15 nt, Human
ccaccuuggcucaag

SEQ ID NO: 2989524 - RNA, 14 nt, Human
ccaccuuggcucaa

SEQ ID NO: 2989525 - RNA, 13 nt, Human
ccaccuuggcuca

SEQ ID NO: 2989526 - RNA, 16 nt, Human
ccaccaucaagccacc

SEQ ID NO: 2989527 - RNA, 17 nt, Human
ccaccaucaagccacca

SEQ ID NO: 2989528 - RNA, 14 nt, Human
caguuugcagagua

SEQ ID NO: 2989529 - RNA, 21 nt, Human
caguuugguugguaacucugu

SEQ ID NO: 2989530 - RNA, 11 nt, Human
caguuugguug

SEQ ID NO: 2989531 - RNA, 17 nt, Human
cauaaugcgugcauacc

SEQ ID NO: 2989532 - RNA, 14 nt, Human
cauaaugcgugcau

SEQ ID NO: 2989533 - RNA, 20 nt, Human
cauagcagcuuauucacaag

SEQ ID NO: 2989534 - RNA, 17 nt, Human
cauagauucccugagca

SEQ ID NO: 2989535 - RNA, 18 nt, Human
cauagauucccugagcag

SEQ ID NO: 2989536 - RNA, 15 nt, Human
cauacaauuccaaac

SEQ ID NO: 2989537 - RNA, 13 nt, Human
cauacaaggccca

SEQ ID NO: 2989538 - RNA, 21 nt, Human
cauaaugcgugcauaccacuu

SEQ ID NO: 2989539 - RNA, 16 nt, Human
cauauuaccacagaca

SEQ ID NO: 2989540 - RNA, 17 nt, Human
cauauuaccacagacau

SEQ ID NO: 2989541 - RNA, 21 nt, Human
cauauuaccacagacauacua

SEQ ID NO: 2989542 - RNA, 20 nt, Human
cauauuaccacagacauacu

SEQ ID NO: 2989543 - RNA, 18 nt, Human
cagucaccccggccaccu

SEQ ID NO: 2989544 - RNA, 15 nt, Human
caugcugccaauauc

SEQ ID NO: 2989545 - RNA, 17 nt, Human
caugcugccaauauccu

SEQ ID NO: 2989546 - RNA, 19 nt, Human
caugcugccaauauccuaa

SEQ ID NO: 2989547 - RNA, 21 nt, Human
caugcugccaauauccuaaua

SEQ ID NO: 2989548 - RNA, 16 nt, Human
caugcugcccugugag

SEQ ID NO: 2989549 - RNA, 18 nt, Human
caugcugcccugugagua

SEQ ID NO: 2989550 - RNA, 22 nt, Human
caugcugccaauauccuaauaa

SEQ ID NO: 2989551 - RNA, 19 nt, Human
cauggccuuugcuugaaag

SEQ ID NO: 2989552 - RNA, 22 nt, Human
cauggccuuugcuugaaagaaa

SEQ ID NO: 2989553 - RNA, 18 nt, Human
caugcaaggucauuuuuu

SEQ ID NO: 2989554 - RNA, 17 nt, Human
caugcaaggucauuuuu

SEQ ID NO: 2989555 - RNA, 22 nt, Human
caugcaaggucauuuuuuuuaa

SEQ ID NO: 2989556 - RNA, 16 nt, Human
caugaauuaguuuuau

SEQ ID NO: 2989557 - RNA, 14 nt, Human
caugacacgaauau

SEQ ID NO: 2989558 - RNA, 17 nt, Human
caugacacgaauauugc

SEQ ID NO: 2989559 - RNA, 18 nt, Human
caugacacgaauauugcu

SEQ ID NO: 2989560 - RNA, 17 nt, Human
caucagcugcugaaaca

SEQ ID NO: 2989561 - RNA, 18 nt, Human
caucagcugcugaaacaa

SEQ ID NO: 2989562 - RNA, 15 nt, Human
caucagcugcugaaa

SEQ ID NO: 2989563 - RNA, 13 nt, Human
caucagcugcuga

SEQ ID NO: 2989564 - RNA, 20 nt, Human
caucagcuugcccuguuaaa

SEQ ID NO: 2989565 - RNA, 13 nt, Human
caucaggccaggc

SEQ ID NO: 2989566 - RNA, 18 nt, Human
caucagcacgauuucugu

SEQ ID NO: 2989567 - RNA, 17 nt, Human
caucagcacgauuucug

SEQ ID NO: 2989568 - RNA, 20 nt, Human
caucaggccaggcccucugc

SEQ ID NO: 2989569 - RNA, 21 nt, Human
caucaggccaggcccucugcc

SEQ ID NO: 2989570 - RNA, 22 nt, Human
caucaggccaggcccucugccc

SEQ ID NO: 2989571 - RNA, 23 nt, Human
caucaggccaggcccucugccca

SEQ ID NO: 2989572 - RNA, 12 nt, Human
caucccagcccc

SEQ ID NO: 2989573 - RNA, 16 nt, Human
caucccagccccaaug

SEQ ID NO: 2989574 - RNA, 14 nt, Human
caucccagccccaa

SEQ ID NO: 2989575 - RNA, 13 nt, Human
caucccagcccca

SEQ ID NO: 2989576 - RNA, 19 nt, Human
cauccuggcccagggcauc

SEQ ID NO: 2989577 - RNA, 18 nt, Human
cauccuggcccagggcau

SEQ ID NO: 2989578 - RNA, 16 nt, Human
cauccuggcccagggc

SEQ ID NO: 2989579 - RNA, 15 nt, Human
cauccuggcccaggg

SEQ ID NO: 2989580 - RNA, 23 nt, Human
cauccuggcacccggccccugcu

SEQ ID NO: 2989581 - RNA, 18 nt, Human
caucugugaaaggaaaga

SEQ ID NO: 2989582 - RNA, 19 nt, Human
caucugugaaaggaaagag

SEQ ID NO: 2989583 - RNA, 21 nt, Human
caucuuagguuggcaaaaagg

SEQ ID NO: 2989584 - RNA, 15 nt, Human
caucuuaaaaacaac

SEQ ID NO: 2989585 - RNA, 22 nt, Human
caucuuagguuggcaaaaaggc

SEQ ID NO: 2989586 - RNA, 14 nt, Human
cacugguuugguuc

SEQ ID NO: 2989587 - RNA, 22 nt, Human
cacugguucuucuuggucucag

SEQ ID NO: 2989588 - RNA, 18 nt, Human
cacuuacacuuuaugcac

SEQ ID NO: 2989589 - RNA, 16 nt, Human
cacuuacacuuuaugc

SEQ ID NO: 2989590 - RNA, 19 nt, Human
cacuuguguuuugcaagcc

SEQ ID NO: 2989591 - RNA, 16 nt, Human
cacuugucaauaaaau

SEQ ID NO: 2989592 - RNA, 22 nt, Human
cacuuguguuuugcaagccaga

SEQ ID NO: 2989593 - RNA, 17 nt, Human
cacuuguguuuugcaag

SEQ ID NO: 2989594 - RNA, 21 nt, Human
cacugcagaagacaguauggc

SEQ ID NO: 2989595 - RNA, 12 nt, Human
cacugcagccuc

SEQ ID NO: 2989596 - RNA, 20 nt, Human
cacugcacuccagccugggu

SEQ ID NO: 2989597 - RNA, 19 nt, Human
cacugcacuccagccuggg

SEQ ID NO: 2989598 - RNA, 18 nt, Human
cacugcacuccagccugg

SEQ ID NO: 2989599 - RNA, 15 nt, Human
cacugcacuccagcc

SEQ ID NO: 2989600 - RNA, 16 nt, Human
cacugcacuccagccu

SEQ ID NO: 2989601 - RNA, 19 nt, Human
cacugcacuauagccuagg

SEQ ID NO: 2989602 - RNA, 16 nt, Human
cacugcauguuuguga

SEQ ID NO: 2989603 - RNA, 13 nt, Human
cacugcagccuca

SEQ ID NO: 2989604 - RNA, 20 nt, Human
cacuagggcagggacaggau

SEQ ID NO: 2989605 - RNA, 21 nt, Human
cacuagggcagggacaggaua

SEQ ID NO: 2989606 - RNA, 16 nt, Human
cacuccagccugggug

SEQ ID NO: 2989607 - RNA, 23 nt, Human
cacuccaauaggugcugagugua

SEQ ID NO: 2989608 - RNA, 14 nt, Human
cacuccccugcugg

SEQ ID NO: 2989609 - RNA, 12 nt, Human
cacuccccugcu

SEQ ID NO: 2989610 - RNA, 13 nt, Human
cacuccccugcug

SEQ ID NO: 2989611 - RNA, 11 nt, Human
caccccagccc

SEQ ID NO: 2989612 - RNA, 16 nt, Human
caccccagcaauuaug

SEQ ID NO: 2989613 - RNA, 14 nt, Human
cacccucaggcagg

SEQ ID NO: 2989614 - RNA, 16 nt, Human
cacccuggggagaaag

SEQ ID NO: 2989615 - RNA, 15 nt, Human
cacccuggggagaaa

SEQ ID NO: 2989616 - RNA, 17 nt, Human
cacccugaaagcccuga

SEQ ID NO: 2989617 - RNA, 15 nt, Human
caccugccccucaac

SEQ ID NO: 2989618 - RNA, 16 nt, Human
caccugccccucaacu

SEQ ID NO: 2989619 - RNA, 14 nt, Human
caccugccccucaa

SEQ ID NO: 2989620 - RNA, 13 nt, Human
caccucagccucc

SEQ ID NO: 2989621 - RNA, 12 nt, Human
caccucagccuc

SEQ ID NO: 2989622 - RNA, 14 nt, Human
caccucagccuccc

SEQ ID NO: 2989623 - RNA, 13 nt, Human
caccuuggcugca

SEQ ID NO: 2989624 - RNA, 15 nt, Human
caccuuggcucaagu

SEQ ID NO: 2989625 - RNA, 14 nt, Human
caccuuggcucaag

SEQ ID NO: 2989626 - RNA, 14 nt, Human
caccuuggcugcag

SEQ ID NO: 2989627 - RNA, 19 nt, Human
caccugccuguugggccag

SEQ ID NO: 2989628 - RNA, 24 nt, Human
caccugccuguugggccaggagcc

SEQ ID NO: 2989629 - RNA, 17 nt, Human
caccugccuguugggcc

SEQ ID NO: 2989630 - RNA, 17 nt, Human
cacagccucuuagaugc

SEQ ID NO: 2989631 - RNA, 21 nt, Human
cacagccucuuagaugcaguu

SEQ ID NO: 2989632 - RNA, 17 nt, Human
cacaggggaaaagagga

SEQ ID NO: 2989633 - RNA, 18 nt, Human
cacaggggaaaagaggag

SEQ ID NO: 2989634 - RNA, 19 nt, Human
cacaggggaaaagaggagu

SEQ ID NO: 2989635 - RNA, 21 nt, Human
cacaguauuacuucugcuaca

SEQ ID NO: 2989636 - RNA, 20 nt, Human
cacaguauuacuucugcuac

SEQ ID NO: 2989637 - RNA, 20 nt, Human
cacacaugagcaucaggcca

SEQ ID NO: 2989638 - RNA, 22 nt, Human
cacacaugaaguccaagcauuu

SEQ ID NO: 2989639 - RNA, 17 nt, Human
cacacaugaaguccaag

SEQ ID NO: 2989640 - RNA, 23 nt, Human
cacacagugagucgaggacaggg

SEQ ID NO: 2989641 - RNA, 21 nt, Human
cacacagugagucgaggacag

SEQ ID NO: 2989642 - RNA, 15 nt, Human
cacacauacacacac

SEQ ID NO: 2989643 - RNA, 16 nt, Human
cacacagcucuguccu

SEQ ID NO: 2989644 - RNA, 23 nt, Human
cacacaguauuacuucugcuaca

SEQ ID NO: 2989645 - RNA, 20 nt, Human
cacacaguauuacuucugcu

SEQ ID NO: 2989646 - RNA, 18 nt, Human
cacacagugagucgagga

SEQ ID NO: 2989647 - RNA, 18 nt, Human
cacagaaaauggaagaca

SEQ ID NO: 2989648 - RNA, 19 nt, Human
cacagaaaauggaagacag

SEQ ID NO: 2989649 - RNA, 20 nt, Human
cacagaaaauggaagacagc

SEQ ID NO: 2989650 - RNA, 22 nt, Human
cacagaaaauggaagacagcuc

SEQ ID NO: 2989651 - RNA, 21 nt, Human
cacacaugagcaucaggccag

SEQ ID NO: 2989652 - RNA, 22 nt, Human
cacacaugagcaucaggccagg

SEQ ID NO: 2989653 - RNA, 23 nt, Human
cacagaaaauggaagacagcucu

SEQ ID NO: 2989654 - RNA, 19 nt, Human
cacagaaaauucuucucca

SEQ ID NO: 2989655 - RNA, 18 nt, Human
cacagacauacuaaccag

SEQ ID NO: 2989656 - RNA, 21 nt, Human
cacagacauacuaaccagcag

SEQ ID NO: 2989657 - RNA, 19 nt, Human
cacagacauacuaaccagc

SEQ ID NO: 2989658 - RNA, 13 nt, Human
cacagacccugcc

SEQ ID NO: 2989659 - RNA, 11 nt, Human
cacagccucug

SEQ ID NO: 2989660 - RNA, 17 nt, Human
cacaagcugcacccuca

SEQ ID NO: 2989661 - RNA, 23 nt, Human
cacaagcugcacccucaggcagg

SEQ ID NO: 2989662 - RNA, 17 nt, Human
cacaagcuccaagcucc

SEQ ID NO: 2989663 - RNA, 23 nt, Human
cacaagcuccaagcucccaggca

SEQ ID NO: 2989664 - RNA, 16 nt, Human
cacaagagcccaggcc

SEQ ID NO: 2989665 - RNA, 13 nt, Human
cacaagcuccaag

SEQ ID NO: 2989666 - RNA, 14 nt, Human
cacaagcuccaagc

SEQ ID NO: 2989667 - RNA, 15 nt, Human
cacaagcuccaagcu

SEQ ID NO: 2989668 - RNA, 18 nt, Human
cacaagacugcacaucaa

SEQ ID NO: 2989669 - RNA, 14 nt, Human
cacaagagcccagg

SEQ ID NO: 2989670 - RNA, 15 nt, Human
caaugcuguauuuua

SEQ ID NO: 2989671 - RNA, 17 nt, Human
caaugcuguauuuuaaa

SEQ ID NO: 2989672 - RNA, 16 nt, Human
caaugcuguauuuuaa

SEQ ID NO: 2989673 - RNA, 15 nt, Human
caauucuugccaaau

SEQ ID NO: 2989674 - RNA, 12 nt, Human
caauggcagccu

SEQ ID NO: 2989675 - RNA, 11 nt, Human
caauggcagcc

SEQ ID NO: 2989676 - RNA, 20 nt, Human
cacacagcucuguccuggga

SEQ ID NO: 2989677 - RNA, 17 nt, Human
cacacagcucuguccug

SEQ ID NO: 2989678 - RNA, 14 nt, Human
caaguccaagcaua

SEQ ID NO: 2989679 - RNA, 13 nt, Human
caagucaagugaa

SEQ ID NO: 2989680 - RNA, 17 nt, Human
caagucaagugaaaaag

SEQ ID NO: 2989681 - RNA, 19 nt, Human
caaguauagaaaaucuuca

SEQ ID NO: 2989682 - RNA, 15 nt, Human
caaguauagaaaauc

SEQ ID NO: 2989683 - RNA, 15 nt, Human
caaggccaaaggaag

SEQ ID NO: 2989684 - RNA, 16 nt, Human
caaggccaaaggaagc

SEQ ID NO: 2989685 - RNA, 17 nt, Human
caaggccaaaggaagca

SEQ ID NO: 2989686 - RNA, 18 nt, Human
caaggccaaaggaagcac

SEQ ID NO: 2989687 - RNA, 13 nt, Human
caaguauagaaaa

SEQ ID NO: 2989688 - RNA, 14 nt, Human
caaguauagaaaau

SEQ ID NO: 2989689 - RNA, 20 nt, Human
caagcugcacccucaggcag

SEQ ID NO: 2989690 - RNA, 14 nt, Human
caagcugcacccuc

SEQ ID NO: 2989691 - RNA, 18 nt, Human
caagcugcacccucaggc

SEQ ID NO: 2989692 - RNA, 13 nt, Human
caagcugcacccu

SEQ ID NO: 2989693 - RNA, 14 nt, Human
caagcucugcuccu

SEQ ID NO: 2989694 - RNA, 12 nt, Human
caagcuccaagc

SEQ ID NO: 2989695 - RNA, 13 nt, Human
caagcucugcucc

SEQ ID NO: 2989696 - RNA, 19 nt, Human
caauaaagcagcguuucua

SEQ ID NO: 2989697 - RNA, 17 nt, Human
auugcugcuuguacacu

SEQ ID NO: 2989698 - RNA, 12 nt, Human
auugcugcuuga

SEQ ID NO: 2989699 - RNA, 23 nt, Human
auugcugauggugcaaugaccuu

SEQ ID NO: 2989700 - RNA, 14 nt, Human
auugcuugagcuca

SEQ ID NO: 2989701 - RNA, 15 nt, Human
auugcugauggugca

SEQ ID NO: 2989702 - RNA, 16 nt, Human
auugcugauggugcaa

SEQ ID NO: 2989703 - RNA, 18 nt, Human
auugcugauggugcaaug

SEQ ID NO: 2989704 - RNA, 19 nt, Human
auugcugauggugcaauga

SEQ ID NO: 2989705 - RNA, 23 nt, Human
auuguaauaggcguaacuaauuu

SEQ ID NO: 2989706 - RNA, 14 nt, Human
auuguaaaauggug

SEQ ID NO: 2989707 - RNA, 13 nt, Human
auuguaaaauggu

SEQ ID NO: 2989708 - RNA, 21 nt, Human
auugugucucuugguccugcu

SEQ ID NO: 2989709 - RNA, 23 nt, Human
auugugucucuugguccugcugc

SEQ ID NO: 2989710 - RNA, 16 nt, Human
auuguuagucucuuga

SEQ ID NO: 2989711 - RNA, 21 nt, Human
auugauaagaaccuuuugagu

SEQ ID NO: 2989712 - RNA, 22 nt, Human
auugcuacuguccuacccaccc

SEQ ID NO: 2989713 - RNA, 20 nt, Human
auugcuacuguccuacccac

SEQ ID NO: 2989714 - RNA, 17 nt, Human
auugauaugcuuauaca

SEQ ID NO: 2989715 - RNA, 15 nt, Human
auugcuacuguccua

SEQ ID NO: 2989716 - RNA, 14 nt, Human
auugcuacuguccu

SEQ ID NO: 2989717 - RNA, 11 nt, Human
auucuuuccug

SEQ ID NO: 2989718 - RNA, 12 nt, Human
auucuucugcuu

SEQ ID NO: 2989719 - RNA, 11 nt, Human
auucuucugcu

SEQ ID NO: 2989720 - RNA, 20 nt, Human
auuaaugucaguauuucaac

SEQ ID NO: 2989721 - RNA, 17 nt, Human
auuacaacucuauuuaa

SEQ ID NO: 2989722 - RNA, 19 nt, Human
auuacaguggggaaugaag

SEQ ID NO: 2989723 - RNA, 16 nt, Human
auuacaggugugaacc

SEQ ID NO: 2989724 - RNA, 17 nt, Human
auuacaggaaguacugg

SEQ ID NO: 2989725 - RNA, 13 nt, Human
auuagguugugaa

SEQ ID NO: 2989726 - RNA, 23 nt, Human
auuagguugaaacauaucucuua

SEQ ID NO: 2989727 - RNA, 19 nt, Human
auuagguugaaacauaucu

SEQ ID NO: 2989728 - RNA, 17 nt, Human
auuagguugaaacauau

SEQ ID NO: 2989729 - RNA, 16 nt, Human
auuagguugaaacaua

SEQ ID NO: 2989730 - RNA, 21 nt, Human
auuaggugugacugaauuucu

SEQ ID NO: 2989731 - RNA, 15 nt, Human
auuagguugugaaug

SEQ ID NO: 2989732 - RNA, 14 nt, Human
auuagguugugaau

SEQ ID NO: 2989733 - RNA, 13 nt, Human
auuaugaaaauaa

SEQ ID NO: 2989734 - RNA, 18 nt, Human
auuaugaaacuuuuggaa

SEQ ID NO: 2989735 - RNA, 17 nt, Human
auuaugaauuacauuug

SEQ ID NO: 2989736 - RNA, 14 nt, Human
auuaugaauuacau

SEQ ID NO: 2989737 - RNA, 18 nt, Human
auuaggugugacugaauu

SEQ ID NO: 2989738 - RNA, 16 nt, Human
auuaggugugacugaa

SEQ ID NO: 2989739 - RNA, 16 nt, Human
auuagggagagaagau

SEQ ID NO: 2989740 - RNA, 19 nt, Human
auucacaagacccaaaagg

SEQ ID NO: 2989741 - RNA, 16 nt, Human
auucaaauguauuaca

SEQ ID NO: 2989742 - RNA, 20 nt, Human
auucaaugccccugaauuua

SEQ ID NO: 2989743 - RNA, 18 nt, Human
auucaaugccccugaauu

SEQ ID NO: 2989744 - RNA, 23 nt, Human
auuaugcaugaaguaauaugcac

SEQ ID NO: 2989745 - RNA, 18 nt, Human
auuaugaauuacauuugu

SEQ ID NO: 2989746 - RNA, 14 nt, Human
auucauaaugacuu

SEQ ID NO: 2989747 - RNA, 15 nt, Human
auucauaaugacuua

SEQ ID NO: 2989748 - RNA, 19 nt, Human
auucauaaugacuuaagca

SEQ ID NO: 2989749 - RNA, 22 nt, Human
auucauagcagcuuauucacaa

SEQ ID NO: 2989750 - RNA, 19 nt, Human
auucauagcagcuuauuca

SEQ ID NO: 2989751 - RNA, 15 nt, Human
auuuggaaaggaaug

SEQ ID NO: 2989752 - RNA, 17 nt, Human
auuugcucauggaauug

SEQ ID NO: 2989753 - RNA, 14 nt, Human
auuugcucauggaa

SEQ ID NO: 2989754 - RNA, 13 nt, Human
auuugcuccuuuc

SEQ ID NO: 2989755 - RNA, 18 nt, Human
auuuggaaaggaaugcaa

SEQ ID NO: 2989756 - RNA, 17 nt, Human
auuugugauacaaugcu

SEQ ID NO: 2989757 - RNA, 15 nt, Human
auuugugauacaaug

SEQ ID NO: 2989758 - RNA, 18 nt, Human
auuuguggaaaauaacuc

SEQ ID NO: 2989759 - RNA, 20 nt, Human
auuugugauacaaugcugug

SEQ ID NO: 2989760 - RNA, 19 nt, Human
auuuuauagcuacuaauuu

SEQ ID NO: 2989761 - RNA, 20 nt, Human
auuuguuugaacugauaaag

SEQ ID NO: 2989762 - RNA, 17 nt, Human
auuuuauagcuacuaau

SEQ ID NO: 2989763 - RNA, 23 nt, Human
auuuguuugaacugauaaagaug

SEQ ID NO: 2989764 - RNA, 22 nt, Human
auuuguuugaacugauaaagau

SEQ ID NO: 2989765 - RNA, 21 nt, Human
auuugccuaauaugaugacug

SEQ ID NO: 2989766 - RNA, 13 nt, Human
caaacccaguguu

SEQ ID NO: 2989767 - RNA, 19 nt, Human
caaacagggccucugcgga

SEQ ID NO: 2989768 - RNA, 15 nt, Human
caaacagggccucug

SEQ ID NO: 2989769 - RNA, 21 nt, Human
caaaccaucauugaaaucuuu

SEQ ID NO: 2989770 - RNA, 19 nt, Human
caaaccaucauugaaaucu

SEQ ID NO: 2989771 - RNA, 15 nt, Human
caaacagaggccgcc

SEQ ID NO: 2989772 - RNA, 14 nt, Human
caaacagggccucu

SEQ ID NO: 2989773 - RNA, 12 nt, Human
caaacagggccu

SEQ ID NO: 2989774 - RNA, 20 nt, Human
caaaaaaaaaaaaaaauuag

SEQ ID NO: 2989775 - RNA, 16 nt, Human
caaaagaugcuucuca

SEQ ID NO: 2989776 - RNA, 15 nt, Human
caaaaggcagaagca

SEQ ID NO: 2989777 - RNA, 18 nt, Human
caaaagaugcuucucacu

SEQ ID NO: 2989778 - RNA, 23 nt, Human
auuuuuuuuuccuucagugccuu

SEQ ID NO: 2989779 - RNA, 20 nt, Human
caaagauauuuugcuuugug

SEQ ID NO: 2989780 - RNA, 18 nt, Human
caaagauauuuugcuuug

SEQ ID NO: 2989781 - RNA, 20 nt, Human
caaagcacugacuucuaagu

SEQ ID NO: 2989782 - RNA, 22 nt, Human
caaagcacugacuucuaaguaa

SEQ ID NO: 2989783 - RNA, 23 nt, Human
caaagauauuuugcuuugugauu

SEQ ID NO: 2989784 - RNA, 22 nt, Human
caaagauauuuugcuuugugau

SEQ ID NO: 2989785 - RNA, 22 nt, Human
caaaguacacuguuucaaacuu

SEQ ID NO: 2989786 - RNA, 15 nt, Human
caaagcagugcaugc

SEQ ID NO: 2989787 - RNA, 17 nt, Human
caaagcagugcaugcug

SEQ ID NO: 2989788 - RNA, 21 nt, Human
caaaguagaagucuuagaugu

SEQ ID NO: 2989789 - RNA, 14 nt, Human
caaaguagaagucu

SEQ ID NO: 2989790 - RNA, 15 nt, Human
caaagucuagguugg

SEQ ID NO: 2989791 - RNA, 20 nt, Human
caacaccucugcacaagcug

SEQ ID NO: 2989792 - RNA, 15 nt, Human
caacacgagcaggcu

SEQ ID NO: 2989793 - RNA, 23 nt, Human
caacacgagcaggcuacugucag

SEQ ID NO: 2989794 - RNA, 21 nt, Human
caaauggaaaugggcagagca

SEQ ID NO: 2989795 - RNA, 20 nt, Human
caaauggaaaugggcagagc

SEQ ID NO: 2989796 - RNA, 24 nt, Human
ccguagacgugcacgcacacuguc

SEQ ID NO: 2989797 - RNA, 15 nt, Human
ccgucuccagcugcu

SEQ ID NO: 2989798 - RNA, 16 nt, Human
ccguagguuauuuuca

SEQ ID NO: 2989799 - RNA, 20 nt, Human
ccuaaguaucaaguauagaa

SEQ ID NO: 2989800 - RNA, 18 nt, Human
ccuaggacccgucuccag

SEQ ID NO: 2989801 - RNA, 22 nt, Human
ccuaggacccgucuccagcugc

SEQ ID NO: 2989802 - RNA, 21 nt, Human
ccuaggacccgucuccagcug

SEQ ID NO: 2989803 - RNA, 20 nt, Human
ccuaggacccgucuccagcu

SEQ ID NO: 2989804 - RNA, 19 nt, Human
ccuaggacccgucuccagc

SEQ ID NO: 2989805 - RNA, 15 nt, Human
ccucauguccacugg

SEQ ID NO: 2989806 - RNA, 22 nt, Human
ccucagccucccgaauagcugg

SEQ ID NO: 2989807 - RNA, 23 nt, Human
ccucagccucccaaagugcuggg

SEQ ID NO: 2989808 - RNA, 13 nt, Human
ccucauguucuua

SEQ ID NO: 2989809 - RNA, 20 nt, Human
ccucauguccacugguucuu

SEQ ID NO: 2989810 - RNA, 22 nt, Human
ccucccaaggggcccaaauucu

SEQ ID NO: 2989811 - RNA, 23 nt, Human
ccucccaacucaccccagcccca

SEQ ID NO: 2989812 - RNA, 19 nt, Human
ccucauguucuuaauucuu

SEQ ID NO: 2989813 - RNA, 20 nt, Human
ccuccaagaccuucuccuuc

SEQ ID NO: 2989814 - RNA, 15 nt, Human
ccucaacucuccucc

SEQ ID NO: 2989815 - RNA, 15 nt, Human
ccucaagagaaggca

SEQ ID NO: 2989816 - RNA, 22 nt, Human
ccucagccucccaaagugcugg

SEQ ID NO: 2989817 - RNA, 11 nt, Human
ccucagccucc

SEQ ID NO: 2989818 - RNA, 16 nt, Human
ccucaaccuccugggc

SEQ ID NO: 2989819 - RNA, 13 nt, Human
cccuucucuguau

SEQ ID NO: 2989820 - RNA, 21 nt, Human
cccuucugacccaugcugccc

SEQ ID NO: 2989821 - RNA, 22 nt, Human
cccuucugacccaugcugcccu

SEQ ID NO: 2989822 - RNA, 23 nt, Human
cccuucugacccaugcugcccug

SEQ ID NO: 2989823 - RNA, 16 nt, Human
cccuucuaccuuccug

SEQ ID NO: 2989824 - RNA, 18 nt, Human
cccuucgcuccugugucu

SEQ ID NO: 2989825 - RNA, 16 nt, Human
cccuucgcuccugugu

SEQ ID NO: 2989826 - RNA, 17 nt, Human
ccgccaaggcuggggga

SEQ ID NO: 2989827 - RNA, 16 nt, Human
ccgacccuugccgucu

SEQ ID NO: 2989828 - RNA, 20 nt, Human
ccgaauagcugggacuacag

SEQ ID NO: 2989829 - RNA, 18 nt, Human
ccgaccagacaccuugac

SEQ ID NO: 2989830 - RNA, 20 nt, Human
ccgcccaggcuuagucacug

SEQ ID NO: 2989831 - RNA, 16 nt, Human
ccgccaugcuccuggc

SEQ ID NO: 2989832 - RNA, 14 nt, Human
cccuggcagccccu

SEQ ID NO: 2989833 - RNA, 16 nt, Human
cccuggcagccccugu

SEQ ID NO: 2989834 - RNA, 21 nt, Human
cccugcccugugggcccccaa

SEQ ID NO: 2989835 - RNA, 12 nt, Human
cccuggcagccc

SEQ ID NO: 2989836 - RNA, 13 nt, Human
cccuggcagcccc

SEQ ID NO: 2989837 - RNA, 16 nt, Human
cccugcccugugggcc

SEQ ID NO: 2989838 - RNA, 20 nt, Human
cccugcccugugggccccca

SEQ ID NO: 2989839 - RNA, 15 nt, Human
cccugcccugugggc

SEQ ID NO: 2989840 - RNA, 14 nt, Human
cccugcccuguggg

SEQ ID NO: 2989841 - RNA, 11 nt, Human
cccugcccugu

SEQ ID NO: 2989842 - RNA, 12 nt, Human
cccugcccugug

SEQ ID NO: 2989843 - RNA, 13 nt, Human
cccugcccugugg

SEQ ID NO: 2989844 - RNA, 13 nt, Human
ccucugcuugcca

SEQ ID NO: 2989845 - RNA, 12 nt, Human
ccucucucacuc

SEQ ID NO: 2989846 - RNA, 13 nt, Human
ccucucucacucc

SEQ ID NO: 2989847 - RNA, 14 nt, Human
ccucucucacuccu

SEQ ID NO: 2989848 - RNA, 15 nt, Human
ccucucucacuccuu

SEQ ID NO: 2989849 - RNA, 17 nt, Human
ccucucucacuccuuga

SEQ ID NO: 2989850 - RNA, 12 nt, Human
ccucucucaggc

SEQ ID NO: 2989851 - RNA, 14 nt, Human
ccucucucaggcca

SEQ ID NO: 2989852 - RNA, 15 nt, Human
ccucugcugcuggcu

SEQ ID NO: 2989853 - RNA, 16 nt, Human
ccucugcugcuggcug

SEQ ID NO: 2989854 - RNA, 17 nt, Human
ccucugcugcuggcugg

SEQ ID NO: 2989855 - RNA, 18 nt, Human
ccucugcugcuggcuggu

SEQ ID NO: 2989856 - RNA, 13 nt, Human
ccucugcugcugg

SEQ ID NO: 2989857 - RNA, 14 nt, Human
ccucugcugcuggc

SEQ ID NO: 2989858 - RNA, 22 nt, Human
ccucugccugaagucacacagu

SEQ ID NO: 2989859 - RNA, 21 nt, Human
ccucugccugaagucacacag

SEQ ID NO: 2989860 - RNA, 19 nt, Human
ccucuugagccuugaacuu

SEQ ID NO: 2989861 - RNA, 13 nt, Human
ccucuugagccuu

SEQ ID NO: 2989862 - RNA, 13 nt, Human
ccucuuggguuca

SEQ ID NO: 2989863 - RNA, 22 nt, Human
ccugcacuugcagacucuacag

SEQ ID NO: 2989864 - RNA, 19 nt, Human
ccugcacuugcagacucua

SEQ ID NO: 2989865 - RNA, 12 nt, Human
ccugagagcugc

SEQ ID NO: 2989866 - RNA, 18 nt, Human
ccugagagcugcaugugu

SEQ ID NO: 2989867 - RNA, 14 nt, Human
ccuggccucugcac

SEQ ID NO: 2989868 - RNA, 15 nt, Human
ccuggccucugcacu

SEQ ID NO: 2989869 - RNA, 13 nt, Human
ccuggccugagcu

SEQ ID NO: 2989870 - RNA, 12 nt, Human
ccuggccucugc

SEQ ID NO: 2989871 - RNA, 16 nt, Human
ccugcccaggccccug

SEQ ID NO: 2989872 - RNA, 22 nt, Human
ccugcccaggccccugccaccc

SEQ ID NO: 2989873 - RNA, 15 nt, Human
ccugcccaggccccu

SEQ ID NO: 2989874 - RNA, 14 nt, Human
ccugcccaggcccc

SEQ ID NO: 2989875 - RNA, 12 nt, Human
ccugcugggugu

SEQ ID NO: 2989876 - RNA, 14 nt, Human
ccugcugggugugg

SEQ ID NO: 2989877 - RNA, 20 nt, Human
ccugcuggguguggcgcagc

SEQ ID NO: 2989878 - RNA, 14 nt, Human
ccuggaugcagccu

SEQ ID NO: 2989879 - RNA, 17 nt, Human
ccuggaugcagccucac

SEQ ID NO: 2989880 - RNA, 19 nt, Human
ccuggaugcagccucacag

SEQ ID NO: 2989881 - RNA, 13 nt, Human
ccuggaugcagcc

SEQ ID NO: 2989882 - RNA, 16 nt, Human
ccuggaguucugguuc

SEQ ID NO: 2989883 - RNA, 17 nt, Human
ccuggaguucugguucc

SEQ ID NO: 2989884 - RNA, 15 nt, Human
ccuggaguucugguu

SEQ ID NO: 2989885 - RNA, 23 nt, Human
cccagcucugguccauagagagc

SEQ ID NO: 2989886 - RNA, 20 nt, Human
cccagccagcaguucagagc

SEQ ID NO: 2989887 - RNA, 17 nt, Human
cccagccagcaguucag

SEQ ID NO: 2989888 - RNA, 16 nt, Human
cccagccagcaguuca

SEQ ID NO: 2989889 - RNA, 22 nt, Human
cccagcuuaaaggggcuagagu

SEQ ID NO: 2989890 - RNA, 13 nt, Human
cccauccucugua

SEQ ID NO: 2989891 - RNA, 17 nt, Human
cccaggcuggcgugcag

SEQ ID NO: 2989892 - RNA, 13 nt, Human
cccaggcuggcgu

SEQ ID NO: 2989893 - RNA, 13 nt, Human
cccacugcucugg

SEQ ID NO: 2989894 - RNA, 12 nt, Human
cccacugcucug

SEQ ID NO: 2989895 - RNA, 19 nt, Human
cccacugcuuuuggucugu

SEQ ID NO: 2989896 - RNA, 20 nt, Human
cccacccaagggccuggccu

SEQ ID NO: 2989897 - RNA, 21 nt, Human
cccacccaagggccuggccug

SEQ ID NO: 2989898 - RNA, 22 nt, Human
cccacccaagggccuggccuga

SEQ ID NO: 2989899 - RNA, 18 nt, Human
cccacccugaaagcccug

SEQ ID NO: 2989900 - RNA, 18 nt, Human
cccacccaagggccuggc

SEQ ID NO: 2989901 - RNA, 12 nt, Human
cccacccccacc

SEQ ID NO: 2989902 - RNA, 15 nt, Human
cccacccccacccaa

SEQ ID NO: 2989903 - RNA, 17 nt, Human
cccacccccacccaagg

SEQ ID NO: 2989904 - RNA, 22 nt, Human
ccccaaaacucuccucugcugc

SEQ ID NO: 2989905 - RNA, 23 nt, Human
cccauuguggucacaggaaguag

SEQ ID NO: 2989906 - RNA, 22 nt, Human
cccauuguggucacaggaagua

SEQ ID NO: 2989907 - RNA, 21 nt, Human
ccccaaaacucuccucugcug

SEQ ID NO: 2989908 - RNA, 23 nt, Human
ccccaaaacucuccucugcugcu

SEQ ID NO: 2989909 - RNA, 22 nt, Human
ccccagcaagugagagcugggu

SEQ ID NO: 2989910 - RNA, 22 nt, Human
ccccagcaauuaugaaaauaau

SEQ ID NO: 2989911 - RNA, 21 nt, Human
ccccagcaagugagagcuggg

SEQ ID NO: 2989912 - RNA, 22 nt, Human
cccccaaauggaaaugggcaga

SEQ ID NO: 2989913 - RNA, 23 nt, Human
ccccgacccuugccgucuaccug

SEQ ID NO: 2989914 - RNA, 14 nt, Human
ccccaucugcgggg

SEQ ID NO: 2989915 - RNA, 23 nt, Human
cccgggaggcagagguugcagug

SEQ ID NO: 2989916 - RNA, 18 nt, Human
cccuauuagagaagagau

SEQ ID NO: 2989917 - RNA, 22 nt, Human
cccgggaagggggcugggacau

SEQ ID NO: 2989918 - RNA, 17 nt, Human
cccggccaccugcggug

SEQ ID NO: 2989919 - RNA, 16 nt, Human
cccggcuccaggcucc

SEQ ID NO: 2989920 - RNA, 15 nt, Human
cccggcuccaggcuc

SEQ ID NO: 2989921 - RNA, 14 nt, Human
cccggcuccaggcu

SEQ ID NO: 2989922 - RNA, 13 nt, Human
cccggcuccaggc

SEQ ID NO: 2989923 - RNA, 13 nt, Human
cccggccaccugc

SEQ ID NO: 2989924 - RNA, 14 nt, Human
cccggccaccugcg

SEQ ID NO: 2989925 - RNA, 12 nt, Human
cccggcuccagg

SEQ ID NO: 2989926 - RNA, 11 nt, Human
cccggcuccag

SEQ ID NO: 2989927 - RNA, 14 nt, Human
cccgaauagcuggg

SEQ ID NO: 2989928 - RNA, 15 nt, Human
ccagauccuggaaau

SEQ ID NO: 2989929 - RNA, 18 nt, Human
ccagagggccugcaaggg

SEQ ID NO: 2989930 - RNA, 19 nt, Human
ccagagggccugcaaggga

SEQ ID NO: 2989931 - RNA, 17 nt, Human
ccagagggccugcaagg

SEQ ID NO: 2989932 - RNA, 16 nt, Human
ccaccuuggcucaagu

SEQ ID NO: 2989933 - RNA, 20 nt, Human
ccagagggccugcaagggag

SEQ ID NO: 2989934 - RNA, 15 nt, Human
ccagaugcaccagcc

SEQ ID NO: 2989935 - RNA, 17 nt, Human
ccagaugcaccagcccu

SEQ ID NO: 2989936 - RNA, 18 nt, Human
ccagaugcaccagcccuu

SEQ ID NO: 2989937 - RNA, 13 nt, Human
ccagcaggcucuc

SEQ ID NO: 2989938 - RNA, 15 nt, Human
ccagcaggcucucag

SEQ ID NO: 2989939 - RNA, 11 nt, Human
ccagccccugg

SEQ ID NO: 2989940 - RNA, 12 nt, Human
ccagccccugga

SEQ ID NO: 2989941 - RNA, 16 nt, Human
ccagcucaccagcccc

SEQ ID NO: 2989942 - RNA, 15 nt, Human
ccagcucaccagccc

SEQ ID NO: 2989943 - RNA, 16 nt, Human
ccagcuguucagcugg

SEQ ID NO: 2989944 - RNA, 22 nt, Human
ccagcucaccagccccagugcc

SEQ ID NO: 2989945 - RNA, 17 nt, Human
ccagcuguucagcuggu

SEQ ID NO: 2989946 - RNA, 19 nt, Human
ccagcuuaaaggggcuaga

SEQ ID NO: 2989947 - RNA, 13 nt, Human
ccaggaagccagc

SEQ ID NO: 2989948 - RNA, 12 nt, Human
ccaggaagccag

SEQ ID NO: 2989949 - RNA, 14 nt, Human
ccaggaaaggcucc

SEQ ID NO: 2989950 - RNA, 15 nt, Human
ccaggaaaggcucca

SEQ ID NO: 2989951 - RNA, 16 nt, Human
ccaggaaaggcuccag

SEQ ID NO: 2989952 - RNA, 14 nt, Human
ccaucccagcccca

SEQ ID NO: 2989953 - RNA, 13 nt, Human
ccaucccagcccc

SEQ ID NO: 2989954 - RNA, 15 nt, Human
ccaucccagccccaa

SEQ ID NO: 2989955 - RNA, 23 nt, Human
ccaguuggucccccuuccaugga

SEQ ID NO: 2989956 - RNA, 14 nt, Human
ccaucccugaaggc

SEQ ID NO: 2989957 - RNA, 15 nt, Human
ccaucccugaaggcc

SEQ ID NO: 2989958 - RNA, 17 nt, Human
ccaucccugaaggcccc

SEQ ID NO: 2989959 - RNA, 20 nt, Human
ccaucccugaaggccccgcc

SEQ ID NO: 2989960 - RNA, 23 nt, Human
ccaugagccucagcauccuggca

SEQ ID NO: 2989961 - RNA, 21 nt, Human
ccaugagccucagcauccugg

SEQ ID NO: 2989962 - RNA, 20 nt, Human
ccauggucggaaaacaugcu

SEQ ID NO: 2989963 - RNA, 15 nt, Human
ccaugucagacacag

SEQ ID NO: 2989964 - RNA, 13 nt, Human
ccaugucagacac

SEQ ID NO: 2989965 - RNA, 21 nt, Human
ccaugucagacacagauuggc

SEQ ID NO: 2989966 - RNA, 20 nt, Human
ccaguuggguggaugccugg

SEQ ID NO: 2989967 - RNA, 19 nt, Human
ccaguuggguggaugccug

SEQ ID NO: 2989968 - RNA, 17 nt, Human
ccaguuggguggaugcc

SEQ ID NO: 2989969 - RNA, 23 nt, Human
ccaggggugggacacccugugau

SEQ ID NO: 2989970 - RNA, 14 nt, Human
ccaggggugggaca

SEQ ID NO: 2989971 - RNA, 17 nt, Human
ccaggggugggacaccc

SEQ ID NO: 2989972 - RNA, 20 nt, Human
ccaggggaaaaucagccugc

SEQ ID NO: 2989973 - RNA, 13 nt, Human
ccaggggugggac

SEQ ID NO: 2989974 - RNA, 19 nt, Human
ccaggggaaaaucagccug

SEQ ID NO: 2989975 - RNA, 21 nt, Human
ccaggcuccuuuagcgcccag

SEQ ID NO: 2989976 - RNA, 20 nt, Human
ccaggcuccuuuagcgccca

SEQ ID NO: 2989977 - RNA, 16 nt, Human
ccaggcuggcgugcag

SEQ ID NO: 2989978 - RNA, 18 nt, Human
ccaggcuggcgugcagug

SEQ ID NO: 2989979 - RNA, 17 nt, Human
ccaggcuggcgugcagu

SEQ ID NO: 2989980 - RNA, 19 nt, Human
ccaggcuggcgugcagugg

SEQ ID NO: 2989981 - RNA, 16 nt, Human
cuagcaugaagacaga

SEQ ID NO: 2989982 - RNA, 17 nt, Human
cuagcauggcugccaau

SEQ ID NO: 2989983 - RNA, 23 nt, Human
cuagcagcagggagggcuucugc

SEQ ID NO: 2989984 - RNA, 19 nt, Human
cuagaacucccuuucaaca

SEQ ID NO: 2989985 - RNA, 18 nt, Human
cuagaacucccuuucaac

SEQ ID NO: 2989986 - RNA, 17 nt, Human
cuagaacucccuuucaa

SEQ ID NO: 2989987 - RNA, 16 nt, Human
cuagaacucccuuuca

SEQ ID NO: 2989988 - RNA, 22 nt, Human
cuagcagcagggagggcuucug

SEQ ID NO: 2989989 - RNA, 12 nt, Human
cuagcagcaggg

SEQ ID NO: 2989990 - RNA, 19 nt, Human
cuagaaauuccccacccug

SEQ ID NO: 2989991 - RNA, 11 nt, Human
cuaccugaggg

SEQ ID NO: 2989992 - RNA, 14 nt, Human
cuaccugaggggcc

SEQ ID NO: 2989993 - RNA, 18 nt, Human
cuauaacaaaggauacuu

SEQ ID NO: 2989994 - RNA, 22 nt, Human
cuauaacaaaggauacuuauuu

SEQ ID NO: 2989995 - RNA, 22 nt, Human
cuaguuccaccaucaagccacc

SEQ ID NO: 2989996 - RNA, 23 nt, Human
cuaguugaucagcuuauugucua

SEQ ID NO: 2989997 - RNA, 19 nt, Human
cuagggaaaaaccagcgug

SEQ ID NO: 2989998 - RNA, 21 nt, Human
cuagggaaaaaccagcgugug

SEQ ID NO: 2989999 - RNA, 18 nt, Human
cuaguuccaccaucaagc

SEQ ID NO: 2990000 - RNA, 20 nt, Human
cuaguuccaccaucaagcca

SEQ ID NO: 2990001 - RNA, 14 nt, Human
cuaguuccaccauc

SEQ ID NO: 2990002 - RNA, 15 nt, Human
cuaacuucaccauau

SEQ ID NO: 2990003 - RNA, 14 nt, Human
cuaacuggacuggu

SEQ ID NO: 2990004 - RNA, 16 nt, Human
cuaacuuuccuucauu

SEQ ID NO: 2990005 - RNA, 16 nt, Human
cuaacuucaccauauu

SEQ ID NO: 2990006 - RNA, 23 nt, Human
cuaagugaaauaagccagacauc

SEQ ID NO: 2990007 - RNA, 20 nt, Human
cuaagugaaauaagccagac

SEQ ID NO: 2990008 - RNA, 15 nt, Human
cuacaugagguacug

SEQ ID NO: 2990009 - RNA, 18 nt, Human
cuacauacaauuccaaac

SEQ ID NO: 2990010 - RNA, 15 nt, Human
cuacaguccucccau

SEQ ID NO: 2990011 - RNA, 16 nt, Human
cuacaguccucccauc

SEQ ID NO: 2990012 - RNA, 17 nt, Human
cuacaguccucccaucu

SEQ ID NO: 2990013 - RNA, 18 nt, Human
cuacaguccucccaucuc

SEQ ID NO: 2990014 - RNA, 13 nt, Human
cuacaguugaaaa

SEQ ID NO: 2990015 - RNA, 22 nt, Human
cuaagugauccucccaccucag

SEQ ID NO: 2990016 - RNA, 20 nt, Human
cuaagugauccucccaccuc

SEQ ID NO: 2990017 - RNA, 18 nt, Human
cuaagugaggaugaaaaa

SEQ ID NO: 2990018 - RNA, 16 nt, Human
ccuuggacauuuuaug

SEQ ID NO: 2990019 - RNA, 18 nt, Human
ccuuggacauuuuauguc

SEQ ID NO: 2990020 - RNA, 21 nt, Human
ccuuggacauuuuaugucuuu

SEQ ID NO: 2990021 - RNA, 20 nt, Human
ccuuuagcgcccaguugggu

SEQ ID NO: 2990022 - RNA, 14 nt, Human
ccuuuagcgcccag

SEQ ID NO: 2990023 - RNA, 20 nt, Human
ccuuuucgcaggauucuucc

SEQ ID NO: 2990024 - RNA, 18 nt, Human
ccuuuuuuauacauaaac

SEQ ID NO: 2990025 - RNA, 17 nt, Human
ccuuuuuuauacauaaa

SEQ ID NO: 2990026 - RNA, 16 nt, Human
cgacagugagacucug

SEQ ID NO: 2990027 - RNA, 15 nt, Human
cgacagugagacucu

SEQ ID NO: 2990028 - RNA, 23 nt, Human
cgaccagacaccuugacagggca

SEQ ID NO: 2990029 - RNA, 12 nt, Human
ccuuuuuuauac

SEQ ID NO: 2990030 - RNA, 17 nt, Human
ccuugccgucuaccuga

SEQ ID NO: 2990031 - RNA, 13 nt, Human
ccuugcccagccu

SEQ ID NO: 2990032 - RNA, 16 nt, Human
ccuugcccagccugga

SEQ ID NO: 2990033 - RNA, 14 nt, Human
ccuugcccagccug

SEQ ID NO: 2990034 - RNA, 20 nt, Human
ccuugccgucuaccugaggg

SEQ ID NO: 2990035 - RNA, 17 nt, Human
ccuugcccagccuggau

SEQ ID NO: 2990036 - RNA, 21 nt, Human
ccuucugacccaugcugcccu

SEQ ID NO: 2990037 - RNA, 22 nt, Human
ccuucugacccaugcugcccug

SEQ ID NO: 2990038 - RNA, 23 nt, Human
ccuucugacccaugcugcccugu

SEQ ID NO: 2990039 - RNA, 22 nt, Human
ccuucuggaauaaggagaauga

SEQ ID NO: 2990040 - RNA, 12 nt, Human
ccuucugaccca

SEQ ID NO: 2990041 - RNA, 16 nt, Human
ccuucugacccaugcu

SEQ ID NO: 2990042 - RNA, 17 nt, Human
ccuucugacccaugcug

SEQ ID NO: 2990043 - RNA, 20 nt, Human
ccuucugacccaugcugccc

SEQ ID NO: 2990044 - RNA, 14 nt, Human
ccuggccugagcug

SEQ ID NO: 2990045 - RNA, 15 nt, Human
ccuggccugagcugg

SEQ ID NO: 2990046 - RNA, 14 nt, Human
cggagucccaccuu

SEQ ID NO: 2990047 - RNA, 15 nt, Human
cggccuuuggcuuca

SEQ ID NO: 2990048 - RNA, 18 nt, Human
cggcucacugcagccuca

SEQ ID NO: 2990049 - RNA, 19 nt, Human
cggcucacugcagccucaa

SEQ ID NO: 2990050 - RNA, 17 nt, Human
cggcucacugcagccuc

SEQ ID NO: 2990051 - RNA, 17 nt, Human
cggagcacacuggcuca

SEQ ID NO: 2990052 - RNA, 15 nt, Human
cgaguagcugggacu

SEQ ID NO: 2990053 - RNA, 14 nt, Human
cgaguagcugggac

SEQ ID NO: 2990054 - RNA, 13 nt, Human
cgaguagcuggga

SEQ ID NO: 2990055 - RNA, 17 nt, Human
cgaguuacagacaaagc

SEQ ID NO: 2990056 - RNA, 18 nt, Human
cgaguuacagacaaagcg

SEQ ID NO: 2990057 - RNA, 13 nt, Human
cgccaaggcuggg

SEQ ID NO: 2990058 - RNA, 16 nt, Human
cgccaaggcuggggga

SEQ ID NO: 2990059 - RNA, 12 nt, Human
cgccaaggcugg

SEQ ID NO: 2990060 - RNA, 13 nt, Human
cucuauuucugga

SEQ ID NO: 2990061 - RNA, 19 nt, Human
cucucagauuguaccauug

SEQ ID NO: 2990062 - RNA, 21 nt, Human
cucucacuuguuuuauuuaac

SEQ ID NO: 2990063 - RNA, 15 nt, Human
cucucacuccuugaa

SEQ ID NO: 2990064 - RNA, 12 nt, Human
cucucacuccuu

SEQ ID NO: 2990065 - RNA, 14 nt, Human
cucucacuccuuga

SEQ ID NO: 2990066 - RNA, 21 nt, Human
cucuccgaccagacaccuuga

SEQ ID NO: 2990067 - RNA, 12 nt, Human
cucucuggccuu

SEQ ID NO: 2990068 - RNA, 11 nt, Human
cucucuggccu

SEQ ID NO: 2990069 - RNA, 15 nt, Human
cucugaaggacauug

SEQ ID NO: 2990070 - RNA, 15 nt, Human
cucuuagaugcaguu

SEQ ID NO: 2990071 - RNA, 17 nt, Human
cucuguacagagcccac

SEQ ID NO: 2990072 - RNA, 21 nt, Human
cucuguacagagcccacgccc

SEQ ID NO: 2990073 - RNA, 15 nt, Human
cucugguccauagag

SEQ ID NO: 2990074 - RNA, 19 nt, Human
cucugcugacagacacagg

SEQ ID NO: 2990075 - RNA, 18 nt, Human
cucugcugacagacacag

SEQ ID NO: 2990076 - RNA, 17 nt, Human
cucugcugacagacaca

SEQ ID NO: 2990077 - RNA, 16 nt, Human
cucugguccauagaga

SEQ ID NO: 2990078 - RNA, 18 nt, Human
cucugguccauagagagc

SEQ ID NO: 2990079 - RNA, 19 nt, Human
cucugguccauagagagca

SEQ ID NO: 2990080 - RNA, 15 nt, Human
cucugguuaucuaau

SEQ ID NO: 2990081 - RNA, 19 nt, Human
cucugcagcaauaaagcag

SEQ ID NO: 2990082 - RNA, 18 nt, Human
cucugcagcaauaaagca

SEQ ID NO: 2990083 - RNA, 23 nt, Human
cucugcagcaauaaagcagcguu

SEQ ID NO: 2990084 - RNA, 13 nt, Human
cucugcagcaaua

SEQ ID NO: 2990085 - RNA, 20 nt, Human
cucuuagaugcaguucugaa

SEQ ID NO: 2990086 - RNA, 13 nt, Human
cugaaggccccgc

SEQ ID NO: 2990087 - RNA, 14 nt, Human
cugaaggccccgcc

SEQ ID NO: 2990088 - RNA, 17 nt, Human
cugaaggcuggguucug

SEQ ID NO: 2990089 - RNA, 17 nt, Human
cugaaggccccgcccag

SEQ ID NO: 2990090 - RNA, 21 nt, Human
cugaaggacauugcggacagc

SEQ ID NO: 2990091 - RNA, 20 nt, Human
cugaaggacauugcggacag

SEQ ID NO: 2990092 - RNA, 19 nt, Human
cugaaggacauugcggaca

SEQ ID NO: 2990093 - RNA, 16 nt, Human
cugaaaauguaugugu

SEQ ID NO: 2990094 - RNA, 14 nt, Human
cugaaaauguaugu

SEQ ID NO: 2990095 - RNA, 18 nt, Human
cugacccaugcugcccug

SEQ ID NO: 2990096 - RNA, 17 nt, Human
cugacccaugcugcccu

SEQ ID NO: 2990097 - RNA, 19 nt, Human
cugacccaugcugcccugu

SEQ ID NO: 2990098 - RNA, 20 nt, Human
cugacccaugcugcccugug

SEQ ID NO: 2990099 - RNA, 23 nt, Human
cugacccugcuucaaauauuucc

SEQ ID NO: 2990100 - RNA, 14 nt, Human
cugacagacacagg

SEQ ID NO: 2990101 - RNA, 12 nt, Human
cugacagacaca

SEQ ID NO: 2990102 - RNA, 14 nt, Human
cucaugcugccaau

SEQ ID NO: 2990103 - RNA, 22 nt, Human
cucaugcugccaauauccuaau

SEQ ID NO: 2990104 - RNA, 12 nt, Human
cucaugcugcca

SEQ ID NO: 2990105 - RNA, 19 nt, Human
cucauguucuuaauucuua

SEQ ID NO: 2990106 - RNA, 18 nt, Human
cucauguucuuaauucuu

SEQ ID NO: 2990107 - RNA, 14 nt, Human
cucauguucuuaau

SEQ ID NO: 2990108 - RNA, 12 nt, Human
cucauguucuua

SEQ ID NO: 2990109 - RNA, 18 nt, Human
cucagucuggcccuuccu

SEQ ID NO: 2990110 - RNA, 17 nt, Human
cucagucuggcccuucc

SEQ ID NO: 2990111 - RNA, 13 nt, Human
cucagugccacua

SEQ ID NO: 2990112 - RNA, 14 nt, Human
cucaggccagcugc

SEQ ID NO: 2990113 - RNA, 20 nt, Human
cucaggccagcugcuugggc

SEQ ID NO: 2990114 - RNA, 21 nt, Human
cucaggccagcugcuugggcu

SEQ ID NO: 2990115 - RNA, 22 nt, Human
cucaggccagcugcuugggcuu

SEQ ID NO: 2990116 - RNA, 13 nt, Human
cucaggccagcug

SEQ ID NO: 2990117 - RNA, 13 nt, Human
cucagccucccaa

SEQ ID NO: 2990118 - RNA, 16 nt, Human
cucagccucccaaagu

SEQ ID NO: 2990119 - RNA, 14 nt, Human
cucagccucccaaa

SEQ ID NO: 2990120 - RNA, 21 nt, Human
cucagccucccaaagugcugg

SEQ ID NO: 2990121 - RNA, 13 nt, Human
cucagccucccga

SEQ ID NO: 2990122 - RNA, 22 nt, Human
cucagccucccaaagugcuggg

SEQ ID NO: 2990123 - RNA, 23 nt, Human
cucagccucccgaauagcuggga

SEQ ID NO: 2990124 - RNA, 21 nt, Human
cucaggccugggggcugggca

SEQ ID NO: 2990125 - RNA, 14 nt, Human
cucaggccuggggg

SEQ ID NO: 2990126 - RNA, 20 nt, Human
cucaggccugggggcugggc

SEQ ID NO: 2990127 - RNA, 13 nt, Human
cucaggccugggg

SEQ ID NO: 2990128 - RNA, 22 nt, Human
cuccagucauuauguuaauauu

SEQ ID NO: 2990129 - RNA, 11 nt, Human
cuccaggugca

SEQ ID NO: 2990130 - RNA, 17 nt, Human
cuccagacacaugucca

SEQ ID NO: 2990131 - RNA, 19 nt, Human
cuccagacacauguccaag

SEQ ID NO: 2990132 - RNA, 15 nt, Human
cuccagaauuuccca

SEQ ID NO: 2990133 - RNA, 18 nt, Human
cuccagaauuucccaaag

SEQ ID NO: 2990134 - RNA, 17 nt, Human
cuccaagaccuucuccu

SEQ ID NO: 2990135 - RNA, 18 nt, Human
cuccaagaccuucuccuu

SEQ ID NO: 2990136 - RNA, 16 nt, Human
cuccaagaccuucucc

SEQ ID NO: 2990137 - RNA, 15 nt, Human
cuccaagaccuucuc

SEQ ID NO: 2990138 - RNA, 22 nt, Human
cuccacuuucuagccagaggag

SEQ ID NO: 2990139 - RNA, 20 nt, Human
cuccacuuucuagccagagg

SEQ ID NO: 2990140 - RNA, 16 nt, Human
cucccugcaauaaaau

SEQ ID NO: 2990141 - RNA, 14 nt, Human
cucccugcaauaaa

SEQ ID NO: 2990142 - RNA, 12 nt, Human
cucccaccucag

SEQ ID NO: 2990143 - RNA, 19 nt, Human
cuccgcuuucuacccagcg

SEQ ID NO: 2990144 - RNA, 13 nt, Human
augaaugcccagu

SEQ ID NO: 2990145 - RNA, 21 nt, Human
augaaugcccagugagacugu

SEQ ID NO: 2990146 - RNA, 20 nt, Human
augaaugucagugugacuga

SEQ ID NO: 2990147 - RNA, 17 nt, Human
augaagauacugaaaua

SEQ ID NO: 2990148 - RNA, 16 nt, Human
augaagauacugaaau

SEQ ID NO: 2990149 - RNA, 13 nt, Human
augaaugaauggc

SEQ ID NO: 2990150 - RNA, 18 nt, Human
augaagauguagaggaga

SEQ ID NO: 2990151 - RNA, 17 nt, Human
augaaauauuauguuaa

SEQ ID NO: 2990152 - RNA, 13 nt, Human
augaaauauuaug

SEQ ID NO: 2990153 - RNA, 18 nt, Human
augaaauauuauguuaaa

SEQ ID NO: 2990154 - RNA, 15 nt, Human
augaagauacugaaa

SEQ ID NO: 2990155 - RNA, 14 nt, Human
uuggggauauuuuu

SEQ ID NO: 2990156 - RNA, 15 nt, Human
uuggggcucccagcc

SEQ ID NO: 2990157 - RNA, 14 nt, Human
uuggggcucccagc

SEQ ID NO: 2990158 - RNA, 13 nt, Human
uuggggcucccag

SEQ ID NO: 2990159 - RNA, 22 nt, Human
uuggggcucccagccaggcccu

SEQ ID NO: 2990160 - RNA, 18 nt, Human
uuggggcucccagccagg

SEQ ID NO: 2990161 - RNA, 22 nt, Human
uuggggggcugaggugggagga

SEQ ID NO: 2990162 - RNA, 13 nt, Human
aucuuuuucuaac

SEQ ID NO: 2990163 - RNA, 15 nt, Human
augaaagcagggacu

SEQ ID NO: 2990164 - RNA, 12 nt, Human
augaaagauuca

SEQ ID NO: 2990165 - RNA, 18 nt, Human
aucuuugcagacaggcaa

SEQ ID NO: 2990166 - RNA, 22 nt, Human
uuggcgcugccccuggcagccc

SEQ ID NO: 2990167 - RNA, 23 nt, Human
uuggcgcugccccuggcagcccc

SEQ ID NO: 2990168 - RNA, 18 nt, Human
uuggcuagagguucaaag

SEQ ID NO: 2990169 - RNA, 21 nt, Human
uugguugguaacucuguaauu

SEQ ID NO: 2990170 - RNA, 17 nt, Human
uugguugggaugacuug

SEQ ID NO: 2990171 - RNA, 20 nt, Human
uugguucuggacuaaaacua

SEQ ID NO: 2990172 - RNA, 18 nt, Human
uugguucuggacuaaaac

SEQ ID NO: 2990173 - RNA, 15 nt, Human
uuguauaaaauaauu

SEQ ID NO: 2990174 - RNA, 16 nt, Human
uuguauaaaauaauuu

SEQ ID NO: 2990175 - RNA, 16 nt, Human
uuguaucacaaaucuu

SEQ ID NO: 2990176 - RNA, 22 nt, Human
augacacaugcaaggucauuuu

SEQ ID NO: 2990177 - RNA, 14 nt, Human
augacacaugcaag

SEQ ID NO: 2990178 - RNA, 17 nt, Human
uuguauaaaauaauuuu

SEQ ID NO: 2990179 - RNA, 23 nt, Human
augacuuggugucuaauguguag

SEQ ID NO: 2990180 - RNA, 18 nt, Human
augacuuggugucuaaug

SEQ ID NO: 2990181 - RNA, 17 nt, Human
augacuuacuguacaug

SEQ ID NO: 2990182 - RNA, 16 nt, Human
augacuuacuguacau

SEQ ID NO: 2990183 - RNA, 22 nt, Human
augagaaacuggcaaagcagaa

SEQ ID NO: 2990184 - RNA, 20 nt, Human
augagaaacuggcaaagcag

SEQ ID NO: 2990185 - RNA, 19 nt, Human
augacauugacuauuuuug

SEQ ID NO: 2990186 - RNA, 16 nt, Human
augacauugacuauuu

SEQ ID NO: 2990187 - RNA, 14 nt, Human
augacauucccugc

SEQ ID NO: 2990188 - RNA, 18 nt, Human
augacacgaauauugcug

SEQ ID NO: 2990189 - RNA, 14 nt, Human
augacuuacuguac

SEQ ID NO: 2990190 - RNA, 22 nt, Human
augacuuaagcacacuugacau

SEQ ID NO: 2990191 - RNA, 19 nt, Human
augagagacacacugaaga

SEQ ID NO: 2990192 - RNA, 17 nt, Human
augagagacacacugaa

SEQ ID NO: 2990193 - RNA, 14 nt, Human
augagagacacacu

SEQ ID NO: 2990194 - RNA, 13 nt, Human
augagagacacac

SEQ ID NO: 2990195 - RNA, 22 nt, Human
augagaaagguugaagcaccaa

SEQ ID NO: 2990196 - RNA, 21 nt, Human
augagaaagguugaagcacca

SEQ ID NO: 2990197 - RNA, 11 nt, Human
uugcacauuaa

SEQ ID NO: 2990198 - RNA, 23 nt, Human
uugcacauuaaaugacucuuccc

SEQ ID NO: 2990199 - RNA, 15 nt, Human
uugauucagacagcu

SEQ ID NO: 2990200 - RNA, 16 nt, Human
uugauucagacagcug

SEQ ID NO: 2990201 - RNA, 21 nt, Human
uugcacacuuuggcccagggu

SEQ ID NO: 2990202 - RNA, 19 nt, Human
uugauggugguauguuuuc

SEQ ID NO: 2990203 - RNA, 21 nt, Human
uugauucaccuccuaaaacaa

SEQ ID NO: 2990204 - RNA, 20 nt, Human
uugauucaccuccuaaaaca

SEQ ID NO: 2990205 - RNA, 22 nt, Human
uugauucaccuccuaaaacaac

SEQ ID NO: 2990206 - RNA, 14 nt, Human
uugauucagacagc

SEQ ID NO: 2990207 - RNA, 18 nt, Human
uugauggugguauguuuu

SEQ ID NO: 2990208 - RNA, 18 nt, Human
aucucuuaucuuacgaaa

SEQ ID NO: 2990209 - RNA, 20 nt, Human
aucucuuaucuuacgaaaaa

SEQ ID NO: 2990210 - RNA, 21 nt, Human
aucucauuuccaagcaaguau

SEQ ID NO: 2990211 - RNA, 23 nt, Human
aucucauuuccaagcaaguauua

SEQ ID NO: 2990212 - RNA, 14 nt, Human
aucucauuuccaag

SEQ ID NO: 2990213 - RNA, 12 nt, Human
aucucccccagc

SEQ ID NO: 2990214 - RNA, 13 nt, Human
aucucccccagcc

SEQ ID NO: 2990215 - RNA, 15 nt, Human
aucucacacaugagc

SEQ ID NO: 2990216 - RNA, 13 nt, Human
aucucaauauuuc

SEQ ID NO: 2990217 - RNA, 16 nt, Human
aucucacacaugagca

SEQ ID NO: 2990218 - RNA, 15 nt, Human
auccuaguuccacca

SEQ ID NO: 2990219 - RNA, 19 nt, Human
auccuaguuccaccaucaa

SEQ ID NO: 2990220 - RNA, 20 nt, Human
uugccuaauaugaugacugu

SEQ ID NO: 2990221 - RNA, 14 nt, Human
uugccguuauuaaa

SEQ ID NO: 2990222 - RNA, 19 nt, Human
uugccgucuaccugagggg

SEQ ID NO: 2990223 - RNA, 15 nt, Human
uugccgucuaccuga

SEQ ID NO: 2990224 - RNA, 18 nt, Human
uugccgucuaccugaggg

SEQ ID NO: 2990225 - RNA, 13 nt, Human
uugcccuguuaaa

SEQ ID NO: 2990226 - RNA, 13 nt, Human
uugccgucuaccu

SEQ ID NO: 2990227 - RNA, 12 nt, Human
aucuguuacaca

SEQ ID NO: 2990228 - RNA, 19 nt, Human
aucuugcucugcugacaga

SEQ ID NO: 2990229 - RNA, 17 nt, Human
aucuugcucugcugaca

SEQ ID NO: 2990230 - RNA, 18 nt, Human
aucuugaauuguaaggaa

SEQ ID NO: 2990231 - RNA, 17 nt, Human
aucuggguucacugcaa

SEQ ID NO: 2990232 - RNA, 19 nt, Human
aucuggguucacugcaacc

SEQ ID NO: 2990233 - RNA, 23 nt, Human
aucugugaaaggaaagagggagg

SEQ ID NO: 2990234 - RNA, 22 nt, Human
uuuagaugaaugucaguuguua

SEQ ID NO: 2990235 - RNA, 20 nt, Human
uuuagcuggaaaaguauguu

SEQ ID NO: 2990236 - RNA, 17 nt, Human
uuuagaugaaugucagu

SEQ ID NO: 2990237 - RNA, 18 nt, Human
uuuagaugaaugucaguu

SEQ ID NO: 2990238 - RNA, 19 nt, Human
augcccccuguggaugcug

SEQ ID NO: 2990239 - RNA, 15 nt, Human
augcccccuguggau

SEQ ID NO: 2990240 - RNA, 22 nt, Human
uuuagcuggaaaaguauguuag

SEQ ID NO: 2990241 - RNA, 15 nt, Human
uuuaguagagacagg

SEQ ID NO: 2990242 - RNA, 13 nt, Human
uuuauauaagcuu

SEQ ID NO: 2990243 - RNA, 20 nt, Human
uuuauggcuuuugugcauua

SEQ ID NO: 2990244 - RNA, 24 nt, Human
uuuauggcuuuugugcauuaucua

SEQ ID NO: 2990245 - RNA, 18 nt, Human
augcuguacauacuuuuu

SEQ ID NO: 2990246 - RNA, 16 nt, Human
augcuguacauacuuu

SEQ ID NO: 2990247 - RNA, 19 nt, Human
augcugucccuuacgugag

SEQ ID NO: 2990248 - RNA, 23 nt, Human
augcugucccuuacgugaguccu

SEQ ID NO: 2990249 - RNA, 22 nt, Human
augcugucuacacuaagagaga

SEQ ID NO: 2990250 - RNA, 16 nt, Human
auggaacacucugaga

SEQ ID NO: 2990251 - RNA, 15 nt, Human
auggaagacagcucu

SEQ ID NO: 2990252 - RNA, 14 nt, Human
auggaacacucuga

SEQ ID NO: 2990253 - RNA, 15 nt, Human
auggaacacucugag

SEQ ID NO: 2990254 - RNA, 11 nt, Human
auggaacacuc

SEQ ID NO: 2990255 - RNA, 15 nt, Human
augcuguacauacuu

SEQ ID NO: 2990256 - RNA, 12 nt, Human
augcuguacaua

SEQ ID NO: 2990257 - RNA, 22 nt, Human
augcuguaacuuucugaaauaa

SEQ ID NO: 2990258 - RNA, 16 nt, Human
augcuagaacucccuu

SEQ ID NO: 2990259 - RNA, 15 nt, Human
augcuagaacucccu

SEQ ID NO: 2990260 - RNA, 20 nt, Human
auggcuaguaucaaaagaaa

SEQ ID NO: 2990261 - RNA, 20 nt, Human
auggccuuugcuugaaagaa

SEQ ID NO: 2990262 - RNA, 21 nt, Human
auggccgggcgcgguggcuca

SEQ ID NO: 2990263 - RNA, 18 nt, Human
auggauuuccagccaaag

SEQ ID NO: 2990264 - RNA, 23 nt, Human
auggacguguuaugacuccagaa

SEQ ID NO: 2990265 - RNA, 19 nt, Human
auggacguguuaugacucc

SEQ ID NO: 2990266 - RNA, 20 nt, Human
auggacguguuaugacucca

SEQ ID NO: 2990267 - RNA, 23 nt, Human
auggcacaucagcacgauuucug

SEQ ID NO: 2990268 - RNA, 17 nt, Human
auggcacaucagcacga

SEQ ID NO: 2990269 - RNA, 13 nt, Human
uuucagaaaugug

SEQ ID NO: 2990270 - RNA, 16 nt, Human
auggaagacagcucuu

SEQ ID NO: 2990271 - RNA, 16 nt, Human
auggaauacucuuaua

SEQ ID NO: 2990272 - RNA, 17 nt, Human
auggaauacucuuauau

SEQ ID NO: 2990273 - RNA, 14 nt, Human
auggacaugaucuu

SEQ ID NO: 2990274 - RNA, 18 nt, Human
augcaguacuaacauuua

SEQ ID NO: 2990275 - RNA, 13 nt, Human
augcagguuuuau

SEQ ID NO: 2990276 - RNA, 20 nt, Human
augcaguacaggacauauau

SEQ ID NO: 2990277 - RNA, 19 nt, Human
augcaguacaggacauaua

SEQ ID NO: 2990278 - RNA, 17 nt, Human
augcaguacaggacaua

SEQ ID NO: 2990279 - RNA, 17 nt, Human
augcaguucugaagaag

SEQ ID NO: 2990280 - RNA, 15 nt, Human
augcaguucugaaga

SEQ ID NO: 2990281 - RNA, 13 nt, Human
augcagccucaca

SEQ ID NO: 2990282 - RNA, 14 nt, Human
augcagccucacag

SEQ ID NO: 2990283 - RNA, 15 nt, Human
augcagccucacagu

SEQ ID NO: 2990284 - RNA, 17 nt, Human
augcagccucacagucc

SEQ ID NO: 2990285 - RNA, 17 nt, Human
augccacuaaauugaca

SEQ ID NO: 2990286 - RNA, 15 nt, Human
augccacuaaauuga

SEQ ID NO: 2990287 - RNA, 19 nt, Human
augcaguucugaagaagau

SEQ ID NO: 2990288 - RNA, 18 nt, Human
augcaguucugaagaaga

SEQ ID NO: 2990289 - RNA, 16 nt, Human
uuguuuucaguguaca

SEQ ID NO: 2990290 - RNA, 13 nt, Human
uuguuuucagugu

SEQ ID NO: 2990291 - RNA, 15 nt, Human
augcacuuuguucug

SEQ ID NO: 2990292 - RNA, 14 nt, Human
uuguuuucauuauc

SEQ ID NO: 2990293 - RNA, 14 nt, Human
uuuaagaggcaggg

SEQ ID NO: 2990294 - RNA, 16 nt, Human
uuuaagugcugcauuu

SEQ ID NO: 2990295 - RNA, 15 nt, Human
uuuaagugcugcauu

SEQ ID NO: 2990296 - RNA, 19 nt, Human
uuuaagugcugcauuuaaa

SEQ ID NO: 2990297 - RNA, 17 nt, Human
uuuaagugcugcauuua

SEQ ID NO: 2990298 - RNA, 12 nt, Human
uuuaauucaguu

SEQ ID NO: 2990299 - RNA, 13 nt, Human
augauuucacagu

SEQ ID NO: 2990300 - RNA, 12 nt, Human
augauucccagc

SEQ ID NO: 2990301 - RNA, 21 nt, Human
augauucaaaugucuauaaac

SEQ ID NO: 2990302 - RNA, 21 nt, Human
augauucaacagguuuuccug

SEQ ID NO: 2990303 - RNA, 20 nt, Human
augauuaaccacuucagcug

SEQ ID NO: 2990304 - RNA, 21 nt, Human
augauuaaccacuucagcuga

SEQ ID NO: 2990305 - RNA, 22 nt, Human
augauuaugaauuacauuugua

SEQ ID NO: 2990306 - RNA, 19 nt, Human
augauuaaccacuucagcu

SEQ ID NO: 2990307 - RNA, 15 nt, Human
uuguugucugcaacu

SEQ ID NO: 2990308 - RNA, 15 nt, Human
augcaaagcacugac

SEQ ID NO: 2990309 - RNA, 13 nt, Human
augcaccagcccu

SEQ ID NO: 2990310 - RNA, 12 nt, Human
augcacuuuguu

SEQ ID NO: 2990311 - RNA, 14 nt, Human
augcaccagcccuu

SEQ ID NO: 2990312 - RNA, 23 nt, Human
uugugugaaagguacuucaaauc

SEQ ID NO: 2990313 - RNA, 13 nt, Human
uugugguuaaucu

SEQ ID NO: 2990314 - RNA, 17 nt, Human
uuguguguuuauuguca

SEQ ID NO: 2990315 - RNA, 19 nt, Human
uuguucuggcucuuccagg

SEQ ID NO: 2990316 - RNA, 20 nt, Human
uuguucuggcucuuccaggc

SEQ ID NO: 2990317 - RNA, 22 nt, Human
uuguucuggcucuuccaggcug

SEQ ID NO: 2990318 - RNA, 23 nt, Human
uuguucugaaaugucaguucuga

SEQ ID NO: 2990319 - RNA, 21 nt, Human
uuguucugaaaugucaguucu

SEQ ID NO: 2990320 - RNA, 18 nt, Human
uugugauacaaugcugug

SEQ ID NO: 2990321 - RNA, 21 nt, Human
uugugaggaagccgcuggggc

SEQ ID NO: 2990322 - RNA, 21 nt, Human
augagagacacacugaagaag

SEQ ID NO: 2990323 - RNA, 20 nt, Human
augagagacacacugaagaa

SEQ ID NO: 2990324 - RNA, 21 nt, Human
augagacuuuaaaagcauuuu

SEQ ID NO: 2990325 - RNA, 13 nt, Human
aucauuucaagaa

SEQ ID NO: 2990326 - RNA, 21 nt, Human
aucaggccaggcccucugccc

SEQ ID NO: 2990327 - RNA, 22 nt, Human
aucaggccaggcccucugccca

SEQ ID NO: 2990328 - RNA, 23 nt, Human
aucaggccaggcccucugcccac

SEQ ID NO: 2990329 - RNA, 20 nt, Human
aucauugaaaucuuuuugcu

SEQ ID NO: 2990330 - RNA, 20 nt, Human
aucaggccaggcccucugcc

SEQ ID NO: 2990331 - RNA, 21 nt, Human
aucauugaaaucuuuuugcuu

SEQ ID NO: 2990332 - RNA, 17 nt, Human
uucucuacucuagggaa

SEQ ID NO: 2990333 - RNA, 23 nt, Human
uucucuacccaucuuaaaaacaa

SEQ ID NO: 2990334 - RNA, 16 nt, Human
uucucuuuucaaaaca

SEQ ID NO: 2990335 - RNA, 14 nt, Human
uucugacccaugcu

SEQ ID NO: 2990336 - RNA, 13 nt, Human
uucugccgcagcc

SEQ ID NO: 2990337 - RNA, 14 nt, Human
auccauacauuugu

SEQ ID NO: 2990338 - RNA, 20 nt, Human
uucuggcuaugcauuugaaa

SEQ ID NO: 2990339 - RNA, 18 nt, Human
uucuggcuaugcauuuga

SEQ ID NO: 2990340 - RNA, 14 nt, Human
uucugccgcagccc

SEQ ID NO: 2990341 - RNA, 15 nt, Human
uucugccgcagcccu

SEQ ID NO: 2990342 - RNA, 16 nt, Human
uucuggcuaugcauuu

SEQ ID NO: 2990343 - RNA, 14 nt, Human
uugaaaugauuuca

SEQ ID NO: 2990344 - RNA, 21 nt, Human
uugaaauuuuuauuaaauuau

SEQ ID NO: 2990345 - RNA, 11 nt, Human
uugaaaucuuu

SEQ ID NO: 2990346 - RNA, 20 nt, Human
uugaaauauaggaacuuaaa

SEQ ID NO: 2990347 - RNA, 19 nt, Human
uugaaauauugacuuuuua

SEQ ID NO: 2990348 - RNA, 14 nt, Human
uucuuuuugaaaug

SEQ ID NO: 2990349 - RNA, 15 nt, Human
uucuuuuugaaaugu

SEQ ID NO: 2990350 - RNA, 17 nt, Human
uucuuuuaagaaucaau

SEQ ID NO: 2990351 - RNA, 20 nt, Human
auccuagucauucuucccua

SEQ ID NO: 2990352 - RNA, 13 nt, Human
auccuaguuccac

SEQ ID NO: 2990353 - RNA, 21 nt, Human
auccuaggcauuugcugaaua

SEQ ID NO: 2990354 - RNA, 18 nt, Human
auccuaauaaaaagguga

SEQ ID NO: 2990355 - RNA, 22 nt, Human
auccuaauaaaaaggugaccau

SEQ ID NO: 2990356 - RNA, 14 nt, Human
auccuaauaaaaag

SEQ ID NO: 2990357 - RNA, 15 nt, Human
auccuaauaaaaagg

SEQ ID NO: 2990358 - RNA, 16 nt, Human
auccuaauaaaaaggu

SEQ ID NO: 2990359 - RNA, 17 nt, Human
auccuaauaaaaaggug

SEQ ID NO: 2990360 - RNA, 12 nt, Human
auccuaauaaaa

SEQ ID NO: 2990361 - RNA, 21 nt, Human
auccuaagcuauucaguaaua

SEQ ID NO: 2990362 - RNA, 23 nt, Human
uugaacauuuggguuacuauuuc

SEQ ID NO: 2990363 - RNA, 15 nt, Human
uucuuggcccaggau

SEQ ID NO: 2990364 - RNA, 13 nt, Human
uucuugcaaagua

SEQ ID NO: 2990365 - RNA, 12 nt, Human
uucuugcaaagu

SEQ ID NO: 2990366 - RNA, 22 nt, Human
uucuuucuggcuaugcauuuga

SEQ ID NO: 2990367 - RNA, 14 nt, Human
uucuuuuaagaauc

SEQ ID NO: 2990368 - RNA, 12 nt, Human
uucuuuuaagaa

SEQ ID NO: 2990369 - RNA, 23 nt, Human
uucuuccucccucccucuuuccc

SEQ ID NO: 2990370 - RNA, 13 nt, Human
uucuuaauucuua

SEQ ID NO: 2990371 - RNA, 18 nt, Human
uucuguucuuucuggcua

SEQ ID NO: 2990372 - RNA, 11 nt, Human
uucuguucuuu

SEQ ID NO: 2990373 - RNA, 20 nt, Human
uucuguuuuucuaggccugg

SEQ ID NO: 2990374 - RNA, 13 nt, Human
uucucagcagagu

SEQ ID NO: 2990375 - RNA, 13 nt, Human
aucaggccaggcc

SEQ ID NO: 2990376 - RNA, 21 nt, Human
uucuaaguaaaaccacagcag

SEQ ID NO: 2990377 - RNA, 13 nt, Human
uucuauaauuuaa

SEQ ID NO: 2990378 - RNA, 14 nt, Human
uucuauaauuuaaa

SEQ ID NO: 2990379 - RNA, 21 nt, Human
uucucacugccaugccagcuu

SEQ ID NO: 2990380 - RNA, 22 nt, Human
uucuaaauaucccuuggacauu

SEQ ID NO: 2990381 - RNA, 19 nt, Human
uucuaaaucuccaaaauaa

SEQ ID NO: 2990382 - RNA, 13 nt, Human
uucgcuccugugu

SEQ ID NO: 2990383 - RNA, 19 nt, Human
uucuaaguaaaaccacagc

SEQ ID NO: 2990384 - RNA, 20 nt, Human
uucuaaguaaaaccacagca

SEQ ID NO: 2990385 - RNA, 17 nt, Human
uucuaaguaaaaccaca

SEQ ID NO: 2990386 - RNA, 21 nt, Human
uucgcaggauucuuccucccu

SEQ ID NO: 2990387 - RNA, 21 nt, Human
uuccuucaagaaugcaguacu

SEQ ID NO: 2990388 - RNA, 14 nt, Human
uuccuucaagaaug

SEQ ID NO: 2990389 - RNA, 20 nt, Human
aucaaauaugcaaagcacug

SEQ ID NO: 2990390 - RNA, 22 nt, Human
aucaaccccuucgcuccugugu

SEQ ID NO: 2990391 - RNA, 20 nt, Human
aucaaccccuucgcuccugu

SEQ ID NO: 2990392 - RNA, 19 nt, Human
aucaaccccuucgcuccug

SEQ ID NO: 2990393 - RNA, 14 nt, Human
aucaaguuauuuuu

SEQ ID NO: 2990394 - RNA, 20 nt, Human
auauuuuacauaaauuuagu

SEQ ID NO: 2990395 - RNA, 16 nt, Human
auauuuuacauaaauu

SEQ ID NO: 2990396 - RNA, 15 nt, Human
auauuuuacauaaau

SEQ ID NO: 2990397 - RNA, 19 nt, Human
uucccuuuuuuggcugcug

SEQ ID NO: 2990398 - RNA, 20 nt, Human
uucccuuuuuuggcugcuga

SEQ ID NO: 2990399 - RNA, 18 nt, Human
uucccuuuuuuggcugcu

SEQ ID NO: 2990400 - RNA, 16 nt, Human
auaugaugacuguuuu

SEQ ID NO: 2990401 - RNA, 13 nt, Human
auaugcacacauu

SEQ ID NO: 2990402 - RNA, 15 nt, Human
auaugcacacauuuu

SEQ ID NO: 2990403 - RNA, 14 nt, Human
auaugcacacauuu

SEQ ID NO: 2990404 - RNA, 16 nt, Human
auaugcacacauuuuu

SEQ ID NO: 2990405 - RNA, 16 nt, Human
auauguaacaagccac

SEQ ID NO: 2990406 - RNA, 17 nt, Human
auauguaacaagccacc

SEQ ID NO: 2990407 - RNA, 21 nt, Human
auaucuccgucaacucauauu

SEQ ID NO: 2990408 - RNA, 20 nt, Human
auaucuccgucaacucauau

SEQ ID NO: 2990409 - RNA, 19 nt, Human
auaucuccgucaacucaua

SEQ ID NO: 2990410 - RNA, 20 nt, Human
auaucugaaaauguaugugu

SEQ ID NO: 2990411 - RNA, 17 nt, Human
auaucugaaaauguaug

SEQ ID NO: 2990412 - RNA, 16 nt, Human
auaucugaaaauguau

SEQ ID NO: 2990413 - RNA, 13 nt, Human
uucauauuuaauu

SEQ ID NO: 2990414 - RNA, 17 nt, Human
uucaucccucuggggcu

SEQ ID NO: 2990415 - RNA, 21 nt, Human
uucaucccucuggggcuguuc

SEQ ID NO: 2990416 - RNA, 13 nt, Human
uucagaaaugugu

SEQ ID NO: 2990417 - RNA, 11 nt, Human
uucagaaaugu

SEQ ID NO: 2990418 - RNA, 16 nt, Human
uucagugccaaaaaca

SEQ ID NO: 2990419 - RNA, 12 nt, Human
uucagugccuua

SEQ ID NO: 2990420 - RNA, 13 nt, Human
uucagugccuuau

SEQ ID NO: 2990421 - RNA, 18 nt, Human
uucagugccuuauggaac

SEQ ID NO: 2990422 - RNA, 12 nt, Human
uucauacaaggc

SEQ ID NO: 2990423 - RNA, 12 nt, Human
uucccaaauuuc

SEQ ID NO: 2990424 - RNA, 18 nt, Human
uucccaacuccagaaagu

SEQ ID NO: 2990425 - RNA, 16 nt, Human
uucccaagcucugcuc

SEQ ID NO: 2990426 - RNA, 15 nt, Human
uucccaagcucugcu

SEQ ID NO: 2990427 - RNA, 14 nt, Human
uucccaagcucugc

SEQ ID NO: 2990428 - RNA, 13 nt, Human
uucccaagcucug

SEQ ID NO: 2990429 - RNA, 12 nt, Human
uucccaccucuc

SEQ ID NO: 2990430 - RNA, 22 nt, Human
uucccaccucucucacuccuug

SEQ ID NO: 2990431 - RNA, 18 nt, Human
uucccaagcucugcuccu

SEQ ID NO: 2990432 - RNA, 21 nt, Human
uuccaggggugggacacccug

SEQ ID NO: 2990433 - RNA, 17 nt, Human
uuccagugaggcucugc

SEQ ID NO: 2990434 - RNA, 19 nt, Human
uuccagugaggcucugccc

SEQ ID NO: 2990435 - RNA, 20 nt, Human
uuccagugaggcucugcccu

SEQ ID NO: 2990436 - RNA, 21 nt, Human
uuccagugaggcucugcccuu

SEQ ID NO: 2990437 - RNA, 22 nt, Human
uuccagugaggcucugcccuug

SEQ ID NO: 2990438 - RNA, 23 nt, Human
uucccaaagcagugcaugcuguc

SEQ ID NO: 2990439 - RNA, 15 nt, Human
auauguggaguucau

SEQ ID NO: 2990440 - RNA, 16 nt, Human
auauguggaguucauc

SEQ ID NO: 2990441 - RNA, 17 nt, Human
uuccaaggguacuaagg

SEQ ID NO: 2990442 - RNA, 15 nt, Human
uuccaaggguacuaa

SEQ ID NO: 2990443 - RNA, 19 nt, Human
uuccaccaucaagccacca

SEQ ID NO: 2990444 - RNA, 22 nt, Human
uuccacaagagcccaggccucc

SEQ ID NO: 2990445 - RNA, 18 nt, Human
uuccaccaucaagccacc

SEQ ID NO: 2990446 - RNA, 17 nt, Human
uuccaggggugggacac

SEQ ID NO: 2990447 - RNA, 23 nt, Human
uucaagaaguccccucuccucca

SEQ ID NO: 2990448 - RNA, 23 nt, Human
uucaagaaugcaguacuaacauu

SEQ ID NO: 2990449 - RNA, 18 nt, Human
uucaaacagucucaggaa

SEQ ID NO: 2990450 - RNA, 21 nt, Human
uucaagcgauucuucugcuuc

SEQ ID NO: 2990451 - RNA, 17 nt, Human
uuauuuuuagacagagu

SEQ ID NO: 2990452 - RNA, 18 nt, Human
uuauuuuuagacagaguc

SEQ ID NO: 2990453 - RNA, 22 nt, Human
auaggaauugacccacaagaaa

SEQ ID NO: 2990454 - RNA, 17 nt, Human
auaggcguaacuaauuu

SEQ ID NO: 2990455 - RNA, 12 nt, Human
auaggaaaaacu

SEQ ID NO: 2990456 - RNA, 14 nt, Human
auaggaaaaacuga

SEQ ID NO: 2990457 - RNA, 16 nt, Human
auaggaaaaacugauu

SEQ ID NO: 2990458 - RNA, 17 nt, Human
auaggaaaaacugauuu

SEQ ID NO: 2990459 - RNA, 15 nt, Human
auagcuuuuuucucu

SEQ ID NO: 2990460 - RNA, 23 nt, Human
uucacaagacccaaaaggcagaa

SEQ ID NO: 2990461 - RNA, 22 nt, Human
uucacaagacccaaaaggcaga

SEQ ID NO: 2990462 - RNA, 20 nt, Human
uucacagaugggugcuugga

SEQ ID NO: 2990463 - RNA, 15 nt, Human
uucacaguucucucc

SEQ ID NO: 2990464 - RNA, 20 nt, Human
uucacaguucucuccuucuu

SEQ ID NO: 2990465 - RNA, 13 nt, Human
uucacaguucucu

SEQ ID NO: 2990466 - RNA, 17 nt, Human
auaguggcuuaaaacaa

SEQ ID NO: 2990467 - RNA, 15 nt, Human
auaguggugugauuu

SEQ ID NO: 2990468 - RNA, 20 nt, Human
auaguuguaccgcaauguga

SEQ ID NO: 2990469 - RNA, 22 nt, Human
auaguuggcuaggaccccucca

SEQ ID NO: 2990470 - RNA, 22 nt, Human
auaguuaagcgugcauaaguua

SEQ ID NO: 2990471 - RNA, 19 nt, Human
auauauaacaaugcuguau

SEQ ID NO: 2990472 - RNA, 13 nt, Human
auauauaaccagu

SEQ ID NO: 2990473 - RNA, 12 nt, Human
auauauaaccag

SEQ ID NO: 2990474 - RNA, 17 nt, Human
auauaacaaugcuguau

SEQ ID NO: 2990475 - RNA, 21 nt, Human
auauauauuuuuuucugaaau

SEQ ID NO: 2990476 - RNA, 14 nt, Human
auucucagcagagu

SEQ ID NO: 2990477 - RNA, 15 nt, Human
auucucagcagagug

SEQ ID NO: 2990478 - RNA, 13 nt, Human
auucuccaccugc

SEQ ID NO: 2990479 - RNA, 20 nt, Human
auucucagaaucucaaauaa

SEQ ID NO: 2990480 - RNA, 18 nt, Human
auucucagaaucucaaau

SEQ ID NO: 2990481 - RNA, 16 nt, Human
auugacagauugaauu

SEQ ID NO: 2990482 - RNA, 16 nt, Human
auucucagcagagugc

SEQ ID NO: 2990483 - RNA, 20 nt, Human
auugacacuuaaaaaugguu

SEQ ID NO: 2990484 - RNA, 16 nt, Human
auucuccaccugccag

SEQ ID NO: 2990485 - RNA, 17 nt, Human
auucuccaccugccagg

SEQ ID NO: 2990486 - RNA, 16 nt, Human
auucuacuuugagugc

SEQ ID NO: 2990487 - RNA, 13 nt, Human
auucuacuuugag

SEQ ID NO: 2990488 - RNA, 14 nt, Human
auuccuaaaauuau

SEQ ID NO: 2990489 - RNA, 19 nt, Human
auuccuaaaauuauggaaa

SEQ ID NO: 2990490 - RNA, 14 nt, Human
auucucagaaucuc

SEQ ID NO: 2990491 - RNA, 22 nt, Human
auucucacagcuccaagaauuu

SEQ ID NO: 2990492 - RNA, 21 nt, Human
auucucacagcuccaagaauu

SEQ ID NO: 2990493 - RNA, 19 nt, Human
auucucacagcuccaagaa

SEQ ID NO: 2990494 - RNA, 18 nt, Human
auucuccaccugccaggg

SEQ ID NO: 2990495 - RNA, 18 nt, Human
auugacaggauuauugga

SEQ ID NO: 2990496 - RNA, 21 nt, Human
auugacccacaagaaaugaaa

SEQ ID NO: 2990497 - RNA, 15 nt, Human
auugcaacaggcugg

SEQ ID NO: 2990498 - RNA, 13 nt, Human
auugaccugaggc

SEQ ID NO: 2990499 - RNA, 21 nt, Human
auugcaacaggcugggcuuca

SEQ ID NO: 2990500 - RNA, 19 nt, Human
auugcggacagccacggcc

SEQ ID NO: 2990501 - RNA, 18 nt, Human
auugcggacagccacggc

SEQ ID NO: 2990502 - RNA, 16 nt, Human
auugcggacagccacg

SEQ ID NO: 2990503 - RNA, 21 nt, Human
auugcccacgcuggagugcag

SEQ ID NO: 2990504 - RNA, 17 nt, Human
auugcccacgcuggagu

SEQ ID NO: 2990505 - RNA, 23 nt, Human
auugccauuucuuccacaagagc

SEQ ID NO: 2990506 - RNA, 18 nt, Human
auuuaaacacauuaaagg

SEQ ID NO: 2990507 - RNA, 17 nt, Human
auuuaaaagagcaggcc

SEQ ID NO: 2990508 - RNA, 19 nt, Human
auuuaaagcuuauuaaaac

SEQ ID NO: 2990509 - RNA, 17 nt, Human
auuuaaacacauuaaag

SEQ ID NO: 2990510 - RNA, 14 nt, Human
auuuaaaagagcag

SEQ ID NO: 2990511 - RNA, 20 nt, Human
auuuaacagaaauguacagc

SEQ ID NO: 2990512 - RNA, 19 nt, Human
auuuaacagaaauguacag

SEQ ID NO: 2990513 - RNA, 17 nt, Human
auuuaacagaaauguac

SEQ ID NO: 2990514 - RNA, 16 nt, Human
auuuaacagaaaugua

SEQ ID NO: 2990515 - RNA, 15 nt, Human
auuuaacagaaaugu

SEQ ID NO: 2990516 - RNA, 16 nt, Human
auuuacaaaugggaaa

SEQ ID NO: 2990517 - RNA, 15 nt, Human
auuuacaaauguuuu

SEQ ID NO: 2990518 - RNA, 23 nt, Human
auuuaauuuuuuugagacagagu

SEQ ID NO: 2990519 - RNA, 19 nt, Human
auuuaauuuuuuugagaca

SEQ ID NO: 2990520 - RNA, 16 nt, Human
auuuaaccucuaaauu

SEQ ID NO: 2990521 - RNA, 18 nt, Human
auuuaaccucuaaauucu

SEQ ID NO: 2990522 - RNA, 23 nt, Human
auuggcuuuggguugcaggaccu

SEQ ID NO: 2990523 - RNA, 14 nt, Human
auuguauuacaaau

SEQ ID NO: 2990524 - RNA, 13 nt, Human
auugugccccugc

SEQ ID NO: 2990525 - RNA, 23 nt, Human
auuucuuuugccguuauuaaaaa

SEQ ID NO: 2990526 - RNA, 18 nt, Human
auuugagguuaagacaaa

SEQ ID NO: 2990527 - RNA, 22 nt, Human
auuugaggucuguucuuuccaa

SEQ ID NO: 2990528 - RNA, 17 nt, Human
auuugagcagggcucag

SEQ ID NO: 2990529 - RNA, 23 nt, Human
auuugaggucuguucuuuccaaa

SEQ ID NO: 2990530 - RNA, 16 nt, Human
auuugagcagggcuca

SEQ ID NO: 2990531 - RNA, 20 nt, Human
auuucuuuugccguuauuaa

SEQ ID NO: 2990532 - RNA, 20 nt, Human
auuuggugguuucagaaaug

SEQ ID NO: 2990533 - RNA, 18 nt, Human
auuuggugguuucagaaa

SEQ ID NO: 2990534 - RNA, 17 nt, Human
auuugguuuucacauug

SEQ ID NO: 2990535 - RNA, 15 nt, Human
auuugguuuucacau

SEQ ID NO: 2990536 - RNA, 22 nt, Human
auuugguuuucacauuggaaac

SEQ ID NO: 2990537 - RNA, 21 nt, Human
auuugguuuucacauuggaaa

SEQ ID NO: 2990538 - RNA, 18 nt, Human
auuuguaguguuggagaa

SEQ ID NO: 2990539 - RNA, 17 nt, Human
auuuggguuacuauuuc

SEQ ID NO: 2990540 - RNA, 23 nt, Human
auuugguaaggggaauugaggac

SEQ ID NO: 2990541 - RNA, 17 nt, Human
auuuggugguuucagaa

SEQ ID NO: 2990542 - RNA, 16 nt, Human
auuuauuauggcacau

SEQ ID NO: 2990543 - RNA, 22 nt, Human
auuuccugggagcuuuuguaga

SEQ ID NO: 2990544 - RNA, 23 nt, Human
auuuccugggagcuuuuguagaa

SEQ ID NO: 2990545 - RNA, 14 nt, Human
auuuccugugucuu

SEQ ID NO: 2990546 - RNA, 13 nt, Human
auuucuaaaucuc

SEQ ID NO: 2990547 - RNA, 12 nt, Human
auuucuaaaucu

SEQ ID NO: 2990548 - RNA, 21 nt, Human
auuucuaaaucuccaaaauaa

SEQ ID NO: 2990549 - RNA, 20 nt, Human
auuuauuaaaugcccagccc

SEQ ID NO: 2990550 - RNA, 22 nt, Human
auuuauuacuguaagaaaauau

SEQ ID NO: 2990551 - RNA, 13 nt, Human
auuuauuauggca

SEQ ID NO: 2990552 - RNA, 15 nt, Human
auuuuauuaugcaug

SEQ ID NO: 2990553 - RNA, 14 nt, Human
auuuuauuaugcau

SEQ ID NO: 2990554 - RNA, 17 nt, Human
auuuuauuaugcaugaa

SEQ ID NO: 2990555 - RNA, 13 nt, Human
auuuuauuaugca

SEQ ID NO: 2990556 - RNA, 21 nt, Human
auuuguauaaaauaauuuuua

SEQ ID NO: 2990557 - RNA, 15 nt, Human
auuuguaucacaaau

SEQ ID NO: 2990558 - RNA, 14 nt, Human
auuuuaauaauguu

SEQ ID NO: 2990559 - RNA, 12 nt, Human
auuuuaauaaug

SEQ ID NO: 2990560 - RNA, 15 nt, Human
auuuuaauaauguuu

SEQ ID NO: 2990561 - RNA, 11 nt, Human
auuauuaacaa

SEQ ID NO: 2990562 - RNA, 23 nt, Human
auuauuuauuaaaugcccagccc

SEQ ID NO: 2990563 - RNA, 18 nt, Human
auuaucucaaaacugcac

SEQ ID NO: 2990564 - RNA, 23 nt, Human
auuaucucaaaacugcacuguca

SEQ ID NO: 2990565 - RNA, 17 nt, Human
auuauauuuacaaaugg

SEQ ID NO: 2990566 - RNA, 15 nt, Human
auuauauuuacaaau

SEQ ID NO: 2990567 - RNA, 16 nt, Human
auuauauuuacaaaug

SEQ ID NO: 2990568 - RNA, 15 nt, Human
auuaaguaaugauaa

SEQ ID NO: 2990569 - RNA, 13 nt, Human
auuaaguaaugau

SEQ ID NO: 2990570 - RNA, 23 nt, Human
uuuuuuaaaaaagaaacauuugg

SEQ ID NO: 2990571 - RNA, 22 nt, Human
uuuuuguuccacaaguuaaaua

SEQ ID NO: 2990572 - RNA, 20 nt, Human
auuaagagagucuauuuacg

SEQ ID NO: 2990573 - RNA, 18 nt, Human
auuaagagguaagacuua

SEQ ID NO: 2990574 - RNA, 13 nt, Human
auuacauuuguau

SEQ ID NO: 2990575 - RNA, 19 nt, Human
auuaccacagacauacuaa

SEQ ID NO: 2990576 - RNA, 20 nt, Human
auuacauuuguauaaaauaa

SEQ ID NO: 2990577 - RNA, 15 nt, Human
auuacauuuguauaa

SEQ ID NO: 2990578 - RNA, 22 nt, Human
auuaccugaauuuuggcugugu

SEQ ID NO: 2990579 - RNA, 20 nt, Human
auuccacuuauaggaauuga

SEQ ID NO: 2990580 - RNA, 19 nt, Human
auuccccaggaggccagcc

SEQ ID NO: 2990581 - RNA, 16 nt, Human
auuccccaggaggcca

SEQ ID NO: 2990582 - RNA, 22 nt, Human
auuccccacccugaaagcccug

SEQ ID NO: 2990583 - RNA, 20 nt, Human
auuccccagauugcaacagg

SEQ ID NO: 2990584 - RNA, 14 nt, Human
auucagcucugcaa

SEQ ID NO: 2990585 - RNA, 18 nt, Human
auucagcucugcaagaau

SEQ ID NO: 2990586 - RNA, 21 nt, Human
auucaggaagcucagggccug

SEQ ID NO: 2990587 - RNA, 22 nt, Human
auucaggaagcucagggccugg

SEQ ID NO: 2990588 - RNA, 23 nt, Human
auucaggaagcucagggccuggc

SEQ ID NO: 2990589 - RNA, 16 nt, Human
auucaguuguuagugu

SEQ ID NO: 2990590 - RNA, 21 nt, Human
auucaguuguuagugugucuu

SEQ ID NO: 2990591 - RNA, 14 nt, Human
auucaaacagucuc

SEQ ID NO: 2990592 - RNA, 15 nt, Human
auucaaacagucuca

SEQ ID NO: 2990593 - RNA, 12 nt, Human
uuugcacauuaa

SEQ ID NO: 2990594 - RNA, 22 nt, Human
uuugccauguuggccaggcugg

SEQ ID NO: 2990595 - RNA, 16 nt, Human
uuugcacauuaaauga

SEQ ID NO: 2990596 - RNA, 13 nt, Human
uuugcacauuaaa

SEQ ID NO: 2990597 - RNA, 22 nt, Human
uuugcacacuuuggcccagggu

SEQ ID NO: 2990598 - RNA, 15 nt, Human
auggcuauaggugcu

SEQ ID NO: 2990599 - RNA, 12 nt, Human
uuugcucaugga

SEQ ID NO: 2990600 - RNA, 11 nt, Human
uuugcucaugg

SEQ ID NO: 2990601 - RNA, 19 nt, Human
uuugcuaagcauuccaacu

SEQ ID NO: 2990602 - RNA, 10 nt, Human
uuuggccaga

SEQ ID NO: 2990603 - RNA, 12 nt, Human
uuuggccagaag

SEQ ID NO: 2990604 - RNA, 14 nt, Human
uuuggccagaaguc

SEQ ID NO: 2990605 - RNA, 12 nt, Human
uuuggcccaggg

SEQ ID NO: 2990606 - RNA, 14 nt, Human
uuuggggauauuuu

SEQ ID NO: 2990607 - RNA, 22 nt, Human
uuugggaggccaaggugggagg

SEQ ID NO: 2990608 - RNA, 13 nt, Human
uuuggggaagaac

SEQ ID NO: 2990609 - RNA, 23 nt, Human
augucuagaccaggaccucccuc

SEQ ID NO: 2990610 - RNA, 22 nt, Human
augucuauaaaccgaacugaug

SEQ ID NO: 2990611 - RNA, 23 nt, Human
augucucuuuaaugucacaggca

SEQ ID NO: 2990612 - RNA, 15 nt, Human
augucaguuguuauu

SEQ ID NO: 2990613 - RNA, 21 nt, Human
augucaguucugauauggaag

SEQ ID NO: 2990614 - RNA, 16 nt, Human
augucaguucugauau

SEQ ID NO: 2990615 - RNA, 17 nt, Human
augucaguuguuauuua

SEQ ID NO: 2990616 - RNA, 23 nt, Human
auguccaagaagcccaggaaagg

SEQ ID NO: 2990617 - RNA, 19 nt, Human
auguccaagaagcccagga

SEQ ID NO: 2990618 - RNA, 18 nt, Human
auguccaagaagcccagg

SEQ ID NO: 2990619 - RNA, 15 nt, Human
augucagugugacug

SEQ ID NO: 2990620 - RNA, 16 nt, Human
augucagugugacuga

SEQ ID NO: 2990621 - RNA, 21 nt, Human
augucagugugacugaucucu

SEQ ID NO: 2990622 - RNA, 14 nt, Human
augucaguucugau

SEQ ID NO: 2990623 - RNA, 22 nt, Human
uuugggggaaaauuuagaaaua

SEQ ID NO: 2990624 - RNA, 15 nt, Human
auguaucaaugagua

SEQ ID NO: 2990625 - RNA, 15 nt, Human
auguaucugagcagg

SEQ ID NO: 2990626 - RNA, 12 nt, Human
auguauguguaa

SEQ ID NO: 2990627 - RNA, 17 nt, Human
uuuuaagacuuugguua

SEQ ID NO: 2990628 - RNA, 16 nt, Human
uuuuaagaggcagggu

SEQ ID NO: 2990629 - RNA, 15 nt, Human
uuuuaagaggcaggg

SEQ ID NO: 2990630 - RNA, 22 nt, Human
uuuuaagggcccuuuuucaaua

SEQ ID NO: 2990631 - RNA, 15 nt, Human
uuuuaagugcugcau

SEQ ID NO: 2990632 - RNA, 14 nt, Human
uuuuaaaagaauga

SEQ ID NO: 2990633 - RNA, 13 nt, Human
uuuuaaaaaagaa

SEQ ID NO: 2990634 - RNA, 18 nt, Human
uuuguuugaacugauaaa

SEQ ID NO: 2990635 - RNA, 21 nt, Human
uuuuaaaaaacugcugacugu

SEQ ID NO: 2990636 - RNA, 22 nt, Human
uuuguaacuguuuagaugaaug

SEQ ID NO: 2990637 - RNA, 23 nt, Human
uuuguaacuguuuagaugaaugu

SEQ ID NO: 2990638 - RNA, 13 nt, Human
uuuguagagccag

SEQ ID NO: 2990639 - RNA, 17 nt, Human
uuuguagaagucacauu

SEQ ID NO: 2990640 - RNA, 14 nt, Human
uuuguuugaacuga

SEQ ID NO: 2990641 - RNA, 13 nt, Human
uuuguuugaacug

SEQ ID NO: 2990642 - RNA, 12 nt, Human
uuuguuugaacu

SEQ ID NO: 2990643 - RNA, 18 nt, Human
uuugugaggaagccgcug

SEQ ID NO: 2990644 - RNA, 19 nt, Human
uuugugaggaagccgcugg

SEQ ID NO: 2990645 - RNA, 15 nt, Human
uuuuauuauuaacaa

SEQ ID NO: 2990646 - RNA, 23 nt, Human
uuuuccaguaaugagcuuaagaa

SEQ ID NO: 2990647 - RNA, 19 nt, Human
uuuuccagguuuaagcugu

SEQ ID NO: 2990648 - RNA, 16 nt, Human
uuuucuauaauuuaaa

SEQ ID NO: 2990649 - RNA, 23 nt, Human
uuuuauggaggcuuugcauagau

SEQ ID NO: 2990650 - RNA, 19 nt, Human
uuuuauggcacuaguauuu

SEQ ID NO: 2990651 - RNA, 14 nt, Human
uuuuauaauuuugu

SEQ ID NO: 2990652 - RNA, 17 nt, Human
uuuuauaaacuuuaccu

SEQ ID NO: 2990653 - RNA, 14 nt, Human
uuuuauaaacuuua

SEQ ID NO: 2990654 - RNA, 19 nt, Human
uuuuauaaacuuuaccuuu

SEQ ID NO: 2990655 - RNA, 15 nt, Human
auguugacaugggac

SEQ ID NO: 2990656 - RNA, 19 nt, Human
auguucaucaaugaaugaa

SEQ ID NO: 2990657 - RNA, 21 nt, Human
auguucaucauccuaagcuau

SEQ ID NO: 2990658 - RNA, 17 nt, Human
uuuuaagugcugcauuu

SEQ ID NO: 2990659 - RNA, 16 nt, Human
uuuuaagugcugcauu

SEQ ID NO: 2990660 - RNA, 21 nt, Human
uuuuaagugcugcauuuaaaa

SEQ ID NO: 2990661 - RNA, 14 nt, Human
auguuggccaggcu

SEQ ID NO: 2990662 - RNA, 13 nt, Human
auguuggccaggc

SEQ ID NO: 2990663 - RNA, 16 nt, Human
auguuggccaggcugg

SEQ ID NO: 2990664 - RNA, 23 nt, Human
uuuuagaguugauacuacaguuu

SEQ ID NO: 2990665 - RNA, 13 nt, Human
uuuuauaaacuuu

SEQ ID NO: 2990666 - RNA, 12 nt, Human
uuuuauaaacuu

SEQ ID NO: 2990667 - RNA, 13 nt, Human
auuaaagugccca

SEQ ID NO: 2990668 - RNA, 21 nt, Human
auuaaacuuaaucuaaaugga

SEQ ID NO: 2990669 - RNA, 19 nt, Human
auuaaacuuaaucuaaaug

SEQ ID NO: 2990670 - RNA, 16 nt, Human
auuaaacuuaaucuaa

SEQ ID NO: 2990671 - RNA, 17 nt, Human
auuaaacuuaaucuaaa

SEQ ID NO: 2990672 - RNA, 17 nt, Human
auuaaccacuucagcug

SEQ ID NO: 2990673 - RNA, 18 nt, Human
auuaaccacuucagcuga

SEQ ID NO: 2990674 - RNA, 20 nt, Human
auuaaccacuucagcugacu

SEQ ID NO: 2990675 - RNA, 20 nt, Human
auuaacuuuuauaaacuuua

SEQ ID NO: 2990676 - RNA, 19 nt, Human
auuaacuuuuauaaacuuu

SEQ ID NO: 2990677 - RNA, 17 nt, Human
auuaacuuuuauaaacu

SEQ ID NO: 2990678 - RNA, 16 nt, Human
auuaacuuuuauaaac

SEQ ID NO: 2990679 - RNA, 12 nt, Human
auuaacuuuuau

SEQ ID NO: 2990680 - RNA, 23 nt, Human
auuaacuuuuauaaacuuuaccu

SEQ ID NO: 2990681 - RNA, 14 nt, Human
auuaagaaagacua

SEQ ID NO: 2990682 - RNA, 13 nt, Human
auuaagaaagacu

SEQ ID NO: 2990683 - RNA, 19 nt, Human
uuuucucacagaagaugaa

SEQ ID NO: 2990684 - RNA, 14 nt, Human
auguuuuccaugag

SEQ ID NO: 2990685 - RNA, 18 nt, Human
auguuucaaacauauaua

SEQ ID NO: 2990686 - RNA, 20 nt, Human
auguuuauuuaaaagagcag

SEQ ID NO: 2990687 - RNA, 18 nt, Human
auguuuuucuucucccuc

SEQ ID NO: 2990688 - RNA, 17 nt, Human
auguuuuucuucucccu

SEQ ID NO: 2990689 - RNA, 15 nt, Human
auuaaaagaauauuu

SEQ ID NO: 2990690 - RNA, 16 nt, Human
auuaaaagaauauuuu

SEQ ID NO: 2990691 - RNA, 17 nt, Human
aguuuugaagauucuau

SEQ ID NO: 2990692 - RNA, 18 nt, Human
aguuuugaagauucuaug

SEQ ID NO: 2990693 - RNA, 23 nt, Human
aguuuucugagaaagacuauuca

SEQ ID NO: 2990694 - RNA, 19 nt, Human
aguuuucugagaaagacua

SEQ ID NO: 2990695 - RNA, 18 nt, Human
aguuuucugagaaagacu

SEQ ID NO: 2990696 - RNA, 23 nt, Human
aguuuuuauggcuuuugugcauu

SEQ ID NO: 2990697 - RNA, 22 nt, Human
auaaaauaauuuuuauauuuga

SEQ ID NO: 2990698 - RNA, 20 nt, Human
uuaagaaaaaggaugcacag

SEQ ID NO: 2990699 - RNA, 19 nt, Human
uuaagaaaaaggaugcaca

SEQ ID NO: 2990700 - RNA, 21 nt, Human
uuaagaaaaaggaugcacaga

SEQ ID NO: 2990701 - RNA, 12 nt, Human
auaaaauaauuu

SEQ ID NO: 2990702 - RNA, 20 nt, Human
uuaagaacuaaaauguucua

SEQ ID NO: 2990703 - RNA, 16 nt, Human
uuaagaacuaaaaugu

SEQ ID NO: 2990704 - RNA, 19 nt, Human
uuaagaacuaaaauguucu

SEQ ID NO: 2990705 - RNA, 22 nt, Human
uuaagaaagacuaucuaaaugu

SEQ ID NO: 2990706 - RNA, 13 nt, Human
uuaaggguaugau

SEQ ID NO: 2990707 - RNA, 9 nt, Human
uuaaggugg

SEQ ID NO: 2990708 - RNA, 16 nt, Human
uuaagugcugcauuua

SEQ ID NO: 2990709 - RNA, 15 nt, Human
uuaagugcugcauuu

SEQ ID NO: 2990710 - RNA, 19 nt, Human
uuaagugcugcauuuaaaa

SEQ ID NO: 2990711 - RNA, 14 nt, Human
uuaagugcugcauu

SEQ ID NO: 2990712 - RNA, 18 nt, Human
uuaaugaaagacuguaca

SEQ ID NO: 2990713 - RNA, 22 nt, Human
uuaaucugguuuauuuuuguuc

SEQ ID NO: 2990714 - RNA, 19 nt, Human
uuaaugaaagacuguacaa

SEQ ID NO: 2990715 - RNA, 13 nt, Human
uuaaucauuaggu

SEQ ID NO: 2990716 - RNA, 23 nt, Human
uuaaucauuaggugugacugaau

SEQ ID NO: 2990717 - RNA, 22 nt, Human
uuaaucauuaggugugacugaa

SEQ ID NO: 2990718 - RNA, 14 nt, Human
uuaaacacauuaaa

SEQ ID NO: 2990719 - RNA, 15 nt, Human
uuaaaaaucucaaau

SEQ ID NO: 2990720 - RNA, 14 nt, Human
uuaaaaaucucaaa

SEQ ID NO: 2990721 - RNA, 16 nt, Human
uuaaaaaucucaaauu

SEQ ID NO: 2990722 - RNA, 19 nt, Human
uuaaacaugcuguacauac

SEQ ID NO: 2990723 - RNA, 23 nt, Human
uuaaacaugcuguacauacuuuu

SEQ ID NO: 2990724 - RNA, 22 nt, Human
uuaaacaugcuguacauacuuu

SEQ ID NO: 2990725 - RNA, 21 nt, Human
uuaaacaugcuguacauacuu

SEQ ID NO: 2990726 - RNA, 22 nt, Human
uuaaacauauccaaguuugaau

SEQ ID NO: 2990727 - RNA, 15 nt, Human
uuaaauaaugugaaa

SEQ ID NO: 2990728 - RNA, 13 nt, Human
uuaaauagaugac

SEQ ID NO: 2990729 - RNA, 14 nt, Human
uuaaauagaugaca

SEQ ID NO: 2990730 - RNA, 16 nt, Human
uuaaauagaugacauu

SEQ ID NO: 2990731 - RNA, 18 nt, Human
uuaaauaaugugaaacug

SEQ ID NO: 2990732 - RNA, 16 nt, Human
uuaaauaaugugaaac

SEQ ID NO: 2990733 - RNA, 13 nt, Human
uuaaauaauguga

SEQ ID NO: 2990734 - RNA, 16 nt, Human
uuaacagaaauguaca

SEQ ID NO: 2990735 - RNA, 19 nt, Human
uuaacagaaauguacagca

SEQ ID NO: 2990736 - RNA, 20 nt, Human
uuaacagaaauguacagcaa

SEQ ID NO: 2990737 - RNA, 13 nt, Human
uguuucaaacaua

SEQ ID NO: 2990738 - RNA, 23 nt, Human
aguugccagucaccccggccacc

SEQ ID NO: 2990739 - RNA, 19 nt, Human
aguugggcuuccucauagu

SEQ ID NO: 2990740 - RNA, 13 nt, Human
aguugggcuuccu

SEQ ID NO: 2990741 - RNA, 14 nt, Human
aguuuaaauuguaa

SEQ ID NO: 2990742 - RNA, 11 nt, Human
aguuggucccc

SEQ ID NO: 2990743 - RNA, 13 nt, Human
aguuggucccccu

SEQ ID NO: 2990744 - RNA, 17 nt, Human
aguuggucccccuucca

SEQ ID NO: 2990745 - RNA, 13 nt, Human
uuaaaaaaaaucc

SEQ ID NO: 2990746 - RNA, 23 nt, Human
auaaauauugguugggaugacuu

SEQ ID NO: 2990747 - RNA, 15 nt, Human
auaaauaguuuauga

SEQ ID NO: 2990748 - RNA, 14 nt, Human
auaaauaaaaauaa

SEQ ID NO: 2990749 - RNA, 13 nt, Human
auaaauaaaaaua

SEQ ID NO: 2990750 - RNA, 18 nt, Human
uuaauugggcacuauuua

SEQ ID NO: 2990751 - RNA, 13 nt, Human
uuaauugggcacu

SEQ ID NO: 2990752 - RNA, 22 nt, Human
auaacgauaaaagacagugaaa

SEQ ID NO: 2990753 - RNA, 11 nt, Human
auaaauuauuu

SEQ ID NO: 2990754 - RNA, 20 nt, Human
auaaccaguguuguggauuu

SEQ ID NO: 2990755 - RNA, 15 nt, Human
uuacugaacaguaac

SEQ ID NO: 2990756 - RNA, 23 nt, Human
uuacugaacaguaacauagcugu

SEQ ID NO: 2990757 - RNA, 19 nt, Human
uuagaaacacaacuauauu

SEQ ID NO: 2990758 - RNA, 13 nt, Human
uuagacagucccu

SEQ ID NO: 2990759 - RNA, 20 nt, Human
uuagacagagucucacuguu

SEQ ID NO: 2990760 - RNA, 13 nt, Human
uuagacagagucu

SEQ ID NO: 2990761 - RNA, 19 nt, Human
uuacccucauguucuuaau

SEQ ID NO: 2990762 - RNA, 23 nt, Human
auaacuuaaugaaaacaaugcag

SEQ ID NO: 2990763 - RNA, 19 nt, Human
auaacuuaaugaaaacaau

SEQ ID NO: 2990764 - RNA, 18 nt, Human
auaacuuaaugaaaacaa

SEQ ID NO: 2990765 - RNA, 16 nt, Human
auaacuuaaugaaaac

SEQ ID NO: 2990766 - RNA, 15 nt, Human
auaacuuaaugaaaa

SEQ ID NO: 2990767 - RNA, 17 nt, Human
uuagguugugaaugcag

SEQ ID NO: 2990768 - RNA, 13 nt, Human
uuagguugugaau

SEQ ID NO: 2990769 - RNA, 12 nt, Human
uuagguugugaa

SEQ ID NO: 2990770 - RNA, 22 nt, Human
uuaguuugcaguuacacuaaaa

SEQ ID NO: 2990771 - RNA, 15 nt, Human
uuaguuucuccaagc

SEQ ID NO: 2990772 - RNA, 15 nt, Human
uuaggugaggaagca

SEQ ID NO: 2990773 - RNA, 20 nt, Human
uuagggaaggauacaaaagc

SEQ ID NO: 2990774 - RNA, 16 nt, Human
uuaggugugacugaau

SEQ ID NO: 2990775 - RNA, 16 nt, Human
uuaggugaggaagcaa

SEQ ID NO: 2990776 - RNA, 21 nt, Human
uuaggugugacugaauuucuu

SEQ ID NO: 2990777 - RNA, 18 nt, Human
uuagguuggcaaaaaggc

SEQ ID NO: 2990778 - RNA, 18 nt, Human
uuagcaaauucuguuuuu

SEQ ID NO: 2990779 - RNA, 14 nt, Human
uuagcggagacgga

SEQ ID NO: 2990780 - RNA, 18 nt, Human
uuagccaagugugguaga

SEQ ID NO: 2990781 - RNA, 18 nt, Human
auaauccuaaacauauga

SEQ ID NO: 2990782 - RNA, 14 nt, Human
auaaucucugauuc

SEQ ID NO: 2990783 - RNA, 23 nt, Human
auaaucucugauucccugauuua

SEQ ID NO: 2990784 - RNA, 19 nt, Human
auaaucucugauucccuga

SEQ ID NO: 2990785 - RNA, 22 nt, Human
auaauugacaggauuauuggaa

SEQ ID NO: 2990786 - RNA, 15 nt, Human
auaaugaaugaaaca

SEQ ID NO: 2990787 - RNA, 15 nt, Human
auaaugcgugcauac

SEQ ID NO: 2990788 - RNA, 20 nt, Human
auaauacaccacuacauucu

SEQ ID NO: 2990789 - RNA, 18 nt, Human
auaauacaccacuacauu

SEQ ID NO: 2990790 - RNA, 12 nt, Human
auaauacaccac

SEQ ID NO: 2990791 - RNA, 15 nt, Human
uguuuagaugaaugu

SEQ ID NO: 2990792 - RNA, 20 nt, Human
uguuuagaugaaugucaguu

SEQ ID NO: 2990793 - RNA, 20 nt, Human
uguuuagauaauacaccacu

SEQ ID NO: 2990794 - RNA, 16 nt, Human
uguugucugcaacucu

SEQ ID NO: 2990795 - RNA, 13 nt, Human
uguugucugcaac

SEQ ID NO: 2990796 - RNA, 15 nt, Human
uguuuaugagaaacu

SEQ ID NO: 2990797 - RNA, 14 nt, Human
uguuuauugucaaa

SEQ ID NO: 2990798 - RNA, 23 nt, Human
aguucuauuuauuugugagacug

SEQ ID NO: 2990799 - RNA, 13 nt, Human
aguucuaguguuu

SEQ ID NO: 2990800 - RNA, 19 nt, Human
aguucggugagcuacaaau

SEQ ID NO: 2990801 - RNA, 24 nt, Human
aguucaaucuggauucauauuuaa

SEQ ID NO: 2990802 - RNA, 16 nt, Human
aguucaauucucauuu

SEQ ID NO: 2990803 - RNA, 23 nt, Human
aguuccucauuagcauuuugcua

SEQ ID NO: 2990804 - RNA, 13 nt, Human
uguuauuuauuga

SEQ ID NO: 2990805 - RNA, 15 nt, Human
uguuauuuauugaaa

SEQ ID NO: 2990806 - RNA, 17 nt, Human
uguuauuuauugaaaug

SEQ ID NO: 2990807 - RNA, 18 nt, Human
uguuauuuauugaaauga

SEQ ID NO: 2990808 - RNA, 19 nt, Human
uguuauuuauugaaaugau

SEQ ID NO: 2990809 - RNA, 18 nt, Human
uguucuagcauggcugcc

SEQ ID NO: 2990810 - RNA, 18 nt, Human
uguucuuaguuugcaguu

SEQ ID NO: 2990811 - RNA, 15 nt, Human
aguggaguuacugaa

SEQ ID NO: 2990812 - RNA, 16 nt, Human
aguuacugaacaguaa

SEQ ID NO: 2990813 - RNA, 16 nt, Human
aguguuggagaagaac

SEQ ID NO: 2990814 - RNA, 14 nt, Human
aguguuggagaaga

SEQ ID NO: 2990815 - RNA, 18 nt, Human
aguguuggagaagaacug

SEQ ID NO: 2990816 - RNA, 17 nt, Human
aguguuggagaagaacu

SEQ ID NO: 2990817 - RNA, 22 nt, Human
uguucuugguuuguaaauuaac

SEQ ID NO: 2990818 - RNA, 20 nt, Human
uguucuugguuuguaaauua

SEQ ID NO: 2990819 - RNA, 19 nt, Human
uguucuuucacccuuuucu

SEQ ID NO: 2990820 - RNA, 13 nt, Human
uguugcccaggcu

SEQ ID NO: 2990821 - RNA, 15 nt, Human
uguugcccaggcugg

SEQ ID NO: 2990822 - RNA, 12 nt, Human
agugcuuggccc

SEQ ID NO: 2990823 - RNA, 14 nt, Human
agugcuuggcccag

SEQ ID NO: 2990824 - RNA, 15 nt, Human
agugcuuggcccagg

SEQ ID NO: 2990825 - RNA, 16 nt, Human
agugcuuggcccagga

SEQ ID NO: 2990826 - RNA, 18 nt, Human
agugcuuggcccaggagu

SEQ ID NO: 2990827 - RNA, 19 nt, Human
agugcuuggcccaggaguu

SEQ ID NO: 2990828 - RNA, 20 nt, Human
agugcuuggcccaggaguuu

SEQ ID NO: 2990829 - RNA, 16 nt, Human
uguggucccaccccac

SEQ ID NO: 2990830 - RNA, 16 nt, Human
agugcuuccaaggaug

SEQ ID NO: 2990831 - RNA, 20 nt, Human
ugugguguuuccuggcacug

SEQ ID NO: 2990832 - RNA, 19 nt, Human
ugugucagcauagaaguaa

SEQ ID NO: 2990833 - RNA, 12 nt, Human
ugugguuucauu

SEQ ID NO: 2990834 - RNA, 23 nt, Human
ugugguuauaacuuaaugaaaac

SEQ ID NO: 2990835 - RNA, 20 nt, Human
ugugguuauaacuuaaugaa

SEQ ID NO: 2990836 - RNA, 20 nt, Human
agugcugcauuuaaaagaua

SEQ ID NO: 2990837 - RNA, 17 nt, Human
agugccuuacacaaugg

SEQ ID NO: 2990838 - RNA, 15 nt, Human
agugccuuacacaau

SEQ ID NO: 2990839 - RNA, 21 nt, Human
agugccuguaaucacagcuac

SEQ ID NO: 2990840 - RNA, 20 nt, Human
agugccucucccugcugcuc

SEQ ID NO: 2990841 - RNA, 19 nt, Human
agugccucucccugcugcu

SEQ ID NO: 2990842 - RNA, 23 nt, Human
agugccucucccugcugcuccua

SEQ ID NO: 2990843 - RNA, 22 nt, Human
agugccucucccugcugcuccu

SEQ ID NO: 2990844 - RNA, 19 nt, Human
agugcugggauuacaggug

SEQ ID NO: 2990845 - RNA, 22 nt, Human
agugcugcauuuaaaagauaca

SEQ ID NO: 2990846 - RNA, 20 nt, Human
agugcugggauuacaagcgu

SEQ ID NO: 2990847 - RNA, 13 nt, Human
uguuaauauuuua

SEQ ID NO: 2990848 - RNA, 21 nt, Human
uguuaacauggacaugaucuu

SEQ ID NO: 2990849 - RNA, 22 nt, Human
agugcuuuaccaauugaaguaa

SEQ ID NO: 2990850 - RNA, 19 nt, Human
uguuaaugauagcuacugu

SEQ ID NO: 2990851 - RNA, 18 nt, Human
aguggaaaaauagccugc

SEQ ID NO: 2990852 - RNA, 19 nt, Human
aguggaaaaauagccugcc

SEQ ID NO: 2990853 - RNA, 11 nt, Human
aguggaaaaau

SEQ ID NO: 2990854 - RNA, 14 nt, Human
uguguuaugaagca

SEQ ID NO: 2990855 - RNA, 23 nt, Human
uguguuaucacccagaagaaaau

SEQ ID NO: 2990856 - RNA, 19 nt, Human
ugugucagguggggcagcu

SEQ ID NO: 2990857 - RNA, 17 nt, Human
ugugucagguggggcag

SEQ ID NO: 2990858 - RNA, 13 nt, Human
ugugucucuuggu

SEQ ID NO: 2990859 - RNA, 18 nt, Human
ugugcucuggacaggcau

SEQ ID NO: 2990860 - RNA, 16 nt, Human
ugugcucuggacaggc

SEQ ID NO: 2990861 - RNA, 19 nt, Human
ugugcucuggacaggcaug

SEQ ID NO: 2990862 - RNA, 12 nt, Human
ugugcugcccug

SEQ ID NO: 2990863 - RNA, 13 nt, Human
ugugcugcccugc

SEQ ID NO: 2990864 - RNA, 14 nt, Human
ugugcugcccugcc

SEQ ID NO: 2990865 - RNA, 15 nt, Human
ugugcugcccugccc

SEQ ID NO: 2990866 - RNA, 21 nt, Human
ugugcccuaaaguguauuuuu

SEQ ID NO: 2990867 - RNA, 20 nt, Human
ugugcccuaaaguguauuuu

SEQ ID NO: 2990868 - RNA, 19 nt, Human
agucucacuguugcccagg

SEQ ID NO: 2990869 - RNA, 18 nt, Human
agucucacuguugcccag

SEQ ID NO: 2990870 - RNA, 20 nt, Human
agucucacuguugcccaggc

SEQ ID NO: 2990871 - RNA, 15 nt, Human
ugugcucuggacagg

SEQ ID NO: 2990872 - RNA, 23 nt, Human
ugugcucugaucauccacugugc

SEQ ID NO: 2990873 - RNA, 12 nt, Human
ugugcucugauc

SEQ ID NO: 2990874 - RNA, 22 nt, Human
ugugcucugaucauccacugug

SEQ ID NO: 2990875 - RNA, 14 nt, Human
agugcaguauagaa

SEQ ID NO: 2990876 - RNA, 15 nt, Human
agugcaguauagaau

SEQ ID NO: 2990877 - RNA, 14 nt, Human
agugcccacaggau

SEQ ID NO: 2990878 - RNA, 16 nt, Human
agugccaaaaacaaca

SEQ ID NO: 2990879 - RNA, 21 nt, Human
agugccaaagaagcagaccau

SEQ ID NO: 2990880 - RNA, 14 nt, Human
agugccaaaaacaa

SEQ ID NO: 2990881 - RNA, 24 nt, Human
agugauucuccugccucagccucc

SEQ ID NO: 2990882 - RNA, 22 nt, Human
agugauucuccugccucagccu

SEQ ID NO: 2990883 - RNA, 16 nt, Human
agugagucgaggacag

SEQ ID NO: 2990884 - RNA, 21 nt, Human
agugcaaauugucacaggaca

SEQ ID NO: 2990885 - RNA, 18 nt, Human
agugcaaauugucacagg

SEQ ID NO: 2990886 - RNA, 14 nt, Human
agugcaaauuguca

SEQ ID NO: 2990887 - RNA, 17 nt, Human
agguagaauguuuucaa

SEQ ID NO: 2990888 - RNA, 23 nt, Human
agguagaaauaucugaaaaugua

SEQ ID NO: 2990889 - RNA, 21 nt, Human
agguaugcaaucaaaucugcu

SEQ ID NO: 2990890 - RNA, 19 nt, Human
agguagaaauaucugaaaa

SEQ ID NO: 2990891 - RNA, 17 nt, Human
agguagaaauaucugaa

SEQ ID NO: 2990892 - RNA, 23 nt, Human
agguacuucaaauccuugaagau

SEQ ID NO: 2990893 - RNA, 17 nt, Human
aggguuggccccugccc

SEQ ID NO: 2990894 - RNA, 23 nt, Human
aggguuggccccugcccggcugc

SEQ ID NO: 2990895 - RNA, 18 nt, Human
aggguuggccccugcccg

SEQ ID NO: 2990896 - RNA, 20 nt, Human
aggucauuuuuuuuaagaaa

SEQ ID NO: 2990897 - RNA, 17 nt, Human
aggucauuuuuuuuaag

SEQ ID NO: 2990898 - RNA, 12 nt, Human
aggucagagccu

SEQ ID NO: 2990899 - RNA, 13 nt, Human
aggguuauaauaa

SEQ ID NO: 2990900 - RNA, 22 nt, Human
aggguguccggucccuguccca

SEQ ID NO: 2990901 - RNA, 21 nt, Human
aggguggugaccucugccuga

SEQ ID NO: 2990902 - RNA, 17 nt, Human
uggucugacccacugcu

SEQ ID NO: 2990903 - RNA, 16 nt, Human
uggucugacccacugc

SEQ ID NO: 2990904 - RNA, 16 nt, Human
uggucccaccccacac

SEQ ID NO: 2990905 - RNA, 16 nt, Human
uggucucaaacucuug

SEQ ID NO: 2990906 - RNA, 13 nt, Human
uggucccacccca

SEQ ID NO: 2990907 - RNA, 23 nt, Human
uggucucaaacucuugaccucag

SEQ ID NO: 2990908 - RNA, 17 nt, Human
uggucucaaacucuuga

SEQ ID NO: 2990909 - RNA, 22 nt, Human
uggucagauuugaacucuucaa

SEQ ID NO: 2990910 - RNA, 18 nt, Human
uggucaccaaaucagcug

SEQ ID NO: 2990911 - RNA, 14 nt, Human
uggucccaccccac

SEQ ID NO: 2990912 - RNA, 15 nt, Human
uggucccaccccaca

SEQ ID NO: 2990913 - RNA, 20 nt, Human
ugguaaggggaauugaggac

SEQ ID NO: 2990914 - RNA, 16 nt, Human
ugguacuaacuuuccu

SEQ ID NO: 2990915 - RNA, 15 nt, Human
ugggugcuuggagga

SEQ ID NO: 2990916 - RNA, 19 nt, Human
ugggugcuuggaggaagga

SEQ ID NO: 2990917 - RNA, 22 nt, Human
ugggugcuuggaggaaggaaac

SEQ ID NO: 2990918 - RNA, 22 nt, Human
uggguggcaccagcagccugga

SEQ ID NO: 2990919 - RNA, 21 nt, Human
agggucucacucugucgccca

SEQ ID NO: 2990920 - RNA, 22 nt, Human
agggucucacucugucgcccag

SEQ ID NO: 2990921 - RNA, 22 nt, Human
aggguggccacaccucuauccc

SEQ ID NO: 2990922 - RNA, 23 nt, Human
aggggagcaaaaucgaugcagug

SEQ ID NO: 2990923 - RNA, 19 nt, Human
uggggucacucuggcagcu

SEQ ID NO: 2990924 - RNA, 20 nt, Human
aggggugggacacccuguga

SEQ ID NO: 2990925 - RNA, 22 nt, Human
aggggugggacacccugugaug

SEQ ID NO: 2990926 - RNA, 17 nt, Human
aggggguggccucccaa

SEQ ID NO: 2990927 - RNA, 18 nt, Human
aggggguggccucccaac

SEQ ID NO: 2990928 - RNA, 15 nt, Human
aggggguggccuccc

SEQ ID NO: 2990929 - RNA, 23 nt, Human
agggucucacuauguugcccagg

SEQ ID NO: 2990930 - RNA, 22 nt, Human
agggucucacuauguugcccag

SEQ ID NO: 2990931 - RNA, 21 nt, Human
agggucucacuauguugccca

SEQ ID NO: 2990932 - RNA, 20 nt, Human
agggucucacuauguugccc

SEQ ID NO: 2990933 - RNA, 24 nt, Human
agggguucccuuuuuuggcugcug

SEQ ID NO: 2990934 - RNA, 15 nt, Human
ugggcacaucauuuc

SEQ ID NO: 2990935 - RNA, 20 nt, Human
ugggcaacccccagccugcu

SEQ ID NO: 2990936 - RNA, 17 nt, Human
ugggcaacccccagccu

SEQ ID NO: 2990937 - RNA, 20 nt, Human
ugggcacaucauuucaagaa

SEQ ID NO: 2990938 - RNA, 23 nt, Human
ugggccaccgccuugcccagccu

SEQ ID NO: 2990939 - RNA, 17 nt, Human
ugggccaccgccuugcc

SEQ ID NO: 2990940 - RNA, 16 nt, Human
ugggccaccgccuugc

SEQ ID NO: 2990941 - RNA, 13 nt, Human
ugggccaggagcc

SEQ ID NO: 2990942 - RNA, 14 nt, Human
ugggccaggagccu

SEQ ID NO: 2990943 - RNA, 16 nt, Human
ugggccaggagccucc

SEQ ID NO: 2990944 - RNA, 20 nt, Human
ugggcccaaugcacuuuguu

SEQ ID NO: 2990945 - RNA, 16 nt, Human
ugggcaacccccagcc

SEQ ID NO: 2990946 - RNA, 15 nt, Human
ugggagguuaaaaag

SEQ ID NO: 2990947 - RNA, 18 nt, Human
ugggaggucaaggcugca

SEQ ID NO: 2990948 - RNA, 19 nt, Human
ugggaggucaaggcugcag

SEQ ID NO: 2990949 - RNA, 20 nt, Human
ugggaggucaaggcugcagu

SEQ ID NO: 2990950 - RNA, 23 nt, Human
ugggaggucaaggcugcagugag

SEQ ID NO: 2990951 - RNA, 17 nt, Human
ugggaggucaaggcugc

SEQ ID NO: 2990952 - RNA, 17 nt, Human
aggccuuccccuggcac

SEQ ID NO: 2990953 - RNA, 19 nt, Human
aggccuuccccuggcacug

SEQ ID NO: 2990954 - RNA, 17 nt, Human
agggcagggacaggaua

SEQ ID NO: 2990955 - RNA, 18 nt, Human
agggcccagagagggugg

SEQ ID NO: 2990956 - RNA, 23 nt, Human
agggcccagagaggguggugacc

SEQ ID NO: 2990957 - RNA, 15 nt, Human
agggagggcuucugc

SEQ ID NO: 2990958 - RNA, 19 nt, Human
agggagugacagaggcagc

SEQ ID NO: 2990959 - RNA, 18 nt, Human
agggagugacagaggcag

SEQ ID NO: 2990960 - RNA, 17 nt, Human
agggagugacagaggca

SEQ ID NO: 2990961 - RNA, 17 nt, Human
agggaggugaccccagg

SEQ ID NO: 2990962 - RNA, 14 nt, Human
uggggcccugccuc

SEQ ID NO: 2990963 - RNA, 12 nt, Human
uggggagaaagu

SEQ ID NO: 2990964 - RNA, 23 nt, Human
uggggaccucaggccugggggcu

SEQ ID NO: 2990965 - RNA, 18 nt, Human
uggggcggugagagggga

SEQ ID NO: 2990966 - RNA, 15 nt, Human
uggggcccugccucc

SEQ ID NO: 2990967 - RNA, 16 nt, Human
uggggcccugccuccu

SEQ ID NO: 2990968 - RNA, 20 nt, Human
ugggguacccacugcucugg

SEQ ID NO: 2990969 - RNA, 16 nt, Human
ugggguacccacugcu

SEQ ID NO: 2990970 - RNA, 15 nt, Human
ugggguacccacugc

SEQ ID NO: 2990971 - RNA, 17 nt, Human
uggggucacucuggcag

SEQ ID NO: 2990972 - RNA, 18 nt, Human
uggggucacucuggcagc

SEQ ID NO: 2990973 - RNA, 14 nt, Human
ugggguacccacug

SEQ ID NO: 2990974 - RNA, 20 nt, Human
uggggcugcaccggcuggcc

SEQ ID NO: 2990975 - RNA, 15 nt, Human
uggggaaugaagaua

SEQ ID NO: 2990976 - RNA, 14 nt, Human
uggggaaugaagau

SEQ ID NO: 2990977 - RNA, 18 nt, Human
ugggcuggguucuaccca

SEQ ID NO: 2990978 - RNA, 19 nt, Human
ugggcuggguucuacccag

SEQ ID NO: 2990979 - RNA, 17 nt, Human
uggggaccagagcugcc

SEQ ID NO: 2990980 - RNA, 18 nt, Human
uggggaccagagcugcca

SEQ ID NO: 2990981 - RNA, 13 nt, Human
uggggaccucagg

SEQ ID NO: 2990982 - RNA, 14 nt, Human
uggggaccagagcu

SEQ ID NO: 2990983 - RNA, 15 nt, Human
uggggaccagagcug

SEQ ID NO: 2990984 - RNA, 20 nt, Human
ugggcucccuucccaccucu

SEQ ID NO: 2990985 - RNA, 18 nt, Human
ugggcucccuucccaccu

SEQ ID NO: 2990986 - RNA, 19 nt, Human
ugggcucccuucccaccuc

SEQ ID NO: 2990987 - RNA, 15 nt, Human
ugggcucccuuccca

SEQ ID NO: 2990988 - RNA, 23 nt, Human
agggcuucugccauuucugagau

SEQ ID NO: 2990989 - RNA, 15 nt, Human
ugucaguauuucaac

SEQ ID NO: 2990990 - RNA, 23 nt, Human
ugucauuugcuggagcucugccc

SEQ ID NO: 2990991 - RNA, 19 nt, Human
ugucagcugaaccugggua

SEQ ID NO: 2990992 - RNA, 19 nt, Human
agucacugagacagcccgg

SEQ ID NO: 2990993 - RNA, 18 nt, Human
agucacugagacagcccg

SEQ ID NO: 2990994 - RNA, 16 nt, Human
ugucagcugaaccugg

SEQ ID NO: 2990995 - RNA, 22 nt, Human
aguauuucuaugaaauauuaug

SEQ ID NO: 2990996 - RNA, 20 nt, Human
agucacauuccugaacagga

SEQ ID NO: 2990997 - RNA, 18 nt, Human
agucacauuccugaacag

SEQ ID NO: 2990998 - RNA, 19 nt, Human
agucacauuccugaacagg

SEQ ID NO: 2990999 - RNA, 13 nt, Human
agucaccaagccc

SEQ ID NO: 2991000 - RNA, 15 nt, Human
aguauuucuaugaaa

SEQ ID NO: 2991001 - RNA, 13 nt, Human
aguauuucuauga

SEQ ID NO: 2991002 - RNA, 21 nt, Human
ugucaauaaaauccauacauu

SEQ ID NO: 2991003 - RNA, 15 nt, Human
ugucaagccauaauu

SEQ ID NO: 2991004 - RNA, 19 nt, Human
ugucaagagggucugagga

SEQ ID NO: 2991005 - RNA, 14 nt, Human
uguauuuuuuuacu

SEQ ID NO: 2991006 - RNA, 20 nt, Human
uguauuuuugucaauuacca

SEQ ID NO: 2991007 - RNA, 16 nt, Human
uguauuuuugucaauu

SEQ ID NO: 2991008 - RNA, 14 nt, Human
uguauuuuugucaa

SEQ ID NO: 2991009 - RNA, 17 nt, Human
aguaggaagacuuugga

SEQ ID NO: 2991010 - RNA, 18 nt, Human
aguaggaagacuuuggaa

SEQ ID NO: 2991011 - RNA, 19 nt, Human
aguaggaagacuuuggaaa

SEQ ID NO: 2991012 - RNA, 22 nt, Human
aguaggaagacuuuggaaagac

SEQ ID NO: 2991013 - RNA, 20 nt, Human
ugucaaucagccuaguugau

SEQ ID NO: 2991014 - RNA, 16 nt, Human
aguaggaagacuuugg

SEQ ID NO: 2991015 - RNA, 13 nt, Human
aguagucagacug

SEQ ID NO: 2991016 - RNA, 23 nt, Human
agucagacuggauaguccgucuc

SEQ ID NO: 2991017 - RNA, 15 nt, Human
agucaggaaagagaa

SEQ ID NO: 2991018 - RNA, 16 nt, Human
agucaggaaagagaac

SEQ ID NO: 2991019 - RNA, 22 nt, Human
agucagaaguuucugccgcagc

SEQ ID NO: 2991020 - RNA, 12 nt, Human
ugucgggcauga

SEQ ID NO: 2991021 - RNA, 15 nt, Human
ugucgcccagucugg

SEQ ID NO: 2991022 - RNA, 14 nt, Human
ugucgcccagucug

SEQ ID NO: 2991023 - RNA, 14 nt, Human
ugucgggcaugaca

SEQ ID NO: 2991024 - RNA, 15 nt, Human
ugucgggcaugacac

SEQ ID NO: 2991025 - RNA, 22 nt, Human
uguccuaaugcuugcugcugau

SEQ ID NO: 2991026 - RNA, 16 nt, Human
uguccuacccacccuc

SEQ ID NO: 2991027 - RNA, 17 nt, Human
ugucccuuuuccuuuuu

SEQ ID NO: 2991028 - RNA, 13 nt, Human
uguccgagcuuug

SEQ ID NO: 2991029 - RNA, 14 nt, Human
uguccgagcuuuga

SEQ ID NO: 2991030 - RNA, 12 nt, Human
agucccugccaa

SEQ ID NO: 2991031 - RNA, 23 nt, Human
aguccgaaagggacuuggaagcu

SEQ ID NO: 2991032 - RNA, 17 nt, Human
agucucacuguugccca

SEQ ID NO: 2991033 - RNA, 16 nt, Human
agucucacuguugccc

SEQ ID NO: 2991034 - RNA, 23 nt, Human
uguaauuaugguuaguagaggua

SEQ ID NO: 2991035 - RNA, 23 nt, Human
uguaauuaaguacuauguaucaa

SEQ ID NO: 2991036 - RNA, 15 nt, Human
uguaaguaaacgguc

SEQ ID NO: 2991037 - RNA, 14 nt, Human
agguuggugggggc

SEQ ID NO: 2991038 - RNA, 17 nt, Human
uguaacuuucugaaaua

SEQ ID NO: 2991039 - RNA, 17 nt, Human
aggugguuauggagagg

SEQ ID NO: 2991040 - RNA, 23 nt, Human
aggucuugaacuccuggccucaa

SEQ ID NO: 2991041 - RNA, 16 nt, Human
aggugcacaagcucca

SEQ ID NO: 2991042 - RNA, 17 nt, Human
aggugcacaagcuccaa

SEQ ID NO: 2991043 - RNA, 18 nt, Human
aggugcacaagcuccaag

SEQ ID NO: 2991044 - RNA, 20 nt, Human
aggugcacaagcuccaagcu

SEQ ID NO: 2991045 - RNA, 15 nt, Human
aggugcacaagcucc

SEQ ID NO: 2991046 - RNA, 20 nt, Human
aggugggauccuccaggugc

SEQ ID NO: 2991047 - RNA, 21 nt, Human
aggugcacaagcuccaagcuc

SEQ ID NO: 2991048 - RNA, 21 nt, Human
aguagagguacacuugugaau

SEQ ID NO: 2991049 - RNA, 20 nt, Human
aguagagguacacuugugaa

SEQ ID NO: 2991050 - RNA, 22 nt, Human
aguagagguacacuugugaaua

SEQ ID NO: 2991051 - RNA, 14 nt, Human
aguagagguacacu

SEQ ID NO: 2991052 - RNA, 12 nt, Human
aguagagacagg

SEQ ID NO: 2991053 - RNA, 19 nt, Human
aguagauaggccaugggca

SEQ ID NO: 2991054 - RNA, 15 nt, Human
aguagaucaugcaua

SEQ ID NO: 2991055 - RNA, 18 nt, Human
uguaggaagguuaauguu

SEQ ID NO: 2991056 - RNA, 18 nt, Human
aguagaucaugcauagag

SEQ ID NO: 2991057 - RNA, 20 nt, Human
uguaggaagguuaauguuca

SEQ ID NO: 2991058 - RNA, 14 nt, Human
aguacacuguuuca

SEQ ID NO: 2991059 - RNA, 20 nt, Human
aguacacuguuucaaacuuu

SEQ ID NO: 2991060 - RNA, 16 nt, Human
aguacacuguuucaaa

SEQ ID NO: 2991061 - RNA, 22 nt, Human
aguaauuuggaaauuagguuga

SEQ ID NO: 2991062 - RNA, 14 nt, Human
aguaauuuggaaau

SEQ ID NO: 2991063 - RNA, 15 nt, Human
uguacuuuuaagacu

SEQ ID NO: 2991064 - RNA, 18 nt, Human
uguacuuuuaagacuuug

SEQ ID NO: 2991065 - RNA, 13 nt, Human
uguagagugggag

SEQ ID NO: 2991066 - RNA, 14 nt, Human
uguagagugggagc

SEQ ID NO: 2991067 - RNA, 16 nt, Human
uguagaggagaaacug

SEQ ID NO: 2991068 - RNA, 18 nt, Human
uguagaggagaaacugga

SEQ ID NO: 2991069 - RNA, 17 nt, Human
uguaccacuuuugcaaa

SEQ ID NO: 2991070 - RNA, 16 nt, Human
uguaccacuuuugcaa

SEQ ID NO: 2991071 - RNA, 14 nt, Human
uguaauuugugaua

SEQ ID NO: 2991072 - RNA, 20 nt, Human
aguaagccgugauuuucauu

SEQ ID NO: 2991073 - RNA, 15 nt, Human
aguaaaaccacagca

SEQ ID NO: 2991074 - RNA, 11 nt, Human
agguuuuccug

SEQ ID NO: 2991075 - RNA, 17 nt, Human
agguuuucuuuuaagaa

SEQ ID NO: 2991076 - RNA, 19 nt, Human
aguaauaugcacacauuuu

SEQ ID NO: 2991077 - RNA, 18 nt, Human
aguaauaugcacacauuu

SEQ ID NO: 2991078 - RNA, 20 nt, Human
aguaauaugcacacauuuuu

SEQ ID NO: 2991079 - RNA, 17 nt, Human
aguaauaugcacacauu

SEQ ID NO: 2991080 - RNA, 17 nt, Human
aggaaugcaaagaugaa

SEQ ID NO: 2991081 - RNA, 15 nt, Human
aggaaugcaaagaug

SEQ ID NO: 2991082 - RNA, 13 nt, Human
ugcugcccugccc

SEQ ID NO: 2991083 - RNA, 16 nt, Human
ugcugcccugcccacc

SEQ ID NO: 2991084 - RNA, 17 nt, Human
ugcugcccugcccaccu

SEQ ID NO: 2991085 - RNA, 18 nt, Human
ugcugcccugcccaccug

SEQ ID NO: 2991086 - RNA, 11 nt, Human
ugcugcccugu

SEQ ID NO: 2991087 - RNA, 12 nt, Human
ugcugcccugcc

SEQ ID NO: 2991088 - RNA, 19 nt, Human
ugcugcccugcccaccugg

SEQ ID NO: 2991089 - RNA, 21 nt, Human
ugcugcccugcccaccuggcc

SEQ ID NO: 2991090 - RNA, 22 nt, Human
ugcuguauuuuaaaagaaugau

SEQ ID NO: 2991091 - RNA, 21 nt, Human
ugcuguauuuuaaaagaauga

SEQ ID NO: 2991092 - RNA, 13 nt, Human
ugcuguauuuuaa

SEQ ID NO: 2991093 - RNA, 17 nt, Human
ugcugggauuacaggug

SEQ ID NO: 2991094 - RNA, 21 nt, Human
ugcugggauuacaagcgugag

SEQ ID NO: 2991095 - RNA, 21 nt, Human
ugcuggcuguuggcugggggc

SEQ ID NO: 2991096 - RNA, 19 nt, Human
ugcuggcuguuggcugggg

SEQ ID NO: 2991097 - RNA, 19 nt, Human
ugcugggauuacaagcgug

SEQ ID NO: 2991098 - RNA, 18 nt, Human
ugcuggcuguuggcuggg

SEQ ID NO: 2991099 - RNA, 17 nt, Human
aggacacugauaugggu

SEQ ID NO: 2991100 - RNA, 16 nt, Human
ugcuuccagugaggcu

SEQ ID NO: 2991101 - RNA, 18 nt, Human
aggacacuaaccacgcug

SEQ ID NO: 2991102 - RNA, 20 nt, Human
ugcuucaaggauccugagcc

SEQ ID NO: 2991103 - RNA, 21 nt, Human
ugcuucaaggauccugagcca

SEQ ID NO: 2991104 - RNA, 23 nt, Human
ugcuucaaggauccugagccaga

SEQ ID NO: 2991105 - RNA, 17 nt, Human
ugcugucccuuuuccuu

SEQ ID NO: 2991106 - RNA, 19 nt, Human
ugcugucccuuacgugagu

SEQ ID NO: 2991107 - RNA, 15 nt, Human
ugcugucccuuuucc

SEQ ID NO: 2991108 - RNA, 17 nt, Human
ugcugucccuuacguga

SEQ ID NO: 2991109 - RNA, 15 nt, Human
aggaaaucaccgaaa

SEQ ID NO: 2991110 - RNA, 19 nt, Human
aggaaaucaccgaaaacgu

SEQ ID NO: 2991111 - RNA, 23 nt, Human
aggaaaucaaauaugcaaagcac

SEQ ID NO: 2991112 - RNA, 16 nt, Human
aggaagcacaugccuc

SEQ ID NO: 2991113 - RNA, 17 nt, Human
aggaagcacaugccucu

SEQ ID NO: 2991114 - RNA, 11 nt, Human
aggaagcacau

SEQ ID NO: 2991115 - RNA, 12 nt, Human
aggaaauauuua

SEQ ID NO: 2991116 - RNA, 15 nt, Human
aggaaaggcuccagg

SEQ ID NO: 2991117 - RNA, 16 nt, Human
aggaaaggcuccagga

SEQ ID NO: 2991118 - RNA, 13 nt, Human
aggaaaggcucca

SEQ ID NO: 2991119 - RNA, 14 nt, Human
aggaaaggcuccag

SEQ ID NO: 2991120 - RNA, 12 nt, Human
aggaagcucagg

SEQ ID NO: 2991121 - RNA, 20 nt, Human
aggaaggaaacccagcucug

SEQ ID NO: 2991122 - RNA, 22 nt, Human
aggaaggaaacccagcucuggu

SEQ ID NO: 2991123 - RNA, 23 nt, Human
aggaaggaaacccagcucugguc

SEQ ID NO: 2991124 - RNA, 18 nt, Human
aggaagccagcaggcucu

SEQ ID NO: 2991125 - RNA, 18 nt, Human
aggaagccgcuggggcca

SEQ ID NO: 2991126 - RNA, 19 nt, Human
aggaagccgcuggggccag

SEQ ID NO: 2991127 - RNA, 20 nt, Human
aggaagccgcuggggccagu

SEQ ID NO: 2991128 - RNA, 22 nt, Human
aggaagccagcaggcucucagg

SEQ ID NO: 2991129 - RNA, 23 nt, Human
aggaagccagcaggcucucaggc

SEQ ID NO: 2991130 - RNA, 21 nt, Human
aggaagccagcaggcucucag

SEQ ID NO: 2991131 - RNA, 14 nt, Human
ugcucauggaauug

SEQ ID NO: 2991132 - RNA, 16 nt, Human
ugcucuggacaggcau

SEQ ID NO: 2991133 - RNA, 15 nt, Human
ugcucuggacaggca

SEQ ID NO: 2991134 - RNA, 14 nt, Human
ugcucuggacaggc

SEQ ID NO: 2991135 - RNA, 22 nt, Human
ugcuccuaggacccgucuccag

SEQ ID NO: 2991136 - RNA, 11 nt, Human
ugcucauggaa

SEQ ID NO: 2991137 - RNA, 20 nt, Human
ugcuaucucccccagcccca

SEQ ID NO: 2991138 - RNA, 18 nt, Human
ugcuaucucccccagccc

SEQ ID NO: 2991139 - RNA, 19 nt, Human
ugcuaucucccccagcccc

SEQ ID NO: 2991140 - RNA, 16 nt, Human
agcuguucacagccag

SEQ ID NO: 2991141 - RNA, 19 nt, Human
agcuguucacagccagacu

SEQ ID NO: 2991142 - RNA, 20 nt, Human
ugccuguucagcuccagcuc

SEQ ID NO: 2991143 - RNA, 18 nt, Human
ugccuguucagcuccagc

SEQ ID NO: 2991144 - RNA, 13 nt, Human
agcuguucagcug

SEQ ID NO: 2991145 - RNA, 17 nt, Human
ugccuguucagcuccag

SEQ ID NO: 2991146 - RNA, 15 nt, Human
ugccuuauggaacac

SEQ ID NO: 2991147 - RNA, 16 nt, Human
ugccuuauggaacacu

SEQ ID NO: 2991148 - RNA, 20 nt, Human
ugccuguugggccaggagcc

SEQ ID NO: 2991149 - RNA, 19 nt, Human
ugccuguugggccaggagc

SEQ ID NO: 2991150 - RNA, 21 nt, Human
ugccuguucagcuccagcuca

SEQ ID NO: 2991151 - RNA, 21 nt, Human
agcugugcucuggacaggcau

SEQ ID NO: 2991152 - RNA, 20 nt, Human
agcugugcucuggacaggca

SEQ ID NO: 2991153 - RNA, 19 nt, Human
agcugugcucuggacaggc

SEQ ID NO: 2991154 - RNA, 22 nt, Human
agcugcccucuccugggcagcu

SEQ ID NO: 2991155 - RNA, 15 nt, Human
agcugccuccccucc

SEQ ID NO: 2991156 - RNA, 16 nt, Human
agcugccuccccuccu

SEQ ID NO: 2991157 - RNA, 20 nt, Human
agcugccuguucagcuccag

SEQ ID NO: 2991158 - RNA, 14 nt, Human
ugccuggauggggc

SEQ ID NO: 2991159 - RNA, 15 nt, Human
ugccuggauggggcu

SEQ ID NO: 2991160 - RNA, 21 nt, Human
agcugccuguucagcuccagc

SEQ ID NO: 2991161 - RNA, 21 nt, Human
agcugcuugggcuucauccuc

SEQ ID NO: 2991162 - RNA, 19 nt, Human
agcugccuguucagcucca

SEQ ID NO: 2991163 - RNA, 21 nt, Human
agcugcuuuugucuaugggac

SEQ ID NO: 2991164 - RNA, 15 nt, Human
ugccucugccucuga

SEQ ID NO: 2991165 - RNA, 13 nt, Human
ugccugcccaggc

SEQ ID NO: 2991166 - RNA, 14 nt, Human
ugccucugccucug

SEQ ID NO: 2991167 - RNA, 13 nt, Human
ugccucugccucu

SEQ ID NO: 2991168 - RNA, 14 nt, Human
ugcccaggcagguc

SEQ ID NO: 2991169 - RNA, 13 nt, Human
ugcccaggcaggu

SEQ ID NO: 2991170 - RNA, 12 nt, Human
ugcccaggcagg

SEQ ID NO: 2991171 - RNA, 16 nt, Human
ugccugcccaggcccc

SEQ ID NO: 2991172 - RNA, 24 nt, Human
ugccugcccaggccccugccaccc

SEQ ID NO: 2991173 - RNA, 12 nt, Human
ugccucugccuc

SEQ ID NO: 2991174 - RNA, 15 nt, Human
ugccugcccaggccc

SEQ ID NO: 2991175 - RNA, 14 nt, Human
ugccugcccaggcc

SEQ ID NO: 2991176 - RNA, 17 nt, Human
ugcggugcuaucucccc

SEQ ID NO: 2991177 - RNA, 21 nt, Human
ugcggugcuaucucccccagc

SEQ ID NO: 2991178 - RNA, 18 nt, Human
ugcgguccacccaggagc

SEQ ID NO: 2991179 - RNA, 17 nt, Human
ugcgguccacccaggag

SEQ ID NO: 2991180 - RNA, 17 nt, Human
ugcggccuuuggcuuca

SEQ ID NO: 2991181 - RNA, 19 nt, Human
ugcggccuuuggcuucacg

SEQ ID NO: 2991182 - RNA, 20 nt, Human
ugcgggcuuccuccuggugu

SEQ ID NO: 2991183 - RNA, 22 nt, Human
ugcggacagccacggccaggcc

SEQ ID NO: 2991184 - RNA, 23 nt, Human
ugcggacagccacggccaggcca

SEQ ID NO: 2991185 - RNA, 15 nt, Human
ugcggagcacacugg

SEQ ID NO: 2991186 - RNA, 13 nt, Human
ugcggagcacacu

SEQ ID NO: 2991187 - RNA, 17 nt, Human
agcuugaaacugagaug

SEQ ID NO: 2991188 - RNA, 19 nt, Human
agcuugaccgugaggccag

SEQ ID NO: 2991189 - RNA, 14 nt, Human
agcuugaggguugg

SEQ ID NO: 2991190 - RNA, 18 nt, Human
agcuugaggguugggcug

SEQ ID NO: 2991191 - RNA, 16 nt, Human
ugcuacaaaaacacag

SEQ ID NO: 2991192 - RNA, 17 nt, Human
ugcuacaaaaacacagc

SEQ ID NO: 2991193 - RNA, 18 nt, Human
ugcuacaaaaacacagca

SEQ ID NO: 2991194 - RNA, 19 nt, Human
ugcuacaaaaacacagcaa

SEQ ID NO: 2991195 - RNA, 15 nt, Human
ugcuacaaaaacaca

SEQ ID NO: 2991196 - RNA, 14 nt, Human
agcuguucagcugg

SEQ ID NO: 2991197 - RNA, 20 nt, Human
ugcuacaaaaacacagcaag

SEQ ID NO: 2991198 - RNA, 16 nt, Human
uggcaucuuacaucug

SEQ ID NO: 2991199 - RNA, 17 nt, Human
aggccccgcccaggcuu

SEQ ID NO: 2991200 - RNA, 23 nt, Human
uggccagugugacaaggauugcu

SEQ ID NO: 2991201 - RNA, 23 nt, Human
uggccaaagccaaagcuaggccu

SEQ ID NO: 2991202 - RNA, 21 nt, Human
uggccaaagccaaagcuaggc

SEQ ID NO: 2991203 - RNA, 13 nt, Human
uggccucuucaga

SEQ ID NO: 2991204 - RNA, 23 nt, Human
uggccgggcgcgguggcucacgc

SEQ ID NO: 2991205 - RNA, 13 nt, Human
uggcccacgcacu

SEQ ID NO: 2991206 - RNA, 18 nt, Human
uggccuggccccucaggg

SEQ ID NO: 2991207 - RNA, 21 nt, Human
uggccuggccccucagggucc

SEQ ID NO: 2991208 - RNA, 12 nt, Human
uggccuggcccc

SEQ ID NO: 2991209 - RNA, 12 nt, Human
aggccuggggac

SEQ ID NO: 2991210 - RNA, 18 nt, Human
aggccugggggcugggca

SEQ ID NO: 2991211 - RNA, 20 nt, Human
aggccugggggcugggcaga

SEQ ID NO: 2991212 - RNA, 18 nt, Human
uggcacaguuuucugaga

SEQ ID NO: 2991213 - RNA, 19 nt, Human
uggcacaguuuucugagaa

SEQ ID NO: 2991214 - RNA, 13 nt, Human
uggcagccuuggc

SEQ ID NO: 2991215 - RNA, 17 nt, Human
aggccacaagacccuug

SEQ ID NO: 2991216 - RNA, 18 nt, Human
aggccacaagacccuugu

SEQ ID NO: 2991217 - RNA, 19 nt, Human
aggccacaagacccuugug

SEQ ID NO: 2991218 - RNA, 14 nt, Human
aggccagagggagu

SEQ ID NO: 2991219 - RNA, 16 nt, Human
aggccacaagacccuu

SEQ ID NO: 2991220 - RNA, 19 nt, Human
uggcagcucaccucucccu

SEQ ID NO: 2991221 - RNA, 15 nt, Human
uggcagcucaccucu

SEQ ID NO: 2991222 - RNA, 17 nt, Human
uggcagccuuggcaaac

SEQ ID NO: 2991223 - RNA, 20 nt, Human
aggccagagggagugacaga

SEQ ID NO: 2991224 - RNA, 21 nt, Human
aggcccagagggccugcaagg

SEQ ID NO: 2991225 - RNA, 16 nt, Human
aggccccgcccaggcu

SEQ ID NO: 2991226 - RNA, 16 nt, Human
aggccaaaggaagcac

SEQ ID NO: 2991227 - RNA, 18 nt, Human
aggccaaaggaagcacau

SEQ ID NO: 2991228 - RNA, 19 nt, Human
aggccaaaggaagcacaug

SEQ ID NO: 2991229 - RNA, 15 nt, Human
aggccaaaggaagca

SEQ ID NO: 2991230 - RNA, 17 nt, Human
aggcagccccauucugc

SEQ ID NO: 2991231 - RNA, 16 nt, Human
aggcagccccauucug

SEQ ID NO: 2991232 - RNA, 18 nt, Human
aggcagccaggccacaag

SEQ ID NO: 2991233 - RNA, 16 nt, Human
aggccaaggugggagg

SEQ ID NO: 2991234 - RNA, 13 nt, Human
uggauuguccccg

SEQ ID NO: 2991235 - RNA, 14 nt, Human
uggaguauauguca

SEQ ID NO: 2991236 - RNA, 13 nt, Human
aggauacuuauuu

SEQ ID NO: 2991237 - RNA, 16 nt, Human
aggauacuuauuuaaa

SEQ ID NO: 2991238 - RNA, 15 nt, Human
aggauacuuauuuaa

SEQ ID NO: 2991239 - RNA, 13 nt, Human
aggauccugagcc

SEQ ID NO: 2991240 - RNA, 14 nt, Human
aggauccugagcca

SEQ ID NO: 2991241 - RNA, 17 nt, Human
uggaaaugggcagagca

SEQ ID NO: 2991242 - RNA, 18 nt, Human
uggaaaugggcagagcag

SEQ ID NO: 2991243 - RNA, 16 nt, Human
uggaagcacagcuuca

SEQ ID NO: 2991244 - RNA, 17 nt, Human
uggaagguauuuaauag

SEQ ID NO: 2991245 - RNA, 13 nt, Human
uggaagguauuua

SEQ ID NO: 2991246 - RNA, 18 nt, Human
ugcuugcugcugauuuaa

SEQ ID NO: 2991247 - RNA, 14 nt, Human
ugcuuggaggaagg

SEQ ID NO: 2991248 - RNA, 15 nt, Human
ugcuuggaggaagga

SEQ ID NO: 2991249 - RNA, 16 nt, Human
ugcuuggaggaaggaa

SEQ ID NO: 2991250 - RNA, 16 nt, Human
ugcuuguacacucauu

SEQ ID NO: 2991251 - RNA, 13 nt, Human
ugcuuguacauaa

SEQ ID NO: 2991252 - RNA, 12 nt, Human
ugcuuguacaua

SEQ ID NO: 2991253 - RNA, 21 nt, Human
ugcuugaggcaacucaucuua

SEQ ID NO: 2991254 - RNA, 22 nt, Human
ugcuuguacacucauucauuac

SEQ ID NO: 2991255 - RNA, 19 nt, Human
ugcuuguacacucauucau

SEQ ID NO: 2991256 - RNA, 22 nt, Human
ugcuuguacauaaugcgugcau

SEQ ID NO: 2991257 - RNA, 16 nt, Human
ugcuuguacauaaugc

SEQ ID NO: 2991258 - RNA, 14 nt, Human
ugcuuguacauaau

SEQ ID NO: 2991259 - RNA, 16 nt, Human
ugcuuugugauuuuug

SEQ ID NO: 2991260 - RNA, 14 nt, Human
ugcuuugugauuuu

SEQ ID NO: 2991261 - RNA, 12 nt, Human
ugcuuugugauu

SEQ ID NO: 2991262 - RNA, 13 nt, Human
uggaaaggcagcu

SEQ ID NO: 2991263 - RNA, 17 nt, Human
ugcuuuuggucugugug

SEQ ID NO: 2991264 - RNA, 14 nt, Human
ugcuuuuggucugu

SEQ ID NO: 2991265 - RNA, 20 nt, Human
uggaccuugaacuggguacu

SEQ ID NO: 2991266 - RNA, 15 nt, Human
uggacccugaggccc

SEQ ID NO: 2991267 - RNA, 23 nt, Human
uggacccuguggaugauaaaaca

SEQ ID NO: 2991268 - RNA, 21 nt, Human
uggacccugaggcccagaggg

SEQ ID NO: 2991269 - RNA, 19 nt, Human
uggacccugaggcccagag

SEQ ID NO: 2991270 - RNA, 20 nt, Human
uggacccugaggcccagagg

SEQ ID NO: 2991271 - RNA, 16 nt, Human
uggacccugaggccca

SEQ ID NO: 2991272 - RNA, 18 nt, Human
uggacccugaggcccaga

SEQ ID NO: 2991273 - RNA, 23 nt, Human
uggacacagcucuucuccaggcu

SEQ ID NO: 2991274 - RNA, 14 nt, Human
uggacacagcucuu

SEQ ID NO: 2991275 - RNA, 13 nt, Human
uggacacagcucu

SEQ ID NO: 2991276 - RNA, 22 nt, Human
uggacacagcucuucuccaggc

SEQ ID NO: 2991277 - RNA, 21 nt, Human
uggacacagcucuucuccagg

SEQ ID NO: 2991278 - RNA, 16 nt, Human
uggaauucacaaagua

SEQ ID NO: 2991279 - RNA, 17 nt, Human
aggaucucuugagccug

SEQ ID NO: 2991280 - RNA, 18 nt, Human
aggaucucuugagccugg

SEQ ID NO: 2991281 - RNA, 19 nt, Human
aggaucucuugagccuggg

SEQ ID NO: 2991282 - RNA, 12 nt, Human
aggaucucuuga

SEQ ID NO: 2991283 - RNA, 14 nt, Human
uggaauucacaaag

SEQ ID NO: 2991284 - RNA, 22 nt, Human
aggcacccaccaucaugucugg

SEQ ID NO: 2991285 - RNA, 21 nt, Human
aggcacccaccaucaugucug

SEQ ID NO: 2991286 - RNA, 20 nt, Human
aggcacccaccaucaugucu

SEQ ID NO: 2991287 - RNA, 14 nt, Human
aggcaaugcuggcu

SEQ ID NO: 2991288 - RNA, 15 nt, Human
aggcacccaccauca

SEQ ID NO: 2991289 - RNA, 13 nt, Human
uggagaagaacug

SEQ ID NO: 2991290 - RNA, 17 nt, Human
uggacuuugcacacuuu

SEQ ID NO: 2991291 - RNA, 13 nt, Human
uggagaagcggcu

SEQ ID NO: 2991292 - RNA, 22 nt, Human
uggagaagcggcuggcagccca

SEQ ID NO: 2991293 - RNA, 14 nt, Human
ugccaauauccuaa

SEQ ID NO: 2991294 - RNA, 18 nt, Human
ugccaaugggagcucaug

SEQ ID NO: 2991295 - RNA, 13 nt, Human
ugccaauuugcac

SEQ ID NO: 2991296 - RNA, 15 nt, Human
ugccaauuugcacau

SEQ ID NO: 2991297 - RNA, 21 nt, Human
ugccaauuugcacauuaaaug

SEQ ID NO: 2991298 - RNA, 17 nt, Human
ugccaauuugcacauua

SEQ ID NO: 2991299 - RNA, 22 nt, Human
ugcauuaucuagauacuguauc

SEQ ID NO: 2991300 - RNA, 21 nt, Human
ugcauuaucuagauacuguau

SEQ ID NO: 2991301 - RNA, 18 nt, Human
ugcauuaucuagauacug

SEQ ID NO: 2991302 - RNA, 11 nt, Human
agccuuccagg

SEQ ID NO: 2991303 - RNA, 14 nt, Human
agccuuccaggggu

SEQ ID NO: 2991304 - RNA, 16 nt, Human
agccuuccaggggugg

SEQ ID NO: 2991305 - RNA, 17 nt, Human
agccuuccagggguggg

SEQ ID NO: 2991306 - RNA, 20 nt, Human
agccuuggggcugaugcagu

SEQ ID NO: 2991307 - RNA, 16 nt, Human
agcggagaaaggaagg

SEQ ID NO: 2991308 - RNA, 20 nt, Human
agcggagaaaggaagggcug

SEQ ID NO: 2991309 - RNA, 18 nt, Human
agcggagacggaguccca

SEQ ID NO: 2991310 - RNA, 20 nt, Human
ugcauuaucuagauacugua

SEQ ID NO: 2991311 - RNA, 21 nt, Human
agccugugccucugggacugg

SEQ ID NO: 2991312 - RNA, 22 nt, Human
agccuuagaagucacacaguau

SEQ ID NO: 2991313 - RNA, 14 nt, Human
agccugcuccagcu

SEQ ID NO: 2991314 - RNA, 15 nt, Human
agccugcuccagcug

SEQ ID NO: 2991315 - RNA, 16 nt, Human
agccugcuccagcugu

SEQ ID NO: 2991316 - RNA, 17 nt, Human
agccugcuccagcuguu

SEQ ID NO: 2991317 - RNA, 12 nt, Human
ugcauaccacuu

SEQ ID NO: 2991318 - RNA, 19 nt, Human
agccugcuccagcuguuca

SEQ ID NO: 2991319 - RNA, 22 nt, Human
agccugcuccagcuguucagcu

SEQ ID NO: 2991320 - RNA, 22 nt, Human
agccugggugacagagcaagug

SEQ ID NO: 2991321 - RNA, 18 nt, Human
agcuacuugggaggcuga

SEQ ID NO: 2991322 - RNA, 17 nt, Human
agcuacuugggaggcug

SEQ ID NO: 2991323 - RNA, 16 nt, Human
agcuagaauuugauau

SEQ ID NO: 2991324 - RNA, 13 nt, Human
agcuagaauuuga

SEQ ID NO: 2991325 - RNA, 18 nt, Human
agcuagacgagcaggcuu

SEQ ID NO: 2991326 - RNA, 15 nt, Human
agcgugcauaaguua

SEQ ID NO: 2991327 - RNA, 22 nt, Human
agcgugagccacugcaccgggc

SEQ ID NO: 2991328 - RNA, 19 nt, Human
agcgugagccacugcaccg

SEQ ID NO: 2991329 - RNA, 21 nt, Human
agcucaggugucccugcacuu

SEQ ID NO: 2991330 - RNA, 20 nt, Human
agcucaggugucccugcacu

SEQ ID NO: 2991331 - RNA, 22 nt, Human
agcucaggugucccugcacuug

SEQ ID NO: 2991332 - RNA, 17 nt, Human
agcucaggugucccugc

SEQ ID NO: 2991333 - RNA, 18 nt, Human
agcucaggugucccugca

SEQ ID NO: 2991334 - RNA, 15 nt, Human
agcuaggccuggcca

SEQ ID NO: 2991335 - RNA, 14 nt, Human
agcuaggccuggcc

SEQ ID NO: 2991336 - RNA, 16 nt, Human
agcuaggccuggccag

SEQ ID NO: 2991337 - RNA, 12 nt, Human
agcuaggccugg

SEQ ID NO: 2991338 - RNA, 21 nt, Human
ugcccagccccuucugaccca

SEQ ID NO: 2991339 - RNA, 20 nt, Human
ugcccagccccuucugaccc

SEQ ID NO: 2991340 - RNA, 17 nt, Human
ugcccagccuggaugcc

SEQ ID NO: 2991341 - RNA, 16 nt, Human
ugcccagccuggaugc

SEQ ID NO: 2991342 - RNA, 14 nt, Human
ugcccagccuggau

SEQ ID NO: 2991343 - RNA, 20 nt, Human
ugcccagccuggaugccauc

SEQ ID NO: 2991344 - RNA, 18 nt, Human
ugcccagccuggaugcca

SEQ ID NO: 2991345 - RNA, 21 nt, Human
ugcccagccuggaugccaucc

SEQ ID NO: 2991346 - RNA, 16 nt, Human
ugcccacaggaucagu

SEQ ID NO: 2991347 - RNA, 19 nt, Human
ugcccacaggaucagucug

SEQ ID NO: 2991348 - RNA, 20 nt, Human
ugcccacaggaucagucuga

SEQ ID NO: 2991349 - RNA, 21 nt, Human
agcucauucuccuuguguuac

SEQ ID NO: 2991350 - RNA, 20 nt, Human
agcucauucuccuuguguua

SEQ ID NO: 2991351 - RNA, 14 nt, Human
ugcaguacuaacau

SEQ ID NO: 2991352 - RNA, 18 nt, Human
ugcaguacaggacauaua

SEQ ID NO: 2991353 - RNA, 16 nt, Human
ugcaguacaggacaua

SEQ ID NO: 2991354 - RNA, 17 nt, Human
ugcauaaguuaacuucc

SEQ ID NO: 2991355 - RNA, 14 nt, Human
ugcauaaguuaacu

SEQ ID NO: 2991356 - RNA, 22 nt, Human
agccugaaagaggaaugaagua

SEQ ID NO: 2991357 - RNA, 23 nt, Human
ugcagccucaaccuccugggcua

SEQ ID NO: 2991358 - RNA, 16 nt, Human
ugcagccucacagucc

SEQ ID NO: 2991359 - RNA, 13 nt, Human
ugcagccucacag

SEQ ID NO: 2991360 - RNA, 15 nt, Human
ugcagccucacaguc

SEQ ID NO: 2991361 - RNA, 15 nt, Human
agccucauguccacu

SEQ ID NO: 2991362 - RNA, 23 nt, Human
agccucagcauccuggcacccgg

SEQ ID NO: 2991363 - RNA, 22 nt, Human
agccucagcauccuggcacccg

SEQ ID NO: 2991364 - RNA, 20 nt, Human
agccucauguccacugguuc

SEQ ID NO: 2991365 - RNA, 16 nt, Human
agccucccaaagugcu

SEQ ID NO: 2991366 - RNA, 16 nt, Human
agccucagcauccugg

SEQ ID NO: 2991367 - RNA, 21 nt, Human
agccucagcauccuggcaccc

SEQ ID NO: 2991368 - RNA, 20 nt, Human
agccucagcauccuggcacc

SEQ ID NO: 2991369 - RNA, 19 nt, Human
agccucagcauccuggcac

SEQ ID NO: 2991370 - RNA, 17 nt, Human
agccucagcauccuggc

SEQ ID NO: 2991371 - RNA, 23 nt, Human
agcccuucuaccuuccugcaaca

SEQ ID NO: 2991372 - RNA, 23 nt, Human
ugcacuauagccuaggugacaga

SEQ ID NO: 2991373 - RNA, 22 nt, Human
ugcacuauagccuaggugacag

SEQ ID NO: 2991374 - RNA, 14 nt, Human
ugcacacuguccua

SEQ ID NO: 2991375 - RNA, 20 nt, Human
ugcacacauuuuuuaaaugc

SEQ ID NO: 2991376 - RNA, 10 nt, Human
ugcacacauu

SEQ ID NO: 2991377 - RNA, 15 nt, Human
ugcacgugugugcac

SEQ ID NO: 2991378 - RNA, 14 nt, Human
ugcacgugugugca

SEQ ID NO: 2991379 - RNA, 16 nt, Human
ugcacccucaggcagg

SEQ ID NO: 2991380 - RNA, 17 nt, Human
ugcacccucaggcaggu

SEQ ID NO: 2991381 - RNA, 21 nt, Human
agcccugguggcagugggagc

SEQ ID NO: 2991382 - RNA, 20 nt, Human
agccccuucugacccaugcu

SEQ ID NO: 2991383 - RNA, 24 nt, Human
agccccuucugacccaugcugccc

SEQ ID NO: 2991384 - RNA, 18 nt, Human
ugcacaagcugcacccuc

SEQ ID NO: 2991385 - RNA, 21 nt, Human
ugcacaagcugcacccucagg

SEQ ID NO: 2991386 - RNA, 22 nt, Human
ugcacacaccagagcccaccuu

SEQ ID NO: 2991387 - RNA, 14 nt, Human
ugcacaagcugcac

SEQ ID NO: 2991388 - RNA, 15 nt, Human
ugcacaagcugcacc

SEQ ID NO: 2991389 - RNA, 23 nt, Human
agcccugguggcagugggagcug

SEQ ID NO: 2991390 - RNA, 22 nt, Human
agcccugguggcagugggagcu

SEQ ID NO: 2991391 - RNA, 21 nt, Human
agccccaaaacucuccucugc

SEQ ID NO: 2991392 - RNA, 22 nt, Human
agccccaaaacucuccucugcu

SEQ ID NO: 2991393 - RNA, 20 nt, Human
agccccaaaacucuccucug

SEQ ID NO: 2991394 - RNA, 18 nt, Human
agcccauggcacucuaug

SEQ ID NO: 2991395 - RNA, 15 nt, Human
ugauucuccugccuc

SEQ ID NO: 2991396 - RNA, 19 nt, Human
ugauucuccugccucagcc

SEQ ID NO: 2991397 - RNA, 20 nt, Human
ugauucuccugccucagccu

SEQ ID NO: 2991398 - RNA, 13 nt, Human
ugauucuccugcc

SEQ ID NO: 2991399 - RNA, 19 nt, Human
agccccuggaugcagccuc

SEQ ID NO: 2991400 - RNA, 17 nt, Human
agccccuggaugcagcc

SEQ ID NO: 2991401 - RNA, 18 nt, Human
agccccuggaugcagccu

SEQ ID NO: 2991402 - RNA, 18 nt, Human
agccccgugggguuccuc

SEQ ID NO: 2991403 - RNA, 24 nt, Human
agccccaaaacucuccucugcugc

SEQ ID NO: 2991404 - RNA, 23 nt, Human
agccccauucugccugcccaggc

SEQ ID NO: 2991405 - RNA, 16 nt, Human
agccccgaggccuucu

SEQ ID NO: 2991406 - RNA, 22 nt, Human
agccccgaggccuucucugaag

SEQ ID NO: 2991407 - RNA, 17 nt, Human
agccccgaggccuucuc

SEQ ID NO: 2991408 - RNA, 23 nt, Human
agcauguccuaaugcuugcugcu

SEQ ID NO: 2991409 - RNA, 20 nt, Human
agcauguauuuuugucaauu

SEQ ID NO: 2991410 - RNA, 12 nt, Human
agcauggcugcc

SEQ ID NO: 2991411 - RNA, 17 nt, Human
agcaugucgucaaagcu

SEQ ID NO: 2991412 - RNA, 20 nt, Human
agcaugucgucaaagcugaa

SEQ ID NO: 2991413 - RNA, 14 nt, Human
agcaucaggccagg

SEQ ID NO: 2991414 - RNA, 16 nt, Human
agcaucaggccaggcc

SEQ ID NO: 2991415 - RNA, 17 nt, Human
agcaucaggccaggccc

SEQ ID NO: 2991416 - RNA, 18 nt, Human
agcaucaggccaggcccu

SEQ ID NO: 2991417 - RNA, 19 nt, Human
agcaucaggccaggcccuc

SEQ ID NO: 2991418 - RNA, 20 nt, Human
agcaucaggccaggcccucu

SEQ ID NO: 2991419 - RNA, 17 nt, Human
agcauuguaaaugugcu

SEQ ID NO: 2991420 - RNA, 18 nt, Human
agcauuguaaaugugcuu

SEQ ID NO: 2991421 - RNA, 12 nt, Human
ugauaugggucu

SEQ ID NO: 2991422 - RNA, 16 nt, Human
ugauaugugaacaguu

SEQ ID NO: 2991423 - RNA, 15 nt, Human
ugauaugugaacagu

SEQ ID NO: 2991424 - RNA, 18 nt, Human
ugauauggguaguauuuu

SEQ ID NO: 2991425 - RNA, 19 nt, Human
ugaucacggcucacugcag

SEQ ID NO: 2991426 - RNA, 18 nt, Human
ugaucacggcucacugca

SEQ ID NO: 2991427 - RNA, 13 nt, Human
agcaucaggccag

SEQ ID NO: 2991428 - RNA, 12 nt, Human
agcaucaggcca

SEQ ID NO: 2991429 - RNA, 21 nt, Human
ugaucacggcucacugcagcc

SEQ ID NO: 2991430 - RNA, 20 nt, Human
ugaucacggcucacugcagc

SEQ ID NO: 2991431 - RNA, 22 nt, Human
agcauauucaggaagcucaggg

SEQ ID NO: 2991432 - RNA, 22 nt, Human
ugaguaacugauuuguaacaag

SEQ ID NO: 2991433 - RNA, 15 nt, Human
ugaguacuacagucc

SEQ ID NO: 2991434 - RNA, 14 nt, Human
agcauauucaggaa

SEQ ID NO: 2991435 - RNA, 17 nt, Human
ugaguacuacaguccuc

SEQ ID NO: 2991436 - RNA, 21 nt, Human
ugaguacuacaguccucccau

SEQ ID NO: 2991437 - RNA, 22 nt, Human
ugaguacuacaguccucccauc

SEQ ID NO: 2991438 - RNA, 23 nt, Human
ugaguacuacaguccucccaucu

SEQ ID NO: 2991439 - RNA, 14 nt, Human
ugaguacuacaguc

SEQ ID NO: 2991440 - RNA, 15 nt, Human
agcauacguacacau

SEQ ID NO: 2991441 - RNA, 23 nt, Human
agcauaaauguugacaugggaca

SEQ ID NO: 2991442 - RNA, 12 nt, Human
ugagaauuaccc

SEQ ID NO: 2991443 - RNA, 19 nt, Human
agcauacguacacauuuua

SEQ ID NO: 2991444 - RNA, 18 nt, Human
agcauacguacacauuuu

SEQ ID NO: 2991445 - RNA, 17 nt, Human
agcauacguacacauuu

SEQ ID NO: 2991446 - RNA, 16 nt, Human
agcauacguacacauu

SEQ ID NO: 2991447 - RNA, 21 nt, Human
agcauacguacacauuuuauu

SEQ ID NO: 2991448 - RNA, 20 nt, Human
agcauacguacacauuuuau

SEQ ID NO: 2991449 - RNA, 20 nt, Human
ugauaagaaccuuuugagug

SEQ ID NO: 2991450 - RNA, 17 nt, Human
ugaguucauacccuguu

SEQ ID NO: 2991451 - RNA, 21 nt, Human
ugauacaaugcugugcccuaa

SEQ ID NO: 2991452 - RNA, 12 nt, Human
ugauacagaaaa

SEQ ID NO: 2991453 - RNA, 20 nt, Human
ugauacaaugcugugcccua

SEQ ID NO: 2991454 - RNA, 18 nt, Human
ugauacaaugcugugccc

SEQ ID NO: 2991455 - RNA, 17 nt, Human
ugauacuacaguuuguu

SEQ ID NO: 2991456 - RNA, 14 nt, Human
ugauacuacaguuu

SEQ ID NO: 2991457 - RNA, 17 nt, Human
ugagugccuuacacaau

SEQ ID NO: 2991458 - RNA, 20 nt, Human
ugagugccuuacacaauggu

SEQ ID NO: 2991459 - RNA, 17 nt, Human
ugagucaccaagcccag

SEQ ID NO: 2991460 - RNA, 16 nt, Human
ugagucaccaagccca

SEQ ID NO: 2991461 - RNA, 14 nt, Human
ugagucaccaagcc

SEQ ID NO: 2991462 - RNA, 23 nt, Human
ugagugggggaucacagccucug

SEQ ID NO: 2991463 - RNA, 21 nt, Human
ugagugggugaauaauacagu

SEQ ID NO: 2991464 - RNA, 16 nt, Human
ugagugccuuacacaa

SEQ ID NO: 2991465 - RNA, 14 nt, Human
agccagacuggcac

SEQ ID NO: 2991466 - RNA, 12 nt, Human
agccaggccaca

SEQ ID NO: 2991467 - RNA, 14 nt, Human
agccaggccacaag

SEQ ID NO: 2991468 - RNA, 21 nt, Human
agccaggccacaagacccuug

SEQ ID NO: 2991469 - RNA, 22 nt, Human
agccaggccacaagacccuugu

SEQ ID NO: 2991470 - RNA, 22 nt, Human
agccaggcccuugucggcccca

SEQ ID NO: 2991471 - RNA, 12 nt, Human
agccagggucuc

SEQ ID NO: 2991472 - RNA, 22 nt, Human
agccaguaaaugggggugcauu

SEQ ID NO: 2991473 - RNA, 23 nt, Human
agccaguaaaugggggugcauuu

SEQ ID NO: 2991474 - RNA, 22 nt, Human
agcccacuucugccauauucug

SEQ ID NO: 2991475 - RNA, 19 nt, Human
agcccaggaaaggcuccag

SEQ ID NO: 2991476 - RNA, 20 nt, Human
agcccaggaaaggcuccagg

SEQ ID NO: 2991477 - RNA, 21 nt, Human
agcccaggaaaggcuccagga

SEQ ID NO: 2991478 - RNA, 21 nt, Human
ugauucccaagcucugcuccu

SEQ ID NO: 2991479 - RNA, 19 nt, Human
ugauucccaagcucugcuc

SEQ ID NO: 2991480 - RNA, 18 nt, Human
ugauucccaagcucugcu

SEQ ID NO: 2991481 - RNA, 16 nt, Human
ugauucccaagcucug

SEQ ID NO: 2991482 - RNA, 15 nt, Human
ugauucccaagcucu

SEQ ID NO: 2991483 - RNA, 22 nt, Human
agcccaggaaaggcuccaggag

SEQ ID NO: 2991484 - RNA, 23 nt, Human
agcccaggaaaggcuccaggagc

SEQ ID NO: 2991485 - RNA, 24 nt, Human
agcccaggaaaggcuccaggagca

SEQ ID NO: 2991486 - RNA, 18 nt, Human
agcccaggaaaggcucca

SEQ ID NO: 2991487 - RNA, 13 nt, Human
ugauucagcucug

SEQ ID NO: 2991488 - RNA, 14 nt, Human
ugauucagcucugc

SEQ ID NO: 2991489 - RNA, 14 nt, Human
ugauuaccagggac

SEQ ID NO: 2991490 - RNA, 15 nt, Human
ugauuaauuaaaaca

SEQ ID NO: 2991491 - RNA, 12 nt, Human
ugauuaaaccaa

SEQ ID NO: 2991492 - RNA, 22 nt, Human
agccacugcaccgggccacaga

SEQ ID NO: 2991493 - RNA, 21 nt, Human
agccacugcaccgggccacag

SEQ ID NO: 2991494 - RNA, 13 nt, Human
agccacugcaccg

SEQ ID NO: 2991495 - RNA, 20 nt, Human
agccacugcaccgggccaca

SEQ ID NO: 2991496 - RNA, 14 nt, Human
ugaugauccuaggc

SEQ ID NO: 2991497 - RNA, 20 nt, Human
ugaugauccuaggcauuugc

SEQ ID NO: 2991498 - RNA, 14 nt, Human
ugaugaucuuuaaa

SEQ ID NO: 2991499 - RNA, 17 nt, Human
ugauggugcaaugaccu

SEQ ID NO: 2991500 - RNA, 23 nt, Human
ugauggugcaaugaccuuucaau

SEQ ID NO: 2991501 - RNA, 16 nt, Human
ugauggugcaaugacc

SEQ ID NO: 2991502 - RNA, 17 nt, Human
ugaugaucuuuaaaaua

SEQ ID NO: 2991503 - RNA, 18 nt, Human
ugauguuuuaaggaugcu

SEQ ID NO: 2991504 - RNA, 17 nt, Human
ugauguuuuaaggaugc

SEQ ID NO: 2991505 - RNA, 23 nt, Human
ugauguuuuccaugaguccccug

SEQ ID NO: 2991506 - RNA, 22 nt, Human
ugauguuuagaaacacaacuau

SEQ ID NO: 2991507 - RNA, 14 nt, Human
agccacauuccuga

SEQ ID NO: 2991508 - RNA, 18 nt, Human
agccacauuccugaugcu

SEQ ID NO: 2991509 - RNA, 20 nt, Human
agccaccaacauacucccau

SEQ ID NO: 2991510 - RNA, 23 nt, Human
agccaccaacauacucccaucug

SEQ ID NO: 2991511 - RNA, 19 nt, Human
agccaccaacauacuccca

SEQ ID NO: 2991512 - RNA, 14 nt, Human
agccacggccaggc

SEQ ID NO: 2991513 - RNA, 15 nt, Human
agccacggccaggcc

SEQ ID NO: 2991514 - RNA, 17 nt, Human
ugaugaagaaguugaua

SEQ ID NO: 2991515 - RNA, 21 nt, Human
ugaaaaaauuuacuuuaaacu

SEQ ID NO: 2991516 - RNA, 16 nt, Human
ugaaaaaggaggaaga

SEQ ID NO: 2991517 - RNA, 12 nt, Human
ucuuuuaaacuc

SEQ ID NO: 2991518 - RNA, 11 nt, Human
ucuuuuaaacu

SEQ ID NO: 2991519 - RNA, 14 nt, Human
ucuuuuaagaauca

SEQ ID NO: 2991520 - RNA, 12 nt, Human
ucuuuuaagaau

SEQ ID NO: 2991521 - RNA, 21 nt, Human
ucuuucuggcuaugcauuuga

SEQ ID NO: 2991522 - RNA, 19 nt, Human
ucuuucuggcuaugcauuu

SEQ ID NO: 2991523 - RNA, 20 nt, Human
ucuuucuggcuaugcauuug

SEQ ID NO: 2991524 - RNA, 22 nt, Human
ucuuuggucuacacugugcuga

SEQ ID NO: 2991525 - RNA, 20 nt, Human
ugaaaagcuccauuuuuagu

SEQ ID NO: 2991526 - RNA, 20 nt, Human
ugaaaaaggaggaagagaaa

SEQ ID NO: 2991527 - RNA, 22 nt, Human
ugaaaaaggaggaagagaaaaa

SEQ ID NO: 2991528 - RNA, 22 nt, Human
ugaaaaaguucugcagauaaac

SEQ ID NO: 2991529 - RNA, 16 nt, Human
ugaaaaucgugacaac

SEQ ID NO: 2991530 - RNA, 19 nt, Human
ugaaacucguuaauuugua

SEQ ID NO: 2991531 - RNA, 16 nt, Human
ugaaacgcaaccacca

SEQ ID NO: 2991532 - RNA, 19 nt, Human
ugaaaaucgugacaacacu

SEQ ID NO: 2991533 - RNA, 17 nt, Human
ugaaaauguauguguaa

SEQ ID NO: 2991534 - RNA, 21 nt, Human
agagcaguuugguuucuagca

SEQ ID NO: 2991535 - RNA, 23 nt, Human
agagcaguuugguuucuagcaug

SEQ ID NO: 2991536 - RNA, 22 nt, Human
agagcaccuuagacagucccug

SEQ ID NO: 2991537 - RNA, 21 nt, Human
agagcaccuuagacagucccu

SEQ ID NO: 2991538 - RNA, 23 nt, Human
agagcaccuuagacagucccugc

SEQ ID NO: 2991539 - RNA, 14 nt, Human
agagcugccaccug

SEQ ID NO: 2991540 - RNA, 13 nt, Human
agagccuuccagg

SEQ ID NO: 2991541 - RNA, 15 nt, Human
agagccuuccagggg

SEQ ID NO: 2991542 - RNA, 17 nt, Human
agagccuuccaggggug

SEQ ID NO: 2991543 - RNA, 22 nt, Human
agagccuuccaggggugggaca

SEQ ID NO: 2991544 - RNA, 20 nt, Human
agagcuagcagcagggaggg

SEQ ID NO: 2991545 - RNA, 19 nt, Human
agagacuccugcaggcagc

SEQ ID NO: 2991546 - RNA, 20 nt, Human
agagacuccugcaggcagcc

SEQ ID NO: 2991547 - RNA, 21 nt, Human
agagacuccugcaggcagcca

SEQ ID NO: 2991548 - RNA, 22 nt, Human
agagacuccugcaggcagccag

SEQ ID NO: 2991549 - RNA, 17 nt, Human
agagacuccugcaggca

SEQ ID NO: 2991550 - RNA, 18 nt, Human
agagacuccugcaggcag

SEQ ID NO: 2991551 - RNA, 15 nt, Human
agagacuccugcagg

SEQ ID NO: 2991552 - RNA, 15 nt, Human
ugaaagacuguacaa

SEQ ID NO: 2991553 - RNA, 13 nt, Human
ugaaagacuguac

SEQ ID NO: 2991554 - RNA, 23 nt, Human
agagacuccugcaggcagccagg

SEQ ID NO: 2991555 - RNA, 22 nt, Human
agagaucaaccccuucgcuccu

SEQ ID NO: 2991556 - RNA, 19 nt, Human
agagcaagacgcugugcug

SEQ ID NO: 2991557 - RNA, 23 nt, Human
agagcaagacgcugugcugcccu

SEQ ID NO: 2991558 - RNA, 18 nt, Human
agacaucaacagauaaau

SEQ ID NO: 2991559 - RNA, 17 nt, Human
agacaucaacagauaaa

SEQ ID NO: 2991560 - RNA, 21 nt, Human
agacauagaauuaacacauga

SEQ ID NO: 2991561 - RNA, 14 nt, Human
agacauagaauuaa

SEQ ID NO: 2991562 - RNA, 19 nt, Human
agacauacuaaccagcaga

SEQ ID NO: 2991563 - RNA, 21 nt, Human
ucuucugaacuuggcgcugcc

SEQ ID NO: 2991564 - RNA, 12 nt, Human
ucuucugcuuca

SEQ ID NO: 2991565 - RNA, 23 nt, Human
ucuucuguacgucugacaggcaa

SEQ ID NO: 2991566 - RNA, 15 nt, Human
ucuucuguacgucug

SEQ ID NO: 2991567 - RNA, 20 nt, Human
ucuucuguggguuucuaaag

SEQ ID NO: 2991568 - RNA, 17 nt, Human
ucuucagagacuccugc

SEQ ID NO: 2991569 - RNA, 18 nt, Human
ucuucagagacuccugca

SEQ ID NO: 2991570 - RNA, 12 nt, Human
ucuucagagacu

SEQ ID NO: 2991571 - RNA, 15 nt, Human
ucuucacaacagauu

SEQ ID NO: 2991572 - RNA, 14 nt, Human
agaaucacuugaac

SEQ ID NO: 2991573 - RNA, 20 nt, Human
ucuucagagacuccugcagg

SEQ ID NO: 2991574 - RNA, 15 nt, Human
ucuuccaggcuggga

SEQ ID NO: 2991575 - RNA, 17 nt, Human
ucuuccaggcugggaga

SEQ ID NO: 2991576 - RNA, 20 nt, Human
ucuuccaggcugggagagcc

SEQ ID NO: 2991577 - RNA, 21 nt, Human
ucuuccaggcugggagagccu

SEQ ID NO: 2991578 - RNA, 19 nt, Human
ucuucccuacaguugaaaa

SEQ ID NO: 2991579 - RNA, 22 nt, Human
ucuucccuacaguugaaaaaca

SEQ ID NO: 2991580 - RNA, 14 nt, Human
ucuuccucccuccc

SEQ ID NO: 2991581 - RNA, 15 nt, Human
ucuuccucccucccu

SEQ ID NO: 2991582 - RNA, 12 nt, Human
agacuauucaaa

SEQ ID NO: 2991583 - RNA, 14 nt, Human
agacuauucaaaca

SEQ ID NO: 2991584 - RNA, 15 nt, Human
agacuauucaaacag

SEQ ID NO: 2991585 - RNA, 21 nt, Human
agaccuucuccuucaccuuug

SEQ ID NO: 2991586 - RNA, 23 nt, Human
agaccuucuccuucaccuuuguc

SEQ ID NO: 2991587 - RNA, 15 nt, Human
agaccuucuccuuca

SEQ ID NO: 2991588 - RNA, 18 nt, Human
agaccuucuccuucaccu

SEQ ID NO: 2991589 - RNA, 11 nt, Human
agaccuucucc

SEQ ID NO: 2991590 - RNA, 13 nt, Human
ucuugagccuggg

SEQ ID NO: 2991591 - RNA, 16 nt, Human
ucuugagccugggagg

SEQ ID NO: 2991592 - RNA, 20 nt, Human
ucuugagccuugaacuuuga

SEQ ID NO: 2991593 - RNA, 16 nt, Human
ucuugagccuugaacu

SEQ ID NO: 2991594 - RNA, 13 nt, Human
ucuugauucauaa

SEQ ID NO: 2991595 - RNA, 17 nt, Human
ucuuggucagauuugaa

SEQ ID NO: 2991596 - RNA, 14 nt, Human
ucuugguccugcug

SEQ ID NO: 2991597 - RNA, 22 nt, Human
ucuugcaauggcagccuuggca

SEQ ID NO: 2991598 - RNA, 18 nt, Human
ucuugcaauggcagccuu

SEQ ID NO: 2991599 - RNA, 19 nt, Human
ucuugcaauggcagccuug

SEQ ID NO: 2991600 - RNA, 17 nt, Human
ucuuuccugaggcuggg

SEQ ID NO: 2991601 - RNA, 16 nt, Human
ucuuuccugaggcugg

SEQ ID NO: 2991602 - RNA, 15 nt, Human
ucuugguccugcugc

SEQ ID NO: 2991603 - RNA, 17 nt, Human
ucuugguccugcugcag

SEQ ID NO: 2991604 - RNA, 19 nt, Human
ucuugguccugcugcaguu

SEQ ID NO: 2991605 - RNA, 23 nt, Human
ugacuauuuuuguuuuuauuaaa

SEQ ID NO: 2991606 - RNA, 13 nt, Human
ugacuuacuguac

SEQ ID NO: 2991607 - RNA, 16 nt, Human
ugacuuacuguacaug

SEQ ID NO: 2991608 - RNA, 15 nt, Human
ugacuuacuguacau

SEQ ID NO: 2991609 - RNA, 18 nt, Human
ugaccugaggcccuucuc

SEQ ID NO: 2991610 - RNA, 19 nt, Human
ugaccugaggcccuucucu

SEQ ID NO: 2991611 - RNA, 17 nt, Human
ugaccugaggcccuucu

SEQ ID NO: 2991612 - RNA, 12 nt, Human
agauguugcuaa

SEQ ID NO: 2991613 - RNA, 14 nt, Human
ugacccaugcugcc

SEQ ID NO: 2991614 - RNA, 15 nt, Human
ugacccaugcugccc

SEQ ID NO: 2991615 - RNA, 12 nt, Human
ugacccaugcug

SEQ ID NO: 2991616 - RNA, 16 nt, Human
ugacccaugcugcccu

SEQ ID NO: 2991617 - RNA, 21 nt, Human
ugacccaugcugcccugugag

SEQ ID NO: 2991618 - RNA, 16 nt, Human
ugacacuuaaaaaugg

SEQ ID NO: 2991619 - RNA, 17 nt, Human
ugacacuuaaaaauggu

SEQ ID NO: 2991620 - RNA, 16 nt, Human
agaugcaguucugaag

SEQ ID NO: 2991621 - RNA, 16 nt, Human
agaugccgcauuugga

SEQ ID NO: 2991622 - RNA, 14 nt, Human
agcaagacauuaua

SEQ ID NO: 2991623 - RNA, 13 nt, Human
agcaagacgcugu

SEQ ID NO: 2991624 - RNA, 16 nt, Human
agcaagacgcugugcu

SEQ ID NO: 2991625 - RNA, 23 nt, Human
agcaacgcaggcccccaggugcc

SEQ ID NO: 2991626 - RNA, 17 nt, Human
agcaagacgcugugcug

SEQ ID NO: 2991627 - RNA, 20 nt, Human
agcaagacgcugugcugccc

SEQ ID NO: 2991628 - RNA, 21 nt, Human
agcaagacgcugugcugcccu

SEQ ID NO: 2991629 - RNA, 22 nt, Human
agcaagacgcugugcugcccug

SEQ ID NO: 2991630 - RNA, 23 nt, Human
agcaagacgcugugcugcccugc

SEQ ID NO: 2991631 - RNA, 15 nt, Human
agauucccugagcag

SEQ ID NO: 2991632 - RNA, 13 nt, Human
agauuggaaggaa

SEQ ID NO: 2991633 - RNA, 22 nt, Human
ugacuucuaaguaaaaccacag

SEQ ID NO: 2991634 - RNA, 23 nt, Human
ugacuucuaaguaaaaccacagc

SEQ ID NO: 2991635 - RNA, 19 nt, Human
ugacuuacuguacaugaaa

SEQ ID NO: 2991636 - RNA, 15 nt, Human
ugacuucuaaguaaa

SEQ ID NO: 2991637 - RNA, 22 nt, Human
agauucauauuuacuucuuaua

SEQ ID NO: 2991638 - RNA, 19 nt, Human
agauucauauuuacuucuu

SEQ ID NO: 2991639 - RNA, 21 nt, Human
agauuuugaaauuuuuauuaa

SEQ ID NO: 2991640 - RNA, 17 nt, Human
agauuugaacucuucaa

SEQ ID NO: 2991641 - RNA, 14 nt, Human
ugaauuugccuaau

SEQ ID NO: 2991642 - RNA, 23 nt, Human
ugaauuucuuuugccguuauuaa

SEQ ID NO: 2991643 - RNA, 20 nt, Human
ugacacaugcaaggucauuu

SEQ ID NO: 2991644 - RNA, 12 nt, Human
ugacacaugcaa

SEQ ID NO: 2991645 - RNA, 18 nt, Human
ugacacacagcucugucc

SEQ ID NO: 2991646 - RNA, 16 nt, Human
ugacacacagcucugu

SEQ ID NO: 2991647 - RNA, 19 nt, Human
ugacaaagacugaguacgu

SEQ ID NO: 2991648 - RNA, 19 nt, Human
ugacacacagcucuguccu

SEQ ID NO: 2991649 - RNA, 17 nt, Human
agaguuguuacauuuuu

SEQ ID NO: 2991650 - RNA, 16 nt, Human
agaguuguuacauuuu

SEQ ID NO: 2991651 - RNA, 15 nt, Human
agagucacuggaaca

SEQ ID NO: 2991652 - RNA, 20 nt, Human
agaguuguuacauuuuuaag

SEQ ID NO: 2991653 - RNA, 19 nt, Human
agaguuguuacauuuuuaa

SEQ ID NO: 2991654 - RNA, 18 nt, Human
agauaauacaccacuaca

SEQ ID NO: 2991655 - RNA, 16 nt, Human
agauacuguaucauga

SEQ ID NO: 2991656 - RNA, 15 nt, Human
agauacuguaucaug

SEQ ID NO: 2991657 - RNA, 21 nt, Human
agauauuuugcuuugugauuu

SEQ ID NO: 2991658 - RNA, 20 nt, Human
agauauuuugcuuugugauu

SEQ ID NO: 2991659 - RNA, 18 nt, Human
agaucaaaagguuaauaa

SEQ ID NO: 2991660 - RNA, 18 nt, Human
agauaauauuaaggaaga

SEQ ID NO: 2991661 - RNA, 22 nt, Human
agauaauauuaaggaagacaau

SEQ ID NO: 2991662 - RNA, 13 nt, Human
agauacaguuacu

SEQ ID NO: 2991663 - RNA, 20 nt, Human
agauacaggaaaagcugcug

SEQ ID NO: 2991664 - RNA, 11 nt, Human
agauacuguau

SEQ ID NO: 2991665 - RNA, 22 nt, Human
agauacaguuacucagaauucu

SEQ ID NO: 2991666 - RNA, 18 nt, Human
ugaagguagaauguuuuc

SEQ ID NO: 2991667 - RNA, 19 nt, Human
ugaagguagaauguuuuca

SEQ ID NO: 2991668 - RNA, 22 nt, Human
ugaaggguaauuauauaguuac

SEQ ID NO: 2991669 - RNA, 14 nt, Human
ugaagucacacagu

SEQ ID NO: 2991670 - RNA, 15 nt, Human
ugaauacuuuauaaa

SEQ ID NO: 2991671 - RNA, 22 nt, Human
ugaauaccccaagacucccaug

SEQ ID NO: 2991672 - RNA, 14 nt, Human
ugaauaccccaaga

SEQ ID NO: 2991673 - RNA, 23 nt, Human
ugaauguaggcuggcuuucagag

SEQ ID NO: 2991674 - RNA, 21 nt, Human
agaguaggcuauuccugagag

SEQ ID NO: 2991675 - RNA, 16 nt, Human
agagguggggagcaga

SEQ ID NO: 2991676 - RNA, 15 nt, Human
agagguuaagguggg

SEQ ID NO: 2991677 - RNA, 16 nt, Human
agagggagggagggcu

SEQ ID NO: 2991678 - RNA, 19 nt, Human
ucuggauucauauuuaauu

SEQ ID NO: 2991679 - RNA, 16 nt, Human
ucuggauucauauuua

SEQ ID NO: 2991680 - RNA, 22 nt, Human
ucugcuuugggguuuaucagaa

SEQ ID NO: 2991681 - RNA, 14 nt, Human
agaagcuccaggua

SEQ ID NO: 2991682 - RNA, 16 nt, Human
ucuggcagcucagaga

SEQ ID NO: 2991683 - RNA, 17 nt, Human
ucuggcagcucagagag

SEQ ID NO: 2991684 - RNA, 20 nt, Human
ucuggcagaguugaagacag

SEQ ID NO: 2991685 - RNA, 23 nt, Human
ucuggcagaguugaagacagagc

SEQ ID NO: 2991686 - RNA, 18 nt, Human
ucuggcagcucagagagg

SEQ ID NO: 2991687 - RNA, 21 nt, Human
ucuggcagcucagagagggug

SEQ ID NO: 2991688 - RNA, 16 nt, Human
agaauaaaccaagaau

SEQ ID NO: 2991689 - RNA, 18 nt, Human
agaauaggcacuuuaaaa

SEQ ID NO: 2991690 - RNA, 17 nt, Human
agaauaggcacuuuaaa

SEQ ID NO: 2991691 - RNA, 22 nt, Human
agaauaggcacuuuaaaacacu

SEQ ID NO: 2991692 - RNA, 20 nt, Human
agaauaggcacuuuaaaaca

SEQ ID NO: 2991693 - RNA, 17 nt, Human
agaaguucuaguguuuu

SEQ ID NO: 2991694 - RNA, 16 nt, Human
agaaguucuaguguuu

SEQ ID NO: 2991695 - RNA, 15 nt, Human
agaaguucuaguguu

SEQ ID NO: 2991696 - RNA, 13 nt, Human
agaaguugauaug

SEQ ID NO: 2991697 - RNA, 15 nt, Human
agaaguuugaacauu

SEQ ID NO: 2991698 - RNA, 22 nt, Human
agaaguuugagaucagccuggg

SEQ ID NO: 2991699 - RNA, 17 nt, Human
agaacuauguuuuuguu

SEQ ID NO: 2991700 - RNA, 19 nt, Human
agaaccuuuugagugccuu

SEQ ID NO: 2991701 - RNA, 23 nt, Human
agaaccuuuugagugccuuacac

SEQ ID NO: 2991702 - RNA, 16 nt, Human
agaacucccuuucaac

SEQ ID NO: 2991703 - RNA, 15 nt, Human
agaacucccuuucaa

SEQ ID NO: 2991704 - RNA, 17 nt, Human
agaacucccuuucaaca

SEQ ID NO: 2991705 - RNA, 12 nt, Human
ucugcccuuggu

SEQ ID NO: 2991706 - RNA, 23 nt, Human
ucugcccuugguuaggcauugug

SEQ ID NO: 2991707 - RNA, 23 nt, Human
ucugcccacucccugcaaccuga

SEQ ID NO: 2991708 - RNA, 20 nt, Human
ucugcccauccugccccuga

SEQ ID NO: 2991709 - RNA, 23 nt, Human
agaagcccaggaaaggcuccagg

SEQ ID NO: 2991710 - RNA, 16 nt, Human
agaagcagaggaagga

SEQ ID NO: 2991711 - RNA, 19 nt, Human
agaagcaccaaucaugaau

SEQ ID NO: 2991712 - RNA, 19 nt, Human
agaagcaacccaaauguuc

SEQ ID NO: 2991713 - RNA, 16 nt, Human
acuuuguguucaccuu

SEQ ID NO: 2991714 - RNA, 21 nt, Human
ucuccuuggugucgggcauga

SEQ ID NO: 2991715 - RNA, 23 nt, Human
ucuccuuggugucgggcaugaca

SEQ ID NO: 2991716 - RNA, 19 nt, Human
ucuccuguaccucuugagc

SEQ ID NO: 2991717 - RNA, 12 nt, Human
ucucucaggcca

SEQ ID NO: 2991718 - RNA, 22 nt, Human
ucucucacuuguuuuauuuaac

SEQ ID NO: 2991719 - RNA, 21 nt, Human
ucucucacuuguuuuauuuaa

SEQ ID NO: 2991720 - RNA, 23 nt, Human
acuuuaccuuuuuuauacauaaa

SEQ ID NO: 2991721 - RNA, 12 nt, Human
acuuuaaaagca

SEQ ID NO: 2991722 - RNA, 12 nt, Human
acuuuaaaacac

SEQ ID NO: 2991723 - RNA, 14 nt, Human
acuuuaaaagcauu

SEQ ID NO: 2991724 - RNA, 22 nt, Human
acuuguuuuauuuaaccucuaa

SEQ ID NO: 2991725 - RNA, 16 nt, Human
acuuuaaaaggagcca

SEQ ID NO: 2991726 - RNA, 14 nt, Human
acuuguggacacag

SEQ ID NO: 2991727 - RNA, 13 nt, Human
acuuuggaaagag

SEQ ID NO: 2991728 - RNA, 14 nt, Human
acuuuggaaagagu

SEQ ID NO: 2991729 - RNA, 23 nt, Human
acuuuggaaagacuuuuccaacc

SEQ ID NO: 2991730 - RNA, 23 nt, Human
acuuuggaaagaguaggaagacu

SEQ ID NO: 2991731 - RNA, 21 nt, Human
acuuugcacacuuuggcccag

SEQ ID NO: 2991732 - RNA, 22 nt, Human
acuuugcacacuuuggcccagg

SEQ ID NO: 2991733 - RNA, 20 nt, Human
agaaagcagaacagugauua

SEQ ID NO: 2991734 - RNA, 18 nt, Human
agaaagcagaacagugau

SEQ ID NO: 2991735 - RNA, 17 nt, Human
agaaagcagaacaguga

SEQ ID NO: 2991736 - RNA, 22 nt, Human
agaaagacuaucuaaauguuga

SEQ ID NO: 2991737 - RNA, 20 nt, Human
agaaagacuaucuaaauguu

SEQ ID NO: 2991738 - RNA, 16 nt, Human
agaaagacuauucaaa

SEQ ID NO: 2991739 - RNA, 15 nt, Human
agaaaugccuuaccc

SEQ ID NO: 2991740 - RNA, 20 nt, Human
ucugaaggguaauuauauag

SEQ ID NO: 2991741 - RNA, 18 nt, Human
ucugaaggcuggguucug

SEQ ID NO: 2991742 - RNA, 22 nt, Human
ucugaaggacauugcggacagc

SEQ ID NO: 2991743 - RNA, 16 nt, Human
ucucuugguccugcug

SEQ ID NO: 2991744 - RNA, 17 nt, Human
ucucuugguccugcugc

SEQ ID NO: 2991745 - RNA, 18 nt, Human
ucucuugguccugcugca

SEQ ID NO: 2991746 - RNA, 18 nt, Human
agaaaaaugagccuggca

SEQ ID NO: 2991747 - RNA, 17 nt, Human
agaaaaaauauuuuccu

SEQ ID NO: 2991748 - RNA, 23 nt, Human
agaaaaaauauuuuccugccagg

SEQ ID NO: 2991749 - RNA, 19 nt, Human
agaaaaaauauuuucccua

SEQ ID NO: 2991750 - RNA, 16 nt, Human
agaaacacaacuauau

SEQ ID NO: 2991751 - RNA, 22 nt, Human
agaaacuggcaaagcagaaugu

SEQ ID NO: 2991752 - RNA, 17 nt, Human
agaaacuggcaaagcag

SEQ ID NO: 2991753 - RNA, 16 nt, Human
agaaacuggcaaagca

SEQ ID NO: 2991754 - RNA, 15 nt, Human
agaaacuggcaaagc

SEQ ID NO: 2991755 - RNA, 15 nt, Human
agaaacuggaacucu

SEQ ID NO: 2991756 - RNA, 12 nt, Human
ucuagcaugaag

SEQ ID NO: 2991757 - RNA, 24 nt, Human
ucuagauacuguaucaugacaaag

SEQ ID NO: 2991758 - RNA, 13 nt, Human
ucuauaauuuaaa

SEQ ID NO: 2991759 - RNA, 22 nt, Human
ucuauaauuuccauuuacuuaa

SEQ ID NO: 2991760 - RNA, 19 nt, Human
ucuauaauuuccauuuacu

SEQ ID NO: 2991761 - RNA, 13 nt, Human
ucuauaauuucca

SEQ ID NO: 2991762 - RNA, 18 nt, Human
ucuaguguuuucaauuuu

SEQ ID NO: 2991763 - RNA, 23 nt, Human
ucuaguuugauuaaauucuugca

SEQ ID NO: 2991764 - RNA, 22 nt, Human
ucuaguuugauuaaauucuugc

SEQ ID NO: 2991765 - RNA, 14 nt, Human
ucuaggaaaauuau

SEQ ID NO: 2991766 - RNA, 14 nt, Human
ucuaguguuuucaa

SEQ ID NO: 2991767 - RNA, 20 nt, Human
acuuccagauccuggaaauc

SEQ ID NO: 2991768 - RNA, 17 nt, Human
acuuccacugccauccu

SEQ ID NO: 2991769 - RNA, 18 nt, Human
acuuccaauuuacauacu

SEQ ID NO: 2991770 - RNA, 20 nt, Human
acuuagagguggggagcaga

SEQ ID NO: 2991771 - RNA, 15 nt, Human
acuuacuguacauga

SEQ ID NO: 2991772 - RNA, 14 nt, Human
acuuacuguacaug

SEQ ID NO: 2991773 - RNA, 13 nt, Human
acuuacuguacau

SEQ ID NO: 2991774 - RNA, 12 nt, Human
ucuaccugaggg

SEQ ID NO: 2991775 - RNA, 19 nt, Human
ucuaccugaggggccucuu

SEQ ID NO: 2991776 - RNA, 23 nt, Human
acuugaacccgggaggcagaggu

SEQ ID NO: 2991777 - RNA, 21 nt, Human
acuugaacccgggaggcagag

SEQ ID NO: 2991778 - RNA, 19 nt, Human
acuugagaauuacccuuuu

SEQ ID NO: 2991779 - RNA, 14 nt, Human
acuugucuuuggac

SEQ ID NO: 2991780 - RNA, 14 nt, Human
acuuggaagcuccg

SEQ ID NO: 2991781 - RNA, 17 nt, Human
ucucaaaacugcacugu

SEQ ID NO: 2991782 - RNA, 21 nt, Human
ucucacagcuccaagaauuuc

SEQ ID NO: 2991783 - RNA, 16 nt, Human
ucucaaaaaaagaaaa

SEQ ID NO: 2991784 - RNA, 16 nt, Human
ucuauuguuucuuuca

SEQ ID NO: 2991785 - RNA, 18 nt, Human
acuucuaaguaaaaccac

SEQ ID NO: 2991786 - RNA, 19 nt, Human
acuucuaaguaaaaccaca

SEQ ID NO: 2991787 - RNA, 13 nt, Human
acuucuaaguaaa

SEQ ID NO: 2991788 - RNA, 18 nt, Human
acuucuccacccugcucu

SEQ ID NO: 2991789 - RNA, 21 nt, Human
acuucucuacccaucuuaaaa

SEQ ID NO: 2991790 - RNA, 17 nt, Human
acuucgggaggucgagg

SEQ ID NO: 2991791 - RNA, 20 nt, Human
acuucgggaggucgaggcag

SEQ ID NO: 2991792 - RNA, 15 nt, Human
acuguccuauuauau

SEQ ID NO: 2991793 - RNA, 16 nt, Human
acuguccuauuauauu

SEQ ID NO: 2991794 - RNA, 23 nt, Human
acuguccuacccacccuccuuuc

SEQ ID NO: 2991795 - RNA, 18 nt, Human
acuguccuauuauauuca

SEQ ID NO: 2991796 - RNA, 22 nt, Human
acugucagcuccccucggagaa

SEQ ID NO: 2991797 - RNA, 23 nt, Human
acugucagcuccccucggagaag

SEQ ID NO: 2991798 - RNA, 20 nt, Human
acuguaucaugacaaagacu

SEQ ID NO: 2991799 - RNA, 16 nt, Human
acuguaucaugacaaa

SEQ ID NO: 2991800 - RNA, 21 nt, Human
acuguacaugaaaacacauuu

SEQ ID NO: 2991801 - RNA, 20 nt, Human
acuguacaugaaaacacauu

SEQ ID NO: 2991802 - RNA, 14 nt, Human
acuguaucaugaca

SEQ ID NO: 2991803 - RNA, 22 nt, Human
acuguacaaaguagaagucuua

SEQ ID NO: 2991804 - RNA, 16 nt, Human
acuguacaaaguagaa

SEQ ID NO: 2991805 - RNA, 17 nt, Human
acuggguacuuguggac

SEQ ID NO: 2991806 - RNA, 16 nt, Human
acuguacaugaaaaca

SEQ ID NO: 2991807 - RNA, 19 nt, Human
acuguacaugaaaacacau

SEQ ID NO: 2991808 - RNA, 15 nt, Human
acuguacacauaagc

SEQ ID NO: 2991809 - RNA, 22 nt, Human
acugaagaagcaccaaucauga

SEQ ID NO: 2991810 - RNA, 12 nt, Human
acugaagaagca

SEQ ID NO: 2991811 - RNA, 22 nt, Human
acugaacaaacuaucagaggaa

SEQ ID NO: 2991812 - RNA, 14 nt, Human
ucgcuccugugucu

SEQ ID NO: 2991813 - RNA, 15 nt, Human
acuggguacuugugg

SEQ ID NO: 2991814 - RNA, 21 nt, Human
acugggcuuggggaccagagc

SEQ ID NO: 2991815 - RNA, 23 nt, Human
ucgcugugucagcauagaaguaa

SEQ ID NO: 2991816 - RNA, 17 nt, Human
ucuaccaaaaaucucaa

SEQ ID NO: 2991817 - RNA, 19 nt, Human
ucuacccaucuuaaaaaca

SEQ ID NO: 2991818 - RNA, 21 nt, Human
ucuacccaucuuaaaaacaac

SEQ ID NO: 2991819 - RNA, 21 nt, Human
ucuacccucuuagaaaaacca

SEQ ID NO: 2991820 - RNA, 16 nt, Human
ucuaaaggcuaccuuu

SEQ ID NO: 2991821 - RNA, 13 nt, Human
ucuaaaggcuacc

SEQ ID NO: 2991822 - RNA, 17 nt, Human
ucuaaagcugccagccg

SEQ ID NO: 2991823 - RNA, 17 nt, Human
acuguuaauaguucagg

SEQ ID NO: 2991824 - RNA, 21 nt, Human
acuguuaauaguucagguaac

SEQ ID NO: 2991825 - RNA, 23 nt, Human
ucgggaggcugaggcaggagacu

SEQ ID NO: 2991826 - RNA, 13 nt, Human
ucaguagucagac

SEQ ID NO: 2991827 - RNA, 19 nt, Human
ucagugccuuauggaacac

SEQ ID NO: 2991828 - RNA, 20 nt, Human
ucagugccuuauggaacacu

SEQ ID NO: 2991829 - RNA, 22 nt, Human
ucagugccuuauggaacacucu

SEQ ID NO: 2991830 - RNA, 23 nt, Human
ucagugccuuauggaacacucug

SEQ ID NO: 2991831 - RNA, 13 nt, Human
ucaguggcagcug

SEQ ID NO: 2991832 - RNA, 18 nt, Human
ucagugccuuauggaaca

SEQ ID NO: 2991833 - RNA, 16 nt, Human
ucaguggcagcugcuu

SEQ ID NO: 2991834 - RNA, 17 nt, Human
ucaguuguuaguguguc

SEQ ID NO: 2991835 - RNA, 15 nt, Human
ucaguggcagcugcu

SEQ ID NO: 2991836 - RNA, 14 nt, Human
ucaguggcagcugc

SEQ ID NO: 2991837 - RNA, 15 nt, Human
ucaguuguuauuuau

SEQ ID NO: 2991838 - RNA, 20 nt, Human
ucaguuguuauuuauugaaa

SEQ ID NO: 2991839 - RNA, 19 nt, Human
ucaguuguuagugugucuu

SEQ ID NO: 2991840 - RNA, 14 nt, Human
ucaguuuaucuguu

SEQ ID NO: 2991841 - RNA, 16 nt, Human
ucaguuuaucuguuca

SEQ ID NO: 2991842 - RNA, 12 nt, Human
ucaguuugguug

SEQ ID NO: 2991843 - RNA, 16 nt, Human
ucaguuugcagaguag

SEQ ID NO: 2991844 - RNA, 15 nt, Human
ucaguuugcagagua

SEQ ID NO: 2991845 - RNA, 22 nt, Human
ucagguggggucacucuggcag

SEQ ID NO: 2991846 - RNA, 21 nt, Human
accgaaaacguggcugcuuca

SEQ ID NO: 2991847 - RNA, 22 nt, Human
accgaaaacguggcugcuucaa

SEQ ID NO: 2991848 - RNA, 18 nt, Human
ucaggugucccugcacuu

SEQ ID NO: 2991849 - RNA, 17 nt, Human
ucaggugucccugcacu

SEQ ID NO: 2991850 - RNA, 23 nt, Human
ucagguggggucacucuggcagc

SEQ ID NO: 2991851 - RNA, 15 nt, Human
ucaggugucccugca

SEQ ID NO: 2991852 - RNA, 20 nt, Human
accgaaaacguggcugcuuc

SEQ ID NO: 2991853 - RNA, 20 nt, Human
acccuugccgucuaccugag

SEQ ID NO: 2991854 - RNA, 13 nt, Human
ucaguaauaacuc

SEQ ID NO: 2991855 - RNA, 13 nt, Human
ucaguaagccgug

SEQ ID NO: 2991856 - RNA, 22 nt, Human
ucaggugucccugcacuugcag

SEQ ID NO: 2991857 - RNA, 23 nt, Human
ucagguuuucuuuuaagaaucaa

SEQ ID NO: 2991858 - RNA, 20 nt, Human
ucagguuuucuuuuaagaau

SEQ ID NO: 2991859 - RNA, 19 nt, Human
ucagguuuucuuuuaagaa

SEQ ID NO: 2991860 - RNA, 23 nt, Human
acccugaggcccagagggccugc

SEQ ID NO: 2991861 - RNA, 11 nt, Human
acccugaggcc

SEQ ID NO: 2991862 - RNA, 17 nt, Human
acccugaggcccagagg

SEQ ID NO: 2991863 - RNA, 19 nt, Human
acccugaggcccagagggc

SEQ ID NO: 2991864 - RNA, 21 nt, Human
acccugaggcccagagggccu

SEQ ID NO: 2991865 - RNA, 19 nt, Human
acccgggaagggggcuggg

SEQ ID NO: 2991866 - RNA, 20 nt, Human
acccgggaagggggcuggga

SEQ ID NO: 2991867 - RNA, 17 nt, Human
acccucauguucuuaau

SEQ ID NO: 2991868 - RNA, 15 nt, Human
acccucauguucuua

SEQ ID NO: 2991869 - RNA, 14 nt, Human
acccucauguucuu

SEQ ID NO: 2991870 - RNA, 22 nt, Human
acccgggaagggggcugggaca

SEQ ID NO: 2991871 - RNA, 21 nt, Human
acccuccuuucaccacaugug

SEQ ID NO: 2991872 - RNA, 13 nt, Human
ucaggccaggccc

SEQ ID NO: 2991873 - RNA, 14 nt, Human
ucaggccaggcccu

SEQ ID NO: 2991874 - RNA, 15 nt, Human
ucaggccaggcccuc

SEQ ID NO: 2991875 - RNA, 16 nt, Human
ucaggccaggcccucu

SEQ ID NO: 2991876 - RNA, 13 nt, Human
ucaggccagcugc

SEQ ID NO: 2991877 - RNA, 12 nt, Human
ucaggccaggcc

SEQ ID NO: 2991878 - RNA, 12 nt, Human
acccccagccug

SEQ ID NO: 2991879 - RNA, 13 nt, Human
acccccagccugc

SEQ ID NO: 2991880 - RNA, 18 nt, Human
ucaggcaggugggaugga

SEQ ID NO: 2991881 - RNA, 17 nt, Human
ucaggcaggugggaugg

SEQ ID NO: 2991882 - RNA, 17 nt, Human
ucaggccaggcccucug

SEQ ID NO: 2991883 - RNA, 18 nt, Human
ucaggccaggcccucugc

SEQ ID NO: 2991884 - RNA, 19 nt, Human
ucaggccaggcccucugcc

SEQ ID NO: 2991885 - RNA, 12 nt, Human
ucaggggugugc

SEQ ID NO: 2991886 - RNA, 19 nt, Human
ucaggggugugcggccuuu

SEQ ID NO: 2991887 - RNA, 23 nt, Human
ucaggggugugcggccuuuggcu

SEQ ID NO: 2991888 - RNA, 17 nt, Human
ucaggguuggccccugc

SEQ ID NO: 2991889 - RNA, 19 nt, Human
ucaggguuggccccugccc

SEQ ID NO: 2991890 - RNA, 18 nt, Human
ucaggguuggccccugcc

SEQ ID NO: 2991891 - RNA, 19 nt, Human
acccgcuaagagggaggga

SEQ ID NO: 2991892 - RNA, 12 nt, Human
ucagcccucaga

SEQ ID NO: 2991893 - RNA, 13 nt, Human
ucagcccucagaa

SEQ ID NO: 2991894 - RNA, 13 nt, Human
acccagcgagccc

SEQ ID NO: 2991895 - RNA, 17 nt, Human
acccagcgagcccuggu

SEQ ID NO: 2991896 - RNA, 16 nt, Human
acccagcgagcccugg

SEQ ID NO: 2991897 - RNA, 15 nt, Human
acccaggagccccga

SEQ ID NO: 2991898 - RNA, 13 nt, Human
acccaggagcccc

SEQ ID NO: 2991899 - RNA, 13 nt, Human
accccagguuucu

SEQ ID NO: 2991900 - RNA, 11 nt, Human
acccaggugcu

SEQ ID NO: 2991901 - RNA, 23 nt, Human
acccaggugcuaggaacacuccu

SEQ ID NO: 2991902 - RNA, 16 nt, Human
ucagaucucuaacuuc

SEQ ID NO: 2991903 - RNA, 15 nt, Human
ucagaucucuaacuu

SEQ ID NO: 2991904 - RNA, 16 nt, Human
ucagagcugcccucuc

SEQ ID NO: 2991905 - RNA, 15 nt, Human
ucagagcugcccucu

SEQ ID NO: 2991906 - RNA, 17 nt, Human
ucagagcugcccucucc

SEQ ID NO: 2991907 - RNA, 14 nt, Human
ucagagcugcccuc

SEQ ID NO: 2991908 - RNA, 13 nt, Human
ucagagcugcccu

SEQ ID NO: 2991909 - RNA, 23 nt, Human
ucagagacuccugcaggcagcca

SEQ ID NO: 2991910 - RNA, 23 nt, Human
ucagaaguuucugccgcagcccu

SEQ ID NO: 2991911 - RNA, 15 nt, Human
acccagcccacuucu

SEQ ID NO: 2991912 - RNA, 12 nt, Human
ucagaauucuca

SEQ ID NO: 2991913 - RNA, 10 nt, Human
ucagaauucu

SEQ ID NO: 2991914 - RNA, 20 nt, Human
ucagaauucucagaaucuca

SEQ ID NO: 2991915 - RNA, 22 nt, Human
ucagagacuccugcaggcagcc

SEQ ID NO: 2991916 - RNA, 20 nt, Human
acccaaauguucaucaauga

SEQ ID NO: 2991917 - RNA, 16 nt, Human
acccaaauguucauca

SEQ ID NO: 2991918 - RNA, 20 nt, Human
acccacugcuuuuggucugu

SEQ ID NO: 2991919 - RNA, 20 nt, Human
accauucuccaccugccagg

SEQ ID NO: 2991920 - RNA, 21 nt, Human
accauucuccaccugccaggg

SEQ ID NO: 2991921 - RNA, 19 nt, Human
accauucuccaccugccag

SEQ ID NO: 2991922 - RNA, 22 nt, Human
accauuuugcugucccuuuucc

SEQ ID NO: 2991923 - RNA, 23 nt, Human
accauuuugcugucccuuuuccu

SEQ ID NO: 2991924 - RNA, 21 nt, Human
accauuuugggguacccacug

SEQ ID NO: 2991925 - RNA, 23 nt, Human
ucacugagacagcccgggcucug

SEQ ID NO: 2991926 - RNA, 21 nt, Human
ucacuauguugcccaggcagg

SEQ ID NO: 2991927 - RNA, 20 nt, Human
ucacuauguugcccaggcag

SEQ ID NO: 2991928 - RNA, 19 nt, Human
ucacauuccugaacaggau

SEQ ID NO: 2991929 - RNA, 22 nt, Human
ucaccagccccagugcccacag

SEQ ID NO: 2991930 - RNA, 14 nt, Human
ucacuguugcccag

SEQ ID NO: 2991931 - RNA, 18 nt, Human
ucacugcaaccuccgccu

SEQ ID NO: 2991932 - RNA, 15 nt, Human
ucacuguugcccagg

SEQ ID NO: 2991933 - RNA, 13 nt, Human
acauuuuaugucu

SEQ ID NO: 2991934 - RNA, 15 nt, Human
acauuuuaugucuuu

SEQ ID NO: 2991935 - RNA, 16 nt, Human
acauuuuacacacugu

SEQ ID NO: 2991936 - RNA, 18 nt, Human
acauuuuuaagugcugca

SEQ ID NO: 2991937 - RNA, 15 nt, Human
acauuuuuaagugcu

SEQ ID NO: 2991938 - RNA, 23 nt, Human
acauuuuucuuagggaaggauac

SEQ ID NO: 2991939 - RNA, 13 nt, Human
acauuuuucuuag

SEQ ID NO: 2991940 - RNA, 21 nt, Human
acauuuuuuaaaugcaccugg

SEQ ID NO: 2991941 - RNA, 16 nt, Human
acauuggaaacaaguc

SEQ ID NO: 2991942 - RNA, 22 nt, Human
acauugcggacagccacggcca

SEQ ID NO: 2991943 - RNA, 21 nt, Human
acauugcggacagccacggcc

SEQ ID NO: 2991944 - RNA, 22 nt, Human
ucaauaggaaaaacugauuuuu

SEQ ID NO: 2991945 - RNA, 23 nt, Human
ucaauauuucagauaaucacaau

SEQ ID NO: 2991946 - RNA, 14 nt, Human
ucaaucaugucagu

SEQ ID NO: 2991947 - RNA, 18 nt, Human
ucaauaggaaaaacugau

SEQ ID NO: 2991948 - RNA, 19 nt, Human
ucaauaggaaaaacugauu

SEQ ID NO: 2991949 - RNA, 17 nt, Human
ucaauaggaaaaacuga

SEQ ID NO: 2991950 - RNA, 17 nt, Human
ucaagugauucuccugc

SEQ ID NO: 2991951 - RNA, 16 nt, Human
ucaagugauucuccug

SEQ ID NO: 2991952 - RNA, 17 nt, Human
ucaagagggucugagga

SEQ ID NO: 2991953 - RNA, 23 nt, Human
ucaaggauccugagccagauuuc

SEQ ID NO: 2991954 - RNA, 14 nt, Human
ucacagaagaugaa

SEQ ID NO: 2991955 - RNA, 16 nt, Human
ucacagaccuuugaac

SEQ ID NO: 2991956 - RNA, 20 nt, Human
ucaauugugaaaaaauuuac

SEQ ID NO: 2991957 - RNA, 16 nt, Human
ucaauugugaaaaaau

SEQ ID NO: 2991958 - RNA, 12 nt, Human
ucaauuuaaaaa

SEQ ID NO: 2991959 - RNA, 13 nt, Human
ucaauuuaaaaaa

SEQ ID NO: 2991960 - RNA, 23 nt, Human
ucacagcagugagacuggggcca

SEQ ID NO: 2991961 - RNA, 19 nt, Human
ucacagcuccaagaauuuc

SEQ ID NO: 2991962 - RNA, 17 nt, Human
ucacagccagacuggca

SEQ ID NO: 2991963 - RNA, 23 nt, Human
ucacagccagacuggcacaguuu

SEQ ID NO: 2991964 - RNA, 14 nt, Human
ucacagaugggugc

SEQ ID NO: 2991965 - RNA, 15 nt, Human
ucacagaugggugcu

SEQ ID NO: 2991966 - RNA, 18 nt, Human
ucacagcagugagacugg

SEQ ID NO: 2991967 - RNA, 22 nt, Human
ucacagcuuauuuccucauuuu

SEQ ID NO: 2991968 - RNA, 16 nt, Human
ucacauauugauuucc

SEQ ID NO: 2991969 - RNA, 20 nt, Human
ucacauauugauuuccguua

SEQ ID NO: 2991970 - RNA, 18 nt, Human
ucacauauugauuuccgu

SEQ ID NO: 2991971 - RNA, 16 nt, Human
ucaccagccccagugc

SEQ ID NO: 2991972 - RNA, 17 nt, Human
ucaccagccccagugcc

SEQ ID NO: 2991973 - RNA, 17 nt, Human
ucacauuccugaacagg

SEQ ID NO: 2991974 - RNA, 13 nt, Human
ucacauuccugaa

SEQ ID NO: 2991975 - RNA, 16 nt, Human
accacaagacugcaca

SEQ ID NO: 2991976 - RNA, 23 nt, Human
accacacccagcccacuucugcc

SEQ ID NO: 2991977 - RNA, 21 nt, Human
accacacccagcccacuucug

SEQ ID NO: 2991978 - RNA, 20 nt, Human
accacacccagcccacuucu

SEQ ID NO: 2991979 - RNA, 16 nt, Human
accacacccagcccac

SEQ ID NO: 2991980 - RNA, 15 nt, Human
accacacccagccca

SEQ ID NO: 2991981 - RNA, 17 nt, Human
accacacagaggcugcc

SEQ ID NO: 2991982 - RNA, 14 nt, Human
accaacacgagcag

SEQ ID NO: 2991983 - RNA, 19 nt, Human
accaacacgagcaggcuac

SEQ ID NO: 2991984 - RNA, 20 nt, Human
accaaccacugcgaccacaa

SEQ ID NO: 2991985 - RNA, 16 nt, Human
accaacauacucccau

SEQ ID NO: 2991986 - RNA, 19 nt, Human
accaaaucagcugcuacua

SEQ ID NO: 2991987 - RNA, 16 nt, Human
accaaaucagcugcua

SEQ ID NO: 2991988 - RNA, 20 nt, Human
uauuuugacuuguugagggu

SEQ ID NO: 2991989 - RNA, 14 nt, Human
uauuuugacuuguu

SEQ ID NO: 2991990 - RNA, 15 nt, Human
uauuuugcuuuguga

SEQ ID NO: 2991991 - RNA, 13 nt, Human
uauuuugcuuugu

SEQ ID NO: 2991992 - RNA, 20 nt, Human
uauuuugcuuugugauuuuu

SEQ ID NO: 2991993 - RNA, 19 nt, Human
uauuuuaauaauguuucaa

SEQ ID NO: 2991994 - RNA, 22 nt, Human
uauuuuaauaauguuucaaaca

SEQ ID NO: 2991995 - RNA, 13 nt, Human
uauuuuacauaaa

SEQ ID NO: 2991996 - RNA, 17 nt, Human
uauuuuuguagagccag

SEQ ID NO: 2991997 - RNA, 18 nt, Human
uauuuuaaaagaaugauu

SEQ ID NO: 2991998 - RNA, 14 nt, Human
uauuuuaaaagaau

SEQ ID NO: 2991999 - RNA, 15 nt, Human
acaugaaaacacauu

SEQ ID NO: 2992000 - RNA, 16 nt, Human
acaucuugcucugcug

SEQ ID NO: 2992001 - RNA, 15 nt, Human
acaucuugcucugcu

SEQ ID NO: 2992002 - RNA, 17 nt, Human
acaucuugcucugcuga

SEQ ID NO: 2992003 - RNA, 22 nt, Human
acaucuugcucugcugacagac

SEQ ID NO: 2992004 - RNA, 19 nt, Human
acaucuuggucagauuuga

SEQ ID NO: 2992005 - RNA, 14 nt, Human
acaucuugcucugc

SEQ ID NO: 2992006 - RNA, 21 nt, Human
acaugucuuuucuugcaugag

SEQ ID NO: 2992007 - RNA, 18 nt, Human
acauggaauaacauguaa

SEQ ID NO: 2992008 - RNA, 14 nt, Human
acauggaaguacua

SEQ ID NO: 2992009 - RNA, 20 nt, Human
acauggaauaacauguaauu

SEQ ID NO: 2992010 - RNA, 23 nt, Human
acaugagcaucaggccaggcccu

SEQ ID NO: 2992011 - RNA, 19 nt, Human
acauggaguauaugucaag

SEQ ID NO: 2992012 - RNA, 15 nt, Human
acauggaguauaugu

SEQ ID NO: 2992013 - RNA, 14 nt, Human
acauggccuuugcu

SEQ ID NO: 2992014 - RNA, 20 nt, Human
ucaaacagucucaggaaauc

SEQ ID NO: 2992015 - RNA, 21 nt, Human
ucaaacagucucaggaaauca

SEQ ID NO: 2992016 - RNA, 13 nt, Human
ucaaacagucuca

SEQ ID NO: 2992017 - RNA, 16 nt, Human
ucaaaagcugggcagg

SEQ ID NO: 2992018 - RNA, 20 nt, Human
ucaaagauauuuugcuuugu

SEQ ID NO: 2992019 - RNA, 13 nt, Human
ucaaagauauuuu

SEQ ID NO: 2992020 - RNA, 22 nt, Human
ucaaagauauuuugcuuuguga

SEQ ID NO: 2992021 - RNA, 22 nt, Human
acaugaaaacacauuuuucuua

SEQ ID NO: 2992022 - RNA, 23 nt, Human
acaugaaaacacauuuuucuuag

SEQ ID NO: 2992023 - RNA, 13 nt, Human
acaugagcaucag

SEQ ID NO: 2992024 - RNA, 23 nt, Human
ucaaauacgugggcauucaaaug

SEQ ID NO: 2992025 - RNA, 22 nt, Human
ucaaauacgugggcauucaaau

SEQ ID NO: 2992026 - RNA, 21 nt, Human
ucaaauacgugggcauucaaa

SEQ ID NO: 2992027 - RNA, 20 nt, Human
ucaaauacgugggcauucaa

SEQ ID NO: 2992028 - RNA, 17 nt, Human
acgcccuuggccauggg

SEQ ID NO: 2992029 - RNA, 23 nt, Human
acgcgugcacacaccagagccca

SEQ ID NO: 2992030 - RNA, 20 nt, Human
acgcgugcacacaccagagc

SEQ ID NO: 2992031 - RNA, 14 nt, Human
acgcccccacuggu

SEQ ID NO: 2992032 - RNA, 13 nt, Human
acgcuacccggga

SEQ ID NO: 2992033 - RNA, 17 nt, Human
acgcuacccgggaaggg

SEQ ID NO: 2992034 - RNA, 18 nt, Human
acgcuacccgggaagggg

SEQ ID NO: 2992035 - RNA, 14 nt, Human
acgcucucuggccu

SEQ ID NO: 2992036 - RNA, 16 nt, Human
acgcucucuggccuuc

SEQ ID NO: 2992037 - RNA, 15 nt, Human
acgcucucuggccuu

SEQ ID NO: 2992038 - RNA, 16 nt, Human
acggccaggccagagg

SEQ ID NO: 2992039 - RNA, 13 nt, Human
acggccaggccag

SEQ ID NO: 2992040 - RNA, 19 nt, Human
acggagucccaccuuggcu

SEQ ID NO: 2992041 - RNA, 17 nt, Human
acgcucucuggccuucg

SEQ ID NO: 2992042 - RNA, 20 nt, Human
acgaggucaggagaucgaga

SEQ ID NO: 2992043 - RNA, 18 nt, Human
acgccaggggaaaaucag

SEQ ID NO: 2992044 - RNA, 15 nt, Human
acgacugcccggcag

SEQ ID NO: 2992045 - RNA, 23 nt, Human
acgccaggggaaaaucagccugc

SEQ ID NO: 2992046 - RNA, 11 nt, Human
acgccauccca

SEQ ID NO: 2992047 - RNA, 14 nt, Human
acgccaucccagcc

SEQ ID NO: 2992048 - RNA, 15 nt, Human
acgccaucccagccc

SEQ ID NO: 2992049 - RNA, 16 nt, Human
acgccaucccagcccc

SEQ ID NO: 2992050 - RNA, 17 nt, Human
acgccaucccagcccca

SEQ ID NO: 2992051 - RNA, 18 nt, Human
acgccaucccagccccaa

SEQ ID NO: 2992052 - RNA, 14 nt, Human
uccaggcugggaga

SEQ ID NO: 2992053 - RNA, 17 nt, Human
uccaggcugggagagcc

SEQ ID NO: 2992054 - RNA, 18 nt, Human
uccaggcugggagagccu

SEQ ID NO: 2992055 - RNA, 22 nt, Human
uccaggcuccuuuagcgcccag

SEQ ID NO: 2992056 - RNA, 16 nt, Human
ucccaaagugcuggga

SEQ ID NO: 2992057 - RNA, 15 nt, Human
ucccaaagugcuggg

SEQ ID NO: 2992058 - RNA, 14 nt, Human
ucccacaaaggaga

SEQ ID NO: 2992059 - RNA, 11 nt, Human
ucccaccccac

SEQ ID NO: 2992060 - RNA, 14 nt, Human
ucccaccccacaca

SEQ ID NO: 2992061 - RNA, 18 nt, Human
uccagugaggcucugccc

SEQ ID NO: 2992062 - RNA, 19 nt, Human
uccagugaggcucugcccu

SEQ ID NO: 2992063 - RNA, 17 nt, Human
uccagugaggcucugcc

SEQ ID NO: 2992064 - RNA, 14 nt, Human
uccagugagacagc

SEQ ID NO: 2992065 - RNA, 20 nt, Human
uccagugaggcucugcccuu

SEQ ID NO: 2992066 - RNA, 14 nt, Human
acggcucacugcag

SEQ ID NO: 2992067 - RNA, 22 nt, Human
uccaugaagauguagaggagaa

SEQ ID NO: 2992068 - RNA, 15 nt, Human
uccaugaguccccug

SEQ ID NO: 2992069 - RNA, 16 nt, Human
uccaugaguccccugu

SEQ ID NO: 2992070 - RNA, 17 nt, Human
uccaugaguccccuguu

SEQ ID NO: 2992071 - RNA, 20 nt, Human
accugcacacuguccuauua

SEQ ID NO: 2992072 - RNA, 16 nt, Human
accugccaggaagcca

SEQ ID NO: 2992073 - RNA, 17 nt, Human
accugccaggaagccag

SEQ ID NO: 2992074 - RNA, 18 nt, Human
accugccaggaagccagc

SEQ ID NO: 2992075 - RNA, 14 nt, Human
accugaggggccuc

SEQ ID NO: 2992076 - RNA, 16 nt, Human
ucauaauaaguugcau

SEQ ID NO: 2992077 - RNA, 12 nt, Human
ucauaaugacuu

SEQ ID NO: 2992078 - RNA, 19 nt, Human
accugaauuuuggcugugu

SEQ ID NO: 2992079 - RNA, 18 nt, Human
accugaagacucauucuu

SEQ ID NO: 2992080 - RNA, 23 nt, Human
accugaagaguggucagaacaga

SEQ ID NO: 2992081 - RNA, 17 nt, Human
accugagccccaaaagg

SEQ ID NO: 2992082 - RNA, 12 nt, Human
accugagcccca

SEQ ID NO: 2992083 - RNA, 23 nt, Human
accugaggcccuucucuccagcc

SEQ ID NO: 2992084 - RNA, 17 nt, Human
ucauuuuuuuuaagaaa

SEQ ID NO: 2992085 - RNA, 18 nt, Human
ucauuuuuuuuaagaaaa

SEQ ID NO: 2992086 - RNA, 19 nt, Human
ucauuuuuaguagagacag

SEQ ID NO: 2992087 - RNA, 14 nt, Human
ucauuugucacaca

SEQ ID NO: 2992088 - RNA, 16 nt, Human
ucauuugucacacacu

SEQ ID NO: 2992089 - RNA, 23 nt, Human
accugccuguugggccaggagcc

SEQ ID NO: 2992090 - RNA, 21 nt, Human
accugcgucucauacucaccu

SEQ ID NO: 2992091 - RNA, 16 nt, Human
accugcggugcuaucu

SEQ ID NO: 2992092 - RNA, 20 nt, Human
accuggaauauauaaccagu

SEQ ID NO: 2992093 - RNA, 18 nt, Human
accuuuuuuauacauaaa

SEQ ID NO: 2992094 - RNA, 17 nt, Human
accuuuuuuauacauaa

SEQ ID NO: 2992095 - RNA, 16 nt, Human
accuuuuuuauacaua

SEQ ID NO: 2992096 - RNA, 14 nt, Human
accuuuguccccac

SEQ ID NO: 2992097 - RNA, 15 nt, Human
accuuuguccccacc

SEQ ID NO: 2992098 - RNA, 16 nt, Human
accuuuguccccaccg

SEQ ID NO: 2992099 - RNA, 14 nt, Human
accuuuuuuauaca

SEQ ID NO: 2992100 - RNA, 13 nt, Human
accuuugucccca

SEQ ID NO: 2992101 - RNA, 16 nt, Human
accuugacagggcaca

SEQ ID NO: 2992102 - RNA, 22 nt, Human
accuucuccuucaccuuugucc

SEQ ID NO: 2992103 - RNA, 14 nt, Human
accuucuccuucac

SEQ ID NO: 2992104 - RNA, 21 nt, Human
accuggguaacuagggaagau

SEQ ID NO: 2992105 - RNA, 12 nt, Human
accuuccugcug

SEQ ID NO: 2992106 - RNA, 12 nt, Human
accuggccucug

SEQ ID NO: 2992107 - RNA, 13 nt, Human
accuggccucugc

SEQ ID NO: 2992108 - RNA, 17 nt, Human
uccacccaggagccccg

SEQ ID NO: 2992109 - RNA, 13 nt, Human
uccacccaccuca

SEQ ID NO: 2992110 - RNA, 18 nt, Human
uccaccaucaagccacca

SEQ ID NO: 2992111 - RNA, 12 nt, Human
uccacccaccuc

SEQ ID NO: 2992112 - RNA, 20 nt, Human
uccacccaggagccccgagg

SEQ ID NO: 2992113 - RNA, 15 nt, Human
acucuucccucaaau

SEQ ID NO: 2992114 - RNA, 19 nt, Human
acucuggcagcucagagag

SEQ ID NO: 2992115 - RNA, 20 nt, Human
acucuggcagcucagagagg

SEQ ID NO: 2992116 - RNA, 21 nt, Human
acucuuauugcccacgcugga

SEQ ID NO: 2992117 - RNA, 16 nt, Human
acucuggcagcucaga

SEQ ID NO: 2992118 - RNA, 17 nt, Human
acucuggcagcucagag

SEQ ID NO: 2992119 - RNA, 15 nt, Human
acucgcgacaaugca

SEQ ID NO: 2992120 - RNA, 16 nt, Human
acucgcgacaaugcaa

SEQ ID NO: 2992121 - RNA, 14 nt, Human
acuccagaaaguga

SEQ ID NO: 2992122 - RNA, 14 nt, Human
uccggcccuccaga

SEQ ID NO: 2992123 - RNA, 18 nt, Human
uccggcccuccagagccc

SEQ ID NO: 2992124 - RNA, 13 nt, Human
uccguuaaaauac

SEQ ID NO: 2992125 - RNA, 15 nt, Human
uccguuaaaauacca

SEQ ID NO: 2992126 - RNA, 21 nt, Human
uccuagccugugccucuggga

SEQ ID NO: 2992127 - RNA, 20 nt, Human
uccuagcacuuugggaggcc

SEQ ID NO: 2992128 - RNA, 16 nt, Human
acucgaguuacagaca

SEQ ID NO: 2992129 - RNA, 21 nt, Human
uccugaaaacccuugccaugu

SEQ ID NO: 2992130 - RNA, 23 nt, Human
uccucuuuggucuacacugugcu

SEQ ID NO: 2992131 - RNA, 19 nt, Human
acucuuucuauuguuucuu

SEQ ID NO: 2992132 - RNA, 15 nt, Human
uccugaagaauugaa

SEQ ID NO: 2992133 - RNA, 20 nt, Human
uccucccaccucagccuccc

SEQ ID NO: 2992134 - RNA, 18 nt, Human
uccucccaccucagccuc

SEQ ID NO: 2992135 - RNA, 16 nt, Human
uccucccaccucagcc

SEQ ID NO: 2992136 - RNA, 15 nt, Human
uccucccaccucagc

SEQ ID NO: 2992137 - RNA, 14 nt, Human
uccucccaccucag

SEQ ID NO: 2992138 - RNA, 13 nt, Human
uccucccaccuca

SEQ ID NO: 2992139 - RNA, 21 nt, Human
uccucccaccucagccucccg

SEQ ID NO: 2992140 - RNA, 17 nt, Human
uccucuccccaugaugu

SEQ ID NO: 2992141 - RNA, 13 nt, Human
acuauucaaacag

SEQ ID NO: 2992142 - RNA, 14 nt, Human
acuauucaaacagu

SEQ ID NO: 2992143 - RNA, 16 nt, Human
acuauucaaacagucu

SEQ ID NO: 2992144 - RNA, 12 nt, Human
acuauguaucaa

SEQ ID NO: 2992145 - RNA, 14 nt, Human
acuauaauguaagc

SEQ ID NO: 2992146 - RNA, 13 nt, Human
acuauaauguaag

SEQ ID NO: 2992147 - RNA, 12 nt, Human
acuauaauguaa

SEQ ID NO: 2992148 - RNA, 18 nt, Human
uccccuccucugcuugcc

SEQ ID NO: 2992149 - RNA, 15 nt, Human
uccccuccucugcuu

SEQ ID NO: 2992150 - RNA, 14 nt, Human
uccccuccucugcu

SEQ ID NO: 2992151 - RNA, 24 nt, Human
uccccuccucugcuugccaucccu

SEQ ID NO: 2992152 - RNA, 14 nt, Human
acucaaugcacuga

SEQ ID NO: 2992153 - RNA, 20 nt, Human
acucacauuuauucugcuca

SEQ ID NO: 2992154 - RNA, 19 nt, Human
acucacauuuauucugcuc

SEQ ID NO: 2992155 - RNA, 20 nt, Human
acuagaguuuagcuggaaaa

SEQ ID NO: 2992156 - RNA, 18 nt, Human
acuacggaauaguuggcu

SEQ ID NO: 2992157 - RNA, 14 nt, Human
acguacacauuuua

SEQ ID NO: 2992158 - RNA, 13 nt, Human
acguacacauuuu

SEQ ID NO: 2992159 - RNA, 12 nt, Human
acguacacauuu

SEQ ID NO: 2992160 - RNA, 13 nt, Human
acguacacacaca

SEQ ID NO: 2992161 - RNA, 19 nt, Human
ucccuccaccucccugcaa

SEQ ID NO: 2992162 - RNA, 13 nt, Human
ucccucuuucccu

SEQ ID NO: 2992163 - RNA, 11 nt, Human
ucccucuuucc

SEQ ID NO: 2992164 - RNA, 17 nt, Human
ucccuccaccucccugc

SEQ ID NO: 2992165 - RNA, 15 nt, Human
ucccuccaccucccu

SEQ ID NO: 2992166 - RNA, 14 nt, Human
ucccuccaccuccc

SEQ ID NO: 2992167 - RNA, 20 nt, Human
ucccucagucuggcccuucc

SEQ ID NO: 2992168 - RNA, 18 nt, Human
ucccucagucuggcccuu

SEQ ID NO: 2992169 - RNA, 21 nt, Human
ucccugaaggccccgcccagg

SEQ ID NO: 2992170 - RNA, 22 nt, Human
ucccugaaggccccgcccaggc

SEQ ID NO: 2992171 - RNA, 18 nt, Human
ucccugaaggccccgccc

SEQ ID NO: 2992172 - RNA, 17 nt, Human
ucccugaaggccccgcc

SEQ ID NO: 2992173 - RNA, 17 nt, Human
acucaccccagccccaa

SEQ ID NO: 2992174 - RNA, 23 nt, Human
ucccugaaggccccgcccaggcu

SEQ ID NO: 2992175 - RNA, 21 nt, Human
acuccaaacugacucuuaaga

SEQ ID NO: 2992176 - RNA, 18 nt, Human
acucauugaccugaggcc

SEQ ID NO: 2992177 - RNA, 22 nt, Human
acucauugaccugaggcccuuc

SEQ ID NO: 2992178 - RNA, 20 nt, Human
acucauuuuaaaaaauggaa

SEQ ID NO: 2992179 - RNA, 12 nt, Human
acucaucuuagg

SEQ ID NO: 2992180 - RNA, 16 nt, Human
acucauugaccugagg

SEQ ID NO: 2992181 - RNA, 17 nt, Human
acucauugaccugaggc

SEQ ID NO: 2992182 - RNA, 18 nt, Human
acucagaagacacugaug

SEQ ID NO: 2992183 - RNA, 22 nt, Human
acucagaauucucuaguuugau

SEQ ID NO: 2992184 - RNA, 21 nt, Human
acucagaauucucuaguuuga

SEQ ID NO: 2992185 - RNA, 14 nt, Human
acucagaauucucu

SEQ ID NO: 2992186 - RNA, 17 nt, Human
acucagaagacacugau

SEQ ID NO: 2992187 - RNA, 16 nt, Human
acucagaagacacuga

SEQ ID NO: 2992188 - RNA, 15 nt, Human
acucagaagacacug

SEQ ID NO: 2992189 - RNA, 14 nt, Human
acucagaagacacu

SEQ ID NO: 2992190 - RNA, 14 nt, Human
acucaccugccccu

SEQ ID NO: 2992191 - RNA, 19 nt, Human
acucaccugccccucaacu

SEQ ID NO: 2992192 - RNA, 21 nt, Human
acucaccugccccucaacucu

SEQ ID NO: 2992193 - RNA, 19 nt, Human
acacaaagcuuuugcauau

SEQ ID NO: 2992194 - RNA, 18 nt, Human
acacaaagcuuuugcaua

SEQ ID NO: 2992195 - RNA, 20 nt, Human
acacaaagcuuuugcauauu

SEQ ID NO: 2992196 - RNA, 13 nt, Human
acacaacuauauu

SEQ ID NO: 2992197 - RNA, 19 nt, Human
acaaugcaaaccaucauug

SEQ ID NO: 2992198 - RNA, 21 nt, Human
acaaugcaaaccaucauugaa

SEQ ID NO: 2992199 - RNA, 23 nt, Human
acaaugcaaaccaucauugaaau

SEQ ID NO: 2992200 - RNA, 15 nt, Human
uaggguuauaauaau

SEQ ID NO: 2992201 - RNA, 17 nt, Human
uaggguuauaauaaugu

SEQ ID NO: 2992202 - RNA, 19 nt, Human
uaggguaagugagagaggg

SEQ ID NO: 2992203 - RNA, 11 nt, Human
acaaugcaaac

SEQ ID NO: 2992204 - RNA, 16 nt, Human
acaaugcaaaccauca

SEQ ID NO: 2992205 - RNA, 17 nt, Human
acaaugcaaaccaucau

SEQ ID NO: 2992206 - RNA, 18 nt, Human
acaaugcaaaccaucauu

SEQ ID NO: 2992207 - RNA, 22 nt, Human
acaaugacuuacuguacaugaa

SEQ ID NO: 2992208 - RNA, 20 nt, Human
acaaugacuuacuguacaug

SEQ ID NO: 2992209 - RNA, 19 nt, Human
acaaugacuuacuguacau

SEQ ID NO: 2992210 - RNA, 14 nt, Human
uagucacugagaca

SEQ ID NO: 2992211 - RNA, 22 nt, Human
uaguagagacaggguuuugcca

SEQ ID NO: 2992212 - RNA, 15 nt, Human
uaguagagacagggu

SEQ ID NO: 2992213 - RNA, 14 nt, Human
uaguagagacaggg

SEQ ID NO: 2992214 - RNA, 22 nt, Human
uagguuuggacaaaauggaaua

SEQ ID NO: 2992215 - RNA, 16 nt, Human
acacaggcccggcucc

SEQ ID NO: 2992216 - RNA, 18 nt, Human
acacaggcccggcuccag

SEQ ID NO: 2992217 - RNA, 17 nt, Human
acacaggcccggcucca

SEQ ID NO: 2992218 - RNA, 22 nt, Human
acacaggcccggcuccaggcuc

SEQ ID NO: 2992219 - RNA, 21 nt, Human
acacaggcccggcuccaggcu

SEQ ID NO: 2992220 - RNA, 20 nt, Human
acacaggcccggcuccaggc

SEQ ID NO: 2992221 - RNA, 19 nt, Human
acacaggcccggcuccagg

SEQ ID NO: 2992222 - RNA, 24 nt, Human
acacaggcccggcuccaggcuccu

SEQ ID NO: 2992223 - RNA, 23 nt, Human
acacaggcccggcuccaggcucc

SEQ ID NO: 2992224 - RNA, 22 nt, Human
uaggggucugucuuuuaaacuc

SEQ ID NO: 2992225 - RNA, 13 nt, Human
uagggaagauaau

SEQ ID NO: 2992226 - RNA, 13 nt, Human
uaggauguugaaa

SEQ ID NO: 2992227 - RNA, 16 nt, Human
uaggaaaaacugauuu

SEQ ID NO: 2992228 - RNA, 17 nt, Human
uaggaaaaacugauuuu

SEQ ID NO: 2992229 - RNA, 12 nt, Human
uaggaaaauuau

SEQ ID NO: 2992230 - RNA, 13 nt, Human
uaggaaaaacuga

SEQ ID NO: 2992231 - RNA, 14 nt, Human
uaggaaaaacugau

SEQ ID NO: 2992232 - RNA, 23 nt, Human
uagcuuuuuucucugauacagaa

SEQ ID NO: 2992233 - RNA, 13 nt, Human
uagcuuuuuucuc

SEQ ID NO: 2992234 - RNA, 21 nt, Human
uagccuuagaagucacacagu

SEQ ID NO: 2992235 - RNA, 20 nt, Human
uagccugugccucugggacu

SEQ ID NO: 2992236 - RNA, 14 nt, Human
uagcgcccaguugg

SEQ ID NO: 2992237 - RNA, 17 nt, Human
uagcgcccaguugggug

SEQ ID NO: 2992238 - RNA, 20 nt, Human
uagccuuagaagucacacag

SEQ ID NO: 2992239 - RNA, 13 nt, Human
uagagguacacuu

SEQ ID NO: 2992240 - RNA, 18 nt, Human
uagagguacacuugugaa

SEQ ID NO: 2992241 - RNA, 14 nt, Human
uagaggguguguaa

SEQ ID NO: 2992242 - RNA, 15 nt, Human
uagcacagacccugc

SEQ ID NO: 2992243 - RNA, 20 nt, Human
uagcacagacccugcccugu

SEQ ID NO: 2992244 - RNA, 21 nt, Human
uagcacagacccugcccugug

SEQ ID NO: 2992245 - RNA, 14 nt, Human
uagcacagacccug

SEQ ID NO: 2992246 - RNA, 13 nt, Human
uagccaaggccaa

SEQ ID NO: 2992247 - RNA, 22 nt, Human
uagcacagacccugcccugugg

SEQ ID NO: 2992248 - RNA, 12 nt, Human
uagccaaggcca

SEQ ID NO: 2992249 - RNA, 13 nt, Human
acaaaaacacagc

SEQ ID NO: 2992250 - RNA, 20 nt, Human
aauuuuacauggcuggagcu

SEQ ID NO: 2992251 - RNA, 14 nt, Human
acaaaaacacagca

SEQ ID NO: 2992252 - RNA, 15 nt, Human
acaaaaacacagcaa

SEQ ID NO: 2992253 - RNA, 16 nt, Human
acaaaaagcauaaaaa

SEQ ID NO: 2992254 - RNA, 16 nt, Human
acaaaaagcuacuuau

SEQ ID NO: 2992255 - RNA, 18 nt, Human
acaaaaggauaaugaaua

SEQ ID NO: 2992256 - RNA, 22 nt, Human
uagagcggagaaaggaagggcu

SEQ ID NO: 2992257 - RNA, 14 nt, Human
uagagccagggucu

SEQ ID NO: 2992258 - RNA, 14 nt, Human
acaaaauagaaagu

SEQ ID NO: 2992259 - RNA, 16 nt, Human
acaaaguaauuuggaa

SEQ ID NO: 2992260 - RNA, 17 nt, Human
uagacagucccugccaa

SEQ ID NO: 2992261 - RNA, 21 nt, Human
uagacagucccugccaaugga

SEQ ID NO: 2992262 - RNA, 18 nt, Human
aauuugggggaaaauuua

SEQ ID NO: 2992263 - RNA, 14 nt, Human
aauuugugauacaa

SEQ ID NO: 2992264 - RNA, 18 nt, Human
aauuugugauacaaugcu

SEQ ID NO: 2992265 - RNA, 17 nt, Human
aauuugugauacaaugc

SEQ ID NO: 2992266 - RNA, 18 nt, Human
uagacaauuuauuauggc

SEQ ID NO: 2992267 - RNA, 13 nt, Human
uagacacacauga

SEQ ID NO: 2992268 - RNA, 16 nt, Human
uagacagucccugcca

SEQ ID NO: 2992269 - RNA, 10 nt, Human
uagacagagu

SEQ ID NO: 2992270 - RNA, 22 nt, Human
uagaauuugauaugugaacagu

SEQ ID NO: 2992271 - RNA, 19 nt, Human
uagaauuugauaugugaac

SEQ ID NO: 2992272 - RNA, 20 nt, Human
uagaauuugauaugugaaca

SEQ ID NO: 2992273 - RNA, 17 nt, Human
uagaacucccuuucaac

SEQ ID NO: 2992274 - RNA, 16 nt, Human
uagaacucccuuucaa

SEQ ID NO: 2992275 - RNA, 15 nt, Human
uagaacucccuuuca

SEQ ID NO: 2992276 - RNA, 15 nt, Human
uagaaacacaacuau

SEQ ID NO: 2992277 - RNA, 14 nt, Human
uagaaaaucuucau

SEQ ID NO: 2992278 - RNA, 20 nt, Human
uaugugcacaucuguuuugu

SEQ ID NO: 2992279 - RNA, 22 nt, Human
acaggcccggcuccaggcuccu

SEQ ID NO: 2992280 - RNA, 21 nt, Human
acaggcccggcuccaggcucc

SEQ ID NO: 2992281 - RNA, 20 nt, Human
acaggcccggcuccaggcuc

SEQ ID NO: 2992282 - RNA, 18 nt, Human
acaggcccggcuccaggc

SEQ ID NO: 2992283 - RNA, 17 nt, Human
acaggcccggcuccagg

SEQ ID NO: 2992284 - RNA, 16 nt, Human
acaggcccggcuccag

SEQ ID NO: 2992285 - RNA, 15 nt, Human
acaggcagauacagg

SEQ ID NO: 2992286 - RNA, 20 nt, Human
acaggaaaauuuuaaaaaua

SEQ ID NO: 2992287 - RNA, 23 nt, Human
acagcuguaugauucccagccag

SEQ ID NO: 2992288 - RNA, 20 nt, Human
acagcuguaugauucccagc

SEQ ID NO: 2992289 - RNA, 19 nt, Human
acagcuguaugauucccag

SEQ ID NO: 2992290 - RNA, 14 nt, Human
acagcuguaugauu

SEQ ID NO: 2992291 - RNA, 19 nt, Human
acagcuaaugggacacuaa

SEQ ID NO: 2992292 - RNA, 17 nt, Human
acagcuaaugggacacu

SEQ ID NO: 2992293 - RNA, 16 nt, Human
acagcuaaugggacac

SEQ ID NO: 2992294 - RNA, 15 nt, Human
acagcuaaugggaca

SEQ ID NO: 2992295 - RNA, 21 nt, Human
acagcuucauuuccugugucu

SEQ ID NO: 2992296 - RNA, 19 nt, Human
acagcuucauuuccugugu

SEQ ID NO: 2992297 - RNA, 17 nt, Human
acagcuucauuuccugu

SEQ ID NO: 2992298 - RNA, 20 nt, Human
acagcuugaccgugaggcca

SEQ ID NO: 2992299 - RNA, 21 nt, Human
acagcuugaccgugaggccag

SEQ ID NO: 2992300 - RNA, 17 nt, Human
acagcuugaccgugagg

SEQ ID NO: 2992301 - RNA, 21 nt, Human
acaggaaaagcugcugacagu

SEQ ID NO: 2992302 - RNA, 20 nt, Human
acaggaaaagcugcugacag

SEQ ID NO: 2992303 - RNA, 19 nt, Human
acaggaaaagcugcugaca

SEQ ID NO: 2992304 - RNA, 18 nt, Human
acaggaaaagcugcugac

SEQ ID NO: 2992305 - RNA, 22 nt, Human
acagcuugaccgugaggccaga

SEQ ID NO: 2992306 - RNA, 23 nt, Human
acagcuugaccgugaggccagag

SEQ ID NO: 2992307 - RNA, 22 nt, Human
uaugcaugaaguaauaugcaca

SEQ ID NO: 2992308 - RNA, 21 nt, Human
uauggcccuggccuagcauac

SEQ ID NO: 2992309 - RNA, 23 nt, Human
uauggcuuuugugcauuaucuag

SEQ ID NO: 2992310 - RNA, 20 nt, Human
uauggcccuggccuagcaua

SEQ ID NO: 2992311 - RNA, 23 nt, Human
uaugggacucaaugcacugacau

SEQ ID NO: 2992312 - RNA, 16 nt, Human
uaugggacucaaugca

SEQ ID NO: 2992313 - RNA, 15 nt, Human
uaugaggcauuuguu

SEQ ID NO: 2992314 - RNA, 14 nt, Human
uaugaggcauuugu

SEQ ID NO: 2992315 - RNA, 21 nt, Human
uaugaggcauuuguuugaacu

SEQ ID NO: 2992316 - RNA, 16 nt, Human
acagcccgggcucugc

SEQ ID NO: 2992317 - RNA, 15 nt, Human
acagcccgggcucug

SEQ ID NO: 2992318 - RNA, 18 nt, Human
acagcaagggugauggga

SEQ ID NO: 2992319 - RNA, 16 nt, Human
acacucauucauuacu

SEQ ID NO: 2992320 - RNA, 20 nt, Human
acacuguuucaaacuuuacu

SEQ ID NO: 2992321 - RNA, 16 nt, Human
acacuuacacuuuaug

SEQ ID NO: 2992322 - RNA, 18 nt, Human
acacuguuucaaacuuua

SEQ ID NO: 2992323 - RNA, 17 nt, Human
acacuguuucaaacuuu

SEQ ID NO: 2992324 - RNA, 16 nt, Human
acacuguuucaaacuu

SEQ ID NO: 2992325 - RNA, 17 nt, Human
acacucauugaccugag

SEQ ID NO: 2992326 - RNA, 21 nt, Human
acacuuacacuuuaugcacaa

SEQ ID NO: 2992327 - RNA, 18 nt, Human
acacuuacacuuuaugca

SEQ ID NO: 2992328 - RNA, 19 nt, Human
acagaaagcagaacaguga

SEQ ID NO: 2992329 - RNA, 19 nt, Human
acagacauacuaaccagca

SEQ ID NO: 2992330 - RNA, 18 nt, Human
acagacauacuaaccagc

SEQ ID NO: 2992331 - RNA, 14 nt, Human
uauccaaucuguga

SEQ ID NO: 2992332 - RNA, 19 nt, Human
uauccaacaucaacaucuu

SEQ ID NO: 2992333 - RNA, 23 nt, Human
uauccaauugcugcuuguacacu

SEQ ID NO: 2992334 - RNA, 15 nt, Human
uauccaauugcugcu

SEQ ID NO: 2992335 - RNA, 17 nt, Human
uaucagaauucucagaa

SEQ ID NO: 2992336 - RNA, 10 nt, Human
uaucagaauu

SEQ ID NO: 2992337 - RNA, 14 nt, Human
acagaccuuugaac

SEQ ID NO: 2992338 - RNA, 14 nt, Human
uaucacaaaucuua

SEQ ID NO: 2992339 - RNA, 16 nt, Human
uaucacaaaucuuaac

SEQ ID NO: 2992340 - RNA, 20 nt, Human
uaucacaaaucuuaacuuga

SEQ ID NO: 2992341 - RNA, 22 nt, Human
uaucacccagaagaaaauagug

SEQ ID NO: 2992342 - RNA, 19 nt, Human
uaucacccagaagaaaaua

SEQ ID NO: 2992343 - RNA, 18 nt, Human
uauauagcaagacauuau

SEQ ID NO: 2992344 - RNA, 16 nt, Human
uauauagcaguaaaaa

SEQ ID NO: 2992345 - RNA, 20 nt, Human
uauauagcaagacauuauau

SEQ ID NO: 2992346 - RNA, 15 nt, Human
uauauagcaguaaaa

SEQ ID NO: 2992347 - RNA, 16 nt, Human
uauaggugcuacaaaa

SEQ ID NO: 2992348 - RNA, 23 nt, Human
uauaggaacuuaaauaaugugaa

SEQ ID NO: 2992349 - RNA, 19 nt, Human
uauaggaauugacccacaa

SEQ ID NO: 2992350 - RNA, 18 nt, Human
uauagcaguaaaaaaugg

SEQ ID NO: 2992351 - RNA, 20 nt, Human
uauagauguugcuaacagca

SEQ ID NO: 2992352 - RNA, 15 nt, Human
uauagauguugcuaa

SEQ ID NO: 2992353 - RNA, 21 nt, Human
uauagauguugcuaacagcaa

SEQ ID NO: 2992354 - RNA, 10 nt, Human
uauagauguu

SEQ ID NO: 2992355 - RNA, 18 nt, Human
uauagccuaggugacaga

SEQ ID NO: 2992356 - RNA, 23 nt, Human
uauauagcaguaaaaaauggugu

SEQ ID NO: 2992357 - RNA, 19 nt, Human
uauauauuuuuuucugaaa

SEQ ID NO: 2992358 - RNA, 16 nt, Human
acacucauugaccuga

SEQ ID NO: 2992359 - RNA, 17 nt, Human
acacucaaaucaagaaa

SEQ ID NO: 2992360 - RNA, 15 nt, Human
acacuaaugaggaaa

SEQ ID NO: 2992361 - RNA, 22 nt, Human
acacuaaugaggaaacugcacu

SEQ ID NO: 2992362 - RNA, 21 nt, Human
acacucaaaagcugggcaggu

SEQ ID NO: 2992363 - RNA, 13 nt, Human
acacucaaaucaa

SEQ ID NO: 2992364 - RNA, 17 nt, Human
uagucacugagacagcc

SEQ ID NO: 2992365 - RNA, 20 nt, Human
uagucacugagacagcccgg

SEQ ID NO: 2992366 - RNA, 19 nt, Human
acacuaagagagaaugaga

SEQ ID NO: 2992367 - RNA, 22 nt, Human
uauacacuuacacuuuaugcac

SEQ ID NO: 2992368 - RNA, 21 nt, Human
uauacacuuacacuuuaugca

SEQ ID NO: 2992369 - RNA, 18 nt, Human
uauaauuuaccugaaguc

SEQ ID NO: 2992370 - RNA, 19 nt, Human
uauacauacuuacaugugu

SEQ ID NO: 2992371 - RNA, 17 nt, Human
uacauuagguugugaau

SEQ ID NO: 2992372 - RNA, 16 nt, Human
uacauuagguugugaa

SEQ ID NO: 2992373 - RNA, 12 nt, Human
uacauucuguua

SEQ ID NO: 2992374 - RNA, 18 nt, Human
uaccagccaguaaauggg

SEQ ID NO: 2992375 - RNA, 22 nt, Human
uaccagcagagcaccuuagaca

SEQ ID NO: 2992376 - RNA, 13 nt, Human
uaccagcagagca

SEQ ID NO: 2992377 - RNA, 14 nt, Human
uaccagcagagcac

SEQ ID NO: 2992378 - RNA, 12 nt, Human
uaccagcagagc

SEQ ID NO: 2992379 - RNA, 19 nt, Human
uaccagggacugaggggag

SEQ ID NO: 2992380 - RNA, 16 nt, Human
uaccaugccauuuaaa

SEQ ID NO: 2992381 - RNA, 22 nt, Human
aauguucacugguacucugcca

SEQ ID NO: 2992382 - RNA, 13 nt, Human
aauguucaucaau

SEQ ID NO: 2992383 - RNA, 21 nt, Human
aaugugcugaaugguuuucaa

SEQ ID NO: 2992384 - RNA, 20 nt, Human
aauguucaucaaugaaugaa

SEQ ID NO: 2992385 - RNA, 16 nt, Human
aauguucaucaaugaa

SEQ ID NO: 2992386 - RNA, 17 nt, Human
aauuaaguacuauguau

SEQ ID NO: 2992387 - RNA, 16 nt, Human
aauuaaguacuaugua

SEQ ID NO: 2992388 - RNA, 16 nt, Human
aauuaacuuuuauaaa

SEQ ID NO: 2992389 - RNA, 15 nt, Human
aauuaacuuuuauaa

SEQ ID NO: 2992390 - RNA, 13 nt, Human
aauuaacuuuuau

SEQ ID NO: 2992391 - RNA, 12 nt, Human
aauuaacuuuua

SEQ ID NO: 2992392 - RNA, 16 nt, Human
aauuaccagaaagaua

SEQ ID NO: 2992393 - RNA, 21 nt, Human
aauuauuuauuaaaugcccag

SEQ ID NO: 2992394 - RNA, 22 nt, Human
aauuauuuauuaaaugcccagc

SEQ ID NO: 2992395 - RNA, 11 nt, Human
aauucaguugu

SEQ ID NO: 2992396 - RNA, 17 nt, Human
aauucaguuguuagugu

SEQ ID NO: 2992397 - RNA, 22 nt, Human
aauucaguuguuagugugucuu

SEQ ID NO: 2992398 - RNA, 13 nt, Human
uaccugaagucuu

SEQ ID NO: 2992399 - RNA, 14 nt, Human
uaccugaagucuuu

SEQ ID NO: 2992400 - RNA, 13 nt, Human
uaccugaggggcc

SEQ ID NO: 2992401 - RNA, 15 nt, Human
uaccugaggggccuc

SEQ ID NO: 2992402 - RNA, 16 nt, Human
uaccugaagucuuugu

SEQ ID NO: 2992403 - RNA, 23 nt, Human
uaccucuugagccuugaacuuug

SEQ ID NO: 2992404 - RNA, 22 nt, Human
uaccucuugagccuugaacuuu

SEQ ID NO: 2992405 - RNA, 21 nt, Human
uaccucuugagccuugaacuu

SEQ ID NO: 2992406 - RNA, 23 nt, Human
uacccgggaagggggcugggaca

SEQ ID NO: 2992407 - RNA, 17 nt, Human
aauuacaggaaguacug

SEQ ID NO: 2992408 - RNA, 19 nt, Human
aauuacaggaaguacugga

SEQ ID NO: 2992409 - RNA, 20 nt, Human
aauuacaggaaguacuggag

SEQ ID NO: 2992410 - RNA, 14 nt, Human
aauuacauuuguau

SEQ ID NO: 2992411 - RNA, 13 nt, Human
aauuacauuugua

SEQ ID NO: 2992412 - RNA, 16 nt, Human
uaccugaggggccucu

SEQ ID NO: 2992413 - RNA, 16 nt, Human
uaccugccaggaagcc

SEQ ID NO: 2992414 - RNA, 16 nt, Human
uaauuauugauguuuu

SEQ ID NO: 2992415 - RNA, 22 nt, Human
uaauuccguagguuauuuucag

SEQ ID NO: 2992416 - RNA, 21 nt, Human
uaauuuuuauauuugaaauau

SEQ ID NO: 2992417 - RNA, 19 nt, Human
uaauuuuuauauuugaaau

SEQ ID NO: 2992418 - RNA, 18 nt, Human
uaauuuuuauauuugaaa

SEQ ID NO: 2992419 - RNA, 17 nt, Human
aaugcaaaaaaaauuag

SEQ ID NO: 2992420 - RNA, 16 nt, Human
aaugcaaaaaaaauua

SEQ ID NO: 2992421 - RNA, 12 nt, Human
aaugcaaaaaaa

SEQ ID NO: 2992422 - RNA, 11 nt, Human
aaugcaaacca

SEQ ID NO: 2992423 - RNA, 16 nt, Human
aaugauuucauucaau

SEQ ID NO: 2992424 - RNA, 12 nt, Human
aaugcaaaccau

SEQ ID NO: 2992425 - RNA, 13 nt, Human
aaugcaccuggaa

SEQ ID NO: 2992426 - RNA, 23 nt, Human
aaugauuaugaauuacauuugua

SEQ ID NO: 2992427 - RNA, 18 nt, Human
aaugaggucagagccugc

SEQ ID NO: 2992428 - RNA, 16 nt, Human
aaugaggucagagccu

SEQ ID NO: 2992429 - RNA, 12 nt, Human
aaugagccuggc

SEQ ID NO: 2992430 - RNA, 13 nt, Human
aaugagccuggca

SEQ ID NO: 2992431 - RNA, 22 nt, Human
aaugagagacacacugaagaag

SEQ ID NO: 2992432 - RNA, 11 nt, Human
aaugagccugg

SEQ ID NO: 2992433 - RNA, 21 nt, Human
aaugaccuuucaauaggaaaa

SEQ ID NO: 2992434 - RNA, 20 nt, Human
aaugaccuuucaauaggaaa

SEQ ID NO: 2992435 - RNA, 20 nt, Human
aaugcuugcugcugauuuaa

SEQ ID NO: 2992436 - RNA, 18 nt, Human
aaugcuugcugcugauuu

SEQ ID NO: 2992437 - RNA, 22 nt, Human
aaugcuguauuuuaaaagaaug

SEQ ID NO: 2992438 - RNA, 23 nt, Human
aaugcuugcugcugauuuaaaca

SEQ ID NO: 2992439 - RNA, 22 nt, Human
aaugcuugcugcugauuuaaac

SEQ ID NO: 2992440 - RNA, 13 nt, Human
aauggaagacagc

SEQ ID NO: 2992441 - RNA, 21 nt, Human
aaugcuguauuuuaaaagaau

SEQ ID NO: 2992442 - RNA, 20 nt, Human
aaugcuguauuuuaaaagaa

SEQ ID NO: 2992443 - RNA, 22 nt, Human
aaugcuggcuguuggcuggggg

SEQ ID NO: 2992444 - RNA, 21 nt, Human
aaugcuggcuguuggcugggg

SEQ ID NO: 2992445 - RNA, 21 nt, Human
uacaaaaaaaaaaaaaaauua

SEQ ID NO: 2992446 - RNA, 18 nt, Human
uaauuuuuuugagacaga

SEQ ID NO: 2992447 - RNA, 17 nt, Human
uaauuuuuauauuugaa

SEQ ID NO: 2992448 - RNA, 16 nt, Human
uacaaugcugugcccu

SEQ ID NO: 2992449 - RNA, 14 nt, Human
uacaaugcugugcc

SEQ ID NO: 2992450 - RNA, 13 nt, Human
uacaaugcugugc

SEQ ID NO: 2992451 - RNA, 20 nt, Human
aauguaagggaaacugccag

SEQ ID NO: 2992452 - RNA, 16 nt, Human
aaugguuuucaaaaua

SEQ ID NO: 2992453 - RNA, 16 nt, Human
aaugguuuucuugugu

SEQ ID NO: 2992454 - RNA, 16 nt, Human
aauggaagacagcucu

SEQ ID NO: 2992455 - RNA, 14 nt, Human
aaugguuuucaaaa

SEQ ID NO: 2992456 - RNA, 23 nt, Human
uacagagcagacaguuaagagaa

SEQ ID NO: 2992457 - RNA, 19 nt, Human
uacagagcccacgccccca

SEQ ID NO: 2992458 - RNA, 22 nt, Human
uacagagcccacgcccccacug

SEQ ID NO: 2992459 - RNA, 17 nt, Human
uacagagacagaaagca

SEQ ID NO: 2992460 - RNA, 13 nt, Human
uacagaauuuuau

SEQ ID NO: 2992461 - RNA, 14 nt, Human
uacagacaaagcgu

SEQ ID NO: 2992462 - RNA, 15 nt, Human
uacagacaaagcgug

SEQ ID NO: 2992463 - RNA, 13 nt, Human
uacagacaaagcg

SEQ ID NO: 2992464 - RNA, 23 nt, Human
aauauuuugacuuguugagggua

SEQ ID NO: 2992465 - RNA, 15 nt, Human
uaagacuuaaugaga

SEQ ID NO: 2992466 - RNA, 16 nt, Human
uaagacuuaaugagac

SEQ ID NO: 2992467 - RNA, 16 nt, Human
aaucagccuaguugau

SEQ ID NO: 2992468 - RNA, 11 nt, Human
aaucagccugc

SEQ ID NO: 2992469 - RNA, 13 nt, Human
aaucagccugcuc

SEQ ID NO: 2992470 - RNA, 18 nt, Human
aaucagccugcuccagcu

SEQ ID NO: 2992471 - RNA, 19 nt, Human
aaucagccugcuccagcug

SEQ ID NO: 2992472 - RNA, 21 nt, Human
aaucagguuuucuuuuaagaa

SEQ ID NO: 2992473 - RNA, 18 nt, Human
aaucagguuuucuuuuaa

SEQ ID NO: 2992474 - RNA, 14 nt, Human
uaagauucauauuu

SEQ ID NO: 2992475 - RNA, 14 nt, Human
uaagcaaaauguga

SEQ ID NO: 2992476 - RNA, 15 nt, Human
uaagcaaaaugugau

SEQ ID NO: 2992477 - RNA, 21 nt, Human
uaagcuauucaguaauaacuc

SEQ ID NO: 2992478 - RNA, 14 nt, Human
uaagcuauucagua

SEQ ID NO: 2992479 - RNA, 13 nt, Human
uaaggaagacaau

SEQ ID NO: 2992480 - RNA, 9 nt, Human
uaaggaaua

SEQ ID NO: 2992481 - RNA, 17 nt, Human
uaaggaauaccuguccc

SEQ ID NO: 2992482 - RNA, 18 nt, Human
uaaggaauaccugucccc

SEQ ID NO: 2992483 - RNA, 14 nt, Human
uaauaaaaagguga

SEQ ID NO: 2992484 - RNA, 15 nt, Human
uaauaaaaaggugac

SEQ ID NO: 2992485 - RNA, 12 nt, Human
uaauaaaaaggu

SEQ ID NO: 2992486 - RNA, 18 nt, Human
uaaguuuuuuuuuaaaaa

SEQ ID NO: 2992487 - RNA, 21 nt, Human
uaaguauucuuauuuaaugaa

SEQ ID NO: 2992488 - RNA, 16 nt, Human
uaaguaaaaccacagc

SEQ ID NO: 2992489 - RNA, 17 nt, Human
uaaguaaaaccacagca

SEQ ID NO: 2992490 - RNA, 18 nt, Human
uaaguaaaaccacagcag

SEQ ID NO: 2992491 - RNA, 20 nt, Human
uaaguaaugauaacuggaaa

SEQ ID NO: 2992492 - RNA, 13 nt, Human
uaaguaaaaccac

SEQ ID NO: 2992493 - RNA, 15 nt, Human
uaaguaaaaccacag

SEQ ID NO: 2992494 - RNA, 18 nt, Human
uaagguuaccuuuguucc

SEQ ID NO: 2992495 - RNA, 20 nt, Human
aauccucaguuuuugugaaa

SEQ ID NO: 2992496 - RNA, 17 nt, Human
aaucccauuuaaaaaaa

SEQ ID NO: 2992497 - RNA, 16 nt, Human
uaacuaucacugguuu

SEQ ID NO: 2992498 - RNA, 21 nt, Human
uaacuaucacugguuugguuc

SEQ ID NO: 2992499 - RNA, 15 nt, Human
uaacuuaaugaaaac

SEQ ID NO: 2992500 - RNA, 18 nt, Human
uaacuuaaugaaaacaau

SEQ ID NO: 2992501 - RNA, 16 nt, Human
uaacuuaaugaaaaca

SEQ ID NO: 2992502 - RNA, 21 nt, Human
uaacuuccuuggacucauuuu

SEQ ID NO: 2992503 - RNA, 16 nt, Human
uaacuugucuuuggac

SEQ ID NO: 2992504 - RNA, 20 nt, Human
uaacuugucuuuggacccug

SEQ ID NO: 2992505 - RNA, 13 nt, Human
uaagaagugaaaa

SEQ ID NO: 2992506 - RNA, 23 nt, Human
uaagacaaaaagcuacuuauugu

SEQ ID NO: 2992507 - RNA, 17 nt, Human
uaacauguaauuaagua

SEQ ID NO: 2992508 - RNA, 19 nt, Human
uaacauguaauuaaguacu

SEQ ID NO: 2992509 - RNA, 19 nt, Human
aauagucaaauugugugaa

SEQ ID NO: 2992510 - RNA, 18 nt, Human
uaacaaaggauacuuauu

SEQ ID NO: 2992511 - RNA, 17 nt, Human
uaacaaaggauacuuau

SEQ ID NO: 2992512 - RNA, 16 nt, Human
uaacaaaggauacuua

SEQ ID NO: 2992513 - RNA, 15 nt, Human
uaacaaaggauacuu

SEQ ID NO: 2992514 - RNA, 21 nt, Human
uaaauuaacuuuuauaaacuu

SEQ ID NO: 2992515 - RNA, 20 nt, Human
uaacaaaggauacuuauuua

SEQ ID NO: 2992516 - RNA, 19 nt, Human
uaacaaaggauacuuauuu

SEQ ID NO: 2992517 - RNA, 21 nt, Human
uaacaaaggauacuuauuuaa

SEQ ID NO: 2992518 - RNA, 13 nt, Human
aauacagaggcaa

SEQ ID NO: 2992519 - RNA, 21 nt, Human
aauacaccacuacauucuguu

SEQ ID NO: 2992520 - RNA, 16 nt, Human
uaaaugugcuuuuaaa

SEQ ID NO: 2992521 - RNA, 20 nt, Human
uaaauuaacuuuuauaaacu

SEQ ID NO: 2992522 - RNA, 19 nt, Human
uaaauuaacuuuuauaaac

SEQ ID NO: 2992523 - RNA, 18 nt, Human
uaaauuaacuuuuauaaa

SEQ ID NO: 2992524 - RNA, 21 nt, Human
aaguguauuuugaaauuguuu

SEQ ID NO: 2992525 - RNA, 17 nt, Human
aaguguauuuugaaauu

SEQ ID NO: 2992526 - RNA, 21 nt, Human
aaguguauuuuuuuacuaaua

SEQ ID NO: 2992527 - RNA, 18 nt, Human
aaguguauuuuuuuacua

SEQ ID NO: 2992528 - RNA, 18 nt, Human
uaaaugaaaaucgugaca

SEQ ID NO: 2992529 - RNA, 21 nt, Human
aauagcaaggcugugcaucua

SEQ ID NO: 2992530 - RNA, 22 nt, Human
aauagcagcccucaauugugaa

SEQ ID NO: 2992531 - RNA, 23 nt, Human
aauagcagcccucaauugugaaa

SEQ ID NO: 2992532 - RNA, 20 nt, Human
aauagccugccucuucucua

SEQ ID NO: 2992533 - RNA, 15 nt, Human
aauaccugucccccu

SEQ ID NO: 2992534 - RNA, 18 nt, Human
aauaccugucccccugac

SEQ ID NO: 2992535 - RNA, 19 nt, Human
aauaccugucccccugaca

SEQ ID NO: 2992536 - RNA, 20 nt, Human
aauaccccaagacucccaug

SEQ ID NO: 2992537 - RNA, 12 nt, Human
aauaccaaggaa

SEQ ID NO: 2992538 - RNA, 23 nt, Human
aauaccacaggaaccacaagacu

SEQ ID NO: 2992539 - RNA, 19 nt, Human
aauaccagccaguaaaugg

SEQ ID NO: 2992540 - RNA, 18 nt, Human
aauaccaugccauuuaaa

SEQ ID NO: 2992541 - RNA, 17 nt, Human
aauaccagccaguaaau

SEQ ID NO: 2992542 - RNA, 23 nt, Human
aauacaucccuuaccugggaaag

SEQ ID NO: 2992543 - RNA, 13 nt, Human
gugucauuucaaa

SEQ ID NO: 2992544 - RNA, 20 nt, Human
gugucagguggggcagcuug

SEQ ID NO: 2992545 - RNA, 22 nt, Human
gugugacaaggauugcuacugu

SEQ ID NO: 2992546 - RNA, 16 nt, Human
gugugguagagugugc

SEQ ID NO: 2992547 - RNA, 13 nt, Human
aagauguagagga

SEQ ID NO: 2992548 - RNA, 23 nt, Human
guguauuuuuuuacuaauagaca

SEQ ID NO: 2992549 - RNA, 17 nt, Human
guguauuuuuuuacuaa

SEQ ID NO: 2992550 - RNA, 20 nt, Human
gugucaagagggucugagga

SEQ ID NO: 2992551 - RNA, 16 nt, Human
gugucagcauagaagu

SEQ ID NO: 2992552 - RNA, 18 nt, Human
aagaugaaggucuguuuu

SEQ ID NO: 2992553 - RNA, 17 nt, Human
aagaugcuucucacugc

SEQ ID NO: 2992554 - RNA, 16 nt, Human
aagaugcuucucacug

SEQ ID NO: 2992555 - RNA, 19 nt, Human
aagaugcuucucacugcca

SEQ ID NO: 2992556 - RNA, 13 nt, Human
aagaugaaaauau

SEQ ID NO: 2992557 - RNA, 14 nt, Human
aagaugaaaauauu

SEQ ID NO: 2992558 - RNA, 13 nt, Human
aagaguaggaaga

SEQ ID NO: 2992559 - RNA, 23 nt, Human
aagagggagggagggcuccagac

SEQ ID NO: 2992560 - RNA, 12 nt, Human
aagaguaggaag

SEQ ID NO: 2992561 - RNA, 17 nt, Human
guggggucacucuggca

SEQ ID NO: 2992562 - RNA, 20 nt, Human
guggggucacucuggcagcu

SEQ ID NO: 2992563 - RNA, 21 nt, Human
guggggucacucuggcagcuc

SEQ ID NO: 2992564 - RNA, 22 nt, Human
guggggucacucuggcagcuca

SEQ ID NO: 2992565 - RNA, 22 nt, Human
aagacugaguacguugugcauu

SEQ ID NO: 2992566 - RNA, 23 nt, Human
aagacugaguacguugugcauuu

SEQ ID NO: 2992567 - RNA, 16 nt, Human
aagacugcacaucaaa

SEQ ID NO: 2992568 - RNA, 16 nt, Human
aagacuuuggaaagac

SEQ ID NO: 2992569 - RNA, 13 nt, Human
aagagcaggccag

SEQ ID NO: 2992570 - RNA, 15 nt, Human
aagaccuucuccuuc

SEQ ID NO: 2992571 - RNA, 18 nt, Human
aagaccuucuccuucacc

SEQ ID NO: 2992572 - RNA, 19 nt, Human
aagaccuucuccuucaccu

SEQ ID NO: 2992573 - RNA, 15 nt, Human
aagacgcugugcugc

SEQ ID NO: 2992574 - RNA, 17 nt, Human
aagacgcugugcugccc

SEQ ID NO: 2992575 - RNA, 18 nt, Human
aagacgcugugcugcccu

SEQ ID NO: 2992576 - RNA, 19 nt, Human
aagacgcugugcugcccug

SEQ ID NO: 2992577 - RNA, 13 nt, Human
aagacgcugugcu

SEQ ID NO: 2992578 - RNA, 23 nt, Human
aagaggaaugaaguacucauaca

SEQ ID NO: 2992579 - RNA, 21 nt, Human
guggccucccaacucacccca

SEQ ID NO: 2992580 - RNA, 22 nt, Human
guggccucccaacucaccccag

SEQ ID NO: 2992581 - RNA, 13 nt, Human
gugggacacccug

SEQ ID NO: 2992582 - RNA, 15 nt, Human
gugggacacccugug

SEQ ID NO: 2992583 - RNA, 14 nt, Human
gugggagcugccug

SEQ ID NO: 2992584 - RNA, 23 nt, Human
guggcgagccauuugucccaagu

SEQ ID NO: 2992585 - RNA, 20 nt, Human
guggcgagccauuuguccca

SEQ ID NO: 2992586 - RNA, 15 nt, Human
guggggucacucugg

SEQ ID NO: 2992587 - RNA, 18 nt, Human
gugggagcugccuguuca

SEQ ID NO: 2992588 - RNA, 15 nt, Human
gugggagcugccugu

SEQ ID NO: 2992589 - RNA, 18 nt, Human
guuauugaagcagagugg

SEQ ID NO: 2992590 - RNA, 17 nt, Human
guuauugaagcagagug

SEQ ID NO: 2992591 - RNA, 16 nt, Human
guuauugaagcagagu

SEQ ID NO: 2992592 - RNA, 20 nt, Human
guuauuauauuuacaaaugg

SEQ ID NO: 2992593 - RNA, 23 nt, Human
guuauuuuuauuuauuuaaauuu

SEQ ID NO: 2992594 - RNA, 22 nt, Human
guucaaagauauuuugcuuugu

SEQ ID NO: 2992595 - RNA, 21 nt, Human
guucaaagauauuuugcuuug

SEQ ID NO: 2992596 - RNA, 20 nt, Human
guucaaagauauuuugcuuu

SEQ ID NO: 2992597 - RNA, 18 nt, Human
guucaagcgauucuucug

SEQ ID NO: 2992598 - RNA, 19 nt, Human
guuaggcauugugggaagg

SEQ ID NO: 2992599 - RNA, 20 nt, Human
guuaggcauugugggaaggg

SEQ ID NO: 2992600 - RNA, 11 nt, Human
guuaagagaaa

SEQ ID NO: 2992601 - RNA, 12 nt, Human
guuaagagaaau

SEQ ID NO: 2992602 - RNA, 18 nt, Human
guuaagagaaaugagcuu

SEQ ID NO: 2992603 - RNA, 17 nt, Human
aagcuccaagcucccag

SEQ ID NO: 2992604 - RNA, 18 nt, Human
aagcuccaagcucccagg

SEQ ID NO: 2992605 - RNA, 14 nt, Human
aagcuccagguaga

SEQ ID NO: 2992606 - RNA, 13 nt, Human
aagcuccagguag

SEQ ID NO: 2992607 - RNA, 18 nt, Human
aagcucagggccuggcuc

SEQ ID NO: 2992608 - RNA, 19 nt, Human
aagcucagggccuggcuca

SEQ ID NO: 2992609 - RNA, 20 nt, Human
aagcucagggccuggcucag

SEQ ID NO: 2992610 - RNA, 12 nt, Human
aagcucagggcc

SEQ ID NO: 2992611 - RNA, 13 nt, Human
aagcucagggccu

SEQ ID NO: 2992612 - RNA, 16 nt, Human
aagcucagggccuggc

SEQ ID NO: 2992613 - RNA, 17 nt, Human
aagcucagggccuggcu

SEQ ID NO: 2992614 - RNA, 20 nt, Human
aagcucacagaccuuugaac

SEQ ID NO: 2992615 - RNA, 12 nt, Human
aagcuaggccug

SEQ ID NO: 2992616 - RNA, 22 nt, Human
aagcuagacgagcaggcuucuu

SEQ ID NO: 2992617 - RNA, 20 nt, Human
aagccugaguuugcuuucaa

SEQ ID NO: 2992618 - RNA, 13 nt, Human
guucagcuccagc

SEQ ID NO: 2992619 - RNA, 20 nt, Human
aagccgcuggggccaguugg

SEQ ID NO: 2992620 - RNA, 18 nt, Human
guuaagacaaacugcaua

SEQ ID NO: 2992621 - RNA, 19 nt, Human
aagcccugagcuuucugcu

SEQ ID NO: 2992622 - RNA, 19 nt, Human
aagcccaggaaaggcucca

SEQ ID NO: 2992623 - RNA, 22 nt, Human
aagcccaggaaaggcuccagga

SEQ ID NO: 2992624 - RNA, 14 nt, Human
aagcccaggaaagg

SEQ ID NO: 2992625 - RNA, 17 nt, Human
aagcccaggaaaggcuc

SEQ ID NO: 2992626 - RNA, 22 nt, Human
aagccaaagcuaggccuggcca

SEQ ID NO: 2992627 - RNA, 20 nt, Human
aagccaaagcuaggccuggc

SEQ ID NO: 2992628 - RNA, 20 nt, Human
aagcagugcaugcugucccu

SEQ ID NO: 2992629 - RNA, 14 nt, Human
aagcagugcaugcu

SEQ ID NO: 2992630 - RNA, 15 nt, Human
aagcagugcaugcug

SEQ ID NO: 2992631 - RNA, 21 nt, Human
gugugugcgccuacaggagug

SEQ ID NO: 2992632 - RNA, 12 nt, Human
aagcagugcaug

SEQ ID NO: 2992633 - RNA, 16 nt, Human
aagcauuuagauguau

SEQ ID NO: 2992634 - RNA, 16 nt, Human
aagcauuuacuuugug

SEQ ID NO: 2992635 - RNA, 13 nt, Human
aagcauuguaaau

SEQ ID NO: 2992636 - RNA, 16 nt, Human
aagccaaaacugagca

SEQ ID NO: 2992637 - RNA, 19 nt, Human
aagccaaaacugagcauaa

SEQ ID NO: 2992638 - RNA, 13 nt, Human
aagucuucuauuu

SEQ ID NO: 2992639 - RNA, 17 nt, Human
aagucuucuauuuauuu

SEQ ID NO: 2992640 - RNA, 16 nt, Human
aagucuuucacauuua

SEQ ID NO: 2992641 - RNA, 22 nt, Human
aagucuuauauauuguagauaa

SEQ ID NO: 2992642 - RNA, 19 nt, Human
aagugaagacaaugacuua

SEQ ID NO: 2992643 - RNA, 17 nt, Human
aagugaagacaaugacu

SEQ ID NO: 2992644 - RNA, 21 nt, Human
aagugaaaaaggaggaagaga

SEQ ID NO: 2992645 - RNA, 12 nt, Human
aagugagagagg

SEQ ID NO: 2992646 - RNA, 14 nt, Human
aagugagagcuggg

SEQ ID NO: 2992647 - RNA, 13 nt, Human
aaguauuagaaua

SEQ ID NO: 2992648 - RNA, 20 nt, Human
aaguacacuguuucaaacuu

SEQ ID NO: 2992649 - RNA, 19 nt, Human
aaguacacuguuucaaacu

SEQ ID NO: 2992650 - RNA, 23 nt, Human
aaguacacuguuucaaacuuuac

SEQ ID NO: 2992651 - RNA, 18 nt, Human
aaguacacuguuucaaac

SEQ ID NO: 2992652 - RNA, 13 nt, Human
aaguacacuguuu

SEQ ID NO: 2992653 - RNA, 14 nt, Human
aaguaaugauaacu

SEQ ID NO: 2992654 - RNA, 22 nt, Human
guuuugccauguuggccaggcu

SEQ ID NO: 2992655 - RNA, 21 nt, Human
guuuugccauguuggccaggc

SEQ ID NO: 2992656 - RNA, 20 nt, Human
guuuugccauguuggccagg

SEQ ID NO: 2992657 - RNA, 16 nt, Human
guuuugccauguuggc

SEQ ID NO: 2992658 - RNA, 15 nt, Human
guuucugccgcagcc

SEQ ID NO: 2992659 - RNA, 14 nt, Human
guuucugccgcagc

SEQ ID NO: 2992660 - RNA, 23 nt, Human
uaaaagaauauuuuaacuuccuu

SEQ ID NO: 2992661 - RNA, 12 nt, Human
uaaaagaaugau

SEQ ID NO: 2992662 - RNA, 22 nt, Human
uaaaacuugauguguuaucucu

SEQ ID NO: 2992663 - RNA, 20 nt, Human
uaaaacuugauguguuaucu

SEQ ID NO: 2992664 - RNA, 16 nt, Human
uaaaagaauauuuuaa

SEQ ID NO: 2992665 - RNA, 21 nt, Human
uaaaaaucucaaauuucuaaa

SEQ ID NO: 2992666 - RNA, 20 nt, Human
uaaaaaucucaaauuucuaa

SEQ ID NO: 2992667 - RNA, 19 nt, Human
uaaaaaucucaaauuucua

SEQ ID NO: 2992668 - RNA, 15 nt, Human
uaaaaaguggaaaaa

SEQ ID NO: 2992669 - RNA, 15 nt, Human
guuuuucuucucccu

SEQ ID NO: 2992670 - RNA, 15 nt, Human
guuuuucuugcaugg

SEQ ID NO: 2992671 - RNA, 17 nt, Human
uaaaaaucucaaauuuc

SEQ ID NO: 2992672 - RNA, 16 nt, Human
uaaaaaucucaaauuu

SEQ ID NO: 2992673 - RNA, 15 nt, Human
uaaaaaucucaaauu

SEQ ID NO: 2992674 - RNA, 20 nt, Human
uaaaagacagugaaagaaaa

SEQ ID NO: 2992675 - RNA, 22 nt, Human
uaaaauaccagccaguaaaugg

SEQ ID NO: 2992676 - RNA, 21 nt, Human
uaaaauaccagccaguaaaug

SEQ ID NO: 2992677 - RNA, 18 nt, Human
aagugauucuccugccuc

SEQ ID NO: 2992678 - RNA, 17 nt, Human
aagugauucuccugccu

SEQ ID NO: 2992679 - RNA, 16 nt, Human
aagugauucuccugcc

SEQ ID NO: 2992680 - RNA, 15 nt, Human
aagugauucuccugc

SEQ ID NO: 2992681 - RNA, 19 nt, Human
aagugauucuccugccuca

SEQ ID NO: 2992682 - RNA, 16 nt, Human
aagugaggaugaaaaa

SEQ ID NO: 2992683 - RNA, 15 nt, Human
aagugagagcugggu

SEQ ID NO: 2992684 - RNA, 14 nt, Human
guugcuaacagcaa

SEQ ID NO: 2992685 - RNA, 13 nt, Human
guugcccaggcug

SEQ ID NO: 2992686 - RNA, 12 nt, Human
guugcccaggcu

SEQ ID NO: 2992687 - RNA, 23 nt, Human
guugcccaggcaggucuugaacu

SEQ ID NO: 2992688 - RNA, 13 nt, Human
aaggauacuuauu

SEQ ID NO: 2992689 - RNA, 16 nt, Human
aaggauacuuauuuaa

SEQ ID NO: 2992690 - RNA, 17 nt, Human
aaggcauggacuucugg

SEQ ID NO: 2992691 - RNA, 21 nt, Human
aaggauacaaaagcaugugag

SEQ ID NO: 2992692 - RNA, 13 nt, Human
aaggauacaaaag

SEQ ID NO: 2992693 - RNA, 13 nt, Human
aaggauaaugaau

SEQ ID NO: 2992694 - RNA, 16 nt, Human
aaggccaaaggaagca

SEQ ID NO: 2992695 - RNA, 15 nt, Human
aaggaagacuucauc

SEQ ID NO: 2992696 - RNA, 13 nt, Human
aaggaagcacaug

SEQ ID NO: 2992697 - RNA, 14 nt, Human
aaggaagacuucau

SEQ ID NO: 2992698 - RNA, 17 nt, Human
aaggaauaccugucccc

SEQ ID NO: 2992699 - RNA, 16 nt, Human
aaggaagcacaugccu

SEQ ID NO: 2992700 - RNA, 15 nt, Human
aaggaaagagggagg

SEQ ID NO: 2992701 - RNA, 14 nt, Human
aaggagauuuacaa

SEQ ID NO: 2992702 - RNA, 11 nt, Human
aaggagagcua

SEQ ID NO: 2992703 - RNA, 18 nt, Human
aaggaauaccuguccccc

SEQ ID NO: 2992704 - RNA, 18 nt, Human
aaggaggaagagaaaaaa

SEQ ID NO: 2992705 - RNA, 20 nt, Human
aaggaggggauagagagaga

SEQ ID NO: 2992706 - RNA, 12 nt, Human
guuuaaugguag

SEQ ID NO: 2992707 - RNA, 17 nt, Human
guuuaaugguaguuuua

SEQ ID NO: 2992708 - RNA, 13 nt, Human
guuuauugucaaa

SEQ ID NO: 2992709 - RNA, 15 nt, Human
guugggccaggagcc

SEQ ID NO: 2992710 - RNA, 17 nt, Human
guugggccaggagccuc

SEQ ID NO: 2992711 - RNA, 13 nt, Human
guugggcuggugu

SEQ ID NO: 2992712 - RNA, 22 nt, Human
guuuauuuggaaaggaaugcaa

SEQ ID NO: 2992713 - RNA, 13 nt, Human
guuucaaacuuua

SEQ ID NO: 2992714 - RNA, 16 nt, Human
guuucaaacuuuacua

SEQ ID NO: 2992715 - RNA, 14 nt, Human
guuucaaacuuuac

SEQ ID NO: 2992716 - RNA, 16 nt, Human
aaggcuccaggagcag

SEQ ID NO: 2992717 - RNA, 18 nt, Human
aaggcuccaggagcagcc

SEQ ID NO: 2992718 - RNA, 15 nt, Human
aaggcuccaggagca

SEQ ID NO: 2992719 - RNA, 19 nt, Human
aaggcuccaggagcagcca

SEQ ID NO: 2992720 - RNA, 22 nt, Human
aaggcuccaggagcagccacau

SEQ ID NO: 2992721 - RNA, 16 nt, Human
aaggcucgagcaugcc

SEQ ID NO: 2992722 - RNA, 18 nt, Human
aaggcucgagcaugccug

SEQ ID NO: 2992723 - RNA, 19 nt, Human
aaggcucgagcaugccugg

SEQ ID NO: 2992724 - RNA, 20 nt, Human
aaggcucgagcaugccugga

SEQ ID NO: 2992725 - RNA, 22 nt, Human
aaggcucgagcaugccuggaug

SEQ ID NO: 2992726 - RNA, 19 nt, Human
aagggugaugggaaagcau

SEQ ID NO: 2992727 - RNA, 13 nt, Human
aagguacuucaaa

SEQ ID NO: 2992728 - RNA, 14 nt, Human
aagguacuucaaau

SEQ ID NO: 2992729 - RNA, 20 nt, Human
aagguagaaauaucugaaaa

SEQ ID NO: 2992730 - RNA, 17 nt, Human
aaggggcaguggugguu

SEQ ID NO: 2992731 - RNA, 22 nt, Human
aaggggcccaaauucuuucagu

SEQ ID NO: 2992732 - RNA, 22 nt, Human
guuucuaugacacaugcaaggu

SEQ ID NO: 2992733 - RNA, 18 nt, Human
aagguauuuaauagguuu

SEQ ID NO: 2992734 - RNA, 12 nt, Human
aaggucauuuuu

SEQ ID NO: 2992735 - RNA, 18 nt, Human
guuucugaaagggacgcu

SEQ ID NO: 2992736 - RNA, 19 nt, Human
guuucuauguguagggcgg

SEQ ID NO: 2992737 - RNA, 18 nt, Human
aaaugguguuuuaucuuc

SEQ ID NO: 2992738 - RNA, 17 nt, Human
aaaugguguuuuaucuu

SEQ ID NO: 2992739 - RNA, 14 nt, Human
aaauggguuuuacu

SEQ ID NO: 2992740 - RNA, 15 nt, Human
aaauggguuuuacug

SEQ ID NO: 2992741 - RNA, 16 nt, Human
aaaugguagcauuuua

SEQ ID NO: 2992742 - RNA, 20 nt, Human
aaaugguagcauuuuaaaca

SEQ ID NO: 2992743 - RNA, 18 nt, Human
aaaugguagcauuuuaaa

SEQ ID NO: 2992744 - RNA, 22 nt, Human
aaaugguagcauuuuaaacaaa

SEQ ID NO: 2992745 - RNA, 22 nt, Human
guaacaggaaaauuuuaaaaau

SEQ ID NO: 2992746 - RNA, 12 nt, Human
guaacaggcaga

SEQ ID NO: 2992747 - RNA, 19 nt, Human
aaaugggggugcauuugag

SEQ ID NO: 2992748 - RNA, 20 nt, Human
guaacaggaaaauuuuaaaa

SEQ ID NO: 2992749 - RNA, 20 nt, Human
guaguguuggagaagaacug

SEQ ID NO: 2992750 - RNA, 16 nt, Human
aaauguaagggaaacu

SEQ ID NO: 2992751 - RNA, 17 nt, Human
guaguguuggagaagaa

SEQ ID NO: 2992752 - RNA, 16 nt, Human
guauauuuuauaucaa

SEQ ID NO: 2992753 - RNA, 18 nt, Human
guaucaggugcugccauc

SEQ ID NO: 2992754 - RNA, 16 nt, Human
guaucaggugcugcca

SEQ ID NO: 2992755 - RNA, 21 nt, Human
guauaaaauaauuuuuauauu

SEQ ID NO: 2992756 - RNA, 15 nt, Human
guauaaaauaauuuu

SEQ ID NO: 2992757 - RNA, 13 nt, Human
guaugguggcugg

SEQ ID NO: 2992758 - RNA, 14 nt, Human
guaugguggcuggg

SEQ ID NO: 2992759 - RNA, 16 nt, Human
guaugguggcuggguu

SEQ ID NO: 2992760 - RNA, 15 nt, Human
guaugguggcugggu

SEQ ID NO: 2992761 - RNA, 22 nt, Human
guaucaggugcugccauccagg

SEQ ID NO: 2992762 - RNA, 19 nt, Human
guaucccaugagccucagc

SEQ ID NO: 2992763 - RNA, 16 nt, Human
gucaaauugugugaaa

SEQ ID NO: 2992764 - RNA, 22 nt, Human
guauuuuguuuuugucuuaaaa

SEQ ID NO: 2992765 - RNA, 14 nt, Human
aaauuagguugaaa

SEQ ID NO: 2992766 - RNA, 18 nt, Human
aaauuagguugaaacaua

SEQ ID NO: 2992767 - RNA, 17 nt, Human
aaauuagguugaaacau

SEQ ID NO: 2992768 - RNA, 16 nt, Human
aaauuagguugaaaca

SEQ ID NO: 2992769 - RNA, 19 nt, Human
aaauuagguugaaacauau

SEQ ID NO: 2992770 - RNA, 20 nt, Human
aaauuauucuauaauuucca

SEQ ID NO: 2992771 - RNA, 18 nt, Human
guauguacuucaugcugu

SEQ ID NO: 2992772 - RNA, 15 nt, Human
aaauguauuacagug

SEQ ID NO: 2992773 - RNA, 19 nt, Human
aaaugucuaguuguaacac

SEQ ID NO: 2992774 - RNA, 15 nt, Human
aaaugucaguucuga

SEQ ID NO: 2992775 - RNA, 16 nt, Human
aaaugucaguucugau

SEQ ID NO: 2992776 - RNA, 12 nt, Human
aaauuuguggaa

SEQ ID NO: 2992777 - RNA, 18 nt, Human
aaauuuguuauaaugaau

SEQ ID NO: 2992778 - RNA, 16 nt, Human
gucaguuguuauuuau

SEQ ID NO: 2992779 - RNA, 15 nt, Human
gucagugugacugau

SEQ ID NO: 2992780 - RNA, 17 nt, Human
gucaguuguuauuuauu

SEQ ID NO: 2992781 - RNA, 18 nt, Human
gucaguuguuauuuauug

SEQ ID NO: 2992782 - RNA, 21 nt, Human
gucaguuguuauuuauugaaa

SEQ ID NO: 2992783 - RNA, 23 nt, Human
gucagaaguuucugccgcagccc

SEQ ID NO: 2992784 - RNA, 13 nt, Human
gucagacacagau

SEQ ID NO: 2992785 - RNA, 18 nt, Human
gucagacacagauuggcc

SEQ ID NO: 2992786 - RNA, 21 nt, Human
gucacacaguauuacuucugc

SEQ ID NO: 2992787 - RNA, 22 nt, Human
gucacacaguauuacuucugcu

SEQ ID NO: 2992788 - RNA, 21 nt, Human
aacacaaagcuuuugcauauu

SEQ ID NO: 2992789 - RNA, 16 nt, Human
aacacaacuauauugu

SEQ ID NO: 2992790 - RNA, 15 nt, Human
aacacaacuauauug

SEQ ID NO: 2992791 - RNA, 22 nt, Human
aacaaugcuguauuuuaaaaga

SEQ ID NO: 2992792 - RNA, 17 nt, Human
aacaaugcuguauuuua

SEQ ID NO: 2992793 - RNA, 15 nt, Human
aacaaugcuguauuu

SEQ ID NO: 2992794 - RNA, 14 nt, Human
aacaaugcuguauu

SEQ ID NO: 2992795 - RNA, 12 nt, Human
aacaauaaaaga

SEQ ID NO: 2992796 - RNA, 18 nt, Human
aacaaggcaaggcuguca

SEQ ID NO: 2992797 - RNA, 21 nt, Human
aacaaggcaaggcugucaauu

SEQ ID NO: 2992798 - RNA, 15 nt, Human
aacaaggcaaggcug

SEQ ID NO: 2992799 - RNA, 16 nt, Human
aacaaggcaaggcugu

SEQ ID NO: 2992800 - RNA, 20 nt, Human
aacaagaccacguuucuaaa

SEQ ID NO: 2992801 - RNA, 23 nt, Human
aaauuuugauguuuuaaggaugc

SEQ ID NO: 2992802 - RNA, 18 nt, Human
aaauuuugauguuuuaag

SEQ ID NO: 2992803 - RNA, 20 nt, Human
aaauuuuuucucuaggaaau

SEQ ID NO: 2992804 - RNA, 15 nt, Human
aacacagcaagggug

SEQ ID NO: 2992805 - RNA, 21 nt, Human
gucauuuuuuuuaagaaaaag

SEQ ID NO: 2992806 - RNA, 19 nt, Human
gucauuuuuuuuaagaaaa

SEQ ID NO: 2992807 - RNA, 17 nt, Human
guccaagaagcccagga

SEQ ID NO: 2992808 - RNA, 18 nt, Human
guccaagaagcccaggaa

SEQ ID NO: 2992809 - RNA, 20 nt, Human
guccaagaagcccaggaaag

SEQ ID NO: 2992810 - RNA, 15 nt, Human
guccaagaagcccag

SEQ ID NO: 2992811 - RNA, 16 nt, Human
guccaagaagcccagg

SEQ ID NO: 2992812 - RNA, 13 nt, Human
guccaagaagccc

SEQ ID NO: 2992813 - RNA, 16 nt, Human
gucccaccuuggcugc

SEQ ID NO: 2992814 - RNA, 15 nt, Human
gucccaccuuggcug

SEQ ID NO: 2992815 - RNA, 14 nt, Human
gucccaccuuggcu

SEQ ID NO: 2992816 - RNA, 20 nt, Human
gucccaccccacacacgcca

SEQ ID NO: 2992817 - RNA, 21 nt, Human
gucccaccccacacacgccag

SEQ ID NO: 2992818 - RNA, 13 nt, Human
guccauagagagc

SEQ ID NO: 2992819 - RNA, 14 nt, Human
guccauagagagca

SEQ ID NO: 2992820 - RNA, 22 nt, Human
aacagugauuaccagggacuga

SEQ ID NO: 2992821 - RNA, 15 nt, Human
aacagugauuaccag

SEQ ID NO: 2992822 - RNA, 14 nt, Human
aacagggccucugc

SEQ ID NO: 2992823 - RNA, 20 nt, Human
aacagaugaaaagccucugu

SEQ ID NO: 2992824 - RNA, 16 nt, Human
aacagauaaauaguuu

SEQ ID NO: 2992825 - RNA, 14 nt, Human
aacagaugaaaagc

SEQ ID NO: 2992826 - RNA, 13 nt, Human
aacagaugaaaag

SEQ ID NO: 2992827 - RNA, 11 nt, Human
aacagaaaugu

SEQ ID NO: 2992828 - RNA, 13 nt, Human
aacagaagaaaau

SEQ ID NO: 2992829 - RNA, 20 nt, Human
aacagaagaaaauagaauug

SEQ ID NO: 2992830 - RNA, 13 nt, Human
aacagaaauguac

SEQ ID NO: 2992831 - RNA, 12 nt, Human
aacagaaaugua

SEQ ID NO: 2992832 - RNA, 14 nt, Human
aacagaaauguaca

SEQ ID NO: 2992833 - RNA, 12 nt, Human
guccuacucugu

SEQ ID NO: 2992834 - RNA, 15 nt, Human
guccuacccacccuc

SEQ ID NO: 2992835 - RNA, 16 nt, Human
guccuacccacccucc

SEQ ID NO: 2992836 - RNA, 16 nt, Human
gucccccuuccaugga

SEQ ID NO: 2992837 - RNA, 18 nt, Human
gucccccuuccauggacu

SEQ ID NO: 2992838 - RNA, 14 nt, Human
gucccccuuccaug

SEQ ID NO: 2992839 - RNA, 18 nt, Human
gucccccugacaacacuc

SEQ ID NO: 2992840 - RNA, 22 nt, Human
aacucugagugcaaacuucaga

SEQ ID NO: 2992841 - RNA, 20 nt, Human
aacucugagugcaaacuuca

SEQ ID NO: 2992842 - RNA, 21 nt, Human
aacucuucaaucucuugcacu

SEQ ID NO: 2992843 - RNA, 12 nt, Human
aacugaaaucau

SEQ ID NO: 2992844 - RNA, 18 nt, Human
aacucugagugcaaacuu

SEQ ID NO: 2992845 - RNA, 19 nt, Human
aacucugagugcaaacuuc

SEQ ID NO: 2992846 - RNA, 22 nt, Human
gugagucgaggacagggaggug

SEQ ID NO: 2992847 - RNA, 15 nt, Human
gugagucgaggacag

SEQ ID NO: 2992848 - RNA, 17 nt, Human
gugaggccagagacaca

SEQ ID NO: 2992849 - RNA, 22 nt, Human
gugaggccagagacacaagccu

SEQ ID NO: 2992850 - RNA, 17 nt, Human
gugaacuugggccacug

SEQ ID NO: 2992851 - RNA, 19 nt, Human
gugaacuugggccacugug

SEQ ID NO: 2992852 - RNA, 21 nt, Human
gugagaugcuagaacucccuu

SEQ ID NO: 2992853 - RNA, 17 nt, Human
gugaacugaucauguuu

SEQ ID NO: 2992854 - RNA, 20 nt, Human
aacugggaugaggugacuau

SEQ ID NO: 2992855 - RNA, 17 nt, Human
aacugggacaggggaga

SEQ ID NO: 2992856 - RNA, 22 nt, Human
aacugggggagggugaagugaa

SEQ ID NO: 2992857 - RNA, 21 nt, Human
aacugggggagggugaaguga

SEQ ID NO: 2992858 - RNA, 21 nt, Human
aacuggguacuuguggacaca

SEQ ID NO: 2992859 - RNA, 16 nt, Human
aacuggguacuugugg

SEQ ID NO: 2992860 - RNA, 15 nt, Human
aacuggauuaaacuu

SEQ ID NO: 2992861 - RNA, 19 nt, Human
aacuggacugguucaaaug

SEQ ID NO: 2992862 - RNA, 11 nt, Human
aacuggcugca

SEQ ID NO: 2992863 - RNA, 16 nt, Human
aacuggauuaaacuua

SEQ ID NO: 2992864 - RNA, 22 nt, Human
aacuggcaaagcagaaugugau

SEQ ID NO: 2992865 - RNA, 13 nt, Human
aacuggcaaagca

SEQ ID NO: 2992866 - RNA, 19 nt, Human
aacugcacugucaagauga

SEQ ID NO: 2992867 - RNA, 15 nt, Human
aacugcugacuguuu

SEQ ID NO: 2992868 - RNA, 20 nt, Human
aacugcugacuguuuucucu

SEQ ID NO: 2992869 - RNA, 21 nt, Human
aacugcugacuguuuucucuu

SEQ ID NO: 2992870 - RNA, 23 nt, Human
aacugcugacuguuuucucuuga

SEQ ID NO: 2992871 - RNA, 22 nt, Human
gugcaugcugucccuuacguga

SEQ ID NO: 2992872 - RNA, 21 nt, Human
gugcacacaccagagcccacc

SEQ ID NO: 2992873 - RNA, 22 nt, Human
gugcaaugaccuuucaauagga

SEQ ID NO: 2992874 - RNA, 19 nt, Human
gugauggggcccugccucc

SEQ ID NO: 2992875 - RNA, 22 nt, Human
gugccucucccugcugcuccua

SEQ ID NO: 2992876 - RNA, 16 nt, Human
gugccucucccugcug

SEQ ID NO: 2992877 - RNA, 14 nt, Human
gugccucucccugc

SEQ ID NO: 2992878 - RNA, 12 nt, Human
gugccucucccu

SEQ ID NO: 2992879 - RNA, 23 nt, Human
gugccucucccugcugcuccuag

SEQ ID NO: 2992880 - RNA, 19 nt, Human
gugcauuaucuagauacug

SEQ ID NO: 2992881 - RNA, 15 nt, Human
gugcauuaucuagau

SEQ ID NO: 2992882 - RNA, 19 nt, Human
gugcauguguguucaugca

SEQ ID NO: 2992883 - RNA, 23 nt, Human
gugcauuaucuagauacuguauc

SEQ ID NO: 2992884 - RNA, 21 nt, Human
aacuucagcgguuuauauaag

SEQ ID NO: 2992885 - RNA, 18 nt, Human
aacuuccagauccuggaa

SEQ ID NO: 2992886 - RNA, 13 nt, Human
aacuuccaauuua

SEQ ID NO: 2992887 - RNA, 14 nt, Human
gugauggggcccug

SEQ ID NO: 2992888 - RNA, 16 nt, Human
gugauggggcccugcc

SEQ ID NO: 2992889 - RNA, 17 nt, Human
gugauggggcccugccu

SEQ ID NO: 2992890 - RNA, 18 nt, Human
gugauggggcccugccuc

SEQ ID NO: 2992891 - RNA, 17 nt, Human
gugaugggaaagcauug

SEQ ID NO: 2992892 - RNA, 22 nt, Human
gugaugcgcaugucacggaggg

SEQ ID NO: 2992893 - RNA, 14 nt, Human
gugaugagaggaaa

SEQ ID NO: 2992894 - RNA, 16 nt, Human
gugaugagaggaaauc

SEQ ID NO: 2992895 - RNA, 17 nt, Human
gucuucuauuuauuuau

SEQ ID NO: 2992896 - RNA, 12 nt, Human
gucuucuauuua

SEQ ID NO: 2992897 - RNA, 14 nt, Human
gucuucuauuuauu

SEQ ID NO: 2992898 - RNA, 16 nt, Human
gucuuucacauuuaaa

SEQ ID NO: 2992899 - RNA, 18 nt, Human
gucuuuggacccugaggc

SEQ ID NO: 2992900 - RNA, 17 nt, Human
aaccugaggauucuauu

SEQ ID NO: 2992901 - RNA, 20 nt, Human
aaccugagccccaaaaggua

SEQ ID NO: 2992902 - RNA, 14 nt, Human
gucuggcccuuccu

SEQ ID NO: 2992903 - RNA, 12 nt, Human
aacucauuucua

SEQ ID NO: 2992904 - RNA, 12 nt, Human
aacuccuggccu

SEQ ID NO: 2992905 - RNA, 15 nt, Human
aacucuccuccagag

SEQ ID NO: 2992906 - RNA, 18 nt, Human
aacucuccuccagaguca

SEQ ID NO: 2992907 - RNA, 16 nt, Human
aacucuccucugcugc

SEQ ID NO: 2992908 - RNA, 23 nt, Human
gugaaccaccacacccagcccac

SEQ ID NO: 2992909 - RNA, 22 nt, Human
gugaaccaccacacccagccca

SEQ ID NO: 2992910 - RNA, 20 nt, Human
aacuacauuagguugugaau

SEQ ID NO: 2992911 - RNA, 12 nt, Human
aaccugugucuc

SEQ ID NO: 2992912 - RNA, 18 nt, Human
aaccuugaaaacuuuaug

SEQ ID NO: 2992913 - RNA, 21 nt, Human
aacuagaguuuagcuggaaaa

SEQ ID NO: 2992914 - RNA, 23 nt, Human
aacuaucucauuuccaagcaagu

SEQ ID NO: 2992915 - RNA, 18 nt, Human
aaccugagccccaaaagg

SEQ ID NO: 2992916 - RNA, 12 nt, Human
aaccucuaaauu

SEQ ID NO: 2992917 - RNA, 10 nt, Human
aacccagcuc

SEQ ID NO: 2992918 - RNA, 23 nt, Human
aacccaaauguucaucaaugaau

SEQ ID NO: 2992919 - RNA, 18 nt, Human
aacccaaguccaagcaua

SEQ ID NO: 2992920 - RNA, 17 nt, Human
aaccaucauugaaaucu

SEQ ID NO: 2992921 - RNA, 18 nt, Human
aaccaucauugaaaucuu

SEQ ID NO: 2992922 - RNA, 21 nt, Human
aaccaccacacccagcccacu

SEQ ID NO: 2992923 - RNA, 12 nt, Human
aaccaucauuga

SEQ ID NO: 2992924 - RNA, 19 nt, Human
aaccaccacacccagccca

SEQ ID NO: 2992925 - RNA, 15 nt, Human
aaccaagucaaguga

SEQ ID NO: 2992926 - RNA, 17 nt, Human
accaagaauugauuggg

SEQ ID NO: 2992927 - RNA, 19 nt, Human
accaaggcugauuaaacca

SEQ ID NO: 2992928 - RNA, 17 nt, Human
acauuucucauguugaa

SEQ ID NO: 2992929 - RNA, 20 nt, Human
accaaggcugauuaaaccaa

SEQ ID NO: 2992930 - RNA, 12 nt, Human
accagcagagca

SEQ ID NO: 2992931 - RNA, 13 nt, Human
accagcagagcac

SEQ ID NO: 2992932 - RNA, 14 nt, Human
accagcagaaaugc

SEQ ID NO: 2992933 - RNA, 17 nt, Human
accagccccagugccca

SEQ ID NO: 2992934 - RNA, 16 nt, Human
accagccccagugccc

SEQ ID NO: 2992935 - RNA, 19 nt, Human
accagccccagugcccaca

SEQ ID NO: 2992936 - RNA, 18 nt, Human
accagccccagugcccac

SEQ ID NO: 2992937 - RNA, 20 nt, Human
accagccccagugcccacag

SEQ ID NO: 2992938 - RNA, 19 nt, Human
acaugccuaccaauauuua

SEQ ID NO: 2992939 - RNA, 18 nt, Human
acaugccuaccaauauuu

SEQ ID NO: 2992940 - RNA, 19 nt, Human
acaugccucucucaggcca

SEQ ID NO: 2992941 - RNA, 23 nt, Human
acaugucuuuucuugcaugaggc

SEQ ID NO: 2992942 - RNA, 15 nt, Human
acccacccccaccca

SEQ ID NO: 2992943 - RNA, 17 nt, Human
acccacccccacccaag

SEQ ID NO: 2992944 - RNA, 14 nt, Human
accaugaaagacuu

SEQ ID NO: 2992945 - RNA, 12 nt, Human
accaugaaagac

SEQ ID NO: 2992946 - RNA, 19 nt, Human
accaugaaagacuucucua

SEQ ID NO: 2992947 - RNA, 15 nt, Human
acccacccuccuuuc

SEQ ID NO: 2992948 - RNA, 13 nt, Human
acccaugcugccc

SEQ ID NO: 2992949 - RNA, 14 nt, Human
accaucaagccacc

SEQ ID NO: 2992950 - RNA, 23 nt, Human
accaucauugaaaucuuuuugcu

SEQ ID NO: 2992951 - RNA, 15 nt, Human
accaucauugaaauc

SEQ ID NO: 2992952 - RNA, 12 nt, Human
accaucauugaa

SEQ ID NO: 2992953 - RNA, 15 nt, Human
accaucaagccacca

SEQ ID NO: 2992954 - RNA, 14 nt, Human
acaugccuaccaau

SEQ ID NO: 2992955 - RNA, 17 nt, Human
acaugcaaggucauuuu

SEQ ID NO: 2992956 - RNA, 15 nt, Human
acaugccucucucag

SEQ ID NO: 2992957 - RNA, 16 nt, Human
acaugccucucucagg

SEQ ID NO: 2992958 - RNA, 17 nt, Human
acaugccucucucaggc

SEQ ID NO: 2992959 - RNA, 18 nt, Human
acaugccucucucaggcc

SEQ ID NO: 2992960 - RNA, 16 nt, Human
acaugcaaggucauuu

SEQ ID NO: 2992961 - RNA, 20 nt, Human
acaucccuuaccugggaaag

SEQ ID NO: 2992962 - RNA, 16 nt, Human
acauaagauaaaugug

SEQ ID NO: 2992963 - RNA, 15 nt, Human
acauaagauaaaugu

SEQ ID NO: 2992964 - RNA, 14 nt, Human
acagcucuguccug

SEQ ID NO: 2992965 - RNA, 23 nt, Human
acagcuccuucuguccuacucug

SEQ ID NO: 2992966 - RNA, 18 nt, Human
acagcuccuucuguccua

SEQ ID NO: 2992967 - RNA, 16 nt, Human
acagcuccuucugucc

SEQ ID NO: 2992968 - RNA, 17 nt, Human
acagaggggguggccuc

SEQ ID NO: 2992969 - RNA, 18 nt, Human
acagaggggguggccucc

SEQ ID NO: 2992970 - RNA, 19 nt, Human
acagaggggguggccuccc

SEQ ID NO: 2992971 - RNA, 15 nt, Human
acagcuccuucuguc

SEQ ID NO: 2992972 - RNA, 17 nt, Human
acagcucuguccuggga

SEQ ID NO: 2992973 - RNA, 16 nt, Human
acagcucuguccuggg

SEQ ID NO: 2992974 - RNA, 13 nt, Human
acagcucuguccu

SEQ ID NO: 2992975 - RNA, 23 nt, Human
acaggcaagcaccuccugccucg

SEQ ID NO: 2992976 - RNA, 20 nt, Human
acaggcaagcaccuccugcc

SEQ ID NO: 2992977 - RNA, 12 nt, Human
acagggccucug

SEQ ID NO: 2992978 - RNA, 17 nt, Human
acagggccucugcggag

SEQ ID NO: 2992979 - RNA, 13 nt, Human
acagggccucugc

SEQ ID NO: 2992980 - RNA, 19 nt, Human
acaggcaagcaccuccugc

SEQ ID NO: 2992981 - RNA, 14 nt, Human
acaggcaaugcugg

SEQ ID NO: 2992982 - RNA, 23 nt, Human
acaggugugagucaccaagccca

SEQ ID NO: 2992983 - RNA, 22 nt, Human
acaggugugagucaccaagccc

SEQ ID NO: 2992984 - RNA, 19 nt, Human
acaggugugaaccaccaca

SEQ ID NO: 2992985 - RNA, 22 nt, Human
acagugagucgaggacagggag

SEQ ID NO: 2992986 - RNA, 21 nt, Human
acagugauuaccagggacuga

SEQ ID NO: 2992987 - RNA, 20 nt, Human
acagugauuaccagggacug

SEQ ID NO: 2992988 - RNA, 23 nt, Human
acagugagucgaggacagggagg

SEQ ID NO: 2992989 - RNA, 15 nt, Human
acaguggggaaugaa

SEQ ID NO: 2992990 - RNA, 19 nt, Human
acaguggggaaugaagaua

SEQ ID NO: 2992991 - RNA, 21 nt, Human
aauuuccugggagcuuuugua

SEQ ID NO: 2992992 - RNA, 18 nt, Human
aauuuccugggagcuuuu

SEQ ID NO: 2992993 - RNA, 17 nt, Human
aauuuccugggagcuuu

SEQ ID NO: 2992994 - RNA, 19 nt, Human
aaugucacaggcaggucca

SEQ ID NO: 2992995 - RNA, 16 nt, Human
aaugucacaggcaggu

SEQ ID NO: 2992996 - RNA, 12 nt, Human
aauuguaaggaa

SEQ ID NO: 2992997 - RNA, 16 nt, Human
aauuguaaggaaugau

SEQ ID NO: 2992998 - RNA, 17 nt, Human
aauuuauuauggcacau

SEQ ID NO: 2992999 - RNA, 20 nt, Human
aauuuauuuaugggauccug

SEQ ID NO: 2993000 - RNA, 16 nt, Human
aauuuugugcccccau

SEQ ID NO: 2993001 - RNA, 18 nt, Human
aauuuugugaagcaaaau

SEQ ID NO: 2993002 - RNA, 17 nt, Human
aauuuugugaagcaaaa

SEQ ID NO: 2993003 - RNA, 13 nt, Human
aauuuugugaagc

SEQ ID NO: 2993004 - RNA, 14 nt, Human
aauuuugauguuuu

SEQ ID NO: 2993005 - RNA, 13 nt, Human
acaaaaugaaacg

SEQ ID NO: 2993006 - RNA, 22 nt, Human
acaaaaugaaacgcaaccacca

SEQ ID NO: 2993007 - RNA, 14 nt, Human
acaaaauggaauac

SEQ ID NO: 2993008 - RNA, 13 nt, Human
acaaaauggaaua

SEQ ID NO: 2993009 - RNA, 13 nt, Human
acaagaaaugaaa

SEQ ID NO: 2993010 - RNA, 16 nt, Human
acaagaaaugaaagca

SEQ ID NO: 2993011 - RNA, 15 nt, Human
acaagaaaugaaagc

SEQ ID NO: 2993012 - RNA, 21 nt, Human
acaaggaugaauuaaguuuuu

SEQ ID NO: 2993013 - RNA, 16 nt, Human
acagaagcuccaggua

SEQ ID NO: 2993014 - RNA, 18 nt, Human
acagaagaaaauagaauu

SEQ ID NO: 2993015 - RNA, 14 nt, Human
acagacaaagcgug

SEQ ID NO: 2993016 - RNA, 13 nt, Human
acagacaaagcgu

SEQ ID NO: 2993017 - RNA, 21 nt, Human
acagaggccaugggccuccug

SEQ ID NO: 2993018 - RNA, 14 nt, Human
acagaggggguggc

SEQ ID NO: 2993019 - RNA, 17 nt, Human
acagaggccaugggccu

SEQ ID NO: 2993020 - RNA, 23 nt, Human
acagaggcagccccauucugccu

SEQ ID NO: 2993021 - RNA, 13 nt, Human
acagaggcagccc

SEQ ID NO: 2993022 - RNA, 17 nt, Human
acacugugcugagucug

SEQ ID NO: 2993023 - RNA, 22 nt, Human
acacugugcugagucugaaggc

SEQ ID NO: 2993024 - RNA, 15 nt, Human
acacgaauauugcug

SEQ ID NO: 2993025 - RNA, 21 nt, Human
acacgaauauugcugauggug

SEQ ID NO: 2993026 - RNA, 20 nt, Human
acaccacuacauucuguuaa

SEQ ID NO: 2993027 - RNA, 17 nt, Human
acaccacuacauucugu

SEQ ID NO: 2993028 - RNA, 12 nt, Human
acacgaauauug

SEQ ID NO: 2993029 - RNA, 14 nt, Human
acacgaauauugcu

SEQ ID NO: 2993030 - RNA, 15 nt, Human
acaccacuacauucu

SEQ ID NO: 2993031 - RNA, 14 nt, Human
acaccacuacauuc

SEQ ID NO: 2993032 - RNA, 18 nt, Human
acacauuuuuuaaaugca

SEQ ID NO: 2993033 - RNA, 16 nt, Human
acacauuuuuuaaaug

SEQ ID NO: 2993034 - RNA, 14 nt, Human
acacauuuuuuaaa

SEQ ID NO: 2993035 - RNA, 21 nt, Human
acacagcucuucuccaggcug

SEQ ID NO: 2993036 - RNA, 20 nt, Human
acacagcucuucuccaggcu

SEQ ID NO: 2993037 - RNA, 19 nt, Human
acacaaaaguuucucuuuu

SEQ ID NO: 2993038 - RNA, 19 nt, Human
acacagcucuucuccaggc

SEQ ID NO: 2993039 - RNA, 20 nt, Human
acaaggaugaucuaggaaga

SEQ ID NO: 2993040 - RNA, 16 nt, Human
acaaggauugcuacug

SEQ ID NO: 2993041 - RNA, 14 nt, Human
acaauuuauuaugg

SEQ ID NO: 2993042 - RNA, 13 nt, Human
acaauuuauuaug

SEQ ID NO: 2993043 - RNA, 19 nt, Human
acggacacucaaaagcugg

SEQ ID NO: 2993044 - RNA, 19 nt, Human
acggacgaaccuugaaaac

SEQ ID NO: 2993045 - RNA, 15 nt, Human
acggaauaguuggcu

SEQ ID NO: 2993046 - RNA, 15 nt, Human
acggaagagccuugc

SEQ ID NO: 2993047 - RNA, 16 nt, Human
acggaagagccuugcg

SEQ ID NO: 2993048 - RNA, 18 nt, Human
acgcuggagugcagugag

SEQ ID NO: 2993049 - RNA, 19 nt, Human
acgcuggagugcagugagc

SEQ ID NO: 2993050 - RNA, 23 nt, Human
acgucugacaggcaaugcuggcu

SEQ ID NO: 2993051 - RNA, 15 nt, Human
acgucugacaggcaa

SEQ ID NO: 2993052 - RNA, 15 nt, Human
acuaauagacaauuu

SEQ ID NO: 2993053 - RNA, 11 nt, Human
accugugucuc

SEQ ID NO: 2993054 - RNA, 18 nt, Human
acuaguauuucuaugaaa

SEQ ID NO: 2993055 - RNA, 19 nt, Human
acuaguauuucuaugaaau

SEQ ID NO: 2993056 - RNA, 16 nt, Human
acuauuguuagucucu

SEQ ID NO: 2993057 - RNA, 17 nt, Human
acuagggaagauaauau

SEQ ID NO: 2993058 - RNA, 21 nt, Human
accucuugagccuugaacuuu

SEQ ID NO: 2993059 - RNA, 20 nt, Human
accucuugagccuugaacuu

SEQ ID NO: 2993060 - RNA, 19 nt, Human
accucuugagccuugaacu

SEQ ID NO: 2993061 - RNA, 17 nt, Human
accucuugagccuugaa

SEQ ID NO: 2993062 - RNA, 18 nt, Human
accucugccucagaaaac

SEQ ID NO: 2993063 - RNA, 17 nt, Human
accucugccucagaaaa

SEQ ID NO: 2993064 - RNA, 11 nt, Human
accugccaggg

SEQ ID NO: 2993065 - RNA, 12 nt, Human
accugccaggga

SEQ ID NO: 2993066 - RNA, 13 nt, Human
accugccagggac

SEQ ID NO: 2993067 - RNA, 15 nt, Human
accugccagggacag

SEQ ID NO: 2993068 - RNA, 16 nt, Human
accugccagggacaga

SEQ ID NO: 2993069 - RNA, 18 nt, Human
accugccagggacagagg

SEQ ID NO: 2993070 - RNA, 16 nt, Human
accgugaggccagaga

SEQ ID NO: 2993071 - RNA, 17 nt, Human
accgugaggccagagac

SEQ ID NO: 2993072 - RNA, 12 nt, Human
accucaggccug

SEQ ID NO: 2993073 - RNA, 13 nt, Human
accucaggccugg

SEQ ID NO: 2993074 - RNA, 14 nt, Human
accucaggccuggg

SEQ ID NO: 2993075 - RNA, 22 nt, Human
accucaggccugggggcugggc

SEQ ID NO: 2993076 - RNA, 18 nt, Human
accucaggugagaagcag

SEQ ID NO: 2993077 - RNA, 22 nt, Human
acccugugauggggcccugccu

SEQ ID NO: 2993078 - RNA, 16 nt, Human
accccacacacgccag

SEQ ID NO: 2993079 - RNA, 14 nt, Human
acccaugcugcccu

SEQ ID NO: 2993080 - RNA, 15 nt, Human
acccaugcugcccug

SEQ ID NO: 2993081 - RNA, 18 nt, Human
accccaagacucccauga

SEQ ID NO: 2993082 - RNA, 17 nt, Human
accccaagacucccaug

SEQ ID NO: 2993083 - RNA, 16 nt, Human
accccaagacucccau

SEQ ID NO: 2993084 - RNA, 15 nt, Human
accccaagacuccca

SEQ ID NO: 2993085 - RNA, 17 nt, Human
acccuguuaccauuuug

SEQ ID NO: 2993086 - RNA, 17 nt, Human
accggcuggccuggccc

SEQ ID NO: 2993087 - RNA, 18 nt, Human
accggcuggccuggcccc

SEQ ID NO: 2993088 - RNA, 19 nt, Human
accggcuggccuggccccu

SEQ ID NO: 2993089 - RNA, 20 nt, Human
accgggcacucagaagacac

SEQ ID NO: 2993090 - RNA, 14 nt, Human
accggcuggccugg

SEQ ID NO: 2993091 - RNA, 15 nt, Human
accggcuggccuggc

SEQ ID NO: 2993092 - RNA, 14 nt, Human
accgugaggccaga

SEQ ID NO: 2993093 - RNA, 19 nt, Human
accgggccacagagaaagu

SEQ ID NO: 2993094 - RNA, 15 nt, Human
accgggccacagaga

SEQ ID NO: 2993095 - RNA, 15 nt, Human
acucuuaagaagacu

SEQ ID NO: 2993096 - RNA, 14 nt, Human
acucuuaagaagac

SEQ ID NO: 2993097 - RNA, 20 nt, Human
acucuuaagaagacugcauu

SEQ ID NO: 2993098 - RNA, 17 nt, Human
acucugucucaguccau

SEQ ID NO: 2993099 - RNA, 15 nt, Human
acucugucucagucc

SEQ ID NO: 2993100 - RNA, 19 nt, Human
acucugugucagguggggc

SEQ ID NO: 2993101 - RNA, 21 nt, Human
acucugugucagguggggcag

SEQ ID NO: 2993102 - RNA, 19 nt, Human
acucugucucaaaaaaaca

SEQ ID NO: 2993103 - RNA, 19 nt, Human
acuauuuauuuacaaaugu

SEQ ID NO: 2993104 - RNA, 23 nt, Human
acugauuuuuuuuuccuucagug

SEQ ID NO: 2993105 - RNA, 21 nt, Human
acugauuuuuuuuuccuucag

SEQ ID NO: 2993106 - RNA, 22 nt, Human
acugauuuuuuuuuccuucagu

SEQ ID NO: 2993107 - RNA, 23 nt, Human
acugacauuguuggccaaagcca

SEQ ID NO: 2993108 - RNA, 22 nt, Human
acugacauuguuggccaaagcc

SEQ ID NO: 2993109 - RNA, 13 nt, Human
acugaucucucgu

SEQ ID NO: 2993110 - RNA, 22 nt, Human
acugauggcuaauguacugcau

SEQ ID NO: 2993111 - RNA, 22 nt, Human
acugaugggcaacccccagccu

SEQ ID NO: 2993112 - RNA, 12 nt, Human
acugaugggcaa

SEQ ID NO: 2993113 - RNA, 15 nt, Human
acugcccggcagggu

SEQ ID NO: 2993114 - RNA, 14 nt, Human
acugccauccuggc

SEQ ID NO: 2993115 - RNA, 20 nt, Human
acugcuuuuggucuguguga

SEQ ID NO: 2993116 - RNA, 16 nt, Human
acugcuuuuggucugu

SEQ ID NO: 2993117 - RNA, 15 nt, Human
acugcuuuuggucug

SEQ ID NO: 2993118 - RNA, 14 nt, Human
acugcuuuuggucu

SEQ ID NO: 2993119 - RNA, 22 nt, Human
acugcccggcaggguccuagaa

SEQ ID NO: 2993120 - RNA, 19 nt, Human
acugccauccuggcccagg

SEQ ID NO: 2993121 - RNA, 22 nt, Human
acuugggaggcugagaugggag

SEQ ID NO: 2993122 - RNA, 17 nt, Human
acuuuaugcuaagugaa

SEQ ID NO: 2993123 - RNA, 12 nt, Human
acuuuaugcuaa

SEQ ID NO: 2993124 - RNA, 14 nt, Human
acuuaaaaaugguu

SEQ ID NO: 2993125 - RNA, 13 nt, Human
acuuaaaaauggu

SEQ ID NO: 2993126 - RNA, 14 nt, Human
acuuaaauaaugug

SEQ ID NO: 2993127 - RNA, 19 nt, Human
acuucaaauccuugaagau

SEQ ID NO: 2993128 - RNA, 18 nt, Human
acuucagcgguuuauaua

SEQ ID NO: 2993129 - RNA, 17 nt, Human
acuucagcgguuuauau

SEQ ID NO: 2993130 - RNA, 20 nt, Human
acuucaaauccuugaagauu

SEQ ID NO: 2993131 - RNA, 19 nt, Human
acuucagcgguuuauauaa

SEQ ID NO: 2993132 - RNA, 20 nt, Human
acuucugccauauucuguug

SEQ ID NO: 2993133 - RNA, 19 nt, Human
acuucugccauauucuguu

SEQ ID NO: 2993134 - RNA, 18 nt, Human
acuucuuauacauuugau

SEQ ID NO: 2993135 - RNA, 17 nt, Human
acuucuuauacauuuga

SEQ ID NO: 2993136 - RNA, 12 nt, Human
aaagugcccagc

SEQ ID NO: 2993137 - RNA, 16 nt, Human
aaauaaacgucuuaaa

SEQ ID NO: 2993138 - RNA, 15 nt, Human
aaauaaacgucuuaa

SEQ ID NO: 2993139 - RNA, 11 nt, Human
aaauaaauuau

SEQ ID NO: 2993140 - RNA, 19 nt, Human
aaagcauuguaaaugugcu

SEQ ID NO: 2993141 - RNA, 20 nt, Human
aaagcauuguaaaugugcuu

SEQ ID NO: 2993142 - RNA, 15 nt, Human
aaagccaaagcuagg

SEQ ID NO: 2993143 - RNA, 19 nt, Human
aaaggcagaagcaacccaa

SEQ ID NO: 2993144 - RNA, 22 nt, Human
aaaggcuccaggagcagccaca

SEQ ID NO: 2993145 - RNA, 21 nt, Human
aaaggcuccaggagcagccac

SEQ ID NO: 2993146 - RNA, 14 nt, Human
aaaggcuaccuuug

SEQ ID NO: 2993147 - RNA, 17 nt, Human
aaaggcuaccuuuguau

SEQ ID NO: 2993148 - RNA, 14 nt, Human
aaaggcuccaggag

SEQ ID NO: 2993149 - RNA, 15 nt, Human
aaagauacaguuacu

SEQ ID NO: 2993150 - RNA, 21 nt, Human
aaacccugucucuacuaaaaa

SEQ ID NO: 2993151 - RNA, 17 nt, Human
aaaccccaucucuacaa

SEQ ID NO: 2993152 - RNA, 18 nt, Human
aaacccagcucuggucca

SEQ ID NO: 2993153 - RNA, 17 nt, Human
aaacucuugaccucagg

SEQ ID NO: 2993154 - RNA, 14 nt, Human
aaacccuucagugc

SEQ ID NO: 2993155 - RNA, 20 nt, Human
aaacugauuuuuuuuuccuu

SEQ ID NO: 2993156 - RNA, 13 nt, Human
aaacugauuuuuu

SEQ ID NO: 2993157 - RNA, 19 nt, Human
aaacugauuuuuuuuuccu

SEQ ID NO: 2993158 - RNA, 13 nt, Human
aaagaaacauuug

SEQ ID NO: 2993159 - RNA, 11 nt, Human
aaacagggccu

SEQ ID NO: 2993160 - RNA, 17 nt, Human
aaacagcuaaugggaca

SEQ ID NO: 2993161 - RNA, 15 nt, Human
aaaauuagccaagug

SEQ ID NO: 2993162 - RNA, 18 nt, Human
aaaauuauggaaacagau

SEQ ID NO: 2993163 - RNA, 14 nt, Human
aaaauuauggaaac

SEQ ID NO: 2993164 - RNA, 17 nt, Human
aaaauuauggaaacaga

SEQ ID NO: 2993165 - RNA, 15 nt, Human
aaaauuauggaaaca

SEQ ID NO: 2993166 - RNA, 19 nt, Human
aaaauccauacauuugugu

SEQ ID NO: 2993167 - RNA, 18 nt, Human
aacagcaacacaaagcuu

SEQ ID NO: 2993168 - RNA, 17 nt, Human
aacagcaacacaaagcu

SEQ ID NO: 2993169 - RNA, 16 nt, Human
aacagcuaaugggaca

SEQ ID NO: 2993170 - RNA, 20 nt, Human
aacaugcuguacauacuuuu

SEQ ID NO: 2993171 - RNA, 19 nt, Human
aacaugcuguacauacuuu

SEQ ID NO: 2993172 - RNA, 18 nt, Human
aacaugcuguacauacuu

SEQ ID NO: 2993173 - RNA, 21 nt, Human
aacaugcuguacauacuuuuu

SEQ ID NO: 2993174 - RNA, 22 nt, Human
aacaugcuacacacugcauguu

SEQ ID NO: 2993175 - RNA, 15 nt, Human
aacauggaaguacua

SEQ ID NO: 2993176 - RNA, 17 nt, Human
aaccaguguuguggauu

SEQ ID NO: 2993177 - RNA, 19 nt, Human
aaccaguguuguggauuua

SEQ ID NO: 2993178 - RNA, 13 nt, Human
aacccuucagugc

SEQ ID NO: 2993179 - RNA, 21 nt, Human
aaccgagggggcugcucccac

SEQ ID NO: 2993180 - RNA, 20 nt, Human
aaccgagggggcugcuccca

SEQ ID NO: 2993181 - RNA, 19 nt, Human
aaccgagggggcugcuccc

SEQ ID NO: 2993182 - RNA, 18 nt, Human
aacugaaguucuauuuau

SEQ ID NO: 2993183 - RNA, 16 nt, Human
aacucauauuuucaug

SEQ ID NO: 2993184 - RNA, 15 nt, Human
aacucauauuuucau

SEQ ID NO: 2993185 - RNA, 18 nt, Human
aacucauauuuucaugcu

SEQ ID NO: 2993186 - RNA, 23 nt, Human
aacugagaugugaacacaucagc

SEQ ID NO: 2993187 - RNA, 15 nt, Human
aacucaccccagccc

SEQ ID NO: 2993188 - RNA, 18 nt, Human
aacucaccccagccccaa

SEQ ID NO: 2993189 - RNA, 16 nt, Human
aacucaccccagcccc

SEQ ID NO: 2993190 - RNA, 17 nt, Human
aacucaccccagcccca

SEQ ID NO: 2993191 - RNA, 17 nt, Human
aacucaaacucuuaaaa

SEQ ID NO: 2993192 - RNA, 14 nt, Human
aacgaaagaaggca

SEQ ID NO: 2993193 - RNA, 14 nt, Human
aaaucuuaacuuga

SEQ ID NO: 2993194 - RNA, 19 nt, Human
aaaucuccaaaauaaaacu

SEQ ID NO: 2993195 - RNA, 22 nt, Human
aaaucuccaaaauaaaacuuuu

SEQ ID NO: 2993196 - RNA, 15 nt, Human
aaauggacguguuau

SEQ ID NO: 2993197 - RNA, 17 nt, Human
aaauggacguguuauga

SEQ ID NO: 2993198 - RNA, 14 nt, Human
aaauggacguguua

SEQ ID NO: 2993199 - RNA, 17 nt, Human
aaauggaauacucuuau

SEQ ID NO: 2993200 - RNA, 20 nt, Human
aaauguucaucaaugaauga

SEQ ID NO: 2993201 - RNA, 17 nt, Human
aaauguucaucaaugaa

SEQ ID NO: 2993202 - RNA, 12 nt, Human
aacacaucagcu

SEQ ID NO: 2993203 - RNA, 21 nt, Human
aacacauacaggaagguagaa

SEQ ID NO: 2993204 - RNA, 22 nt, Human
aacaaaccuguuucugcagcca

SEQ ID NO: 2993205 - RNA, 14 nt, Human
aaauuaacuuuuau

SEQ ID NO: 2993206 - RNA, 13 nt, Human
aaauuaacuuuua

SEQ ID NO: 2993207 - RNA, 22 nt, Human
aaauugacacuuaaaaaugguu

SEQ ID NO: 2993208 - RNA, 12 nt, Human
aaauuaacuuuu

SEQ ID NO: 2993209 - RNA, 13 nt, Human
aauauaaaaauaa

SEQ ID NO: 2993210 - RNA, 19 nt, Human
aauagaaaguugcaaggca

SEQ ID NO: 2993211 - RNA, 20 nt, Human
aauacgugggcauucaaaug

SEQ ID NO: 2993212 - RNA, 19 nt, Human
aauacgugggcauucaaau

SEQ ID NO: 2993213 - RNA, 21 nt, Human
aauaccugucccccugacaac

SEQ ID NO: 2993214 - RNA, 16 nt, Human
aauauaggaacuuaaa

SEQ ID NO: 2993215 - RNA, 17 nt, Human
aauaaaauuuuaguuga

SEQ ID NO: 2993216 - RNA, 10 nt, Human
aauaaaccau

SEQ ID NO: 2993217 - RNA, 15 nt, Human
aauaaacgucuuaaa

SEQ ID NO: 2993218 - RNA, 17 nt, Human
aaguucugcagauaaac

SEQ ID NO: 2993219 - RNA, 22 nt, Human
aaguugauaugccuuuucccaa

SEQ ID NO: 2993220 - RNA, 13 nt, Human
aagugcugcauuu

SEQ ID NO: 2993221 - RNA, 19 nt, Human
aaguauagaaaaucuucau

SEQ ID NO: 2993222 - RNA, 18 nt, Human
aaguauagaaaaucuuca

SEQ ID NO: 2993223 - RNA, 16 nt, Human
aaguauagaaaaucuu

SEQ ID NO: 2993224 - RNA, 12 nt, Human
aaguauagaaaa

SEQ ID NO: 2993225 - RNA, 14 nt, Human
aauaauguuucaaa

SEQ ID NO: 2993226 - RNA, 12 nt, Human
aauaauguuuca

SEQ ID NO: 2993227 - RNA, 15 nt, Human
aaucaaauaugcaaa

SEQ ID NO: 2993228 - RNA, 16 nt, Human
aaucaaauaugcaaag

SEQ ID NO: 2993229 - RNA, 22 nt, Human
aaucaaauaugcaaagcacuga

SEQ ID NO: 2993230 - RNA, 22 nt, Human
aaucauuucugcaucagcugcu

SEQ ID NO: 2993231 - RNA, 14 nt, Human
aaugauaacuggaa

SEQ ID NO: 2993232 - RNA, 16 nt, Human
aaugauaacuggaaac

SEQ ID NO: 2993233 - RNA, 15 nt, Human
aaugauaacuggaaa

SEQ ID NO: 2993234 - RNA, 12 nt, Human
aaugauuaauua

SEQ ID NO: 2993235 - RNA, 13 nt, Human
aaugauuaauuaa

SEQ ID NO: 2993236 - RNA, 15 nt, Human
aaugauagcuacugu

SEQ ID NO: 2993237 - RNA, 17 nt, Human
aauccauacauuugugu

SEQ ID NO: 2993238 - RNA, 14 nt, Human
aauccauacauuug

SEQ ID NO: 2993239 - RNA, 16 nt, Human
aauccauacauuugug

SEQ ID NO: 2993240 - RNA, 15 nt, Human
aauccaaugaaauga

SEQ ID NO: 2993241 - RNA, 18 nt, Human
aaucuccaaaauaaaacu

SEQ ID NO: 2993242 - RNA, 17 nt, Human
aaugggggugcauuuga

SEQ ID NO: 2993243 - RNA, 15 nt, Human
aaugggggugcauuu

SEQ ID NO: 2993244 - RNA, 15 nt, Human
aaugucacaggcagg

SEQ ID NO: 2993245 - RNA, 23 nt, Human
aaugcucuuuacuucauggacuu

SEQ ID NO: 2993246 - RNA, 14 nt, Human
aaugggagcucaug

SEQ ID NO: 2993247 - RNA, 13 nt, Human
aaugggacacuaa

SEQ ID NO: 2993248 - RNA, 23 nt, Human
aaugcgugcauaccacuuuuguu

SEQ ID NO: 2993249 - RNA, 21 nt, Human
aaugcgugcauaccacuuuug

SEQ ID NO: 2993250 - RNA, 10 nt, Human
aagcagagug

SEQ ID NO: 2993251 - RNA, 14 nt, Human
aagcagaaugugau

SEQ ID NO: 2993252 - RNA, 21 nt, Human
aagcagaggaaggagaggaga

SEQ ID NO: 2993253 - RNA, 14 nt, Human
aagcagaguggcag

SEQ ID NO: 2993254 - RNA, 11 nt, Human
aagcagagugg

SEQ ID NO: 2993255 - RNA, 15 nt, Human
aagcagggacuugaa

SEQ ID NO: 2993256 - RNA, 20 nt, Human
aagcagaguggcagucuuca

SEQ ID NO: 2993257 - RNA, 19 nt, Human
aagccaccaacauacuccc

SEQ ID NO: 2993258 - RNA, 19 nt, Human
aagauuuugaaauuuuuau

SEQ ID NO: 2993259 - RNA, 19 nt, Human
aagauucuauguuaauauu

SEQ ID NO: 2993260 - RNA, 21 nt, Human
aagauucuauguuaauauuuu

SEQ ID NO: 2993261 - RNA, 22 nt, Human
aagauucuauguuaauauuuua

SEQ ID NO: 2993262 - RNA, 21 nt, Human
aagauucaaugccccugaauu

SEQ ID NO: 2993263 - RNA, 20 nt, Human
aagauucaaugccccugaau

SEQ ID NO: 2993264 - RNA, 20 nt, Human
aagauucauauuuacuucuu

SEQ ID NO: 2993265 - RNA, 20 nt, Human
aagauacugaaauaaacguc

SEQ ID NO: 2993266 - RNA, 16 nt, Human
aagauacugaaauaaa

SEQ ID NO: 2993267 - RNA, 14 nt, Human
aagauacugaaaua

SEQ ID NO: 2993268 - RNA, 15 nt, Human
aagacuuugguuauu

SEQ ID NO: 2993269 - RNA, 13 nt, Human
aagacuuugguua

SEQ ID NO: 2993270 - RNA, 23 nt, Human
aagacuuugguuauuuuacuuuu

SEQ ID NO: 2993271 - RNA, 17 nt, Human
aagacuuugguuauuuu

SEQ ID NO: 2993272 - RNA, 15 nt, Human
aagagaacuuccaga

SEQ ID NO: 2993273 - RNA, 13 nt, Human
aacuguuuagaug

SEQ ID NO: 2993274 - RNA, 23 nt, Human
aagacagugaaagaaaauaacaa

SEQ ID NO: 2993275 - RNA, 16 nt, Human
aagacuuuggaaagag

SEQ ID NO: 2993276 - RNA, 16 nt, Human
aaggaaugcaaagaug

SEQ ID NO: 2993277 - RNA, 15 nt, Human
aaggaaugcaaagau

SEQ ID NO: 2993278 - RNA, 23 nt, Human
aaggaaugauuaauuaaaacaca

SEQ ID NO: 2993279 - RNA, 16 nt, Human
aagcugcugacagugu

SEQ ID NO: 2993280 - RNA, 11 nt, Human
aagcugccagc

SEQ ID NO: 2993281 - RNA, 12 nt, Human
aagcugccagcc

SEQ ID NO: 2993282 - RNA, 22 nt, Human
aagcugccagccgagauagcca

SEQ ID NO: 2993283 - RNA, 14 nt, Human
aagcugcugacagu

SEQ ID NO: 2993284 - RNA, 20 nt, Human
aagcgugagccacugcaccg

SEQ ID NO: 2993285 - RNA, 17 nt, Human
aagcgugagccacugca

SEQ ID NO: 2993286 - RNA, 21 nt, Human
aagcgugagccacugcaccgg

SEQ ID NO: 2993287 - RNA, 19 nt, Human
aagccagauuuuccugaaa

SEQ ID NO: 2993288 - RNA, 21 nt, Human
aagccaccaacauacucccau

SEQ ID NO: 2993289 - RNA, 18 nt, Human
aagccagcaggcucucag

SEQ ID NO: 2993290 - RNA, 15 nt, Human
aagccagcaggcucu

SEQ ID NO: 2993291 - RNA, 16 nt, Human
aagcgauucuucugcu

SEQ ID NO: 2993292 - RNA, 16 nt, Human
aagcgugagccacugc

SEQ ID NO: 2993293 - RNA, 14 nt, Human
aagcgauucuucug

SEQ ID NO: 2993294 - RNA, 15 nt, Human
aagcgauucuucugc

SEQ ID NO: 2993295 - RNA, 23 nt, Human
aaggucuguuuuguguacuuuua

SEQ ID NO: 2993296 - RNA, 20 nt, Human
aaggucuguuuuguguacuu

SEQ ID NO: 2993297 - RNA, 19 nt, Human
aaggucuguuuuguguacu

SEQ ID NO: 2993298 - RNA, 12 nt, Human
aaguagaggagg

SEQ ID NO: 2993299 - RNA, 21 nt, Human
aagggauuuucagcccucaga

SEQ ID NO: 2993300 - RNA, 23 nt, Human
aagggauuuucagcccucagaau

SEQ ID NO: 2993301 - RNA, 15 nt, Human
aagggauuuucagcc

SEQ ID NO: 2993302 - RNA, 14 nt, Human
aagggauggcaaga

SEQ ID NO: 2993303 - RNA, 17 nt, Human
aagggauggcaagaugu

SEQ ID NO: 2993304 - RNA, 18 nt, Human
aagggacgcuacccggga

SEQ ID NO: 2993305 - RNA, 20 nt, Human
aagggacuuggaagcuccgc

SEQ ID NO: 2993306 - RNA, 17 nt, Human
agaugaaggucuguuuu

SEQ ID NO: 2993307 - RNA, 14 nt, Human
agaugaaggucugu

SEQ ID NO: 2993308 - RNA, 16 nt, Human
agaguggaauaagaca

SEQ ID NO: 2993309 - RNA, 22 nt, Human
agauucuuguauuuauuacaac

SEQ ID NO: 2993310 - RNA, 21 nt, Human
agauucuauguuaauauuuua

SEQ ID NO: 2993311 - RNA, 16 nt, Human
agauguagaggagaaa

SEQ ID NO: 2993312 - RNA, 19 nt, Human
agauguagaggagaaacug

SEQ ID NO: 2993313 - RNA, 14 nt, Human
agaugagugagcau

SEQ ID NO: 2993314 - RNA, 20 nt, Human
agcaaaggagauuggaagga

SEQ ID NO: 2993315 - RNA, 21 nt, Human
agauugcaacaggcugggcuu

SEQ ID NO: 2993316 - RNA, 20 nt, Human
agauugcaacaggcugggcu

SEQ ID NO: 2993317 - RNA, 23 nt, Human
agauugcaacaggcugggcuuca

SEQ ID NO: 2993318 - RNA, 19 nt, Human
agauugcaacaggcugggc

SEQ ID NO: 2993319 - RNA, 19 nt, Human
agauucuuuccugaggcug

SEQ ID NO: 2993320 - RNA, 21 nt, Human
agauucuuuccugaggcuggg

SEQ ID NO: 2993321 - RNA, 18 nt, Human
agauucuuuccugaggcu

SEQ ID NO: 2993322 - RNA, 24 nt, Human
agcaaaauuuuuucucuaggaaau

SEQ ID NO: 2993323 - RNA, 18 nt, Human
agcaaaagaugcuucuca

SEQ ID NO: 2993324 - RNA, 23 nt, Human
agcaaaauuuuuucucuaggaaa

SEQ ID NO: 2993325 - RNA, 21 nt, Human
agcacgauuucuguuuagaua

SEQ ID NO: 2993326 - RNA, 19 nt, Human
agcacgauuucuguuuaga

SEQ ID NO: 2993327 - RNA, 17 nt, Human
agcacgauuucuguuua

SEQ ID NO: 2993328 - RNA, 16 nt, Human
agcacagacccugccc

SEQ ID NO: 2993329 - RNA, 14 nt, Human
agcacagacccugc

SEQ ID NO: 2993330 - RNA, 15 nt, Human
agcacagacccugcc

SEQ ID NO: 2993331 - RNA, 12 nt, Human
agcacagacccu

SEQ ID NO: 2993332 - RNA, 15 nt, Human
agcaauuaugaaaau

SEQ ID NO: 2993333 - RNA, 17 nt, Human
agcaauuaugaaaauaa

SEQ ID NO: 2993334 - RNA, 19 nt, Human
agccccauucugccugccc

SEQ ID NO: 2993335 - RNA, 18 nt, Human
agccccauucugccugcc

SEQ ID NO: 2993336 - RNA, 17 nt, Human
agccccauucugccugc

SEQ ID NO: 2993337 - RNA, 17 nt, Human
agccccauccucuguac

SEQ ID NO: 2993338 - RNA, 23 nt, Human
agccccauccucuguacagagcc

SEQ ID NO: 2993339 - RNA, 15 nt, Human
agccccauccucugu

SEQ ID NO: 2993340 - RNA, 17 nt, Human
agcccgggcucugccuc

SEQ ID NO: 2993341 - RNA, 18 nt, Human
agcccgggcucugccucc

SEQ ID NO: 2993342 - RNA, 20 nt, Human
agcccgggcucugccuccca

SEQ ID NO: 2993343 - RNA, 21 nt, Human
agcccgggcucugccucccau

SEQ ID NO: 2993344 - RNA, 13 nt, Human
agccccacagccc

SEQ ID NO: 2993345 - RNA, 13 nt, Human
agcauccuggcac

SEQ ID NO: 2993346 - RNA, 16 nt, Human
agccagcaggcucuca

SEQ ID NO: 2993347 - RNA, 15 nt, Human
agcccaccccucaac

SEQ ID NO: 2993348 - RNA, 14 nt, Human
agcccaccuuggcu

SEQ ID NO: 2993349 - RNA, 16 nt, Human
agcccaccuuggcuca

SEQ ID NO: 2993350 - RNA, 14 nt, Human
agcccacgccccca

SEQ ID NO: 2993351 - RNA, 20 nt, Human
agcccacgcccccacuggug

SEQ ID NO: 2993352 - RNA, 23 nt, Human
agcccacgcccccacuggugaca

SEQ ID NO: 2993353 - RNA, 17 nt, Human
agccagaggagagagga

SEQ ID NO: 2993354 - RNA, 18 nt, Human
agccagaggagagaggac

SEQ ID NO: 2993355 - RNA, 14 nt, Human
agccagcaggcucu

SEQ ID NO: 2993356 - RNA, 13 nt, Human
agccagaggagag

SEQ ID NO: 2993357 - RNA, 15 nt, Human
agccagaggagagag

SEQ ID NO: 2993358 - RNA, 17 nt, Human
agcauccuggcacccgg

SEQ ID NO: 2993359 - RNA, 14 nt, Human
agcauccuggcacc

SEQ ID NO: 2993360 - RNA, 16 nt, Human
agccaaagcuaggccu

SEQ ID NO: 2993361 - RNA, 16 nt, Human
agacuggauaguccgu

SEQ ID NO: 2993362 - RNA, 16 nt, Human
agagagaccacuuuuc

SEQ ID NO: 2993363 - RNA, 13 nt, Human
agagccagggucu

SEQ ID NO: 2993364 - RNA, 13 nt, Human
agagcccaccuug

SEQ ID NO: 2993365 - RNA, 16 nt, Human
agacgcugugcugccc

SEQ ID NO: 2993366 - RNA, 20 nt, Human
agacugaguacguugugcau

SEQ ID NO: 2993367 - RNA, 18 nt, Human
agacucugucucagucca

SEQ ID NO: 2993368 - RNA, 22 nt, Human
agacugaguacguugugcauuu

SEQ ID NO: 2993369 - RNA, 13 nt, Human
agacucugucuca

SEQ ID NO: 2993370 - RNA, 18 nt, Human
agacucugucucaaaaaa

SEQ ID NO: 2993371 - RNA, 13 nt, Human
agaggaaugaagu

SEQ ID NO: 2993372 - RNA, 13 nt, Human
agagggccugcaa

SEQ ID NO: 2993373 - RNA, 16 nt, Human
agagggccugcaaggg

SEQ ID NO: 2993374 - RNA, 17 nt, Human
agaggggguggccuccc

SEQ ID NO: 2993375 - RNA, 19 nt, Human
agaggggguggccucccaa

SEQ ID NO: 2993376 - RNA, 22 nt, Human
agaggacuuuucuuuguggcuu

SEQ ID NO: 2993377 - RNA, 21 nt, Human
agaggacuuuucuuuguggcu

SEQ ID NO: 2993378 - RNA, 14 nt, Human
agaggacuuuucuu

SEQ ID NO: 2993379 - RNA, 21 nt, Human
agaagucuucuauuuauuuau

SEQ ID NO: 2993380 - RNA, 21 nt, Human
agaagugaaaaucuacacucc

SEQ ID NO: 2993381 - RNA, 22 nt, Human
agaagucacauuccugaacagg

SEQ ID NO: 2993382 - RNA, 18 nt, Human
agaaugaaagggcccaga

SEQ ID NO: 2993383 - RNA, 16 nt, Human
agaaugaaagggccca

SEQ ID NO: 2993384 - RNA, 19 nt, Human
agaaugcacaaacagaggc

SEQ ID NO: 2993385 - RNA, 22 nt, Human
agaaugcacaaacagaggccgc

SEQ ID NO: 2993386 - RNA, 17 nt, Human
agaaugauuaugaauua

SEQ ID NO: 2993387 - RNA, 22 nt, Human
agaaugagagacacacugaaga

SEQ ID NO: 2993388 - RNA, 17 nt, Human
agaaugagagacacacu

SEQ ID NO: 2993389 - RNA, 14 nt, Human
agaaguaacuuacu

SEQ ID NO: 2993390 - RNA, 18 nt, Human
agaagucacauuccugaa

SEQ ID NO: 2993391 - RNA, 21 nt, Human
agaagucacauuccugaacag

SEQ ID NO: 2993392 - RNA, 20 nt, Human
agaagucacauuccugaaca

SEQ ID NO: 2993393 - RNA, 21 nt, Human
agaagacacugaugggcaacc

SEQ ID NO: 2993394 - RNA, 13 nt, Human
agaagacacugau

SEQ ID NO: 2993395 - RNA, 21 nt, Human
acuuuccucuuuggucuacac

SEQ ID NO: 2993396 - RNA, 22 nt, Human
agaagagcuguucacagccaga

SEQ ID NO: 2993397 - RNA, 21 nt, Human
agaagagcuguucacagccag

SEQ ID NO: 2993398 - RNA, 21 nt, Human
agaagagauugugguuucauu

SEQ ID NO: 2993399 - RNA, 19 nt, Human
agacccaaaaggcagaagc

SEQ ID NO: 2993400 - RNA, 17 nt, Human
agacccaaaaggcagaa

SEQ ID NO: 2993401 - RNA, 15 nt, Human
agaccacguuucuaa

SEQ ID NO: 2993402 - RNA, 22 nt, Human
agacagauacuccuccaagguu

SEQ ID NO: 2993403 - RNA, 21 nt, Human
agacagagucucacuguugcc

SEQ ID NO: 2993404 - RNA, 22 nt, Human
agacaaugacuuacuguacaug

SEQ ID NO: 2993405 - RNA, 21 nt, Human
agacaaugacuuacuguacau

SEQ ID NO: 2993406 - RNA, 15 nt, Human
agacagagcuacaca

SEQ ID NO: 2993407 - RNA, 20 nt, Human
agacagagucucacuguugc

SEQ ID NO: 2993408 - RNA, 19 nt, Human
agacagagucucacuguug

SEQ ID NO: 2993409 - RNA, 13 nt, Human
agacagagcuaca

SEQ ID NO: 2993410 - RNA, 11 nt, Human
agacagagucu

SEQ ID NO: 2993411 - RNA, 20 nt, Human
agacaaugacuuacuguaca

SEQ ID NO: 2993412 - RNA, 24 nt, Human
aggcuuagacccucaugcugccaa

SEQ ID NO: 2993413 - RNA, 17 nt, Human
aggcuuagucacugaga

SEQ ID NO: 2993414 - RNA, 23 nt, Human
aggcuuagacccucaugcugcca

SEQ ID NO: 2993415 - RNA, 22 nt, Human
aggcuguaucccaugagccuca

SEQ ID NO: 2993416 - RNA, 21 nt, Human
aggcuguaucccaugagccuc

SEQ ID NO: 2993417 - RNA, 20 nt, Human
aggcuguaucccaugagccu

SEQ ID NO: 2993418 - RNA, 15 nt, Human
agggacccuccacca

SEQ ID NO: 2993419 - RNA, 15 nt, Human
agggacugaggggag

SEQ ID NO: 2993420 - RNA, 18 nt, Human
aggcuuagucacugagac

SEQ ID NO: 2993421 - RNA, 15 nt, Human
aggcuaccuuuguau

SEQ ID NO: 2993422 - RNA, 14 nt, Human
aggcuaccuuugua

SEQ ID NO: 2993423 - RNA, 13 nt, Human
aggcuaccuuugu

SEQ ID NO: 2993424 - RNA, 18 nt, Human
aggcuggguucugauccu

SEQ ID NO: 2993425 - RNA, 16 nt, Human
aggcugaggcgggugg

SEQ ID NO: 2993426 - RNA, 18 nt, Human
aggcugaggcaggagacu

SEQ ID NO: 2993427 - RNA, 16 nt, Human
aggcugaggcaggaga

SEQ ID NO: 2993428 - RNA, 22 nt, Human
aggcccucugcccacucccugc

SEQ ID NO: 2993429 - RNA, 23 nt, Human
aggcccucugcccacucccugca

SEQ ID NO: 2993430 - RNA, 21 nt, Human
aggcccucugcccacucccug

SEQ ID NO: 2993431 - RNA, 21 nt, Human
aggccaugggcacugugggua

SEQ ID NO: 2993432 - RNA, 15 nt, Human
aggcccuucucucca

SEQ ID NO: 2993433 - RNA, 19 nt, Human
aggcccuucucuccagccc

SEQ ID NO: 2993434 - RNA, 12 nt, Human
aggcccuucucu

SEQ ID NO: 2993435 - RNA, 19 nt, Human
aggcauuccccaggaggcc

SEQ ID NO: 2993436 - RNA, 20 nt, Human
aggcauuccccaggaggcca

SEQ ID NO: 2993437 - RNA, 23 nt, Human
aggccagcugcuugggcuucauc

SEQ ID NO: 2993438 - RNA, 13 nt, Human
aggccaggcccuc

SEQ ID NO: 2993439 - RNA, 14 nt, Human
aggccaggcccucu

SEQ ID NO: 2993440 - RNA, 15 nt, Human
aggccaggcccucug

SEQ ID NO: 2993441 - RNA, 18 nt, Human
aggcauuccccaggaggc

SEQ ID NO: 2993442 - RNA, 17 nt, Human
aggcauuccccaggagg

SEQ ID NO: 2993443 - RNA, 12 nt, Human
aggcauguucuc

SEQ ID NO: 2993444 - RNA, 19 nt, Human
aggcauguucucugaggac

SEQ ID NO: 2993445 - RNA, 18 nt, Human
aggcauguucucugagga

SEQ ID NO: 2993446 - RNA, 19 nt, Human
aggcaugugaugagaggaa

SEQ ID NO: 2993447 - RNA, 20 nt, Human
aggcaugugaugagaggaaa

SEQ ID NO: 2993448 - RNA, 21 nt, Human
aggcaugugaugagaggaaau

SEQ ID NO: 2993449 - RNA, 17 nt, Human
aggcauguucucugagg

SEQ ID NO: 2993450 - RNA, 17 nt, Human
aggcaugugaugagagg

SEQ ID NO: 2993451 - RNA, 15 nt, Human
aggcaugguggccca

SEQ ID NO: 2993452 - RNA, 15 nt, Human
aggcagcagacacau

SEQ ID NO: 2993453 - RNA, 18 nt, Human
aggcauggacuucuggau

SEQ ID NO: 2993454 - RNA, 17 nt, Human
agggauuuucagcccuc

SEQ ID NO: 2993455 - RNA, 22 nt, Human
agggauuuucagcccucagaau

SEQ ID NO: 2993456 - RNA, 15 nt, Human
agggauuagggagag

SEQ ID NO: 2993457 - RNA, 12 nt, Human
agggccuggccu

SEQ ID NO: 2993458 - RNA, 13 nt, Human
agggccuggccug

SEQ ID NO: 2993459 - RNA, 15 nt, Human
agggccugcaaggga

SEQ ID NO: 2993460 - RNA, 14 nt, Human
agggccugcaaggg

SEQ ID NO: 2993461 - RNA, 16 nt, Human
agggauacccauccca

SEQ ID NO: 2993462 - RNA, 16 nt, Human
agggucccugguggca

SEQ ID NO: 2993463 - RNA, 17 nt, Human
agggucccugguggcag

SEQ ID NO: 2993464 - RNA, 20 nt, Human
agggucccugguggcagcuc

SEQ ID NO: 2993465 - RNA, 22 nt, Human
agggucccugguggcagcucac

SEQ ID NO: 2993466 - RNA, 12 nt, Human
agggucccuggu

SEQ ID NO: 2993467 - RNA, 14 nt, Human
agggucccuggugg

SEQ ID NO: 2993468 - RNA, 13 nt, Human
aggguauuccaga

SEQ ID NO: 2993469 - RNA, 21 nt, Human
aggguaucuggugacuuuccu

SEQ ID NO: 2993470 - RNA, 14 nt, Human
agggccuggccuga

SEQ ID NO: 2993471 - RNA, 22 nt, Human
aggggcccaaauucuuucagug

SEQ ID NO: 2993472 - RNA, 14 nt, Human
agguaacaggcaga

SEQ ID NO: 2993473 - RNA, 13 nt, Human
agguaacaggcag

SEQ ID NO: 2993474 - RNA, 16 nt, Human
agguaacaggcagaua

SEQ ID NO: 2993475 - RNA, 22 nt, Human
agguacgaaaagaggggaagag

SEQ ID NO: 2993476 - RNA, 14 nt, Human
agguacucuccugg

SEQ ID NO: 2993477 - RNA, 13 nt, Human
agguacucuccug

SEQ ID NO: 2993478 - RNA, 23 nt, Human
aggguuuugccauguuggccagg

SEQ ID NO: 2993479 - RNA, 22 nt, Human
aggguuuugccauguuggccag

SEQ ID NO: 2993480 - RNA, 20 nt, Human
agcuuauuuccucauuuuua

SEQ ID NO: 2993481 - RNA, 18 nt, Human
agcuucauuuccuguguc

SEQ ID NO: 2993482 - RNA, 19 nt, Human
agcuucauuuccugugucu

SEQ ID NO: 2993483 - RNA, 22 nt, Human
agcuuuguuuguugucagcuga

SEQ ID NO: 2993484 - RNA, 23 nt, Human
agcuuuguuuguugucagcugaa

SEQ ID NO: 2993485 - RNA, 13 nt, Human
aggaaguagagga

SEQ ID NO: 2993486 - RNA, 15 nt, Human
aggaauaccuguccc

SEQ ID NO: 2993487 - RNA, 18 nt, Human
aggaauaccugucccccu

SEQ ID NO: 2993488 - RNA, 22 nt, Human
aggaauaccugucccccugaca

SEQ ID NO: 2993489 - RNA, 13 nt, Human
aggaacaaggcaa

SEQ ID NO: 2993490 - RNA, 16 nt, Human
aggaacaaggcaaggc

SEQ ID NO: 2993491 - RNA, 17 nt, Human
aggaacaaggcaaggcu

SEQ ID NO: 2993492 - RNA, 19 nt, Human
aggaacaaggcaaggcugu

SEQ ID NO: 2993493 - RNA, 12 nt, Human
aggaacaaggca

SEQ ID NO: 2993494 - RNA, 23 nt, Human
aggaaccgagggggcugcuccca

SEQ ID NO: 2993495 - RNA, 21 nt, Human
aggaacuuaaauaaugugaaa

SEQ ID NO: 2993496 - RNA, 20 nt, Human
aggaacaaggcaaggcuguc

SEQ ID NO: 2993497 - RNA, 15 nt, Human
aggagaggagagggg

SEQ ID NO: 2993498 - RNA, 16 nt, Human
aggacccgucuccagc

SEQ ID NO: 2993499 - RNA, 17 nt, Human
agcgacagugagacucu

SEQ ID NO: 2993500 - RNA, 13 nt, Human
agcgagcccuggu

SEQ ID NO: 2993501 - RNA, 19 nt, Human
agcgagcccugguggcagu

SEQ ID NO: 2993502 - RNA, 12 nt, Human
agccugggaggu

SEQ ID NO: 2993503 - RNA, 16 nt, Human
agcucaccagccccag

SEQ ID NO: 2993504 - RNA, 15 nt, Human
agcucaccucucccu

SEQ ID NO: 2993505 - RNA, 18 nt, Human
agcucaccucucccuugg

SEQ ID NO: 2993506 - RNA, 19 nt, Human
agcucaccucucccuugga

SEQ ID NO: 2993507 - RNA, 12 nt, Human
agcucaccucuc

SEQ ID NO: 2993508 - RNA, 15 nt, Human
agcucaccagcccca

SEQ ID NO: 2993509 - RNA, 20 nt, Human
agcucaccagccccagugcc

SEQ ID NO: 2993510 - RNA, 19 nt, Human
agcucaccagccccagugc

SEQ ID NO: 2993511 - RNA, 18 nt, Human
agcucagagaggguggga

SEQ ID NO: 2993512 - RNA, 14 nt, Human
agcucagagagggu

SEQ ID NO: 2993513 - RNA, 12 nt, Human
agcucagagagg

SEQ ID NO: 2993514 - RNA, 18 nt, Human
agcugcgguccacccagg

SEQ ID NO: 2993515 - RNA, 17 nt, Human
agcugcgguccacccag

SEQ ID NO: 2993516 - RNA, 16 nt, Human
agcugcgguccaccca

SEQ ID NO: 2993517 - RNA, 13 nt, Human
agcugcgguccac

SEQ ID NO: 2993518 - RNA, 20 nt, Human
agcugcgguccacccaggag

SEQ ID NO: 2993519 - RNA, 19 nt, Human
agcugcgguccacccagga

SEQ ID NO: 2993520 - RNA, 12 nt, Human
agcugcugacag

SEQ ID NO: 2993521 - RNA, 17 nt, Human
agcuggucccacucagu

SEQ ID NO: 2993522 - RNA, 16 nt, Human
agcuggucccacucag

SEQ ID NO: 2993523 - RNA, 14 nt, Human
agcugcugacagug

SEQ ID NO: 2993524 - RNA, 13 nt, Human
agcugcugacagu

SEQ ID NO: 2993525 - RNA, 18 nt, Human
agcuggucccacucaguc

SEQ ID NO: 2993526 - RNA, 19 nt, Human
agcugcugagauccuggac

SEQ ID NO: 2993527 - RNA, 16 nt, Human
agcugguugagguuuc

SEQ ID NO: 2993528 - RNA, 22 nt, Human
agcugguuuuuagcggagacgg

SEQ ID NO: 2993529 - RNA, 17 nt, Human
agcuccccucggagaag

SEQ ID NO: 2993530 - RNA, 19 nt, Human
agcuccccucggagaagag

SEQ ID NO: 2993531 - RNA, 20 nt, Human
agcuccccucggagaagagc

SEQ ID NO: 2993532 - RNA, 15 nt, Human
agcugaaccugggua

SEQ ID NO: 2993533 - RNA, 14 nt, Human
augacuguuuuuaa

SEQ ID NO: 2993534 - RNA, 22 nt, Human
augaggcauuuguuugaacuga

SEQ ID NO: 2993535 - RNA, 21 nt, Human
augaggcauuuguuugaacug

SEQ ID NO: 2993536 - RNA, 14 nt, Human
augaggcauuuguu

SEQ ID NO: 2993537 - RNA, 13 nt, Human
augaggcauuugu

SEQ ID NO: 2993538 - RNA, 16 nt, Human
augagggagaugccau

SEQ ID NO: 2993539 - RNA, 17 nt, Human
augagggagaugccaug

SEQ ID NO: 2993540 - RNA, 21 nt, Human
augaaguacucauacauguua

SEQ ID NO: 2993541 - RNA, 13 nt, Human
augaaguacucau

SEQ ID NO: 2993542 - RNA, 23 nt, Human
augaaguccaagcauuuagaugu

SEQ ID NO: 2993543 - RNA, 20 nt, Human
augaaguccaagcauuuaga

SEQ ID NO: 2993544 - RNA, 16 nt, Human
augaaaacacauuuuu

SEQ ID NO: 2993545 - RNA, 15 nt, Human
augaaaacacauuuu

SEQ ID NO: 2993546 - RNA, 14 nt, Human
augaaaacacauuu

SEQ ID NO: 2993547 - RNA, 21 nt, Human
aucuaguaguuguucugaaau

SEQ ID NO: 2993548 - RNA, 15 nt, Human
aucuaguaguuguuc

SEQ ID NO: 2993549 - RNA, 12 nt, Human
aucuaguaguug

SEQ ID NO: 2993550 - RNA, 20 nt, Human
aucuccgucaacucauauuu

SEQ ID NO: 2993551 - RNA, 23 nt, Human
aucucugauucccugauuuaaua

SEQ ID NO: 2993552 - RNA, 17 nt, Human
aucgcuccaccuugcag

SEQ ID NO: 2993553 - RNA, 21 nt, Human
aucgcuccaccuugcagcucu

SEQ ID NO: 2993554 - RNA, 17 nt, Human
auccucauacccacccc

SEQ ID NO: 2993555 - RNA, 19 nt, Human
auccucaguuuuugugaaa

SEQ ID NO: 2993556 - RNA, 19 nt, Human
aucccaugagccucagcau

SEQ ID NO: 2993557 - RNA, 19 nt, Human
auccagacccggcugcgug

SEQ ID NO: 2993558 - RNA, 14 nt, Human
aucaaauaugcaaa

SEQ ID NO: 2993559 - RNA, 13 nt, Human
aucacagccucug

SEQ ID NO: 2993560 - RNA, 13 nt, Human
aucaccagacagg

SEQ ID NO: 2993561 - RNA, 20 nt, Human
aucaccaacgucugugccau

SEQ ID NO: 2993562 - RNA, 20 nt, Human
aucaaagagguuuuaaaaaa

SEQ ID NO: 2993563 - RNA, 23 nt, Human
aucaaagagguuuuaaaaaaauc

SEQ ID NO: 2993564 - RNA, 24 nt, Human
aucaaaagguuaauaaaguaauua

SEQ ID NO: 2993565 - RNA, 17 nt, Human
aucaugaauuaguuuua

SEQ ID NO: 2993566 - RNA, 14 nt, Human
aucaugucuggcua

SEQ ID NO: 2993567 - RNA, 16 nt, Human
aucaugucagucugcu

SEQ ID NO: 2993568 - RNA, 22 nt, Human
aucagcuugcccuguuaaaaga

SEQ ID NO: 2993569 - RNA, 13 nt, Human
aucagcuuauugu

SEQ ID NO: 2993570 - RNA, 18 nt, Human
auggauaaauauugguug

SEQ ID NO: 2993571 - RNA, 18 nt, Human
auggcuggagcuagaauu

SEQ ID NO: 2993572 - RNA, 15 nt, Human
augcuuguacauaau

SEQ ID NO: 2993573 - RNA, 16 nt, Human
augcuuguacauaaug

SEQ ID NO: 2993574 - RNA, 17 nt, Human
auggcuuuugugcauua

SEQ ID NO: 2993575 - RNA, 16 nt, Human
auggcuuuugugcauu

SEQ ID NO: 2993576 - RNA, 18 nt, Human
auggcuuuugugcauuau

SEQ ID NO: 2993577 - RNA, 13 nt, Human
augcugcccugug

SEQ ID NO: 2993578 - RNA, 12 nt, Human
augcugcccugu

SEQ ID NO: 2993579 - RNA, 14 nt, Human
augcugcccuguga

SEQ ID NO: 2993580 - RNA, 15 nt, Human
augcugcccugugag

SEQ ID NO: 2993581 - RNA, 16 nt, Human
augcugcccugugagu

SEQ ID NO: 2993582 - RNA, 16 nt, Human
augaucuuuaaaauac

SEQ ID NO: 2993583 - RNA, 17 nt, Human
augaucuuugcagacag

SEQ ID NO: 2993584 - RNA, 21 nt, Human
augaucuuugcagacaggcaa

SEQ ID NO: 2993585 - RNA, 19 nt, Human
augaucuuugcagacaggc

SEQ ID NO: 2993586 - RNA, 18 nt, Human
augaucuuugcagacagg

SEQ ID NO: 2993587 - RNA, 15 nt, Human
augaugauccuaggc

SEQ ID NO: 2993588 - RNA, 18 nt, Human
augaugaucuuuaaaaua

SEQ ID NO: 2993589 - RNA, 21 nt, Human
augaugaucuuuaaaauacac

SEQ ID NO: 2993590 - RNA, 23 nt, Human
augaugaaaugaggucagagccu

SEQ ID NO: 2993591 - RNA, 18 nt, Human
augaugaaaugaggucag

SEQ ID NO: 2993592 - RNA, 18 nt, Human
augcacaaacagaggccg

SEQ ID NO: 2993593 - RNA, 19 nt, Human
augccuggauggggcugca

SEQ ID NO: 2993594 - RNA, 20 nt, Human
augccuggauggggcugcac

SEQ ID NO: 2993595 - RNA, 22 nt, Human
augcacagaguuguuacauuuu

SEQ ID NO: 2993596 - RNA, 21 nt, Human
augcacagaguuguuacauuu

SEQ ID NO: 2993597 - RNA, 19 nt, Human
augcacagaguuguuacau

SEQ ID NO: 2993598 - RNA, 14 nt, Human
augcacacauuuuu

SEQ ID NO: 2993599 - RNA, 13 nt, Human
augcacacauuuu

SEQ ID NO: 2993600 - RNA, 15 nt, Human
augcacacauuuuuu

SEQ ID NO: 2993601 - RNA, 15 nt, Human
augcacacacauaua

SEQ ID NO: 2993602 - RNA, 16 nt, Human
augcacacacauauau

SEQ ID NO: 2993603 - RNA, 21 nt, Human
augguaguuuuacaguguuuc

SEQ ID NO: 2993604 - RNA, 22 nt, Human
augguaguuuuacaguguuucu

SEQ ID NO: 2993605 - RNA, 15 nt, Human
augguaguuuuacag

SEQ ID NO: 2993606 - RNA, 16 nt, Human
auggucccaucugcag

SEQ ID NO: 2993607 - RNA, 23 nt, Human
augguagcauuuuaaacaaaaua

SEQ ID NO: 2993608 - RNA, 18 nt, Human
augguagcauuuuaaaca

SEQ ID NO: 2993609 - RNA, 13 nt, Human
augguagcauuuu

SEQ ID NO: 2993610 - RNA, 20 nt, Human
augggugcuuggaggaagga

SEQ ID NO: 2993611 - RNA, 21 nt, Human
augggugcuuggaggaaggaa

SEQ ID NO: 2993612 - RNA, 23 nt, Human
augggugcuuggaggaaggaaac

SEQ ID NO: 2993613 - RNA, 16 nt, Human
augucaaucagccuag

SEQ ID NO: 2993614 - RNA, 21 nt, Human
augucaaucagccuaguugau

SEQ ID NO: 2993615 - RNA, 13 nt, Human
augucacaggcag

SEQ ID NO: 2993616 - RNA, 23 nt, Human
auguaauuaaguacuauguauca

SEQ ID NO: 2993617 - RNA, 15 nt, Human
augugaacacaucag

SEQ ID NO: 2993618 - RNA, 19 nt, Human
augucacaggcagguccag

SEQ ID NO: 2993619 - RNA, 17 nt, Human
augucacaggcaggucc

SEQ ID NO: 2993620 - RNA, 19 nt, Human
auguguaagacaaaaagcu

SEQ ID NO: 2993621 - RNA, 17 nt, Human
auguguaagacaaaaag

SEQ ID NO: 2993622 - RNA, 13 nt, Human
auguguaaguauu

SEQ ID NO: 2993623 - RNA, 15 nt, Human
auguuccuagugaaa

SEQ ID NO: 2993624 - RNA, 16 nt, Human
auguuccuagugaaag

SEQ ID NO: 2993625 - RNA, 16 nt, Human
auguucucucuucucc

SEQ ID NO: 2993626 - RNA, 17 nt, Human
auguuccuagugaaaga

SEQ ID NO: 2993627 - RNA, 17 nt, Human
auguucucucuucucca

SEQ ID NO: 2993628 - RNA, 13 nt, Human
auguucucugagg

SEQ ID NO: 2993629 - RNA, 14 nt, Human
auguucugggacac

SEQ ID NO: 2993630 - RNA, 17 nt, Human
auguucucugaggacac

SEQ ID NO: 2993631 - RNA, 15 nt, Human
auguucugggacaca

SEQ ID NO: 2993632 - RNA, 17 nt, Human
auguuugccucugccuc

SEQ ID NO: 2993633 - RNA, 15 nt, Human
auguuugccucugcc

SEQ ID NO: 2993634 - RNA, 14 nt, Human
auguuugccucugc

SEQ ID NO: 2993635 - RNA, 16 nt, Human
aguacuaacauuuauu

SEQ ID NO: 2993636 - RNA, 18 nt, Human
aguacguugugcauuugg

SEQ ID NO: 2993637 - RNA, 17 nt, Human
aguacguugugcauuug

SEQ ID NO: 2993638 - RNA, 16 nt, Human
aguacguugugcauuu

SEQ ID NO: 2993639 - RNA, 19 nt, Human
aguacuacaguccucccau

SEQ ID NO: 2993640 - RNA, 22 nt, Human
aguacuacaguccucccaucuc

SEQ ID NO: 2993641 - RNA, 14 nt, Human
aguacuauaauuua

SEQ ID NO: 2993642 - RNA, 14 nt, Human
aguacuauguauca

SEQ ID NO: 2993643 - RNA, 12 nt, Human
aguacuauguau

SEQ ID NO: 2993644 - RNA, 22 nt, Human
aguacuucuccacccugcucuc

SEQ ID NO: 2993645 - RNA, 12 nt, Human
aguacuucuuuu

SEQ ID NO: 2993646 - RNA, 17 nt, Human
aguacuucuccacccug

SEQ ID NO: 2993647 - RNA, 15 nt, Human
aggucuguucuuucc

SEQ ID NO: 2993648 - RNA, 13 nt, Human
aggucuguucuuu

SEQ ID NO: 2993649 - RNA, 16 nt, Human
aggucuguucuuucca

SEQ ID NO: 2993650 - RNA, 14 nt, Human
aguacguugugcau

SEQ ID NO: 2993651 - RNA, 15 nt, Human
aguacguugugcauu

SEQ ID NO: 2993652 - RNA, 19 nt, Human
aguauuuuuuacauuuuac

SEQ ID NO: 2993653 - RNA, 18 nt, Human
aguauuuuuuacauuuua

SEQ ID NO: 2993654 - RNA, 15 nt, Human
aguauuuuuuacauu

SEQ ID NO: 2993655 - RNA, 22 nt, Human
aguauuuuuuacauuuuacaca

SEQ ID NO: 2993656 - RNA, 20 nt, Human
aguauuuuuuacauuuuaca

SEQ ID NO: 2993657 - RNA, 24 nt, Human
aguauuuuuuacauuuuacacacu

SEQ ID NO: 2993658 - RNA, 17 nt, Human
aguaugaggcauuuguu

SEQ ID NO: 2993659 - RNA, 14 nt, Human
aguauuuuguuuca

SEQ ID NO: 2993660 - RNA, 23 nt, Human
aguaugaggcauuuguuugaacu

SEQ ID NO: 2993661 - RNA, 17 nt, Human
aguauuuuguuucagug

SEQ ID NO: 2993662 - RNA, 21 nt, Human
aguaugaggcauuuguuugaa

SEQ ID NO: 2993663 - RNA, 20 nt, Human
aguaugaggcauuuguuuga

SEQ ID NO: 2993664 - RNA, 22 nt, Human
agucacacaguauuacuucugc

SEQ ID NO: 2993665 - RNA, 19 nt, Human
aguccucuuuucugagagg

SEQ ID NO: 2993666 - RNA, 20 nt, Human
aguccuuaccagcagagcac

SEQ ID NO: 2993667 - RNA, 22 nt, Human
aguccucuuuucugagaggacu

SEQ ID NO: 2993668 - RNA, 19 nt, Human
aguccuuaccagcagagca

SEQ ID NO: 2993669 - RNA, 17 nt, Human
agucugaaggcuggguu

SEQ ID NO: 2993670 - RNA, 16 nt, Human
agugaauguaggcugg

SEQ ID NO: 2993671 - RNA, 17 nt, Human
agugaauguaggcuggc

SEQ ID NO: 2993672 - RNA, 19 nt, Human
agugucaaugcagccccca

SEQ ID NO: 2993673 - RNA, 16 nt, Human
agugggagcugccugu

SEQ ID NO: 2993674 - RNA, 16 nt, Human
agugccuuauggaaca

SEQ ID NO: 2993675 - RNA, 10 nt, Human
agugccuuau

SEQ ID NO: 2993676 - RNA, 13 nt, Human
agugccuuaugga

SEQ ID NO: 2993677 - RNA, 14 nt, Human
agugccuuauggaa

SEQ ID NO: 2993678 - RNA, 15 nt, Human
agugccuuauggaac

SEQ ID NO: 2993679 - RNA, 24 nt, Human
agugauccucccaccucagccucc

SEQ ID NO: 2993680 - RNA, 23 nt, Human
agugauccucccaccucagccuc

SEQ ID NO: 2993681 - RNA, 18 nt, Human
agugauccucccaccuca

SEQ ID NO: 2993682 - RNA, 15 nt, Human
agugauccucccacc

SEQ ID NO: 2993683 - RNA, 14 nt, Human
agugauccucccac

SEQ ID NO: 2993684 - RNA, 17 nt, Human
agugauucuccugccuc

SEQ ID NO: 2993685 - RNA, 15 nt, Human
agugauucuccugcc

SEQ ID NO: 2993686 - RNA, 18 nt, Human
agugccuuacacaauggu

SEQ ID NO: 2993687 - RNA, 14 nt, Human
agugauucuccugc

SEQ ID NO: 2993688 - RNA, 19 nt, Human
aguucagagcugcccucuc

SEQ ID NO: 2993689 - RNA, 20 nt, Human
aguucagagcugcccucucc

SEQ ID NO: 2993690 - RNA, 22 nt, Human
aguucagagcugcccucuccug

SEQ ID NO: 2993691 - RNA, 21 nt, Human
aguucagagcugcccucuccu

SEQ ID NO: 2993692 - RNA, 23 nt, Human
aguucagagcugcccucuccugg

SEQ ID NO: 2993693 - RNA, 15 nt, Human
aguucaucuugaauu

SEQ ID NO: 2993694 - RNA, 19 nt, Human
aguucaucuugaauuguaa

SEQ ID NO: 2993695 - RNA, 13 nt, Human
aguucaucuugaa

SEQ ID NO: 2993696 - RNA, 19 nt, Human
aguugaaaagacuccaaag

SEQ ID NO: 2993697 - RNA, 20 nt, Human
aguugaaaagacuccaaaga

SEQ ID NO: 2993698 - RNA, 14 nt, Human
aguugaaaagacuc

SEQ ID NO: 2993699 - RNA, 18 nt, Human
aguugaaaagacuccaaa

SEQ ID NO: 2993700 - RNA, 16 nt, Human
aguugauacuacaguu

SEQ ID NO: 2993701 - RNA, 17 nt, Human
auauucauucuuuuuga

SEQ ID NO: 2993702 - RNA, 23 nt, Human
auauuucagauaaucacaauaca

SEQ ID NO: 2993703 - RNA, 14 nt, Human
auauuauguuaaaa

SEQ ID NO: 2993704 - RNA, 19 nt, Human
auauucaggaagcucaggg

SEQ ID NO: 2993705 - RNA, 17 nt, Human
auauucaggaagcucag

SEQ ID NO: 2993706 - RNA, 13 nt, Human
auauuauguuaaa

SEQ ID NO: 2993707 - RNA, 20 nt, Human
auaugcucugcauguuacau

SEQ ID NO: 2993708 - RNA, 17 nt, Human
auaugcucugcauguua

SEQ ID NO: 2993709 - RNA, 16 nt, Human
auaugcucugcauguu

SEQ ID NO: 2993710 - RNA, 22 nt, Human
auaugcacacauuuuuuaaaug

SEQ ID NO: 2993711 - RNA, 18 nt, Human
auauauuuuuuucugaaa

SEQ ID NO: 2993712 - RNA, 22 nt, Human
auauauuuuuuaaaauaagucu

SEQ ID NO: 2993713 - RNA, 18 nt, Human
auauauuuuuuaaaauaa

SEQ ID NO: 2993714 - RNA, 21 nt, Human
auagcagcccucaauugugaa

SEQ ID NO: 2993715 - RNA, 22 nt, Human
auagcagcccucaauugugaaa

SEQ ID NO: 2993716 - RNA, 15 nt, Human
auagcagcuuauuca

SEQ ID NO: 2993717 - RNA, 16 nt, Human
auagcauguccuaaug

SEQ ID NO: 2993718 - RNA, 19 nt, Human
auagcauguccuaaugcuu

SEQ ID NO: 2993719 - RNA, 17 nt, Human
auagcacagacccugcc

SEQ ID NO: 2993720 - RNA, 18 nt, Human
auagcacagacccugccc

SEQ ID NO: 2993721 - RNA, 15 nt, Human
auagcacagacccug

SEQ ID NO: 2993722 - RNA, 23 nt, Human
auagaaaguugcaaggcaaaugu

SEQ ID NO: 2993723 - RNA, 18 nt, Human
auagaaaguugcaaggca

SEQ ID NO: 2993724 - RNA, 17 nt, Human
auagaaaguugcaaggc

SEQ ID NO: 2993725 - RNA, 17 nt, Human
auagccuaggugacaga

SEQ ID NO: 2993726 - RNA, 15 nt, Human
auagccuaggugaca

SEQ ID NO: 2993727 - RNA, 18 nt, Human
auagguuuggacaaaaug

SEQ ID NO: 2993728 - RNA, 24 nt, Human
auagguuuggacaaaauggaauac

SEQ ID NO: 2993729 - RNA, 11 nt, Human
aguuuggccag

SEQ ID NO: 2993730 - RNA, 23 nt, Human
aguuugauuaaauucuugcaaag

SEQ ID NO: 2993731 - RNA, 20 nt, Human
aguuugagaucagccugggc

SEQ ID NO: 2993732 - RNA, 21 nt, Human
aguuugaauuccuaaaauuau

SEQ ID NO: 2993733 - RNA, 16 nt, Human
aguuugauuaaauucu

SEQ ID NO: 2993734 - RNA, 18 nt, Human
aguuugagaucagccugg

SEQ ID NO: 2993735 - RNA, 19 nt, Human
aguuugagaucagccuggg

SEQ ID NO: 2993736 - RNA, 22 nt, Human
aguuugauuaaauucuugcaaa

SEQ ID NO: 2993737 - RNA, 20 nt, Human
aguuugauuaaauucuugca

SEQ ID NO: 2993738 - RNA, 18 nt, Human
aguuugauuaaauucuug

SEQ ID NO: 2993739 - RNA, 17 nt, Human
aguuugauuaaauucuu

SEQ ID NO: 2993740 - RNA, 20 nt, Human
aguuguuacauuuuuaagug

SEQ ID NO: 2993741 - RNA, 19 nt, Human
aguuguuacauuuuuaagu

SEQ ID NO: 2993742 - RNA, 22 nt, Human
aguuguuacauuuuuaagugcu

SEQ ID NO: 2993743 - RNA, 20 nt, Human
auaacauguaauuaaguacu

SEQ ID NO: 2993744 - RNA, 18 nt, Human
auaacauguaauuaagua

SEQ ID NO: 2993745 - RNA, 13 nt, Human
auaacauguaauu

SEQ ID NO: 2993746 - RNA, 12 nt, Human
auaacauguaau

SEQ ID NO: 2993747 - RNA, 17 nt, Human
auaacaaugcuguauuu

SEQ ID NO: 2993748 - RNA, 15 nt, Human
auaacaaugcuguau

SEQ ID NO: 2993749 - RNA, 14 nt, Human
auaacaaugaaagu

SEQ ID NO: 2993750 - RNA, 20 nt, Human
auaacaaugcuguauuuuaa

SEQ ID NO: 2993751 - RNA, 19 nt, Human
auaacaaugcuguauuuua

SEQ ID NO: 2993752 - RNA, 21 nt, Human
auaacaaugcuguauuuuaaa

SEQ ID NO: 2993753 - RNA, 22 nt, Human
auacacuuacacuuuaugcaca

SEQ ID NO: 2993754 - RNA, 13 nt, Human
auacacuuacacu

SEQ ID NO: 2993755 - RNA, 17 nt, Human
auacaaugcugugcccu

SEQ ID NO: 2993756 - RNA, 14 nt, Human
auacaaugcugugc

SEQ ID NO: 2993757 - RNA, 18 nt, Human
auaauguuucaaacauau

SEQ ID NO: 2993758 - RNA, 17 nt, Human
auacccacccccaccca

SEQ ID NO: 2993759 - RNA, 13 nt, Human
auacagaaaaguu

SEQ ID NO: 2993760 - RNA, 17 nt, Human
auaccccaagacuccca

SEQ ID NO: 2993761 - RNA, 19 nt, Human
auaccccaagacucccaug

SEQ ID NO: 2993762 - RNA, 14 nt, Human
auacccacccccac

SEQ ID NO: 2993763 - RNA, 16 nt, Human
auacccacccccaccc

SEQ ID NO: 2993764 - RNA, 13 nt, Human
auacccaccccca

SEQ ID NO: 2993765 - RNA, 13 nt, Human
auaccuguccccc

SEQ ID NO: 2993766 - RNA, 14 nt, Human
auaccugucccccu

SEQ ID NO: 2993767 - RNA, 15 nt, Human
auaccugucccccug

SEQ ID NO: 2993768 - RNA, 16 nt, Human
auaccugucccccuga

SEQ ID NO: 2993769 - RNA, 14 nt, Human
auaagccagacauc

SEQ ID NO: 2993770 - RNA, 22 nt, Human
auaagccagacaucaacagaua

SEQ ID NO: 2993771 - RNA, 21 nt, Human
auaagccagacaucaacagau

SEQ ID NO: 2993772 - RNA, 18 nt, Human
auaaggguaucuggugac

SEQ ID NO: 2993773 - RNA, 13 nt, Human
auaauguuucaaa

SEQ ID NO: 2993774 - RNA, 23 nt, Human
cacaguguguggucaacauuucu

SEQ ID NO: 2993775 - RNA, 17 nt, Human
cacaguucaauucucau

SEQ ID NO: 2993776 - RNA, 19 nt, Human
caaggcuuagacccucaug

SEQ ID NO: 2993777 - RNA, 22 nt, Human
caaggcuuagacccucaugcug

SEQ ID NO: 2993778 - RNA, 21 nt, Human
caagggugaugggaaagcauu

SEQ ID NO: 2993779 - RNA, 23 nt, Human
caagggugaugggaaagcauugu

SEQ ID NO: 2993780 - RNA, 21 nt, Human
caauauccuaauaaaaaggug

SEQ ID NO: 2993781 - RNA, 19 nt, Human
caauagucaaauuguguga

SEQ ID NO: 2993782 - RNA, 17 nt, Human
caauagucaaauugugu

SEQ ID NO: 2993783 - RNA, 16 nt, Human
caauaggaaaaacuga

SEQ ID NO: 2993784 - RNA, 17 nt, Human
caauaggaaaaacugau

SEQ ID NO: 2993785 - RNA, 15 nt, Human
caauaggaaaaacug

SEQ ID NO: 2993786 - RNA, 19 nt, Human
caauagauugcucaaauca

SEQ ID NO: 2993787 - RNA, 18 nt, Human
caauaacuggaacacucu

SEQ ID NO: 2993788 - RNA, 18 nt, Human
caaggaaaaaauaacaau

SEQ ID NO: 2993789 - RNA, 23 nt, Human
caagcuggucccacucaguccau

SEQ ID NO: 2993790 - RNA, 22 nt, Human
caagcuggucccacucagucca

SEQ ID NO: 2993791 - RNA, 20 nt, Human
caaggaaaaaauaacaauga

SEQ ID NO: 2993792 - RNA, 17 nt, Human
caaggcugcagugagcc

SEQ ID NO: 2993793 - RNA, 22 nt, Human
caaggcugcagugagccgagau

SEQ ID NO: 2993794 - RNA, 20 nt, Human
caaggauccugagccagauu

SEQ ID NO: 2993795 - RNA, 18 nt, Human
caaggauccugagccaga

SEQ ID NO: 2993796 - RNA, 19 nt, Human
caaggauccugagccagau

SEQ ID NO: 2993797 - RNA, 16 nt, Human
caaggagauuuacaac

SEQ ID NO: 2993798 - RNA, 22 nt, Human
caagcugcacccucaggcaggu

SEQ ID NO: 2993799 - RNA, 21 nt, Human
caagcuggucccacucagucc

SEQ ID NO: 2993800 - RNA, 17 nt, Human
caagcgauucuucugcu

SEQ ID NO: 2993801 - RNA, 15 nt, Human
caagcgauucuucug

SEQ ID NO: 2993802 - RNA, 21 nt, Human
caagcugcacccucaggcagg

SEQ ID NO: 2993803 - RNA, 18 nt, Human
caagcgauucuucugcuu

SEQ ID NO: 2993804 - RNA, 13 nt, Human
cacaaagcuuuug

SEQ ID NO: 2993805 - RNA, 16 nt, Human
cacaaagcuuuugcau

SEQ ID NO: 2993806 - RNA, 13 nt, Human
cacaaaggagagc

SEQ ID NO: 2993807 - RNA, 18 nt, Human
cacaagaaaugaaagcag

SEQ ID NO: 2993808 - RNA, 21 nt, Human
cacaagaaaugaaagcaggga

SEQ ID NO: 2993809 - RNA, 20 nt, Human
cacaagaaaugaaagcaggg

SEQ ID NO: 2993810 - RNA, 15 nt, Human
cacacaaacaaggcc

SEQ ID NO: 2993811 - RNA, 17 nt, Human
cacacacgcgugcacac

SEQ ID NO: 2993812 - RNA, 22 nt, Human
caauauccuaauaaaaagguga

SEQ ID NO: 2993813 - RNA, 19 nt, Human
caaugugaaaagaaaaaug

SEQ ID NO: 2993814 - RNA, 22 nt, Human
caaugugaaaagaaaaaugagc

SEQ ID NO: 2993815 - RNA, 14 nt, Human
caauguucucucuu

SEQ ID NO: 2993816 - RNA, 17 nt, Human
caauuacaggaaguacu

SEQ ID NO: 2993817 - RNA, 18 nt, Human
caauuacaggaaguacug

SEQ ID NO: 2993818 - RNA, 17 nt, Human
caauuaccagaaagaua

SEQ ID NO: 2993819 - RNA, 22 nt, Human
caauuuuucuuauuucauuucu

SEQ ID NO: 2993820 - RNA, 14 nt, Human
cacaaacagaggcc

SEQ ID NO: 2993821 - RNA, 13 nt, Human
cacaaacagaggc

SEQ ID NO: 2993822 - RNA, 17 nt, Human
cacagccagacuggcac

SEQ ID NO: 2993823 - RNA, 18 nt, Human
cacagccagacuggcaca

SEQ ID NO: 2993824 - RNA, 14 nt, Human
cacagccccaucug

SEQ ID NO: 2993825 - RNA, 21 nt, Human
cacagcucuucuccaggcugu

SEQ ID NO: 2993826 - RNA, 19 nt, Human
cacagcaguugaaaagacu

SEQ ID NO: 2993827 - RNA, 13 nt, Human
cacagcaggcugc

SEQ ID NO: 2993828 - RNA, 17 nt, Human
cacagcaggcugccagu

SEQ ID NO: 2993829 - RNA, 16 nt, Human
cacagcaggcugccag

SEQ ID NO: 2993830 - RNA, 15 nt, Human
cacagcaggcugcca

SEQ ID NO: 2993831 - RNA, 21 nt, Human
cacagcaguugaaaagacucc

SEQ ID NO: 2993832 - RNA, 22 nt, Human
cacagcaggcugccagugccug

SEQ ID NO: 2993833 - RNA, 21 nt, Human
cacagcaggcugccagugccu

SEQ ID NO: 2993834 - RNA, 20 nt, Human
cacagcaggcugccagugcc

SEQ ID NO: 2993835 - RNA, 19 nt, Human
cacagcaggcugccagugc

SEQ ID NO: 2993836 - RNA, 17 nt, Human
cacagcagugagacugg

SEQ ID NO: 2993837 - RNA, 16 nt, Human
cacagcagugagacug

SEQ ID NO: 2993838 - RNA, 13 nt, Human
cacacugaagaag

SEQ ID NO: 2993839 - RNA, 12 nt, Human
cacagagaaagu

SEQ ID NO: 2993840 - RNA, 20 nt, Human
cacagagaaaguacuucucc

SEQ ID NO: 2993841 - RNA, 19 nt, Human
cacagagaaaguacuucuc

SEQ ID NO: 2993842 - RNA, 13 nt, Human
cacagaggcugcc

SEQ ID NO: 2993843 - RNA, 22 nt, Human
cacagaguuguuacauuuuuaa

SEQ ID NO: 2993844 - RNA, 21 nt, Human
cacagaguuguuacauuuuua

SEQ ID NO: 2993845 - RNA, 23 nt, Human
cacagaugggugcuuggaggaag

SEQ ID NO: 2993846 - RNA, 13 nt, Human
cacagauuggcca

SEQ ID NO: 2993847 - RNA, 21 nt, Human
caaacugacucuuaagaagac

SEQ ID NO: 2993848 - RNA, 17 nt, Human
caaacugacucuuaaga

SEQ ID NO: 2993849 - RNA, 16 nt, Human
caaacugacucuuaag

SEQ ID NO: 2993850 - RNA, 21 nt, Human
caaacucuugaccucagguga

SEQ ID NO: 2993851 - RNA, 20 nt, Human
caaacucuugaccucaggug

SEQ ID NO: 2993852 - RNA, 19 nt, Human
caaacucuugaccucaggu

SEQ ID NO: 2993853 - RNA, 17 nt, Human
caaacucuugaccucag

SEQ ID NO: 2993854 - RNA, 13 nt, Human
caaacagaggccg

SEQ ID NO: 2993855 - RNA, 21 nt, Human
caaacaaggccugucagcuaa

SEQ ID NO: 2993856 - RNA, 11 nt, Human
caaaaugaaac

SEQ ID NO: 2993857 - RNA, 22 nt, Human
caaaaugaaacgcaaccaccac

SEQ ID NO: 2993858 - RNA, 20 nt, Human
caaaauaaaacuuuuuaaaa

SEQ ID NO: 2993859 - RNA, 16 nt, Human
caaaauaaaacuuuuu

SEQ ID NO: 2993860 - RNA, 14 nt, Human
caaaauaaaacuuu

SEQ ID NO: 2993861 - RNA, 13 nt, Human
caaaauagaaagu

SEQ ID NO: 2993862 - RNA, 12 nt, Human
caaaauagaaag

SEQ ID NO: 2993863 - RNA, 22 nt, Human
caaaauagaaaguugcaaggca

SEQ ID NO: 2993864 - RNA, 21 nt, Human
caaaauagaaaguugcaaggc

SEQ ID NO: 2993865 - RNA, 21 nt, Human
caaaaucgaugcagugcuucc

SEQ ID NO: 2993866 - RNA, 19 nt, Human
caaaacucuccucugcugc

SEQ ID NO: 2993867 - RNA, 14 nt, Human
caaaacugcacugu

SEQ ID NO: 2993868 - RNA, 17 nt, Human
caaaacugcacugucaa

SEQ ID NO: 2993869 - RNA, 18 nt, Human
caaaacugcacugucaag

SEQ ID NO: 2993870 - RNA, 23 nt, Human
caaaacucuccucugcugcuggc

SEQ ID NO: 2993871 - RNA, 14 nt, Human
caaaaguuucucuu

SEQ ID NO: 2993872 - RNA, 15 nt, Human
caaaacgguuuuacu

SEQ ID NO: 2993873 - RNA, 21 nt, Human
caaaacgguuuuacugcagcu

SEQ ID NO: 2993874 - RNA, 18 nt, Human
auuuuauuuuauuaugca

SEQ ID NO: 2993875 - RNA, 15 nt, Human
caaaacucuccucug

SEQ ID NO: 2993876 - RNA, 16 nt, Human
caaaacucuccucugc

SEQ ID NO: 2993877 - RNA, 19 nt, Human
caagaaaugaaagcaggga

SEQ ID NO: 2993878 - RNA, 17 nt, Human
caagaaaugaaagcagg

SEQ ID NO: 2993879 - RNA, 15 nt, Human
caagaaaugaaagca

SEQ ID NO: 2993880 - RNA, 13 nt, Human
caagaagcccagg

SEQ ID NO: 2993881 - RNA, 14 nt, Human
caagaagcccagga

SEQ ID NO: 2993882 - RNA, 21 nt, Human
caagaccuucuccuucaccuu

SEQ ID NO: 2993883 - RNA, 23 nt, Human
caagaccuucuccuucaccuuug

SEQ ID NO: 2993884 - RNA, 13 nt, Human
caagacgcugugc

SEQ ID NO: 2993885 - RNA, 15 nt, Human
caagacgcugugcug

SEQ ID NO: 2993886 - RNA, 14 nt, Human
caagagcaaaguag

SEQ ID NO: 2993887 - RNA, 17 nt, Human
caacauacucccaucug

SEQ ID NO: 2993888 - RNA, 19 nt, Human
caacauacucccaucugug

SEQ ID NO: 2993889 - RNA, 12 nt, Human
caacaggcuggg

SEQ ID NO: 2993890 - RNA, 20 nt, Human
caacauacucccaucuguga

SEQ ID NO: 2993891 - RNA, 22 nt, Human
caaauuucuaaaucuccaaaau

SEQ ID NO: 2993892 - RNA, 15 nt, Human
caaauuucuaaaucu

SEQ ID NO: 2993893 - RNA, 23 nt, Human
caaagugcugggauuacaagcgu

SEQ ID NO: 2993894 - RNA, 19 nt, Human
caaaguggugagaggcauc

SEQ ID NO: 2993895 - RNA, 19 nt, Human
caaagugcugggauuacaa

SEQ ID NO: 2993896 - RNA, 13 nt, Human
caaagugcuggga

SEQ ID NO: 2993897 - RNA, 13 nt, Human
caaauaugcaaag

SEQ ID NO: 2993898 - RNA, 12 nt, Human
caaauaugcaaa

SEQ ID NO: 2993899 - RNA, 23 nt, Human
caaauggaaaugggcagagcaga

SEQ ID NO: 2993900 - RNA, 22 nt, Human
caaauggaaaugggcagagcag

SEQ ID NO: 2993901 - RNA, 18 nt, Human
caaauguucaucaaugaa

SEQ ID NO: 2993902 - RNA, 14 nt, Human
caaauguucaucaa

SEQ ID NO: 2993903 - RNA, 18 nt, Human
uguucacuggacacuuca

SEQ ID NO: 2993904 - RNA, 17 nt, Human
uguuaguaugaggcauu

SEQ ID NO: 2993905 - RNA, 20 nt, Human
uguuaguaugaggcauuugu

SEQ ID NO: 2993906 - RNA, 19 nt, Human
uguuaguaugaggcauuug

SEQ ID NO: 2993907 - RNA, 22 nt, Human
uguucagcuccagcucaccagc

SEQ ID NO: 2993908 - RNA, 21 nt, Human
uguucagcuccagcucaccag

SEQ ID NO: 2993909 - RNA, 20 nt, Human
uguucagcuccagcucacca

SEQ ID NO: 2993910 - RNA, 18 nt, Human
uguucagcuccagcucac

SEQ ID NO: 2993911 - RNA, 21 nt, Human
uguuaaaagaugaaaauauuu

SEQ ID NO: 2993912 - RNA, 14 nt, Human
uguuacuaaguuuu

SEQ ID NO: 2993913 - RNA, 14 nt, Human
uguguggucaacau

SEQ ID NO: 2993914 - RNA, 23 nt, Human
uguguggucaacauuucucaugu

SEQ ID NO: 2993915 - RNA, 16 nt, Human
uguguuuauugucaaa

SEQ ID NO: 2993916 - RNA, 13 nt, Human
uguguuuauuguc

SEQ ID NO: 2993917 - RNA, 19 nt, Human
uguguuuugcaagccagau

SEQ ID NO: 2993918 - RNA, 13 nt, Human
uguguuuugcaag

SEQ ID NO: 2993919 - RNA, 13 nt, Human
uguguuugaagca

SEQ ID NO: 2993920 - RNA, 19 nt, Human
ugugugcacguacacacac

SEQ ID NO: 2993921 - RNA, 22 nt, Human
ugugugaaagguacuucaaauc

SEQ ID NO: 2993922 - RNA, 21 nt, Human
ugugugaaagguacuucaaau

SEQ ID NO: 2993923 - RNA, 20 nt, Human
ugugugaaagguacuucaaa

SEQ ID NO: 2993924 - RNA, 20 nt, Human
uguugacaugggacauuugc

SEQ ID NO: 2993925 - RNA, 17 nt, Human
uguucuggcucuuccag

SEQ ID NO: 2993926 - RNA, 20 nt, Human
uguucuggcucuuccaggcu

SEQ ID NO: 2993927 - RNA, 21 nt, Human
uguucuggcucuuccaggcug

SEQ ID NO: 2993928 - RNA, 23 nt, Human
uguucuuucuggcuaugcauuug

SEQ ID NO: 2993929 - RNA, 13 nt, Human
uguucucugcccu

SEQ ID NO: 2993930 - RNA, 14 nt, Human
uguucucugcccuc

SEQ ID NO: 2993931 - RNA, 15 nt, Human
uguucucugcccucc

SEQ ID NO: 2993932 - RNA, 16 nt, Human
uguucucugcccucca

SEQ ID NO: 2993933 - RNA, 13 nt, Human
uguucuggcucuu

SEQ ID NO: 2993934 - RNA, 16 nt, Human
uguucuggcucuucca

SEQ ID NO: 2993935 - RNA, 12 nt, Human
uguucuggcucu

SEQ ID NO: 2993936 - RNA, 22 nt, Human
uguucaucaacagugagagacu

SEQ ID NO: 2993937 - RNA, 14 nt, Human
uguucaugaaagau

SEQ ID NO: 2993938 - RNA, 13 nt, Human
uguucaugaaaga

SEQ ID NO: 2993939 - RNA, 19 nt, Human
uguucaucauccuaagcua

SEQ ID NO: 2993940 - RNA, 15 nt, Human
uguucucucuucucc

SEQ ID NO: 2993941 - RNA, 16 nt, Human
uguucucucuucucca

SEQ ID NO: 2993942 - RNA, 14 nt, Human
uguuuaaaaucauu

SEQ ID NO: 2993943 - RNA, 17 nt, Human
uguuuaaaaucauuucu

SEQ ID NO: 2993944 - RNA, 18 nt, Human
uguuuaaaaucauuucug

SEQ ID NO: 2993945 - RNA, 19 nt, Human
uguuggcugggggccucag

SEQ ID NO: 2993946 - RNA, 17 nt, Human
uguuggcugggggccuc

SEQ ID NO: 2993947 - RNA, 16 nt, Human
uguuggccaggcuggu

SEQ ID NO: 2993948 - RNA, 15 nt, Human
uguuggccaggcugg

SEQ ID NO: 2993949 - RNA, 20 nt, Human
uguuggagaagaacugaaau

SEQ ID NO: 2993950 - RNA, 19 nt, Human
uguuggagaagaacugaaa

SEQ ID NO: 2993951 - RNA, 17 nt, Human
uguuggagaagaacuga

SEQ ID NO: 2993952 - RNA, 16 nt, Human
uguuggagaagaacug

SEQ ID NO: 2993953 - RNA, 14 nt, Human
uguuggagaagaac

SEQ ID NO: 2993954 - RNA, 22 nt, Human
uuaaacuacauuagguugugaa

SEQ ID NO: 2993955 - RNA, 23 nt, Human
uuaaacuacauuagguugugaau

SEQ ID NO: 2993956 - RNA, 18 nt, Human
uuaaaauacacacucaaa

SEQ ID NO: 2993957 - RNA, 22 nt, Human
uuaaacuuaaucuaaauggaac

SEQ ID NO: 2993958 - RNA, 14 nt, Human
uuaaaacccaagug

SEQ ID NO: 2993959 - RNA, 17 nt, Human
uuaaaauaagucugauu

SEQ ID NO: 2993960 - RNA, 15 nt, Human
uuaaaauaagucuga

SEQ ID NO: 2993961 - RNA, 20 nt, Human
uuaaauauuuugacuuguug

SEQ ID NO: 2993962 - RNA, 11 nt, Human
uuaaaugacuc

SEQ ID NO: 2993963 - RNA, 18 nt, Human
uuaaaugacucuucccuc

SEQ ID NO: 2993964 - RNA, 15 nt, Human
uuaaaugcccagccc

SEQ ID NO: 2993965 - RNA, 16 nt, Human
uuaaaugcccagcccc

SEQ ID NO: 2993966 - RNA, 14 nt, Human
uuaaaugcccagcc

SEQ ID NO: 2993967 - RNA, 18 nt, Human
uguuucuggcuuagaaca

SEQ ID NO: 2993968 - RNA, 16 nt, Human
uguuuuaagaggcagg

SEQ ID NO: 2993969 - RNA, 22 nt, Human
uuaaaaaaaaaccugagcccca

SEQ ID NO: 2993970 - RNA, 23 nt, Human
uguuuuaaggaugcuuguacaua

SEQ ID NO: 2993971 - RNA, 22 nt, Human
uguuuuaaggaugcuuguacau

SEQ ID NO: 2993972 - RNA, 19 nt, Human
uguuuuaaggaugcuugua

SEQ ID NO: 2993973 - RNA, 17 nt, Human
uguuuuaagaggcaggg

SEQ ID NO: 2993974 - RNA, 14 nt, Human
uuaacuuuuauaaa

SEQ ID NO: 2993975 - RNA, 13 nt, Human
uuaaaugcccagc

SEQ ID NO: 2993976 - RNA, 13 nt, Human
uuaacuuuuauaa

SEQ ID NO: 2993977 - RNA, 12 nt, Human
uuaacuuuuaua

SEQ ID NO: 2993978 - RNA, 17 nt, Human
uuacauuuuuaagugcu

SEQ ID NO: 2993979 - RNA, 12 nt, Human
uuacauuuuuaa

SEQ ID NO: 2993980 - RNA, 20 nt, Human
uuacauuuguauaaaauaau

SEQ ID NO: 2993981 - RNA, 20 nt, Human
uuacacuuuaugcacaaaau

SEQ ID NO: 2993982 - RNA, 13 nt, Human
uuacacuuuaugc

SEQ ID NO: 2993983 - RNA, 22 nt, Human
uuaauuaaaacacaacaucuuu

SEQ ID NO: 2993984 - RNA, 21 nt, Human
uuaaugagacuuuaaaagcau

SEQ ID NO: 2993985 - RNA, 18 nt, Human
uuaaugagacuuuaaaag

SEQ ID NO: 2993986 - RNA, 16 nt, Human
uuaaugagacuuuaaa

SEQ ID NO: 2993987 - RNA, 23 nt, Human
uuaaugagacuuuaaaagcauuu

SEQ ID NO: 2993988 - RNA, 18 nt, Human
uuacacacuguacacaua

SEQ ID NO: 2993989 - RNA, 20 nt, Human
uguaauaaacucauuucuag

SEQ ID NO: 2993990 - RNA, 18 nt, Human
uguacagagcccacgccc

SEQ ID NO: 2993991 - RNA, 16 nt, Human
uguaccgcaaugugac

SEQ ID NO: 2993992 - RNA, 15 nt, Human
uguaccgcaauguga

SEQ ID NO: 2993993 - RNA, 16 nt, Human
uguacagagcccacgc

SEQ ID NO: 2993994 - RNA, 17 nt, Human
uguacagagcccacgcc

SEQ ID NO: 2993995 - RNA, 13 nt, Human
uguacagagccca

SEQ ID NO: 2993996 - RNA, 22 nt, Human
uguaguguuggagaagaacuga

SEQ ID NO: 2993997 - RNA, 19 nt, Human
uguacugcauaugaaagga

SEQ ID NO: 2993998 - RNA, 15 nt, Human
uguacgucugacagg

SEQ ID NO: 2993999 - RNA, 16 nt, Human
uguagcauccuggaau

SEQ ID NO: 2994000 - RNA, 14 nt, Human
uguagcauccugga

SEQ ID NO: 2994001 - RNA, 18 nt, Human
uguagcauccuggaauau

SEQ ID NO: 2994002 - RNA, 17 nt, Human
uguagcauccuggaaua

SEQ ID NO: 2994003 - RNA, 18 nt, Human
uguagauguaugcacaca

SEQ ID NO: 2994004 - RNA, 14 nt, Human
uguagauguaugca

SEQ ID NO: 2994005 - RNA, 23 nt, Human
ugucccaaaaagaaaggagggga

SEQ ID NO: 2994006 - RNA, 19 nt, Human
ugucauuugagcagggcuc

SEQ ID NO: 2994007 - RNA, 16 nt, Human
ugucauuugagcaggg

SEQ ID NO: 2994008 - RNA, 13 nt, Human
ugucaccugaaga

SEQ ID NO: 2994009 - RNA, 16 nt, Human
uguccccgacccuugc

SEQ ID NO: 2994010 - RNA, 17 nt, Human
uguccccgacccuugcc

SEQ ID NO: 2994011 - RNA, 20 nt, Human
uguccuacccacccuccuuu

SEQ ID NO: 2994012 - RNA, 17 nt, Human
uguccuacucuguguca

SEQ ID NO: 2994013 - RNA, 12 nt, Human
uguccuacucug

SEQ ID NO: 2994014 - RNA, 18 nt, Human
uguccccaccgcagacag

SEQ ID NO: 2994015 - RNA, 13 nt, Human
ugucccaagugcc

SEQ ID NO: 2994016 - RNA, 12 nt, Human
ugucccaagugc

SEQ ID NO: 2994017 - RNA, 15 nt, Human
ugucccaagugccaa

SEQ ID NO: 2994018 - RNA, 14 nt, Human
ugucccaagugcca

SEQ ID NO: 2994019 - RNA, 19 nt, Human
uguccccaccgcagacagg

SEQ ID NO: 2994020 - RNA, 22 nt, Human
uguccccaccgcagacaggacc

SEQ ID NO: 2994021 - RNA, 13 nt, Human
uguccccaccgca

SEQ ID NO: 2994022 - RNA, 19 nt, Human
uguauuuuacuaauaaaau

SEQ ID NO: 2994023 - RNA, 12 nt, Human
ugucacaggcag

SEQ ID NO: 2994024 - RNA, 17 nt, Human
ugucacacacuuuggcu

SEQ ID NO: 2994025 - RNA, 13 nt, Human
uguauuuugaaau

SEQ ID NO: 2994026 - RNA, 13 nt, Human
ugucacacacuuu

SEQ ID NO: 2994027 - RNA, 22 nt, Human
uguauucucuccuguaccucuu

SEQ ID NO: 2994028 - RNA, 15 nt, Human
uguaugauucccagc

SEQ ID NO: 2994029 - RNA, 23 nt, Human
ugugaaggcaggggaauguaugu

SEQ ID NO: 2994030 - RNA, 15 nt, Human
ugugacauguuuuau

SEQ ID NO: 2994031 - RNA, 13 nt, Human
ugugaggaagccg

SEQ ID NO: 2994032 - RNA, 18 nt, Human
ugugaggaagccgcuggg

SEQ ID NO: 2994033 - RNA, 20 nt, Human
ugugaggaagccgcuggggc

SEQ ID NO: 2994034 - RNA, 12 nt, Human
ugugaggaagcc

SEQ ID NO: 2994035 - RNA, 17 nt, Human
ugugagucaccaagccc

SEQ ID NO: 2994036 - RNA, 15 nt, Human
ugugagucaccaagc

SEQ ID NO: 2994037 - RNA, 21 nt, Human
ugugagucaccaagcccaguu

SEQ ID NO: 2994038 - RNA, 19 nt, Human
ugugagucaccaagcccag

SEQ ID NO: 2994039 - RNA, 23 nt, Human
ugucuuuucuugcaugaggcuag

SEQ ID NO: 2994040 - RNA, 23 nt, Human
ugugaaaagaaaaaugagccugg

SEQ ID NO: 2994041 - RNA, 21 nt, Human
ugugaaaagaaaaaugagccu

SEQ ID NO: 2994042 - RNA, 16 nt, Human
ugucuuuggacccuga

SEQ ID NO: 2994043 - RNA, 21 nt, Human
ugucuuuucuugcaugaggcu

SEQ ID NO: 2994044 - RNA, 14 nt, Human
ugucuuuggacccu

SEQ ID NO: 2994045 - RNA, 17 nt, Human
ugugcacaucuguuuug

SEQ ID NO: 2994046 - RNA, 15 nt, Human
ugugcacaucuguuu

SEQ ID NO: 2994047 - RNA, 14 nt, Human
ugugcacguacaca

SEQ ID NO: 2994048 - RNA, 14 nt, Human
ugugcauuaucuag

SEQ ID NO: 2994049 - RNA, 19 nt, Human
ugugcauuaucuagauacu

SEQ ID NO: 2994050 - RNA, 16 nt, Human
ugugcauuaucuagau

SEQ ID NO: 2994051 - RNA, 21 nt, Human
ugugcauuaucuagauacugu

SEQ ID NO: 2994052 - RNA, 20 nt, Human
ugugcauuaucuagauacug

SEQ ID NO: 2994053 - RNA, 23 nt, Human
ugugcauuaucuagauacuguau

SEQ ID NO: 2994054 - RNA, 19 nt, Human
ugugcuaguaauuggaaag

SEQ ID NO: 2994055 - RNA, 19 nt, Human
ugugcgccuacaggaguga

SEQ ID NO: 2994056 - RNA, 14 nt, Human
ugugcgccuacagg

SEQ ID NO: 2994057 - RNA, 23 nt, Human
uguggcgcagcauauucaggaag

SEQ ID NO: 2994058 - RNA, 22 nt, Human
uguggcgagccauuugucccaa

SEQ ID NO: 2994059 - RNA, 12 nt, Human
uguggcgagcca

SEQ ID NO: 2994060 - RNA, 19 nt, Human
uguggacacagcucuucuc

SEQ ID NO: 2994061 - RNA, 16 nt, Human
uguggacacagcucuu

SEQ ID NO: 2994062 - RNA, 18 nt, Human
uguggacacagcucuucu

SEQ ID NO: 2994063 - RNA, 22 nt, Human
ugugggcuaguugggcuuccuc

SEQ ID NO: 2994064 - RNA, 12 nt, Human
uguguagggcgg

SEQ ID NO: 2994065 - RNA, 21 nt, Human
ugcuuuaccaauugaaguaaa

SEQ ID NO: 2994066 - RNA, 17 nt, Human
uggaaaaauagccugcc

SEQ ID NO: 2994067 - RNA, 20 nt, Human
uggaaaaauagccugccucu

SEQ ID NO: 2994068 - RNA, 20 nt, Human
uggaacauaaaauacaaugu

SEQ ID NO: 2994069 - RNA, 21 nt, Human
uggaacauaaaauacaauguu

SEQ ID NO: 2994070 - RNA, 20 nt, Human
uggaaagaguaggaagacuu

SEQ ID NO: 2994071 - RNA, 23 nt, Human
uggaaacuucagcgguuuauaua

SEQ ID NO: 2994072 - RNA, 21 nt, Human
uggaaagacuuuuccaacccu

SEQ ID NO: 2994073 - RNA, 17 nt, Human
uggaaacaagucaguca

SEQ ID NO: 2994074 - RNA, 18 nt, Human
uggaauaagacagagacc

SEQ ID NO: 2994075 - RNA, 14 nt, Human
uggaauaagacaga

SEQ ID NO: 2994076 - RNA, 17 nt, Human
uggaauaaggagaauga

SEQ ID NO: 2994077 - RNA, 22 nt, Human
uggaauaauccuaaacauauga

SEQ ID NO: 2994078 - RNA, 16 nt, Human
uggaauauauaaccag

SEQ ID NO: 2994079 - RNA, 15 nt, Human
uggaauauauaacca

SEQ ID NO: 2994080 - RNA, 19 nt, Human
uggaauaacauguaauuaa

SEQ ID NO: 2994081 - RNA, 15 nt, Human
uggaauaacauguaa

SEQ ID NO: 2994082 - RNA, 14 nt, Human
uggaauaacaugua

SEQ ID NO: 2994083 - RNA, 13 nt, Human
uggacaugcacag

SEQ ID NO: 2994084 - RNA, 19 nt, Human
uggacaugcacagcuaaca

SEQ ID NO: 2994085 - RNA, 12 nt, Human
uggcccaggagu

SEQ ID NO: 2994086 - RNA, 14 nt, Human
uggcccagggcauc

SEQ ID NO: 2994087 - RNA, 13 nt, Human
uggcccagggcau

SEQ ID NO: 2994088 - RNA, 22 nt, Human
uggcccaggaguuuggccagaa

SEQ ID NO: 2994089 - RNA, 20 nt, Human
uggcccaggaguuuggccag

SEQ ID NO: 2994090 - RNA, 21 nt, Human
uggcccaggaguuuggccaga

SEQ ID NO: 2994091 - RNA, 14 nt, Human
uggcccaggaguuu

SEQ ID NO: 2994092 - RNA, 19 nt, Human
uggcccaggaguuuggcca

SEQ ID NO: 2994093 - RNA, 13 nt, Human
uggcccaggaguu

SEQ ID NO: 2994094 - RNA, 21 nt, Human
uggccagaugcaccagcccuu

SEQ ID NO: 2994095 - RNA, 20 nt, Human
uggccagaugcaccagcccu

SEQ ID NO: 2994096 - RNA, 13 nt, Human
uggcagcugcuuu

SEQ ID NO: 2994097 - RNA, 21 nt, Human
uggcacccggccccugcuggu

SEQ ID NO: 2994098 - RNA, 11 nt, Human
uggagggaagc

SEQ ID NO: 2994099 - RNA, 12 nt, Human
uggaggaaggaa

SEQ ID NO: 2994100 - RNA, 18 nt, Human
uggaggaaggaaacccag

SEQ ID NO: 2994101 - RNA, 20 nt, Human
uggaggaaggaaacccagcu

SEQ ID NO: 2994102 - RNA, 24 nt, Human
uggauuuaacagaaauguacagca

SEQ ID NO: 2994103 - RNA, 20 nt, Human
uggauuuaacagaaauguac

SEQ ID NO: 2994104 - RNA, 15 nt, Human
ugguaguuuuacagu

SEQ ID NO: 2994105 - RNA, 21 nt, Human
uggguuucuaaagcugccagc

SEQ ID NO: 2994106 - RNA, 17 nt, Human
uggguuucuaaagcugc

SEQ ID NO: 2994107 - RNA, 18 nt, Human
uggguuucuaaagcugcc

SEQ ID NO: 2994108 - RNA, 23 nt, Human
ugguauuggcuagagguucaaag

SEQ ID NO: 2994109 - RNA, 21 nt, Human
ugguauguuuucaggcuagau

SEQ ID NO: 2994110 - RNA, 15 nt, Human
uggguucuacccagg

SEQ ID NO: 2994111 - RNA, 16 nt, Human
uggguucuacccaggu

SEQ ID NO: 2994112 - RNA, 22 nt, Human
uggguucuacccaggugcuagg

SEQ ID NO: 2994113 - RNA, 15 nt, Human
uggguguaaacacau

SEQ ID NO: 2994114 - RNA, 14 nt, Human
uggguguggcgcag

SEQ ID NO: 2994115 - RNA, 19 nt, Human
ugggguuuaucagaauucu

SEQ ID NO: 2994116 - RNA, 16 nt, Human
uggguaacuagggaag

SEQ ID NO: 2994117 - RNA, 21 nt, Human
ugggggaucacagccucugaa

SEQ ID NO: 2994118 - RNA, 20 nt, Human
ugggggaucacagccucuga

SEQ ID NO: 2994119 - RNA, 17 nt, Human
ugggggcugggcagagg

SEQ ID NO: 2994120 - RNA, 18 nt, Human
ugggggcugggcagagga

SEQ ID NO: 2994121 - RNA, 15 nt, Human
ugggggugcauuuga

SEQ ID NO: 2994122 - RNA, 12 nt, Human
ugggggugcauu

SEQ ID NO: 2994123 - RNA, 15 nt, Human
ugggcuucaguggca

SEQ ID NO: 2994124 - RNA, 17 nt, Human
ugggcuucaguggcagc

SEQ ID NO: 2994125 - RNA, 16 nt, Human
ugggcagaggaaagca

SEQ ID NO: 2994126 - RNA, 22 nt, Human
ugggcuaagugauccucccacc

SEQ ID NO: 2994127 - RNA, 23 nt, Human
ugggcuggguucuacccaggugc

SEQ ID NO: 2994128 - RNA, 17 nt, Human
ugggcuggugucaccug

SEQ ID NO: 2994129 - RNA, 16 nt, Human
ugggcuaguugggcuu

SEQ ID NO: 2994130 - RNA, 13 nt, Human
ugggcuacaagga

SEQ ID NO: 2994131 - RNA, 14 nt, Human
ugggaguacaaaag

SEQ ID NO: 2994132 - RNA, 22 nt, Human
ugggagcugccuguucagcucc

SEQ ID NO: 2994133 - RNA, 21 nt, Human
ugggagcugccuguucagcuc

SEQ ID NO: 2994134 - RNA, 17 nt, Human
ugggagcugccuguuca

SEQ ID NO: 2994135 - RNA, 15 nt, Human
ugggauccuccaggu

SEQ ID NO: 2994136 - RNA, 14 nt, Human
ugggauccuccagg

SEQ ID NO: 2994137 - RNA, 15 nt, Human
ugggagugagcuggu

SEQ ID NO: 2994138 - RNA, 18 nt, Human
ugggauccuccaggugca

SEQ ID NO: 2994139 - RNA, 13 nt, Human
ugggauccuggag

SEQ ID NO: 2994140 - RNA, 16 nt, Human
ugggauuacaggugug

SEQ ID NO: 2994141 - RNA, 15 nt, Human
ugggcagaggaaagc

SEQ ID NO: 2994142 - RNA, 13 nt, Human
ugggagcaaaaga

SEQ ID NO: 2994143 - RNA, 14 nt, Human
ugggagcugccugu

SEQ ID NO: 2994144 - RNA, 13 nt, Human
ugggagcugccug

SEQ ID NO: 2994145 - RNA, 12 nt, Human
ugggagcugccu

SEQ ID NO: 2994146 - RNA, 12 nt, Human
ugggacacccug

SEQ ID NO: 2994147 - RNA, 14 nt, Human
uggcuuuugugcau

SEQ ID NO: 2994148 - RNA, 16 nt, Human
uggcuuccuggcaaua

SEQ ID NO: 2994149 - RNA, 22 nt, Human
uggcuuccuaaaauucagugga

SEQ ID NO: 2994150 - RNA, 21 nt, Human
uggcugggggccucagugcca

SEQ ID NO: 2994151 - RNA, 16 nt, Human
uggcugcuucaaggau

SEQ ID NO: 2994152 - RNA, 21 nt, Human
uggcugcuucaaggauccuga

SEQ ID NO: 2994153 - RNA, 19 nt, Human
uggcccagggcaucuggga

SEQ ID NO: 2994154 - RNA, 19 nt, Human
ugcacgcacacugucugcc

SEQ ID NO: 2994155 - RNA, 17 nt, Human
ugcacgcacacugucug

SEQ ID NO: 2994156 - RNA, 19 nt, Human
ugaguccccuguuuguuuc

SEQ ID NO: 2994157 - RNA, 23 nt, Human
ugcaccggcuggccuggccccuc

SEQ ID NO: 2994158 - RNA, 15 nt, Human
ugcaccgggccacag

SEQ ID NO: 2994159 - RNA, 14 nt, Human
ugcaccgggccaca

SEQ ID NO: 2994160 - RNA, 22 nt, Human
ugcaccgggccacagagaaagu

SEQ ID NO: 2994161 - RNA, 17 nt, Human
ugcaccgggccacagag

SEQ ID NO: 2994162 - RNA, 23 nt, Human
ugcagcaauaaagcagcguuucu

SEQ ID NO: 2994163 - RNA, 20 nt, Human
ugcagcaauaaagcagcguu

SEQ ID NO: 2994164 - RNA, 12 nt, Human
ugcacuuuguuc

SEQ ID NO: 2994165 - RNA, 14 nt, Human
ugcacuuuguucug

SEQ ID NO: 2994166 - RNA, 19 nt, Human
ugcagugagccgagauugu

SEQ ID NO: 2994167 - RNA, 16 nt, Human
ugcagugcuuccaagg

SEQ ID NO: 2994168 - RNA, 17 nt, Human
ugcagugcaguauagaa

SEQ ID NO: 2994169 - RNA, 16 nt, Human
ugcagugcaguauaga

SEQ ID NO: 2994170 - RNA, 10 nt, Human
ugcagugcag

SEQ ID NO: 2994171 - RNA, 13 nt, Human
ugcaggcagccag

SEQ ID NO: 2994172 - RNA, 14 nt, Human
ugcaggcagccagg

SEQ ID NO: 2994173 - RNA, 15 nt, Human
ugcaggcagccaggc

SEQ ID NO: 2994174 - RNA, 18 nt, Human
ugcaguucugaagaagau

SEQ ID NO: 2994175 - RNA, 17 nt, Human
ugcaguucugaagaaga

SEQ ID NO: 2994176 - RNA, 16 nt, Human
ugcaguucugaagaag

SEQ ID NO: 2994177 - RNA, 15 nt, Human
ugcaguucugaagaa

SEQ ID NO: 2994178 - RNA, 14 nt, Human
ugcaguucugaaga

SEQ ID NO: 2994179 - RNA, 22 nt, Human
ugcagugguaugaucacggcuc

SEQ ID NO: 2994180 - RNA, 13 nt, Human
ugcaguugccagu

SEQ ID NO: 2994181 - RNA, 14 nt, Human
ugcaguugccaguc

SEQ ID NO: 2994182 - RNA, 22 nt, Human
ugcaguucugaagaagauggua

SEQ ID NO: 2994183 - RNA, 19 nt, Human
ugcaguucugaagaagaug

SEQ ID NO: 2994184 - RNA, 15 nt, Human
ugcaguugccaguca

SEQ ID NO: 2994185 - RNA, 12 nt, Human
ugccaucccucc

SEQ ID NO: 2994186 - RNA, 11 nt, Human
ugccaucccuc

SEQ ID NO: 2994187 - RNA, 20 nt, Human
ugccauccagguucagcuug

SEQ ID NO: 2994188 - RNA, 21 nt, Human
ugccauccagguucagcuugu

SEQ ID NO: 2994189 - RNA, 13 nt, Human
ugcccacucccug

SEQ ID NO: 2994190 - RNA, 13 nt, Human
ugcccaccuggcc

SEQ ID NO: 2994191 - RNA, 14 nt, Human
ugcccacucccugc

SEQ ID NO: 2994192 - RNA, 15 nt, Human
ugcccacucccugca

SEQ ID NO: 2994193 - RNA, 16 nt, Human
ugcccacucccugcaa

SEQ ID NO: 2994194 - RNA, 11 nt, Human
ugcccaggcug

SEQ ID NO: 2994195 - RNA, 23 nt, Human
ugccccucaacucuccuccagag

SEQ ID NO: 2994196 - RNA, 17 nt, Human
ugccccuggcagccccu

SEQ ID NO: 2994197 - RNA, 19 nt, Human
ugccccucaacucuccucc

SEQ ID NO: 2994198 - RNA, 20 nt, Human
ugccacuaaauugacacuua

SEQ ID NO: 2994199 - RNA, 19 nt, Human
ugccacccuggggagaaag

SEQ ID NO: 2994200 - RNA, 22 nt, Human
ugccacuacggaauaguuggcu

SEQ ID NO: 2994201 - RNA, 22 nt, Human
ugccagguuuuuggucugaccc

SEQ ID NO: 2994202 - RNA, 19 nt, Human
ugccagguuuuuggucuga

SEQ ID NO: 2994203 - RNA, 18 nt, Human
ugccagguuuuuggucug

SEQ ID NO: 2994204 - RNA, 17 nt, Human
ugccaaauauaaauaaa

SEQ ID NO: 2994205 - RNA, 18 nt, Human
ugccaaauauaaauaaaa

SEQ ID NO: 2994206 - RNA, 19 nt, Human
ugccaaauauaaauaaaaa

SEQ ID NO: 2994207 - RNA, 22 nt, Human
ugccaaauauaaauaaaaauaa

SEQ ID NO: 2994208 - RNA, 14 nt, Human
ugcaucaagaugug

SEQ ID NO: 2994209 - RNA, 19 nt, Human
ugcaucaagaugugacaug

SEQ ID NO: 2994210 - RNA, 16 nt, Human
ugcucaguagucagac

SEQ ID NO: 2994211 - RNA, 14 nt, Human
ugcuccucucccca

SEQ ID NO: 2994212 - RNA, 19 nt, Human
ugcuaagcauuccaacuau

SEQ ID NO: 2994213 - RNA, 15 nt, Human
ugcuaagcauuccaa

SEQ ID NO: 2994214 - RNA, 16 nt, Human
ugcucacauaucuguc

SEQ ID NO: 2994215 - RNA, 15 nt, Human
ugcucacauaucugu

SEQ ID NO: 2994216 - RNA, 17 nt, Human
ugcugaaacaacaaaua

SEQ ID NO: 2994217 - RNA, 17 nt, Human
ugcuccucuccccagca

SEQ ID NO: 2994218 - RNA, 18 nt, Human
ugcuccuuucuuguuuua

SEQ ID NO: 2994219 - RNA, 14 nt, Human
ugcugauuuaaaca

SEQ ID NO: 2994220 - RNA, 18 nt, Human
ugcugauggugcaaugac

SEQ ID NO: 2994221 - RNA, 17 nt, Human
ugcugauuuaaacacau

SEQ ID NO: 2994222 - RNA, 15 nt, Human
ugcugauuuaaacac

SEQ ID NO: 2994223 - RNA, 15 nt, Human
ugcugauggugcaau

SEQ ID NO: 2994224 - RNA, 17 nt, Human
ugcugauggugcaauga

SEQ ID NO: 2994225 - RNA, 13 nt, Human
ugcugauggugca

SEQ ID NO: 2994226 - RNA, 12 nt, Human
ugcugaaggcuc

SEQ ID NO: 2994227 - RNA, 13 nt, Human
ugcugaaggcucg

SEQ ID NO: 2994228 - RNA, 19 nt, Human
ugcugacagacacaggccc

SEQ ID NO: 2994229 - RNA, 23 nt, Human
ugcugacagacacaggcccggcu

SEQ ID NO: 2994230 - RNA, 22 nt, Human
ugcugacagacacaggcccggc

SEQ ID NO: 2994231 - RNA, 18 nt, Human
ugcugcaguugccaguca

SEQ ID NO: 2994232 - RNA, 23 nt, Human
ugcugcaguugccagucaccccg

SEQ ID NO: 2994233 - RNA, 13 nt, Human
ugcugcuggcugg

SEQ ID NO: 2994234 - RNA, 23 nt, Human
ugcuaacagcaacacaaagcuuu

SEQ ID NO: 2994235 - RNA, 22 nt, Human
ugcuaacagcaacacaaagcuu

SEQ ID NO: 2994236 - RNA, 21 nt, Human
ugcuaacagcaacacaaagcu

SEQ ID NO: 2994237 - RNA, 15 nt, Human
ugcuaaaugugaaug

SEQ ID NO: 2994238 - RNA, 16 nt, Human
ugcgccuacaggagug

SEQ ID NO: 2994239 - RNA, 14 nt, Human
ugcgccuacaggag

SEQ ID NO: 2994240 - RNA, 22 nt, Human
ugcgccuacaggagugagcacu

SEQ ID NO: 2994241 - RNA, 13 nt, Human
ugcgccuacagga

SEQ ID NO: 2994242 - RNA, 15 nt, Human
ugccuucucaacucc

SEQ ID NO: 2994243 - RNA, 21 nt, Human
ugcgaucuggguucacugcaa

SEQ ID NO: 2994244 - RNA, 20 nt, Human
ugcgaucuggguucacugca

SEQ ID NO: 2994245 - RNA, 19 nt, Human
ugcgaucuggguucacugc

SEQ ID NO: 2994246 - RNA, 15 nt, Human
ugcgaucuggguuca

SEQ ID NO: 2994247 - RNA, 14 nt, Human
ugcgaucuggguuc

SEQ ID NO: 2994248 - RNA, 18 nt, Human
ugccuguaaucacagcua

SEQ ID NO: 2994249 - RNA, 16 nt, Human
ugccugguggcagcug

SEQ ID NO: 2994250 - RNA, 15 nt, Human
ugccugguggcagcu

SEQ ID NO: 2994251 - RNA, 14 nt, Human
ugccugguggcagc

SEQ ID NO: 2994252 - RNA, 21 nt, Human
ugccugggaucccucauccuc

SEQ ID NO: 2994253 - RNA, 18 nt, Human
ugccugggcagaaggaag

SEQ ID NO: 2994254 - RNA, 19 nt, Human
ugccucgaacuggcugcaa

SEQ ID NO: 2994255 - RNA, 18 nt, Human
ugccucgaacuggcugca

SEQ ID NO: 2994256 - RNA, 20 nt, Human
ugccucgaacuggcugcaaa

SEQ ID NO: 2994257 - RNA, 18 nt, Human
ugccccuggcagccccug

SEQ ID NO: 2994258 - RNA, 17 nt, Human
ugccucucccugcugcu

SEQ ID NO: 2994259 - RNA, 20 nt, Human
ugccucucccugcugcuccu

SEQ ID NO: 2994260 - RNA, 14 nt, Human
ucggagcccugucu

SEQ ID NO: 2994261 - RNA, 15 nt, Human
ucggagcccugucuc

SEQ ID NO: 2994262 - RNA, 16 nt, Human
ucggccuccauccuga

SEQ ID NO: 2994263 - RNA, 15 nt, Human
ucggccuccauccug

SEQ ID NO: 2994264 - RNA, 19 nt, Human
ucggccccaccagugccuc

SEQ ID NO: 2994265 - RNA, 18 nt, Human
ucggccccaccagugccu

SEQ ID NO: 2994266 - RNA, 23 nt, Human
ucgucacugcuuaacuucacaua

SEQ ID NO: 2994267 - RNA, 18 nt, Human
ucggaaaacaugcuacac

SEQ ID NO: 2994268 - RNA, 15 nt, Human
ucggaaaacaugcua

SEQ ID NO: 2994269 - RNA, 23 nt, Human
ucgcccagucuggaaugcagugg

SEQ ID NO: 2994270 - RNA, 19 nt, Human
ucgcccagucuggaaugca

SEQ ID NO: 2994271 - RNA, 14 nt, Human
ucgcccagucugga

SEQ ID NO: 2994272 - RNA, 18 nt, Human
uccuuuucgcaggauucu

SEQ ID NO: 2994273 - RNA, 22 nt, Human
uccuuuucgcaggauucuuccu

SEQ ID NO: 2994274 - RNA, 23 nt, Human
ucgcaggauucuuccucccuccc

SEQ ID NO: 2994275 - RNA, 21 nt, Human
ucgcaggauucuuccucccuc

SEQ ID NO: 2994276 - RNA, 17 nt, Human
ucgcaggauucuuccuc

SEQ ID NO: 2994277 - RNA, 20 nt, Human
uccuuaccagcagagcaccu

SEQ ID NO: 2994278 - RNA, 21 nt, Human
uccuuaccagcagagcaccuu

SEQ ID NO: 2994279 - RNA, 22 nt, Human
uccuugaaaacacuguucucug

SEQ ID NO: 2994280 - RNA, 23 nt, Human
uccuugaaaacacuguucucugc

SEQ ID NO: 2994281 - RNA, 17 nt, Human
uccuugcaucaauuuuu

SEQ ID NO: 2994282 - RNA, 18 nt, Human
uccuuggugucgggcaug

SEQ ID NO: 2994283 - RNA, 21 nt, Human
uccuuggugucgggcaugaca

SEQ ID NO: 2994284 - RNA, 18 nt, Human
uccuuugugaggaagccg

SEQ ID NO: 2994285 - RNA, 22 nt, Human
uccuuugugaggaagccgcugg

SEQ ID NO: 2994286 - RNA, 17 nt, Human
uccuuugugaggaagcc

SEQ ID NO: 2994287 - RNA, 22 nt, Human
uccuuggugucgggcaugacac

SEQ ID NO: 2994288 - RNA, 16 nt, Human
ucucaaauuucuaaau

SEQ ID NO: 2994289 - RNA, 14 nt, Human
ucucaaauuucuaa

SEQ ID NO: 2994290 - RNA, 13 nt, Human
ucucaaauuucua

SEQ ID NO: 2994291 - RNA, 18 nt, Human
ucucaaauuucuaaaucu

SEQ ID NO: 2994292 - RNA, 16 nt, Human
ucucacacaugagcau

SEQ ID NO: 2994293 - RNA, 20 nt, Human
ucucacugccaugccagcuu

SEQ ID NO: 2994294 - RNA, 21 nt, Human
ucucacacaugagcaucaggc

SEQ ID NO: 2994295 - RNA, 23 nt, Human
ucucacucugucgcccagucugg

SEQ ID NO: 2994296 - RNA, 15 nt, Human
ucucacuguugccca

SEQ ID NO: 2994297 - RNA, 14 nt, Human
ucucacuguugccc

SEQ ID NO: 2994298 - RNA, 12 nt, Human
ucuacuaaaaau

SEQ ID NO: 2994299 - RNA, 15 nt, Human
ucuacuaaaaauaca

SEQ ID NO: 2994300 - RNA, 19 nt, Human
ucuacuaaaaauacaaaaa

SEQ ID NO: 2994301 - RNA, 16 nt, Human
ucuacuaaaaaugcaa

SEQ ID NO: 2994302 - RNA, 13 nt, Human
ucuauauuuuaca

SEQ ID NO: 2994303 - RNA, 12 nt, Human
ucuagggaaaaa

SEQ ID NO: 2994304 - RNA, 20 nt, Human
ucuacucgaguuacagacaa

SEQ ID NO: 2994305 - RNA, 21 nt, Human
ucuacucgaguuacagacaaa

SEQ ID NO: 2994306 - RNA, 18 nt, Human
ucuacucuagggaaaaac

SEQ ID NO: 2994307 - RNA, 18 nt, Human
ucuaggaggucucuaaga

SEQ ID NO: 2994308 - RNA, 15 nt, Human
uccugaggcugggcu

SEQ ID NO: 2994309 - RNA, 16 nt, Human
uccugaggcugggcuc

SEQ ID NO: 2994310 - RNA, 17 nt, Human
uccugaggcugggcucc

SEQ ID NO: 2994311 - RNA, 19 nt, Human
uccugaggcugggcucccu

SEQ ID NO: 2994312 - RNA, 12 nt, Human
uccugaggcugg

SEQ ID NO: 2994313 - RNA, 21 nt, Human
uccugaggcuccacuuggucu

SEQ ID NO: 2994314 - RNA, 16 nt, Human
uccugaggcuccacuu

SEQ ID NO: 2994315 - RNA, 18 nt, Human
uccugagccagauuucac

SEQ ID NO: 2994316 - RNA, 19 nt, Human
uccugagccagauuucacu

SEQ ID NO: 2994317 - RNA, 15 nt, Human
uccugaggcuccacu

SEQ ID NO: 2994318 - RNA, 17 nt, Human
uccugagccagauuuca

SEQ ID NO: 2994319 - RNA, 23 nt, Human
uccucuguacagagcccacgccc

SEQ ID NO: 2994320 - RNA, 19 nt, Human
uccucuguacagagcccac

SEQ ID NO: 2994321 - RNA, 17 nt, Human
uccucugcuugccaucc

SEQ ID NO: 2994322 - RNA, 16 nt, Human
uccucugcuugccauc

SEQ ID NO: 2994323 - RNA, 15 nt, Human
uccucugcuugccau

SEQ ID NO: 2994324 - RNA, 14 nt, Human
uccucugcuugcca

SEQ ID NO: 2994325 - RNA, 17 nt, Human
uccucugcugcuggcug

SEQ ID NO: 2994326 - RNA, 13 nt, Human
uccucuguacaga

SEQ ID NO: 2994327 - RNA, 15 nt, Human
uccucuggccugugu

SEQ ID NO: 2994328 - RNA, 21 nt, Human
uccucuaggaggucucuaaga

SEQ ID NO: 2994329 - RNA, 17 nt, Human
uccucuaggaggucucu

SEQ ID NO: 2994330 - RNA, 22 nt, Human
uccucuagugaauguaggcugg

SEQ ID NO: 2994331 - RNA, 21 nt, Human
uccuccuuuucacaguucucu

SEQ ID NO: 2994332 - RNA, 14 nt, Human
uccuaguuccacca

SEQ ID NO: 2994333 - RNA, 17 nt, Human
uccuaguuccaccauca

SEQ ID NO: 2994334 - RNA, 18 nt, Human
uccuaagcuauucaguaa

SEQ ID NO: 2994335 - RNA, 12 nt, Human
uccuaguuccac

SEQ ID NO: 2994336 - RNA, 16 nt, Human
uccuaagcuauucagu

SEQ ID NO: 2994337 - RNA, 21 nt, Human
uccuaguuccaccaucaagcc

SEQ ID NO: 2994338 - RNA, 14 nt, Human
uccuccaggugcac

SEQ ID NO: 2994339 - RNA, 18 nt, Human
uccuccaggugcacaagc

SEQ ID NO: 2994340 - RNA, 20 nt, Human
uccuccaggugcacaagcuc

SEQ ID NO: 2994341 - RNA, 22 nt, Human
uccuccaggugcacaagcucca

SEQ ID NO: 2994342 - RNA, 12 nt, Human
uccuccaggugc

SEQ ID NO: 2994343 - RNA, 13 nt, Human
uccuccaggugca

SEQ ID NO: 2994344 - RNA, 12 nt, Human
uccuccucagau

SEQ ID NO: 2994345 - RNA, 21 nt, Human
uccgcuuucuacccagcgagc

SEQ ID NO: 2994346 - RNA, 22 nt, Human
uccgaaagggacuuggaagcuc

SEQ ID NO: 2994347 - RNA, 17 nt, Human
uccgaccagacaccuug

SEQ ID NO: 2994348 - RNA, 21 nt, Human
uccgaaagggacuuggaagcu

SEQ ID NO: 2994349 - RNA, 17 nt, Human
ucccuucccaccucucu

SEQ ID NO: 2994350 - RNA, 21 nt, Human
ucccuucccacuggaggcaug

SEQ ID NO: 2994351 - RNA, 14 nt, Human
ucccuucccaccuc

SEQ ID NO: 2994352 - RNA, 16 nt, Human
ucccuucccaccucuc

SEQ ID NO: 2994353 - RNA, 13 nt, Human
ucccucuggggcu

SEQ ID NO: 2994354 - RNA, 17 nt, Human
ucccucuggggcuguuc

SEQ ID NO: 2994355 - RNA, 20 nt, Human
ucccugcacuugcagacucu

SEQ ID NO: 2994356 - RNA, 14 nt, Human
ucccugccaaugga

SEQ ID NO: 2994357 - RNA, 16 nt, Human
ucccugccaauggacu

SEQ ID NO: 2994358 - RNA, 18 nt, Human
ucccucccuuccucuuuc

SEQ ID NO: 2994359 - RNA, 22 nt, Human
ucccaugagccucagcauccug

SEQ ID NO: 2994360 - RNA, 23 nt, Human
ucccaugagggagaugccaugag

SEQ ID NO: 2994361 - RNA, 19 nt, Human
ucccaugagggagaugcca

SEQ ID NO: 2994362 - RNA, 17 nt, Human
uccauagagagcaagac

SEQ ID NO: 2994363 - RNA, 20 nt, Human
uccauagagagcaagacgcu

SEQ ID NO: 2994364 - RNA, 19 nt, Human
ucccaacucaccccagccc

SEQ ID NO: 2994365 - RNA, 21 nt, Human
ucccaacucaccccagcccca

SEQ ID NO: 2994366 - RNA, 17 nt, Human
ucccaacucaccccagc

SEQ ID NO: 2994367 - RNA, 18 nt, Human
ucccaacucaccccagcc

SEQ ID NO: 2994368 - RNA, 16 nt, Human
ucccaugagccucagc

SEQ ID NO: 2994369 - RNA, 15 nt, Human
ucccaugagccucag

SEQ ID NO: 2994370 - RNA, 17 nt, Human
ucccaggcauuccccag

SEQ ID NO: 2994371 - RNA, 18 nt, Human
ucccaggcauuccccagg

SEQ ID NO: 2994372 - RNA, 14 nt, Human
ucccacucagucca

SEQ ID NO: 2994373 - RNA, 20 nt, Human
ucccaccucucucacuccuu

SEQ ID NO: 2994374 - RNA, 18 nt, Human
ucccaccuuggcugcagg

SEQ ID NO: 2994375 - RNA, 21 nt, Human
ucccaccuuggcugcagggag

SEQ ID NO: 2994376 - RNA, 19 nt, Human
ucccaccuuggcugcaggg

SEQ ID NO: 2994377 - RNA, 17 nt, Human
ucccaccucucucacuc

SEQ ID NO: 2994378 - RNA, 18 nt, Human
ucccaccucucucacucc

SEQ ID NO: 2994379 - RNA, 14 nt, Human
ucccaccucucuca

SEQ ID NO: 2994380 - RNA, 16 nt, Human
ucccaccucagccucc

SEQ ID NO: 2994381 - RNA, 18 nt, Human
ucccaccucagccucccg

SEQ ID NO: 2994382 - RNA, 22 nt, Human
uccagcugcugagauccuggac

SEQ ID NO: 2994383 - RNA, 21 nt, Human
uccagcugcugagauccugga

SEQ ID NO: 2994384 - RNA, 18 nt, Human
uccagcugcugagauccu

SEQ ID NO: 2994385 - RNA, 14 nt, Human
uccacuuucuagcc

SEQ ID NO: 2994386 - RNA, 17 nt, Human
uccagagccccacagcc

SEQ ID NO: 2994387 - RNA, 22 nt, Human
uccacugugccaugugccaggu

SEQ ID NO: 2994388 - RNA, 14 nt, Human
uccacccugcucuc

SEQ ID NO: 2994389 - RNA, 13 nt, Human
uccacccugcucu

SEQ ID NO: 2994390 - RNA, 21 nt, Human
uccacccugcucuccgaccag

SEQ ID NO: 2994391 - RNA, 20 nt, Human
uccaagcauuuagauguaua

SEQ ID NO: 2994392 - RNA, 14 nt, Human
uccaagcaggacau

SEQ ID NO: 2994393 - RNA, 19 nt, Human
uccaagaccuucuccuuca

SEQ ID NO: 2994394 - RNA, 20 nt, Human
uccaagaccuucuccuucac

SEQ ID NO: 2994395 - RNA, 15 nt, Human
uccaagaagcccagg

SEQ ID NO: 2994396 - RNA, 16 nt, Human
uccaagaagcccagga

SEQ ID NO: 2994397 - RNA, 14 nt, Human
uccaagaagcccag

SEQ ID NO: 2994398 - RNA, 20 nt, Human
uccacaagagcccaggccuc

SEQ ID NO: 2994399 - RNA, 19 nt, Human
uccacaagagcccaggccu

SEQ ID NO: 2994400 - RNA, 21 nt, Human
uccacaagagcccaggccucc

SEQ ID NO: 2994401 - RNA, 18 nt, Human
ucaguccaugaagaugua

SEQ ID NO: 2994402 - RNA, 15 nt, Human
ucaguccauagcaga

SEQ ID NO: 2994403 - RNA, 17 nt, Human
ucagguggggucacucu

SEQ ID NO: 2994404 - RNA, 20 nt, Human
ucagguggggucacucuggc

SEQ ID NO: 2994405 - RNA, 21 nt, Human
ucagguggggucacucuggca

SEQ ID NO: 2994406 - RNA, 17 nt, Human
ucagguggggcagcuug

SEQ ID NO: 2994407 - RNA, 21 nt, Human
ucagguggggcagcuugaggg

SEQ ID NO: 2994408 - RNA, 16 nt, Human
ucagguggggcagcuu

SEQ ID NO: 2994409 - RNA, 15 nt, Human
ucagguggggcagcu

SEQ ID NO: 2994410 - RNA, 20 nt, Human
ucaggugcugccauccaggu

SEQ ID NO: 2994411 - RNA, 18 nt, Human
ucaggugcugccauccag

SEQ ID NO: 2994412 - RNA, 14 nt, Human
ucagguggggcagc

SEQ ID NO: 2994413 - RNA, 17 nt, Human
ucagucugauucccaag

SEQ ID NO: 2994414 - RNA, 18 nt, Human
ucagugugacugaucucu

SEQ ID NO: 2994415 - RNA, 13 nt, Human
ucaugaaagauuc

SEQ ID NO: 2994416 - RNA, 19 nt, Human
ucauggaauuggagcucgu

SEQ ID NO: 2994417 - RNA, 21 nt, Human
ucauggaauuggagcucgugg

SEQ ID NO: 2994418 - RNA, 15 nt, Human
ucauacucaccucac

SEQ ID NO: 2994419 - RNA, 17 nt, Human
ucagcacgauuucuguu

SEQ ID NO: 2994420 - RNA, 16 nt, Human
ucagcacgauuucugu

SEQ ID NO: 2994421 - RNA, 15 nt, Human
ucagcacgauuucug

SEQ ID NO: 2994422 - RNA, 12 nt, Human
ucagccucccaa

SEQ ID NO: 2994423 - RNA, 18 nt, Human
ucagcauccuggcacccg

SEQ ID NO: 2994424 - RNA, 17 nt, Human
ucagcauccuggcaccc

SEQ ID NO: 2994425 - RNA, 16 nt, Human
ucagcauccuggcacc

SEQ ID NO: 2994426 - RNA, 15 nt, Human
ucagcauccuggcac

SEQ ID NO: 2994427 - RNA, 18 nt, Human
ucagauaugauucaaaug

SEQ ID NO: 2994428 - RNA, 16 nt, Human
ucagauaugauucaaa

SEQ ID NO: 2994429 - RNA, 17 nt, Human
ucagauaugauucaaau

SEQ ID NO: 2994430 - RNA, 22 nt, Human
ucagcuccccucggagaagagc

SEQ ID NO: 2994431 - RNA, 21 nt, Human
ucagcuccccucggagaagag

SEQ ID NO: 2994432 - RNA, 22 nt, Human
ucagcuccagcucaccagcccc

SEQ ID NO: 2994433 - RNA, 21 nt, Human
ucagcuccagcucaccagccc

SEQ ID NO: 2994434 - RNA, 18 nt, Human
ucagcuccagcucaccag

SEQ ID NO: 2994435 - RNA, 15 nt, Human
ucagcuccagcucac

SEQ ID NO: 2994436 - RNA, 20 nt, Human
ucagccucccgaauagcugg

SEQ ID NO: 2994437 - RNA, 12 nt, Human
ucagccucccga

SEQ ID NO: 2994438 - RNA, 22 nt, Human
ucagccucccaaagugcuggga

SEQ ID NO: 2994439 - RNA, 16 nt, Human
ucagccugcuccagcu

SEQ ID NO: 2994440 - RNA, 16 nt, Human
ucagcugcugaaacaa

SEQ ID NO: 2994441 - RNA, 15 nt, Human
ucagcugcuacuacu

SEQ ID NO: 2994442 - RNA, 14 nt, Human
ucuggacuaaaacu

SEQ ID NO: 2994443 - RNA, 14 nt, Human
ucugcugcuggcug

SEQ ID NO: 2994444 - RNA, 15 nt, Human
ucugcugcuggcugg

SEQ ID NO: 2994445 - RNA, 17 nt, Human
ucugcugcuggcugguu

SEQ ID NO: 2994446 - RNA, 16 nt, Human
ucuggaaugcaguggu

SEQ ID NO: 2994447 - RNA, 20 nt, Human
ucugccugcccaggccccug

SEQ ID NO: 2994448 - RNA, 18 nt, Human
ucugccugcccaggcccc

SEQ ID NO: 2994449 - RNA, 17 nt, Human
ucugccugcccaggccc

SEQ ID NO: 2994450 - RNA, 16 nt, Human
ucugccugcccaggcc

SEQ ID NO: 2994451 - RNA, 21 nt, Human
ucugcuccucuccccagcaag

SEQ ID NO: 2994452 - RNA, 11 nt, Human
ucugcugcugg

SEQ ID NO: 2994453 - RNA, 13 nt, Human
ucugcugcuggcu

SEQ ID NO: 2994454 - RNA, 14 nt, Human
ucugucucagucca

SEQ ID NO: 2994455 - RNA, 13 nt, Human
ucugucuaggaau

SEQ ID NO: 2994456 - RNA, 16 nt, Human
ucugucgcccagucug

SEQ ID NO: 2994457 - RNA, 17 nt, Human
ucugucgcccagucugg

SEQ ID NO: 2994458 - RNA, 12 nt, Human
ucuguccuggga

SEQ ID NO: 2994459 - RNA, 14 nt, Human
ucuguacagagccc

SEQ ID NO: 2994460 - RNA, 15 nt, Human
ucuguacagagccca

SEQ ID NO: 2994461 - RNA, 20 nt, Human
ucuguccuacucugugucag

SEQ ID NO: 2994462 - RNA, 16 nt, Human
ucuggugacuuuccuc

SEQ ID NO: 2994463 - RNA, 13 nt, Human
ucugccucccauc

SEQ ID NO: 2994464 - RNA, 15 nt, Human
ucugccucccaucac

SEQ ID NO: 2994465 - RNA, 12 nt, Human
ucugccucccau

SEQ ID NO: 2994466 - RNA, 13 nt, Human
ucugcccacuccc

SEQ ID NO: 2994467 - RNA, 14 nt, Human
ucugcccacucccu

SEQ ID NO: 2994468 - RNA, 23 nt, Human
ucugccauauucuguuggccagu

SEQ ID NO: 2994469 - RNA, 22 nt, Human
ucugccauauucuguuggccag

SEQ ID NO: 2994470 - RNA, 12 nt, Human
ucugcccacucc

SEQ ID NO: 2994471 - RNA, 18 nt, Human
ucugccauauucuguugg

SEQ ID NO: 2994472 - RNA, 20 nt, Human
ucugccugaagucacacagu

SEQ ID NO: 2994473 - RNA, 19 nt, Human
ucugccugaagucacacag

SEQ ID NO: 2994474 - RNA, 22 nt, Human
ucugccucugacacacagcucu

SEQ ID NO: 2994475 - RNA, 21 nt, Human
ucugccucugacacacagcuc

SEQ ID NO: 2994476 - RNA, 23 nt, Human
ucugccucugacacacagcucug

SEQ ID NO: 2994477 - RNA, 16 nt, Human
ucugccucccaucacc

SEQ ID NO: 2994478 - RNA, 17 nt, Human
ucugccucccaucaccc

SEQ ID NO: 2994479 - RNA, 20 nt, Human
ucugccucccaucacccgcu

SEQ ID NO: 2994480 - RNA, 21 nt, Human
ucugccucccaucacccgcua

SEQ ID NO: 2994481 - RNA, 18 nt, Human
ucugccucugacacacag

SEQ ID NO: 2994482 - RNA, 15 nt, Human
ucugccucugacaca

SEQ ID NO: 2994483 - RNA, 13 nt, Human
ucugcacuccccu

SEQ ID NO: 2994484 - RNA, 21 nt, Human
ucugaggaauccagacccggc

SEQ ID NO: 2994485 - RNA, 18 nt, Human
ucugaggaauccagaccc

SEQ ID NO: 2994486 - RNA, 13 nt, Human
ucugauuuaauug

SEQ ID NO: 2994487 - RNA, 22 nt, Human
ucugaggaauccagacccggcu

SEQ ID NO: 2994488 - RNA, 19 nt, Human
ucugacccaugcugcccug

SEQ ID NO: 2994489 - RNA, 20 nt, Human
ucugacccaugcugcccugu

SEQ ID NO: 2994490 - RNA, 22 nt, Human
ucugacccaugcugcccuguga

SEQ ID NO: 2994491 - RNA, 23 nt, Human
ucugacccaugcugcccugugag

SEQ ID NO: 2994492 - RNA, 18 nt, Human
ucugagaggacuuuucuu

SEQ ID NO: 2994493 - RNA, 20 nt, Human
ugaaacacugguuuuaaaua

SEQ ID NO: 2994494 - RNA, 15 nt, Human
ugaaacacugguuuu

SEQ ID NO: 2994495 - RNA, 12 nt, Human
ugaaaauuuuga

SEQ ID NO: 2994496 - RNA, 14 nt, Human
ugaaaauucagugg

SEQ ID NO: 2994497 - RNA, 20 nt, Human
ugaaaagaaaaaugagccug

SEQ ID NO: 2994498 - RNA, 22 nt, Human
ugaaaagaaaaaugagccuggc

SEQ ID NO: 2994499 - RNA, 19 nt, Human
ugaaaagaaaaaugagccu

SEQ ID NO: 2994500 - RNA, 15 nt, Human
ugaaaagaaaaauga

SEQ ID NO: 2994501 - RNA, 21 nt, Human
ugaaaacacauuuuucuuagg

SEQ ID NO: 2994502 - RNA, 20 nt, Human
ugaaaacacauuuuucuuag

SEQ ID NO: 2994503 - RNA, 17 nt, Human
ugaaaacacuguucucu

SEQ ID NO: 2994504 - RNA, 20 nt, Human
ugaaaacacuguucucugcc

SEQ ID NO: 2994505 - RNA, 21 nt, Human
ugaaaacacuguucucugccc

SEQ ID NO: 2994506 - RNA, 22 nt, Human
ugaaaacacuguucucugcccu

SEQ ID NO: 2994507 - RNA, 23 nt, Human
ugaaaacacuguucucugcccuc

SEQ ID NO: 2994508 - RNA, 12 nt, Human
ucuuucccuccc

SEQ ID NO: 2994509 - RNA, 17 nt, Human
ucuuuccaaaguacacu

SEQ ID NO: 2994510 - RNA, 17 nt, Human
ucuuuccacagaagcuc

SEQ ID NO: 2994511 - RNA, 23 nt, Human
ucuuucccucccuuccucuuucc

SEQ ID NO: 2994512 - RNA, 13 nt, Human
ucuuucccucccu

SEQ ID NO: 2994513 - RNA, 23 nt, Human
ucuuuccaaaguacacuguuuca

SEQ ID NO: 2994514 - RNA, 13 nt, Human
ucuuguguguuua

SEQ ID NO: 2994515 - RNA, 19 nt, Human
ucuugugguuauaacuuaa

SEQ ID NO: 2994516 - RNA, 23 nt, Human
ucuugugguuauaacuuaaugaa

SEQ ID NO: 2994517 - RNA, 16 nt, Human
ucuuuggacccugagg

SEQ ID NO: 2994518 - RNA, 14 nt, Human
ucuuuggacccuga

SEQ ID NO: 2994519 - RNA, 15 nt, Human
ucuuuggacccugag

SEQ ID NO: 2994520 - RNA, 13 nt, Human
ucuuuggacccug

SEQ ID NO: 2994521 - RNA, 17 nt, Human
ucuuugcagacaggcaa

SEQ ID NO: 2994522 - RNA, 14 nt, Human
ucuuugcagacagg

SEQ ID NO: 2994523 - RNA, 23 nt, Human
ucuuugagugaagcugggagaac

SEQ ID NO: 2994524 - RNA, 13 nt, Human
ucuuugcagacag

SEQ ID NO: 2994525 - RNA, 18 nt, Human
ucuucaguuugcagagua

SEQ ID NO: 2994526 - RNA, 17 nt, Human
ucuucaguuugcagagu

SEQ ID NO: 2994527 - RNA, 22 nt, Human
ucuuauccaacaucaacaucuu

SEQ ID NO: 2994528 - RNA, 21 nt, Human
ucuucagagacuccugcaggc

SEQ ID NO: 2994529 - RNA, 14 nt, Human
ucuuaucuuacgaa

SEQ ID NO: 2994530 - RNA, 14 nt, Human
ucuucagaucucua

SEQ ID NO: 2994531 - RNA, 13 nt, Human
ucuuauaauuuaa

SEQ ID NO: 2994532 - RNA, 14 nt, Human
ucuuauaauuuaaa

SEQ ID NO: 2994533 - RNA, 20 nt, Human
ucuuagguuggcaaaaaggc

SEQ ID NO: 2994534 - RNA, 23 nt, Human
ucuuagguuggcaaaaaggcagg

SEQ ID NO: 2994535 - RNA, 22 nt, Human
ucuuaggguuaugauuaaguaa

SEQ ID NO: 2994536 - RNA, 20 nt, Human
ucugugucagguggggcagc

SEQ ID NO: 2994537 - RNA, 17 nt, Human
ucugugucagguggggc

SEQ ID NO: 2994538 - RNA, 14 nt, Human
ucuuagauguauau

SEQ ID NO: 2994539 - RNA, 15 nt, Human
ucuuagauguauaua

SEQ ID NO: 2994540 - RNA, 19 nt, Human
ucuugccaaauauaaauaa

SEQ ID NO: 2994541 - RNA, 19 nt, Human
ucuugcaugguuuggagcu

SEQ ID NO: 2994542 - RNA, 15 nt, Human
ucuugcaugguuugg

SEQ ID NO: 2994543 - RNA, 20 nt, Human
ucuugcaugguuuggagcug

SEQ ID NO: 2994544 - RNA, 14 nt, Human
ucuugcucugcuga

SEQ ID NO: 2994545 - RNA, 23 nt, Human
ucuugcucugcugacagacacag

SEQ ID NO: 2994546 - RNA, 15 nt, Human
ucuugcucugcugac

SEQ ID NO: 2994547 - RNA, 13 nt, Human
ucuugaagacuuu

SEQ ID NO: 2994548 - RNA, 22 nt, Human
ucuugaagacuuuucuuucagc

SEQ ID NO: 2994549 - RNA, 15 nt, Human
ucuugcaugaggcua

SEQ ID NO: 2994550 - RNA, 21 nt, Human
ucuugaaauauaggaacuuaa

SEQ ID NO: 2994551 - RNA, 20 nt, Human
ucuugaaauauaggaacuua

SEQ ID NO: 2994552 - RNA, 16 nt, Human
ucuucuuggucucagu

SEQ ID NO: 2994553 - RNA, 15 nt, Human
ugacucuucccucaa

SEQ ID NO: 2994554 - RNA, 16 nt, Human
ugacucuuaagaagac

SEQ ID NO: 2994555 - RNA, 15 nt, Human
ugacucuuaagaaga

SEQ ID NO: 2994556 - RNA, 14 nt, Human
ugacucuuaagaag

SEQ ID NO: 2994557 - RNA, 13 nt, Human
ugacucuuaagaa

SEQ ID NO: 2994558 - RNA, 16 nt, Human
ugaccaugaaagacuu

SEQ ID NO: 2994559 - RNA, 13 nt, Human
ugaccauucucca

SEQ ID NO: 2994560 - RNA, 14 nt, Human
ugaccauucuccac

SEQ ID NO: 2994561 - RNA, 16 nt, Human
ugacuuuccucuuugg

SEQ ID NO: 2994562 - RNA, 21 nt, Human
ugacucuuucuauuguuucuu

SEQ ID NO: 2994563 - RNA, 21 nt, Human
ugagaaacuggcaaagcagaa

SEQ ID NO: 2994564 - RNA, 20 nt, Human
ugagaaagacuauucaaaca

SEQ ID NO: 2994565 - RNA, 15 nt, Human
ugagaaagacuauuc

SEQ ID NO: 2994566 - RNA, 15 nt, Human
ugagaaauaaaguuu

SEQ ID NO: 2994567 - RNA, 22 nt, Human
ugacuuuucuguccgagcuuug

SEQ ID NO: 2994568 - RNA, 20 nt, Human
ugagcaggauuuuaaucuuu

SEQ ID NO: 2994569 - RNA, 15 nt, Human
ugagcaggauuuuaa

SEQ ID NO: 2994570 - RNA, 14 nt, Human
ugagaggggaacag

SEQ ID NO: 2994571 - RNA, 18 nt, Human
ugagaggggaacagacug

SEQ ID NO: 2994572 - RNA, 14 nt, Human
ugagaccaaccugg

SEQ ID NO: 2994573 - RNA, 15 nt, Human
ugaggcugggcuccc

SEQ ID NO: 2994574 - RNA, 16 nt, Human
ugaggcugggcucccu

SEQ ID NO: 2994575 - RNA, 18 nt, Human
ugaggcucugcccuuggu

SEQ ID NO: 2994576 - RNA, 16 nt, Human
ugaggcucugcccuug

SEQ ID NO: 2994577 - RNA, 15 nt, Human
ugaggcucugcccuu

SEQ ID NO: 2994578 - RNA, 20 nt, Human
ugaggcggguggaucacgag

SEQ ID NO: 2994579 - RNA, 19 nt, Human
ugaggucagagccugcagu

SEQ ID NO: 2994580 - RNA, 18 nt, Human
ugaggucagagccugcag

SEQ ID NO: 2994581 - RNA, 21 nt, Human
ugaggcugggcucccuuccca

SEQ ID NO: 2994582 - RNA, 21 nt, Human
ugaggugggaggaucucuuga

SEQ ID NO: 2994583 - RNA, 22 nt, Human
ugaggaugaaaaaauaacacug

SEQ ID NO: 2994584 - RNA, 22 nt, Human
ugagccgagaucacgccacugc

SEQ ID NO: 2994585 - RNA, 23 nt, Human
ugagcagggcucagcggggacag

SEQ ID NO: 2994586 - RNA, 22 nt, Human
ugagcagggcucagcggggaca

SEQ ID NO: 2994587 - RNA, 20 nt, Human
ugagcagggcucagcgggga

SEQ ID NO: 2994588 - RNA, 14 nt, Human
ugagccgcccaagg

SEQ ID NO: 2994589 - RNA, 23 nt, Human
ugagccgagaucacgccacugca

SEQ ID NO: 2994590 - RNA, 19 nt, Human
ugagccgcccaaggccuuc

SEQ ID NO: 2994591 - RNA, 18 nt, Human
ugagccgcccaaggccuu

SEQ ID NO: 2994592 - RNA, 17 nt, Human
ugagccgcccaaggccu

SEQ ID NO: 2994593 - RNA, 15 nt, Human
ugagccgcccaaggc

SEQ ID NO: 2994594 - RNA, 11 nt, Human
ugagcucagga

SEQ ID NO: 2994595 - RNA, 19 nt, Human
ugagcucaggaguuugaga

SEQ ID NO: 2994596 - RNA, 20 nt, Human
ugaaugcagguuuuaucaga

SEQ ID NO: 2994597 - RNA, 18 nt, Human
ugaaugcagguuuuauca

SEQ ID NO: 2994598 - RNA, 15 nt, Human
ugaaugaauggcuaa

SEQ ID NO: 2994599 - RNA, 23 nt, Human
ugaaugaugauccuaggcauuug

SEQ ID NO: 2994600 - RNA, 20 nt, Human
ugaaggcuggguucugaucc

SEQ ID NO: 2994601 - RNA, 21 nt, Human
ugaaggcuggguucugauccu

SEQ ID NO: 2994602 - RNA, 21 nt, Human
ugaaacacugguuuuaaauau

SEQ ID NO: 2994603 - RNA, 22 nt, Human
ugaaacauaucucuuaucuuac

SEQ ID NO: 2994604 - RNA, 23 nt, Human
ugaacuggguacuuguggacaca

SEQ ID NO: 2994605 - RNA, 20 nt, Human
ugaagacucauucuucugua

SEQ ID NO: 2994606 - RNA, 19 nt, Human
ugaagacucauucuucugu

SEQ ID NO: 2994607 - RNA, 19 nt, Human
ugaaggccccgcccaggcu

SEQ ID NO: 2994608 - RNA, 20 nt, Human
ugaaggccccgcccaggcuu

SEQ ID NO: 2994609 - RNA, 16 nt, Human
ugaaggcuggguucug

SEQ ID NO: 2994610 - RNA, 18 nt, Human
ugaaggccccgcccaggc

SEQ ID NO: 2994611 - RNA, 21 nt, Human
ugaagagguuuuaaagcuucc

SEQ ID NO: 2994612 - RNA, 20 nt, Human
ugaagagguuuuaaagcuuc

SEQ ID NO: 2994613 - RNA, 19 nt, Human
ugaagagguuuuaaagcuu

SEQ ID NO: 2994614 - RNA, 20 nt, Human
ugaccagcaccaucucuccu

SEQ ID NO: 2994615 - RNA, 17 nt, Human
ugaccacugcagaagac

SEQ ID NO: 2994616 - RNA, 16 nt, Human
ugaccacugcagaaga

SEQ ID NO: 2994617 - RNA, 15 nt, Human
ugaccaugaaagacu

SEQ ID NO: 2994618 - RNA, 18 nt, Human
ugacagacacaggcccgg

SEQ ID NO: 2994619 - RNA, 17 nt, Human
ugacagacacaggcccg

SEQ ID NO: 2994620 - RNA, 22 nt, Human
ugacagagcaagugagacccug

SEQ ID NO: 2994621 - RNA, 23 nt, Human
ugacaucaacugcaucaagaugu

SEQ ID NO: 2994622 - RNA, 23 nt, Human
ugacaaggauugcuacuguccua

SEQ ID NO: 2994623 - RNA, 13 nt, Human
ugacagacacagg

SEQ ID NO: 2994624 - RNA, 16 nt, Human
ugacagacacaggccc

SEQ ID NO: 2994625 - RNA, 14 nt, Human
ugacagacacaggc

SEQ ID NO: 2994626 - RNA, 14 nt, Human
ugacacacagcucu

SEQ ID NO: 2994627 - RNA, 15 nt, Human
ugacacacagcucug

SEQ ID NO: 2994628 - RNA, 13 nt, Human
ugaauuacauuug

SEQ ID NO: 2994629 - RNA, 14 nt, Human
ugaauuaaguuuuu

SEQ ID NO: 2994630 - RNA, 13 nt, Human
ugaauuguaagga

SEQ ID NO: 2994631 - RNA, 21 nt, Human
ugaauuguaaggaaugauuaa

SEQ ID NO: 2994632 - RNA, 23 nt, Human
ugacaacacucauugaccugagg

SEQ ID NO: 2994633 - RNA, 16 nt, Human
ugaauuuaaauagcuu

SEQ ID NO: 2994634 - RNA, 13 nt, Human
ugacaacacucau

SEQ ID NO: 2994635 - RNA, 18 nt, Human
uacuaacauuuauuugag

SEQ ID NO: 2994636 - RNA, 13 nt, Human
uacuaacuuuccu

SEQ ID NO: 2994637 - RNA, 17 nt, Human
uacuaacauuuauuuga

SEQ ID NO: 2994638 - RNA, 21 nt, Human
uacuaauagacaauuuauuau

SEQ ID NO: 2994639 - RNA, 20 nt, Human
uacuaauagacaauuuauua

SEQ ID NO: 2994640 - RNA, 14 nt, Human
uacuaaggaaucuu

SEQ ID NO: 2994641 - RNA, 18 nt, Human
uacgaaaagaggggaaga

SEQ ID NO: 2994642 - RNA, 21 nt, Human
uacgaaaagaggggaagagac

SEQ ID NO: 2994643 - RNA, 23 nt, Human
uacgaaaaaaugguagcauuuua

SEQ ID NO: 2994644 - RNA, 16 nt, Human
uaccuuuuuuauacau

SEQ ID NO: 2994645 - RNA, 13 nt, Human
uaccuuuuuuaua

SEQ ID NO: 2994646 - RNA, 17 nt, Human
uaccuuuuuuauacaua

SEQ ID NO: 2994647 - RNA, 22 nt, Human
uaccuuuuuuauacauaaacaa

SEQ ID NO: 2994648 - RNA, 23 nt, Human
uaccuuuguucccaaauuucaua

SEQ ID NO: 2994649 - RNA, 22 nt, Human
uaccuuuuuuagaguugauacu

SEQ ID NO: 2994650 - RNA, 19 nt, Human
uaccuuuuuuagaguugau

SEQ ID NO: 2994651 - RNA, 13 nt, Human
uaccuuuuuuaga

SEQ ID NO: 2994652 - RNA, 18 nt, Human
uaccucggugccuuccuc

SEQ ID NO: 2994653 - RNA, 22 nt, Human
uaccuaacgaaguauccuucag

SEQ ID NO: 2994654 - RNA, 22 nt, Human
uaccaaaaaucucaauauuuca

SEQ ID NO: 2994655 - RNA, 15 nt, Human
uacccacugcucugg

SEQ ID NO: 2994656 - RNA, 23 nt, Human
uacauuuuuaagugcugcauuua

SEQ ID NO: 2994657 - RNA, 16 nt, Human
uaccuaucaucuuaag

SEQ ID NO: 2994658 - RNA, 15 nt, Human
uaccuacauacaauu

SEQ ID NO: 2994659 - RNA, 23 nt, Human
uacugucagcuccccucggagaa

SEQ ID NO: 2994660 - RNA, 16 nt, Human
uacuguccuacccacc

SEQ ID NO: 2994661 - RNA, 21 nt, Human
uacugucuucaguaagccgug

SEQ ID NO: 2994662 - RNA, 13 nt, Human
uacuuguggacac

SEQ ID NO: 2994663 - RNA, 14 nt, Human
uacuuaagacuuaa

SEQ ID NO: 2994664 - RNA, 12 nt, Human
uacuuaagacuu

SEQ ID NO: 2994665 - RNA, 15 nt, Human
uacugccauccuggc

SEQ ID NO: 2994666 - RNA, 19 nt, Human
uacugccauccuggcccag

SEQ ID NO: 2994667 - RNA, 18 nt, Human
uacugccauccuggccca

SEQ ID NO: 2994668 - RNA, 22 nt, Human
uacugccauccuggcccagggc

SEQ ID NO: 2994669 - RNA, 15 nt, Human
uacucgggaggcuga

SEQ ID NO: 2994670 - RNA, 22 nt, Human
uacucgggaggcugaggcagga

SEQ ID NO: 2994671 - RNA, 22 nt, Human
uacucgaguuacagacaaagcg

SEQ ID NO: 2994672 - RNA, 18 nt, Human
uacucgaguuacagacaa

SEQ ID NO: 2994673 - RNA, 22 nt, Human
uacuacaguccucccaucucac

SEQ ID NO: 2994674 - RNA, 14 nt, Human
uacuacaguuuguu

SEQ ID NO: 2994675 - RNA, 13 nt, Human
uacuacaguuugu

SEQ ID NO: 2994676 - RNA, 19 nt, Human
uacaugccuaccaauauuu

SEQ ID NO: 2994677 - RNA, 16 nt, Human
uacaugccuaccaaua

SEQ ID NO: 2994678 - RNA, 22 nt, Human
uacauggaauaacauguaauua

SEQ ID NO: 2994679 - RNA, 19 nt, Human
uacauggaauaacauguaa

SEQ ID NO: 2994680 - RNA, 18 nt, Human
uacauggaauaacaugua

SEQ ID NO: 2994681 - RNA, 14 nt, Human
uacauggaauaaca

SEQ ID NO: 2994682 - RNA, 22 nt, Human
uacauuuuuaagugcugcauuu

SEQ ID NO: 2994683 - RNA, 19 nt, Human
uacauuuuuaagugcugca

SEQ ID NO: 2994684 - RNA, 14 nt, Human
uacauuuuuaagug

SEQ ID NO: 2994685 - RNA, 21 nt, Human
uacauggcuggagcuagaauu

SEQ ID NO: 2994686 - RNA, 21 nt, Human
uacaguuuguuaguaugaggc

SEQ ID NO: 2994687 - RNA, 19 nt, Human
uacaguuuguuaguaugag

SEQ ID NO: 2994688 - RNA, 16 nt, Human
uacauaaacaaguccu

SEQ ID NO: 2994689 - RNA, 23 nt, Human
uacaugaaaacacauuuuucuua

SEQ ID NO: 2994690 - RNA, 19 nt, Human
uacaugaaaacacauuuuu

SEQ ID NO: 2994691 - RNA, 18 nt, Human
uacaugaaaacacauuuu

SEQ ID NO: 2994692 - RNA, 17 nt, Human
uacaugaaaacacauuu

SEQ ID NO: 2994693 - RNA, 17 nt, Human
uacauaagauaaaugug

SEQ ID NO: 2994694 - RNA, 16 nt, Human
uacauaagauaaaugu

SEQ ID NO: 2994695 - RNA, 16 nt, Human
uacaugaaaacacauu

SEQ ID NO: 2994696 - RNA, 23 nt, Human
uacaguucggugagcuacaaaug

SEQ ID NO: 2994697 - RNA, 14 nt, Human
uacaggaaguacug

SEQ ID NO: 2994698 - RNA, 15 nt, Human
uacaggaaguacugg

SEQ ID NO: 2994699 - RNA, 22 nt, Human
uacaggaaguacuggagaaaau

SEQ ID NO: 2994700 - RNA, 15 nt, Human
uacaggagugagcac

SEQ ID NO: 2994701 - RNA, 17 nt, Human
uacaguugaaaaacagc

SEQ ID NO: 2994702 - RNA, 19 nt, Human
uacaguugaaaaacagcug

SEQ ID NO: 2994703 - RNA, 14 nt, Human
uacaggacauauau

SEQ ID NO: 2994704 - RNA, 20 nt, Human
uacaguugaaaaacagcuga

SEQ ID NO: 2994705 - RNA, 18 nt, Human
uacaguuuguuaguauga

SEQ ID NO: 2994706 - RNA, 18 nt, Human
uacaggaagguagaaaua

SEQ ID NO: 2994707 - RNA, 13 nt, Human
uacaggaaguacu

SEQ ID NO: 2994708 - RNA, 20 nt, Human
uacagcuugaccgugaggcc

SEQ ID NO: 2994709 - RNA, 16 nt, Human
uacacuuacacuuuau

SEQ ID NO: 2994710 - RNA, 22 nt, Human
uacacuguuucaaacuuuacua

SEQ ID NO: 2994711 - RNA, 22 nt, Human
uacacugugcugagucugaagg

SEQ ID NO: 2994712 - RNA, 23 nt, Human
uacacugugcugagucugaaggc

SEQ ID NO: 2994713 - RNA, 20 nt, Human
uacacuguuucaaacuuuac

SEQ ID NO: 2994714 - RNA, 18 nt, Human
uaauuccuguuuuuauua

SEQ ID NO: 2994715 - RNA, 13 nt, Human
uaauuuugugaag

SEQ ID NO: 2994716 - RNA, 16 nt, Human
uaauuuuuauauuuga

SEQ ID NO: 2994717 - RNA, 12 nt, Human
uaauuuuuauau

SEQ ID NO: 2994718 - RNA, 18 nt, Human
uaauuuugugaagcaaaa

SEQ ID NO: 2994719 - RNA, 18 nt, Human
uacaaaguagaagucuua

SEQ ID NO: 2994720 - RNA, 14 nt, Human
uacaaaguagaagu

SEQ ID NO: 2994721 - RNA, 16 nt, Human
uacacacucaaaucaa

SEQ ID NO: 2994722 - RNA, 15 nt, Human
uacacacugcauguu

SEQ ID NO: 2994723 - RNA, 17 nt, Human
uacacacucaaaucaag

SEQ ID NO: 2994724 - RNA, 14 nt, Human
uacacuccagugag

SEQ ID NO: 2994725 - RNA, 21 nt, Human
uacacugugcugagucugaag

SEQ ID NO: 2994726 - RNA, 12 nt, Human
uacaaauguuuu

SEQ ID NO: 2994727 - RNA, 11 nt, Human
uacacacacac

SEQ ID NO: 2994728 - RNA, 19 nt, Human
uagaauguuuucaaauguu

SEQ ID NO: 2994729 - RNA, 23 nt, Human
uagaauuaguggcacuugcuuuu

SEQ ID NO: 2994730 - RNA, 18 nt, Human
uagaauuaacacaugauc

SEQ ID NO: 2994731 - RNA, 16 nt, Human
uagaauuaacacauga

SEQ ID NO: 2994732 - RNA, 15 nt, Human
uagaauuaacacaug

SEQ ID NO: 2994733 - RNA, 18 nt, Human
uagaauguuuucaaaugu

SEQ ID NO: 2994734 - RNA, 12 nt, Human
uacuuuaaacua

SEQ ID NO: 2994735 - RNA, 20 nt, Human
uagaagucuuagauguauau

SEQ ID NO: 2994736 - RNA, 23 nt, Human
uagaauaccacaggaaccacaag

SEQ ID NO: 2994737 - RNA, 20 nt, Human
uagaaguucuaguguuuuca

SEQ ID NO: 2994738 - RNA, 22 nt, Human
uagaaguucuaguguuuucaau

SEQ ID NO: 2994739 - RNA, 22 nt, Human
uagaauaggcacuuuaaaacac

SEQ ID NO: 2994740 - RNA, 16 nt, Human
uagaauaggcacuuua

SEQ ID NO: 2994741 - RNA, 19 nt, Human
uagacccucaugcugccaa

SEQ ID NO: 2994742 - RNA, 17 nt, Human
uagacccucaugcugcc

SEQ ID NO: 2994743 - RNA, 18 nt, Human
uagacccucaugcugcca

SEQ ID NO: 2994744 - RNA, 15 nt, Human
uagagguucaaagau

SEQ ID NO: 2994745 - RNA, 14 nt, Human
uagagguucaaaga

SEQ ID NO: 2994746 - RNA, 19 nt, Human
uagagguacacuugugaau

SEQ ID NO: 2994747 - RNA, 17 nt, Human
uagaguugauacuacag

SEQ ID NO: 2994748 - RNA, 14 nt, Human
uagaguugauacua

SEQ ID NO: 2994749 - RNA, 12 nt, Human
uagagugggagc

SEQ ID NO: 2994750 - RNA, 18 nt, Human
uagagugugauguaugug

SEQ ID NO: 2994751 - RNA, 16 nt, Human
uagcaugaagacagag

SEQ ID NO: 2994752 - RNA, 22 nt, Human
uagccgggcgugguggcaggca

SEQ ID NO: 2994753 - RNA, 12 nt, Human
uagcucauucuc

SEQ ID NO: 2994754 - RNA, 21 nt, Human
uagcucaggugucccugcacu

SEQ ID NO: 2994755 - RNA, 20 nt, Human
uagcucaggugucccugcac

SEQ ID NO: 2994756 - RNA, 18 nt, Human
uagccugugccucuggga

SEQ ID NO: 2994757 - RNA, 19 nt, Human
uagcugggacuacaggcac

SEQ ID NO: 2994758 - RNA, 17 nt, Human
uagcugggacuacaggc

SEQ ID NO: 2994759 - RNA, 15 nt, Human
uagcugggacuacag

SEQ ID NO: 2994760 - RNA, 12 nt, Human
uagcugggacua

SEQ ID NO: 2994761 - RNA, 21 nt, Human
uagcagcccucaauugugaaa

SEQ ID NO: 2994762 - RNA, 11 nt, Human
uagcagggaaa

SEQ ID NO: 2994763 - RNA, 19 nt, Human
uagcauacguacacauuuu

SEQ ID NO: 2994764 - RNA, 18 nt, Human
uagcauacguacacauuu

SEQ ID NO: 2994765 - RNA, 17 nt, Human
uagcauacguacacauu

SEQ ID NO: 2994766 - RNA, 16 nt, Human
uagcauacguacacau

SEQ ID NO: 2994767 - RNA, 16 nt, Human
uagcauccuggaauau

SEQ ID NO: 2994768 - RNA, 15 nt, Human
uagcauccuggaaua

SEQ ID NO: 2994769 - RNA, 13 nt, Human
uagcauccuggaa

SEQ ID NO: 2994770 - RNA, 18 nt, Human
uagcauccuggaauaucu

SEQ ID NO: 2994771 - RNA, 14 nt, Human
uagauaggccaugg

SEQ ID NO: 2994772 - RNA, 16 nt, Human
uagauacuguaucaug

SEQ ID NO: 2994773 - RNA, 17 nt, Human
uaguagagguacacuug

SEQ ID NO: 2994774 - RNA, 21 nt, Human
uaguagagguacacuugugaa

SEQ ID NO: 2994775 - RNA, 20 nt, Human
uaguagagguacacuuguga

SEQ ID NO: 2994776 - RNA, 22 nt, Human
uaguagagguacacuugugaau

SEQ ID NO: 2994777 - RNA, 18 nt, Human
uaguaugaggcauuuguu

SEQ ID NO: 2994778 - RNA, 17 nt, Human
uaguaugaggcauuugu

SEQ ID NO: 2994779 - RNA, 23 nt, Human
uaggugugacugaauuucuuuug

SEQ ID NO: 2994780 - RNA, 21 nt, Human
uaggugugacugaauuucuuu

SEQ ID NO: 2994781 - RNA, 19 nt, Human
uaggugugacugaauuucu

SEQ ID NO: 2994782 - RNA, 13 nt, Human
uagguguggggga

SEQ ID NO: 2994783 - RNA, 17 nt, Human
uaggugugggggaagca

SEQ ID NO: 2994784 - RNA, 20 nt, Human
uaggugcuacaaaaacacag

SEQ ID NO: 2994785 - RNA, 22 nt, Human
uaggugcuacaaaaacacagca

SEQ ID NO: 2994786 - RNA, 23 nt, Human
uaggugcuacaaaaacacagcaa

SEQ ID NO: 2994787 - RNA, 18 nt, Human
uaggugcuacaaaaacac

SEQ ID NO: 2994788 - RNA, 16 nt, Human
uaggugacagagugag

SEQ ID NO: 2994789 - RNA, 11 nt, Human
uaggugacaga

SEQ ID NO: 2994790 - RNA, 22 nt, Human
uagcuggucuuauuuguaaagc

SEQ ID NO: 2994791 - RNA, 14 nt, Human
uauaaacuuuaccu

SEQ ID NO: 2994792 - RNA, 13 nt, Human
uauaaacuuuacc

SEQ ID NO: 2994793 - RNA, 11 nt, Human
uauaaacuuua

SEQ ID NO: 2994794 - RNA, 18 nt, Human
uauaaaccgaacugaugu

SEQ ID NO: 2994795 - RNA, 16 nt, Human
uauaaacuuuaccuuu

SEQ ID NO: 2994796 - RNA, 15 nt, Human
uauaaacuuuaccuu

SEQ ID NO: 2994797 - RNA, 17 nt, Human
uauaaacuuuaccuuuu

SEQ ID NO: 2994798 - RNA, 16 nt, Human
uaguuugauuaaauuc

SEQ ID NO: 2994799 - RNA, 15 nt, Human
uaguuugauuaaauu

SEQ ID NO: 2994800 - RNA, 17 nt, Human
uaguauuguccaggucu

SEQ ID NO: 2994801 - RNA, 15 nt, Human
uaguaugaggcauuu

SEQ ID NO: 2994802 - RNA, 16 nt, Human
uaguaugguggcuggg

SEQ ID NO: 2994803 - RNA, 20 nt, Human
uaguggcuuaaaacaacacu

SEQ ID NO: 2994804 - RNA, 20 nt, Human
uaguuguuugauucagacag

SEQ ID NO: 2994805 - RNA, 21 nt, Human
uaguuguuugauucagacagc

SEQ ID NO: 2994806 - RNA, 22 nt, Human
uaguuguuugauucagacagcu

SEQ ID NO: 2994807 - RNA, 19 nt, Human
uauauaacaaugcuguauu

SEQ ID NO: 2994808 - RNA, 17 nt, Human
uauauaacaaugcugua

SEQ ID NO: 2994809 - RNA, 13 nt, Human
uauauaacaaugc

SEQ ID NO: 2994810 - RNA, 23 nt, Human
uauagaauaggcacuuuaaaaca

SEQ ID NO: 2994811 - RNA, 20 nt, Human
uauagaauaggcacuuuaaa

SEQ ID NO: 2994812 - RNA, 15 nt, Human
uauagaaaaucuuca

SEQ ID NO: 2994813 - RNA, 12 nt, Human
uauagaaaaucu

SEQ ID NO: 2994814 - RNA, 16 nt, Human
uauaugcuucuguuuu

SEQ ID NO: 2994815 - RNA, 14 nt, Human
uauaugcuucuguu

SEQ ID NO: 2994816 - RNA, 20 nt, Human
uauauuugaaauauugacuu

SEQ ID NO: 2994817 - RNA, 20 nt, Human
uauauuuuuuucugaaauuu

SEQ ID NO: 2994818 - RNA, 19 nt, Human
uauauuuuuuucugaaauu

SEQ ID NO: 2994819 - RNA, 16 nt, Human
uauauuuuuuucugaa

SEQ ID NO: 2994820 - RNA, 21 nt, Human
uauauuuuuuguuaaaugauu

SEQ ID NO: 2994821 - RNA, 14 nt, Human
uaucaaaagaaaga

SEQ ID NO: 2994822 - RNA, 19 nt, Human
uaucaggugcugccaucca

SEQ ID NO: 2994823 - RNA, 20 nt, Human
uaucaggugcugccauccag

SEQ ID NO: 2994824 - RNA, 17 nt, Human
uaucaugacaaagacug

SEQ ID NO: 2994825 - RNA, 10 nt, Human
uaacuggaac

SEQ ID NO: 2994826 - RNA, 15 nt, Human
uaacuggaaacuuca

SEQ ID NO: 2994827 - RNA, 14 nt, Human
uaacuuuuuauauu

SEQ ID NO: 2994828 - RNA, 13 nt, Human
uaacuuuuuauau

SEQ ID NO: 2994829 - RNA, 16 nt, Human
uaacuuuuuauauucu

SEQ ID NO: 2994830 - RNA, 15 nt, Human
uaacuuuuuauauuc

SEQ ID NO: 2994831 - RNA, 18 nt, Human
uaagaaaaaggaugcaca

SEQ ID NO: 2994832 - RNA, 16 nt, Human
uaagaaaaaggaugca

SEQ ID NO: 2994833 - RNA, 23 nt, Human
uaagaaaaaggaugcacagaguu

SEQ ID NO: 2994834 - RNA, 19 nt, Human
uaagaaaaaggaugcacag

SEQ ID NO: 2994835 - RNA, 13 nt, Human
uaagagagaauga

SEQ ID NO: 2994836 - RNA, 19 nt, Human
uaagaaccuuuugagugcc

SEQ ID NO: 2994837 - RNA, 14 nt, Human
uaagagagaaugag

SEQ ID NO: 2994838 - RNA, 21 nt, Human
uaagaaaauaucacuugucaa

SEQ ID NO: 2994839 - RNA, 18 nt, Human
uaacucaccuggcaucuu

SEQ ID NO: 2994840 - RNA, 16 nt, Human
uaaccacuucagcuga

SEQ ID NO: 2994841 - RNA, 23 nt, Human
uaaccaguguuguggauuuaaca

SEQ ID NO: 2994842 - RNA, 17 nt, Human
uaaccaggggccaugaa

SEQ ID NO: 2994843 - RNA, 11 nt, Human
uaacagaaaug

SEQ ID NO: 2994844 - RNA, 13 nt, Human
uaaaugcccagcc

SEQ ID NO: 2994845 - RNA, 14 nt, Human
uaaaugcccagccc

SEQ ID NO: 2994846 - RNA, 15 nt, Human
uaaaugcccagcccc

SEQ ID NO: 2994847 - RNA, 16 nt, Human
uaaaugcccagccccu

SEQ ID NO: 2994848 - RNA, 17 nt, Human
uaaaugcccagccccuu

SEQ ID NO: 2994849 - RNA, 16 nt, Human
uaaauggaaccacucu

SEQ ID NO: 2994850 - RNA, 17 nt, Human
uaaaugggggugcauuu

SEQ ID NO: 2994851 - RNA, 14 nt, Human
uaaaugggggugca

SEQ ID NO: 2994852 - RNA, 20 nt, Human
uaaauggcuuccuggcaaua

SEQ ID NO: 2994853 - RNA, 19 nt, Human
uaaaugggggugcauuuga

SEQ ID NO: 2994854 - RNA, 18 nt, Human
uaaaugggggugcauuug

SEQ ID NO: 2994855 - RNA, 20 nt, Human
uaaaugucuaguuguaacac

SEQ ID NO: 2994856 - RNA, 22 nt, Human
uaaaugucucuuuaaugucaca

SEQ ID NO: 2994857 - RNA, 18 nt, Human
uaacaccaugauuaacca

SEQ ID NO: 2994858 - RNA, 20 nt, Human
uaaauugacacuuaaaaaug

SEQ ID NO: 2994859 - RNA, 13 nt, Human
uaaauucuuucau

SEQ ID NO: 2994860 - RNA, 22 nt, Human
uaaauuuaguauuuuguuucag

SEQ ID NO: 2994861 - RNA, 16 nt, Human
uaaauucuugcaaagu

SEQ ID NO: 2994862 - RNA, 18 nt, Human
uaaauucuugcaaaguau

SEQ ID NO: 2994863 - RNA, 17 nt, Human
uaaauucuugcaaagua

SEQ ID NO: 2994864 - RNA, 22 nt, Human
uaaauucuugcaaaguaucccu

SEQ ID NO: 2994865 - RNA, 11 nt, Human
uaaauuauuuu

SEQ ID NO: 2994866 - RNA, 16 nt, Human
uaaaugugccuucauu

SEQ ID NO: 2994867 - RNA, 15 nt, Human
uaauauggaucugua

SEQ ID NO: 2994868 - RNA, 19 nt, Human
uaauaugcacacauuuuuu

SEQ ID NO: 2994869 - RNA, 18 nt, Human
uaauaugcacacauuuuu

SEQ ID NO: 2994870 - RNA, 17 nt, Human
uaauaugcacacauuuu

SEQ ID NO: 2994871 - RNA, 16 nt, Human
uaauaugcacacauuu

SEQ ID NO: 2994872 - RNA, 15 nt, Human
uaauaugcacacauu

SEQ ID NO: 2994873 - RNA, 15 nt, Human
uaauaugaugacugu

SEQ ID NO: 2994874 - RNA, 16 nt, Human
uaauaugcaaagucua

SEQ ID NO: 2994875 - RNA, 15 nt, Human
uaauaugcaaagucu

SEQ ID NO: 2994876 - RNA, 13 nt, Human
uaaucuaaaugga

SEQ ID NO: 2994877 - RNA, 12 nt, Human
uaaucuaaaugg

SEQ ID NO: 2994878 - RNA, 20 nt, Human
uaauccucuaggaggucucu

SEQ ID NO: 2994879 - RNA, 20 nt, Human
uaauauuaaggaagacaaug

SEQ ID NO: 2994880 - RNA, 19 nt, Human
uaaugcuugcugcugauuu

SEQ ID NO: 2994881 - RNA, 15 nt, Human
uaauggggcggugag

SEQ ID NO: 2994882 - RNA, 22 nt, Human
uaaugauaacuggaaacuucag

SEQ ID NO: 2994883 - RNA, 17 nt, Human
uaaugauaacuggaaac

SEQ ID NO: 2994884 - RNA, 15 nt, Human
uaaugcgugcauacc

SEQ ID NO: 2994885 - RNA, 22 nt, Human
uaaugcgugcauaccacuuuug

SEQ ID NO: 2994886 - RNA, 19 nt, Human
uaaugcgugcauaccacuu

SEQ ID NO: 2994887 - RNA, 23 nt, Human
uaaugcgugcauaccacuuuugu

SEQ ID NO: 2994888 - RNA, 22 nt, Human
uaauguuucaaacauauauaac

SEQ ID NO: 2994889 - RNA, 17 nt, Human
uaauuaaguacuaugua

SEQ ID NO: 2994890 - RNA, 14 nt, Human
uaauuaaguacuau

SEQ ID NO: 2994891 - RNA, 20 nt, Human
uaauuaaguacuauguauca

SEQ ID NO: 2994892 - RNA, 13 nt, Human
uaagugaaauaag

SEQ ID NO: 2994893 - RNA, 14 nt, Human
uaagucugauuuaa

SEQ ID NO: 2994894 - RNA, 14 nt, Human
uaagugcugcauuu

SEQ ID NO: 2994895 - RNA, 12 nt, Human
uaagugagagag

SEQ ID NO: 2994896 - RNA, 23 nt, Human
uaagugaggaugaaaaaauaaca

SEQ ID NO: 2994897 - RNA, 20 nt, Human
uaauaaauauguuucacaca

SEQ ID NO: 2994898 - RNA, 13 nt, Human
uaauaaauauguu

SEQ ID NO: 2994899 - RNA, 22 nt, Human
uaagugcugcauuuaaaagaua

SEQ ID NO: 2994900 - RNA, 18 nt, Human
uaagugcugcauuuaaaa

SEQ ID NO: 2994901 - RNA, 16 nt, Human
uaagugcugcauuuaa

SEQ ID NO: 2994902 - RNA, 15 nt, Human
uaagugcugcauuua

SEQ ID NO: 2994903 - RNA, 14 nt, Human
uaaguguauuuuga

SEQ ID NO: 2994904 - RNA, 17 nt, Human
uaaggguaucuggugac

SEQ ID NO: 2994905 - RNA, 15 nt, Human
uaaggugugcucuga

SEQ ID NO: 2994906 - RNA, 20 nt, Human
uaagguggguacgggagggu

SEQ ID NO: 2994907 - RNA, 15 nt, Human
uaagaggcagggucu

SEQ ID NO: 2994908 - RNA, 12 nt, Human
uaagaggcaggg

SEQ ID NO: 2994909 - RNA, 14 nt, Human
uaagcuacugccau

SEQ ID NO: 2994910 - RNA, 16 nt, Human
uaagcuacugccaucc

SEQ ID NO: 2994911 - RNA, 15 nt, Human
uaagcuacugccauc

SEQ ID NO: 2994912 - RNA, 18 nt, Human
uaagcuacugccauccug

SEQ ID NO: 2994913 - RNA, 16 nt, Human
uaaggauguucuagca

SEQ ID NO: 2994914 - RNA, 22 nt, Human
uaaacaugcuguacauacuuuu

SEQ ID NO: 2994915 - RNA, 21 nt, Human
uaaacaugcuguacauacuuu

SEQ ID NO: 2994916 - RNA, 23 nt, Human
uaaacaugcuguacauacuuuuu

SEQ ID NO: 2994917 - RNA, 22 nt, Human
uaaacuugguuuuuaaaaaacu

SEQ ID NO: 2994918 - RNA, 22 nt, Human
uaaacacauuaaagguacuuug

SEQ ID NO: 2994919 - RNA, 19 nt, Human
uaaacaugcuguacauacu

SEQ ID NO: 2994920 - RNA, 20 nt, Human
uaaacaugcuguacauacuu

SEQ ID NO: 2994921 - RNA, 19 nt, Human
uaaacaagaccacguuucu

SEQ ID NO: 2994922 - RNA, 20 nt, Human
uaaacaagaccacguuucua

SEQ ID NO: 2994923 - RNA, 22 nt, Human
uaaacaagaccacguuucuaaa

SEQ ID NO: 2994924 - RNA, 21 nt, Human
uaaacaagaccacguuucuaa

SEQ ID NO: 2994925 - RNA, 19 nt, Human
uaaagcagcguuucuauga

SEQ ID NO: 2994926 - RNA, 17 nt, Human
uaaagcagcguuucuau

SEQ ID NO: 2994927 - RNA, 16 nt, Human
uaaagcagcguuucua

SEQ ID NO: 2994928 - RNA, 12 nt, Human
uaaagaaaacug

SEQ ID NO: 2994929 - RNA, 15 nt, Human
uaaaggcuaccuuug

SEQ ID NO: 2994930 - RNA, 20 nt, Human
uaaagccugaguuugcuuuc

SEQ ID NO: 2994931 - RNA, 14 nt, Human
uaaaguguuugaaa

SEQ ID NO: 2994932 - RNA, 17 nt, Human
uaaaggcuaccuuugua

SEQ ID NO: 2994933 - RNA, 18 nt, Human
uaaaaggaagcuuacaug

SEQ ID NO: 2994934 - RNA, 21 nt, Human
uaaaaggaagcuuacaugccu

SEQ ID NO: 2994935 - RNA, 12 nt, Human
uaaaaggagcca

SEQ ID NO: 2994936 - RNA, 21 nt, Human
uaaaagguaugcaaucaaauc

SEQ ID NO: 2994937 - RNA, 18 nt, Human
uaaaaucauuucugcauc

SEQ ID NO: 2994938 - RNA, 22 nt, Human
uaaaaucauuucugcaucagcu

SEQ ID NO: 2994939 - RNA, 17 nt, Human
uaaaauccauacauuug

SEQ ID NO: 2994940 - RNA, 15 nt, Human
uaaaauccauacauu

SEQ ID NO: 2994941 - RNA, 10 nt, Human
uaaaaucauu

SEQ ID NO: 2994942 - RNA, 13 nt, Human
uaaaaucauuucu

SEQ ID NO: 2994943 - RNA, 12 nt, Human
uaaaaggugacc

SEQ ID NO: 2994944 - RNA, 20 nt, Human
uaaaagauacaguuacucag

SEQ ID NO: 2994945 - RNA, 17 nt, Human
uaaaagauacaguuacu

SEQ ID NO: 2994946 - RNA, 14 nt, Human
uaaaagauacaguu

SEQ ID NO: 2994947 - RNA, 21 nt, Human
uaaaagauacaguuacucaga

SEQ ID NO: 2994948 - RNA, 18 nt, Human
uaaaaaugguuuaaaugg

SEQ ID NO: 2994949 - RNA, 15 nt, Human
uaaaaaugguuuaaa

SEQ ID NO: 2994950 - RNA, 19 nt, Human
uaaaaaugguuuaaauggu

SEQ ID NO: 2994951 - RNA, 18 nt, Human
uaaaaacaacgaaagaag

SEQ ID NO: 2994952 - RNA, 22 nt, Human
uaaaacaagcacuaaacaaaga

SEQ ID NO: 2994953 - RNA, 15 nt, Human
uaaaacaacacucac

SEQ ID NO: 2994954 - RNA, 19 nt, Human
uaaaacaacagauguacga

SEQ ID NO: 2994955 - RNA, 16 nt, Human
uaaaacaacagaugua

SEQ ID NO: 2994956 - RNA, 22 nt, Human
uaaaacacaacaucuuuuucua

SEQ ID NO: 2994957 - RNA, 23 nt, Human
uaaaacacaacaucuuuuucuac

SEQ ID NO: 2994958 - RNA, 17 nt, Human
uaaaacacaacaucuuu

SEQ ID NO: 2994959 - RNA, 20 nt, Human
guuuuccagguuuaagcugu

SEQ ID NO: 2994960 - RNA, 19 nt, Human
guuuuccaugaguccccug

SEQ ID NO: 2994961 - RNA, 20 nt, Human
guuuuccaugaguccccugu

SEQ ID NO: 2994962 - RNA, 13 nt, Human
guuuuccugaaga

SEQ ID NO: 2994963 - RNA, 20 nt, Human
guuuguuucugaaagggacg

SEQ ID NO: 2994964 - RNA, 17 nt, Human
guuuucaaaauaaaaau

SEQ ID NO: 2994965 - RNA, 12 nt, Human
guuuucacucuu

SEQ ID NO: 2994966 - RNA, 11 nt, Human
guuuucacucu

SEQ ID NO: 2994967 - RNA, 18 nt, Human
guuuucaauuuuaaacau

SEQ ID NO: 2994968 - RNA, 20 nt, Human
guuuucaauuuuaaacauau

SEQ ID NO: 2994969 - RNA, 18 nt, Human
guuuguuucugaaaggga

SEQ ID NO: 2994970 - RNA, 16 nt, Human
guuugauucagacagc

SEQ ID NO: 2994971 - RNA, 20 nt, Human
guuugauucagacagcugcc

SEQ ID NO: 2994972 - RNA, 21 nt, Human
guuugauucagacagcugccu

SEQ ID NO: 2994973 - RNA, 18 nt, Human
guuuggggaugagaaagg

SEQ ID NO: 2994974 - RNA, 20 nt, Human
guuuguaaauuaacuuuuau

SEQ ID NO: 2994975 - RNA, 23 nt, Human
guuugauuaaauucuugcaaagu

SEQ ID NO: 2994976 - RNA, 17 nt, Human
guuugagaucagccugg

SEQ ID NO: 2994977 - RNA, 16 nt, Human
guuugacggcaagguu

SEQ ID NO: 2994978 - RNA, 12 nt, Human
guuggcuggggg

SEQ ID NO: 2994979 - RNA, 14 nt, Human
guuggccccugccc

SEQ ID NO: 2994980 - RNA, 13 nt, Human
guuggccccugcc

SEQ ID NO: 2994981 - RNA, 20 nt, Human
guuggccccugcccggcugc

SEQ ID NO: 2994982 - RNA, 19 nt, Human
guuggcugggggccucagu

SEQ ID NO: 2994983 - RNA, 12 nt, Human
guugucagcuga

SEQ ID NO: 2994984 - RNA, 22 nt, Human
guuguggauuuaacagaaaugu

SEQ ID NO: 2994985 - RNA, 14 nt, Human
guugugguuaaucu

SEQ ID NO: 2994986 - RNA, 19 nt, Human
guugucugcaacucugaag

SEQ ID NO: 2994987 - RNA, 21 nt, Human
guuuagcuggaaaaguauguu

SEQ ID NO: 2994988 - RNA, 20 nt, Human
guuuagcuggaaaaguaugu

SEQ ID NO: 2994989 - RNA, 20 nt, Human
guuuauauaagcuuguauuc

SEQ ID NO: 2994990 - RNA, 15 nt, Human
guuguuacauuuuua

SEQ ID NO: 2994991 - RNA, 14 nt, Human
guuguuacauuuuu

SEQ ID NO: 2994992 - RNA, 19 nt, Human
guuguucugaaaugucagu

SEQ ID NO: 2994993 - RNA, 15 nt, Human
guuuagauaauacac

SEQ ID NO: 2994994 - RNA, 14 nt, Human
guuuagauaauaca

SEQ ID NO: 2994995 - RNA, 17 nt, Human
guuuagaaagcuugccc

SEQ ID NO: 2994996 - RNA, 15 nt, Human
guggguggggcagug

SEQ ID NO: 2994997 - RNA, 23 nt, Human
guggguuucuaaagcugccagcc

SEQ ID NO: 2994998 - RNA, 14 nt, Human
guggggcagugcuu

SEQ ID NO: 2994999 - RNA, 23 nt, Human
guggggcagugcuuggcccagga

SEQ ID NO: 2995000 - RNA, 17 nt, Human
guggggcagcuugaggg

SEQ ID NO: 2995001 - RNA, 13 nt, Human
guggggcagcuug

SEQ ID NO: 2995002 - RNA, 15 nt, Human
guggggaccucaggc

SEQ ID NO: 2995003 - RNA, 18 nt, Human
guggggaccucaggccug

SEQ ID NO: 2995004 - RNA, 15 nt, Human
gugggcauucaaaug

SEQ ID NO: 2995005 - RNA, 17 nt, Human
gugggcccaaugcacuu

SEQ ID NO: 2995006 - RNA, 15 nt, Human
gugggcuaguugggc

SEQ ID NO: 2995007 - RNA, 14 nt, Human
guggcucacgccug

SEQ ID NO: 2995008 - RNA, 17 nt, Human
guggcuaacuuggguua

SEQ ID NO: 2995009 - RNA, 15 nt, Human
gugcuacaaaaacac

SEQ ID NO: 2995010 - RNA, 20 nt, Human
gugcuacaaaaacacagcaa

SEQ ID NO: 2995011 - RNA, 12 nt, Human
guggcugcuuca

SEQ ID NO: 2995012 - RNA, 14 nt, Human
guggcugcuucaag

SEQ ID NO: 2995013 - RNA, 22 nt, Human
guggcuuaaaacaacacucaca

SEQ ID NO: 2995014 - RNA, 15 nt, Human
guggcugcuucaagg

SEQ ID NO: 2995015 - RNA, 16 nt, Human
guggcugcuucaagga

SEQ ID NO: 2995016 - RNA, 19 nt, Human
guggcugcuucaaggaucc

SEQ ID NO: 2995017 - RNA, 22 nt, Human
guggcugcuucaaggauccuga

SEQ ID NO: 2995018 - RNA, 23 nt, Human
guggcugcuucaaggauccugag

SEQ ID NO: 2995019 - RNA, 19 nt, Human
guggcuggguuggagggug

SEQ ID NO: 2995020 - RNA, 17 nt, Human
guguacauggaauaaca

SEQ ID NO: 2995021 - RNA, 22 nt, Human
guguacauggaauaacauguaa

SEQ ID NO: 2995022 - RNA, 18 nt, Human
gugucccugcacuugcag

SEQ ID NO: 2995023 - RNA, 16 nt, Human
gugucccugcacuugc

SEQ ID NO: 2995024 - RNA, 13 nt, Human
gugucccugcacu

SEQ ID NO: 2995025 - RNA, 19 nt, Human
gugguaugaucacggcuca

SEQ ID NO: 2995026 - RNA, 17 nt, Human
gugguagagugugccug

SEQ ID NO: 2995027 - RNA, 14 nt, Human
guggucccacccca

SEQ ID NO: 2995028 - RNA, 15 nt, Human
guggucccaccccac

SEQ ID NO: 2995029 - RNA, 16 nt, Human
guggucccaccccaca

SEQ ID NO: 2995030 - RNA, 17 nt, Human
guggucccaccccacac

SEQ ID NO: 2995031 - RNA, 18 nt, Human
gugguccuaaucuucuga

SEQ ID NO: 2995032 - RNA, 21 nt, Human
guggugagaggcauccaguau

SEQ ID NO: 2995033 - RNA, 17 nt, Human
guggugaccucugccug

SEQ ID NO: 2995034 - RNA, 14 nt, Human
guggugaccucugc

SEQ ID NO: 2995035 - RNA, 19 nt, Human
guggugcgaucuggguuca

SEQ ID NO: 2995036 - RNA, 17 nt, Human
guguaagacaaaaagcu

SEQ ID NO: 2995037 - RNA, 21 nt, Human
guguaaguauucuuauuuaau

SEQ ID NO: 2995038 - RNA, 21 nt, Human
guguaaguagauaggccaugg

SEQ ID NO: 2995039 - RNA, 14 nt, Human
gugugcguccuguc

SEQ ID NO: 2995040 - RNA, 16 nt, Human
gugugcguccugucgg

SEQ ID NO: 2995041 - RNA, 22 nt, Human
gugugcucugaucauccacugu

SEQ ID NO: 2995042 - RNA, 15 nt, Human
gugugcucugaucau

SEQ ID NO: 2995043 - RNA, 12 nt, Human
gugugcucugau

SEQ ID NO: 2995044 - RNA, 13 nt, Human
guguggagaagcg

SEQ ID NO: 2995045 - RNA, 21 nt, Human
guguggagaagcggcuggcag

SEQ ID NO: 2995046 - RNA, 15 nt, Human
gugucgggcaugaca

SEQ ID NO: 2995047 - RNA, 14 nt, Human
guguccggucccug

SEQ ID NO: 2995048 - RNA, 23 nt, Human
gugucccugcacuugcagacucu

SEQ ID NO: 2995049 - RNA, 14 nt, Human
gugucucuuggucc

SEQ ID NO: 2995050 - RNA, 17 nt, Human
gugucucccuucauccu

SEQ ID NO: 2995051 - RNA, 18 nt, Human
gugucucuugguccugcu

SEQ ID NO: 2995052 - RNA, 19 nt, Human
gugucucuugguccugcug

SEQ ID NO: 2995053 - RNA, 20 nt, Human
gugucucuugguccugcugc

SEQ ID NO: 2995054 - RNA, 21 nt, Human
gugucucuugguccugcugca

SEQ ID NO: 2995055 - RNA, 22 nt, Human
gugucucuugguccugcugcag

SEQ ID NO: 2995056 - RNA, 20 nt, Human
gugugagucaccaagcccag

SEQ ID NO: 2995057 - RNA, 14 nt, Human
guuaaaagaugaaa

SEQ ID NO: 2995058 - RNA, 16 nt, Human
guuaaaagaugaaaau

SEQ ID NO: 2995059 - RNA, 22 nt, Human
guuaaaaagaaaaguuuauaaa

SEQ ID NO: 2995060 - RNA, 14 nt, Human
guuaaaaagaaaag

SEQ ID NO: 2995061 - RNA, 22 nt, Human
guuaaaauaccagccaguaaau

SEQ ID NO: 2995062 - RNA, 20 nt, Human
guuaaaagaugaaaauauuu

SEQ ID NO: 2995063 - RNA, 13 nt, Human
guuacagacaaag

SEQ ID NO: 2995064 - RNA, 16 nt, Human
guuacacuaaaaggug

SEQ ID NO: 2995065 - RNA, 15 nt, Human
guuacacuaaaaggu

SEQ ID NO: 2995066 - RNA, 12 nt, Human
guguuacuaagu

SEQ ID NO: 2995067 - RNA, 14 nt, Human
guguuacuaaguuu

SEQ ID NO: 2995068 - RNA, 18 nt, Human
guguuaugacuccagaau

SEQ ID NO: 2995069 - RNA, 24 nt, Human
guucacuggacacuucacgcccuu

SEQ ID NO: 2995070 - RNA, 14 nt, Human
guucagagcugccc

SEQ ID NO: 2995071 - RNA, 13 nt, Human
guucagagcugcc

SEQ ID NO: 2995072 - RNA, 19 nt, Human
guucagagcugcccucucc

SEQ ID NO: 2995073 - RNA, 17 nt, Human
guucagagcugcccucu

SEQ ID NO: 2995074 - RNA, 16 nt, Human
guucagagcugcccuc

SEQ ID NO: 2995075 - RNA, 15 nt, Human
guucagagcugcccu

SEQ ID NO: 2995076 - RNA, 22 nt, Human
guucagagcugcccucuccugg

SEQ ID NO: 2995077 - RNA, 20 nt, Human
guucagagcugcccucuccu

SEQ ID NO: 2995078 - RNA, 23 nt, Human
guucagagcugcccucuccuggg

SEQ ID NO: 2995079 - RNA, 19 nt, Human
guucacugcaaccuccgcc

SEQ ID NO: 2995080 - RNA, 17 nt, Human
guucaucauccuaagcu

SEQ ID NO: 2995081 - RNA, 16 nt, Human
guucaucaaugaauga

SEQ ID NO: 2995082 - RNA, 12 nt, Human
guucaucuugaa

SEQ ID NO: 2995083 - RNA, 13 nt, Human
guucaucuugaau

SEQ ID NO: 2995084 - RNA, 18 nt, Human
guucaucuugaauuguaa

SEQ ID NO: 2995085 - RNA, 12 nt, Human
guucaugaaaga

SEQ ID NO: 2995086 - RNA, 22 nt, Human
guuccucauuagcauuuugcua

SEQ ID NO: 2995087 - RNA, 14 nt, Human
guuccuaauccucu

SEQ ID NO: 2995088 - RNA, 17 nt, Human
guuccaccaucaagcca

SEQ ID NO: 2995089 - RNA, 20 nt, Human
guuccaccaucaagccacca

SEQ ID NO: 2995090 - RNA, 23 nt, Human
guucaaucuggauucauauuuaa

SEQ ID NO: 2995091 - RNA, 16 nt, Human
guucaauucucauuug

SEQ ID NO: 2995092 - RNA, 23 nt, Human
guucaauucucauuugucacaca

SEQ ID NO: 2995093 - RNA, 20 nt, Human
guucaagcgauucuucugcu

SEQ ID NO: 2995094 - RNA, 19 nt, Human
guuauuaaaaaucucaaau

SEQ ID NO: 2995095 - RNA, 19 nt, Human
guucaagcgauucuucugc

SEQ ID NO: 2995096 - RNA, 21 nt, Human
guuaugacuccagaauuuccc

SEQ ID NO: 2995097 - RNA, 24 nt, Human
guuaguucaaucuggauucauauu

SEQ ID NO: 2995098 - RNA, 22 nt, Human
guuaguuucuccaagcaggaca

SEQ ID NO: 2995099 - RNA, 16 nt, Human
guuaguuucuccaagc

SEQ ID NO: 2995100 - RNA, 19 nt, Human
guuaguuucuccaagcagg

SEQ ID NO: 2995101 - RNA, 21 nt, Human
guuauaacuuaaugaaaacaa

SEQ ID NO: 2995102 - RNA, 17 nt, Human
guuauaacuuaaugaaa

SEQ ID NO: 2995103 - RNA, 14 nt, Human
guuauaacuuaaug

SEQ ID NO: 2995104 - RNA, 22 nt, Human
guuacuaaguuuuuauggcuuu

SEQ ID NO: 2995105 - RNA, 15 nt, Human
guuacucagaauucu

SEQ ID NO: 2995106 - RNA, 23 nt, Human
guuaccucugccucagaaaacaa

SEQ ID NO: 2995107 - RNA, 16 nt, Human
guuacccaaauuaaga

SEQ ID NO: 2995108 - RNA, 23 nt, Human
guuaccauuuugggguacccacu

SEQ ID NO: 2995109 - RNA, 21 nt, Human
guuacauuuuuaagugcugca

SEQ ID NO: 2995110 - RNA, 19 nt, Human
guuacauaagauaaaugug

SEQ ID NO: 2995111 - RNA, 18 nt, Human
guuacauaagauaaaugu

SEQ ID NO: 2995112 - RNA, 15 nt, Human
guuacagacaaagcg

SEQ ID NO: 2995113 - RNA, 17 nt, Human
guuacagacaaagcgug

SEQ ID NO: 2995114 - RNA, 15 nt, Human
guucugaagaagaug

SEQ ID NO: 2995115 - RNA, 14 nt, Human
guucugaagaagau

SEQ ID NO: 2995116 - RNA, 20 nt, Human
guucugaaaugucaguucug

SEQ ID NO: 2995117 - RNA, 13 nt, Human
guucugaagaaga

SEQ ID NO: 2995118 - RNA, 12 nt, Human
guucugaagaag

SEQ ID NO: 2995119 - RNA, 19 nt, Human
guucugauccuaguuccac

SEQ ID NO: 2995120 - RNA, 17 nt, Human
guugaaaagacuccaaa

SEQ ID NO: 2995121 - RNA, 22 nt, Human
guugaaaagacuccaaagaaau

SEQ ID NO: 2995122 - RNA, 23 nt, Human
guugaaaagacuccaaagaaaug

SEQ ID NO: 2995123 - RNA, 17 nt, Human
guugaaaaacagcugag

SEQ ID NO: 2995124 - RNA, 20 nt, Human
guucuuuccaaaguacacug

SEQ ID NO: 2995125 - RNA, 18 nt, Human
guucuuuccaaaguacac

SEQ ID NO: 2995126 - RNA, 14 nt, Human
guucuuuccaaagu

SEQ ID NO: 2995127 - RNA, 13 nt, Human
guucuuuccaaag

SEQ ID NO: 2995128 - RNA, 18 nt, Human
guucuuucacccuuuucu

SEQ ID NO: 2995129 - RNA, 16 nt, Human
guucugggacacaguu

SEQ ID NO: 2995130 - RNA, 15 nt, Human
guucugggacacagu

SEQ ID NO: 2995131 - RNA, 14 nt, Human
guucugggacacag

SEQ ID NO: 2995132 - RNA, 12 nt, Human
guucugggacac

SEQ ID NO: 2995133 - RNA, 11 nt, Human
guucugggaca

SEQ ID NO: 2995134 - RNA, 23 nt, Human
guucuggcagaguugaagacaga

SEQ ID NO: 2995135 - RNA, 16 nt, Human
guucuggcucuuccag

SEQ ID NO: 2995136 - RNA, 20 nt, Human
guucuggcucuuccaggcug

SEQ ID NO: 2995137 - RNA, 12 nt, Human
guucuggcucuu

SEQ ID NO: 2995138 - RNA, 23 nt, Human
guuggccaaagccaaagcuaggc

SEQ ID NO: 2995139 - RNA, 14 nt, Human
guuggcaaaaaggc

SEQ ID NO: 2995140 - RNA, 18 nt, Human
guuggcaaaaaggcagga

SEQ ID NO: 2995141 - RNA, 13 nt, Human
guuggccaggcug

SEQ ID NO: 2995142 - RNA, 14 nt, Human
guuggccaggcugg

SEQ ID NO: 2995143 - RNA, 15 nt, Human
guuggccaggcuggu

SEQ ID NO: 2995144 - RNA, 14 nt, Human
guuggccaguguga

SEQ ID NO: 2995145 - RNA, 19 nt, Human
guuggccaggcuggucuca

SEQ ID NO: 2995146 - RNA, 17 nt, Human
guuggccaggcuggucu

SEQ ID NO: 2995147 - RNA, 14 nt, Human
guugcccaggcagg

SEQ ID NO: 2995148 - RNA, 12 nt, Human
guugcccaggca

SEQ ID NO: 2995149 - RNA, 16 nt, Human
guugccagucaccccg

SEQ ID NO: 2995150 - RNA, 17 nt, Human
guugccagucaccccgg

SEQ ID NO: 2995151 - RNA, 18 nt, Human
guugccagucaccccggc

SEQ ID NO: 2995152 - RNA, 23 nt, Human
guugccagucaccccggccaccu

SEQ ID NO: 2995153 - RNA, 13 nt, Human
guugccagucacc

SEQ ID NO: 2995154 - RNA, 14 nt, Human
guugccagucaccc

SEQ ID NO: 2995155 - RNA, 15 nt, Human
guugcaggaccucag

SEQ ID NO: 2995156 - RNA, 20 nt, Human
guugauggugguauguuuuc

SEQ ID NO: 2995157 - RNA, 21 nt, Human
guugauggugguauguuuuca

SEQ ID NO: 2995158 - RNA, 12 nt, Human
guugaaacauau

SEQ ID NO: 2995159 - RNA, 16 nt, Human
guugaagacagagcua

SEQ ID NO: 2995160 - RNA, 18 nt, Human
guugaagagguuuuaaag

SEQ ID NO: 2995161 - RNA, 17 nt, Human
gucugucuuuuaaacuc

SEQ ID NO: 2995162 - RNA, 21 nt, Human
gucugugagaugcuagaacuc

SEQ ID NO: 2995163 - RNA, 17 nt, Human
gucugugagaugcuaga

SEQ ID NO: 2995164 - RNA, 16 nt, Human
gucugugagaugcuag

SEQ ID NO: 2995165 - RNA, 15 nt, Human
gucugugagaugcua

SEQ ID NO: 2995166 - RNA, 23 nt, Human
gucugugagaugcuagaacuccc

SEQ ID NO: 2995167 - RNA, 22 nt, Human
gucugugagaugcuagaacucc

SEQ ID NO: 2995168 - RNA, 18 nt, Human
gucugugccauuuuguau

SEQ ID NO: 2995169 - RNA, 14 nt, Human
gucuguuuugugua

SEQ ID NO: 2995170 - RNA, 17 nt, Human
gucuguucuuuccaaag

SEQ ID NO: 2995171 - RNA, 14 nt, Human
gucuguucuuucca

SEQ ID NO: 2995172 - RNA, 15 nt, Human
gucuguuuuguguac

SEQ ID NO: 2995173 - RNA, 20 nt, Human
gucuguuuuguguacuuuua

SEQ ID NO: 2995174 - RNA, 21 nt, Human
gucuuaaaaaguggaaaaaua

SEQ ID NO: 2995175 - RNA, 17 nt, Human
gucuugaacuccuggcc

SEQ ID NO: 2995176 - RNA, 16 nt, Human
gucuugaacuccuggc

SEQ ID NO: 2995177 - RNA, 19 nt, Human
gucuugcaauggcagccuu

SEQ ID NO: 2995178 - RNA, 18 nt, Human
gucuugcaauggcagccu

SEQ ID NO: 2995179 - RNA, 17 nt, Human
gucuugcaauggcagcc

SEQ ID NO: 2995180 - RNA, 16 nt, Human
gucuugcaauggcagc

SEQ ID NO: 2995181 - RNA, 20 nt, Human
gucuugaacuccuggccuca

SEQ ID NO: 2995182 - RNA, 18 nt, Human
gucuugaacuccuggccu

SEQ ID NO: 2995183 - RNA, 21 nt, Human
gucuugaacuccuggccucaa

SEQ ID NO: 2995184 - RNA, 21 nt, Human
gucuugcaauggcagccuugg

SEQ ID NO: 2995185 - RNA, 20 nt, Human
gucuugcaauggcagccuug

SEQ ID NO: 2995186 - RNA, 23 nt, Human
gucuugcaauggcagccuuggca

SEQ ID NO: 2995187 - RNA, 16 nt, Human
gucuuuuuucacuaca

SEQ ID NO: 2995188 - RNA, 12 nt, Human
gucggagcccug

SEQ ID NO: 2995189 - RNA, 21 nt, Human
gucggaaaacaugcuacacac

SEQ ID NO: 2995190 - RNA, 16 nt, Human
gucggagcccugucuc

SEQ ID NO: 2995191 - RNA, 15 nt, Human
gucggccccaccagu

SEQ ID NO: 2995192 - RNA, 22 nt, Human
gucggccccaccagugccucuc

SEQ ID NO: 2995193 - RNA, 19 nt, Human
gucggccccaccagugccu

SEQ ID NO: 2995194 - RNA, 17 nt, Human
gucggccccaccagugc

SEQ ID NO: 2995195 - RNA, 16 nt, Human
gucgggcaugacacga

SEQ ID NO: 2995196 - RNA, 23 nt, Human
gucggguuuuauuguuuaaaauc

SEQ ID NO: 2995197 - RNA, 21 nt, Human
guccuuaccagcagagcaccu

SEQ ID NO: 2995198 - RNA, 18 nt, Human
guccuuaccagcagagca

SEQ ID NO: 2995199 - RNA, 19 nt, Human
guccuuaccagcagagcac

SEQ ID NO: 2995200 - RNA, 11 nt, Human
gucccugccaa

SEQ ID NO: 2995201 - RNA, 14 nt, Human
gucccugccaaugg

SEQ ID NO: 2995202 - RNA, 15 nt, Human
gucccugccaaugga

SEQ ID NO: 2995203 - RNA, 18 nt, Human
gucgucaaagcugaaaug

SEQ ID NO: 2995204 - RNA, 19 nt, Human
gucucacuauguugcccag

SEQ ID NO: 2995205 - RNA, 11 nt, Human
gucucacucug

SEQ ID NO: 2995206 - RNA, 18 nt, Human
gucucacuauguugccca

SEQ ID NO: 2995207 - RNA, 13 nt, Human
gucugacuguuuc

SEQ ID NO: 2995208 - RNA, 22 nt, Human
gucucacucugucgcccagucu

SEQ ID NO: 2995209 - RNA, 19 nt, Human
gucucacucugucgcccag

SEQ ID NO: 2995210 - RNA, 18 nt, Human
gucucacucugucgccca

SEQ ID NO: 2995211 - RNA, 16 nt, Human
gucucacucugucgcc

SEQ ID NO: 2995212 - RNA, 15 nt, Human
gucucacucugucgc

SEQ ID NO: 2995213 - RNA, 13 nt, Human
gugcguccugucg

SEQ ID NO: 2995214 - RNA, 13 nt, Human
gugcgggguacac

SEQ ID NO: 2995215 - RNA, 14 nt, Human
gugcggccuuuggc

SEQ ID NO: 2995216 - RNA, 14 nt, Human
gugcgccuacagga

SEQ ID NO: 2995217 - RNA, 16 nt, Human
gugccaugugccaggu

SEQ ID NO: 2995218 - RNA, 14 nt, Human
gugccaugugccag

SEQ ID NO: 2995219 - RNA, 21 nt, Human
gugcgaucuggguucacugca

SEQ ID NO: 2995220 - RNA, 23 nt, Human
gugcaguggugcgaucuggguuc

SEQ ID NO: 2995221 - RNA, 20 nt, Human
gugcaguggugcgaucuggg

SEQ ID NO: 2995222 - RNA, 22 nt, Human
gugcauaccacuuuuguucuug

SEQ ID NO: 2995223 - RNA, 18 nt, Human
gugauuuuuguaauuuuu

SEQ ID NO: 2995224 - RNA, 13 nt, Human
gugauuuuuguaa

SEQ ID NO: 2995225 - RNA, 24 nt, Human
gugauccacccaccucagccuccc

SEQ ID NO: 2995226 - RNA, 23 nt, Human
gugauccacccaccucagccucc

SEQ ID NO: 2995227 - RNA, 22 nt, Human
gugcacuaauguguaagacaaa

SEQ ID NO: 2995228 - RNA, 22 nt, Human
gugauccacccaccucagccuc

SEQ ID NO: 2995229 - RNA, 17 nt, Human
gugaguugauagcacag

SEQ ID NO: 2995230 - RNA, 15 nt, Human
gugauacaaugcugu

SEQ ID NO: 2995231 - RNA, 17 nt, Human
gugauacaaugcugugc

SEQ ID NO: 2995232 - RNA, 19 nt, Human
gugagccgagaucacgcca

SEQ ID NO: 2995233 - RNA, 17 nt, Human
gugaggaugaaaaaaua

SEQ ID NO: 2995234 - RNA, 20 nt, Human
gugagccacugcaccgggcc

SEQ ID NO: 2995235 - RNA, 15 nt, Human
gugagccacugcacc

SEQ ID NO: 2995236 - RNA, 14 nt, Human
gugagccacugcac

SEQ ID NO: 2995237 - RNA, 14 nt, Human
gugacagaggcagc

SEQ ID NO: 2995238 - RNA, 13 nt, Human
gugacagaggcag

SEQ ID NO: 2995239 - RNA, 12 nt, Human
gugacagaggca

SEQ ID NO: 2995240 - RNA, 14 nt, Human
gugaccucugccug

SEQ ID NO: 2995241 - RNA, 13 nt, Human
gugaccucugccu

SEQ ID NO: 2995242 - RNA, 15 nt, Human
gugacagaggcagcc

SEQ ID NO: 2995243 - RNA, 12 nt, Human
gugaccucugcc

SEQ ID NO: 2995244 - RNA, 16 nt, Human
gugacaagcucacaga

SEQ ID NO: 2995245 - RNA, 20 nt, Human
gugacaaggauugcuacugu

SEQ ID NO: 2995246 - RNA, 21 nt, Human
gugaaugaugauccuaggcau

SEQ ID NO: 2995247 - RNA, 21 nt, Human
gugaacaaauuuacagagaca

SEQ ID NO: 2995248 - RNA, 13 nt, Human
gugaacacaucag

SEQ ID NO: 2995249 - RNA, 15 nt, Human
guauagauguugcua

SEQ ID NO: 2995250 - RNA, 16 nt, Human
guauagauguugcuaa

SEQ ID NO: 2995251 - RNA, 21 nt, Human
guauagaauaggcacuuuaaa

SEQ ID NO: 2995252 - RNA, 15 nt, Human
guauagaauaggcac

SEQ ID NO: 2995253 - RNA, 14 nt, Human
guauagaaaaucuu

SEQ ID NO: 2995254 - RNA, 22 nt, Human
guauaugucaagccauaauugu

SEQ ID NO: 2995255 - RNA, 23 nt, Human
guauauguagauguaugcacaca

SEQ ID NO: 2995256 - RNA, 20 nt, Human
guauguuuuauauagcaaga

SEQ ID NO: 2995257 - RNA, 17 nt, Human
guauguuagugcaaauu

SEQ ID NO: 2995258 - RNA, 21 nt, Human
guaugaucacggcucacugca

SEQ ID NO: 2995259 - RNA, 20 nt, Human
guaugaggcauuuguuugaa

SEQ ID NO: 2995260 - RNA, 17 nt, Human
guaugaggcauuuguuu

SEQ ID NO: 2995261 - RNA, 20 nt, Human
guaugaucacggcucacugc

SEQ ID NO: 2995262 - RNA, 15 nt, Human
guaugaggcauuugu

SEQ ID NO: 2995263 - RNA, 13 nt, Human
guaugaggcauuu

SEQ ID NO: 2995264 - RNA, 12 nt, Human
guaucugagcag

SEQ ID NO: 2995265 - RNA, 12 nt, Human
guaucuggugac

SEQ ID NO: 2995266 - RNA, 19 nt, Human
guaucuggugacuuuccuc

SEQ ID NO: 2995267 - RNA, 15 nt, Human
guaguguuggagaag

SEQ ID NO: 2995268 - RNA, 14 nt, Human
guaguguuggagaa

SEQ ID NO: 2995269 - RNA, 13 nt, Human
guagugagccgag

SEQ ID NO: 2995270 - RNA, 14 nt, Human
guagucaggugccu

SEQ ID NO: 2995271 - RNA, 16 nt, Human
guaggguuauaauaau

SEQ ID NO: 2995272 - RNA, 15 nt, Human
guagagugugccuga

SEQ ID NO: 2995273 - RNA, 18 nt, Human
gcuauaggugcuacaaaa

SEQ ID NO: 2995274 - RNA, 17 nt, Human
guagauguaugcacaca

SEQ ID NO: 2995275 - RNA, 20 nt, Human
guagauguaugcacacacau

SEQ ID NO: 2995276 - RNA, 16 nt, Human
guagcauccuggaaua

SEQ ID NO: 2995277 - RNA, 21 nt, Human
guagcauuuguguugaagagg

SEQ ID NO: 2995278 - RNA, 15 nt, Human
guagcauuuuaaaca

SEQ ID NO: 2995279 - RNA, 13 nt, Human
guagcauuuuaaa

SEQ ID NO: 2995280 - RNA, 22 nt, Human
guagggcgggaggauguucugg

SEQ ID NO: 2995281 - RNA, 21 nt, Human
guagggcgggaggauguucug

SEQ ID NO: 2995282 - RNA, 23 nt, Human
guagggcgggaggauguucuggg

SEQ ID NO: 2995283 - RNA, 16 nt, Human
guagggcgggaggaug

SEQ ID NO: 2995284 - RNA, 21 nt, Human
guaggcuauuccugagagcug

SEQ ID NO: 2995285 - RNA, 16 nt, Human
gucaaggcuuagaccc

SEQ ID NO: 2995286 - RNA, 18 nt, Human
gucaaggcuuagacccuc

SEQ ID NO: 2995287 - RNA, 19 nt, Human
guauuuuguuuuugucuua

SEQ ID NO: 2995288 - RNA, 20 nt, Human
gucaaggcuuagacccucau

SEQ ID NO: 2995289 - RNA, 14 nt, Human
gucaaggcuuagac

SEQ ID NO: 2995290 - RNA, 15 nt, Human
gucaagugaaaaagg

SEQ ID NO: 2995291 - RNA, 22 nt, Human
gucaauaaaauccauacauuug

SEQ ID NO: 2995292 - RNA, 23 nt, Human
gucaauaaaauccauacauuugu

SEQ ID NO: 2995293 - RNA, 15 nt, Human
gucaaugcagccccc

SEQ ID NO: 2995294 - RNA, 15 nt, Human
gucaccccggccacc

SEQ ID NO: 2995295 - RNA, 22 nt, Human
guauuuucuccaaauguucacu

SEQ ID NO: 2995296 - RNA, 13 nt, Human
guauuuugaaauu

SEQ ID NO: 2995297 - RNA, 14 nt, Human
guauuuuacuaaua

SEQ ID NO: 2995298 - RNA, 20 nt, Human
guauuuuaaaagaaugauua

SEQ ID NO: 2995299 - RNA, 13 nt, Human
guauuuuaaucac

SEQ ID NO: 2995300 - RNA, 18 nt, Human
guauuuuaaaagaaugau

SEQ ID NO: 2995301 - RNA, 19 nt, Human
gucagcuccccucggagaa

SEQ ID NO: 2995302 - RNA, 16 nt, Human
gucagagccugcaguu

SEQ ID NO: 2995303 - RNA, 15 nt, Human
gucagagccugcagu

SEQ ID NO: 2995304 - RNA, 14 nt, Human
gucagagccugcag

SEQ ID NO: 2995305 - RNA, 12 nt, Human
gucacucuggca

SEQ ID NO: 2995306 - RNA, 13 nt, Human
gucacucuggcag

SEQ ID NO: 2995307 - RNA, 14 nt, Human
gucacucuggcagc

SEQ ID NO: 2995308 - RNA, 16 nt, Human
gucacucuggcagcuc

SEQ ID NO: 2995309 - RNA, 17 nt, Human
gucacucuggcagcuca

SEQ ID NO: 2995310 - RNA, 19 nt, Human
gucacucuggcagcucaga

SEQ ID NO: 2995311 - RNA, 17 nt, Human
gucaccccggccaccug

SEQ ID NO: 2995312 - RNA, 18 nt, Human
gucaccccggccaccugc

SEQ ID NO: 2995313 - RNA, 22 nt, Human
gucaccccggccaccugcggug

SEQ ID NO: 2995314 - RNA, 14 nt, Human
gucauucuucccua

SEQ ID NO: 2995315 - RNA, 21 nt, Human
gucauucagauaugauucaaa

SEQ ID NO: 2995316 - RNA, 17 nt, Human
gucauuauguuaauauu

SEQ ID NO: 2995317 - RNA, 19 nt, Human
gucauuauguuaauauuuc

SEQ ID NO: 2995318 - RNA, 21 nt, Human
gucagcuccccucggagaaga

SEQ ID NO: 2995319 - RNA, 22 nt, Human
gucagcuccccucggagaagag

SEQ ID NO: 2995320 - RNA, 23 nt, Human
gucagcuccccucggagaagagc

SEQ ID NO: 2995321 - RNA, 21 nt, Human
gucccaccuuggcugcaggga

SEQ ID NO: 2995322 - RNA, 12 nt, Human
guccacccagga

SEQ ID NO: 2995323 - RNA, 23 nt, Human
guccacccaggagccccgaggcc

SEQ ID NO: 2995324 - RNA, 21 nt, Human
gucccugcacuugcagacucu

SEQ ID NO: 2995325 - RNA, 19 nt, Human
gucccugcacuugcagacu

SEQ ID NO: 2995326 - RNA, 16 nt, Human
gucccugcacuugcag

SEQ ID NO: 2995327 - RNA, 23 nt, Human
gucccaccuuggcugcagggagu

SEQ ID NO: 2995328 - RNA, 20 nt, Human
gucccaccuuggcugcaggg

SEQ ID NO: 2995329 - RNA, 17 nt, Human
guccccaccgcagacag

SEQ ID NO: 2995330 - RNA, 13 nt, Human
uuuuccuucaaga

SEQ ID NO: 2995331 - RNA, 14 nt, Human
uuuuccugaaaacc

SEQ ID NO: 2995332 - RNA, 13 nt, Human
uuuuccugaaaac

SEQ ID NO: 2995333 - RNA, 21 nt, Human
uuuuccuucaagaaugcagua

SEQ ID NO: 2995334 - RNA, 14 nt, Human
uuuuccuucaagaa

SEQ ID NO: 2995335 - RNA, 15 nt, Human
uuuucuuuuaagaau

SEQ ID NO: 2995336 - RNA, 13 nt, Human
uuuucuuuuaaga

SEQ ID NO: 2995337 - RNA, 16 nt, Human
uuuugguauuugaaac

SEQ ID NO: 2995338 - RNA, 14 nt, Human
uuuugguauuugaa

SEQ ID NO: 2995339 - RNA, 18 nt, Human
uuuuggucuggagggaag

SEQ ID NO: 2995340 - RNA, 15 nt, Human
uuuuggucuguguga

SEQ ID NO: 2995341 - RNA, 18 nt, Human
uuuuggguuuauuuggaa

SEQ ID NO: 2995342 - RNA, 17 nt, Human
uuuuggguuuauuugga

SEQ ID NO: 2995343 - RNA, 14 nt, Human
uuuuggcugcugaa

SEQ ID NO: 2995344 - RNA, 20 nt, Human
uuuugacaaggggcaguggu

SEQ ID NO: 2995345 - RNA, 22 nt, Human
uuuucuuuugcuuuauggguuu

SEQ ID NO: 2995346 - RNA, 18 nt, Human
uuuuuaaaaaagaaacau

SEQ ID NO: 2995347 - RNA, 16 nt, Human
uuuugucauauaagau

SEQ ID NO: 2995348 - RNA, 19 nt, Human
uuuuguagagccagggucu

SEQ ID NO: 2995349 - RNA, 20 nt, Human
uuuuuaagggcccuuuuuca

SEQ ID NO: 2995350 - RNA, 23 nt, Human
uuuuuaagaaaaaggaugcacag

SEQ ID NO: 2995351 - RNA, 11 nt, Human
uuuuuccuuca

SEQ ID NO: 2995352 - RNA, 21 nt, Human
uuuuuccuucaagaaugcagu

SEQ ID NO: 2995353 - RNA, 19 nt, Human
uuuuuccuucagugccuua

SEQ ID NO: 2995354 - RNA, 19 nt, Human
uuuuucucuaggaaauauu

SEQ ID NO: 2995355 - RNA, 23 nt, Human
uuuuucucugauacagaaaaguu

SEQ ID NO: 2995356 - RNA, 23 nt, Human
uuaccaauugaaguaaaaugugg

SEQ ID NO: 2995357 - RNA, 22 nt, Human
uuuccucaaaacuucagacaua

SEQ ID NO: 2995358 - RNA, 18 nt, Human
uuuccucauuuuuauaau

SEQ ID NO: 2995359 - RNA, 16 nt, Human
uuuccugaggcugggc

SEQ ID NO: 2995360 - RNA, 22 nt, Human
uuaccaauugaaguaaaaugug

SEQ ID NO: 2995361 - RNA, 17 nt, Human
uuaccacagacauacua

SEQ ID NO: 2995362 - RNA, 14 nt, Human
uuaccacagacaua

SEQ ID NO: 2995363 - RNA, 14 nt, Human
uuacauuuuacaca

SEQ ID NO: 2995364 - RNA, 15 nt, Human
uuacauuuuacacac

SEQ ID NO: 2995365 - RNA, 23 nt, Human
uuacauuuuuaagugcugcauuu

SEQ ID NO: 2995366 - RNA, 13 nt, Human
uuucugagaaaga

SEQ ID NO: 2995367 - RNA, 20 nt, Human
uuucuguucuuucuggcuau

SEQ ID NO: 2995368 - RNA, 18 nt, Human
uuucucugauacagaaaa

SEQ ID NO: 2995369 - RNA, 17 nt, Human
uuucucugauacagaaa

SEQ ID NO: 2995370 - RNA, 16 nt, Human
uuucucugauacagaa

SEQ ID NO: 2995371 - RNA, 15 nt, Human
uuucucugauacaga

SEQ ID NO: 2995372 - RNA, 21 nt, Human
uuucugaaauuuccugggagc

SEQ ID NO: 2995373 - RNA, 19 nt, Human
uuucugaaauuuccuggga

SEQ ID NO: 2995374 - RNA, 18 nt, Human
uuucuaaaggcuaccuuu

SEQ ID NO: 2995375 - RNA, 21 nt, Human
uuucuaaaggcuaccuuugua

SEQ ID NO: 2995376 - RNA, 20 nt, Human
uuucuaaaggcuaccuuugu

SEQ ID NO: 2995377 - RNA, 23 nt, Human
uuucuacucgaguuacagacaaa

SEQ ID NO: 2995378 - RNA, 16 nt, Human
uuugaagauucuaugu

SEQ ID NO: 2995379 - RNA, 22 nt, Human
uuugaagaugccgcauuuggau

SEQ ID NO: 2995380 - RNA, 18 nt, Human
uuugaaucaucaagucuu

SEQ ID NO: 2995381 - RNA, 14 nt, Human
uuugaacucuucaa

SEQ ID NO: 2995382 - RNA, 15 nt, Human
uuugaacugauaaag

SEQ ID NO: 2995383 - RNA, 19 nt, Human
uuugaacugauaaagauga

SEQ ID NO: 2995384 - RNA, 17 nt, Human
uuugaacugauaaagau

SEQ ID NO: 2995385 - RNA, 12 nt, Human
uuucuucucccu

SEQ ID NO: 2995386 - RNA, 13 nt, Human
uuucuucucccuc

SEQ ID NO: 2995387 - RNA, 23 nt, Human
uuucuuagggaaggauacaaaag

SEQ ID NO: 2995388 - RNA, 18 nt, Human
uuucuuagggaaggauac

SEQ ID NO: 2995389 - RNA, 17 nt, Human
uuucuuauuucauuucu

SEQ ID NO: 2995390 - RNA, 14 nt, Human
uuuggaaaagaaua

SEQ ID NO: 2995391 - RNA, 14 nt, Human
uuuggaauuuugug

SEQ ID NO: 2995392 - RNA, 16 nt, Human
uuugcuuugugauuuu

SEQ ID NO: 2995393 - RNA, 15 nt, Human
uuugcuuugugauuu

SEQ ID NO: 2995394 - RNA, 20 nt, Human
uuugcauauugcauacuauu

SEQ ID NO: 2995395 - RNA, 15 nt, Human
uuugcauauugcaua

SEQ ID NO: 2995396 - RNA, 13 nt, Human
uuugguuucuagc

SEQ ID NO: 2995397 - RNA, 19 nt, Human
uuugguuuucacauuggaa

SEQ ID NO: 2995398 - RNA, 14 nt, Human
uuuguauaaaauaa

SEQ ID NO: 2995399 - RNA, 13 nt, Human
uuuguauaaaaua

SEQ ID NO: 2995400 - RNA, 21 nt, Human
uuuggaauuuugugcccccau

SEQ ID NO: 2995401 - RNA, 12 nt, Human
uuuguucccugu

SEQ ID NO: 2995402 - RNA, 21 nt, Human
uuuguucuggcucuuccaggc

SEQ ID NO: 2995403 - RNA, 21 nt, Human
uuuuaaaagaaugauuaugaa

SEQ ID NO: 2995404 - RNA, 15 nt, Human
uuuuaaaagaaugau

SEQ ID NO: 2995405 - RNA, 17 nt, Human
uuuuaaagaaugcucuu

SEQ ID NO: 2995406 - RNA, 19 nt, Human
uuuuaauauggaucuguau

SEQ ID NO: 2995407 - RNA, 20 nt, Human
uuuuaauaauguuucaaaca

SEQ ID NO: 2995408 - RNA, 21 nt, Human
uuuuaaaugcaccuggaauau

SEQ ID NO: 2995409 - RNA, 12 nt, Human
uuuuaaaugcac

SEQ ID NO: 2995410 - RNA, 11 nt, Human
uuuuaaaugca

SEQ ID NO: 2995411 - RNA, 22 nt, Human
gccgugugugugcguccugucg

SEQ ID NO: 2995412 - RNA, 13 nt, Human
gccucacaguccu

SEQ ID NO: 2995413 - RNA, 17 nt, Human
gccucacaguccuuacc

SEQ ID NO: 2995414 - RNA, 17 nt, Human
gccucaaccuccugggc

SEQ ID NO: 2995415 - RNA, 15 nt, Human
gccucacagcaguga

SEQ ID NO: 2995416 - RNA, 19 nt, Human
gccucacagcagugagacu

SEQ ID NO: 2995417 - RNA, 19 nt, Human
gccucaaccuccugggcua

SEQ ID NO: 2995418 - RNA, 18 nt, Human
gccucaaccuccugggcu

SEQ ID NO: 2995419 - RNA, 23 nt, Human
gccguggugauuuagcaggaagc

SEQ ID NO: 2995420 - RNA, 20 nt, Human
gccguguaaccauggaccca

SEQ ID NO: 2995421 - RNA, 15 nt, Human
gccgucuaccugagg

SEQ ID NO: 2995422 - RNA, 16 nt, Human
gccgucuaccugaggg

SEQ ID NO: 2995423 - RNA, 17 nt, Human
gccgucuaccugagggg

SEQ ID NO: 2995424 - RNA, 18 nt, Human
gcccuuuuucaauaacug

SEQ ID NO: 2995425 - RNA, 16 nt, Human
gcccuuggccaugggu

SEQ ID NO: 2995426 - RNA, 21 nt, Human
gcccuugucggccccaccagu

SEQ ID NO: 2995427 - RNA, 16 nt, Human
gcccuugucggcccca

SEQ ID NO: 2995428 - RNA, 14 nt, Human
gcccuucucuccag

SEQ ID NO: 2995429 - RNA, 16 nt, Human
gcccuucucuccagcc

SEQ ID NO: 2995430 - RNA, 17 nt, Human
gcccuucucuccagccc

SEQ ID NO: 2995431 - RNA, 18 nt, Human
gcccuucucuccagcccc

SEQ ID NO: 2995432 - RNA, 20 nt, Human
gccgggcgugguggugagug

SEQ ID NO: 2995433 - RNA, 21 nt, Human
gccgggcgcgguggcucacgc

SEQ ID NO: 2995434 - RNA, 21 nt, Human
gccgggcgugguggcaggcac

SEQ ID NO: 2995435 - RNA, 11 nt, Human
gccgcagcccu

SEQ ID NO: 2995436 - RNA, 12 nt, Human
gccgcagcccug

SEQ ID NO: 2995437 - RNA, 22 nt, Human
gccgagaucacgccacugcacu

SEQ ID NO: 2995438 - RNA, 21 nt, Human
gccgagaucacgccacugcac

SEQ ID NO: 2995439 - RNA, 20 nt, Human
gccgagaucacgccacugca

SEQ ID NO: 2995440 - RNA, 16 nt, Human
gccuccccuccucugc

SEQ ID NO: 2995441 - RNA, 19 nt, Human
gccuccccuccucugcuug

SEQ ID NO: 2995442 - RNA, 17 nt, Human
gccuccccuccucugcu

SEQ ID NO: 2995443 - RNA, 22 nt, Human
gccuccccuccucugcuugcca

SEQ ID NO: 2995444 - RNA, 20 nt, Human
gccuccccuccucugcuugc

SEQ ID NO: 2995445 - RNA, 17 nt, Human
gccucccgaguagcugg

SEQ ID NO: 2995446 - RNA, 19 nt, Human
gccucccgaguagcuggga

SEQ ID NO: 2995447 - RNA, 18 nt, Human
gccucccgaguagcuggg

SEQ ID NO: 2995448 - RNA, 20 nt, Human
gccucccgaguagcugggac

SEQ ID NO: 2995449 - RNA, 16 nt, Human
gccucccaacucaccc

SEQ ID NO: 2995450 - RNA, 17 nt, Human
gccucccaacucacccc

SEQ ID NO: 2995451 - RNA, 18 nt, Human
gccucccaacucacccca

SEQ ID NO: 2995452 - RNA, 19 nt, Human
gccucccaacucaccccag

SEQ ID NO: 2995453 - RNA, 14 nt, Human
gccucccaucaccc

SEQ ID NO: 2995454 - RNA, 16 nt, Human
gccucccaucacccgc

SEQ ID NO: 2995455 - RNA, 13 nt, Human
gccucccaacuca

SEQ ID NO: 2995456 - RNA, 19 nt, Human
gccucccaaagugcuggga

SEQ ID NO: 2995457 - RNA, 18 nt, Human
gccucccaaagugcuggg

SEQ ID NO: 2995458 - RNA, 16 nt, Human
gccucagcauccuggc

SEQ ID NO: 2995459 - RNA, 15 nt, Human
gccucagcauccugg

SEQ ID NO: 2995460 - RNA, 18 nt, Human
gccucacaguccuuacca

SEQ ID NO: 2995461 - RNA, 14 nt, Human
gccucugcacuccc

SEQ ID NO: 2995462 - RNA, 21 nt, Human
gccucugacacacagcucugu

SEQ ID NO: 2995463 - RNA, 20 nt, Human
gccucugacacacagcucug

SEQ ID NO: 2995464 - RNA, 19 nt, Human
gccucugacacacagcucu

SEQ ID NO: 2995465 - RNA, 16 nt, Human
gccucucucaggccaa

SEQ ID NO: 2995466 - RNA, 16 nt, Human
gccucugacacacagc

SEQ ID NO: 2995467 - RNA, 18 nt, Human
gccucugacacacagcuc

SEQ ID NO: 2995468 - RNA, 17 nt, Human
gccucugacacacagcu

SEQ ID NO: 2995469 - RNA, 13 nt, Human
gccucucucaggc

SEQ ID NO: 2995470 - RNA, 14 nt, Human
gccucucucaggcc

SEQ ID NO: 2995471 - RNA, 13 nt, Human
gccugcaagggag

SEQ ID NO: 2995472 - RNA, 15 nt, Human
gccugcaagggagug

SEQ ID NO: 2995473 - RNA, 13 nt, Human
gccucugccucug

SEQ ID NO: 2995474 - RNA, 12 nt, Human
gccucugccucu

SEQ ID NO: 2995475 - RNA, 13 nt, Human
gcuacacaccuaa

SEQ ID NO: 2995476 - RNA, 20 nt, Human
gcuaagagggagggagggcu

SEQ ID NO: 2995477 - RNA, 20 nt, Human
gcuacacacugcauguuugu

SEQ ID NO: 2995478 - RNA, 13 nt, Human
gcuacacacugca

SEQ ID NO: 2995479 - RNA, 14 nt, Human
gcuacacaggggaa

SEQ ID NO: 2995480 - RNA, 13 nt, Human
gcuaagagggagg

SEQ ID NO: 2995481 - RNA, 19 nt, Human
gcuaaagaaguuugaacau

SEQ ID NO: 2995482 - RNA, 18 nt, Human
gcuaaagaaguuugaaca

SEQ ID NO: 2995483 - RNA, 15 nt, Human
gcuaaagaaguuuga

SEQ ID NO: 2995484 - RNA, 20 nt, Human
gcuaaagaaguuugaacauu

SEQ ID NO: 2995485 - RNA, 13 nt, Human
gcuauaggugcua

SEQ ID NO: 2995486 - RNA, 15 nt, Human
gcuaggaacacuccu

SEQ ID NO: 2995487 - RNA, 18 nt, Human
gcuagaacucccuuucaa

SEQ ID NO: 2995488 - RNA, 16 nt, Human
gcuaccuuuguauucu

SEQ ID NO: 2995489 - RNA, 19 nt, Human
gcuagaacucccuuucaac

SEQ ID NO: 2995490 - RNA, 15 nt, Human
gcuacaguaauaaau

SEQ ID NO: 2995491 - RNA, 14 nt, Human
gcuacaguaauaaa

SEQ ID NO: 2995492 - RNA, 13 nt, Human
gcuacaguaauaa

SEQ ID NO: 2995493 - RNA, 12 nt, Human
gcgacagugaga

SEQ ID NO: 2995494 - RNA, 15 nt, Human
gcgccuacaggagug

SEQ ID NO: 2995495 - RNA, 13 nt, Human
gcggacagccacg

SEQ ID NO: 2995496 - RNA, 11 nt, Human
gcggacagcca

SEQ ID NO: 2995497 - RNA, 19 nt, Human
gcgucucauacucaccuca

SEQ ID NO: 2995498 - RNA, 15 nt, Human
gcggacagccacggc

SEQ ID NO: 2995499 - RNA, 13 nt, Human
gccuuuggcuuca

SEQ ID NO: 2995500 - RNA, 23 nt, Human
gcgacaaugcaaaccaucauuga

SEQ ID NO: 2995501 - RNA, 16 nt, Human
gccuuauggaacacuc

SEQ ID NO: 2995502 - RNA, 18 nt, Human
gccuuauggaacacucug

SEQ ID NO: 2995503 - RNA, 19 nt, Human
gccuuauggaacacucuga

SEQ ID NO: 2995504 - RNA, 20 nt, Human
gccuuauggaacacucugag

SEQ ID NO: 2995505 - RNA, 12 nt, Human
gccuuccagggg

SEQ ID NO: 2995506 - RNA, 15 nt, Human
gccuuccaggggugg

SEQ ID NO: 2995507 - RNA, 16 nt, Human
gccuuccagggguggg

SEQ ID NO: 2995508 - RNA, 20 nt, Human
gccuuacacaaugguuuucu

SEQ ID NO: 2995509 - RNA, 16 nt, Human
gccuuacacaaugguu

SEQ ID NO: 2995510 - RNA, 18 nt, Human
gccuuacccucauguucu

SEQ ID NO: 2995511 - RNA, 21 nt, Human
gccuuacacaaugguuuucuu

SEQ ID NO: 2995512 - RNA, 21 nt, Human
gccuguugggccaggagccuc

SEQ ID NO: 2995513 - RNA, 18 nt, Human
gccuuagaagucacacag

SEQ ID NO: 2995514 - RNA, 17 nt, Human
gccuuagaagucacaca

SEQ ID NO: 2995515 - RNA, 19 nt, Human
gccuuagaagucacacagu

SEQ ID NO: 2995516 - RNA, 10 nt, Human
gccuuaugga

SEQ ID NO: 2995517 - RNA, 14 nt, Human
gccuuauggaacac

SEQ ID NO: 2995518 - RNA, 21 nt, Human
gccugggggcugggcagagga

SEQ ID NO: 2995519 - RNA, 22 nt, Human
gccugggggcugggcagaggaa

SEQ ID NO: 2995520 - RNA, 13 nt, Human
gccugguggcagc

SEQ ID NO: 2995521 - RNA, 21 nt, Human
gccugguggcagcugcggucc

SEQ ID NO: 2995522 - RNA, 19 nt, Human
gccugguggcagcugcggu

SEQ ID NO: 2995523 - RNA, 18 nt, Human
gccugguggcagcugcgg

SEQ ID NO: 2995524 - RNA, 15 nt, Human
gcccugcagagggca

SEQ ID NO: 2995525 - RNA, 14 nt, Human
gcccugcagagggc

SEQ ID NO: 2995526 - RNA, 13 nt, Human
gcccugcagaggg

SEQ ID NO: 2995527 - RNA, 13 nt, Human
gcccucugcccac

SEQ ID NO: 2995528 - RNA, 16 nt, Human
gcccucugcccacucc

SEQ ID NO: 2995529 - RNA, 18 nt, Human
gcccucugcccacucccu

SEQ ID NO: 2995530 - RNA, 19 nt, Human
gcccucugcccacucccug

SEQ ID NO: 2995531 - RNA, 22 nt, Human
gcccuccaagaccuucuccuuc

SEQ ID NO: 2995532 - RNA, 23 nt, Human
gcccuccaagaccuucuccuuca

SEQ ID NO: 2995533 - RNA, 12 nt, Human
gcccuccagagc

SEQ ID NO: 2995534 - RNA, 18 nt, Human
gcccuccagagccccaca

SEQ ID NO: 2995535 - RNA, 16 nt, Human
gcccuccagagcccca

SEQ ID NO: 2995536 - RNA, 14 nt, Human
gcccuccagagccc

SEQ ID NO: 2995537 - RNA, 22 nt, Human
gcccuccagagccccacagccc

SEQ ID NO: 2995538 - RNA, 20 nt, Human
gcccuccagagccccacagc

SEQ ID NO: 2995539 - RNA, 19 nt, Human
gcccuccaagaccuucucc

SEQ ID NO: 2995540 - RNA, 21 nt, Human
gcccuccaagaccuucuccuu

SEQ ID NO: 2995541 - RNA, 16 nt, Human
gccccucagggucccu

SEQ ID NO: 2995542 - RNA, 18 nt, Human
gccccucagggucccugg

SEQ ID NO: 2995543 - RNA, 14 nt, Human
gccccucagggucc

SEQ ID NO: 2995544 - RNA, 18 nt, Human
gccccgaggccuucucug

SEQ ID NO: 2995545 - RNA, 23 nt, Human
gccccucaacucuccuccagagu

SEQ ID NO: 2995546 - RNA, 13 nt, Human
gcccccuguggau

SEQ ID NO: 2995547 - RNA, 17 nt, Human
gcccccuguggaugcug

SEQ ID NO: 2995548 - RNA, 15 nt, Human
gccccgaggccuucu

SEQ ID NO: 2995549 - RNA, 20 nt, Human
gccccuucugacccaugcug

SEQ ID NO: 2995550 - RNA, 12 nt, Human
gccccagugccc

SEQ ID NO: 2995551 - RNA, 18 nt, Human
gccccaucccaaacccuu

SEQ ID NO: 2995552 - RNA, 14 nt, Human
gccccagugcccac

SEQ ID NO: 2995553 - RNA, 13 nt, Human
gccccagugccca

SEQ ID NO: 2995554 - RNA, 21 nt, Human
gccccagugcccacaggauca

SEQ ID NO: 2995555 - RNA, 13 nt, Human
gccccauccucug

SEQ ID NO: 2995556 - RNA, 14 nt, Human
gccccauccucugu

SEQ ID NO: 2995557 - RNA, 22 nt, Human
gccccauccucuguacagagcc

SEQ ID NO: 2995558 - RNA, 14 nt, Human
gccccauucugccu

SEQ ID NO: 2995559 - RNA, 18 nt, Human
gcccagggcaucugggag

SEQ ID NO: 2995560 - RNA, 15 nt, Human
gcccagggcaucugg

SEQ ID NO: 2995561 - RNA, 14 nt, Human
gcccagggcaucug

SEQ ID NO: 2995562 - RNA, 12 nt, Human
gcccaggcuggc

SEQ ID NO: 2995563 - RNA, 13 nt, Human
gcccaggccuccu

SEQ ID NO: 2995564 - RNA, 23 nt, Human
gcccaggccccugccacccuggg

SEQ ID NO: 2995565 - RNA, 21 nt, Human
gcccagagaggguggugaccu

SEQ ID NO: 2995566 - RNA, 15 nt, Human
gcccagagagggugg

SEQ ID NO: 2995567 - RNA, 22 nt, Human
gcccaguuggguggaugccugg

SEQ ID NO: 2995568 - RNA, 15 nt, Human
gcccaggguggccac

SEQ ID NO: 2995569 - RNA, 20 nt, Human
gcccaggguggccacaccuc

SEQ ID NO: 2995570 - RNA, 24 nt, Human
gccaaggccaaaggaagcacaugc

SEQ ID NO: 2995571 - RNA, 19 nt, Human
gccaaggccaaaggaagca

SEQ ID NO: 2995572 - RNA, 20 nt, Human
gccaaggccaaaggaagcac

SEQ ID NO: 2995573 - RNA, 21 nt, Human
gccagagacacaagccuucgg

SEQ ID NO: 2995574 - RNA, 22 nt, Human
gccagagacacaagccuucggc

SEQ ID NO: 2995575 - RNA, 19 nt, Human
gccacugcaccgggccaca

SEQ ID NO: 2995576 - RNA, 21 nt, Human
gccacugcaccgggccacaga

SEQ ID NO: 2995577 - RNA, 20 nt, Human
gccacugcaccgggccacag

SEQ ID NO: 2995578 - RNA, 14 nt, Human
gccagaugcaccag

SEQ ID NO: 2995579 - RNA, 24 nt, Human
gccagauucuuuccugaggcuggg

SEQ ID NO: 2995580 - RNA, 13 nt, Human
gccagauuucacu

SEQ ID NO: 2995581 - RNA, 20 nt, Human
gccagauucuuuccugaggc

SEQ ID NO: 2995582 - RNA, 15 nt, Human
gccagaugcaccagc

SEQ ID NO: 2995583 - RNA, 22 nt, Human
gccagccgagauagccaaggcc

SEQ ID NO: 2995584 - RNA, 19 nt, Human
gccagauucuuuccugagg

SEQ ID NO: 2995585 - RNA, 20 nt, Human
gccagcugcuugggcuucau

SEQ ID NO: 2995586 - RNA, 12 nt, Human
gccaggaagcca

SEQ ID NO: 2995587 - RNA, 13 nt, Human
gccaggaagccag

SEQ ID NO: 2995588 - RNA, 14 nt, Human
gccaggaagccagc

SEQ ID NO: 2995589 - RNA, 17 nt, Human
gccagcugcuugggcuu

SEQ ID NO: 2995590 - RNA, 18 nt, Human
gccagcugcuugggcuuc

SEQ ID NO: 2995591 - RNA, 16 nt, Human
gccagcugcuugggcu

SEQ ID NO: 2995592 - RNA, 19 nt, Human
gccaggagccuccugcccu

SEQ ID NO: 2995593 - RNA, 20 nt, Human
gccaggagccuccugcccuu

SEQ ID NO: 2995594 - RNA, 14 nt, Human
gccaggagccuccu

SEQ ID NO: 2995595 - RNA, 16 nt, Human
gccaggagccuccugc

SEQ ID NO: 2995596 - RNA, 15 nt, Human
gccaggaagccagca

SEQ ID NO: 2995597 - RNA, 20 nt, Human
gccaggaagccagcaggcuc

SEQ ID NO: 2995598 - RNA, 19 nt, Human
gccaugggcacugugggua

SEQ ID NO: 2995599 - RNA, 16 nt, Human
gccaugggccuccugu

SEQ ID NO: 2995600 - RNA, 15 nt, Human
gccaugggccuccug

SEQ ID NO: 2995601 - RNA, 13 nt, Human
gcccaaggccuuc

SEQ ID NO: 2995602 - RNA, 16 nt, Human
gcccaaggccuucccc

SEQ ID NO: 2995603 - RNA, 17 nt, Human
gcccaccuggccucugc

SEQ ID NO: 2995604 - RNA, 20 nt, Human
gcccaccuggccucugcacu

SEQ ID NO: 2995605 - RNA, 21 nt, Human
gcccaccuggccucugcacuc

SEQ ID NO: 2995606 - RNA, 24 nt, Human
gcccaccuggccucugcacucccc

SEQ ID NO: 2995607 - RNA, 15 nt, Human
gcccaccuggccucu

SEQ ID NO: 2995608 - RNA, 16 nt, Human
gcccaccuggccucug

SEQ ID NO: 2995609 - RNA, 16 nt, Human
gcccaccuuggcucaa

SEQ ID NO: 2995610 - RNA, 15 nt, Human
gcccaccuuggcuca

SEQ ID NO: 2995611 - RNA, 13 nt, Human
gcccaccuuggcu

SEQ ID NO: 2995612 - RNA, 14 nt, Human
gcccacuucugcca

SEQ ID NO: 2995613 - RNA, 21 nt, Human
gccagucaccccggccaccug

SEQ ID NO: 2995614 - RNA, 12 nt, Human
gccaguaaaugg

SEQ ID NO: 2995615 - RNA, 23 nt, Human
gccaguaaaugggggugcauuug

SEQ ID NO: 2995616 - RNA, 15 nt, Human
gccaggcuggucuca

SEQ ID NO: 2995617 - RNA, 13 nt, Human
gccaggcuggucu

SEQ ID NO: 2995618 - RNA, 14 nt, Human
gccaugcuccuggc

SEQ ID NO: 2995619 - RNA, 20 nt, Human
gccaugaggaacaaggcaag

SEQ ID NO: 2995620 - RNA, 16 nt, Human
gccaucccucccucca

SEQ ID NO: 2995621 - RNA, 18 nt, Human
gccaucccucccuccacc

SEQ ID NO: 2995622 - RNA, 23 nt, Human
gccaucccucccuccaccucccu

SEQ ID NO: 2995623 - RNA, 19 nt, Human
gccauccuggcccagggca

SEQ ID NO: 2995624 - RNA, 18 nt, Human
gccauccuggcccagggc

SEQ ID NO: 2995625 - RNA, 20 nt, Human
gccauccuggcccagggcau

SEQ ID NO: 2995626 - RNA, 14 nt, Human
gccauccuggccca

SEQ ID NO: 2995627 - RNA, 19 nt, Human
gcagcccucaauugugaaa

SEQ ID NO: 2995628 - RNA, 13 nt, Human
gcagcccugcaga

SEQ ID NO: 2995629 - RNA, 20 nt, Human
gcagccccuguucuggcaga

SEQ ID NO: 2995630 - RNA, 21 nt, Human
gcagccccuguucuggcagag

SEQ ID NO: 2995631 - RNA, 20 nt, Human
gcagccccgugggguuccuc

SEQ ID NO: 2995632 - RNA, 24 nt, Human
gcagccccauucugccugcccagg

SEQ ID NO: 2995633 - RNA, 21 nt, Human
gcagccccauucugccugccc

SEQ ID NO: 2995634 - RNA, 19 nt, Human
gcagccccauucugccugc

SEQ ID NO: 2995635 - RNA, 18 nt, Human
gcagccccauucugccug

SEQ ID NO: 2995636 - RNA, 23 nt, Human
gcagcaauaaagcagcguuucua

SEQ ID NO: 2995637 - RNA, 16 nt, Human
gcagcaauaaagcagc

SEQ ID NO: 2995638 - RNA, 17 nt, Human
gcagccccauucugccu

SEQ ID NO: 2995639 - RNA, 20 nt, Human
gcagaguugaagacagagcu

SEQ ID NO: 2995640 - RNA, 18 nt, Human
gcagauaaacaguaguga

SEQ ID NO: 2995641 - RNA, 21 nt, Human
gcagaguugaagacagagcua

SEQ ID NO: 2995642 - RNA, 17 nt, Human
gcagacaguuaagagaa

SEQ ID NO: 2995643 - RNA, 23 nt, Human
gcagaccauuggggcucccagcc

SEQ ID NO: 2995644 - RNA, 22 nt, Human
gcagaccauuggggcucccagc

SEQ ID NO: 2995645 - RNA, 21 nt, Human
gcagaccauuggggcucccag

SEQ ID NO: 2995646 - RNA, 20 nt, Human
gcagaccauuggggcuccca

SEQ ID NO: 2995647 - RNA, 22 nt, Human
gcagauacaggaaaagcugcug

SEQ ID NO: 2995648 - RNA, 14 nt, Human
gcagcccugcagag

SEQ ID NO: 2995649 - RNA, 15 nt, Human
gcagcccugcagagg

SEQ ID NO: 2995650 - RNA, 16 nt, Human
gcagcccugcagaggg

SEQ ID NO: 2995651 - RNA, 17 nt, Human
gcagcccugcagagggc

SEQ ID NO: 2995652 - RNA, 15 nt, Human
gcagcucaccucucc

SEQ ID NO: 2995653 - RNA, 15 nt, Human
gcagccuuggcaaac

SEQ ID NO: 2995654 - RNA, 14 nt, Human
gcagcucaccucuc

SEQ ID NO: 2995655 - RNA, 23 nt, Human
gcaggaggaucacuugaguccag

SEQ ID NO: 2995656 - RNA, 20 nt, Human
gcaggaggaucacuugaguc

SEQ ID NO: 2995657 - RNA, 13 nt, Human
gcaggcagccagg

SEQ ID NO: 2995658 - RNA, 14 nt, Human
gcaggcagccaggc

SEQ ID NO: 2995659 - RNA, 12 nt, Human
gcaggcagccag

SEQ ID NO: 2995660 - RNA, 12 nt, Human
gcaggcaccugu

SEQ ID NO: 2995661 - RNA, 17 nt, Human
gcacugguuuguucccu

SEQ ID NO: 2995662 - RNA, 20 nt, Human
gcacugcuuccagugaggcu

SEQ ID NO: 2995663 - RNA, 16 nt, Human
gcacugcuuccaguga

SEQ ID NO: 2995664 - RNA, 18 nt, Human
gcacugcuuccagugagg

SEQ ID NO: 2995665 - RNA, 19 nt, Human
gcacugguuuguucccugu

SEQ ID NO: 2995666 - RNA, 12 nt, Human
gcagacaggacc

SEQ ID NO: 2995667 - RNA, 13 nt, Human
gcagacaggacca

SEQ ID NO: 2995668 - RNA, 15 nt, Human
gcagacaggaccagg

SEQ ID NO: 2995669 - RNA, 19 nt, Human
gcagacaggcaagcaccuc

SEQ ID NO: 2995670 - RNA, 23 nt, Human
gcagacaggcaagcaccuccugc

SEQ ID NO: 2995671 - RNA, 12 nt, Human
gcacgauuucug

SEQ ID NO: 2995672 - RNA, 18 nt, Human
gcaccuuagacagucccu

SEQ ID NO: 2995673 - RNA, 21 nt, Human
gcaccuggaauauauaaccag

SEQ ID NO: 2995674 - RNA, 18 nt, Human
gcaccuggaauauauaac

SEQ ID NO: 2995675 - RNA, 15 nt, Human
gcacccucaggcagg

SEQ ID NO: 2995676 - RNA, 14 nt, Human
gcaccuuagacagu

SEQ ID NO: 2995677 - RNA, 17 nt, Human
gcaccuuagacaguccc

SEQ ID NO: 2995678 - RNA, 22 nt, Human
gcaccuggaauauauaaccagu

SEQ ID NO: 2995679 - RNA, 19 nt, Human
gcacccggccccugcuggu

SEQ ID NO: 2995680 - RNA, 18 nt, Human
gcacccggccccugcugg

SEQ ID NO: 2995681 - RNA, 22 nt, Human
gcacccaccaucaugucuggcu

SEQ ID NO: 2995682 - RNA, 16 nt, Human
gcaccagcagccugga

SEQ ID NO: 2995683 - RNA, 21 nt, Human
gcaccacugcacuccagccug

SEQ ID NO: 2995684 - RNA, 22 nt, Human
gcaccacugcacuccagccugg

SEQ ID NO: 2995685 - RNA, 15 nt, Human
gcaccagcagccugg

SEQ ID NO: 2995686 - RNA, 14 nt, Human
gcaccagcagccug

SEQ ID NO: 2995687 - RNA, 13 nt, Human
gcaauggcagccu

SEQ ID NO: 2995688 - RNA, 12 nt, Human
gcaauggcagcc

SEQ ID NO: 2995689 - RNA, 20 nt, Human
gcaccacugcacuccagccu

SEQ ID NO: 2995690 - RNA, 14 nt, Human
gcaauggcagccuu

SEQ ID NO: 2995691 - RNA, 18 nt, Human
gcagugcuuggcccagga

SEQ ID NO: 2995692 - RNA, 19 nt, Human
gcagugcuuggcccaggag

SEQ ID NO: 2995693 - RNA, 20 nt, Human
gcagugcuuggcccaggagu

SEQ ID NO: 2995694 - RNA, 15 nt, Human
gcagugcaugcuguc

SEQ ID NO: 2995695 - RNA, 16 nt, Human
gcagugcaugcugucc

SEQ ID NO: 2995696 - RNA, 22 nt, Human
gcagguccaggguuugaguuca

SEQ ID NO: 2995697 - RNA, 20 nt, Human
gcaggucuugaacuccuggc

SEQ ID NO: 2995698 - RNA, 19 nt, Human
gcaggucuugaacuccugg

SEQ ID NO: 2995699 - RNA, 18 nt, Human
gcagggucucacucuguc

SEQ ID NO: 2995700 - RNA, 17 nt, Human
gcagggucucacucugu

SEQ ID NO: 2995701 - RNA, 14 nt, Human
gcagggcucagcgg

SEQ ID NO: 2995702 - RNA, 15 nt, Human
gcaggcagccaggcc

SEQ ID NO: 2995703 - RNA, 16 nt, Human
gcaggcagccaggcca

SEQ ID NO: 2995704 - RNA, 21 nt, Human
gcagggcucagcggggacagc

SEQ ID NO: 2995705 - RNA, 19 nt, Human
gcagggcucagcggggaca

SEQ ID NO: 2995706 - RNA, 18 nt, Human
gcaguucagagcugcccu

SEQ ID NO: 2995707 - RNA, 17 nt, Human
gcaguucagagcugccc

SEQ ID NO: 2995708 - RNA, 15 nt, Human
gcaguucugaagaag

SEQ ID NO: 2995709 - RNA, 16 nt, Human
gcaguucagagcugcc

SEQ ID NO: 2995710 - RNA, 17 nt, Human
gcaguuauuaacacuaa

SEQ ID NO: 2995711 - RNA, 13 nt, Human
gcauagaaguaaa

SEQ ID NO: 2995712 - RNA, 17 nt, Human
gcaguucugaagaagau

SEQ ID NO: 2995713 - RNA, 14 nt, Human
gcaguucugaagaa

SEQ ID NO: 2995714 - RNA, 15 nt, Human
gcagugggagcugcc

SEQ ID NO: 2995715 - RNA, 14 nt, Human
gcagugggagcugc

SEQ ID NO: 2995716 - RNA, 12 nt, Human
gcagugggagcu

SEQ ID NO: 2995717 - RNA, 13 nt, Human
gcagugggagcug

SEQ ID NO: 2995718 - RNA, 23 nt, Human
gcaguggugguuuucuguucuuu

SEQ ID NO: 2995719 - RNA, 22 nt, Human
gcaguggugguuuucuguucuu

SEQ ID NO: 2995720 - RNA, 17 nt, Human
gcauagguuuaauaauu

SEQ ID NO: 2995721 - RNA, 14 nt, Human
gccaaacucaccug

SEQ ID NO: 2995722 - RNA, 16 nt, Human
gccaaacucaccugcc

SEQ ID NO: 2995723 - RNA, 19 nt, Human
gcauuuuuuaaccuccuaa

SEQ ID NO: 2995724 - RNA, 18 nt, Human
gcauuuguuugaacugau

SEQ ID NO: 2995725 - RNA, 22 nt, Human
gccaaagcuaggccuggccaga

SEQ ID NO: 2995726 - RNA, 16 nt, Human
gccaaagcuaggccug

SEQ ID NO: 2995727 - RNA, 16 nt, Human
gccaaagccuccucca

SEQ ID NO: 2995728 - RNA, 19 nt, Human
gccaaagccuccuccagcc

SEQ ID NO: 2995729 - RNA, 20 nt, Human
gccaaagccaaagcuaggcc

SEQ ID NO: 2995730 - RNA, 13 nt, Human
gccaaagccaaag

SEQ ID NO: 2995731 - RNA, 16 nt, Human
gcauuuguuugaacug

SEQ ID NO: 2995732 - RNA, 16 nt, Human
gcauuuguguugaaga

SEQ ID NO: 2995733 - RNA, 14 nt, Human
gcauuugcugaaua

SEQ ID NO: 2995734 - RNA, 13 nt, Human
gcauuugcugaau

SEQ ID NO: 2995735 - RNA, 21 nt, Human
gcauuugaggucuguucuuuc

SEQ ID NO: 2995736 - RNA, 17 nt, Human
gcauuaucuagauacug

SEQ ID NO: 2995737 - RNA, 19 nt, Human
gcauucaaauguauuacag

SEQ ID NO: 2995738 - RNA, 13 nt, Human
gcauuauauuuau

SEQ ID NO: 2995739 - RNA, 22 nt, Human
gcauguucucugaggacacuaa

SEQ ID NO: 2995740 - RNA, 21 nt, Human
gcauguucucugaggacacua

SEQ ID NO: 2995741 - RNA, 15 nt, Human
gcauguucucugagg

SEQ ID NO: 2995742 - RNA, 14 nt, Human
gcauguucucugag

SEQ ID NO: 2995743 - RNA, 18 nt, Human
gcaugcgggcuuccuccu

SEQ ID NO: 2995744 - RNA, 18 nt, Human
gcaugaaguaauaugcac

SEQ ID NO: 2995745 - RNA, 12 nt, Human
gcaucagcugcu

SEQ ID NO: 2995746 - RNA, 12 nt, Human
gauucauauuua

SEQ ID NO: 2995747 - RNA, 17 nt, Human
gauucauauuuacuucu

SEQ ID NO: 2995748 - RNA, 19 nt, Human
gauucauauuuacuucuua

SEQ ID NO: 2995749 - RNA, 18 nt, Human
gauucauauuuacuucuu

SEQ ID NO: 2995750 - RNA, 18 nt, Human
gauucccaagcucugcuc

SEQ ID NO: 2995751 - RNA, 23 nt, Human
gauggggcugcaccggcuggccu

SEQ ID NO: 2995752 - RNA, 19 nt, Human
gauggggcugcaccggcug

SEQ ID NO: 2995753 - RNA, 13 nt, Human
gauucagcucugc

SEQ ID NO: 2995754 - RNA, 15 nt, Human
gauucagcucugcaa

SEQ ID NO: 2995755 - RNA, 19 nt, Human
gauucagacagcugccugg

SEQ ID NO: 2995756 - RNA, 20 nt, Human
gauucccaagcucugcuccu

SEQ ID NO: 2995757 - RNA, 19 nt, Human
gauucccaagcucugcucc

SEQ ID NO: 2995758 - RNA, 12 nt, Human
gauucuuuccug

SEQ ID NO: 2995759 - RNA, 16 nt, Human
gauucuuuccugaggc

SEQ ID NO: 2995760 - RNA, 17 nt, Human
gauucuuuccugaggcu

SEQ ID NO: 2995761 - RNA, 18 nt, Human
gauucuuuccugaggcug

SEQ ID NO: 2995762 - RNA, 20 nt, Human
gauugcaacaggcugggcuu

SEQ ID NO: 2995763 - RNA, 16 nt, Human
gauugcaccacugcac

SEQ ID NO: 2995764 - RNA, 23 nt, Human
gauugcaccacugcacuccagcc

SEQ ID NO: 2995765 - RNA, 21 nt, Human
gauugcaacaggcugggcuuc

SEQ ID NO: 2995766 - RNA, 11 nt, Human
gauuuucagcc

SEQ ID NO: 2995767 - RNA, 15 nt, Human
gauuuucagcccuca

SEQ ID NO: 2995768 - RNA, 19 nt, Human
gauuuucagcccucagaau

SEQ ID NO: 2995769 - RNA, 15 nt, Human
gauuuuccugaaaac

SEQ ID NO: 2995770 - RNA, 18 nt, Human
gauuuccguuaaaauacc

SEQ ID NO: 2995771 - RNA, 15 nt, Human
gauuuccguuaaaau

SEQ ID NO: 2995772 - RNA, 19 nt, Human
gauuucuguuuagauaaua

SEQ ID NO: 2995773 - RNA, 11 nt, Human
gauuucuguuu

SEQ ID NO: 2995774 - RNA, 14 nt, Human
gcaagggugauggg

SEQ ID NO: 2995775 - RNA, 11 nt, Human
gcaaggcuguc

SEQ ID NO: 2995776 - RNA, 10 nt, Human
gcaagccaga

SEQ ID NO: 2995777 - RNA, 22 nt, Human
gcaaggcaaauguuuauuuaaa

SEQ ID NO: 2995778 - RNA, 18 nt, Human
gcaaggagauuuacaacu

SEQ ID NO: 2995779 - RNA, 15 nt, Human
gcaaugaccuuucaa

SEQ ID NO: 2995780 - RNA, 17 nt, Human
gcaaugaccuuucaaua

SEQ ID NO: 2995781 - RNA, 20 nt, Human
gcaaugaccuuucaauagga

SEQ ID NO: 2995782 - RNA, 22 nt, Human
gcaaugaccuuucaauaggaaa

SEQ ID NO: 2995783 - RNA, 15 nt, Human
gcaaucaaaucugcu

SEQ ID NO: 2995784 - RNA, 17 nt, Human
gcaaucaaaucugcuuu

SEQ ID NO: 2995785 - RNA, 23 nt, Human
gcaaugcuggcuguuggcugggg

SEQ ID NO: 2995786 - RNA, 22 nt, Human
gcaaugcuggcuguuggcuggg

SEQ ID NO: 2995787 - RNA, 14 nt, Human
gcaaugcuggcugu

SEQ ID NO: 2995788 - RNA, 13 nt, Human
gcaaugcuggcug

SEQ ID NO: 2995789 - RNA, 23 nt, Human
gcaaugaccuuucaauaggaaaa

SEQ ID NO: 2995790 - RNA, 23 nt, Human
gcaaagcacugacuucuaaguaa

SEQ ID NO: 2995791 - RNA, 18 nt, Human
gcaaacagggccucugcg

SEQ ID NO: 2995792 - RNA, 17 nt, Human
gcaaacagggccucugc

SEQ ID NO: 2995793 - RNA, 16 nt, Human
gcaaacagggccucug

SEQ ID NO: 2995794 - RNA, 13 nt, Human
gcaaacagggccu

SEQ ID NO: 2995795 - RNA, 16 nt, Human
gcaaaguaucccuacu

SEQ ID NO: 2995796 - RNA, 17 nt, Human
gcaagaauugaagcagg

SEQ ID NO: 2995797 - RNA, 14 nt, Human
gcaagacgcugugc

SEQ ID NO: 2995798 - RNA, 20 nt, Human
gcaagacgcugugcugcccu

SEQ ID NO: 2995799 - RNA, 21 nt, Human
gcaagacgcugugcugcccug

SEQ ID NO: 2995800 - RNA, 22 nt, Human
gcaagacgcugugcugcccugc

SEQ ID NO: 2995801 - RNA, 23 nt, Human
gcaagacgcugugcugcccugcc

SEQ ID NO: 2995802 - RNA, 15 nt, Human
gaugacauucccugc

SEQ ID NO: 2995803 - RNA, 23 nt, Human
gaugacauugacuauuuuuguuu

SEQ ID NO: 2995804 - RNA, 21 nt, Human
gaugacauugacuauuuuugu

SEQ ID NO: 2995805 - RNA, 17 nt, Human
gaugacauugacuauuu

SEQ ID NO: 2995806 - RNA, 17 nt, Human
gaugacauucccugcua

SEQ ID NO: 2995807 - RNA, 22 nt, Human
gaugcacagaguuguuacauuu

SEQ ID NO: 2995808 - RNA, 21 nt, Human
gaugcacagaguuguuacauu

SEQ ID NO: 2995809 - RNA, 13 nt, Human
gaugcaccagccc

SEQ ID NO: 2995810 - RNA, 14 nt, Human
gaugcagccucaca

SEQ ID NO: 2995811 - RNA, 12 nt, Human
gaugcagccuca

SEQ ID NO: 2995812 - RNA, 17 nt, Human
gaugccugguggcagcu

SEQ ID NO: 2995813 - RNA, 21 nt, Human
gauggcuaguaucaaaagaaa

SEQ ID NO: 2995814 - RNA, 14 nt, Human
gauggggcccugcc

SEQ ID NO: 2995815 - RNA, 22 nt, Human
gauggggcccugccuccuuugu

SEQ ID NO: 2995816 - RNA, 13 nt, Human
gauggggcccugc

SEQ ID NO: 2995817 - RNA, 22 nt, Human
gauggauuuccagccaaagccu

SEQ ID NO: 2995818 - RNA, 19 nt, Human
gaugccugguggcagcugc

SEQ ID NO: 2995819 - RNA, 18 nt, Human
gaugccugguggcagcug

SEQ ID NO: 2995820 - RNA, 20 nt, Human
gaugccugguggcagcugcg

SEQ ID NO: 2995821 - RNA, 15 nt, Human
gaugaaggucuguuu

SEQ ID NO: 2995822 - RNA, 18 nt, Human
gaugaaggucuguuuugu

SEQ ID NO: 2995823 - RNA, 14 nt, Human
gaugaaaauauuug

SEQ ID NO: 2995824 - RNA, 17 nt, Human
gaucuuugcagacaggc

SEQ ID NO: 2995825 - RNA, 18 nt, Human
gaucuuugcagacaggca

SEQ ID NO: 2995826 - RNA, 21 nt, Human
gauccugagccagauuucacu

SEQ ID NO: 2995827 - RNA, 22 nt, Human
gauccugagccagauuucacuc

SEQ ID NO: 2995828 - RNA, 15 nt, Human
gaucccucauccuca

SEQ ID NO: 2995829 - RNA, 16 nt, Human
gaucccucauccucau

SEQ ID NO: 2995830 - RNA, 18 nt, Human
gaucacgccacugcacua

SEQ ID NO: 2995831 - RNA, 16 nt, Human
gaucacgccacugcac

SEQ ID NO: 2995832 - RNA, 21 nt, Human
gaucaaguuauuuuuaauuug

SEQ ID NO: 2995833 - RNA, 12 nt, Human
gaucacggcuca

SEQ ID NO: 2995834 - RNA, 12 nt, Human
gaucagccuggg

SEQ ID NO: 2995835 - RNA, 15 nt, Human
gaucagccugggcaa

SEQ ID NO: 2995836 - RNA, 22 nt, Human
gaucagucugauucccaagcuc

SEQ ID NO: 2995837 - RNA, 21 nt, Human
gaucauccacugugccaugug

SEQ ID NO: 2995838 - RNA, 16 nt, Human
gaucauccacugugcc

SEQ ID NO: 2995839 - RNA, 17 nt, Human
gaucaugcauagagugu

SEQ ID NO: 2995840 - RNA, 14 nt, Human
gaucaugcauagag

SEQ ID NO: 2995841 - RNA, 19 nt, Human
gaucauccacugugccaug

SEQ ID NO: 2995842 - RNA, 17 nt, Human
gaucauccacugugcca

SEQ ID NO: 2995843 - RNA, 22 nt, Human
gauaaauaguuuaugauuccac

SEQ ID NO: 2995844 - RNA, 13 nt, Human
gaggaaggaaacc

SEQ ID NO: 2995845 - RNA, 19 nt, Human
gaggaaggaaacccagcuc

SEQ ID NO: 2995846 - RNA, 20 nt, Human
gaggaaggaaacccagcucu

SEQ ID NO: 2995847 - RNA, 21 nt, Human
gaggaaggaaacccagcucug

SEQ ID NO: 2995848 - RNA, 21 nt, Human
gauagcacagacccugcccug

SEQ ID NO: 2995849 - RNA, 22 nt, Human
gauagcacagacccugcccugu

SEQ ID NO: 2995850 - RNA, 20 nt, Human
gauagcacagacccugcccu

SEQ ID NO: 2995851 - RNA, 17 nt, Human
gauaggucagugcaaau

SEQ ID NO: 2995852 - RNA, 18 nt, Human
gauacaggaaaagcugcu

SEQ ID NO: 2995853 - RNA, 22 nt, Human
gauaauacaccacuacauucug

SEQ ID NO: 2995854 - RNA, 21 nt, Human
gauaauacaccacuacauucu

SEQ ID NO: 2995855 - RNA, 18 nt, Human
gauaauacaccacuacau

SEQ ID NO: 2995856 - RNA, 14 nt, Human
gauaauacaccacu

SEQ ID NO: 2995857 - RNA, 23 nt, Human
gauagauaggucagugcaaauac

SEQ ID NO: 2995858 - RNA, 11 nt, Human
gauacagaaaa

SEQ ID NO: 2995859 - RNA, 13 nt, Human
gaagucuucuauu

SEQ ID NO: 2995860 - RNA, 17 nt, Human
gaagucuucuauuuauu

SEQ ID NO: 2995861 - RNA, 14 nt, Human
gaagucuuuguaca

SEQ ID NO: 2995862 - RNA, 16 nt, Human
gaagucuuuguacaga

SEQ ID NO: 2995863 - RNA, 22 nt, Human
gacaaggauugcuacuguccua

SEQ ID NO: 2995864 - RNA, 21 nt, Human
gacaaggauugcuacuguccu

SEQ ID NO: 2995865 - RNA, 16 nt, Human
gacaaugacccagugg

SEQ ID NO: 2995866 - RNA, 21 nt, Human
gacaaugacuuacuguacaug

SEQ ID NO: 2995867 - RNA, 12 nt, Human
gacaaugcaaac

SEQ ID NO: 2995868 - RNA, 20 nt, Human
gacaaugacuuacuguacau

SEQ ID NO: 2995869 - RNA, 17 nt, Human
gacaaugacuuacugua

SEQ ID NO: 2995870 - RNA, 16 nt, Human
gacaaugcaaaccauc

SEQ ID NO: 2995871 - RNA, 18 nt, Human
gacaaugcaaaccaucau

SEQ ID NO: 2995872 - RNA, 12 nt, Human
gacaauuuauua

SEQ ID NO: 2995873 - RNA, 19 nt, Human
gacaauuuauuauggcaca

SEQ ID NO: 2995874 - RNA, 13 nt, Human
gacaauuuauuau

SEQ ID NO: 2995875 - RNA, 22 nt, Human
gacacaagccuucggcgccuua

SEQ ID NO: 2995876 - RNA, 17 nt, Human
gacacaggcccggcucc

SEQ ID NO: 2995877 - RNA, 15 nt, Human
gacacaggcccggcu

SEQ ID NO: 2995878 - RNA, 12 nt, Human
gacacaggcccg

SEQ ID NO: 2995879 - RNA, 18 nt, Human
gacacaggcccggcucca

SEQ ID NO: 2995880 - RNA, 12 nt, Human
gacacccuguga

SEQ ID NO: 2995881 - RNA, 13 nt, Human
gacacccugugau

SEQ ID NO: 2995882 - RNA, 22 nt, Human
gacacccugugauggggcccug

SEQ ID NO: 2995883 - RNA, 23 nt, Human
gacacccugugauggggcccugc

SEQ ID NO: 2995884 - RNA, 18 nt, Human
gacacuaaccacgcugga

SEQ ID NO: 2995885 - RNA, 17 nt, Human
gacacuaaccacgcugg

SEQ ID NO: 2995886 - RNA, 16 nt, Human
gacacuaaccacgcug

SEQ ID NO: 2995887 - RNA, 15 nt, Human
gacacuaaccacgcu

SEQ ID NO: 2995888 - RNA, 17 nt, Human
gacacgaauauugcuga

SEQ ID NO: 2995889 - RNA, 18 nt, Human
gacacgaauauugcugau

SEQ ID NO: 2995890 - RNA, 19 nt, Human
gacacgaauauugcugaug

SEQ ID NO: 2995891 - RNA, 17 nt, Human
gacaccuugacagggca

SEQ ID NO: 2995892 - RNA, 15 nt, Human
gacaccuugacaggg

SEQ ID NO: 2995893 - RNA, 20 nt, Human
gacaccuugacagggcacac

SEQ ID NO: 2995894 - RNA, 18 nt, Human
gacaccuugacagggcac

SEQ ID NO: 2995895 - RNA, 15 nt, Human
gacacgaauauugcu

SEQ ID NO: 2995896 - RNA, 22 nt, Human
gacaugggacauuugcucaugg

SEQ ID NO: 2995897 - RNA, 17 nt, Human
gacaugggacauuugcu

SEQ ID NO: 2995898 - RNA, 17 nt, Human
gacaugucuuuucuugc

SEQ ID NO: 2995899 - RNA, 21 nt, Human
gacaugucuuuucuugcauga

SEQ ID NO: 2995900 - RNA, 21 nt, Human
gacauauauuuuuuaaaauaa

SEQ ID NO: 2995901 - RNA, 20 nt, Human
gacauauauuuuuuaaaaua

SEQ ID NO: 2995902 - RNA, 17 nt, Human
gacauauauuuuuuaaa

SEQ ID NO: 2995903 - RNA, 23 nt, Human
gacauacuaaccagcagaaaugc

SEQ ID NO: 2995904 - RNA, 16 nt, Human
gacauacuaaccagca

SEQ ID NO: 2995905 - RNA, 15 nt, Human
gacauacuaaccagc

SEQ ID NO: 2995906 - RNA, 14 nt, Human
gacagcugccuggg

SEQ ID NO: 2995907 - RNA, 15 nt, Human
gacagcugccuggga

SEQ ID NO: 2995908 - RNA, 19 nt, Human
gacaggcauguucucugag

SEQ ID NO: 2995909 - RNA, 18 nt, Human
gacaggcauguucucuga

SEQ ID NO: 2995910 - RNA, 17 nt, Human
gacaggcaaugcuggcu

SEQ ID NO: 2995911 - RNA, 24 nt, Human
gacaggcaaugcuggcuguuggcu

SEQ ID NO: 2995912 - RNA, 16 nt, Human
gacaggcaaugcuggc

SEQ ID NO: 2995913 - RNA, 14 nt, Human
gacaggcaaugcug

SEQ ID NO: 2995914 - RNA, 16 nt, Human
gacagacacaggcccg

SEQ ID NO: 2995915 - RNA, 15 nt, Human
gacagacacaggccc

SEQ ID NO: 2995916 - RNA, 21 nt, Human
gacacuaaccacgcuggaccu

SEQ ID NO: 2995917 - RNA, 20 nt, Human
gacacuaaccacgcuggacc

SEQ ID NO: 2995918 - RNA, 14 nt, Human
gacagacacaggcc

SEQ ID NO: 2995919 - RNA, 12 nt, Human
gacagacacagg

SEQ ID NO: 2995920 - RNA, 12 nt, Human
gacagcugccug

SEQ ID NO: 2995921 - RNA, 13 nt, Human
gacagcugccugg

SEQ ID NO: 2995922 - RNA, 23 nt, Human
gaccugauuucugagcauuuaau

SEQ ID NO: 2995923 - RNA, 11 nt, Human
gaccucaggcc

SEQ ID NO: 2995924 - RNA, 12 nt, Human
gaccucaggccu

SEQ ID NO: 2995925 - RNA, 13 nt, Human
gaccucaggccug

SEQ ID NO: 2995926 - RNA, 15 nt, Human
gaccugaggcccuuc

SEQ ID NO: 2995927 - RNA, 18 nt, Human
gaccugaggcccuucucu

SEQ ID NO: 2995928 - RNA, 21 nt, Human
gaccugaggcccuucucucca

SEQ ID NO: 2995929 - RNA, 14 nt, Human
gaccgugaggccag

SEQ ID NO: 2995930 - RNA, 15 nt, Human
gaccgugaggccaga

SEQ ID NO: 2995931 - RNA, 19 nt, Human
gaccgugaggccagagaca

SEQ ID NO: 2995932 - RNA, 22 nt, Human
gacccacaagaaaugaaagcag

SEQ ID NO: 2995933 - RNA, 11 nt, Human
gacccacugcu

SEQ ID NO: 2995934 - RNA, 16 nt, Human
gacccaugcugcccug

SEQ ID NO: 2995935 - RNA, 14 nt, Human
gacccaugcugccc

SEQ ID NO: 2995936 - RNA, 15 nt, Human
gacccaugcugcccu

SEQ ID NO: 2995937 - RNA, 13 nt, Human
gacccaugcugcc

SEQ ID NO: 2995938 - RNA, 23 nt, Human
gacccugucucaaaaaaagaaaa

SEQ ID NO: 2995939 - RNA, 16 nt, Human
gacccugcccuguggg

SEQ ID NO: 2995940 - RNA, 13 nt, Human
gacccugcccugu

SEQ ID NO: 2995941 - RNA, 15 nt, Human
gacccugcccugugg

SEQ ID NO: 2995942 - RNA, 19 nt, Human
gacccugaggcccagaggg

SEQ ID NO: 2995943 - RNA, 20 nt, Human
gacccugaggcccagagggc

SEQ ID NO: 2995944 - RNA, 12 nt, Human
gacccugcccug

SEQ ID NO: 2995945 - RNA, 21 nt, Human
gacccugaggcccagagggcc

SEQ ID NO: 2995946 - RNA, 18 nt, Human
gacccugaggcccagagg

SEQ ID NO: 2995947 - RNA, 13 nt, Human
gaccccuccaugu

SEQ ID NO: 2995948 - RNA, 23 nt, Human
gaccuugaacuggguacuugugg

SEQ ID NO: 2995949 - RNA, 21 nt, Human
gaccuuucaauaggaaaaacu

SEQ ID NO: 2995950 - RNA, 18 nt, Human
gaccuuguagugagccga

SEQ ID NO: 2995951 - RNA, 21 nt, Human
gacggagucccaccuuggcug

SEQ ID NO: 2995952 - RNA, 18 nt, Human
gacggagucccaccuugg

SEQ ID NO: 2995953 - RNA, 14 nt, Human
gacggagucccacc

SEQ ID NO: 2995954 - RNA, 17 nt, Human
gacguguuaugacucca

SEQ ID NO: 2995955 - RNA, 20 nt, Human
gacguguuaugacuccagaa

SEQ ID NO: 2995956 - RNA, 21 nt, Human
gacuccaggcagcagacacau

SEQ ID NO: 2995957 - RNA, 20 nt, Human
gacuccaggcagcagacaca

SEQ ID NO: 2995958 - RNA, 17 nt, Human
gacuccaggcagcagac

SEQ ID NO: 2995959 - RNA, 16 nt, Human
gacuccaggcagcaga

SEQ ID NO: 2995960 - RNA, 15 nt, Human
gacuccaggcagcag

SEQ ID NO: 2995961 - RNA, 18 nt, Human
gacuccaaagaaauguaa

SEQ ID NO: 2995962 - RNA, 15 nt, Human
gacuccugcaggcag

SEQ ID NO: 2995963 - RNA, 16 nt, Human
gacuccugcaggcagc

SEQ ID NO: 2995964 - RNA, 14 nt, Human
gacuccugcaggca

SEQ ID NO: 2995965 - RNA, 18 nt, Human
gacucccaugagggagau

SEQ ID NO: 2995966 - RNA, 17 nt, Human
gacuacucccccaggug

SEQ ID NO: 2995967 - RNA, 12 nt, Human
gacuacaggcac

SEQ ID NO: 2995968 - RNA, 22 nt, Human
gacguguuaugacuccagaauu

SEQ ID NO: 2995969 - RNA, 13 nt, Human
gagaaagacuauu

SEQ ID NO: 2995970 - RNA, 15 nt, Human
gagaaagacuauuca

SEQ ID NO: 2995971 - RNA, 17 nt, Human
gagaaagacuauucaaa

SEQ ID NO: 2995972 - RNA, 18 nt, Human
gagaaagacuauucaaac

SEQ ID NO: 2995973 - RNA, 18 nt, Human
gagaaacuggcaaagcag

SEQ ID NO: 2995974 - RNA, 19 nt, Human
gagaaacuggcaaagcaga

SEQ ID NO: 2995975 - RNA, 22 nt, Human
gagaaaguacuucuccacccug

SEQ ID NO: 2995976 - RNA, 23 nt, Human
gagaaaguacuucuccacccugc

SEQ ID NO: 2995977 - RNA, 13 nt, Human
gacuuggaagcuc

SEQ ID NO: 2995978 - RNA, 21 nt, Human
gagaaaauggacguguuauga

SEQ ID NO: 2995979 - RNA, 17 nt, Human
gacuccugcaggcagcc

SEQ ID NO: 2995980 - RNA, 18 nt, Human
gacucgcgacaaugcaaa

SEQ ID NO: 2995981 - RNA, 19 nt, Human
gacucgcgacaaugcaaac

SEQ ID NO: 2995982 - RNA, 16 nt, Human
gacuuggaagcuccgc

SEQ ID NO: 2995983 - RNA, 15 nt, Human
gacuuggaagcuccg

SEQ ID NO: 2995984 - RNA, 14 nt, Human
gacuuggaagcucc

SEQ ID NO: 2995985 - RNA, 15 nt, Human
gagaagagcuguuca

SEQ ID NO: 2995986 - RNA, 22 nt, Human
gagaagagcuguucacagccag

SEQ ID NO: 2995987 - RNA, 13 nt, Human
gagaagagcuguu

SEQ ID NO: 2995988 - RNA, 14 nt, Human
gagaagaacugaaa

SEQ ID NO: 2995989 - RNA, 13 nt, Human
gagaagaacugaa

SEQ ID NO: 2995990 - RNA, 16 nt, Human
gagaagaacugaaauc

SEQ ID NO: 2995991 - RNA, 20 nt, Human
gagaaugcacaaacagaggc

SEQ ID NO: 2995992 - RNA, 21 nt, Human
gagaaugcacaaacagaggcc

SEQ ID NO: 2995993 - RNA, 22 nt, Human
gagaaugcacaaacagaggccg

SEQ ID NO: 2995994 - RNA, 21 nt, Human
gagaaugagagacacacugaa

SEQ ID NO: 2995995 - RNA, 12 nt, Human
gagacagcccgg

SEQ ID NO: 2995996 - RNA, 19 nt, Human
gagacagaguuuucacucu

SEQ ID NO: 2995997 - RNA, 15 nt, Human
gagacacaagccuuc

SEQ ID NO: 2995998 - RNA, 17 nt, Human
gagacacaagccuucgg

SEQ ID NO: 2995999 - RNA, 18 nt, Human
gagacacacugaagaagc

SEQ ID NO: 2996000 - RNA, 14 nt, Human
gagacagcccgggc

SEQ ID NO: 2996001 - RNA, 17 nt, Human
gagacagcccgggcucu

SEQ ID NO: 2996002 - RNA, 18 nt, Human
gagacagcccgggcucug

SEQ ID NO: 2996003 - RNA, 19 nt, Human
gagacagcccgggcucugc

SEQ ID NO: 2996004 - RNA, 20 nt, Human
gagacagcccgggcucugcc

SEQ ID NO: 2996005 - RNA, 21 nt, Human
gagacagcccgggcucugccu

SEQ ID NO: 2996006 - RNA, 22 nt, Human
gagacagcccgggcucugccuc

SEQ ID NO: 2996007 - RNA, 23 nt, Human
gagacagcccgggcucugccucc

SEQ ID NO: 2996008 - RNA, 24 nt, Human
gagacagcccgggcucugccuccc

SEQ ID NO: 2996009 - RNA, 13 nt, Human
gagacagcucugc

SEQ ID NO: 2996010 - RNA, 18 nt, Human
gagacagcucugcauacu

SEQ ID NO: 2996011 - RNA, 15 nt, Human
gagacagcucugcau

SEQ ID NO: 2996012 - RNA, 22 nt, Human
gagacuccugcaggcagccagg

SEQ ID NO: 2996013 - RNA, 16 nt, Human
gagacucgcgacaaug

SEQ ID NO: 2996014 - RNA, 18 nt, Human
gagacucgcgacaaugca

SEQ ID NO: 2996015 - RNA, 14 nt, Human
gagacucugucuca

SEQ ID NO: 2996016 - RNA, 17 nt, Human
gagauacagaauuuuau

SEQ ID NO: 2996017 - RNA, 19 nt, Human
gagagugaacaaauuuaca

SEQ ID NO: 2996018 - RNA, 15 nt, Human
gagagugaacaaauu

SEQ ID NO: 2996019 - RNA, 20 nt, Human
gagagggugggagugggccc

SEQ ID NO: 2996020 - RNA, 21 nt, Human
gagagggugggagugggccca

SEQ ID NO: 2996021 - RNA, 18 nt, Human
gagaggggaacagacugg

SEQ ID NO: 2996022 - RNA, 13 nt, Human
gagaggggaacag

SEQ ID NO: 2996023 - RNA, 13 nt, Human
gagagccuuccag

SEQ ID NO: 2996024 - RNA, 14 nt, Human
gagagccuuccagg

SEQ ID NO: 2996025 - RNA, 17 nt, Human
gagagaagagaaugcac

SEQ ID NO: 2996026 - RNA, 17 nt, Human
gagacuuuaaaagcauu

SEQ ID NO: 2996027 - RNA, 16 nt, Human
gagacuuuaaaagcau

SEQ ID NO: 2996028 - RNA, 14 nt, Human
gagacuuuaaaagc

SEQ ID NO: 2996029 - RNA, 20 nt, Human
gagcuuugaaaauucagugg

SEQ ID NO: 2996030 - RNA, 22 nt, Human
gagcuuucugcuaucaaagagg

SEQ ID NO: 2996031 - RNA, 23 nt, Human
gagcugcccucuccugggcagcu

SEQ ID NO: 2996032 - RNA, 21 nt, Human
gagcugcccucuccugggcag

SEQ ID NO: 2996033 - RNA, 19 nt, Human
gagcugcccucuccugggc

SEQ ID NO: 2996034 - RNA, 18 nt, Human
gagcugcccucuccuggg

SEQ ID NO: 2996035 - RNA, 14 nt, Human
gagcuuuuguagaa

SEQ ID NO: 2996036 - RNA, 16 nt, Human
gaggaaagcaaaggag

SEQ ID NO: 2996037 - RNA, 17 nt, Human
gaggaaagcaaaggaga

SEQ ID NO: 2996038 - RNA, 14 nt, Human
gaggaagccgcugg

SEQ ID NO: 2996039 - RNA, 17 nt, Human
gaggaagccgcuggggc

SEQ ID NO: 2996040 - RNA, 18 nt, Human
gaggaagccgcuggggcc

SEQ ID NO: 2996041 - RNA, 13 nt, Human
gaggaagccgcug

SEQ ID NO: 2996042 - RNA, 17 nt, Human
gaggaagagaaaaaaua

SEQ ID NO: 2996043 - RNA, 16 nt, Human
gaggaacaaggcaagg

SEQ ID NO: 2996044 - RNA, 14 nt, Human
gaggaacaaggcaa

SEQ ID NO: 2996045 - RNA, 16 nt, Human
gagcucgugggacagu

SEQ ID NO: 2996046 - RNA, 17 nt, Human
gagcugcccucuccugg

SEQ ID NO: 2996047 - RNA, 16 nt, Human
gagcugaucgcuucuc

SEQ ID NO: 2996048 - RNA, 21 nt, Human
gagcugaucgcuucuccccca

SEQ ID NO: 2996049 - RNA, 15 nt, Human
gagcugaguggggga

SEQ ID NO: 2996050 - RNA, 15 nt, Human
gagcuagcagcaggg

SEQ ID NO: 2996051 - RNA, 17 nt, Human
gagcuagcagcagggag

SEQ ID NO: 2996052 - RNA, 15 nt, Human
gagccugcaguuauu

SEQ ID NO: 2996053 - RNA, 13 nt, Human
gagccuccugccc

SEQ ID NO: 2996054 - RNA, 12 nt, Human
gagccugcaguu

SEQ ID NO: 2996055 - RNA, 15 nt, Human
gagccucagcauccu

SEQ ID NO: 2996056 - RNA, 14 nt, Human
gagccucagcaucc

SEQ ID NO: 2996057 - RNA, 17 nt, Human
gagccucagcauccugg

SEQ ID NO: 2996058 - RNA, 18 nt, Human
gagccucacagcagugag

SEQ ID NO: 2996059 - RNA, 15 nt, Human
gagccucacagcagu

SEQ ID NO: 2996060 - RNA, 13 nt, Human
gagccucagcauc

SEQ ID NO: 2996061 - RNA, 14 nt, Human
gagccucacagcag

SEQ ID NO: 2996062 - RNA, 13 nt, Human
gagccucacagca

SEQ ID NO: 2996063 - RNA, 18 nt, Human
gagcccacgcccccacug

SEQ ID NO: 2996064 - RNA, 20 nt, Human
gagccgagaucacgccacug

SEQ ID NO: 2996065 - RNA, 19 nt, Human
gagccgagaucacgccacu

SEQ ID NO: 2996066 - RNA, 22 nt, Human
gagccgagaucacgccacugca

SEQ ID NO: 2996067 - RNA, 21 nt, Human
gagccgagaucacgccacugc

SEQ ID NO: 2996068 - RNA, 13 nt, Human
gagccgcccaagg

SEQ ID NO: 2996069 - RNA, 20 nt, Human
gagccgagaucgcgccacug

SEQ ID NO: 2996070 - RNA, 16 nt, Human
gagccgcccaaggccu

SEQ ID NO: 2996071 - RNA, 18 nt, Human
gagccagauuucacucuc

SEQ ID NO: 2996072 - RNA, 19 nt, Human
gagccagauuucacucucc

SEQ ID NO: 2996073 - RNA, 15 nt, Human
gagccagauuucacu

SEQ ID NO: 2996074 - RNA, 20 nt, Human
gagccacugcaccgggccac

SEQ ID NO: 2996075 - RNA, 13 nt, Human
gagccacugcacc

SEQ ID NO: 2996076 - RNA, 19 nt, Human
gagccacugcaccgggcca

SEQ ID NO: 2996077 - RNA, 18 nt, Human
gagccacugcaccgggcc

SEQ ID NO: 2996078 - RNA, 17 nt, Human
gagcccaccuuggcuca

SEQ ID NO: 2996079 - RNA, 15 nt, Human
gagcccaccuuggcu

SEQ ID NO: 2996080 - RNA, 13 nt, Human
gagcccaccuugg

SEQ ID NO: 2996081 - RNA, 13 nt, Human
gagccagauuuca

SEQ ID NO: 2996082 - RNA, 22 nt, Human
gagcagccacauuccugaugcu

SEQ ID NO: 2996083 - RNA, 21 nt, Human
gagcagccacauuccugaugc

SEQ ID NO: 2996084 - RNA, 19 nt, Human
gagcagagaccaucccuga

SEQ ID NO: 2996085 - RNA, 21 nt, Human
gagcagagaccaucccugaag

SEQ ID NO: 2996086 - RNA, 23 nt, Human
gagcagagaccaucccugaaggc

SEQ ID NO: 2996087 - RNA, 17 nt, Human
gagcagagaccaucccu

SEQ ID NO: 2996088 - RNA, 18 nt, Human
gagcagagaccaucccug

SEQ ID NO: 2996089 - RNA, 16 nt, Human
gagcagagaccauccc

SEQ ID NO: 2996090 - RNA, 19 nt, Human
gagauagccaaggccaaag

SEQ ID NO: 2996091 - RNA, 20 nt, Human
gagauagccaaggccaaagg

SEQ ID NO: 2996092 - RNA, 21 nt, Human
gagauagccaaggccaaagga

SEQ ID NO: 2996093 - RNA, 17 nt, Human
cuugcugcugauuuaaa

SEQ ID NO: 2996094 - RNA, 19 nt, Human
cuugcugcugauuuaaaca

SEQ ID NO: 2996095 - RNA, 17 nt, Human
cuugccaaauauaaaua

SEQ ID NO: 2996096 - RNA, 22 nt, Human
cuugcaugguuuggagcugauc

SEQ ID NO: 2996097 - RNA, 20 nt, Human
cuugcaugguuuggagcuga

SEQ ID NO: 2996098 - RNA, 17 nt, Human
cuuggacauuuuauguc

SEQ ID NO: 2996099 - RNA, 18 nt, Human
cuuggacauuuuaugucu

SEQ ID NO: 2996100 - RNA, 16 nt, Human
cuuggacauuuuaugu

SEQ ID NO: 2996101 - RNA, 13 nt, Human
cuugcuugcuuuu

SEQ ID NO: 2996102 - RNA, 19 nt, Human
cuuggacauuuuaugucuu

SEQ ID NO: 2996103 - RNA, 13 nt, Human
cuuggauuguccc

SEQ ID NO: 2996104 - RNA, 14 nt, Human
cuuggauugucccc

SEQ ID NO: 2996105 - RNA, 23 nt, Human
cuuggcucaaguccucuuuucug

SEQ ID NO: 2996106 - RNA, 13 nt, Human
cuuggcugcaggg

SEQ ID NO: 2996107 - RNA, 12 nt, Human
cuuggcugcagg

SEQ ID NO: 2996108 - RNA, 21 nt, Human
cuuguaaauagcucagguguc

SEQ ID NO: 2996109 - RNA, 20 nt, Human
cuugguuuguaaauuaacuu

SEQ ID NO: 2996110 - RNA, 18 nt, Human
cuuggggaccagagcugc

SEQ ID NO: 2996111 - RNA, 19 nt, Human
cuuggggaccagagcugcc

SEQ ID NO: 2996112 - RNA, 17 nt, Human
cuuggggaccagagcug

SEQ ID NO: 2996113 - RNA, 16 nt, Human
cuuggggaccagagcu

SEQ ID NO: 2996114 - RNA, 18 nt, Human
cuuguggacacagcucuu

SEQ ID NO: 2996115 - RNA, 17 nt, Human
cuuguggacacagcucu

SEQ ID NO: 2996116 - RNA, 16 nt, Human
cuuguggacacagcuc

SEQ ID NO: 2996117 - RNA, 16 nt, Human
cuugagugcucaguag

SEQ ID NO: 2996118 - RNA, 22 nt, Human
cuugagugucaagcugaccuug

SEQ ID NO: 2996119 - RNA, 22 nt, Human
cuugcaaaguaucccuacugua

SEQ ID NO: 2996120 - RNA, 14 nt, Human
cuugcaauggcagc

SEQ ID NO: 2996121 - RNA, 21 nt, Human
cuugcaugaggcuaguguggu

SEQ ID NO: 2996122 - RNA, 17 nt, Human
cuugcaugaggcuagug

SEQ ID NO: 2996123 - RNA, 21 nt, Human
cuugcaugguuuagaaagcuu

SEQ ID NO: 2996124 - RNA, 19 nt, Human
cuugcaugguuuggagcug

SEQ ID NO: 2996125 - RNA, 18 nt, Human
cuugcaugguuuggagcu

SEQ ID NO: 2996126 - RNA, 18 nt, Human
cuugcagacucuacagag

SEQ ID NO: 2996127 - RNA, 22 nt, Human
cuugagccuugaacuuugaccu

SEQ ID NO: 2996128 - RNA, 20 nt, Human
cuugagccuugaacuuugac

SEQ ID NO: 2996129 - RNA, 14 nt, Human
cuugagagggugga

SEQ ID NO: 2996130 - RNA, 21 nt, Human
cuugaccauucuccaccugcc

SEQ ID NO: 2996131 - RNA, 17 nt, Human
cuugaccauucuccacc

SEQ ID NO: 2996132 - RNA, 20 nt, Human
cuugaccauucuccaccugc

SEQ ID NO: 2996133 - RNA, 19 nt, Human
cuugagccuugaacuuuga

SEQ ID NO: 2996134 - RNA, 14 nt, Human
cuugaacccgggag

SEQ ID NO: 2996135 - RNA, 19 nt, Human
cuugaacccgggaggcaga

SEQ ID NO: 2996136 - RNA, 20 nt, Human
cuugaacccgggaggcagag

SEQ ID NO: 2996137 - RNA, 18 nt, Human
cuugaacuccuggccuca

SEQ ID NO: 2996138 - RNA, 17 nt, Human
cuugaacuccuggccuc

SEQ ID NO: 2996139 - RNA, 15 nt, Human
cuugaacuccuggcc

SEQ ID NO: 2996140 - RNA, 14 nt, Human
cuugaacuccuggc

SEQ ID NO: 2996141 - RNA, 16 nt, Human
cuugaacuggguacuu

SEQ ID NO: 2996142 - RNA, 19 nt, Human
cuugaacuccuggccucaa

SEQ ID NO: 2996143 - RNA, 20 nt, Human
cuugaacuggguacuugugg

SEQ ID NO: 2996144 - RNA, 18 nt, Human
cuugaacuggguacuugu

SEQ ID NO: 2996145 - RNA, 15 nt, Human
cuugaacuuugaccu

SEQ ID NO: 2996146 - RNA, 19 nt, Human
cuucuuuccacagaagcuc

SEQ ID NO: 2996147 - RNA, 13 nt, Human
cuucuuuccacag

SEQ ID NO: 2996148 - RNA, 22 nt, Human
cuucuuuauaauucuacuuuga

SEQ ID NO: 2996149 - RNA, 19 nt, Human
cuugaaauauaggaacuua

SEQ ID NO: 2996150 - RNA, 17 nt, Human
cuuucccuuggugcccu

SEQ ID NO: 2996151 - RNA, 12 nt, Human
cuuucccuuggu

SEQ ID NO: 2996152 - RNA, 16 nt, Human
cuuuccaaaugcccag

SEQ ID NO: 2996153 - RNA, 22 nt, Human
cuuuccaaaguacacuguuuca

SEQ ID NO: 2996154 - RNA, 16 nt, Human
cuuuccaaaguacacu

SEQ ID NO: 2996155 - RNA, 14 nt, Human
cuuuccaggaaggc

SEQ ID NO: 2996156 - RNA, 21 nt, Human
cuuguggacacagcucuucuc

SEQ ID NO: 2996157 - RNA, 21 nt, Human
cuuuauuuucuauaauuuaaa

SEQ ID NO: 2996158 - RNA, 17 nt, Human
cuuuccugaggcugggc

SEQ ID NO: 2996159 - RNA, 16 nt, Human
cuuuccugaggcuggg

SEQ ID NO: 2996160 - RNA, 20 nt, Human
cuuuccugaggcugggcucc

SEQ ID NO: 2996161 - RNA, 21 nt, Human
cuuuccugaggcugggcuccc

SEQ ID NO: 2996162 - RNA, 19 nt, Human
cuuuggaaagaguaggaag

SEQ ID NO: 2996163 - RNA, 23 nt, Human
cuuuggaaagaguaggaagacuu

SEQ ID NO: 2996164 - RNA, 15 nt, Human
cuuugcagacaggca

SEQ ID NO: 2996165 - RNA, 14 nt, Human
cuuugcagacaggc

SEQ ID NO: 2996166 - RNA, 11 nt, Human
cuuuuaaacuc

SEQ ID NO: 2996167 - RNA, 17 nt, Human
cuuuuaagacuuugguu

SEQ ID NO: 2996168 - RNA, 14 nt, Human
cuuuuaagaaucaa

SEQ ID NO: 2996169 - RNA, 21 nt, Human
cuuuucgcaggauucuuccuc

SEQ ID NO: 2996170 - RNA, 20 nt, Human
cuuuucgcaggauucuuccu

SEQ ID NO: 2996171 - RNA, 13 nt, Human
cuuuuccaacccu

SEQ ID NO: 2996172 - RNA, 23 nt, Human
cuuuuccaacccucaucaccaac

SEQ ID NO: 2996173 - RNA, 22 nt, Human
cuuuucauuuaggugaggaagc

SEQ ID NO: 2996174 - RNA, 15 nt, Human
cuuuugcauauugca

SEQ ID NO: 2996175 - RNA, 22 nt, Human
cuuuuuaauauugauaugcuua

SEQ ID NO: 2996176 - RNA, 17 nt, Human
cuuuucuuucagccaag

SEQ ID NO: 2996177 - RNA, 13 nt, Human
cuuuucuuuucuu

SEQ ID NO: 2996178 - RNA, 22 nt, Human
cuuuuuauauucucagcagagu

SEQ ID NO: 2996179 - RNA, 16 nt, Human
cuuuuuauaacuuuuu

SEQ ID NO: 2996180 - RNA, 18 nt, Human
cuuuuuauauucucagca

SEQ ID NO: 2996181 - RNA, 12 nt, Human
cuuuuuauaacu

SEQ ID NO: 2996182 - RNA, 17 nt, Human
cuuuuuuauacauaaac

SEQ ID NO: 2996183 - RNA, 16 nt, Human
cuuuuuuauacauaaa

SEQ ID NO: 2996184 - RNA, 15 nt, Human
cuuuuuuauacauaa

SEQ ID NO: 2996185 - RNA, 11 nt, Human
gaaaaagaaaa

SEQ ID NO: 2996186 - RNA, 16 nt, Human
gaaaaagaaaaaauau

SEQ ID NO: 2996187 - RNA, 18 nt, Human
cuuuuuuauacauaaaca

SEQ ID NO: 2996188 - RNA, 20 nt, Human
gaaaggaaugcaaagaugaa

SEQ ID NO: 2996189 - RNA, 21 nt, Human
gaaaggaagugggacuggcac

SEQ ID NO: 2996190 - RNA, 22 nt, Human
gaaaguacuucuccacccugcu

SEQ ID NO: 2996191 - RNA, 11 nt, Human
gaaaggaaaga

SEQ ID NO: 2996192 - RNA, 16 nt, Human
gaaaggaaagaggcuc

SEQ ID NO: 2996193 - RNA, 21 nt, Human
gaaagcuugcccuggugccuc

SEQ ID NO: 2996194 - RNA, 17 nt, Human
gaaaguugcaaggcaaa

SEQ ID NO: 2996195 - RNA, 21 nt, Human
gaaaguugcaaggcaaauguu

SEQ ID NO: 2996196 - RNA, 22 nt, Human
gaaaguugcaaggcaaauguuu

SEQ ID NO: 2996197 - RNA, 16 nt, Human
gaaacugacacaugcu

SEQ ID NO: 2996198 - RNA, 13 nt, Human
gaaacugccagca

SEQ ID NO: 2996199 - RNA, 15 nt, Human
gaaacugccagcaac

SEQ ID NO: 2996200 - RNA, 16 nt, Human
gaaaaaugagccuggc

SEQ ID NO: 2996201 - RNA, 22 nt, Human
gaaagacuauucaaacagucuc

SEQ ID NO: 2996202 - RNA, 23 nt, Human
gaaagacuauucaaacagucuca

SEQ ID NO: 2996203 - RNA, 19 nt, Human
gaaagacuauucaaacagu

SEQ ID NO: 2996204 - RNA, 13 nt, Human
gaaagcagaacag

SEQ ID NO: 2996205 - RNA, 16 nt, Human
gaaagaucaaaagguu

SEQ ID NO: 2996206 - RNA, 22 nt, Human
gaacaguaacauagcugugauu

SEQ ID NO: 2996207 - RNA, 20 nt, Human
gaacaguuguguuugaagca

SEQ ID NO: 2996208 - RNA, 24 nt, Human
gaacaguuaccucugccucagaaa

SEQ ID NO: 2996209 - RNA, 17 nt, Human
gaacaggauauucucac

SEQ ID NO: 2996210 - RNA, 22 nt, Human
gaacagacuggaagcacagcuu

SEQ ID NO: 2996211 - RNA, 22 nt, Human
gaacaguuguguuugaagcaca

SEQ ID NO: 2996212 - RNA, 21 nt, Human
gaacacucuauaacaaaggau

SEQ ID NO: 2996213 - RNA, 15 nt, Human
gaacacucuauaaca

SEQ ID NO: 2996214 - RNA, 17 nt, Human
gaacacuccuucacaga

SEQ ID NO: 2996215 - RNA, 19 nt, Human
gaacagacuggaagcacag

SEQ ID NO: 2996216 - RNA, 20 nt, Human
gaacagacuggaagcacagc

SEQ ID NO: 2996217 - RNA, 15 nt, Human
gaacacuccuucaca

SEQ ID NO: 2996218 - RNA, 16 nt, Human
gaacacuccuucacag

SEQ ID NO: 2996219 - RNA, 21 nt, Human
gaaauuuccugggagcuuuug

SEQ ID NO: 2996220 - RNA, 17 nt, Human
gaaauuagguugaaaca

SEQ ID NO: 2996221 - RNA, 19 nt, Human
gaaauuagguugaaacaua

SEQ ID NO: 2996222 - RNA, 18 nt, Human
gaaauuagguugaaacau

SEQ ID NO: 2996223 - RNA, 20 nt, Human
gaaauuagguugaaacauau

SEQ ID NO: 2996224 - RNA, 17 nt, Human
gaaaugggcagagcaga

SEQ ID NO: 2996225 - RNA, 19 nt, Human
gaaaugggcagagcagaga

SEQ ID NO: 2996226 - RNA, 17 nt, Human
gaaauguacagcaagga

SEQ ID NO: 2996227 - RNA, 22 nt, Human
gaaauguaagggaaacugccag

SEQ ID NO: 2996228 - RNA, 17 nt, Human
gaaaugucaguucugau

SEQ ID NO: 2996229 - RNA, 16 nt, Human
gaaaugggcagagcag

SEQ ID NO: 2996230 - RNA, 15 nt, Human
gaaaugggcagagca

SEQ ID NO: 2996231 - RNA, 11 nt, Human
gaaaugagcug

SEQ ID NO: 2996232 - RNA, 18 nt, Human
gaaaugaggucagagccu

SEQ ID NO: 2996233 - RNA, 17 nt, Human
gaaauaaacgucuuaaa

SEQ ID NO: 2996234 - RNA, 16 nt, Human
gaaauaaacgucuuaa

SEQ ID NO: 2996235 - RNA, 14 nt, Human
gaaauaaacgucuu

SEQ ID NO: 2996236 - RNA, 21 nt, Human
gaaauaaacgucuuaaauauu

SEQ ID NO: 2996237 - RNA, 18 nt, Human
gaaauaaacgucuuaaau

SEQ ID NO: 2996238 - RNA, 17 nt, Human
gaaauauaggaacuuaa

SEQ ID NO: 2996239 - RNA, 19 nt, Human
gaaauaucugaaaauguau

SEQ ID NO: 2996240 - RNA, 18 nt, Human
gaaauaucugaaaaugua

SEQ ID NO: 2996241 - RNA, 13 nt, Human
gaaauauuuauuu

SEQ ID NO: 2996242 - RNA, 16 nt, Human
gaaauauuuauuuuaa

SEQ ID NO: 2996243 - RNA, 15 nt, Human
gaaauauuuauuuua

SEQ ID NO: 2996244 - RNA, 18 nt, Human
gaaguccccucuccucca

SEQ ID NO: 2996245 - RNA, 23 nt, Human
gaaguccaagcauuuagauguau

SEQ ID NO: 2996246 - RNA, 23 nt, Human
gaaguccccucuccuccacauuu

SEQ ID NO: 2996247 - RNA, 18 nt, Human
gaagucuuagauguauau

SEQ ID NO: 2996248 - RNA, 20 nt, Human
gaagucacauuccugaacag

SEQ ID NO: 2996249 - RNA, 16 nt, Human
gaagucacauuccuga

SEQ ID NO: 2996250 - RNA, 21 nt, Human
gaagucacauuccugaacagg

SEQ ID NO: 2996251 - RNA, 18 nt, Human
gaagucaaggcuuagacc

SEQ ID NO: 2996252 - RNA, 13 nt, Human
gaagucacacagu

SEQ ID NO: 2996253 - RNA, 20 nt, Human
gaaguaauaugcacacauuu

SEQ ID NO: 2996254 - RNA, 19 nt, Human
gaaguaauaugcacacauu

SEQ ID NO: 2996255 - RNA, 19 nt, Human
gaaggucuguuuuguguac

SEQ ID NO: 2996256 - RNA, 20 nt, Human
gaagguagaauguuuucaaa

SEQ ID NO: 2996257 - RNA, 13 nt, Human
gaagggggcuggg

SEQ ID NO: 2996258 - RNA, 20 nt, Human
gaaggcauggacuucuggau

SEQ ID NO: 2996259 - RNA, 14 nt, Human
gaaggaugcugucu

SEQ ID NO: 2996260 - RNA, 18 nt, Human
gaagccgcuggggccagu

SEQ ID NO: 2996261 - RNA, 20 nt, Human
gaagccgcuggggccaguug

SEQ ID NO: 2996262 - RNA, 14 nt, Human
gaagccgcuggggc

SEQ ID NO: 2996263 - RNA, 19 nt, Human
gaaggaaacccagcucugg

SEQ ID NO: 2996264 - RNA, 20 nt, Human
gaaggaaacccagcucuggu

SEQ ID NO: 2996265 - RNA, 21 nt, Human
gaaggacauugcggacagcca

SEQ ID NO: 2996266 - RNA, 20 nt, Human
gaaggacauugcggacagcc

SEQ ID NO: 2996267 - RNA, 19 nt, Human
gaaggacauugcggacagc

SEQ ID NO: 2996268 - RNA, 21 nt, Human
gaaggaaacccagcucugguc

SEQ ID NO: 2996269 - RNA, 22 nt, Human
gaaggaaacccagcucuggucc

SEQ ID NO: 2996270 - RNA, 15 nt, Human
gaaggaacguccccu

SEQ ID NO: 2996271 - RNA, 19 nt, Human
gaaggaagacuucaucccu

SEQ ID NO: 2996272 - RNA, 20 nt, Human
gaagauucuuguauuuauua

SEQ ID NO: 2996273 - RNA, 18 nt, Human
gaagcauuuacuuugugu

SEQ ID NO: 2996274 - RNA, 15 nt, Human
gaagagcuguucaca

SEQ ID NO: 2996275 - RNA, 20 nt, Human
gaagagcuguucacagccag

SEQ ID NO: 2996276 - RNA, 13 nt, Human
gaagagcuguuca

SEQ ID NO: 2996277 - RNA, 23 nt, Human
gaagagcuguucacagccagacu

SEQ ID NO: 2996278 - RNA, 12 nt, Human
gaagagccuugc

SEQ ID NO: 2996279 - RNA, 17 nt, Human
gaagacuucaucccucu

SEQ ID NO: 2996280 - RNA, 19 nt, Human
gaagacuucaucccucugg

SEQ ID NO: 2996281 - RNA, 15 nt, Human
gaagacuucaucccu

SEQ ID NO: 2996282 - RNA, 16 nt, Human
gaagacuucaucccuc

SEQ ID NO: 2996283 - RNA, 16 nt, Human
gaacucccuuucaaca

SEQ ID NO: 2996284 - RNA, 15 nt, Human
gaacucccuuucaac

SEQ ID NO: 2996285 - RNA, 15 nt, Human
gaaccacaagacugc

SEQ ID NO: 2996286 - RNA, 14 nt, Human
gaaccacaagacug

SEQ ID NO: 2996287 - RNA, 18 nt, Human
gaaccacaucuugcucug

SEQ ID NO: 2996288 - RNA, 17 nt, Human
gaacuuggcgcugcccc

SEQ ID NO: 2996289 - RNA, 14 nt, Human
gaacuuaaauaaug

SEQ ID NO: 2996290 - RNA, 17 nt, Human
gaacuuaaauaauguga

SEQ ID NO: 2996291 - RNA, 17 nt, Human
gaacuugggccacugug

SEQ ID NO: 2996292 - RNA, 18 nt, Human
gaacuuggcgcugccccu

SEQ ID NO: 2996293 - RNA, 22 nt, Human
gaacuuguaaaggaauuuaaaa

SEQ ID NO: 2996294 - RNA, 17 nt, Human
gaacuuuccaggaaggc

SEQ ID NO: 2996295 - RNA, 22 nt, Human
gaacuuugaccucugcagcaau

SEQ ID NO: 2996296 - RNA, 16 nt, Human
gaacuuugaccucugc

SEQ ID NO: 2996297 - RNA, 14 nt, Human
gaagaagcucucuc

SEQ ID NO: 2996298 - RNA, 21 nt, Human
cugguacucugccacuuuauu

SEQ ID NO: 2996299 - RNA, 23 nt, Human
cuggucucaaacucuugaccuca

SEQ ID NO: 2996300 - RNA, 13 nt, Human
cuggucccacuca

SEQ ID NO: 2996301 - RNA, 21 nt, Human
cugguccauagagagcaagac

SEQ ID NO: 2996302 - RNA, 19 nt, Human
cugggcucccuucccaccu

SEQ ID NO: 2996303 - RNA, 20 nt, Human
cugggcucccuucccaccuc

SEQ ID NO: 2996304 - RNA, 21 nt, Human
cugggcucccuucccaccucu

SEQ ID NO: 2996305 - RNA, 22 nt, Human
cugggcucccuucccaccucuc

SEQ ID NO: 2996306 - RNA, 14 nt, Human
cuggguacuugugg

SEQ ID NO: 2996307 - RNA, 16 nt, Human
cuggguacuuguggac

SEQ ID NO: 2996308 - RNA, 18 nt, Human
cuggguacuuguggacac

SEQ ID NO: 2996309 - RNA, 15 nt, Human
cuggguuggagggug

SEQ ID NO: 2996310 - RNA, 21 nt, Human
cuguaaguuacaugaaggcag

SEQ ID NO: 2996311 - RNA, 17 nt, Human
cuguaauuugugauaca

SEQ ID NO: 2996312 - RNA, 18 nt, Human
cuguaauuugugauacaa

SEQ ID NO: 2996313 - RNA, 22 nt, Human
cuguaauuugugauacaaugcu

SEQ ID NO: 2996314 - RNA, 21 nt, Human
cuguaauuugugauacaaugc

SEQ ID NO: 2996315 - RNA, 23 nt, Human
cuguacagagcccacgcccccac

SEQ ID NO: 2996316 - RNA, 16 nt, Human
cuguacauacuuuuug

SEQ ID NO: 2996317 - RNA, 21 nt, Human
cuguaccucuugagccuugaa

SEQ ID NO: 2996318 - RNA, 15 nt, Human
cuguacauacuuuuu

SEQ ID NO: 2996319 - RNA, 23 nt, Human
cuguacaugaaaacacauuuuuc

SEQ ID NO: 2996320 - RNA, 22 nt, Human
cuguacaugaaaacacauuuuu

SEQ ID NO: 2996321 - RNA, 20 nt, Human
cugguucaggguuggccccu

SEQ ID NO: 2996322 - RNA, 13 nt, Human
cugguggcagcuc

SEQ ID NO: 2996323 - RNA, 14 nt, Human
cugguggcagcuca

SEQ ID NO: 2996324 - RNA, 12 nt, Human
cugguggcagcu

SEQ ID NO: 2996325 - RNA, 17 nt, Human
cugucuccucucucugu

SEQ ID NO: 2996326 - RNA, 20 nt, Human
cugucuccucucucuguaau

SEQ ID NO: 2996327 - RNA, 18 nt, Human
cugucucuacuaaaaaua

SEQ ID NO: 2996328 - RNA, 15 nt, Human
cuguccuauuauauu

SEQ ID NO: 2996329 - RNA, 21 nt, Human
cuguccuauuauauucauucu

SEQ ID NO: 2996330 - RNA, 22 nt, Human
cugucucaaaaaaagaaaaaga

SEQ ID NO: 2996331 - RNA, 21 nt, Human
cuguccuacucugugucaggu

SEQ ID NO: 2996332 - RNA, 13 nt, Human
cugucccccugac

SEQ ID NO: 2996333 - RNA, 14 nt, Human
cugucccccugaca

SEQ ID NO: 2996334 - RNA, 20 nt, Human
cuguccuacucugugucagg

SEQ ID NO: 2996335 - RNA, 18 nt, Human
cuguccuacucuguguca

SEQ ID NO: 2996336 - RNA, 17 nt, Human
cuguccuacucuguguc

SEQ ID NO: 2996337 - RNA, 16 nt, Human
cuguccuacucugugu

SEQ ID NO: 2996338 - RNA, 22 nt, Human
cugucccuuacgugaguccugg

SEQ ID NO: 2996339 - RNA, 15 nt, Human
cuguaugauucccag

SEQ ID NO: 2996340 - RNA, 18 nt, Human
cuguaucccaugagccuc

SEQ ID NO: 2996341 - RNA, 22 nt, Human
cuguaccucuugagccuugaac

SEQ ID NO: 2996342 - RNA, 15 nt, Human
cuguaucccaugagc

SEQ ID NO: 2996343 - RNA, 14 nt, Human
cuguaucccaugag

SEQ ID NO: 2996344 - RNA, 22 nt, Human
cugucccagugccgagaaggaa

SEQ ID NO: 2996345 - RNA, 16 nt, Human
cuguauuuuaaaagaa

SEQ ID NO: 2996346 - RNA, 13 nt, Human
cuguauuuuaaaa

SEQ ID NO: 2996347 - RNA, 23 nt, Human
cugucauuugagcagggcucagc

SEQ ID NO: 2996348 - RNA, 20 nt, Human
cugggaaagggauuuucagc

SEQ ID NO: 2996349 - RNA, 17 nt, Human
cugggagagccuuccag

SEQ ID NO: 2996350 - RNA, 18 nt, Human
cugggagagccuuccagg

SEQ ID NO: 2996351 - RNA, 19 nt, Human
cugggagagccuuccaggg

SEQ ID NO: 2996352 - RNA, 20 nt, Human
cugggagagccuuccagggg

SEQ ID NO: 2996353 - RNA, 21 nt, Human
cugggagagccuuccaggggu

SEQ ID NO: 2996354 - RNA, 15 nt, Human
cuggcuuucagagua

SEQ ID NO: 2996355 - RNA, 20 nt, Human
cuggcugguuagagguuccc

SEQ ID NO: 2996356 - RNA, 17 nt, Human
cuggcuguuggcugggg

SEQ ID NO: 2996357 - RNA, 16 nt, Human
cuggcuguuggcuggg

SEQ ID NO: 2996358 - RNA, 20 nt, Human
cugggaucccucauccucau

SEQ ID NO: 2996359 - RNA, 18 nt, Human
cugggaugauuggagggg

SEQ ID NO: 2996360 - RNA, 20 nt, Human
cugggauuacaggugugaac

SEQ ID NO: 2996361 - RNA, 17 nt, Human
cugggauuacaggugug

SEQ ID NO: 2996362 - RNA, 19 nt, Human
cugggaggucaaggcugca

SEQ ID NO: 2996363 - RNA, 21 nt, Human
cugggaggucaaggcugcagu

SEQ ID NO: 2996364 - RNA, 20 nt, Human
cugggagguuaaaaagaaaa

SEQ ID NO: 2996365 - RNA, 16 nt, Human
cuggccuggccccuca

SEQ ID NO: 2996366 - RNA, 17 nt, Human
cuggccuggccccucag

SEQ ID NO: 2996367 - RNA, 14 nt, Human
cuggccugugucua

SEQ ID NO: 2996368 - RNA, 15 nt, Human
cuggccuucggccuc

SEQ ID NO: 2996369 - RNA, 21 nt, Human
cuggccuucggccuccauccu

SEQ ID NO: 2996370 - RNA, 18 nt, Human
cuggccuucggccuccau

SEQ ID NO: 2996371 - RNA, 17 nt, Human
cuggccuucggccucca

SEQ ID NO: 2996372 - RNA, 16 nt, Human
cuggccuucggccucc

SEQ ID NO: 2996373 - RNA, 15 nt, Human
cuggccugagcuggg

SEQ ID NO: 2996374 - RNA, 18 nt, Human
cuggccugagcugggaug

SEQ ID NO: 2996375 - RNA, 14 nt, Human
cuggccuggccccu

SEQ ID NO: 2996376 - RNA, 13 nt, Human
cuggccuggcccc

SEQ ID NO: 2996377 - RNA, 13 nt, Human
cuggccucugcac

SEQ ID NO: 2996378 - RNA, 14 nt, Human
cuggccucugcacu

SEQ ID NO: 2996379 - RNA, 16 nt, Human
cuggccugagcuggga

SEQ ID NO: 2996380 - RNA, 22 nt, Human
cuggccucaagugauucuccug

SEQ ID NO: 2996381 - RNA, 12 nt, Human
cuggccucugca

SEQ ID NO: 2996382 - RNA, 23 nt, Human
cuggccucaagugauucuccugc

SEQ ID NO: 2996383 - RNA, 22 nt, Human
cuggccagaugcaccagcccuu

SEQ ID NO: 2996384 - RNA, 24 nt, Human
cuggcaugggaaugaaugucagug

SEQ ID NO: 2996385 - RNA, 16 nt, Human
cuggcaugggaaugaa

SEQ ID NO: 2996386 - RNA, 18 nt, Human
cuggcaugggaaugaaug

SEQ ID NO: 2996387 - RNA, 19 nt, Human
cuggcaugggaaugaaugu

SEQ ID NO: 2996388 - RNA, 22 nt, Human
cuggcaugggaaugaaugucag

SEQ ID NO: 2996389 - RNA, 16 nt, Human
cuggcacuauaaugua

SEQ ID NO: 2996390 - RNA, 15 nt, Human
cuggcacuauaaugu

SEQ ID NO: 2996391 - RNA, 14 nt, Human
cuggcaagaaugug

SEQ ID NO: 2996392 - RNA, 18 nt, Human
cuggaauauauaaccagu

SEQ ID NO: 2996393 - RNA, 22 nt, Human
cuggcacccggccccugcuggu

SEQ ID NO: 2996394 - RNA, 18 nt, Human
cuggcacccggccccugc

SEQ ID NO: 2996395 - RNA, 17 nt, Human
cuggcacccggccccug

SEQ ID NO: 2996396 - RNA, 16 nt, Human
cuggcacccggccccu

SEQ ID NO: 2996397 - RNA, 20 nt, Human
cugcaguuuuuuuccuucaa

SEQ ID NO: 2996398 - RNA, 13 nt, Human
cugcaguugccag

SEQ ID NO: 2996399 - RNA, 16 nt, Human
cugcaguugccaguca

SEQ ID NO: 2996400 - RNA, 17 nt, Human
cugcagcaauaaagcag

SEQ ID NO: 2996401 - RNA, 21 nt, Human
cugcacuccccugcugggugu

SEQ ID NO: 2996402 - RNA, 18 nt, Human
cugcacuccccugcuggg

SEQ ID NO: 2996403 - RNA, 12 nt, Human
cugcacugucaa

SEQ ID NO: 2996404 - RNA, 10 nt, Human
cugcagaggg

SEQ ID NO: 2996405 - RNA, 16 nt, Human
cugcagcaauaaagca

SEQ ID NO: 2996406 - RNA, 15 nt, Human
cugcagcaauaaagc

SEQ ID NO: 2996407 - RNA, 13 nt, Human
cugcagagggcac

SEQ ID NO: 2996408 - RNA, 19 nt, Human
cugcacuccccugcugggu

SEQ ID NO: 2996409 - RNA, 20 nt, Human
cugcacuccccugcugggug

SEQ ID NO: 2996410 - RNA, 13 nt, Human
cugcacuccccug

SEQ ID NO: 2996411 - RNA, 20 nt, Human
cugcacuccagccuggguga

SEQ ID NO: 2996412 - RNA, 18 nt, Human
cugcaccgggccacagag

SEQ ID NO: 2996413 - RNA, 22 nt, Human
cugaggcccuucucuccagccc

SEQ ID NO: 2996414 - RNA, 23 nt, Human
cugaggcccuucucuccagcccc

SEQ ID NO: 2996415 - RNA, 14 nt, Human
cugcaccggcuggc

SEQ ID NO: 2996416 - RNA, 15 nt, Human
cugcaccggcuggcc

SEQ ID NO: 2996417 - RNA, 16 nt, Human
cugcaccggcuggccu

SEQ ID NO: 2996418 - RNA, 15 nt, Human
cugcaccgggccaca

SEQ ID NO: 2996419 - RNA, 14 nt, Human
cugcaccgggccac

SEQ ID NO: 2996420 - RNA, 22 nt, Human
cugcaguuuuuuuccuucaaga

SEQ ID NO: 2996421 - RNA, 23 nt, Human
cugcaguuuuuuuccuucaagaa

SEQ ID NO: 2996422 - RNA, 15 nt, Human
cugcauaugaaagga

SEQ ID NO: 2996423 - RNA, 20 nt, Human
cugcaucaagaugugacaug

SEQ ID NO: 2996424 - RNA, 12 nt, Human
cugccacccugg

SEQ ID NO: 2996425 - RNA, 21 nt, Human
cugccacccuggggagaaagu

SEQ ID NO: 2996426 - RNA, 13 nt, Human
cugccaggaagcc

SEQ ID NO: 2996427 - RNA, 14 nt, Human
cugccaggaagcca

SEQ ID NO: 2996428 - RNA, 20 nt, Human
cugccaggaagccagcaggc

SEQ ID NO: 2996429 - RNA, 21 nt, Human
cugccaggaagccagcaggcu

SEQ ID NO: 2996430 - RNA, 15 nt, Human
cugccagcaacgcag

SEQ ID NO: 2996431 - RNA, 22 nt, Human
cugccaggaagccagcaggcuc

SEQ ID NO: 2996432 - RNA, 15 nt, Human
cugccauccucccaa

SEQ ID NO: 2996433 - RNA, 21 nt, Human
cugccauccagguucagcuug

SEQ ID NO: 2996434 - RNA, 20 nt, Human
cugccauccuggcccagggc

SEQ ID NO: 2996435 - RNA, 19 nt, Human
cugccauccuggcccaggg

SEQ ID NO: 2996436 - RNA, 18 nt, Human
cugccauccuggcccagg

SEQ ID NO: 2996437 - RNA, 17 nt, Human
cugccauccuggcccag

SEQ ID NO: 2996438 - RNA, 16 nt, Human
cugccauccuggccca

SEQ ID NO: 2996439 - RNA, 13 nt, Human
cugccauccuggc

SEQ ID NO: 2996440 - RNA, 22 nt, Human
cugccauccuggcccagggcau

SEQ ID NO: 2996441 - RNA, 21 nt, Human
cugccauccuggcccagggca

SEQ ID NO: 2996442 - RNA, 23 nt, Human
cugccauccuggcccagggcauc

SEQ ID NO: 2996443 - RNA, 18 nt, Human
cugccccuggcagccccu

SEQ ID NO: 2996444 - RNA, 17 nt, Human
cugccccuggcagcccc

SEQ ID NO: 2996445 - RNA, 19 nt, Human
cugccccuggcagccccug

SEQ ID NO: 2996446 - RNA, 13 nt, Human
cugcccggcaggg

SEQ ID NO: 2996447 - RNA, 15 nt, Human
cugccauuucugaga

SEQ ID NO: 2996448 - RNA, 15 nt, Human
cugcccaggccccug

SEQ ID NO: 2996449 - RNA, 14 nt, Human
cugcccaggccccu

SEQ ID NO: 2996450 - RNA, 12 nt, Human
cugcccaccugg

SEQ ID NO: 2996451 - RNA, 20 nt, Human
cugcccaggccccugccacc

SEQ ID NO: 2996452 - RNA, 19 nt, Human
cugcccaggccccugccac

SEQ ID NO: 2996453 - RNA, 18 nt, Human
cugcccaggccccugcca

SEQ ID NO: 2996454 - RNA, 16 nt, Human
cugcccaggccccugc

SEQ ID NO: 2996455 - RNA, 20 nt, Human
cugcccugcccaccuggccu

SEQ ID NO: 2996456 - RNA, 17 nt, Human
cugcccugcccaccugg

SEQ ID NO: 2996457 - RNA, 14 nt, Human
cugcccucuccugg

SEQ ID NO: 2996458 - RNA, 13 nt, Human
cugcccucuccug

SEQ ID NO: 2996459 - RNA, 12 nt, Human
cugcccucuccu

SEQ ID NO: 2996460 - RNA, 21 nt, Human
cugcccugcccaccuggccuc

SEQ ID NO: 2996461 - RNA, 16 nt, Human
cugccugaagucacac

SEQ ID NO: 2996462 - RNA, 18 nt, Human
cugccugaagucacacag

SEQ ID NO: 2996463 - RNA, 19 nt, Human
cugccugaagucacacagu

SEQ ID NO: 2996464 - RNA, 18 nt, Human
cugcggugcuaucucccc

SEQ ID NO: 2996465 - RNA, 19 nt, Human
cugcggugcuaucuccccc

SEQ ID NO: 2996466 - RNA, 23 nt, Human
cugcgguccacccaggagccccg

SEQ ID NO: 2996467 - RNA, 18 nt, Human
cugcgggggcagugcuca

SEQ ID NO: 2996468 - RNA, 15 nt, Human
cugcucuccgaccag

SEQ ID NO: 2996469 - RNA, 20 nt, Human
cugcuccucuccccagcaag

SEQ ID NO: 2996470 - RNA, 19 nt, Human
cugcuccucuccccagcaa

SEQ ID NO: 2996471 - RNA, 23 nt, Human
cugcuccucuccccagcaaguga

SEQ ID NO: 2996472 - RNA, 20 nt, Human
cugcggugcuaucuccccca

SEQ ID NO: 2996473 - RNA, 21 nt, Human
cugcggugcuaucucccccag

SEQ ID NO: 2996474 - RNA, 22 nt, Human
cugcggugcuaucucccccagc

SEQ ID NO: 2996475 - RNA, 23 nt, Human
cugcggugcuaucucccccagcc

SEQ ID NO: 2996476 - RNA, 19 nt, Human
cugcucccaccuggcucug

SEQ ID NO: 2996477 - RNA, 18 nt, Human
cugcucccaccuggcucu

SEQ ID NO: 2996478 - RNA, 20 nt, Human
cugcucccaccuggcucugu

SEQ ID NO: 2996479 - RNA, 17 nt, Human
cugcucccaccuggcuc

SEQ ID NO: 2996480 - RNA, 21 nt, Human
cugcgggggcagugcucaccc

SEQ ID NO: 2996481 - RNA, 16 nt, Human
cugcucccaccuggcu

SEQ ID NO: 2996482 - RNA, 15 nt, Human
cugcugcaguugcca

SEQ ID NO: 2996483 - RNA, 14 nt, Human
cugcugcaguugcc

SEQ ID NO: 2996484 - RNA, 10 nt, Human
cugcugcagu

SEQ ID NO: 2996485 - RNA, 13 nt, Human
cugcugcaguugc

SEQ ID NO: 2996486 - RNA, 12 nt, Human
cugcucugguua

SEQ ID NO: 2996487 - RNA, 13 nt, Human
cugcuugaggcaa

SEQ ID NO: 2996488 - RNA, 20 nt, Human
cugcuugaggcaacucaucu

SEQ ID NO: 2996489 - RNA, 21 nt, Human
cugcuugaggcaacucaucuu

SEQ ID NO: 2996490 - RNA, 17 nt, Human
cugcuggguguggcgca

SEQ ID NO: 2996491 - RNA, 14 nt, Human
cugcuggguguggc

SEQ ID NO: 2996492 - RNA, 15 nt, Human
cugcuggguguggcg

SEQ ID NO: 2996493 - RNA, 12 nt, Human
cugcugcuggcu

SEQ ID NO: 2996494 - RNA, 13 nt, Human
cugcugcuggcug

SEQ ID NO: 2996495 - RNA, 18 nt, Human
cugcugggagguuaaaaa

SEQ ID NO: 2996496 - RNA, 22 nt, Human
cugcugggagguuaaaaagaaa

SEQ ID NO: 2996497 - RNA, 17 nt, Human
cugcuuuuggucugugu

SEQ ID NO: 2996498 - RNA, 15 nt, Human
cugcuuuuggucugu

SEQ ID NO: 2996499 - RNA, 20 nt, Human
cugcuugcuugcuuuuuaau

SEQ ID NO: 2996500 - RNA, 22 nt, Human
cugcuugccaucccucccucca

SEQ ID NO: 2996501 - RNA, 20 nt, Human
cugcuugccaucccucccuc

SEQ ID NO: 2996502 - RNA, 19 nt, Human
cugcuugccaucccucccu

SEQ ID NO: 2996503 - RNA, 18 nt, Human
cugcuugccaucccuccc

SEQ ID NO: 2996504 - RNA, 15 nt, Human
cugcuugccaucccu

SEQ ID NO: 2996505 - RNA, 16 nt, Human
cugcuugccaucccuc

SEQ ID NO: 2996506 - RNA, 22 nt, Human
cugcuugaggcaacucaucuua

SEQ ID NO: 2996507 - RNA, 13 nt, Human
cugcuugggcuuc

SEQ ID NO: 2996508 - RNA, 15 nt, Human
cugcuugggcuucau

SEQ ID NO: 2996509 - RNA, 17 nt, Human
cugcuugggcuucaucc

SEQ ID NO: 2996510 - RNA, 18 nt, Human
cugcuugggcuucauccu

SEQ ID NO: 2996511 - RNA, 19 nt, Human
cugcuugggcuucauccuc

SEQ ID NO: 2996512 - RNA, 19 nt, Human
cugcuugugaaaggaaaga

SEQ ID NO: 2996513 - RNA, 16 nt, Human
cugaaauaaggaauga

SEQ ID NO: 2996514 - RNA, 23 nt, Human
cugaaagcccugagcuuucugcu

SEQ ID NO: 2996515 - RNA, 21 nt, Human
cugaaauaaacgucuuaaaua

SEQ ID NO: 2996516 - RNA, 16 nt, Human
cugaaagcccugagcu

SEQ ID NO: 2996517 - RNA, 17 nt, Human
cugaaagcccugagcuu

SEQ ID NO: 2996518 - RNA, 18 nt, Human
cugaaagcccugagcuuu

SEQ ID NO: 2996519 - RNA, 19 nt, Human
cugaaagcccugagcuuuc

SEQ ID NO: 2996520 - RNA, 15 nt, Human
cugaaagcccugagc

SEQ ID NO: 2996521 - RNA, 23 nt, Human
cugaagaagcaccaaucaugaau

SEQ ID NO: 2996522 - RNA, 19 nt, Human
cugaagaauugaaaaacca

SEQ ID NO: 2996523 - RNA, 14 nt, Human
cugaagaagauggu

SEQ ID NO: 2996524 - RNA, 16 nt, Human
cugaaauuuccuggga

SEQ ID NO: 2996525 - RNA, 23 nt, Human
cugaaauuuccugggagcuuuug

SEQ ID NO: 2996526 - RNA, 13 nt, Human
cugaaauuuccug

SEQ ID NO: 2996527 - RNA, 17 nt, Human
cucuuucccucccuucc

SEQ ID NO: 2996528 - RNA, 13 nt, Human
cucuuucccuccc

SEQ ID NO: 2996529 - RNA, 23 nt, Human
cucuuuaaugucacaggcagguc

SEQ ID NO: 2996530 - RNA, 22 nt, Human
cucuuuaaugucacaggcaggu

SEQ ID NO: 2996531 - RNA, 21 nt, Human
cucuuuaaugucacaggcagg

SEQ ID NO: 2996532 - RNA, 20 nt, Human
cucuuuaaugucacaggcag

SEQ ID NO: 2996533 - RNA, 13 nt, Human
cucuugguccugc

SEQ ID NO: 2996534 - RNA, 15 nt, Human
cucuugguccugcug

SEQ ID NO: 2996535 - RNA, 16 nt, Human
cucuugguccugcugc

SEQ ID NO: 2996536 - RNA, 17 nt, Human
cucuugguccugcugca

SEQ ID NO: 2996537 - RNA, 18 nt, Human
cucuuuaaugucacaggc

SEQ ID NO: 2996538 - RNA, 22 nt, Human
cucuucuuuaaagggauggcaa

SEQ ID NO: 2996539 - RNA, 22 nt, Human
cucuugaaauauaggaacuuaa

SEQ ID NO: 2996540 - RNA, 19 nt, Human
cucuuggguucaagcgauu

SEQ ID NO: 2996541 - RNA, 21 nt, Human
cucuuggguucaagcgauucu

SEQ ID NO: 2996542 - RNA, 15 nt, Human
cucugugucaggugg

SEQ ID NO: 2996543 - RNA, 16 nt, Human
cucuguggcgagccau

SEQ ID NO: 2996544 - RNA, 13 nt, Human
cucuuagaaaaac

SEQ ID NO: 2996545 - RNA, 15 nt, Human
cucuuagaaaaacca

SEQ ID NO: 2996546 - RNA, 14 nt, Human
cucuuccaggcugg

SEQ ID NO: 2996547 - RNA, 15 nt, Human
cucuuccaggcuggg

SEQ ID NO: 2996548 - RNA, 13 nt, Human
cucuuccaggcug

SEQ ID NO: 2996549 - RNA, 19 nt, Human
cucuggccuucggccucca

SEQ ID NO: 2996550 - RNA, 15 nt, Human
cucuggcagcucaga

SEQ ID NO: 2996551 - RNA, 16 nt, Human
cucuggcagcucagag

SEQ ID NO: 2996552 - RNA, 12 nt, Human
cucuggccuucg

SEQ ID NO: 2996553 - RNA, 22 nt, Human
cucuggacaggcauguucucug

SEQ ID NO: 2996554 - RNA, 16 nt, Human
cucuggacaggcaugu

SEQ ID NO: 2996555 - RNA, 14 nt, Human
cucuggacaggcau

SEQ ID NO: 2996556 - RNA, 12 nt, Human
cucuggcagcuc

SEQ ID NO: 2996557 - RNA, 14 nt, Human
cucuggcagcucag

SEQ ID NO: 2996558 - RNA, 20 nt, Human
cucugcuugccaucccuccc

SEQ ID NO: 2996559 - RNA, 17 nt, Human
cucugcuugccaucccu

SEQ ID NO: 2996560 - RNA, 14 nt, Human
cucugcuugccauc

SEQ ID NO: 2996561 - RNA, 12 nt, Human
cucugcuugcca

SEQ ID NO: 2996562 - RNA, 15 nt, Human
cucuggacaggcaug

SEQ ID NO: 2996563 - RNA, 21 nt, Human
cucugccugaagucacacagu

SEQ ID NO: 2996564 - RNA, 10 nt, Human
cucugccuga

SEQ ID NO: 2996565 - RNA, 22 nt, Human
cucugccugaagucacacagug

SEQ ID NO: 2996566 - RNA, 13 nt, Human
cucucuccucccu

SEQ ID NO: 2996567 - RNA, 20 nt, Human
cugagcgacagugagacucu

SEQ ID NO: 2996568 - RNA, 16 nt, Human
cugagcgacagugaga

SEQ ID NO: 2996569 - RNA, 16 nt, Human
cugagacagcccgggc

SEQ ID NO: 2996570 - RNA, 17 nt, Human
cugagacagcccgggcu

SEQ ID NO: 2996571 - RNA, 18 nt, Human
cugagacagcccgggcuc

SEQ ID NO: 2996572 - RNA, 17 nt, Human
cugagccagauuucacu

SEQ ID NO: 2996573 - RNA, 18 nt, Human
cugagccagauuucacuc

SEQ ID NO: 2996574 - RNA, 19 nt, Human
cugagccagauuucacucu

SEQ ID NO: 2996575 - RNA, 20 nt, Human
cugagccagauuucacucuc

SEQ ID NO: 2996576 - RNA, 21 nt, Human
cugagccagauuucacucucc

SEQ ID NO: 2996577 - RNA, 15 nt, Human
cugagccagauuuca

SEQ ID NO: 2996578 - RNA, 15 nt, Human
cugagccucacagca

SEQ ID NO: 2996579 - RNA, 19 nt, Human
cugagccucacagcaguga

SEQ ID NO: 2996580 - RNA, 17 nt, Human
cugagccucacagcagu

SEQ ID NO: 2996581 - RNA, 16 nt, Human
cugagccucacagcag

SEQ ID NO: 2996582 - RNA, 12 nt, Human
cugaggcccaga

SEQ ID NO: 2996583 - RNA, 13 nt, Human
cugaggcccagag

SEQ ID NO: 2996584 - RNA, 14 nt, Human
cugaggcccagagg

SEQ ID NO: 2996585 - RNA, 15 nt, Human
cugaggcccagaggg

SEQ ID NO: 2996586 - RNA, 16 nt, Human
cugaggcccagagggc

SEQ ID NO: 2996587 - RNA, 17 nt, Human
cugaggcccagagggcc

SEQ ID NO: 2996588 - RNA, 18 nt, Human
cugaggcccagagggccu

SEQ ID NO: 2996589 - RNA, 19 nt, Human
cugaggcccagagggccug

SEQ ID NO: 2996590 - RNA, 21 nt, Human
cugaggcccagagggccugca

SEQ ID NO: 2996591 - RNA, 23 nt, Human
cugaggcccagagggccugcaag

SEQ ID NO: 2996592 - RNA, 14 nt, Human
cugaggcccuucuc

SEQ ID NO: 2996593 - RNA, 15 nt, Human
cugaggcccuucucu

SEQ ID NO: 2996594 - RNA, 18 nt, Human
cugaggcccuucucucca

SEQ ID NO: 2996595 - RNA, 19 nt, Human
cugaggcccuucucuccag

SEQ ID NO: 2996596 - RNA, 20 nt, Human
cugaggcccuucucuccagc

SEQ ID NO: 2996597 - RNA, 17 nt, Human
cugaggcaggagacugg

SEQ ID NO: 2996598 - RNA, 18 nt, Human
cugaggcaggagacuggc

SEQ ID NO: 2996599 - RNA, 22 nt, Human
cugagaaagacuauucaaacag

SEQ ID NO: 2996600 - RNA, 23 nt, Human
cugagaaagacuauucaaacagu

SEQ ID NO: 2996601 - RNA, 14 nt, Human
cugagacagcccgg

SEQ ID NO: 2996602 - RNA, 15 nt, Human
cugagacagcccggg

SEQ ID NO: 2996603 - RNA, 13 nt, Human
cugacuucuaagu

SEQ ID NO: 2996604 - RNA, 15 nt, Human
cugacuucuaaguaa

SEQ ID NO: 2996605 - RNA, 18 nt, Human
cugacuguuuucucuuga

SEQ ID NO: 2996606 - RNA, 16 nt, Human
cugacuucuaaguaaa

SEQ ID NO: 2996607 - RNA, 17 nt, Human
cugacucuuaagaagac

SEQ ID NO: 2996608 - RNA, 16 nt, Human
cugacuguuuucucuu

SEQ ID NO: 2996609 - RNA, 13 nt, Human
cugacccaugcug

SEQ ID NO: 2996610 - RNA, 14 nt, Human
cugacccacugcuu

SEQ ID NO: 2996611 - RNA, 13 nt, Human
cugacccacugcu

SEQ ID NO: 2996612 - RNA, 14 nt, Human
cugacccaugcugc

SEQ ID NO: 2996613 - RNA, 15 nt, Human
cugacccaugcugcc

SEQ ID NO: 2996614 - RNA, 16 nt, Human
cugacccaugcugccc

SEQ ID NO: 2996615 - RNA, 12 nt, Human
cugacccacugc

SEQ ID NO: 2996616 - RNA, 22 nt, Human
cugacauuguuggccaaagcca

SEQ ID NO: 2996617 - RNA, 21 nt, Human
cugacaggcaaugcuggcugu

SEQ ID NO: 2996618 - RNA, 21 nt, Human
cugacauuguuggccaaagcc

SEQ ID NO: 2996619 - RNA, 13 nt, Human
cuccuccacauuu

SEQ ID NO: 2996620 - RNA, 22 nt, Human
cuccuccagccgccaugcuccu

SEQ ID NO: 2996621 - RNA, 22 nt, Human
cuccucuccccagcaagugaga

SEQ ID NO: 2996622 - RNA, 17 nt, Human
cucccuuucuucccuac

SEQ ID NO: 2996623 - RNA, 17 nt, Human
cucccuccaccucccug

SEQ ID NO: 2996624 - RNA, 15 nt, Human
cucccuccaccuccc

SEQ ID NO: 2996625 - RNA, 18 nt, Human
cucccucagucuggcccu

SEQ ID NO: 2996626 - RNA, 15 nt, Human
cuccgaccagacacc

SEQ ID NO: 2996627 - RNA, 15 nt, Human
cuccugccucagccu

SEQ ID NO: 2996628 - RNA, 22 nt, Human
cuccugccucgaacuggcugca

SEQ ID NO: 2996629 - RNA, 19 nt, Human
cuccugugugugcgccuac

SEQ ID NO: 2996630 - RNA, 16 nt, Human
cuccugugugugcgcc

SEQ ID NO: 2996631 - RNA, 11 nt, Human
cuccugcaggc

SEQ ID NO: 2996632 - RNA, 16 nt, Human
cuccugcaggcagcca

SEQ ID NO: 2996633 - RNA, 17 nt, Human
cuccugcaggcagccag

SEQ ID NO: 2996634 - RNA, 14 nt, Human
cuccugccucagcc

SEQ ID NO: 2996635 - RNA, 13 nt, Human
cuccugccucagc

SEQ ID NO: 2996636 - RNA, 11 nt, Human
cuccugcccuu

SEQ ID NO: 2996637 - RNA, 18 nt, Human
cuccugcaggcagccagg

SEQ ID NO: 2996638 - RNA, 20 nt, Human
cuccugcaggcagccaggcc

SEQ ID NO: 2996639 - RNA, 12 nt, Human
cuccccugcugg

SEQ ID NO: 2996640 - RNA, 20 nt, Human
cuccccagccccaucccaaa

SEQ ID NO: 2996641 - RNA, 20 nt, Human
cuccccagcaagugagagcu

SEQ ID NO: 2996642 - RNA, 12 nt, Human
cuccccagcaag

SEQ ID NO: 2996643 - RNA, 22 nt, Human
cucccaugagggagaugccaug

SEQ ID NO: 2996644 - RNA, 20 nt, Human
cucccaugagggagaugcca

SEQ ID NO: 2996645 - RNA, 18 nt, Human
cucccaugagggagaugc

SEQ ID NO: 2996646 - RNA, 17 nt, Human
cucccgaguagcuggga

SEQ ID NO: 2996647 - RNA, 16 nt, Human
cucccgaguagcuggg

SEQ ID NO: 2996648 - RNA, 18 nt, Human
cucccgaauagcugggac

SEQ ID NO: 2996649 - RNA, 15 nt, Human
cucccgaguagcugg

SEQ ID NO: 2996650 - RNA, 13 nt, Human
cuccccugcuggg

SEQ ID NO: 2996651 - RNA, 16 nt, Human
cucccgaauagcuggg

SEQ ID NO: 2996652 - RNA, 17 nt, Human
cucccgaauagcuggga

SEQ ID NO: 2996653 - RNA, 21 nt, Human
cucccaucucacacaugagca

SEQ ID NO: 2996654 - RNA, 11 nt, Human
cucccaucugu

SEQ ID NO: 2996655 - RNA, 14 nt, Human
cucccaucugugaa

SEQ ID NO: 2996656 - RNA, 15 nt, Human
cucccaucugugaaa

SEQ ID NO: 2996657 - RNA, 18 nt, Human
cucccaucugugaaagga

SEQ ID NO: 2996658 - RNA, 23 nt, Human
cucccaucugugaaaggaaagag

SEQ ID NO: 2996659 - RNA, 16 nt, Human
cucccaacucacccca

SEQ ID NO: 2996660 - RNA, 17 nt, Human
cucccaacucaccccag

SEQ ID NO: 2996661 - RNA, 18 nt, Human
cucccaaagugcugggau

SEQ ID NO: 2996662 - RNA, 22 nt, Human
cucccaacucaccccagcccca

SEQ ID NO: 2996663 - RNA, 16 nt, Human
cuccauccugaggcuc

SEQ ID NO: 2996664 - RNA, 14 nt, Human
cuccauccugaggc

SEQ ID NO: 2996665 - RNA, 18 nt, Human
cuccauccugaggcucca

SEQ ID NO: 2996666 - RNA, 18 nt, Human
cucacuauguugcccagg

SEQ ID NO: 2996667 - RNA, 13 nt, Human
cuccaugugggcu

SEQ ID NO: 2996668 - RNA, 17 nt, Human
cucccaaagugcuggga

SEQ ID NO: 2996669 - RNA, 20 nt, Human
cucuccugggcagcugccuc

SEQ ID NO: 2996670 - RNA, 19 nt, Human
cucuccugggcagcugccu

SEQ ID NO: 2996671 - RNA, 18 nt, Human
cucuccugggcagcugcc

SEQ ID NO: 2996672 - RNA, 16 nt, Human
cucuccugggcagcug

SEQ ID NO: 2996673 - RNA, 15 nt, Human
cucuccugggcagcu

SEQ ID NO: 2996674 - RNA, 12 nt, Human
cucuccugggca

SEQ ID NO: 2996675 - RNA, 12 nt, Human
cucucucacucc

SEQ ID NO: 2996676 - RNA, 13 nt, Human
cucucucaggcca

SEQ ID NO: 2996677 - RNA, 13 nt, Human
cucuccccagcaa

SEQ ID NO: 2996678 - RNA, 19 nt, Human
cucuccagccccuggaugc

SEQ ID NO: 2996679 - RNA, 12 nt, Human
cucuccucugcu

SEQ ID NO: 2996680 - RNA, 24 nt, Human
cucuccccagcaagugagagcugg

SEQ ID NO: 2996681 - RNA, 22 nt, Human
cucuccccagcaagugagagcu

SEQ ID NO: 2996682 - RNA, 14 nt, Human
cucuccccagcaag

SEQ ID NO: 2996683 - RNA, 13 nt, Human
cucuccucugcug

SEQ ID NO: 2996684 - RNA, 14 nt, Human
cucuccucugcugc

SEQ ID NO: 2996685 - RNA, 15 nt, Human
cucuccucugcugcu

SEQ ID NO: 2996686 - RNA, 18 nt, Human
cucuccucugcugcuggc

SEQ ID NO: 2996687 - RNA, 17 nt, Human
cucucaggccagcugcu

SEQ ID NO: 2996688 - RNA, 18 nt, Human
cucucaggccagcugcuu

SEQ ID NO: 2996689 - RNA, 19 nt, Human
cucucaggccagcugcuug

SEQ ID NO: 2996690 - RNA, 21 nt, Human
cucucaggccagcugcuuggg

SEQ ID NO: 2996691 - RNA, 15 nt, Human
cucuccagccccugg

SEQ ID NO: 2996692 - RNA, 16 nt, Human
cucuccagccccugga

SEQ ID NO: 2996693 - RNA, 17 nt, Human
cucuccagccccuggau

SEQ ID NO: 2996694 - RNA, 18 nt, Human
cucuccagccccuggaug

SEQ ID NO: 2996695 - RNA, 14 nt, Human
cucuccagccccug

SEQ ID NO: 2996696 - RNA, 22 nt, Human
cucucaggccaaacucaccugc

SEQ ID NO: 2996697 - RNA, 23 nt, Human
cucucaggccaaacucaccugcc

SEQ ID NO: 2996698 - RNA, 13 nt, Human
cucucaggccagc

SEQ ID NO: 2996699 - RNA, 15 nt, Human
cucucaggccagcug

SEQ ID NO: 2996700 - RNA, 20 nt, Human
cucucaggccaaacucaccu

SEQ ID NO: 2996701 - RNA, 21 nt, Human
cucucaggccaaacucaccug

SEQ ID NO: 2996702 - RNA, 12 nt, Human
cucucaggccaa

SEQ ID NO: 2996703 - RNA, 21 nt, Human
cucuaguuugauuaaauucuu

SEQ ID NO: 2996704 - RNA, 20 nt, Human
cucuaguuugauuaaauucu

SEQ ID NO: 2996705 - RNA, 19 nt, Human
cucuaguuugauuaaauuc

SEQ ID NO: 2996706 - RNA, 15 nt, Human
cucuaguuugauuaa

SEQ ID NO: 2996707 - RNA, 15 nt, Human
cucuaggaaauauuu

SEQ ID NO: 2996708 - RNA, 17 nt, Human
cucuaggaaauauuuau

SEQ ID NO: 2996709 - RNA, 23 nt, Human
cucuagggaaaaaccagcgugug

SEQ ID NO: 2996710 - RNA, 20 nt, Human
cucuagugaauguaggcugg

SEQ ID NO: 2996711 - RNA, 13 nt, Human
cucuacccuggca

SEQ ID NO: 2996712 - RNA, 21 nt, Human
cucuacccaucuuaaaaacaa

SEQ ID NO: 2996713 - RNA, 20 nt, Human
cucuaccauccccuguagag

SEQ ID NO: 2996714 - RNA, 22 nt, Human
cucuacccaucuuaaaaacaac

SEQ ID NO: 2996715 - RNA, 16 nt, Human
cuccuucacagauggg

SEQ ID NO: 2996716 - RNA, 17 nt, Human
cuccuucacagaugggu

SEQ ID NO: 2996717 - RNA, 14 nt, Human
cuccugugugugcg

SEQ ID NO: 2996718 - RNA, 20 nt, Human
cuccugugugugcgccuaca

SEQ ID NO: 2996719 - RNA, 19 nt, Human
cuccuucacagaugggugc

SEQ ID NO: 2996720 - RNA, 13 nt, Human
cucuacaaaaagc

SEQ ID NO: 2996721 - RNA, 16 nt, Human
cucuacagaggccaug

SEQ ID NO: 2996722 - RNA, 14 nt, Human
cucuacagaggcca

SEQ ID NO: 2996723 - RNA, 19 nt, Human
cucuacagaggccaugggc

SEQ ID NO: 2996724 - RNA, 13 nt, Human
cucuacagaggcc

SEQ ID NO: 2996725 - RNA, 22 nt, Human
cgccagcucaccccaucauccc

SEQ ID NO: 2996726 - RNA, 22 nt, Human
cgccagauucuuuccugaggcu

SEQ ID NO: 2996727 - RNA, 17 nt, Human
ccucugcccacucccug

SEQ ID NO: 2996728 - RNA, 19 nt, Human
ccucugcccacucccugca

SEQ ID NO: 2996729 - RNA, 20 nt, Human
ccucugcccacucccugcaa

SEQ ID NO: 2996730 - RNA, 23 nt, Human
cgccaggggaaaaucagccugcu

SEQ ID NO: 2996731 - RNA, 14 nt, Human
cgccaucccagccc

SEQ ID NO: 2996732 - RNA, 16 nt, Human
cgccaucccagcccca

SEQ ID NO: 2996733 - RNA, 22 nt, Human
cgcccaggcuuagucacugaga

SEQ ID NO: 2996734 - RNA, 18 nt, Human
cgcucucuggccuucggc

SEQ ID NO: 2996735 - RNA, 22 nt, Human
cgcugucagccauuccuguucc

SEQ ID NO: 2996736 - RNA, 16 nt, Human
cgcugugcugcccugc

SEQ ID NO: 2996737 - RNA, 17 nt, Human
cgcugugcugcccugcc

SEQ ID NO: 2996738 - RNA, 15 nt, Human
cgcugugcugcccug

SEQ ID NO: 2996739 - RNA, 18 nt, Human
cgcugugcugcccugccc

SEQ ID NO: 2996740 - RNA, 20 nt, Human
cggaaaacaugcuacacacu

SEQ ID NO: 2996741 - RNA, 15 nt, Human
cggaaaacaugcuac

SEQ ID NO: 2996742 - RNA, 15 nt, Human
cgcucucuggccuuc

SEQ ID NO: 2996743 - RNA, 14 nt, Human
cgcucucuggccuu

SEQ ID NO: 2996744 - RNA, 16 nt, Human
cgcuacccgggaaggg

SEQ ID NO: 2996745 - RNA, 22 nt, Human
cgcuaagagggagggagggcuc

SEQ ID NO: 2996746 - RNA, 12 nt, Human
cggccuccaucc

SEQ ID NO: 2996747 - RNA, 24 nt, Human
cggccaggccagagggagugacag

SEQ ID NO: 2996748 - RNA, 19 nt, Human
cggccccugcugguucagg

SEQ ID NO: 2996749 - RNA, 18 nt, Human
cggccccugcugguucag

SEQ ID NO: 2996750 - RNA, 13 nt, Human
cggccccugcugg

SEQ ID NO: 2996751 - RNA, 13 nt, Human
cggaagagccuug

SEQ ID NO: 2996752 - RNA, 20 nt, Human
cggaagaccugaagaguggu

SEQ ID NO: 2996753 - RNA, 11 nt, Human
cggccaccugc

SEQ ID NO: 2996754 - RNA, 15 nt, Human
cggccaccugcggug

SEQ ID NO: 2996755 - RNA, 16 nt, Human
cggccaccugcggugc

SEQ ID NO: 2996756 - RNA, 17 nt, Human
cggccaccugcggugcu

SEQ ID NO: 2996757 - RNA, 21 nt, Human
cggguuuuauuguuuaaaauc

SEQ ID NO: 2996758 - RNA, 20 nt, Human
cgguccacccaggagccccg

SEQ ID NO: 2996759 - RNA, 16 nt, Human
cgguccacccaggagc

SEQ ID NO: 2996760 - RNA, 15 nt, Human
cgguccacccaggag

SEQ ID NO: 2996761 - RNA, 14 nt, Human
cgguccacccagga

SEQ ID NO: 2996762 - RNA, 22 nt, Human
cggucggguuuuauuguuuaaa

SEQ ID NO: 2996763 - RNA, 17 nt, Human
cggugagcuacaaaugc

SEQ ID NO: 2996764 - RNA, 21 nt, Human
cggugagaggggaacagacug

SEQ ID NO: 2996765 - RNA, 20 nt, Human
cggugagaggggaacagacu

SEQ ID NO: 2996766 - RNA, 23 nt, Human
cggcuggccuggccccucagggu

SEQ ID NO: 2996767 - RNA, 22 nt, Human
cggcuggccuggccccucaggg

SEQ ID NO: 2996768 - RNA, 19 nt, Human
cggcuggccuggccccuca

SEQ ID NO: 2996769 - RNA, 22 nt, Human
cgggcacucagaagacacugau

SEQ ID NO: 2996770 - RNA, 14 nt, Human
cgggcacucagaag

SEQ ID NO: 2996771 - RNA, 22 nt, Human
cggggacagcuccuucuguccu

SEQ ID NO: 2996772 - RNA, 18 nt, Human
cgggaggucgaggcagga

SEQ ID NO: 2996773 - RNA, 20 nt, Human
cgggaggucgaggcaggagg

SEQ ID NO: 2996774 - RNA, 15 nt, Human
cgggggcagagaggg

SEQ ID NO: 2996775 - RNA, 22 nt, Human
cgggggcagugcucacccacac

SEQ ID NO: 2996776 - RNA, 14 nt, Human
cgggggcagugcuc

SEQ ID NO: 2996777 - RNA, 23 nt, Human
cggggacagcuccuucuguccua

SEQ ID NO: 2996778 - RNA, 18 nt, Human
cgugcacgcacacugucu

SEQ ID NO: 2996779 - RNA, 14 nt, Human
cgugcacacaccag

SEQ ID NO: 2996780 - RNA, 19 nt, Human
cgugcacacaccagagccc

SEQ ID NO: 2996781 - RNA, 18 nt, Human
cgugcacacaccagagcc

SEQ ID NO: 2996782 - RNA, 23 nt, Human
cgugcauaccacuuuuguucuug

SEQ ID NO: 2996783 - RNA, 21 nt, Human
cgugcaguggugcgaucuggg

SEQ ID NO: 2996784 - RNA, 16 nt, Human
cgugcacacaccagag

SEQ ID NO: 2996785 - RNA, 22 nt, Human
cgucugacaggcaaugcuggcu

SEQ ID NO: 2996786 - RNA, 21 nt, Human
cgucugacaggcaaugcuggc

SEQ ID NO: 2996787 - RNA, 20 nt, Human
cgucugacaggcaaugcugg

SEQ ID NO: 2996788 - RNA, 22 nt, Human
cggugcuaucucccccagcccc

SEQ ID NO: 2996789 - RNA, 20 nt, Human
cggugcuaucucccccagcc

SEQ ID NO: 2996790 - RNA, 21 nt, Human
cggugcuaucucccccagccc

SEQ ID NO: 2996791 - RNA, 18 nt, Human
cggugcuaucucccccag

SEQ ID NO: 2996792 - RNA, 16 nt, Human
cgucucauacucaccu

SEQ ID NO: 2996793 - RNA, 16 nt, Human
cgucuaccugaggggc

SEQ ID NO: 2996794 - RNA, 14 nt, Human
cgucuccagcugcu

SEQ ID NO: 2996795 - RNA, 13 nt, Human
cuaaaauguucua

SEQ ID NO: 2996796 - RNA, 22 nt, Human
cuaaaaaugcaaaaaaaauuag

SEQ ID NO: 2996797 - RNA, 17 nt, Human
cuaaaacaacagaugua

SEQ ID NO: 2996798 - RNA, 18 nt, Human
cuaaauggaaccacucua

SEQ ID NO: 2996799 - RNA, 17 nt, Human
cuaaauggaaccacucu

SEQ ID NO: 2996800 - RNA, 16 nt, Human
cuaaauggaaccacuc

SEQ ID NO: 2996801 - RNA, 20 nt, Human
cuaaaucuccaaaauaaaac

SEQ ID NO: 2996802 - RNA, 15 nt, Human
cuaaauggaaccacu

SEQ ID NO: 2996803 - RNA, 15 nt, Human
cuaacauggaaguac

SEQ ID NO: 2996804 - RNA, 17 nt, Human
cuaacauggaaguacua

SEQ ID NO: 2996805 - RNA, 23 nt, Human
cuaaauugacacuuaaaaauggu

SEQ ID NO: 2996806 - RNA, 16 nt, Human
cuaaauguugaaagau

SEQ ID NO: 2996807 - RNA, 18 nt, Human
cuacacaccuaacuuaug

SEQ ID NO: 2996808 - RNA, 15 nt, Human
cuacacacugcaugu

SEQ ID NO: 2996809 - RNA, 13 nt, Human
cuacacacugcau

SEQ ID NO: 2996810 - RNA, 18 nt, Human
cuacacugugcugagucu

SEQ ID NO: 2996811 - RNA, 17 nt, Human
cuacacuccagugagac

SEQ ID NO: 2996812 - RNA, 16 nt, Human
cuacacuccagugaga

SEQ ID NO: 2996813 - RNA, 15 nt, Human
cuacagaggccaugg

SEQ ID NO: 2996814 - RNA, 22 nt, Human
cuacccacccuccuuucaccac

SEQ ID NO: 2996815 - RNA, 13 nt, Human
cuacccacccucc

SEQ ID NO: 2996816 - RNA, 17 nt, Human
cuacccacccuccuuuc

SEQ ID NO: 2996817 - RNA, 19 nt, Human
cuacccagcgagcccuggu

SEQ ID NO: 2996818 - RNA, 20 nt, Human
cuacccagcgagcccuggug

SEQ ID NO: 2996819 - RNA, 16 nt, Human
cuaauguacugcauau

SEQ ID NO: 2996820 - RNA, 14 nt, Human
cuaauguacugcau

SEQ ID NO: 2996821 - RNA, 21 nt, Human
cuaauaaaauuuaaaagucuu

SEQ ID NO: 2996822 - RNA, 16 nt, Human
cuaaggugugcucuga

SEQ ID NO: 2996823 - RNA, 20 nt, Human
cuaauaaaauuuaaaagucu

SEQ ID NO: 2996824 - RNA, 18 nt, Human
cuaauauguaacaagcca

SEQ ID NO: 2996825 - RNA, 18 nt, Human
cuaagcaaaaugugauau

SEQ ID NO: 2996826 - RNA, 15 nt, Human
cuaagcaaaauguga

SEQ ID NO: 2996827 - RNA, 14 nt, Human
cuaagcaaaaugug

SEQ ID NO: 2996828 - RNA, 17 nt, Human
cuaaccagcagaaaugc

SEQ ID NO: 2996829 - RNA, 17 nt, Human
cuaaccacgcuggaccu

SEQ ID NO: 2996830 - RNA, 16 nt, Human
cuaaccagcagaaaug

SEQ ID NO: 2996831 - RNA, 21 nt, Human
cuaagcuauucaguaauaacu

SEQ ID NO: 2996832 - RNA, 19 nt, Human
cuaagcuauucaguaauaa

SEQ ID NO: 2996833 - RNA, 15 nt, Human
cuaaggugugcucug

SEQ ID NO: 2996834 - RNA, 17 nt, Human
cuagcacuuugggaggc

SEQ ID NO: 2996835 - RNA, 17 nt, Human
cuagagugaacuugggc

SEQ ID NO: 2996836 - RNA, 21 nt, Human
cuagagugaacuugggccacu

SEQ ID NO: 2996837 - RNA, 20 nt, Human
cuagacgagcaggcuucuuc

SEQ ID NO: 2996838 - RNA, 21 nt, Human
cuagacgagcaggcuucuucc

SEQ ID NO: 2996839 - RNA, 19 nt, Human
cuacuugggaggcugagau

SEQ ID NO: 2996840 - RNA, 18 nt, Human
cuacuugggaggcugaga

SEQ ID NO: 2996841 - RNA, 15 nt, Human
cuacuugggaggcug

SEQ ID NO: 2996842 - RNA, 22 nt, Human
cuacuuauuguagcauccugga

SEQ ID NO: 2996843 - RNA, 14 nt, Human
cuacccgggaaggg

SEQ ID NO: 2996844 - RNA, 15 nt, Human
cuacccgggaagggg

SEQ ID NO: 2996845 - RNA, 20 nt, Human
cuacccgggaagggggcugg

SEQ ID NO: 2996846 - RNA, 21 nt, Human
cuacccgggaagggggcuggg

SEQ ID NO: 2996847 - RNA, 21 nt, Human
cuacucugugucagguggggc

SEQ ID NO: 2996848 - RNA, 16 nt, Human
cuacucugugucaggu

SEQ ID NO: 2996849 - RNA, 13 nt, Human
cuacucuguguca

SEQ ID NO: 2996850 - RNA, 16 nt, Human
cuacuguaauuuguga

SEQ ID NO: 2996851 - RNA, 17 nt, Human
cuacuguaauuugugau

SEQ ID NO: 2996852 - RNA, 14 nt, Human
cuacugaggugcua

SEQ ID NO: 2996853 - RNA, 17 nt, Human
cuaguaucaaaagaaag

SEQ ID NO: 2996854 - RNA, 15 nt, Human
cuaguaucaaaagaa

SEQ ID NO: 2996855 - RNA, 23 nt, Human
cuaguaucaaaagaaagaaaauc

SEQ ID NO: 2996856 - RNA, 20 nt, Human
cuaguauuucuaugaaauau

SEQ ID NO: 2996857 - RNA, 19 nt, Human
cuaguauuucuaugaaaua

SEQ ID NO: 2996858 - RNA, 22 nt, Human
cuaguauuucuaugaaauauua

SEQ ID NO: 2996859 - RNA, 21 nt, Human
cuaggcauuugcugaauacag

SEQ ID NO: 2996860 - RNA, 21 nt, Human
cuagugugguguuuccuggca

SEQ ID NO: 2996861 - RNA, 22 nt, Human
cuagugugguguuuccuggcac

SEQ ID NO: 2996862 - RNA, 23 nt, Human
cuagugugguguuuccuggcacu

SEQ ID NO: 2996863 - RNA, 19 nt, Human
cuagugugguguuuccugg

SEQ ID NO: 2996864 - RNA, 21 nt, Human
cuaggaagacuuuggaaagag

SEQ ID NO: 2996865 - RNA, 13 nt, Human
cuaggaacacucc

SEQ ID NO: 2996866 - RNA, 15 nt, Human
cuaggaacacuccuu

SEQ ID NO: 2996867 - RNA, 22 nt, Human
cuaggaaauauuuauuuuaaua

SEQ ID NO: 2996868 - RNA, 17 nt, Human
cuaggaggucucuaaga

SEQ ID NO: 2996869 - RNA, 14 nt, Human
cuaggagguaauga

SEQ ID NO: 2996870 - RNA, 22 nt, Human
cuaggacugaauuaugaaacuu

SEQ ID NO: 2996871 - RNA, 23 nt, Human
cuaggacccgucuccagcugcug

SEQ ID NO: 2996872 - RNA, 22 nt, Human
cuaggacccgucuccagcugcu

SEQ ID NO: 2996873 - RNA, 22 nt, Human
cuaggaccccuccaugugggcu

SEQ ID NO: 2996874 - RNA, 21 nt, Human
cuaggacccgucuccagcugc

SEQ ID NO: 2996875 - RNA, 20 nt, Human
cuaggacccgucuccagcug

SEQ ID NO: 2996876 - RNA, 23 nt, Human
cuauauuguuuucaguguacaug

SEQ ID NO: 2996877 - RNA, 20 nt, Human
cuauauuuuuuguuaaauga

SEQ ID NO: 2996878 - RNA, 22 nt, Human
cuauauuguuuucaguguacau

SEQ ID NO: 2996879 - RNA, 19 nt, Human
cuauauuguuugcuaagca

SEQ ID NO: 2996880 - RNA, 18 nt, Human
cuauauuguuugcuaagc

SEQ ID NO: 2996881 - RNA, 22 nt, Human
cuaguguuuucaauuuuaaaca

SEQ ID NO: 2996882 - RNA, 18 nt, Human
cuaguguuuucaauuuua

SEQ ID NO: 2996883 - RNA, 13 nt, Human
cuaugaaauauua

SEQ ID NO: 2996884 - RNA, 14 nt, Human
cuaugacacaugca

SEQ ID NO: 2996885 - RNA, 20 nt, Human
cuaucaaguauuauaccuuu

SEQ ID NO: 2996886 - RNA, 22 nt, Human
cuauauuuuuuguuaaaugauu

SEQ ID NO: 2996887 - RNA, 12 nt, Human
cuaugcauuuga

SEQ ID NO: 2996888 - RNA, 11 nt, Human
cuaugcauuug

SEQ ID NO: 2996889 - RNA, 17 nt, Human
cucaccccuugccauaa

SEQ ID NO: 2996890 - RNA, 17 nt, Human
cucacuauguugcccag

SEQ ID NO: 2996891 - RNA, 16 nt, Human
cucacuauguugccca

SEQ ID NO: 2996892 - RNA, 12 nt, Human
cucaccccagcc

SEQ ID NO: 2996893 - RNA, 13 nt, Human
cucaccccagccc

SEQ ID NO: 2996894 - RNA, 14 nt, Human
cucaccccagcccc

SEQ ID NO: 2996895 - RNA, 19 nt, Human
cucaccagccccagugccc

SEQ ID NO: 2996896 - RNA, 21 nt, Human
cucaccagccccagugcccac

SEQ ID NO: 2996897 - RNA, 20 nt, Human
cucaccagccccagugccca

SEQ ID NO: 2996898 - RNA, 20 nt, Human
cucaagugauucuccugccu

SEQ ID NO: 2996899 - RNA, 19 nt, Human
cucaagugauucuccugcc

SEQ ID NO: 2996900 - RNA, 18 nt, Human
cucaagugauucuccugc

SEQ ID NO: 2996901 - RNA, 23 nt, Human
cucacaguccuuaccagcagagc

SEQ ID NO: 2996902 - RNA, 19 nt, Human
cucaacucuccuccagagu

SEQ ID NO: 2996903 - RNA, 15 nt, Human
cucaagagcaaagua

SEQ ID NO: 2996904 - RNA, 20 nt, Human
cucaacucuccuccagaguc

SEQ ID NO: 2996905 - RNA, 21 nt, Human
cucaacucuccuccagaguca

SEQ ID NO: 2996906 - RNA, 14 nt, Human
cuaugcauuugaaa

SEQ ID NO: 2996907 - RNA, 14 nt, Human
cccucaugcugcca

SEQ ID NO: 2996908 - RNA, 17 nt, Human
cccucaugcugccaaua

SEQ ID NO: 2996909 - RNA, 22 nt, Human
cccucauccucauacccacccc

SEQ ID NO: 2996910 - RNA, 21 nt, Human
cccuccaagaccuucuccuuc

SEQ ID NO: 2996911 - RNA, 17 nt, Human
cccucauccucauaccc

SEQ ID NO: 2996912 - RNA, 20 nt, Human
cccucauccucauacccacc

SEQ ID NO: 2996913 - RNA, 22 nt, Human
cccucaucaccaacgucugugc

SEQ ID NO: 2996914 - RNA, 20 nt, Human
cccucagucuggcccuuccu

SEQ ID NO: 2996915 - RNA, 21 nt, Human
cccucagggucccugguggca

SEQ ID NO: 2996916 - RNA, 13 nt, Human
cccucccucuuuc

SEQ ID NO: 2996917 - RNA, 20 nt, Human
cccucccuccaccucccugc

SEQ ID NO: 2996918 - RNA, 12 nt, Human
cccucccuccac

SEQ ID NO: 2996919 - RNA, 13 nt, Human
cccucccuccacc

SEQ ID NO: 2996920 - RNA, 17 nt, Human
cccuccaugugggcuag

SEQ ID NO: 2996921 - RNA, 21 nt, Human
cccuccagagccccacagccc

SEQ ID NO: 2996922 - RNA, 19 nt, Human
cccuccagagccccacagc

SEQ ID NO: 2996923 - RNA, 18 nt, Human
cccuccagagccccacag

SEQ ID NO: 2996924 - RNA, 16 nt, Human
cccggcaggguccuag

SEQ ID NO: 2996925 - RNA, 17 nt, Human
cccuaaaguguauuuuu

SEQ ID NO: 2996926 - RNA, 22 nt, Human
cccuaaaguguauuuuuuuacu

SEQ ID NO: 2996927 - RNA, 16 nt, Human
cccucagggucccugg

SEQ ID NO: 2996928 - RNA, 17 nt, Human
cccucagggucccuggu

SEQ ID NO: 2996929 - RNA, 18 nt, Human
cccucagggucccuggug

SEQ ID NO: 2996930 - RNA, 19 nt, Human
cccucagggucccuggugg

SEQ ID NO: 2996931 - RNA, 15 nt, Human
cccucagggucccug

SEQ ID NO: 2996932 - RNA, 22 nt, Human
ccccaggugguuauggagaggg

SEQ ID NO: 2996933 - RNA, 14 nt, Human
ccccaggugccagu

SEQ ID NO: 2996934 - RNA, 12 nt, Human
ccccuggcagcc

SEQ ID NO: 2996935 - RNA, 14 nt, Human
ccccuggcagcccc

SEQ ID NO: 2996936 - RNA, 15 nt, Human
ccccuggcagccccu

SEQ ID NO: 2996937 - RNA, 12 nt, Human
ccccaggaggcc

SEQ ID NO: 2996938 - RNA, 16 nt, Human
ccccagccccauccca

SEQ ID NO: 2996939 - RNA, 12 nt, Human
ccccacagcccc

SEQ ID NO: 2996940 - RNA, 15 nt, Human
ccccagccccauccu

SEQ ID NO: 2996941 - RNA, 13 nt, Human
ccccaccagugcc

SEQ ID NO: 2996942 - RNA, 14 nt, Human
ccccaccagugccu

SEQ ID NO: 2996943 - RNA, 13 nt, Human
ccccagccugcua

SEQ ID NO: 2996944 - RNA, 15 nt, Human
cccgaggccuucucu

SEQ ID NO: 2996945 - RNA, 20 nt, Human
cccgaggccuucucugaagg

SEQ ID NO: 2996946 - RNA, 22 nt, Human
cccgauggaggacuccaggcag

SEQ ID NO: 2996947 - RNA, 23 nt, Human
cccgauggaggacuccaggcagc

SEQ ID NO: 2996948 - RNA, 22 nt, Human
cccgcuaagagggagggagggc

SEQ ID NO: 2996949 - RNA, 20 nt, Human
ccccuguucuggcagaguug

SEQ ID NO: 2996950 - RNA, 22 nt, Human
ccccuguccccgcacugggcuu

SEQ ID NO: 2996951 - RNA, 14 nt, Human
cccugguggcagcu

SEQ ID NO: 2996952 - RNA, 22 nt, Human
cccugcaaccugauugugucuc

SEQ ID NO: 2996953 - RNA, 16 nt, Human
cccugcaaccugauug

SEQ ID NO: 2996954 - RNA, 15 nt, Human
cccugcaauaaaaug

SEQ ID NO: 2996955 - RNA, 14 nt, Human
cccugcaauaaaau

SEQ ID NO: 2996956 - RNA, 18 nt, Human
cccugcagagggcacaga

SEQ ID NO: 2996957 - RNA, 12 nt, Human
cccugcagaggg

SEQ ID NO: 2996958 - RNA, 22 nt, Human
cccugcacuugcagacucuaca

SEQ ID NO: 2996959 - RNA, 21 nt, Human
cccugauuuaauaugcaaagu

SEQ ID NO: 2996960 - RNA, 14 nt, Human
cccugccuccuuug

SEQ ID NO: 2996961 - RNA, 16 nt, Human
cccugccuccuuugug

SEQ ID NO: 2996962 - RNA, 23 nt, Human
cccugccuccuuugugaggaagc

SEQ ID NO: 2996963 - RNA, 18 nt, Human
cccugccacccuggggag

SEQ ID NO: 2996964 - RNA, 17 nt, Human
cccugccacccugggga

SEQ ID NO: 2996965 - RNA, 15 nt, Human
cccugccacccuggg

SEQ ID NO: 2996966 - RNA, 14 nt, Human
cccugccacccugg

SEQ ID NO: 2996967 - RNA, 12 nt, Human
cccugccacccu

SEQ ID NO: 2996968 - RNA, 22 nt, Human
cccugguggcagugggagcugc

SEQ ID NO: 2996969 - RNA, 13 nt, Human
cccugcugguuca

SEQ ID NO: 2996970 - RNA, 20 nt, Human
cccugcugguucaggguugg

SEQ ID NO: 2996971 - RNA, 19 nt, Human
cccugcugguucaggguug

SEQ ID NO: 2996972 - RNA, 16 nt, Human
ccucccccuggcacug

SEQ ID NO: 2996973 - RNA, 15 nt, Human
ccucccaacucaccc

SEQ ID NO: 2996974 - RNA, 13 nt, Human
ccuccccuccucu

SEQ ID NO: 2996975 - RNA, 12 nt, Human
ccuccccuccuc

SEQ ID NO: 2996976 - RNA, 18 nt, Human
ccucccgaauagcuggga

SEQ ID NO: 2996977 - RNA, 20 nt, Human
ccucccgaauagcugggacu

SEQ ID NO: 2996978 - RNA, 19 nt, Human
ccucccgaauagcugggac

SEQ ID NO: 2996979 - RNA, 21 nt, Human
ccucccgaauagcugggacua

SEQ ID NO: 2996980 - RNA, 18 nt, Human
ccucccgaguagcuggga

SEQ ID NO: 2996981 - RNA, 17 nt, Human
ccucccgaguagcuggg

SEQ ID NO: 2996982 - RNA, 12 nt, Human
ccuccuccagcc

SEQ ID NO: 2996983 - RNA, 11 nt, Human
ccuccucagau

SEQ ID NO: 2996984 - RNA, 13 nt, Human
ccucccucuuucc

SEQ ID NO: 2996985 - RNA, 13 nt, Human
ccuccauccugag

SEQ ID NO: 2996986 - RNA, 12 nt, Human
ccuccauccuga

SEQ ID NO: 2996987 - RNA, 14 nt, Human
ccucccaacucacc

SEQ ID NO: 2996988 - RNA, 17 nt, Human
ccucccaaagugcuggg

SEQ ID NO: 2996989 - RNA, 15 nt, Human
ccuccaugugggcua

SEQ ID NO: 2996990 - RNA, 12 nt, Human
ccuccauguggg

SEQ ID NO: 2996991 - RNA, 17 nt, Human
ccuccaggugcacaagc

SEQ ID NO: 2996992 - RNA, 11 nt, Human
ccuccaggugc

SEQ ID NO: 2996993 - RNA, 12 nt, Human
ccuccaggugca

SEQ ID NO: 2996994 - RNA, 17 nt, Human
ccucaggugagaagcag

SEQ ID NO: 2996995 - RNA, 18 nt, Human
ccucaggugagaagcaga

SEQ ID NO: 2996996 - RNA, 20 nt, Human
ccucaggugagaagcagagg

SEQ ID NO: 2996997 - RNA, 14 nt, Human
ccucuccuccacau

SEQ ID NO: 2996998 - RNA, 13 nt, Human
ccucugacacaca

SEQ ID NO: 2996999 - RNA, 20 nt, Human
ccucugacacacagcucugu

SEQ ID NO: 2997000 - RNA, 19 nt, Human
ccucugacacacagcucug

SEQ ID NO: 2997001 - RNA, 14 nt, Human
ccucugacacacag

SEQ ID NO: 2997002 - RNA, 21 nt, Human
ccucugacacacagcucuguc

SEQ ID NO: 2997003 - RNA, 19 nt, Human
ccucugcagcaauaaagca

SEQ ID NO: 2997004 - RNA, 13 nt, Human
ccucugcccacuc

SEQ ID NO: 2997005 - RNA, 16 nt, Human
ccucugcccacucccu

SEQ ID NO: 2997006 - RNA, 18 nt, Human
ccucugcagcaauaaagc

SEQ ID NO: 2997007 - RNA, 14 nt, Human
ccucugcagcaaua

SEQ ID NO: 2997008 - RNA, 23 nt, Human
ccucugcacuccccugcugggug

SEQ ID NO: 2997009 - RNA, 18 nt, Human
ccucugcacuccccugcu

SEQ ID NO: 2997010 - RNA, 16 nt, Human
ccucugcacuccccug

SEQ ID NO: 2997011 - RNA, 17 nt, Human
ccucugcacuccccugc

SEQ ID NO: 2997012 - RNA, 15 nt, Human
ccucugcacuccccu

SEQ ID NO: 2997013 - RNA, 20 nt, Human
ccucuccccagcaagugaga

SEQ ID NO: 2997014 - RNA, 13 nt, Human
ccucucccuugga

SEQ ID NO: 2997015 - RNA, 22 nt, Human
ccucucccuuggauuguccccg

SEQ ID NO: 2997016 - RNA, 14 nt, Human
ccucucccugcugc

SEQ ID NO: 2997017 - RNA, 19 nt, Human
ccucucccugcugcuccua

SEQ ID NO: 2997018 - RNA, 17 nt, Human
ccucucccugcugcucc

SEQ ID NO: 2997019 - RNA, 15 nt, Human
ccucucccugcugcu

SEQ ID NO: 2997020 - RNA, 23 nt, Human
ccucucccugcugcuccuaggac

SEQ ID NO: 2997021 - RNA, 15 nt, Human
ccucuccccagcaag

SEQ ID NO: 2997022 - RNA, 21 nt, Human
ccuccuccagccgccaugcuc

SEQ ID NO: 2997023 - RNA, 18 nt, Human
ccucgguguggagaagcg

SEQ ID NO: 2997024 - RNA, 20 nt, Human
ccucagaugcacaugagcug

SEQ ID NO: 2997025 - RNA, 16 nt, Human
ccucagaucuucugug

SEQ ID NO: 2997026 - RNA, 16 nt, Human
ccucagggucccuggu

SEQ ID NO: 2997027 - RNA, 17 nt, Human
ccucagggucccuggug

SEQ ID NO: 2997028 - RNA, 20 nt, Human
ccucagggucccugguggca

SEQ ID NO: 2997029 - RNA, 23 nt, Human
ccucaggccugggggcugggcag

SEQ ID NO: 2997030 - RNA, 17 nt, Human
ccuauuagagaagagau

SEQ ID NO: 2997031 - RNA, 16 nt, Human
ccuauuagagaagaga

SEQ ID NO: 2997032 - RNA, 24 nt, Human
ccucacaguccuuaccagcagagc

SEQ ID NO: 2997033 - RNA, 23 nt, Human
ccucacaguccuuaccagcagag

SEQ ID NO: 2997034 - RNA, 15 nt, Human
ccuaggugacagagu

SEQ ID NO: 2997035 - RNA, 15 nt, Human
cccuuggacauuuua

SEQ ID NO: 2997036 - RNA, 14 nt, Human
cccuuggacauuuu

SEQ ID NO: 2997037 - RNA, 17 nt, Human
cccuuggauuguccccg

SEQ ID NO: 2997038 - RNA, 17 nt, Human
cccuucuuuccacagaa

SEQ ID NO: 2997039 - RNA, 22 nt, Human
cccuugguuaggcauuguggga

SEQ ID NO: 2997040 - RNA, 23 nt, Human
cccuugguuaggcauugugggaa

SEQ ID NO: 2997041 - RNA, 22 nt, Human
cccuugucggccccaccagugc

SEQ ID NO: 2997042 - RNA, 19 nt, Human
cccuugucggccccaccag

SEQ ID NO: 2997043 - RNA, 22 nt, Human
cccuuguggucccaccccacac

SEQ ID NO: 2997044 - RNA, 20 nt, Human
cccuuguggucccaccccac

SEQ ID NO: 2997045 - RNA, 13 nt, Human
cccuucccaccuc

SEQ ID NO: 2997046 - RNA, 12 nt, Human
cccuucccaccu

SEQ ID NO: 2997047 - RNA, 17 nt, Human
ccgggaagggggcuggg

SEQ ID NO: 2997048 - RNA, 12 nt, Human
ccguuauuaaaa

SEQ ID NO: 2997049 - RNA, 13 nt, Human
ccuaaacauauga

SEQ ID NO: 2997050 - RNA, 15 nt, Human
ccuaaaauucagugg

SEQ ID NO: 2997051 - RNA, 16 nt, Human
ccuaaaauucagugga

SEQ ID NO: 2997052 - RNA, 19 nt, Human
ccuacagcuugaccgugag

SEQ ID NO: 2997053 - RNA, 22 nt, Human
ccuacaguugaaaaacagcuga

SEQ ID NO: 2997054 - RNA, 19 nt, Human
ccuacuguaauuugugaua

SEQ ID NO: 2997055 - RNA, 18 nt, Human
ccuacccacccuccuuuc

SEQ ID NO: 2997056 - RNA, 13 nt, Human
ccuacccacccuc

SEQ ID NO: 2997057 - RNA, 13 nt, Human
ccuaggugacaga

SEQ ID NO: 2997058 - RNA, 21 nt, Human
ccuagaaauuccccacccuga

SEQ ID NO: 2997059 - RNA, 16 nt, Human
cccaguguuuuaggag

SEQ ID NO: 2997060 - RNA, 17 nt, Human
cccaguguuuuaggagc

SEQ ID NO: 2997061 - RNA, 14 nt, Human
cccaguuagcucuc

SEQ ID NO: 2997062 - RNA, 20 nt, Human
cccagugguuccuaauccuc

SEQ ID NO: 2997063 - RNA, 19 nt, Human
cccagucuggaaugcagug

SEQ ID NO: 2997064 - RNA, 18 nt, Human
cccagucuggaaugcagu

SEQ ID NO: 2997065 - RNA, 10 nt, Human
cccagucugg

SEQ ID NO: 2997066 - RNA, 21 nt, Human
cccagugcccacaggaucagu

SEQ ID NO: 2997067 - RNA, 15 nt, Human
cccagugccgagaag

SEQ ID NO: 2997068 - RNA, 13 nt, Human
cccagguuucuau

SEQ ID NO: 2997069 - RNA, 15 nt, Human
cccaguccugcccgc

SEQ ID NO: 2997070 - RNA, 15 nt, Human
cccaggaggccagcc

SEQ ID NO: 2997071 - RNA, 16 nt, Human
cccaggaggccagccu

SEQ ID NO: 2997072 - RNA, 15 nt, Human
cccaggcauucccca

SEQ ID NO: 2997073 - RNA, 23 nt, Human
cccaggcaggucuugaacuccug

SEQ ID NO: 2997074 - RNA, 17 nt, Human
cccaggcauuccccagg

SEQ ID NO: 2997075 - RNA, 14 nt, Human
cccaggguggccac

SEQ ID NO: 2997076 - RNA, 13 nt, Human
cccaggguggcca

SEQ ID NO: 2997077 - RNA, 19 nt, Human
cccaggguggccacaccuc

SEQ ID NO: 2997078 - RNA, 15 nt, Human
cccaggguggccaca

SEQ ID NO: 2997079 - RNA, 16 nt, Human
cccaugagccucagca

SEQ ID NO: 2997080 - RNA, 15 nt, Human
cccaugagccucagc

SEQ ID NO: 2997081 - RNA, 20 nt, Human
cccaugagccucagcauccu

SEQ ID NO: 2997082 - RNA, 12 nt, Human
cccaugcugccc

SEQ ID NO: 2997083 - RNA, 13 nt, Human
cccaugcugcccu

SEQ ID NO: 2997084 - RNA, 14 nt, Human
cccaugcugcccug

SEQ ID NO: 2997085 - RNA, 12 nt, Human
cccaucugugaa

SEQ ID NO: 2997086 - RNA, 18 nt, Human
cccaucucacacaugagc

SEQ ID NO: 2997087 - RNA, 13 nt, Human
cccaucucacaca

SEQ ID NO: 2997088 - RNA, 20 nt, Human
cccaucugugaaaggaaaga

SEQ ID NO: 2997089 - RNA, 20 nt, Human
cccauuaugcgcuguggcca

SEQ ID NO: 2997090 - RNA, 21 nt, Human
ccccaaauggaaaugggcaga

SEQ ID NO: 2997091 - RNA, 23 nt, Human
ccauggcacucuauguucuaaga

SEQ ID NO: 2997092 - RNA, 13 nt, Human
ccaugugccaggu

SEQ ID NO: 2997093 - RNA, 14 nt, Human
ccauguuggccagg

SEQ ID NO: 2997094 - RNA, 13 nt, Human
ccauguuggccag

SEQ ID NO: 2997095 - RNA, 13 nt, Human
ccaugcuccuggc

SEQ ID NO: 2997096 - RNA, 10 nt, Human
ccaugaaaga

SEQ ID NO: 2997097 - RNA, 16 nt, Human
ccaugcugcccuguga

SEQ ID NO: 2997098 - RNA, 17 nt, Human
ccaugcugcccugugag

SEQ ID NO: 2997099 - RNA, 15 nt, Human
ccaugcuccuggccc

SEQ ID NO: 2997100 - RNA, 18 nt, Human
ccaugcuccuggcccacu

SEQ ID NO: 2997101 - RNA, 15 nt, Human
ccaugcugcccugug

SEQ ID NO: 2997102 - RNA, 13 nt, Human
cccacgcccccac

SEQ ID NO: 2997103 - RNA, 14 nt, Human
cccacgcccccacu

SEQ ID NO: 2997104 - RNA, 15 nt, Human
cccacgcccccacug

SEQ ID NO: 2997105 - RNA, 19 nt, Human
cccaccuuggcugcaggga

SEQ ID NO: 2997106 - RNA, 17 nt, Human
cccaccuuggcugcagg

SEQ ID NO: 2997107 - RNA, 16 nt, Human
cccaccuuggcugcag

SEQ ID NO: 2997108 - RNA, 12 nt, Human
cccaccuggccu

SEQ ID NO: 2997109 - RNA, 15 nt, Human
cccaccuggccucug

SEQ ID NO: 2997110 - RNA, 15 nt, Human
ccauguuggccaggc

SEQ ID NO: 2997111 - RNA, 18 nt, Human
ccauguuggccaggcugg

SEQ ID NO: 2997112 - RNA, 21 nt, Human
ccauguuggccaggcuggucu

SEQ ID NO: 2997113 - RNA, 19 nt, Human
ccauguuggccaggcuggu

SEQ ID NO: 2997114 - RNA, 18 nt, Human
cccaggaggccagccuug

SEQ ID NO: 2997115 - RNA, 23 nt, Human
cccagauugcaacaggcugggcu

SEQ ID NO: 2997116 - RNA, 17 nt, Human
cccagccccaaugaaca

SEQ ID NO: 2997117 - RNA, 11 nt, Human
cccagccccau

SEQ ID NO: 2997118 - RNA, 12 nt, Human
cccagccccauc

SEQ ID NO: 2997119 - RNA, 13 nt, Human
cccagccccaaug

SEQ ID NO: 2997120 - RNA, 18 nt, Human
cccagccccauccucugu

SEQ ID NO: 2997121 - RNA, 19 nt, Human
cccagccccauccucugua

SEQ ID NO: 2997122 - RNA, 18 nt, Human
cccagccccuucugaccc

SEQ ID NO: 2997123 - RNA, 13 nt, Human
cccagccccaucc

SEQ ID NO: 2997124 - RNA, 14 nt, Human
cccagccccauccc

SEQ ID NO: 2997125 - RNA, 14 nt, Human
cccagccccauccu

SEQ ID NO: 2997126 - RNA, 15 nt, Human
cccagccccauccuc

SEQ ID NO: 2997127 - RNA, 13 nt, Human
cccagcucugguc

SEQ ID NO: 2997128 - RNA, 14 nt, Human
cccagcucuggucc

SEQ ID NO: 2997129 - RNA, 12 nt, Human
cccagcucuggu

SEQ ID NO: 2997130 - RNA, 15 nt, Human
cccagcucuggucca

SEQ ID NO: 2997131 - RNA, 16 nt, Human
cccagcucugguccau

SEQ ID NO: 2997132 - RNA, 18 nt, Human
cccagcucugguccauag

SEQ ID NO: 2997133 - RNA, 14 nt, Human
cccagcgagcccug

SEQ ID NO: 2997134 - RNA, 20 nt, Human
cccagcuacucgggaggcug

SEQ ID NO: 2997135 - RNA, 22 nt, Human
cccagcuacucgggaggcugag

SEQ ID NO: 2997136 - RNA, 14 nt, Human
cccaggaggccagc

SEQ ID NO: 2997137 - RNA, 14 nt, Human
cccaggagccccga

SEQ ID NO: 2997138 - RNA, 13 nt, Human
cccaggagccccg

SEQ ID NO: 2997139 - RNA, 17 nt, Human
ccagccuggaugccauc

SEQ ID NO: 2997140 - RNA, 13 nt, Human
ccagccuggaugc

SEQ ID NO: 2997141 - RNA, 15 nt, Human
ccagccuggaugcca

SEQ ID NO: 2997142 - RNA, 16 nt, Human
ccagcugcuugggcuu

SEQ ID NO: 2997143 - RNA, 18 nt, Human
ccagcugcuugggcuuca

SEQ ID NO: 2997144 - RNA, 13 nt, Human
ccagcugcuuggg

SEQ ID NO: 2997145 - RNA, 15 nt, Human
ccagcugcuugggcu

SEQ ID NO: 2997146 - RNA, 21 nt, Human
ccagcugugcucuggacaggc

SEQ ID NO: 2997147 - RNA, 20 nt, Human
ccagcugugcucuggacagg

SEQ ID NO: 2997148 - RNA, 18 nt, Human
ccagcugugcucuggaca

SEQ ID NO: 2997149 - RNA, 12 nt, Human
ccaggagcagcc

SEQ ID NO: 2997150 - RNA, 13 nt, Human
ccaggagcagcca

SEQ ID NO: 2997151 - RNA, 14 nt, Human
ccaggaagccagca

SEQ ID NO: 2997152 - RNA, 15 nt, Human
ccaggaagccagcag

SEQ ID NO: 2997153 - RNA, 17 nt, Human
ccaggaagccagcaggc

SEQ ID NO: 2997154 - RNA, 19 nt, Human
ccaggaagccagcaggcuc

SEQ ID NO: 2997155 - RNA, 23 nt, Human
ccagcugugcucuggacaggcau

SEQ ID NO: 2997156 - RNA, 22 nt, Human
ccagcugugcucuggacaggca

SEQ ID NO: 2997157 - RNA, 16 nt, Human
ccaggcccucugccca

SEQ ID NO: 2997158 - RNA, 17 nt, Human
ccaggcccucugcccac

SEQ ID NO: 2997159 - RNA, 18 nt, Human
ccaggcccucugcccacu

SEQ ID NO: 2997160 - RNA, 19 nt, Human
ccaggcccucugcccacuc

SEQ ID NO: 2997161 - RNA, 13 nt, Human
ccaggccuccuac

SEQ ID NO: 2997162 - RNA, 18 nt, Human
ccaggccuccuacagcuu

SEQ ID NO: 2997163 - RNA, 19 nt, Human
ccaggccuccuacagcuug

SEQ ID NO: 2997164 - RNA, 14 nt, Human
ccaggagcagccac

SEQ ID NO: 2997165 - RNA, 21 nt, Human
ccaggccagagggagugacag

SEQ ID NO: 2997166 - RNA, 14 nt, Human
ccaggccagaggga

SEQ ID NO: 2997167 - RNA, 23 nt, Human
ccaggccccugccacccugggga

SEQ ID NO: 2997168 - RNA, 21 nt, Human
ccaggccccugccacccuggg

SEQ ID NO: 2997169 - RNA, 19 nt, Human
ccaggccccugccacccug

SEQ ID NO: 2997170 - RNA, 23 nt, Human
ccagggacagaggggguggccuc

SEQ ID NO: 2997171 - RNA, 14 nt, Human
ccagugccugggug

SEQ ID NO: 2997172 - RNA, 13 nt, Human
ccagugccugggu

SEQ ID NO: 2997173 - RNA, 21 nt, Human
ccagugccucucccugcugcu

SEQ ID NO: 2997174 - RNA, 19 nt, Human
ccagugccucucccugcug

SEQ ID NO: 2997175 - RNA, 16 nt, Human
ccagugccucucccug

SEQ ID NO: 2997176 - RNA, 14 nt, Human
ccagugccucuccc

SEQ ID NO: 2997177 - RNA, 12 nt, Human
ccaucacccgcu

SEQ ID NO: 2997178 - RNA, 18 nt, Human
ccauauucuguuggccag

SEQ ID NO: 2997179 - RNA, 15 nt, Human
ccauauucuguuggc

SEQ ID NO: 2997180 - RNA, 19 nt, Human
ccauauuaccacagacaua

SEQ ID NO: 2997181 - RNA, 23 nt, Human
ccauagagagcaagacgcugugc

SEQ ID NO: 2997182 - RNA, 21 nt, Human
ccauccucuguacagagccca

SEQ ID NO: 2997183 - RNA, 15 nt, Human
ccauccugaggcucc

SEQ ID NO: 2997184 - RNA, 22 nt, Human
ccauccuggcccagggcaucug

SEQ ID NO: 2997185 - RNA, 20 nt, Human
ccauccuggcccagggcauc

SEQ ID NO: 2997186 - RNA, 19 nt, Human
ccauccuggcccagggcau

SEQ ID NO: 2997187 - RNA, 18 nt, Human
ccauccuggcccagggca

SEQ ID NO: 2997188 - RNA, 17 nt, Human
ccauccuggcccagggc

SEQ ID NO: 2997189 - RNA, 16 nt, Human
ccaucaugucuggcua

SEQ ID NO: 2997190 - RNA, 14 nt, Human
ccaucaugucuggc

SEQ ID NO: 2997191 - RNA, 22 nt, Human
cauugacuauuuuuguuuuuau

SEQ ID NO: 2997192 - RNA, 13 nt, Human
cauugaccugagg

SEQ ID NO: 2997193 - RNA, 22 nt, Human
cauugaccugaggcccuucucu

SEQ ID NO: 2997194 - RNA, 14 nt, Human
cauugacagauuga

SEQ ID NO: 2997195 - RNA, 22 nt, Human
cauugaaaucuaggaaaauuau

SEQ ID NO: 2997196 - RNA, 19 nt, Human
cauugaaaucuuuuugcuu

SEQ ID NO: 2997197 - RNA, 16 nt, Human
cauuucucauguugaa

SEQ ID NO: 2997198 - RNA, 17 nt, Human
cauuucucauguugaaa

SEQ ID NO: 2997199 - RNA, 21 nt, Human
cauuucuuccacaagagccca

SEQ ID NO: 2997200 - RNA, 23 nt, Human
cauuucugcaucagcugcugaaa

SEQ ID NO: 2997201 - RNA, 19 nt, Human
cauuuaaagcuuauuaaaa

SEQ ID NO: 2997202 - RNA, 21 nt, Human
cauuuacuuuguguucaccuu

SEQ ID NO: 2997203 - RNA, 17 nt, Human
cauuuacuuuguguuca

SEQ ID NO: 2997204 - RNA, 12 nt, Human
cauuuccaagca

SEQ ID NO: 2997205 - RNA, 15 nt, Human
cauuuacuuaagacu

SEQ ID NO: 2997206 - RNA, 14 nt, Human
cauuuacuuaagac

SEQ ID NO: 2997207 - RNA, 13 nt, Human
cauuuacuuaaga

SEQ ID NO: 2997208 - RNA, 17 nt, Human
cauuuacuuaagacuua

SEQ ID NO: 2997209 - RNA, 16 nt, Human
cauuuacuuaagacuu

SEQ ID NO: 2997210 - RNA, 21 nt, Human
cauuuaaaagauacaguuacu

SEQ ID NO: 2997211 - RNA, 17 nt, Human
ccaaagaaauguaaggg

SEQ ID NO: 2997212 - RNA, 21 nt, Human
ccaaaauaaaacuuuuuaaaa

SEQ ID NO: 2997213 - RNA, 18 nt, Human
ccaaaauaaaacuuuuua

SEQ ID NO: 2997214 - RNA, 20 nt, Human
cauuuuuaguagagacaggg

SEQ ID NO: 2997215 - RNA, 14 nt, Human
cauuugcucaugga

SEQ ID NO: 2997216 - RNA, 15 nt, Human
cauuugcucauggaa

SEQ ID NO: 2997217 - RNA, 12 nt, Human
cauuuuaaacaa

SEQ ID NO: 2997218 - RNA, 16 nt, Human
cauuugcucauggaau

SEQ ID NO: 2997219 - RNA, 17 nt, Human
cauuuuaaacaaaauag

SEQ ID NO: 2997220 - RNA, 16 nt, Human
cauuuuaaacaaaaua

SEQ ID NO: 2997221 - RNA, 13 nt, Human
cauuuuaaacaaa

SEQ ID NO: 2997222 - RNA, 23 nt, Human
cauuuuaaacaaaauagaaaguu

SEQ ID NO: 2997223 - RNA, 22 nt, Human
cauuuuaaacaaaauagaaagu

SEQ ID NO: 2997224 - RNA, 21 nt, Human
cauuuuauuuuauuaugcaug

SEQ ID NO: 2997225 - RNA, 19 nt, Human
cauuuuauuuuauuaugca

SEQ ID NO: 2997226 - RNA, 20 nt, Human
cauuuuuaagugcugcauuu

SEQ ID NO: 2997227 - RNA, 15 nt, Human
cauuuuuaagugcug

SEQ ID NO: 2997228 - RNA, 18 nt, Human
cauuuuuaguagagacag

SEQ ID NO: 2997229 - RNA, 19 nt, Human
cauuuuuaguagagacagg

SEQ ID NO: 2997230 - RNA, 23 nt, Human
cauuuugggguacccacugcucu

SEQ ID NO: 2997231 - RNA, 18 nt, Human
cauuuugcuaaaugugaa

SEQ ID NO: 2997232 - RNA, 21 nt, Human
cauuuugcuaaaugugaauga

SEQ ID NO: 2997233 - RNA, 24 nt, Human
cauuuugcuaaaugugaaugauga

SEQ ID NO: 2997234 - RNA, 22 nt, Human
cauuuugggguacccacugcuc

SEQ ID NO: 2997235 - RNA, 21 nt, Human
cauuuugggguacccacugcu

SEQ ID NO: 2997236 - RNA, 20 nt, Human
cauuuugggguacccacugc

SEQ ID NO: 2997237 - RNA, 23 nt, Human
cauuucuuccacaagagcccagg

SEQ ID NO: 2997238 - RNA, 14 nt, Human
cauuugagcagggc

SEQ ID NO: 2997239 - RNA, 19 nt, Human
cauuugaggucuguucuuu

SEQ ID NO: 2997240 - RNA, 18 nt, Human
cauuugaggucuguucuu

SEQ ID NO: 2997241 - RNA, 17 nt, Human
cauuugaggucuguucu

SEQ ID NO: 2997242 - RNA, 20 nt, Human
ccaauuugcacauuaaauga

SEQ ID NO: 2997243 - RNA, 19 nt, Human
ccaauuugcacauuaaaug

SEQ ID NO: 2997244 - RNA, 16 nt, Human
ccacaagacccuugug

SEQ ID NO: 2997245 - RNA, 13 nt, Human
ccacaagagccca

SEQ ID NO: 2997246 - RNA, 22 nt, Human
ccacaagaaaugaaagcaggga

SEQ ID NO: 2997247 - RNA, 16 nt, Human
ccacaagaaaugaaag

SEQ ID NO: 2997248 - RNA, 18 nt, Human
ccacaaaggagagcuagc

SEQ ID NO: 2997249 - RNA, 20 nt, Human
ccaauauucauagcagcuua

SEQ ID NO: 2997250 - RNA, 23 nt, Human
ccaagugccaaagaagcagacca

SEQ ID NO: 2997251 - RNA, 19 nt, Human
ccaaggcugauuaaaccaa

SEQ ID NO: 2997252 - RNA, 14 nt, Human
ccaaggcuggggga

SEQ ID NO: 2997253 - RNA, 18 nt, Human
ccaaggugggaggauugc

SEQ ID NO: 2997254 - RNA, 18 nt, Human
ccaaggcuagaaccaccu

SEQ ID NO: 2997255 - RNA, 19 nt, Human
ccaaggccuuccccuggca

SEQ ID NO: 2997256 - RNA, 13 nt, Human
ccaaggccuuccc

SEQ ID NO: 2997257 - RNA, 12 nt, Human
ccaagcucccag

SEQ ID NO: 2997258 - RNA, 13 nt, Human
ccaagcucccagg

SEQ ID NO: 2997259 - RNA, 23 nt, Human
ccaagcagagguugggaggccau

SEQ ID NO: 2997260 - RNA, 14 nt, Human
ccaagcaggacaug

SEQ ID NO: 2997261 - RNA, 16 nt, Human
ccacaagagcccaggc

SEQ ID NO: 2997262 - RNA, 17 nt, Human
ccacaagagcccaggcc

SEQ ID NO: 2997263 - RNA, 18 nt, Human
ccacaagagcccaggccu

SEQ ID NO: 2997264 - RNA, 19 nt, Human
ccacaagagcccaggccuc

SEQ ID NO: 2997265 - RNA, 20 nt, Human
ccacaagagcccaggccucc

SEQ ID NO: 2997266 - RNA, 21 nt, Human
ccacaagagcccaggccuccu

SEQ ID NO: 2997267 - RNA, 20 nt, Human
ccacaaguuaaauaaaucau

SEQ ID NO: 2997268 - RNA, 15 nt, Human
ccacaaguuaaauaa

SEQ ID NO: 2997269 - RNA, 14 nt, Human
ccaaagaugcagcc

SEQ ID NO: 2997270 - RNA, 13 nt, Human
ccaaagaugcagc

SEQ ID NO: 2997271 - RNA, 12 nt, Human
ccaagacuccca

SEQ ID NO: 2997272 - RNA, 19 nt, Human
ccaagacucccaugaggga

SEQ ID NO: 2997273 - RNA, 15 nt, Human
ccaagacucccauga

SEQ ID NO: 2997274 - RNA, 14 nt, Human
ccaagacucccaug

SEQ ID NO: 2997275 - RNA, 13 nt, Human
ccaacccucauca

SEQ ID NO: 2997276 - RNA, 15 nt, Human
ccaacccucaucacc

SEQ ID NO: 2997277 - RNA, 15 nt, Human
ccaagaccuucuccu

SEQ ID NO: 2997278 - RNA, 14 nt, Human
ccaacacgagcagg

SEQ ID NO: 2997279 - RNA, 22 nt, Human
ccaaauucuuucaguggcuacc

SEQ ID NO: 2997280 - RNA, 15 nt, Human
ccaaauucuuucagu

SEQ ID NO: 2997281 - RNA, 16 nt, Human
ccaacaucaacaucuu

SEQ ID NO: 2997282 - RNA, 14 nt, Human
ccaacauacuccca

SEQ ID NO: 2997283 - RNA, 13 nt, Human
ccaacaucaacau

SEQ ID NO: 2997284 - RNA, 21 nt, Human
ccaacacgagcaggcuacugu

SEQ ID NO: 2997285 - RNA, 17 nt, Human
cauuaaagguacuuugc

SEQ ID NO: 2997286 - RNA, 18 nt, Human
cauuaaaugacucuuccc

SEQ ID NO: 2997287 - RNA, 14 nt, Human
cauuaaaugacucu

SEQ ID NO: 2997288 - RNA, 13 nt, Human
cauuaaaugacuc

SEQ ID NO: 2997289 - RNA, 15 nt, Human
cauguuuuguuuacg

SEQ ID NO: 2997290 - RNA, 21 nt, Human
cauuaaagccugaguuugcuu

SEQ ID NO: 2997291 - RNA, 18 nt, Human
cauguuuuucuucucccu

SEQ ID NO: 2997292 - RNA, 14 nt, Human
caugucuuuucuug

SEQ ID NO: 2997293 - RNA, 19 nt, Human
caugucuuuucuugcauga

SEQ ID NO: 2997294 - RNA, 21 nt, Human
caugucuuuucuugcaugagg

SEQ ID NO: 2997295 - RNA, 23 nt, Human
caugucuuuucuugcaugaggcu

SEQ ID NO: 2997296 - RNA, 21 nt, Human
cauguaauuaaguacuaugua

SEQ ID NO: 2997297 - RNA, 18 nt, Human
cauguaauuaaguacuau

SEQ ID NO: 2997298 - RNA, 16 nt, Human
cauggucggaaaacau

SEQ ID NO: 2997299 - RNA, 15 nt, Human
caugugcacaugcac

SEQ ID NO: 2997300 - RNA, 21 nt, Human
caugugccagguuuuuggucu

SEQ ID NO: 2997301 - RNA, 15 nt, Human
cauguuuaugagaaa

SEQ ID NO: 2997302 - RNA, 23 nt, Human
cauguuugauguaucugagcagg

SEQ ID NO: 2997303 - RNA, 15 nt, Human
cauguuugugauuga

SEQ ID NO: 2997304 - RNA, 17 nt, Human
caugccuaccaauauuu

SEQ ID NO: 2997305 - RNA, 14 nt, Human
caugccucucucag

SEQ ID NO: 2997306 - RNA, 15 nt, Human
caugccucucucagg

SEQ ID NO: 2997307 - RNA, 16 nt, Human
caugccucucucaggc

SEQ ID NO: 2997308 - RNA, 17 nt, Human
caugccucucucaggcc

SEQ ID NO: 2997309 - RNA, 18 nt, Human
caugccucucucaggcca

SEQ ID NO: 2997310 - RNA, 19 nt, Human
caugccucucucaggccaa

SEQ ID NO: 2997311 - RNA, 13 nt, Human
caugccuggaugg

SEQ ID NO: 2997312 - RNA, 22 nt, Human
caugggaaugaaugucagugug

SEQ ID NO: 2997313 - RNA, 17 nt, Human
caugggacagggaggac

SEQ ID NO: 2997314 - RNA, 15 nt, Human
caugggccuccugug

SEQ ID NO: 2997315 - RNA, 17 nt, Human
caugggccuccugugug

SEQ ID NO: 2997316 - RNA, 16 nt, Human
caugggccuccugugu

SEQ ID NO: 2997317 - RNA, 11 nt, Human
cauggacuuug

SEQ ID NO: 2997318 - RNA, 13 nt, Human
cauggacuuuguu

SEQ ID NO: 2997319 - RNA, 17 nt, Human
cauggagguuugaagau

SEQ ID NO: 2997320 - RNA, 16 nt, Human
cauggaguauauguca

SEQ ID NO: 2997321 - RNA, 18 nt, Human
caugggaaugaaugucag

SEQ ID NO: 2997322 - RNA, 17 nt, Human
caugcugucccuuacgu

SEQ ID NO: 2997323 - RNA, 20 nt, Human
caugcuguucaugaaagauu

SEQ ID NO: 2997324 - RNA, 22 nt, Human
caugcugucccuuacgugaguc

SEQ ID NO: 2997325 - RNA, 23 nt, Human
caugcugucuacacuaagagaga

SEQ ID NO: 2997326 - RNA, 17 nt, Human
caugcgggcuuccuccu

SEQ ID NO: 2997327 - RNA, 18 nt, Human
caugccuggauggggcug

SEQ ID NO: 2997328 - RNA, 21 nt, Human
caugccuggauggggcugcac

SEQ ID NO: 2997329 - RNA, 23 nt, Human
caugccuggauggggcugcaccg

SEQ ID NO: 2997330 - RNA, 18 nt, Human
cauggacaugaucuucuu

SEQ ID NO: 2997331 - RNA, 17 nt, Human
cauggacuucuggaugc

SEQ ID NO: 2997332 - RNA, 16 nt, Human
cauggaauaacaugua

SEQ ID NO: 2997333 - RNA, 20 nt, Human
cauggaaguacuauaauuua

SEQ ID NO: 2997334 - RNA, 22 nt, Human
cauggaaguacuauaauuuacc

SEQ ID NO: 2997335 - RNA, 13 nt, Human
caugccccugaac

SEQ ID NO: 2997336 - RNA, 20 nt, Human
caugccagggccaugucaga

SEQ ID NO: 2997337 - RNA, 19 nt, Human
caugccagcuuaucucagg

SEQ ID NO: 2997338 - RNA, 20 nt, Human
caugccagcuuaucucaggg

SEQ ID NO: 2997339 - RNA, 20 nt, Human
caugcauagagugugaugua

SEQ ID NO: 2997340 - RNA, 18 nt, Human
cauacuuuuuggguuuau

SEQ ID NO: 2997341 - RNA, 16 nt, Human
cauacuuuuuggguuu

SEQ ID NO: 2997342 - RNA, 12 nt, Human
cauacuuuuugg

SEQ ID NO: 2997343 - RNA, 23 nt, Human
cauagagagcaagacgcugugcu

SEQ ID NO: 2997344 - RNA, 19 nt, Human
cauagagagcaagacgcug

SEQ ID NO: 2997345 - RNA, 21 nt, Human
cauagagagcaagacgcugug

SEQ ID NO: 2997346 - RNA, 18 nt, Human
cauacuauuaaacaugcu

SEQ ID NO: 2997347 - RNA, 11 nt, Human
cauacucugcu

SEQ ID NO: 2997348 - RNA, 16 nt, Human
cauacucccaucugug

SEQ ID NO: 2997349 - RNA, 15 nt, Human
cauacucccaucugu

SEQ ID NO: 2997350 - RNA, 18 nt, Human
cauacucccaucugugaa

SEQ ID NO: 2997351 - RNA, 20 nt, Human
cauacucccaucugugaaag

SEQ ID NO: 2997352 - RNA, 20 nt, Human
cauauauaacaaugcuguau

SEQ ID NO: 2997353 - RNA, 21 nt, Human
cauauauuuuuuaaaauaagu

SEQ ID NO: 2997354 - RNA, 20 nt, Human
cauauauuuuuuaaaauaag

SEQ ID NO: 2997355 - RNA, 16 nt, Human
cauauauuuuuuaaaa

SEQ ID NO: 2997356 - RNA, 15 nt, Human
cauauauuuuuuaaa

SEQ ID NO: 2997357 - RNA, 22 nt, Human
cauauauauguuuuaagaggca

SEQ ID NO: 2997358 - RNA, 14 nt, Human
cauauccaaguuug

SEQ ID NO: 2997359 - RNA, 16 nt, Human
cauauccaaguuugaa

SEQ ID NO: 2997360 - RNA, 22 nt, Human
cauaguggcuuaaaacaacacu

SEQ ID NO: 2997361 - RNA, 21 nt, Human
cauaguuugggcuuguaccac

SEQ ID NO: 2997362 - RNA, 19 nt, Human
cauaguaugguggcugggu

SEQ ID NO: 2997363 - RNA, 18 nt, Human
cauaguaugguggcuggg

SEQ ID NO: 2997364 - RNA, 20 nt, Human
cauaguaugguggcuggguu

SEQ ID NO: 2997365 - RNA, 17 nt, Human
cauaguaugguggcugg

SEQ ID NO: 2997366 - RNA, 18 nt, Human
caucaaugaaugaaugaa

SEQ ID NO: 2997367 - RNA, 22 nt, Human
caucaagucuuucacauuuaaa

SEQ ID NO: 2997368 - RNA, 14 nt, Human
caucaagaugugac

SEQ ID NO: 2997369 - RNA, 12 nt, Human
cauauuuucaug

SEQ ID NO: 2997370 - RNA, 17 nt, Human
cauauuuacuucuuaua

SEQ ID NO: 2997371 - RNA, 16 nt, Human
cauauuuacuucuuau

SEQ ID NO: 2997372 - RNA, 20 nt, Human
cauauuuacuucuuauacau

SEQ ID NO: 2997373 - RNA, 14 nt, Human
cauauuuacuucuu

SEQ ID NO: 2997374 - RNA, 14 nt, Human
caucauuucaagaa

SEQ ID NO: 2997375 - RNA, 12 nt, Human
caucauuucaag

SEQ ID NO: 2997376 - RNA, 14 nt, Human
caucauugaaaucu

SEQ ID NO: 2997377 - RNA, 15 nt, Human
caucauugaaaucuu

SEQ ID NO: 2997378 - RNA, 20 nt, Human
caucauugaaaucuuuuugc

SEQ ID NO: 2997379 - RNA, 21 nt, Human
caucauugaaaucuuuuugcu

SEQ ID NO: 2997380 - RNA, 13 nt, Human
caucauugaaauc

SEQ ID NO: 2997381 - RNA, 15 nt, Human
caucaccaacgucug

SEQ ID NO: 2997382 - RNA, 11 nt, Human
caucccugaag

SEQ ID NO: 2997383 - RNA, 13 nt, Human
caucccugaaggc

SEQ ID NO: 2997384 - RNA, 19 nt, Human
caucccucuggggcuguuc

SEQ ID NO: 2997385 - RNA, 14 nt, Human
caucccucccucca

SEQ ID NO: 2997386 - RNA, 13 nt, Human
caucccucccucc

SEQ ID NO: 2997387 - RNA, 12 nt, Human
caucccucccuc

SEQ ID NO: 2997388 - RNA, 15 nt, Human
cauccagguucagcu

SEQ ID NO: 2997389 - RNA, 17 nt, Human
caucccugaaggccccg

SEQ ID NO: 2997390 - RNA, 18 nt, Human
caucccugaaggccccgc

SEQ ID NO: 2997391 - RNA, 19 nt, Human
caucccugaaggccccgcc

SEQ ID NO: 2997392 - RNA, 21 nt, Human
caucccugaaggccccgccca

SEQ ID NO: 2997393 - RNA, 22 nt, Human
caucuuccaaggguacuaagga

SEQ ID NO: 2997394 - RNA, 13 nt, Human
caucuugcucugc

SEQ ID NO: 2997395 - RNA, 14 nt, Human
caucuugcucugcu

SEQ ID NO: 2997396 - RNA, 20 nt, Human
caucuugcucugcugacaga

SEQ ID NO: 2997397 - RNA, 17 nt, Human
cauccucauacccaccc

SEQ ID NO: 2997398 - RNA, 18 nt, Human
cauccucauacccacccc

SEQ ID NO: 2997399 - RNA, 21 nt, Human
cauccucauacccacccccac

SEQ ID NO: 2997400 - RNA, 22 nt, Human
cauccucauacccacccccacc

SEQ ID NO: 2997401 - RNA, 13 nt, Human
cauccucccaagg

SEQ ID NO: 2997402 - RNA, 15 nt, Human
cauccuccucagauc

SEQ ID NO: 2997403 - RNA, 16 nt, Human
cauccuccucagaucu

SEQ ID NO: 2997404 - RNA, 18 nt, Human
cauccuccucagaucuuc

SEQ ID NO: 2997405 - RNA, 19 nt, Human
cauccuccucagaucuucu

SEQ ID NO: 2997406 - RNA, 11 nt, Human
cauccuccuca

SEQ ID NO: 2997407 - RNA, 12 nt, Human
cauccuccucag

SEQ ID NO: 2997408 - RNA, 15 nt, Human
cauccucauacccac

SEQ ID NO: 2997409 - RNA, 16 nt, Human
cauccucauacccacc

SEQ ID NO: 2997410 - RNA, 22 nt, Human
caucuagugagcagucaggaaa

SEQ ID NO: 2997411 - RNA, 16 nt, Human
caucucacacaugagc

SEQ ID NO: 2997412 - RNA, 17 nt, Human
caucucacacaugagca

SEQ ID NO: 2997413 - RNA, 20 nt, Human
caucucacacaugagcauca

SEQ ID NO: 2997414 - RNA, 15 nt, Human
cauccucuguacaga

SEQ ID NO: 2997415 - RNA, 18 nt, Human
cauccucuguacagagcc

SEQ ID NO: 2997416 - RNA, 19 nt, Human
cauccucuguacagagccc

SEQ ID NO: 2997417 - RNA, 15 nt, Human
caucuacccuccgau

SEQ ID NO: 2997418 - RNA, 14 nt, Human
caucuagugagcag

SEQ ID NO: 2997419 - RNA, 14 nt, Human
cauacuauuaaaca

SEQ ID NO: 2997420 - RNA, 21 nt, Human
cauacuaaccagcagaaaugc

SEQ ID NO: 2997421 - RNA, 14 nt, Human
cauacuaaccagca

SEQ ID NO: 2997422 - RNA, 18 nt, Human
cauacguacacauuuuau

SEQ ID NO: 2997423 - RNA, 17 nt, Human
cauacguacacauuuua

SEQ ID NO: 2997424 - RNA, 16 nt, Human
cauacguacacauuuu

SEQ ID NO: 2997425 - RNA, 15 nt, Human
cauacguacacauuu

SEQ ID NO: 2997426 - RNA, 13 nt, Human
cauacguacacau

SEQ ID NO: 2997427 - RNA, 14 nt, Human
cauacccaccccca

SEQ ID NO: 2997428 - RNA, 17 nt, Human
cauacccacccccaccc

SEQ ID NO: 2997429 - RNA, 18 nt, Human
cauacccacccccaccca

SEQ ID NO: 2997430 - RNA, 21 nt, Human
cauacccacccccacccaagg

SEQ ID NO: 2997431 - RNA, 18 nt, Human
caguuggguuuuuuaagg

SEQ ID NO: 2997432 - RNA, 16 nt, Human
caguuggguuuuuuaa

SEQ ID NO: 2997433 - RNA, 11 nt, Human
caguuggguuu

SEQ ID NO: 2997434 - RNA, 18 nt, Human
caguuggucccccuucca

SEQ ID NO: 2997435 - RNA, 19 nt, Human
caguuggguggaugccugg

SEQ ID NO: 2997436 - RNA, 18 nt, Human
caguuggguggaugccug

SEQ ID NO: 2997437 - RNA, 19 nt, Human
caguuggucccccuuccau

SEQ ID NO: 2997438 - RNA, 20 nt, Human
caguuggucccccuuccaug

SEQ ID NO: 2997439 - RNA, 21 nt, Human
caguuggucccccuuccaugg

SEQ ID NO: 2997440 - RNA, 22 nt, Human
caguuggucccccuuccaugga

SEQ ID NO: 2997441 - RNA, 23 nt, Human
caguugccagucaccccggccac

SEQ ID NO: 2997442 - RNA, 16 nt, Human
caguuggguggaugcc

SEQ ID NO: 2997443 - RNA, 19 nt, Human
caguuuuuuuccuucaaga

SEQ ID NO: 2997444 - RNA, 19 nt, Human
caguuuucugagaaagacu

SEQ ID NO: 2997445 - RNA, 20 nt, Human
caguuuucugagaaagacua

SEQ ID NO: 2997446 - RNA, 14 nt, Human
caguuuucugagaa

SEQ ID NO: 2997447 - RNA, 15 nt, Human
caguuuucugagaaa

SEQ ID NO: 2997448 - RNA, 17 nt, Human
caguuguuagugugucu

SEQ ID NO: 2997449 - RNA, 14 nt, Human
caguugaaaagacu

SEQ ID NO: 2997450 - RNA, 18 nt, Human
caguugaaaagacuccaa

SEQ ID NO: 2997451 - RNA, 21 nt, Human
caguugaaaagacuccaaaga

SEQ ID NO: 2997452 - RNA, 22 nt, Human
caguugaaaagacuccaaagaa

SEQ ID NO: 2997453 - RNA, 23 nt, Human
caguugaaaagacuccaaagaaa

SEQ ID NO: 2997454 - RNA, 22 nt, Human
cauaagugcuauugcagagccg

SEQ ID NO: 2997455 - RNA, 22 nt, Human
cauaaguccucuagugaaugua

SEQ ID NO: 2997456 - RNA, 18 nt, Human
cauaagugcuauugcaga

SEQ ID NO: 2997457 - RNA, 20 nt, Human
cauaagcuacugccauccug

SEQ ID NO: 2997458 - RNA, 14 nt, Human
cauaagauaaaugu

SEQ ID NO: 2997459 - RNA, 17 nt, Human
cauaagcuacugccauc

SEQ ID NO: 2997460 - RNA, 16 nt, Human
cauaagcuacugccau

SEQ ID NO: 2997461 - RNA, 14 nt, Human
cauaagcuacugcc

SEQ ID NO: 2997462 - RNA, 20 nt, Human
cauaagccaaaacugagcau

SEQ ID NO: 2997463 - RNA, 17 nt, Human
cauaccaacacgagcag

SEQ ID NO: 2997464 - RNA, 18 nt, Human
cauaccacuuuuguucuu

SEQ ID NO: 2997465 - RNA, 15 nt, Human
cauaccacuuuuguu

SEQ ID NO: 2997466 - RNA, 14 nt, Human
cauaccacuuuugu

SEQ ID NO: 2997467 - RNA, 13 nt, Human
cauaccacuuuug

SEQ ID NO: 2997468 - RNA, 11 nt, Human
cauacccaccc

SEQ ID NO: 2997469 - RNA, 12 nt, Human
cauacccacccc

SEQ ID NO: 2997470 - RNA, 19 nt, Human
cauaccacuuuuguucuug

SEQ ID NO: 2997471 - RNA, 21 nt, Human
cauaaacaagaccacguuucu

SEQ ID NO: 2997472 - RNA, 20 nt, Human
cauaaacaagaccacguuuc

SEQ ID NO: 2997473 - RNA, 22 nt, Human
cauaaacaagaccacguuucua

SEQ ID NO: 2997474 - RNA, 21 nt, Human
cauaaaaauuagccaagugug

SEQ ID NO: 2997475 - RNA, 16 nt, Human
cauaaccuagccuuag

SEQ ID NO: 2997476 - RNA, 20 nt, Human
cauaaauuuaguauuuuguu

SEQ ID NO: 2997477 - RNA, 19 nt, Human
cauaaauuuaguauuuugu

SEQ ID NO: 2997478 - RNA, 20 nt, Human
caguguuuuaggagcaugag

SEQ ID NO: 2997479 - RNA, 16 nt, Human
caguguuuuaggagca

SEQ ID NO: 2997480 - RNA, 22 nt, Human
caguguuguggauuuaacagaa

SEQ ID NO: 2997481 - RNA, 20 nt, Human
caguguuguggauuuaacag

SEQ ID NO: 2997482 - RNA, 19 nt, Human
caguguuguggauuuaaca

SEQ ID NO: 2997483 - RNA, 21 nt, Human
caguuaccucugccucagaaa

SEQ ID NO: 2997484 - RNA, 14 nt, Human
caguuacucagaau

SEQ ID NO: 2997485 - RNA, 13 nt, Human
caguuaagagaaa

SEQ ID NO: 2997486 - RNA, 14 nt, Human
caguuaagagaaau

SEQ ID NO: 2997487 - RNA, 14 nt, Human
caguucugaagaag

SEQ ID NO: 2997488 - RNA, 13 nt, Human
caguucugaagaa

SEQ ID NO: 2997489 - RNA, 22 nt, Human
caguucucuccuucuucccccc

SEQ ID NO: 2997490 - RNA, 12 nt, Human
caguucugaaga

SEQ ID NO: 2997491 - RNA, 16 nt, Human
caguucugaagaagau

SEQ ID NO: 2997492 - RNA, 15 nt, Human
caguucugaagaaga

SEQ ID NO: 2997493 - RNA, 22 nt, Human
caguucugaagaagaugguacc

SEQ ID NO: 2997494 - RNA, 22 nt, Human
caguucggugagcuacaaaugc

SEQ ID NO: 2997495 - RNA, 14 nt, Human
caguucucuccuuc

SEQ ID NO: 2997496 - RNA, 15 nt, Human
caguucucuccuucu

SEQ ID NO: 2997497 - RNA, 13 nt, Human
caguucucuccuu

SEQ ID NO: 2997498 - RNA, 12 nt, Human
caguugaaaaac

SEQ ID NO: 2997499 - RNA, 18 nt, Human
caguugaaaaacagcuga

SEQ ID NO: 2997500 - RNA, 19 nt, Human
caguugaaaaacagcugag

SEQ ID NO: 2997501 - RNA, 13 nt, Human
cagugcuuggccc

SEQ ID NO: 2997502 - RNA, 14 nt, Human
cagugcuuggccca

SEQ ID NO: 2997503 - RNA, 15 nt, Human
cagugcuuggcccag

SEQ ID NO: 2997504 - RNA, 16 nt, Human
cagugcuuggcccagg

SEQ ID NO: 2997505 - RNA, 12 nt, Human
cagugcuuggcc

SEQ ID NO: 2997506 - RNA, 17 nt, Human
cagugcuuggcccagga

SEQ ID NO: 2997507 - RNA, 18 nt, Human
cagugcuuggcccaggag

SEQ ID NO: 2997508 - RNA, 19 nt, Human
cagugcuuggcccaggagu

SEQ ID NO: 2997509 - RNA, 20 nt, Human
cagugcuuggcccaggaguu

SEQ ID NO: 2997510 - RNA, 16 nt, Human
caguggcagcugcuuu

SEQ ID NO: 2997511 - RNA, 15 nt, Human
caguggcagcugcuu

SEQ ID NO: 2997512 - RNA, 14 nt, Human
caguggcagcugcu

SEQ ID NO: 2997513 - RNA, 13 nt, Human
caguggcagcugc

SEQ ID NO: 2997514 - RNA, 12 nt, Human
caguggcagcug

SEQ ID NO: 2997515 - RNA, 22 nt, Human
cagugguuccuaauccucuagg

SEQ ID NO: 2997516 - RNA, 17 nt, Human
caguguguggucaacau

SEQ ID NO: 2997517 - RNA, 21 nt, Human
caguguguggucaacauuucu

SEQ ID NO: 2997518 - RNA, 12 nt, Human
cagugugacuga

SEQ ID NO: 2997519 - RNA, 14 nt, Human
cagugugacaagga

SEQ ID NO: 2997520 - RNA, 14 nt, Human
cagugucaaugcag

SEQ ID NO: 2997521 - RNA, 23 nt, Human
caguguacauggaauaacaugua

SEQ ID NO: 2997522 - RNA, 20 nt, Human
caguguacauggaauaacau

SEQ ID NO: 2997523 - RNA, 16 nt, Human
caguguacauggaaua

SEQ ID NO: 2997524 - RNA, 16 nt, Human
caccaugggauuaaua

SEQ ID NO: 2997525 - RNA, 16 nt, Human
caccaucaagccacca

SEQ ID NO: 2997526 - RNA, 17 nt, Human
caccaucaagccaccaa

SEQ ID NO: 2997527 - RNA, 19 nt, Human
caccaucaagccaccaaca

SEQ ID NO: 2997528 - RNA, 24 nt, Human
caccaucaagccaccaacauacuc

SEQ ID NO: 2997529 - RNA, 17 nt, Human
caccaucaugucuggcu

SEQ ID NO: 2997530 - RNA, 15 nt, Human
caccaucaugucugg

SEQ ID NO: 2997531 - RNA, 18 nt, Human
caccaucaugucuggcua

SEQ ID NO: 2997532 - RNA, 11 nt, Human
caccagugccu

SEQ ID NO: 2997533 - RNA, 17 nt, Human
caccagugccucucccu

SEQ ID NO: 2997534 - RNA, 14 nt, Human
caccagugccucuc

SEQ ID NO: 2997535 - RNA, 13 nt, Human
caccagugccucu

SEQ ID NO: 2997536 - RNA, 12 nt, Human
caccagugccuc

SEQ ID NO: 2997537 - RNA, 19 nt, Human
caccauaagcuacugccau

SEQ ID NO: 2997538 - RNA, 18 nt, Human
caccauaagcuacugcca

SEQ ID NO: 2997539 - RNA, 16 nt, Human
caccauaagcuacugc

SEQ ID NO: 2997540 - RNA, 21 nt, Human
caccauauuaccacagacaua

SEQ ID NO: 2997541 - RNA, 21 nt, Human
caccauaagcuacugccaucc

SEQ ID NO: 2997542 - RNA, 20 nt, Human
caccauaagcuacugccauc

SEQ ID NO: 2997543 - RNA, 14 nt, Human
caccaucaagccac

SEQ ID NO: 2997544 - RNA, 15 nt, Human
caccaucaagccacc

SEQ ID NO: 2997545 - RNA, 13 nt, Human
caccaucaagcca

SEQ ID NO: 2997546 - RNA, 18 nt, Human
cacauguccaagaagccc

SEQ ID NO: 2997547 - RNA, 19 nt, Human
cacauguccaagaagccca

SEQ ID NO: 2997548 - RNA, 21 nt, Human
cacauguccaagaagcccagg

SEQ ID NO: 2997549 - RNA, 22 nt, Human
cacauguccaagaagcccagga

SEQ ID NO: 2997550 - RNA, 17 nt, Human
caccaacgucugugcca

SEQ ID NO: 2997551 - RNA, 13 nt, Human
caccaagcccagu

SEQ ID NO: 2997552 - RNA, 12 nt, Human
caccaagcccag

SEQ ID NO: 2997553 - RNA, 15 nt, Human
caccagagcccaccu

SEQ ID NO: 2997554 - RNA, 22 nt, Human
caccagagcccaccuuggcuca

SEQ ID NO: 2997555 - RNA, 20 nt, Human
caccagagcccaccuuggcu

SEQ ID NO: 2997556 - RNA, 18 nt, Human
caccagagcccaccuugg

SEQ ID NO: 2997557 - RNA, 17 nt, Human
caccagagcccaccuug

SEQ ID NO: 2997558 - RNA, 19 nt, Human
caccacacccagcccacuu

SEQ ID NO: 2997559 - RNA, 20 nt, Human
cacaguuuucugagaaagac

SEQ ID NO: 2997560 - RNA, 16 nt, Human
cacaugaaguccaagc

SEQ ID NO: 2997561 - RNA, 20 nt, Human
cacaugaaguccaagcauuu

SEQ ID NO: 2997562 - RNA, 17 nt, Human
cacaugaaguccaagca

SEQ ID NO: 2997563 - RNA, 21 nt, Human
cacaguuuucugagaaagacu

SEQ ID NO: 2997564 - RNA, 22 nt, Human
cacaguuuucugagaaagacua

SEQ ID NO: 2997565 - RNA, 18 nt, Human
cacaugagcaucaggcca

SEQ ID NO: 2997566 - RNA, 19 nt, Human
cacaugagcaucaggccag

SEQ ID NO: 2997567 - RNA, 20 nt, Human
cacaugagcaucaggccagg

SEQ ID NO: 2997568 - RNA, 21 nt, Human
cacaugagcaucaggccaggc

SEQ ID NO: 2997569 - RNA, 13 nt, Human
cacaugagcauca

SEQ ID NO: 2997570 - RNA, 17 nt, Human
cacaugagcaucaggcc

SEQ ID NO: 2997571 - RNA, 19 nt, Human
cacaugcaaggucauuuuu

SEQ ID NO: 2997572 - RNA, 17 nt, Human
cacaugcaaggucauuu

SEQ ID NO: 2997573 - RNA, 20 nt, Human
cacaugcaaggucauuuuuu

SEQ ID NO: 2997574 - RNA, 18 nt, Human
cacaugcacgugugugca

SEQ ID NO: 2997575 - RNA, 16 nt, Human
cacauguccaagaagc

SEQ ID NO: 2997576 - RNA, 17 nt, Human
cacauguccaagaagcc

SEQ ID NO: 2997577 - RNA, 20 nt, Human
cacaugccucucucaggcca

SEQ ID NO: 2997578 - RNA, 21 nt, Human
cacaugccucucucaggccaa

SEQ ID NO: 2997579 - RNA, 19 nt, Human
cacaggcagguccaggguu

SEQ ID NO: 2997580 - RNA, 23 nt, Human
cacaguccuuaccagcagagcac

SEQ ID NO: 2997581 - RNA, 14 nt, Human
cacaggcccggcuc

SEQ ID NO: 2997582 - RNA, 20 nt, Human
cacagcucuucuccaggcug

SEQ ID NO: 2997583 - RNA, 19 nt, Human
cacagcucuucuccaggcu

SEQ ID NO: 2997584 - RNA, 17 nt, Human
cacaggaucagucugau

SEQ ID NO: 2997585 - RNA, 18 nt, Human
cacagcucuucuccaggc

SEQ ID NO: 2997586 - RNA, 22 nt, Human
cacacggacacucaaaagcugg

SEQ ID NO: 2997587 - RNA, 13 nt, Human
cacccaagggccu

SEQ ID NO: 2997588 - RNA, 12 nt, Human
caauauccuaau

SEQ ID NO: 2997589 - RNA, 13 nt, Human
caauauccuaaua

SEQ ID NO: 2997590 - RNA, 14 nt, Human
caauauccuaauaa

SEQ ID NO: 2997591 - RNA, 15 nt, Human
caauauccuaauaaa

SEQ ID NO: 2997592 - RNA, 16 nt, Human
caauauccuaauaaaa

SEQ ID NO: 2997593 - RNA, 18 nt, Human
caauauccuaauaaaaag

SEQ ID NO: 2997594 - RNA, 19 nt, Human
caauauccuaauaaaaagg

SEQ ID NO: 2997595 - RNA, 20 nt, Human
caauauccuaauaaaaaggu

SEQ ID NO: 2997596 - RNA, 15 nt, Human
caaugaccuuucaau

SEQ ID NO: 2997597 - RNA, 16 nt, Human
caaugaccuuucaaua

SEQ ID NO: 2997598 - RNA, 13 nt, Human
caaugauggucac

SEQ ID NO: 2997599 - RNA, 14 nt, Human
caaugaccuuucaa

SEQ ID NO: 2997600 - RNA, 13 nt, Human
caaugaccuuuca

SEQ ID NO: 2997601 - RNA, 21 nt, Human
caaugcaaaccaucauugaaa

SEQ ID NO: 2997602 - RNA, 22 nt, Human
caaugcaaaccaucauugaaau

SEQ ID NO: 2997603 - RNA, 14 nt, Human
caaugauggucacc

SEQ ID NO: 2997604 - RNA, 14 nt, Human
caaugcaaaccauc

SEQ ID NO: 2997605 - RNA, 13 nt, Human
caaugcacuuugu

SEQ ID NO: 2997606 - RNA, 14 nt, Human
caaugcacugacau

SEQ ID NO: 2997607 - RNA, 23 nt, Human
caaugcaaaccaucauugaaauc

SEQ ID NO: 2997608 - RNA, 20 nt, Human
caaugcaaaccaucauugaa

SEQ ID NO: 2997609 - RNA, 13 nt, Human
cacacccagccca

SEQ ID NO: 2997610 - RNA, 22 nt, Human
cacaccagagcccaccuuggcu

SEQ ID NO: 2997611 - RNA, 21 nt, Human
cacaccagagcccaccuuggc

SEQ ID NO: 2997612 - RNA, 15 nt, Human
cacacagcucugucc

SEQ ID NO: 2997613 - RNA, 14 nt, Human
cacacagcucuguc

SEQ ID NO: 2997614 - RNA, 13 nt, Human
cacacagcucugu

SEQ ID NO: 2997615 - RNA, 20 nt, Human
cacacccagcccacuucugc

SEQ ID NO: 2997616 - RNA, 14 nt, Human
cacacccagcccac

SEQ ID NO: 2997617 - RNA, 17 nt, Human
cacaccgggcacucaga

SEQ ID NO: 2997618 - RNA, 21 nt, Human
cacacagaggcugccucuccc

SEQ ID NO: 2997619 - RNA, 14 nt, Human
cacacacuuuggcu

SEQ ID NO: 2997620 - RNA, 20 nt, Human
cacacaccagagcccaccuu

SEQ ID NO: 2997621 - RNA, 16 nt, Human
cacacaccagagccca

SEQ ID NO: 2997622 - RNA, 15 nt, Human
cacacaccagagccc

SEQ ID NO: 2997623 - RNA, 18 nt, Human
caaugguuuucuugugug

SEQ ID NO: 2997624 - RNA, 14 nt, Human
caaugcacuuuguu

SEQ ID NO: 2997625 - RNA, 14 nt, Human
caauuaugaaaaua

SEQ ID NO: 2997626 - RNA, 11 nt, Human
caauuaugaaa

SEQ ID NO: 2997627 - RNA, 15 nt, Human
cacaaacagaggccg

SEQ ID NO: 2997628 - RNA, 17 nt, Human
cacaaacgggcucagca

SEQ ID NO: 2997629 - RNA, 15 nt, Human
caauuaugaaaauaa

SEQ ID NO: 2997630 - RNA, 13 nt, Human
cacaagaaaugaa

SEQ ID NO: 2997631 - RNA, 15 nt, Human
cacaagaaaugaaag

SEQ ID NO: 2997632 - RNA, 17 nt, Human
cacaaagguagcuuuuc

SEQ ID NO: 2997633 - RNA, 18 nt, Human
cacaaaguaauuuggaaa

SEQ ID NO: 2997634 - RNA, 23 nt, Human
cacaagaaaugaaagcagggacu

SEQ ID NO: 2997635 - RNA, 23 nt, Human
cacaagacccaaaaggcagaagc

SEQ ID NO: 2997636 - RNA, 23 nt, Human
caacugggguggguggggcagug

SEQ ID NO: 2997637 - RNA, 20 nt, Human
caacugcaucaagaugugac

SEQ ID NO: 2997638 - RNA, 23 nt, Human
caacugcaucaagaugugacaug

SEQ ID NO: 2997639 - RNA, 17 nt, Human
caacugcaucaagaugu

SEQ ID NO: 2997640 - RNA, 19 nt, Human
caaccugauugugucucuu

SEQ ID NO: 2997641 - RNA, 21 nt, Human
caaccugauugugucucuugg

SEQ ID NO: 2997642 - RNA, 17 nt, Human
caaccugauugugucuc

SEQ ID NO: 2997643 - RNA, 17 nt, Human
caacauaacucaagucu

SEQ ID NO: 2997644 - RNA, 14 nt, Human
caacauacucccau

SEQ ID NO: 2997645 - RNA, 15 nt, Human
caacauacucccauc

SEQ ID NO: 2997646 - RNA, 16 nt, Human
caacauacucccaucu

SEQ ID NO: 2997647 - RNA, 17 nt, Human
caaauuuacagagacag

SEQ ID NO: 2997648 - RNA, 16 nt, Human
caaauuuacagagaca

SEQ ID NO: 2997649 - RNA, 23 nt, Human
caaauuuacagagacagaaagca

SEQ ID NO: 2997650 - RNA, 14 nt, Human
caacaggcugggcu

SEQ ID NO: 2997651 - RNA, 17 nt, Human
caacaggcugggcuuca

SEQ ID NO: 2997652 - RNA, 13 nt, Human
caacaggcugggc

SEQ ID NO: 2997653 - RNA, 16 nt, Human
caacagugagagacuc

SEQ ID NO: 2997654 - RNA, 13 nt, Human
caagaccuucucc

SEQ ID NO: 2997655 - RNA, 19 nt, Human
caagacgcugugcugcccu

SEQ ID NO: 2997656 - RNA, 20 nt, Human
caagacgcugugcugcccug

SEQ ID NO: 2997657 - RNA, 21 nt, Human
caagacgcugugcugcccugc

SEQ ID NO: 2997658 - RNA, 22 nt, Human
caagacgcugugcugcccugcc

SEQ ID NO: 2997659 - RNA, 19 nt, Human
caagacugcacaucaaaau

SEQ ID NO: 2997660 - RNA, 13 nt, Human
caagaaaugaaag

SEQ ID NO: 2997661 - RNA, 23 nt, Human
caagacccuuguggucccacccc

SEQ ID NO: 2997662 - RNA, 17 nt, Human
caagagggucugaggaa

SEQ ID NO: 2997663 - RNA, 16 nt, Human
caagagggucugagga

SEQ ID NO: 2997664 - RNA, 12 nt, Human
caagagggucug

SEQ ID NO: 2997665 - RNA, 17 nt, Human
caagagcccaggccucc

SEQ ID NO: 2997666 - RNA, 16 nt, Human
caagcauaccaacacg

SEQ ID NO: 2997667 - RNA, 21 nt, Human
caagcauaccaacacgagcag

SEQ ID NO: 2997668 - RNA, 21 nt, Human
caagcauguauuuuugucaau

SEQ ID NO: 2997669 - RNA, 15 nt, Human
caagcauguauuuuu

SEQ ID NO: 2997670 - RNA, 19 nt, Human
caagcauuuagauguauag

SEQ ID NO: 2997671 - RNA, 16 nt, Human
caagcauuuagaugua

SEQ ID NO: 2997672 - RNA, 14 nt, Human
caaggauccugagc

SEQ ID NO: 2997673 - RNA, 15 nt, Human
caaggauccugagcc

SEQ ID NO: 2997674 - RNA, 16 nt, Human
caaggauccugagcca

SEQ ID NO: 2997675 - RNA, 17 nt, Human
caaggauccugagccag

SEQ ID NO: 2997676 - RNA, 18 nt, Human
caaggcugggggaagaag

SEQ ID NO: 2997677 - RNA, 21 nt, Human
caaggcugggggaagaagcuc

SEQ ID NO: 2997678 - RNA, 13 nt, Human
caaggcugucaau

SEQ ID NO: 2997679 - RNA, 14 nt, Human
caaggcugucaauu

SEQ ID NO: 2997680 - RNA, 23 nt, Human
caaggggaauguuugccucugcc

SEQ ID NO: 2997681 - RNA, 13 nt, Human
caagggccuggcc

SEQ ID NO: 2997682 - RNA, 14 nt, Human
caagggccuggccu

SEQ ID NO: 2997683 - RNA, 15 nt, Human
caagggccuggccug

SEQ ID NO: 2997684 - RNA, 21 nt, Human
caaggggaauguuugccucug

SEQ ID NO: 2997685 - RNA, 20 nt, Human
caagugauucuccugccuca

SEQ ID NO: 2997686 - RNA, 15 nt, Human
caagugagacccugu

SEQ ID NO: 2997687 - RNA, 19 nt, Human
caagugagacccugucuca

SEQ ID NO: 2997688 - RNA, 18 nt, Human
caagugauucuccugccu

SEQ ID NO: 2997689 - RNA, 19 nt, Human
caagugauucuccugccuc

SEQ ID NO: 2997690 - RNA, 22 nt, Human
caagugaaaaaggaggaagaga

SEQ ID NO: 2997691 - RNA, 17 nt, Human
caagguuuaaguuauua

SEQ ID NO: 2997692 - RNA, 15 nt, Human
caagguuuaaguuau

SEQ ID NO: 2997693 - RNA, 23 nt, Human
caagugaaaaaggaggaagagaa

SEQ ID NO: 2997694 - RNA, 14 nt, Human
caagugagacccug

SEQ ID NO: 2997695 - RNA, 20 nt, Human
caacaggcugggcuucagug

SEQ ID NO: 2997696 - RNA, 14 nt, Human
caaaggagauugga

SEQ ID NO: 2997697 - RNA, 20 nt, Human
caaaggagauuggaaggaac

SEQ ID NO: 2997698 - RNA, 16 nt, Human
caaaguggugagaggc

SEQ ID NO: 2997699 - RNA, 17 nt, Human
caaaguggugagaggca

SEQ ID NO: 2997700 - RNA, 23 nt, Human
caaaggguaucaggugcugccau

SEQ ID NO: 2997701 - RNA, 21 nt, Human
caaaggguaucaggugcugcc

SEQ ID NO: 2997702 - RNA, 20 nt, Human
caaaggguaucaggugcugc

SEQ ID NO: 2997703 - RNA, 18 nt, Human
caaauguuuauuuaaaag

SEQ ID NO: 2997704 - RNA, 17 nt, Human
caaauguuuauuuaaaa

SEQ ID NO: 2997705 - RNA, 16 nt, Human
caaauguuuauuuaaa

SEQ ID NO: 2997706 - RNA, 16 nt, Human
auuuuaauaauguuuc

SEQ ID NO: 2997707 - RNA, 19 nt, Human
auuuuaauaauguuucaaa

SEQ ID NO: 2997708 - RNA, 18 nt, Human
auuuuaauaauguuucaa

SEQ ID NO: 2997709 - RNA, 14 nt, Human
caaagagguuuuaa

SEQ ID NO: 2997710 - RNA, 21 nt, Human
caaagagguuuuaaaaaaauc

SEQ ID NO: 2997711 - RNA, 14 nt, Human
caaagaaauguaag

SEQ ID NO: 2997712 - RNA, 19 nt, Human
agcaucgcuuaggagaagu

SEQ ID NO: 2997713 - RNA, 16 nt, Human
agcaucuaugugagac

SEQ ID NO: 2997714 - RNA, 22 nt, Human
agccagcaggcucucaggccag

SEQ ID NO: 2997715 - RNA, 21 nt, Human
agccagcaggcucucaggcca

SEQ ID NO: 2997716 - RNA, 23 nt, Human
agccagcaggcucucaggccagc

SEQ ID NO: 2997717 - RNA, 14 nt, Human
agccagcaguucag

SEQ ID NO: 2997718 - RNA, 19 nt, Human
agccauuugucccaagugc

SEQ ID NO: 2997719 - RNA, 17 nt, Human
agcccacgcccccacug

SEQ ID NO: 2997720 - RNA, 18 nt, Human
agcccacgcccccacugg

SEQ ID NO: 2997721 - RNA, 15 nt, Human
agcccacgcccccac

SEQ ID NO: 2997722 - RNA, 19 nt, Human
agcccacgcccccacuggu

SEQ ID NO: 2997723 - RNA, 23 nt, Human
agcccaccccucaacaccucugc

SEQ ID NO: 2997724 - RNA, 13 nt, Human
agcccaccuuggc

SEQ ID NO: 2997725 - RNA, 14 nt, Human
agccagauuucacu

SEQ ID NO: 2997726 - RNA, 17 nt, Human
agccagauuucacucuc

SEQ ID NO: 2997727 - RNA, 20 nt, Human
agccagauuucacucuccuu

SEQ ID NO: 2997728 - RNA, 22 nt, Human
agccagauuucacucuccuugg

SEQ ID NO: 2997729 - RNA, 16 nt, Human
agcagccuggacccug

SEQ ID NO: 2997730 - RNA, 19 nt, Human
agcacugacuucuaaguaa

SEQ ID NO: 2997731 - RNA, 17 nt, Human
agcacugacuucuaagu

SEQ ID NO: 2997732 - RNA, 13 nt, Human
agcagugcaugcu

SEQ ID NO: 2997733 - RNA, 16 nt, Human
agcagugcaugcuguc

SEQ ID NO: 2997734 - RNA, 19 nt, Human
agcagcguuucuaugacac

SEQ ID NO: 2997735 - RNA, 18 nt, Human
agcagcguuucuaugaca

SEQ ID NO: 2997736 - RNA, 20 nt, Human
agcagccuggacccugugga

SEQ ID NO: 2997737 - RNA, 17 nt, Human
agcagugcaugcugucc

SEQ ID NO: 2997738 - RNA, 21 nt, Human
agcacagacccugcccugugg

SEQ ID NO: 2997739 - RNA, 20 nt, Human
agcacuaaggugugcucuga

SEQ ID NO: 2997740 - RNA, 18 nt, Human
agauucuauguuaauauu

SEQ ID NO: 2997741 - RNA, 14 nt, Human
agauucuuuccuga

SEQ ID NO: 2997742 - RNA, 20 nt, Human
agaugggugcuuggaggaag

SEQ ID NO: 2997743 - RNA, 22 nt, Human
agaugggugcuuggaggaagga

SEQ ID NO: 2997744 - RNA, 11 nt, Human
agaugaauguc

SEQ ID NO: 2997745 - RNA, 18 nt, Human
agaugacaucugucuagg

SEQ ID NO: 2997746 - RNA, 15 nt, Human
agaugaaugucaguu

SEQ ID NO: 2997747 - RNA, 18 nt, Human
agaugacauugacuauuu

SEQ ID NO: 2997748 - RNA, 23 nt, Human
agaugacauugacuauuuuuguu

SEQ ID NO: 2997749 - RNA, 13 nt, Human
agcaaaucaguuu

SEQ ID NO: 2997750 - RNA, 19 nt, Human
agcaaauucuguuuuucua

SEQ ID NO: 2997751 - RNA, 20 nt, Human
agcaaaguagaucaugcaua

SEQ ID NO: 2997752 - RNA, 16 nt, Human
agauugcaacaggcug

SEQ ID NO: 2997753 - RNA, 15 nt, Human
agauucuuuccugag

SEQ ID NO: 2997754 - RNA, 16 nt, Human
agauucuuuccugagg

SEQ ID NO: 2997755 - RNA, 16 nt, Human
agauugcaccacugca

SEQ ID NO: 2997756 - RNA, 17 nt, Human
agauugcaacaggcugg

SEQ ID NO: 2997757 - RNA, 16 nt, Human
agauugcucaaaucag

SEQ ID NO: 2997758 - RNA, 14 nt, Human
agauugcucaaauc

SEQ ID NO: 2997759 - RNA, 14 nt, Human
agauaugauucaaa

SEQ ID NO: 2997760 - RNA, 15 nt, Human
agauaugauucaaau

SEQ ID NO: 2997761 - RNA, 20 nt, Human
agauagauaggucagugcaa

SEQ ID NO: 2997762 - RNA, 20 nt, Human
agauagccaaggccaaagga

SEQ ID NO: 2997763 - RNA, 13 nt, Human
agaguugaagaca

SEQ ID NO: 2997764 - RNA, 14 nt, Human
agaguugaagacag

SEQ ID NO: 2997765 - RNA, 15 nt, Human
agaguugaagacaga

SEQ ID NO: 2997766 - RNA, 23 nt, Human
agaggggguggccucccaacuca

SEQ ID NO: 2997767 - RNA, 20 nt, Human
agagggucugaggaauccag

SEQ ID NO: 2997768 - RNA, 23 nt, Human
agaaugcaguacuaacauuuauu

SEQ ID NO: 2997769 - RNA, 18 nt, Human
agaaugcucuuuacuuca

SEQ ID NO: 2997770 - RNA, 23 nt, Human
agaaugcacaaacagaggccgcc

SEQ ID NO: 2997771 - RNA, 17 nt, Human
agaaucucaaauaacua

SEQ ID NO: 2997772 - RNA, 16 nt, Human
agaagucaaggcuuag

SEQ ID NO: 2997773 - RNA, 17 nt, Human
agaagucaaggcuuaga

SEQ ID NO: 2997774 - RNA, 18 nt, Human
agaagucaaggcuuagac

SEQ ID NO: 2997775 - RNA, 19 nt, Human
agaagucaaggcuuagacc

SEQ ID NO: 2997776 - RNA, 14 nt, Human
agaagucacacagu

SEQ ID NO: 2997777 - RNA, 18 nt, Human
agaagucuucuauuuauu

SEQ ID NO: 2997778 - RNA, 19 nt, Human
agaagucuuagauguauau

SEQ ID NO: 2997779 - RNA, 17 nt, Human
agaagucuuagauguau

SEQ ID NO: 2997780 - RNA, 21 nt, Human
agaagacugcauuauauuuau

SEQ ID NO: 2997781 - RNA, 18 nt, Human
agaagacugcauuauauu

SEQ ID NO: 2997782 - RNA, 21 nt, Human
agaaccaaaaagaggcuaugu

SEQ ID NO: 2997783 - RNA, 20 nt, Human
agaagagcuguucacagcca

SEQ ID NO: 2997784 - RNA, 13 nt, Human
agaagauagcagg

SEQ ID NO: 2997785 - RNA, 15 nt, Human
agaagagaaugcaca

SEQ ID NO: 2997786 - RNA, 23 nt, Human
agaagagaaugcacaaacagagg

SEQ ID NO: 2997787 - RNA, 13 nt, Human
agaagagcuguuc

SEQ ID NO: 2997788 - RNA, 22 nt, Human
agaacagugauuaccagggacu

SEQ ID NO: 2997789 - RNA, 17 nt, Human
agaaccaaaaagaggcu

SEQ ID NO: 2997790 - RNA, 18 nt, Human
agaaccaaaaagaggcua

SEQ ID NO: 2997791 - RNA, 19 nt, Human
agacaaggaaaaaauaaca

SEQ ID NO: 2997792 - RNA, 23 nt, Human
agacaaugacuuacuguacauga

SEQ ID NO: 2997793 - RNA, 20 nt, Human
agacaaugugaaaagaaaaa

SEQ ID NO: 2997794 - RNA, 20 nt, Human
agacgcugugcugcccugcc

SEQ ID NO: 2997795 - RNA, 18 nt, Human
agacgcugugcugcccug

SEQ ID NO: 2997796 - RNA, 19 nt, Human
agacgcugugcugcccugc

SEQ ID NO: 2997797 - RNA, 17 nt, Human
agacgcugugcugcccu

SEQ ID NO: 2997798 - RNA, 18 nt, Human
agaccauuggggcuccca

SEQ ID NO: 2997799 - RNA, 15 nt, Human
agaccauccuggcua

SEQ ID NO: 2997800 - RNA, 14 nt, Human
agaccacguuucua

SEQ ID NO: 2997801 - RNA, 23 nt, Human
agaccaucccugaaggccccgcc

SEQ ID NO: 2997802 - RNA, 23 nt, Human
agaccauuggggcucccagccag

SEQ ID NO: 2997803 - RNA, 22 nt, Human
agaccauuggggcucccagcca

SEQ ID NO: 2997804 - RNA, 20 nt, Human
agaccauuggggcucccagc

SEQ ID NO: 2997805 - RNA, 19 nt, Human
agaccauuggggcucccag

SEQ ID NO: 2997806 - RNA, 21 nt, Human
agacagcccgggcucugccuc

SEQ ID NO: 2997807 - RNA, 14 nt, Human
agacaauuuauuau

SEQ ID NO: 2997808 - RNA, 22 nt, Human
agacagcccgggcucugccucc

SEQ ID NO: 2997809 - RNA, 23 nt, Human
agacagcccgggcucugccuccc

SEQ ID NO: 2997810 - RNA, 16 nt, Human
agacucuuuggacacu

SEQ ID NO: 2997811 - RNA, 11 nt, Human
agagagcaaga

SEQ ID NO: 2997812 - RNA, 19 nt, Human
agagagcaagacgcugugc

SEQ ID NO: 2997813 - RNA, 23 nt, Human
agagagcaagacgcugugcugcc

SEQ ID NO: 2997814 - RNA, 18 nt, Human
agagcccacgcccccacu

SEQ ID NO: 2997815 - RNA, 17 nt, Human
agagcccacgcccccac

SEQ ID NO: 2997816 - RNA, 18 nt, Human
agagaaaguacuucucca

SEQ ID NO: 2997817 - RNA, 22 nt, Human
aggcuuagacccucaugcugcc

SEQ ID NO: 2997818 - RNA, 14 nt, Human
aggcuuagacccuc

SEQ ID NO: 2997819 - RNA, 21 nt, Human
aggcuuagacccucaugcugc

SEQ ID NO: 2997820 - RNA, 12 nt, Human
aggcuuagaccc

SEQ ID NO: 2997821 - RNA, 17 nt, Human
agggacaggauaagagg

SEQ ID NO: 2997822 - RNA, 24 nt, Human
aggcuguaucccaugagccucagc

SEQ ID NO: 2997823 - RNA, 11 nt, Human
aggcugccagu

SEQ ID NO: 2997824 - RNA, 12 nt, Human
aggcugucaauu

SEQ ID NO: 2997825 - RNA, 17 nt, Human
aggcugcagugagccga

SEQ ID NO: 2997826 - RNA, 19 nt, Human
aggcugcagugagccgaga

SEQ ID NO: 2997827 - RNA, 23 nt, Human
aggcuguaucccaugagccucag

SEQ ID NO: 2997828 - RNA, 17 nt, Human
aggcuagauguauguac

SEQ ID NO: 2997829 - RNA, 19 nt, Human
aggcccucugcccacuccc

SEQ ID NO: 2997830 - RNA, 20 nt, Human
aggcccucugcccacucccu

SEQ ID NO: 2997831 - RNA, 20 nt, Human
agggauuagggagagaagau

SEQ ID NO: 2997832 - RNA, 18 nt, Human
agggccuggcucaggugg

SEQ ID NO: 2997833 - RNA, 13 nt, Human
agggccuggcuca

SEQ ID NO: 2997834 - RNA, 14 nt, Human
agggccuggcucag

SEQ ID NO: 2997835 - RNA, 18 nt, Human
agggccuggccugagcug

SEQ ID NO: 2997836 - RNA, 14 nt, Human
aggagugagcacua

SEQ ID NO: 2997837 - RNA, 12 nt, Human
aggagugagcac

SEQ ID NO: 2997838 - RNA, 15 nt, Human
aggaggucucuaaga

SEQ ID NO: 2997839 - RNA, 22 nt, Human
aggagguaaugaccaugaaaga

SEQ ID NO: 2997840 - RNA, 14 nt, Human
aggaggucucuaag

SEQ ID NO: 2997841 - RNA, 19 nt, Human
aggaaguacuggagaaaau

SEQ ID NO: 2997842 - RNA, 20 nt, Human
aggcagagguugcagugagc

SEQ ID NO: 2997843 - RNA, 13 nt, Human
aggcagauacagg

SEQ ID NO: 2997844 - RNA, 15 nt, Human
aggcagccaggccac

SEQ ID NO: 2997845 - RNA, 16 nt, Human
aggcagccaggccaca

SEQ ID NO: 2997846 - RNA, 14 nt, Human
aggcagccaggcca

SEQ ID NO: 2997847 - RNA, 15 nt, Human
aggcacuuuaaaaca

SEQ ID NO: 2997848 - RNA, 13 nt, Human
aggccagcugcuu

SEQ ID NO: 2997849 - RNA, 14 nt, Human
aggccagcugcuug

SEQ ID NO: 2997850 - RNA, 16 nt, Human
aggccagcugcuuggg

SEQ ID NO: 2997851 - RNA, 16 nt, Human
aggccaggcccucugc

SEQ ID NO: 2997852 - RNA, 17 nt, Human
aggccaggcccucugcc

SEQ ID NO: 2997853 - RNA, 18 nt, Human
aggccaggcccucugccc

SEQ ID NO: 2997854 - RNA, 19 nt, Human
aggccaggcccucugccca

SEQ ID NO: 2997855 - RNA, 23 nt, Human
aggccaggcccucugcccacucc

SEQ ID NO: 2997856 - RNA, 23 nt, Human
aggccaugggcacuguggguaga

SEQ ID NO: 2997857 - RNA, 20 nt, Human
aggccaggcgcgguggcuca

SEQ ID NO: 2997858 - RNA, 17 nt, Human
aggcccucugcccacuc

SEQ ID NO: 2997859 - RNA, 15 nt, Human
aggcccucugcccac

SEQ ID NO: 2997860 - RNA, 16 nt, Human
aggccaugggccuccu

SEQ ID NO: 2997861 - RNA, 14 nt, Human
aggccaugggccuc

SEQ ID NO: 2997862 - RNA, 23 nt, Human
aggcaugugaugagaggaaauca

SEQ ID NO: 2997863 - RNA, 24 nt, Human
aggcaugugaugagaggaaaucac

SEQ ID NO: 2997864 - RNA, 22 nt, Human
aggcauguucucugaggacacu

SEQ ID NO: 2997865 - RNA, 20 nt, Human
aggcauguucucugaggaca

SEQ ID NO: 2997866 - RNA, 21 nt, Human
aggcauuccccaggaggccag

SEQ ID NO: 2997867 - RNA, 22 nt, Human
aggcauuccccaggaggccagc

SEQ ID NO: 2997868 - RNA, 23 nt, Human
aggcauuccccaggaggccagcc

SEQ ID NO: 2997869 - RNA, 12 nt, Human
aggccagcugcu

SEQ ID NO: 2997870 - RNA, 13 nt, Human
agcuacaaaugca

SEQ ID NO: 2997871 - RNA, 21 nt, Human
agcucaccagccccagugccc

SEQ ID NO: 2997872 - RNA, 14 nt, Human
agcucaccagcccc

SEQ ID NO: 2997873 - RNA, 13 nt, Human
agcucaccagccc

SEQ ID NO: 2997874 - RNA, 12 nt, Human
agcuacaaaugc

SEQ ID NO: 2997875 - RNA, 15 nt, Human
agcuaaugggacacu

SEQ ID NO: 2997876 - RNA, 14 nt, Human
agcuaaugggacac

SEQ ID NO: 2997877 - RNA, 13 nt, Human
agcuaaugggaca

SEQ ID NO: 2997878 - RNA, 15 nt, Human
agcgacagugagacu

SEQ ID NO: 2997879 - RNA, 13 nt, Human
agcgacagugaga

SEQ ID NO: 2997880 - RNA, 15 nt, Human
agcgauucuucugcu

SEQ ID NO: 2997881 - RNA, 19 nt, Human
agcgauucuucugcuucag

SEQ ID NO: 2997882 - RNA, 17 nt, Human
agcgauucuucugcuuc

SEQ ID NO: 2997883 - RNA, 19 nt, Human
agcuaacauggaaguacua

SEQ ID NO: 2997884 - RNA, 16 nt, Human
agcuaaagaaguuuga

SEQ ID NO: 2997885 - RNA, 20 nt, Human
agcuaacauggaaguacuau

SEQ ID NO: 2997886 - RNA, 18 nt, Human
agccugggcaaugugaua

SEQ ID NO: 2997887 - RNA, 21 nt, Human
agccugggcaacagagcaaga

SEQ ID NO: 2997888 - RNA, 20 nt, Human
agccugggaggucaaggcug

SEQ ID NO: 2997889 - RNA, 14 nt, Human
agccuggacccugu

SEQ ID NO: 2997890 - RNA, 16 nt, Human
agccuggaugccaucc

SEQ ID NO: 2997891 - RNA, 15 nt, Human
agccuggaugccauc

SEQ ID NO: 2997892 - RNA, 13 nt, Human
agccuggaugcca

SEQ ID NO: 2997893 - RNA, 11 nt, Human
agccuggaugc

SEQ ID NO: 2997894 - RNA, 10 nt, Human
agccuggaug

SEQ ID NO: 2997895 - RNA, 14 nt, Human
agcugcugaaacaa

SEQ ID NO: 2997896 - RNA, 15 nt, Human
agcugcugaaacaac

SEQ ID NO: 2997897 - RNA, 16 nt, Human
agcugcugaaacaaca

SEQ ID NO: 2997898 - RNA, 20 nt, Human
agcugcugaaacaacaaaua

SEQ ID NO: 2997899 - RNA, 22 nt, Human
agcugccuguucagcuccagcu

SEQ ID NO: 2997900 - RNA, 14 nt, Human
agcuguaugauucc

SEQ ID NO: 2997901 - RNA, 15 nt, Human
agcuggucccacuca

SEQ ID NO: 2997902 - RNA, 15 nt, Human
agcugacuuuucugu

SEQ ID NO: 2997903 - RNA, 21 nt, Human
agcugacuuuucuguccgagc

SEQ ID NO: 2997904 - RNA, 23 nt, Human
agcucaccagccccagugcccac

SEQ ID NO: 2997905 - RNA, 22 nt, Human
agcucaccagccccagugccca

SEQ ID NO: 2997906 - RNA, 18 nt, Human
agcuguaugauucccagc

SEQ ID NO: 2997907 - RNA, 17 nt, Human
agcuguaugauucccag

SEQ ID NO: 2997908 - RNA, 18 nt, Human
aggaaaaaauaacaauga

SEQ ID NO: 2997909 - RNA, 22 nt, Human
agcuuuuuucucugauacagaa

SEQ ID NO: 2997910 - RNA, 20 nt, Human
agcuuuuuucucugauacag

SEQ ID NO: 2997911 - RNA, 19 nt, Human
agcuuuuuucucugauaca

SEQ ID NO: 2997912 - RNA, 23 nt, Human
agcuuuuuucucugauacagaaa

SEQ ID NO: 2997913 - RNA, 21 nt, Human
agcuuuguuuguugucagcug

SEQ ID NO: 2997914 - RNA, 15 nt, Human
aggaacacuccuuca

SEQ ID NO: 2997915 - RNA, 23 nt, Human
aggaacuuaaauaaugugaaacu

SEQ ID NO: 2997916 - RNA, 12 nt, Human
aggaacacuccu

SEQ ID NO: 2997917 - RNA, 23 nt, Human
aggaacaaggcaaggcugucaau

SEQ ID NO: 2997918 - RNA, 14 nt, Human
aggaagguagaaau

SEQ ID NO: 2997919 - RNA, 11 nt, Human
aggaaguacug

SEQ ID NO: 2997920 - RNA, 15 nt, Human
aggaaguacuggaga

SEQ ID NO: 2997921 - RNA, 14 nt, Human
augagcuuaagaaa

SEQ ID NO: 2997922 - RNA, 23 nt, Human
augagcuuaagaaauuuguggaa

SEQ ID NO: 2997923 - RNA, 15 nt, Human
augaccuuucaauag

SEQ ID NO: 2997924 - RNA, 13 nt, Human
augaccuuucaau

SEQ ID NO: 2997925 - RNA, 11 nt, Human
augagccuggc

SEQ ID NO: 2997926 - RNA, 19 nt, Human
augagccucagcauccugg

SEQ ID NO: 2997927 - RNA, 21 nt, Human
augagccucagcauccuggca

SEQ ID NO: 2997928 - RNA, 21 nt, Human
augaaguaauaugcacacauu

SEQ ID NO: 2997929 - RNA, 14 nt, Human
augaaguaauaugc

SEQ ID NO: 2997930 - RNA, 23 nt, Human
augaaguaauaugcacacauuuu

SEQ ID NO: 2997931 - RNA, 12 nt, Human
augaaagacugu

SEQ ID NO: 2997932 - RNA, 16 nt, Human
augaaacuuuuggaag

SEQ ID NO: 2997933 - RNA, 23 nt, Human
augaagcauuuacuuuguguuca

SEQ ID NO: 2997934 - RNA, 23 nt, Human
aucuaggaagacuuuggaaagag

SEQ ID NO: 2997935 - RNA, 23 nt, Human
auggcuuccuggcaauagucaaa

SEQ ID NO: 2997936 - RNA, 14 nt, Human
augggaaagcauug

SEQ ID NO: 2997937 - RNA, 20 nt, Human
augggaaagcauuguaaaug

SEQ ID NO: 2997938 - RNA, 21 nt, Human
augggaaugaaugucagugug

SEQ ID NO: 2997939 - RNA, 20 nt, Human
augggacauuugcucaugga

SEQ ID NO: 2997940 - RNA, 15 nt, Human
augggacagggagga

SEQ ID NO: 2997941 - RNA, 14 nt, Human
augcuucuucagag

SEQ ID NO: 2997942 - RNA, 17 nt, Human
augcuucuucagagacu

SEQ ID NO: 2997943 - RNA, 20 nt, Human
augcuucuucagagacuccu

SEQ ID NO: 2997944 - RNA, 21 nt, Human
augcuucuguuuuauaauuuu

SEQ ID NO: 2997945 - RNA, 19 nt, Human
augcucugcauguuacaua

SEQ ID NO: 2997946 - RNA, 18 nt, Human
augcucugcauguuacau

SEQ ID NO: 2997947 - RNA, 15 nt, Human
augcucugcauguua

SEQ ID NO: 2997948 - RNA, 16 nt, Human
augcuuugaucccuuc

SEQ ID NO: 2997949 - RNA, 18 nt, Human
augccugguggcagcugc

SEQ ID NO: 2997950 - RNA, 19 nt, Human
augccugguggcagcugcg

SEQ ID NO: 2997951 - RNA, 14 nt, Human
augccugguggcag

SEQ ID NO: 2997952 - RNA, 13 nt, Human
augccugguggca

SEQ ID NO: 2997953 - RNA, 12 nt, Human
augccugguggc

SEQ ID NO: 2997954 - RNA, 11 nt, Human
augccuggugg

SEQ ID NO: 2997955 - RNA, 21 nt, Human
augccugguggcagcugcggu

SEQ ID NO: 2997956 - RNA, 16 nt, Human
augcauagagugugau

SEQ ID NO: 2997957 - RNA, 16 nt, Human
auagcaagacauuaua

SEQ ID NO: 2997958 - RNA, 14 nt, Human
auagcacagacccu

SEQ ID NO: 2997959 - RNA, 19 nt, Human
auauuuuuuucugaaauuu

SEQ ID NO: 2997960 - RNA, 14 nt, Human
aucaaaagaaagaa

SEQ ID NO: 2997961 - RNA, 18 nt, Human
auauuuuuuucuuuucuu

SEQ ID NO: 2997962 - RNA, 18 nt, Human
auauuuuuuucugaaauu

SEQ ID NO: 2997963 - RNA, 16 nt, Human
auauuuuuuucugaaa

SEQ ID NO: 2997964 - RNA, 14 nt, Human
auauuuuuuucuga

SEQ ID NO: 2997965 - RNA, 19 nt, Human
aucaaagagguuuuaaaaa

SEQ ID NO: 2997966 - RNA, 20 nt, Human
aucaaaagguuaauaaagua

SEQ ID NO: 2997967 - RNA, 19 nt, Human
aucaucccuuucccuuggu

SEQ ID NO: 2997968 - RNA, 15 nt, Human
aucaucccuuucccu

SEQ ID NO: 2997969 - RNA, 20 nt, Human
aucaugacaaagacugagua

SEQ ID NO: 2997970 - RNA, 21 nt, Human
aucaugaauuaguuuuauaug

SEQ ID NO: 2997971 - RNA, 15 nt, Human
aucauccuaagcuau

SEQ ID NO: 2997972 - RNA, 15 nt, Human
aucaugcauagagug

SEQ ID NO: 2997973 - RNA, 14 nt, Human
aucaugcauagagu

SEQ ID NO: 2997974 - RNA, 20 nt, Human
auccacuggguguaaacaca

SEQ ID NO: 2997975 - RNA, 21 nt, Human
auccacugugccaugugccag

SEQ ID NO: 2997976 - RNA, 21 nt, Human
auccacuggguguaaacacau

SEQ ID NO: 2997977 - RNA, 22 nt, Human
aucuaggaagacuuuggaaaga

SEQ ID NO: 2997978 - RNA, 12 nt, Human
auccuugaagau

SEQ ID NO: 2997979 - RNA, 18 nt, Human
agugauguaauuaugguu

SEQ ID NO: 2997980 - RNA, 13 nt, Human
agugauuaccagg

SEQ ID NO: 2997981 - RNA, 19 nt, Human
agugaugucacuagggcag

SEQ ID NO: 2997982 - RNA, 22 nt, Human
agugauccucccaccucagccu

SEQ ID NO: 2997983 - RNA, 20 nt, Human
agugauccucccaccucagc

SEQ ID NO: 2997984 - RNA, 19 nt, Human
agugauccucccaccucag

SEQ ID NO: 2997985 - RNA, 22 nt, Human
agugcuacacaccuaacuuaug

SEQ ID NO: 2997986 - RNA, 19 nt, Human
agugccuuauggaacacuc

SEQ ID NO: 2997987 - RNA, 20 nt, Human
agugccuuauggaacacucu

SEQ ID NO: 2997988 - RNA, 21 nt, Human
agugccuuauggaacacucug

SEQ ID NO: 2997989 - RNA, 22 nt, Human
agugccuuauggaacacucuga

SEQ ID NO: 2997990 - RNA, 18 nt, Human
agugccuuauggaacacu

SEQ ID NO: 2997991 - RNA, 20 nt, Human
agugauucuccugccucagc

SEQ ID NO: 2997992 - RNA, 18 nt, Human
agugauucuccugccuca

SEQ ID NO: 2997993 - RNA, 19 nt, Human
agugauucuccugccucag

SEQ ID NO: 2997994 - RNA, 14 nt, Human
agugacagaggcag

SEQ ID NO: 2997995 - RNA, 17 nt, Human
agugaauaaccugagga

SEQ ID NO: 2997996 - RNA, 19 nt, Human
agugacagaggcagcccca

SEQ ID NO: 2997997 - RNA, 16 nt, Human
agugacagaggcagcc

SEQ ID NO: 2997998 - RNA, 22 nt, Human
agucuggcagacuuucuucucu

SEQ ID NO: 2997999 - RNA, 18 nt, Human
agucuggcccuuccuuuu

SEQ ID NO: 2998000 - RNA, 16 nt, Human
agucgaggacagggag

SEQ ID NO: 2998001 - RNA, 12 nt, Human
agucugauuuaa

SEQ ID NO: 2998002 - RNA, 18 nt, Human
agucuggaaugcaguggu

SEQ ID NO: 2998003 - RNA, 11 nt, Human
agucugauuua

SEQ ID NO: 2998004 - RNA, 20 nt, Human
agucugauucccaagcucug

SEQ ID NO: 2998005 - RNA, 22 nt, Human
agucugauucccaagcucugcu

SEQ ID NO: 2998006 - RNA, 21 nt, Human
agucugauucccaagcucugc

SEQ ID NO: 2998007 - RNA, 13 nt, Human
agucauuuaauaa

SEQ ID NO: 2998008 - RNA, 16 nt, Human
aguccuuaccagcaga

SEQ ID NO: 2998009 - RNA, 18 nt, Human
aguccuuaccagcagagc

SEQ ID NO: 2998010 - RNA, 14 nt, Human
aguccucuuuucug

SEQ ID NO: 2998011 - RNA, 16 nt, Human
aguaucaaguauagaa

SEQ ID NO: 2998012 - RNA, 17 nt, Human
aguaucaaguauagaaa

SEQ ID NO: 2998013 - RNA, 13 nt, Human
aguacucauacau

SEQ ID NO: 2998014 - RNA, 15 nt, Human
aguacuggagaaaau

SEQ ID NO: 2998015 - RNA, 21 nt, Human
aguacuucuccacccugcucu

SEQ ID NO: 2998016 - RNA, 19 nt, Human
aguacuucuccacccugcu

SEQ ID NO: 2998017 - RNA, 20 nt, Human
aguacuucuccacccugcuc

SEQ ID NO: 2998018 - RNA, 18 nt, Human
aguaaaugggggugcauu

SEQ ID NO: 2998019 - RNA, 20 nt, Human
aguaaaugggggugcauuug

SEQ ID NO: 2998020 - RNA, 19 nt, Human
aguaaaugggggugcauuu

SEQ ID NO: 2998021 - RNA, 21 nt, Human
aguaaaugggggugcauuuga

SEQ ID NO: 2998022 - RNA, 17 nt, Human
aguaacuuacuuaggug

SEQ ID NO: 2998023 - RNA, 21 nt, Human
auaagugcuauugcagagccg

SEQ ID NO: 2998024 - RNA, 15 nt, Human
auacaccacuacauu

SEQ ID NO: 2998025 - RNA, 20 nt, Human
auacacacucaaaucaagaa

SEQ ID NO: 2998026 - RNA, 23 nt, Human
auacaaugcugugcccuaaagug

SEQ ID NO: 2998027 - RNA, 12 nt, Human
auaauguuaaca

SEQ ID NO: 2998028 - RNA, 16 nt, Human
auaagcuacugccauc

SEQ ID NO: 2998029 - RNA, 14 nt, Human
auaagcuacugcca

SEQ ID NO: 2998030 - RNA, 21 nt, Human
auaaagaugagugagcaugcc

SEQ ID NO: 2998031 - RNA, 17 nt, Human
auacaccacuacauucu

SEQ ID NO: 2998032 - RNA, 14 nt, Human
agugcuauugcaga

SEQ ID NO: 2998033 - RNA, 18 nt, Human
agugcucacccacaccau

SEQ ID NO: 2998034 - RNA, 17 nt, Human
agugcucacccacacca

SEQ ID NO: 2998035 - RNA, 16 nt, Human
aguguuuucaauuuua

SEQ ID NO: 2998036 - RNA, 18 nt, Human
aguguuuucaauuuuaaa

SEQ ID NO: 2998037 - RNA, 14 nt, Human
aguucauacccugu

SEQ ID NO: 2998038 - RNA, 18 nt, Human
aguuccaccaucaagcca

SEQ ID NO: 2998039 - RNA, 21 nt, Human
aguuccaccaucaagccacca

SEQ ID NO: 2998040 - RNA, 18 nt, Human
aguugaaaaacagcugag

SEQ ID NO: 2998041 - RNA, 16 nt, Human
aguugaagacagagcu

SEQ ID NO: 2998042 - RNA, 17 nt, Human
aguugaagacagagcua

SEQ ID NO: 2998043 - RNA, 17 nt, Human
aguugaaaaacagcuga

SEQ ID NO: 2998044 - RNA, 17 nt, Human
aguuguuauuuauugaa

SEQ ID NO: 2998045 - RNA, 17 nt, Human
aguuguuagugugucuu

SEQ ID NO: 2998046 - RNA, 22 nt, Human
aguuguuagugugucuuagugu

SEQ ID NO: 2998047 - RNA, 13 nt, Human
aguuugcagagua

SEQ ID NO: 2998048 - RNA, 11 nt, Human
aguuugcaguu

SEQ ID NO: 2998049 - RNA, 14 nt, Human
aguuugauuaaauu

SEQ ID NO: 2998050 - RNA, 16 nt, Human
auaaaagacagugaaa

SEQ ID NO: 2998051 - RNA, 15 nt, Human
auaaaagacagugaa

SEQ ID NO: 2998052 - RNA, 14 nt, Human
acgcacacugucug

SEQ ID NO: 2998053 - RNA, 19 nt, Human
acgauuucuguuuagauaa

SEQ ID NO: 2998054 - RNA, 23 nt, Human
acgauuucuguuuagauaauaca

SEQ ID NO: 2998055 - RNA, 20 nt, Human
acgauuucuguuuagauaau

SEQ ID NO: 2998056 - RNA, 22 nt, Human
acgcugugcugcccugcccacc

SEQ ID NO: 2998057 - RNA, 19 nt, Human
acgcugugcugcccugccc

SEQ ID NO: 2998058 - RNA, 12 nt, Human
acgucugugcca

SEQ ID NO: 2998059 - RNA, 13 nt, Human
acgucugugccau

SEQ ID NO: 2998060 - RNA, 14 nt, Human
acgucuuaaauauu

SEQ ID NO: 2998061 - RNA, 13 nt, Human
acgucuuaaauau

SEQ ID NO: 2998062 - RNA, 19 nt, Human
acggaauaguuggcuagga

SEQ ID NO: 2998063 - RNA, 17 nt, Human
acggacacucaaaagcu

SEQ ID NO: 2998064 - RNA, 18 nt, Human
acuaauggggcggugaga

SEQ ID NO: 2998065 - RNA, 20 nt, Human
acuaauguguaagacaaaaa

SEQ ID NO: 2998066 - RNA, 20 nt, Human
accucugccucagaaaacaa

SEQ ID NO: 2998067 - RNA, 12 nt, Human
accucugccuga

SEQ ID NO: 2998068 - RNA, 23 nt, Human
accucugccugaagucacacagu

SEQ ID NO: 2998069 - RNA, 20 nt, Human
accucugccugaagucacac

SEQ ID NO: 2998070 - RNA, 19 nt, Human
accugccaggaagccagca

SEQ ID NO: 2998071 - RNA, 23 nt, Human
accugccaggaagccagcaggcu

SEQ ID NO: 2998072 - RNA, 21 nt, Human
accugccaggaagccagcagg

SEQ ID NO: 2998073 - RNA, 22 nt, Human
accugccaggaagccagcaggc

SEQ ID NO: 2998074 - RNA, 12 nt, Human
accugccccuca

SEQ ID NO: 2998075 - RNA, 15 nt, Human
accugccccucaacu

SEQ ID NO: 2998076 - RNA, 20 nt, Human
acccucagaugcacaugagc

SEQ ID NO: 2998077 - RNA, 13 nt, Human
acccucaggcagg

SEQ ID NO: 2998078 - RNA, 14 nt, Human
acccucaggcaggu

SEQ ID NO: 2998079 - RNA, 15 nt, Human
acccucaggcaggug

SEQ ID NO: 2998080 - RNA, 16 nt, Human
acccucaggcaggugg

SEQ ID NO: 2998081 - RNA, 13 nt, Human
acccucaucacca

SEQ ID NO: 2998082 - RNA, 14 nt, Human
acccucaugcugcc

SEQ ID NO: 2998083 - RNA, 16 nt, Human
acccucaugcugccaa

SEQ ID NO: 2998084 - RNA, 23 nt, Human
acccucaucaccaacgucugugc

SEQ ID NO: 2998085 - RNA, 22 nt, Human
acccucaugcugccaauauccu

SEQ ID NO: 2998086 - RNA, 23 nt, Human
acccuggcacuauaauguaagcu

SEQ ID NO: 2998087 - RNA, 21 nt, Human
acccugucucuacuaaaaaua

SEQ ID NO: 2998088 - RNA, 16 nt, Human
acccugugauggggcc

SEQ ID NO: 2998089 - RNA, 16 nt, Human
acccuggggagaaagu

SEQ ID NO: 2998090 - RNA, 14 nt, Human
acccuauugcugcu

SEQ ID NO: 2998091 - RNA, 19 nt, Human
acccuauugcugcuugagg

SEQ ID NO: 2998092 - RNA, 13 nt, Human
acccuauugcugc

SEQ ID NO: 2998093 - RNA, 17 nt, Human
acccgucuccagcugcu

SEQ ID NO: 2998094 - RNA, 21 nt, Human
accucaggugauccacccacc

SEQ ID NO: 2998095 - RNA, 20 nt, Human
accucaggugauccacccac

SEQ ID NO: 2998096 - RNA, 11 nt, Human
accucaggccu

SEQ ID NO: 2998097 - RNA, 17 nt, Human
acccugugauggggccc

SEQ ID NO: 2998098 - RNA, 19 nt, Human
acccugugauggggcccug

SEQ ID NO: 2998099 - RNA, 20 nt, Human
acccugugauggggcccugc

SEQ ID NO: 2998100 - RNA, 21 nt, Human
acccugugauggggcccugcc

SEQ ID NO: 2998101 - RNA, 16 nt, Human
accgggcacucagaag

SEQ ID NO: 2998102 - RNA, 20 nt, Human
accgggccacagagaaagua

SEQ ID NO: 2998103 - RNA, 14 nt, Human
accgggcacucaga

SEQ ID NO: 2998104 - RNA, 12 nt, Human
accgggcacuca

SEQ ID NO: 2998105 - RNA, 11 nt, Human
accucagccuc

SEQ ID NO: 2998106 - RNA, 12 nt, Human
accucagccucc

SEQ ID NO: 2998107 - RNA, 23 nt, Human
accgugaggccagagacacaagc

SEQ ID NO: 2998108 - RNA, 18 nt, Human
accgugaggccagagaca

SEQ ID NO: 2998109 - RNA, 13 nt, Human
acugacacaugcu

SEQ ID NO: 2998110 - RNA, 23 nt, Human
acugaauuucuuuugccguuauu

SEQ ID NO: 2998111 - RNA, 18 nt, Human
acugacauuguuggccaa

SEQ ID NO: 2998112 - RNA, 17 nt, Human
acugacauuguuggcca

SEQ ID NO: 2998113 - RNA, 12 nt, Human
acugaauuucuu

SEQ ID NO: 2998114 - RNA, 20 nt, Human
acugaauuaugaaacuuuug

SEQ ID NO: 2998115 - RNA, 15 nt, Human
acugaauuaugaaac

SEQ ID NO: 2998116 - RNA, 14 nt, Human
acugaauuaugaaa

SEQ ID NO: 2998117 - RNA, 13 nt, Human
acugaauuaugaa

SEQ ID NO: 2998118 - RNA, 17 nt, Human
acugaauggacuuugca

SEQ ID NO: 2998119 - RNA, 22 nt, Human
acugaauggacuuugcacacuu

SEQ ID NO: 2998120 - RNA, 21 nt, Human
acugaucauguuuaugagaaa

SEQ ID NO: 2998121 - RNA, 19 nt, Human
acugauaugggucuugaua

SEQ ID NO: 2998122 - RNA, 23 nt, Human
acugaucauguuuaugagaaacu

SEQ ID NO: 2998123 - RNA, 23 nt, Human
acugaugggcaacccccagccug

SEQ ID NO: 2998124 - RNA, 17 nt, Human
acugauuuuuuuuuccu

SEQ ID NO: 2998125 - RNA, 18 nt, Human
acugauuuuuuuuuccuu

SEQ ID NO: 2998126 - RNA, 19 nt, Human
acugauuuuuuuuuccuuc

SEQ ID NO: 2998127 - RNA, 20 nt, Human
acugauuuuuuuuuccuuca

SEQ ID NO: 2998128 - RNA, 16 nt, Human
acugauuuuuuuuucc

SEQ ID NO: 2998129 - RNA, 14 nt, Human
acucccuuucaaca

SEQ ID NO: 2998130 - RNA, 16 nt, Human
acuccggcccuccaga

SEQ ID NO: 2998131 - RNA, 22 nt, Human
acucccaucugugaaaggaaag

SEQ ID NO: 2998132 - RNA, 23 nt, Human
acucccaugagggagaugccaug

SEQ ID NO: 2998133 - RNA, 22 nt, Human
acucccaugagggagaugccau

SEQ ID NO: 2998134 - RNA, 17 nt, Human
acucccaugagggagau

SEQ ID NO: 2998135 - RNA, 19 nt, Human
acuccggcccuccagagcc

SEQ ID NO: 2998136 - RNA, 19 nt, Human
acucguuaauuuguagugu

SEQ ID NO: 2998137 - RNA, 14 nt, Human
acucguuaauuugu

SEQ ID NO: 2998138 - RNA, 15 nt, Human
acucuacagaggcca

SEQ ID NO: 2998139 - RNA, 19 nt, Human
acuggaacacucuauaaca

SEQ ID NO: 2998140 - RNA, 17 nt, Human
acuguaaaauaauaacu

SEQ ID NO: 2998141 - RNA, 14 nt, Human
acugccaugccagc

SEQ ID NO: 2998142 - RNA, 16 nt, Human
acugugaagagaacca

SEQ ID NO: 2998143 - RNA, 16 nt, Human
acugugccaugugcca

SEQ ID NO: 2998144 - RNA, 18 nt, Human
acugugccaugugccagg

SEQ ID NO: 2998145 - RNA, 17 nt, Human
acugugccaugugccag

SEQ ID NO: 2998146 - RNA, 21 nt, Human
acuucagacauagaauuaaca

SEQ ID NO: 2998147 - RNA, 23 nt, Human
acuuggggggcugaggugggagg

SEQ ID NO: 2998148 - RNA, 21 nt, Human
acuuaaaaaugguuuaaaugg

SEQ ID NO: 2998149 - RNA, 22 nt, Human
acuuaaaaaugguuuaaauggu

SEQ ID NO: 2998150 - RNA, 18 nt, Human
acuucaaauccuugaaga

SEQ ID NO: 2998151 - RNA, 12 nt, Human
acuucagacaua

SEQ ID NO: 2998152 - RNA, 17 nt, Human
acuucaaauccuugaag

SEQ ID NO: 2998153 - RNA, 18 nt, Human
acuguuucaaacuuuacu

SEQ ID NO: 2998154 - RNA, 15 nt, Human
acuguuucaaacuuu

SEQ ID NO: 2998155 - RNA, 13 nt, Human
acuguuucaaacu

SEQ ID NO: 2998156 - RNA, 19 nt, Human
acuguuucaaacuuuacua

SEQ ID NO: 2998157 - RNA, 14 nt, Human
acaucauuucaaga

SEQ ID NO: 2998158 - RNA, 16 nt, Human
acauacaauuccaaac

SEQ ID NO: 2998159 - RNA, 20 nt, Human
acauacaggaagguagaaau

SEQ ID NO: 2998160 - RNA, 20 nt, Human
acauaaauuuaguauuuugu

SEQ ID NO: 2998161 - RNA, 22 nt, Human
acauguguguauauguagaugu

SEQ ID NO: 2998162 - RNA, 20 nt, Human
acaugccucucucaggccaa

SEQ ID NO: 2998163 - RNA, 13 nt, Human
acaugcacgugug

SEQ ID NO: 2998164 - RNA, 23 nt, Human
acaugcacagcuaacauggaagu

SEQ ID NO: 2998165 - RNA, 19 nt, Human
acauguuuuucuucucccu

SEQ ID NO: 2998166 - RNA, 19 nt, Human
acauuuguauaaaauaauu

SEQ ID NO: 2998167 - RNA, 16 nt, Human
acauuuguauaaaaua

SEQ ID NO: 2998168 - RNA, 15 nt, Human
acauuugcucaugga

SEQ ID NO: 2998169 - RNA, 14 nt, Human
accaacgucugugc

SEQ ID NO: 2998170 - RNA, 17 nt, Human
accaacgucugugccau

SEQ ID NO: 2998171 - RNA, 21 nt, Human
accaacgucugugccauuuug

SEQ ID NO: 2998172 - RNA, 12 nt, Human
accaagcccagu

SEQ ID NO: 2998173 - RNA, 16 nt, Human
accacgcuggaccuug

SEQ ID NO: 2998174 - RNA, 14 nt, Human
accacgcuggaccu

SEQ ID NO: 2998175 - RNA, 18 nt, Human
accacgcuggaccuugaa

SEQ ID NO: 2998176 - RNA, 14 nt, Human
accacguuucuaaa

SEQ ID NO: 2998177 - RNA, 13 nt, Human
accacguuucuaa

SEQ ID NO: 2998178 - RNA, 14 nt, Human
accagagcugccac

SEQ ID NO: 2998179 - RNA, 16 nt, Human
accagagcugccaccu

SEQ ID NO: 2998180 - RNA, 13 nt, Human
accagagcugcca

SEQ ID NO: 2998181 - RNA, 12 nt, Human
accagagcugcc

SEQ ID NO: 2998182 - RNA, 22 nt, Human
acaggaugguucccuugaugaa

SEQ ID NO: 2998183 - RNA, 24 nt, Human
acaggaugguucccuugaugaaga

SEQ ID NO: 2998184 - RNA, 17 nt, Human
acaggcaaugcuggcug

SEQ ID NO: 2998185 - RNA, 14 nt, Human
acaggcacccacca

SEQ ID NO: 2998186 - RNA, 16 nt, Human
acaggcaaugcuggcu

SEQ ID NO: 2998187 - RNA, 15 nt, Human
acaggcaaugcuggc

SEQ ID NO: 2998188 - RNA, 18 nt, Human
acagcucuucuccaggcu

SEQ ID NO: 2998189 - RNA, 20 nt, Human
acagcucuucuccaggcugu

SEQ ID NO: 2998190 - RNA, 19 nt, Human
acagcucuucuccaggcug

SEQ ID NO: 2998191 - RNA, 19 nt, Human
acagugauuaccagggacu

SEQ ID NO: 2998192 - RNA, 23 nt, Human
acagugaucaaguuauuuuuaau

SEQ ID NO: 2998193 - RNA, 23 nt, Human
acaggcacccaccaucaugucug

SEQ ID NO: 2998194 - RNA, 20 nt, Human
aauuaugguuaguagaggua

SEQ ID NO: 2998195 - RNA, 13 nt, Human
aauuccuguuuuu

SEQ ID NO: 2998196 - RNA, 22 nt, Human
aauuccuguuuuuauuauuaac

SEQ ID NO: 2998197 - RNA, 21 nt, Human
aauuccuguuuuuauuauuaa

SEQ ID NO: 2998198 - RNA, 19 nt, Human
aauuccuguuuuuauuauu

SEQ ID NO: 2998199 - RNA, 13 nt, Human
aauuaugaaaaua

SEQ ID NO: 2998200 - RNA, 12 nt, Human
aauuaugaaacu

SEQ ID NO: 2998201 - RNA, 15 nt, Human
aauuaugaaacuuuu

SEQ ID NO: 2998202 - RNA, 13 nt, Human
aauuaugaaacuu

SEQ ID NO: 2998203 - RNA, 19 nt, Human
aauuaugaguuauuuuuau

SEQ ID NO: 2998204 - RNA, 18 nt, Human
aauuaugaaacuuuugga

SEQ ID NO: 2998205 - RNA, 19 nt, Human
aauucucagaaucucaaau

SEQ ID NO: 2998206 - RNA, 14 nt, Human
aauucuacuuugag

SEQ ID NO: 2998207 - RNA, 17 nt, Human
aauucucuaguuugauu

SEQ ID NO: 2998208 - RNA, 15 nt, Human
aauucucuaguuuga

SEQ ID NO: 2998209 - RNA, 15 nt, Human
aauucucuuauccaa

SEQ ID NO: 2998210 - RNA, 21 nt, Human
aauucucauuugucacacacu

SEQ ID NO: 2998211 - RNA, 14 nt, Human
aauucuguuuuucu

SEQ ID NO: 2998212 - RNA, 18 nt, Human
aauucuguuuuucuaggc

SEQ ID NO: 2998213 - RNA, 15 nt, Human
aauuggagcucgugg

SEQ ID NO: 2998214 - RNA, 18 nt, Human
aauugggcacuauuuauu

SEQ ID NO: 2998215 - RNA, 16 nt, Human
aauugggcacuauuua

SEQ ID NO: 2998216 - RNA, 22 nt, Human
aauuguaaggaaugauuaauua

SEQ ID NO: 2998217 - RNA, 15 nt, Human
aauugggcacuauuu

SEQ ID NO: 2998218 - RNA, 15 nt, Human
aauuuccugggagcu

SEQ ID NO: 2998219 - RNA, 12 nt, Human
aauuuccuggga

SEQ ID NO: 2998220 - RNA, 15 nt, Human
aauuucccaaagcag

SEQ ID NO: 2998221 - RNA, 17 nt, Human
aauuucccaaagcagug

SEQ ID NO: 2998222 - RNA, 21 nt, Human
aauuuccauuuacuuaagacu

SEQ ID NO: 2998223 - RNA, 22 nt, Human
aauuuccauuuacuuaagacuu

SEQ ID NO: 2998224 - RNA, 11 nt, Human
aauuguaauag

SEQ ID NO: 2998225 - RNA, 22 nt, Human
aauuucauaccuaucaucuuaa

SEQ ID NO: 2998226 - RNA, 15 nt, Human
acaccaauauucaua

SEQ ID NO: 2998227 - RNA, 13 nt, Human
acaccagagccca

SEQ ID NO: 2998228 - RNA, 23 nt, Human
acaccagagcccaccuuggcuca

SEQ ID NO: 2998229 - RNA, 18 nt, Human
acaccagagcccaccuug

SEQ ID NO: 2998230 - RNA, 18 nt, Human
acacagcucuucuccagg

SEQ ID NO: 2998231 - RNA, 16 nt, Human
acacagcucuucucca

SEQ ID NO: 2998232 - RNA, 14 nt, Human
acacagcucuucuc

SEQ ID NO: 2998233 - RNA, 21 nt, Human
acaaacaaggccugucagcua

SEQ ID NO: 2998234 - RNA, 16 nt, Human
acaaggcaaggcuguc

SEQ ID NO: 2998235 - RNA, 17 nt, Human
acaaggcaaggcuguca

SEQ ID NO: 2998236 - RNA, 19 nt, Human
acaaggcaaggcugucaau

SEQ ID NO: 2998237 - RNA, 15 nt, Human
acaaggcaaggcugu

SEQ ID NO: 2998238 - RNA, 15 nt, Human
acaaguuaaauaaau

SEQ ID NO: 2998239 - RNA, 18 nt, Human
aaggcaggggaauguaug

SEQ ID NO: 2998240 - RNA, 20 nt, Human
aaggcaggggaauguaugug

SEQ ID NO: 2998241 - RNA, 15 nt, Human
aaggcaaggcuguca

SEQ ID NO: 2998242 - RNA, 13 nt, Human
aaggcaaggcugu

SEQ ID NO: 2998243 - RNA, 13 nt, Human
aagcugcacccuc

SEQ ID NO: 2998244 - RNA, 19 nt, Human
aagcugcacccucaggcag

SEQ ID NO: 2998245 - RNA, 13 nt, Human
aagcuacuuauug

SEQ ID NO: 2998246 - RNA, 15 nt, Human
aagcgugagccacug

SEQ ID NO: 2998247 - RNA, 14 nt, Human
aagcggcuggcagc

SEQ ID NO: 2998248 - RNA, 17 nt, Human
aagauacaguuacucag

SEQ ID NO: 2998249 - RNA, 19 nt, Human
aagauaauauuaaggaaga

SEQ ID NO: 2998250 - RNA, 21 nt, Human
aagauaauauuaaggaagaca

SEQ ID NO: 2998251 - RNA, 14 nt, Human
aagauaaaugugcu

SEQ ID NO: 2998252 - RNA, 22 nt, Human
aagacagagccccacccucaga

SEQ ID NO: 2998253 - RNA, 23 nt, Human
aagacagauacuccuccaagguu

SEQ ID NO: 2998254 - RNA, 13 nt, Human
aagagaaaaaaua

SEQ ID NO: 2998255 - RNA, 19 nt, Human
aagacuuuucuuucagcca

SEQ ID NO: 2998256 - RNA, 21 nt, Human
aagacuuuuccaacccucauc

SEQ ID NO: 2998257 - RNA, 12 nt, Human
aagacuuuucuu

SEQ ID NO: 2998258 - RNA, 17 nt, Human
aagaccacguuucuaaa

SEQ ID NO: 2998259 - RNA, 15 nt, Human
aagaccacguuucua

SEQ ID NO: 2998260 - RNA, 17 nt, Human
aagacuuuuccaacccu

SEQ ID NO: 2998261 - RNA, 20 nt, Human
aacgcaggcccccaggugcc

SEQ ID NO: 2998262 - RNA, 13 nt, Human
aagaacugaaauc

SEQ ID NO: 2998263 - RNA, 12 nt, Human
aagaacugaaau

SEQ ID NO: 2998264 - RNA, 11 nt, Human
aagaacugaaa

SEQ ID NO: 2998265 - RNA, 15 nt, Human
aagaacugaaaucau

SEQ ID NO: 2998266 - RNA, 20 nt, Human
aagacaaugugaaaagaaaa

SEQ ID NO: 2998267 - RNA, 19 nt, Human
aagacaaugugaaaagaaa

SEQ ID NO: 2998268 - RNA, 22 nt, Human
aagacaaugacuuacuguacau

SEQ ID NO: 2998269 - RNA, 15 nt, Human
aagaagacugcauua

SEQ ID NO: 2998270 - RNA, 21 nt, Human
aagacaaggaaaaaauaacaa

SEQ ID NO: 2998271 - RNA, 20 nt, Human
aagaagacugcauuauauuu

SEQ ID NO: 2998272 - RNA, 20 nt, Human
aagaguaggaagacuuugga

SEQ ID NO: 2998273 - RNA, 19 nt, Human
aauaauguuaacauggaca

SEQ ID NO: 2998274 - RNA, 14 nt, Human
aauaaagcagcguu

SEQ ID NO: 2998275 - RNA, 22 nt, Human
aauaaugugaaacuggauuaaa

SEQ ID NO: 2998276 - RNA, 17 nt, Human
aauaaugugaaacugga

SEQ ID NO: 2998277 - RNA, 22 nt, Human
aagugcugcauuuaaaagauac

SEQ ID NO: 2998278 - RNA, 14 nt, Human
aagugcugcauuua

SEQ ID NO: 2998279 - RNA, 12 nt, Human
aagugcugggau

SEQ ID NO: 2998280 - RNA, 13 nt, Human
aauauuaagaaag

SEQ ID NO: 2998281 - RNA, 23 nt, Human
aauauguggaguucaucuugaau

SEQ ID NO: 2998282 - RNA, 23 nt, Human
aaucaccgaaaacguggcugcuu

SEQ ID NO: 2998283 - RNA, 21 nt, Human
aaucaccgaaaacguggcugc

SEQ ID NO: 2998284 - RNA, 21 nt, Human
aaucaaucaugucagucugcu

SEQ ID NO: 2998285 - RNA, 16 nt, Human
aaucucaauauuucag

SEQ ID NO: 2998286 - RNA, 20 nt, Human
aaugaauacuuuauaaagga

SEQ ID NO: 2998287 - RNA, 20 nt, Human
aaugaugccaugaggaacaa

SEQ ID NO: 2998288 - RNA, 20 nt, Human
aaugaaagacuguacaaagu

SEQ ID NO: 2998289 - RNA, 18 nt, Human
aaugaaagacuguacaaa

SEQ ID NO: 2998290 - RNA, 21 nt, Human
aaugaaagacuguacaaagua

SEQ ID NO: 2998291 - RNA, 20 nt, Human
aaugaagauacugaaauaaa

SEQ ID NO: 2998292 - RNA, 14 nt, Human
aaauagaugacauu

SEQ ID NO: 2998293 - RNA, 21 nt, Human
aaauagaugacauugacuauu

SEQ ID NO: 2998294 - RNA, 22 nt, Human
aaauagcagcccucaauuguga

SEQ ID NO: 2998295 - RNA, 21 nt, Human
aaauauuuauuuuaauaaugu

SEQ ID NO: 2998296 - RNA, 18 nt, Human
aaaucucaauauuucaga

SEQ ID NO: 2998297 - RNA, 13 nt, Human
aaaucuuuuugcu

SEQ ID NO: 2998298 - RNA, 14 nt, Human
aaaucuuuuugcuu

SEQ ID NO: 2998299 - RNA, 19 nt, Human
aaaugcuguaacuuucuga

SEQ ID NO: 2998300 - RNA, 14 nt, Human
aaaggaugcacaga

SEQ ID NO: 2998301 - RNA, 20 nt, Human
aaaggaugcccaaagaugca

SEQ ID NO: 2998302 - RNA, 22 nt, Human
aaauguugacaugggacauuug

SEQ ID NO: 2998303 - RNA, 13 nt, Human
aaauguucaucaa

SEQ ID NO: 2998304 - RNA, 23 nt, Human
aaauguugacaugggacauuugc

SEQ ID NO: 2998305 - RNA, 22 nt, Human
aaauguuuugcucaauagauug

SEQ ID NO: 2998306 - RNA, 11 nt, Human
aaauguuuugc

SEQ ID NO: 2998307 - RNA, 15 nt, Human
aaauucuugcaaagu

SEQ ID NO: 2998308 - RNA, 23 nt, Human
aaauucuucuccacuuucuagcc

SEQ ID NO: 2998309 - RNA, 11 nt, Human
aacaggcagau

SEQ ID NO: 2998310 - RNA, 22 nt, Human
aacauggccuuugcuugaaaga

SEQ ID NO: 2998311 - RNA, 16 nt, Human
aaccuuuugagugccu

SEQ ID NO: 2998312 - RNA, 23 nt, Human
aaccuuuugagugccuuacacaa

SEQ ID NO: 2998313 - RNA, 23 nt, Human
aacauggccuuugcuugaaagaa

SEQ ID NO: 2998314 - RNA, 18 nt, Human
aaaaucucaaauuucuaa

SEQ ID NO: 2998315 - RNA, 16 nt, Human
aaaaucucaaauuucu

SEQ ID NO: 2998316 - RNA, 15 nt, Human
aaaaucucaaauuuc

SEQ ID NO: 2998317 - RNA, 21 nt, Human
aaaaucauuucugcaucagcu

SEQ ID NO: 2998318 - RNA, 15 nt, Human
aaaccgccaaggcug

SEQ ID NO: 2998319 - RNA, 16 nt, Human
aaaccgccaaggcugg

SEQ ID NO: 2998320 - RNA, 12 nt, Human
aaacccagcucu

SEQ ID NO: 2998321 - RNA, 16 nt, Human
aaacccagcucugguc

SEQ ID NO: 2998322 - RNA, 22 nt, Human
aaaccgaacugauguaaguaaa

SEQ ID NO: 2998323 - RNA, 19 nt, Human
aaacccuugccaugugcua

SEQ ID NO: 2998324 - RNA, 12 nt, Human
aaacucuuaaaa

SEQ ID NO: 2998325 - RNA, 23 nt, Human
aaacucuuaaaacccaagugccu

SEQ ID NO: 2998326 - RNA, 22 nt, Human
aaacugauuuuuuuuuccuuca

SEQ ID NO: 2998327 - RNA, 23 nt, Human
aaacugauuuuuuuuuccuucag

SEQ ID NO: 2998328 - RNA, 15 nt, Human
aaacugcacugucaa

SEQ ID NO: 2998329 - RNA, 20 nt, Human
aaagauauuuugcuuuguga

SEQ ID NO: 2998330 - RNA, 15 nt, Human
aaagcauuguaaaug

SEQ ID NO: 2998331 - RNA, 17 nt, Human
aaagcauuguaaaugug

SEQ ID NO: 2998332 - RNA, 16 nt, Human
aaagccucuguuuuga

SEQ ID NO: 2998333 - RNA, 17 nt, Human
aaagccucuguuuugau

SEQ ID NO: 2998334 - RNA, 16 nt, Human
aaagccuccuccagcc

SEQ ID NO: 2998335 - RNA, 13 nt, Human
aaaaucagccugc

SEQ ID NO: 2998336 - RNA, 16 nt, Human
aaaauaaaacuuuuua

SEQ ID NO: 2998337 - RNA, 17 nt, Human
aaaaucagccugcucca

SEQ ID NO: 2998338 - RNA, 21 nt, Human
aaaaucagccugcuccagcug

SEQ ID NO: 2998339 - RNA, 11 nt, Human
aaaaucauuuc

SEQ ID NO: 2998340 - RNA, 12 nt, Human
aaaaucauuucu

SEQ ID NO: 2998341 - RNA, 10 nt, Human
aaaaucauuu

SEQ ID NO: 2998342 - RNA, 18 nt, Human
aaaaguugaauuuuacau

SEQ ID NO: 2998343 - RNA, 13 nt, Human
aaaaguugaauuu

SEQ ID NO: 2998344 - RNA, 14 nt, Human
aaaauaaaacuuuu

SEQ ID NO: 2998345 - RNA, 17 nt, Human
aaaagaaagaaaaucag

SEQ ID NO: 2998346 - RNA, 13 nt, Human
aaaagaaaaguuu

SEQ ID NO: 2998347 - RNA, 12 nt, Human
aaaagaauauuu

SEQ ID NO: 2998348 - RNA, 20 nt, Human
aaaagacaaggaaaaaauaa

SEQ ID NO: 2998349 - RNA, 13 nt, Human
aaaagaauauuuu

SEQ ID NO: 2998350 - RNA, 11 nt, Human
aaaagaaugau

SEQ ID NO: 2998351 - RNA, 13 nt, Human
aaaagacuccaaa

SEQ ID NO: 2998352 - RNA, 11 nt, Human
aaaagaaaaag

SEQ ID NO: 2998353 - RNA, 19 nt, Human
aaaacacuguucucugccc

SEQ ID NO: 2998354 - RNA, 17 nt, Human
aaaacacauuuuucuua

SEQ ID NO: 2998355 - RNA, 15 nt, Human
auuuaaauagaugac

SEQ ID NO: 2998356 - RNA, 16 nt, Human
auuuaaauagcuuuuu

SEQ ID NO: 2998357 - RNA, 14 nt, Human
auuuaaauagauga

SEQ ID NO: 2998358 - RNA, 22 nt, Human
auuuacaacugggggaggguga

SEQ ID NO: 2998359 - RNA, 15 nt, Human
auuuaccacuugugu

SEQ ID NO: 2998360 - RNA, 22 nt, Human
auuuaccacuuguguuuugcaa

SEQ ID NO: 2998361 - RNA, 19 nt, Human
auuguuuucaguguacaug

SEQ ID NO: 2998362 - RNA, 18 nt, Human
auuguuuucaguguacau

SEQ ID NO: 2998363 - RNA, 17 nt, Human
auuuaaaaaaaaaccug

SEQ ID NO: 2998364 - RNA, 14 nt, Human
auuuaaaaaaaauc

SEQ ID NO: 2998365 - RNA, 17 nt, Human
auuguagcauccuggaa

SEQ ID NO: 2998366 - RNA, 16 nt, Human
auuguaguccuguaau

SEQ ID NO: 2998367 - RNA, 20 nt, Human
auuguagcauccuggaauau

SEQ ID NO: 2998368 - RNA, 17 nt, Human
auuguuuucaguguaca

SEQ ID NO: 2998369 - RNA, 15 nt, Human
auuuacuuuaaacua

SEQ ID NO: 2998370 - RNA, 20 nt, Human
auuuacuucuuauacauuug

SEQ ID NO: 2998371 - RNA, 19 nt, Human
auuuacuucuuauacauuu

SEQ ID NO: 2998372 - RNA, 12 nt, Human
auuuauuacaac

SEQ ID NO: 2998373 - RNA, 13 nt, Human
auuuauugaaaug

SEQ ID NO: 2998374 - RNA, 15 nt, Human
auuuauugaaaugau

SEQ ID NO: 2998375 - RNA, 22 nt, Human
auuuauugaaaugauuucacag

SEQ ID NO: 2998376 - RNA, 20 nt, Human
auuuauuacuguaagaaaau

SEQ ID NO: 2998377 - RNA, 19 nt, Human
auuuauuacuguaagaaaa

SEQ ID NO: 2998378 - RNA, 17 nt, Human
auuuccguuaaaauacc

SEQ ID NO: 2998379 - RNA, 14 nt, Human
auuucccaaagcag

SEQ ID NO: 2998380 - RNA, 16 nt, Human
auuucccaaagcagug

SEQ ID NO: 2998381 - RNA, 20 nt, Human
auuuccauuuacuuaagacu

SEQ ID NO: 2998382 - RNA, 19 nt, Human
auuuccauuuacuuaagac

SEQ ID NO: 2998383 - RNA, 22 nt, Human
auuuccauuuacuuaagacuua

SEQ ID NO: 2998384 - RNA, 21 nt, Human
auuuauuuuaauaauguuuca

SEQ ID NO: 2998385 - RNA, 18 nt, Human
auuuccauuuacuuaaga

SEQ ID NO: 2998386 - RNA, 18 nt, Human
auuugauaugugaacagu

SEQ ID NO: 2998387 - RNA, 19 nt, Human
auuugauaugugaacaguu

SEQ ID NO: 2998388 - RNA, 21 nt, Human
auuugaggucuguucuuucca

SEQ ID NO: 2998389 - RNA, 14 nt, Human
auuugguuuucaca

SEQ ID NO: 2998390 - RNA, 12 nt, Human
auuugguuuuca

SEQ ID NO: 2998391 - RNA, 21 nt, Human
auuuggugguuucagaaaugu

SEQ ID NO: 2998392 - RNA, 18 nt, Human
auuugaggucuguucuuu

SEQ ID NO: 2998393 - RNA, 17 nt, Human
auuugaggucuguucuu

SEQ ID NO: 2998394 - RNA, 15 nt, Human
auuugaggucuguuc

SEQ ID NO: 2998395 - RNA, 15 nt, Human
auuugagcagggcuc

SEQ ID NO: 2998396 - RNA, 20 nt, Human
auuucuugagguaaaagcau

SEQ ID NO: 2998397 - RNA, 16 nt, Human
auuucuuccacaagag

SEQ ID NO: 2998398 - RNA, 17 nt, Human
auugcaccuggauguac

SEQ ID NO: 2998399 - RNA, 16 nt, Human
auugcaacaggcuggg

SEQ ID NO: 2998400 - RNA, 17 nt, Human
auugcauacuauuaaac

SEQ ID NO: 2998401 - RNA, 18 nt, Human
auugcauacuauuaaaca

SEQ ID NO: 2998402 - RNA, 18 nt, Human
auugcaacaggcugggcu

SEQ ID NO: 2998403 - RNA, 17 nt, Human
auugcaacaggcugggc

SEQ ID NO: 2998404 - RNA, 12 nt, Human
auugcaccacug

SEQ ID NO: 2998405 - RNA, 19 nt, Human
auugcaacaggcugggcuu

SEQ ID NO: 2998406 - RNA, 13 nt, Human
auugauguuuuca

SEQ ID NO: 2998407 - RNA, 16 nt, Human
auugauguuuucauag

SEQ ID NO: 2998408 - RNA, 17 nt, Human
auugauguuuucauaga

SEQ ID NO: 2998409 - RNA, 14 nt, Human
auugaaguaaaaug

SEQ ID NO: 2998410 - RNA, 17 nt, Human
auugaaggaugcugucu

SEQ ID NO: 2998411 - RNA, 24 nt, Human
auuccuagaaacugacacaugcug

SEQ ID NO: 2998412 - RNA, 15 nt, Human
auugaaguaaaaugu

SEQ ID NO: 2998413 - RNA, 21 nt, Human
auugccuuuuuauaacuuuuu

SEQ ID NO: 2998414 - RNA, 20 nt, Human
auugccuuuuuauaacuuuu

SEQ ID NO: 2998415 - RNA, 19 nt, Human
auugccuuuuuauaacuuu

SEQ ID NO: 2998416 - RNA, 13 nt, Human
auuggaaacaagu

SEQ ID NO: 2998417 - RNA, 14 nt, Human
auuggaaacaaguc

SEQ ID NO: 2998418 - RNA, 20 nt, Human
auugcauacuauuaaacaug

SEQ ID NO: 2998419 - RNA, 19 nt, Human
auugcauacuauuaaacau

SEQ ID NO: 2998420 - RNA, 22 nt, Human
auugcauacuauuaaacaugcu

SEQ ID NO: 2998421 - RNA, 17 nt, Human
auuggagcucgugggac

SEQ ID NO: 2998422 - RNA, 16 nt, Human
auuggagcucguggaa

SEQ ID NO: 2998423 - RNA, 22 nt, Human
auuggcuagagguucaaagaua

SEQ ID NO: 2998424 - RNA, 20 nt, Human
auuggcuagagguucaaaga

SEQ ID NO: 2998425 - RNA, 19 nt, Human
auuggcuagagguucaaag

SEQ ID NO: 2998426 - RNA, 14 nt, Human
auuggggcucccag

SEQ ID NO: 2998427 - RNA, 23 nt, Human
auuggcuagagguucaaagauau

SEQ ID NO: 2998428 - RNA, 14 nt, Human
auguugcuaacagc

SEQ ID NO: 2998429 - RNA, 21 nt, Human
uuuuagacccuauugcugcuu

SEQ ID NO: 2998430 - RNA, 17 nt, Human
uuuuagaguugauacua

SEQ ID NO: 2998431 - RNA, 15 nt, Human
auguugcccaggcag

SEQ ID NO: 2998432 - RNA, 14 nt, Human
auguugcccaggca

SEQ ID NO: 2998433 - RNA, 18 nt, Human
auguugaaagaucaaaag

SEQ ID NO: 2998434 - RNA, 13 nt, Human
auguugcccaggc

SEQ ID NO: 2998435 - RNA, 12 nt, Human
auguugaaagau

SEQ ID NO: 2998436 - RNA, 19 nt, Human
auguuacauaagauaaaug

SEQ ID NO: 2998437 - RNA, 20 nt, Human
auguuacauaagauaaaugu

SEQ ID NO: 2998438 - RNA, 17 nt, Human
uuuguuuuuauuaaaag

SEQ ID NO: 2998439 - RNA, 18 nt, Human
uuuuaaaaaacugcugac

SEQ ID NO: 2998440 - RNA, 20 nt, Human
augugcuaguaauuggaaag

SEQ ID NO: 2998441 - RNA, 21 nt, Human
augugcuaguaauuggaaagg

SEQ ID NO: 2998442 - RNA, 13 nt, Human
uuuucuguucuuu

SEQ ID NO: 2998443 - RNA, 17 nt, Human
auguuggccaggcuggu

SEQ ID NO: 2998444 - RNA, 23 nt, Human
auuaaaaaucucaaauuucuaaa

SEQ ID NO: 2998445 - RNA, 19 nt, Human
auuaaaacacaacaucuuu

SEQ ID NO: 2998446 - RNA, 17 nt, Human
uuuucucugauacagaa

SEQ ID NO: 2998447 - RNA, 16 nt, Human
uuuucucuaggaaaua

SEQ ID NO: 2998448 - RNA, 20 nt, Human
uuuucaggcuagauguaugu

SEQ ID NO: 2998449 - RNA, 21 nt, Human
uuuuauggcuuuugugcauua

SEQ ID NO: 2998450 - RNA, 12 nt, Human
uuuuauuaaauu

SEQ ID NO: 2998451 - RNA, 19 nt, Human
uuuuauggcuuuugugcau

SEQ ID NO: 2998452 - RNA, 18 nt, Human
uuuuauggcuuuugugca

SEQ ID NO: 2998453 - RNA, 22 nt, Human
uuuuauggcacuaguauuucua

SEQ ID NO: 2998454 - RNA, 15 nt, Human
uuuuaguagagacag

SEQ ID NO: 2998455 - RNA, 23 nt, Human
uuugagaaauuuuuuuuuccagu

SEQ ID NO: 2998456 - RNA, 13 nt, Human
uuugagacagagu

SEQ ID NO: 2998457 - RNA, 18 nt, Human
uuugaccucugcagcaau

SEQ ID NO: 2998458 - RNA, 15 nt, Human
uuugauccaagcugg

SEQ ID NO: 2998459 - RNA, 14 nt, Human
uuugauccaagcug

SEQ ID NO: 2998460 - RNA, 15 nt, Human
uuugauucagacagc

SEQ ID NO: 2998461 - RNA, 23 nt, Human
uuucccucccuuccucuuuccau

SEQ ID NO: 2998462 - RNA, 21 nt, Human
uuugaccucugcagcaauaaa

SEQ ID NO: 2998463 - RNA, 19 nt, Human
uuugaccucugcagcaaua

SEQ ID NO: 2998464 - RNA, 14 nt, Human
uuugacaaggggca

SEQ ID NO: 2998465 - RNA, 12 nt, Human
uuuggcugcuga

SEQ ID NO: 2998466 - RNA, 13 nt, Human
uuuggcugcugaa

SEQ ID NO: 2998467 - RNA, 21 nt, Human
uuugggguacccacugcucug

SEQ ID NO: 2998468 - RNA, 22 nt, Human
uuugggguacccacugcucugg

SEQ ID NO: 2998469 - RNA, 19 nt, Human
uuugcuggggccgaaagaa

SEQ ID NO: 2998470 - RNA, 22 nt, Human
uuugcuggggccgaaagaacag

SEQ ID NO: 2998471 - RNA, 20 nt, Human
uuugcuggagcucugcccau

SEQ ID NO: 2998472 - RNA, 22 nt, Human
uuuggauuggaugaauuccaaa

SEQ ID NO: 2998473 - RNA, 18 nt, Human
uuugauucagacagcugc

SEQ ID NO: 2998474 - RNA, 23 nt, Human
augucgucaaagcugaaauggac

SEQ ID NO: 2998475 - RNA, 13 nt, Human
augugagaccauu

SEQ ID NO: 2998476 - RNA, 14 nt, Human
augugagacugguu

SEQ ID NO: 2998477 - RNA, 19 nt, Human
auguauauuuuauaucaau

SEQ ID NO: 2998478 - RNA, 12 nt, Human
auguaucaauga

SEQ ID NO: 2998479 - RNA, 16 nt, Human
auguccaagaagccca

SEQ ID NO: 2998480 - RNA, 17 nt, Human
auguccaagaagcccag

SEQ ID NO: 2998481 - RNA, 14 nt, Human
uuuguacagacaac

SEQ ID NO: 2998482 - RNA, 16 nt, Human
uuuguaauuuuuuuau

SEQ ID NO: 2998483 - RNA, 23 nt, Human
uuugucuuaaaaaguggaaaaau

SEQ ID NO: 2998484 - RNA, 16 nt, Human
uuugugauacaaugcu

SEQ ID NO: 2998485 - RNA, 13 nt, Human
uuugucuuaaaaa

SEQ ID NO: 2998486 - RNA, 14 nt, Human
uuugucuuaaaaag

SEQ ID NO: 2998487 - RNA, 19 nt, Human
uuugugcauuaucuagaua

SEQ ID NO: 2998488 - RNA, 22 nt, Human
uuugugauacaaugcugugccc

SEQ ID NO: 2998489 - RNA, 15 nt, Human
uuugugauacaaugc

SEQ ID NO: 2998490 - RNA, 22 nt, Human
uuugugcauuaucuagauacug

SEQ ID NO: 2998491 - RNA, 14 nt, Human
uuuguuucugaaag

SEQ ID NO: 2998492 - RNA, 16 nt, Human
uuuguuucugaaaggg

SEQ ID NO: 2998493 - RNA, 21 nt, Human
auuccuaacuaucacugguuu

SEQ ID NO: 2998494 - RNA, 22 nt, Human
auuccccaggaggccagccuug

SEQ ID NO: 2998495 - RNA, 19 nt, Human
auucccaagcucugcuccu

SEQ ID NO: 2998496 - RNA, 18 nt, Human
auucccaagcucugcucc

SEQ ID NO: 2998497 - RNA, 20 nt, Human
auuccccaggaggccagccu

SEQ ID NO: 2998498 - RNA, 17 nt, Human
auuccaagugauugaaa

SEQ ID NO: 2998499 - RNA, 17 nt, Human
auucccaagcucugcuc

SEQ ID NO: 2998500 - RNA, 21 nt, Human
auuaguuuugaagauucuaug

SEQ ID NO: 2998501 - RNA, 20 nt, Human
auuauauggcuugaguuuaa

SEQ ID NO: 2998502 - RNA, 17 nt, Human
auuauugauguuuucau

SEQ ID NO: 2998503 - RNA, 22 nt, Human
auucaaacagucucaggaaauc

SEQ ID NO: 2998504 - RNA, 21 nt, Human
auucaccuccuaaaacaacag

SEQ ID NO: 2998505 - RNA, 18 nt, Human
auucaccuccuaaaacaa

SEQ ID NO: 2998506 - RNA, 19 nt, Human
auucaccuccuaaaacaac

SEQ ID NO: 2998507 - RNA, 15 nt, Human
uuuuugguauuugaa

SEQ ID NO: 2998508 - RNA, 13 nt, Human
auuaaggaagaca

SEQ ID NO: 2998509 - RNA, 19 nt, Human
auuaaguacuauguaucaa

SEQ ID NO: 2998510 - RNA, 16 nt, Human
auuaaguacuauguau

SEQ ID NO: 2998511 - RNA, 18 nt, Human
auuaaguacuauguauca

SEQ ID NO: 2998512 - RNA, 18 nt, Human
uuuuuggaaaagaauaaa

SEQ ID NO: 2998513 - RNA, 15 nt, Human
uuuuugaagcuguau

SEQ ID NO: 2998514 - RNA, 12 nt, Human
uuuuguguacuu

SEQ ID NO: 2998515 - RNA, 23 nt, Human
uuuugugcauuaucuagauacug

SEQ ID NO: 2998516 - RNA, 14 nt, Human
uuuugugaagcaaa

SEQ ID NO: 2998517 - RNA, 14 nt, Human
uuuuggaaaagaau

SEQ ID NO: 2998518 - RNA, 22 nt, Human
uuuuuauauucucagcagagug

SEQ ID NO: 2998519 - RNA, 21 nt, Human
uuuuuauauucucagcagagu

SEQ ID NO: 2998520 - RNA, 23 nt, Human
uuuuuauacauaaacaagaccac

SEQ ID NO: 2998521 - RNA, 20 nt, Human
uuuuguuuuuauuaaaagga

SEQ ID NO: 2998522 - RNA, 15 nt, Human
uuuuguuuucauuau

SEQ ID NO: 2998523 - RNA, 16 nt, Human
uuuuguuuuugucuua

SEQ ID NO: 2998524 - RNA, 16 nt, Human
auuacuguaagaaaau

SEQ ID NO: 2998525 - RNA, 15 nt, Human
auuacuguaagaaaa

SEQ ID NO: 2998526 - RNA, 13 nt, Human
auuagagaagaga

SEQ ID NO: 2998527 - RNA, 13 nt, Human
auuacuucugcua

SEQ ID NO: 2998528 - RNA, 12 nt, Human
auuacuucugcu

SEQ ID NO: 2998529 - RNA, 14 nt, Human
auuacuucugcuac

SEQ ID NO: 2998530 - RNA, 16 nt, Human
uuuaagacuuugguua

SEQ ID NO: 2998531 - RNA, 12 nt, Human
uuuaagagaaau

SEQ ID NO: 2998532 - RNA, 21 nt, Human
uuuaagcuguuacugucuuca

SEQ ID NO: 2998533 - RNA, 19 nt, Human
uuuaaggaugcuuguacau

SEQ ID NO: 2998534 - RNA, 15 nt, Human
uuuaaucuuuuauga

SEQ ID NO: 2998535 - RNA, 13 nt, Human
uuuaaucuuuuau

SEQ ID NO: 2998536 - RNA, 16 nt, Human
uuuaaugaaagacugu

SEQ ID NO: 2998537 - RNA, 21 nt, Human
uuuaagggcccuuuuucaaua

SEQ ID NO: 2998538 - RNA, 20 nt, Human
uuuaagggcccuuuuucaau

SEQ ID NO: 2998539 - RNA, 18 nt, Human
uuuaagggcccuuuuuca

SEQ ID NO: 2998540 - RNA, 21 nt, Human
uuuaaggaugcuuguacauaa

SEQ ID NO: 2998541 - RNA, 20 nt, Human
uuuaaggaugcuuguacaua

SEQ ID NO: 2998542 - RNA, 22 nt, Human
uuuaaggaugcuuguacauaau

SEQ ID NO: 2998543 - RNA, 21 nt, Human
uuuaaauauaugcuaagucuu

SEQ ID NO: 2998544 - RNA, 11 nt, Human
uuuaaaugcac

SEQ ID NO: 2998545 - RNA, 20 nt, Human
augcaaagaugaaggucugu

SEQ ID NO: 2998546 - RNA, 14 nt, Human
augcaaagcacuga

SEQ ID NO: 2998547 - RNA, 12 nt, Human
augcaaagcacu

SEQ ID NO: 2998548 - RNA, 13 nt, Human
augcaaagcacug

SEQ ID NO: 2998549 - RNA, 21 nt, Human
augcacuuuguucuggcucuu

SEQ ID NO: 2998550 - RNA, 18 nt, Human
uuuaaaaaaauuccaagu

SEQ ID NO: 2998551 - RNA, 23 nt, Human
augcacuuuguucuggcucuucc

SEQ ID NO: 2998552 - RNA, 13 nt, Human
augauuucauuca

SEQ ID NO: 2998553 - RNA, 16 nt, Human
augcaaaaaaaauuag

SEQ ID NO: 2998554 - RNA, 19 nt, Human
uuguucuugguuuguaaau

SEQ ID NO: 2998555 - RNA, 17 nt, Human
uuguucuugguuuguaa

SEQ ID NO: 2998556 - RNA, 16 nt, Human
uuguguacuuuuaaga

SEQ ID NO: 2998557 - RNA, 22 nt, Human
uugugaaugcagguuuuaucag

SEQ ID NO: 2998558 - RNA, 15 nt, Human
uuguccccgacccuu

SEQ ID NO: 2998559 - RNA, 16 nt, Human
uuguccccgacccuug

SEQ ID NO: 2998560 - RNA, 18 nt, Human
uuguccccaccgcagaca

SEQ ID NO: 2998561 - RNA, 20 nt, Human
uuguccccaccgcagacagg

SEQ ID NO: 2998562 - RNA, 15 nt, Human
uugucccaagugcca

SEQ ID NO: 2998563 - RNA, 17 nt, Human
uugugaggaagccgcug

SEQ ID NO: 2998564 - RNA, 18 nt, Human
uugugaggaagccgcugg

SEQ ID NO: 2998565 - RNA, 20 nt, Human
uugugauacaaugcugugcc

SEQ ID NO: 2998566 - RNA, 19 nt, Human
uugugauacaaugcugugc

SEQ ID NO: 2998567 - RNA, 13 nt, Human
uugugaggaagcc

SEQ ID NO: 2998568 - RNA, 15 nt, Human
augagguacugagag

SEQ ID NO: 2998569 - RNA, 18 nt, Human
augagguacugagaguga

SEQ ID NO: 2998570 - RNA, 17 nt, Human
augagguacugagagug

SEQ ID NO: 2998571 - RNA, 18 nt, Human
uuguagcauccuggaaua

SEQ ID NO: 2998572 - RNA, 16 nt, Human
uuguagcauccuggaa

SEQ ID NO: 2998573 - RNA, 18 nt, Human
augaggucagagccugca

SEQ ID NO: 2998574 - RNA, 16 nt, Human
augaggucagagccug

SEQ ID NO: 2998575 - RNA, 15 nt, Human
augaggucagagccu

SEQ ID NO: 2998576 - RNA, 20 nt, Human
augaggucagagccugcagu

SEQ ID NO: 2998577 - RNA, 19 nt, Human
augaggucagagccugcag

SEQ ID NO: 2998578 - RNA, 20 nt, Human
uugucaauaaaauccauaca

SEQ ID NO: 2998579 - RNA, 23 nt, Human
augaguccccuguuuguuucuga

SEQ ID NO: 2998580 - RNA, 13 nt, Human
augaguccccugu

SEQ ID NO: 2998581 - RNA, 17 nt, Human
uugucacacacuuuggc

SEQ ID NO: 2998582 - RNA, 21 nt, Human
uugucauauaagauucauauu

SEQ ID NO: 2998583 - RNA, 18 nt, Human
uuuaucagaacuauguuu

SEQ ID NO: 2998584 - RNA, 14 nt, Human
uuuaucagaauucu

SEQ ID NO: 2998585 - RNA, 18 nt, Human
augcuggcuguuggcugg

SEQ ID NO: 2998586 - RNA, 14 nt, Human
augcuccuggccca

SEQ ID NO: 2998587 - RNA, 19 nt, Human
augcuccuggcccacugca

SEQ ID NO: 2998588 - RNA, 16 nt, Human
augcuucucacugcca

SEQ ID NO: 2998589 - RNA, 20 nt, Human
augcuucucacugccaugcc

SEQ ID NO: 2998590 - RNA, 17 nt, Human
auggaagacagcucuua

SEQ ID NO: 2998591 - RNA, 18 nt, Human
auggaagacagcucuuau

SEQ ID NO: 2998592 - RNA, 22 nt, Human
augcuguauuuuaaaagaauga

SEQ ID NO: 2998593 - RNA, 19 nt, Human
augcuguauuuuaaaagaa

SEQ ID NO: 2998594 - RNA, 20 nt, Human
augcuggcuguuggcugggg

SEQ ID NO: 2998595 - RNA, 19 nt, Human
augcuggcuguuggcuggg

SEQ ID NO: 2998596 - RNA, 23 nt, Human
augcuguauuuuaaaagaaugau

SEQ ID NO: 2998597 - RNA, 23 nt, Human
augcuguucaugaaagauucaau

SEQ ID NO: 2998598 - RNA, 12 nt, Human
uuucagaaaugu

SEQ ID NO: 2998599 - RNA, 11 nt, Human
uuucagaaaug

SEQ ID NO: 2998600 - RNA, 19 nt, Human
uuucaugcuguucaugaaa

SEQ ID NO: 2998601 - RNA, 21 nt, Human
uuucaugcuguucaugaaaga

SEQ ID NO: 2998602 - RNA, 16 nt, Human
uuucccuauuagagaa

SEQ ID NO: 2998603 - RNA, 17 nt, Human
uuuccauuuacuuaaga

SEQ ID NO: 2998604 - RNA, 13 nt, Human
uuucacauuggaa

SEQ ID NO: 2998605 - RNA, 19 nt, Human
uuucacauuggaaacaagu

SEQ ID NO: 2998606 - RNA, 14 nt, Human
uuucacauuggaaa

SEQ ID NO: 2998607 - RNA, 12 nt, Human
uuucaaacuuua

SEQ ID NO: 2998608 - RNA, 19 nt, Human
uuucaaacauauauaacaa

SEQ ID NO: 2998609 - RNA, 20 nt, Human
auggaauucacaaaguaauu

SEQ ID NO: 2998610 - RNA, 17 nt, Human
uuucaaacauauauaac

SEQ ID NO: 2998611 - RNA, 16 nt, Human
auggaauucacaaagu

SEQ ID NO: 2998612 - RNA, 17 nt, Human
auggaauucacaaagua

SEQ ID NO: 2998613 - RNA, 15 nt, Human
augcccagugagacu

SEQ ID NO: 2998614 - RNA, 16 nt, Human
augcccagugagacug

SEQ ID NO: 2998615 - RNA, 17 nt, Human
augcccagccccuucug

SEQ ID NO: 2998616 - RNA, 20 nt, Human
augccccugaauuuaaauag

SEQ ID NO: 2998617 - RNA, 15 nt, Human
augccccugaauuua

SEQ ID NO: 2998618 - RNA, 21 nt, Human
augccaugaggaacaaggcaa

SEQ ID NO: 2998619 - RNA, 16 nt, Human
augcccagccccuucu

SEQ ID NO: 2998620 - RNA, 15 nt, Human
augcccagccccuuc

SEQ ID NO: 2998621 - RNA, 18 nt, Human
uuuaaucuuuuaugauug

SEQ ID NO: 2998622 - RNA, 23 nt, Human
uuuaaugaaagacuguacaaagu

SEQ ID NO: 2998623 - RNA, 21 nt, Human
uuuaaugaaagacuguacaaa

SEQ ID NO: 2998624 - RNA, 21 nt, Human
augccagggccaugucagaca

SEQ ID NO: 2998625 - RNA, 23 nt, Human
augccagggccaugucagacaca

SEQ ID NO: 2998626 - RNA, 22 nt, Human
augccuuuucccaacuccagaa

SEQ ID NO: 2998627 - RNA, 20 nt, Human
augccuuuucccaacuccag

SEQ ID NO: 2998628 - RNA, 15 nt, Human
augccucucucaggc

SEQ ID NO: 2998629 - RNA, 14 nt, Human
augccuuuucccaa

SEQ ID NO: 2998630 - RNA, 13 nt, Human
augccucucucag

SEQ ID NO: 2998631 - RNA, 14 nt, Human
augccucucucagg

SEQ ID NO: 2998632 - RNA, 18 nt, Human
augcuacaggauuugaaa

SEQ ID NO: 2998633 - RNA, 22 nt, Human
augcgugcauaccacuuuuguu

SEQ ID NO: 2998634 - RNA, 20 nt, Human
augcgugcauaccacuuuug

SEQ ID NO: 2998635 - RNA, 17 nt, Human
uuuaucagaacuauguu

SEQ ID NO: 2998636 - RNA, 16 nt, Human
uuuaucagaacuaugu

SEQ ID NO: 2998637 - RNA, 21 nt, Human
uuuauaugcuucuguuuuaua

SEQ ID NO: 2998638 - RNA, 19 nt, Human
uuuauaugcuucuguuuua

SEQ ID NO: 2998639 - RNA, 17 nt, Human
uuuagggguagcauuug

SEQ ID NO: 2998640 - RNA, 13 nt, Human
uuuacuucuuaua

SEQ ID NO: 2998641 - RNA, 12 nt, Human
uuuacuuaagac

SEQ ID NO: 2998642 - RNA, 14 nt, Human
uuuacuuaagacuu

SEQ ID NO: 2998643 - RNA, 14 nt, Human
uuuacuucuuauac

SEQ ID NO: 2998644 - RNA, 18 nt, Human
uuuaccugaagucuuugu

SEQ ID NO: 2998645 - RNA, 17 nt, Human
augcuacaguaauaaau

SEQ ID NO: 2998646 - RNA, 15 nt, Human
augcuacaguaauaa

SEQ ID NO: 2998647 - RNA, 16 nt, Human
uuuacugcagcuuugu

SEQ ID NO: 2998648 - RNA, 11 nt, Human
uuuacuuaaac

SEQ ID NO: 2998649 - RNA, 23 nt, Human
uugccaauuugcacauuaaauga

SEQ ID NO: 2998650 - RNA, 22 nt, Human
uugccaauuugcacauuaaaug

SEQ ID NO: 2998651 - RNA, 19 nt, Human
uugccaauuugcacauuaa

SEQ ID NO: 2998652 - RNA, 18 nt, Human
uugcccaggcaggucuug

SEQ ID NO: 2998653 - RNA, 16 nt, Human
uugcccaggcaggucu

SEQ ID NO: 2998654 - RNA, 14 nt, Human
uugcccaggcaggu

SEQ ID NO: 2998655 - RNA, 13 nt, Human
uugcccaggcagg

SEQ ID NO: 2998656 - RNA, 23 nt, Human
uugcccaggcuggcgugcagugg

SEQ ID NO: 2998657 - RNA, 14 nt, Human
uugcccaggcuggc

SEQ ID NO: 2998658 - RNA, 12 nt, Human
uugcccaggcug

SEQ ID NO: 2998659 - RNA, 11 nt, Human
uugcccaggcu

SEQ ID NO: 2998660 - RNA, 14 nt, Human
uugcaugaggcuag

SEQ ID NO: 2998661 - RNA, 12 nt, Human
uugcaugaggcu

SEQ ID NO: 2998662 - RNA, 19 nt, Human
uugcaugguuuggagcuga

SEQ ID NO: 2998663 - RNA, 14 nt, Human
uugcaauggcagcc

SEQ ID NO: 2998664 - RNA, 21 nt, Human
uugcaccacugcacuccagcc

SEQ ID NO: 2998665 - RNA, 17 nt, Human
aucucaaauuucuaaau

SEQ ID NO: 2998666 - RNA, 16 nt, Human
aucucaaauuucuaaa

SEQ ID NO: 2998667 - RNA, 23 nt, Human
aucucacacaugagcaucaggcc

SEQ ID NO: 2998668 - RNA, 18 nt, Human
aucucuugagccugggag

SEQ ID NO: 2998669 - RNA, 23 nt, Human
uugauguucuuucacccuuuucu

SEQ ID NO: 2998670 - RNA, 21 nt, Human
uugauuaaauucuugcaaagu

SEQ ID NO: 2998671 - RNA, 20 nt, Human
uugauuaaauucuugcaaag

SEQ ID NO: 2998672 - RNA, 16 nt, Human
uugauuaaauucuugc

SEQ ID NO: 2998673 - RNA, 15 nt, Human
uugauuaaauucuug

SEQ ID NO: 2998674 - RNA, 16 nt, Human
aucccuuucccuuggu

SEQ ID NO: 2998675 - RNA, 20 nt, Human
aucccuuggacauuuuaugu

SEQ ID NO: 2998676 - RNA, 21 nt, Human
aucccuuggacauuuuauguc

SEQ ID NO: 2998677 - RNA, 17 nt, Human
aucccuuggacauuuua

SEQ ID NO: 2998678 - RNA, 19 nt, Human
aucccuuggacauuuuaug

SEQ ID NO: 2998679 - RNA, 13 nt, Human
uugacaucaacug

SEQ ID NO: 2998680 - RNA, 16 nt, Human
uugacaucaacugcau

SEQ ID NO: 2998681 - RNA, 13 nt, Human
uugacaugggaca

SEQ ID NO: 2998682 - RNA, 12 nt, Human
uugacagggcac

SEQ ID NO: 2998683 - RNA, 10 nt, Human
uugacagggc

SEQ ID NO: 2998684 - RNA, 19 nt, Human
uugacaggauuauuggaaa

SEQ ID NO: 2998685 - RNA, 12 nt, Human
uugacuuuuuau

SEQ ID NO: 2998686 - RNA, 23 nt, Human
uugacauugaaaucuaggaaaau

SEQ ID NO: 2998687 - RNA, 14 nt, Human
uugacauugaaauc

SEQ ID NO: 2998688 - RNA, 16 nt, Human
uugagcagggcucagc

SEQ ID NO: 2998689 - RNA, 12 nt, Human
uugagcagggcu

SEQ ID NO: 2998690 - RNA, 11 nt, Human
uugagacagag

SEQ ID NO: 2998691 - RNA, 14 nt, Human
uugagugucaagcu

SEQ ID NO: 2998692 - RNA, 21 nt, Human
uugagugcugucuccauguuu

SEQ ID NO: 2998693 - RNA, 11 nt, Human
uugagugccuu

SEQ ID NO: 2998694 - RNA, 17 nt, Human
uugauacuacaguuugu

SEQ ID NO: 2998695 - RNA, 15 nt, Human
uugauacuacaguuu

SEQ ID NO: 2998696 - RNA, 18 nt, Human
uugauagcacagacccug

SEQ ID NO: 2998697 - RNA, 18 nt, Human
aucuagauacuguaucau

SEQ ID NO: 2998698 - RNA, 23 nt, Human
aucuaauauguaacaagccaccc

SEQ ID NO: 2998699 - RNA, 20 nt, Human
aucuaauauguaacaagcca

SEQ ID NO: 2998700 - RNA, 21 nt, Human
aucucaaauaacuaaaaggua

SEQ ID NO: 2998701 - RNA, 14 nt, Human
aucucaaauaacua

SEQ ID NO: 2998702 - RNA, 23 nt, Human
aucucaaauaacuaaaagguaug

SEQ ID NO: 2998703 - RNA, 14 nt, Human
aucucaaauuucua

SEQ ID NO: 2998704 - RNA, 19 nt, Human
aucucaaaacugcacuguc

SEQ ID NO: 2998705 - RNA, 20 nt, Human
aucucaaaacugcacuguca

SEQ ID NO: 2998706 - RNA, 15 nt, Human
aucucaaaacugcac

SEQ ID NO: 2998707 - RNA, 17 nt, Human
aucuaggaagacuuugg

SEQ ID NO: 2998708 - RNA, 18 nt, Human
aucuaggaagacuuugga

SEQ ID NO: 2998709 - RNA, 19 nt, Human
aucuaggaagacuuuggaa

SEQ ID NO: 2998710 - RNA, 14 nt, Human
aucuaggaaaauua

SEQ ID NO: 2998711 - RNA, 16 nt, Human
aucuaggaaaauuauu

SEQ ID NO: 2998712 - RNA, 19 nt, Human
aucuagauacuguaucaug

SEQ ID NO: 2998713 - RNA, 19 nt, Human
aucugugaugacauucccu

SEQ ID NO: 2998714 - RNA, 21 nt, Human
aucugugaugacauucccugc

SEQ ID NO: 2998715 - RNA, 21 nt, Human
aucuuaaaaacaacgaaagaa

SEQ ID NO: 2998716 - RNA, 14 nt, Human
aucuuaaaaacaac

SEQ ID NO: 2998717 - RNA, 13 nt, Human
aucuuaaaaacaa

SEQ ID NO: 2998718 - RNA, 22 nt, Human
aucugucauuugagcagggcuc

SEQ ID NO: 2998719 - RNA, 17 nt, Human
aucugucauuugagcag

SEQ ID NO: 2998720 - RNA, 12 nt, Human
aucugucauuug

SEQ ID NO: 2998721 - RNA, 15 nt, Human
aucuuauaauuuaaa

SEQ ID NO: 2998722 - RNA, 16 nt, Human
aucuuauaauuuaaaa

SEQ ID NO: 2998723 - RNA, 14 nt, Human
aucuugcucugcug

SEQ ID NO: 2998724 - RNA, 14 nt, Human
aucuuauaauuuaa

SEQ ID NO: 2998725 - RNA, 16 nt, Human
aucuugcucugcugac

SEQ ID NO: 2998726 - RNA, 15 nt, Human
aucuugcucugcuga

SEQ ID NO: 2998727 - RNA, 22 nt, Human
uuggagaagaacugaaaucaua

SEQ ID NO: 2998728 - RNA, 17 nt, Human
uuggagaagaacugaaa

SEQ ID NO: 2998729 - RNA, 15 nt, Human
uuggagaagaacuga

SEQ ID NO: 2998730 - RNA, 17 nt, Human
uuggaaaauaaauuauu

SEQ ID NO: 2998731 - RNA, 20 nt, Human
uugcuuugugauuuuuguaa

SEQ ID NO: 2998732 - RNA, 15 nt, Human
uugcuuugugauuuu

SEQ ID NO: 2998733 - RNA, 12 nt, Human
aucuuuaaaaua

SEQ ID NO: 2998734 - RNA, 15 nt, Human
aucuuuaaaauacac

SEQ ID NO: 2998735 - RNA, 13 nt, Human
uuggcccaggagu

SEQ ID NO: 2998736 - RNA, 14 nt, Human
uuggcccaggaguu

SEQ ID NO: 2998737 - RNA, 15 nt, Human
uuggcccaggaguuu

SEQ ID NO: 2998738 - RNA, 20 nt, Human
uuggcccaggaguuuggcca

SEQ ID NO: 2998739 - RNA, 21 nt, Human
uuggcccaggaguuuggccag

SEQ ID NO: 2998740 - RNA, 22 nt, Human
uuggcccaggaguuuggccaga

SEQ ID NO: 2998741 - RNA, 20 nt, Human
uuggcccaggauuauuguca

SEQ ID NO: 2998742 - RNA, 22 nt, Human
augaaccacaucuugcucugcu

SEQ ID NO: 2998743 - RNA, 23 nt, Human
augaaccacaucuugcucugcug

SEQ ID NO: 2998744 - RNA, 18 nt, Human
augaacuuguaaaggaau

SEQ ID NO: 2998745 - RNA, 17 nt, Human
augaaugaaacauuuug

SEQ ID NO: 2998746 - RNA, 21 nt, Human
augaaugucacuucuggauau

SEQ ID NO: 2998747 - RNA, 19 nt, Human
augaaugucacuucuggau

SEQ ID NO: 2998748 - RNA, 20 nt, Human
uugguuuucacauuggaaac

SEQ ID NO: 2998749 - RNA, 14 nt, Human
uugguuuguaaauu

SEQ ID NO: 2998750 - RNA, 18 nt, Human
uuggugucgggcaugaca

SEQ ID NO: 2998751 - RNA, 19 nt, Human
uuggugucgggcaugacac

SEQ ID NO: 2998752 - RNA, 17 nt, Human
uuggugucgggcaugac

SEQ ID NO: 2998753 - RNA, 16 nt, Human
augaaugucaguguga

SEQ ID NO: 2998754 - RNA, 18 nt, Human
augaaugucagugugacu

SEQ ID NO: 2998755 - RNA, 19 nt, Human
uuggugguuucagaaaugu

SEQ ID NO: 2998756 - RNA, 18 nt, Human
uuggugguuucagaaaug

SEQ ID NO: 2998757 - RNA, 13 nt, Human
auauaagguuuuu

SEQ ID NO: 2998758 - RNA, 19 nt, Human
auauaagcuuguauuccuu

SEQ ID NO: 2998759 - RNA, 15 nt, Human
auauaacaaugcugu

SEQ ID NO: 2998760 - RNA, 12 nt, Human
auauaacaaugc

SEQ ID NO: 2998761 - RNA, 18 nt, Human
auauauaacaaugcugua

SEQ ID NO: 2998762 - RNA, 17 nt, Human
auauauaacaaugcugu

SEQ ID NO: 2998763 - RNA, 14 nt, Human
auauauaacaaugc

SEQ ID NO: 2998764 - RNA, 18 nt, Human
auagucaaauugugugaa

SEQ ID NO: 2998765 - RNA, 17 nt, Human
auagucaaauuguguga

SEQ ID NO: 2998766 - RNA, 15 nt, Human
uucagcccucagaau

SEQ ID NO: 2998767 - RNA, 14 nt, Human
uucagccaagaauu

SEQ ID NO: 2998768 - RNA, 19 nt, Human
uucagccaagaauucuuaa

SEQ ID NO: 2998769 - RNA, 17 nt, Human
uucagaucucuaacuuc

SEQ ID NO: 2998770 - RNA, 18 nt, Human
uucacugguacucugcca

SEQ ID NO: 2998771 - RNA, 11 nt, Human
uucauagagaa

SEQ ID NO: 2998772 - RNA, 18 nt, Human
uucauagagaauauaaaa

SEQ ID NO: 2998773 - RNA, 21 nt, Human
uucauauuuacuucuuauaca

SEQ ID NO: 2998774 - RNA, 16 nt, Human
uucauauuuacuucuu

SEQ ID NO: 2998775 - RNA, 14 nt, Human
uucaguaauaacuc

SEQ ID NO: 2998776 - RNA, 20 nt, Human
uucauauuuaauuugaaggu

SEQ ID NO: 2998777 - RNA, 18 nt, Human
uucaucauccuaagcuau

SEQ ID NO: 2998778 - RNA, 21 nt, Human
uucaucauccuaagcuauuca

SEQ ID NO: 2998779 - RNA, 14 nt, Human
auauauuauuugca

SEQ ID NO: 2998780 - RNA, 22 nt, Human
auaucuauauuuuacauaaauu

SEQ ID NO: 2998781 - RNA, 20 nt, Human
auaucuauauuuuacauaaa

SEQ ID NO: 2998782 - RNA, 16 nt, Human
auaucuauauuuuaca

SEQ ID NO: 2998783 - RNA, 17 nt, Human
auaucuauauuuuacau

SEQ ID NO: 2998784 - RNA, 22 nt, Human
auaucugaaaauguauguguaa

SEQ ID NO: 2998785 - RNA, 20 nt, Human
auaugauuuaaaucagccgu

SEQ ID NO: 2998786 - RNA, 22 nt, Human
auaugauucaaaugucuauaaa

SEQ ID NO: 2998787 - RNA, 13 nt, Human
auaugauucaaau

SEQ ID NO: 2998788 - RNA, 12 nt, Human
auaugauucaaa

SEQ ID NO: 2998789 - RNA, 13 nt, Human
auaugugaacagu

SEQ ID NO: 2998790 - RNA, 14 nt, Human
auaugucaagccau

SEQ ID NO: 2998791 - RNA, 16 nt, Human
auaugcaaagcacuga

SEQ ID NO: 2998792 - RNA, 15 nt, Human
auaugcaaagcacug

SEQ ID NO: 2998793 - RNA, 23 nt, Human
auaugcaaagcacugacuucuaa

SEQ ID NO: 2998794 - RNA, 21 nt, Human
uuauuucucucaucuguuaca

SEQ ID NO: 2998795 - RNA, 17 nt, Human
uucaaaauaaaaaugag

SEQ ID NO: 2998796 - RNA, 15 nt, Human
uucaaacauauauaa

SEQ ID NO: 2998797 - RNA, 14 nt, Human
uucaaacauauaua

SEQ ID NO: 2998798 - RNA, 16 nt, Human
uucaaggauccugagc

SEQ ID NO: 2998799 - RNA, 18 nt, Human
uucaaggauccugagcca

SEQ ID NO: 2998800 - RNA, 19 nt, Human
uucaaggauccugagccag

SEQ ID NO: 2998801 - RNA, 21 nt, Human
uucaaggauccugagccagau

SEQ ID NO: 2998802 - RNA, 15 nt, Human
uucaaggauccugag

SEQ ID NO: 2998803 - RNA, 22 nt, Human
auagcugugauuuuugguauuu

SEQ ID NO: 2998804 - RNA, 21 nt, Human
auaggaauugacccacaagaa

SEQ ID NO: 2998805 - RNA, 19 nt, Human
auaggaacuuaaauaaugu

SEQ ID NO: 2998806 - RNA, 17 nt, Human
auaggcacuuuaaaaca

SEQ ID NO: 2998807 - RNA, 22 nt, Human
uucaccacaugugcacaugcac

SEQ ID NO: 2998808 - RNA, 14 nt, Human
uucacauuggaaac

SEQ ID NO: 2998809 - RNA, 17 nt, Human
uucacauauugauuucc

SEQ ID NO: 2998810 - RNA, 13 nt, Human
uucacauuggaaa

SEQ ID NO: 2998811 - RNA, 12 nt, Human
auaacuuuuuau

SEQ ID NO: 2998812 - RNA, 18 nt, Human
auagccugccucuucucu

SEQ ID NO: 2998813 - RNA, 17 nt, Human
auaagauaaaugugcug

SEQ ID NO: 2998814 - RNA, 13 nt, Human
auaagauaaaugu

SEQ ID NO: 2998815 - RNA, 14 nt, Human
auagcuacuaauuu

SEQ ID NO: 2998816 - RNA, 17 nt, Human
auagcuacuaauuuuaa

SEQ ID NO: 2998817 - RNA, 18 nt, Human
auagcuacuaauuuuaaa

SEQ ID NO: 2998818 - RNA, 22 nt, Human
auagcuaggugacauauacaua

SEQ ID NO: 2998819 - RNA, 19 nt, Human
auagcucaggugucccugc

SEQ ID NO: 2998820 - RNA, 12 nt, Human
auagcugggacu

SEQ ID NO: 2998821 - RNA, 21 nt, Human
auagcucaggugucccugcac

SEQ ID NO: 2998822 - RNA, 20 nt, Human
auagcucaggugucccugca

SEQ ID NO: 2998823 - RNA, 22 nt, Human
auagcucaggugucccugcacu

SEQ ID NO: 2998824 - RNA, 19 nt, Human
auagcugugauuuuuggua

SEQ ID NO: 2998825 - RNA, 17 nt, Human
uuauuguuuaaaaucau

SEQ ID NO: 2998826 - RNA, 22 nt, Human
auagcuggucuuauuuguaaag

SEQ ID NO: 2998827 - RNA, 17 nt, Human
auagcugggacuacagg

SEQ ID NO: 2998828 - RNA, 23 nt, Human
auagcuggucuuauuuguaaagc

SEQ ID NO: 2998829 - RNA, 13 nt, Human
uuauuuaaauaga

SEQ ID NO: 2998830 - RNA, 14 nt, Human
uuauuuaaauuuua

SEQ ID NO: 2998831 - RNA, 22 nt, Human
uuauuuaaugaaagacuguaca

SEQ ID NO: 2998832 - RNA, 18 nt, Human
uuauuuaaugaaagacug

SEQ ID NO: 2998833 - RNA, 11 nt, Human
uuauuuauuga

SEQ ID NO: 2998834 - RNA, 14 nt, Human
uuauuuacaaaugu

SEQ ID NO: 2998835 - RNA, 16 nt, Human
uuauuuaguuccuuga

SEQ ID NO: 2998836 - RNA, 13 nt, Human
uucucacagaaga

SEQ ID NO: 2998837 - RNA, 23 nt, Human
uucucagaaucucaaauaacuaa

SEQ ID NO: 2998838 - RNA, 22 nt, Human
uucucagaaucucaaauaacua

SEQ ID NO: 2998839 - RNA, 19 nt, Human
uucucagaaucucaaauaa

SEQ ID NO: 2998840 - RNA, 13 nt, Human
uucucagaaucuc

SEQ ID NO: 2998841 - RNA, 18 nt, Human
uucucaacuccaaacuga

SEQ ID NO: 2998842 - RNA, 14 nt, Human
uucucaacuccaaa

SEQ ID NO: 2998843 - RNA, 13 nt, Human
uucuaggccuggg

SEQ ID NO: 2998844 - RNA, 23 nt, Human
uucuaggacugaauuaugaaacu

SEQ ID NO: 2998845 - RNA, 14 nt, Human
aucauugaaaucuu

SEQ ID NO: 2998846 - RNA, 15 nt, Human
aucauugaaaucuuu

SEQ ID NO: 2998847 - RNA, 13 nt, Human
aucauugaaaucu

SEQ ID NO: 2998848 - RNA, 22 nt, Human
aucauuaaagccugaguuugcu

SEQ ID NO: 2998849 - RNA, 17 nt, Human
aucauguuuaugagaaa

SEQ ID NO: 2998850 - RNA, 18 nt, Human
aucagcacgauuucuguu

SEQ ID NO: 2998851 - RNA, 17 nt, Human
aucagcacgauuucugu

SEQ ID NO: 2998852 - RNA, 16 nt, Human
aucagcacgauuucug

SEQ ID NO: 2998853 - RNA, 15 nt, Human
aucagcacgauuucu

SEQ ID NO: 2998854 - RNA, 13 nt, Human
aucccucccucca

SEQ ID NO: 2998855 - RNA, 11 nt, Human
aucccucccuc

SEQ ID NO: 2998856 - RNA, 23 nt, Human
aucccucccuccaccucccugca

SEQ ID NO: 2998857 - RNA, 21 nt, Human
aucccucccuccaccucccug

SEQ ID NO: 2998858 - RNA, 17 nt, Human
aucccauaugccugggc

SEQ ID NO: 2998859 - RNA, 16 nt, Human
aucccauaugccuggg

SEQ ID NO: 2998860 - RNA, 20 nt, Human
aucauuucugcaucagcugc

SEQ ID NO: 2998861 - RNA, 16 nt, Human
auccagguucagcuug

SEQ ID NO: 2998862 - RNA, 15 nt, Human
auccagguucagcuu

SEQ ID NO: 2998863 - RNA, 22 nt, Human
uucugggacacaguucaauucu

SEQ ID NO: 2998864 - RNA, 11 nt, Human
uucugggacac

SEQ ID NO: 2998865 - RNA, 10 nt, Human
uucugggaca

SEQ ID NO: 2998866 - RNA, 23 nt, Human
uucugccgcagcccugcagaggg

SEQ ID NO: 2998867 - RNA, 16 nt, Human
uucugccgcagcccug

SEQ ID NO: 2998868 - RNA, 20 nt, Human
uucugaaaugucaguucuga

SEQ ID NO: 2998869 - RNA, 21 nt, Human
uucugaaauuuccugggagcu

SEQ ID NO: 2998870 - RNA, 23 nt, Human
uucugaacuuggcgcugccccug

SEQ ID NO: 2998871 - RNA, 13 nt, Human
uucugaagaagau

SEQ ID NO: 2998872 - RNA, 12 nt, Human
uucugaagaaga

SEQ ID NO: 2998873 - RNA, 23 nt, Human
uucugcaucagcugcugaaacaa

SEQ ID NO: 2998874 - RNA, 16 nt, Human
uucugcaucagcugcu

SEQ ID NO: 2998875 - RNA, 19 nt, Human
aucauugaaaucuuuuugc

SEQ ID NO: 2998876 - RNA, 15 nt, Human
uucugaaagggacgc

SEQ ID NO: 2998877 - RNA, 23 nt, Human
auauuucugaggagccugcaaca

SEQ ID NO: 2998878 - RNA, 13 nt, Human
auauuugaaauau

SEQ ID NO: 2998879 - RNA, 20 nt, Human
auauuguuuucaguguacau

SEQ ID NO: 2998880 - RNA, 17 nt, Human
auauuguuuucagugua

SEQ ID NO: 2998881 - RNA, 20 nt, Human
auauugcauacuauuaaaca

SEQ ID NO: 2998882 - RNA, 22 nt, Human
auauugcauacuauuaaacaug

SEQ ID NO: 2998883 - RNA, 16 nt, Human
auauugccaaugcuac

SEQ ID NO: 2998884 - RNA, 17 nt, Human
auauugcugauggugca

SEQ ID NO: 2998885 - RNA, 21 nt, Human
auauugcugauggugcaauga

SEQ ID NO: 2998886 - RNA, 12 nt, Human
auauuuuaacuu

SEQ ID NO: 2998887 - RNA, 22 nt, Human
auauuuguaucacaaaucuuaa

SEQ ID NO: 2998888 - RNA, 19 nt, Human
auauuugaaauauugacuu

SEQ ID NO: 2998889 - RNA, 14 nt, Human
auauuugaaauauu

SEQ ID NO: 2998890 - RNA, 23 nt, Human
auauuugaaauauugacuuuuua

SEQ ID NO: 2998891 - RNA, 18 nt, Human
auauucucagcagagugc

SEQ ID NO: 2998892 - RNA, 17 nt, Human
auauucucagcagagug

SEQ ID NO: 2998893 - RNA, 15 nt, Human
auauucucagcagag

SEQ ID NO: 2998894 - RNA, 16 nt, Human
auauucucagcagagu

SEQ ID NO: 2998895 - RNA, 21 nt, Human
auauucucacagcuccaagaa

SEQ ID NO: 2998896 - RNA, 16 nt, Human
auauucuguuggccag

SEQ ID NO: 2998897 - RNA, 23 nt, Human
auauucucacagcuccaagaauu

SEQ ID NO: 2998898 - RNA, 22 nt, Human
auauucucacagcuccaagaau

SEQ ID NO: 2998899 - RNA, 22 nt, Human
auauugauuuccguuaaaauac

SEQ ID NO: 2998900 - RNA, 21 nt, Human
auauugauuuccguuaaaaua

SEQ ID NO: 2998901 - RNA, 19 nt, Human
auauugauuuccguuaaaa

SEQ ID NO: 2998902 - RNA, 22 nt, Human
auauuaaggaagacaaugugaa

SEQ ID NO: 2998903 - RNA, 24 nt, Human
auauuaagaaagacuaucuaaaug

SEQ ID NO: 2998904 - RNA, 18 nt, Human
auauguuucacacaaaca

SEQ ID NO: 2998905 - RNA, 14 nt, Human
auauguuucacaca

SEQ ID NO: 2998906 - RNA, 21 nt, Human
auauguuucacacaaacaagg

SEQ ID NO: 2998907 - RNA, 18 nt, Human
auauguuuuaagaggcag

SEQ ID NO: 2998908 - RNA, 20 nt, Human
auauguuuuaagaggcaggg

SEQ ID NO: 2998909 - RNA, 19 nt, Human
aucaauuuuucuuauuuca

SEQ ID NO: 2998910 - RNA, 22 nt, Human
aucacggcucacugcagccuca

SEQ ID NO: 2998911 - RNA, 18 nt, Human
aucaaguauuauaccuuu

SEQ ID NO: 2998912 - RNA, 14 nt, Human
aucaaguauuauac

SEQ ID NO: 2998913 - RNA, 13 nt, Human
aucaaguauuaua

SEQ ID NO: 2998914 - RNA, 13 nt, Human
aucaaguauagaa

SEQ ID NO: 2998915 - RNA, 16 nt, Human
aucaaguauagaaaau

SEQ ID NO: 2998916 - RNA, 15 nt, Human
aucaaguauagaaaa

SEQ ID NO: 2998917 - RNA, 21 nt, Human
aucaaguauagaaaaucuuca

SEQ ID NO: 2998918 - RNA, 19 nt, Human
aucaaguauagaaaaucuu

SEQ ID NO: 2998919 - RNA, 17 nt, Human
aucaaguauagaaaauc

SEQ ID NO: 2998920 - RNA, 13 nt, Human
uuccuaauccucu

SEQ ID NO: 2998921 - RNA, 15 nt, Human
uuccuaauccucuag

SEQ ID NO: 2998922 - RNA, 15 nt, Human
uuccugggagcuuuu

SEQ ID NO: 2998923 - RNA, 11 nt, Human
uuccucuuucc

SEQ ID NO: 2998924 - RNA, 16 nt, Human
uuccugggagcuuuug

SEQ ID NO: 2998925 - RNA, 17 nt, Human
uuccuguucccaugaga

SEQ ID NO: 2998926 - RNA, 11 nt, Human
uuccuucagug

SEQ ID NO: 2998927 - RNA, 14 nt, Human
uuccuucagugccu

SEQ ID NO: 2998928 - RNA, 21 nt, Human
auauuuucaugcuguucauga

SEQ ID NO: 2998929 - RNA, 18 nt, Human
auauuuucaugcuguuca

SEQ ID NO: 2998930 - RNA, 18 nt, Human
ugugaugacauucccugc

SEQ ID NO: 2998931 - RNA, 19 nt, Human
ugugauggggcccugccuc

SEQ ID NO: 2998932 - RNA, 20 nt, Human
ugugauggggcccugccucc

SEQ ID NO: 2998933 - RNA, 18 nt, Human
ugugauggggcccugccu

SEQ ID NO: 2998934 - RNA, 16 nt, Human
agugaacaaauuuaca

SEQ ID NO: 2998935 - RNA, 15 nt, Human
agugaaagaaaauaa

SEQ ID NO: 2998936 - RNA, 16 nt, Human
ugugccaugugccagg

SEQ ID NO: 2998937 - RNA, 12 nt, Human
ugugccaugugc

SEQ ID NO: 2998938 - RNA, 20 nt, Human
ugugccagguuuuuggucug

SEQ ID NO: 2998939 - RNA, 23 nt, Human
ugugcauuuggugguuucagaaa

SEQ ID NO: 2998940 - RNA, 17 nt, Human
uguggaguucaucuuga

SEQ ID NO: 2998941 - RNA, 21 nt, Human
uguggaguucaucuugaauug

SEQ ID NO: 2998942 - RNA, 21 nt, Human
ugugcccccauguaagcaccc

SEQ ID NO: 2998943 - RNA, 19 nt, Human
agugaggcucugcccuugg

SEQ ID NO: 2998944 - RNA, 20 nt, Human
agugaggcucugcccuuggu

SEQ ID NO: 2998945 - RNA, 21 nt, Human
agugaggcucugcccuugguu

SEQ ID NO: 2998946 - RNA, 21 nt, Human
agugaguugauagcacagacc

SEQ ID NO: 2998947 - RNA, 15 nt, Human
agugagucgaggaca

SEQ ID NO: 2998948 - RNA, 15 nt, Human
agugaggcucugccc

SEQ ID NO: 2998949 - RNA, 14 nt, Human
agugaggcucugcc

SEQ ID NO: 2998950 - RNA, 16 nt, Human
agugaggcucugcccu

SEQ ID NO: 2998951 - RNA, 17 nt, Human
agugaggcucugcccuu

SEQ ID NO: 2998952 - RNA, 21 nt, Human
agucuucaguuugcagaguag

SEQ ID NO: 2998953 - RNA, 20 nt, Human
agucuucaguuugcagagua

SEQ ID NO: 2998954 - RNA, 18 nt, Human
agucuucaguuugcagag

SEQ ID NO: 2998955 - RNA, 23 nt, Human
agucuuagauguauauauuuccu

SEQ ID NO: 2998956 - RNA, 18 nt, Human
agucuuucacauuuaaau

SEQ ID NO: 2998957 - RNA, 20 nt, Human
agugaaacucguuaauuugu

SEQ ID NO: 2998958 - RNA, 14 nt, Human
agucuuuguacaga

SEQ ID NO: 2998959 - RNA, 16 nt, Human
agucucaggaaaucaa

SEQ ID NO: 2998960 - RNA, 22 nt, Human
agucucaggaaaucaaauaugc

SEQ ID NO: 2998961 - RNA, 19 nt, Human
ugugagaugcuagaacucc

SEQ ID NO: 2998962 - RNA, 15 nt, Human
ugugagaugcuagaa

SEQ ID NO: 2998963 - RNA, 15 nt, Human
ugugacugaauuucu

SEQ ID NO: 2998964 - RNA, 16 nt, Human
ugugacugaauuucuu

SEQ ID NO: 2998965 - RNA, 12 nt, Human
ugucagacacag

SEQ ID NO: 2998966 - RNA, 13 nt, Human
ugucagacacaga

SEQ ID NO: 2998967 - RNA, 14 nt, Human
ugucagacacagau

SEQ ID NO: 2998968 - RNA, 18 nt, Human
ugugaaaggaaagaggcu

SEQ ID NO: 2998969 - RNA, 21 nt, Human
ugugaaaggaaagagggaggu

SEQ ID NO: 2998970 - RNA, 15 nt, Human
ugugaaaggaaagag

SEQ ID NO: 2998971 - RNA, 17 nt, Human
ugugaaccaccacaccc

SEQ ID NO: 2998972 - RNA, 21 nt, Human
ugugaaccaccacacccagcc

SEQ ID NO: 2998973 - RNA, 20 nt, Human
ugugaaccaccacacccagc

SEQ ID NO: 2998974 - RNA, 20 nt, Human
ugugaacaguuguguuugaa

SEQ ID NO: 2998975 - RNA, 19 nt, Human
ugugaaccaccacacccag

SEQ ID NO: 2998976 - RNA, 23 nt, Human
uguggguuucuaaagcugccagc

SEQ ID NO: 2998977 - RNA, 20 nt, Human
uguggucacaggaaguagag

SEQ ID NO: 2998978 - RNA, 21 nt, Human
uguggguuucuaaagcugcca

SEQ ID NO: 2998979 - RNA, 14 nt, Human
ugugguguuuccug

SEQ ID NO: 2998980 - RNA, 16 nt, Human
ugugguguuuccuggc

SEQ ID NO: 2998981 - RNA, 18 nt, Human
uguguaagacaaaaagcu

SEQ ID NO: 2998982 - RNA, 13 nt, Human
uguggucccaccc

SEQ ID NO: 2998983 - RNA, 15 nt, Human
uguggucccacccca

SEQ ID NO: 2998984 - RNA, 22 nt, Human
agugaguugauagcacagaccc

SEQ ID NO: 2998985 - RNA, 23 nt, Human
agugaguugauagcacagacccu

SEQ ID NO: 2998986 - RNA, 13 nt, Human
agugcugcauuua

SEQ ID NO: 2998987 - RNA, 12 nt, Human
agugcugcauuu

SEQ ID NO: 2998988 - RNA, 21 nt, Human
agugcugggauuacaggugug

SEQ ID NO: 2998989 - RNA, 17 nt, Human
agugcugcauuuaaaag

SEQ ID NO: 2998990 - RNA, 16 nt, Human
agugcugcauuuaaaa

SEQ ID NO: 2998991 - RNA, 19 nt, Human
agugcugcauuuaaaagau

SEQ ID NO: 2998992 - RNA, 20 nt, Human
agugcugggauuacaggugu

SEQ ID NO: 2998993 - RNA, 17 nt, Human
ugugucucuugguccug

SEQ ID NO: 2998994 - RNA, 20 nt, Human
ugugucucuugguccugcug

SEQ ID NO: 2998995 - RNA, 13 nt, Human
uguguaaguagau

SEQ ID NO: 2998996 - RNA, 21 nt, Human
ugugucucuugguccugcugc

SEQ ID NO: 2998997 - RNA, 20 nt, Human
ugugucuugcaauggcagcc

SEQ ID NO: 2998998 - RNA, 21 nt, Human
ugugucuugcaauggcagccu

SEQ ID NO: 2998999 - RNA, 16 nt, Human
ugugucucuugguccu

SEQ ID NO: 2999000 - RNA, 19 nt, Human
uguguguuuauugucaaag

SEQ ID NO: 2999001 - RNA, 23 nt, Human
uguguguuuauugucaaaguggu

SEQ ID NO: 2999002 - RNA, 13 nt, Human
uguguugaagagg

SEQ ID NO: 2999003 - RNA, 16 nt, Human
agugugguguuuccug

SEQ ID NO: 2999004 - RNA, 19 nt, Human
agugugguguuuccuggca

SEQ ID NO: 2999005 - RNA, 17 nt, Human
agugugguguuuccugg

SEQ ID NO: 2999006 - RNA, 22 nt, Human
agugugauguauguguaauaaa

SEQ ID NO: 2999007 - RNA, 18 nt, Human
agugugauguauguguaa

SEQ ID NO: 2999008 - RNA, 23 nt, Human
agugugauguauguguaauaaau

SEQ ID NO: 2999009 - RNA, 23 nt, Human
aguggugguuuucuguucuuucu

SEQ ID NO: 2999010 - RNA, 21 nt, Human
aguggugguuuucuguucuuu

SEQ ID NO: 2999011 - RNA, 20 nt, Human
aguggugguuuucuguucuu

SEQ ID NO: 2999012 - RNA, 19 nt, Human
aguggugguuuucuguucu

SEQ ID NO: 2999013 - RNA, 18 nt, Human
aguggugguuuucuguuc

SEQ ID NO: 2999014 - RNA, 17 nt, Human
aguggugguuuucuguu

SEQ ID NO: 2999015 - RNA, 21 nt, Human
agugguggugaacagaacaaa

SEQ ID NO: 2999016 - RNA, 14 nt, Human
aguggaauaagaca

SEQ ID NO: 2999017 - RNA, 17 nt, Human
aguggugcgaucugggu

SEQ ID NO: 2999018 - RNA, 16 nt, Human
aguggugcgaucuggg

SEQ ID NO: 2999019 - RNA, 18 nt, Human
uguugcccaggcaggucu

SEQ ID NO: 2999020 - RNA, 17 nt, Human
uguugcccaggcagguc

SEQ ID NO: 2999021 - RNA, 16 nt, Human
uguugcccaggcaggu

SEQ ID NO: 2999022 - RNA, 15 nt, Human
uguugcccaggcagg

SEQ ID NO: 2999023 - RNA, 12 nt, Human
uguugcccaggc

SEQ ID NO: 2999024 - RNA, 13 nt, Human
uguugcccaggca

SEQ ID NO: 2999025 - RNA, 14 nt, Human
uguuccuagugaaa

SEQ ID NO: 2999026 - RNA, 18 nt, Human
uguuccuagugaaagagg

SEQ ID NO: 2999027 - RNA, 16 nt, Human
uguucugggacacagu

SEQ ID NO: 2999028 - RNA, 15 nt, Human
uguuauaaucuuuca

SEQ ID NO: 2999029 - RNA, 12 nt, Human
uguuauaaucuu

SEQ ID NO: 2999030 - RNA, 20 nt, Human
agugugucuuagugugugca

SEQ ID NO: 2999031 - RNA, 20 nt, Human
uguuccacaaguuaaauaaa

SEQ ID NO: 2999032 - RNA, 15 nt, Human
aguuggguuuuuuaa

SEQ ID NO: 2999033 - RNA, 18 nt, Human
aguuggucccccuuccau

SEQ ID NO: 2999034 - RNA, 21 nt, Human
aguuguuugauucagacagcu

SEQ ID NO: 2999035 - RNA, 23 nt, Human
aguuguuugauucagacagcugc

SEQ ID NO: 2999036 - RNA, 16 nt, Human
aguuuagcuggaaaag

SEQ ID NO: 2999037 - RNA, 21 nt, Human
aguuggguggaugccuggugg

SEQ ID NO: 2999038 - RNA, 17 nt, Human
aguuggguggaugccug

SEQ ID NO: 2999039 - RNA, 16 nt, Human
aguuggcuaggacccc

SEQ ID NO: 2999040 - RNA, 20 nt, Human
uuaaaaagaaaaguuuauaa

SEQ ID NO: 2999041 - RNA, 22 nt, Human
uuaaaaacaacgaaagaaggca

SEQ ID NO: 2999042 - RNA, 13 nt, Human
aguuuauaaaagu

SEQ ID NO: 2999043 - RNA, 20 nt, Human
uuaaagcuuccauuguuguc

SEQ ID NO: 2999044 - RNA, 20 nt, Human
uuaaauucuugcaaaguauc

SEQ ID NO: 2999045 - RNA, 14 nt, Human
uguugcuaacagca

SEQ ID NO: 2999046 - RNA, 19 nt, Human
uguugcccaggcaggucuu

SEQ ID NO: 2999047 - RNA, 17 nt, Human
uguuuauugucaaagug

SEQ ID NO: 2999048 - RNA, 19 nt, Human
uguuuauugucaaaguggu

SEQ ID NO: 2999049 - RNA, 22 nt, Human
uguuugagcaucgcuuaggaga

SEQ ID NO: 2999050 - RNA, 17 nt, Human
uguuugauucagacagc

SEQ ID NO: 2999051 - RNA, 22 nt, Human
uguuugauucagacagcugccu

SEQ ID NO: 2999052 - RNA, 16 nt, Human
aguucugcagauaaac

SEQ ID NO: 2999053 - RNA, 21 nt, Human
aguucugcagauaaacaguag

SEQ ID NO: 2999054 - RNA, 22 nt, Human
uguuuugccaauuugcacauua

SEQ ID NO: 2999055 - RNA, 21 nt, Human
uguuuugccaauuugcacauu

SEQ ID NO: 2999056 - RNA, 16 nt, Human
aguucugaagaagaug

SEQ ID NO: 2999057 - RNA, 17 nt, Human
uguuuugccaauuugca

SEQ ID NO: 2999058 - RNA, 19 nt, Human
uguuuugccaauuugcaca

SEQ ID NO: 2999059 - RNA, 14 nt, Human
uguuuugcaagcca

SEQ ID NO: 2999060 - RNA, 14 nt, Human
aguucugguuccua

SEQ ID NO: 2999061 - RNA, 21 nt, Human
uguuuuauauagcaagacauu

SEQ ID NO: 2999062 - RNA, 16 nt, Human
uguuuuaucuucuaua

SEQ ID NO: 2999063 - RNA, 21 nt, Human
uguuuuauuuuaauucaguug

SEQ ID NO: 2999064 - RNA, 21 nt, Human
uguuuuauuuaaccucuaaau

SEQ ID NO: 2999065 - RNA, 20 nt, Human
uguuuuccaugaguccccug

SEQ ID NO: 2999066 - RNA, 19 nt, Human
uguuuucauuaucucaaaa

SEQ ID NO: 2999067 - RNA, 18 nt, Human
auaaauauguuucacaca

SEQ ID NO: 2999068 - RNA, 14 nt, Human
uuacaggaaguacu

SEQ ID NO: 2999069 - RNA, 16 nt, Human
auaacuaaaagguaug

SEQ ID NO: 2999070 - RNA, 12 nt, Human
auaaaugaaugu

SEQ ID NO: 2999071 - RNA, 15 nt, Human
auaaaugaaugucac

SEQ ID NO: 2999072 - RNA, 15 nt, Human
uuacuguaagaaaau

SEQ ID NO: 2999073 - RNA, 14 nt, Human
uuagaaauauaauu

SEQ ID NO: 2999074 - RNA, 12 nt, Human
uuagaaauauaa

SEQ ID NO: 2999075 - RNA, 11 nt, Human
uuagaaauaua

SEQ ID NO: 2999076 - RNA, 16 nt, Human
uuagaaauaacagaag

SEQ ID NO: 2999077 - RNA, 11 nt, Human
uuagacagagu

SEQ ID NO: 2999078 - RNA, 23 nt, Human
uuacucagaauucucuaguuuga

SEQ ID NO: 2999079 - RNA, 18 nt, Human
uuacucagaauucucuag

SEQ ID NO: 2999080 - RNA, 19 nt, Human
uuacuauggcccuggccua

SEQ ID NO: 2999081 - RNA, 15 nt, Human
uuacuauuucuugug

SEQ ID NO: 2999082 - RNA, 12 nt, Human
uuacuauuucuu

SEQ ID NO: 2999083 - RNA, 20 nt, Human
uuacauaagauaaaugugcu

SEQ ID NO: 2999084 - RNA, 12 nt, Human
uuaccugggaaa

SEQ ID NO: 2999085 - RNA, 14 nt, Human
uuaccuuacagaag

SEQ ID NO: 2999086 - RNA, 20 nt, Human
uuaaugaaagacuguacaaa

SEQ ID NO: 2999087 - RNA, 23 nt, Human
uuaaugaaagacuguacaaagua

SEQ ID NO: 2999088 - RNA, 15 nt, Human
uuaauucuuagcuca

SEQ ID NO: 2999089 - RNA, 22 nt, Human
auaaacaagaccacguuucuaa

SEQ ID NO: 2999090 - RNA, 15 nt, Human
auaaacaagaccacg

SEQ ID NO: 2999091 - RNA, 23 nt, Human
auaaacaagaccacguuucuaaa

SEQ ID NO: 2999092 - RNA, 19 nt, Human
uuaauuuuuuugagacaga

SEQ ID NO: 2999093 - RNA, 22 nt, Human
uuaagaagacugcauuauauuu

SEQ ID NO: 2999094 - RNA, 20 nt, Human
uuaagaagacugcauuauau

SEQ ID NO: 2999095 - RNA, 13 nt, Human
uuaagaggcaggg

SEQ ID NO: 2999096 - RNA, 16 nt, Human
uuaagaggcagggucu

SEQ ID NO: 2999097 - RNA, 15 nt, Human
uuaagaggcaggguc

SEQ ID NO: 2999098 - RNA, 17 nt, Human
uuaaguacuauguauca

SEQ ID NO: 2999099 - RNA, 18 nt, Human
uuaaguaaugauaacugg

SEQ ID NO: 2999100 - RNA, 22 nt, Human
uuaagugcugcauuuaaaagau

SEQ ID NO: 2999101 - RNA, 19 nt, Human
auaaaauccauacauuugu

SEQ ID NO: 2999102 - RNA, 18 nt, Human
auaaaauccauacauuug

SEQ ID NO: 2999103 - RNA, 21 nt, Human
auaaaauaauuuuuauauuug

SEQ ID NO: 2999104 - RNA, 16 nt, Human
auaaaauaauuuuuau

SEQ ID NO: 2999105 - RNA, 15 nt, Human
auaaaauaauuuuua

SEQ ID NO: 2999106 - RNA, 17 nt, Human
agggcccuuuuucaaua

SEQ ID NO: 2999107 - RNA, 23 nt, Human
agggcucagcggggacagcuccu

SEQ ID NO: 2999108 - RNA, 22 nt, Human
agggcucagcggggacagcucc

SEQ ID NO: 2999109 - RNA, 20 nt, Human
agggcucagcggggacagcu

SEQ ID NO: 2999110 - RNA, 19 nt, Human
agggcucagcggggacagc

SEQ ID NO: 2999111 - RNA, 14 nt, Human
agggagggcuccag

SEQ ID NO: 2999112 - RNA, 15 nt, Human
agggagggcuccaga

SEQ ID NO: 2999113 - RNA, 16 nt, Human
agggagggcuccagac

SEQ ID NO: 2999114 - RNA, 11 nt, Human
ugggcagagca

SEQ ID NO: 2999115 - RNA, 12 nt, Human
ugggcagagcag

SEQ ID NO: 2999116 - RNA, 18 nt, Human
ugggccaggagccuccug

SEQ ID NO: 2999117 - RNA, 12 nt, Human
ugggcagaagga

SEQ ID NO: 2999118 - RNA, 20 nt, Human
ugggaggaucucuugagccu

SEQ ID NO: 2999119 - RNA, 21 nt, Human
ugggaggaucucuugagccug

SEQ ID NO: 2999120 - RNA, 19 nt, Human
ugggaggccaaggugggag

SEQ ID NO: 2999121 - RNA, 20 nt, Human
ugggaggccaaggugggagg

SEQ ID NO: 2999122 - RNA, 20 nt, Human
ugggcacuauuuauuuacaa

SEQ ID NO: 2999123 - RNA, 21 nt, Human
ugggcccccaaauggaaaugg

SEQ ID NO: 2999124 - RNA, 16 nt, Human
ugggcccccaaaugga

SEQ ID NO: 2999125 - RNA, 15 nt, Human
agggagggagggcuc

SEQ ID NO: 2999126 - RNA, 13 nt, Human
agggagggcucca

SEQ ID NO: 2999127 - RNA, 22 nt, Human
agggaggacgcucucuggccuu

SEQ ID NO: 2999128 - RNA, 21 nt, Human
agggaggacgcucucuggccu

SEQ ID NO: 2999129 - RNA, 23 nt, Human
agggaggacgcucucuggccuuc

SEQ ID NO: 2999130 - RNA, 16 nt, Human
ugggacuacaggcacc

SEQ ID NO: 2999131 - RNA, 15 nt, Human
ugggacuacaggcac

SEQ ID NO: 2999132 - RNA, 14 nt, Human
ugggacuacaggca

SEQ ID NO: 2999133 - RNA, 19 nt, Human
ugggagagaagagaaugca

SEQ ID NO: 2999134 - RNA, 21 nt, Human
ugggagagaagagaaugcaca

SEQ ID NO: 2999135 - RNA, 18 nt, Human
ugggaggaucucuugagc

SEQ ID NO: 2999136 - RNA, 16 nt, Human
ugggagagccuuccag

SEQ ID NO: 2999137 - RNA, 20 nt, Human
ugggacucaaugcacugaca

SEQ ID NO: 2999138 - RNA, 22 nt, Human
ugggagaaccaaaaagaggcua

SEQ ID NO: 2999139 - RNA, 22 nt, Human
agggaaggauacaaaagcaugu

SEQ ID NO: 2999140 - RNA, 13 nt, Human
agggaaauuucag

SEQ ID NO: 2999141 - RNA, 20 nt, Human
aggcccggcuccaggcuccu

SEQ ID NO: 2999142 - RNA, 18 nt, Human
aggcccggcuccaggcuc

SEQ ID NO: 2999143 - RNA, 21 nt, Human
aggcccggcuccaggcuccuu

SEQ ID NO: 2999144 - RNA, 12 nt, Human
agggcuccagac

SEQ ID NO: 2999145 - RNA, 14 nt, Human
uggggaccucaggc

SEQ ID NO: 2999146 - RNA, 15 nt, Human
uggggaccucaggcc

SEQ ID NO: 2999147 - RNA, 16 nt, Human
uggggaccucaggccu

SEQ ID NO: 2999148 - RNA, 17 nt, Human
uggggaccucaggccug

SEQ ID NO: 2999149 - RNA, 21 nt, Human
uggggccaguuggucccccuu

SEQ ID NO: 2999150 - RNA, 12 nt, Human
uggggcccugcc

SEQ ID NO: 2999151 - RNA, 22 nt, Human
uggggcugcaccggcuggccug

SEQ ID NO: 2999152 - RNA, 23 nt, Human
uggggcugcaccggcuggccugg

SEQ ID NO: 2999153 - RNA, 23 nt, Human
uggggcucccagccaggcccuug

SEQ ID NO: 2999154 - RNA, 21 nt, Human
uggggcucccagccaggcccu

SEQ ID NO: 2999155 - RNA, 20 nt, Human
uggggcucccagccaggccc

SEQ ID NO: 2999156 - RNA, 19 nt, Human
uggggcucccagccaggcc

SEQ ID NO: 2999157 - RNA, 18 nt, Human
uggggcucccagccaggc

SEQ ID NO: 2999158 - RNA, 15 nt, Human
uggggcucccagcca

SEQ ID NO: 2999159 - RNA, 13 nt, Human
uggggcucccagc

SEQ ID NO: 2999160 - RNA, 12 nt, Human
uggggcucccag

SEQ ID NO: 2999161 - RNA, 22 nt, Human
uggggucacucuggcagcucag

SEQ ID NO: 2999162 - RNA, 16 nt, Human
uggggucacucuggca

SEQ ID NO: 2999163 - RNA, 20 nt, Human
uggggucacucuggcagcuc

SEQ ID NO: 2999164 - RNA, 13 nt, Human
uggggucacucug

SEQ ID NO: 2999165 - RNA, 14 nt, Human
uggggucacucugg

SEQ ID NO: 2999166 - RNA, 15 nt, Human
ugggguaugggagag

SEQ ID NO: 2999167 - RNA, 19 nt, Human
ugggguacccacugcucug

SEQ ID NO: 2999168 - RNA, 18 nt, Human
ugggguacccacugcucu

SEQ ID NO: 2999169 - RNA, 17 nt, Human
ugggguacccacugcuc

SEQ ID NO: 2999170 - RNA, 13 nt, Human
aggggaauguuug

SEQ ID NO: 2999171 - RNA, 18 nt, Human
aggggaaaaucagccugc

SEQ ID NO: 2999172 - RNA, 22 nt, Human
aggggaaaaucagccugcucca

SEQ ID NO: 2999173 - RNA, 14 nt, Human
aggggaacagacug

SEQ ID NO: 2999174 - RNA, 13 nt, Human
aggggaaaagagg

SEQ ID NO: 2999175 - RNA, 18 nt, Human
aggggagcaugggaagug

SEQ ID NO: 2999176 - RNA, 20 nt, Human
aggggaauguuugccucugc

SEQ ID NO: 2999177 - RNA, 19 nt, Human
aggggaauguuugccucug

SEQ ID NO: 2999178 - RNA, 21 nt, Human
aggggaauguuugccucugcc

SEQ ID NO: 2999179 - RNA, 15 nt, Human
agggggccuggaugc

SEQ ID NO: 2999180 - RNA, 17 nt, Human
agggggccuggaugccc

SEQ ID NO: 2999181 - RNA, 22 nt, Human
agggggcugcucccaccuggcu

SEQ ID NO: 2999182 - RNA, 19 nt, Human
agggggcugcucccaccug

SEQ ID NO: 2999183 - RNA, 16 nt, Human
agggggcugcucccac

SEQ ID NO: 2999184 - RNA, 15 nt, Human
agggggcugcuccca

SEQ ID NO: 2999185 - RNA, 14 nt, Human
agggggcugcuccc

SEQ ID NO: 2999186 - RNA, 16 nt, Human
agggucucacucuguc

SEQ ID NO: 2999187 - RNA, 15 nt, Human
agggucucacucugu

SEQ ID NO: 2999188 - RNA, 14 nt, Human
agggucucacucug

SEQ ID NO: 2999189 - RNA, 15 nt, Human
aggguaaggcugugg

SEQ ID NO: 2999190 - RNA, 20 nt, Human
aggggguggccucccaacuc

SEQ ID NO: 2999191 - RNA, 18 nt, Human
aggggugggacacccugu

SEQ ID NO: 2999192 - RNA, 15 nt, Human
agggugggagugggc

SEQ ID NO: 2999193 - RNA, 16 nt, Human
aggguggugaccucug

SEQ ID NO: 2999194 - RNA, 20 nt, Human
ugguagagugugccugaagu

SEQ ID NO: 2999195 - RNA, 19 nt, Human
ugguagcauuuuaaacaaa

SEQ ID NO: 2999196 - RNA, 18 nt, Human
ugguagcauuuuaaacaa

SEQ ID NO: 2999197 - RNA, 12 nt, Human
ugguagcauuuu

SEQ ID NO: 2999198 - RNA, 17 nt, Human
uggguggcaccagcagc

SEQ ID NO: 2999199 - RNA, 20 nt, Human
uggguggcaccagcagccug

SEQ ID NO: 2999200 - RNA, 21 nt, Human
uggguggcaccagcagccugg

SEQ ID NO: 2999201 - RNA, 19 nt, Human
ugucaagcugaccuugcug

SEQ ID NO: 2999202 - RNA, 20 nt, Human
uguauucucuccuguaccuc

SEQ ID NO: 2999203 - RNA, 19 nt, Human
uguauucucuccuguaccu

SEQ ID NO: 2999204 - RNA, 16 nt, Human
uguauuuuuuuacuaa

SEQ ID NO: 2999205 - RNA, 22 nt, Human
uguauuacaaauccaaugaaau

SEQ ID NO: 2999206 - RNA, 13 nt, Human
uguauuacaaauc

SEQ ID NO: 2999207 - RNA, 15 nt, Human
uguaguguuggagaa

SEQ ID NO: 2999208 - RNA, 14 nt, Human
uguaguguuggaga

SEQ ID NO: 2999209 - RNA, 15 nt, Human
uguaucacaaaucuu

SEQ ID NO: 2999210 - RNA, 18 nt, Human
uguaucacaaaucuuaac

SEQ ID NO: 2999211 - RNA, 17 nt, Human
uguaucaaugaguaaca

SEQ ID NO: 2999212 - RNA, 16 nt, Human
aguaugguggcugggu

SEQ ID NO: 2999213 - RNA, 15 nt, Human
aguaugguggcuggg

SEQ ID NO: 2999214 - RNA, 18 nt, Human
aguauuagaauaccacag

SEQ ID NO: 2999215 - RNA, 18 nt, Human
aguauuacuucugcuaca

SEQ ID NO: 2999216 - RNA, 17 nt, Human
aguaugguggcuggguu

SEQ ID NO: 2999217 - RNA, 15 nt, Human
aguauuacuucugcu

SEQ ID NO: 2999218 - RNA, 20 nt, Human
aguaggggucugucuuuuaa

SEQ ID NO: 2999219 - RNA, 18 nt, Human
aguaggggucugucuuuu

SEQ ID NO: 2999220 - RNA, 17 nt, Human
ugucaauuacaggaagu

SEQ ID NO: 2999221 - RNA, 14 nt, Human
ugucaauuacagga

SEQ ID NO: 2999222 - RNA, 15 nt, Human
ugucaauuacaggaa

SEQ ID NO: 2999223 - RNA, 15 nt, Human
agucaccucauggaa

SEQ ID NO: 2999224 - RNA, 14 nt, Human
agucaccucaugga

SEQ ID NO: 2999225 - RNA, 17 nt, Human
agucaccucauggaauu

SEQ ID NO: 2999226 - RNA, 23 nt, Human
agucacacagugagucgaggaca

SEQ ID NO: 2999227 - RNA, 15 nt, Human
agucacacagugagu

SEQ ID NO: 2999228 - RNA, 19 nt, Human
agucaccccggccaccugc

SEQ ID NO: 2999229 - RNA, 16 nt, Human
aguauuucuaugaaau

SEQ ID NO: 2999230 - RNA, 17 nt, Human
aguauuucuaugaaaua

SEQ ID NO: 2999231 - RNA, 18 nt, Human
aguauuucuaugaaauau

SEQ ID NO: 2999232 - RNA, 23 nt, Human
agucacacaguauuacuucugcu

SEQ ID NO: 2999233 - RNA, 14 nt, Human
aguaugguggcugg

SEQ ID NO: 2999234 - RNA, 16 nt, Human
aguaaaauguggcagg

SEQ ID NO: 2999235 - RNA, 15 nt, Human
aguaauaugcacaca

SEQ ID NO: 2999236 - RNA, 14 nt, Human
aguaauaugcacac

SEQ ID NO: 2999237 - RNA, 20 nt, Human
aguaaugauaacuggaaacu

SEQ ID NO: 2999238 - RNA, 18 nt, Human
aguaaugauaacuggaaa

SEQ ID NO: 2999239 - RNA, 17 nt, Human
aguaaugauaacuggaa

SEQ ID NO: 2999240 - RNA, 13 nt, Human
aguaaugauaacu

SEQ ID NO: 2999241 - RNA, 13 nt, Human
aguaaaauccaca

SEQ ID NO: 2999242 - RNA, 20 nt, Human
aguaaaaccacagcaguuga

SEQ ID NO: 2999243 - RNA, 18 nt, Human
uguagagccagggucuca

SEQ ID NO: 2999244 - RNA, 16 nt, Human
uguagagccagggucu

SEQ ID NO: 2999245 - RNA, 17 nt, Human
uguaggcauaaagucag

SEQ ID NO: 2999246 - RNA, 20 nt, Human
uguaggcauaaagucagggg

SEQ ID NO: 2999247 - RNA, 11 nt, Human
aguagagacag

SEQ ID NO: 2999248 - RNA, 20 nt, Human
aguagaagucuuagauguau

SEQ ID NO: 2999249 - RNA, 19 nt, Human
aguagaagucuuagaugua

SEQ ID NO: 2999250 - RNA, 21 nt, Human
aguagaagucuuagauguaua

SEQ ID NO: 2999251 - RNA, 17 nt, Human
aguagaagucuuagaug

SEQ ID NO: 2999252 - RNA, 21 nt, Human
ugguuaguagagguacacuug

SEQ ID NO: 2999253 - RNA, 16 nt, Human
ugguuauaacuuaaug

SEQ ID NO: 2999254 - RNA, 17 nt, Human
ugguuauaacuuaauga

SEQ ID NO: 2999255 - RNA, 14 nt, Human
ugguuauggagagg

SEQ ID NO: 2999256 - RNA, 17 nt, Human
ugguuuucaaaauaaaa

SEQ ID NO: 2999257 - RNA, 15 nt, Human
ugguuuucaaaauaa

SEQ ID NO: 2999258 - RNA, 14 nt, Human
ugguuuucaaaaua

SEQ ID NO: 2999259 - RNA, 15 nt, Human
ugguuuguaaauuaa

SEQ ID NO: 2999260 - RNA, 16 nt, Human
uguaaaggaauuuaaa

SEQ ID NO: 2999261 - RNA, 16 nt, Human
uguaaauagcucaggu

SEQ ID NO: 2999262 - RNA, 15 nt, Human
uguaaauagcucagg

SEQ ID NO: 2999263 - RNA, 16 nt, Human
aggugggauccuccag

SEQ ID NO: 2999264 - RNA, 17 nt, Human
aggugggauccuccagg

SEQ ID NO: 2999265 - RNA, 23 nt, Human
agguggggcagcuugaggguugg

SEQ ID NO: 2999266 - RNA, 18 nt, Human
aggugggauccuccaggu

SEQ ID NO: 2999267 - RNA, 16 nt, Human
agguggggcagcuuga

SEQ ID NO: 2999268 - RNA, 18 nt, Human
aggugccucaagagaagg

SEQ ID NO: 2999269 - RNA, 15 nt, Human
aggugggauccucca

SEQ ID NO: 2999270 - RNA, 20 nt, Human
aggugauccacccaccucag

SEQ ID NO: 2999271 - RNA, 14 nt, Human
aggugauccaccca

SEQ ID NO: 2999272 - RNA, 20 nt, Human
aggugugcucugaucaucca

SEQ ID NO: 2999273 - RNA, 15 nt, Human
aggugugcucugauc

SEQ ID NO: 2999274 - RNA, 17 nt, Human
aggugugaaccaccaca

SEQ ID NO: 2999275 - RNA, 19 nt, Human
agguggggucacucuggca

SEQ ID NO: 2999276 - RNA, 20 nt, Human
aggugucccugcacuugcag

SEQ ID NO: 2999277 - RNA, 14 nt, Human
agguuuaagcuguu

SEQ ID NO: 2999278 - RNA, 12 nt, Human
aggugugcucug

SEQ ID NO: 2999279 - RNA, 17 nt, Human
uggugcgaucuggguuc

SEQ ID NO: 2999280 - RNA, 16 nt, Human
uggugcgaucuggguu

SEQ ID NO: 2999281 - RNA, 19 nt, Human
uggugucgggcaugacacg

SEQ ID NO: 2999282 - RNA, 15 nt, Human
ugguggcagcugcgg

SEQ ID NO: 2999283 - RNA, 13 nt, Human
ugguggcagcugc

SEQ ID NO: 2999284 - RNA, 14 nt, Human
ugguggcagcugcg

SEQ ID NO: 2999285 - RNA, 18 nt, Human
ugguuaggcauuguggga

SEQ ID NO: 2999286 - RNA, 20 nt, Human
ugguuaggcauugugggaag

SEQ ID NO: 2999287 - RNA, 16 nt, Human
aggugagaagcagagg

SEQ ID NO: 2999288 - RNA, 21 nt, Human
aggugagaagcagaggaagga

SEQ ID NO: 2999289 - RNA, 23 nt, Human
aggugagaagcagaggaaggaga

SEQ ID NO: 2999290 - RNA, 15 nt, Human
aggugacagagugag

SEQ ID NO: 2999291 - RNA, 13 nt, Human
aggugacagagug

SEQ ID NO: 2999292 - RNA, 17 nt, Human
aggucuugaacuccugg

SEQ ID NO: 2999293 - RNA, 13 nt, Human
aggugaccccagg

SEQ ID NO: 2999294 - RNA, 15 nt, Human
aggugacauauacau

SEQ ID NO: 2999295 - RNA, 22 nt, Human
aggugacagagugagacucugu

SEQ ID NO: 2999296 - RNA, 18 nt, Human
aggucagagccugcaguu

SEQ ID NO: 2999297 - RNA, 17 nt, Human
aggucagagccugcagu

SEQ ID NO: 2999298 - RNA, 15 nt, Human
aggucagagccugca

SEQ ID NO: 2999299 - RNA, 14 nt, Human
aggucagagccugc

SEQ ID NO: 2999300 - RNA, 15 nt, Human
uggucagauuugaac

SEQ ID NO: 2999301 - RNA, 16 nt, Human
uggucagauuugaacu

SEQ ID NO: 2999302 - RNA, 13 nt, Human
aggucagagccug

SEQ ID NO: 2999303 - RNA, 16 nt, Human
aggucuugaacuccug

SEQ ID NO: 2999304 - RNA, 21 nt, Human
aggucaggagaucgagaccau

SEQ ID NO: 2999305 - RNA, 20 nt, Human
agcuuaagaaauuuguggaa

SEQ ID NO: 2999306 - RNA, 20 nt, Human
agcuuaaaggggcuagagug

SEQ ID NO: 2999307 - RNA, 11 nt, Human
ugcuacacacu

SEQ ID NO: 2999308 - RNA, 14 nt, Human
ugcuacaaaaacac

SEQ ID NO: 2999309 - RNA, 13 nt, Human
ugcuacaguaaua

SEQ ID NO: 2999310 - RNA, 15 nt, Human
ugcgguccacccagg

SEQ ID NO: 2999311 - RNA, 14 nt, Human
ugcgguccacccag

SEQ ID NO: 2999312 - RNA, 19 nt, Human
ugccuuuucccaacuccag

SEQ ID NO: 2999313 - RNA, 17 nt, Human
ugccuuuucccaacucc

SEQ ID NO: 2999314 - RNA, 14 nt, Human
aggaaaagcugcug

SEQ ID NO: 2999315 - RNA, 20 nt, Human
agcuugcccuggugccucac

SEQ ID NO: 2999316 - RNA, 23 nt, Human
agcuugaccgugaggccagagac

SEQ ID NO: 2999317 - RNA, 22 nt, Human
agcuugaggguugggcuggugu

SEQ ID NO: 2999318 - RNA, 20 nt, Human
agcuugaccgugaggccaga

SEQ ID NO: 2999319 - RNA, 22 nt, Human
agcuugaccgugaggccagaga

SEQ ID NO: 2999320 - RNA, 16 nt, Human
agcuugcccuguuaaa

SEQ ID NO: 2999321 - RNA, 18 nt, Human
agcuugcccuguuaaaag

SEQ ID NO: 2999322 - RNA, 19 nt, Human
agcuugcccuguuaaaaga

SEQ ID NO: 2999323 - RNA, 21 nt, Human
aggaaaucaaauaugcaaagc

SEQ ID NO: 2999324 - RNA, 22 nt, Human
aggaaaucaaauaugcaaagca

SEQ ID NO: 2999325 - RNA, 20 nt, Human
aggaaaucaaauaugcaaag

SEQ ID NO: 2999326 - RNA, 19 nt, Human
aggaaaucaaauaugcaaa

SEQ ID NO: 2999327 - RNA, 23 nt, Human
aggaaaggcuccaggagcagcca

SEQ ID NO: 2999328 - RNA, 21 nt, Human
ugcugagccucacagcaguga

SEQ ID NO: 2999329 - RNA, 19 nt, Human
ugcugagccucacagcagu

SEQ ID NO: 2999330 - RNA, 18 nt, Human
ugcugagauccuggacug

SEQ ID NO: 2999331 - RNA, 14 nt, Human
ugcugagauccugg

SEQ ID NO: 2999332 - RNA, 18 nt, Human
ugcugagccucacagcag

SEQ ID NO: 2999333 - RNA, 13 nt, Human
aggaagcucaggg

SEQ ID NO: 2999334 - RNA, 14 nt, Human
aggaagcucagggc

SEQ ID NO: 2999335 - RNA, 16 nt, Human
aggaagcucagggccu

SEQ ID NO: 2999336 - RNA, 15 nt, Human
aggaagcucagggcc

SEQ ID NO: 2999337 - RNA, 21 nt, Human
ugcuccagcuguucagcuggu

SEQ ID NO: 2999338 - RNA, 20 nt, Human
ugcuccagcuguucagcugg

SEQ ID NO: 2999339 - RNA, 15 nt, Human
ugcuccauccuccug

SEQ ID NO: 2999340 - RNA, 15 nt, Human
ugcucccaccuggcu

SEQ ID NO: 2999341 - RNA, 15 nt, Human
ugcucugcugacaga

SEQ ID NO: 2999342 - RNA, 14 nt, Human
ugcucugcugacag

SEQ ID NO: 2999343 - RNA, 14 nt, Human
ugcuaucuccccca

SEQ ID NO: 2999344 - RNA, 17 nt, Human
ugcuaucucccccagcc

SEQ ID NO: 2999345 - RNA, 13 nt, Human
ugcuaucuccccc

SEQ ID NO: 2999346 - RNA, 16 nt, Human
aggaaaagcugcugac

SEQ ID NO: 2999347 - RNA, 21 nt, Human
aggaaaauuauucuauaauuu

SEQ ID NO: 2999348 - RNA, 11 nt, Human
aggaaaauuau

SEQ ID NO: 2999349 - RNA, 15 nt, Human
agcugcccucuccug

SEQ ID NO: 2999350 - RNA, 14 nt, Human
agcugcccucuccu

SEQ ID NO: 2999351 - RNA, 13 nt, Human
agcugcccucucc

SEQ ID NO: 2999352 - RNA, 20 nt, Human
ugcccuguuaaaagaugaaa

SEQ ID NO: 2999353 - RNA, 19 nt, Human
ugcccuguuaaaagaugaa

SEQ ID NO: 2999354 - RNA, 18 nt, Human
ugcccuuaccugccagga

SEQ ID NO: 2999355 - RNA, 14 nt, Human
ugccgcagcccugc

SEQ ID NO: 2999356 - RNA, 12 nt, Human
ugccgcagcccu

SEQ ID NO: 2999357 - RNA, 13 nt, Human
ugccucagccucc

SEQ ID NO: 2999358 - RNA, 12 nt, Human
ugccucagccuc

SEQ ID NO: 2999359 - RNA, 21 nt, Human
agcucuguccugggagugagc

SEQ ID NO: 2999360 - RNA, 16 nt, Human
agcucuguccugggag

SEQ ID NO: 2999361 - RNA, 20 nt, Human
agcugccagccgagauagcc

SEQ ID NO: 2999362 - RNA, 14 nt, Human
agcugccagccgag

SEQ ID NO: 2999363 - RNA, 23 nt, Human
agcucccaggcauuccccaggag

SEQ ID NO: 2999364 - RNA, 15 nt, Human
agcuccuucuguccu

SEQ ID NO: 2999365 - RNA, 13 nt, Human
agcucccaggcau

SEQ ID NO: 2999366 - RNA, 12 nt, Human
agcucuggucca

SEQ ID NO: 2999367 - RNA, 17 nt, Human
agcucugguccauagag

SEQ ID NO: 2999368 - RNA, 14 nt, Human
agcucuguccuggg

SEQ ID NO: 2999369 - RNA, 21 nt, Human
agcuccuucuguccuacucug

SEQ ID NO: 2999370 - RNA, 16 nt, Human
agcuccuucuguccua

SEQ ID NO: 2999371 - RNA, 19 nt, Human
agcuguuacugucuucagu

SEQ ID NO: 2999372 - RNA, 14 nt, Human
agcuguucacagcc

SEQ ID NO: 2999373 - RNA, 16 nt, Human
ugccuguugggccagg

SEQ ID NO: 2999374 - RNA, 17 nt, Human
ugccuguugggccagga

SEQ ID NO: 2999375 - RNA, 20 nt, Human
ugccuuacccucauguucuu

SEQ ID NO: 2999376 - RNA, 16 nt, Human
ugccuuggggacaaga

SEQ ID NO: 2999377 - RNA, 21 nt, Human
ugccuuacccucauguucuua

SEQ ID NO: 2999378 - RNA, 18 nt, Human
agcuguuacugucuucag

SEQ ID NO: 2999379 - RNA, 14 nt, Human
agcuguuacugucu

SEQ ID NO: 2999380 - RNA, 23 nt, Human
agcugugcucuggacaggcaugu

SEQ ID NO: 2999381 - RNA, 18 nt, Human
agcugugcucuggacagg

SEQ ID NO: 2999382 - RNA, 17 nt, Human
agcugugcucuggacag

SEQ ID NO: 2999383 - RNA, 22 nt, Human
agcugggguggggaccucaggc

SEQ ID NO: 2999384 - RNA, 23 nt, Human
agcugggguggggaccucaggcc

SEQ ID NO: 2999385 - RNA, 20 nt, Human
agcugggguggggaccucag

SEQ ID NO: 2999386 - RNA, 16 nt, Human
agcugggacuacaggu

SEQ ID NO: 2999387 - RNA, 23 nt, Human
agcugggacuacaggcacccacc

SEQ ID NO: 2999388 - RNA, 20 nt, Human
agcugggacuacaggcaccc

SEQ ID NO: 2999389 - RNA, 17 nt, Human
ugccucugccucugaca

SEQ ID NO: 2999390 - RNA, 20 nt, Human
ugccucugccucugacacac

SEQ ID NO: 2999391 - RNA, 18 nt, Human
ugccucugccucugacac

SEQ ID NO: 2999392 - RNA, 14 nt, Human
ugccucagccuccc

SEQ ID NO: 2999393 - RNA, 23 nt, Human
ugccugcccaggccccugccacc

SEQ ID NO: 2999394 - RNA, 22 nt, Human
ugccugcccaggccccugccac

SEQ ID NO: 2999395 - RNA, 20 nt, Human
ugccugcccaggccccugcc

SEQ ID NO: 2999396 - RNA, 16 nt, Human
ugccuggauggggcug

SEQ ID NO: 2999397 - RNA, 17 nt, Human
ugccuggauggggcugc

SEQ ID NO: 2999398 - RNA, 20 nt, Human
ugccuggauggggcugcacc

SEQ ID NO: 2999399 - RNA, 21 nt, Human
ugccuggauggggcugcaccg

SEQ ID NO: 2999400 - RNA, 16 nt, Human
agcugccuguucagcu

SEQ ID NO: 2999401 - RNA, 14 nt, Human
agcugccuguucag

SEQ ID NO: 2999402 - RNA, 18 nt, Human
agcugccuguucagcucc

SEQ ID NO: 2999403 - RNA, 20 nt, Human
agcugcugagauccuggacu

SEQ ID NO: 2999404 - RNA, 20 nt, Human
agcugcuugggcuucauccu

SEQ ID NO: 2999405 - RNA, 16 nt, Human
agcugcuugggcuuca

SEQ ID NO: 2999406 - RNA, 21 nt, Human
agcugcugagauccuggacug

SEQ ID NO: 2999407 - RNA, 16 nt, Human
aggcaggggaauguau

SEQ ID NO: 2999408 - RNA, 19 nt, Human
aggcaggggaauguaugug

SEQ ID NO: 2999409 - RNA, 14 nt, Human
aggcaggggaaugu

SEQ ID NO: 2999410 - RNA, 20 nt, Human
aggcagcucuaaaugucaau

SEQ ID NO: 2999411 - RNA, 15 nt, Human
aggcagcuugaaacu

SEQ ID NO: 2999412 - RNA, 22 nt, Human
aggcauaaagucagggguuccc

SEQ ID NO: 2999413 - RNA, 18 nt, Human
aggcauugugggaagggg

SEQ ID NO: 2999414 - RNA, 20 nt, Human
aggcauuuaggccaugggac

SEQ ID NO: 2999415 - RNA, 17 nt, Human
aggcaggugggauggau

SEQ ID NO: 2999416 - RNA, 15 nt, Human
aggcauaaagucagg

SEQ ID NO: 2999417 - RNA, 12 nt, Human
aggcagggucuc

SEQ ID NO: 2999418 - RNA, 22 nt, Human
aggcaggucuugaacuccuggc

SEQ ID NO: 2999419 - RNA, 21 nt, Human
uggagcucguggaacaguuac

SEQ ID NO: 2999420 - RNA, 17 nt, Human
uggagcucguggaacag

SEQ ID NO: 2999421 - RNA, 17 nt, Human
aggcaagcaccuccugc

SEQ ID NO: 2999422 - RNA, 14 nt, Human
uggagcucguggaa

SEQ ID NO: 2999423 - RNA, 20 nt, Human
aggcaagcaccuccugccuc

SEQ ID NO: 2999424 - RNA, 19 nt, Human
aggcaagcaccuccugccu

SEQ ID NO: 2999425 - RNA, 18 nt, Human
aggcaagcaccuccugcc

SEQ ID NO: 2999426 - RNA, 17 nt, Human
aggcaaggcugucaauu

SEQ ID NO: 2999427 - RNA, 16 nt, Human
aggcaaggcugucaau

SEQ ID NO: 2999428 - RNA, 14 nt, Human
uggagaaaauggac

SEQ ID NO: 2999429 - RNA, 11 nt, Human
uggacuucugg

SEQ ID NO: 2999430 - RNA, 17 nt, Human
aggauugcuacuguccu

SEQ ID NO: 2999431 - RNA, 15 nt, Human
aggauugcuacuguc

SEQ ID NO: 2999432 - RNA, 18 nt, Human
aggauugcuacuguccua

SEQ ID NO: 2999433 - RNA, 19 nt, Human
uggacuucuggaugcccau

SEQ ID NO: 2999434 - RNA, 20 nt, Human
uggaguuauugaagcagagu

SEQ ID NO: 2999435 - RNA, 14 nt, Human
uggaguugaaaauc

SEQ ID NO: 2999436 - RNA, 14 nt, Human
uggagugcagugag

SEQ ID NO: 2999437 - RNA, 16 nt, Human
aggcauuugcugaaua

SEQ ID NO: 2999438 - RNA, 20 nt, Human
aggcauuugcugaauacaga

SEQ ID NO: 2999439 - RNA, 20 nt, Human
uggagguacgaaaagagggg

SEQ ID NO: 2999440 - RNA, 14 nt, Human
uggauucauauuua

SEQ ID NO: 2999441 - RNA, 17 nt, Human
uggauucauauuuaauu

SEQ ID NO: 2999442 - RNA, 23 nt, Human
uggaugccugguggcagcugcgg

SEQ ID NO: 2999443 - RNA, 21 nt, Human
uggaugccugguggcagcugc

SEQ ID NO: 2999444 - RNA, 20 nt, Human
uggaugccugguggcagcug

SEQ ID NO: 2999445 - RNA, 21 nt, Human
uggcacaucagcacgauuucu

SEQ ID NO: 2999446 - RNA, 23 nt, Human
uggcacaucagcacgauuucugu

SEQ ID NO: 2999447 - RNA, 15 nt, Human
aggcccccaggugcc

SEQ ID NO: 2999448 - RNA, 14 nt, Human
aggccccgcccagg

SEQ ID NO: 2999449 - RNA, 17 nt, Human
aggcccggcuccaggcu

SEQ ID NO: 2999450 - RNA, 13 nt, Human
aggcccggcucca

SEQ ID NO: 2999451 - RNA, 13 nt, Human
aggcccagagggc

SEQ ID NO: 2999452 - RNA, 13 nt, Human
aggccagccuuga

SEQ ID NO: 2999453 - RNA, 15 nt, Human
aggccagccuugacc

SEQ ID NO: 2999454 - RNA, 13 nt, Human
uggcagcucagag

SEQ ID NO: 2999455 - RNA, 23 nt, Human
uggcagcucaccucucccuugga

SEQ ID NO: 2999456 - RNA, 21 nt, Human
uggcagcucaccucucccuug

SEQ ID NO: 2999457 - RNA, 22 nt, Human
uggcagcucaccucucccuugg

SEQ ID NO: 2999458 - RNA, 20 nt, Human
uggcacccggccccugcugg

SEQ ID NO: 2999459 - RNA, 19 nt, Human
uggcacccggccccugcug

SEQ ID NO: 2999460 - RNA, 18 nt, Human
uggcacccggccccugcu

SEQ ID NO: 2999461 - RNA, 16 nt, Human
uggcacccggccccug

SEQ ID NO: 2999462 - RNA, 13 nt, Human
aggaucagucuga

SEQ ID NO: 2999463 - RNA, 19 nt, Human
aggauucuuccucccuccc

SEQ ID NO: 2999464 - RNA, 17 nt, Human
aggauucuuccucccuc

SEQ ID NO: 2999465 - RNA, 22 nt, Human
aggaugaucuaggaagacuuug

SEQ ID NO: 2999466 - RNA, 23 nt, Human
aggaugaucuaggaagacuuugg

SEQ ID NO: 2999467 - RNA, 22 nt, Human
aggaugcacagaguuguuacau

SEQ ID NO: 2999468 - RNA, 16 nt, Human
aggauucuuccucccu

SEQ ID NO: 2999469 - RNA, 18 nt, Human
ugcuuuuggucuguguga

SEQ ID NO: 2999470 - RNA, 23 nt, Human
ugcuuuuuaauauugauaugcuu

SEQ ID NO: 2999471 - RNA, 20 nt, Human
ugcuuuugucuaugggacuc

SEQ ID NO: 2999472 - RNA, 22 nt, Human
ugcuuugugauuuuuguaauuu

SEQ ID NO: 2999473 - RNA, 17 nt, Human
ugcuuugugauuuuugu

SEQ ID NO: 2999474 - RNA, 17 nt, Human
aggagccuccugcccuu

SEQ ID NO: 2999475 - RNA, 15 nt, Human
ugcuugagcucagga

SEQ ID NO: 2999476 - RNA, 23 nt, Human
uggaaauuuguuauaaugaauga

SEQ ID NO: 2999477 - RNA, 21 nt, Human
uggaaauuuguuauaaugaau

SEQ ID NO: 2999478 - RNA, 16 nt, Human
uggaagacagcucuua

SEQ ID NO: 2999479 - RNA, 15 nt, Human
uggaagacagcucuu

SEQ ID NO: 2999480 - RNA, 20 nt, Human
aggacgcucucuggccuucg

SEQ ID NO: 2999481 - RNA, 19 nt, Human
aggacgcucucuggccuuc

SEQ ID NO: 2999482 - RNA, 17 nt, Human
aggacgcucucuggccu

SEQ ID NO: 2999483 - RNA, 16 nt, Human
aggacgcucucuggcc

SEQ ID NO: 2999484 - RNA, 14 nt, Human
aggacgcucucugg

SEQ ID NO: 2999485 - RNA, 13 nt, Human
aggacgcucucug

SEQ ID NO: 2999486 - RNA, 23 nt, Human
aggacuccaggcagcagacacau

SEQ ID NO: 2999487 - RNA, 19 nt, Human
aggacuccaggcagcagac

SEQ ID NO: 2999488 - RNA, 14 nt, Human
aggacuccaggcag

SEQ ID NO: 2999489 - RNA, 18 nt, Human
aggacuccaggcagcaga

SEQ ID NO: 2999490 - RNA, 16 nt, Human
aggagccuccugcccu

SEQ ID NO: 2999491 - RNA, 17 nt, Human
aggagccccgaggccuu

SEQ ID NO: 2999492 - RNA, 12 nt, Human
aggagcagccac

SEQ ID NO: 2999493 - RNA, 13 nt, Human
aggagcagccaca

SEQ ID NO: 2999494 - RNA, 20 nt, Human
aggagaucgagaccauccug

SEQ ID NO: 2999495 - RNA, 19 nt, Human
aggagaaacuggaacucuc

SEQ ID NO: 2999496 - RNA, 18 nt, Human
aggagaaacuggaacucu

SEQ ID NO: 2999497 - RNA, 17 nt, Human
aggagaaacuggaacuc

SEQ ID NO: 2999498 - RNA, 22 nt, Human
aggacuuuucuuuguggcuucc

SEQ ID NO: 2999499 - RNA, 19 nt, Human
aggacuuuucuuuguggcu

SEQ ID NO: 2999500 - RNA, 17 nt, Human
aggacuuuucuuugugg

SEQ ID NO: 2999501 - RNA, 13 nt, Human
ugcacauuaaaug

SEQ ID NO: 2999502 - RNA, 18 nt, Human
ugcacauuaaaugacucu

SEQ ID NO: 2999503 - RNA, 15 nt, Human
ugcacauuaaaugac

SEQ ID NO: 2999504 - RNA, 15 nt, Human
ugcaccacugcacuc

SEQ ID NO: 2999505 - RNA, 21 nt, Human
ugcaccacugcacuccagccu

SEQ ID NO: 2999506 - RNA, 13 nt, Human
ugcaccagcccuu

SEQ ID NO: 2999507 - RNA, 22 nt, Human
ugcagaagacaguauggcagcu

SEQ ID NO: 2999508 - RNA, 17 nt, Human
ugcacuccagccugagc

SEQ ID NO: 2999509 - RNA, 15 nt, Human
ugcacuccagccugg

SEQ ID NO: 2999510 - RNA, 16 nt, Human
ugcacuccagccuggg

SEQ ID NO: 2999511 - RNA, 15 nt, Human
ugcacuccagccuga

SEQ ID NO: 2999512 - RNA, 14 nt, Human
ugcacuccagccug

SEQ ID NO: 2999513 - RNA, 16 nt, Human
ugcaccggcuggccug

SEQ ID NO: 2999514 - RNA, 14 nt, Human
ugcaccggcuggcc

SEQ ID NO: 2999515 - RNA, 15 nt, Human
ugcaccggcuggccu

SEQ ID NO: 2999516 - RNA, 19 nt, Human
agccccuucugacccaugc

SEQ ID NO: 2999517 - RNA, 13 nt, Human
agcccgggcucug

SEQ ID NO: 2999518 - RNA, 14 nt, Human
agcccgggcucugc

SEQ ID NO: 2999519 - RNA, 15 nt, Human
agcccgggcucugcc

SEQ ID NO: 2999520 - RNA, 15 nt, Human
agccccuucugaccc

SEQ ID NO: 2999521 - RNA, 16 nt, Human
agccccuucugaccca

SEQ ID NO: 2999522 - RNA, 14 nt, Human
agccccuucugacc

SEQ ID NO: 2999523 - RNA, 14 nt, Human
agcccugcagaggg

SEQ ID NO: 2999524 - RNA, 15 nt, Human
agcccugcagagggc

SEQ ID NO: 2999525 - RNA, 16 nt, Human
agcccugcagagggca

SEQ ID NO: 2999526 - RNA, 19 nt, Human
agcccugcagagggcacag

SEQ ID NO: 2999527 - RNA, 16 nt, Human
agcccgggcucugccu

SEQ ID NO: 2999528 - RNA, 14 nt, Human
agcccaggccuccu

SEQ ID NO: 2999529 - RNA, 19 nt, Human
agcccaggccuccuacagc

SEQ ID NO: 2999530 - RNA, 14 nt, Human
agccccgaggccuu

SEQ ID NO: 2999531 - RNA, 22 nt, Human
agccccuggaugcagccucaca

SEQ ID NO: 2999532 - RNA, 12 nt, Human
ugcaaagaugaa

SEQ ID NO: 2999533 - RNA, 23 nt, Human
ugcaaagaugaaggucuguuuug

SEQ ID NO: 2999534 - RNA, 18 nt, Human
ugcaaagcacugacuucu

SEQ ID NO: 2999535 - RNA, 20 nt, Human
ugcaaagcacugacuucuaa

SEQ ID NO: 2999536 - RNA, 22 nt, Human
ugcaaagcacugacuucuaagu

SEQ ID NO: 2999537 - RNA, 16 nt, Human
ugcaaacuucagaguu

SEQ ID NO: 2999538 - RNA, 18 nt, Human
ugcaaaccaucauugaaa

SEQ ID NO: 2999539 - RNA, 20 nt, Human
ugcaaaccaucauugaaauc

SEQ ID NO: 2999540 - RNA, 20 nt, Human
ugcaaaguaucccuacugua

SEQ ID NO: 2999541 - RNA, 21 nt, Human
ugcaaaggguaucaggugcug

SEQ ID NO: 2999542 - RNA, 14 nt, Human
ugauuucacagugu

SEQ ID NO: 2999543 - RNA, 16 nt, Human
ugauuucacagugugu

SEQ ID NO: 2999544 - RNA, 13 nt, Human
ugauuucauucaa

SEQ ID NO: 2999545 - RNA, 18 nt, Human
agccacggccaggccaga

SEQ ID NO: 2999546 - RNA, 17 nt, Human
agccacggccaggccag

SEQ ID NO: 2999547 - RNA, 12 nt, Human
ugcaaaccauca

SEQ ID NO: 2999548 - RNA, 13 nt, Human
ugcaaaccaucau

SEQ ID NO: 2999549 - RNA, 21 nt, Human
ugcaagccagauuuuccugaa

SEQ ID NO: 2999550 - RNA, 15 nt, Human
ugcaagccagauuuu

SEQ ID NO: 2999551 - RNA, 13 nt, Human
ugcaacaggcugg

SEQ ID NO: 2999552 - RNA, 18 nt, Human
ugcaaauaaguguauuuu

SEQ ID NO: 2999553 - RNA, 15 nt, Human
ugcaaauaaguguau

SEQ ID NO: 2999554 - RNA, 23 nt, Human
ugcaaauaaguguauuuugaaau

SEQ ID NO: 2999555 - RNA, 21 nt, Human
ugcaaauaaguguauuuugaa

SEQ ID NO: 2999556 - RNA, 15 nt, Human
ugcaaggucauuuuu

SEQ ID NO: 2999557 - RNA, 14 nt, Human
ugcaaggcaaaugu

SEQ ID NO: 2999558 - RNA, 12 nt, Human
agcccaggccuc

SEQ ID NO: 2999559 - RNA, 21 nt, Human
ugcaauaaaauggguuuuacu

SEQ ID NO: 2999560 - RNA, 17 nt, Human
ugcaauaaaauggguuu

SEQ ID NO: 2999561 - RNA, 18 nt, Human
ugcaucuagccucaagcu

SEQ ID NO: 2999562 - RNA, 17 nt, Human
ugcaucguuucaucuuc

SEQ ID NO: 2999563 - RNA, 19 nt, Human
ugcaugcugucccuuacgu

SEQ ID NO: 2999564 - RNA, 21 nt, Human
ugcaugcugucccuuacguga

SEQ ID NO: 2999565 - RNA, 18 nt, Human
ugcaugcugucccuuacg

SEQ ID NO: 2999566 - RNA, 14 nt, Human
ugcauaccacuuuu

SEQ ID NO: 2999567 - RNA, 13 nt, Human
ugcauacucauua

SEQ ID NO: 2999568 - RNA, 19 nt, Human
ugcauacucauuaggaugg

SEQ ID NO: 2999569 - RNA, 20 nt, Human
ugcauagauucccugagcag

SEQ ID NO: 2999570 - RNA, 20 nt, Human
ugcauaccacuuuuguucuu

SEQ ID NO: 2999571 - RNA, 18 nt, Human
ugcauaccacuuuuguuc

SEQ ID NO: 2999572 - RNA, 16 nt, Human
ugcauaccacuuuugu

SEQ ID NO: 2999573 - RNA, 13 nt, Human
ugcaguauagaau

SEQ ID NO: 2999574 - RNA, 14 nt, Human
ugcaguauagaaua

SEQ ID NO: 2999575 - RNA, 17 nt, Human
ugcagccucacaguccu

SEQ ID NO: 2999576 - RNA, 21 nt, Human
ugcagccucacaguccuuacc

SEQ ID NO: 2999577 - RNA, 18 nt, Human
ugcagccucacaguccuu

SEQ ID NO: 2999578 - RNA, 14 nt, Human
agccucuguuuuga

SEQ ID NO: 2999579 - RNA, 17 nt, Human
agccucuguuuugauau

SEQ ID NO: 2999580 - RNA, 21 nt, Human
ugcagacaggcaagcaccucc

SEQ ID NO: 2999581 - RNA, 13 nt, Human
ugcagacaggcaa

SEQ ID NO: 2999582 - RNA, 12 nt, Human
ugcagacaggca

SEQ ID NO: 2999583 - RNA, 14 nt, Human
agccuccugcccuu

SEQ ID NO: 2999584 - RNA, 18 nt, Human
agccuccugcccuuaccu

SEQ ID NO: 2999585 - RNA, 13 nt, Human
agccuccugcccu

SEQ ID NO: 2999586 - RNA, 13 nt, Human
ugccauaauuacu

SEQ ID NO: 2999587 - RNA, 17 nt, Human
ugccaguuauggcuaua

SEQ ID NO: 2999588 - RNA, 17 nt, Human
ugccagccgagauagcc

SEQ ID NO: 2999589 - RNA, 22 nt, Human
ugccagccgagauagccaaggc

SEQ ID NO: 2999590 - RNA, 16 nt, Human
ugcauuuaaaagauac

SEQ ID NO: 2999591 - RNA, 13 nt, Human
ugccaauggacua

SEQ ID NO: 2999592 - RNA, 14 nt, Human
ugccaaugggagcu

SEQ ID NO: 2999593 - RNA, 22 nt, Human
ugccaaugcuacaguaauaaau

SEQ ID NO: 2999594 - RNA, 17 nt, Human
ugccaaugcuacaguaa

SEQ ID NO: 2999595 - RNA, 19 nt, Human
agccugagcgacagugaga

SEQ ID NO: 2999596 - RNA, 19 nt, Human
agccugugccucugggacu

SEQ ID NO: 2999597 - RNA, 18 nt, Human
agccugugccucugggac

SEQ ID NO: 2999598 - RNA, 17 nt, Human
agccugugccucuggga

SEQ ID NO: 2999599 - RNA, 23 nt, Human
agccuugaacuuugaccucugca

SEQ ID NO: 2999600 - RNA, 20 nt, Human
agccuuagaagucacacagu

SEQ ID NO: 2999601 - RNA, 19 nt, Human
agccuugcggaagguucua

SEQ ID NO: 2999602 - RNA, 21 nt, Human
agccuugaccauucuccaccu

SEQ ID NO: 2999603 - RNA, 18 nt, Human
agccuugaccauucucca

SEQ ID NO: 2999604 - RNA, 19 nt, Human
agccuugaccauucuccac

SEQ ID NO: 2999605 - RNA, 22 nt, Human
ugagugcaaacuucagaguucu

SEQ ID NO: 2999606 - RNA, 20 nt, Human
ugagugcaaacuucagaguu

SEQ ID NO: 2999607 - RNA, 18 nt, Human
ugagugcaaacuucagag

SEQ ID NO: 2999608 - RNA, 20 nt, Human
ugaguacguugugcauuugg

SEQ ID NO: 2999609 - RNA, 18 nt, Human
ugagucaccaagcccagu

SEQ ID NO: 2999610 - RNA, 14 nt, Human
ugaguggaguuacu

SEQ ID NO: 2999611 - RNA, 17 nt, Human
ugagugcagcucuggag

SEQ ID NO: 2999612 - RNA, 13 nt, Human
ugagugccuuaca

SEQ ID NO: 2999613 - RNA, 14 nt, Human
ugagugccuuacac

SEQ ID NO: 2999614 - RNA, 21 nt, Human
ugagugggggaucacagccuc

SEQ ID NO: 2999615 - RNA, 18 nt, Human
ugagugucuuaauuaaaa

SEQ ID NO: 2999616 - RNA, 18 nt, Human
ugaguucauacccuguua

SEQ ID NO: 2999617 - RNA, 15 nt, Human
ugauacaaugcugug

SEQ ID NO: 2999618 - RNA, 14 nt, Human
ugauacaaugcugu

SEQ ID NO: 2999619 - RNA, 22 nt, Human
agcaguuugguuucuagcauga

SEQ ID NO: 2999620 - RNA, 23 nt, Human
agcaguuugguuucuagcaugaa

SEQ ID NO: 2999621 - RNA, 19 nt, Human
agcauaaaaauuagccaag

SEQ ID NO: 2999622 - RNA, 20 nt, Human
agcaguuugguuucuagcau

SEQ ID NO: 2999623 - RNA, 19 nt, Human
agcagucaggaaagagaac

SEQ ID NO: 2999624 - RNA, 18 nt, Human
agcagucaggaaagagaa

SEQ ID NO: 2999625 - RNA, 17 nt, Human
agcagucaggaaagaga

SEQ ID NO: 2999626 - RNA, 19 nt, Human
agcauaccaacacgagcag

SEQ ID NO: 2999627 - RNA, 22 nt, Human
agcauaccaacacgagcaggcu

SEQ ID NO: 2999628 - RNA, 13 nt, Human
agcauaccaacac

SEQ ID NO: 2999629 - RNA, 23 nt, Human
agcauaaaaauuagccaagugug

SEQ ID NO: 2999630 - RNA, 19 nt, Human
ugaguacguugugcauuug

SEQ ID NO: 2999631 - RNA, 18 nt, Human
ugaguacguugugcauuu

SEQ ID NO: 2999632 - RNA, 17 nt, Human
ugaguacguugugcauu

SEQ ID NO: 2999633 - RNA, 16 nt, Human
ugaguacguugugcau

SEQ ID NO: 2999634 - RNA, 20 nt, Human
agcaggaagcugugagagca

SEQ ID NO: 2999635 - RNA, 13 nt, Human
agcaggacaugga

SEQ ID NO: 2999636 - RNA, 11 nt, Human
agcagccacau

SEQ ID NO: 2999637 - RNA, 16 nt, Human
agcagcagggagggcu

SEQ ID NO: 2999638 - RNA, 20 nt, Human
ugacccaugcugcccuguga

SEQ ID NO: 2999639 - RNA, 18 nt, Human
ugacccaugcugcccugu

SEQ ID NO: 2999640 - RNA, 19 nt, Human
ugacccaugcugcccugug

SEQ ID NO: 2999641 - RNA, 17 nt, Human
ugacccaugcugcccug

SEQ ID NO: 2999642 - RNA, 16 nt, Human
agcaggcuacugucag

SEQ ID NO: 2999643 - RNA, 17 nt, Human
agcaggcuacugucagc

SEQ ID NO: 2999644 - RNA, 19 nt, Human
agcaggcuacugucagcuc

SEQ ID NO: 2999645 - RNA, 20 nt, Human
agcaggcuacugucagcucc

SEQ ID NO: 2999646 - RNA, 14 nt, Human
agcaggcuacuguc

SEQ ID NO: 2999647 - RNA, 19 nt, Human
agcagggcauggcugggaa

SEQ ID NO: 2999648 - RNA, 20 nt, Human
agcagggagggcuucugcca

SEQ ID NO: 2999649 - RNA, 15 nt, Human
agcagggcucagcgg

SEQ ID NO: 2999650 - RNA, 14 nt, Human
agcagggcucagcg

SEQ ID NO: 2999651 - RNA, 13 nt, Human
agcagggcucagc

SEQ ID NO: 2999652 - RNA, 22 nt, Human
agcagggcucagcggggacagc

SEQ ID NO: 2999653 - RNA, 17 nt, Human
agcaggcucgggcuccc

SEQ ID NO: 2999654 - RNA, 13 nt, Human
agcaggcucucag

SEQ ID NO: 2999655 - RNA, 14 nt, Human
agcaggcucucagg

SEQ ID NO: 2999656 - RNA, 15 nt, Human
agcaggcucucaggc

SEQ ID NO: 2999657 - RNA, 16 nt, Human
agcaggcucucaggcc

SEQ ID NO: 2999658 - RNA, 17 nt, Human
agcaggcucucaggcca

SEQ ID NO: 2999659 - RNA, 18 nt, Human
agcaggcucucaggccag

SEQ ID NO: 2999660 - RNA, 19 nt, Human
agcaggcucucaggccagc

SEQ ID NO: 2999661 - RNA, 21 nt, Human
agcaggcucucaggccagcug

SEQ ID NO: 2999662 - RNA, 22 nt, Human
agcaggcucucaggccagcugc

SEQ ID NO: 2999663 - RNA, 23 nt, Human
agcaggcucucaggccagcugcu

SEQ ID NO: 2999664 - RNA, 22 nt, Human
agcaggcugccagugccugggu

SEQ ID NO: 2999665 - RNA, 20 nt, Human
agcaggcugccagugccugg

SEQ ID NO: 2999666 - RNA, 18 nt, Human
agcaggcugccagugccu

SEQ ID NO: 2999667 - RNA, 17 nt, Human
agcaggcugccagugcc

SEQ ID NO: 2999668 - RNA, 14 nt, Human
agcaggcugccagu

SEQ ID NO: 2999669 - RNA, 13 nt, Human
agcaggcugccag

SEQ ID NO: 2999670 - RNA, 15 nt, Human
agcagggaaacagcu

SEQ ID NO: 2999671 - RNA, 14 nt, Human
agcagggaaacagc

SEQ ID NO: 2999672 - RNA, 13 nt, Human
agcagggaaacag

SEQ ID NO: 2999673 - RNA, 16 nt, Human
ugauuaaguaaugaua

SEQ ID NO: 2999674 - RNA, 16 nt, Human
agccacggccaggcca

SEQ ID NO: 2999675 - RNA, 15 nt, Human
ugauuaaguaaugau

SEQ ID NO: 2999676 - RNA, 16 nt, Human
ugauuaaauucuugca

SEQ ID NO: 2999677 - RNA, 13 nt, Human
ugauuaaauucuu

SEQ ID NO: 2999678 - RNA, 17 nt, Human
ugauuaaauucuugcaa

SEQ ID NO: 2999679 - RNA, 20 nt, Human
ugauuaaccacuucagcuga

SEQ ID NO: 2999680 - RNA, 21 nt, Human
ugauguuuuaaggaugcuugu

SEQ ID NO: 2999681 - RNA, 17 nt, Human
ugauguuuuccaugagu

SEQ ID NO: 2999682 - RNA, 19 nt, Human
ugauguuuuccaugagucc

SEQ ID NO: 2999683 - RNA, 22 nt, Human
ugauggggcccugccuccuuug

SEQ ID NO: 2999684 - RNA, 20 nt, Human
ugaugaucuuugcagacagg

SEQ ID NO: 2999685 - RNA, 19 nt, Human
ugaugaucuuugcagacag

SEQ ID NO: 2999686 - RNA, 23 nt, Human
ugaugaaaugaggucagagccug

SEQ ID NO: 2999687 - RNA, 14 nt, Human
ugaucuaggaagac

SEQ ID NO: 2999688 - RNA, 15 nt, Human
ugaucuaggaagacu

SEQ ID NO: 2999689 - RNA, 22 nt, Human
ugaugaaaugaggucagagccu

SEQ ID NO: 2999690 - RNA, 21 nt, Human
ugaugaucuuugcagacaggc

SEQ ID NO: 2999691 - RNA, 13 nt, Human
ugauggggcccug

SEQ ID NO: 2999692 - RNA, 22 nt, Human
ugaugggcaacccccagccugc

SEQ ID NO: 2999693 - RNA, 21 nt, Human
ugaugggcaacccccagccug

SEQ ID NO: 2999694 - RNA, 18 nt, Human
ugauccucccaccucagc

SEQ ID NO: 2999695 - RNA, 20 nt, Human
ugauccucccaccucagccu

SEQ ID NO: 2999696 - RNA, 19 nt, Human
ugauccucccaccucagcc

SEQ ID NO: 2999697 - RNA, 13 nt, Human
ugaucuaggaaga

SEQ ID NO: 2999698 - RNA, 16 nt, Human
ugauccucccaccuca

SEQ ID NO: 2999699 - RNA, 17 nt, Human
agcauauucaggaagcu

SEQ ID NO: 2999700 - RNA, 19 nt, Human
agcauauucaggaagcuca

SEQ ID NO: 2999701 - RNA, 21 nt, Human
agcauauucaggaagcucagg

SEQ ID NO: 2999702 - RNA, 20 nt, Human
agcaucacaugaacuuguaa

SEQ ID NO: 2999703 - RNA, 14 nt, Human
ugaucacggcucac

SEQ ID NO: 2999704 - RNA, 13 nt, Human
ugaucacggcuca

SEQ ID NO: 2999705 - RNA, 15 nt, Human
ugaucacggcucacu

SEQ ID NO: 2999706 - RNA, 21 nt, Human
ugauacagaaaaguugaauuu

SEQ ID NO: 2999707 - RNA, 13 nt, Human
agcauggcugcca

SEQ ID NO: 2999708 - RNA, 15 nt, Human
agcauccuggaauau

SEQ ID NO: 2999709 - RNA, 14 nt, Human
agcauccuggaaua

SEQ ID NO: 2999710 - RNA, 13 nt, Human
agcauccuggaau

SEQ ID NO: 2999711 - RNA, 16 nt, Human
agcauauucaggaagc

SEQ ID NO: 2999712 - RNA, 22 nt, Human
agcaucaggccaggcccucugc

SEQ ID NO: 2999713 - RNA, 21 nt, Human
agcaucaggccaggcccucug

SEQ ID NO: 2999714 - RNA, 23 nt, Human
agcaucaggccaggcccucugcc

SEQ ID NO: 2999715 - RNA, 15 nt, Human
agcauuuugcuaaau

SEQ ID NO: 2999716 - RNA, 22 nt, Human
agcauuuugcuaaaugugaaug

SEQ ID NO: 2999717 - RNA, 15 nt, Human
agccaaaacugagca

SEQ ID NO: 2999718 - RNA, 15 nt, Human
agcauuuuuuaaccu

SEQ ID NO: 2999719 - RNA, 19 nt, Human
agcauuuuaaacaaaauag

SEQ ID NO: 2999720 - RNA, 17 nt, Human
agcauuuuaaacaaaau

SEQ ID NO: 2999721 - RNA, 15 nt, Human
agcauuuuaaacaaa

SEQ ID NO: 2999722 - RNA, 13 nt, Human
agcauuuuaaaca

SEQ ID NO: 2999723 - RNA, 18 nt, Human
agcauuuguguugaagag

SEQ ID NO: 2999724 - RNA, 17 nt, Human
agcauuuguguugaaga

SEQ ID NO: 2999725 - RNA, 20 nt, Human
agcauuuuaaacaaaauaga

SEQ ID NO: 2999726 - RNA, 19 nt, Human
agcauggcugccaauggga

SEQ ID NO: 2999727 - RNA, 22 nt, Human
agcauuuagauguauagguuga

SEQ ID NO: 2999728 - RNA, 18 nt, Human
ugaaauaaggaaugauau

SEQ ID NO: 2999729 - RNA, 14 nt, Human
ugaaauaaggaaug

SEQ ID NO: 2999730 - RNA, 15 nt, Human
ugaaauuguauuaca

SEQ ID NO: 2999731 - RNA, 23 nt, Human
ugaaauuuccugggagcuuuugu

SEQ ID NO: 2999732 - RNA, 23 nt, Human
ugaaauaagccagacaucaacag

SEQ ID NO: 2999733 - RNA, 20 nt, Human
ugaaauaagccagacaucaa

SEQ ID NO: 2999734 - RNA, 18 nt, Human
ugaaauaagccagacauc

SEQ ID NO: 2999735 - RNA, 17 nt, Human
ugaaauaagccagacau

SEQ ID NO: 2999736 - RNA, 14 nt, Human
ugaaauaagccaga

SEQ ID NO: 2999737 - RNA, 14 nt, Human
agagcugcccucuc

SEQ ID NO: 2999738 - RNA, 13 nt, Human
agagcugcccucu

SEQ ID NO: 2999739 - RNA, 18 nt, Human
agagcugccaccugccug

SEQ ID NO: 2999740 - RNA, 17 nt, Human
ucuuuggacccugaggc

SEQ ID NO: 2999741 - RNA, 21 nt, Human
ucuuuggacccugaggcccag

SEQ ID NO: 2999742 - RNA, 16 nt, Human
agagauugugguuuca

SEQ ID NO: 2999743 - RNA, 12 nt, Human
agagcagagacc

SEQ ID NO: 2999744 - RNA, 17 nt, Human
agagcagagaccauccc

SEQ ID NO: 2999745 - RNA, 18 nt, Human
agagcagagaccaucccu

SEQ ID NO: 2999746 - RNA, 20 nt, Human
agagcagagaccaucccuga

SEQ ID NO: 2999747 - RNA, 21 nt, Human
agagcaggccaggcgcggugg

SEQ ID NO: 2999748 - RNA, 15 nt, Human
agagcaggccaggcg

SEQ ID NO: 2999749 - RNA, 13 nt, Human
agagcaggccagg

SEQ ID NO: 2999750 - RNA, 21 nt, Human
agagccuugcggaagguucua

SEQ ID NO: 2999751 - RNA, 11 nt, Human
agagccuugcg

SEQ ID NO: 2999752 - RNA, 15 nt, Human
agagguugcagugag

SEQ ID NO: 2999753 - RNA, 18 nt, Human
agagguacacuugugaau

SEQ ID NO: 2999754 - RNA, 22 nt, Human
ugaagcacagugaucaaguuau

SEQ ID NO: 2999755 - RNA, 12 nt, Human
agagguuuuaaa

SEQ ID NO: 2999756 - RNA, 13 nt, Human
agaggcagggucu

SEQ ID NO: 2999757 - RNA, 10 nt, Human
agaggcaggg

SEQ ID NO: 2999758 - RNA, 17 nt, Human
agaggcuaugugagcac

SEQ ID NO: 2999759 - RNA, 19 nt, Human
agaggccaugggccuccug

SEQ ID NO: 2999760 - RNA, 19 nt, Human
agaggcagccccauucugc

SEQ ID NO: 2999761 - RNA, 13 nt, Human
agaggcagcccca

SEQ ID NO: 2999762 - RNA, 24 nt, Human
agaggcagccccauucugccugcc

SEQ ID NO: 2999763 - RNA, 21 nt, Human
agagcuguucacagccagacu

SEQ ID NO: 2999764 - RNA, 19 nt, Human
agagcuguucacagccaga

SEQ ID NO: 2999765 - RNA, 22 nt, Human
ugaacuuugaccucugcagcaa

SEQ ID NO: 2999766 - RNA, 17 nt, Human
ugaacuuugaccucugc

SEQ ID NO: 2999767 - RNA, 20 nt, Human
ugaacuuugaccucugcagc

SEQ ID NO: 2999768 - RNA, 19 nt, Human
ugaacuuugaccucugcag

SEQ ID NO: 2999769 - RNA, 22 nt, Human
agagcugcccucuccugggcag

SEQ ID NO: 2999770 - RNA, 23 nt, Human
ugaacuagaguuuagcuggaaaa

SEQ ID NO: 2999771 - RNA, 12 nt, Human
ugaacuccuggc

SEQ ID NO: 2999772 - RNA, 11 nt, Human
ugaacuccugg

SEQ ID NO: 2999773 - RNA, 15 nt, Human
ugaacuccuggccuc

SEQ ID NO: 2999774 - RNA, 14 nt, Human
ugaacuccuggccu

SEQ ID NO: 2999775 - RNA, 15 nt, Human
ugaaauuuuuauuaa

SEQ ID NO: 2999776 - RNA, 18 nt, Human
ugaacaaauuuacagaga

SEQ ID NO: 2999777 - RNA, 20 nt, Human
ugaacaaauuuacagagaca

SEQ ID NO: 2999778 - RNA, 19 nt, Human
ugaacaaauuuacagagac

SEQ ID NO: 2999779 - RNA, 22 nt, Human
ugaaccgaugagaaauaaaguu

SEQ ID NO: 2999780 - RNA, 15 nt, Human
ugaaugucaguuguu

SEQ ID NO: 2999781 - RNA, 19 nt, Human
ugaaugucagugugacuga

SEQ ID NO: 2999782 - RNA, 16 nt, Human
ugaagcagaguggcag

SEQ ID NO: 2999783 - RNA, 13 nt, Human
ugaagcagagugg

SEQ ID NO: 2999784 - RNA, 12 nt, Human
ugaagcagagug

SEQ ID NO: 2999785 - RNA, 20 nt, Human
ugaaugguuuucaaaauaaa

SEQ ID NO: 2999786 - RNA, 22 nt, Human
agagucagaaguuucugccgca

SEQ ID NO: 2999787 - RNA, 17 nt, Human
agaguuuagcuggaaaa

SEQ ID NO: 2999788 - RNA, 16 nt, Human
agaguuuagcuggaaa

SEQ ID NO: 2999789 - RNA, 21 nt, Human
agaguuguuacauuuuuaagu

SEQ ID NO: 2999790 - RNA, 12 nt, Human
agaguuguuaca

SEQ ID NO: 2999791 - RNA, 22 nt, Human
agaguugauacuacaguuuguu

SEQ ID NO: 2999792 - RNA, 20 nt, Human
agaguugauacuacaguuug

SEQ ID NO: 2999793 - RNA, 17 nt, Human
agaguugauacuacagu

SEQ ID NO: 2999794 - RNA, 16 nt, Human
agaucacgccacugca

SEQ ID NO: 2999795 - RNA, 15 nt, Human
agaucacgccacugc

SEQ ID NO: 2999796 - RNA, 14 nt, Human
agaucacgccacug

SEQ ID NO: 2999797 - RNA, 16 nt, Human
agauaugauucaaaug

SEQ ID NO: 2999798 - RNA, 15 nt, Human
agauacugaaauaaa

SEQ ID NO: 2999799 - RNA, 13 nt, Human
agauacugaaaua

SEQ ID NO: 2999800 - RNA, 12 nt, Human
agauacugaaau

SEQ ID NO: 2999801 - RNA, 12 nt, Human
agauaaaugugc

SEQ ID NO: 2999802 - RNA, 15 nt, Human
agaguuuagcccuga

SEQ ID NO: 2999803 - RNA, 18 nt, Human
agaucacgccacugcacu

SEQ ID NO: 2999804 - RNA, 17 nt, Human
agaucacgccacugcac

SEQ ID NO: 2999805 - RNA, 15 nt, Human
ugaauuucuuuugcc

SEQ ID NO: 2999806 - RNA, 16 nt, Human
ugaauuuuacauggcu

SEQ ID NO: 2999807 - RNA, 20 nt, Human
ugacacacagcucuguccug

SEQ ID NO: 2999808 - RNA, 14 nt, Human
agaugcuagaacuc

SEQ ID NO: 2999809 - RNA, 19 nt, Human
agaugcaguucugaagaag

SEQ ID NO: 2999810 - RNA, 18 nt, Human
agaugcaguucugaagaa

SEQ ID NO: 2999811 - RNA, 17 nt, Human
agaugcaguucugaaga

SEQ ID NO: 2999812 - RNA, 15 nt, Human
agaugcaccagcccu

SEQ ID NO: 2999813 - RNA, 14 nt, Human
agaugcaccagccc

SEQ ID NO: 2999814 - RNA, 23 nt, Human
ugaccauucuccaccugccaggg

SEQ ID NO: 2999815 - RNA, 17 nt, Human
ugacccacaagaaauga

SEQ ID NO: 2999816 - RNA, 13 nt, Human
ugacccacugcuu

SEQ ID NO: 2999817 - RNA, 12 nt, Human
ugacccacugcu

SEQ ID NO: 2999818 - RNA, 15 nt, Human
agaugcuucucacug

SEQ ID NO: 2999819 - RNA, 18 nt, Human
ugaccaaugauggucacc

SEQ ID NO: 2999820 - RNA, 21 nt, Human
ugacauuguuggccaaagcca

SEQ ID NO: 2999821 - RNA, 20 nt, Human
ugacauuguuggccaaagcc

SEQ ID NO: 2999822 - RNA, 13 nt, Human
agaucagccuggg

SEQ ID NO: 2999823 - RNA, 15 nt, Human
agaucagccugggca

SEQ ID NO: 2999824 - RNA, 14 nt, Human
agaucaugcauaga

SEQ ID NO: 2999825 - RNA, 21 nt, Human
ugacacacagcucuguccugg

SEQ ID NO: 2999826 - RNA, 20 nt, Human
ugacaggcaaugcuggcugu

SEQ ID NO: 2999827 - RNA, 20 nt, Human
ugacagggcacaccgggcac

SEQ ID NO: 2999828 - RNA, 16 nt, Human
ugacagggcacaccgg

SEQ ID NO: 2999829 - RNA, 11 nt, Human
ugacagggcac

SEQ ID NO: 2999830 - RNA, 14 nt, Human
agacccggcugcgu

SEQ ID NO: 2999831 - RNA, 23 nt, Human
agacuauucaaacagucucagga

SEQ ID NO: 2999832 - RNA, 22 nt, Human
agaccugcccucaagagcaaag

SEQ ID NO: 2999833 - RNA, 17 nt, Human
ucuugagccuugaacuu

SEQ ID NO: 2999834 - RNA, 19 nt, Human
ucuugagccuugaacuuug

SEQ ID NO: 2999835 - RNA, 18 nt, Human
ucuugagccuugaacuuu

SEQ ID NO: 2999836 - RNA, 17 nt, Human
ucuuauuuaaugaaaga

SEQ ID NO: 2999837 - RNA, 15 nt, Human
ucuuauuucauuucu

SEQ ID NO: 2999838 - RNA, 16 nt, Human
ucuuauuucauuucuu

SEQ ID NO: 2999839 - RNA, 22 nt, Human
ucuucuguacgucugacaggca

SEQ ID NO: 2999840 - RNA, 21 nt, Human
ucuucuguacgucugacaggc

SEQ ID NO: 2999841 - RNA, 19 nt, Human
ucuucugcuucagccuccc

SEQ ID NO: 2999842 - RNA, 22 nt, Human
ucuucugcuucagccucccgag

SEQ ID NO: 2999843 - RNA, 23 nt, Human
agacauacuaaccagcagaaaug

SEQ ID NO: 2999844 - RNA, 20 nt, Human
ucuucuguacgucugacagg

SEQ ID NO: 2999845 - RNA, 15 nt, Human
agagacagaaagcag

SEQ ID NO: 2999846 - RNA, 24 nt, Human
agagacagaaagcagaacagugau

SEQ ID NO: 2999847 - RNA, 19 nt, Human
agacuuuucuuucagccaa

SEQ ID NO: 2999848 - RNA, 22 nt, Human
agagaaaaaauauuuuccugcc

SEQ ID NO: 2999849 - RNA, 22 nt, Human
agacuucucuacccaucuuaaa

SEQ ID NO: 2999850 - RNA, 14 nt, Human
agacuuuaaaagca

SEQ ID NO: 2999851 - RNA, 16 nt, Human
agacuguacaaaguag

SEQ ID NO: 2999852 - RNA, 15 nt, Human
agacuguacaaagua

SEQ ID NO: 2999853 - RNA, 14 nt, Human
agacuguacaaagu

SEQ ID NO: 2999854 - RNA, 20 nt, Human
agacucgcgacaaugcaaac

SEQ ID NO: 2999855 - RNA, 21 nt, Human
agacuuaaugagacuuuaaaa

SEQ ID NO: 2999856 - RNA, 20 nt, Human
agacuuaaugagacuuuaaa

SEQ ID NO: 2999857 - RNA, 20 nt, Human
ucuuuauaauucuacuuuga

SEQ ID NO: 2999858 - RNA, 13 nt, Human
ucuuucugcuuug

SEQ ID NO: 2999859 - RNA, 18 nt, Human
ucuuucuggcuaugcauu

SEQ ID NO: 2999860 - RNA, 15 nt, Human
agacucgcgacaaug

SEQ ID NO: 2999861 - RNA, 17 nt, Human
agacucgcgacaaugca

SEQ ID NO: 2999862 - RNA, 18 nt, Human
agacucgcgacaaugcaa

SEQ ID NO: 2999863 - RNA, 19 nt, Human
agacucgcgacaaugcaaa

SEQ ID NO: 2999864 - RNA, 20 nt, Human
ucuuuaaugucacaggcagg

SEQ ID NO: 2999865 - RNA, 16 nt, Human
ucuugguuuguaaauu

SEQ ID NO: 2999866 - RNA, 22 nt, Human
ucuuuaaugucacaggcagguc

SEQ ID NO: 2999867 - RNA, 14 nt, Human
ucuugguuuguaaa

SEQ ID NO: 2999868 - RNA, 12 nt, Human
agaauguuuuca

SEQ ID NO: 2999869 - RNA, 23 nt, Human
agaauuaacacaugauccugcaa

SEQ ID NO: 2999870 - RNA, 19 nt, Human
agaauuaguggcacuugcu

SEQ ID NO: 2999871 - RNA, 21 nt, Human
agaauguguuuaaacuugguu

SEQ ID NO: 2999872 - RNA, 23 nt, Human
agaaccccaggguccuguagccc

SEQ ID NO: 2999873 - RNA, 14 nt, Human
agaauucucuaguu

SEQ ID NO: 2999874 - RNA, 20 nt, Human
agaauuauaauuaguuccuc

SEQ ID NO: 2999875 - RNA, 20 nt, Human
agaauucucagaaucucaaa

SEQ ID NO: 2999876 - RNA, 15 nt, Human
ucuguauguguucua

SEQ ID NO: 2999877 - RNA, 12 nt, Human
ucuguauguguu

SEQ ID NO: 2999878 - RNA, 18 nt, Human
ucuguacgucugacaggc

SEQ ID NO: 2999879 - RNA, 17 nt, Human
ucugugaugacauuccc

SEQ ID NO: 2999880 - RNA, 20 nt, Human
ucugugaugacauucccugc

SEQ ID NO: 2999881 - RNA, 19 nt, Human
ucuguuuagauaauacacc

SEQ ID NO: 2999882 - RNA, 16 nt, Human
ucuguuuagauaauac

SEQ ID NO: 2999883 - RNA, 23 nt, Human
ucuguuuagauaauacaccacua

SEQ ID NO: 2999884 - RNA, 13 nt, Human
ucuguuuagauaa

SEQ ID NO: 2999885 - RNA, 14 nt, Human
agacaguuggguuu

SEQ ID NO: 2999886 - RNA, 12 nt, Human
agacagucccug

SEQ ID NO: 2999887 - RNA, 15 nt, Human
agacagcugccuggg

SEQ ID NO: 2999888 - RNA, 16 nt, Human
agacagcugccuggga

SEQ ID NO: 2999889 - RNA, 13 nt, Human
agacagucccugc

SEQ ID NO: 2999890 - RNA, 19 nt, Human
agacagucccugccaaugg

SEQ ID NO: 2999891 - RNA, 15 nt, Human
ucuuacaucugaaau

SEQ ID NO: 2999892 - RNA, 12 nt, Human
ucuuagauguau

SEQ ID NO: 2999893 - RNA, 23 nt, Human
ucuuagaugcaguucugaagaag

SEQ ID NO: 2999894 - RNA, 22 nt, Human
ucuuagaugcaguucugaagaa

SEQ ID NO: 2999895 - RNA, 18 nt, Human
ucuuaugggcuggguucu

SEQ ID NO: 2999896 - RNA, 16 nt, Human
agacacacugaagaag

SEQ ID NO: 2999897 - RNA, 17 nt, Human
agacacacugaagaagc

SEQ ID NO: 2999898 - RNA, 17 nt, Human
agacacaggcccggcuc

SEQ ID NO: 2999899 - RNA, 22 nt, Human
agacacaggcccggcuccaggc

SEQ ID NO: 2999900 - RNA, 21 nt, Human
agacacaggcccggcuccagg

SEQ ID NO: 2999901 - RNA, 20 nt, Human
agacacaggcccggcuccag

SEQ ID NO: 2999902 - RNA, 19 nt, Human
agacacaggcccggcucca

SEQ ID NO: 2999903 - RNA, 14 nt, Human
agacacaagccuuc

SEQ ID NO: 2999904 - RNA, 15 nt, Human
agacacacaugaagu

SEQ ID NO: 2999905 - RNA, 13 nt, Human
agacacaagccuu

SEQ ID NO: 2999906 - RNA, 19 nt, Human
agaauucucuaguuugauu

SEQ ID NO: 2999907 - RNA, 18 nt, Human
agaauucucuaguuugau

SEQ ID NO: 2999908 - RNA, 17 nt, Human
agaauucucuuauccaa

SEQ ID NO: 2999909 - RNA, 13 nt, Human
agacagcugccug

SEQ ID NO: 2999910 - RNA, 14 nt, Human
agacagcugccugg

SEQ ID NO: 2999911 - RNA, 21 nt, Human
agacacauguccaagaagccc

SEQ ID NO: 2999912 - RNA, 22 nt, Human
agacacauguccaagaagccca

SEQ ID NO: 2999913 - RNA, 23 nt, Human
agacacaggcccggcuccaggcu

SEQ ID NO: 2999914 - RNA, 24 nt, Human
agacacauguccaagaagcccagg

SEQ ID NO: 2999915 - RNA, 19 nt, Human
agacaccuugacagggcac

SEQ ID NO: 2999916 - RNA, 22 nt, Human
agacaccuugacagggcacacc

SEQ ID NO: 2999917 - RNA, 21 nt, Human
ucuauuucuggaugaaugccc

SEQ ID NO: 2999918 - RNA, 23 nt, Human
ucucacacaugagcaucaggcca

SEQ ID NO: 2999919 - RNA, 11 nt, Human
acuucagcuga

SEQ ID NO: 2999920 - RNA, 16 nt, Human
acuucagcugacuuuu

SEQ ID NO: 2999921 - RNA, 15 nt, Human
ucuauuuauuuguga

SEQ ID NO: 2999922 - RNA, 11 nt, Human
ucucacuccuu

SEQ ID NO: 2999923 - RNA, 23 nt, Human
acuucuaaguaaaaccacagcag

SEQ ID NO: 2999924 - RNA, 14 nt, Human
acuucuccacccug

SEQ ID NO: 2999925 - RNA, 21 nt, Human
acuucuaaguaaaaccacagc

SEQ ID NO: 2999926 - RNA, 12 nt, Human
ucucacucuguc

SEQ ID NO: 2999927 - RNA, 13 nt, Human
ucucacuccuuga

SEQ ID NO: 2999928 - RNA, 22 nt, Human
acuucgggaggucgaggcagga

SEQ ID NO: 2999929 - RNA, 20 nt, Human
acuugaacccgggaggcaga

SEQ ID NO: 2999930 - RNA, 19 nt, Human
acuugaacccgggaggcag

SEQ ID NO: 2999931 - RNA, 21 nt, Human
acuugaacccauauuuguaca

SEQ ID NO: 2999932 - RNA, 16 nt, Human
acuucuccacccugcu

SEQ ID NO: 2999933 - RNA, 15 nt, Human
acuucuccacccugc

SEQ ID NO: 2999934 - RNA, 19 nt, Human
acuugagcccagagugaac

SEQ ID NO: 2999935 - RNA, 16 nt, Human
acuugucaauaaaauc

SEQ ID NO: 2999936 - RNA, 18 nt, Human
acuuguggacacagcucu

SEQ ID NO: 2999937 - RNA, 17 nt, Human
acuuguggacacagcuc

SEQ ID NO: 2999938 - RNA, 16 nt, Human
acuuguggacacagcu

SEQ ID NO: 2999939 - RNA, 11 nt, Human
acuuuaaacua

SEQ ID NO: 2999940 - RNA, 16 nt, Human
acuuguguuuugcaag

SEQ ID NO: 2999941 - RNA, 21 nt, Human
ucuccuccuuuucacaguucu

SEQ ID NO: 2999942 - RNA, 16 nt, Human
acuuucuagccagagg

SEQ ID NO: 2999943 - RNA, 17 nt, Human
acuuucuagccagagga

SEQ ID NO: 2999944 - RNA, 14 nt, Human
acuuugaccucugc

SEQ ID NO: 2999945 - RNA, 16 nt, Human
ucuccauguuugaugu

SEQ ID NO: 2999946 - RNA, 16 nt, Human
ucuccaggcuguaucc

SEQ ID NO: 2999947 - RNA, 13 nt, Human
ucuccaaaauaaa

SEQ ID NO: 2999948 - RNA, 22 nt, Human
ucuccaaaauaaaacuuuuuaa

SEQ ID NO: 2999949 - RNA, 19 nt, Human
ucuccaaaauaaaacuuuu

SEQ ID NO: 2999950 - RNA, 17 nt, Human
ucuccaaaauaaaacuu

SEQ ID NO: 2999951 - RNA, 11 nt, Human
ucuccaggcug

SEQ ID NO: 2999952 - RNA, 14 nt, Human
ucucagggccuggu

SEQ ID NO: 2999953 - RNA, 15 nt, Human
ucucagggccugguc

SEQ ID NO: 2999954 - RNA, 19 nt, Human
ucucagggccuggucguuu

SEQ ID NO: 2999955 - RNA, 15 nt, Human
acuuguggacacagc

SEQ ID NO: 2999956 - RNA, 12 nt, Human
ucucagggccug

SEQ ID NO: 2999957 - RNA, 13 nt, Human
ucucagggccugg

SEQ ID NO: 2999958 - RNA, 18 nt, Human
ucucucaucuguuacaca

SEQ ID NO: 2999959 - RNA, 17 nt, Human
ucucuccagccccugga

SEQ ID NO: 2999960 - RNA, 16 nt, Human
ucucuccagccccugg

SEQ ID NO: 2999961 - RNA, 18 nt, Human
ucucuccagccccuggau

SEQ ID NO: 2999962 - RNA, 19 nt, Human
ucucuccagccccuggaug

SEQ ID NO: 2999963 - RNA, 16 nt, Human
acuuugaccucugcag

SEQ ID NO: 2999964 - RNA, 15 nt, Human
acuuugaccucugca

SEQ ID NO: 2999965 - RNA, 18 nt, Human
acuuugaccucugcagca

SEQ ID NO: 2999966 - RNA, 13 nt, Human
ucucucacuccuu

SEQ ID NO: 2999967 - RNA, 15 nt, Human
ucucucacuccuuga

SEQ ID NO: 2999968 - RNA, 21 nt, Human
ucucucaggccaaacucaccu

SEQ ID NO: 2999969 - RNA, 17 nt, Human
ucucucacuuguuuuau

SEQ ID NO: 2999970 - RNA, 12 nt, Human
ucucuggccuuc

SEQ ID NO: 2999971 - RNA, 11 nt, Human
ucucugcccuc

SEQ ID NO: 2999972 - RNA, 15 nt, Human
ucucugcccuccaag

SEQ ID NO: 2999973 - RNA, 16 nt, Human
ucucugcccuccaaga

SEQ ID NO: 2999974 - RNA, 17 nt, Human
ucucugcccuccaagac

SEQ ID NO: 2999975 - RNA, 14 nt, Human
ucucuccuguaccu

SEQ ID NO: 2999976 - RNA, 16 nt, Human
ucucuccuguaccucu

SEQ ID NO: 2999977 - RNA, 23 nt, Human
agaaacuuaagguuaccuuuguu

SEQ ID NO: 2999978 - RNA, 17 nt, Human
agaaaaaggaugcacag

SEQ ID NO: 2999979 - RNA, 17 nt, Human
ucucuugagccugggag

SEQ ID NO: 2999980 - RNA, 22 nt, Human
ucucuggccuucggccuccauc

SEQ ID NO: 2999981 - RNA, 21 nt, Human
ucucuggccuucggccuccau

SEQ ID NO: 2999982 - RNA, 14 nt, Human
ucucuugauucaua

SEQ ID NO: 2999983 - RNA, 16 nt, Human
ucucuugauucauaau

SEQ ID NO: 2999984 - RNA, 18 nt, Human
ucucuugagccugggagg

SEQ ID NO: 2999985 - RNA, 21 nt, Human
ucucuuuaaugucacaggcag

SEQ ID NO: 2999986 - RNA, 20 nt, Human
ucucuuuaaugucacaggca

SEQ ID NO: 2999987 - RNA, 13 nt, Human
agaaaaagaaaaa

SEQ ID NO: 2999988 - RNA, 12 nt, Human
ucugacuauaac

SEQ ID NO: 2999989 - RNA, 22 nt, Human
ucugagacucgcgacaaugcaa

SEQ ID NO: 2999990 - RNA, 23 nt, Human
ucugagacucgcgacaaugcaaa

SEQ ID NO: 2999991 - RNA, 18 nt, Human
ucugcacuccccugcugg

SEQ ID NO: 2999992 - RNA, 19 nt, Human
ucugcacuccccugcuggg

SEQ ID NO: 2999993 - RNA, 17 nt, Human
ucugcacuccccugcug

SEQ ID NO: 2999994 - RNA, 20 nt, Human
ucugcacuccccugcugggu

SEQ ID NO: 2999995 - RNA, 18 nt, Human
ucugcagcaauaaagcag

SEQ ID NO: 2999996 - RNA, 19 nt, Human
agaaauaucugaaaaugua

SEQ ID NO: 2999997 - RNA, 14 nt, Human
agaaauauaauuga

SEQ ID NO: 2999998 - RNA, 20 nt, Human
agaaauaucugaaaauguau

SEQ ID NO: 2999999 - RNA, 12 nt, Human
ucugaagaagau

SEQ ID NO: 3000000 - RNA, 18 nt, Human
ucgcuccaccuugcagcu

SEQ ID NO: 3000001 - RNA, 16 nt, Human
ucgcgacaaugcaaac

SEQ ID NO: 3000002 - RNA, 14 nt, Human
ucgcgacaaugcaa

SEQ ID NO: 3000003 - RNA, 19 nt, Human
ucgcgacaaugcaaaccau

SEQ ID NO: 3000004 - RNA, 16 nt, Human
ucgagcaugccuggau

SEQ ID NO: 3000005 - RNA, 18 nt, Human
ucgagcaugccuggaugg

SEQ ID NO: 3000006 - RNA, 15 nt, Human
ucgagcaugccugga

SEQ ID NO: 3000007 - RNA, 23 nt, Human
uccuuuagcgcccaguugggugg

SEQ ID NO: 3000008 - RNA, 22 nt, Human
uccuuuagcgcccaguugggug

SEQ ID NO: 3000009 - RNA, 23 nt, Human
uccuuguguuacuaaguuuuuau

SEQ ID NO: 3000010 - RNA, 14 nt, Human
uccuuguguuacua

SEQ ID NO: 3000011 - RNA, 19 nt, Human
uccuuuagcgcccaguugg

SEQ ID NO: 3000012 - RNA, 15 nt, Human
uccuuuagcgcccag

SEQ ID NO: 3000013 - RNA, 16 nt, Human
uccuucagugccuuau

SEQ ID NO: 3000014 - RNA, 17 nt, Human
uccuucagugccuuaug

SEQ ID NO: 3000015 - RNA, 14 nt, Human
uccuucagugccuu

SEQ ID NO: 3000016 - RNA, 15 nt, Human
uccuucagugccuua

SEQ ID NO: 3000017 - RNA, 14 nt, Human
acugcauuauauuu

SEQ ID NO: 3000018 - RNA, 15 nt, Human
acugcauuauauuua

SEQ ID NO: 3000019 - RNA, 16 nt, Human
acugcauaugaaagga

SEQ ID NO: 3000020 - RNA, 21 nt, Human
uccuagaaauuccccacccug

SEQ ID NO: 3000021 - RNA, 22 nt, Human
uccuagaaauuccccacccuga

SEQ ID NO: 3000022 - RNA, 16 nt, Human
acugcauguuugugau

SEQ ID NO: 3000023 - RNA, 15 nt, Human
acugcauguuuguga

SEQ ID NO: 3000024 - RNA, 20 nt, Human
acugcaucaagaugugacau

SEQ ID NO: 3000025 - RNA, 22 nt, Human
acugcaucaagaugugacaugu

SEQ ID NO: 3000026 - RNA, 19 nt, Human
acugccuucucaacuccaa

SEQ ID NO: 3000027 - RNA, 13 nt, Human
acugccuucucaa

SEQ ID NO: 3000028 - RNA, 18 nt, Human
acugcuuaacuucacaua

SEQ ID NO: 3000029 - RNA, 19 nt, Human
acuggcacaguuuucugag

SEQ ID NO: 3000030 - RNA, 20 nt, Human
acuggcacaguuuucugaga

SEQ ID NO: 3000031 - RNA, 13 nt, Human
acuggcacaguuu

SEQ ID NO: 3000032 - RNA, 15 nt, Human
acuggauuaaacuua

SEQ ID NO: 3000033 - RNA, 21 nt, Human
acugcuugugaaaggaaagag

SEQ ID NO: 3000034 - RNA, 17 nt, Human
acugcuuccagugaggc

SEQ ID NO: 3000035 - RNA, 20 nt, Human
acugcuuaacuucacauauu

SEQ ID NO: 3000036 - RNA, 13 nt, Human
ucuaaagcugcca

SEQ ID NO: 3000037 - RNA, 14 nt, Human
ucuaaagcugccag

SEQ ID NO: 3000038 - RNA, 20 nt, Human
ucuaaagccauuguaguccu

SEQ ID NO: 3000039 - RNA, 15 nt, Human
ucuaaagcugccagc

SEQ ID NO: 3000040 - RNA, 16 nt, Human
ucuaaagcugccagcc

SEQ ID NO: 3000041 - RNA, 21 nt, Human
ucuaaguaaaaccacagcagu

SEQ ID NO: 3000042 - RNA, 22 nt, Human
ucuaaguaaaaccacagcaguu

SEQ ID NO: 3000043 - RNA, 20 nt, Human
ucuaaguaaaaccacagcag

SEQ ID NO: 3000044 - RNA, 16 nt, Human
ucuacauacuauggaa

SEQ ID NO: 3000045 - RNA, 23 nt, Human
ucuaaguaaaaccacagcaguug

SEQ ID NO: 3000046 - RNA, 14 nt, Human
acuguucucugccc

SEQ ID NO: 3000047 - RNA, 15 nt, Human
acuguucucugcccu

SEQ ID NO: 3000048 - RNA, 20 nt, Human
acuguucucugcccuccaag

SEQ ID NO: 3000049 - RNA, 21 nt, Human
acuguucucugcccuccaaga

SEQ ID NO: 3000050 - RNA, 19 nt, Human
acuguucucugcccuccaa

SEQ ID NO: 3000051 - RNA, 15 nt, Human
acuuaaauaauguga

SEQ ID NO: 3000052 - RNA, 16 nt, Human
acuuaaauaaugugaa

SEQ ID NO: 3000053 - RNA, 18 nt, Human
acuuaaauaaugugaaac

SEQ ID NO: 3000054 - RNA, 17 nt, Human
acuuaaauaaugugaaa

SEQ ID NO: 3000055 - RNA, 14 nt, Human
acuguugcccaggc

SEQ ID NO: 3000056 - RNA, 13 nt, Human
acuguugcccagg

SEQ ID NO: 3000057 - RNA, 12 nt, Human
acuguugcccag

SEQ ID NO: 3000058 - RNA, 18 nt, Human
acuguugcccaggcuggc

SEQ ID NO: 3000059 - RNA, 17 nt, Human
acuguugcccaggcugg

SEQ ID NO: 3000060 - RNA, 16 nt, Human
acuuaaucuaaaugga

SEQ ID NO: 3000061 - RNA, 15 nt, Human
acuuaaucuaaaugg

SEQ ID NO: 3000062 - RNA, 13 nt, Human
acuuaaucuaaau

SEQ ID NO: 3000063 - RNA, 22 nt, Human
ucggguuuuauuguuuaaaauc

SEQ ID NO: 3000064 - RNA, 11 nt, Human
ucgggcaugac

SEQ ID NO: 3000065 - RNA, 12 nt, Human
ucgggcaugaca

SEQ ID NO: 3000066 - RNA, 19 nt, Human
ucgggaggucgaggcagga

SEQ ID NO: 3000067 - RNA, 21 nt, Human
ucgggaggucgaggcaggagg

SEQ ID NO: 3000068 - RNA, 17 nt, Human
ucgggaggucgaggcag

SEQ ID NO: 3000069 - RNA, 18 nt, Human
acuguggguagacacaca

SEQ ID NO: 3000070 - RNA, 13 nt, Human
acuguggguagac

SEQ ID NO: 3000071 - RNA, 17 nt, Human
acuguccuacccacccu

SEQ ID NO: 3000072 - RNA, 18 nt, Human
acuguccuacccacccuc

SEQ ID NO: 3000073 - RNA, 18 nt, Human
acugggacaggggagaac

SEQ ID NO: 3000074 - RNA, 21 nt, Human
acugucagcuccccucggaga

SEQ ID NO: 3000075 - RNA, 22 nt, Human
uccaaucugugaugacauuccc

SEQ ID NO: 3000076 - RNA, 17 nt, Human
uccacccaccucagccu

SEQ ID NO: 3000077 - RNA, 19 nt, Human
uccacccaccucagccucc

SEQ ID NO: 3000078 - RNA, 18 nt, Human
uccacccaccucagccuc

SEQ ID NO: 3000079 - RNA, 15 nt, Human
uccacccaggagccc

SEQ ID NO: 3000080 - RNA, 14 nt, Human
uccacccaggagcc

SEQ ID NO: 3000081 - RNA, 12 nt, Human
uccacccaggag

SEQ ID NO: 3000082 - RNA, 22 nt, Human
accuggauugugccuaaugugu

SEQ ID NO: 3000083 - RNA, 16 nt, Human
accuggccucugcacu

SEQ ID NO: 3000084 - RNA, 17 nt, Human
accuggccucugcacuc

SEQ ID NO: 3000085 - RNA, 14 nt, Human
accuggccucugca

SEQ ID NO: 3000086 - RNA, 19 nt, Human
accuuagacagucccugcc

SEQ ID NO: 3000087 - RNA, 20 nt, Human
accuuagacagucccugcca

SEQ ID NO: 3000088 - RNA, 18 nt, Human
accuuagacagucccugc

SEQ ID NO: 3000089 - RNA, 19 nt, Human
accuguuucugcagccacu

SEQ ID NO: 3000090 - RNA, 23 nt, Human
accuggcucuguggcgagccauu

SEQ ID NO: 3000091 - RNA, 14 nt, Human
accuggcucugugg

SEQ ID NO: 3000092 - RNA, 23 nt, Human
accuggccucugcacuccccugc

SEQ ID NO: 3000093 - RNA, 18 nt, Human
accuggccucugcacucc

SEQ ID NO: 3000094 - RNA, 20 nt, Human
accuggccucugcacucccc

SEQ ID NO: 3000095 - RNA, 21 nt, Human
uccaacuaucucauuuccaag

SEQ ID NO: 3000096 - RNA, 20 nt, Human
uccaagcuggucccacucag

SEQ ID NO: 3000097 - RNA, 16 nt, Human
uccaagcuggucccac

SEQ ID NO: 3000098 - RNA, 12 nt, Human
uccaagaagccc

SEQ ID NO: 3000099 - RNA, 18 nt, Human
uccaaggguacuaaggaa

SEQ ID NO: 3000100 - RNA, 21 nt, Human
uccaagcuggucccacucagu

SEQ ID NO: 3000101 - RNA, 23 nt, Human
uccaacccucaucaccaacgucu

SEQ ID NO: 3000102 - RNA, 16 nt, Human
uccaacccucaucacc

SEQ ID NO: 3000103 - RNA, 17 nt, Human
uccaacccucaucacca

SEQ ID NO: 3000104 - RNA, 14 nt, Human
uccaacccucauca

SEQ ID NO: 3000105 - RNA, 15 nt, Human
accugccaggaagcc

SEQ ID NO: 3000106 - RNA, 12 nt, Human
accugccaggaa

SEQ ID NO: 3000107 - RNA, 14 nt, Human
accugccaggaagc

SEQ ID NO: 3000108 - RNA, 14 nt, Human
acgagaaaacaaua

SEQ ID NO: 3000109 - RNA, 21 nt, Human
accuuuuuuauacauaaacaa

SEQ ID NO: 3000110 - RNA, 20 nt, Human
accuuuuuuauacauaaaca

SEQ ID NO: 3000111 - RNA, 19 nt, Human
accuuuuuuauacauaaac

SEQ ID NO: 3000112 - RNA, 21 nt, Human
uccaggcuguaucccaugagc

SEQ ID NO: 3000113 - RNA, 19 nt, Human
acgagcaggcuacugucag

SEQ ID NO: 3000114 - RNA, 20 nt, Human
acgagcaggcuacugucagc

SEQ ID NO: 3000115 - RNA, 19 nt, Human
acgccagauucuuuccuga

SEQ ID NO: 3000116 - RNA, 17 nt, Human
acgccagauucuuuccu

SEQ ID NO: 3000117 - RNA, 16 nt, Human
acgagcaggcuucuuc

SEQ ID NO: 3000118 - RNA, 14 nt, Human
uccaggcuguaucc

SEQ ID NO: 3000119 - RNA, 17 nt, Human
uccaggcagcagacaca

SEQ ID NO: 3000120 - RNA, 18 nt, Human
uccaggcagcagacacau

SEQ ID NO: 3000121 - RNA, 12 nt, Human
uccagccccugg

SEQ ID NO: 3000122 - RNA, 13 nt, Human
uccagccccugga

SEQ ID NO: 3000123 - RNA, 17 nt, Human
accuuuugagugccuua

SEQ ID NO: 3000124 - RNA, 20 nt, Human
accuuuugagugccuuacac

SEQ ID NO: 3000125 - RNA, 14 nt, Human
accuuuugagugcc

SEQ ID NO: 3000126 - RNA, 16 nt, Human
uccagaauuucccaaa

SEQ ID NO: 3000127 - RNA, 20 nt, Human
uccagaauuucccaaagcag

SEQ ID NO: 3000128 - RNA, 22 nt, Human
uccagaauuucccaaagcagug

SEQ ID NO: 3000129 - RNA, 14 nt, Human
uccagacccggcug

SEQ ID NO: 3000130 - RNA, 18 nt, Human
uccagacccggcugcgug

SEQ ID NO: 3000131 - RNA, 15 nt, Human
uccagacccggcugc

SEQ ID NO: 3000132 - RNA, 19 nt, Human
uccagacccggcugcgugg

SEQ ID NO: 3000133 - RNA, 21 nt, Human
ucauucuuuuugaaaugucaa

SEQ ID NO: 3000134 - RNA, 12 nt, Human
ucauucuucugu

SEQ ID NO: 3000135 - RNA, 12 nt, Human
ucauugaaaucu

SEQ ID NO: 3000136 - RNA, 13 nt, Human
ucauugaaaucuu

SEQ ID NO: 3000137 - RNA, 12 nt, Human
ucauuacuaaaa

SEQ ID NO: 3000138 - RNA, 19 nt, Human
accucggugccuuccucuu

SEQ ID NO: 3000139 - RNA, 13 nt, Human
accuccugggcua

SEQ ID NO: 3000140 - RNA, 22 nt, Human
ucauugaaaucuuuuugcuuug

SEQ ID NO: 3000141 - RNA, 12 nt, Human
ucauugaccuga

SEQ ID NO: 3000142 - RNA, 14 nt, Human
ucauugaccugagg

SEQ ID NO: 3000143 - RNA, 15 nt, Human
ucauugaccugaggc

SEQ ID NO: 3000144 - RNA, 14 nt, Human
accugaggcccuuc

SEQ ID NO: 3000145 - RNA, 15 nt, Human
accugaggcccuucu

SEQ ID NO: 3000146 - RNA, 16 nt, Human
accugaggcccuucuc

SEQ ID NO: 3000147 - RNA, 20 nt, Human
accugaggcccuucucucca

SEQ ID NO: 3000148 - RNA, 21 nt, Human
accugaggcccuucucuccag

SEQ ID NO: 3000149 - RNA, 22 nt, Human
accugaggcccuucucuccagc

SEQ ID NO: 3000150 - RNA, 16 nt, Human
accugaggggccucuu

SEQ ID NO: 3000151 - RNA, 15 nt, Human
accugauugugucuc

SEQ ID NO: 3000152 - RNA, 17 nt, Human
accugauugugucucuu

SEQ ID NO: 3000153 - RNA, 18 nt, Human
accugauugugucucuug

SEQ ID NO: 3000154 - RNA, 14 nt, Human
accugauugugucu

SEQ ID NO: 3000155 - RNA, 16 nt, Human
ucaugaauuaguuuua

SEQ ID NO: 3000156 - RNA, 22 nt, Human
ucauccuucuggaauaaggaga

SEQ ID NO: 3000157 - RNA, 13 nt, Human
ucauccuccucag

SEQ ID NO: 3000158 - RNA, 19 nt, Human
ucauccuccucagaucuuc

SEQ ID NO: 3000159 - RNA, 18 nt, Human
ucauccucauacccaccc

SEQ ID NO: 3000160 - RNA, 14 nt, Human
ucauccuucuggaa

SEQ ID NO: 3000161 - RNA, 13 nt, Human
accucccugcaau

SEQ ID NO: 3000162 - RNA, 12 nt, Human
accucccugcaa

SEQ ID NO: 3000163 - RNA, 12 nt, Human
accuccugccuc

SEQ ID NO: 3000164 - RNA, 13 nt, Human
accuccugccucg

SEQ ID NO: 3000165 - RNA, 15 nt, Human
ucauccuaagcuauu

SEQ ID NO: 3000166 - RNA, 23 nt, Human
accuccugccucgaacuggcugc

SEQ ID NO: 3000167 - RNA, 21 nt, Human
accuagggugauauuaaccag

SEQ ID NO: 3000168 - RNA, 16 nt, Human
accuagggugauauua

SEQ ID NO: 3000169 - RNA, 22 nt, Human
ucaggaaaucaaauaugcaaag

SEQ ID NO: 3000170 - RNA, 23 nt, Human
ucaggaaaucaaauaugcaaagc

SEQ ID NO: 3000171 - RNA, 12 nt, Human
ucaggaagcuca

SEQ ID NO: 3000172 - RNA, 13 nt, Human
ucaggaagcucag

SEQ ID NO: 3000173 - RNA, 14 nt, Human
ucaggaagcucagg

SEQ ID NO: 3000174 - RNA, 15 nt, Human
ucaggaagcucaggg

SEQ ID NO: 3000175 - RNA, 15 nt, Human
accgccuugcccagc

SEQ ID NO: 3000176 - RNA, 17 nt, Human
accgccuugcccagccu

SEQ ID NO: 3000177 - RNA, 16 nt, Human
accgccuugcccagcc

SEQ ID NO: 3000178 - RNA, 22 nt, Human
accgccuugcccagccuggaug

SEQ ID NO: 3000179 - RNA, 18 nt, Human
acuaacaggcuuagugau

SEQ ID NO: 3000180 - RNA, 17 nt, Human
acuaacaggcuuaguga

SEQ ID NO: 3000181 - RNA, 12 nt, Human
acuaacaggcuu

SEQ ID NO: 3000182 - RNA, 18 nt, Human
acuaacauuuauuugagu

SEQ ID NO: 3000183 - RNA, 12 nt, Human
acuaaccacgcu

SEQ ID NO: 3000184 - RNA, 14 nt, Human
acuacaguuuguua

SEQ ID NO: 3000185 - RNA, 13 nt, Human
acuacaguuuguu

SEQ ID NO: 3000186 - RNA, 17 nt, Human
acuacaguccucccauc

SEQ ID NO: 3000187 - RNA, 15 nt, Human
acuacaggcacccac

SEQ ID NO: 3000188 - RNA, 11 nt, Human
acuacaggcac

SEQ ID NO: 3000189 - RNA, 18 nt, Human
ucccagccagcaguucag

SEQ ID NO: 3000190 - RNA, 17 nt, Human
ucccagccagcaguuca

SEQ ID NO: 3000191 - RNA, 23 nt, Human
ucccagcacuuugggaggcugag

SEQ ID NO: 3000192 - RNA, 17 nt, Human
ucccagcugugcucugg

SEQ ID NO: 3000193 - RNA, 15 nt, Human
ucccagccaggcccu

SEQ ID NO: 3000194 - RNA, 14 nt, Human
ucccagccaggccc

SEQ ID NO: 3000195 - RNA, 13 nt, Human
ucccagccaggcc

SEQ ID NO: 3000196 - RNA, 12 nt, Human
ucccagccccaa

SEQ ID NO: 3000197 - RNA, 13 nt, Human
acuacauucuguu

SEQ ID NO: 3000198 - RNA, 12 nt, Human
acuacauucugu

SEQ ID NO: 3000199 - RNA, 11 nt, Human
acuacauucug

SEQ ID NO: 3000200 - RNA, 15 nt, Human
acuacaguuuguuag

SEQ ID NO: 3000201 - RNA, 14 nt, Human
acuacauucuguua

SEQ ID NO: 3000202 - RNA, 22 nt, Human
ucccagcacuuugggaggcuga

SEQ ID NO: 3000203 - RNA, 13 nt, Human
ucccagcacuuug

SEQ ID NO: 3000204 - RNA, 14 nt, Human
ucccagucauuuaa

SEQ ID NO: 3000205 - RNA, 22 nt, Human
ucccagucauuuaauaaaugug

SEQ ID NO: 3000206 - RNA, 15 nt, Human
ucccaucacccgcua

SEQ ID NO: 3000207 - RNA, 16 nt, Human
ucccauaugccugggc

SEQ ID NO: 3000208 - RNA, 22 nt, Human
ucccauaugccugggcagaagg

SEQ ID NO: 3000209 - RNA, 18 nt, Human
uccccaccgcagacagga

SEQ ID NO: 3000210 - RNA, 21 nt, Human
uccccaccgcagacaggacca

SEQ ID NO: 3000211 - RNA, 17 nt, Human
uccccaccgcagacagg

SEQ ID NO: 3000212 - RNA, 15 nt, Human
acuacauucuguuaa

SEQ ID NO: 3000213 - RNA, 22 nt, Human
acgccagauucuuuccugaggc

SEQ ID NO: 3000214 - RNA, 23 nt, Human
acgccagauucuuuccugaggcu

SEQ ID NO: 3000215 - RNA, 21 nt, Human
uccauccugaggcuccacuug

SEQ ID NO: 3000216 - RNA, 20 nt, Human
uccauccugaggcuccacuu

SEQ ID NO: 3000217 - RNA, 19 nt, Human
uccauccugaggcuccacu

SEQ ID NO: 3000218 - RNA, 21 nt, Human
uccaugaagauguagaggaga

SEQ ID NO: 3000219 - RNA, 13 nt, Human
uccaugaagaugu

SEQ ID NO: 3000220 - RNA, 20 nt, Human
uccauuuacuuaagacuuaa

SEQ ID NO: 3000221 - RNA, 19 nt, Human
uccauuuacuuaagacuua

SEQ ID NO: 3000222 - RNA, 17 nt, Human
uccauuuacuuaagacu

SEQ ID NO: 3000223 - RNA, 21 nt, Human
ucccaaagcagugcaugcugu

SEQ ID NO: 3000224 - RNA, 17 nt, Human
ucccaaagcagugcaug

SEQ ID NO: 3000225 - RNA, 18 nt, Human
ucccaaagcagugcaugc

SEQ ID NO: 3000226 - RNA, 14 nt, Human
ucccaaagugcugg

SEQ ID NO: 3000227 - RNA, 13 nt, Human
ucccaaagugcug

SEQ ID NO: 3000228 - RNA, 18 nt, Human
ucccaaacccuucagugc

SEQ ID NO: 3000229 - RNA, 16 nt, Human
ucccaaagcagugcau

SEQ ID NO: 3000230 - RNA, 22 nt, Human
uccauuuacuuaagacuuaaug

SEQ ID NO: 3000231 - RNA, 15 nt, Human
acgguuuuacugcag

SEQ ID NO: 3000232 - RNA, 17 nt, Human
acgguuuuacugcagcu

SEQ ID NO: 3000233 - RNA, 23 nt, Human
acguggcugcuucaaggauccug

SEQ ID NO: 3000234 - RNA, 20 nt, Human
acgugggcauucaaauguau

SEQ ID NO: 3000235 - RNA, 17 nt, Human
acgugggcauucaaaug

SEQ ID NO: 3000236 - RNA, 15 nt, Human
ucccaccccacacac

SEQ ID NO: 3000237 - RNA, 20 nt, Human
ucccaccccacacacgccag

SEQ ID NO: 3000238 - RNA, 16 nt, Human
ucccacaaaggagagc

SEQ ID NO: 3000239 - RNA, 23 nt, Human
ucccaagugccaaagaagcagac

SEQ ID NO: 3000240 - RNA, 15 nt, Human
ucccaagugccaaag

SEQ ID NO: 3000241 - RNA, 13 nt, Human
ucccaagugccaa

SEQ ID NO: 3000242 - RNA, 12 nt, Human
ucccaagugcca

SEQ ID NO: 3000243 - RNA, 20 nt, Human
acgggaggguaaggcugugg

SEQ ID NO: 3000244 - RNA, 16 nt, Human
ucccugugucauuuca

SEQ ID NO: 3000245 - RNA, 17 nt, Human
ucccugugucauuucaa

SEQ ID NO: 3000246 - RNA, 17 nt, Human
ucccuuacgugaguccu

SEQ ID NO: 3000247 - RNA, 15 nt, Human
ucccuuucccuuggu

SEQ ID NO: 3000248 - RNA, 21 nt, Human
acuccugcaggcagccaggcc

SEQ ID NO: 3000249 - RNA, 12 nt, Human
ucccugucccag

SEQ ID NO: 3000250 - RNA, 15 nt, Human
ucccugguggcagcu

SEQ ID NO: 3000251 - RNA, 11 nt, Human
uccuaaauagc

SEQ ID NO: 3000252 - RNA, 17 nt, Human
uccggucccugucccag

SEQ ID NO: 3000253 - RNA, 16 nt, Human
uccuagaaauucccca

SEQ ID NO: 3000254 - RNA, 12 nt, Human
ucccuuuuccuu

SEQ ID NO: 3000255 - RNA, 13 nt, Human
acuccagccuggg

SEQ ID NO: 3000256 - RNA, 12 nt, Human
acuccagccugg

SEQ ID NO: 3000257 - RNA, 23 nt, Human
acuccagaauuucccaaagcagu

SEQ ID NO: 3000258 - RNA, 18 nt, Human
acuccugcaggcagccag

SEQ ID NO: 3000259 - RNA, 19 nt, Human
acuccugcaggcagccagg

SEQ ID NO: 3000260 - RNA, 17 nt, Human
acuccugcaggcagcca

SEQ ID NO: 3000261 - RNA, 15 nt, Human
acuccaaagaaaugu

SEQ ID NO: 3000262 - RNA, 18 nt, Human
acuccaaagaaauguaag

SEQ ID NO: 3000263 - RNA, 15 nt, Human
acucauugaccugag

SEQ ID NO: 3000264 - RNA, 14 nt, Human
acuccaaagaaaug

SEQ ID NO: 3000265 - RNA, 15 nt, Human
acuccagaauuuccc

SEQ ID NO: 3000266 - RNA, 17 nt, Human
acuccagaauuucccaa

SEQ ID NO: 3000267 - RNA, 18 nt, Human
acuccagaaagugacaag

SEQ ID NO: 3000268 - RNA, 14 nt, Human
acucauugaccuga

SEQ ID NO: 3000269 - RNA, 15 nt, Human
acucauucuucugua

SEQ ID NO: 3000270 - RNA, 14 nt, Human
uccccucuccucca

SEQ ID NO: 3000271 - RNA, 17 nt, Human
uccccucggagaagagc

SEQ ID NO: 3000272 - RNA, 16 nt, Human
uccccucggagaagag

SEQ ID NO: 3000273 - RNA, 17 nt, Human
ucccgaguagcugggac

SEQ ID NO: 3000274 - RNA, 16 nt, Human
ucccgaguagcuggga

SEQ ID NO: 3000275 - RNA, 18 nt, Human
ucccgaguagcugggacu

SEQ ID NO: 3000276 - RNA, 15 nt, Human
ucccgaguagcuggg

SEQ ID NO: 3000277 - RNA, 20 nt, Human
ucccgaauagcugggacuac

SEQ ID NO: 3000278 - RNA, 21 nt, Human
acucacauuuauucugcucac

SEQ ID NO: 3000279 - RNA, 12 nt, Human
acucaccccagc

SEQ ID NO: 3000280 - RNA, 17 nt, Human
acuacucccccaggugg

SEQ ID NO: 3000281 - RNA, 21 nt, Human
ucccucuuucccucccuuccu

SEQ ID NO: 3000282 - RNA, 11 nt, Human
ucccugaaggc

SEQ ID NO: 3000283 - RNA, 15 nt, Human
ucccugaaggccccg

SEQ ID NO: 3000284 - RNA, 20 nt, Human
ucccucuuucccucccuucc

SEQ ID NO: 3000285 - RNA, 18 nt, Human
ucccucuuucccucccuu

SEQ ID NO: 3000286 - RNA, 14 nt, Human
ucccucuuucccuc

SEQ ID NO: 3000287 - RNA, 16 nt, Human
ucccucccuccaccuc

SEQ ID NO: 3000288 - RNA, 15 nt, Human
ucccucccuccaccu

SEQ ID NO: 3000289 - RNA, 14 nt, Human
ucccucccuccacc

SEQ ID NO: 3000290 - RNA, 13 nt, Human
ucccucccuccac

SEQ ID NO: 3000291 - RNA, 16 nt, Human
ucccggcuuuggugcg

SEQ ID NO: 3000292 - RNA, 23 nt, Human
ucccuccaccucccugcaauaaa

SEQ ID NO: 3000293 - RNA, 21 nt, Human
ucccuccaccucccugcaaua

SEQ ID NO: 3000294 - RNA, 11 nt, Human
ucccugagcag

SEQ ID NO: 3000295 - RNA, 16 nt, Human
ucccugaaggccccgc

SEQ ID NO: 3000296 - RNA, 13 nt, Human
ucccugauuuaau

SEQ ID NO: 3000297 - RNA, 23 nt, Human
accaauauuuaaucuuuuaugau

SEQ ID NO: 3000298 - RNA, 20 nt, Human
accaauauuuaaucuuuuau

SEQ ID NO: 3000299 - RNA, 13 nt, Human
accaaucaugaau

SEQ ID NO: 3000300 - RNA, 15 nt, Human
accaauguucucucu

SEQ ID NO: 3000301 - RNA, 15 nt, Human
accaaucaugaauua

SEQ ID NO: 3000302 - RNA, 16 nt, Human
accaauauuuaaucuu

SEQ ID NO: 3000303 - RNA, 17 nt, Human
accaauauuuaaucuuu

SEQ ID NO: 3000304 - RNA, 17 nt, Human
accaacauacucccauc

SEQ ID NO: 3000305 - RNA, 19 nt, Human
accaacauacucccaucug

SEQ ID NO: 3000306 - RNA, 21 nt, Human
accaacauacucccaucugug

SEQ ID NO: 3000307 - RNA, 22 nt, Human
accaacauacucccaucuguga

SEQ ID NO: 3000308 - RNA, 23 nt, Human
ucaagugaaaaaggaggaagaga

SEQ ID NO: 3000309 - RNA, 15 nt, Human
ucaagugaaaaagga

SEQ ID NO: 3000310 - RNA, 15 nt, Human
ucaauucuugccaaa

SEQ ID NO: 3000311 - RNA, 20 nt, Human
ucaauuuuucuuauuucauu

SEQ ID NO: 3000312 - RNA, 23 nt, Human
ucaauuuuucuuauuucauuucu

SEQ ID NO: 3000313 - RNA, 14 nt, Human
accaauugccaaag

SEQ ID NO: 3000314 - RNA, 15 nt, Human
ucaccccggccaccu

SEQ ID NO: 3000315 - RNA, 14 nt, Human
ucaccccagcccca

SEQ ID NO: 3000316 - RNA, 20 nt, Human
ucaccccagccccaaaacuc

SEQ ID NO: 3000317 - RNA, 13 nt, Human
ucaccccagcccc

SEQ ID NO: 3000318 - RNA, 13 nt, Human
ucacccaguccug

SEQ ID NO: 3000319 - RNA, 19 nt, Human
ucacccaguccugcccgcc

SEQ ID NO: 3000320 - RNA, 15 nt, Human
ucacaguucucuccu

SEQ ID NO: 3000321 - RNA, 15 nt, Human
ucacauaucugucau

SEQ ID NO: 3000322 - RNA, 12 nt, Human
ucacauaucugu

SEQ ID NO: 3000323 - RNA, 15 nt, Human
ucaccucucccuugg

SEQ ID NO: 3000324 - RNA, 13 nt, Human
ucaccugccccuc

SEQ ID NO: 3000325 - RNA, 15 nt, Human
ucaccugccccucaa

SEQ ID NO: 3000326 - RNA, 19 nt, Human
ucacuauguugcccaggca

SEQ ID NO: 3000327 - RNA, 17 nt, Human
ucacuauguugcccagg

SEQ ID NO: 3000328 - RNA, 18 nt, Human
ucacuauguugcccaggc

SEQ ID NO: 3000329 - RNA, 21 nt, Human
accacuuuuguucuugguuug

SEQ ID NO: 3000330 - RNA, 16 nt, Human
accacuuuuguucuug

SEQ ID NO: 3000331 - RNA, 15 nt, Human
accacuuuuguucuu

SEQ ID NO: 3000332 - RNA, 18 nt, Human
accacuuguguuuugcaa

SEQ ID NO: 3000333 - RNA, 17 nt, Human
accacugcacuccagcc

SEQ ID NO: 3000334 - RNA, 20 nt, Human
accacugcacuccagccugg

SEQ ID NO: 3000335 - RNA, 17 nt, Human
ucaccccggccaccugc

SEQ ID NO: 3000336 - RNA, 18 nt, Human
ucaccccggccaccugcg

SEQ ID NO: 3000337 - RNA, 21 nt, Human
accacugcacuccagccuggg

SEQ ID NO: 3000338 - RNA, 22 nt, Human
accacuuuuguucuugguuugu

SEQ ID NO: 3000339 - RNA, 16 nt, Human
accagagcccaccuug

SEQ ID NO: 3000340 - RNA, 14 nt, Human
accagagcccaccu

SEQ ID NO: 3000341 - RNA, 12 nt, Human
accagagcccac

SEQ ID NO: 3000342 - RNA, 11 nt, Human
accagacaggu

SEQ ID NO: 3000343 - RNA, 14 nt, Human
accagacaccuuga

SEQ ID NO: 3000344 - RNA, 23 nt, Human
accauuucuugagguaaaagcau

SEQ ID NO: 3000345 - RNA, 11 nt, Human
acccacugcuc

SEQ ID NO: 3000346 - RNA, 10 nt, Human
acccacugcu

SEQ ID NO: 3000347 - RNA, 11 nt, Human
acccacugcuu

SEQ ID NO: 3000348 - RNA, 15 nt, Human
acccacugcucuggu

SEQ ID NO: 3000349 - RNA, 14 nt, Human
acccacugcucugg

SEQ ID NO: 3000350 - RNA, 13 nt, Human
acccacugcucug

SEQ ID NO: 3000351 - RNA, 22 nt, Human
accauggucggaaaacaugcua

SEQ ID NO: 3000352 - RNA, 23 nt, Human
ucacucuuauugcccacgcugga

SEQ ID NO: 3000353 - RNA, 21 nt, Human
ucacucuuauugcccacgcug

SEQ ID NO: 3000354 - RNA, 18 nt, Human
accauuggggcucccagc

SEQ ID NO: 3000355 - RNA, 17 nt, Human
accauuggggcucccag

SEQ ID NO: 3000356 - RNA, 16 nt, Human
accauuggggcuccca

SEQ ID NO: 3000357 - RNA, 19 nt, Human
ucagaaguuucugccgcag

SEQ ID NO: 3000358 - RNA, 22 nt, Human
ucagaaguuucugccgcagccc

SEQ ID NO: 3000359 - RNA, 14 nt, Human
ucagaagacacuga

SEQ ID NO: 3000360 - RNA, 18 nt, Human
ucagagccugcaguuauu

SEQ ID NO: 3000361 - RNA, 15 nt, Human
ucagagccugcaguu

SEQ ID NO: 3000362 - RNA, 14 nt, Human
ucagagccugcagu

SEQ ID NO: 3000363 - RNA, 13 nt, Human
ucagagccugcag

SEQ ID NO: 3000364 - RNA, 16 nt, Human
ucagagagggugggag

SEQ ID NO: 3000365 - RNA, 21 nt, Human
ucagagagggugggagugggc

SEQ ID NO: 3000366 - RNA, 23 nt, Human
ucagagagggugggagugggccc

SEQ ID NO: 3000367 - RNA, 12 nt, Human
ucagagccugca

SEQ ID NO: 3000368 - RNA, 17 nt, Human
ucagagacuccugcagg

SEQ ID NO: 3000369 - RNA, 20 nt, Human
ucagagacuccugcaggcag

SEQ ID NO: 3000370 - RNA, 21 nt, Human
ucagagacuccugcaggcagc

SEQ ID NO: 3000371 - RNA, 16 nt, Human
ucagagacuccugcag

SEQ ID NO: 3000372 - RNA, 19 nt, Human
ucagaaucucaaauaacua

SEQ ID NO: 3000373 - RNA, 18 nt, Human
ucagaaucucaaauaacu

SEQ ID NO: 3000374 - RNA, 13 nt, Human
ucaggaaagagaa

SEQ ID NO: 3000375 - RNA, 20 nt, Human
ucaggaaaucaaauaugcaa

SEQ ID NO: 3000376 - RNA, 21 nt, Human
ucaggaaaucaaauaugcaaa

SEQ ID NO: 3000377 - RNA, 19 nt, Human
ucaggaaagagaacuucca

SEQ ID NO: 3000378 - RNA, 20 nt, Human
ucagcuuguaaauagcucag

SEQ ID NO: 3000379 - RNA, 14 nt, Human
ucagcggggacagc

SEQ ID NO: 3000380 - RNA, 12 nt, Human
acccccacccaa

SEQ ID NO: 3000381 - RNA, 15 nt, Human
accccuucgcuccug

SEQ ID NO: 3000382 - RNA, 14 nt, Human
accccuucgcuccu

SEQ ID NO: 3000383 - RNA, 16 nt, Human
accccuucgcuccugu

SEQ ID NO: 3000384 - RNA, 24 nt, Human
acccagcgagcccugguggcagug

SEQ ID NO: 3000385 - RNA, 23 nt, Human
acccagcgagcccugguggcagu

SEQ ID NO: 3000386 - RNA, 19 nt, Human
acccagcgagcccuggugg

SEQ ID NO: 3000387 - RNA, 23 nt, Human
ucagccguguaaccauggaccca

SEQ ID NO: 3000388 - RNA, 12 nt, Human
ucagagcugccc

SEQ ID NO: 3000389 - RNA, 22 nt, Human
ucagccaagaauucuuaaauau

SEQ ID NO: 3000390 - RNA, 14 nt, Human
acauagcugugauu

SEQ ID NO: 3000391 - RNA, 18 nt, Human
acauagaauuaacacaug

SEQ ID NO: 3000392 - RNA, 14 nt, Human
acauagaauuaaca

SEQ ID NO: 3000393 - RNA, 19 nt, Human
acauauauaacaaugcugu

SEQ ID NO: 3000394 - RNA, 22 nt, Human
acauauacauacuuacaugugu

SEQ ID NO: 3000395 - RNA, 17 nt, Human
acauauacauacuuaca

SEQ ID NO: 3000396 - RNA, 13 nt, Human
acauauacauacu

SEQ ID NO: 3000397 - RNA, 19 nt, Human
acauaucucuuaucuuacg

SEQ ID NO: 3000398 - RNA, 20 nt, Human
acauauauuuuuuaaaauaa

SEQ ID NO: 3000399 - RNA, 19 nt, Human
acauauauuuuuuaaaaua

SEQ ID NO: 3000400 - RNA, 18 nt, Human
acauauauuuuuuaaaau

SEQ ID NO: 3000401 - RNA, 22 nt, Human
acauauugauuuccguuaaaau

SEQ ID NO: 3000402 - RNA, 18 nt, Human
acauauugauuuccguua

SEQ ID NO: 3000403 - RNA, 23 nt, Human
acauauugauuuccguuaaaaua

SEQ ID NO: 3000404 - RNA, 16 nt, Human
acauauugauuuccgu

SEQ ID NO: 3000405 - RNA, 14 nt, Human
acauauugauuucc

SEQ ID NO: 3000406 - RNA, 13 nt, Human
acaucuguuuugu

SEQ ID NO: 3000407 - RNA, 13 nt, Human
acaucuugcucug

SEQ ID NO: 3000408 - RNA, 19 nt, Human
acaucuugcucugcugaca

SEQ ID NO: 3000409 - RNA, 18 nt, Human
acaucuugcucugcugac

SEQ ID NO: 3000410 - RNA, 17 nt, Human
acaugaaaacacauuuu

SEQ ID NO: 3000411 - RNA, 21 nt, Human
acaucuugcucugcugacaga

SEQ ID NO: 3000412 - RNA, 19 nt, Human
acaugaaaacacauuuuuc

SEQ ID NO: 3000413 - RNA, 18 nt, Human
acaugaaaacacauuuuu

SEQ ID NO: 3000414 - RNA, 16 nt, Human
acaugaaaacacauuu

SEQ ID NO: 3000415 - RNA, 18 nt, Human
acaucaacaucuugguca

SEQ ID NO: 3000416 - RNA, 16 nt, Human
acaucaacaucuuggu

SEQ ID NO: 3000417 - RNA, 13 nt, Human
acaucaacagaua

SEQ ID NO: 3000418 - RNA, 16 nt, Human
acaucuaguaguuguu

SEQ ID NO: 3000419 - RNA, 20 nt, Human
acaucuaguaguuguucuga

SEQ ID NO: 3000420 - RNA, 16 nt, Human
acaguuggguuuuuua

SEQ ID NO: 3000421 - RNA, 18 nt, Human
acaguuggguuuuuuaag

SEQ ID NO: 3000422 - RNA, 15 nt, Human
acaguugaaaaacag

SEQ ID NO: 3000423 - RNA, 16 nt, Human
acaguugaaaaacagc

SEQ ID NO: 3000424 - RNA, 20 nt, Human
acaguugaaaaacagcugag

SEQ ID NO: 3000425 - RNA, 13 nt, Human
uauuucauuucuu

SEQ ID NO: 3000426 - RNA, 22 nt, Human
uauuucccucaccuuucccauc

SEQ ID NO: 3000427 - RNA, 23 nt, Human
uauuuccuauauuguuuucagug

SEQ ID NO: 3000428 - RNA, 20 nt, Human
acauacuuuuuggguuuauu

SEQ ID NO: 3000429 - RNA, 17 nt, Human
acauacuuuuuggguuu

SEQ ID NO: 3000430 - RNA, 13 nt, Human
acauacuuuuugg

SEQ ID NO: 3000431 - RNA, 11 nt, Human
acauacuuuuu

SEQ ID NO: 3000432 - RNA, 14 nt, Human
acauacucugcuua

SEQ ID NO: 3000433 - RNA, 17 nt, Human
acauacucccaucugug

SEQ ID NO: 3000434 - RNA, 13 nt, Human
acauacucccauc

SEQ ID NO: 3000435 - RNA, 22 nt, Human
acauacuaaccagcagaaaugc

SEQ ID NO: 3000436 - RNA, 21 nt, Human
acauacuaaccagcagaaaug

SEQ ID NO: 3000437 - RNA, 13 nt, Human
acauacuaaccag

SEQ ID NO: 3000438 - RNA, 16 nt, Human
acaguuuucugagaaa

SEQ ID NO: 3000439 - RNA, 17 nt, Human
acaguuuucugagaaag

SEQ ID NO: 3000440 - RNA, 15 nt, Human
acaguuuucugagaa

SEQ ID NO: 3000441 - RNA, 20 nt, Human
acaguuuguuaguaugaggc

SEQ ID NO: 3000442 - RNA, 16 nt, Human
acaguuuguuaguaug

SEQ ID NO: 3000443 - RNA, 18 nt, Human
acaguuuucugagaaaga

SEQ ID NO: 3000444 - RNA, 19 nt, Human
acaguuuucugagaaagac

SEQ ID NO: 3000445 - RNA, 20 nt, Human
acaguuuucugagaaagacu

SEQ ID NO: 3000446 - RNA, 21 nt, Human
acaguuuucugagaaagacua

SEQ ID NO: 3000447 - RNA, 14 nt, Human
ucaaggcuuagacc

SEQ ID NO: 3000448 - RNA, 22 nt, Human
ucaagaugaugaugaucuuuaa

SEQ ID NO: 3000449 - RNA, 21 nt, Human
ucaaguauuauaccuuuuuua

SEQ ID NO: 3000450 - RNA, 16 nt, Human
ucaaguauuauaccuu

SEQ ID NO: 3000451 - RNA, 23 nt, Human
ucaaguauuauaccuuuuuuaga

SEQ ID NO: 3000452 - RNA, 15 nt, Human
ucaaguauuauaccu

SEQ ID NO: 3000453 - RNA, 17 nt, Human
ucaaguauagaaaaucu

SEQ ID NO: 3000454 - RNA, 15 nt, Human
ucaaguauagaaaau

SEQ ID NO: 3000455 - RNA, 11 nt, Human
ucaaguauuau

SEQ ID NO: 3000456 - RNA, 16 nt, Human
ucaagaaugcaguacu

SEQ ID NO: 3000457 - RNA, 16 nt, Human
ucaacagugagagacu

SEQ ID NO: 3000458 - RNA, 21 nt, Human
acauuaaaugacucuucccuc

SEQ ID NO: 3000459 - RNA, 19 nt, Human
acauuaaaugacucuuccc

SEQ ID NO: 3000460 - RNA, 15 nt, Human
acauuaaaugacucu

SEQ ID NO: 3000461 - RNA, 19 nt, Human
acaugcuguacauacuuuu

SEQ ID NO: 3000462 - RNA, 17 nt, Human
acaugcuguacauacuu

SEQ ID NO: 3000463 - RNA, 19 nt, Human
acauguccaagaagcccag

SEQ ID NO: 3000464 - RNA, 21 nt, Human
acauguccaagaagcccagga

SEQ ID NO: 3000465 - RNA, 14 nt, Human
acaugcugaacauc

SEQ ID NO: 3000466 - RNA, 21 nt, Human
acaugcugaacaucacagcuu

SEQ ID NO: 3000467 - RNA, 17 nt, Human
acauuagguugugaaug

SEQ ID NO: 3000468 - RNA, 16 nt, Human
acauuagguugugaau

SEQ ID NO: 3000469 - RNA, 15 nt, Human
acauuagguugugaa

SEQ ID NO: 3000470 - RNA, 16 nt, Human
ucaacagguuuuccug

SEQ ID NO: 3000471 - RNA, 17 nt, Human
ucaaauuucuaaaucuc

SEQ ID NO: 3000472 - RNA, 14 nt, Human
ucaaauuucuaaau

SEQ ID NO: 3000473 - RNA, 15 nt, Human
acauucuguuaauca

SEQ ID NO: 3000474 - RNA, 16 nt, Human
ucaaauuucuaaaucu

SEQ ID NO: 3000475 - RNA, 15 nt, Human
ucaaauuucuaaauc

SEQ ID NO: 3000476 - RNA, 12 nt, Human
acauucuguuaa

SEQ ID NO: 3000477 - RNA, 15 nt, Human
uauuugugagacugu

SEQ ID NO: 3000478 - RNA, 18 nt, Human
ucaaaagaaagaaaauca

SEQ ID NO: 3000479 - RNA, 23 nt, Human
ucaaaauaccaugccauuuaaag

SEQ ID NO: 3000480 - RNA, 21 nt, Human
ucaaaauaugccccauucaac

SEQ ID NO: 3000481 - RNA, 21 nt, Human
ucaaaauaccaugccauuuaa

SEQ ID NO: 3000482 - RNA, 17 nt, Human
acaugagcaucaggcca

SEQ ID NO: 3000483 - RNA, 18 nt, Human
acaugagcaucaggccag

SEQ ID NO: 3000484 - RNA, 19 nt, Human
acaugagcaucaggccagg

SEQ ID NO: 3000485 - RNA, 19 nt, Human
acaugauccugcaauucca

SEQ ID NO: 3000486 - RNA, 17 nt, Human
acaugaucuucuuuaua

SEQ ID NO: 3000487 - RNA, 15 nt, Human
acaugaucuucuuua

SEQ ID NO: 3000488 - RNA, 22 nt, Human
acaugcuacacacugcauguuu

SEQ ID NO: 3000489 - RNA, 20 nt, Human
acaugagcaucaggccaggc

SEQ ID NO: 3000490 - RNA, 18 nt, Human
ucaaauaacuaaaaggua

SEQ ID NO: 3000491 - RNA, 14 nt, Human
ucaaagcugaaaug

SEQ ID NO: 3000492 - RNA, 20 nt, Human
uauccuagucauucuucccu

SEQ ID NO: 3000493 - RNA, 17 nt, Human
uaucucaaaacugcacu

SEQ ID NO: 3000494 - RNA, 13 nt, Human
uaucucagggccu

SEQ ID NO: 3000495 - RNA, 15 nt, Human
uaucucagggccugg

SEQ ID NO: 3000496 - RNA, 19 nt, Human
uauauuuauuacuguaaga

SEQ ID NO: 3000497 - RNA, 15 nt, Human
uauauuuauuacugu

SEQ ID NO: 3000498 - RNA, 20 nt, Human
uaucccuacuguaauuugug

SEQ ID NO: 3000499 - RNA, 19 nt, Human
uaucccuacuguaauuugu

SEQ ID NO: 3000500 - RNA, 20 nt, Human
acagaguuguuacauuuuua

SEQ ID NO: 3000501 - RNA, 19 nt, Human
acagaguuguuacauuuuu

SEQ ID NO: 3000502 - RNA, 18 nt, Human
acagaguuguuacauuuu

SEQ ID NO: 3000503 - RNA, 17 nt, Human
acagaguuguuacauuu

SEQ ID NO: 3000504 - RNA, 16 nt, Human
acagaguuguuacauu

SEQ ID NO: 3000505 - RNA, 21 nt, Human
acagagcaagugagacccugu

SEQ ID NO: 3000506 - RNA, 12 nt, Human
acagagcaagac

SEQ ID NO: 3000507 - RNA, 18 nt, Human
acagagcuacacagggga

SEQ ID NO: 3000508 - RNA, 17 nt, Human
acagcaacacaaagcuu

SEQ ID NO: 3000509 - RNA, 20 nt, Human
acagcccgggcucugccucc

SEQ ID NO: 3000510 - RNA, 21 nt, Human
acagcccgggcucugccuccc

SEQ ID NO: 3000511 - RNA, 22 nt, Human
acagcccgggcucugccuccca

SEQ ID NO: 3000512 - RNA, 20 nt, Human
acagcaacacaaagcuuuug

SEQ ID NO: 3000513 - RNA, 23 nt, Human
acagcccgggcucugccucccau

SEQ ID NO: 3000514 - RNA, 21 nt, Human
acagcccuucuuuccacagaa

SEQ ID NO: 3000515 - RNA, 20 nt, Human
acagcccuucuuuccacaga

SEQ ID NO: 3000516 - RNA, 19 nt, Human
acagcccuucuuuccacag

SEQ ID NO: 3000517 - RNA, 23 nt, Human
acagaugggugcuuggaggaagg

SEQ ID NO: 3000518 - RNA, 20 nt, Human
acagauacuccuccaagguu

SEQ ID NO: 3000519 - RNA, 20 nt, Human
acagauagauauaugcucug

SEQ ID NO: 3000520 - RNA, 22 nt, Human
acagaguuguuacauuuuuaag

SEQ ID NO: 3000521 - RNA, 21 nt, Human
acagaguuguuacauuuuuaa

SEQ ID NO: 3000522 - RNA, 15 nt, Human
acagaguuguuacau

SEQ ID NO: 3000523 - RNA, 15 nt, Human
acacucuauaacaaa

SEQ ID NO: 3000524 - RNA, 13 nt, Human
acacucugagacu

SEQ ID NO: 3000525 - RNA, 11 nt, Human
acacucugaga

SEQ ID NO: 3000526 - RNA, 14 nt, Human
acacuccagugaga

SEQ ID NO: 3000527 - RNA, 13 nt, Human
acacuccuucaca

SEQ ID NO: 3000528 - RNA, 22 nt, Human
acacucacauuuauucugcuca

SEQ ID NO: 3000529 - RNA, 22 nt, Human
acacuguucucugcccuccaag

SEQ ID NO: 3000530 - RNA, 23 nt, Human
acacuguucucugcccuccaaga

SEQ ID NO: 3000531 - RNA, 16 nt, Human
acacuguucucugccc

SEQ ID NO: 3000532 - RNA, 17 nt, Human
acacuguucucugcccu

SEQ ID NO: 3000533 - RNA, 18 nt, Human
acacuguucucugcccuc

SEQ ID NO: 3000534 - RNA, 20 nt, Human
acacuguucucugcccucca

SEQ ID NO: 3000535 - RNA, 14 nt, Human
acacuguucucugc

SEQ ID NO: 3000536 - RNA, 15 nt, Human
acacuguucucugcc

SEQ ID NO: 3000537 - RNA, 14 nt, Human
acacugaagaagca

SEQ ID NO: 3000538 - RNA, 12 nt, Human
acacugaagaag

SEQ ID NO: 3000539 - RNA, 13 nt, Human
acacuugugaaua

SEQ ID NO: 3000540 - RNA, 12 nt, Human
acacuugugaau

SEQ ID NO: 3000541 - RNA, 23 nt, Human
acacuguuucaaacuuuacuaug

SEQ ID NO: 3000542 - RNA, 18 nt, Human
acacuugugaauaaagag

SEQ ID NO: 3000543 - RNA, 15 nt, Human
acacuuaaaaauggu

SEQ ID NO: 3000544 - RNA, 13 nt, Human
acacuuaaaaaug

SEQ ID NO: 3000545 - RNA, 15 nt, Human
acacuguuucaaacu

SEQ ID NO: 3000546 - RNA, 18 nt, Human
acagaaaauucuucucca

SEQ ID NO: 3000547 - RNA, 18 nt, Human
acacuuuggcccagggug

SEQ ID NO: 3000548 - RNA, 17 nt, Human
acacuuuggcccagggu

SEQ ID NO: 3000549 - RNA, 20 nt, Human
uauauucauucuuuuugaaa

SEQ ID NO: 3000550 - RNA, 19 nt, Human
uauauucauucuuuuugaa

SEQ ID NO: 3000551 - RNA, 14 nt, Human
uauauuauuugcag

SEQ ID NO: 3000552 - RNA, 12 nt, Human
uauauuuacaaa

SEQ ID NO: 3000553 - RNA, 15 nt, Human
acagacacaggcccg

SEQ ID NO: 3000554 - RNA, 17 nt, Human
acagacacaggcccggc

SEQ ID NO: 3000555 - RNA, 22 nt, Human
acagacacaggcccggcuccag

SEQ ID NO: 3000556 - RNA, 18 nt, Human
acagacacaggcccggcu

SEQ ID NO: 3000557 - RNA, 19 nt, Human
acagacuggaagcacagcu

SEQ ID NO: 3000558 - RNA, 17 nt, Human
acagacuggaagcacag

SEQ ID NO: 3000559 - RNA, 21 nt, Human
acagacuggaagcacagcuuc

SEQ ID NO: 3000560 - RNA, 18 nt, Human
acacaugcugaacaucac

SEQ ID NO: 3000561 - RNA, 18 nt, Human
acacauguccaagaagcc

SEQ ID NO: 3000562 - RNA, 19 nt, Human
acacauguccaagaagccc

SEQ ID NO: 3000563 - RNA, 13 nt, Human
acacauguccaag

SEQ ID NO: 3000564 - RNA, 21 nt, Human
acacauguccaagaagcccag

SEQ ID NO: 3000565 - RNA, 22 nt, Human
acacauguccaagaagcccagg

SEQ ID NO: 3000566 - RNA, 13 nt, Human
acacccagcccac

SEQ ID NO: 3000567 - RNA, 12 nt, Human
acacccagccca

SEQ ID NO: 3000568 - RNA, 23 nt, Human
uaguucaaucuggauucauauuu

SEQ ID NO: 3000569 - RNA, 23 nt, Human
uauaaaauaauuuuuauauuuga

SEQ ID NO: 3000570 - RNA, 18 nt, Human
acaccucugcacaagcug

SEQ ID NO: 3000571 - RNA, 16 nt, Human
acaccuugacagggca

SEQ ID NO: 3000572 - RNA, 15 nt, Human
acaccuugacagggc

SEQ ID NO: 3000573 - RNA, 14 nt, Human
acaccuugacaggg

SEQ ID NO: 3000574 - RNA, 17 nt, Human
acacuaagagagaauga

SEQ ID NO: 3000575 - RNA, 19 nt, Human
acacuaaccacgcuggacc

SEQ ID NO: 3000576 - RNA, 17 nt, Human
acacuaaccacgcugga

SEQ ID NO: 3000577 - RNA, 16 nt, Human
acacuaaccacgcugg

SEQ ID NO: 3000578 - RNA, 18 nt, Human
acacuaagagagaaugag

SEQ ID NO: 3000579 - RNA, 14 nt, Human
acacuaagagagaa

SEQ ID NO: 3000580 - RNA, 22 nt, Human
uauaaccaguguuguggauuua

SEQ ID NO: 3000581 - RNA, 14 nt, Human
acacaccuaacuua

SEQ ID NO: 3000582 - RNA, 18 nt, Human
acacacauauauuauuug

SEQ ID NO: 3000583 - RNA, 20 nt, Human
acacacucaaaucaagaaac

SEQ ID NO: 3000584 - RNA, 13 nt, Human
acacacugaagaa

SEQ ID NO: 3000585 - RNA, 19 nt, Human
acacacagcucuguccugg

SEQ ID NO: 3000586 - RNA, 12 nt, Human
acacacagcucu

SEQ ID NO: 3000587 - RNA, 11 nt, Human
acacacagcuc

SEQ ID NO: 3000588 - RNA, 17 nt, Human
acacaacuauauuguuu

SEQ ID NO: 3000589 - RNA, 14 nt, Human
acacaacuauauug

SEQ ID NO: 3000590 - RNA, 21 nt, Human
acaaugguuuucuuguguguu

SEQ ID NO: 3000591 - RNA, 17 nt, Human
acaaugcuguauuuuaa

SEQ ID NO: 3000592 - RNA, 14 nt, Human
acaaugcuguauuu

SEQ ID NO: 3000593 - RNA, 15 nt, Human
acaaugguuuucuug

SEQ ID NO: 3000594 - RNA, 24 nt, Human
acaaugcaguacaggacauauauu

SEQ ID NO: 3000595 - RNA, 12 nt, Human
uagguugugaau

SEQ ID NO: 3000596 - RNA, 21 nt, Human
uagguuggcaaaaaggcagga

SEQ ID NO: 3000597 - RNA, 14 nt, Human
acacacugaagaag

SEQ ID NO: 3000598 - RNA, 22 nt, Human
acacagcucuucuccaggcugu

SEQ ID NO: 3000599 - RNA, 11 nt, Human
acacagugagu

SEQ ID NO: 3000600 - RNA, 22 nt, Human
acacaguauuacuucugcuaca

SEQ ID NO: 3000601 - RNA, 12 nt, Human
uaguguuggaga

SEQ ID NO: 3000602 - RNA, 16 nt, Human
uaguguuggagaagaa

SEQ ID NO: 3000603 - RNA, 13 nt, Human
uaguagagacagg

SEQ ID NO: 3000604 - RNA, 19 nt, Human
aauugauugggcacaucau

SEQ ID NO: 3000605 - RNA, 23 nt, Human
aauugauugggcacaucauuuca

SEQ ID NO: 3000606 - RNA, 20 nt, Human
aauugauugggcacaucauu

SEQ ID NO: 3000607 - RNA, 18 nt, Human
aauugaggacacugauau

SEQ ID NO: 3000608 - RNA, 23 nt, Human
uacuguaauuugugauacaaugc

SEQ ID NO: 3000609 - RNA, 14 nt, Human
uacugaacaguaac

SEQ ID NO: 3000610 - RNA, 22 nt, Human
uacugaaauaaacgucuuaaau

SEQ ID NO: 3000611 - RNA, 19 nt, Human
uacugaaauaaacgucuua

SEQ ID NO: 3000612 - RNA, 17 nt, Human
uacugagagugaacaaa

SEQ ID NO: 3000613 - RNA, 23 nt, Human
uacugggaaagggauuuucagcc

SEQ ID NO: 3000614 - RNA, 17 nt, Human
uacuguaauuugugaua

SEQ ID NO: 3000615 - RNA, 16 nt, Human
uacuguaauuugugau

SEQ ID NO: 3000616 - RNA, 15 nt, Human
uacuguaauuuguga

SEQ ID NO: 3000617 - RNA, 21 nt, Human
uacuaaaaguuuugagaaauu

SEQ ID NO: 3000618 - RNA, 16 nt, Human
uacuaaaaaugcaaaa

SEQ ID NO: 3000619 - RNA, 18 nt, Human
uacuaaaaauacaaaaaa

SEQ ID NO: 3000620 - RNA, 13 nt, Human
uacgugaguccug

SEQ ID NO: 3000621 - RNA, 14 nt, Human
uacuaaaaauacaa

SEQ ID NO: 3000622 - RNA, 16 nt, Human
uacgucugacaggcaa

SEQ ID NO: 3000623 - RNA, 16 nt, Human
uacucuacccucuuag

SEQ ID NO: 3000624 - RNA, 22 nt, Human
uacucuacccucuuagaaaaac

SEQ ID NO: 3000625 - RNA, 12 nt, Human
uacuauuucuug

SEQ ID NO: 3000626 - RNA, 21 nt, Human
uacuauuucuugugguuauaa

SEQ ID NO: 3000627 - RNA, 22 nt, Human
uacuauuucuugugguuauaac

SEQ ID NO: 3000628 - RNA, 15 nt, Human
uacgucugacaggca

SEQ ID NO: 3000629 - RNA, 18 nt, Human
aauugacauugaaaucua

SEQ ID NO: 3000630 - RNA, 17 nt, Human
aauugacauugaaaucu

SEQ ID NO: 3000631 - RNA, 18 nt, Human
aauuuacuuuaaacuaca

SEQ ID NO: 3000632 - RNA, 13 nt, Human
aauuuaguauuuu

SEQ ID NO: 3000633 - RNA, 15 nt, Human
aauuuacuuuaaacu

SEQ ID NO: 3000634 - RNA, 16 nt, Human
aauuuacuuuaaacua

SEQ ID NO: 3000635 - RNA, 15 nt, Human
aauuuaccugaaguc

SEQ ID NO: 3000636 - RNA, 17 nt, Human
aauuuaccugaagucuu

SEQ ID NO: 3000637 - RNA, 18 nt, Human
aauuuacagagacagaaa

SEQ ID NO: 3000638 - RNA, 17 nt, Human
aauuuacagagacagaa

SEQ ID NO: 3000639 - RNA, 23 nt, Human
aauuucuaggacugaauuaugaa

SEQ ID NO: 3000640 - RNA, 14 nt, Human
aauuuauuauggca

SEQ ID NO: 3000641 - RNA, 13 nt, Human
aauuuauuauggc

SEQ ID NO: 3000642 - RNA, 22 nt, Human
aauuucuaggacugaauuauga

SEQ ID NO: 3000643 - RNA, 18 nt, Human
aauuucuaggacugaauu

SEQ ID NO: 3000644 - RNA, 17 nt, Human
aauuucuaggacugaau

SEQ ID NO: 3000645 - RNA, 14 nt, Human
aauuugcacauuaa

SEQ ID NO: 3000646 - RNA, 21 nt, Human
uacuuauuuaaauagaugaca

SEQ ID NO: 3000647 - RNA, 14 nt, Human
uacuuauuuaaaua

SEQ ID NO: 3000648 - RNA, 12 nt, Human
uacuuauuuaaa

SEQ ID NO: 3000649 - RNA, 12 nt, Human
aauuugcacauu

SEQ ID NO: 3000650 - RNA, 16 nt, Human
uacuucaugcugucua

SEQ ID NO: 3000651 - RNA, 18 nt, Human
uacuucuccacccugcuc

SEQ ID NO: 3000652 - RNA, 13 nt, Human
uacuucuccaccc

SEQ ID NO: 3000653 - RNA, 16 nt, Human
uacuucuuauacauuu

SEQ ID NO: 3000654 - RNA, 15 nt, Human
uacuucuuauacauu

SEQ ID NO: 3000655 - RNA, 14 nt, Human
uacuucuuauacau

SEQ ID NO: 3000656 - RNA, 19 nt, Human
uacuucuuaggguuaugau

SEQ ID NO: 3000657 - RNA, 15 nt, Human
uacuucugcuacaua

SEQ ID NO: 3000658 - RNA, 20 nt, Human
uacuucuccacccugcucuc

SEQ ID NO: 3000659 - RNA, 10 nt, Human
uacuuuuugg

SEQ ID NO: 3000660 - RNA, 16 nt, Human
aauuugcacauuaaau

SEQ ID NO: 3000661 - RNA, 23 nt, Human
aauuugccuaauaugaugacugu

SEQ ID NO: 3000662 - RNA, 13 nt, Human
aauuugguuuuca

SEQ ID NO: 3000663 - RNA, 20 nt, Human
aauuugugauacaaugcugu

SEQ ID NO: 3000664 - RNA, 21 nt, Human
aauuugguuuucacauuggaa

SEQ ID NO: 3000665 - RNA, 15 nt, Human
aauuugguuuucaca

SEQ ID NO: 3000666 - RNA, 16 nt, Human
aauuuguuauaaugaa

SEQ ID NO: 3000667 - RNA, 22 nt, Human
aauuuuuucucuaggaaauauu

SEQ ID NO: 3000668 - RNA, 21 nt, Human
aauuuuucuuauuucauuucu

SEQ ID NO: 3000669 - RNA, 20 nt, Human
uagaugaaugucaguuguua

SEQ ID NO: 3000670 - RNA, 20 nt, Human
uagaugcaguucugaagaag

SEQ ID NO: 3000671 - RNA, 21 nt, Human
uagaugcaguucugaagaaga

SEQ ID NO: 3000672 - RNA, 22 nt, Human
uagauaggucagugcaaauacu

SEQ ID NO: 3000673 - RNA, 17 nt, Human
uagauaggccaugggca

SEQ ID NO: 3000674 - RNA, 23 nt, Human
acaaaggauacuuauuuaaauag

SEQ ID NO: 3000675 - RNA, 21 nt, Human
acaaaggauacuuauuuaaau

SEQ ID NO: 3000676 - RNA, 23 nt, Human
acaaagcuuuugcauauugcaua

SEQ ID NO: 3000677 - RNA, 22 nt, Human
acaaagcuuuugcauauugcau

SEQ ID NO: 3000678 - RNA, 15 nt, Human
acaaagcuuuugcau

SEQ ID NO: 3000679 - RNA, 14 nt, Human
acaaaacuuuucua

SEQ ID NO: 3000680 - RNA, 21 nt, Human
acaaagcgugguggacaugca

SEQ ID NO: 3000681 - RNA, 13 nt, Human
acaagcuccaagc

SEQ ID NO: 3000682 - RNA, 22 nt, Human
acaagcucacagaccuuugaac

SEQ ID NO: 3000683 - RNA, 17 nt, Human
acaagcgugagccacug

SEQ ID NO: 3000684 - RNA, 22 nt, Human
acaagagcccaggccuccuaca

SEQ ID NO: 3000685 - RNA, 18 nt, Human
acaagagcccaggccucc

SEQ ID NO: 3000686 - RNA, 17 nt, Human
acaagaccacguuucua

SEQ ID NO: 3000687 - RNA, 16 nt, Human
acaagaccacguuucu

SEQ ID NO: 3000688 - RNA, 17 nt, Human
acaacaucuuuuucuac

SEQ ID NO: 3000689 - RNA, 17 nt, Human
acaaauuuacagagaca

SEQ ID NO: 3000690 - RNA, 16 nt, Human
uagcuacuaauuuuaa

SEQ ID NO: 3000691 - RNA, 16 nt, Human
uagcucaggugucccu

SEQ ID NO: 3000692 - RNA, 15 nt, Human
acaagcuccaagcuc

SEQ ID NO: 3000693 - RNA, 16 nt, Human
acaagcuccaagcucc

SEQ ID NO: 3000694 - RNA, 17 nt, Human
acaagcuccaagcuccc

SEQ ID NO: 3000695 - RNA, 19 nt, Human
acaagcuccaagcucccag

SEQ ID NO: 3000696 - RNA, 22 nt, Human
acaagcuccaagcucccaggca

SEQ ID NO: 3000697 - RNA, 21 nt, Human
aauaucccuuggacauuuuau

SEQ ID NO: 3000698 - RNA, 20 nt, Human
aauaucccuuggacauuuua

SEQ ID NO: 3000699 - RNA, 22 nt, Human
aauaucccuuggacauuuuaug

SEQ ID NO: 3000700 - RNA, 12 nt, Human
aauauccuaaua

SEQ ID NO: 3000701 - RNA, 13 nt, Human
aauauccuaauaa

SEQ ID NO: 3000702 - RNA, 14 nt, Human
aauauccuaauaaa

SEQ ID NO: 3000703 - RNA, 20 nt, Human
aauauccaauugcugcuugu

SEQ ID NO: 3000704 - RNA, 15 nt, Human
aauaucacuugucaa

SEQ ID NO: 3000705 - RNA, 12 nt, Human
aauaucacuugu

SEQ ID NO: 3000706 - RNA, 15 nt, Human
aauauccuaauaaaa

SEQ ID NO: 3000707 - RNA, 19 nt, Human
aauauccuaauaaaaaggu

SEQ ID NO: 3000708 - RNA, 14 nt, Human
uaacauggaaguac

SEQ ID NO: 3000709 - RNA, 14 nt, Human
uaacuaaaagguau

SEQ ID NO: 3000710 - RNA, 15 nt, Human
uaacuaaaagguaug

SEQ ID NO: 3000711 - RNA, 15 nt, Human
uaacauggaaguacu

SEQ ID NO: 3000712 - RNA, 16 nt, Human
uaaccucuaaauucuu

SEQ ID NO: 3000713 - RNA, 22 nt, Human
aauagaugacauugacuauuuu

SEQ ID NO: 3000714 - RNA, 21 nt, Human
aauagaugacauugacuauuu

SEQ ID NO: 3000715 - RNA, 19 nt, Human
aauagaugacauugacuau

SEQ ID NO: 3000716 - RNA, 20 nt, Human
aauagcauguccuaaugcuu

SEQ ID NO: 3000717 - RNA, 19 nt, Human
aauagauugcucaaaucag

SEQ ID NO: 3000718 - RNA, 22 nt, Human
aauagauugcucaaaucagguu

SEQ ID NO: 3000719 - RNA, 14 nt, Human
aauagcugggacua

SEQ ID NO: 3000720 - RNA, 13 nt, Human
aauagcugggacu

SEQ ID NO: 3000721 - RNA, 23 nt, Human
aauagacaauuuauuauggcaca

SEQ ID NO: 3000722 - RNA, 18 nt, Human
aauagacaauuuauuaug

SEQ ID NO: 3000723 - RNA, 18 nt, Human
aauaggcguaacuaauuu

SEQ ID NO: 3000724 - RNA, 17 nt, Human
aauaggcacuuuaaaac

SEQ ID NO: 3000725 - RNA, 15 nt, Human
aauaggcacuuuaaa

SEQ ID NO: 3000726 - RNA, 14 nt, Human
aauaggcacuuuaa

SEQ ID NO: 3000727 - RNA, 18 nt, Human
aauaggcacuuuaaaaca

SEQ ID NO: 3000728 - RNA, 15 nt, Human
aauaggaaaaacuga

SEQ ID NO: 3000729 - RNA, 16 nt, Human
aauaggaaaaacugau

SEQ ID NO: 3000730 - RNA, 17 nt, Human
aauaggaaaaacugauu

SEQ ID NO: 3000731 - RNA, 18 nt, Human
aauaggaaaaacugauuu

SEQ ID NO: 3000732 - RNA, 19 nt, Human
aauaggaaaaacugauuuu

SEQ ID NO: 3000733 - RNA, 24 nt, Human
aauagcuuuuuucucugauacaga

SEQ ID NO: 3000734 - RNA, 21 nt, Human
aauauccuaauaaaaagguga

SEQ ID NO: 3000735 - RNA, 21 nt, Human
aauaucuccgucaacucauau

SEQ ID NO: 3000736 - RNA, 16 nt, Human
aauaucuccgucaacu

SEQ ID NO: 3000737 - RNA, 19 nt, Human
aauaucugaaaauguaugu

SEQ ID NO: 3000738 - RNA, 18 nt, Human
aauaucugaaaauguaug

SEQ ID NO: 3000739 - RNA, 17 nt, Human
aauaucugaaaauguau

SEQ ID NO: 3000740 - RNA, 16 nt, Human
aauaucugaaaaugua

SEQ ID NO: 3000741 - RNA, 20 nt, Human
aauaucugaaaauguaugug

SEQ ID NO: 3000742 - RNA, 19 nt, Human
aauaucuuuuuuuuaauaa

SEQ ID NO: 3000743 - RNA, 18 nt, Human
uaacuuuuauaaacuuua

SEQ ID NO: 3000744 - RNA, 17 nt, Human
uaacuuuuauaaacuuu

SEQ ID NO: 3000745 - RNA, 15 nt, Human
uaacuuuuauaaacu

SEQ ID NO: 3000746 - RNA, 17 nt, Human
aauaugaugacuguuuu

SEQ ID NO: 3000747 - RNA, 16 nt, Human
aauaugaugacuguuu

SEQ ID NO: 3000748 - RNA, 15 nt, Human
aauaugcaaagcacu

SEQ ID NO: 3000749 - RNA, 17 nt, Human
aauaugcaaagcacuga

SEQ ID NO: 3000750 - RNA, 15 nt, Human
aauaugcacacauuu

SEQ ID NO: 3000751 - RNA, 24 nt, Human
aauaugcaaagcacugacuucuaa

SEQ ID NO: 3000752 - RNA, 18 nt, Human
aauauugauaugcuuaua

SEQ ID NO: 3000753 - RNA, 17 nt, Human
aauauugauaugcuuau

SEQ ID NO: 3000754 - RNA, 18 nt, Human
aauaugcaaagucuaggu

SEQ ID NO: 3000755 - RNA, 14 nt, Human
aauaugcaaagucu

SEQ ID NO: 3000756 - RNA, 23 nt, Human
aauauugccaaugcuacaguaau

SEQ ID NO: 3000757 - RNA, 11 nt, Human
aauauugcuga

SEQ ID NO: 3000758 - RNA, 12 nt, Human
aauauugcugau

SEQ ID NO: 3000759 - RNA, 13 nt, Human
aauauugcugaug

SEQ ID NO: 3000760 - RNA, 15 nt, Human
aauauugcugauggu

SEQ ID NO: 3000761 - RNA, 18 nt, Human
aauauugcugauggugca

SEQ ID NO: 3000762 - RNA, 21 nt, Human
aauauugcugauggugcaaug

SEQ ID NO: 3000763 - RNA, 22 nt, Human
aauauugcugauggugcaauga

SEQ ID NO: 3000764 - RNA, 21 nt, Human
aauauuuuagguguaaaauaa

SEQ ID NO: 3000765 - RNA, 21 nt, Human
aauauugguugggaugacuug

SEQ ID NO: 3000766 - RNA, 15 nt, Human
aauauugguugggau

SEQ ID NO: 3000767 - RNA, 15 nt, Human
aauauuucagauaau

SEQ ID NO: 3000768 - RNA, 14 nt, Human
aauauuucagauaa

SEQ ID NO: 3000769 - RNA, 21 nt, Human
uaaauagaugacauugacuau

SEQ ID NO: 3000770 - RNA, 19 nt, Human
uaaauagaugacauugacu

SEQ ID NO: 3000771 - RNA, 14 nt, Human
uaaauagaugacau

SEQ ID NO: 3000772 - RNA, 18 nt, Human
uaaaucuccaaaauaaaa

SEQ ID NO: 3000773 - RNA, 15 nt, Human
uaaaucuccaaaaua

SEQ ID NO: 3000774 - RNA, 14 nt, Human
uaaaucuccaaaau

SEQ ID NO: 3000775 - RNA, 22 nt, Human
uaaaucuccaaaauaaaacuuu

SEQ ID NO: 3000776 - RNA, 23 nt, Human
uaaaugcaccuggaauauauaac

SEQ ID NO: 3000777 - RNA, 20 nt, Human
uaaauguugaaagaucaaaa

SEQ ID NO: 3000778 - RNA, 15 nt, Human
uaaauguugaaagau

SEQ ID NO: 3000779 - RNA, 16 nt, Human
uaaauuaacuuuuaua

SEQ ID NO: 3000780 - RNA, 15 nt, Human
uaaauuaacuuuuau

SEQ ID NO: 3000781 - RNA, 17 nt, Human
uaaauuaacuuuuauaa

SEQ ID NO: 3000782 - RNA, 14 nt, Human
uaaauuaacuuuua

SEQ ID NO: 3000783 - RNA, 12 nt, Human
uaaauuaacuuu

SEQ ID NO: 3000784 - RNA, 20 nt, Human
aauaauuuuuauauuugaaa

SEQ ID NO: 3000785 - RNA, 19 nt, Human
uaaauaaugugaaacugga

SEQ ID NO: 3000786 - RNA, 16 nt, Human
aauaauuuuuauauuu

SEQ ID NO: 3000787 - RNA, 19 nt, Human
aauaauuuuuauauuugaa

SEQ ID NO: 3000788 - RNA, 17 nt, Human
aauaauuuuuauauuug

SEQ ID NO: 3000789 - RNA, 16 nt, Human
aauaaaaaggugacca

SEQ ID NO: 3000790 - RNA, 12 nt, Human
aauaaaaaggug

SEQ ID NO: 3000791 - RNA, 13 nt, Human
aauaaaaagguga

SEQ ID NO: 3000792 - RNA, 20 nt, Human
aaguuuuuauggcuuuugug

SEQ ID NO: 3000793 - RNA, 16 nt, Human
guuuugaagauucuau

SEQ ID NO: 3000794 - RNA, 17 nt, Human
guuuugaagauucuaug

SEQ ID NO: 3000795 - RNA, 20 nt, Human
guuuugaagauucuauguua

SEQ ID NO: 3000796 - RNA, 14 nt, Human
guuuucuuuuaaga

SEQ ID NO: 3000797 - RNA, 17 nt, Human
aauaacuggaacacucu

SEQ ID NO: 3000798 - RNA, 22 nt, Human
aauaacauguaauuaaguacua

SEQ ID NO: 3000799 - RNA, 21 nt, Human
aauaacaaugaaaguugauaa

SEQ ID NO: 3000800 - RNA, 16 nt, Human
aauaaaucauaaaacu

SEQ ID NO: 3000801 - RNA, 23 nt, Human
aauaaaugaaugucacuucugga

SEQ ID NO: 3000802 - RNA, 15 nt, Human
aauaaaacuuuuuaa

SEQ ID NO: 3000803 - RNA, 14 nt, Human
aauaaaacuuuuua

SEQ ID NO: 3000804 - RNA, 12 nt, Human
aauaaaacuuuu

SEQ ID NO: 3000805 - RNA, 18 nt, Human
aauaaaacuuuuuaaaau

SEQ ID NO: 3000806 - RNA, 18 nt, Human
aaugcaguacuaacauuu

SEQ ID NO: 3000807 - RNA, 20 nt, Human
aaugcaguacaggacauaua

SEQ ID NO: 3000808 - RNA, 22 nt, Human
aaugcaguacaggacauauauu

SEQ ID NO: 3000809 - RNA, 14 nt, Human
aaugcccagccccu

SEQ ID NO: 3000810 - RNA, 15 nt, Human
aaugcccagccccuu

SEQ ID NO: 3000811 - RNA, 13 nt, Human
aaugcccagcccc

SEQ ID NO: 3000812 - RNA, 20 nt, Human
aaugcccagccccuucugac

SEQ ID NO: 3000813 - RNA, 22 nt, Human
aaugcccagccccuucugaccc

SEQ ID NO: 3000814 - RNA, 23 nt, Human
aaugcccagccccuucugaccca

SEQ ID NO: 3000815 - RNA, 24 nt, Human
aaugcccagccccuucugacccau

SEQ ID NO: 3000816 - RNA, 21 nt, Human
aaugcugugcccuaaagugua

SEQ ID NO: 3000817 - RNA, 20 nt, Human
aaugcugugcccuaaagugu

SEQ ID NO: 3000818 - RNA, 13 nt, Human
aaugcugugcccu

SEQ ID NO: 3000819 - RNA, 21 nt, Human
aaugccccugaauuuaaauag

SEQ ID NO: 3000820 - RNA, 16 nt, Human
aauggacguguuauga

SEQ ID NO: 3000821 - RNA, 18 nt, Human
aauggaagacagcucuua

SEQ ID NO: 3000822 - RNA, 14 nt, Human
aaugagcuuaagaa

SEQ ID NO: 3000823 - RNA, 14 nt, Human
aaugagccuggcaa

SEQ ID NO: 3000824 - RNA, 18 nt, Human
uaauuauugauguuuuca

SEQ ID NO: 3000825 - RNA, 15 nt, Human
uacaaaaagcauaaa

SEQ ID NO: 3000826 - RNA, 15 nt, Human
uacaaaaacacagca

SEQ ID NO: 3000827 - RNA, 20 nt, Human
uacaaaaagcauaaaaauua

SEQ ID NO: 3000828 - RNA, 15 nt, Human
uacaaaagcauguga

SEQ ID NO: 3000829 - RNA, 13 nt, Human
uacaaaaacacag

SEQ ID NO: 3000830 - RNA, 14 nt, Human
uacaaaaacacagc

SEQ ID NO: 3000831 - RNA, 16 nt, Human
uaauuuccauuuacuu

SEQ ID NO: 3000832 - RNA, 11 nt, Human
aaugugauaug

SEQ ID NO: 3000833 - RNA, 18 nt, Human
aauguacugcauaugaaa

SEQ ID NO: 3000834 - RNA, 14 nt, Human
aauguacugcauau

SEQ ID NO: 3000835 - RNA, 14 nt, Human
aauguauguguaag

SEQ ID NO: 3000836 - RNA, 12 nt, Human
aauguaugugua

SEQ ID NO: 3000837 - RNA, 15 nt, Human
uacaguaucucaggg

SEQ ID NO: 3000838 - RNA, 17 nt, Human
uacauaaugcgugcaua

SEQ ID NO: 3000839 - RNA, 20 nt, Human
uacauaaugcgugcauacca

SEQ ID NO: 3000840 - RNA, 19 nt, Human
uacauaaugcgugcauacc

SEQ ID NO: 3000841 - RNA, 15 nt, Human
uacauaaugcgugca

SEQ ID NO: 3000842 - RNA, 12 nt, Human
aauguacugcau

SEQ ID NO: 3000843 - RNA, 19 nt, Human
uacacuaagagagaaugag

SEQ ID NO: 3000844 - RNA, 18 nt, Human
uacacuaagagagaauga

SEQ ID NO: 3000845 - RNA, 23 nt, Human
uacagagcccacgcccccacugg

SEQ ID NO: 3000846 - RNA, 13 nt, Human
uacaguaauaaau

SEQ ID NO: 3000847 - RNA, 19 nt, Human
aauggacuuuuguacauag

SEQ ID NO: 3000848 - RNA, 18 nt, Human
aauggacuuugcacacuu

SEQ ID NO: 3000849 - RNA, 23 nt, Human
aauggacuuugcacacuuuggcc

SEQ ID NO: 3000850 - RNA, 18 nt, Human
uacaccacuacauucugu

SEQ ID NO: 3000851 - RNA, 17 nt, Human
uacaccacuacauucug

SEQ ID NO: 3000852 - RNA, 16 nt, Human
uacaccacuacauucu

SEQ ID NO: 3000853 - RNA, 15 nt, Human
uacaccacuacauuc

SEQ ID NO: 3000854 - RNA, 20 nt, Human
uacaccacuacauucuguua

SEQ ID NO: 3000855 - RNA, 19 nt, Human
uacaccacuacauucuguu

SEQ ID NO: 3000856 - RNA, 13 nt, Human
aaugacucuuccc

SEQ ID NO: 3000857 - RNA, 17 nt, Human
aaugaaaacaaugcagu

SEQ ID NO: 3000858 - RNA, 15 nt, Human
aaugagccuggcaag

SEQ ID NO: 3000859 - RNA, 21 nt, Human
aaugagagacacacugaagaa

SEQ ID NO: 3000860 - RNA, 20 nt, Human
aaugagacuuuaaaagcauu

SEQ ID NO: 3000861 - RNA, 17 nt, Human
aaugagacuuuaaaagc

SEQ ID NO: 3000862 - RNA, 16 nt, Human
aaugagacuuuaaaag

SEQ ID NO: 3000863 - RNA, 17 nt, Human
aaugacuuacuguacau

SEQ ID NO: 3000864 - RNA, 14 nt, Human
aaugacuuacugua

SEQ ID NO: 3000865 - RNA, 18 nt, Human
aaugacuuacuguacaug

SEQ ID NO: 3000866 - RNA, 18 nt, Human
uaaugguaguuuuacagu

SEQ ID NO: 3000867 - RNA, 13 nt, Human
uaaugaggaaacu

SEQ ID NO: 3000868 - RNA, 16 nt, Human
uaaugauaacuggaaa

SEQ ID NO: 3000869 - RNA, 16 nt, Human
uaaugguaguuuuaca

SEQ ID NO: 3000870 - RNA, 12 nt, Human
aaugaaaacaau

SEQ ID NO: 3000871 - RNA, 16 nt, Human
aaugaaaacaaugcag

SEQ ID NO: 3000872 - RNA, 18 nt, Human
uaaugagcuuaagaaauu

SEQ ID NO: 3000873 - RNA, 14 nt, Human
uaaugagacuuuaa

SEQ ID NO: 3000874 - RNA, 20 nt, Human
uaaugaccaugaaagacuuc

SEQ ID NO: 3000875 - RNA, 19 nt, Human
uaaugagacuuuaaaagca

SEQ ID NO: 3000876 - RNA, 21 nt, Human
uaaugacuuaagcacacuuga

SEQ ID NO: 3000877 - RNA, 15 nt, Human
uaaugacuuaagcac

SEQ ID NO: 3000878 - RNA, 18 nt, Human
uaaugaccaugaaagacu

SEQ ID NO: 3000879 - RNA, 16 nt, Human
uaaugaccaugaaaga

SEQ ID NO: 3000880 - RNA, 14 nt, Human
uaaugaccaugaaa

SEQ ID NO: 3000881 - RNA, 23 nt, Human
uaaugaaagacuguacaaaguag

SEQ ID NO: 3000882 - RNA, 22 nt, Human
uaaugaaagacuguacaaagua

SEQ ID NO: 3000883 - RNA, 19 nt, Human
uaaugaaagacuguacaaa

SEQ ID NO: 3000884 - RNA, 18 nt, Human
uaaugaaagacuguacaa

SEQ ID NO: 3000885 - RNA, 17 nt, Human
uaaugaaagacuguaca

SEQ ID NO: 3000886 - RNA, 14 nt, Human
uaaugaaagacugu

SEQ ID NO: 3000887 - RNA, 13 nt, Human
aaucuucugaacu

SEQ ID NO: 3000888 - RNA, 20 nt, Human
aaucuucugaacuuggcgcu

SEQ ID NO: 3000889 - RNA, 21 nt, Human
aaucuucauggaauucacaaa

SEQ ID NO: 3000890 - RNA, 23 nt, Human
aaucuucauggaauucacaaagu

SEQ ID NO: 3000891 - RNA, 19 nt, Human
uaauagguuuggacaaaau

SEQ ID NO: 3000892 - RNA, 14 nt, Human
uaauagguuuggac

SEQ ID NO: 3000893 - RNA, 13 nt, Human
aauccuugaagau

SEQ ID NO: 3000894 - RNA, 12 nt, Human
aaucuaaaugga

SEQ ID NO: 3000895 - RNA, 15 nt, Human
aaucuaaauggaacc

SEQ ID NO: 3000896 - RNA, 13 nt, Human
aaucuaaauggaa

SEQ ID NO: 3000897 - RNA, 18 nt, Human
aaucuaaauggaaccacu

SEQ ID NO: 3000898 - RNA, 14 nt, Human
aaucuuauaauuua

SEQ ID NO: 3000899 - RNA, 15 nt, Human
aaucucaaauaacua

SEQ ID NO: 3000900 - RNA, 12 nt, Human
aaucucaaauuu

SEQ ID NO: 3000901 - RNA, 14 nt, Human
aaucucaaauuucu

SEQ ID NO: 3000902 - RNA, 13 nt, Human
aaucucaaauaac

SEQ ID NO: 3000903 - RNA, 15 nt, Human
aaucuaggaaaauua

SEQ ID NO: 3000904 - RNA, 23 nt, Human
uaaguuauuaagagguaagacuu

SEQ ID NO: 3000905 - RNA, 22 nt, Human
uaaguuauuaagagguaagacu

SEQ ID NO: 3000906 - RNA, 20 nt, Human
uaaguuuuuauggcuuuugu

SEQ ID NO: 3000907 - RNA, 19 nt, Human
uaaguacuauguaucaaug

SEQ ID NO: 3000908 - RNA, 17 nt, Human
uaaguaucaaguauaga

SEQ ID NO: 3000909 - RNA, 20 nt, Human
uaaguaucaaguauagaaaa

SEQ ID NO: 3000910 - RNA, 19 nt, Human
uaaguaucaaguauagaaa

SEQ ID NO: 3000911 - RNA, 15 nt, Human
aaucaucaagucuuu

SEQ ID NO: 3000912 - RNA, 20 nt, Human
uaaguuauuaagagguaaga

SEQ ID NO: 3000913 - RNA, 17 nt, Human
aaucaugaauuaguuuu

SEQ ID NO: 3000914 - RNA, 19 nt, Human
aaucaugaauuaguuuuau

SEQ ID NO: 3000915 - RNA, 23 nt, Human
aaucaugaauuaguuuuauaugc

SEQ ID NO: 3000916 - RNA, 23 nt, Human
aaucaugucagucugcuuagaaa

SEQ ID NO: 3000917 - RNA, 22 nt, Human
aaucaugucagucugcuuagaa

SEQ ID NO: 3000918 - RNA, 21 nt, Human
aacuuuaagaacuaaaauguu

SEQ ID NO: 3000919 - RNA, 13 nt, Human
aacuuuaccuuuu

SEQ ID NO: 3000920 - RNA, 18 nt, Human
aacuugucuuuggacccu

SEQ ID NO: 3000921 - RNA, 11 nt, Human
gugccuuaugg

SEQ ID NO: 3000922 - RNA, 17 nt, Human
aacuuggcgcugccccu

SEQ ID NO: 3000923 - RNA, 15 nt, Human
gugccuaauguguuu

SEQ ID NO: 3000924 - RNA, 15 nt, Human
gugccucaagagaag

SEQ ID NO: 3000925 - RNA, 22 nt, Human
gugccgagaaggaagccuccca

SEQ ID NO: 3000926 - RNA, 21 nt, Human
gugaaccaccacacccagccc

SEQ ID NO: 3000927 - RNA, 21 nt, Human
gugccuuauggaacacucuga

SEQ ID NO: 3000928 - RNA, 23 nt, Human
gugccuuauggaacacucugaga

SEQ ID NO: 3000929 - RNA, 14 nt, Human
gugccuuauggaac

SEQ ID NO: 3000930 - RNA, 13 nt, Human
gugccucugggac

SEQ ID NO: 3000931 - RNA, 12 nt, Human
gugccucuggga

SEQ ID NO: 3000932 - RNA, 22 nt, Human
aagaagugaaaaucuacacucc

SEQ ID NO: 3000933 - RNA, 16 nt, Human
aagaagugaaaaucua

SEQ ID NO: 3000934 - RNA, 21 nt, Human
gugcuaucucccccagcccca

SEQ ID NO: 3000935 - RNA, 22 nt, Human
gugcuaggaacacuccuucaca

SEQ ID NO: 3000936 - RNA, 17 nt, Human
gugcuaggaacacuccu

SEQ ID NO: 3000937 - RNA, 18 nt, Human
gugcuaggaacacuccuu

SEQ ID NO: 3000938 - RNA, 18 nt, Human
aagaaaaaggaugcacag

SEQ ID NO: 3000939 - RNA, 17 nt, Human
aagaaaaaggaugcaca

SEQ ID NO: 3000940 - RNA, 15 nt, Human
aagaaaaaggaugca

SEQ ID NO: 3000941 - RNA, 22 nt, Human
aagaaagacuaucuaaauguug

SEQ ID NO: 3000942 - RNA, 20 nt, Human
aagaaagacuaucuaaaugu

SEQ ID NO: 3000943 - RNA, 24 nt, Human
aagaaugcaguacuaacauuuauu

SEQ ID NO: 3000944 - RNA, 18 nt, Human
aagaaugauuaugaauua

SEQ ID NO: 3000945 - RNA, 16 nt, Human
aagaauugaagcagga

SEQ ID NO: 3000946 - RNA, 23 nt, Human
aagaauugauugggcacaucauu

SEQ ID NO: 3000947 - RNA, 23 nt, Human
aagacaaaaagcuacuuauugua

SEQ ID NO: 3000948 - RNA, 20 nt, Human
aagacaaaaagcuacuuauu

SEQ ID NO: 3000949 - RNA, 17 nt, Human
aagacccucucaaacua

SEQ ID NO: 3000950 - RNA, 14 nt, Human
aagacaaacugcau

SEQ ID NO: 3000951 - RNA, 16 nt, Human
aagacaaaaagcuacu

SEQ ID NO: 3000952 - RNA, 16 nt, Human
aagaaugauuaugaau

SEQ ID NO: 3000953 - RNA, 14 nt, Human
guggcagcucaccu

SEQ ID NO: 3000954 - RNA, 16 nt, Human
guggcagcucaccucu

SEQ ID NO: 3000955 - RNA, 20 nt, Human
guggcagcucaccucucccu

SEQ ID NO: 3000956 - RNA, 18 nt, Human
guggcaccagcagccugg

SEQ ID NO: 3000957 - RNA, 19 nt, Human
guggauuuaacagaaaugu

SEQ ID NO: 3000958 - RNA, 18 nt, Human
guggauuuaacagaaaug

SEQ ID NO: 3000959 - RNA, 19 nt, Human
guggcaccagcagccugga

SEQ ID NO: 3000960 - RNA, 21 nt, Human
guggaugccugguggcagcug

SEQ ID NO: 3000961 - RNA, 20 nt, Human
guggaugcugcugccccugc

SEQ ID NO: 3000962 - RNA, 22 nt, Human
guggacacagcucuucuccagg

SEQ ID NO: 3000963 - RNA, 18 nt, Human
guggacacagcucuucuc

SEQ ID NO: 3000964 - RNA, 23 nt, Human
guggacacagcucuucuccaggc

SEQ ID NO: 3000965 - RNA, 17 nt, Human
guggacacagcucuucu

SEQ ID NO: 3000966 - RNA, 20 nt, Human
gugcugggauuacaggugug

SEQ ID NO: 3000967 - RNA, 22 nt, Human
gugcugggauuacaagcgugag

SEQ ID NO: 3000968 - RNA, 21 nt, Human
gugcugggauuacaagcguga

SEQ ID NO: 3000969 - RNA, 12 nt, Human
gugcuauguucu

SEQ ID NO: 3000970 - RNA, 19 nt, Human
gugcuaucucccccagccc

SEQ ID NO: 3000971 - RNA, 22 nt, Human
gugcuaucucccccagccccau

SEQ ID NO: 3000972 - RNA, 22 nt, Human
gugggacacccugugauggggc

SEQ ID NO: 3000973 - RNA, 21 nt, Human
gugggacagucaccucaugga

SEQ ID NO: 3000974 - RNA, 22 nt, Human
guggcgcagcauauucaggaag

SEQ ID NO: 3000975 - RNA, 23 nt, Human
guggcgcagcauauucaggaagc

SEQ ID NO: 3000976 - RNA, 13 nt, Human
gugggagugggcc

SEQ ID NO: 3000977 - RNA, 14 nt, Human
gugggagugggccc

SEQ ID NO: 3000978 - RNA, 13 nt, Human
gugggauccucca

SEQ ID NO: 3000979 - RNA, 23 nt, Human
gugggaggaucucuugagccugg

SEQ ID NO: 3000980 - RNA, 14 nt, Human
guggugguuuucug

SEQ ID NO: 3000981 - RNA, 16 nt, Human
gugguuucagaaaugu

SEQ ID NO: 3000982 - RNA, 20 nt, Human
gugggggaucacagccucug

SEQ ID NO: 3000983 - RNA, 14 nt, Human
guggguacgggagg

SEQ ID NO: 3000984 - RNA, 19 nt, Human
aagagcuguucacagccag

SEQ ID NO: 3000985 - RNA, 16 nt, Human
aagacuuaaugagacu

SEQ ID NO: 3000986 - RNA, 13 nt, Human
aagagcaaaguag

SEQ ID NO: 3000987 - RNA, 16 nt, Human
aagacuguacaaagua

SEQ ID NO: 3000988 - RNA, 21 nt, Human
aagacugaguacguugugcau

SEQ ID NO: 3000989 - RNA, 17 nt, Human
aagacuguacaaaguag

SEQ ID NO: 3000990 - RNA, 17 nt, Human
aagacugaguacguugu

SEQ ID NO: 3000991 - RNA, 18 nt, Human
aagacuaucuaaauguug

SEQ ID NO: 3000992 - RNA, 17 nt, Human
aagacuaucuaaauguu

SEQ ID NO: 3000993 - RNA, 16 nt, Human
aagacuaucuaaaugu

SEQ ID NO: 3000994 - RNA, 18 nt, Human
aagacccuugugguccca

SEQ ID NO: 3000995 - RNA, 21 nt, Human
aagacccuuguggucccaccc

SEQ ID NO: 3000996 - RNA, 22 nt, Human
aagacccuuguggucccacccc

SEQ ID NO: 3000997 - RNA, 17 nt, Human
gugugacuacuccccca

SEQ ID NO: 3000998 - RNA, 21 nt, Human
gugugaccacugcagaagaca

SEQ ID NO: 3000999 - RNA, 18 nt, Human
gugucuuuuuucacuaca

SEQ ID NO: 3001000 - RNA, 18 nt, Human
gugucuugcaauggcagc

SEQ ID NO: 3001001 - RNA, 17 nt, Human
gugucuugcaauggcag

SEQ ID NO: 3001002 - RNA, 23 nt, Human
guguuuccuggcacugcuuccag

SEQ ID NO: 3001003 - RNA, 17 nt, Human
gugguuuucuguucuuu

SEQ ID NO: 3001004 - RNA, 18 nt, Human
aagagguuuuaaaaaaau

SEQ ID NO: 3001005 - RNA, 18 nt, Human
aagagguuuuaaagcuuc

SEQ ID NO: 3001006 - RNA, 14 nt, Human
aagagguuuuaaag

SEQ ID NO: 3001007 - RNA, 12 nt, Human
aagaugcagccg

SEQ ID NO: 3001008 - RNA, 12 nt, Human
aagcaaaggaga

SEQ ID NO: 3001009 - RNA, 13 nt, Human
aagcaaaggagau

SEQ ID NO: 3001010 - RNA, 14 nt, Human
aagaugugacaugu

SEQ ID NO: 3001011 - RNA, 18 nt, Human
aagaugugacauguuuua

SEQ ID NO: 3001012 - RNA, 14 nt, Human
guuacacaaagaac

SEQ ID NO: 3001013 - RNA, 17 nt, Human
guuaguaugaggcauuu

SEQ ID NO: 3001014 - RNA, 20 nt, Human
guuaguaugaggcauuuguu

SEQ ID NO: 3001015 - RNA, 18 nt, Human
guuaaugauagcuacugu

SEQ ID NO: 3001016 - RNA, 22 nt, Human
aagcuaggccuggccagaugca

SEQ ID NO: 3001017 - RNA, 16 nt, Human
aagcuaggccuggcca

SEQ ID NO: 3001018 - RNA, 18 nt, Human
aagcuaggccuggccaga

SEQ ID NO: 3001019 - RNA, 17 nt, Human
aagcuaggccuggccag

SEQ ID NO: 3001020 - RNA, 19 nt, Human
aagccuccuccagccgcca

SEQ ID NO: 3001021 - RNA, 19 nt, Human
guucaggguuggccccugc

SEQ ID NO: 3001022 - RNA, 18 nt, Human
guucaggguuggccccug

SEQ ID NO: 3001023 - RNA, 17 nt, Human
guucaggguuggccccu

SEQ ID NO: 3001024 - RNA, 17 nt, Human
guucagcuccagcucac

SEQ ID NO: 3001025 - RNA, 16 nt, Human
guucagcuccagcuca

SEQ ID NO: 3001026 - RNA, 18 nt, Human
guucagcuccagcucacc

SEQ ID NO: 3001027 - RNA, 15 nt, Human
guucagcuccagcuc

SEQ ID NO: 3001028 - RNA, 18 nt, Human
guugacaugggacauuug

SEQ ID NO: 3001029 - RNA, 14 nt, Human
guugacaugggaca

SEQ ID NO: 3001030 - RNA, 22 nt, Human
guugaugaucuuugcagacagg

SEQ ID NO: 3001031 - RNA, 13 nt, Human
guugacaugggac

SEQ ID NO: 3001032 - RNA, 17 nt, Human
guucuuaguuugcaguu

SEQ ID NO: 3001033 - RNA, 21 nt, Human
guucuugguuuguaaauuaac

SEQ ID NO: 3001034 - RNA, 23 nt, Human
guucugggacacaguucaauucu

SEQ ID NO: 3001035 - RNA, 20 nt, Human
guucccuuugacgccauccc

SEQ ID NO: 3001036 - RNA, 21 nt, Human
guucccuuugacgccauccca

SEQ ID NO: 3001037 - RNA, 22 nt, Human
guucccuuugacgccaucccag

SEQ ID NO: 3001038 - RNA, 16 nt, Human
guucuacccaggugcu

SEQ ID NO: 3001039 - RNA, 20 nt, Human
guucccauuugcuccuuucu

SEQ ID NO: 3001040 - RNA, 16 nt, Human
guucccauuugcuccu

SEQ ID NO: 3001041 - RNA, 20 nt, Human
guuccauggccucuucagau

SEQ ID NO: 3001042 - RNA, 22 nt, Human
aagcuauucaguaauaacucua

SEQ ID NO: 3001043 - RNA, 23 nt, Human
aagcuuguauuccuuuuucucuc

SEQ ID NO: 3001044 - RNA, 18 nt, Human
aagcuuauuaaaacucau

SEQ ID NO: 3001045 - RNA, 20 nt, Human
guuuaaugguaguuuuacag

SEQ ID NO: 3001046 - RNA, 10 nt, Human
guuuaaaauc

SEQ ID NO: 3001047 - RNA, 16 nt, Human
guuuaaaaucauuucu

SEQ ID NO: 3001048 - RNA, 18 nt, Human
guuguaccgcaaugugac

SEQ ID NO: 3001049 - RNA, 18 nt, Human
guuggucccccuuccaug

SEQ ID NO: 3001050 - RNA, 13 nt, Human
guuggguggaugc

SEQ ID NO: 3001051 - RNA, 17 nt, Human
guugcccaggcuggcgu

SEQ ID NO: 3001052 - RNA, 15 nt, Human
guugcccaggcaggu

SEQ ID NO: 3001053 - RNA, 21 nt, Human
guugcccaggcuggcgugcag

SEQ ID NO: 3001054 - RNA, 19 nt, Human
guugcccaggcaggucuug

SEQ ID NO: 3001055 - RNA, 18 nt, Human
guugcccaggcaggucuu

SEQ ID NO: 3001056 - RNA, 14 nt, Human
aaggcuccaggagc

SEQ ID NO: 3001057 - RNA, 17 nt, Human
guugcccaggcaggucu

SEQ ID NO: 3001058 - RNA, 18 nt, Human
aaggccaaaggaagcaca

SEQ ID NO: 3001059 - RNA, 19 nt, Human
aaggcuaccuuuguauucu

SEQ ID NO: 3001060 - RNA, 15 nt, Human
aaggauccugagcca

SEQ ID NO: 3001061 - RNA, 17 nt, Human
aaggauccugagccaga

SEQ ID NO: 3001062 - RNA, 18 nt, Human
aaggaugaucuaggaaga

SEQ ID NO: 3001063 - RNA, 23 nt, Human
aaggaugaucuaggaagacuuug

SEQ ID NO: 3001064 - RNA, 14 nt, Human
aaggauccugagcc

SEQ ID NO: 3001065 - RNA, 13 nt, Human
aaggauccugagc

SEQ ID NO: 3001066 - RNA, 23 nt, Human
guugaugaucuuugcagacaggc

SEQ ID NO: 3001067 - RNA, 16 nt, Human
aaggaugcuuguacau

SEQ ID NO: 3001068 - RNA, 15 nt, Human
aaggaugcuuguaca

SEQ ID NO: 3001069 - RNA, 18 nt, Human
aaggaugcacagaguugu

SEQ ID NO: 3001070 - RNA, 19 nt, Human
aaggaugcuuguacauaau

SEQ ID NO: 3001071 - RNA, 17 nt, Human
aaggaugcuuguacaua

SEQ ID NO: 3001072 - RNA, 14 nt, Human
guuuuacaguguuu

SEQ ID NO: 3001073 - RNA, 11 nt, Human
guuuucuguuc

SEQ ID NO: 3001074 - RNA, 23 nt, Human
guuuucugagaaagacuauucaa

SEQ ID NO: 3001075 - RNA, 19 nt, Human
guuuucuguucuuucuggc

SEQ ID NO: 3001076 - RNA, 16 nt, Human
guuugccucugccucu

SEQ ID NO: 3001077 - RNA, 13 nt, Human
guuugccucugcc

SEQ ID NO: 3001078 - RNA, 23 nt, Human
guuucuaaaggcuaccuuuguau

SEQ ID NO: 3001079 - RNA, 22 nt, Human
guuucuaaaggcuaccuuugua

SEQ ID NO: 3001080 - RNA, 22 nt, Human
guuugauucagacagcugccug

SEQ ID NO: 3001081 - RNA, 21 nt, Human
guuucaaacauauauaacaau

SEQ ID NO: 3001082 - RNA, 13 nt, Human
aagggccuggccu

SEQ ID NO: 3001083 - RNA, 19 nt, Human
aagggccuggccugagcug

SEQ ID NO: 3001084 - RNA, 14 nt, Human
aagggccuggccug

SEQ ID NO: 3001085 - RNA, 17 nt, Human
aagggccuggccugagc

SEQ ID NO: 3001086 - RNA, 23 nt, Human
aaggggaauguuugccucugccu

SEQ ID NO: 3001087 - RNA, 22 nt, Human
aaggggaauguuugccucugcc

SEQ ID NO: 3001088 - RNA, 12 nt, Human
aaguaauaugca

SEQ ID NO: 3001089 - RNA, 19 nt, Human
guuucuaaaggcuaccuuu

SEQ ID NO: 3001090 - RNA, 20 nt, Human
guuucuaaagcugccagccg

SEQ ID NO: 3001091 - RNA, 16 nt, Human
aaguaauaugcacaca

SEQ ID NO: 3001092 - RNA, 15 nt, Human
aaguaauaugcacac

SEQ ID NO: 3001093 - RNA, 16 nt, Human
aaggguaucaggugcu

SEQ ID NO: 3001094 - RNA, 16 nt, Human
aaccccaaguuaguuc

SEQ ID NO: 3001095 - RNA, 20 nt, Human
aacccauauuuguacaccaa

SEQ ID NO: 3001096 - RNA, 17 nt, Human
aacccagcucuggucca

SEQ ID NO: 3001097 - RNA, 23 nt, Human
aaccauuuugcugucccuuuucc

SEQ ID NO: 3001098 - RNA, 13 nt, Human
aacccaaauguuc

SEQ ID NO: 3001099 - RNA, 13 nt, Human
aacccagcucugg

SEQ ID NO: 3001100 - RNA, 14 nt, Human
aacccagcucuggu

SEQ ID NO: 3001101 - RNA, 11 nt, Human
aacccagcucu

SEQ ID NO: 3001102 - RNA, 18 nt, Human
aacccaaauguucaucaa

SEQ ID NO: 3001103 - RNA, 20 nt, Human
aaccuagggugauauuaacc

SEQ ID NO: 3001104 - RNA, 17 nt, Human
aaccuagggugauauua

SEQ ID NO: 3001105 - RNA, 15 nt, Human
aacccccagccugcu

SEQ ID NO: 3001106 - RNA, 14 nt, Human
aacccccagccugc

SEQ ID NO: 3001107 - RNA, 13 nt, Human
aacccccagccug

SEQ ID NO: 3001108 - RNA, 24 nt, Human
aaccucuaaauucuuucauuuuag

SEQ ID NO: 3001109 - RNA, 14 nt, Human
aaccuccugggcua

SEQ ID NO: 3001110 - RNA, 17 nt, Human
aaccuccgccucuuggg

SEQ ID NO: 3001111 - RNA, 12 nt, Human
aaccacagcagu

SEQ ID NO: 3001112 - RNA, 18 nt, Human
aaccacaucuugcucugc

SEQ ID NO: 3001113 - RNA, 21 nt, Human
aaccaucauugaaaucuuuuu

SEQ ID NO: 3001114 - RNA, 19 nt, Human
aaccaucauugaaaucuuu

SEQ ID NO: 3001115 - RNA, 20 nt, Human
aaccaucauugaaaucuuuu

SEQ ID NO: 3001116 - RNA, 22 nt, Human
aaccacaucuugcucugcugac

SEQ ID NO: 3001117 - RNA, 20 nt, Human
aaccacaucuugcucugcug

SEQ ID NO: 3001118 - RNA, 16 nt, Human
aacauuuugucauaua

SEQ ID NO: 3001119 - RNA, 19 nt, Human
gucuuaauuaaaagaauau

SEQ ID NO: 3001120 - RNA, 21 nt, Human
gucuuaauuaaaagaauauuu

SEQ ID NO: 3001121 - RNA, 22 nt, Human
gucuuaauuaaaagaauauuuu

SEQ ID NO: 3001122 - RNA, 12 nt, Human
gucugcuuagaa

SEQ ID NO: 3001123 - RNA, 14 nt, Human
gucuuuggacccug

SEQ ID NO: 3001124 - RNA, 15 nt, Human
gucuuuggacccuga

SEQ ID NO: 3001125 - RNA, 17 nt, Human
gucuuuggacccugagg

SEQ ID NO: 3001126 - RNA, 14 nt, Human
gucuuuucuugcau

SEQ ID NO: 3001127 - RNA, 19 nt, Human
gucuuuucuugcaugaggc

SEQ ID NO: 3001128 - RNA, 24 nt, Human
gucuuuucuugcaugaggcuagug

SEQ ID NO: 3001129 - RNA, 15 nt, Human
gucuuagauguauau

SEQ ID NO: 3001130 - RNA, 14 nt, Human
aacuccagaaagug

SEQ ID NO: 3001131 - RNA, 21 nt, Human
aacuccagaaagugacaagcu

SEQ ID NO: 3001132 - RNA, 14 nt, Human
aacucccuuucaac

SEQ ID NO: 3001133 - RNA, 13 nt, Human
aacucccuuucaa

SEQ ID NO: 3001134 - RNA, 18 nt, Human
aacucguuaauuuguagu

SEQ ID NO: 3001135 - RNA, 15 nt, Human
gugaacacaucagcu

SEQ ID NO: 3001136 - RNA, 19 nt, Human
gugaaccaccacacccagc

SEQ ID NO: 3001137 - RNA, 22 nt, Human
aacguggcugcuucaaggaucc

SEQ ID NO: 3001138 - RNA, 16 nt, Human
aacguggcugcuucaa

SEQ ID NO: 3001139 - RNA, 19 nt, Human
aacguggcugcuucaagga

SEQ ID NO: 3001140 - RNA, 15 nt, Human
aacguggcugcuuca

SEQ ID NO: 3001141 - RNA, 18 nt, Human
aacacugguuuuaaauau

SEQ ID NO: 3001142 - RNA, 22 nt, Human
aacacugguuuuaaauauuuug

SEQ ID NO: 3001143 - RNA, 15 nt, Human
aacacuguucucugc

SEQ ID NO: 3001144 - RNA, 20 nt, Human
aacacuguucucugcccucc

SEQ ID NO: 3001145 - RNA, 21 nt, Human
aacacucuauaacaaaggaua

SEQ ID NO: 3001146 - RNA, 14 nt, Human
aacacucugagacu

SEQ ID NO: 3001147 - RNA, 12 nt, Human
aacacucugaga

SEQ ID NO: 3001148 - RNA, 13 nt, Human
aacacucugagac

SEQ ID NO: 3001149 - RNA, 17 nt, Human
aacacucauugaccuga

SEQ ID NO: 3001150 - RNA, 21 nt, Human
aacacucauugaccugaggcc

SEQ ID NO: 3001151 - RNA, 12 nt, Human
aacacuccuuca

SEQ ID NO: 3001152 - RNA, 11 nt, Human
aacacucugag

SEQ ID NO: 3001153 - RNA, 21 nt, Human
guccaagcauuuagauguaua

SEQ ID NO: 3001154 - RNA, 24 nt, Human
guccaagcauaccaacacgagcag

SEQ ID NO: 3001155 - RNA, 22 nt, Human
gucauuugagcagggcucagcg

SEQ ID NO: 3001156 - RNA, 21 nt, Human
gucauuugagcagggcucagc

SEQ ID NO: 3001157 - RNA, 21 nt, Human
aacacuguucucugcccucca

SEQ ID NO: 3001158 - RNA, 21 nt, Human
aacaagccuccuuuuaaagua

SEQ ID NO: 3001159 - RNA, 15 nt, Human
aacaaggaugaauua

SEQ ID NO: 3001160 - RNA, 17 nt, Human
aacaagaccacguuucu

SEQ ID NO: 3001161 - RNA, 16 nt, Human
aacaagaccacguuuc

SEQ ID NO: 3001162 - RNA, 19 nt, Human
aacaagaccacguuucuaa

SEQ ID NO: 3001163 - RNA, 15 nt, Human
gucacaggcaggucc

SEQ ID NO: 3001164 - RNA, 13 nt, Human
gucacaggcaggu

SEQ ID NO: 3001165 - RNA, 16 nt, Human
gucacaggcaggucca

SEQ ID NO: 3001166 - RNA, 23 nt, Human
aacaaggcaaggcugucaauuac

SEQ ID NO: 3001167 - RNA, 23 nt, Human
aacaaggccugucagcuaaagaa

SEQ ID NO: 3001168 - RNA, 15 nt, Human
aacaagucagucauu

SEQ ID NO: 3001169 - RNA, 18 nt, Human
aacaagucagucauucag

SEQ ID NO: 3001170 - RNA, 22 nt, Human
aacauuuauuugaguggaguua

SEQ ID NO: 3001171 - RNA, 18 nt, Human
aacauuugguaaggggaa

SEQ ID NO: 3001172 - RNA, 14 nt, Human
aacauacucccauc

SEQ ID NO: 3001173 - RNA, 15 nt, Human
aacauacucccaucu

SEQ ID NO: 3001174 - RNA, 19 nt, Human
aacauuuggguuacuauuu

SEQ ID NO: 3001175 - RNA, 15 nt, Human
aacaguaacauagcu

SEQ ID NO: 3001176 - RNA, 22 nt, Human
aacaguagugauaguuguaccg

SEQ ID NO: 3001177 - RNA, 18 nt, Human
aacaggcuuagugaugua

SEQ ID NO: 3001178 - RNA, 19 nt, Human
aacagguuuuccugaagaa

SEQ ID NO: 3001179 - RNA, 23 nt, Human
aacaggcugggcuucaguggcag

SEQ ID NO: 3001180 - RNA, 13 nt, Human
aacaggcugggcu

SEQ ID NO: 3001181 - RNA, 22 nt, Human
aacaggcugggcuucaguggca

SEQ ID NO: 3001182 - RNA, 19 nt, Human
aacagacuggaagcacagc

SEQ ID NO: 3001183 - RNA, 22 nt, Human
aacaguaacauagcugugauuu

SEQ ID NO: 3001184 - RNA, 19 nt, Human
aacaguuguguuugaagca

SEQ ID NO: 3001185 - RNA, 15 nt, Human
aacagaaauguacag

SEQ ID NO: 3001186 - RNA, 10 nt, Human
aacagaaaug

SEQ ID NO: 3001187 - RNA, 21 nt, Human
aacagaaauguacagcaagga

SEQ ID NO: 3001188 - RNA, 21 nt, Human
guccggucccugucccagugc

SEQ ID NO: 3001189 - RNA, 13 nt, Human
guccgagcuuuga

SEQ ID NO: 3001190 - RNA, 15 nt, Human
aaaugauuucacagu

SEQ ID NO: 3001191 - RNA, 15 nt, Human
aaaugcaaaaaaaau

SEQ ID NO: 3001192 - RNA, 14 nt, Human
aaaugcaccuggaa

SEQ ID NO: 3001193 - RNA, 18 nt, Human
aaaugcaaaaaaaauuag

SEQ ID NO: 3001194 - RNA, 17 nt, Human
aaaugcaaaaaaaauua

SEQ ID NO: 3001195 - RNA, 22 nt, Human
aaaugcaccuggaauauauaac

SEQ ID NO: 3001196 - RNA, 18 nt, Human
aaaugcaccuggaauaua

SEQ ID NO: 3001197 - RNA, 13 nt, Human
aaaugcccagcuu

SEQ ID NO: 3001198 - RNA, 18 nt, Human
aaaugcccagccccuucu

SEQ ID NO: 3001199 - RNA, 14 nt, Human
aaaugcccagcccc

SEQ ID NO: 3001200 - RNA, 15 nt, Human
aaaugcccagccccu

SEQ ID NO: 3001201 - RNA, 14 nt, Human
aaaugcauuucuaa

SEQ ID NO: 3001202 - RNA, 13 nt, Human
aaaugcccagccc

SEQ ID NO: 3001203 - RNA, 18 nt, Human
aaauggcuuccuggcaau

SEQ ID NO: 3001204 - RNA, 19 nt, Human
aaauggcuuccuggcaaua

SEQ ID NO: 3001205 - RNA, 18 nt, Human
aaaugggcagagcagaga

SEQ ID NO: 3001206 - RNA, 20 nt, Human
aaaugggcagagcagagacc

SEQ ID NO: 3001207 - RNA, 15 nt, Human
aaaugggcagagcag

SEQ ID NO: 3001208 - RNA, 23 nt, Human
aaaugagguacucuccuggaaau

SEQ ID NO: 3001209 - RNA, 16 nt, Human
aaaugagguacucucc

SEQ ID NO: 3001210 - RNA, 19 nt, Human
aaaugaggucagagccugc

SEQ ID NO: 3001211 - RNA, 17 nt, Human
aaaugaggucagagccu

SEQ ID NO: 3001212 - RNA, 13 nt, Human
aaaugagccuggc

SEQ ID NO: 3001213 - RNA, 19 nt, Human
aaaugagccuggcaagaau

SEQ ID NO: 3001214 - RNA, 22 nt, Human
aaaugaaagcagggacuugaac

SEQ ID NO: 3001215 - RNA, 21 nt, Human
aaaugaaagcagggacuugaa

SEQ ID NO: 3001216 - RNA, 21 nt, Human
aaaugaaugucacuucuggau

SEQ ID NO: 3001217 - RNA, 19 nt, Human
aaaugaaugucacuucugg

SEQ ID NO: 3001218 - RNA, 14 nt, Human
aaaugaaugucacu

SEQ ID NO: 3001219 - RNA, 15 nt, Human
aaaggauacuuauuu

SEQ ID NO: 3001220 - RNA, 17 nt, Human
aaaggauacuuauuuaa

SEQ ID NO: 3001221 - RNA, 21 nt, Human
guagcugggacuacaggcacc

SEQ ID NO: 3001222 - RNA, 19 nt, Human
guagcugggacuacaggca

SEQ ID NO: 3001223 - RNA, 18 nt, Human
guagcugggacuacaggc

SEQ ID NO: 3001224 - RNA, 12 nt, Human
guagcugggacu

SEQ ID NO: 3001225 - RNA, 18 nt, Human
aaauccauacauuugugu

SEQ ID NO: 3001226 - RNA, 18 nt, Human
guaggaagguuaauguuc

SEQ ID NO: 3001227 - RNA, 15 nt, Human
guaggaagacuuugg

SEQ ID NO: 3001228 - RNA, 15 nt, Human
aaaucccauuuaaaa

SEQ ID NO: 3001229 - RNA, 18 nt, Human
aaaucccuuaccucggug

SEQ ID NO: 3001230 - RNA, 13 nt, Human
aaaucgaugcagu

SEQ ID NO: 3001231 - RNA, 14 nt, Human
aaauccuugaagau

SEQ ID NO: 3001232 - RNA, 19 nt, Human
aaaucuacacuccagugag

SEQ ID NO: 3001233 - RNA, 17 nt, Human
aaaucuaggaaaauuau

SEQ ID NO: 3001234 - RNA, 22 nt, Human
aaaucuaggaaaauuauucuau

SEQ ID NO: 3001235 - RNA, 19 nt, Human
aaaucucaaauuucuaaau

SEQ ID NO: 3001236 - RNA, 17 nt, Human
aaaucucaaauuucuaa

SEQ ID NO: 3001237 - RNA, 16 nt, Human
aaaucucaaauuucua

SEQ ID NO: 3001238 - RNA, 15 nt, Human
aaaucucaaauuucu

SEQ ID NO: 3001239 - RNA, 17 nt, Human
aaaugaaaaucgugaca

SEQ ID NO: 3001240 - RNA, 13 nt, Human
gucaacauuucuc

SEQ ID NO: 3001241 - RNA, 17 nt, Human
gucaacauuucucaugu

SEQ ID NO: 3001242 - RNA, 20 nt, Human
gucacacaguauuacuucug

SEQ ID NO: 3001243 - RNA, 16 nt, Human
gucacacacuuuggcu

SEQ ID NO: 3001244 - RNA, 19 nt, Human
gucaacucauauuuucaug

SEQ ID NO: 3001245 - RNA, 19 nt, Human
gucaaaguggugagaggca

SEQ ID NO: 3001246 - RNA, 18 nt, Human
gucaaaguggugagaggc

SEQ ID NO: 3001247 - RNA, 21 nt, Human
guauuuuuuuacuaauagaca

SEQ ID NO: 3001248 - RNA, 17 nt, Human
guauuuuuuuacuaaua

SEQ ID NO: 3001249 - RNA, 20 nt, Human
aaauuuacuuuaaacuacau

SEQ ID NO: 3001250 - RNA, 17 nt, Human
aaauuuacuuuaaacua

SEQ ID NO: 3001251 - RNA, 20 nt, Human
aaauuuaguauuuuguuuca

SEQ ID NO: 3001252 - RNA, 17 nt, Human
aaauuucagcagcugca

SEQ ID NO: 3001253 - RNA, 18 nt, Human
aaauuucagcagcugcag

SEQ ID NO: 3001254 - RNA, 15 nt, Human
guauuuuuuuacuaa

SEQ ID NO: 3001255 - RNA, 14 nt, Human
guauuuuuuuacua

SEQ ID NO: 3001256 - RNA, 22 nt, Human
aaauuuccugggagcuuuugua

SEQ ID NO: 3001257 - RNA, 23 nt, Human
aaauuaacuuuuauaaacuuuac

SEQ ID NO: 3001258 - RNA, 22 nt, Human
aaauuaacuuuuauaaacuuua

SEQ ID NO: 3001259 - RNA, 21 nt, Human
aaauuaacuuuuauaaacuuu

SEQ ID NO: 3001260 - RNA, 19 nt, Human
aaauuaacuuuuauaaacu

SEQ ID NO: 3001261 - RNA, 22 nt, Human
guauuggcuagagguucaaaga

SEQ ID NO: 3001262 - RNA, 20 nt, Human
guauuuaauagguuuggaca

SEQ ID NO: 3001263 - RNA, 16 nt, Human
aaauuccccacccuga

SEQ ID NO: 3001264 - RNA, 14 nt, Human
aaauucaugcugcu

SEQ ID NO: 3001265 - RNA, 14 nt, Human
guaugauucccagc

SEQ ID NO: 3001266 - RNA, 14 nt, Human
guaugcacacacau

SEQ ID NO: 3001267 - RNA, 14 nt, Human
guaugggagagaag

SEQ ID NO: 3001268 - RNA, 21 nt, Human
guaucccaugagccucagcau

SEQ ID NO: 3001269 - RNA, 18 nt, Human
guaucaaguauagaaaau

SEQ ID NO: 3001270 - RNA, 22 nt, Human
guaugaucacggcucacugcag

SEQ ID NO: 3001271 - RNA, 15 nt, Human
guaucccuacuguaa

SEQ ID NO: 3001272 - RNA, 21 nt, Human
guauucucuccuguaccucuu

SEQ ID NO: 3001273 - RNA, 15 nt, Human
guauguguaauaaau

SEQ ID NO: 3001274 - RNA, 15 nt, Human
guauucuuauuuaau

SEQ ID NO: 3001275 - RNA, 15 nt, Human
guaugggagagaaga

SEQ ID NO: 3001276 - RNA, 16 nt, Human
aaaugggggugcauuu

SEQ ID NO: 3001277 - RNA, 15 nt, Human
aaaugggggugcauu

SEQ ID NO: 3001278 - RNA, 18 nt, Human
aaaugggggugcauuuga

SEQ ID NO: 3001279 - RNA, 17 nt, Human
aaaugggggugcauuug

SEQ ID NO: 3001280 - RNA, 22 nt, Human
aaauguaagggaaacugccagc

SEQ ID NO: 3001281 - RNA, 22 nt, Human
cugcugauuuaaacacauuaaa

SEQ ID NO: 3001282 - RNA, 16 nt, Human
cugcugauuuaaacac

SEQ ID NO: 3001283 - RNA, 13 nt, Human
cugcugaaggcuc

SEQ ID NO: 3001284 - RNA, 14 nt, Human
cugcugaaggcucg

SEQ ID NO: 3001285 - RNA, 15 nt, Human
cugcugaaggcucga

SEQ ID NO: 3001286 - RNA, 12 nt, Human
cugcugacagug

SEQ ID NO: 3001287 - RNA, 11 nt, Human
cugcugacagu

SEQ ID NO: 3001288 - RNA, 15 nt, Human
cugcugacaguguug

SEQ ID NO: 3001289 - RNA, 13 nt, Human
cugcugacagugu

SEQ ID NO: 3001290 - RNA, 19 nt, Human
cugcucacauaucugucau

SEQ ID NO: 3001291 - RNA, 16 nt, Human
cugcucacauaucugu

SEQ ID NO: 3001292 - RNA, 12 nt, Human
cugcugaaggcu

SEQ ID NO: 3001293 - RNA, 14 nt, Human
cugcucacauaucu

SEQ ID NO: 3001294 - RNA, 20 nt, Human
cugcuuaacuucacauauug

SEQ ID NO: 3001295 - RNA, 20 nt, Human
cugcuuauccguuagccgug

SEQ ID NO: 3001296 - RNA, 23 nt, Human
cugcuuagaaauaacagaagaaa

SEQ ID NO: 3001297 - RNA, 16 nt, Human
cuggaguucugguucc

SEQ ID NO: 3001298 - RNA, 17 nt, Human
cuggaguucugguuccu

SEQ ID NO: 3001299 - RNA, 15 nt, Human
cuggaguucugguuc

SEQ ID NO: 3001300 - RNA, 22 nt, Human
cuggaugcagccucacaguccu

SEQ ID NO: 3001301 - RNA, 19 nt, Human
cuggaugcccccuguggau

SEQ ID NO: 3001302 - RNA, 18 nt, Human
cuggaugcccccugugga

SEQ ID NO: 3001303 - RNA, 17 nt, Human
cuggaugcccccugugg

SEQ ID NO: 3001304 - RNA, 23 nt, Human
cuggaugcccauccacugggugu

SEQ ID NO: 3001305 - RNA, 12 nt, Human
cuggaugccauc

SEQ ID NO: 3001306 - RNA, 22 nt, Human
cuggaugcccccuguggaugcu

SEQ ID NO: 3001307 - RNA, 13 nt, Human
cuggggagaaagu

SEQ ID NO: 3001308 - RNA, 18 nt, Human
cuggguggcaccagcagc

SEQ ID NO: 3001309 - RNA, 20 nt, Human
cuggguggcaccagcagccu

SEQ ID NO: 3001310 - RNA, 16 nt, Human
cuggguggaugggcca

SEQ ID NO: 3001311 - RNA, 15 nt, Human
cugggcagcugccuc

SEQ ID NO: 3001312 - RNA, 14 nt, Human
cugggcagcugccu

SEQ ID NO: 3001313 - RNA, 20 nt, Human
cugggcagguuggugggggc

SEQ ID NO: 3001314 - RNA, 13 nt, Human
cugggcagcugcc

SEQ ID NO: 3001315 - RNA, 20 nt, Human
cugggcagaggaaagcaaag

SEQ ID NO: 3001316 - RNA, 13 nt, Human
cugggcagaggaa

SEQ ID NO: 3001317 - RNA, 16 nt, Human
cugggcagaggaaagc

SEQ ID NO: 3001318 - RNA, 12 nt, Human
cugggcagagga

SEQ ID NO: 3001319 - RNA, 15 nt, Human
cuggguguaaacaca

SEQ ID NO: 3001320 - RNA, 14 nt, Human
cuggguguggcgca

SEQ ID NO: 3001321 - RNA, 21 nt, Human
cuggguggcaccagcagccug

SEQ ID NO: 3001322 - RNA, 15 nt, Human
cuggguguggcgcag

SEQ ID NO: 3001323 - RNA, 16 nt, Human
cuggguguaaacacau

SEQ ID NO: 3001324 - RNA, 21 nt, Human
cuggugccucaccccuugcca

SEQ ID NO: 3001325 - RNA, 12 nt, Human
cuggugccucac

SEQ ID NO: 3001326 - RNA, 18 nt, Human
cugggacaugggaaaggg

SEQ ID NO: 3001327 - RNA, 22 nt, Human
cugggacaugggaaaggggaag

SEQ ID NO: 3001328 - RNA, 14 nt, Human
cugggacaugggaa

SEQ ID NO: 3001329 - RNA, 22 nt, Human
cugggagaaccaaaaagaggcu

SEQ ID NO: 3001330 - RNA, 15 nt, Human
cugggacuacaggca

SEQ ID NO: 3001331 - RNA, 13 nt, Human
cugggacuacagg

SEQ ID NO: 3001332 - RNA, 14 nt, Human
cuggcuaugcauuu

SEQ ID NO: 3001333 - RNA, 13 nt, Human
cuggcuaugcauu

SEQ ID NO: 3001334 - RNA, 16 nt, Human
cuggcuaugcauuuga

SEQ ID NO: 3001335 - RNA, 15 nt, Human
cuggcuaugcauuug

SEQ ID NO: 3001336 - RNA, 22 nt, Human
cuggcuaugcauuugaaaauuu

SEQ ID NO: 3001337 - RNA, 13 nt, Human
cuggcucacccag

SEQ ID NO: 3001338 - RNA, 14 nt, Human
cuggcucacccagu

SEQ ID NO: 3001339 - RNA, 12 nt, Human
cuggcccuuccu

SEQ ID NO: 3001340 - RNA, 15 nt, Human
cugcacuccagccug

SEQ ID NO: 3001341 - RNA, 16 nt, Human
cugcacuccagccuga

SEQ ID NO: 3001342 - RNA, 20 nt, Human
cugcacuccagccugagcga

SEQ ID NO: 3001343 - RNA, 17 nt, Human
cugcacuccagccugag

SEQ ID NO: 3001344 - RNA, 13 nt, Human
cugcacuccagcc

SEQ ID NO: 3001345 - RNA, 23 nt, Human
cugcacuauagccuaggugacag

SEQ ID NO: 3001346 - RNA, 22 nt, Human
cugcacuauagccuaggugaca

SEQ ID NO: 3001347 - RNA, 20 nt, Human
cugcacuauagccuagguga

SEQ ID NO: 3001348 - RNA, 18 nt, Human
cugcacuauagccuaggu

SEQ ID NO: 3001349 - RNA, 17 nt, Human
cugcacuauagccuagg

SEQ ID NO: 3001350 - RNA, 16 nt, Human
cugcacuauagccuag

SEQ ID NO: 3001351 - RNA, 17 nt, Human
cugcacuccagccuggg

SEQ ID NO: 3001352 - RNA, 16 nt, Human
cugcacuccagccugg

SEQ ID NO: 3001353 - RNA, 18 nt, Human
cugcacuccagccugggu

SEQ ID NO: 3001354 - RNA, 24 nt, Human
cugcagccucaaccuccugggcua

SEQ ID NO: 3001355 - RNA, 19 nt, Human
cugcacuccagccugggug

SEQ ID NO: 3001356 - RNA, 23 nt, Human
cugcagccucaaccuccugggcu

SEQ ID NO: 3001357 - RNA, 13 nt, Human
cugcaggcagcca

SEQ ID NO: 3001358 - RNA, 14 nt, Human
cugcaggcagccag

SEQ ID NO: 3001359 - RNA, 15 nt, Human
cugcaggcagccagg

SEQ ID NO: 3001360 - RNA, 16 nt, Human
cugcaggcagccaggc

SEQ ID NO: 3001361 - RNA, 17 nt, Human
cugcaggcagccaggcc

SEQ ID NO: 3001362 - RNA, 18 nt, Human
cugcaggcagccaggcca

SEQ ID NO: 3001363 - RNA, 19 nt, Human
cugcaggcagccaggccac

SEQ ID NO: 3001364 - RNA, 20 nt, Human
cugcaggcagccaggccaca

SEQ ID NO: 3001365 - RNA, 12 nt, Human
cugcagcuuugu

SEQ ID NO: 3001366 - RNA, 16 nt, Human
cugaugcuucuucaga

SEQ ID NO: 3001367 - RNA, 17 nt, Human
cugaugcuucuucagag

SEQ ID NO: 3001368 - RNA, 14 nt, Human
cucuuaugggcugg

SEQ ID NO: 3001369 - RNA, 18 nt, Human
cucuuauaucuauauuuu

SEQ ID NO: 3001370 - RNA, 15 nt, Human
cucuuauaucuauau

SEQ ID NO: 3001371 - RNA, 15 nt, Human
cucuuaugggcuggg

SEQ ID NO: 3001372 - RNA, 21 nt, Human
cugaugggcaacccccagccu

SEQ ID NO: 3001373 - RNA, 18 nt, Human
cugaugggcaacccccag

SEQ ID NO: 3001374 - RNA, 18 nt, Human
cugaugcuucuucagaga

SEQ ID NO: 3001375 - RNA, 19 nt, Human
cugaugcuucuucagagac

SEQ ID NO: 3001376 - RNA, 20 nt, Human
cugaugcuucuucagagacu

SEQ ID NO: 3001377 - RNA, 22 nt, Human
cugcaaaggguaucaggugcug

SEQ ID NO: 3001378 - RNA, 21 nt, Human
cugcaaaggguaucaggugcu

SEQ ID NO: 3001379 - RNA, 23 nt, Human
cugaugggcaacccccagccugc

SEQ ID NO: 3001380 - RNA, 22 nt, Human
cugaugggcaacccccagccug

SEQ ID NO: 3001381 - RNA, 24 nt, Human
cugaugggcaacccccagccugcu

SEQ ID NO: 3001382 - RNA, 20 nt, Human
cugcaagaauugaagcagga

SEQ ID NO: 3001383 - RNA, 12 nt, Human
cugcaagggagu

SEQ ID NO: 3001384 - RNA, 23 nt, Human
cugcaccgggccacagagaaagu

SEQ ID NO: 3001385 - RNA, 20 nt, Human
cugcaccgggccacagagaa

SEQ ID NO: 3001386 - RNA, 19 nt, Human
cugcaaccugauugugucu

SEQ ID NO: 3001387 - RNA, 21 nt, Human
cugcaaccugauugugucucu

SEQ ID NO: 3001388 - RNA, 14 nt, Human
cugcaaccugauug

SEQ ID NO: 3001389 - RNA, 22 nt, Human
cugcaaccuccgccucuugggu

SEQ ID NO: 3001390 - RNA, 20 nt, Human
cugcaaccuccgccucuugg

SEQ ID NO: 3001391 - RNA, 18 nt, Human
cugcaagaauugaagcag

SEQ ID NO: 3001392 - RNA, 22 nt, Human
cugcaaccugauugugucucuu

SEQ ID NO: 3001393 - RNA, 18 nt, Human
cugcauuuaaaagauaca

SEQ ID NO: 3001394 - RNA, 17 nt, Human
cugcauuuaaaagauac

SEQ ID NO: 3001395 - RNA, 20 nt, Human
cugccagggacagagggggu

SEQ ID NO: 3001396 - RNA, 22 nt, Human
cugccagggacagagggggugg

SEQ ID NO: 3001397 - RNA, 23 nt, Human
cugccagggacagaggggguggc

SEQ ID NO: 3001398 - RNA, 12 nt, Human
cugccagugccu

SEQ ID NO: 3001399 - RNA, 16 nt, Human
cugccagugccugggu

SEQ ID NO: 3001400 - RNA, 13 nt, Human
cugccagugccug

SEQ ID NO: 3001401 - RNA, 17 nt, Human
cugccagugccugggug

SEQ ID NO: 3001402 - RNA, 19 nt, Human
cugccauccagguucagcu

SEQ ID NO: 3001403 - RNA, 18 nt, Human
cugccauccagguucagc

SEQ ID NO: 3001404 - RNA, 16 nt, Human
cugccauccagguuca

SEQ ID NO: 3001405 - RNA, 16 nt, Human
cugccauauucuguug

SEQ ID NO: 3001406 - RNA, 12 nt, Human
cugccauccagg

SEQ ID NO: 3001407 - RNA, 16 nt, Human
cugcccuuaccugcca

SEQ ID NO: 3001408 - RNA, 17 nt, Human
cugcccuuaccugccag

SEQ ID NO: 3001409 - RNA, 12 nt, Human
cugcccuuaccu

SEQ ID NO: 3001410 - RNA, 19 nt, Human
cugcccugugggcccccaa

SEQ ID NO: 3001411 - RNA, 13 nt, Human
cugcauuggcuuu

SEQ ID NO: 3001412 - RNA, 14 nt, Human
cugcauuuaaaaga

SEQ ID NO: 3001413 - RNA, 13 nt, Human
cuuggcccaggag

SEQ ID NO: 3001414 - RNA, 23 nt, Human
cuugaaugaugccaugaggaaca

SEQ ID NO: 3001415 - RNA, 20 nt, Human
cuugccgucuaccugagggg

SEQ ID NO: 3001416 - RNA, 12 nt, Human
cuugacagggca

SEQ ID NO: 3001417 - RNA, 23 nt, Human
cuugccgucuaccugaggggccu

SEQ ID NO: 3001418 - RNA, 12 nt, Human
cuugcucugcug

SEQ ID NO: 3001419 - RNA, 20 nt, Human
cuucuguuuuauaauuuugu

SEQ ID NO: 3001420 - RNA, 15 nt, Human
cuucuguuuuauaau

SEQ ID NO: 3001421 - RNA, 20 nt, Human
cuucuucagagacuccugca

SEQ ID NO: 3001422 - RNA, 21 nt, Human
cuucuucagagacuccugcag

SEQ ID NO: 3001423 - RNA, 18 nt, Human
cuucuucagagacuccug

SEQ ID NO: 3001424 - RNA, 22 nt, Human
cuucuucagagacuccugcagg

SEQ ID NO: 3001425 - RNA, 20 nt, Human
cuugaaugaugccaugagga

SEQ ID NO: 3001426 - RNA, 15 nt, Human
cuuuuauaaacuuua

SEQ ID NO: 3001427 - RNA, 18 nt, Human
cuuuuauaaacuuuaccu

SEQ ID NO: 3001428 - RNA, 16 nt, Human
cuuuuauaaacuuuac

SEQ ID NO: 3001429 - RNA, 14 nt, Human
cuuuuauaaacuuu

SEQ ID NO: 3001430 - RNA, 16 nt, Human
cuuuggucuacacugu

SEQ ID NO: 3001431 - RNA, 20 nt, Human
cuuuggucuacacugugcug

SEQ ID NO: 3001432 - RNA, 15 nt, Human
cuuuucaaaacauuu

SEQ ID NO: 3001433 - RNA, 21 nt, Human
cuuugagugucuuaauuaaaa

SEQ ID NO: 3001434 - RNA, 18 nt, Human
cuuugacgccaucccagc

SEQ ID NO: 3001435 - RNA, 19 nt, Human
cuuugacgccaucccagcc

SEQ ID NO: 3001436 - RNA, 21 nt, Human
cuuugacgccaucccagcccc

SEQ ID NO: 3001437 - RNA, 22 nt, Human
cuuugacgccaucccagcccca

SEQ ID NO: 3001438 - RNA, 20 nt, Human
cuuuaaagggauggcaagau

SEQ ID NO: 3001439 - RNA, 15 nt, Human
cuuguggacacagcu

SEQ ID NO: 3001440 - RNA, 14 nt, Human
cuuguggacacagc

SEQ ID NO: 3001441 - RNA, 13 nt, Human
cuuguggacacag

SEQ ID NO: 3001442 - RNA, 18 nt, Human
cuuucaauaggaaaaacu

SEQ ID NO: 3001443 - RNA, 20 nt, Human
cuuucaauaggaaaaacuga

SEQ ID NO: 3001444 - RNA, 21 nt, Human
cuuucaauaggaaaaacugau

SEQ ID NO: 3001445 - RNA, 22 nt, Human
cuuucaauaggaaaaacugauu

SEQ ID NO: 3001446 - RNA, 18 nt, Human
cuuagcagggaaacagcu

SEQ ID NO: 3001447 - RNA, 13 nt, Human
cuuauugcccacg

SEQ ID NO: 3001448 - RNA, 12 nt, Human
cuuauugcccac

SEQ ID NO: 3001449 - RNA, 22 nt, Human
cuuaugggcuggguucuaccca

SEQ ID NO: 3001450 - RNA, 23 nt, Human
cuuaugggcuggguucuacccag

SEQ ID NO: 3001451 - RNA, 14 nt, Human
cuuaugggcugggu

SEQ ID NO: 3001452 - RNA, 21 nt, Human
cuuaugggcuggguucuaccc

SEQ ID NO: 3001453 - RNA, 21 nt, Human
cuuauggaacacucugagacu

SEQ ID NO: 3001454 - RNA, 23 nt, Human
cuucaugcugucuacacuaagag

SEQ ID NO: 3001455 - RNA, 21 nt, Human
cuucauggaauucacaaagua

SEQ ID NO: 3001456 - RNA, 16 nt, Human
cuucauccuccucaga

SEQ ID NO: 3001457 - RNA, 23 nt, Human
cuucagagacuccugcaggcagc

SEQ ID NO: 3001458 - RNA, 18 nt, Human
cuucaguggcagcugcuu

SEQ ID NO: 3001459 - RNA, 13 nt, Human
cuucaucccucug

SEQ ID NO: 3001460 - RNA, 15 nt, Human
cuucauccuccucag

SEQ ID NO: 3001461 - RNA, 16 nt, Human
cuucagagacuccugc

SEQ ID NO: 3001462 - RNA, 21 nt, Human
cuucagagacuccugcaggca

SEQ ID NO: 3001463 - RNA, 22 nt, Human
cuucagagacuccugcaggcag

SEQ ID NO: 3001464 - RNA, 11 nt, Human
cuucagacaua

SEQ ID NO: 3001465 - RNA, 17 nt, Human
cuucaccuuugucccca

SEQ ID NO: 3001466 - RNA, 20 nt, Human
cuucaccuuuguccccaccg

SEQ ID NO: 3001467 - RNA, 18 nt, Human
cuuauugcccacgcugga

SEQ ID NO: 3001468 - RNA, 14 nt, Human
cuucaccuuugucc

SEQ ID NO: 3001469 - RNA, 18 nt, Human
cuuccagugaggcucugc

SEQ ID NO: 3001470 - RNA, 17 nt, Human
cuuccagugaggcucug

SEQ ID NO: 3001471 - RNA, 19 nt, Human
cuuccagugaggcucugcc

SEQ ID NO: 3001472 - RNA, 20 nt, Human
cuuccagugaggcucugccc

SEQ ID NO: 3001473 - RNA, 16 nt, Human
cuuccauggacuuugu

SEQ ID NO: 3001474 - RNA, 17 nt, Human
cuuccauggacuuuguu

SEQ ID NO: 3001475 - RNA, 13 nt, Human
cuuacacaauggu

SEQ ID NO: 3001476 - RNA, 17 nt, Human
cuguugggccaggagcc

SEQ ID NO: 3001477 - RNA, 20 nt, Human
cuguugggccaggagccucc

SEQ ID NO: 3001478 - RNA, 16 nt, Human
cuguugggccaggagc

SEQ ID NO: 3001479 - RNA, 19 nt, Human
cuuacccucauguucuuaa

SEQ ID NO: 3001480 - RNA, 18 nt, Human
cuuacccucauguucuua

SEQ ID NO: 3001481 - RNA, 17 nt, Human
cuuacccucauguucuu

SEQ ID NO: 3001482 - RNA, 13 nt, Human
cuuaccucggugc

SEQ ID NO: 3001483 - RNA, 19 nt, Human
cuuaccucggugccuuccu

SEQ ID NO: 3001484 - RNA, 21 nt, Human
cuuaccucggugccuuccucu

SEQ ID NO: 3001485 - RNA, 19 nt, Human
cuuagauguauauauuucc

SEQ ID NO: 3001486 - RNA, 19 nt, Human
cugugucuugcaauggcag

SEQ ID NO: 3001487 - RNA, 16 nt, Human
cugugucuugcaaugg

SEQ ID NO: 3001488 - RNA, 13 nt, Human
cuguucagcucca

SEQ ID NO: 3001489 - RNA, 20 nt, Human
cugugcugagucugaaggcu

SEQ ID NO: 3001490 - RNA, 22 nt, Human
cugugcugagucugaaggcugg

SEQ ID NO: 3001491 - RNA, 11 nt, Human
cugugcugccc

SEQ ID NO: 3001492 - RNA, 19 nt, Human
cugugcugagucugaaggc

SEQ ID NO: 3001493 - RNA, 14 nt, Human
cugugucucccuuc

SEQ ID NO: 3001494 - RNA, 19 nt, Human
cugugucucccuucauccu

SEQ ID NO: 3001495 - RNA, 14 nt, Human
cugugucuugcaau

SEQ ID NO: 3001496 - RNA, 21 nt, Human
cugugucagguggggcagcuu

SEQ ID NO: 3001497 - RNA, 20 nt, Human
cugugucagcauagaaguaa

SEQ ID NO: 3001498 - RNA, 19 nt, Human
cugugucagguggggcagc

SEQ ID NO: 3001499 - RNA, 13 nt, Human
gacucuucccuca

SEQ ID NO: 3001500 - RNA, 21 nt, Human
gacucuuaagaagacugcauu

SEQ ID NO: 3001501 - RNA, 18 nt, Human
gacucuuaagaagacugc

SEQ ID NO: 3001502 - RNA, 14 nt, Human
gacucuuaagaaga

SEQ ID NO: 3001503 - RNA, 19 nt, Human
gacucugucucaaaaaaac

SEQ ID NO: 3001504 - RNA, 20 nt, Human
gacugaauuaugaaacuuuu

SEQ ID NO: 3001505 - RNA, 14 nt, Human
gacugaauuucuuu

SEQ ID NO: 3001506 - RNA, 14 nt, Human
gacugaauuaugaa

SEQ ID NO: 3001507 - RNA, 16 nt, Human
gacugaauggacuuug

SEQ ID NO: 3001508 - RNA, 14 nt, Human
gaccucugcagcaa

SEQ ID NO: 3001509 - RNA, 13 nt, Human
gaccucugccuga

SEQ ID NO: 3001510 - RNA, 20 nt, Human
gaccaucccugaaggccccg

SEQ ID NO: 3001511 - RNA, 11 nt, Human
gaccugaggcc

SEQ ID NO: 3001512 - RNA, 13 nt, Human
gaccugaggcccu

SEQ ID NO: 3001513 - RNA, 14 nt, Human
gaccugaggcccuu

SEQ ID NO: 3001514 - RNA, 16 nt, Human
gacgccaucccagccc

SEQ ID NO: 3001515 - RNA, 16 nt, Human
gaccugaagagugguc

SEQ ID NO: 3001516 - RNA, 16 nt, Human
gacgcuacccgggaag

SEQ ID NO: 3001517 - RNA, 18 nt, Human
gacgcuacccgggaaggg

SEQ ID NO: 3001518 - RNA, 19 nt, Human
gacgcuacccgggaagggg

SEQ ID NO: 3001519 - RNA, 15 nt, Human
gacgcucucuggccu

SEQ ID NO: 3001520 - RNA, 17 nt, Human
gacgccaucccagcccc

SEQ ID NO: 3001521 - RNA, 18 nt, Human
gacgccaucccagcccca

SEQ ID NO: 3001522 - RNA, 15 nt, Human
gacgccaucccagcc

SEQ ID NO: 3001523 - RNA, 17 nt, Human
gacgcucucuggccuuc

SEQ ID NO: 3001524 - RNA, 16 nt, Human
gacgcucucuggccuu

SEQ ID NO: 3001525 - RNA, 12 nt, Human
gacauucccugc

SEQ ID NO: 3001526 - RNA, 21 nt, Human
gacagugagacucugucucag

SEQ ID NO: 3001527 - RNA, 18 nt, Human
gacagcccgggcucugcc

SEQ ID NO: 3001528 - RNA, 19 nt, Human
gacagcccgggcucugccu

SEQ ID NO: 3001529 - RNA, 20 nt, Human
gacagcccgggcucugccuc

SEQ ID NO: 3001530 - RNA, 14 nt, Human
gacagugaaagaaa

SEQ ID NO: 3001531 - RNA, 14 nt, Human
gacauugacuauuu

SEQ ID NO: 3001532 - RNA, 22 nt, Human
gacauugacuauuuuuguuuuu

SEQ ID NO: 3001533 - RNA, 14 nt, Human
gacauugaaaucua

SEQ ID NO: 3001534 - RNA, 15 nt, Human
gacauugcggacagc

SEQ ID NO: 3001535 - RNA, 14 nt, Human
gacauugcggacag

SEQ ID NO: 3001536 - RNA, 21 nt, Human
gacauugaaaucuaggaaaau

SEQ ID NO: 3001537 - RNA, 19 nt, Human
gacauuguuggccaaagcc

SEQ ID NO: 3001538 - RNA, 17 nt, Human
gacauuugcucauggaa

SEQ ID NO: 3001539 - RNA, 16 nt, Human
gacauuugcucaugga

SEQ ID NO: 3001540 - RNA, 12 nt, Human
gaccaucccuga

SEQ ID NO: 3001541 - RNA, 13 nt, Human
gaccaucccugaa

SEQ ID NO: 3001542 - RNA, 18 nt, Human
gaccaucccugaaggccc

SEQ ID NO: 3001543 - RNA, 19 nt, Human
gaccaucccugaaggcccc

SEQ ID NO: 3001544 - RNA, 20 nt, Human
gaccagggauuuccaugaug

SEQ ID NO: 3001545 - RNA, 18 nt, Human
gaccagggauuuccauga

SEQ ID NO: 3001546 - RNA, 16 nt, Human
gacacagcucuucucc

SEQ ID NO: 3001547 - RNA, 14 nt, Human
gacacagcucuucu

SEQ ID NO: 3001548 - RNA, 13 nt, Human
gacacagcucuuc

SEQ ID NO: 3001549 - RNA, 16 nt, Human
gacacacugaagaagc

SEQ ID NO: 3001550 - RNA, 15 nt, Human
gacacacugaagaag

SEQ ID NO: 3001551 - RNA, 14 nt, Human
gacacacugaagaa

SEQ ID NO: 3001552 - RNA, 23 nt, Human
gacacagcucuucuccaggcugu

SEQ ID NO: 3001553 - RNA, 22 nt, Human
gacacagcucuucuccaggcug

SEQ ID NO: 3001554 - RNA, 21 nt, Human
gacagaaagcagaacagugau

SEQ ID NO: 3001555 - RNA, 17 nt, Human
gacagcccgggcucugc

SEQ ID NO: 3001556 - RNA, 16 nt, Human
gaaguucuauuuauuu

SEQ ID NO: 3001557 - RNA, 16 nt, Human
gaaguucuaguguuuu

SEQ ID NO: 3001558 - RNA, 15 nt, Human
gaaguucuaguguuu

SEQ ID NO: 3001559 - RNA, 22 nt, Human
gaaggggagauaaggguaucug

SEQ ID NO: 3001560 - RNA, 19 nt, Human
gaauauugcugauggugca

SEQ ID NO: 3001561 - RNA, 20 nt, Human
gaauauugcugauggugcaa

SEQ ID NO: 3001562 - RNA, 14 nt, Human
gaauauugcugaug

SEQ ID NO: 3001563 - RNA, 15 nt, Human
gaauauugcugaugg

SEQ ID NO: 3001564 - RNA, 20 nt, Human
gaaggcuggguucugauccu

SEQ ID NO: 3001565 - RNA, 22 nt, Human
gaaggcuggguucugauccuag

SEQ ID NO: 3001566 - RNA, 15 nt, Human
gaaggcuggguucug

SEQ ID NO: 3001567 - RNA, 19 nt, Human
gaaggcuggguucugaucc

SEQ ID NO: 3001568 - RNA, 19 nt, Human
gaaggcucgagcaugccug

SEQ ID NO: 3001569 - RNA, 18 nt, Human
gaaggccccgcccaggcu

SEQ ID NO: 3001570 - RNA, 19 nt, Human
gaaggccccgcccaggcuu

SEQ ID NO: 3001571 - RNA, 21 nt, Human
gaaggcucgagcaugccugga

SEQ ID NO: 3001572 - RNA, 17 nt, Human
gaaggccccgcccaggc

SEQ ID NO: 3001573 - RNA, 22 nt, Human
gaagcuccgcuuucuacccagc

SEQ ID NO: 3001574 - RNA, 19 nt, Human
gaagcuccgcuuucuaccc

SEQ ID NO: 3001575 - RNA, 12 nt, Human
gaagcagagugg

SEQ ID NO: 3001576 - RNA, 11 nt, Human
gaagcagagug

SEQ ID NO: 3001577 - RNA, 23 nt, Human
gaagcagaccauuggggcuccca

SEQ ID NO: 3001578 - RNA, 15 nt, Human
gaagcagaggaagga

SEQ ID NO: 3001579 - RNA, 14 nt, Human
gaagcacaugccuc

SEQ ID NO: 3001580 - RNA, 14 nt, Human
gaagcaaaauuuuu

SEQ ID NO: 3001581 - RNA, 23 nt, Human
gaagauuuugaaauuuuuauuaa

SEQ ID NO: 3001582 - RNA, 23 nt, Human
gaagacaaugugaaaagaaaaau

SEQ ID NO: 3001583 - RNA, 22 nt, Human
gaagacaaugacuuacuguaca

SEQ ID NO: 3001584 - RNA, 16 nt, Human
gaagacaaugacuuac

SEQ ID NO: 3001585 - RNA, 23 nt, Human
gaagcaacccaaauguucaucaa

SEQ ID NO: 3001586 - RNA, 17 nt, Human
gaagcacaugccucucu

SEQ ID NO: 3001587 - RNA, 20 nt, Human
gaagcacaugccucucucag

SEQ ID NO: 3001588 - RNA, 15 nt, Human
gaagcacaugccucu

SEQ ID NO: 3001589 - RNA, 12 nt, Human
gaacuggcugca

SEQ ID NO: 3001590 - RNA, 11 nt, Human
gaacuggcugc

SEQ ID NO: 3001591 - RNA, 13 nt, Human
gaacugaaaucau

SEQ ID NO: 3001592 - RNA, 14 nt, Human
gaacugaaaucaua

SEQ ID NO: 3001593 - RNA, 15 nt, Human
gaacuccuggccuca

SEQ ID NO: 3001594 - RNA, 22 nt, Human
gaaccgagggggcugcucccac

SEQ ID NO: 3001595 - RNA, 21 nt, Human
gaaccgagggggcugcuccca

SEQ ID NO: 3001596 - RNA, 20 nt, Human
gaaccgagggggcugcuccc

SEQ ID NO: 3001597 - RNA, 19 nt, Human
gaacccgggaggcagaggu

SEQ ID NO: 3001598 - RNA, 13 nt, Human
gcacaucauuuca

SEQ ID NO: 3001599 - RNA, 14 nt, Human
gcaccgggccacag

SEQ ID NO: 3001600 - RNA, 23 nt, Human
gcacaucagcacgauuucuguuu

SEQ ID NO: 3001601 - RNA, 22 nt, Human
gcacaucagcacgauuucuguu

SEQ ID NO: 3001602 - RNA, 23 nt, Human
gcaccgggccacagagaaaguac

SEQ ID NO: 3001603 - RNA, 17 nt, Human
gcacuccccugcugggu

SEQ ID NO: 3001604 - RNA, 16 nt, Human
gcacucagaagacacu

SEQ ID NO: 3001605 - RNA, 13 nt, Human
gcacucagaagac

SEQ ID NO: 3001606 - RNA, 22 nt, Human
gcacuccccugcuggguguggc

SEQ ID NO: 3001607 - RNA, 16 nt, Human
gcacuccccugcuggg

SEQ ID NO: 3001608 - RNA, 22 nt, Human
gcacaagcugcacccucaggca

SEQ ID NO: 3001609 - RNA, 14 nt, Human
gcacaccgggcacu

SEQ ID NO: 3001610 - RNA, 14 nt, Human
gcacacauuuuuua

SEQ ID NO: 3001611 - RNA, 20 nt, Human
gcacaguuuucugagaaaga

SEQ ID NO: 3001612 - RNA, 22 nt, Human
gcacaguuuucugagaaagacu

SEQ ID NO: 3001613 - RNA, 23 nt, Human
gcacaguuuucugagaaagacua

SEQ ID NO: 3001614 - RNA, 19 nt, Human
gcaagugagagcugggugu

SEQ ID NO: 3001615 - RNA, 22 nt, Human
gcaauagucaaauugugugaaa

SEQ ID NO: 3001616 - RNA, 20 nt, Human
gcaaguauuagaauaccaca

SEQ ID NO: 3001617 - RNA, 20 nt, Human
gauguaugcacacacauaua

SEQ ID NO: 3001618 - RNA, 12 nt, Human
gauuauuggaaa

SEQ ID NO: 3001619 - RNA, 18 nt, Human
gauucuuccucccucccu

SEQ ID NO: 3001620 - RNA, 17 nt, Human
gauucuuccucccuccc

SEQ ID NO: 3001621 - RNA, 15 nt, Human
gauuuaccacuugug

SEQ ID NO: 3001622 - RNA, 16 nt, Human
gauuuaccacuugugu

SEQ ID NO: 3001623 - RNA, 17 nt, Human
gauucuccugccucagc

SEQ ID NO: 3001624 - RNA, 15 nt, Human
gauucuccugccuca

SEQ ID NO: 3001625 - RNA, 18 nt, Human
gauucuccugccucagcc

SEQ ID NO: 3001626 - RNA, 18 nt, Human
gauguagaggagaaacug

SEQ ID NO: 3001627 - RNA, 17 nt, Human
gauguagaggagaaacu

SEQ ID NO: 3001628 - RNA, 22 nt, Human
gaugguucccuugaugaagaag

SEQ ID NO: 3001629 - RNA, 16 nt, Human
gaugagugagcaugcc

SEQ ID NO: 3001630 - RNA, 21 nt, Human
gaugaucuaggaagacuuugg

SEQ ID NO: 3001631 - RNA, 16 nt, Human
gaugaucuuuaaaaua

SEQ ID NO: 3001632 - RNA, 15 nt, Human
gaugaucuaggaaga

SEQ ID NO: 3001633 - RNA, 11 nt, Human
gaguggaguua

SEQ ID NO: 3001634 - RNA, 20 nt, Human
gagugacagaggcagcccca

SEQ ID NO: 3001635 - RNA, 17 nt, Human
gaguggaguuacugaac

SEQ ID NO: 3001636 - RNA, 22 nt, Human
gaguugauagcacagacccugc

SEQ ID NO: 3001637 - RNA, 15 nt, Human
gaguugauucagcuc

SEQ ID NO: 3001638 - RNA, 16 nt, Human
gaguugauucagcucu

SEQ ID NO: 3001639 - RNA, 17 nt, Human
gaguugauucagcucug

SEQ ID NO: 3001640 - RNA, 17 nt, Human
gagucaccaagcccagu

SEQ ID NO: 3001641 - RNA, 16 nt, Human
gagucaccaagcccag

SEQ ID NO: 3001642 - RNA, 15 nt, Human
gagucaccaagccca

SEQ ID NO: 3001643 - RNA, 22 nt, Human
gagucagaaguuucugccgcag

SEQ ID NO: 3001644 - RNA, 18 nt, Human
gagugacagaggcagccc

SEQ ID NO: 3001645 - RNA, 12 nt, Human
gagucccaccuu

SEQ ID NO: 3001646 - RNA, 15 nt, Human
gaggucgaggcagga

SEQ ID NO: 3001647 - RNA, 23 nt, Human
gaggugaccccagguuucuaugu

SEQ ID NO: 3001648 - RNA, 22 nt, Human
gaguuguuacauuuuuaagugc

SEQ ID NO: 3001649 - RNA, 18 nt, Human
gaguugauucagcucugc

SEQ ID NO: 3001650 - RNA, 23 nt, Human
gaggcuccacuuggucugugaga

SEQ ID NO: 3001651 - RNA, 18 nt, Human
gaggcugaggcaggagac

SEQ ID NO: 3001652 - RNA, 16 nt, Human
gaggcugaggcaggag

SEQ ID NO: 3001653 - RNA, 18 nt, Human
gaggcuccacuuggucug

SEQ ID NO: 3001654 - RNA, 19 nt, Human
gaggcuccacuuggucugu

SEQ ID NO: 3001655 - RNA, 13 nt, Human
gaggccagagaca

SEQ ID NO: 3001656 - RNA, 14 nt, Human
gaggccagagacac

SEQ ID NO: 3001657 - RNA, 19 nt, Human
gaggccagagacacaagcc

SEQ ID NO: 3001658 - RNA, 22 nt, Human
gaggcuagugugguguuuccug

SEQ ID NO: 3001659 - RNA, 15 nt, Human
gaggacgcucucugg

SEQ ID NO: 3001660 - RNA, 14 nt, Human
gaggcagggucuca

SEQ ID NO: 3001661 - RNA, 17 nt, Human
gaggccaaggugggagg

SEQ ID NO: 3001662 - RNA, 22 nt, Human
gaggccaaggugggaggauugc

SEQ ID NO: 3001663 - RNA, 22 nt, Human
gaggcagggucucacucugucg

SEQ ID NO: 3001664 - RNA, 15 nt, Human
gaggcagggucucac

SEQ ID NO: 3001665 - RNA, 13 nt, Human
gagccuugaacuu

SEQ ID NO: 3001666 - RNA, 23 nt, Human
gagccuuccaggggugggacacc

SEQ ID NO: 3001667 - RNA, 20 nt, Human
gagccuuccaggggugggac

SEQ ID NO: 3001668 - RNA, 16 nt, Human
gcuguacauacuuuuu

SEQ ID NO: 3001669 - RNA, 15 nt, Human
gcuguacauacuuuu

SEQ ID NO: 3001670 - RNA, 14 nt, Human
gcuguacauacuuu

SEQ ID NO: 3001671 - RNA, 13 nt, Human
gcuguacauacuu

SEQ ID NO: 3001672 - RNA, 17 nt, Human
gcuguacauacuuuuug

SEQ ID NO: 3001673 - RNA, 19 nt, Human
gcuguaucccaugagccuc

SEQ ID NO: 3001674 - RNA, 23 nt, Human
gcuguaucccaugagccucagca

SEQ ID NO: 3001675 - RNA, 20 nt, Human
gcuguaucccaugagccuca

SEQ ID NO: 3001676 - RNA, 15 nt, Human
gcuggguucuaccca

SEQ ID NO: 3001677 - RNA, 15 nt, Human
gcuggguucugaucc

SEQ ID NO: 3001678 - RNA, 21 nt, Human
gcuggguuggaggguguccca

SEQ ID NO: 3001679 - RNA, 14 nt, Human
gcuggguuggaggg

SEQ ID NO: 3001680 - RNA, 19 nt, Human
gcugugcugcccugcccac

SEQ ID NO: 3001681 - RNA, 22 nt, Human
gcugugcugcccugcccaccug

SEQ ID NO: 3001682 - RNA, 22 nt, Human
gcuguuggcugggggccucagu

SEQ ID NO: 3001683 - RNA, 21 nt, Human
gcuguuggcugggggccucag

SEQ ID NO: 3001684 - RNA, 12 nt, Human
gcugugcugccc

SEQ ID NO: 3001685 - RNA, 21 nt, Human
gcugugcucuggacaggcaug

SEQ ID NO: 3001686 - RNA, 13 nt, Human
gcugugcugcccu

SEQ ID NO: 3001687 - RNA, 18 nt, Human
gcugugcucuggacaggc

SEQ ID NO: 3001688 - RNA, 22 nt, Human
gcuucaaggauccugagccaga

SEQ ID NO: 3001689 - RNA, 19 nt, Human
gcuucacggaagagccuug

SEQ ID NO: 3001690 - RNA, 20 nt, Human
gcuucacggaagagccuugc

SEQ ID NO: 3001691 - RNA, 16 nt, Human
gcuuguacauaaugcg

SEQ ID NO: 3001692 - RNA, 14 nt, Human
gcuuguacauaaug

SEQ ID NO: 3001693 - RNA, 16 nt, Human
gcugcugauuuaaaca

SEQ ID NO: 3001694 - RNA, 13 nt, Human
gcugcugccccug

SEQ ID NO: 3001695 - RNA, 23 nt, Human
gcugcugccccugcacagcaggc

SEQ ID NO: 3001696 - RNA, 15 nt, Human
gcugcugccccugca

SEQ ID NO: 3001697 - RNA, 14 nt, Human
gcugcugccccugc

SEQ ID NO: 3001698 - RNA, 22 nt, Human
gcugcuccuaggacccgucucc

SEQ ID NO: 3001699 - RNA, 19 nt, Human
gcugccugggaucccucau

SEQ ID NO: 3001700 - RNA, 16 nt, Human
gcugccugggaucccu

SEQ ID NO: 3001701 - RNA, 18 nt, Human
gcugccugggaucccuca

SEQ ID NO: 3001702 - RNA, 22 nt, Human
gcugccuccccuccucugcuug

SEQ ID NO: 3001703 - RNA, 21 nt, Human
gcugccuccccuccucugcuu

SEQ ID NO: 3001704 - RNA, 20 nt, Human
gcugccuccccuccucugcu

SEQ ID NO: 3001705 - RNA, 17 nt, Human
gcugccuccccuccucu

SEQ ID NO: 3001706 - RNA, 16 nt, Human
gcugccuccccuccuc

SEQ ID NO: 3001707 - RNA, 14 nt, Human
gcugccuccccucc

SEQ ID NO: 3001708 - RNA, 13 nt, Human
gcugccugggauc

SEQ ID NO: 3001709 - RNA, 19 nt, Human
gcugccagccgagauagcc

SEQ ID NO: 3001710 - RNA, 21 nt, Human
gcugccagccgagauagccaa

SEQ ID NO: 3001711 - RNA, 23 nt, Human
gcugccauccagguucagcuugu

SEQ ID NO: 3001712 - RNA, 21 nt, Human
gcugccauccagguucagcuu

SEQ ID NO: 3001713 - RNA, 14 nt, Human
gcugcaccggcugg

SEQ ID NO: 3001714 - RNA, 16 nt, Human
gcugcaccggcuggcc

SEQ ID NO: 3001715 - RNA, 17 nt, Human
gcugcaccggcuggccu

SEQ ID NO: 3001716 - RNA, 18 nt, Human
gcugcaccggcuggccug

SEQ ID NO: 3001717 - RNA, 19 nt, Human
gcugcaccggcuggccugg

SEQ ID NO: 3001718 - RNA, 22 nt, Human
gcugcaccggcuggccuggccc

SEQ ID NO: 3001719 - RNA, 18 nt, Human
gcuggccuggccccucag

SEQ ID NO: 3001720 - RNA, 19 nt, Human
gcuggccuggccccucagg

SEQ ID NO: 3001721 - RNA, 16 nt, Human
gcugggauuacaggug

SEQ ID NO: 3001722 - RNA, 16 nt, Human
gcuggccuggccccuc

SEQ ID NO: 3001723 - RNA, 17 nt, Human
gcuggccuggccccuca

SEQ ID NO: 3001724 - RNA, 15 nt, Human
gcuggagugcaguga

SEQ ID NO: 3001725 - RNA, 14 nt, Human
gcuggagugcagug

SEQ ID NO: 3001726 - RNA, 14 nt, Human
gcugggcagaggaa

SEQ ID NO: 3001727 - RNA, 15 nt, Human
gcugggcagaggaaa

SEQ ID NO: 3001728 - RNA, 13 nt, Human
gcugggcagagga

SEQ ID NO: 3001729 - RNA, 18 nt, Human
gcugggauuacaggugug

SEQ ID NO: 3001730 - RNA, 19 nt, Human
gcugggauuacagguguga

SEQ ID NO: 3001731 - RNA, 19 nt, Human
gcugggcagaggaaagcaa

SEQ ID NO: 3001732 - RNA, 16 nt, Human
gcugggcagaggaaag

SEQ ID NO: 3001733 - RNA, 17 nt, Human
gcugggcagaggaaagc

SEQ ID NO: 3001734 - RNA, 12 nt, Human
gcugggcucccu

SEQ ID NO: 3001735 - RNA, 16 nt, Human
gcugggcucccuuccc

SEQ ID NO: 3001736 - RNA, 17 nt, Human
gcugggcucccuuccca

SEQ ID NO: 3001737 - RNA, 20 nt, Human
gcugggcucccuucccaccu

SEQ ID NO: 3001738 - RNA, 15 nt, Human
gcuggguguggcgca

SEQ ID NO: 3001739 - RNA, 14 nt, Human
gcuggagcucugcc

SEQ ID NO: 3001740 - RNA, 17 nt, Human
gcuggagcucugcccau

SEQ ID NO: 3001741 - RNA, 12 nt, Human
gcuggagugcag

SEQ ID NO: 3001742 - RNA, 21 nt, Human
gcuaguaauuggaaaggcagc

SEQ ID NO: 3001743 - RNA, 16 nt, Human
gcuaguaucaaaagaa

SEQ ID NO: 3001744 - RNA, 15 nt, Human
gcuaggccuggccag

SEQ ID NO: 3001745 - RNA, 14 nt, Human
gcuaggccuggcca

SEQ ID NO: 3001746 - RNA, 22 nt, Human
gcuaggaccccuccaugugggc

SEQ ID NO: 3001747 - RNA, 19 nt, Human
gcuaggaacacuccuucac

SEQ ID NO: 3001748 - RNA, 21 nt, Human
gcuaggaacacuccuucacag

SEQ ID NO: 3001749 - RNA, 18 nt, Human
gcuaggaacacuccuuca

SEQ ID NO: 3001750 - RNA, 16 nt, Human
gcuaggaacacuccuu

SEQ ID NO: 3001751 - RNA, 19 nt, Human
gccuguucagcuccagcuc

SEQ ID NO: 3001752 - RNA, 20 nt, Human
gccuguucagcuccagcuca

SEQ ID NO: 3001753 - RNA, 22 nt, Human
gcucagagagggugggaguggg

SEQ ID NO: 3001754 - RNA, 18 nt, Human
gcucagagagggugggag

SEQ ID NO: 3001755 - RNA, 20 nt, Human
gcucagagagggugggagug

SEQ ID NO: 3001756 - RNA, 15 nt, Human
gcucagagagggugg

SEQ ID NO: 3001757 - RNA, 13 nt, Human
gcucagggccugg

SEQ ID NO: 3001758 - RNA, 16 nt, Human
gcucagggccuggcuc

SEQ ID NO: 3001759 - RNA, 12 nt, Human
gcucagggccug

SEQ ID NO: 3001760 - RNA, 21 nt, Human
gcucagguggggucacucugg

SEQ ID NO: 3001761 - RNA, 22 nt, Human
gcucagguggggucacucuggc

SEQ ID NO: 3001762 - RNA, 15 nt, Human
gcuccccucggagaa

SEQ ID NO: 3001763 - RNA, 20 nt, Human
gcucccaggcauuccccagg

SEQ ID NO: 3001764 - RNA, 21 nt, Human
gcucccaggcauuccccagga

SEQ ID NO: 3001765 - RNA, 14 nt, Human
gcuccccagcccca

SEQ ID NO: 3001766 - RNA, 22 nt, Human
gcucccaggcauuccccaggag

SEQ ID NO: 3001767 - RNA, 17 nt, Human
gcucccaggcauucccc

SEQ ID NO: 3001768 - RNA, 13 nt, Human
gcucucaggccag

SEQ ID NO: 3001769 - RNA, 14 nt, Human
gcucucaggccagc

SEQ ID NO: 3001770 - RNA, 15 nt, Human
gcucucaggccagcu

SEQ ID NO: 3001771 - RNA, 16 nt, Human
gcucucaggccagcug

SEQ ID NO: 3001772 - RNA, 16 nt, Human
gcucuguccugggagu

SEQ ID NO: 3001773 - RNA, 14 nt, Human
gcucuguccuggga

SEQ ID NO: 3001774 - RNA, 15 nt, Human
gcucuguccugggag

SEQ ID NO: 3001775 - RNA, 15 nt, Human
gcucuuccaggcugg

SEQ ID NO: 3001776 - RNA, 16 nt, Human
gcucuuccaggcuggg

SEQ ID NO: 3001777 - RNA, 12 nt, Human
gcucuuccaggc

SEQ ID NO: 3001778 - RNA, 22 nt, Human
gcugaauacagaggcaacugca

SEQ ID NO: 3001779 - RNA, 17 nt, Human
gcugaaugguuuucaaa

SEQ ID NO: 3001780 - RNA, 12 nt, Human
gcugaaggcucg

SEQ ID NO: 3001781 - RNA, 20 nt, Human
gcugaaggcucgagcaugcc

SEQ ID NO: 3001782 - RNA, 16 nt, Human
gcugacagacacaggc

SEQ ID NO: 3001783 - RNA, 15 nt, Human
gcugacagacacagg

SEQ ID NO: 3001784 - RNA, 14 nt, Human
gcugacagacacag

SEQ ID NO: 3001785 - RNA, 23 nt, Human
gccagaagucaaggcuuagaccc

SEQ ID NO: 3001786 - RNA, 22 nt, Human
gccagacaucaacagauaaaua

SEQ ID NO: 3001787 - RNA, 16 nt, Human
gccagaagucaaggcu

SEQ ID NO: 3001788 - RNA, 20 nt, Human
gccagaagucaaggcuuaga

SEQ ID NO: 3001789 - RNA, 22 nt, Human
gccagaagucaaggcuuagacc

SEQ ID NO: 3001790 - RNA, 19 nt, Human
gccagauuuuccugaaaac

SEQ ID NO: 3001791 - RNA, 17 nt, Human
gccagcaggcucucagg

SEQ ID NO: 3001792 - RNA, 18 nt, Human
gccagcaggcucucaggc

SEQ ID NO: 3001793 - RNA, 19 nt, Human
gccagcaggcucucaggcc

SEQ ID NO: 3001794 - RNA, 20 nt, Human
gccagcaggcucucaggcca

SEQ ID NO: 3001795 - RNA, 21 nt, Human
gccagcaggcucucaggccag

SEQ ID NO: 3001796 - RNA, 23 nt, Human
gccagcaggcucucaggccagcu

SEQ ID NO: 3001797 - RNA, 21 nt, Human
gccagcaguucagagcugccc

SEQ ID NO: 3001798 - RNA, 23 nt, Human
gccagcaguucagagcugcccuc

SEQ ID NO: 3001799 - RNA, 22 nt, Human
gccagcaguucagagcugcccu

SEQ ID NO: 3001800 - RNA, 13 nt, Human
gccagcaggcucu

SEQ ID NO: 3001801 - RNA, 16 nt, Human
gccagcaggcucucag

SEQ ID NO: 3001802 - RNA, 12 nt, Human
gccaggccagag

SEQ ID NO: 3001803 - RNA, 23 nt, Human
gccaggccacaagacccuugugg

SEQ ID NO: 3001804 - RNA, 19 nt, Human
gccaggcccucugcccacu

SEQ ID NO: 3001805 - RNA, 20 nt, Human
gccaggcccucugcccacuc

SEQ ID NO: 3001806 - RNA, 21 nt, Human
gccaggcccucugcccacucc

SEQ ID NO: 3001807 - RNA, 21 nt, Human
gccaggcccuugucggcccca

SEQ ID NO: 3001808 - RNA, 16 nt, Human
gccaggcccucugccc

SEQ ID NO: 3001809 - RNA, 17 nt, Human
gccaggcccucugccca

SEQ ID NO: 3001810 - RNA, 15 nt, Human
gccaggcccucugcc

SEQ ID NO: 3001811 - RNA, 13 nt, Human
gccaggccagagg

SEQ ID NO: 3001812 - RNA, 24 nt, Human
gccauguuggccaggcuggucuca

SEQ ID NO: 3001813 - RNA, 22 nt, Human
gccauguuggccaggcuggucu

SEQ ID NO: 3001814 - RNA, 20 nt, Human
gccauguuggccaggcuggu

SEQ ID NO: 3001815 - RNA, 19 nt, Human
gccauguuggccaggcugg

SEQ ID NO: 3001816 - RNA, 13 nt, Human
gcccacgccccca

SEQ ID NO: 3001817 - RNA, 14 nt, Human
gcccacgcccccac

SEQ ID NO: 3001818 - RNA, 18 nt, Human
gcccaccuuggcucaagu

SEQ ID NO: 3001819 - RNA, 17 nt, Human
gcccaccuuggcucaag

SEQ ID NO: 3001820 - RNA, 17 nt, Human
gcccacgcuggagugca

SEQ ID NO: 3001821 - RNA, 16 nt, Human
gcccacgcuggagugc

SEQ ID NO: 3001822 - RNA, 15 nt, Human
gcccacgcuggagug

SEQ ID NO: 3001823 - RNA, 18 nt, Human
gccauguuggccaggcug

SEQ ID NO: 3001824 - RNA, 17 nt, Human
gccauguuggccaggcu

SEQ ID NO: 3001825 - RNA, 16 nt, Human
gccauguuggccaggc

SEQ ID NO: 3001826 - RNA, 15 nt, Human
gccauguuggccagg

SEQ ID NO: 3001827 - RNA, 14 nt, Human
gccauguuggccag

SEQ ID NO: 3001828 - RNA, 16 nt, Human
gccaugucagacacag

SEQ ID NO: 3001829 - RNA, 14 nt, Human
gccaugucagacac

SEQ ID NO: 3001830 - RNA, 15 nt, Human
gccaugucagacaca

SEQ ID NO: 3001831 - RNA, 20 nt, Human
gccauauucuguuggccagu

SEQ ID NO: 3001832 - RNA, 19 nt, Human
gccauauucuguuggccag

SEQ ID NO: 3001833 - RNA, 16 nt, Human
gccauaugaaaaggcu

SEQ ID NO: 3001834 - RNA, 14 nt, Human
gccacuuuauuucu

SEQ ID NO: 3001835 - RNA, 20 nt, Human
gccagaaaccuuccugcuga

SEQ ID NO: 3001836 - RNA, 18 nt, Human
gccacugugaagagaacc

SEQ ID NO: 3001837 - RNA, 19 nt, Human
gccacugugaagagaacca

SEQ ID NO: 3001838 - RNA, 19 nt, Human
gccacugugcuccagccug

SEQ ID NO: 3001839 - RNA, 23 nt, Human
gccacugcaccgggccacagaga

SEQ ID NO: 3001840 - RNA, 19 nt, Human
gccacccuggggagaaagu

SEQ ID NO: 3001841 - RNA, 13 nt, Human
gccacccugggga

SEQ ID NO: 3001842 - RNA, 21 nt, Human
gccacugcacuauagccuagg

SEQ ID NO: 3001843 - RNA, 22 nt, Human
gccacugcaccgggccacagag

SEQ ID NO: 3001844 - RNA, 22 nt, Human
gccaccaacauacucccaucug

SEQ ID NO: 3001845 - RNA, 20 nt, Human
gccaccaacauacucccauc

SEQ ID NO: 3001846 - RNA, 21 nt, Human
gccaccaacauacucccaucu

SEQ ID NO: 3001847 - RNA, 19 nt, Human
gccaccaacauacucccau

SEQ ID NO: 3001848 - RNA, 16 nt, Human
gccacauuccugaugc

SEQ ID NO: 3001849 - RNA, 20 nt, Human
gccacauuccugaugcuucu

SEQ ID NO: 3001850 - RNA, 15 nt, Human
gccuaccaauauuua

SEQ ID NO: 3001851 - RNA, 12 nt, Human
gccucuucucua

SEQ ID NO: 3001852 - RNA, 23 nt, Human
gccucuucucuacucuagggaaa

SEQ ID NO: 3001853 - RNA, 19 nt, Human
gccugcccaggccccugcc

SEQ ID NO: 3001854 - RNA, 18 nt, Human
gccugcccaggccccugc

SEQ ID NO: 3001855 - RNA, 17 nt, Human
gccugcccaggccccug

SEQ ID NO: 3001856 - RNA, 12 nt, Human
gccucugggacu

SEQ ID NO: 3001857 - RNA, 18 nt, Human
gccuccugcccuuaccug

SEQ ID NO: 3001858 - RNA, 13 nt, Human
gccuccuccagcc

SEQ ID NO: 3001859 - RNA, 16 nt, Human
gccugccucuucucua

SEQ ID NO: 3001860 - RNA, 18 nt, Human
gccugggaucccucaucc

SEQ ID NO: 3001861 - RNA, 22 nt, Human
gccugggaggucaaggcugcag

SEQ ID NO: 3001862 - RNA, 14 nt, Human
gccugggaucccuc

SEQ ID NO: 3001863 - RNA, 21 nt, Human
gccugggaggucaaggcugca

SEQ ID NO: 3001864 - RNA, 20 nt, Human
gccuggccccucaggguccc

SEQ ID NO: 3001865 - RNA, 22 nt, Human
gccuggccccucagggucccug

SEQ ID NO: 3001866 - RNA, 10 nt, Human
gccuggccug

SEQ ID NO: 3001867 - RNA, 15 nt, Human
gccuggccccucagg

SEQ ID NO: 3001868 - RNA, 16 nt, Human
gccuggccccucaggg

SEQ ID NO: 3001869 - RNA, 17 nt, Human
gccuggccccucagggu

SEQ ID NO: 3001870 - RNA, 19 nt, Human
gccccaaaacucuccucug

SEQ ID NO: 3001871 - RNA, 16 nt, Human
gcccccaggugccagu

SEQ ID NO: 3001872 - RNA, 18 nt, Human
gccccaaaacucuccucu

SEQ ID NO: 3001873 - RNA, 14 nt, Human
gccccugcccggcu

SEQ ID NO: 3001874 - RNA, 13 nt, Human
gccccugcccggc

SEQ ID NO: 3001875 - RNA, 16 nt, Human
gccccuggaugcagcc

SEQ ID NO: 3001876 - RNA, 18 nt, Human
gccccuggaugcagccuc

SEQ ID NO: 3001877 - RNA, 22 nt, Human
gccccuggaugcagccucacag

SEQ ID NO: 3001878 - RNA, 22 nt, Human
gcccuaaaguguauuuuuuuac

SEQ ID NO: 3001879 - RNA, 14 nt, Human
gcccacucccugca

SEQ ID NO: 3001880 - RNA, 15 nt, Human
gcccacucccugcaa

SEQ ID NO: 3001881 - RNA, 19 nt, Human
gcccacucccugcaaccug

SEQ ID NO: 3001882 - RNA, 13 nt, Human
gcccacucccugc

SEQ ID NO: 3001883 - RNA, 13 nt, Human
gcccuguuaaaag

SEQ ID NO: 3001884 - RNA, 14 nt, Human
gcccuguuaaaaga

SEQ ID NO: 3001885 - RNA, 17 nt, Human
gcccuguuaaaagauga

SEQ ID NO: 3001886 - RNA, 21 nt, Human
gcccugugggcccccaaaugg

SEQ ID NO: 3001887 - RNA, 14 nt, Human
gcccugccuccuuu

SEQ ID NO: 3001888 - RNA, 16 nt, Human
gcccugccuccuuugu

SEQ ID NO: 3001889 - RNA, 22 nt, Human
gcccugccuccuuugugaggaa

SEQ ID NO: 3001890 - RNA, 15 nt, Human
gccgccaugcuccug

SEQ ID NO: 3001891 - RNA, 16 nt, Human
gcccuuaccugccagg

SEQ ID NO: 3001892 - RNA, 20 nt, Human
gcccuuaccugccaggaagc

SEQ ID NO: 3001893 - RNA, 16 nt, Human
gccgccaugcuccugg

SEQ ID NO: 3001894 - RNA, 13 nt, Human
gccgcccaaggcc

SEQ ID NO: 3001895 - RNA, 22 nt, Human
ggcccaggaguuuggccagaag

SEQ ID NO: 3001896 - RNA, 23 nt, Human
ggcccaggaguuuggccagaagu

SEQ ID NO: 3001897 - RNA, 15 nt, Human
ggcccagggcaucug

SEQ ID NO: 3001898 - RNA, 12 nt, Human
ggcccagggcau

SEQ ID NO: 3001899 - RNA, 21 nt, Human
ggcccaggaguuuggccagaa

SEQ ID NO: 3001900 - RNA, 15 nt, Human
ggcccuccagagccc

SEQ ID NO: 3001901 - RNA, 14 nt, Human
ggcccuccagagcc

SEQ ID NO: 3001902 - RNA, 21 nt, Human
ggcccuccagagccccacagc

SEQ ID NO: 3001903 - RNA, 17 nt, Human
ggcccuccagagcccca

SEQ ID NO: 3001904 - RNA, 23 nt, Human
ggcccuccagagccccacagccc

SEQ ID NO: 3001905 - RNA, 16 nt, Human
ggcccagggcaucugg

SEQ ID NO: 3001906 - RNA, 15 nt, Human
ggccccaccagugcc

SEQ ID NO: 3001907 - RNA, 16 nt, Human
ggccccaccagugccu

SEQ ID NO: 3001908 - RNA, 13 nt, Human
ggccucccaacuc

SEQ ID NO: 3001909 - RNA, 14 nt, Human
ggccucccaacuca

SEQ ID NO: 3001910 - RNA, 16 nt, Human
ggccuccauccugagg

SEQ ID NO: 3001911 - RNA, 20 nt, Human
ggccagaugcaccagcccuu

SEQ ID NO: 3001912 - RNA, 19 nt, Human
ggccagaugcaccagcccu

SEQ ID NO: 3001913 - RNA, 17 nt, Human
ggccagaugcaccagcc

SEQ ID NO: 3001914 - RNA, 23 nt, Human
ggccagagggagugacagaggca

SEQ ID NO: 3001915 - RNA, 22 nt, Human
ggccagagggagugacagaggc

SEQ ID NO: 3001916 - RNA, 13 nt, Human
ggccaagguggga

SEQ ID NO: 3001917 - RNA, 12 nt, Human
ggcauuguggga

SEQ ID NO: 3001918 - RNA, 21 nt, Human
ggccaaacucaccugccccuc

SEQ ID NO: 3001919 - RNA, 12 nt, Human
ggccaaaggaag

SEQ ID NO: 3001920 - RNA, 15 nt, Human
ggccaaagccaaagc

SEQ ID NO: 3001921 - RNA, 21 nt, Human
ggccaaaggaagcacaugccu

SEQ ID NO: 3001922 - RNA, 12 nt, Human
ggauuuucagcc

SEQ ID NO: 3001923 - RNA, 21 nt, Human
ggauuuugauccaagcugguc

SEQ ID NO: 3001924 - RNA, 23 nt, Human
ggauuaaacuuaaucuaaaugga

SEQ ID NO: 3001925 - RNA, 18 nt, Human
ggcaaacagggccucugc

SEQ ID NO: 3001926 - RNA, 17 nt, Human
ggcaaacagggccucug

SEQ ID NO: 3001927 - RNA, 14 nt, Human
ggcaaacagggccu

SEQ ID NO: 3001928 - RNA, 17 nt, Human
ggcaacagagcaagacu

SEQ ID NO: 3001929 - RNA, 16 nt, Human
ggcaacagagcaagac

SEQ ID NO: 3001930 - RNA, 16 nt, Human
ggcaaauguuuauuua

SEQ ID NO: 3001931 - RNA, 22 nt, Human
ggauguugaaaaaguucugcag

SEQ ID NO: 3001932 - RNA, 23 nt, Human
ggaugguucccuugaugaagaag

SEQ ID NO: 3001933 - RNA, 22 nt, Human
ggaugguucccuugaugaagaa

SEQ ID NO: 3001934 - RNA, 22 nt, Human
ggaugagaaagguugaagcacc

SEQ ID NO: 3001935 - RNA, 12 nt, Human
ggaugagaaagg

SEQ ID NO: 3001936 - RNA, 21 nt, Human
ggaugaauuccaaauucugcu

SEQ ID NO: 3001937 - RNA, 20 nt, Human
ggcaacagagcaagacucca

SEQ ID NO: 3001938 - RNA, 14 nt, Human
ggcagccaggccac

SEQ ID NO: 3001939 - RNA, 10 nt, Human
ggcagagcag

SEQ ID NO: 3001940 - RNA, 15 nt, Human
ggcagccaggccaca

SEQ ID NO: 3001941 - RNA, 17 nt, Human
ggcagccaggccacaag

SEQ ID NO: 3001942 - RNA, 12 nt, Human
ggcagaaggaag

SEQ ID NO: 3001943 - RNA, 20 nt, Human
ggacuacaggugugagucac

SEQ ID NO: 3001944 - RNA, 22 nt, Human
ggacucaaugcacugacauugu

SEQ ID NO: 3001945 - RNA, 18 nt, Human
ggacucaaugcacugaca

SEQ ID NO: 3001946 - RNA, 22 nt, Human
ggagaaccaaaaagaggcuaug

SEQ ID NO: 3001947 - RNA, 17 nt, Human
ggacuuggaagcuccgc

SEQ ID NO: 3001948 - RNA, 15 nt, Human
ggacuuggaagcucc

SEQ ID NO: 3001949 - RNA, 19 nt, Human
ggagaaaauggacguguua

SEQ ID NO: 3001950 - RNA, 9 nt, Human
ggacuuugu

SEQ ID NO: 3001951 - RNA, 22 nt, Human
ggagagccuuccagggguggga

SEQ ID NO: 3001952 - RNA, 17 nt, Human
ggagagccuuccagggg

SEQ ID NO: 3001953 - RNA, 18 nt, Human
ggagagccuuccaggggu

SEQ ID NO: 3001954 - RNA, 13 nt, Human
ggagagccuucca

SEQ ID NO: 3001955 - RNA, 16 nt, Human
ggagagccuuccaggg

SEQ ID NO: 3001956 - RNA, 15 nt, Human
ggagagcuagcagca

SEQ ID NO: 3001957 - RNA, 15 nt, Human
ggacccugaggccca

SEQ ID NO: 3001958 - RNA, 18 nt, Human
ggacccugaggcccagag

SEQ ID NO: 3001959 - RNA, 14 nt, Human
ggacccugaggccc

SEQ ID NO: 3001960 - RNA, 19 nt, Human
ggacccugaggcccagagg

SEQ ID NO: 3001961 - RNA, 19 nt, Human
gcuuguacauaaugcgugc

SEQ ID NO: 3001962 - RNA, 22 nt, Human
gcuuguaccacuuuugcaaaua

SEQ ID NO: 3001963 - RNA, 19 nt, Human
gcuuguaccacuuuugcaa

SEQ ID NO: 3001964 - RNA, 16 nt, Human
ggagcugaguggggga

SEQ ID NO: 3001965 - RNA, 22 nt, Human
ggagcugccuguucagcuccag

SEQ ID NO: 3001966 - RNA, 12 nt, Human
ggaggccagccu

SEQ ID NO: 3001967 - RNA, 18 nt, Human
ggaggccaaggugggagg

SEQ ID NO: 3001968 - RNA, 13 nt, Human
ggaggccagccuu

SEQ ID NO: 3001969 - RNA, 21 nt, Human
ggaggcaugugaugagaggaa

SEQ ID NO: 3001970 - RNA, 12 nt, Human
ggaggaagagaa

SEQ ID NO: 3001971 - RNA, 20 nt, Human
ggaggaaccgagggggcugc

SEQ ID NO: 3001972 - RNA, 19 nt, Human
ggaggcugagaugggagaa

SEQ ID NO: 3001973 - RNA, 15 nt, Human
ggaggcugagauggg

SEQ ID NO: 3001974 - RNA, 15 nt, Human
ggaggucgaggcagg

SEQ ID NO: 3001975 - RNA, 16 nt, Human
ggaggucgaggcagga

SEQ ID NO: 3001976 - RNA, 14 nt, Human
ggaggucgaggcag

SEQ ID NO: 3001977 - RNA, 12 nt, Human
ggaggcugaggc

SEQ ID NO: 3001978 - RNA, 18 nt, Human
ggaggucgaggcaggagg

SEQ ID NO: 3001979 - RNA, 13 nt, Human
ggagcagccacau

SEQ ID NO: 3001980 - RNA, 21 nt, Human
ggagcagccacauuccugaug

SEQ ID NO: 3001981 - RNA, 19 nt, Human
aaagaugaaggucuguuuu

SEQ ID NO: 3001982 - RNA, 20 nt, Human
aaagaggcagcuugaaacug

SEQ ID NO: 3001983 - RNA, 13 nt, Human
aaagaggcuaugu

SEQ ID NO: 3001984 - RNA, 18 nt, Human
aaagaggcuaugugagca

SEQ ID NO: 3001985 - RNA, 15 nt, Human
aaagaugagugagca

SEQ ID NO: 3001986 - RNA, 15 nt, Human
aaagacuguacaaag

SEQ ID NO: 3001987 - RNA, 13 nt, Human
aaagacuccaaag

SEQ ID NO: 3001988 - RNA, 23 nt, Human
aaagacuauucaaacagucucag

SEQ ID NO: 3001989 - RNA, 22 nt, Human
aaagacuauucaaacagucuca

SEQ ID NO: 3001990 - RNA, 18 nt, Human
aaagagaacuuccagauc

SEQ ID NO: 3001991 - RNA, 19 nt, Human
aaagacuuuuccaacccuc

SEQ ID NO: 3001992 - RNA, 23 nt, Human
aaagacuucucuacccaucuuaa

SEQ ID NO: 3001993 - RNA, 16 nt, Human
aaagaaugauuaugaa

SEQ ID NO: 3001994 - RNA, 14 nt, Human
aaacuuuaccuuuu

SEQ ID NO: 3001995 - RNA, 12 nt, Human
ggucccacccca

SEQ ID NO: 3001996 - RNA, 22 nt, Human
gguccacccaggagccccgagg

SEQ ID NO: 3001997 - RNA, 20 nt, Human
gguccacccaggagccccga

SEQ ID NO: 3001998 - RNA, 23 nt, Human
gguauuggcuagagguucaaaga

SEQ ID NO: 3001999 - RNA, 19 nt, Human
gguccacccaggagccccg

SEQ ID NO: 3002000 - RNA, 22 nt, Human
aaaggaaugcaaagaugaaggu

SEQ ID NO: 3002001 - RNA, 19 nt, Human
aaaggaaugcaaagaugaa

SEQ ID NO: 3002002 - RNA, 11 nt, Human
aaaggaaagag

SEQ ID NO: 3002003 - RNA, 13 nt, Human
aaaggaauuuaaa

SEQ ID NO: 3002004 - RNA, 13 nt, Human
aaagcuuauuaaa

SEQ ID NO: 3002005 - RNA, 17 nt, Human
aaagcagugcaugcugu

SEQ ID NO: 3002006 - RNA, 21 nt, Human
aaagcagugcaugcugucccu

SEQ ID NO: 3002007 - RNA, 22 nt, Human
aaagcagugcaugcugucccuu

SEQ ID NO: 3002008 - RNA, 16 nt, Human
aaagcagugcaugcug

SEQ ID NO: 3002009 - RNA, 18 nt, Human
aaagcuaggccuggccag

SEQ ID NO: 3002010 - RNA, 17 nt, Human
aaagcuaggccuggcca

SEQ ID NO: 3002011 - RNA, 17 nt, Human
aaagcuacuuauuguag

SEQ ID NO: 3002012 - RNA, 16 nt, Human
aaagcuacuuauugua

SEQ ID NO: 3002013 - RNA, 13 nt, Human
ggucugucuuuua

SEQ ID NO: 3002014 - RNA, 14 nt, Human
ggucugucuuuuaa

SEQ ID NO: 3002015 - RNA, 12 nt, Human
ggucuguucuuu

SEQ ID NO: 3002016 - RNA, 24 nt, Human
ggucugugagaugcuagaacuccc

SEQ ID NO: 3002017 - RNA, 14 nt, Human
ggucugugagaugc

SEQ ID NO: 3002018 - RNA, 19 nt, Human
ggucuguucuuuccaaagu

SEQ ID NO: 3002019 - RNA, 17 nt, Human
ggucuguucuuuccaaa

SEQ ID NO: 3002020 - RNA, 22 nt, Human
ggucuugaacuccuggccucaa

SEQ ID NO: 3002021 - RNA, 21 nt, Human
ggucuugaacuccuggccuca

SEQ ID NO: 3002022 - RNA, 20 nt, Human
ggugauuuagcaggaagcug

SEQ ID NO: 3002023 - RNA, 16 nt, Human
ggugcacaagcuccaa

SEQ ID NO: 3002024 - RNA, 22 nt, Human
ggugcacaagcuccaagcuccc

SEQ ID NO: 3002025 - RNA, 15 nt, Human
ggugccaguuauggc

SEQ ID NO: 3002026 - RNA, 18 nt, Human
aaacaugcuguacauacu

SEQ ID NO: 3002027 - RNA, 16 nt, Human
aaacaugcuguacaua

SEQ ID NO: 3002028 - RNA, 15 nt, Human
aaacaugcuguacau

SEQ ID NO: 3002029 - RNA, 14 nt, Human
aaacauaucucuua

SEQ ID NO: 3002030 - RNA, 19 nt, Human
aaacauauccaaguuugaa

SEQ ID NO: 3002031 - RNA, 22 nt, Human
aaacaugcuacacacugcaugu

SEQ ID NO: 3002032 - RNA, 16 nt, Human
aaacaugcuacacacu

SEQ ID NO: 3002033 - RNA, 21 nt, Human
aaacauauauaacaaugcugu

SEQ ID NO: 3002034 - RNA, 19 nt, Human
aaacauauauaacaaugcu

SEQ ID NO: 3002035 - RNA, 16 nt, Human
aaacauauauaacaau

SEQ ID NO: 3002036 - RNA, 13 nt, Human
aaacauauauaac

SEQ ID NO: 3002037 - RNA, 14 nt, Human
aaacacaacuauau

SEQ ID NO: 3002038 - RNA, 19 nt, Human
aaacaagucagucauucag

SEQ ID NO: 3002039 - RNA, 21 nt, Human
aaacaugcuguacauacuuuu

SEQ ID NO: 3002040 - RNA, 20 nt, Human
aaacaugcuguacauacuuu

SEQ ID NO: 3002041 - RNA, 24 nt, Human
ggggaaaaucagccugcuccagcu

SEQ ID NO: 3002042 - RNA, 22 nt, Human
aaacaugcuguacauacuuuuu

SEQ ID NO: 3002043 - RNA, 13 nt, Human
ggggaccucaggc

SEQ ID NO: 3002044 - RNA, 15 nt, Human
ggggaccucaggccu

SEQ ID NO: 3002045 - RNA, 16 nt, Human
ggggaccucaggccug

SEQ ID NO: 3002046 - RNA, 17 nt, Human
ggggaccucaggccugg

SEQ ID NO: 3002047 - RNA, 17 nt, Human
ggggccaguuggucccc

SEQ ID NO: 3002048 - RNA, 16 nt, Human
ggggcccugccuccuu

SEQ ID NO: 3002049 - RNA, 15 nt, Human
ggggcccugccuccu

SEQ ID NO: 3002050 - RNA, 19 nt, Human
ggggcccugccuccuuugu

SEQ ID NO: 3002051 - RNA, 23 nt, Human
ggggcccugccuccuuugugagg

SEQ ID NO: 3002052 - RNA, 17 nt, Human
aaacaaggaugaauuaa

SEQ ID NO: 3002053 - RNA, 19 nt, Human
aaaauuuuuucucuaggaa

SEQ ID NO: 3002054 - RNA, 16 nt, Human
aaacaaaauagaaagu

SEQ ID NO: 3002055 - RNA, 21 nt, Human
aaaauggacguguuaugacuc

SEQ ID NO: 3002056 - RNA, 12 nt, Human
aaaauggaauac

SEQ ID NO: 3002057 - RNA, 21 nt, Human
aaaauguaggguuauaauaau

SEQ ID NO: 3002058 - RNA, 20 nt, Human
aaaauggaagacagcucuua

SEQ ID NO: 3002059 - RNA, 20 nt, Human
aaacuacauuagguugugaa

SEQ ID NO: 3002060 - RNA, 22 nt, Human
aaacuacauuagguugugaaug

SEQ ID NO: 3002061 - RNA, 21 nt, Human
aaacuacauuagguugugaau

SEQ ID NO: 3002062 - RNA, 16 nt, Human
aaacguggcugcuuca

SEQ ID NO: 3002063 - RNA, 15 nt, Human
aaacgucuuaaauau

SEQ ID NO: 3002064 - RNA, 17 nt, Human
aaacguggcugcuucaa

SEQ ID NO: 3002065 - RNA, 16 nt, Human
aaaccacagcaguuga

SEQ ID NO: 3002066 - RNA, 15 nt, Human
aaaccacagcaguug

SEQ ID NO: 3002067 - RNA, 16 nt, Human
aaacucauuucuagca

SEQ ID NO: 3002068 - RNA, 18 nt, Human
aaacuacauugacagauu

SEQ ID NO: 3002069 - RNA, 16 nt, Human
aaacuggauuaaacuu

SEQ ID NO: 3002070 - RNA, 16 nt, Human
aaacuggcaaagcaga

SEQ ID NO: 3002071 - RNA, 15 nt, Human
aaacuggcaaagcag

SEQ ID NO: 3002072 - RNA, 20 nt, Human
ggguaucaggugcugccauc

SEQ ID NO: 3002073 - RNA, 22 nt, Human
gggucacucuggcagcucagag

SEQ ID NO: 3002074 - RNA, 23 nt, Human
gggucucacuauguugcccaggc

SEQ ID NO: 3002075 - RNA, 22 nt, Human
gggucucacuauguugcccagg

SEQ ID NO: 3002076 - RNA, 17 nt, Human
gggauugaaggaugcug

SEQ ID NO: 3002077 - RNA, 21 nt, Human
gggauuuucagcccucagaau

SEQ ID NO: 3002078 - RNA, 23 nt, Human
gggcagagcagagaccaucccug

SEQ ID NO: 3002079 - RNA, 15 nt, Human
gggauuuccaugaug

SEQ ID NO: 3002080 - RNA, 19 nt, Human
gggcagcugccuccccucc

SEQ ID NO: 3002081 - RNA, 14 nt, Human
gggcagcugccucc

SEQ ID NO: 3002082 - RNA, 13 nt, Human
gggcagcugccuc

SEQ ID NO: 3002083 - RNA, 12 nt, Human
gggcagcugccu

SEQ ID NO: 3002084 - RNA, 23 nt, Human
gggcagcugccuccccuccucug

SEQ ID NO: 3002085 - RNA, 20 nt, Human
gggcagcugccuccccuccu

SEQ ID NO: 3002086 - RNA, 12 nt, Human
aaaauaaauuau

SEQ ID NO: 3002087 - RNA, 20 nt, Human
aaaauaauuuuuauauuuga

SEQ ID NO: 3002088 - RNA, 23 nt, Human
aaaauaauuuuuauauuugaaau

SEQ ID NO: 3002089 - RNA, 21 nt, Human
aaaauaauuuuuauauuugaa

SEQ ID NO: 3002090 - RNA, 14 nt, Human
aaaauaccagccag

SEQ ID NO: 3002091 - RNA, 15 nt, Human
aaaauaccagccagu

SEQ ID NO: 3002092 - RNA, 14 nt, Human
aaaauaccaaggaa

SEQ ID NO: 3002093 - RNA, 12 nt, Human
aaaauagccugc

SEQ ID NO: 3002094 - RNA, 18 nt, Human
aaaauaguggugugauuu

SEQ ID NO: 3002095 - RNA, 22 nt, Human
aaaacuugauguguuaucucuu

SEQ ID NO: 3002096 - RNA, 21 nt, Human
aaaacuuuaugcuaagugaaa

SEQ ID NO: 3002097 - RNA, 20 nt, Human
aaaagccucuguuuugauau

SEQ ID NO: 3002098 - RNA, 22 nt, Human
aaaagcuccauuuuuagugaaa

SEQ ID NO: 3002099 - RNA, 14 nt, Human
aaaagcugggcagg

SEQ ID NO: 3002100 - RNA, 11 nt, Human
gggaggcagag

SEQ ID NO: 3002101 - RNA, 20 nt, Human
gggaggcagagguugcagug

SEQ ID NO: 3002102 - RNA, 11 nt, Human
gggagggcucc

SEQ ID NO: 3002103 - RNA, 13 nt, Human
gggagggcuccag

SEQ ID NO: 3002104 - RNA, 20 nt, Human
aaaaaucucaaauuucuaaa

SEQ ID NO: 3002105 - RNA, 19 nt, Human
aaaaaucucaaauuucuaa

SEQ ID NO: 3002106 - RNA, 17 nt, Human
aaaaaucucaaauuucu

SEQ ID NO: 3002107 - RNA, 22 nt, Human
gggaacagacuggaagcacagc

SEQ ID NO: 3002108 - RNA, 14 nt, Human
gggaacagacugga

SEQ ID NO: 3002109 - RNA, 14 nt, Human
aaaacguggcugcu

SEQ ID NO: 3002110 - RNA, 16 nt, Human
aaaacguggcugcuuc

SEQ ID NO: 3002111 - RNA, 17 nt, Human
aaaacguggcugcuuca

SEQ ID NO: 3002112 - RNA, 18 nt, Human
aaaacguggcugcuucaa

SEQ ID NO: 3002113 - RNA, 15 nt, Human
aaaaccaauguucuc

SEQ ID NO: 3002114 - RNA, 18 nt, Human
aaaacugauuuuuuuuuc

SEQ ID NO: 3002115 - RNA, 22 nt, Human
aaaacugauuuuuuuuuccuuc

SEQ ID NO: 3002116 - RNA, 21 nt, Human
aaaacguggcugcuucaagga

SEQ ID NO: 3002117 - RNA, 23 nt, Human
gggaaaaucagccugcuccagcu

SEQ ID NO: 3002118 - RNA, 13 nt, Human
gggaaaaucagcc

SEQ ID NO: 3002119 - RNA, 16 nt, Human
ggcuucaguggcagcu

SEQ ID NO: 3002120 - RNA, 16 nt, Human
ggcuggugucaccuga

SEQ ID NO: 3002121 - RNA, 19 nt, Human
ggcuguaucccaugagccu

SEQ ID NO: 3002122 - RNA, 15 nt, Human
ggcugucaauuacag

SEQ ID NO: 3002123 - RNA, 23 nt, Human
ggcuguaucccaugagccucagc

SEQ ID NO: 3002124 - RNA, 22 nt, Human
ggcuguaucccaugagccucag

SEQ ID NO: 3002125 - RNA, 20 nt, Human
ggcuguaucccaugagccuc

SEQ ID NO: 3002126 - RNA, 15 nt, Human
ggcuucaguggcagc

SEQ ID NO: 3002127 - RNA, 13 nt, Human
aaaaaaacacaaa

SEQ ID NO: 3002128 - RNA, 17 nt, Human
ggcuggccuggccccuc

SEQ ID NO: 3002129 - RNA, 22 nt, Human
ggcuggccuggccccucagggu

SEQ ID NO: 3002130 - RNA, 20 nt, Human
ggcuggcgugcaguggugcg

SEQ ID NO: 3002131 - RNA, 16 nt, Human
ggcuggcgugcagugg

SEQ ID NO: 3002132 - RNA, 14 nt, Human
ggcuggcgugcagu

SEQ ID NO: 3002133 - RNA, 18 nt, Human
ggcugccagugccugggu

SEQ ID NO: 3002134 - RNA, 17 nt, Human
ggcugccagugccuggg

SEQ ID NO: 3002135 - RNA, 15 nt, Human
ggcugccagugccug

SEQ ID NO: 3002136 - RNA, 20 nt, Human
ggcucuuccaggcugggaga

SEQ ID NO: 3002137 - RNA, 23 nt, Human
ggcucuuccaggcugggagagcc

SEQ ID NO: 3002138 - RNA, 24 nt, Human
ggcucuuccaggcugggagagccu

SEQ ID NO: 3002139 - RNA, 18 nt, Human
ggcucgagcaugccugga

SEQ ID NO: 3002140 - RNA, 17 nt, Human
ggcugcagggaguccga

SEQ ID NO: 3002141 - RNA, 20 nt, Human
ggcugcaugcgggcuuccuc

SEQ ID NO: 3002142 - RNA, 14 nt, Human
ggcugccagugccu

SEQ ID NO: 3002143 - RNA, 20 nt, Human
ggcucccuucccaccucucu

SEQ ID NO: 3002144 - RNA, 22 nt, Human
ggcucccuucccaccucucuca

SEQ ID NO: 3002145 - RNA, 17 nt, Human
ggcucccuucccaccuc

SEQ ID NO: 3002146 - RNA, 18 nt, Human
ggcucccuucccaccucu

SEQ ID NO: 3002147 - RNA, 16 nt, Human
ggcucccuucccaccu

SEQ ID NO: 3002148 - RNA, 16 nt, Human
auucauucuuuuugaa

SEQ ID NO: 3002149 - RNA, 21 nt, Human
auucauucuuuuugaaauguc

SEQ ID NO: 3002150 - RNA, 15 nt, Human
auucauucuuuuuga

SEQ ID NO: 3002151 - RNA, 14 nt, Human
auucucuuauccaa

SEQ ID NO: 3002152 - RNA, 12 nt, Human
auucucuuaucc

SEQ ID NO: 3002153 - RNA, 23 nt, Human
auucucuaguuugauuaaauucu

SEQ ID NO: 3002154 - RNA, 19 nt, Human
auucucuaguuugauuaaa

SEQ ID NO: 3002155 - RNA, 20 nt, Human
auucucuaguuugauuaaau

SEQ ID NO: 3002156 - RNA, 15 nt, Human
auucucuuauccaac

SEQ ID NO: 3002157 - RNA, 22 nt, Human
auugaggacacugauauggguc

SEQ ID NO: 3002158 - RNA, 14 nt, Human
auucauuaguuuug

SEQ ID NO: 3002159 - RNA, 15 nt, Human
auucauuaguuuuga

SEQ ID NO: 3002160 - RNA, 14 nt, Human
auucauauuuacuu

SEQ ID NO: 3002161 - RNA, 22 nt, Human
auuacaagcgugagccacugca

SEQ ID NO: 3002162 - RNA, 17 nt, Human
auuucucucaucuguua

SEQ ID NO: 3002163 - RNA, 19 nt, Human
auuucuguuuagauaauac

SEQ ID NO: 3002164 - RNA, 20 nt, Human
auuucuguuuagauaauaca

SEQ ID NO: 3002165 - RNA, 21 nt, Human
auuucuguuuagauaauacac

SEQ ID NO: 3002166 - RNA, 19 nt, Human
auuugcacauuaaaugacu

SEQ ID NO: 3002167 - RNA, 17 nt, Human
auuugcacauuaaauga

SEQ ID NO: 3002168 - RNA, 15 nt, Human
auuugcacauuaaau

SEQ ID NO: 3002169 - RNA, 14 nt, Human
auuugcacauuaaa

SEQ ID NO: 3002170 - RNA, 13 nt, Human
auuuaauuugaag

SEQ ID NO: 3002171 - RNA, 15 nt, Human
auuuaauuugaaggu

SEQ ID NO: 3002172 - RNA, 22 nt, Human
auuuaauuugaagguagaaugu

SEQ ID NO: 3002173 - RNA, 19 nt, Human
auuuaauugggcacuauuu

SEQ ID NO: 3002174 - RNA, 22 nt, Human
auuuaauagguuuggacaaaau

SEQ ID NO: 3002175 - RNA, 17 nt, Human
auuucacaguguguggu

SEQ ID NO: 3002176 - RNA, 12 nt, Human
auuuauccucug

SEQ ID NO: 3002177 - RNA, 16 nt, Human
auuuauccucuguuga

SEQ ID NO: 3002178 - RNA, 14 nt, Human
auuucacucuccuu

SEQ ID NO: 3002179 - RNA, 16 nt, Human
auuucagcagcugcag

SEQ ID NO: 3002180 - RNA, 12 nt, Human
auuucacucucc

SEQ ID NO: 3002181 - RNA, 21 nt, Human
auuugcacauuaaaugacucu

SEQ ID NO: 3002182 - RNA, 20 nt, Human
auuugcacauuaaaugacuc

SEQ ID NO: 3002183 - RNA, 15 nt, Human
auuuguguugaagag

SEQ ID NO: 3002184 - RNA, 14 nt, Human
auuuguguugaaga

SEQ ID NO: 3002185 - RNA, 22 nt, Human
auuuguguugaagagguuuuaa

SEQ ID NO: 3002186 - RNA, 18 nt, Human
auuuguguugaagagguu

SEQ ID NO: 3002187 - RNA, 14 nt, Human
auuuguuauaauga

SEQ ID NO: 3002188 - RNA, 17 nt, Human
auuuucuccaaauguuc

SEQ ID NO: 3002189 - RNA, 19 nt, Human
auuuucuauaauuuaaaua

SEQ ID NO: 3002190 - RNA, 17 nt, Human
auuuucuauaauuuaaa

SEQ ID NO: 3002191 - RNA, 18 nt, Human
auuuucuauaauuuaaau

SEQ ID NO: 3002192 - RNA, 13 nt, Human
caaaagcauguga

SEQ ID NO: 3002193 - RNA, 19 nt, Human
caaaagcaucuaugugaga

SEQ ID NO: 3002194 - RNA, 21 nt, Human
caaaagguauuuuaaucacca

SEQ ID NO: 3002195 - RNA, 20 nt, Human
caaaagguuaauaaaguaau

SEQ ID NO: 3002196 - RNA, 17 nt, Human
caaacauauauaacaau

SEQ ID NO: 3002197 - RNA, 19 nt, Human
auuuuuauauuugaaauau

SEQ ID NO: 3002198 - RNA, 16 nt, Human
auuuuuauauuugaaa

SEQ ID NO: 3002199 - RNA, 22 nt, Human
auuuuguuuuugucuuaaaaag

SEQ ID NO: 3002200 - RNA, 21 nt, Human
auuuuguuuuugucuuaaaaa

SEQ ID NO: 3002201 - RNA, 17 nt, Human
auuuuuuucugaaauuu

SEQ ID NO: 3002202 - RNA, 16 nt, Human
auuuuuuucugaaauu

SEQ ID NO: 3002203 - RNA, 16 nt, Human
auuuuuauuaaauuau

SEQ ID NO: 3002204 - RNA, 17 nt, Human
caaaccaucauugaaau

SEQ ID NO: 3002205 - RNA, 14 nt, Human
caaaccaucauuga

SEQ ID NO: 3002206 - RNA, 16 nt, Human
caaaccaucauugaaa

SEQ ID NO: 3002207 - RNA, 23 nt, Human
caauugugaaaaaauuuacuuua

SEQ ID NO: 3002208 - RNA, 20 nt, Human
caauuuauuauggcacauca

SEQ ID NO: 3002209 - RNA, 13 nt, Human
caauuuauuaugg

SEQ ID NO: 3002210 - RNA, 17 nt, Human
cacaaggaaauaaaauu

SEQ ID NO: 3002211 - RNA, 22 nt, Human
caauugugaaaaaauuuacuuu

SEQ ID NO: 3002212 - RNA, 15 nt, Human
caauggcagccuugg

SEQ ID NO: 3002213 - RNA, 14 nt, Human
caauggcagccuug

SEQ ID NO: 3002214 - RNA, 13 nt, Human
caauggcagccuu

SEQ ID NO: 3002215 - RNA, 17 nt, Human
caaucagccuaguugau

SEQ ID NO: 3002216 - RNA, 14 nt, Human
caaucaaaucugcu

SEQ ID NO: 3002217 - RNA, 18 nt, Human
caauauuuaaucuuuuau

SEQ ID NO: 3002218 - RNA, 21 nt, Human
caauauuucagauaaucacaa

SEQ ID NO: 3002219 - RNA, 20 nt, Human
caaguuauuuuuaauuuggu

SEQ ID NO: 3002220 - RNA, 20 nt, Human
caaggauugcuacuguccua

SEQ ID NO: 3002221 - RNA, 19 nt, Human
caaggauugcuacuguccu

SEQ ID NO: 3002222 - RNA, 14 nt, Human
caaggcaaggcugu

SEQ ID NO: 3002223 - RNA, 13 nt, Human
caaggcaaauguu

SEQ ID NO: 3002224 - RNA, 22 nt, Human
caaguauuauaccuuuuuuaga

SEQ ID NO: 3002225 - RNA, 17 nt, Human
caaguauuauaccuuuu

SEQ ID NO: 3002226 - RNA, 13 nt, Human
caaguauuauacc

SEQ ID NO: 3002227 - RNA, 17 nt, Human
caagcuccaagcuccca

SEQ ID NO: 3002228 - RNA, 18 nt, Human
caagcuccaagcucccag

SEQ ID NO: 3002229 - RNA, 19 nt, Human
caagcuccaagcucccagg

SEQ ID NO: 3002230 - RNA, 21 nt, Human
caagcuccaagcucccaggca

SEQ ID NO: 3002231 - RNA, 12 nt, Human
caagcucccagg

SEQ ID NO: 3002232 - RNA, 14 nt, Human
caagcucccaggca

SEQ ID NO: 3002233 - RNA, 15 nt, Human
caagcucccaggcau

SEQ ID NO: 3002234 - RNA, 17 nt, Human
caagcucccaggcauuc

SEQ ID NO: 3002235 - RNA, 16 nt, Human
caagcucugcuccucu

SEQ ID NO: 3002236 - RNA, 15 nt, Human
caagcucugcuccuc

SEQ ID NO: 3002237 - RNA, 14 nt, Human
caagcaccuccugc

SEQ ID NO: 3002238 - RNA, 13 nt, Human
caagcaccuccug

SEQ ID NO: 3002239 - RNA, 16 nt, Human
caagaccacguuucua

SEQ ID NO: 3002240 - RNA, 14 nt, Human
caagaccacguuuc

SEQ ID NO: 3002241 - RNA, 14 nt, Human
caagcaaguauuag

SEQ ID NO: 3002242 - RNA, 12 nt, Human
caacuccagaaa

SEQ ID NO: 3002243 - RNA, 15 nt, Human
caagaagcccaggaa

SEQ ID NO: 3002244 - RNA, 18 nt, Human
caagaagcccaggaaagg

SEQ ID NO: 3002245 - RNA, 17 nt, Human
caagaaggaugauucaa

SEQ ID NO: 3002246 - RNA, 14 nt, Human
caacccccagccug

SEQ ID NO: 3002247 - RNA, 16 nt, Human
caaccccuucgcuccu

SEQ ID NO: 3002248 - RNA, 14 nt, Human
caaccccuucgcuc

SEQ ID NO: 3002249 - RNA, 17 nt, Human
caaccccuucgcuccug

SEQ ID NO: 3002250 - RNA, 19 nt, Human
caacuaucucauuuccaag

SEQ ID NO: 3002251 - RNA, 19 nt, Human
caacuauauuguuugcuaa

SEQ ID NO: 3002252 - RNA, 13 nt, Human
cacaucagcuugc

SEQ ID NO: 3002253 - RNA, 23 nt, Human
cacaucagcuugcccuguuaaaa

SEQ ID NO: 3002254 - RNA, 22 nt, Human
cacaucuugcucugcugacaga

SEQ ID NO: 3002255 - RNA, 21 nt, Human
cacaucuugcucugcugacag

SEQ ID NO: 3002256 - RNA, 20 nt, Human
cacaucuugcucugcugaca

SEQ ID NO: 3002257 - RNA, 15 nt, Human
cacaucuugcucugc

SEQ ID NO: 3002258 - RNA, 14 nt, Human
cacaucuugcucug

SEQ ID NO: 3002259 - RNA, 13 nt, Human
cacaucuugcucu

SEQ ID NO: 3002260 - RNA, 19 nt, Human
caccagcccuuagcaggga

SEQ ID NO: 3002261 - RNA, 22 nt, Human
caccagccccagugcccacagg

SEQ ID NO: 3002262 - RNA, 21 nt, Human
caccagccccagugcccacag

SEQ ID NO: 3002263 - RNA, 18 nt, Human
caccagccccagugccca

SEQ ID NO: 3002264 - RNA, 17 nt, Human
caccagccccagugccc

SEQ ID NO: 3002265 - RNA, 18 nt, Human
cacauuuauucugcucac

SEQ ID NO: 3002266 - RNA, 17 nt, Human
cacauuuauucugcuca

SEQ ID NO: 3002267 - RNA, 19 nt, Human
cacaucuugcucugcugac

SEQ ID NO: 3002268 - RNA, 23 nt, Human
cacaucuugcucugcugacagac

SEQ ID NO: 3002269 - RNA, 12 nt, Human
cacccagcccac

SEQ ID NO: 3002270 - RNA, 19 nt, Human
cacccaguccugcccgcca

SEQ ID NO: 3002271 - RNA, 17 nt, Human
caccugcggugcuaucu

SEQ ID NO: 3002272 - RNA, 19 nt, Human
caccugcggugcuaucucc

SEQ ID NO: 3002273 - RNA, 16 nt, Human
caccugcggugcuauc

SEQ ID NO: 3002274 - RNA, 12 nt, Human
cacccuccuuuc

SEQ ID NO: 3002275 - RNA, 12 nt, Human
cacccugcucuc

SEQ ID NO: 3002276 - RNA, 18 nt, Human
caccugccccucaacucu

SEQ ID NO: 3002277 - RNA, 21 nt, Human
caccugccccucaacucuccu

SEQ ID NO: 3002278 - RNA, 11 nt, Human
caccugccagg

SEQ ID NO: 3002279 - RNA, 12 nt, Human
caccugccaggg

SEQ ID NO: 3002280 - RNA, 17 nt, Human
cacccuggggagaaagu

SEQ ID NO: 3002281 - RNA, 21 nt, Human
cacuccagugagacagcucug

SEQ ID NO: 3002282 - RNA, 16 nt, Human
cacuccagugagacag

SEQ ID NO: 3002283 - RNA, 23 nt, Human
cacugaagaagcaccaaucauga

SEQ ID NO: 3002284 - RNA, 11 nt, Human
cacugaagaag

SEQ ID NO: 3002285 - RNA, 15 nt, Human
cacgcuggagugcag

SEQ ID NO: 3002286 - RNA, 20 nt, Human
cacgcuggagugcagugagc

SEQ ID NO: 3002287 - RNA, 18 nt, Human
cacgcuggagugcaguga

SEQ ID NO: 3002288 - RNA, 17 nt, Human
cacgcuggagugcagug

SEQ ID NO: 3002289 - RNA, 16 nt, Human
cacgcuggagugcagu

SEQ ID NO: 3002290 - RNA, 21 nt, Human
cacgcuggagugcagugagcc

SEQ ID NO: 3002291 - RNA, 14 nt, Human
cacuacauucuguu

SEQ ID NO: 3002292 - RNA, 13 nt, Human
cacuacauucugu

SEQ ID NO: 3002293 - RNA, 21 nt, Human
cacuacauuauaaaugucucu

SEQ ID NO: 3002294 - RNA, 16 nt, Human
cacggaagagccuugc

SEQ ID NO: 3002295 - RNA, 22 nt, Human
cacggaagagccuugcggaagg

SEQ ID NO: 3002296 - RNA, 15 nt, Human
cacuacauucuguua

SEQ ID NO: 3002297 - RNA, 19 nt, Human
cagacuggauaguccgucu

SEQ ID NO: 3002298 - RNA, 22 nt, Human
cagacuggcacaguuuucugag

SEQ ID NO: 3002299 - RNA, 23 nt, Human
cagacuggcacaguuuucugaga

SEQ ID NO: 3002300 - RNA, 17 nt, Human
cagacuggcacaguuuu

SEQ ID NO: 3002301 - RNA, 18 nt, Human
cagacuggcacaguuuuc

SEQ ID NO: 3002302 - RNA, 21 nt, Human
cagacuggaagcacagcuuca

SEQ ID NO: 3002303 - RNA, 20 nt, Human
cagacuggaagcacagcuuc

SEQ ID NO: 3002304 - RNA, 18 nt, Human
cagacuggaagcacagcu

SEQ ID NO: 3002305 - RNA, 17 nt, Human
cagacuggaagcacagc

SEQ ID NO: 3002306 - RNA, 16 nt, Human
cagacuggaagcacag

SEQ ID NO: 3002307 - RNA, 14 nt, Human
cagacuggaagcac

SEQ ID NO: 3002308 - RNA, 13 nt, Human
cagacuggaagca

SEQ ID NO: 3002309 - RNA, 23 nt, Human
cagacaggcaagcaccuccugcc

SEQ ID NO: 3002310 - RNA, 22 nt, Human
cagacaggcaagcaccuccugc

SEQ ID NO: 3002311 - RNA, 17 nt, Human
cagacucuacagaggcc

SEQ ID NO: 3002312 - RNA, 21 nt, Human
cagacucuacagaggccaugg

SEQ ID NO: 3002313 - RNA, 20 nt, Human
cagacucuacagaggccaug

SEQ ID NO: 3002314 - RNA, 19 nt, Human
cagacucuacagaggccau

SEQ ID NO: 3002315 - RNA, 18 nt, Human
cagacucuacagaggcca

SEQ ID NO: 3002316 - RNA, 23 nt, Human
cagacucuacagaggccaugggc

SEQ ID NO: 3002317 - RNA, 13 nt, Human
cagacagcugccu

SEQ ID NO: 3002318 - RNA, 14 nt, Human
cagacagcugccug

SEQ ID NO: 3002319 - RNA, 13 nt, Human
cagacaggaccag

SEQ ID NO: 3002320 - RNA, 15 nt, Human
cagacaggaccaggg

SEQ ID NO: 3002321 - RNA, 16 nt, Human
cagacaggaccaggga

SEQ ID NO: 3002322 - RNA, 15 nt, Human
cagacagcugccugg

SEQ ID NO: 3002323 - RNA, 16 nt, Human
cagacagcugccuggg

SEQ ID NO: 3002324 - RNA, 17 nt, Human
cagacagcugccuggga

SEQ ID NO: 3002325 - RNA, 18 nt, Human
cagacagcugccugggau

SEQ ID NO: 3002326 - RNA, 21 nt, Human
cagacaggcaagcaccuccug

SEQ ID NO: 3002327 - RNA, 20 nt, Human
cagacaggcaagcaccuccu

SEQ ID NO: 3002328 - RNA, 18 nt, Human
cagacaggcaagcaccuc

SEQ ID NO: 3002329 - RNA, 13 nt, Human
cagacaggcaagc

SEQ ID NO: 3002330 - RNA, 17 nt, Human
cagacaggaccagggau

SEQ ID NO: 3002331 - RNA, 24 nt, Human
cagacaggaccagggauuuccaug

SEQ ID NO: 3002332 - RNA, 11 nt, Human
cagacaggcaa

SEQ ID NO: 3002333 - RNA, 12 nt, Human
cagccaggcccu

SEQ ID NO: 3002334 - RNA, 15 nt, Human
cagccagacuggcac

SEQ ID NO: 3002335 - RNA, 18 nt, Human
cagccagacuggcacagu

SEQ ID NO: 3002336 - RNA, 23 nt, Human
cagccagcaguucagagcugccc

SEQ ID NO: 3002337 - RNA, 22 nt, Human
cagccagcaguucagagcugcc

SEQ ID NO: 3002338 - RNA, 14 nt, Human
cagccagacuggca

SEQ ID NO: 3002339 - RNA, 15 nt, Human
cagcacgauuucugu

SEQ ID NO: 3002340 - RNA, 14 nt, Human
cagcacgauuucug

SEQ ID NO: 3002341 - RNA, 20 nt, Human
cagcacgauuucuguuuaga

SEQ ID NO: 3002342 - RNA, 18 nt, Human
cagauugcaacaggcugg

SEQ ID NO: 3002343 - RNA, 20 nt, Human
cagauugcaacaggcugggc

SEQ ID NO: 3002344 - RNA, 19 nt, Human
cagauugcaacaggcuggg

SEQ ID NO: 3002345 - RNA, 20 nt, Human
cagauuucacucuccuuggu

SEQ ID NO: 3002346 - RNA, 19 nt, Human
cagcaccaucucuccuccu

SEQ ID NO: 3002347 - RNA, 17 nt, Human
cagcaccaucucuccuc

SEQ ID NO: 3002348 - RNA, 19 nt, Human
cagauuucacucuccuugg

SEQ ID NO: 3002349 - RNA, 21 nt, Human
cagagcugcccucuccugggc

SEQ ID NO: 3002350 - RNA, 20 nt, Human
cagagcugcccucuccuggg

SEQ ID NO: 3002351 - RNA, 19 nt, Human
cagagcugcccucuccugg

SEQ ID NO: 3002352 - RNA, 18 nt, Human
cagagcugcccucuccug

SEQ ID NO: 3002353 - RNA, 17 nt, Human
cagaggaaagcaaagga

SEQ ID NO: 3002354 - RNA, 19 nt, Human
cagaggaaagcaaaggaga

SEQ ID NO: 3002355 - RNA, 13 nt, Human
cagaggggguggc

SEQ ID NO: 3002356 - RNA, 13 nt, Human
cagagcugccacc

SEQ ID NO: 3002357 - RNA, 17 nt, Human
cagagcugcccucuccu

SEQ ID NO: 3002358 - RNA, 20 nt, Human
cagagagguuaaggugggua

SEQ ID NO: 3002359 - RNA, 23 nt, Human
cagagaggguggugaccucugcc

SEQ ID NO: 3002360 - RNA, 23 nt, Human
cagagagggugggagugggccca

SEQ ID NO: 3002361 - RNA, 22 nt, Human
cagagaggguggugaccucugc

SEQ ID NO: 3002362 - RNA, 20 nt, Human
cagagaggguggugaccucu

SEQ ID NO: 3002363 - RNA, 17 nt, Human
cagagaggguggugacc

SEQ ID NO: 3002364 - RNA, 12 nt, Human
cagagagggugg

SEQ ID NO: 3002365 - RNA, 23 nt, Human
cagagacuccugcaggcagccag

SEQ ID NO: 3002366 - RNA, 14 nt, Human
cagaggggguggcc

SEQ ID NO: 3002367 - RNA, 16 nt, Human
cagaggggguggccuc

SEQ ID NO: 3002368 - RNA, 19 nt, Human
cagauacuuggggggcuga

SEQ ID NO: 3002369 - RNA, 19 nt, Human
cagauagauauaugcucug

SEQ ID NO: 3002370 - RNA, 14 nt, Human
cagauaugauucaa

SEQ ID NO: 3002371 - RNA, 11 nt, Human
caggcuacugu

SEQ ID NO: 3002372 - RNA, 21 nt, Human
caggcugggagagccuuccag

SEQ ID NO: 3002373 - RNA, 20 nt, Human
caggcugggagagccuucca

SEQ ID NO: 3002374 - RNA, 12 nt, Human
caggccuccuac

SEQ ID NO: 3002375 - RNA, 14 nt, Human
caggccuccuacag

SEQ ID NO: 3002376 - RNA, 14 nt, Human
caggggaaaagagg

SEQ ID NO: 3002377 - RNA, 16 nt, Human
caggggaaaagaggag

SEQ ID NO: 3002378 - RNA, 22 nt, Human
caggcugggagagccuuccagg

SEQ ID NO: 3002379 - RNA, 23 nt, Human
caggcugggagagccuuccaggg

SEQ ID NO: 3002380 - RNA, 21 nt, Human
caggaccagggauuuccauga

SEQ ID NO: 3002381 - RNA, 16 nt, Human
caggaccucaggugag

SEQ ID NO: 3002382 - RNA, 23 nt, Human
caggaccucaggugagaagcaga

SEQ ID NO: 3002383 - RNA, 16 nt, Human
caggcaaugcuggcug

SEQ ID NO: 3002384 - RNA, 15 nt, Human
caggcaaugcuggcu

SEQ ID NO: 3002385 - RNA, 14 nt, Human
caggcaaugcuggc

SEQ ID NO: 3002386 - RNA, 18 nt, Human
caggaggccagccuugac

SEQ ID NO: 3002387 - RNA, 19 nt, Human
caggaggccagccuugacc

SEQ ID NO: 3002388 - RNA, 22 nt, Human
caggaggccagccuugaccauu

SEQ ID NO: 3002389 - RNA, 19 nt, Human
caggaggaucacuugaguc

SEQ ID NO: 3002390 - RNA, 11 nt, Human
caggccaggcc

SEQ ID NO: 3002391 - RNA, 12 nt, Human
caggccaggccc

SEQ ID NO: 3002392 - RNA, 19 nt, Human
caggcaccuguagucccag

SEQ ID NO: 3002393 - RNA, 16 nt, Human
caggaaaggcuccagg

SEQ ID NO: 3002394 - RNA, 17 nt, Human
caggaaaggcuccagga

SEQ ID NO: 3002395 - RNA, 16 nt, Human
caggaaagagaacuuc

SEQ ID NO: 3002396 - RNA, 19 nt, Human
caggaaaggcuccaggagc

SEQ ID NO: 3002397 - RNA, 20 nt, Human
caggaaaggcuccaggagca

SEQ ID NO: 3002398 - RNA, 14 nt, Human
cagcuuauugucua

SEQ ID NO: 3002399 - RNA, 20 nt, Human
cagcuguaugauucccagcc

SEQ ID NO: 3002400 - RNA, 20 nt, Human
cagcuuauugucuagugaaa

SEQ ID NO: 3002401 - RNA, 17 nt, Human
cagcuuauucacaagac

SEQ ID NO: 3002402 - RNA, 19 nt, Human
cagcuguaugauucccagc

SEQ ID NO: 3002403 - RNA, 19 nt, Human
cagcugccuccccuccucu

SEQ ID NO: 3002404 - RNA, 18 nt, Human
cagcugccuccccuccuc

SEQ ID NO: 3002405 - RNA, 17 nt, Human
cagcugccuccccuccu

SEQ ID NO: 3002406 - RNA, 16 nt, Human
cagcugccuccccucc

SEQ ID NO: 3002407 - RNA, 15 nt, Human
cagcugccuccccuc

SEQ ID NO: 3002408 - RNA, 14 nt, Human
cagcugccuccccu

SEQ ID NO: 3002409 - RNA, 9 nt, Human
cagcugccu

SEQ ID NO: 3002410 - RNA, 11 nt, Human
cagcugccucc

SEQ ID NO: 3002411 - RNA, 10 nt, Human
cagcugccuc

SEQ ID NO: 3002412 - RNA, 21 nt, Human
cagcugacuuuucuguccgag

SEQ ID NO: 3002413 - RNA, 15 nt, Human
cagcuaacauggaag

SEQ ID NO: 3002414 - RNA, 22 nt, Human
cagcuaaagaaguuugaacauu

SEQ ID NO: 3002415 - RNA, 19 nt, Human
cagcguuucuaugacacau

SEQ ID NO: 3002416 - RNA, 16 nt, Human
cagccugcuccagcug

SEQ ID NO: 3002417 - RNA, 17 nt, Human
cagccugcuccagcugu

SEQ ID NO: 3002418 - RNA, 19 nt, Human
cagccugcuccagcuguuc

SEQ ID NO: 3002419 - RNA, 15 nt, Human
cagccugcuccagcu

SEQ ID NO: 3002420 - RNA, 14 nt, Human
caguuguuauuuau

SEQ ID NO: 3002421 - RNA, 19 nt, Human
caguuguuauuuauugaaa

SEQ ID NO: 3002422 - RNA, 22 nt, Human
caguuguuagugugucuuagug

SEQ ID NO: 3002423 - RNA, 18 nt, Human
caguuguuagugugucuu

SEQ ID NO: 3002424 - RNA, 21 nt, Human
caguuguuauuuauugaaaug

SEQ ID NO: 3002425 - RNA, 23 nt, Human
caguuuguuaguaugaggcauuu

SEQ ID NO: 3002426 - RNA, 21 nt, Human
caguuuguuaguaugaggcau

SEQ ID NO: 3002427 - RNA, 19 nt, Human
cauagcagcuuauucacaa

SEQ ID NO: 3002428 - RNA, 23 nt, Human
cauagcagagaaugaaagggccc

SEQ ID NO: 3002429 - RNA, 22 nt, Human
cauauuaccacagacauacuaa

SEQ ID NO: 3002430 - RNA, 23 nt, Human
cauacaggaagguagaaauaucu

SEQ ID NO: 3002431 - RNA, 16 nt, Human
cauacaguuugcacuu

SEQ ID NO: 3002432 - RNA, 23 nt, Human
cauaaugcgugcauaccacuuuu

SEQ ID NO: 3002433 - RNA, 19 nt, Human
cauccugaggcuccacuug

SEQ ID NO: 3002434 - RNA, 18 nt, Human
cauccugaggcuccacuu

SEQ ID NO: 3002435 - RNA, 11 nt, Human
caucccagccc

SEQ ID NO: 3002436 - RNA, 20 nt, Human
caucccaaacccuucagugc

SEQ ID NO: 3002437 - RNA, 21 nt, Human
cauccucuguacagagcccac

SEQ ID NO: 3002438 - RNA, 22 nt, Human
cauccucuguacagagcccacg

SEQ ID NO: 3002439 - RNA, 19 nt, Human
caucccaaacccuucagug

SEQ ID NO: 3002440 - RNA, 19 nt, Human
caucagcacgauuucuguu

SEQ ID NO: 3002441 - RNA, 21 nt, Human
caucagcacgauuucuguuua

SEQ ID NO: 3002442 - RNA, 17 nt, Human
caguucagagcugcccu

SEQ ID NO: 3002443 - RNA, 16 nt, Human
caguucagagcugccc

SEQ ID NO: 3002444 - RNA, 15 nt, Human
caguucagagcugcc

SEQ ID NO: 3002445 - RNA, 22 nt, Human
caguuauuauauuuacaaaugg

SEQ ID NO: 3002446 - RNA, 22 nt, Human
caguucagagcugcccucuccu

SEQ ID NO: 3002447 - RNA, 21 nt, Human
caguucagagcugcccucucc

SEQ ID NO: 3002448 - RNA, 19 nt, Human
caguucagagcugcccucu

SEQ ID NO: 3002449 - RNA, 18 nt, Human
caguucagagcugcccuc

SEQ ID NO: 3002450 - RNA, 24 nt, Human
caguucagagcugcccucuccugg

SEQ ID NO: 3002451 - RNA, 23 nt, Human
caguucagagcugcccucuccug

SEQ ID NO: 3002452 - RNA, 22 nt, Human
cagucugauucccaagcucugc

SEQ ID NO: 3002453 - RNA, 21 nt, Human
cagucugauucccaagcucug

SEQ ID NO: 3002454 - RNA, 22 nt, Human
cagugauuaccagggacugagg

SEQ ID NO: 3002455 - RNA, 23 nt, Human
cagucugauucccaagcucugcu

SEQ ID NO: 3002456 - RNA, 22 nt, Human
cagugcccacaggaucagucug

SEQ ID NO: 3002457 - RNA, 18 nt, Human
cagugcccacaggaucag

SEQ ID NO: 3002458 - RNA, 21 nt, Human
cagugcccacaggaucagucu

SEQ ID NO: 3002459 - RNA, 20 nt, Human
cagugguaugaucacggcuc

SEQ ID NO: 3002460 - RNA, 18 nt, Human
cagugggagcugccuguu

SEQ ID NO: 3002461 - RNA, 17 nt, Human
cagugggagcugccugu

SEQ ID NO: 3002462 - RNA, 15 nt, Human
cagugggagcugccu

SEQ ID NO: 3002463 - RNA, 16 nt, Human
cagugggagcugccug

SEQ ID NO: 3002464 - RNA, 17 nt, Human
caguuauuauauuuaca

SEQ ID NO: 3002465 - RNA, 21 nt, Human
caguuauuauauuuacaaaug

SEQ ID NO: 3002466 - RNA, 19 nt, Human
caguuauggcuauaggugc

SEQ ID NO: 3002467 - RNA, 20 nt, Human
caguuauggcuauaggugcu

SEQ ID NO: 3002468 - RNA, 13 nt, Human
caguuauggcuau

SEQ ID NO: 3002469 - RNA, 19 nt, Human
caguggugcgaucuggguu

SEQ ID NO: 3002470 - RNA, 21 nt, Human
cagugguaugaucacggcuca

SEQ ID NO: 3002471 - RNA, 20 nt, Human
caguuacucagaauucucua

SEQ ID NO: 3002472 - RNA, 17 nt, Human
cauuauguuaauauuuc

SEQ ID NO: 3002473 - RNA, 14 nt, Human
cauuauguuaauau

SEQ ID NO: 3002474 - RNA, 15 nt, Human
cauuauguuaauauu

SEQ ID NO: 3002475 - RNA, 16 nt, Human
cauuauguuaauauuu

SEQ ID NO: 3002476 - RNA, 17 nt, Human
cauucuccaccugccag

SEQ ID NO: 3002477 - RNA, 18 nt, Human
cauucuccaccugccagg

SEQ ID NO: 3002478 - RNA, 19 nt, Human
cauucuccaccugccaggg

SEQ ID NO: 3002479 - RNA, 21 nt, Human
cauucuccaccugccagggac

SEQ ID NO: 3002480 - RNA, 20 nt, Human
cauucuccuuguguuacuaa

SEQ ID NO: 3002481 - RNA, 17 nt, Human
cauguuacauaagauaa

SEQ ID NO: 3002482 - RNA, 16 nt, Human
cauguuacauaagaua

SEQ ID NO: 3002483 - RNA, 15 nt, Human
cauguccaagaagcc

SEQ ID NO: 3002484 - RNA, 16 nt, Human
cauguccaagaagccc

SEQ ID NO: 3002485 - RNA, 16 nt, Human
cauguucuuaauucuu

SEQ ID NO: 3002486 - RNA, 13 nt, Human
cauguucuuaauu

SEQ ID NO: 3002487 - RNA, 21 nt, Human
cauguuacauaagauaaaugu

SEQ ID NO: 3002488 - RNA, 19 nt, Human
caugucagucugcuuagaa

SEQ ID NO: 3002489 - RNA, 17 nt, Human
cauguuggccaggcugg

SEQ ID NO: 3002490 - RNA, 18 nt, Human
cauguuggccaggcuggu

SEQ ID NO: 3002491 - RNA, 18 nt, Human
cauguucuuaauucuuag

SEQ ID NO: 3002492 - RNA, 19 nt, Human
cauuauauuuauuacugua

SEQ ID NO: 3002493 - RNA, 21 nt, Human
cauggccucuucagaucucua

SEQ ID NO: 3002494 - RNA, 18 nt, Human
caugggaaaggggaaguu

SEQ ID NO: 3002495 - RNA, 14 nt, Human
caugcuccuggccc

SEQ ID NO: 3002496 - RNA, 16 nt, Human
caugcuccuggcccac

SEQ ID NO: 3002497 - RNA, 17 nt, Human
caugcuccuggcccacu

SEQ ID NO: 3002498 - RNA, 13 nt, Human
caugacaaagacu

SEQ ID NO: 3002499 - RNA, 15 nt, Human
caugcaaggucauuu

SEQ ID NO: 3002500 - RNA, 12 nt, Human
caugcaagguca

SEQ ID NO: 3002501 - RNA, 14 nt, Human
ccaaaaggcagaag

SEQ ID NO: 3002502 - RNA, 16 nt, Human
cauuuguauaaaauaa

SEQ ID NO: 3002503 - RNA, 14 nt, Human
cauuuguauaaaau

SEQ ID NO: 3002504 - RNA, 20 nt, Human
cauuuguguugaagagguuu

SEQ ID NO: 3002505 - RNA, 23 nt, Human
cauuuuuuuuaagaaaaaggaug

SEQ ID NO: 3002506 - RNA, 16 nt, Human
cauuuaggugaggaag

SEQ ID NO: 3002507 - RNA, 21 nt, Human
cauuggggcucccagccaggc

SEQ ID NO: 3002508 - RNA, 19 nt, Human
cauuggggcucccagccag

SEQ ID NO: 3002509 - RNA, 18 nt, Human
cauuggggcucccagcca

SEQ ID NO: 3002510 - RNA, 17 nt, Human
cauuggggcucccagcc

SEQ ID NO: 3002511 - RNA, 22 nt, Human
cauuggggcucccagccaggcc

SEQ ID NO: 3002512 - RNA, 18 nt, Human
cauuuaggugaggaagca

SEQ ID NO: 3002513 - RNA, 16 nt, Human
cauuggggcucccagc

SEQ ID NO: 3002514 - RNA, 15 nt, Human
cauuggggcucccag

SEQ ID NO: 3002515 - RNA, 21 nt, Human
ccaacuccagaaagugacaag

SEQ ID NO: 3002516 - RNA, 21 nt, Human
ccaacucaccccagccccaaa

SEQ ID NO: 3002517 - RNA, 15 nt, Human
ccaagcucugcuccu

SEQ ID NO: 3002518 - RNA, 14 nt, Human
ccaagcucugcucc

SEQ ID NO: 3002519 - RNA, 16 nt, Human
ccaagcucugcuccuc

SEQ ID NO: 3002520 - RNA, 13 nt, Human
ccaacucacccca

SEQ ID NO: 3002521 - RNA, 23 nt, Human
ccaaaucagcugcuacuacuccu

SEQ ID NO: 3002522 - RNA, 15 nt, Human
ccaaaucagcugcua

SEQ ID NO: 3002523 - RNA, 23 nt, Human
ccaauggacuaacuugucuuugg

SEQ ID NO: 3002524 - RNA, 22 nt, Human
ccaaaguacacuguuucaaacu

SEQ ID NO: 3002525 - RNA, 14 nt, Human
ccaggaguuuggcc

SEQ ID NO: 3002526 - RNA, 15 nt, Human
ccaggaguuuggcca

SEQ ID NO: 3002527 - RNA, 16 nt, Human
ccaggaguuuggccag

SEQ ID NO: 3002528 - RNA, 17 nt, Human
ccaggaguuuggccaga

SEQ ID NO: 3002529 - RNA, 18 nt, Human
ccaggaguuuggccagaa

SEQ ID NO: 3002530 - RNA, 17 nt, Human
ccaggcagcagacacau

SEQ ID NO: 3002531 - RNA, 15 nt, Human
ccaggcagcagacac

SEQ ID NO: 3002532 - RNA, 15 nt, Human
ccaggggccaugaau

SEQ ID NO: 3002533 - RNA, 19 nt, Human
ccaggggugggacacccug

SEQ ID NO: 3002534 - RNA, 20 nt, Human
ccaggggugggacacccugu

SEQ ID NO: 3002535 - RNA, 21 nt, Human
ccaggggugggacacccugug

SEQ ID NO: 3002536 - RNA, 22 nt, Human
ccaggggugggacacccuguga

SEQ ID NO: 3002537 - RNA, 13 nt, Human
ccaguaucuugaa

SEQ ID NO: 3002538 - RNA, 19 nt, Human
ccaguaucuugaagacuuu

SEQ ID NO: 3002539 - RNA, 22 nt, Human
ccaguaucuugaagacuuuucu

SEQ ID NO: 3002540 - RNA, 16 nt, Human
ccagucaccccggcca

SEQ ID NO: 3002541 - RNA, 17 nt, Human
ccagucaccccggccac

SEQ ID NO: 3002542 - RNA, 18 nt, Human
ccagucaccccggccacc

SEQ ID NO: 3002543 - RNA, 16 nt, Human
ccaguccugcccgcca

SEQ ID NO: 3002544 - RNA, 22 nt, Human
ccagcagaaaugccuuacccuc

SEQ ID NO: 3002545 - RNA, 17 nt, Human
ccagcagaaaugccuua

SEQ ID NO: 3002546 - RNA, 16 nt, Human
ccagcagaaaugccuu

SEQ ID NO: 3002547 - RNA, 11 nt, Human
ccagcagccug

SEQ ID NO: 3002548 - RNA, 12 nt, Human
ccagcagccugg

SEQ ID NO: 3002549 - RNA, 12 nt, Human
ccagcagaaaug

SEQ ID NO: 3002550 - RNA, 13 nt, Human
ccagccccuggau

SEQ ID NO: 3002551 - RNA, 14 nt, Human
ccagccccuggaug

SEQ ID NO: 3002552 - RNA, 15 nt, Human
ccagccccuggaugc

SEQ ID NO: 3002553 - RNA, 13 nt, Human
ccagcagccugga

SEQ ID NO: 3002554 - RNA, 23 nt, Human
ccagccccauccucuguacagag

SEQ ID NO: 3002555 - RNA, 18 nt, Human
ccagccccauccucugua

SEQ ID NO: 3002556 - RNA, 18 nt, Human
ccagccccuggaugcagc

SEQ ID NO: 3002557 - RNA, 15 nt, Human
ccagccccuucugac

SEQ ID NO: 3002558 - RNA, 16 nt, Human
ccagccccuucugacc

SEQ ID NO: 3002559 - RNA, 17 nt, Human
ccagccccuucugaccc

SEQ ID NO: 3002560 - RNA, 18 nt, Human
ccagccccuucugaccca

SEQ ID NO: 3002561 - RNA, 21 nt, Human
ccagcgagcccugguggcagu

SEQ ID NO: 3002562 - RNA, 20 nt, Human
ccaggaaaggcuccaggagc

SEQ ID NO: 3002563 - RNA, 18 nt, Human
ccaggaaaggcuccagga

SEQ ID NO: 3002564 - RNA, 19 nt, Human
ccaggaaaggcuccaggag

SEQ ID NO: 3002565 - RNA, 17 nt, Human
ccaggaaaggcuccagg

SEQ ID NO: 3002566 - RNA, 18 nt, Human
ccacuugagugucaagcu

SEQ ID NO: 3002567 - RNA, 12 nt, Human
ccacuuggucug

SEQ ID NO: 3002568 - RNA, 19 nt, Human
ccacugcaccgggccacag

SEQ ID NO: 3002569 - RNA, 17 nt, Human
ccacugcaccgggccac

SEQ ID NO: 3002570 - RNA, 14 nt, Human
ccacugcaccgggc

SEQ ID NO: 3002571 - RNA, 13 nt, Human
ccacugcaccggg

SEQ ID NO: 3002572 - RNA, 20 nt, Human
ccacugcacuauagccuagg

SEQ ID NO: 3002573 - RNA, 19 nt, Human
ccacugcacuauagccuag

SEQ ID NO: 3002574 - RNA, 19 nt, Human
ccacuuggucugugagaug

SEQ ID NO: 3002575 - RNA, 17 nt, Human
ccacuuggucugugaga

SEQ ID NO: 3002576 - RNA, 16 nt, Human
ccacuuggucugugag

SEQ ID NO: 3002577 - RNA, 15 nt, Human
ccacuuggucuguga

SEQ ID NO: 3002578 - RNA, 22 nt, Human
ccacuuggucugugagaugcua

SEQ ID NO: 3002579 - RNA, 20 nt, Human
ccacuuggucugugagaugc

SEQ ID NO: 3002580 - RNA, 20 nt, Human
ccacuuucuagccagaggag

SEQ ID NO: 3002581 - RNA, 18 nt, Human
ccacuuucuagccagagg

SEQ ID NO: 3002582 - RNA, 19 nt, Human
ccacuuucuagccagagga

SEQ ID NO: 3002583 - RNA, 13 nt, Human
ccacuuucuagcc

SEQ ID NO: 3002584 - RNA, 22 nt, Human
ccacuuuuguucuugguuugua

SEQ ID NO: 3002585 - RNA, 21 nt, Human
ccacuuuuguucuugguuugu

SEQ ID NO: 3002586 - RNA, 15 nt, Human
ccacuuuuguucuug

SEQ ID NO: 3002587 - RNA, 14 nt, Human
ccacuuuuguucuu

SEQ ID NO: 3002588 - RNA, 16 nt, Human
ccagacccggcugcgu

SEQ ID NO: 3002589 - RNA, 17 nt, Human
ccagacccggcugcgug

SEQ ID NO: 3002590 - RNA, 16 nt, Human
ccagagacacaagccu

SEQ ID NO: 3002591 - RNA, 18 nt, Human
ccagagacacaagccuuc

SEQ ID NO: 3002592 - RNA, 13 nt, Human
ccagagagggugg

SEQ ID NO: 3002593 - RNA, 14 nt, Human
ccagaugcaccagc

SEQ ID NO: 3002594 - RNA, 13 nt, Human
ccagaugcaccag

SEQ ID NO: 3002595 - RNA, 14 nt, Human
cccauucuuggccc

SEQ ID NO: 3002596 - RNA, 23 nt, Human
cccauucugccugcccaggcccc

SEQ ID NO: 3002597 - RNA, 15 nt, Human
ccccauuguggucac

SEQ ID NO: 3002598 - RNA, 14 nt, Human
cccccuuccaugga

SEQ ID NO: 3002599 - RNA, 20 nt, Human
cccccuguggaugcugcugc

SEQ ID NO: 3002600 - RNA, 12 nt, Human
ccccgcccaggc

SEQ ID NO: 3002601 - RNA, 14 nt, Human
ccccgcccaggcuu

SEQ ID NO: 3002602 - RNA, 14 nt, Human
ccccggccaccugc

SEQ ID NO: 3002603 - RNA, 18 nt, Human
ccccggccaccugcggug

SEQ ID NO: 3002604 - RNA, 13 nt, Human
ccccggccaccug

SEQ ID NO: 3002605 - RNA, 18 nt, Human
ccccaaaacucuccucug

SEQ ID NO: 3002606 - RNA, 20 nt, Human
ccccaaaacucuccucugcu

SEQ ID NO: 3002607 - RNA, 14 nt, Human
ccccagccccaucc

SEQ ID NO: 3002608 - RNA, 14 nt, Human
ccccagccccaaaa

SEQ ID NO: 3002609 - RNA, 21 nt, Human
ccccauucugccugcccaggc

SEQ ID NO: 3002610 - RNA, 10 nt, Human
ccccagcccc

SEQ ID NO: 3002611 - RNA, 12 nt, Human
ccccagccccaa

SEQ ID NO: 3002612 - RNA, 20 nt, Human
cccauccucuguacagagcc

SEQ ID NO: 3002613 - RNA, 15 nt, Human
cccauccucuguaca

SEQ ID NO: 3002614 - RNA, 19 nt, Human
cccauccucuguacagagc

SEQ ID NO: 3002615 - RNA, 14 nt, Human
cccauccucuguac

SEQ ID NO: 3002616 - RNA, 17 nt, Human
cccagggcaucugggag

SEQ ID NO: 3002617 - RNA, 16 nt, Human
cccagggcaucuggga

SEQ ID NO: 3002618 - RNA, 18 nt, Human
cccaggcuggcgugcagu

SEQ ID NO: 3002619 - RNA, 20 nt, Human
cccaggcuggcgugcagugg

SEQ ID NO: 3002620 - RNA, 19 nt, Human
cccaggcuggcgugcagug

SEQ ID NO: 3002621 - RNA, 21 nt, Human
cccagccccaaaacucuccuc

SEQ ID NO: 3002622 - RNA, 23 nt, Human
cccagccccaaaacucuccucug

SEQ ID NO: 3002623 - RNA, 19 nt, Human
cccagcccacuucugccau

SEQ ID NO: 3002624 - RNA, 17 nt, Human
cccagcccacuucugcc

SEQ ID NO: 3002625 - RNA, 16 nt, Human
ccaugaggaacaaggc

SEQ ID NO: 3002626 - RNA, 17 nt, Human
ccaugaggaacaaggca

SEQ ID NO: 3002627 - RNA, 18 nt, Human
ccaugaggaacaaggcaa

SEQ ID NO: 3002628 - RNA, 18 nt, Human
ccaugggcacugugggua

SEQ ID NO: 3002629 - RNA, 17 nt, Human
ccaugggccuccugugu

SEQ ID NO: 3002630 - RNA, 15 nt, Human
cccaccgcagacagg

SEQ ID NO: 3002631 - RNA, 18 nt, Human
cccaccgcagacaggacc

SEQ ID NO: 3002632 - RNA, 17 nt, Human
cccaagcucugcuccuc

SEQ ID NO: 3002633 - RNA, 15 nt, Human
cccaagcucugcucc

SEQ ID NO: 3002634 - RNA, 15 nt, Human
cccacccaagggccu

SEQ ID NO: 3002635 - RNA, 18 nt, Human
cccaccaucaugucuggc

SEQ ID NO: 3002636 - RNA, 13 nt, Human
ccauuuaaagcuu

SEQ ID NO: 3002637 - RNA, 19 nt, Human
ccauuggggcucccagcca

SEQ ID NO: 3002638 - RNA, 21 nt, Human
ccauuggggcucccagccagg

SEQ ID NO: 3002639 - RNA, 20 nt, Human
ccauuggggcucccagccag

SEQ ID NO: 3002640 - RNA, 22 nt, Human
ccauuggggcucccagccaggc

SEQ ID NO: 3002641 - RNA, 22 nt, Human
ccauuguggucacaggaaguag

SEQ ID NO: 3002642 - RNA, 13 nt, Human
ccucaugcugcca

SEQ ID NO: 3002643 - RNA, 15 nt, Human
ccucaugcugccaau

SEQ ID NO: 3002644 - RNA, 11 nt, Human
ccucaggcagg

SEQ ID NO: 3002645 - RNA, 17 nt, Human
ccucccaacucacccca

SEQ ID NO: 3002646 - RNA, 20 nt, Human
ccucccaacucaccccagcc

SEQ ID NO: 3002647 - RNA, 21 nt, Human
ccucccaacucaccccagccc

SEQ ID NO: 3002648 - RNA, 16 nt, Human
ccucaugcugccaaua

SEQ ID NO: 3002649 - RNA, 16 nt, Human
ccucuccugggcagcu

SEQ ID NO: 3002650 - RNA, 15 nt, Human
ccucuccugggcagc

SEQ ID NO: 3002651 - RNA, 14 nt, Human
ccucuccugggcag

SEQ ID NO: 3002652 - RNA, 20 nt, Human
ccucuccugggcagcugccu

SEQ ID NO: 3002653 - RNA, 19 nt, Human
ccucuccugggcagcugcc

SEQ ID NO: 3002654 - RNA, 18 nt, Human
ccucuccugggcagcugc

SEQ ID NO: 3002655 - RNA, 17 nt, Human
ccucuccugggcagcug

SEQ ID NO: 3002656 - RNA, 22 nt, Human
ccucuccugggcagcugccucc

SEQ ID NO: 3002657 - RNA, 21 nt, Human
ccucuccugggcagcugccuc

SEQ ID NO: 3002658 - RNA, 20 nt, Human
ccucugccugaagucacaca

SEQ ID NO: 3002659 - RNA, 11 nt, Human
ccucugccuga

SEQ ID NO: 3002660 - RNA, 23 nt, Human
ccucugccucugacacacagcuc

SEQ ID NO: 3002661 - RNA, 21 nt, Human
ccucugccucugacacacagc

SEQ ID NO: 3002662 - RNA, 20 nt, Human
ccucugccucugacacacag

SEQ ID NO: 3002663 - RNA, 19 nt, Human
ccuccuuugugaggaagcc

SEQ ID NO: 3002664 - RNA, 20 nt, Human
ccuccuuugugaggaagccg

SEQ ID NO: 3002665 - RNA, 18 nt, Human
ccuccuuugugaggaagc

SEQ ID NO: 3002666 - RNA, 15 nt, Human
ccucgaacuggcugc

SEQ ID NO: 3002667 - RNA, 16 nt, Human
ccucgaacuggcugca

SEQ ID NO: 3002668 - RNA, 14 nt, Human
ccuccuaaaacaac

SEQ ID NO: 3002669 - RNA, 23 nt, Human
ccugccuccuuugugaggaagcc

SEQ ID NO: 3002670 - RNA, 21 nt, Human
ccugccuccuuugugaggaag

SEQ ID NO: 3002671 - RNA, 22 nt, Human
ccugccuccuuugugaggaagc

SEQ ID NO: 3002672 - RNA, 13 nt, Human
ccugccuccuuug

SEQ ID NO: 3002673 - RNA, 15 nt, Human
ccugccuccuuugug

SEQ ID NO: 3002674 - RNA, 19 nt, Human
ccugccuccuuugugagga

SEQ ID NO: 3002675 - RNA, 20 nt, Human
ccugccuccuuugugaggaa

SEQ ID NO: 3002676 - RNA, 15 nt, Human
ccugccucuucucua

SEQ ID NO: 3002677 - RNA, 12 nt, Human
ccugcugcaguu

SEQ ID NO: 3002678 - RNA, 16 nt, Human
ccugcugcaguugcca

SEQ ID NO: 3002679 - RNA, 11 nt, Human
ccugcugcagu

SEQ ID NO: 3002680 - RNA, 22 nt, Human
ccugcugcaguugccagucacc

SEQ ID NO: 3002681 - RNA, 21 nt, Human
ccugcugcaguugccagucac

SEQ ID NO: 3002682 - RNA, 16 nt, Human
ccucuuugagugaagc

SEQ ID NO: 3002683 - RNA, 19 nt, Human
ccucuuuggucuacacugu

SEQ ID NO: 3002684 - RNA, 23 nt, Human
ccugcaggcagccaggccacaag

SEQ ID NO: 3002685 - RNA, 18 nt, Human
ccugcaggcagccaggcc

SEQ ID NO: 3002686 - RNA, 19 nt, Human
ccugcaggcagccaggcca

SEQ ID NO: 3002687 - RNA, 20 nt, Human
ccugcaggcagccaggccac

SEQ ID NO: 3002688 - RNA, 21 nt, Human
ccugcaggcagccaggccaca

SEQ ID NO: 3002689 - RNA, 15 nt, Human
ccugcaggcagccag

SEQ ID NO: 3002690 - RNA, 12 nt, Human
ccugcagagggc

SEQ ID NO: 3002691 - RNA, 16 nt, Human
ccugcaggcagccagg

SEQ ID NO: 3002692 - RNA, 17 nt, Human
ccugcaggcagccaggc

SEQ ID NO: 3002693 - RNA, 16 nt, Human
ccugaggcugggcucc

SEQ ID NO: 3002694 - RNA, 17 nt, Human
ccugaggcugggcuccc

SEQ ID NO: 3002695 - RNA, 19 nt, Human
ccugaggcugggcucccuu

SEQ ID NO: 3002696 - RNA, 21 nt, Human
ccugaggcugggcucccuucc

SEQ ID NO: 3002697 - RNA, 16 nt, Human
ccugaggggccucuua

SEQ ID NO: 3002698 - RNA, 12 nt, Human
ccugaggggccu

SEQ ID NO: 3002699 - RNA, 17 nt, Human
ccgucuaccugaggggc

SEQ ID NO: 3002700 - RNA, 12 nt, Human
ccgugaggccag

SEQ ID NO: 3002701 - RNA, 13 nt, Human
ccgugaggccaga

SEQ ID NO: 3002702 - RNA, 14 nt, Human
ccgugaggccagag

SEQ ID NO: 3002703 - RNA, 16 nt, Human
ccgugaggccagagac

SEQ ID NO: 3002704 - RNA, 20 nt, Human
ccuaacgaaguauccuucag

SEQ ID NO: 3002705 - RNA, 15 nt, Human
ccuaacgaaguaucc

SEQ ID NO: 3002706 - RNA, 14 nt, Human
ccgucuaccugagg

SEQ ID NO: 3002707 - RNA, 15 nt, Human
ccgucuaccugaggg

SEQ ID NO: 3002708 - RNA, 15 nt, Human
ccggcuccaggcucc

SEQ ID NO: 3002709 - RNA, 14 nt, Human
ccggcuccaggcuc

SEQ ID NO: 3002710 - RNA, 13 nt, Human
ccggcuccaggcu

SEQ ID NO: 3002711 - RNA, 12 nt, Human
ccggcuccaggc

SEQ ID NO: 3002712 - RNA, 14 nt, Human
ccuaaucuucugaa

SEQ ID NO: 3002713 - RNA, 20 nt, Human
ccuagccugugccucuggga

SEQ ID NO: 3002714 - RNA, 17 nt, Human
ccuagcacuuugggagg

SEQ ID NO: 3002715 - RNA, 19 nt, Human
ccuagcauacguacacauu

SEQ ID NO: 3002716 - RNA, 16 nt, Human
ccggccaccugcggug

SEQ ID NO: 3002717 - RNA, 15 nt, Human
ccggccccugcuggu

SEQ ID NO: 3002718 - RNA, 16 nt, Human
ccggcccuccagagcc

SEQ ID NO: 3002719 - RNA, 13 nt, Human
ccggcccuccaga

SEQ ID NO: 3002720 - RNA, 17 nt, Human
ccggcccuccagagccc

SEQ ID NO: 3002721 - RNA, 18 nt, Human
ccggcaggguccuagaaa

SEQ ID NO: 3002722 - RNA, 21 nt, Human
cccugugauggggcccugccu

SEQ ID NO: 3002723 - RNA, 22 nt, Human
cccugugauggggcccugccuc

SEQ ID NO: 3002724 - RNA, 23 nt, Human
cccugugauggggcccugccucc

SEQ ID NO: 3002725 - RNA, 16 nt, Human
ccgcagacaggaccag

SEQ ID NO: 3002726 - RNA, 17 nt, Human
ccgcagacaggaccagg

SEQ ID NO: 3002727 - RNA, 17 nt, Human
ccgcccaaggccuuccc

SEQ ID NO: 3002728 - RNA, 14 nt, Human
ccgcccaaggccuu

SEQ ID NO: 3002729 - RNA, 13 nt, Human
ccgcccaaggccu

SEQ ID NO: 3002730 - RNA, 12 nt, Human
ccgcccaaggcc

SEQ ID NO: 3002731 - RNA, 12 nt, Human
ccgcccaggcuu

SEQ ID NO: 3002732 - RNA, 17 nt, Human
ccgaccagacaccuuga

SEQ ID NO: 3002733 - RNA, 13 nt, Human
ccgaccagacacc

SEQ ID NO: 3002734 - RNA, 15 nt, Human
ccgcagacaggacca

SEQ ID NO: 3002735 - RNA, 17 nt, Human
ccgaauagcugggacua

SEQ ID NO: 3002736 - RNA, 16 nt, Human
ccgaauagcugggacu

SEQ ID NO: 3002737 - RNA, 16 nt, Human
ccgaaaacguggcugc

SEQ ID NO: 3002738 - RNA, 17 nt, Human
ccgaaaacguggcugcu

SEQ ID NO: 3002739 - RNA, 19 nt, Human
ccgaaagggacuuggaagc

SEQ ID NO: 3002740 - RNA, 15 nt, Human
cccuuccucuuucca

SEQ ID NO: 3002741 - RNA, 16 nt, Human
cccugagcuuucugcu

SEQ ID NO: 3002742 - RNA, 20 nt, Human
cccugcccaccuggccucug

SEQ ID NO: 3002743 - RNA, 14 nt, Human
cccugagcaggauu

SEQ ID NO: 3002744 - RNA, 17 nt, Human
cccugcccggcugcgga

SEQ ID NO: 3002745 - RNA, 14 nt, Human
cccugcccggcugc

SEQ ID NO: 3002746 - RNA, 22 nt, Human
cccugcccaccuggccucugca

SEQ ID NO: 3002747 - RNA, 17 nt, Human
cccuggaugcagccuca

SEQ ID NO: 3002748 - RNA, 21 nt, Human
cccuggaugcagccucacagu

SEQ ID NO: 3002749 - RNA, 13 nt, Human
cccuggaugcagc

SEQ ID NO: 3002750 - RNA, 13 nt, Human
cccuggcacuggc

SEQ ID NO: 3002751 - RNA, 16 nt, Human
cccuggcacuggcaaa

SEQ ID NO: 3002752 - RNA, 20 nt, Human
cccuggcacuggcaaacagg

SEQ ID NO: 3002753 - RNA, 13 nt, Human
cccucggagaaga

SEQ ID NO: 3002754 - RNA, 18 nt, Human
cccugaaagcccugagcu

SEQ ID NO: 3002755 - RNA, 16 nt, Human
cccugacaacacucau

SEQ ID NO: 3002756 - RNA, 22 nt, Human
cccugacaacacucauugaccu

SEQ ID NO: 3002757 - RNA, 20 nt, Human
cccugaauuuaaauagcuuu

SEQ ID NO: 3002758 - RNA, 20 nt, Human
cccugaaggccccgcccagg

SEQ ID NO: 3002759 - RNA, 22 nt, Human
cccugaaggccccgcccaggcu

SEQ ID NO: 3002760 - RNA, 14 nt, Human
cccugacaacacuc

SEQ ID NO: 3002761 - RNA, 13 nt, Human
cccugaaggcccc

SEQ ID NO: 3002762 - RNA, 14 nt, Human
cccugaaggccccg

SEQ ID NO: 3002763 - RNA, 16 nt, Human
cccugaaggccccgcc

SEQ ID NO: 3002764 - RNA, 19 nt, Human
cccugaaggccccgcccag

SEQ ID NO: 3002765 - RNA, 12 nt, Human
cccugaaggccc

SEQ ID NO: 3002766 - RNA, 16 nt, Human
cccugaaagcccugag

SEQ ID NO: 3002767 - RNA, 13 nt, Human
ccuuucccuuggu

SEQ ID NO: 3002768 - RNA, 17 nt, Human
ccuuucaauaggaaaaa

SEQ ID NO: 3002769 - RNA, 15 nt, Human
ccuuucaauaggaaa

SEQ ID NO: 3002770 - RNA, 13 nt, Human
ccuuccccuggca

SEQ ID NO: 3002771 - RNA, 20 nt, Human
ccuucucuccagccccugga

SEQ ID NO: 3002772 - RNA, 16 nt, Human
ccuucucugaaggaca

SEQ ID NO: 3002773 - RNA, 14 nt, Human
ccuucucugaagga

SEQ ID NO: 3002774 - RNA, 21 nt, Human
ccuucucuccagccccuggau

SEQ ID NO: 3002775 - RNA, 23 nt, Human
ccuucucuccagccccuggaugc

SEQ ID NO: 3002776 - RNA, 17 nt, Human
ccuucucuucacaguca

SEQ ID NO: 3002777 - RNA, 21 nt, Human
ccuucuguccuacucuguguc

SEQ ID NO: 3002778 - RNA, 20 nt, Human
ccuucuguccuacucugugu

SEQ ID NO: 3002779 - RNA, 22 nt, Human
ccuucuguccuacucuguguca

SEQ ID NO: 3002780 - RNA, 12 nt, Human
ccuuauggaaca

SEQ ID NO: 3002781 - RNA, 22 nt, Human
ccuuauggaacacucugagacu

SEQ ID NO: 3002782 - RNA, 19 nt, Human
ccuuauggaacacucugag

SEQ ID NO: 3002783 - RNA, 20 nt, Human
ccuuauggaacacucugaga

SEQ ID NO: 3002784 - RNA, 14 nt, Human
ccuuauggaacacu

SEQ ID NO: 3002785 - RNA, 16 nt, Human
ccuuauggaacacucu

SEQ ID NO: 3002786 - RNA, 17 nt, Human
ccuuauggaacacucug

SEQ ID NO: 3002787 - RNA, 18 nt, Human
ccuuauggaacacucuga

SEQ ID NO: 3002788 - RNA, 14 nt, Human
ccuucccaccucuc

SEQ ID NO: 3002789 - RNA, 19 nt, Human
ccuucccaccucucucacu

SEQ ID NO: 3002790 - RNA, 12 nt, Human
ccuucccaccuc

SEQ ID NO: 3002791 - RNA, 20 nt, Human
ccuuagcagggaaacagcua

SEQ ID NO: 3002792 - RNA, 19 nt, Human
ccuuagcagggaaacagcu

SEQ ID NO: 3002793 - RNA, 16 nt, Human
ccuuagcaaauucugu

SEQ ID NO: 3002794 - RNA, 17 nt, Human
ccuguugggccaggagc

SEQ ID NO: 3002795 - RNA, 18 nt, Human
ccuguugggccaggagcc

SEQ ID NO: 3002796 - RNA, 19 nt, Human
ccuguugggccaggagccu

SEQ ID NO: 3002797 - RNA, 20 nt, Human
ccuguugggccaggagccuc

SEQ ID NO: 3002798 - RNA, 16 nt, Human
ccuguugggccaggag

SEQ ID NO: 3002799 - RNA, 19 nt, Human
ccuguucagcuccagcuca

SEQ ID NO: 3002800 - RNA, 16 nt, Human
ccuguucagcuccagc

SEQ ID NO: 3002801 - RNA, 15 nt, Human
ccuguucagcuccag

SEQ ID NO: 3002802 - RNA, 14 nt, Human
ccuguucagcucca

SEQ ID NO: 3002803 - RNA, 21 nt, Human
ccuguucagcuccagcucacc

SEQ ID NO: 3002804 - RNA, 20 nt, Human
ccuguucagcuccagcucac

SEQ ID NO: 3002805 - RNA, 23 nt, Human
ccuguucagcuccagcucaccag

SEQ ID NO: 3002806 - RNA, 12 nt, Human
ccuguucuggca

SEQ ID NO: 3002807 - RNA, 17 nt, Human
ccuguucuggcagaguu

SEQ ID NO: 3002808 - RNA, 18 nt, Human
ccuguucccaugagauga

SEQ ID NO: 3002809 - RNA, 13 nt, Human
ccuguucagcucc

SEQ ID NO: 3002810 - RNA, 13 nt, Human
cuaacuuggguua

SEQ ID NO: 3002811 - RNA, 14 nt, Human
cuaacuugucuuug

SEQ ID NO: 3002812 - RNA, 22 nt, Human
cuaacuugucuuuggacccuga

SEQ ID NO: 3002813 - RNA, 20 nt, Human
cuaacgaaguauccuucagc

SEQ ID NO: 3002814 - RNA, 11 nt, Human
cuaaagcugcc

SEQ ID NO: 3002815 - RNA, 19 nt, Human
cgugaguccuggcauggga

SEQ ID NO: 3002816 - RNA, 18 nt, Human
cgugaguccuggcauggg

SEQ ID NO: 3002817 - RNA, 19 nt, Human
cguguuaugacuccagaau

SEQ ID NO: 3002818 - RNA, 15 nt, Human
cguguuaugacucca

SEQ ID NO: 3002819 - RNA, 12 nt, Human
cgugacaacacu

SEQ ID NO: 3002820 - RNA, 15 nt, Human
cgugacaacacuugu

SEQ ID NO: 3002821 - RNA, 14 nt, Human
cgugacaacacuug

SEQ ID NO: 3002822 - RNA, 20 nt, Human
cgugagccacugcaccgggc

SEQ ID NO: 3002823 - RNA, 15 nt, Human
cgugagccacugcac

SEQ ID NO: 3002824 - RNA, 14 nt, Human
cgugagccacugca

SEQ ID NO: 3002825 - RNA, 14 nt, Human
cgugaggccagaga

SEQ ID NO: 3002826 - RNA, 22 nt, Human
cgugagccacugcaccgggcca

SEQ ID NO: 3002827 - RNA, 19 nt, Human
cuaauaaaaaggugaccau

SEQ ID NO: 3002828 - RNA, 14 nt, Human
cuaaguuuuuaugg

SEQ ID NO: 3002829 - RNA, 19 nt, Human
cuacaaaaagcauaaaaau

SEQ ID NO: 3002830 - RNA, 20 nt, Human
cuacaaaaacacagcaaggg

SEQ ID NO: 3002831 - RNA, 18 nt, Human
cuaaguaucaaguauaga

SEQ ID NO: 3002832 - RNA, 20 nt, Human
cgguggcucacgccuguaau

SEQ ID NO: 3002833 - RNA, 22 nt, Human
cguacacauuuuauuuuauuau

SEQ ID NO: 3002834 - RNA, 12 nt, Human
cgggcucugccu

SEQ ID NO: 3002835 - RNA, 19 nt, Human
cgggcucagcaaaagaugc

SEQ ID NO: 3002836 - RNA, 17 nt, Human
cgggccacagagaaagu

SEQ ID NO: 3002837 - RNA, 17 nt, Human
cggagacggagucccac

SEQ ID NO: 3002838 - RNA, 20 nt, Human
cggagacggagucccaccuu

SEQ ID NO: 3002839 - RNA, 22 nt, Human
cggagucccaccuuggcugcag

SEQ ID NO: 3002840 - RNA, 21 nt, Human
cggagucccaccuuggcugca

SEQ ID NO: 3002841 - RNA, 23 nt, Human
cggagucccaccuuggcugcagg

SEQ ID NO: 3002842 - RNA, 12 nt, Human
ccuuuucccaac

SEQ ID NO: 3002843 - RNA, 23 nt, Human
cgccaaggcugggggaagaagcu

SEQ ID NO: 3002844 - RNA, 23 nt, Human
cgagggggcugcucccaccuggc

SEQ ID NO: 3002845 - RNA, 18 nt, Human
cgagggggcugcucccac

SEQ ID NO: 3002846 - RNA, 17 nt, Human
cgagggggcugcuccca

SEQ ID NO: 3002847 - RNA, 15 nt, Human
cgagggggcugcucc

SEQ ID NO: 3002848 - RNA, 18 nt, Human
cgcuggagugcagugagc

SEQ ID NO: 3002849 - RNA, 17 nt, Human
cgcuggagugcagugag

SEQ ID NO: 3002850 - RNA, 19 nt, Human
cgcugccccuggcagcccc

SEQ ID NO: 3002851 - RNA, 20 nt, Human
cgcugccccuggcagccccu

SEQ ID NO: 3002852 - RNA, 13 nt, Human
cuauguuaauauu

SEQ ID NO: 3002853 - RNA, 15 nt, Human
cuauguuaauauuuu

SEQ ID NO: 3002854 - RNA, 17 nt, Human
cuauguuaauauuuuag

SEQ ID NO: 3002855 - RNA, 14 nt, Human
cuauguuaauauuu

SEQ ID NO: 3002856 - RNA, 21 nt, Human
cuauguuaauauuuuaggugu

SEQ ID NO: 3002857 - RNA, 18 nt, Human
cuauguucuaagaaguga

SEQ ID NO: 3002858 - RNA, 22 nt, Human
cuauguugcccaggcaggucuu

SEQ ID NO: 3002859 - RNA, 21 nt, Human
cuauguugcccaggcaggucu

SEQ ID NO: 3002860 - RNA, 19 nt, Human
cuauguugcccaggcaggu

SEQ ID NO: 3002861 - RNA, 18 nt, Human
cuauguugcccaggcagg

SEQ ID NO: 3002862 - RNA, 13 nt, Human
cuaucucccccag

SEQ ID NO: 3002863 - RNA, 14 nt, Human
cuaucucccccagc

SEQ ID NO: 3002864 - RNA, 18 nt, Human
cuaucucauuuccaagca

SEQ ID NO: 3002865 - RNA, 14 nt, Human
cuaugugagaccau

SEQ ID NO: 3002866 - RNA, 23 nt, Human
cuaugucauuugcuggagcucug

SEQ ID NO: 3002867 - RNA, 17 nt, Human
cuaucacugguuugguu

SEQ ID NO: 3002868 - RNA, 12 nt, Human
cuauguuuuugu

SEQ ID NO: 3002869 - RNA, 21 nt, Human
cucaagugauucuccugccuc

SEQ ID NO: 3002870 - RNA, 23 nt, Human
cucaauuauuuugcauuuuuucu

SEQ ID NO: 3002871 - RNA, 18 nt, Human
cucaguagucagacugga

SEQ ID NO: 3002872 - RNA, 23 nt, Human
cucaggugucccugcacuugcag

SEQ ID NO: 3002873 - RNA, 16 nt, Human
cucaguccaugaagau

SEQ ID NO: 3002874 - RNA, 20 nt, Human
cucagucuggcccuuccuuu

SEQ ID NO: 3002875 - RNA, 17 nt, Human
cucaguccauagcagag

SEQ ID NO: 3002876 - RNA, 15 nt, Human
cucaguccauagcag

SEQ ID NO: 3002877 - RNA, 22 nt, Human
cucagucuggcccuuccuuuuc

SEQ ID NO: 3002878 - RNA, 22 nt, Human
cucagccucccgaauagcuggg

SEQ ID NO: 3002879 - RNA, 21 nt, Human
cucagccucccgaauagcugg

SEQ ID NO: 3002880 - RNA, 19 nt, Human
cucagccucccgaauagcu

SEQ ID NO: 3002881 - RNA, 23 nt, Human
cucagaagacacugaugggcaac

SEQ ID NO: 3002882 - RNA, 17 nt, Human
cucaccuuucccaucuu

SEQ ID NO: 3002883 - RNA, 22 nt, Human
cucagaagacacugaugggcaa

SEQ ID NO: 3002884 - RNA, 20 nt, Human
cucagaagacacugaugggc

SEQ ID NO: 3002885 - RNA, 17 nt, Human
cucagaagacacugaug

SEQ ID NO: 3002886 - RNA, 15 nt, Human
cucagaagacacuga

SEQ ID NO: 3002887 - RNA, 13 nt, Human
cucagaagacacu

SEQ ID NO: 3002888 - RNA, 16 nt, Human
cucaggccagcugcuu

SEQ ID NO: 3002889 - RNA, 17 nt, Human
cucaggccagcugcuug

SEQ ID NO: 3002890 - RNA, 18 nt, Human
cucaggccagcugcuugg

SEQ ID NO: 3002891 - RNA, 22 nt, Human
cucaggccugggggcugggcag

SEQ ID NO: 3002892 - RNA, 11 nt, Human
cucaggccugg

SEQ ID NO: 3002893 - RNA, 19 nt, Human
cucaggccaaacucaccug

SEQ ID NO: 3002894 - RNA, 20 nt, Human
cucaggccaaacucaccugc

SEQ ID NO: 3002895 - RNA, 21 nt, Human
cucaggccaaacucaccugcc

SEQ ID NO: 3002896 - RNA, 15 nt, Human
cucaggccagcugcu

SEQ ID NO: 3002897 - RNA, 16 nt, Human
cucucuguaauaaacu

SEQ ID NO: 3002898 - RNA, 21 nt, Human
cucucuguaauaaacucauuu

SEQ ID NO: 3002899 - RNA, 22 nt, Human
cucucuggccuucggccuccau

SEQ ID NO: 3002900 - RNA, 19 nt, Human
cucucccugcugcuccuag

SEQ ID NO: 3002901 - RNA, 16 nt, Human
cucucccugcugcucc

SEQ ID NO: 3002902 - RNA, 20 nt, Human
cucucccugcugcuccuagg

SEQ ID NO: 3002903 - RNA, 16 nt, Human
cucuccuccagaguca

SEQ ID NO: 3002904 - RNA, 13 nt, Human
cucucuggccuuc

SEQ ID NO: 3002905 - RNA, 16 nt, Human
cucucuggccuucggc

SEQ ID NO: 3002906 - RNA, 14 nt, Human
cucucuggccuucg

SEQ ID NO: 3002907 - RNA, 13 nt, Human
cucuccuccagag

SEQ ID NO: 3002908 - RNA, 15 nt, Human
cucuccuccagaguc

SEQ ID NO: 3002909 - RNA, 12 nt, Human
cucuccuccaga

SEQ ID NO: 3002910 - RNA, 14 nt, Human
cucucccugcugcu

SEQ ID NO: 3002911 - RNA, 13 nt, Human
cucucccugcugc

SEQ ID NO: 3002912 - RNA, 15 nt, Human
cucuccccaugaugu

SEQ ID NO: 3002913 - RNA, 16 nt, Human
cucuccccaugauguu

SEQ ID NO: 3002914 - RNA, 19 nt, Human
cucuauguucuaagaagug

SEQ ID NO: 3002915 - RNA, 16 nt, Human
cucgguguggagaagc

SEQ ID NO: 3002916 - RNA, 17 nt, Human
cucgguguggagaagcg

SEQ ID NO: 3002917 - RNA, 17 nt, Human
cuccuuugugaggaagc

SEQ ID NO: 3002918 - RNA, 18 nt, Human
cuccuuugugaggaagcc

SEQ ID NO: 3002919 - RNA, 16 nt, Human
cucuguacagagccca

SEQ ID NO: 3002920 - RNA, 14 nt, Human
cucugcugcuggcu

SEQ ID NO: 3002921 - RNA, 15 nt, Human
cucugcugcuggcug

SEQ ID NO: 3002922 - RNA, 16 nt, Human
cucugcugcuggcugg

SEQ ID NO: 3002923 - RNA, 14 nt, Human
cucuguacagagcc

SEQ ID NO: 3002924 - RNA, 15 nt, Human
cucuguacagagccc

SEQ ID NO: 3002925 - RNA, 13 nt, Human
cucuguacagagc

SEQ ID NO: 3002926 - RNA, 23 nt, Human
cucugcugacagacacaggcccg

SEQ ID NO: 3002927 - RNA, 13 nt, Human
cucugcugcuggc

SEQ ID NO: 3002928 - RNA, 20 nt, Human
cucugcugacagacacaggc

SEQ ID NO: 3002929 - RNA, 22 nt, Human
cucugcugacagacacaggccc

SEQ ID NO: 3002930 - RNA, 21 nt, Human
cucugcugacagacacaggcc

SEQ ID NO: 3002931 - RNA, 17 nt, Human
cucugcacuccccugcu

SEQ ID NO: 3002932 - RNA, 21 nt, Human
cucugcuccucuccccagcaa

SEQ ID NO: 3002933 - RNA, 20 nt, Human
cucugcuccucuccccagca

SEQ ID NO: 3002934 - RNA, 20 nt, Human
cucugcacaagcugcacccu

SEQ ID NO: 3002935 - RNA, 21 nt, Human
cucugcacaagcugcacccuc

SEQ ID NO: 3002936 - RNA, 19 nt, Human
cucugcacaagcugcaccc

SEQ ID NO: 3002937 - RNA, 15 nt, Human
cucugcacuccccug

SEQ ID NO: 3002938 - RNA, 16 nt, Human
cucugcacuccccugc

SEQ ID NO: 3002939 - RNA, 14 nt, Human
cucugcacuccccu

SEQ ID NO: 3002940 - RNA, 19 nt, Human
cucccuccaccucccugca

SEQ ID NO: 3002941 - RNA, 21 nt, Human
cucccuccaccucccugcaau

SEQ ID NO: 3002942 - RNA, 20 nt, Human
cucccuccaccucccugcaa

SEQ ID NO: 3002943 - RNA, 22 nt, Human
cucccuccaccucccugcaaua

SEQ ID NO: 3002944 - RNA, 20 nt, Human
cucccucuuucccucccuuc

SEQ ID NO: 3002945 - RNA, 20 nt, Human
cuccaggcuguaucccauga

SEQ ID NO: 3002946 - RNA, 23 nt, Human
cuccaggcuccuuuagcgcccag

SEQ ID NO: 3002947 - RNA, 15 nt, Human
cuccaggcuccuuua

SEQ ID NO: 3002948 - RNA, 23 nt, Human
cuccaggugcacaagcuccaagc

SEQ ID NO: 3002949 - RNA, 13 nt, Human
cuccucugcugcu

SEQ ID NO: 3002950 - RNA, 14 nt, Human
cuccucugcugcug

SEQ ID NO: 3002951 - RNA, 15 nt, Human
cuccucugcugcugg

SEQ ID NO: 3002952 - RNA, 22 nt, Human
cuccucugcuugccaucccucc

SEQ ID NO: 3002953 - RNA, 19 nt, Human
cuccuggcccacugcaucg

SEQ ID NO: 3002954 - RNA, 18 nt, Human
cuccugggcuaagugauc

SEQ ID NO: 3002955 - RNA, 19 nt, Human
cuccuggccucaagugauu

SEQ ID NO: 3002956 - RNA, 14 nt, Human
cuccuuguguuacu

SEQ ID NO: 3002957 - RNA, 15 nt, Human
cuccuuucaccacau

SEQ ID NO: 3002958 - RNA, 16 nt, Human
cuccuguaccucuuga

SEQ ID NO: 3002959 - RNA, 19 nt, Human
cuccggcccuccagagccc

SEQ ID NO: 3002960 - RNA, 23 nt, Human
cuccgcuuucuacccagcgagcc

SEQ ID NO: 3002961 - RNA, 11 nt, Human
uuugcagagua

SEQ ID NO: 3002962 - RNA, 14 nt, Human
uuugcagacaggca

SEQ ID NO: 3002963 - RNA, 21 nt, Human
uuugcauagauucccugagca

SEQ ID NO: 3002964 - RNA, 18 nt, Human
uuugccauguuggccagg

SEQ ID NO: 3002965 - RNA, 23 nt, Human
uuuggaaauuagguugaaacaua

SEQ ID NO: 3002966 - RNA, 15 nt, Human
uuugagcagggcuca

SEQ ID NO: 3002967 - RNA, 22 nt, Human
uuugaggucuguucuuuccaaa

SEQ ID NO: 3002968 - RNA, 17 nt, Human
uuugaggucuguucuuu

SEQ ID NO: 3002969 - RNA, 22 nt, Human
uuuguaaauuaacuuuuauaaa

SEQ ID NO: 3002970 - RNA, 21 nt, Human
uuuguauaaaauaauuuuuau

SEQ ID NO: 3002971 - RNA, 19 nt, Human
uuuguauaaaauaauuuuu

SEQ ID NO: 3002972 - RNA, 15 nt, Human
uuuguaaauuaacuu

SEQ ID NO: 3002973 - RNA, 17 nt, Human
uuuguaaauuaacuuuu

SEQ ID NO: 3002974 - RNA, 16 nt, Human
uuuguaaauuaacuuu

SEQ ID NO: 3002975 - RNA, 19 nt, Human
uuuggugguuucagaaaug

SEQ ID NO: 3002976 - RNA, 16 nt, Human
uuuguugucagcugaa

SEQ ID NO: 3002977 - RNA, 13 nt, Human
uuuguccccaccg

SEQ ID NO: 3002978 - RNA, 21 nt, Human
uuuguccccaccgcagacagg

SEQ ID NO: 3002979 - RNA, 16 nt, Human
uuugucccaagugcca

SEQ ID NO: 3002980 - RNA, 19 nt, Human
uuuucaauaacuggaacac

SEQ ID NO: 3002981 - RNA, 16 nt, Human
uuuucaauaacuggaa

SEQ ID NO: 3002982 - RNA, 13 nt, Human
uuuucaauaacug

SEQ ID NO: 3002983 - RNA, 23 nt, Human
uuuucaauaacuggaacacucua

SEQ ID NO: 3002984 - RNA, 17 nt, Human
uuuucaauuuuaaacau

SEQ ID NO: 3002985 - RNA, 15 nt, Human
uuuucacaguucucu

SEQ ID NO: 3002986 - RNA, 14 nt, Human
uuuucuucucccuc

SEQ ID NO: 3002987 - RNA, 17 nt, Human
uuuucuugcaugaggcu

SEQ ID NO: 3002988 - RNA, 16 nt, Human
uuuucuugcaugguuu

SEQ ID NO: 3002989 - RNA, 15 nt, Human
uuuuccuucagugcc

SEQ ID NO: 3002990 - RNA, 18 nt, Human
uuuuccaugaguccccug

SEQ ID NO: 3002991 - RNA, 19 nt, Human
uuuuccaugaguccccugu

SEQ ID NO: 3002992 - RNA, 13 nt, Human
uuuuauauagcaa

SEQ ID NO: 3002993 - RNA, 20 nt, Human
uuuuauaugcuucuguuuua

SEQ ID NO: 3002994 - RNA, 15 nt, Human
uuuuauaugcuucug

SEQ ID NO: 3002995 - RNA, 20 nt, Human
uuuuauaucaauuuaaaaaa

SEQ ID NO: 3002996 - RNA, 15 nt, Human
uuuuauauucucagc

SEQ ID NO: 3002997 - RNA, 10 nt, Human
uuuuauauuu

SEQ ID NO: 3002998 - RNA, 22 nt, Human
uuuuaucagaacuauguuuuug

SEQ ID NO: 3002999 - RNA, 18 nt, Human
uuuuaucgucacugcuua

SEQ ID NO: 3003000 - RNA, 17 nt, Human
uuuuaauuugguuuuca

SEQ ID NO: 3003001 - RNA, 21 nt, Human
uuuuaauuugguuuucacauu

SEQ ID NO: 3003002 - RNA, 22 nt, Human
uuuuacauaaauuuaguauuuu

SEQ ID NO: 3003003 - RNA, 14 nt, Human
uuuuaaacaaaaua

SEQ ID NO: 3003004 - RNA, 22 nt, Human
uuuauuuggaaaggaaugcaaa

SEQ ID NO: 3003005 - RNA, 19 nt, Human
uuucaauaggaaaaacuga

SEQ ID NO: 3003006 - RNA, 20 nt, Human
uuucaauaggaaaaacugau

SEQ ID NO: 3003007 - RNA, 22 nt, Human
uuucaauaggaaaaacugauuu

SEQ ID NO: 3003008 - RNA, 16 nt, Human
uuuauuuauuuauuca

SEQ ID NO: 3003009 - RNA, 15 nt, Human
uuucagcagcugcag

SEQ ID NO: 3003010 - RNA, 15 nt, Human
uuucagauaaucaca

SEQ ID NO: 3003011 - RNA, 22 nt, Human
uuucauugcugggcuugucugu

SEQ ID NO: 3003012 - RNA, 15 nt, Human
uuucagccaagaauu

SEQ ID NO: 3003013 - RNA, 15 nt, Human
uuuccaaaguacacu

SEQ ID NO: 3003014 - RNA, 12 nt, Human
uuuccaaaguac

SEQ ID NO: 3003015 - RNA, 13 nt, Human
uuuccaggaaggc

SEQ ID NO: 3003016 - RNA, 15 nt, Human
uuucugagaaagacu

SEQ ID NO: 3003017 - RNA, 22 nt, Human
uuucugagaaagacuauucaaa

SEQ ID NO: 3003018 - RNA, 16 nt, Human
uuucuaggacugaauu

SEQ ID NO: 3003019 - RNA, 15 nt, Human
uuucuagccagagga

SEQ ID NO: 3003020 - RNA, 14 nt, Human
uuucuaaagcugcc

SEQ ID NO: 3003021 - RNA, 17 nt, Human
uuucuaaagcugccagc

SEQ ID NO: 3003022 - RNA, 14 nt, Human
uuucuaaaggcuac

SEQ ID NO: 3003023 - RNA, 21 nt, Human
uuuccucuuuggucuacacug

SEQ ID NO: 3003024 - RNA, 23 nt, Human
uuuacuuuuuggaaaagaauaaa

SEQ ID NO: 3003025 - RNA, 12 nt, Human
uuuagaaacaca

SEQ ID NO: 3003026 - RNA, 15 nt, Human
uuuacuuuuuggaaa

SEQ ID NO: 3003027 - RNA, 22 nt, Human
uuuacauggcuggagcuagaau

SEQ ID NO: 3003028 - RNA, 15 nt, Human
uuuacuuuguguuca

SEQ ID NO: 3003029 - RNA, 20 nt, Human
uuuagaaacacaacuauauu

SEQ ID NO: 3003030 - RNA, 16 nt, Human
uuuacauggcuggagc

SEQ ID NO: 3003031 - RNA, 17 nt, Human
uuuacauggcuggagcu

SEQ ID NO: 3003032 - RNA, 14 nt, Human
uuuauaaacuuuac

SEQ ID NO: 3003033 - RNA, 16 nt, Human
uuuauaaacuuuaccu

SEQ ID NO: 3003034 - RNA, 16 nt, Human
uuuaucgucacugcuu

SEQ ID NO: 3003035 - RNA, 21 nt, Human
uuuaucgucacugcuuaacuu

SEQ ID NO: 3003036 - RNA, 14 nt, Human
uuuauugucaaagu

SEQ ID NO: 3003037 - RNA, 16 nt, Human
uuuauugucaaagugg

SEQ ID NO: 3003038 - RNA, 19 nt, Human
uuuauuuaguuccuugagu

SEQ ID NO: 3003039 - RNA, 12 nt, Human
uuuuuuacuaau

SEQ ID NO: 3003040 - RNA, 12 nt, Human
uuuuuucugaaa

SEQ ID NO: 3003041 - RNA, 17 nt, Human
uuuuuuccuucagugcc

SEQ ID NO: 3003042 - RNA, 19 nt, Human
uucuccagucauuauguua

SEQ ID NO: 3003043 - RNA, 17 nt, Human
uucuccagucauuaugu

SEQ ID NO: 3003044 - RNA, 16 nt, Human
uucuccaagcaggaca

SEQ ID NO: 3003045 - RNA, 13 nt, Human
uucuccacccugc

SEQ ID NO: 3003046 - RNA, 11 nt, Human
uucuccaggcu

SEQ ID NO: 3003047 - RNA, 22 nt, Human
uucucuccuguaccucuugagc

SEQ ID NO: 3003048 - RNA, 18 nt, Human
uucucuccagccccugga

SEQ ID NO: 3003049 - RNA, 16 nt, Human
uucugacccaugcugc

SEQ ID NO: 3003050 - RNA, 18 nt, Human
uucugacccaugcugccc

SEQ ID NO: 3003051 - RNA, 20 nt, Human
uucugacccaugcugcccug

SEQ ID NO: 3003052 - RNA, 21 nt, Human
uucugacccaugcugcccugu

SEQ ID NO: 3003053 - RNA, 21 nt, Human
uucugacccugcuucaaauau

SEQ ID NO: 3003054 - RNA, 17 nt, Human
uucucugauacagaaaa

SEQ ID NO: 3003055 - RNA, 14 nt, Human
uucucugauacaga

SEQ ID NO: 3003056 - RNA, 16 nt, Human
uucucugauacagaaa

SEQ ID NO: 3003057 - RNA, 15 nt, Human
uucucugauacagaa

SEQ ID NO: 3003058 - RNA, 14 nt, Human
uucuauuuauuugu

SEQ ID NO: 3003059 - RNA, 21 nt, Human
uucuauuuauuuauuuauuca

SEQ ID NO: 3003060 - RNA, 14 nt, Human
uucuauuguuucuu

SEQ ID NO: 3003061 - RNA, 17 nt, Human
uucuaugacacaugcaa

SEQ ID NO: 3003062 - RNA, 16 nt, Human
uucuaugacacaugca

SEQ ID NO: 3003063 - RNA, 12 nt, Human
uuccuagugaaa

SEQ ID NO: 3003064 - RNA, 23 nt, Human
uuccucauaguaugguggcuggg

SEQ ID NO: 3003065 - RNA, 22 nt, Human
uuccucccucccucuuucccuc

SEQ ID NO: 3003066 - RNA, 21 nt, Human
uuccucccucccucuuucccu

SEQ ID NO: 3003067 - RNA, 19 nt, Human
uuccucccucccucuuucc

SEQ ID NO: 3003068 - RNA, 12 nt, Human
uuccucccuccc

SEQ ID NO: 3003069 - RNA, 18 nt, Human
uucccuugaugaagaagu

SEQ ID NO: 3003070 - RNA, 19 nt, Human
uucccuuugacgccauccc

SEQ ID NO: 3003071 - RNA, 22 nt, Human
uuccccacuugagaauuacccu

SEQ ID NO: 3003072 - RNA, 19 nt, Human
uucggccuccauccugagg

SEQ ID NO: 3003073 - RNA, 18 nt, Human
uucggccuccauccugag

SEQ ID NO: 3003074 - RNA, 16 nt, Human
uucuaaaggcuaccuu

SEQ ID NO: 3003075 - RNA, 18 nt, Human
uucuaaaggcuaccuuug

SEQ ID NO: 3003076 - RNA, 17 nt, Human
uucuaaaggcuaccuuu

SEQ ID NO: 3003077 - RNA, 19 nt, Human
uuccuucauucaacccacc

SEQ ID NO: 3003078 - RNA, 23 nt, Human
uuccuucagugccuuauggaaca

SEQ ID NO: 3003079 - RNA, 16 nt, Human
uuccuucagugccuua

SEQ ID NO: 3003080 - RNA, 19 nt, Human
uuccuucagugccuuaugg

SEQ ID NO: 3003081 - RNA, 15 nt, Human
uuccuucagugccuu

SEQ ID NO: 3003082 - RNA, 18 nt, Human
uucaguuuaucuguucau

SEQ ID NO: 3003083 - RNA, 13 nt, Human
uucauaaugacuu

SEQ ID NO: 3003084 - RNA, 23 nt, Human
uucauaaugacuuaagcacacuu

SEQ ID NO: 3003085 - RNA, 15 nt, Human
uucaguuuaucuguu

SEQ ID NO: 3003086 - RNA, 19 nt, Human
uucagugccuuauggaaca

SEQ ID NO: 3003087 - RNA, 21 nt, Human
uucagugccuuauggaacacu

SEQ ID NO: 3003088 - RNA, 20 nt, Human
uucaucuuccaacucaaacu

SEQ ID NO: 3003089 - RNA, 11 nt, Human
uucaucuugaa

SEQ ID NO: 3003090 - RNA, 18 nt, Human
uucaugaaagauucaaug

SEQ ID NO: 3003091 - RNA, 12 nt, Human
uucaucuugaau

SEQ ID NO: 3003092 - RNA, 19 nt, Human
uucauuuaggugaggaagc

SEQ ID NO: 3003093 - RNA, 18 nt, Human
uucauuuaggugaggaag

SEQ ID NO: 3003094 - RNA, 21 nt, Human
uuccacuugagugucaagcug

SEQ ID NO: 3003095 - RNA, 17 nt, Human
uuccacuugagugucaa

SEQ ID NO: 3003096 - RNA, 19 nt, Human
uuccacuuauaggaauuga

SEQ ID NO: 3003097 - RNA, 17 nt, Human
uuccaugaguccccugu

SEQ ID NO: 3003098 - RNA, 18 nt, Human
uuccauuuacuuaagacu

SEQ ID NO: 3003099 - RNA, 19 nt, Human
uuccauuuacuuaagacuu

SEQ ID NO: 3003100 - RNA, 20 nt, Human
uucaaucuggauucauauuu

SEQ ID NO: 3003101 - RNA, 23 nt, Human
uucaaucuggauucauauuuaau

SEQ ID NO: 3003102 - RNA, 19 nt, Human
uucaaucuggauucauauu

SEQ ID NO: 3003103 - RNA, 19 nt, Human
uucaaugccccugaauuua

SEQ ID NO: 3003104 - RNA, 18 nt, Human
uucaauucucauuuguca

SEQ ID NO: 3003105 - RNA, 20 nt, Human
uuacuaaaaguuuugagaaa

SEQ ID NO: 3003106 - RNA, 19 nt, Human
uuacuaaaaguuuugagaa

SEQ ID NO: 3003107 - RNA, 13 nt, Human
uuacgugaguccu

SEQ ID NO: 3003108 - RNA, 14 nt, Human
uuacgugaguccug

SEQ ID NO: 3003109 - RNA, 13 nt, Human
uucaaagauauuu

SEQ ID NO: 3003110 - RNA, 23 nt, Human
uucagagcugcccucuccugggc

SEQ ID NO: 3003111 - RNA, 22 nt, Human
uucagagcugcccucuccuggg

SEQ ID NO: 3003112 - RNA, 21 nt, Human
uucagagcugcccucuccugg

SEQ ID NO: 3003113 - RNA, 22 nt, Human
uucagcuccagcucaccagccc

SEQ ID NO: 3003114 - RNA, 15 nt, Human
uucagagacuccugc

SEQ ID NO: 3003115 - RNA, 14 nt, Human
uucacucuccuugg

SEQ ID NO: 3003116 - RNA, 15 nt, Human
uucaggaagcucagg

SEQ ID NO: 3003117 - RNA, 20 nt, Human
uucaggaagcucagggccug

SEQ ID NO: 3003118 - RNA, 17 nt, Human
uucaggaagcucagggc

SEQ ID NO: 3003119 - RNA, 19 nt, Human
uucaggaagcucagggccu

SEQ ID NO: 3003120 - RNA, 18 nt, Human
uucagcugcauacaguuu

SEQ ID NO: 3003121 - RNA, 17 nt, Human
uucagcugacuuuucug

SEQ ID NO: 3003122 - RNA, 16 nt, Human
uucaggaagcucaggg

SEQ ID NO: 3003123 - RNA, 17 nt, Human
uucagcucugcaagaau

SEQ ID NO: 3003124 - RNA, 24 nt, Human
uucagcucugcaagaauugaagca

SEQ ID NO: 3003125 - RNA, 23 nt, Human
uucagcuccagcucaccagcccc

SEQ ID NO: 3003126 - RNA, 12 nt, Human
uugacuauuuuu

SEQ ID NO: 3003127 - RNA, 20 nt, Human
uugacgccaucccagcccca

SEQ ID NO: 3003128 - RNA, 14 nt, Human
uugaggacacugau

SEQ ID NO: 3003129 - RNA, 15 nt, Human
uugaggacacugaua

SEQ ID NO: 3003130 - RNA, 19 nt, Human
uugauagcacagacccugc

SEQ ID NO: 3003131 - RNA, 20 nt, Human
uugauagcacagacccugcc

SEQ ID NO: 3003132 - RNA, 20 nt, Human
uugaccgugaggccagagac

SEQ ID NO: 3003133 - RNA, 21 nt, Human
uugaccgugaggccagagaca

SEQ ID NO: 3003134 - RNA, 15 nt, Human
uugaccucaggugau

SEQ ID NO: 3003135 - RNA, 14 nt, Human
uugacgccauccca

SEQ ID NO: 3003136 - RNA, 22 nt, Human
uugacgccaucccagccccaau

SEQ ID NO: 3003137 - RNA, 12 nt, Human
uugaccugaggc

SEQ ID NO: 3003138 - RNA, 19 nt, Human
uugaccugaggcccuucuc

SEQ ID NO: 3003139 - RNA, 22 nt, Human
uugaccugaggcccuucucucc

SEQ ID NO: 3003140 - RNA, 16 nt, Human
uugcauacuauuaaac

SEQ ID NO: 3003141 - RNA, 18 nt, Human
uugcauacuauuaaacau

SEQ ID NO: 3003142 - RNA, 19 nt, Human
uugcauacuauuaaacaug

SEQ ID NO: 3003143 - RNA, 18 nt, Human
uugcauagauucccugag

SEQ ID NO: 3003144 - RNA, 16 nt, Human
uugcagacaggcaagc

SEQ ID NO: 3003145 - RNA, 18 nt, Human
uugaggguauguuuuaua

SEQ ID NO: 3003146 - RNA, 21 nt, Human
uugauagcacagacccugccc

SEQ ID NO: 3003147 - RNA, 12 nt, Human
uugaugaagaag

SEQ ID NO: 3003148 - RNA, 18 nt, Human
uugauuuccguuaaaaua

SEQ ID NO: 3003149 - RNA, 17 nt, Human
uugcaacaggcugggcu

SEQ ID NO: 3003150 - RNA, 14 nt, Human
uugcaacaggcugg

SEQ ID NO: 3003151 - RNA, 14 nt, Human
uugaaacuuuaaga

SEQ ID NO: 3003152 - RNA, 23 nt, Human
uugaaacugagaugugaacacau

SEQ ID NO: 3003153 - RNA, 16 nt, Human
uugaaaagacuccaaa

SEQ ID NO: 3003154 - RNA, 18 nt, Human
uugaaaagacuccaaaga

SEQ ID NO: 3003155 - RNA, 22 nt, Human
uugaaaagacuccaaagaaaug

SEQ ID NO: 3003156 - RNA, 23 nt, Human
uugaaaagacuccaaagaaaugu

SEQ ID NO: 3003157 - RNA, 19 nt, Human
uugaaaacacuguucucug

SEQ ID NO: 3003158 - RNA, 21 nt, Human
uugaaaacacuguucucugcc

SEQ ID NO: 3003159 - RNA, 18 nt, Human
uucuuuauaauucuacuu

SEQ ID NO: 3003160 - RNA, 17 nt, Human
uugaagacagagcuaca

SEQ ID NO: 3003161 - RNA, 19 nt, Human
uugaagacuuuucuuucag

SEQ ID NO: 3003162 - RNA, 19 nt, Human
uugaacucuucaaucucuu

SEQ ID NO: 3003163 - RNA, 16 nt, Human
uugaacugauaaagau

SEQ ID NO: 3003164 - RNA, 20 nt, Human
uugaacuuugaccucugcag

SEQ ID NO: 3003165 - RNA, 22 nt, Human
uugaacuuugaccucugcagca

SEQ ID NO: 3003166 - RNA, 18 nt, Human
uucuugguuuguaaauua

SEQ ID NO: 3003167 - RNA, 17 nt, Human
uucuugguuuguaaauu

SEQ ID NO: 3003168 - RNA, 23 nt, Human
uucuugguuuguaaauuaacuuu

SEQ ID NO: 3003169 - RNA, 16 nt, Human
uucuugguuuguaaau

SEQ ID NO: 3003170 - RNA, 13 nt, Human
uucuugguuugua

SEQ ID NO: 3003171 - RNA, 23 nt, Human
uucuuauuuaaugaaagacugua

SEQ ID NO: 3003172 - RNA, 19 nt, Human
uucuuauuuaaugaaagac

SEQ ID NO: 3003173 - RNA, 15 nt, Human
uucuuauuucauuuc

SEQ ID NO: 3003174 - RNA, 14 nt, Human
uucugagcauuuaa

SEQ ID NO: 3003175 - RNA, 15 nt, Human
uucugagaaagacua

SEQ ID NO: 3003176 - RNA, 17 nt, Human
uucuguccgagcuuuga

SEQ ID NO: 3003177 - RNA, 21 nt, Human
uucuguccgagcuuugaaaau

SEQ ID NO: 3003178 - RNA, 23 nt, Human
uucuguggguuucuaaagcugcc

SEQ ID NO: 3003179 - RNA, 17 nt, Human
uucuguccuacucugug

SEQ ID NO: 3003180 - RNA, 21 nt, Human
uuggaaaggaaugcaaagaug

SEQ ID NO: 3003181 - RNA, 23 nt, Human
uuggaaagaguaggaagacuuug

SEQ ID NO: 3003182 - RNA, 23 nt, Human
uuggaaauuagguugaaacauau

SEQ ID NO: 3003183 - RNA, 21 nt, Human
uuggaaauuagguugaaacau

SEQ ID NO: 3003184 - RNA, 20 nt, Human
uugcuggggccgaaagaaca

SEQ ID NO: 3003185 - RNA, 15 nt, Human
uuggacauuuuaugu

SEQ ID NO: 3003186 - RNA, 16 nt, Human
uuggacauuuuauguc

SEQ ID NO: 3003187 - RNA, 17 nt, Human
uuggacauuuuaugucu

SEQ ID NO: 3003188 - RNA, 18 nt, Human
uuggacauuuuaugucuu

SEQ ID NO: 3003189 - RNA, 20 nt, Human
uuggacauuuuaugucuuuc

SEQ ID NO: 3003190 - RNA, 11 nt, Human
uuggaaggaac

SEQ ID NO: 3003191 - RNA, 19 nt, Human
uuggaaggaacguccccug

SEQ ID NO: 3003192 - RNA, 17 nt, Human
uuggcaaaaaggcagga

SEQ ID NO: 3003193 - RNA, 14 nt, Human
uuggauuguccccg

SEQ ID NO: 3003194 - RNA, 13 nt, Human
uugcuaacagcaa

SEQ ID NO: 3003195 - RNA, 20 nt, Human
uugcuaacagcaacacaaag

SEQ ID NO: 3003196 - RNA, 19 nt, Human
uugcugauggugcaaugac

SEQ ID NO: 3003197 - RNA, 20 nt, Human
uugcugauggugcaaugacc

SEQ ID NO: 3003198 - RNA, 22 nt, Human
uugcugauggugcaaugaccuu

SEQ ID NO: 3003199 - RNA, 18 nt, Human
uugccucugccucugaca

SEQ ID NO: 3003200 - RNA, 16 nt, Human
uugccucugccucuga

SEQ ID NO: 3003201 - RNA, 14 nt, Human
uugccucugccucu

SEQ ID NO: 3003202 - RNA, 11 nt, Human
uugccucugcc

SEQ ID NO: 3003203 - RNA, 15 nt, Human
uugcccagccuggau

SEQ ID NO: 3003204 - RNA, 18 nt, Human
uugccagucaccccggcc

SEQ ID NO: 3003205 - RNA, 13 nt, Human
uugccagucaccc

SEQ ID NO: 3003206 - RNA, 11 nt, Human
uugcccaggca

SEQ ID NO: 3003207 - RNA, 23 nt, Human
uugcccacgcuggagugcaguga

SEQ ID NO: 3003208 - RNA, 20 nt, Human
uuguacacucauucauuacu

SEQ ID NO: 3003209 - RNA, 12 nt, Human
uuguacagacaa

SEQ ID NO: 3003210 - RNA, 13 nt, Human
uuguacagacaac

SEQ ID NO: 3003211 - RNA, 11 nt, Human
uuguaaaugug

SEQ ID NO: 3003212 - RNA, 14 nt, Human
uuguaaaugugcuu

SEQ ID NO: 3003213 - RNA, 18 nt, Human
uuguaaaugugcuuuuaa

SEQ ID NO: 3003214 - RNA, 12 nt, Human
uugguccugcug

SEQ ID NO: 3003215 - RNA, 22 nt, Human
uuggucccccuuccauggacuu

SEQ ID NO: 3003216 - RNA, 16 nt, Human
uuggucccccuuccau

SEQ ID NO: 3003217 - RNA, 16 nt, Human
uuguaaaggaauuuaa

SEQ ID NO: 3003218 - RNA, 14 nt, Human
uuguauuacaaauc

SEQ ID NO: 3003219 - RNA, 21 nt, Human
uuguauucucuccuguaccuc

SEQ ID NO: 3003220 - RNA, 19 nt, Human
uuguaucacaaaucuuaac

SEQ ID NO: 3003221 - RNA, 15 nt, Human
uuguagagccagggu

SEQ ID NO: 3003222 - RNA, 14 nt, Human
uuguagagccaggg

SEQ ID NO: 3003223 - RNA, 20 nt, Human
uuggccagaagucaaggcuu

SEQ ID NO: 3003224 - RNA, 16 nt, Human
uuggcugcugaaggcu

SEQ ID NO: 3003225 - RNA, 18 nt, Human
uuggcugggggccucagu

SEQ ID NO: 3003226 - RNA, 22 nt, Human
uuggcugggggccucagugcca

SEQ ID NO: 3003227 - RNA, 21 nt, Human
uuggcugggggccucagugcc

SEQ ID NO: 3003228 - RNA, 24 nt, Human
uuggccaaagccaaagcuaggccu

SEQ ID NO: 3003229 - RNA, 22 nt, Human
uuggccagaaaccuuccugcug

SEQ ID NO: 3003230 - RNA, 14 nt, Human
uuggccaggcuggu

SEQ ID NO: 3003231 - RNA, 13 nt, Human
uuggcauucccca

SEQ ID NO: 3003232 - RNA, 12 nt, Human
uuggguuuauuu

SEQ ID NO: 3003233 - RNA, 17 nt, Human
uuggguuuauuuggaaa

SEQ ID NO: 3003234 - RNA, 16 nt, Human
uuggguggaugccugg

SEQ ID NO: 3003235 - RNA, 12 nt, Human
uugggaggcuga

SEQ ID NO: 3003236 - RNA, 16 nt, Human
uugggaggccauuugu

SEQ ID NO: 3003237 - RNA, 22 nt, Human
uuggcuuuggguugcaggaccu

SEQ ID NO: 3003238 - RNA, 20 nt, Human
ugugaaugcagguuuuauca

SEQ ID NO: 3003239 - RNA, 14 nt, Human
ugugaaugcagguu

SEQ ID NO: 3003240 - RNA, 21 nt, Human
ugugacaaggauugcuacugu

SEQ ID NO: 3003241 - RNA, 21 nt, Human
ugugaauaaagagggugggug

SEQ ID NO: 3003242 - RNA, 16 nt, Human
ugugaauaccccaaga

SEQ ID NO: 3003243 - RNA, 22 nt, Human
ugugaccacugcagaagacagu

SEQ ID NO: 3003244 - RNA, 21 nt, Human
ugugauacaaugcugugcccu

SEQ ID NO: 3003245 - RNA, 19 nt, Human
ugugaguacuacaguccuc

SEQ ID NO: 3003246 - RNA, 20 nt, Human
ugugaguacuacaguccucc

SEQ ID NO: 3003247 - RNA, 23 nt, Human
ugugaguacuacaguccucccau

SEQ ID NO: 3003248 - RNA, 18 nt, Human
ugugaguacuacaguccu

SEQ ID NO: 3003249 - RNA, 23 nt, Human
ugugaaaaaauuuacuuuaaacu

SEQ ID NO: 3003250 - RNA, 17 nt, Human
ugugaaaaaauuuacuu

SEQ ID NO: 3003251 - RNA, 12 nt, Human
ugugaaaaaauu

SEQ ID NO: 3003252 - RNA, 14 nt, Human
ugugaaaggaaaga

SEQ ID NO: 3003253 - RNA, 13 nt, Human
ugugaaaggaaag

SEQ ID NO: 3003254 - RNA, 17 nt, Human
ugucuuuggacccugag

SEQ ID NO: 3003255 - RNA, 18 nt, Human
ugucuuuggacccugagg

SEQ ID NO: 3003256 - RNA, 19 nt, Human
ugucuuuggacccugaggc

SEQ ID NO: 3003257 - RNA, 22 nt, Human
ugucuuuggacccugaggccca

SEQ ID NO: 3003258 - RNA, 16 nt, Human
ugucuuuuuucacuac

SEQ ID NO: 3003259 - RNA, 21 nt, Human
ugucucaguccaugaagaugu

SEQ ID NO: 3003260 - RNA, 14 nt, Human
ugugcguccugucg

SEQ ID NO: 3003261 - RNA, 20 nt, Human
ugugcgugcauguguguuca

SEQ ID NO: 3003262 - RNA, 17 nt, Human
ugugccucugggacugg

SEQ ID NO: 3003263 - RNA, 16 nt, Human
ugugccucugggacug

SEQ ID NO: 3003264 - RNA, 15 nt, Human
ugugccucugggacu

SEQ ID NO: 3003265 - RNA, 13 nt, Human
ugugccucuggga

SEQ ID NO: 3003266 - RNA, 22 nt, Human
ugugcacaugcacgugugugca

SEQ ID NO: 3003267 - RNA, 16 nt, Human
ugugcacaugcacgug

SEQ ID NO: 3003268 - RNA, 15 nt, Human
uguguacuuuuaaga

SEQ ID NO: 3003269 - RNA, 12 nt, Human
uguguacuuuua

SEQ ID NO: 3003270 - RNA, 12 nt, Human
ugugggaagggg

SEQ ID NO: 3003271 - RNA, 12 nt, Human
uguggagaagcg

SEQ ID NO: 3003272 - RNA, 21 nt, Human
uguggagaagcggcuggcagc

SEQ ID NO: 3003273 - RNA, 15 nt, Human
uguggacacagcucu

SEQ ID NO: 3003274 - RNA, 13 nt, Human
uguggacacagcu

SEQ ID NO: 3003275 - RNA, 14 nt, Human
uguggacacagcuc

SEQ ID NO: 3003276 - RNA, 21 nt, Human
uguaacuguuuagaugaaugu

SEQ ID NO: 3003277 - RNA, 15 nt, Human
uguaaucacagcuac

SEQ ID NO: 3003278 - RNA, 14 nt, Human
uguaaucacagcua

SEQ ID NO: 3003279 - RNA, 17 nt, Human
uguaaauuaacuuuuau

SEQ ID NO: 3003280 - RNA, 16 nt, Human
uguaaauuaacuuuua

SEQ ID NO: 3003281 - RNA, 15 nt, Human
uguaaauuaacuuuu

SEQ ID NO: 3003282 - RNA, 14 nt, Human
uguaaauuaacuuu

SEQ ID NO: 3003283 - RNA, 13 nt, Human
uguaaauuaacuu

SEQ ID NO: 3003284 - RNA, 20 nt, Human
uguaaacacaucuaguaguu

SEQ ID NO: 3003285 - RNA, 13 nt, Human
uguaaacacaucu

SEQ ID NO: 3003286 - RNA, 17 nt, Human
uguagauaauacaguuc

SEQ ID NO: 3003287 - RNA, 16 nt, Human
uguacgucugacaggc

SEQ ID NO: 3003288 - RNA, 17 nt, Human
uguacgucugacaggca

SEQ ID NO: 3003289 - RNA, 14 nt, Human
uguaccucuugagc

SEQ ID NO: 3003290 - RNA, 22 nt, Human
uguaccucuugagccuugaacu

SEQ ID NO: 3003291 - RNA, 23 nt, Human
uguaccucuugagccuugaacuu

SEQ ID NO: 3003292 - RNA, 22 nt, Human
ugucaguuguuauuuauugaaa

SEQ ID NO: 3003293 - RNA, 19 nt, Human
ugucaguucugauauggaa

SEQ ID NO: 3003294 - RNA, 17 nt, Human
ugucaguuguuauuuau

SEQ ID NO: 3003295 - RNA, 18 nt, Human
ugucaguuguuauuuauu

SEQ ID NO: 3003296 - RNA, 19 nt, Human
ugucagucugcuuagaaau

SEQ ID NO: 3003297 - RNA, 17 nt, Human
ugucagucugcuuagaa

SEQ ID NO: 3003298 - RNA, 20 nt, Human
ugucagucugcuuagaaaua

SEQ ID NO: 3003299 - RNA, 12 nt, Human
ugucagugugac

SEQ ID NO: 3003300 - RNA, 20 nt, Human
ugucagugugacugaucucu

SEQ ID NO: 3003301 - RNA, 23 nt, Human
uguaucccaugagccucagcauc

SEQ ID NO: 3003302 - RNA, 19 nt, Human
uguaucccaugagccucag

SEQ ID NO: 3003303 - RNA, 16 nt, Human
uguaucccaugagccu

SEQ ID NO: 3003304 - RNA, 15 nt, Human
uguaugcacacacau

SEQ ID NO: 3003305 - RNA, 21 nt, Human
uguaugcacacacauauauua

SEQ ID NO: 3003306 - RNA, 19 nt, Human
uguaugcacacacauauau

SEQ ID NO: 3003307 - RNA, 17 nt, Human
uguaugcacacacauau

SEQ ID NO: 3003308 - RNA, 16 nt, Human
uguaugcacacacaua

SEQ ID NO: 3003309 - RNA, 16 nt, Human
uguaugauucccagcc

SEQ ID NO: 3003310 - RNA, 16 nt, Human
uguugaaacuuuaaga

SEQ ID NO: 3003311 - RNA, 11 nt, Human
uguugaaagau

SEQ ID NO: 3003312 - RNA, 22 nt, Human
uguucuuucuggcuaugcauuu

SEQ ID NO: 3003313 - RNA, 20 nt, Human
uguucuuucuggcuaugcau

SEQ ID NO: 3003314 - RNA, 20 nt, Human
uguucuuuccaaaguacacu

SEQ ID NO: 3003315 - RNA, 15 nt, Human
uguucugacccugcu

SEQ ID NO: 3003316 - RNA, 19 nt, Human
uguucucugcccuccaaga

SEQ ID NO: 3003317 - RNA, 18 nt, Human
uguucugacccugcuuca

SEQ ID NO: 3003318 - RNA, 14 nt, Human
uguucuuucuggcu

SEQ ID NO: 3003319 - RNA, 21 nt, Human
uguucuccagucauuauguua

SEQ ID NO: 3003320 - RNA, 12 nt, Human
uguucucugccc

SEQ ID NO: 3003321 - RNA, 18 nt, Human
uguucucugaggacacua

SEQ ID NO: 3003322 - RNA, 16 nt, Human
uguucucugaggacac

SEQ ID NO: 3003323 - RNA, 13 nt, Human
uguucucugagga

SEQ ID NO: 3003324 - RNA, 20 nt, Human
uguucaugaaagauucaaug

SEQ ID NO: 3003325 - RNA, 15 nt, Human
uguuuaaugguaguu

SEQ ID NO: 3003326 - RNA, 13 nt, Human
uguuuaaaaucau

SEQ ID NO: 3003327 - RNA, 14 nt, Human
uguuggccaggcug

SEQ ID NO: 3003328 - RNA, 19 nt, Human
uguugaagagguuuuaaag

SEQ ID NO: 3003329 - RNA, 21 nt, Human
uguuggagaagaacugaaauc

SEQ ID NO: 3003330 - RNA, 11 nt, Human
uguuggccagg

SEQ ID NO: 3003331 - RNA, 15 nt, Human
uguuggccaaagcca

SEQ ID NO: 3003332 - RNA, 19 nt, Human
ugugugcguccugucggag

SEQ ID NO: 3003333 - RNA, 18 nt, Human
ugugugaauaccccaaga

SEQ ID NO: 3003334 - RNA, 16 nt, Human
uguguagggcgggagg

SEQ ID NO: 3003335 - RNA, 16 nt, Human
uguucacagccagacu

SEQ ID NO: 3003336 - RNA, 14 nt, Human
uguucagcuccagc

SEQ ID NO: 3003337 - RNA, 11 nt, Human
uguucagcugg

SEQ ID NO: 3003338 - RNA, 16 nt, Human
uguucagcuccagcuc

SEQ ID NO: 3003339 - RNA, 15 nt, Human
uguucagcuccagcu

SEQ ID NO: 3003340 - RNA, 14 nt, Human
uguuagugcaaauu

SEQ ID NO: 3003341 - RNA, 13 nt, Human
uguuacauuuuua

SEQ ID NO: 3003342 - RNA, 22 nt, Human
uguuacauuuuuaagugcugca

SEQ ID NO: 3003343 - RNA, 15 nt, Human
uguuacugucuucag

SEQ ID NO: 3003344 - RNA, 16 nt, Human
uguuacugucuucagu

SEQ ID NO: 3003345 - RNA, 15 nt, Human
uguuuuuauuauuaa

SEQ ID NO: 3003346 - RNA, 18 nt, Human
uguuuuuauuauuaacaa

SEQ ID NO: 3003347 - RNA, 17 nt, Human
uguuuugcucaauagau

SEQ ID NO: 3003348 - RNA, 23 nt, Human
uguuuugccaauuugcacauuaa

SEQ ID NO: 3003349 - RNA, 13 nt, Human
uguuuuugucuua

SEQ ID NO: 3003350 - RNA, 20 nt, Human
uguuuccuggcacugcuucc

SEQ ID NO: 3003351 - RNA, 21 nt, Human
uguuuccuggcacugcuucca

SEQ ID NO: 3003352 - RNA, 22 nt, Human
uguuuccuggcacugcuuccag

SEQ ID NO: 3003353 - RNA, 15 nt, Human
uguuuccuggcacug

SEQ ID NO: 3003354 - RNA, 17 nt, Human
uguuuguugucagcuga

SEQ ID NO: 3003355 - RNA, 16 nt, Human
uguuuguugucagcug

SEQ ID NO: 3003356 - RNA, 11 nt, Human
uuaaaugcacc

SEQ ID NO: 3003357 - RNA, 16 nt, Human
uuaaaugcaccuggaa

SEQ ID NO: 3003358 - RNA, 18 nt, Human
uuaaaugcaccuggaaua

SEQ ID NO: 3003359 - RNA, 17 nt, Human
uuaaaugcaccuggaau

SEQ ID NO: 3003360 - RNA, 15 nt, Human
uuaaagcuuccauug

SEQ ID NO: 3003361 - RNA, 19 nt, Human
uuaaauagcuuuuuucucu

SEQ ID NO: 3003362 - RNA, 17 nt, Human
uuaaaugcccagccccu

SEQ ID NO: 3003363 - RNA, 18 nt, Human
uuaaaugcccagccccuu

SEQ ID NO: 3003364 - RNA, 19 nt, Human
uuaaaagaaugauuaugaa

SEQ ID NO: 3003365 - RNA, 13 nt, Human
uuaaaagaaugau

SEQ ID NO: 3003366 - RNA, 18 nt, Human
uuaaacuuaaucuaaaug

SEQ ID NO: 3003367 - RNA, 16 nt, Human
uuaaacuuaaucuaaa

SEQ ID NO: 3003368 - RNA, 20 nt, Human
uuaaacuuaaucuaaaugga

SEQ ID NO: 3003369 - RNA, 20 nt, Human
uuaaagcuuauuaaaacuca

SEQ ID NO: 3003370 - RNA, 18 nt, Human
uuaauaauguuucaaaca

SEQ ID NO: 3003371 - RNA, 16 nt, Human
uuaauagguuuggaca

SEQ ID NO: 3003372 - RNA, 16 nt, Human
uuaauaauguuucaaa

SEQ ID NO: 3003373 - RNA, 22 nt, Human
uuaaggaugcuuguacauaaug

SEQ ID NO: 3003374 - RNA, 20 nt, Human
uuaaggaugcuuguacauaa

SEQ ID NO: 3003375 - RNA, 19 nt, Human
uuaaggaugcuuguacaua

SEQ ID NO: 3003376 - RNA, 18 nt, Human
uuaaggaugcuuguacau

SEQ ID NO: 3003377 - RNA, 17 nt, Human
uuaaggaugcuuguaca

SEQ ID NO: 3003378 - RNA, 21 nt, Human
uuaaggaagacaaugugaaaa

SEQ ID NO: 3003379 - RNA, 22 nt, Human
uuaaugucaauucuugccaaau

SEQ ID NO: 3003380 - RNA, 17 nt, Human
uuaaugucacaggcagg

SEQ ID NO: 3003381 - RNA, 18 nt, Human
uuaaugucacaggcaggu

SEQ ID NO: 3003382 - RNA, 21 nt, Human
uuaauagguuuggacaaaaug

SEQ ID NO: 3003383 - RNA, 22 nt, Human
uuacauuuuuaagugcugcauu

SEQ ID NO: 3003384 - RNA, 21 nt, Human
uuacauuuuuaagugcugcau

SEQ ID NO: 3003385 - RNA, 20 nt, Human
uuacauuuuuaagugcugca

SEQ ID NO: 3003386 - RNA, 21 nt, Human
uuaccacuuguguuuugcaag

SEQ ID NO: 3003387 - RNA, 14 nt, Human
uuaccagcagagca

SEQ ID NO: 3003388 - RNA, 20 nt, Human
uuaccuuuuuuauacauaaa

SEQ ID NO: 3003389 - RNA, 19 nt, Human
uuaccuuuuuuauacauaa

SEQ ID NO: 3003390 - RNA, 22 nt, Human
uuaccuuuuuuauacauaaaca

SEQ ID NO: 3003391 - RNA, 23 nt, Human
uuacgaaaaaaugguagcauuuu

SEQ ID NO: 3003392 - RNA, 20 nt, Human
uuacgguuuuccagguuuaa

SEQ ID NO: 3003393 - RNA, 16 nt, Human
uuacggaacucaaaua

SEQ ID NO: 3003394 - RNA, 22 nt, Human
uuacauggcuggagcuagaauu

SEQ ID NO: 3003395 - RNA, 23 nt, Human
uuacauggcuggagcuagaauuu

SEQ ID NO: 3003396 - RNA, 15 nt, Human
uuacauuuguauaaa

SEQ ID NO: 3003397 - RNA, 14 nt, Human
uuacauuuguauaa

SEQ ID NO: 3003398 - RNA, 20 nt, Human
uuacagagacagaaagcaga

SEQ ID NO: 3003399 - RNA, 22 nt, Human
ugccuaauaugaugacuguuuu

SEQ ID NO: 3003400 - RNA, 17 nt, Human
ugccuaauaugaugacu

SEQ ID NO: 3003401 - RNA, 17 nt, Human
ugccuaccaauauuuaa

SEQ ID NO: 3003402 - RNA, 23 nt, Human
ugccuaccaauauuuaaucuuuu

SEQ ID NO: 3003403 - RNA, 23 nt, Human
ugccuccccuccucugcuugcca

SEQ ID NO: 3003404 - RNA, 22 nt, Human
ugccuccccuccucugcuugcc

SEQ ID NO: 3003405 - RNA, 19 nt, Human
ugccuccccuccucugcuu

SEQ ID NO: 3003406 - RNA, 18 nt, Human
ugccuccccuccucugcu

SEQ ID NO: 3003407 - RNA, 11 nt, Human
ugcccagcccc

SEQ ID NO: 3003408 - RNA, 23 nt, Human
ugcccaggcuggcgugcaguggu

SEQ ID NO: 3003409 - RNA, 17 nt, Human
ugccugaagucacacag

SEQ ID NO: 3003410 - RNA, 18 nt, Human
ugccugaagucacacagu

SEQ ID NO: 3003411 - RNA, 22 nt, Human
ugccugaagucacacagugagu

SEQ ID NO: 3003412 - RNA, 17 nt, Human
ugccuccuuugugagga

SEQ ID NO: 3003413 - RNA, 18 nt, Human
ugccuccuuugugaggaa

SEQ ID NO: 3003414 - RNA, 16 nt, Human
ugccuccuuugugagg

SEQ ID NO: 3003415 - RNA, 16 nt, Human
ugccuccccuccucug

SEQ ID NO: 3003416 - RNA, 14 nt, Human
ugccucugggacug

SEQ ID NO: 3003417 - RNA, 22 nt, Human
ugccuucucaacuccaaacuga

SEQ ID NO: 3003418 - RNA, 17 nt, Human
ugccuucucaacuccaa

SEQ ID NO: 3003419 - RNA, 23 nt, Human
ugcggugcuaucucccccagccc

SEQ ID NO: 3003420 - RNA, 18 nt, Human
ugccuuauggaacacucu

SEQ ID NO: 3003421 - RNA, 20 nt, Human
ugccuuauggaacacucuga

SEQ ID NO: 3003422 - RNA, 21 nt, Human
ugccuuauggaacacucugag

SEQ ID NO: 3003423 - RNA, 22 nt, Human
ugccuuauggaacacucugaga

SEQ ID NO: 3003424 - RNA, 18 nt, Human
ugcuagaacucccuuuca

SEQ ID NO: 3003425 - RNA, 19 nt, Human
ugcuagaacucccuuucaa

SEQ ID NO: 3003426 - RNA, 15 nt, Human
ugcgugcauaccacu

SEQ ID NO: 3003427 - RNA, 21 nt, Human
ugcuagaacucccuuucaaca

SEQ ID NO: 3003428 - RNA, 20 nt, Human
ugcuagaacucccuuucaac

SEQ ID NO: 3003429 - RNA, 17 nt, Human
ugcuaggaacacuccuu

SEQ ID NO: 3003430 - RNA, 19 nt, Human
ugcuaggaacacuccuuca

SEQ ID NO: 3003431 - RNA, 16 nt, Human
ugcuaggaacacuccu

SEQ ID NO: 3003432 - RNA, 19 nt, Human
ugcuccucuccccagcaag

SEQ ID NO: 3003433 - RNA, 18 nt, Human
ugcuccucuccccagcaa

SEQ ID NO: 3003434 - RNA, 23 nt, Human
ugcugaguguacagaguggaaua

SEQ ID NO: 3003435 - RNA, 16 nt, Human
ugcugacagacacagg

SEQ ID NO: 3003436 - RNA, 15 nt, Human
ugcugacagacacag

SEQ ID NO: 3003437 - RNA, 20 nt, Human
ugcugauggugcaaugaccu

SEQ ID NO: 3003438 - RNA, 23 nt, Human
ugcugauggugcaaugaccuuuc

SEQ ID NO: 3003439 - RNA, 15 nt, Human
ugcugcaguugccag

SEQ ID NO: 3003440 - RNA, 16 nt, Human
ugcugcaguugccagu

SEQ ID NO: 3003441 - RNA, 19 nt, Human
ugcuccuggcccacugcau

SEQ ID NO: 3003442 - RNA, 20 nt, Human
ugcuccugggcuacaaggac

SEQ ID NO: 3003443 - RNA, 22 nt, Human
ugcugaaugguuuucaaaauaa

SEQ ID NO: 3003444 - RNA, 18 nt, Human
ugcugaaugguuuucaaa

SEQ ID NO: 3003445 - RNA, 17 nt, Human
ugcugaaugguuuucaa

SEQ ID NO: 3003446 - RNA, 18 nt, Human
ugcugaauacagaggcaa

SEQ ID NO: 3003447 - RNA, 23 nt, Human
ugcugaauacagaggcaacugca

SEQ ID NO: 3003448 - RNA, 21 nt, Human
ugcugaaggcucgagcaugcc

SEQ ID NO: 3003449 - RNA, 21 nt, Human
ugcacacuguccuauuauauu

SEQ ID NO: 3003450 - RNA, 22 nt, Human
ugaagucuuuguacagacaaca

SEQ ID NO: 3003451 - RNA, 13 nt, Human
ugcacacuuuggc

SEQ ID NO: 3003452 - RNA, 16 nt, Human
ugcacacuuuggccca

SEQ ID NO: 3003453 - RNA, 20 nt, Human
ugcacacuuuggcccagggu

SEQ ID NO: 3003454 - RNA, 19 nt, Human
ugcacacuuuggcccaggg

SEQ ID NO: 3003455 - RNA, 18 nt, Human
ugcacacuuuggcccagg

SEQ ID NO: 3003456 - RNA, 17 nt, Human
ugcacacuuuggcccag

SEQ ID NO: 3003457 - RNA, 17 nt, Human
ugaagucuuuguacaga

SEQ ID NO: 3003458 - RNA, 20 nt, Human
ugaagucuuuguacagacaa

SEQ ID NO: 3003459 - RNA, 22 nt, Human
ugcacagaguuguuacauuuuu

SEQ ID NO: 3003460 - RNA, 21 nt, Human
ugcacagaguuguuacauuuu

SEQ ID NO: 3003461 - RNA, 20 nt, Human
ugcacagaguuguuacauuu

SEQ ID NO: 3003462 - RNA, 21 nt, Human
ugcacacuuuggcccagggug

SEQ ID NO: 3003463 - RNA, 23 nt, Human
ugcacagaguuguuacauuuuua

SEQ ID NO: 3003464 - RNA, 18 nt, Human
ugcacagcaggcugccag

SEQ ID NO: 3003465 - RNA, 17 nt, Human
ugcacagcuaacaugga

SEQ ID NO: 3003466 - RNA, 23 nt, Human
ugcacagcaggcugccagugccu

SEQ ID NO: 3003467 - RNA, 22 nt, Human
ugcacagcaggcugccagugcc

SEQ ID NO: 3003468 - RNA, 21 nt, Human
ugcacagcaggcugccagugc

SEQ ID NO: 3003469 - RNA, 13 nt, Human
ugcacaucuguuu

SEQ ID NO: 3003470 - RNA, 15 nt, Human
ugcacaucaaaauau

SEQ ID NO: 3003471 - RNA, 18 nt, Human
ugcacagcuaacauggaa

SEQ ID NO: 3003472 - RNA, 20 nt, Human
ugcacagcuaacauggaagu

SEQ ID NO: 3003473 - RNA, 23 nt, Human
ugcacagcuaacauggaaguacu

SEQ ID NO: 3003474 - RNA, 15 nt, Human
ugcacuuuguucugg

SEQ ID NO: 3003475 - RNA, 18 nt, Human
ugcacuuuguucuggcuc

SEQ ID NO: 3003476 - RNA, 19 nt, Human
ugcacuuuguucuggcucu

SEQ ID NO: 3003477 - RNA, 20 nt, Human
ugcacuuuguucuggcucuu

SEQ ID NO: 3003478 - RNA, 16 nt, Human
ugcagauaaacaguag

SEQ ID NO: 3003479 - RNA, 16 nt, Human
ugcacguacacacaca

SEQ ID NO: 3003480 - RNA, 16 nt, Human
ugcacuugcagacucu

SEQ ID NO: 3003481 - RNA, 21 nt, Human
ugcacuugcagacucuacaga

SEQ ID NO: 3003482 - RNA, 16 nt, Human
ugcagcaauaaagcag

SEQ ID NO: 3003483 - RNA, 15 nt, Human
ugcagcaauaaagca

SEQ ID NO: 3003484 - RNA, 14 nt, Human
ugcagcaauaaagc

SEQ ID NO: 3003485 - RNA, 14 nt, Human
ugcaggaccucagg

SEQ ID NO: 3003486 - RNA, 15 nt, Human
ugcaggaccucaggu

SEQ ID NO: 3003487 - RNA, 16 nt, Human
ugcaggaccucaggug

SEQ ID NO: 3003488 - RNA, 18 nt, Human
ugcaggaccucaggugag

SEQ ID NO: 3003489 - RNA, 20 nt, Human
ugccaucccucccuccaccu

SEQ ID NO: 3003490 - RNA, 19 nt, Human
ugccaucccucccuccacc

SEQ ID NO: 3003491 - RNA, 14 nt, Human
ugccaucccucccu

SEQ ID NO: 3003492 - RNA, 15 nt, Human
ugccaucccucccuc

SEQ ID NO: 3003493 - RNA, 22 nt, Human
ugccaucccucccuccaccucc

SEQ ID NO: 3003494 - RNA, 21 nt, Human
ugccaucccucccuccaccuc

SEQ ID NO: 3003495 - RNA, 13 nt, Human
ugccauccuggcc

SEQ ID NO: 3003496 - RNA, 14 nt, Human
ugccagucaccccg

SEQ ID NO: 3003497 - RNA, 24 nt, Human
ugccagguuuuuggucugacccac

SEQ ID NO: 3003498 - RNA, 11 nt, Human
ugccagggaca

SEQ ID NO: 3003499 - RNA, 22 nt, Human
ugccagggacagaggggguggc

SEQ ID NO: 3003500 - RNA, 15 nt, Human
ugcccaccuggccuc

SEQ ID NO: 3003501 - RNA, 17 nt, Human
ugcccaccuggccucug

SEQ ID NO: 3003502 - RNA, 18 nt, Human
ugcccaccuggccucugc

SEQ ID NO: 3003503 - RNA, 14 nt, Human
ugcccaccuggccu

SEQ ID NO: 3003504 - RNA, 10 nt, Human
ugcccagccc

SEQ ID NO: 3003505 - RNA, 21 nt, Human
ugccauccuggcccagggcau

SEQ ID NO: 3003506 - RNA, 18 nt, Human
ugccauccuggcccaggg

SEQ ID NO: 3003507 - RNA, 16 nt, Human
ugccauccuggcccag

SEQ ID NO: 3003508 - RNA, 15 nt, Human
ugccauccuggccca

SEQ ID NO: 3003509 - RNA, 17 nt, Human
ugcaggcagccaggcca

SEQ ID NO: 3003510 - RNA, 18 nt, Human
ugcaggcagccaggccac

SEQ ID NO: 3003511 - RNA, 19 nt, Human
ugcaggcagccaggccaca

SEQ ID NO: 3003512 - RNA, 19 nt, Human
ugcaucagcugcugaaaca

SEQ ID NO: 3003513 - RNA, 22 nt, Human
ugcaucagcugcugaaacaaca

SEQ ID NO: 3003514 - RNA, 16 nt, Human
ugcaggcagccaggcc

SEQ ID NO: 3003515 - RNA, 15 nt, Human
ugcaucguuucaucu

SEQ ID NO: 3003516 - RNA, 20 nt, Human
ugcauuauauuuauuacugu

SEQ ID NO: 3003517 - RNA, 14 nt, Human
ugcauuauauuuau

SEQ ID NO: 3003518 - RNA, 15 nt, Human
ugcauuauauuuauu

SEQ ID NO: 3003519 - RNA, 19 nt, Human
ugcauguuacauaagauaa

SEQ ID NO: 3003520 - RNA, 23 nt, Human
uggggcagugcuuggcccaggag

SEQ ID NO: 3003521 - RNA, 20 nt, Human
uggggcagugcuuggcccag

SEQ ID NO: 3003522 - RNA, 22 nt, Human
uggggcagugcuuggcccagga

SEQ ID NO: 3003523 - RNA, 17 nt, Human
ugggguggggaccucag

SEQ ID NO: 3003524 - RNA, 18 nt, Human
uggggcagugcuuggccc

SEQ ID NO: 3003525 - RNA, 16 nt, Human
uggguagacacacaug

SEQ ID NO: 3003526 - RNA, 17 nt, Human
uggguagacacacauga

SEQ ID NO: 3003527 - RNA, 13 nt, Human
uggguuuauuugg

SEQ ID NO: 3003528 - RNA, 23 nt, Human
ugggugucaagagggucugagga

SEQ ID NO: 3003529 - RNA, 21 nt, Human
ugggugucaagagggucugag

SEQ ID NO: 3003530 - RNA, 16 nt, Human
uggguucacugcaacc

SEQ ID NO: 3003531 - RNA, 23 nt, Human
uggguucaagcgauucuucugcu

SEQ ID NO: 3003532 - RNA, 24 nt, Human
ugggagcugccuguucagcuccag

SEQ ID NO: 3003533 - RNA, 16 nt, Human
ugggagcugucaagca

SEQ ID NO: 3003534 - RNA, 16 nt, Human
ugggagcuuuuguaga

SEQ ID NO: 3003535 - RNA, 22 nt, Human
ugggccuccugugugugcgccu

SEQ ID NO: 3003536 - RNA, 16 nt, Human
ugggccuccugugugu

SEQ ID NO: 3003537 - RNA, 14 nt, Human
ugggccuccugugu

SEQ ID NO: 3003538 - RNA, 19 nt, Human
ugggcuucaguggcagcug

SEQ ID NO: 3003539 - RNA, 18 nt, Human
ugggcuucaguggcagcu

SEQ ID NO: 3003540 - RNA, 13 nt, Human
uggggcagcuuga

SEQ ID NO: 3003541 - RNA, 21 nt, Human
ugggcuuggggaccagagcug

SEQ ID NO: 3003542 - RNA, 16 nt, Human
uggggcagcuugaggg

SEQ ID NO: 3003543 - RNA, 19 nt, Human
ugggcuuggggaccagagc

SEQ ID NO: 3003544 - RNA, 20 nt, Human
ugggcuucaguggcagcugc

SEQ ID NO: 3003545 - RNA, 14 nt, Human
uggccuucggccuc

SEQ ID NO: 3003546 - RNA, 18 nt, Human
uggccuucggccuccauc

SEQ ID NO: 3003547 - RNA, 17 nt, Human
uggccuucggccuccau

SEQ ID NO: 3003548 - RNA, 15 nt, Human
uggccagaugcacca

SEQ ID NO: 3003549 - RNA, 19 nt, Human
uggcgagccauuuguccca

SEQ ID NO: 3003550 - RNA, 14 nt, Human
uggcgagccauuug

SEQ ID NO: 3003551 - RNA, 14 nt, Human
uggcgcugccccug

SEQ ID NO: 3003552 - RNA, 14 nt, Human
uggcgugaacccag

SEQ ID NO: 3003553 - RNA, 22 nt, Human
uggcgugcaguggugcgaucug

SEQ ID NO: 3003554 - RNA, 13 nt, Human
uggcucuuccagg

SEQ ID NO: 3003555 - RNA, 15 nt, Human
uggcucuuccaggcu

SEQ ID NO: 3003556 - RNA, 12 nt, Human
uggcugggggcc

SEQ ID NO: 3003557 - RNA, 16 nt, Human
uggcucuuccaggcug

SEQ ID NO: 3003558 - RNA, 20 nt, Human
uggcucagguggggucacuc

SEQ ID NO: 3003559 - RNA, 22 nt, Human
uggcucagguggggucacucug

SEQ ID NO: 3003560 - RNA, 20 nt, Human
ugggacauuugcucauggaa

SEQ ID NO: 3003561 - RNA, 19 nt, Human
ugggacauuugcucaugga

SEQ ID NO: 3003562 - RNA, 16 nt, Human
ugggacaugggaaagg

SEQ ID NO: 3003563 - RNA, 23 nt, Human
ugggagcugccuguucagcucca

SEQ ID NO: 3003564 - RNA, 21 nt, Human
ugggacagucaccucauggaa

SEQ ID NO: 3003565 - RNA, 20 nt, Human
ugggacagucaccucaugga

SEQ ID NO: 3003566 - RNA, 18 nt, Human
ugggacagucaccucaug

SEQ ID NO: 3003567 - RNA, 22 nt, Human
ugggaaugaaugucagugugac

SEQ ID NO: 3003568 - RNA, 22 nt, Human
uggcugguuagagguucccuuu

SEQ ID NO: 3003569 - RNA, 14 nt, Human
uggcugggggccuc

SEQ ID NO: 3003570 - RNA, 17 nt, Human
uggccagaagucaaggc

SEQ ID NO: 3003571 - RNA, 20 nt, Human
uggcagugggagcugccugu

SEQ ID NO: 3003572 - RNA, 19 nt, Human
uggcagugggagcugccug

SEQ ID NO: 3003573 - RNA, 16 nt, Human
uggcagugggagcugc

SEQ ID NO: 3003574 - RNA, 15 nt, Human
uggcagugggagcug

SEQ ID NO: 3003575 - RNA, 14 nt, Human
uggcagugggagcu

SEQ ID NO: 3003576 - RNA, 13 nt, Human
uggcagugggagc

SEQ ID NO: 3003577 - RNA, 22 nt, Human
uggcagcugcgguccacccagg

SEQ ID NO: 3003578 - RNA, 21 nt, Human
uggcagcugcgguccacccag

SEQ ID NO: 3003579 - RNA, 23 nt, Human
uggcagcugcgguccacccagga

SEQ ID NO: 3003580 - RNA, 14 nt, Human
uggcaggcaccugu

SEQ ID NO: 3003581 - RNA, 19 nt, Human
uggcagcugcgguccaccc

SEQ ID NO: 3003582 - RNA, 14 nt, Human
uggaugccuggugg

SEQ ID NO: 3003583 - RNA, 14 nt, Human
uggcacugcuucca

SEQ ID NO: 3003584 - RNA, 16 nt, Human
uggcacugcuuccagu

SEQ ID NO: 3003585 - RNA, 18 nt, Human
uggcacugcuuccaguga

SEQ ID NO: 3003586 - RNA, 16 nt, Human
uggacaggcauguucu

SEQ ID NO: 3003587 - RNA, 12 nt, Human
uggacaggcaug

SEQ ID NO: 3003588 - RNA, 22 nt, Human
uggaggcaugugaugagaggaa

SEQ ID NO: 3003589 - RNA, 21 nt, Human
uggauauagcuaggugacaua

SEQ ID NO: 3003590 - RNA, 23 nt, Human
uggauauagcuaggugacauaua

SEQ ID NO: 3003591 - RNA, 15 nt, Human
ugcuuuuuuuggccu

SEQ ID NO: 3003592 - RNA, 16 nt, Human
ugcuucuucagagacu

SEQ ID NO: 3003593 - RNA, 14 nt, Human
ugcuucuguuuuau

SEQ ID NO: 3003594 - RNA, 19 nt, Human
ugcuuccagugaggcucug

SEQ ID NO: 3003595 - RNA, 20 nt, Human
ugcuuccagugaggcucugc

SEQ ID NO: 3003596 - RNA, 18 nt, Human
ugcuuccagugaggcucu

SEQ ID NO: 3003597 - RNA, 14 nt, Human
uggaacucucgagc

SEQ ID NO: 3003598 - RNA, 11 nt, Human
uggaagacagc

SEQ ID NO: 3003599 - RNA, 12 nt, Human
uggaagacagcu

SEQ ID NO: 3003600 - RNA, 22 nt, Human
uggaaaaguauguuagugcaaa

SEQ ID NO: 3003601 - RNA, 16 nt, Human
uggaaaauaaauuauu

SEQ ID NO: 3003602 - RNA, 15 nt, Human
uggaaaauaaauuau

SEQ ID NO: 3003603 - RNA, 14 nt, Human
uggaagacagcucu

SEQ ID NO: 3003604 - RNA, 16 nt, Human
uggaauacucuuauau

SEQ ID NO: 3003605 - RNA, 16 nt, Human
uggaauaucuccguca

SEQ ID NO: 3003606 - RNA, 13 nt, Human
ucuucuauauaau

SEQ ID NO: 3003607 - RNA, 12 nt, Human
ucuucuauuuau

SEQ ID NO: 3003608 - RNA, 22 nt, Human
ucuucuauauaauuccuguuuu

SEQ ID NO: 3003609 - RNA, 22 nt, Human
ucuucuauuuauuuauuuauuc

SEQ ID NO: 3003610 - RNA, 19 nt, Human
ucuucuccacuuucuagcc

SEQ ID NO: 3003611 - RNA, 21 nt, Human
ucuucuccacuuucuagccag

SEQ ID NO: 3003612 - RNA, 21 nt, Human
ucuuccacaagagcccaggcc

SEQ ID NO: 3003613 - RNA, 16 nt, Human
ucuucaguaagccgug

SEQ ID NO: 3003614 - RNA, 14 nt, Human
ucuuccaggcuggg

SEQ ID NO: 3003615 - RNA, 14 nt, Human
ucuuauacauuuga

SEQ ID NO: 3003616 - RNA, 15 nt, Human
ucuuauacauuugau

SEQ ID NO: 3003617 - RNA, 16 nt, Human
ucuuaguggauguucu

SEQ ID NO: 3003618 - RNA, 14 nt, Human
ucuuagugugugca

SEQ ID NO: 3003619 - RNA, 13 nt, Human
ucuuaaaaagugg

SEQ ID NO: 3003620 - RNA, 15 nt, Human
ucuucaguaagccgu

SEQ ID NO: 3003621 - RNA, 13 nt, Human
ucuuaugggcugg

SEQ ID NO: 3003622 - RNA, 12 nt, Human
ucuucuccaggc

SEQ ID NO: 3003623 - RNA, 14 nt, Human
ucuucuccaggcug

SEQ ID NO: 3003624 - RNA, 13 nt, Human
ucuucuccaggcu

SEQ ID NO: 3003625 - RNA, 18 nt, Human
ucuugaacuccuggccuc

SEQ ID NO: 3003626 - RNA, 17 nt, Human
ucuugaacuccuggccu

SEQ ID NO: 3003627 - RNA, 16 nt, Human
ucuugaacuccuggcc

SEQ ID NO: 3003628 - RNA, 21 nt, Human
ucuugaauuguaaggaaugau

SEQ ID NO: 3003629 - RNA, 11 nt, Human
ucuugcucugc

SEQ ID NO: 3003630 - RNA, 13 nt, Human
ucuugcucugcug

SEQ ID NO: 3003631 - RNA, 12 nt, Human
ucuugcucugcu

SEQ ID NO: 3003632 - RNA, 20 nt, Human
ucuguuacacaaagaaccac

SEQ ID NO: 3003633 - RNA, 18 nt, Human
ucuuaaaaaguggaaaaa

SEQ ID NO: 3003634 - RNA, 22 nt, Human
ucuguuuuauaauuuugugaag

SEQ ID NO: 3003635 - RNA, 20 nt, Human
ucuguuuuauaauuuuguga

SEQ ID NO: 3003636 - RNA, 17 nt, Human
ucuguacgucugacagg

SEQ ID NO: 3003637 - RNA, 22 nt, Human
ucuguggguuucuaaagcugcc

SEQ ID NO: 3003638 - RNA, 19 nt, Human
ucuguccgagcuuugaaaa

SEQ ID NO: 3003639 - RNA, 23 nt, Human
ucuguggguuucuaaagcugcca

SEQ ID NO: 3003640 - RNA, 22 nt, Human
ucugugucagguggggcagcuu

SEQ ID NO: 3003641 - RNA, 19 nt, Human
ucuguaauaaacucauuuc

SEQ ID NO: 3003642 - RNA, 23 nt, Human
ucuguaauaaacucauuucuagc

SEQ ID NO: 3003643 - RNA, 24 nt, Human
ucuguaauaaacucauuucuagca

SEQ ID NO: 3003644 - RNA, 23 nt, Human
ucuguacagagcccacgccccca

SEQ ID NO: 3003645 - RNA, 12 nt, Human
ucugggacacag

SEQ ID NO: 3003646 - RNA, 15 nt, Human
ucuggcucuuccagg

SEQ ID NO: 3003647 - RNA, 16 nt, Human
ucuggcucuuccaggc

SEQ ID NO: 3003648 - RNA, 17 nt, Human
ucuggcucuuccaggcu

SEQ ID NO: 3003649 - RNA, 23 nt, Human
ucuggccuucggccuccauccug

SEQ ID NO: 3003650 - RNA, 14 nt, Human
ucuggcuaugcauu

SEQ ID NO: 3003651 - RNA, 14 nt, Human
ucuuuuugaaaugu

SEQ ID NO: 3003652 - RNA, 16 nt, Human
ucuuuuugcuuugcuu

SEQ ID NO: 3003653 - RNA, 15 nt, Human
ugaaaagacuccaaa

SEQ ID NO: 3003654 - RNA, 16 nt, Human
ugaaaagacuccaaag

SEQ ID NO: 3003655 - RNA, 17 nt, Human
ugaaaagacuccaaaga

SEQ ID NO: 3003656 - RNA, 19 nt, Human
ugaaaagacuccaaagaaa

SEQ ID NO: 3003657 - RNA, 19 nt, Human
ugaaaacuuuaugcuaagu

SEQ ID NO: 3003658 - RNA, 19 nt, Human
ucuuuugccguuauuaaaa

SEQ ID NO: 3003659 - RNA, 17 nt, Human
ucuuuugccguuauuaa

SEQ ID NO: 3003660 - RNA, 19 nt, Human
ugaaagcagggacuugaac

SEQ ID NO: 3003661 - RNA, 18 nt, Human
ugaaagcagggacuugaa

SEQ ID NO: 3003662 - RNA, 17 nt, Human
ugaaaggaaagaggcuc

SEQ ID NO: 3003663 - RNA, 12 nt, Human
ugaaaggaaaga

SEQ ID NO: 3003664 - RNA, 13 nt, Human
ugaaagauucaau

SEQ ID NO: 3003665 - RNA, 22 nt, Human
ugaaaagacuccaaagaaaugu

SEQ ID NO: 3003666 - RNA, 18 nt, Human
ugaaacccugucucuacu

SEQ ID NO: 3003667 - RNA, 22 nt, Human
ugaaaugaggucagagccugca

SEQ ID NO: 3003668 - RNA, 21 nt, Human
ugaaaugaggucagagccugc

SEQ ID NO: 3003669 - RNA, 23 nt, Human
ugaaaugaggucagagccugcag

SEQ ID NO: 3003670 - RNA, 20 nt, Human
ugaaaugaggucagagccug

SEQ ID NO: 3003671 - RNA, 19 nt, Human
ugaaaugaggucagagccu

SEQ ID NO: 3003672 - RNA, 17 nt, Human
ugaaagggcccagagag

SEQ ID NO: 3003673 - RNA, 16 nt, Human
ugaaagggcccagaga

SEQ ID NO: 3003674 - RNA, 15 nt, Human
ugaaagggcccagag

SEQ ID NO: 3003675 - RNA, 17 nt, Human
ugaaaucuuuuugcuuu

SEQ ID NO: 3003676 - RNA, 19 nt, Human
ugaaaucuaggaaaauuau

SEQ ID NO: 3003677 - RNA, 18 nt, Human
ugaaaucuaggaaaauua

SEQ ID NO: 3003678 - RNA, 17 nt, Human
ugaaaucuaggaaaauu

SEQ ID NO: 3003679 - RNA, 15 nt, Human
ugaaaucuaggaaaa

SEQ ID NO: 3003680 - RNA, 14 nt, Human
ugaagacagagcua

SEQ ID NO: 3003681 - RNA, 16 nt, Human
ugaagacagagcuaca

SEQ ID NO: 3003682 - RNA, 14 nt, Human
ugaacuuggcgcug

SEQ ID NO: 3003683 - RNA, 12 nt, Human
ugaacuugguuc

SEQ ID NO: 3003684 - RNA, 19 nt, Human
ugaacuggguacuugugga

SEQ ID NO: 3003685 - RNA, 17 nt, Human
ugaagacuuuucuuuca

SEQ ID NO: 3003686 - RNA, 22 nt, Human
ugaagacuuuucuuucagccaa

SEQ ID NO: 3003687 - RNA, 14 nt, Human
ugaagacuuuucuu

SEQ ID NO: 3003688 - RNA, 21 nt, Human
ugaaggcucgagcaugccugg

SEQ ID NO: 3003689 - RNA, 22 nt, Human
ugaaguccaagcauuuagaugu

SEQ ID NO: 3003690 - RNA, 21 nt, Human
ugaaguccaagcauuuagaug

SEQ ID NO: 3003691 - RNA, 20 nt, Human
ugaaggcucgagcaugccug

SEQ ID NO: 3003692 - RNA, 14 nt, Human
ugaacacaucagcu

SEQ ID NO: 3003693 - RNA, 19 nt, Human
ugaaccacaucuugcucug

SEQ ID NO: 3003694 - RNA, 15 nt, Human
ugaacucuucaaucu

SEQ ID NO: 3003695 - RNA, 22 nt, Human
ugaaccacaucuugcucugcug

SEQ ID NO: 3003696 - RNA, 21 nt, Human
ugaaccacaucuugcucugcu

SEQ ID NO: 3003697 - RNA, 20 nt, Human
ugaaccacaucuugcucugc

SEQ ID NO: 3003698 - RNA, 18 nt, Human
ugaacucuucaaucucuu

SEQ ID NO: 3003699 - RNA, 13 nt, Human
ugaacugauaaag

SEQ ID NO: 3003700 - RNA, 15 nt, Human
ugaacugauaaagau

SEQ ID NO: 3003701 - RNA, 20 nt, Human
ugaacugaucauguuuauga

SEQ ID NO: 3003702 - RNA, 17 nt, Human
ucucaaacuaacaggcu

SEQ ID NO: 3003703 - RNA, 15 nt, Human
ucucaaacuaacagg

SEQ ID NO: 3003704 - RNA, 19 nt, Human
ucuaguaguuguucugaaa

SEQ ID NO: 3003705 - RNA, 21 nt, Human
ucucaaacucuugaccucagg

SEQ ID NO: 3003706 - RNA, 13 nt, Human
ucucaaacucuug

SEQ ID NO: 3003707 - RNA, 22 nt, Human
ucucaaacucuugaccucaggu

SEQ ID NO: 3003708 - RNA, 17 nt, Human
ucucacucugucgccca

SEQ ID NO: 3003709 - RNA, 16 nt, Human
ucucacucugucgccc

SEQ ID NO: 3003710 - RNA, 22 nt, Human
ucucacucugucgcccagucug

SEQ ID NO: 3003711 - RNA, 18 nt, Human
ucucacucugucgcccag

SEQ ID NO: 3003712 - RNA, 21 nt, Human
ucucacuguugcccaggcugg

SEQ ID NO: 3003713 - RNA, 20 nt, Human
ucucacuguugcccaggcug

SEQ ID NO: 3003714 - RNA, 19 nt, Human
ucucacuguugcccaggcu

SEQ ID NO: 3003715 - RNA, 18 nt, Human
ucucacuguugcccaggc

SEQ ID NO: 3003716 - RNA, 21 nt, Human
ucucagaaucucaaauaacua

SEQ ID NO: 3003717 - RNA, 17 nt, Human
ucucagaaucucaaaua

SEQ ID NO: 3003718 - RNA, 17 nt, Human
ucucacuguugcccagg

SEQ ID NO: 3003719 - RNA, 12 nt, Human
ucuacacugugc

SEQ ID NO: 3003720 - RNA, 14 nt, Human
ucuacacugugcug

SEQ ID NO: 3003721 - RNA, 17 nt, Human
ucuacacuccagugaga

SEQ ID NO: 3003722 - RNA, 17 nt, Human
ucuacacuaagagagaa

SEQ ID NO: 3003723 - RNA, 19 nt, Human
ucuacugaggugcuauguu

SEQ ID NO: 3003724 - RNA, 18 nt, Human
ucuacugaggugcuaugu

SEQ ID NO: 3003725 - RNA, 15 nt, Human
ucuacacugugcuga

SEQ ID NO: 3003726 - RNA, 22 nt, Human
ucuacugaggugcuauguucuu

SEQ ID NO: 3003727 - RNA, 22 nt, Human
ucuagggaaaaaccagcgugug

SEQ ID NO: 3003728 - RNA, 19 nt, Human
ucuagggaaaaaccagcgu

SEQ ID NO: 3003729 - RNA, 22 nt, Human
ucuaaaucuccaaaauaaaacu

SEQ ID NO: 3003730 - RNA, 16 nt, Human
ucuaaauucuuucauu

SEQ ID NO: 3003731 - RNA, 16 nt, Human
ucuaacuucaccauau

SEQ ID NO: 3003732 - RNA, 15 nt, Human
ucuaacuucaccaua

SEQ ID NO: 3003733 - RNA, 22 nt, Human
ucuaacuucaccauauuaccac

SEQ ID NO: 3003734 - RNA, 21 nt, Human
ucuacacuaagagagaaugag

SEQ ID NO: 3003735 - RNA, 15 nt, Human
uccuugcaucaauuu

SEQ ID NO: 3003736 - RNA, 19 nt, Human
uccuucuguccuacucugu

SEQ ID NO: 3003737 - RNA, 12 nt, Human
uccuucuguccu

SEQ ID NO: 3003738 - RNA, 23 nt, Human
uccugguccccucagcucugccu

SEQ ID NO: 3003739 - RNA, 10 nt, Human
ucccucccuu

SEQ ID NO: 3003740 - RNA, 22 nt, Human
uccuggcaugggaaugaauguc

SEQ ID NO: 3003741 - RNA, 17 nt, Human
uccuggcccacugcauc

SEQ ID NO: 3003742 - RNA, 15 nt, Human
uccugguguggaaga

SEQ ID NO: 3003743 - RNA, 15 nt, Human
ucgaguuacagacaa

SEQ ID NO: 3003744 - RNA, 17 nt, Human
ucgaguuacagacaaag

SEQ ID NO: 3003745 - RNA, 18 nt, Human
ucucuucacagucacauu

SEQ ID NO: 3003746 - RNA, 13 nt, Human
ucugaaagggacg

SEQ ID NO: 3003747 - RNA, 23 nt, Human
ucugaaaauguauguguaaguau

SEQ ID NO: 3003748 - RNA, 14 nt, Human
ucugaaaauguaug

SEQ ID NO: 3003749 - RNA, 14 nt, Human
ucugaaauuuccug

SEQ ID NO: 3003750 - RNA, 21 nt, Human
ucugaaaugucaguucugaua

SEQ ID NO: 3003751 - RNA, 16 nt, Human
ucucuuuucaaaacau

SEQ ID NO: 3003752 - RNA, 15 nt, Human
ucucuuuucaaaaca

SEQ ID NO: 3003753 - RNA, 16 nt, Human
ucugaaaauguaugug

SEQ ID NO: 3003754 - RNA, 23 nt, Human
ucugaggacacuaaccacgcugg

SEQ ID NO: 3003755 - RNA, 20 nt, Human
ucugaggacacuaaccacgc

SEQ ID NO: 3003756 - RNA, 17 nt, Human
ucugaggaauccagacc

SEQ ID NO: 3003757 - RNA, 16 nt, Human
ucugaggaauccagac

SEQ ID NO: 3003758 - RNA, 19 nt, Human
ucugauucccugauuuaau

SEQ ID NO: 3003759 - RNA, 23 nt, Human
ucugauucccaagcucugcuccu

SEQ ID NO: 3003760 - RNA, 14 nt, Human
ucugcacaagcugc

SEQ ID NO: 3003761 - RNA, 19 nt, Human
ucugcacaagcugcacccu

SEQ ID NO: 3003762 - RNA, 15 nt, Human
ucugacccaugcugc

SEQ ID NO: 3003763 - RNA, 16 nt, Human
ucugacccaugcugcc

SEQ ID NO: 3003764 - RNA, 17 nt, Human
ucugacccaugcugccc

SEQ ID NO: 3003765 - RNA, 18 nt, Human
ucugacccaugcugcccu

SEQ ID NO: 3003766 - RNA, 24 nt, Human
ucugagaucaaaacgguuuuacug

SEQ ID NO: 3003767 - RNA, 20 nt, Human
ucugaacuuggcgcugcccc

SEQ ID NO: 3003768 - RNA, 21 nt, Human
ucugaacuuggcgcugccccu

SEQ ID NO: 3003769 - RNA, 14 nt, Human
ucugacccaugcug

SEQ ID NO: 3003770 - RNA, 19 nt, Human
ucucuaguuugauuaaauu

SEQ ID NO: 3003771 - RNA, 18 nt, Human
ucucuaguuugauuaaau

SEQ ID NO: 3003772 - RNA, 16 nt, Human
ucucuaguuugauuaa

SEQ ID NO: 3003773 - RNA, 13 nt, Human
ucucuaggaaaua

SEQ ID NO: 3003774 - RNA, 20 nt, Human
ucuccugggcagcugccucc

SEQ ID NO: 3003775 - RNA, 19 nt, Human
ucuccugggcagcugccuc

SEQ ID NO: 3003776 - RNA, 21 nt, Human
ucuccugggcagcugccuccc

SEQ ID NO: 3003777 - RNA, 15 nt, Human
ucucuacaaaaagca

SEQ ID NO: 3003778 - RNA, 14 nt, Human
ucucuacuaaaaau

SEQ ID NO: 3003779 - RNA, 23 nt, Human
ucucuacccaucuuaaaaacaac

SEQ ID NO: 3003780 - RNA, 20 nt, Human
ucucuacccaucuuaaaaac

SEQ ID NO: 3003781 - RNA, 19 nt, Human
ucucuacccaucuuaaaaa

SEQ ID NO: 3003782 - RNA, 18 nt, Human
ucucuacccaucuuaaaa

SEQ ID NO: 3003783 - RNA, 13 nt, Human
ucucugaggacac

SEQ ID NO: 3003784 - RNA, 21 nt, Human
ucucagugucaaugcagcccc

SEQ ID NO: 3003785 - RNA, 15 nt, Human
ucucccccagcccca

SEQ ID NO: 3003786 - RNA, 17 nt, Human
ucucccccagccccauc

SEQ ID NO: 3003787 - RNA, 14 nt, Human
ucucccccagcccc

SEQ ID NO: 3003788 - RNA, 22 nt, Human
ucucccccagccccauccucug

SEQ ID NO: 3003789 - RNA, 13 nt, Human
ucucccccagccc

SEQ ID NO: 3003790 - RNA, 18 nt, Human
ucucccccagccccaucc

SEQ ID NO: 3003791 - RNA, 20 nt, Human
ucucccccagccccauccuc

SEQ ID NO: 3003792 - RNA, 18 nt, Human
ucuccugggcagcugccu

SEQ ID NO: 3003793 - RNA, 17 nt, Human
ucuccugggcagcugcc

SEQ ID NO: 3003794 - RNA, 16 nt, Human
ucuccugggcagcugc

SEQ ID NO: 3003795 - RNA, 15 nt, Human
ucuccugggcagcug

SEQ ID NO: 3003796 - RNA, 13 nt, Human
ucuccugggcagc

SEQ ID NO: 3003797 - RNA, 14 nt, Human
ucuccugggcagcu

SEQ ID NO: 3003798 - RNA, 19 nt, Human
ucuccugccucagccuccc

SEQ ID NO: 3003799 - RNA, 22 nt, Human
ucuccugccucagccucccaaa

SEQ ID NO: 3003800 - RNA, 16 nt, Human
ucccauucuuggccca

SEQ ID NO: 3003801 - RNA, 22 nt, Human
uccccacuugagaauuacccuu

SEQ ID NO: 3003802 - RNA, 15 nt, Human
ucccauucuuggccc

SEQ ID NO: 3003803 - RNA, 20 nt, Human
ucccaucucacacaugagca

SEQ ID NO: 3003804 - RNA, 23 nt, Human
ucccaucucacacaugagcauca

SEQ ID NO: 3003805 - RNA, 22 nt, Human
ucccaggcauuccccaggaggc

SEQ ID NO: 3003806 - RNA, 19 nt, Human
ucccaggcauuccccagga

SEQ ID NO: 3003807 - RNA, 20 nt, Human
ucccaggcauuccccaggag

SEQ ID NO: 3003808 - RNA, 21 nt, Human
ucccaggcauuccccaggagg

SEQ ID NO: 3003809 - RNA, 15 nt, Human
ucccaccucagccuc

SEQ ID NO: 3003810 - RNA, 14 nt, Human
ucccaccucagccu

SEQ ID NO: 3003811 - RNA, 13 nt, Human
ucccaccucagcc

SEQ ID NO: 3003812 - RNA, 16 nt, Human
ucccaaauuucauacc

SEQ ID NO: 3003813 - RNA, 13 nt, Human
ucccaacucaccc

SEQ ID NO: 3003814 - RNA, 14 nt, Human
ucccaacucacccc

SEQ ID NO: 3003815 - RNA, 15 nt, Human
ucccaacucacccca

SEQ ID NO: 3003816 - RNA, 16 nt, Human
ucccaacucaccccag

SEQ ID NO: 3003817 - RNA, 15 nt, Human
ucccaagcucugcuc

SEQ ID NO: 3003818 - RNA, 14 nt, Human
ucccaagcucugcu

SEQ ID NO: 3003819 - RNA, 13 nt, Human
ucccaagcucugc

SEQ ID NO: 3003820 - RNA, 12 nt, Human
ucccaagcucug

SEQ ID NO: 3003821 - RNA, 17 nt, Human
ucccaagcucugcuccu

SEQ ID NO: 3003822 - RNA, 13 nt, Human
uccauggacuuug

SEQ ID NO: 3003823 - RNA, 14 nt, Human
uccauggacuuugu

SEQ ID NO: 3003824 - RNA, 15 nt, Human
uccauggacuuuguu

SEQ ID NO: 3003825 - RNA, 21 nt, Human
ucccaaagugcugggauuaca

SEQ ID NO: 3003826 - RNA, 23 nt, Human
uccagcucaccagccccagugcc

SEQ ID NO: 3003827 - RNA, 17 nt, Human
ucccccuggcacugguu

SEQ ID NO: 3003828 - RNA, 21 nt, Human
ucccccuuccauggacuuugu

SEQ ID NO: 3003829 - RNA, 20 nt, Human
uccccgcacugggcuugggg

SEQ ID NO: 3003830 - RNA, 17 nt, Human
ucccucccucuuucccu

SEQ ID NO: 3003831 - RNA, 17 nt, Human
ucccucccuccaccucc

SEQ ID NO: 3003832 - RNA, 15 nt, Human
ucccucccucuuucc

SEQ ID NO: 3003833 - RNA, 15 nt, Human
ucccuacuguaauuu

SEQ ID NO: 3003834 - RNA, 14 nt, Human
uccccugcugggug

SEQ ID NO: 3003835 - RNA, 15 nt, Human
uccccugcugggugu

SEQ ID NO: 3003836 - RNA, 20 nt, Human
uccccugcuggguguggcgc

SEQ ID NO: 3003837 - RNA, 21 nt, Human
uccccugcuggguguggcgca

SEQ ID NO: 3003838 - RNA, 22 nt, Human
uccccuguagagugggagcuga

SEQ ID NO: 3003839 - RNA, 23 nt, Human
uccccuguccccgcacugggcuu

SEQ ID NO: 3003840 - RNA, 24 nt, Human
uccccugcuggguguggcgcagca

SEQ ID NO: 3003841 - RNA, 19 nt, Human
uccccuguagagugggagc

SEQ ID NO: 3003842 - RNA, 15 nt, Human
uccccuggcacuggc

SEQ ID NO: 3003843 - RNA, 15 nt, Human
ucaucuguuacacaa

SEQ ID NO: 3003844 - RNA, 20 nt, Human
ucauacccacccccacccaa

SEQ ID NO: 3003845 - RNA, 14 nt, Human
ucauacccaccccc

SEQ ID NO: 3003846 - RNA, 15 nt, Human
ucauacccaccccca

SEQ ID NO: 3003847 - RNA, 21 nt, Human
ucauuaggugugacugaauuu

SEQ ID NO: 3003848 - RNA, 18 nt, Human
ucauuaggugugacugaa

SEQ ID NO: 3003849 - RNA, 22 nt, Human
ucauuaggugugacugaauuuc

SEQ ID NO: 3003850 - RNA, 16 nt, Human
ucauuaggugugacug

SEQ ID NO: 3003851 - RNA, 12 nt, Human
ucagcagagugc

SEQ ID NO: 3003852 - RNA, 11 nt, Human
ucagcagagug

SEQ ID NO: 3003853 - RNA, 22 nt, Human
ucagcagagugcuuuaccaauu

SEQ ID NO: 3003854 - RNA, 16 nt, Human
ucagcagagugcuuua

SEQ ID NO: 3003855 - RNA, 24 nt, Human
ucagucugauucccaagcucugcu

SEQ ID NO: 3003856 - RNA, 15 nt, Human
ucagucuggcccuuc

SEQ ID NO: 3003857 - RNA, 16 nt, Human
ucagucugcuuagaaa

SEQ ID NO: 3003858 - RNA, 19 nt, Human
ucagucugcuuagaaauaa

SEQ ID NO: 3003859 - RNA, 21 nt, Human
ucagucugcuuagaaauaaca

SEQ ID NO: 3003860 - RNA, 17 nt, Human
ucagugugacugaucuc

SEQ ID NO: 3003861 - RNA, 13 nt, Human
ucagugugacuga

SEQ ID NO: 3003862 - RNA, 11 nt, Human
ucaguguacau

SEQ ID NO: 3003863 - RNA, 23 nt, Human
ucagugguuggcaauuguuucaa

SEQ ID NO: 3003864 - RNA, 22 nt, Human
ucauacaaggcccaggaggcuu

SEQ ID NO: 3003865 - RNA, 13 nt, Human
ucauacccacccc

SEQ ID NO: 3003866 - RNA, 13 nt, Human
ucauaaugacuua

SEQ ID NO: 3003867 - RNA, 13 nt, Human
ucaguucugauau

SEQ ID NO: 3003868 - RNA, 23 nt, Human
uccaagcauaccaacacgagcag

SEQ ID NO: 3003869 - RNA, 17 nt, Human
uccaagcauuuagaugu

SEQ ID NO: 3003870 - RNA, 14 nt, Human
uccaagaauuucua

SEQ ID NO: 3003871 - RNA, 22 nt, Human
uccaagaagcccaggaaaggcu

SEQ ID NO: 3003872 - RNA, 19 nt, Human
uccaagaagcccaggaaag

SEQ ID NO: 3003873 - RNA, 20 nt, Human
uccaagaagcccaggaaagg

SEQ ID NO: 3003874 - RNA, 16 nt, Human
ucauuucugcaucagc

SEQ ID NO: 3003875 - RNA, 22 nt, Human
ucauuucugcaucagcugcuga

SEQ ID NO: 3003876 - RNA, 14 nt, Human
ucauuucuuugagu

SEQ ID NO: 3003877 - RNA, 22 nt, Human
ucauucagauaugauucaaaug

SEQ ID NO: 3003878 - RNA, 23 nt, Human
uccaaacugacucuuaagaagac

SEQ ID NO: 3003879 - RNA, 12 nt, Human
uccaaagaaaug

SEQ ID NO: 3003880 - RNA, 16 nt, Human
uccaaaauaaaacuuu

SEQ ID NO: 3003881 - RNA, 17 nt, Human
uccaaaauaaaacuuuu

SEQ ID NO: 3003882 - RNA, 14 nt, Human
uccaccuacaugag

SEQ ID NO: 3003883 - RNA, 12 nt, Human
uccaccugccag

SEQ ID NO: 3003884 - RNA, 23 nt, Human
uccaccucccugcaauaaaaugg

SEQ ID NO: 3003885 - RNA, 22 nt, Human
uccaagcaggacauggacaagg

SEQ ID NO: 3003886 - RNA, 14 nt, Human
uccacaagagccca

SEQ ID NO: 3003887 - RNA, 17 nt, Human
uccagauccuggaaauc

SEQ ID NO: 3003888 - RNA, 16 nt, Human
uccagauccuggaaau

SEQ ID NO: 3003889 - RNA, 14 nt, Human
uccagauccuggaa

SEQ ID NO: 3003890 - RNA, 13 nt, Human
uccacuuggucug

SEQ ID NO: 3003891 - RNA, 12 nt, Human
uccacuuggucu

SEQ ID NO: 3003892 - RNA, 13 nt, Human
uccaccugccagg

SEQ ID NO: 3003893 - RNA, 18 nt, Human
ucaagcugaccuugcuga

SEQ ID NO: 3003894 - RNA, 18 nt, Human
ucaaggauccugagccag

SEQ ID NO: 3003895 - RNA, 19 nt, Human
ucaaggauccugagccaga

SEQ ID NO: 3003896 - RNA, 20 nt, Human
ucaaggauccugagccagau

SEQ ID NO: 3003897 - RNA, 22 nt, Human
ucaagugauucuccugccucag

SEQ ID NO: 3003898 - RNA, 16 nt, Human
ucaagcgauucuucug

SEQ ID NO: 3003899 - RNA, 15 nt, Human
ucaagcauguauuuu

SEQ ID NO: 3003900 - RNA, 14 nt, Human
ucaaccuccugggc

SEQ ID NO: 3003901 - RNA, 13 nt, Human
ucaaccuccuggg

SEQ ID NO: 3003902 - RNA, 16 nt, Human
ucaaacuuuacuaugg

SEQ ID NO: 3003903 - RNA, 13 nt, Human
ucaaacuuuacua

SEQ ID NO: 3003904 - RNA, 15 nt, Human
ucaaacuuuacuaug

SEQ ID NO: 3003905 - RNA, 22 nt, Human
ucaaacucuugaccucagguga

SEQ ID NO: 3003906 - RNA, 13 nt, Human
ucaauuacaggaa

SEQ ID NO: 3003907 - RNA, 18 nt, Human
ucaauuacaggaaguacu

SEQ ID NO: 3003908 - RNA, 22 nt, Human
ucaaugccccugaauuuaaaua

SEQ ID NO: 3003909 - RNA, 18 nt, Human
ucaaugcacugacauugu

SEQ ID NO: 3003910 - RNA, 14 nt, Human
ucaauaggaaaaac

SEQ ID NO: 3003911 - RNA, 14 nt, Human
ucaaugcacugaca

SEQ ID NO: 3003912 - RNA, 13 nt, Human
ucaauaggaaaaa

SEQ ID NO: 3003913 - RNA, 19 nt, Human
ucacaggaaguagaggagg

SEQ ID NO: 3003914 - RNA, 14 nt, Human
ucacaggaaguaga

SEQ ID NO: 3003915 - RNA, 23 nt, Human
ucacaggacagcccuucuuucca

SEQ ID NO: 3003916 - RNA, 11 nt, Human
ucacaggcagg

SEQ ID NO: 3003917 - RNA, 23 nt, Human
ucacacagugagucgaggacagg

SEQ ID NO: 3003918 - RNA, 22 nt, Human
ucacacagugagucgaggacag

SEQ ID NO: 3003919 - RNA, 21 nt, Human
ucacacaugagcaucaggcca

SEQ ID NO: 3003920 - RNA, 13 nt, Human
ucacacagugagu

SEQ ID NO: 3003921 - RNA, 22 nt, Human
ucacacaguauuacuucugcua

SEQ ID NO: 3003922 - RNA, 21 nt, Human
ucacacaguauuacuucugcu

SEQ ID NO: 3003923 - RNA, 19 nt, Human
ucaauuacaggaaguacug

SEQ ID NO: 3003924 - RNA, 20 nt, Human
uauuuuuguuuuuauuaaaa

SEQ ID NO: 3003925 - RNA, 18 nt, Human
uauuuuuguuuuuauuaa

SEQ ID NO: 3003926 - RNA, 20 nt, Human
uauuuuuuacauuuuacaca

SEQ ID NO: 3003927 - RNA, 12 nt, Human
uauuuugaaauu

SEQ ID NO: 3003928 - RNA, 13 nt, Human
ucaaacuaacagg

SEQ ID NO: 3003929 - RNA, 12 nt, Human
ucaaacuaacag

SEQ ID NO: 3003930 - RNA, 14 nt, Human
ucaaacucuuaaaa

SEQ ID NO: 3003931 - RNA, 22 nt, Human
ucaaaacgguuuuacugcagcu

SEQ ID NO: 3003932 - RNA, 13 nt, Human
ucaaaacugcacu

SEQ ID NO: 3003933 - RNA, 17 nt, Human
uauuuuuuucugaaauu

SEQ ID NO: 3003934 - RNA, 16 nt, Human
uauuuuuuucugaaau

SEQ ID NO: 3003935 - RNA, 15 nt, Human
uauuuuuuuacuaau

SEQ ID NO: 3003936 - RNA, 16 nt, Human
uauuuauugaaaugau

SEQ ID NO: 3003937 - RNA, 20 nt, Human
uauuuauugaaaugauuuca

SEQ ID NO: 3003938 - RNA, 12 nt, Human
uauuuauugaaa

SEQ ID NO: 3003939 - RNA, 21 nt, Human
uauuucuaugaaauauuaugu

SEQ ID NO: 3003940 - RNA, 22 nt, Human
uauuucuaugaaauauuauguu

SEQ ID NO: 3003941 - RNA, 23 nt, Human
uauuuauuaaaugcccagccccu

SEQ ID NO: 3003942 - RNA, 15 nt, Human
uaucugaaaauguau

SEQ ID NO: 3003943 - RNA, 14 nt, Human
uaucugaaaaugua

SEQ ID NO: 3003944 - RNA, 20 nt, Human
uaucugaaaauguaugugua

SEQ ID NO: 3003945 - RNA, 23 nt, Human
uauuugaguggaguuacugaaca

SEQ ID NO: 3003946 - RNA, 23 nt, Human
uauuucugaggagccugcaacau

SEQ ID NO: 3003947 - RNA, 12 nt, Human
uauuuuacuuuu

SEQ ID NO: 3003948 - RNA, 13 nt, Human
uauuuuacuuuuu

SEQ ID NO: 3003949 - RNA, 14 nt, Human
uauuuuacuuuuug

SEQ ID NO: 3003950 - RNA, 15 nt, Human
uauuuuacuuuuugg

SEQ ID NO: 3003951 - RNA, 22 nt, Human
uauuuuagguguaaaauaauua

SEQ ID NO: 3003952 - RNA, 23 nt, Human
ucagagcugcccucuccugggca

SEQ ID NO: 3003953 - RNA, 22 nt, Human
ucagacauagaauuaacacaug

SEQ ID NO: 3003954 - RNA, 15 nt, Human
ucagacagcugccug

SEQ ID NO: 3003955 - RNA, 16 nt, Human
ucagacagcugccugg

SEQ ID NO: 3003956 - RNA, 17 nt, Human
ucagacagcugccuggg

SEQ ID NO: 3003957 - RNA, 18 nt, Human
ucagacagcugccuggga

SEQ ID NO: 3003958 - RNA, 19 nt, Human
ucagacagcugccugggau

SEQ ID NO: 3003959 - RNA, 20 nt, Human
ucagacagcugccugggauc

SEQ ID NO: 3003960 - RNA, 19 nt, Human
ucagacauagaauuaacac

SEQ ID NO: 3003961 - RNA, 14 nt, Human
ucagacagcugccu

SEQ ID NO: 3003962 - RNA, 19 nt, Human
ucagcacgauuucuguuua

SEQ ID NO: 3003963 - RNA, 18 nt, Human
ucagcacgauuucuguuu

SEQ ID NO: 3003964 - RNA, 17 nt, Human
ucacuugucaauaaaau

SEQ ID NO: 3003965 - RNA, 20 nt, Human
ucacugcuuaacuucacaua

SEQ ID NO: 3003966 - RNA, 18 nt, Human
ucacugcuuaacuucaca

SEQ ID NO: 3003967 - RNA, 17 nt, Human
ucacugcuuaacuucac

SEQ ID NO: 3003968 - RNA, 15 nt, Human
ucacugcuuaacuuc

SEQ ID NO: 3003969 - RNA, 16 nt, Human
ucacucugucgcccag

SEQ ID NO: 3003970 - RNA, 12 nt, Human
ucacucugucgc

SEQ ID NO: 3003971 - RNA, 19 nt, Human
ucacucugucgcccagucu

SEQ ID NO: 3003972 - RNA, 14 nt, Human
ucacucuggcagcu

SEQ ID NO: 3003973 - RNA, 15 nt, Human
ucacucuggcagcuc

SEQ ID NO: 3003974 - RNA, 16 nt, Human
ucacucuggcagcuca

SEQ ID NO: 3003975 - RNA, 17 nt, Human
ucacucuggcagcucag

SEQ ID NO: 3003976 - RNA, 18 nt, Human
ucacucuggcagcucaga

SEQ ID NO: 3003977 - RNA, 19 nt, Human
ucacucuggcagcucagag

SEQ ID NO: 3003978 - RNA, 20 nt, Human
ucacucuggcagcucagaga

SEQ ID NO: 3003979 - RNA, 22 nt, Human
ucacucuggcagcucagagagg

SEQ ID NO: 3003980 - RNA, 12 nt, Human
ucacucuccuug

SEQ ID NO: 3003981 - RNA, 14 nt, Human
ucacucuccuuggu

SEQ ID NO: 3003982 - RNA, 12 nt, Human
ucacucuggcag

SEQ ID NO: 3003983 - RNA, 13 nt, Human
ucacucuggcagc

SEQ ID NO: 3003984 - RNA, 23 nt, Human
ucacucuccuuggugucgggcau

SEQ ID NO: 3003985 - RNA, 13 nt, Human
ucacuccuugaaa

SEQ ID NO: 3003986 - RNA, 20 nt, Human
ucacggcucacugcagccuc

SEQ ID NO: 3003987 - RNA, 15 nt, Human
ucacggcucacugca

SEQ ID NO: 3003988 - RNA, 13 nt, Human
ucacggcucacug

SEQ ID NO: 3003989 - RNA, 16 nt, Human
ucacggaagagccuug

SEQ ID NO: 3003990 - RNA, 17 nt, Human
ucacggaagagccuugc

SEQ ID NO: 3003991 - RNA, 14 nt, Human
ucacggaagagccu

SEQ ID NO: 3003992 - RNA, 15 nt, Human
ucacaggcaggucca

SEQ ID NO: 3003993 - RNA, 12 nt, Human
ucacaggcaggu

SEQ ID NO: 3003994 - RNA, 19 nt, Human
ucacaggcagguccagggu

SEQ ID NO: 3003995 - RNA, 14 nt, Human
ucaccuuucccauc

SEQ ID NO: 3003996 - RNA, 12 nt, Human
ucaccuuugucc

SEQ ID NO: 3003997 - RNA, 14 nt, Human
ucaccuuugucccc

SEQ ID NO: 3003998 - RNA, 15 nt, Human
ucaccuuugucccca

SEQ ID NO: 3003999 - RNA, 17 nt, Human
ucaccuuuguccccacc

SEQ ID NO: 3004000 - RNA, 18 nt, Human
ucaccuuuguccccaccg

SEQ ID NO: 3004001 - RNA, 22 nt, Human
ucaccuuuguccccaccgcaga

SEQ ID NO: 3004002 - RNA, 14 nt, Human
ucacgccacugcac

SEQ ID NO: 3004003 - RNA, 13 nt, Human
ucacgccacugca

SEQ ID NO: 3004004 - RNA, 16 nt, Human
ucacgccacugcacua

SEQ ID NO: 3004005 - RNA, 20 nt, Human
ucacgccuguaauccuagca

SEQ ID NO: 3004006 - RNA, 19 nt, Human
ucacgccuguaauccuagc

SEQ ID NO: 3004007 - RNA, 12 nt, Human
uaaacacauuaa

SEQ ID NO: 3004008 - RNA, 23 nt, Human
uaaacaagaccacguuucuaaag

SEQ ID NO: 3004009 - RNA, 17 nt, Human
uaaaauggguuuuacug

SEQ ID NO: 3004010 - RNA, 18 nt, Human
uaaacaagaccacguuuc

SEQ ID NO: 3004011 - RNA, 19 nt, Human
uaaacuuaaucuaaaugga

SEQ ID NO: 3004012 - RNA, 18 nt, Human
uaaacuuaaucuaaaugg

SEQ ID NO: 3004013 - RNA, 13 nt, Human
uaaacuuaaucua

SEQ ID NO: 3004014 - RNA, 14 nt, Human
uaaacuuaaucuaa

SEQ ID NO: 3004015 - RNA, 22 nt, Human
uaaacuuuaccuuuuuuauaca

SEQ ID NO: 3004016 - RNA, 16 nt, Human
uaaacuuuaccuuuuu

SEQ ID NO: 3004017 - RNA, 19 nt, Human
uaaacauauccaaguuuga

SEQ ID NO: 3004018 - RNA, 20 nt, Human
uaaacauauccaaguuugaa

SEQ ID NO: 3004019 - RNA, 14 nt, Human
uaaaagaugaaaau

SEQ ID NO: 3004020 - RNA, 14 nt, Human
uaaaagcauuuuuu

SEQ ID NO: 3004021 - RNA, 18 nt, Human
uaaaauccauacauuugu

SEQ ID NO: 3004022 - RNA, 19 nt, Human
uaaaauccauacauuugug

SEQ ID NO: 3004023 - RNA, 22 nt, Human
uaaauaucccuuggacauuuua

SEQ ID NO: 3004024 - RNA, 18 nt, Human
uaaauauaugcuaagucu

SEQ ID NO: 3004025 - RNA, 22 nt, Human
uaaauauugguugggaugacuu

SEQ ID NO: 3004026 - RNA, 23 nt, Human
uaaauauugguugggaugacuug

SEQ ID NO: 3004027 - RNA, 17 nt, Human
uaaauauguuucacaca

SEQ ID NO: 3004028 - RNA, 18 nt, Human
uaaauauuuugacuuguu

SEQ ID NO: 3004029 - RNA, 15 nt, Human
uaaauauuuugacuu

SEQ ID NO: 3004030 - RNA, 19 nt, Human
uaaauauuuugacuuguug

SEQ ID NO: 3004031 - RNA, 19 nt, Human
uaaaucagccguguaacca

SEQ ID NO: 3004032 - RNA, 17 nt, Human
uaaauaaaaauaauccu

SEQ ID NO: 3004033 - RNA, 13 nt, Human
uaaaguuucuguu

SEQ ID NO: 3004034 - RNA, 20 nt, Human
uaaaguguauuuuuuuacua

SEQ ID NO: 3004035 - RNA, 23 nt, Human
uaaaguguauuuuuuuacuaaua

SEQ ID NO: 3004036 - RNA, 22 nt, Human
uaaaguguauuuuuuuacuaau

SEQ ID NO: 3004037 - RNA, 21 nt, Human
uaaaguguauuuuuuuacuaa

SEQ ID NO: 3004038 - RNA, 14 nt, Human
uaaaggaauuuaaa

SEQ ID NO: 3004039 - RNA, 16 nt, Human
guuuuguguacuuuua

SEQ ID NO: 3004040 - RNA, 15 nt, Human
guuuuguguacuuuu

SEQ ID NO: 3004041 - RNA, 17 nt, Human
guuuuguguacuuuuaa

SEQ ID NO: 3004042 - RNA, 12 nt, Human
guuuucucuuga

SEQ ID NO: 3004043 - RNA, 19 nt, Human
guuuucucuugagagggug

SEQ ID NO: 3004044 - RNA, 23 nt, Human
guuuuuauggcuuuugugcauua

SEQ ID NO: 3004045 - RNA, 22 nt, Human
guuuuuauggcuuuugugcauu

SEQ ID NO: 3004046 - RNA, 19 nt, Human
guuuuuauggcuuuugugc

SEQ ID NO: 3004047 - RNA, 13 nt, Human
guuuguucccugu

SEQ ID NO: 3004048 - RNA, 16 nt, Human
guuuucaguguacaug

SEQ ID NO: 3004049 - RNA, 18 nt, Human
guuuucaggcuagaugua

SEQ ID NO: 3004050 - RNA, 17 nt, Human
guuuucaguguacaugg

SEQ ID NO: 3004051 - RNA, 16 nt, Human
guuuucauuaucucaa

SEQ ID NO: 3004052 - RNA, 13 nt, Human
guuuuuauuaaaa

SEQ ID NO: 3004053 - RNA, 17 nt, Human
guuuuuauuaaaaggaa

SEQ ID NO: 3004054 - RNA, 14 nt, Human
guuuuuauuaaaag

SEQ ID NO: 3004055 - RNA, 15 nt, Human
guuuuuauuauuaac

SEQ ID NO: 3004056 - RNA, 18 nt, Human
guuuuuauuauuaacaaa

SEQ ID NO: 3004057 - RNA, 20 nt, Human
uaaaaaugcaaaaaaaauua

SEQ ID NO: 3004058 - RNA, 16 nt, Human
uaaaaaagaaacauuu

SEQ ID NO: 3004059 - RNA, 20 nt, Human
uaaaaaacugcugacuguuu

SEQ ID NO: 3004060 - RNA, 23 nt, Human
uaaaaaacugcugacuguuuucu

SEQ ID NO: 3004061 - RNA, 17 nt, Human
guuuagaugaaugucag

SEQ ID NO: 3004062 - RNA, 18 nt, Human
guuuagaugaaugucagu

SEQ ID NO: 3004063 - RNA, 20 nt, Human
guuuaggauguugaaaaagu

SEQ ID NO: 3004064 - RNA, 13 nt, Human
guuuagaaagcuu

SEQ ID NO: 3004065 - RNA, 21 nt, Human
gguuggccccugcccggcugc

SEQ ID NO: 3004066 - RNA, 18 nt, Human
gguuggcaaaaaggcagg

SEQ ID NO: 3004067 - RNA, 18 nt, Human
guuucagaaauguguuau

SEQ ID NO: 3004068 - RNA, 14 nt, Human
guuucagaaaugug

SEQ ID NO: 3004069 - RNA, 21 nt, Human
guuuccuggcacugcuuccag

SEQ ID NO: 3004070 - RNA, 22 nt, Human
guuuccuggcacugcuuccagu

SEQ ID NO: 3004071 - RNA, 16 nt, Human
guuuccuggcacugcu

SEQ ID NO: 3004072 - RNA, 20 nt, Human
guuuccuggcacugcuucca

SEQ ID NO: 3004073 - RNA, 19 nt, Human
guuuguaaauuaacuuuua

SEQ ID NO: 3004074 - RNA, 17 nt, Human
guuuguaaauuaacuuu

SEQ ID NO: 3004075 - RNA, 19 nt, Human
guuugauuaaauucuugca

SEQ ID NO: 3004076 - RNA, 17 nt, Human
guuugauuaaauucuug

SEQ ID NO: 3004077 - RNA, 22 nt, Human
guuugauuaaauucuugcaaag

SEQ ID NO: 3004078 - RNA, 16 nt, Human
guuugaaccaagaacu

SEQ ID NO: 3004079 - RNA, 18 nt, Human
guuugagaucagccuggg

SEQ ID NO: 3004080 - RNA, 14 nt, Human
guuucuaaagcugc

SEQ ID NO: 3004081 - RNA, 15 nt, Human
guuucuaaagcugcc

SEQ ID NO: 3004082 - RNA, 16 nt, Human
guuucuaaagcugcca

SEQ ID NO: 3004083 - RNA, 16 nt, Human
uaagaacuaaaauguu

SEQ ID NO: 3004084 - RNA, 23 nt, Human
uaagagagaaugagagacacacu

SEQ ID NO: 3004085 - RNA, 17 nt, Human
uaagagagucuauuuac

SEQ ID NO: 3004086 - RNA, 22 nt, Human
uaagaggcagggucucacucug

SEQ ID NO: 3004087 - RNA, 24 nt, Human
uaagaaagacuaucuaaauguuga

SEQ ID NO: 3004088 - RNA, 19 nt, Human
uaacuuuuauaaacuuuac

SEQ ID NO: 3004089 - RNA, 22 nt, Human
uaacuuuuauaaacuuuaccuu

SEQ ID NO: 3004090 - RNA, 21 nt, Human
uaacuuuuauaaacuuuaccu

SEQ ID NO: 3004091 - RNA, 22 nt, Human
uaagaaccuuuugagugccuua

SEQ ID NO: 3004092 - RNA, 12 nt, Human
uaagagggaggg

SEQ ID NO: 3004093 - RNA, 22 nt, Human
uaagagggagggagggcuccag

SEQ ID NO: 3004094 - RNA, 23 nt, Human
uaagagggagggagggcuccaga

SEQ ID NO: 3004095 - RNA, 23 nt, Human
uaagagggauuagggagagaaga

SEQ ID NO: 3004096 - RNA, 14 nt, Human
uaagauaaaugugc

SEQ ID NO: 3004097 - RNA, 19 nt, Human
uaagagguaagacuuagua

SEQ ID NO: 3004098 - RNA, 17 nt, Human
uaagauaaaugugcuga

SEQ ID NO: 3004099 - RNA, 16 nt, Human
uaagauaaaugugcug

SEQ ID NO: 3004100 - RNA, 13 nt, Human
uaagccagacauc

SEQ ID NO: 3004101 - RNA, 15 nt, Human
uaagccaaaacugag

SEQ ID NO: 3004102 - RNA, 18 nt, Human
uaagccaaaacugagcau

SEQ ID NO: 3004103 - RNA, 18 nt, Human
uaagcauuccaacuaucu

SEQ ID NO: 3004104 - RNA, 16 nt, Human
uaagcauuccaacuau

SEQ ID NO: 3004105 - RNA, 20 nt, Human
uaagcauuccaacuaucuca

SEQ ID NO: 3004106 - RNA, 23 nt, Human
uaaggaugcuuguacauaaugcg

SEQ ID NO: 3004107 - RNA, 22 nt, Human
uaaggaugcuuguacauaaugc

SEQ ID NO: 3004108 - RNA, 21 nt, Human
uaaggaugcuuguacauaaug

SEQ ID NO: 3004109 - RNA, 20 nt, Human
uaaggaugcuuguacauaau

SEQ ID NO: 3004110 - RNA, 18 nt, Human
uaaggaugcuuguacaua

SEQ ID NO: 3004111 - RNA, 19 nt, Human
uaaggaugcuuguacauaa

SEQ ID NO: 3004112 - RNA, 21 nt, Human
uaagccagacaucaacagaua

SEQ ID NO: 3004113 - RNA, 20 nt, Human
uaagccagacaucaacagau

SEQ ID NO: 3004114 - RNA, 20 nt, Human
uaacagcaacacaaagcuuu

SEQ ID NO: 3004115 - RNA, 18 nt, Human
uaacagcaacacaaagcu

SEQ ID NO: 3004116 - RNA, 19 nt, Human
uaacagaagaaaauagaau

SEQ ID NO: 3004117 - RNA, 15 nt, Human
uaacagaagaaaaua

SEQ ID NO: 3004118 - RNA, 14 nt, Human
uaacagaagaaaau

SEQ ID NO: 3004119 - RNA, 16 nt, Human
uaacaggacgagauga

SEQ ID NO: 3004120 - RNA, 13 nt, Human
uaacagaaaugua

SEQ ID NO: 3004121 - RNA, 15 nt, Human
uaacagaaauguaca

SEQ ID NO: 3004122 - RNA, 14 nt, Human
uaacagaaauguac

SEQ ID NO: 3004123 - RNA, 12 nt, Human
uaacagaaaugu

SEQ ID NO: 3004124 - RNA, 19 nt, Human
uaacaaugcuguauuuuaa

SEQ ID NO: 3004125 - RNA, 14 nt, Human
uaaauuuaguauuu

SEQ ID NO: 3004126 - RNA, 23 nt, Human
uaaauugacacuuaaaaaugguu

SEQ ID NO: 3004127 - RNA, 21 nt, Human
uaacaggcuuagugauguaau

SEQ ID NO: 3004128 - RNA, 14 nt, Human
uaacaggcuuagug

SEQ ID NO: 3004129 - RNA, 19 nt, Human
uaacaggcagauacaggaa

SEQ ID NO: 3004130 - RNA, 14 nt, Human
uaaccagcagaaau

SEQ ID NO: 3004131 - RNA, 19 nt, Human
uaaccagcagaaaugccuu

SEQ ID NO: 3004132 - RNA, 16 nt, Human
uaaccagcagaaaugc

SEQ ID NO: 3004133 - RNA, 20 nt, Human
uaacuuuuauaaacuuuacc

SEQ ID NO: 3004134 - RNA, 17 nt, Human
uaauuaaaacacaacau

SEQ ID NO: 3004135 - RNA, 20 nt, Human
uaauuaaaagaauauuuuaa

SEQ ID NO: 3004136 - RNA, 15 nt, Human
uaauguuucaaacau

SEQ ID NO: 3004137 - RNA, 14 nt, Human
uaauguuucaaaca

SEQ ID NO: 3004138 - RNA, 14 nt, Human
uaaugcgugcauac

SEQ ID NO: 3004139 - RNA, 20 nt, Human
uaauugacaggauuauugga

SEQ ID NO: 3004140 - RNA, 22 nt, Human
uaauugacaggauuauuggaaa

SEQ ID NO: 3004141 - RNA, 18 nt, Human
uaauucuuagcucauucu

SEQ ID NO: 3004142 - RNA, 18 nt, Human
uaauuugugauacaaugc

SEQ ID NO: 3004143 - RNA, 15 nt, Human
uaauuugugauacaa

SEQ ID NO: 3004144 - RNA, 14 nt, Human
uaauuugugauaca

SEQ ID NO: 3004145 - RNA, 23 nt, Human
uaauuuguaguguuggagaagaa

SEQ ID NO: 3004146 - RNA, 20 nt, Human
uaauuuguaguguuggagaa

SEQ ID NO: 3004147 - RNA, 18 nt, Human
uaauuugguuuucacauu

SEQ ID NO: 3004148 - RNA, 17 nt, Human
uaauuugguuuucacau

SEQ ID NO: 3004149 - RNA, 15 nt, Human
uaauuugguuuucac

SEQ ID NO: 3004150 - RNA, 22 nt, Human
uaauuugugauacaaugcugug

SEQ ID NO: 3004151 - RNA, 19 nt, Human
uaauuugugauacaaugcu

SEQ ID NO: 3004152 - RNA, 20 nt, Human
uaauugggcacuauuuauuu

SEQ ID NO: 3004153 - RNA, 17 nt, Human
uaauugggcacuauuua

SEQ ID NO: 3004154 - RNA, 22 nt, Human
uaauuggaaaggcagcucuaaa

SEQ ID NO: 3004155 - RNA, 19 nt, Human
uaaugccacuaaauugaca

SEQ ID NO: 3004156 - RNA, 23 nt, Human
uaaugauaacuggaaacuucagc

SEQ ID NO: 3004157 - RNA, 11 nt, Human
uaaucuaaaug

SEQ ID NO: 3004158 - RNA, 23 nt, Human
uaaucucugauucccugauuuaa

SEQ ID NO: 3004159 - RNA, 14 nt, Human
uaauaauguuucaa

SEQ ID NO: 3004160 - RNA, 15 nt, Human
uaauaauguuucaaa

SEQ ID NO: 3004161 - RNA, 21 nt, Human
uaauaguucagguaacaggca

SEQ ID NO: 3004162 - RNA, 20 nt, Human
uaagugguacuaacuuuccu

SEQ ID NO: 3004163 - RNA, 19 nt, Human
uaauaaaugaaugucacuu

SEQ ID NO: 3004164 - RNA, 13 nt, Human
uacacuugugaau

SEQ ID NO: 3004165 - RNA, 19 nt, Human
uacacuguuucaaacuuua

SEQ ID NO: 3004166 - RNA, 18 nt, Human
uacacuguuucaaacuuu

SEQ ID NO: 3004167 - RNA, 17 nt, Human
uacacuguuucaaacuu

SEQ ID NO: 3004168 - RNA, 22 nt, Human
uacagaaaaguugaauuuuaca

SEQ ID NO: 3004169 - RNA, 18 nt, Human
uacagaaaaguugaauuu

SEQ ID NO: 3004170 - RNA, 13 nt, Human
uacacuuuaugca

SEQ ID NO: 3004171 - RNA, 24 nt, Human
uacagcaaggagauuuacaacugg

SEQ ID NO: 3004172 - RNA, 14 nt, Human
uacaggauuugaaa

SEQ ID NO: 3004173 - RNA, 16 nt, Human
uacaggcacccaccau

SEQ ID NO: 3004174 - RNA, 19 nt, Human
uacaggaaaagcugcugac

SEQ ID NO: 3004175 - RNA, 22 nt, Human
uacagcuugaccgugaggccag

SEQ ID NO: 3004176 - RNA, 21 nt, Human
uacagcuugaccgugaggcca

SEQ ID NO: 3004177 - RNA, 18 nt, Human
uacaggaaaagcugcuga

SEQ ID NO: 3004178 - RNA, 17 nt, Human
uacaggaaaagcugcug

SEQ ID NO: 3004179 - RNA, 23 nt, Human
uacagcuugaccgugaggccaga

SEQ ID NO: 3004180 - RNA, 21 nt, Human
uacacaaugguuuucuugugu

SEQ ID NO: 3004181 - RNA, 23 nt, Human
uacacaaugguuuucuugugugu

SEQ ID NO: 3004182 - RNA, 17 nt, Human
uacacaaugguuuucuu

SEQ ID NO: 3004183 - RNA, 15 nt, Human
uacacacacauacac

SEQ ID NO: 3004184 - RNA, 21 nt, Human
uacacacacacgcgugcacac

SEQ ID NO: 3004185 - RNA, 17 nt, Human
uacacacugcauguuug

SEQ ID NO: 3004186 - RNA, 14 nt, Human
uacacuguuucaaa

SEQ ID NO: 3004187 - RNA, 16 nt, Human
uacacugugcugaguc

SEQ ID NO: 3004188 - RNA, 22 nt, Human
uacacacugcauguuugugauu

SEQ ID NO: 3004189 - RNA, 18 nt, Human
uacacacuguacacauaa

SEQ ID NO: 3004190 - RNA, 17 nt, Human
uacacacuguacacaua

SEQ ID NO: 3004191 - RNA, 23 nt, Human
uaccaauauuuaaucuuuuauga

SEQ ID NO: 3004192 - RNA, 21 nt, Human
uaccaauauuuaaucuuuuau

SEQ ID NO: 3004193 - RNA, 16 nt, Human
uaccaauauuuaaucu

SEQ ID NO: 3004194 - RNA, 13 nt, Human
uaccaauauuuaa

SEQ ID NO: 3004195 - RNA, 13 nt, Human
uaccacagacaua

SEQ ID NO: 3004196 - RNA, 23 nt, Human
uaccacaggaaccacaagacugc

SEQ ID NO: 3004197 - RNA, 23 nt, Human
uaccauuuugggguacccacugc

SEQ ID NO: 3004198 - RNA, 22 nt, Human
uacccaggugcuaggaacacuc

SEQ ID NO: 3004199 - RNA, 18 nt, Human
uacccagcgagcccuggu

SEQ ID NO: 3004200 - RNA, 16 nt, Human
uacccagcgagcccug

SEQ ID NO: 3004201 - RNA, 14 nt, Human
uacccacugcucug

SEQ ID NO: 3004202 - RNA, 13 nt, Human
uacccacugcucu

SEQ ID NO: 3004203 - RNA, 12 nt, Human
uacccacugcuc

SEQ ID NO: 3004204 - RNA, 11 nt, Human
uacccacugcu

SEQ ID NO: 3004205 - RNA, 17 nt, Human
uacccacccccacccaa

SEQ ID NO: 3004206 - RNA, 19 nt, Human
uacccacccccacccaagg

SEQ ID NO: 3004207 - RNA, 23 nt, Human
uacccacccccacccaagggccu

SEQ ID NO: 3004208 - RNA, 12 nt, Human
uacccaccccca

SEQ ID NO: 3004209 - RNA, 15 nt, Human
uacccacccccaccc

SEQ ID NO: 3004210 - RNA, 15 nt, Human
uacccaaauuaagag

SEQ ID NO: 3004211 - RNA, 22 nt, Human
uacaugagguacugagagugaa

SEQ ID NO: 3004212 - RNA, 21 nt, Human
uacaugagguacugagaguga

SEQ ID NO: 3004213 - RNA, 11 nt, Human
uacauuugugu

SEQ ID NO: 3004214 - RNA, 17 nt, Human
uacauuuguauaaaaua

SEQ ID NO: 3004215 - RNA, 16 nt, Human
uacauuuguauaaaau

SEQ ID NO: 3004216 - RNA, 21 nt, Human
uacauuugcuccauccuccug

SEQ ID NO: 3004217 - RNA, 16 nt, Human
uaccaacacgagcagg

SEQ ID NO: 3004218 - RNA, 22 nt, Human
uacauuuuacacacuguacaca

SEQ ID NO: 3004219 - RNA, 18 nt, Human
uacauuuuacacacugua

SEQ ID NO: 3004220 - RNA, 15 nt, Human
uacauuuuacacacu

SEQ ID NO: 3004221 - RNA, 13 nt, Human
uacauuuuacaca

SEQ ID NO: 3004222 - RNA, 19 nt, Human
uacaguuacucagaauucu

SEQ ID NO: 3004223 - RNA, 23 nt, Human
uacaguuacucagaauucucuag

SEQ ID NO: 3004224 - RNA, 19 nt, Human
uacauaagauaaaugugcu

SEQ ID NO: 3004225 - RNA, 18 nt, Human
uacauaagauaaaugugc

SEQ ID NO: 3004226 - RNA, 22 nt, Human
uacauaagauaaaugugcugaa

SEQ ID NO: 3004227 - RNA, 15 nt, Human
uacugaggugcuaug

SEQ ID NO: 3004228 - RNA, 19 nt, Human
uacugagagugaacaaauu

SEQ ID NO: 3004229 - RNA, 23 nt, Human
uacugauguuccuagugaaagag

SEQ ID NO: 3004230 - RNA, 12 nt, Human
uacucccaucug

SEQ ID NO: 3004231 - RNA, 14 nt, Human
uacucccaucugug

SEQ ID NO: 3004232 - RNA, 16 nt, Human
uacucccaucugugaa

SEQ ID NO: 3004233 - RNA, 17 nt, Human
uacucccaucugugaaa

SEQ ID NO: 3004234 - RNA, 14 nt, Human
uacucaccucaccc

SEQ ID NO: 3004235 - RNA, 12 nt, Human
uacucaccucac

SEQ ID NO: 3004236 - RNA, 20 nt, Human
uacuacaguccucccaucuc

SEQ ID NO: 3004237 - RNA, 20 nt, Human
uacuacaguuuguuaguaug

SEQ ID NO: 3004238 - RNA, 22 nt, Human
uacucagaauucucuaguuuga

SEQ ID NO: 3004239 - RNA, 16 nt, Human
uacucagaauucucua

SEQ ID NO: 3004240 - RNA, 22 nt, Human
uacuaauaaaauuuaaaagucu

SEQ ID NO: 3004241 - RNA, 17 nt, Human
uacuaauagacaauuua

SEQ ID NO: 3004242 - RNA, 15 nt, Human
uacuaauagacaauu

SEQ ID NO: 3004243 - RNA, 12 nt, Human
uacuacaguccu

SEQ ID NO: 3004244 - RNA, 17 nt, Human
uacuacaguccucccau

SEQ ID NO: 3004245 - RNA, 17 nt, Human
uacuaaccagcagaaau

SEQ ID NO: 3004246 - RNA, 18 nt, Human
uacuaaccagcagaaaug

SEQ ID NO: 3004247 - RNA, 19 nt, Human
uacuaaccagcagaaaugc

SEQ ID NO: 3004248 - RNA, 18 nt, Human
uacccaucuuaaaaacaa

SEQ ID NO: 3004249 - RNA, 19 nt, Human
uacccaucuuaaaaacaac

SEQ ID NO: 3004250 - RNA, 22 nt, Human
uacccaucccauaugccugggc

SEQ ID NO: 3004251 - RNA, 15 nt, Human
uacccaucuuaaaaa

SEQ ID NO: 3004252 - RNA, 20 nt, Human
uaccuuuguauucucuccug

SEQ ID NO: 3004253 - RNA, 20 nt, Human
uaccuuuuuuauacauaaac

SEQ ID NO: 3004254 - RNA, 19 nt, Human
uaccuuuuuuauacauaaa

SEQ ID NO: 3004255 - RNA, 18 nt, Human
uaccuuuuuuauacauaa

SEQ ID NO: 3004256 - RNA, 16 nt, Human
uagaaauaacagaaga

SEQ ID NO: 3004257 - RNA, 13 nt, Human
uagaaauaacaga

SEQ ID NO: 3004258 - RNA, 23 nt, Human
uagaaauaucugaaaauguaugu

SEQ ID NO: 3004259 - RNA, 21 nt, Human
uagaaauaucugaaaauguau

SEQ ID NO: 3004260 - RNA, 20 nt, Human
uagaaauaucugaaaaugua

SEQ ID NO: 3004261 - RNA, 15 nt, Human
uagaaauauaauuga

SEQ ID NO: 3004262 - RNA, 18 nt, Human
uacuuguggacacagcuc

SEQ ID NO: 3004263 - RNA, 15 nt, Human
uacuuguggacacag

SEQ ID NO: 3004264 - RNA, 19 nt, Human
uacuuguggacacagcucu

SEQ ID NO: 3004265 - RNA, 14 nt, Human
uacuuguggacaca

SEQ ID NO: 3004266 - RNA, 17 nt, Human
uacugcauaugaaagga

SEQ ID NO: 3004267 - RNA, 21 nt, Human
uacuguaucaugacaaagacu

SEQ ID NO: 3004268 - RNA, 23 nt, Human
uagcaguaaaaaaugguguuuua

SEQ ID NO: 3004269 - RNA, 20 nt, Human
uagcagggcauggcugggaa

SEQ ID NO: 3004270 - RNA, 20 nt, Human
uagcagcccucaauugugaa

SEQ ID NO: 3004271 - RNA, 23 nt, Human
uagcagagaaugaaagggcccag

SEQ ID NO: 3004272 - RNA, 19 nt, Human
uagcagagaaugaaagggc

SEQ ID NO: 3004273 - RNA, 11 nt, Human
uagauguugcu

SEQ ID NO: 3004274 - RNA, 13 nt, Human
uagauguugcuaa

SEQ ID NO: 3004275 - RNA, 16 nt, Human
uagcacuuugggaggc

SEQ ID NO: 3004276 - RNA, 18 nt, Human
uagauaauacaccacuac

SEQ ID NO: 3004277 - RNA, 12 nt, Human
uagauguauaua

SEQ ID NO: 3004278 - RNA, 20 nt, Human
uagauguauguacuucaugc

SEQ ID NO: 3004279 - RNA, 20 nt, Human
uagauguaugcacacacaua

SEQ ID NO: 3004280 - RNA, 19 nt, Human
uagauguaugcacacacau

SEQ ID NO: 3004281 - RNA, 22 nt, Human
uagauguaugcacacacauaua

SEQ ID NO: 3004282 - RNA, 16 nt, Human
uagauguauguacuuc

SEQ ID NO: 3004283 - RNA, 16 nt, Human
uagauguaugcacaca

SEQ ID NO: 3004284 - RNA, 11 nt, Human
uagagacaggg

SEQ ID NO: 3004285 - RNA, 23 nt, Human
uagacccucaugcugccaauauc

SEQ ID NO: 3004286 - RNA, 16 nt, Human
uagagagagaccacuu

SEQ ID NO: 3004287 - RNA, 16 nt, Human
uagagguucaaagaua

SEQ ID NO: 3004288 - RNA, 19 nt, Human
uagagguucaaagauauuu

SEQ ID NO: 3004289 - RNA, 21 nt, Human
uagagguucaaagauauuuug

SEQ ID NO: 3004290 - RNA, 18 nt, Human
uagaguuuagcuggaaaa

SEQ ID NO: 3004291 - RNA, 17 nt, Human
uagaguuuagcuggaaa

SEQ ID NO: 3004292 - RNA, 21 nt, Human
uagaguuuagcccugaacauu

SEQ ID NO: 3004293 - RNA, 16 nt, Human
uagccuaggugacaga

SEQ ID NO: 3004294 - RNA, 14 nt, Human
uagcccugaacauu

SEQ ID NO: 3004295 - RNA, 14 nt, Human
uagcccaaaaccaa

SEQ ID NO: 3004296 - RNA, 21 nt, Human
uagcucuaggagggcuggcaa

SEQ ID NO: 3004297 - RNA, 17 nt, Human
uagccugccucuucucu

SEQ ID NO: 3004298 - RNA, 22 nt, Human
uagcucauucuccuuguguuac

SEQ ID NO: 3004299 - RNA, 20 nt, Human
uagcugggacuacaggcacc

SEQ ID NO: 3004300 - RNA, 18 nt, Human
uagcugggacuacaggug

SEQ ID NO: 3004301 - RNA, 11 nt, Human
uagcugggacu

SEQ ID NO: 3004302 - RNA, 20 nt, Human
uaggaauugacccacaagaa

SEQ ID NO: 3004303 - RNA, 23 nt, Human
uaggaauugacccacaagaaaug

SEQ ID NO: 3004304 - RNA, 15 nt, Human
uaggaagguuaaugu

SEQ ID NO: 3004305 - RNA, 13 nt, Human
uaggccaugggac

SEQ ID NO: 3004306 - RNA, 14 nt, Human
uaggccuggccaga

SEQ ID NO: 3004307 - RNA, 13 nt, Human
uaggccuggccag

SEQ ID NO: 3004308 - RNA, 16 nt, Human
uaggaagacuuuggaa

SEQ ID NO: 3004309 - RNA, 17 nt, Human
uaggaagacuuuggaaa

SEQ ID NO: 3004310 - RNA, 14 nt, Human
uaggaagacuuugg

SEQ ID NO: 3004311 - RNA, 15 nt, Human
uaggaagacuuugga

SEQ ID NO: 3004312 - RNA, 13 nt, Human
uaggaagacuuug

SEQ ID NO: 3004313 - RNA, 13 nt, Human
uaggaacacuccu

SEQ ID NO: 3004314 - RNA, 14 nt, Human
uaggaacacuccuu

SEQ ID NO: 3004315 - RNA, 21 nt, Human
uaggaacuuaaauaaugugaa

SEQ ID NO: 3004316 - RNA, 17 nt, Human
uaggaacacuccuucac

SEQ ID NO: 3004317 - RNA, 23 nt, Human
uauaauuccuguuuuuauuauua

SEQ ID NO: 3004318 - RNA, 17 nt, Human
uauaauucuacuuugag

SEQ ID NO: 3004319 - RNA, 20 nt, Human
uauaauguaagcucuacuga

SEQ ID NO: 3004320 - RNA, 19 nt, Human
uauaauguaagcucuacug

SEQ ID NO: 3004321 - RNA, 14 nt, Human
uauaauguaagcuc

SEQ ID NO: 3004322 - RNA, 22 nt, Human
uauaacaaaggauacuuauuua

SEQ ID NO: 3004323 - RNA, 18 nt, Human
uauaaugaaugaaacauu

SEQ ID NO: 3004324 - RNA, 20 nt, Human
uauaaugaaugaaacauuuu

SEQ ID NO: 3004325 - RNA, 20 nt, Human
uauaacaaaggauacuuauu

SEQ ID NO: 3004326 - RNA, 21 nt, Human
uaguuugauuaaauucuugca

SEQ ID NO: 3004327 - RNA, 14 nt, Human
uagucaaauugugu

SEQ ID NO: 3004328 - RNA, 18 nt, Human
uagucaaauugugugaaa

SEQ ID NO: 3004329 - RNA, 15 nt, Human
uaguggauguucuga

SEQ ID NO: 3004330 - RNA, 21 nt, Human
uaguuguaccgcaaugugacu

SEQ ID NO: 3004331 - RNA, 12 nt, Human
uaguuugcaguu

SEQ ID NO: 3004332 - RNA, 23 nt, Human
uaguuugauuaaauucuugcaaa

SEQ ID NO: 3004333 - RNA, 13 nt, Human
uaguuucuccaag

SEQ ID NO: 3004334 - RNA, 23 nt, Human
uauauuuauuacuguaagaaaau

SEQ ID NO: 3004335 - RNA, 20 nt, Human
uauauuuauuacuguaagaa

SEQ ID NO: 3004336 - RNA, 20 nt, Human
uauauguagauguaugcaca

SEQ ID NO: 3004337 - RNA, 18 nt, Human
uauauguagauguaugca

SEQ ID NO: 3004338 - RNA, 15 nt, Human
uauauguagauguau

SEQ ID NO: 3004339 - RNA, 13 nt, Human
uauauuugaaaua

SEQ ID NO: 3004340 - RNA, 14 nt, Human
uauauuugaaauau

SEQ ID NO: 3004341 - RNA, 18 nt, Human
uauauuuuuuaaaauaag

SEQ ID NO: 3004342 - RNA, 19 nt, Human
uauauuuuuuaaaauaagu

SEQ ID NO: 3004343 - RNA, 19 nt, Human
uauauuuuuuguuaaauga

SEQ ID NO: 3004344 - RNA, 17 nt, Human
uaucaggugcugccauc

SEQ ID NO: 3004345 - RNA, 16 nt, Human
uaucaugacaaagacu

SEQ ID NO: 3004346 - RNA, 15 nt, Human
uaucuaaauguugaa

SEQ ID NO: 3004347 - RNA, 16 nt, Human
uaucgucacugcuuaa

SEQ ID NO: 3004348 - RNA, 19 nt, Human
uaucgucacugcuuaacuu

SEQ ID NO: 3004349 - RNA, 21 nt, Human
ggggcagugcuuggcccagga

SEQ ID NO: 3004350 - RNA, 23 nt, Human
ggggcagugcuuggcccaggagu

SEQ ID NO: 3004351 - RNA, 20 nt, Human
ggggcagugcucacccacac

SEQ ID NO: 3004352 - RNA, 17 nt, Human
ggggcagugcucaccca

SEQ ID NO: 3004353 - RNA, 13 nt, Human
ggggcagugcuca

SEQ ID NO: 3004354 - RNA, 16 nt, Human
ggggcaacccugguga

SEQ ID NO: 3004355 - RNA, 17 nt, Human
ggggcugaggugggagg

SEQ ID NO: 3004356 - RNA, 12 nt, Human
ggggcucccagc

SEQ ID NO: 3004357 - RNA, 16 nt, Human
ggggcucccagccagg

SEQ ID NO: 3004358 - RNA, 13 nt, Human
ggggcucccagcc

SEQ ID NO: 3004359 - RNA, 20 nt, Human
ggggcucccagccaggcccu

SEQ ID NO: 3004360 - RNA, 21 nt, Human
ggggaaaaucagccugcucca

SEQ ID NO: 3004361 - RNA, 17 nt, Human
ggggaaaaucagccugc

SEQ ID NO: 3004362 - RNA, 19 nt, Human
ggggaaaaucagccugcuc

SEQ ID NO: 3004363 - RNA, 16 nt, Human
ggggaaaaucagccug

SEQ ID NO: 3004364 - RNA, 22 nt, Human
gggcuuggggaccagagcugcc

SEQ ID NO: 3004365 - RNA, 17 nt, Human
ggguaagugagagaggg

SEQ ID NO: 3004366 - RNA, 14 nt, Human
gggucucacucugu

SEQ ID NO: 3004367 - RNA, 12 nt, Human
gggucucacucu

SEQ ID NO: 3004368 - RNA, 21 nt, Human
gggucugaggaauccagaccc

SEQ ID NO: 3004369 - RNA, 12 nt, Human
gggucugaggaa

SEQ ID NO: 3004370 - RNA, 19 nt, Human
ggggcugaggugggaggau

SEQ ID NO: 3004371 - RNA, 12 nt, Human
ggggcugcaccg

SEQ ID NO: 3004372 - RNA, 21 nt, Human
ggggcugcaccggcuggccug

SEQ ID NO: 3004373 - RNA, 22 nt, Human
ggggcugcaccggcuggccugg

SEQ ID NO: 3004374 - RNA, 22 nt, Human
gggggaggugggauccuccagg

SEQ ID NO: 3004375 - RNA, 23 nt, Human
ggggcugcaccggcuggccuggc

SEQ ID NO: 3004376 - RNA, 17 nt, Human
gggguggggaccucagg

SEQ ID NO: 3004377 - RNA, 12 nt, Human
gggguggccucc

SEQ ID NO: 3004378 - RNA, 23 nt, Human
ggguucaagcgauucuucugcuu

SEQ ID NO: 3004379 - RNA, 22 nt, Human
ggguucaagcgauucuucugcu

SEQ ID NO: 3004380 - RNA, 12 nt, Human
ggguucuaccca

SEQ ID NO: 3004381 - RNA, 17 nt, Human
gggugaagugaagacaa

SEQ ID NO: 3004382 - RNA, 19 nt, Human
gggugacagagcaagugag

SEQ ID NO: 3004383 - RNA, 11 nt, Human
ggucagagccu

SEQ ID NO: 3004384 - RNA, 15 nt, Human
ggucccaccccacac

SEQ ID NO: 3004385 - RNA, 16 nt, Human
ggucccaccccacaca

SEQ ID NO: 3004386 - RNA, 13 nt, Human
gguacccacugcu

SEQ ID NO: 3004387 - RNA, 11 nt, Human
gguacccacug

SEQ ID NO: 3004388 - RNA, 22 nt, Human
gguagaaauaucugaaaaugua

SEQ ID NO: 3004389 - RNA, 17 nt, Human
gguacuuguggacacag

SEQ ID NO: 3004390 - RNA, 16 nt, Human
gguacuuguggacaca

SEQ ID NO: 3004391 - RNA, 23 nt, Human
gguagaaauaucugaaaauguau

SEQ ID NO: 3004392 - RNA, 22 nt, Human
gguagaagcccuucuaccuucc

SEQ ID NO: 3004393 - RNA, 14 nt, Human
gguagcauuuuaaa

SEQ ID NO: 3004394 - RNA, 18 nt, Human
gguagcauuuguguugaa

SEQ ID NO: 3004395 - RNA, 16 nt, Human
gguuauuuuacuuuuu

SEQ ID NO: 3004396 - RNA, 13 nt, Human
gguucaaagauau

SEQ ID NO: 3004397 - RNA, 21 nt, Human
gguucaaagauauuuugcuuu

SEQ ID NO: 3004398 - RNA, 13 nt, Human
gguugagguuuca

SEQ ID NO: 3004399 - RNA, 21 nt, Human
gguuacccaguuagcucucaa

SEQ ID NO: 3004400 - RNA, 17 nt, Human
gguuaggcauuguggga

SEQ ID NO: 3004401 - RNA, 13 nt, Human
gguuauggagagg

SEQ ID NO: 3004402 - RNA, 23 nt, Human
gguuauaacuuaaugaaaacaau

SEQ ID NO: 3004403 - RNA, 17 nt, Human
ggugucaagagggucug

SEQ ID NO: 3004404 - RNA, 19 nt, Human
ggugucaagagggucugag

SEQ ID NO: 3004405 - RNA, 19 nt, Human
ggugucaccugaagacuca

SEQ ID NO: 3004406 - RNA, 21 nt, Human
ggugguuauggagaggguguc

SEQ ID NO: 3004407 - RNA, 18 nt, Human
ggugguuucagaaaugug

SEQ ID NO: 3004408 - RNA, 17 nt, Human
ggugguuucagaaaugu

SEQ ID NO: 3004409 - RNA, 18 nt, Human
ggugguuuucuguucuuu

SEQ ID NO: 3004410 - RNA, 15 nt, Human
ggugguuuucuguuc

SEQ ID NO: 3004411 - RNA, 14 nt, Human
gguguaaacacauc

SEQ ID NO: 3004412 - RNA, 13 nt, Human
gguguaaacacau

SEQ ID NO: 3004413 - RNA, 15 nt, Human
gguggugaccucugc

SEQ ID NO: 3004414 - RNA, 14 nt, Human
gguggugaccucug

SEQ ID NO: 3004415 - RNA, 16 nt, Human
gguggugaccucugcc

SEQ ID NO: 3004416 - RNA, 16 nt, Human
ggugcuaucuccccca

SEQ ID NO: 3004417 - RNA, 17 nt, Human
ggugcuaucucccccag

SEQ ID NO: 3004418 - RNA, 19 nt, Human
ggugcuaucucccccagcc

SEQ ID NO: 3004419 - RNA, 20 nt, Human
ggugcuaucucccccagccc

SEQ ID NO: 3004420 - RNA, 21 nt, Human
ggugcuacaaaaacacagcaa

SEQ ID NO: 3004421 - RNA, 23 nt, Human
ggugcuacaaaaacacagcaagg

SEQ ID NO: 3004422 - RNA, 16 nt, Human
ggugagaggggaacag

SEQ ID NO: 3004423 - RNA, 15 nt, Human
ggugagaagcagagg

SEQ ID NO: 3004424 - RNA, 23 nt, Human
gguggccucccaacucaccccag

SEQ ID NO: 3004425 - RNA, 22 nt, Human
gguggccucccaacucacccca

SEQ ID NO: 3004426 - RNA, 16 nt, Human
gguggcagugggagcu

SEQ ID NO: 3004427 - RNA, 22 nt, Human
gguggcagugggagcugccugu

SEQ ID NO: 3004428 - RNA, 19 nt, Human
gguggcagugggagcugcc

SEQ ID NO: 3004429 - RNA, 15 nt, Human
ggugcugccauccag

SEQ ID NO: 3004430 - RNA, 18 nt, Human
ggugcugaguguacagag

SEQ ID NO: 3004431 - RNA, 22 nt, Human
ggugaccagcaccaucucuccu

SEQ ID NO: 3004432 - RNA, 21 nt, Human
ggugaccucugccugaaguca

SEQ ID NO: 3004433 - RNA, 14 nt, Human
ggucugacccacug

SEQ ID NO: 3004434 - RNA, 21 nt, Human
ggugacagagugagacucugu

SEQ ID NO: 3004435 - RNA, 16 nt, Human
ggugacauauacauac

SEQ ID NO: 3004436 - RNA, 17 nt, Human
ggucccaccccacacac

SEQ ID NO: 3004437 - RNA, 14 nt, Human
ggucccaccccaca

SEQ ID NO: 3004438 - RNA, 23 nt, Human
ggucucacucugucgcccagucu

SEQ ID NO: 3004439 - RNA, 22 nt, Human
ggucucacucugucgcccaguc

SEQ ID NO: 3004440 - RNA, 16 nt, Human
ggucucacucugucgc

SEQ ID NO: 3004441 - RNA, 16 nt, Human
gggcacaucauuucaa

SEQ ID NO: 3004442 - RNA, 13 nt, Human
gggcacagggucu

SEQ ID NO: 3004443 - RNA, 16 nt, Human
gggcacagggucucua

SEQ ID NO: 3004444 - RNA, 19 nt, Human
gggcacucagaagacacug

SEQ ID NO: 3004445 - RNA, 16 nt, Human
gggcacucagaagaca

SEQ ID NO: 3004446 - RNA, 23 nt, Human
gggcacaccgggcacucagaaga

SEQ ID NO: 3004447 - RNA, 18 nt, Human
gggcacagaaaauggaag

SEQ ID NO: 3004448 - RNA, 20 nt, Human
gggcacagaaaauggaagac

SEQ ID NO: 3004449 - RNA, 21 nt, Human
gggcacagaaaauggaagaca

SEQ ID NO: 3004450 - RNA, 18 nt, Human
gggcagaaggaagacuuc

SEQ ID NO: 3004451 - RNA, 14 nt, Human
gggcagaaggaaga

SEQ ID NO: 3004452 - RNA, 20 nt, Human
gggcacucagaagacacuga

SEQ ID NO: 3004453 - RNA, 11 nt, Human
gggcagagcag

SEQ ID NO: 3004454 - RNA, 17 nt, Human
gggcagguugguggggg

SEQ ID NO: 3004455 - RNA, 18 nt, Human
gggauaucacuuccauga

SEQ ID NO: 3004456 - RNA, 15 nt, Human
gggauccuccaggug

SEQ ID NO: 3004457 - RNA, 16 nt, Human
gggauccuccaggugc

SEQ ID NO: 3004458 - RNA, 21 nt, Human
gggauaugauuuaaaucagcc

SEQ ID NO: 3004459 - RNA, 13 nt, Human
gggauagagagag

SEQ ID NO: 3004460 - RNA, 18 nt, Human
gggcaacccuggugacca

SEQ ID NO: 3004461 - RNA, 20 nt, Human
gggcaacccccagccugcua

SEQ ID NO: 3004462 - RNA, 23 nt, Human
gggauccuggaguucugguuccu

SEQ ID NO: 3004463 - RNA, 14 nt, Human
gggagugagcuggu

SEQ ID NO: 3004464 - RNA, 11 nt, Human
gggagugagcu

SEQ ID NO: 3004465 - RNA, 18 nt, Human
gggagugacagaggcagc

SEQ ID NO: 3004466 - RNA, 17 nt, Human
gggagugacagaggcag

SEQ ID NO: 3004467 - RNA, 17 nt, Human
gggaggugggauccucc

SEQ ID NO: 3004468 - RNA, 16 nt, Human
gggaggugaccccagg

SEQ ID NO: 3004469 - RNA, 18 nt, Human
gggcagugcuuggcccag

SEQ ID NO: 3004470 - RNA, 19 nt, Human
gggcagugcuuggcccagg

SEQ ID NO: 3004471 - RNA, 20 nt, Human
gggcagugcuuggcccagga

SEQ ID NO: 3004472 - RNA, 22 nt, Human
gggcagugcuuggcccaggagu

SEQ ID NO: 3004473 - RNA, 20 nt, Human
gggcagugcucacccacacc

SEQ ID NO: 3004474 - RNA, 23 nt, Human
gggcagugcuuggcccaggaguu

SEQ ID NO: 3004475 - RNA, 12 nt, Human
gggcaugacacg

SEQ ID NO: 3004476 - RNA, 16 nt, Human
gggccacagagaaagu

SEQ ID NO: 3004477 - RNA, 23 nt, Human
gggccacagagaaaguacuucuc

SEQ ID NO: 3004478 - RNA, 19 nt, Human
gggccaccgccuugcccag

SEQ ID NO: 3004479 - RNA, 17 nt, Human
gggcccagagagggugg

SEQ ID NO: 3004480 - RNA, 14 nt, Human
gggccuggccugag

SEQ ID NO: 3004481 - RNA, 18 nt, Human
gggccuggccugagcugg

SEQ ID NO: 3004482 - RNA, 17 nt, Human
gggccuggcucaggugg

SEQ ID NO: 3004483 - RNA, 13 nt, Human
gggccuggcuccc

SEQ ID NO: 3004484 - RNA, 13 nt, Human
gggcccugccucc

SEQ ID NO: 3004485 - RNA, 13 nt, Human
gggccuggccuga

SEQ ID NO: 3004486 - RNA, 12 nt, Human
gggccuggccug

SEQ ID NO: 3004487 - RNA, 17 nt, Human
ggcuuagugauguaauu

SEQ ID NO: 3004488 - RNA, 21 nt, Human
ggcuuagucacugagacagcc

SEQ ID NO: 3004489 - RNA, 16 nt, Human
ggcuuagacccucaug

SEQ ID NO: 3004490 - RNA, 21 nt, Human
ggcuuaauuauugauguuuuc

SEQ ID NO: 3004491 - RNA, 17 nt, Human
ggcugggcuucaguggc

SEQ ID NO: 3004492 - RNA, 13 nt, Human
ggcugggcuucag

SEQ ID NO: 3004493 - RNA, 15 nt, Human
ggcuuaaaacaacac

SEQ ID NO: 3004494 - RNA, 12 nt, Human
ggcugggcuuca

SEQ ID NO: 3004495 - RNA, 17 nt, Human
ggcugggcucccuuccc

SEQ ID NO: 3004496 - RNA, 19 nt, Human
ggcuuggggaccagagcug

SEQ ID NO: 3004497 - RNA, 21 nt, Human
ggcuuggggaccagagcugcc

SEQ ID NO: 3004498 - RNA, 22 nt, Human
ggcuugaguuuaaauuguaaua

SEQ ID NO: 3004499 - RNA, 10 nt, Human
ggcuuuugug

SEQ ID NO: 3004500 - RNA, 14 nt, Human
gggaauugaggaca

SEQ ID NO: 3004501 - RNA, 12 nt, Human
gggaccucaggc

SEQ ID NO: 3004502 - RNA, 13 nt, Human
gggaccucaggcc

SEQ ID NO: 3004503 - RNA, 15 nt, Human
gggaccucaggccug

SEQ ID NO: 3004504 - RNA, 16 nt, Human
gggacucaaugcacug

SEQ ID NO: 3004505 - RNA, 17 nt, Human
gggacuacaggcaccca

SEQ ID NO: 3004506 - RNA, 23 nt, Human
gggaaggauacaaaagcauguga

SEQ ID NO: 3004507 - RNA, 21 nt, Human
gggaaggauacaaaagcaugu

SEQ ID NO: 3004508 - RNA, 14 nt, Human
ggcuuuugugcauu

SEQ ID NO: 3004509 - RNA, 16 nt, Human
gggaaggauacaaaag

SEQ ID NO: 3004510 - RNA, 14 nt, Human
gggaagggggcugg

SEQ ID NO: 3004511 - RNA, 16 nt, Human
gggaagggggcuggga

SEQ ID NO: 3004512 - RNA, 17 nt, Human
gggaagggggcugggac

SEQ ID NO: 3004513 - RNA, 13 nt, Human
gggaaugaagaua

SEQ ID NO: 3004514 - RNA, 23 nt, Human
ggcugcaaaggguaucaggugcu

SEQ ID NO: 3004515 - RNA, 22 nt, Human
ggcugcaaaggguaucaggugc

SEQ ID NO: 3004516 - RNA, 18 nt, Human
ggcugcaaaggguaucag

SEQ ID NO: 3004517 - RNA, 18 nt, Human
ggcugcaccggcuggccu

SEQ ID NO: 3004518 - RNA, 19 nt, Human
ggcugcaccggcuggccug

SEQ ID NO: 3004519 - RNA, 17 nt, Human
ggcugcaccggcuggcc

SEQ ID NO: 3004520 - RNA, 24 nt, Human
ggcugcaaaggguaucaggugcug

SEQ ID NO: 3004521 - RNA, 17 nt, Human
ggccccugcccggcugc

SEQ ID NO: 3004522 - RNA, 16 nt, Human
ggccccugcccggcug

SEQ ID NO: 3004523 - RNA, 17 nt, Human
ggcucugccucccauca

SEQ ID NO: 3004524 - RNA, 20 nt, Human
ggccccugcccggcugcgga

SEQ ID NO: 3004525 - RNA, 13 nt, Human
ggcugagguggga

SEQ ID NO: 3004526 - RNA, 15 nt, Human
ggcugaggugggagg

SEQ ID NO: 3004527 - RNA, 13 nt, Human
ggcugggcagagg

SEQ ID NO: 3004528 - RNA, 14 nt, Human
ggcugggcagagga

SEQ ID NO: 3004529 - RNA, 20 nt, Human
ggcugggagagccuuccagg

SEQ ID NO: 3004530 - RNA, 23 nt, Human
ggcugggagagccuuccaggggu

SEQ ID NO: 3004531 - RNA, 15 nt, Human
ggcugggcagaggaa

SEQ ID NO: 3004532 - RNA, 19 nt, Human
ggcugggcagaggaaagca

SEQ ID NO: 3004533 - RNA, 18 nt, Human
ggcugggagagccuucca

SEQ ID NO: 3004534 - RNA, 19 nt, Human
ggcugggagagccuuccag

SEQ ID NO: 3004535 - RNA, 23 nt, Human
ggcugcuucaaggauccugagcc

SEQ ID NO: 3004536 - RNA, 21 nt, Human
ggcugcuucaaggauccugag

SEQ ID NO: 3004537 - RNA, 13 nt, Human
ggcugcugaaggc

SEQ ID NO: 3004538 - RNA, 18 nt, Human
ggcugcugaaggcucgag

SEQ ID NO: 3004539 - RNA, 15 nt, Human
ggcugcugaaggcuc

SEQ ID NO: 3004540 - RNA, 17 nt, Human
ggcugcugaaggcucga

SEQ ID NO: 3004541 - RNA, 14 nt, Human
ggcugcugaaggcu

SEQ ID NO: 3004542 - RNA, 13 nt, Human
ggcugcagggagu

SEQ ID NO: 3004543 - RNA, 12 nt, Human
ggcugcagggag

SEQ ID NO: 3004544 - RNA, 11 nt, Human
ggcugcuucaa

SEQ ID NO: 3004545 - RNA, 12 nt, Human
ggcugcuucaag

SEQ ID NO: 3004546 - RNA, 14 nt, Human
ggcugcuucaagga

SEQ ID NO: 3004547 - RNA, 22 nt, Human
ggcugcuucaaggauccugagc

SEQ ID NO: 3004548 - RNA, 23 nt, Human
ggagcccugucuccucucucugu

SEQ ID NO: 3004549 - RNA, 20 nt, Human
ggagcaaaaucgaugcagug

SEQ ID NO: 3004550 - RNA, 15 nt, Human
ggagaggggcacagg

SEQ ID NO: 3004551 - RNA, 20 nt, Human
ggagauuuacaacuggggga

SEQ ID NO: 3004552 - RNA, 17 nt, Human
ggagagcuagcagcagg

SEQ ID NO: 3004553 - RNA, 21 nt, Human
ggagagcuagcagcagggagg

SEQ ID NO: 3004554 - RNA, 21 nt, Human
ggagaccccuuggggagcagg

SEQ ID NO: 3004555 - RNA, 23 nt, Human
ggaccccacuccggcccuccaga

SEQ ID NO: 3004556 - RNA, 20 nt, Human
ggaagccagcaggcucucag

SEQ ID NO: 3004557 - RNA, 19 nt, Human
ggaggacgcucucuggccu

SEQ ID NO: 3004558 - RNA, 21 nt, Human
ggaggacgcucucuggccuuc

SEQ ID NO: 3004559 - RNA, 20 nt, Human
ggaggacgcucucuggccuu

SEQ ID NO: 3004560 - RNA, 19 nt, Human
ggaggacuccaggcagcag

SEQ ID NO: 3004561 - RNA, 15 nt, Human
ggaggauguucuggg

SEQ ID NO: 3004562 - RNA, 23 nt, Human
ggaggaucacuugaguccagaag

SEQ ID NO: 3004563 - RNA, 17 nt, Human
ggaggaucucuugagcc

SEQ ID NO: 3004564 - RNA, 21 nt, Human
ggaggaucucuugagccuggg

SEQ ID NO: 3004565 - RNA, 12 nt, Human
ggagggcuccag

SEQ ID NO: 3004566 - RNA, 13 nt, Human
ggagggcuccaga

SEQ ID NO: 3004567 - RNA, 12 nt, Human
ggagggagggcu

SEQ ID NO: 3004568 - RNA, 21 nt, Human
ggagugacagaggcagcccca

SEQ ID NO: 3004569 - RNA, 19 nt, Human
ggagugacagaggcagccc

SEQ ID NO: 3004570 - RNA, 18 nt, Human
ggagugacagaggcagcc

SEQ ID NO: 3004571 - RNA, 17 nt, Human
ggagugacagaggcagc

SEQ ID NO: 3004572 - RNA, 21 nt, Human
ggagugaguugauagcacaga

SEQ ID NO: 3004573 - RNA, 14 nt, Human
ggagugagcugguu

SEQ ID NO: 3004574 - RNA, 12 nt, Human
ggagugagcugg

SEQ ID NO: 3004575 - RNA, 16 nt, Human
ggaucacagccucuga

SEQ ID NO: 3004576 - RNA, 16 nt, Human
ggagugacagaggcag

SEQ ID NO: 3004577 - RNA, 11 nt, Human
ggagugacaga

SEQ ID NO: 3004578 - RNA, 20 nt, Human
ggagucccaccuuggcugca

SEQ ID NO: 3004579 - RNA, 17 nt, Human
ggagggcuccagacaca

SEQ ID NO: 3004580 - RNA, 14 nt, Human
ggagggcuccagac

SEQ ID NO: 3004581 - RNA, 15 nt, Human
ggagggcuccagaca

SEQ ID NO: 3004582 - RNA, 18 nt, Human
ggcagcucaccucucccu

SEQ ID NO: 3004583 - RNA, 21 nt, Human
ggcagcucaccucucccuugg

SEQ ID NO: 3004584 - RNA, 22 nt, Human
ggcagcucaccucucccuugga

SEQ ID NO: 3004585 - RNA, 16 nt, Human
ggcagcucaccucucc

SEQ ID NO: 3004586 - RNA, 16 nt, Human
ggcagcugccuccccu

SEQ ID NO: 3004587 - RNA, 16 nt, Human
ggcagcagacacaugc

SEQ ID NO: 3004588 - RNA, 22 nt, Human
ggcagcugccuccccuccucug

SEQ ID NO: 3004589 - RNA, 21 nt, Human
ggcagcuugaggguugggcug

SEQ ID NO: 3004590 - RNA, 21 nt, Human
ggcagcugccuccccuccucu

SEQ ID NO: 3004591 - RNA, 18 nt, Human
ggcagcugccuccccucc

SEQ ID NO: 3004592 - RNA, 19 nt, Human
ggcagcugcgguccaccca

SEQ ID NO: 3004593 - RNA, 13 nt, Human
ggcagguccaggg

SEQ ID NO: 3004594 - RNA, 23 nt, Human
ggcaggucuugaacuccuggccu

SEQ ID NO: 3004595 - RNA, 23 nt, Human
ggcagaguugaagacagagcuac

SEQ ID NO: 3004596 - RNA, 23 nt, Human
ggcagauacaggaaaagcugcug

SEQ ID NO: 3004597 - RNA, 17 nt, Human
ggcagaggaaagcaaag

SEQ ID NO: 3004598 - RNA, 14 nt, Human
ggcagcagacacau

SEQ ID NO: 3004599 - RNA, 18 nt, Human
ggcaacugcauuggcuuu

SEQ ID NO: 3004600 - RNA, 19 nt, Human
ggcaacugcauuggcuuug

SEQ ID NO: 3004601 - RNA, 15 nt, Human
ggcaaggcugucaau

SEQ ID NO: 3004602 - RNA, 19 nt, Human
ggcaacccccagccugcua

SEQ ID NO: 3004603 - RNA, 21 nt, Human
ggaucagucugauucccaagc

SEQ ID NO: 3004604 - RNA, 20 nt, Human
ggcagagcagagaccauccc

SEQ ID NO: 3004605 - RNA, 15 nt, Human
ggcagagcagagacc

SEQ ID NO: 3004606 - RNA, 16 nt, Human
ggcagagcagagacca

SEQ ID NO: 3004607 - RNA, 12 nt, Human
ggcagagcagag

SEQ ID NO: 3004608 - RNA, 16 nt, Human
ggcacccggccccugc

SEQ ID NO: 3004609 - RNA, 15 nt, Human
ggcacccggccccug

SEQ ID NO: 3004610 - RNA, 16 nt, Human
ggcaaggcugucaauu

SEQ ID NO: 3004611 - RNA, 22 nt, Human
ggccaugggacagggaggacgc

SEQ ID NO: 3004612 - RNA, 13 nt, Human
ggccaugggccuc

SEQ ID NO: 3004613 - RNA, 12 nt, Human
ggccccugccac

SEQ ID NO: 3004614 - RNA, 16 nt, Human
ggccccugccacccug

SEQ ID NO: 3004615 - RNA, 13 nt, Human
ggccccugccacc

SEQ ID NO: 3004616 - RNA, 13 nt, Human
ggccccugcccgg

SEQ ID NO: 3004617 - RNA, 18 nt, Human
ggccccugccacccuggg

SEQ ID NO: 3004618 - RNA, 17 nt, Human
ggccccugccacccugg

SEQ ID NO: 3004619 - RNA, 16 nt, Human
ggccccucaggguccc

SEQ ID NO: 3004620 - RNA, 19 nt, Human
ggccccucagggucccugg

SEQ ID NO: 3004621 - RNA, 20 nt, Human
ggccccucagggucccuggu

SEQ ID NO: 3004622 - RNA, 21 nt, Human
ggccccucagggucccuggug

SEQ ID NO: 3004623 - RNA, 15 nt, Human
ggcauuccccaggag

SEQ ID NO: 3004624 - RNA, 16 nt, Human
ggccacaagacccuug

SEQ ID NO: 3004625 - RNA, 17 nt, Human
ggccacaagacccuugu

SEQ ID NO: 3004626 - RNA, 16 nt, Human
ggccaccugcggugcu

SEQ ID NO: 3004627 - RNA, 22 nt, Human
ggccaccugcggugcuaucucc

SEQ ID NO: 3004628 - RNA, 23 nt, Human
ggcauguucucugaggacacuaa

SEQ ID NO: 3004629 - RNA, 19 nt, Human
ggcagugcucacccacacc

SEQ ID NO: 3004630 - RNA, 15 nt, Human
ggcagguuggugggg

SEQ ID NO: 3004631 - RNA, 16 nt, Human
ggccaggccagaggga

SEQ ID NO: 3004632 - RNA, 14 nt, Human
ggccaggccagagg

SEQ ID NO: 3004633 - RNA, 11 nt, Human
ggccaggcugg

SEQ ID NO: 3004634 - RNA, 16 nt, Human
ggccacugugaagaga

SEQ ID NO: 3004635 - RNA, 14 nt, Human
ggccaggagccucc

SEQ ID NO: 3004636 - RNA, 16 nt, Human
ggccaggagccuccug

SEQ ID NO: 3004637 - RNA, 11 nt, Human
ggccacuguga

SEQ ID NO: 3004638 - RNA, 14 nt, Human
gcuuggcccaggag

SEQ ID NO: 3004639 - RNA, 15 nt, Human
gcuuggcccaggagu

SEQ ID NO: 3004640 - RNA, 16 nt, Human
gcuuggcccaggaguu

SEQ ID NO: 3004641 - RNA, 22 nt, Human
gcuuggcccaggaguuuggcca

SEQ ID NO: 3004642 - RNA, 13 nt, Human
gcuuggcccagga

SEQ ID NO: 3004643 - RNA, 23 nt, Human
gcuuggcccaggaguuuggccag

SEQ ID NO: 3004644 - RNA, 22 nt, Human
gcuuuaccaauugaaguaaaau

SEQ ID NO: 3004645 - RNA, 14 nt, Human
gcuuuuacuuaaac

SEQ ID NO: 3004646 - RNA, 20 nt, Human
ggaaaaaauaacaaugaaag

SEQ ID NO: 3004647 - RNA, 17 nt, Human
gcuuuuaaaaaaaaaua

SEQ ID NO: 3004648 - RNA, 15 nt, Human
ggaaaaauagccugc

SEQ ID NO: 3004649 - RNA, 14 nt, Human
ggaaaaacugauuu

SEQ ID NO: 3004650 - RNA, 13 nt, Human
ggaaaaauagccu

SEQ ID NO: 3004651 - RNA, 15 nt, Human
gcuguucacagccag

SEQ ID NO: 3004652 - RNA, 16 nt, Human
gcuguucacagccaga

SEQ ID NO: 3004653 - RNA, 18 nt, Human
gcuuccagugaggcucug

SEQ ID NO: 3004654 - RNA, 23 nt, Human
gcuguucacagccagacuggcac

SEQ ID NO: 3004655 - RNA, 19 nt, Human
gcuuccagugaggcucugc

SEQ ID NO: 3004656 - RNA, 20 nt, Human
gcuuccagugaggcucugcc

SEQ ID NO: 3004657 - RNA, 21 nt, Human
gcuuccagugaggcucugccc

SEQ ID NO: 3004658 - RNA, 13 nt, Human
gcuuggaggaagg

SEQ ID NO: 3004659 - RNA, 14 nt, Human
gcuuggaggaagga

SEQ ID NO: 3004660 - RNA, 15 nt, Human
gcuuggaggaaggaa

SEQ ID NO: 3004661 - RNA, 19 nt, Human
gcuugcccuggugccucac

SEQ ID NO: 3004662 - RNA, 17 nt, Human
gcuugcccuggugccuc

SEQ ID NO: 3004663 - RNA, 21 nt, Human
gcuugccaucccucccuccac

SEQ ID NO: 3004664 - RNA, 18 nt, Human
gcuugccaucccucccuc

SEQ ID NO: 3004665 - RNA, 16 nt, Human
gcuugccaucccuccc

SEQ ID NO: 3004666 - RNA, 22 nt, Human
gcuugaggguugggcugguguc

SEQ ID NO: 3004667 - RNA, 10 nt, Human
ggaaaagaau

SEQ ID NO: 3004668 - RNA, 14 nt, Human
ggaaaauaaauuau

SEQ ID NO: 3004669 - RNA, 15 nt, Human
ggaaaaucagccugc

SEQ ID NO: 3004670 - RNA, 18 nt, Human
ggaaauauuuauuuuaau

SEQ ID NO: 3004671 - RNA, 17 nt, Human
ggaaauauuuauuuuaa

SEQ ID NO: 3004672 - RNA, 17 nt, Human
ggaacagacuggaagca

SEQ ID NO: 3004673 - RNA, 15 nt, Human
ggaaauauuuauuuu

SEQ ID NO: 3004674 - RNA, 13 nt, Human
ggaaauauuuauu

SEQ ID NO: 3004675 - RNA, 12 nt, Human
ggaaauauuuau

SEQ ID NO: 3004676 - RNA, 20 nt, Human
ggaacagacuggaagcacag

SEQ ID NO: 3004677 - RNA, 19 nt, Human
ggaacagacuggaagcaca

SEQ ID NO: 3004678 - RNA, 23 nt, Human
ggaaccgagggggcugcucccac

SEQ ID NO: 3004679 - RNA, 13 nt, Human
ggaagcacaugcc

SEQ ID NO: 3004680 - RNA, 14 nt, Human
ggaagcacaugccu

SEQ ID NO: 3004681 - RNA, 15 nt, Human
ggaagcacaugccuc

SEQ ID NO: 3004682 - RNA, 17 nt, Human
ggaagcacaugccucuc

SEQ ID NO: 3004683 - RNA, 17 nt, Human
ggaagcacagcuucauu

SEQ ID NO: 3004684 - RNA, 13 nt, Human
ggaagagccuugc

SEQ ID NO: 3004685 - RNA, 21 nt, Human
ggaagcacaugccucucucag

SEQ ID NO: 3004686 - RNA, 22 nt, Human
ggaagcacaugccucucucagg

SEQ ID NO: 3004687 - RNA, 23 nt, Human
ggaagcacaugccucucucaggc

SEQ ID NO: 3004688 - RNA, 15 nt, Human
ggaagccagcaggcu

SEQ ID NO: 3004689 - RNA, 16 nt, Human
ggaagccagcaggcuc

SEQ ID NO: 3004690 - RNA, 17 nt, Human
ggaagccagcaggcucu

SEQ ID NO: 3004691 - RNA, 18 nt, Human
ggaagccagcaggcucuc

SEQ ID NO: 3004692 - RNA, 13 nt, Human
ggaagccagcagg

SEQ ID NO: 3004693 - RNA, 14 nt, Human
ggaagccagcaggc

SEQ ID NO: 3004694 - RNA, 18 nt, Human
gcuagauguauguacuuc

SEQ ID NO: 3004695 - RNA, 16 nt, Human
gcuagauguauguacu

SEQ ID NO: 3004696 - RNA, 11 nt, Human
gcugcccugug

SEQ ID NO: 3004697 - RNA, 12 nt, Human
gcugcccuguga

SEQ ID NO: 3004698 - RNA, 14 nt, Human
gcugcccugugagu

SEQ ID NO: 3004699 - RNA, 16 nt, Human
gcugcgguccacccag

SEQ ID NO: 3004700 - RNA, 13 nt, Human
gcugcuucaagga

SEQ ID NO: 3004701 - RNA, 10 nt, Human
gcugcuccca

SEQ ID NO: 3004702 - RNA, 18 nt, Human
gcugcgguccacccagga

SEQ ID NO: 3004703 - RNA, 17 nt, Human
gcugcgguccacccagg

SEQ ID NO: 3004704 - RNA, 16 nt, Human
gcugcuugggcuucau

SEQ ID NO: 3004705 - RNA, 21 nt, Human
gcugcuucaaggauccugagc

SEQ ID NO: 3004706 - RNA, 22 nt, Human
gcugcuucaaggauccugagcc

SEQ ID NO: 3004707 - RNA, 23 nt, Human
gcugcuucaaggauccugagcca

SEQ ID NO: 3004708 - RNA, 22 nt, Human
gcuggaccuugaacuggguacu

SEQ ID NO: 3004709 - RNA, 21 nt, Human
gcuggaccuugaacuggguac

SEQ ID NO: 3004710 - RNA, 17 nt, Human
gcugcuugggcuucauc

SEQ ID NO: 3004711 - RNA, 22 nt, Human
gcugcuugggcuucauccuccu

SEQ ID NO: 3004712 - RNA, 18 nt, Human
gcuggaccuugaacuggg

SEQ ID NO: 3004713 - RNA, 16 nt, Human
gcuggaccuugaacug

SEQ ID NO: 3004714 - RNA, 20 nt, Human
gcugggacaugggaaagggg

SEQ ID NO: 3004715 - RNA, 20 nt, Human
gcugggacuacaggcaccca

SEQ ID NO: 3004716 - RNA, 19 nt, Human
gcugggacuacaggcaccc

SEQ ID NO: 3004717 - RNA, 18 nt, Human
gcugggacuacaggcacc

SEQ ID NO: 3004718 - RNA, 13 nt, Human
gcugggacuacag

SEQ ID NO: 3004719 - RNA, 19 nt, Human
gcugggacuacagguguga

SEQ ID NO: 3004720 - RNA, 19 nt, Human
gcugggcuucaguggcagc

SEQ ID NO: 3004721 - RNA, 18 nt, Human
gcugggcuucaguggcag

SEQ ID NO: 3004722 - RNA, 23 nt, Human
gcugggggaagaagcucucuccu

SEQ ID NO: 3004723 - RNA, 12 nt, Human
gcuggggccagu

SEQ ID NO: 3004724 - RNA, 19 nt, Human
gcuggucccacucagucca

SEQ ID NO: 3004725 - RNA, 15 nt, Human
gcuggucccacucag

SEQ ID NO: 3004726 - RNA, 20 nt, Human
gcugggggccucagugccac

SEQ ID NO: 3004727 - RNA, 19 nt, Human
gcugggggccucagugcca

SEQ ID NO: 3004728 - RNA, 12 nt, Human
gcugggagagcc

SEQ ID NO: 3004729 - RNA, 13 nt, Human
gcugggagagccu

SEQ ID NO: 3004730 - RNA, 17 nt, Human
gcugggagagccuucca

SEQ ID NO: 3004731 - RNA, 18 nt, Human
gcugggagagccuuccag

SEQ ID NO: 3004732 - RNA, 19 nt, Human
gcugggagagccuuccagg

SEQ ID NO: 3004733 - RNA, 22 nt, Human
gcugggagagccuuccaggggu

SEQ ID NO: 3004734 - RNA, 21 nt, Human
gcugggaugauuggagggggg

SEQ ID NO: 3004735 - RNA, 17 nt, Human
gcugggcuucaguggca

SEQ ID NO: 3004736 - RNA, 22 nt, Human
gcuguauuuuaaaagaaugauu

SEQ ID NO: 3004737 - RNA, 22 nt, Human
gcugguucaggguuggccccug

SEQ ID NO: 3004738 - RNA, 16 nt, Human
gcugucaauuacagga

SEQ ID NO: 3004739 - RNA, 21 nt, Human
gcugguuagagguucccuuug

SEQ ID NO: 3004740 - RNA, 15 nt, Human
gcugguucaggguug

SEQ ID NO: 3004741 - RNA, 14 nt, Human
gcuggucccacuca

SEQ ID NO: 3004742 - RNA, 20 nt, Human
gcuggucccacucaguccau

SEQ ID NO: 3004743 - RNA, 18 nt, Human
gcuggugucaccugaaga

SEQ ID NO: 3004744 - RNA, 16 nt, Human
gcuggugucaccugaa

SEQ ID NO: 3004745 - RNA, 17 nt, Human
gcugucaauuacaggaa

SEQ ID NO: 3004746 - RNA, 19 nt, Human
gcugucaauuacaggaagu

SEQ ID NO: 3004747 - RNA, 22 nt, Human
gcugucaauuacaggaaguacu

SEQ ID NO: 3004748 - RNA, 23 nt, Human
gcugucaauuacaggaaguacug

SEQ ID NO: 3004749 - RNA, 21 nt, Human
gcugucccuuacgugaguccu

SEQ ID NO: 3004750 - RNA, 19 nt, Human
gcugucccuuacgugaguc

SEQ ID NO: 3004751 - RNA, 17 nt, Human
gcugucuccauguuuga

SEQ ID NO: 3004752 - RNA, 19 nt, Human
gccuuuuuauaacuuuuua

SEQ ID NO: 3004753 - RNA, 22 nt, Human
gcgacagugagacucugucuca

SEQ ID NO: 3004754 - RNA, 19 nt, Human
gccuucggccuccauccug

SEQ ID NO: 3004755 - RNA, 20 nt, Human
gccuuccccuggcacuggca

SEQ ID NO: 3004756 - RNA, 18 nt, Human
gccuucggccuccauccu

SEQ ID NO: 3004757 - RNA, 19 nt, Human
gccuuccccuggcacuggc

SEQ ID NO: 3004758 - RNA, 21 nt, Human
gccuuccaggggugggacacc

SEQ ID NO: 3004759 - RNA, 18 nt, Human
gccuguaaucacagcuac

SEQ ID NO: 3004760 - RNA, 17 nt, Human
gccugguggcagcugcg

SEQ ID NO: 3004761 - RNA, 16 nt, Human
gccugguggcagcugc

SEQ ID NO: 3004762 - RNA, 17 nt, Human
gccugucagcuaaagaa

SEQ ID NO: 3004763 - RNA, 15 nt, Human
gccugguggcagcug

SEQ ID NO: 3004764 - RNA, 14 nt, Human
gccugguggcagcu

SEQ ID NO: 3004765 - RNA, 20 nt, Human
gccuuagaagucacacagua

SEQ ID NO: 3004766 - RNA, 19 nt, Human
gccuuacccucauguucuu

SEQ ID NO: 3004767 - RNA, 21 nt, Human
gccuuauggaacacucugaga

SEQ ID NO: 3004768 - RNA, 22 nt, Human
gccuuauggaacacucugagac

SEQ ID NO: 3004769 - RNA, 23 nt, Human
gccuuauggaacacucugagacu

SEQ ID NO: 3004770 - RNA, 22 nt, Human
gcguccugucggagcccugucu

SEQ ID NO: 3004771 - RNA, 14 nt, Human
gcgugagccacugc

SEQ ID NO: 3004772 - RNA, 15 nt, Human
gcgugagccacugca

SEQ ID NO: 3004773 - RNA, 17 nt, Human
gcuaacauggaaguacu

SEQ ID NO: 3004774 - RNA, 18 nt, Human
gcuaacauggaaguacua

SEQ ID NO: 3004775 - RNA, 14 nt, Human
gcuaacauggaagu

SEQ ID NO: 3004776 - RNA, 14 nt, Human
gcuaacuuggguua

SEQ ID NO: 3004777 - RNA, 22 nt, Human
gcuacacaggggaaaagaggag

SEQ ID NO: 3004778 - RNA, 21 nt, Human
gcuagacgagcaggcuucuuc

SEQ ID NO: 3004779 - RNA, 22 nt, Human
gcuagacgagcaggcuucuucc

SEQ ID NO: 3004780 - RNA, 19 nt, Human
gcguccugucggagcccug

SEQ ID NO: 3004781 - RNA, 23 nt, Human
gcgguccacccaggagccccgag

SEQ ID NO: 3004782 - RNA, 20 nt, Human
gcgguccacccaggagcccc

SEQ ID NO: 3004783 - RNA, 23 nt, Human
gcggggacagcuccuucuguccu

SEQ ID NO: 3004784 - RNA, 23 nt, Human
gcggacagccacggccaggccag

SEQ ID NO: 3004785 - RNA, 19 nt, Human
gcggggacagcuccuucug

SEQ ID NO: 3004786 - RNA, 18 nt, Human
gcggggacagcuccuucu

SEQ ID NO: 3004787 - RNA, 19 nt, Human
gcggacagccacggccagg

SEQ ID NO: 3004788 - RNA, 16 nt, Human
gcggacagccacggcc

SEQ ID NO: 3004789 - RNA, 19 nt, Human
gcggaaugaaccacaucuu

SEQ ID NO: 3004790 - RNA, 18 nt, Human
gcgccuacaggagugagc

SEQ ID NO: 3004791 - RNA, 23 nt, Human
gcgccacugugcuccagccuggg

SEQ ID NO: 3004792 - RNA, 22 nt, Human
gcgccacugugcuccagccugg

SEQ ID NO: 3004793 - RNA, 21 nt, Human
gcgccuacaggagugagcacu

SEQ ID NO: 3004794 - RNA, 20 nt, Human
gcgccuacaggagugagcac

SEQ ID NO: 3004795 - RNA, 14 nt, Human
gcgcugccccuggc

SEQ ID NO: 3004796 - RNA, 17 nt, Human
gcgcugccccuggcagc

SEQ ID NO: 3004797 - RNA, 14 nt, Human
gccuccccuccucu

SEQ ID NO: 3004798 - RNA, 13 nt, Human
gccuccccuccuc

SEQ ID NO: 3004799 - RNA, 12 nt, Human
gccuccccuccu

SEQ ID NO: 3004800 - RNA, 11 nt, Human
gccuccccucc

SEQ ID NO: 3004801 - RNA, 19 nt, Human
gccucccgaauagcuggga

SEQ ID NO: 3004802 - RNA, 18 nt, Human
gccucccgaauagcuggg

SEQ ID NO: 3004803 - RNA, 23 nt, Human
gccucccgaguagcugggacuac

SEQ ID NO: 3004804 - RNA, 21 nt, Human
gccucccgaguagcugggacu

SEQ ID NO: 3004805 - RNA, 20 nt, Human
gccucccgaauagcugggac

SEQ ID NO: 3004806 - RNA, 14 nt, Human
gccucagccuccca

SEQ ID NO: 3004807 - RNA, 12 nt, Human
gccucagccucc

SEQ ID NO: 3004808 - RNA, 17 nt, Human
gccucccaucacccgcu

SEQ ID NO: 3004809 - RNA, 22 nt, Human
gccucagccucccaaagugcug

SEQ ID NO: 3004810 - RNA, 15 nt, Human
gccucucccaucacu

SEQ ID NO: 3004811 - RNA, 21 nt, Human
gccucugcacuccccugcugg

SEQ ID NO: 3004812 - RNA, 15 nt, Human
gccucugcacucccc

SEQ ID NO: 3004813 - RNA, 13 nt, Human
gccugagaugguc

SEQ ID NO: 3004814 - RNA, 17 nt, Human
gccucugcacuccccug

SEQ ID NO: 3004815 - RNA, 18 nt, Human
gccucugcacuccccugc

SEQ ID NO: 3004816 - RNA, 19 nt, Human
gccucugcacuccccugcu

SEQ ID NO: 3004817 - RNA, 20 nt, Human
gccucugcacuccccugcug

SEQ ID NO: 3004818 - RNA, 16 nt, Human
gccucugcacuccccu

SEQ ID NO: 3004819 - RNA, 15 nt, Human
gccucugacacacag

SEQ ID NO: 3004820 - RNA, 14 nt, Human
gccuggacccugug

SEQ ID NO: 3004821 - RNA, 12 nt, Human
gccugcccaggc

SEQ ID NO: 3004822 - RNA, 11 nt, Human
gccugcccagg

SEQ ID NO: 3004823 - RNA, 13 nt, Human
gcccuucucucca

SEQ ID NO: 3004824 - RNA, 23 nt, Human
gcccuucucuccagccccuggau

SEQ ID NO: 3004825 - RNA, 19 nt, Human
gcccuucuuuccacagaag

SEQ ID NO: 3004826 - RNA, 16 nt, Human
gccgagauagccaagg

SEQ ID NO: 3004827 - RNA, 16 nt, Human
gccgcagcccugcaga

SEQ ID NO: 3004828 - RNA, 17 nt, Human
gccgcagcccugcagag

SEQ ID NO: 3004829 - RNA, 15 nt, Human
gccgcagcccugcag

SEQ ID NO: 3004830 - RNA, 17 nt, Human
gccgagauagccaaggc

SEQ ID NO: 3004831 - RNA, 13 nt, Human
gccgcagcccugc

SEQ ID NO: 3004832 - RNA, 18 nt, Human
gccgucuaccugaggggc

SEQ ID NO: 3004833 - RNA, 20 nt, Human
gccgucuaccugaggggccu

SEQ ID NO: 3004834 - RNA, 22 nt, Human
gccgucuaccugaggggccucu

SEQ ID NO: 3004835 - RNA, 23 nt, Human
gccgucuaccugaggggccucuu

SEQ ID NO: 3004836 - RNA, 21 nt, Human
gccucagcauccuggcacccg

SEQ ID NO: 3004837 - RNA, 17 nt, Human
gccucagcauccuggca

SEQ ID NO: 3004838 - RNA, 18 nt, Human
gccucagcauccuggcac

SEQ ID NO: 3004839 - RNA, 24 nt, Human
gccucaagugauucuccugccuca

SEQ ID NO: 3004840 - RNA, 22 nt, Human
gccucaagugauucuccugccu

SEQ ID NO: 3004841 - RNA, 21 nt, Human
gcccucuccugggcagcugcc

SEQ ID NO: 3004842 - RNA, 19 nt, Human
gcccucuccugggcagcug

SEQ ID NO: 3004843 - RNA, 18 nt, Human
gcccucuccugggcagcu

SEQ ID NO: 3004844 - RNA, 22 nt, Human
gcccucugcccacucccugcaa

SEQ ID NO: 3004845 - RNA, 16 nt, Human
gcccucuccugggcag

SEQ ID NO: 3004846 - RNA, 15 nt, Human
gcccucuccugggca

SEQ ID NO: 3004847 - RNA, 14 nt, Human
gcccucuccugggc

SEQ ID NO: 3004848 - RNA, 19 nt, Human
gcccgggcucugccuccca

SEQ ID NO: 3004849 - RNA, 20 nt, Human
gcccgggcucugccucccau

SEQ ID NO: 3004850 - RNA, 21 nt, Human
gcccgggcucugccucccauc

SEQ ID NO: 3004851 - RNA, 13 nt, Human
gcccgggcucugc

SEQ ID NO: 3004852 - RNA, 14 nt, Human
gcccgggcucugcc

SEQ ID NO: 3004853 - RNA, 15 nt, Human
gcccgggcucugccu

SEQ ID NO: 3004854 - RNA, 18 nt, Human
gcccgggcucugccuccc

SEQ ID NO: 3004855 - RNA, 12 nt, Human
gcccgggcucug

SEQ ID NO: 3004856 - RNA, 15 nt, Human
gcccggcuccaggcu

SEQ ID NO: 3004857 - RNA, 14 nt, Human
gcccggcuccaggc

SEQ ID NO: 3004858 - RNA, 13 nt, Human
gcccggcuccagg

SEQ ID NO: 3004859 - RNA, 12 nt, Human
gcccggcuccag

SEQ ID NO: 3004860 - RNA, 19 nt, Human
gccccuucugacccaugcu

SEQ ID NO: 3004861 - RNA, 23 nt, Human
gccccuggcagccccuguucugg

SEQ ID NO: 3004862 - RNA, 19 nt, Human
gccccugcacuccagccug

SEQ ID NO: 3004863 - RNA, 22 nt, Human
gccccugcacagcaggcugcca

SEQ ID NO: 3004864 - RNA, 17 nt, Human
gccccugcacagcaggc

SEQ ID NO: 3004865 - RNA, 14 nt, Human
gccccugcacagca

SEQ ID NO: 3004866 - RNA, 23 nt, Human
gccccugcacagcaggcugccag

SEQ ID NO: 3004867 - RNA, 19 nt, Human
gccccucagggucccuggu

SEQ ID NO: 3004868 - RNA, 21 nt, Human
gccccucagggucccuggugg

SEQ ID NO: 3004869 - RNA, 17 nt, Human
gccccgugggguuccuc

SEQ ID NO: 3004870 - RNA, 23 nt, Human
gccccauucugccugcccaggcc

SEQ ID NO: 3004871 - RNA, 22 nt, Human
gccccauucugccugcccaggc

SEQ ID NO: 3004872 - RNA, 23 nt, Human
gccccgaggccuucucugaagga

SEQ ID NO: 3004873 - RNA, 15 nt, Human
gccccauucugccug

SEQ ID NO: 3004874 - RNA, 14 nt, Human
gccccgcccaggcu

SEQ ID NO: 3004875 - RNA, 22 nt, Human
gccccgaggccuucucugaagg

SEQ ID NO: 3004876 - RNA, 15 nt, Human
gcccaggcuggcgug

SEQ ID NO: 3004877 - RNA, 14 nt, Human
gcccaggcuggcgu

SEQ ID NO: 3004878 - RNA, 16 nt, Human
gcccaggcuggcgugc

SEQ ID NO: 3004879 - RNA, 20 nt, Human
gcccagucuggaaugcagug

SEQ ID NO: 3004880 - RNA, 22 nt, Human
gcccagucuggaaugcaguggu

SEQ ID NO: 3004881 - RNA, 12 nt, Human
gcccaggaaagg

SEQ ID NO: 3004882 - RNA, 15 nt, Human
gcccaggaaaggcuc

SEQ ID NO: 3004883 - RNA, 16 nt, Human
gcccaggaaaggcucc

SEQ ID NO: 3004884 - RNA, 18 nt, Human
gcccaggccuccuacagc

SEQ ID NO: 3004885 - RNA, 11 nt, Human
gcccaggcugg

SEQ ID NO: 3004886 - RNA, 17 nt, Human
gccccagugcccacagg

SEQ ID NO: 3004887 - RNA, 16 nt, Human
gccccagugcccacag

SEQ ID NO: 3004888 - RNA, 15 nt, Human
gccccagugcccaca

SEQ ID NO: 3004889 - RNA, 21 nt, Human
gccccauucugccugcccagg

SEQ ID NO: 3004890 - RNA, 20 nt, Human
gccccauucugccugcccag

SEQ ID NO: 3004891 - RNA, 18 nt, Human
gccccauucugccugccc

SEQ ID NO: 3004892 - RNA, 17 nt, Human
gccccauucugccugcc

SEQ ID NO: 3004893 - RNA, 23 nt, Human
gccccauccucuguacagagccc

SEQ ID NO: 3004894 - RNA, 15 nt, Human
gccccaucugcgggg

SEQ ID NO: 3004895 - RNA, 14 nt, Human
gccagcugcuuggg

SEQ ID NO: 3004896 - RNA, 15 nt, Human
gccagcugcuugggc

SEQ ID NO: 3004897 - RNA, 14 nt, Human
gccagccuugacca

SEQ ID NO: 3004898 - RNA, 20 nt, Human
gccagccuugaccauucucc

SEQ ID NO: 3004899 - RNA, 21 nt, Human
gccagccuugaccauucucca

SEQ ID NO: 3004900 - RNA, 22 nt, Human
gccagccuugaccauucuccac

SEQ ID NO: 3004901 - RNA, 21 nt, Human
gccagccgagauagccaaggc

SEQ ID NO: 3004902 - RNA, 20 nt, Human
gccagccgagauagccaagg

SEQ ID NO: 3004903 - RNA, 12 nt, Human
gccagccuugac

SEQ ID NO: 3004904 - RNA, 16 nt, Human
gccagauucuuuccug

SEQ ID NO: 3004905 - RNA, 20 nt, Human
gccagagggagugacagagg

SEQ ID NO: 3004906 - RNA, 19 nt, Human
gccagagggagugacagag

SEQ ID NO: 3004907 - RNA, 17 nt, Human
gccagauucuuuccuga

SEQ ID NO: 3004908 - RNA, 22 nt, Human
gccacguucuuacuaguuuccc

SEQ ID NO: 3004909 - RNA, 16 nt, Human
gccacggccaggccag

SEQ ID NO: 3004910 - RNA, 21 nt, Human
gccacuauuguuagucucuug

SEQ ID NO: 3004911 - RNA, 20 nt, Human
gccacuauuguuagucucuu

SEQ ID NO: 3004912 - RNA, 15 nt, Human
gccacggccaggcca

SEQ ID NO: 3004913 - RNA, 14 nt, Human
gccacggccaggcc

SEQ ID NO: 3004914 - RNA, 12 nt, Human
gccaaaggaagc

SEQ ID NO: 3004915 - RNA, 18 nt, Human
gccacugcaccgggccac

SEQ ID NO: 3004916 - RNA, 17 nt, Human
gccacugcaccgggcca

SEQ ID NO: 3004917 - RNA, 18 nt, Human
gccagagggagugacaga

SEQ ID NO: 3004918 - RNA, 17 nt, Human
gccagagggagugacag

SEQ ID NO: 3004919 - RNA, 12 nt, Human
gccagagacaca

SEQ ID NO: 3004920 - RNA, 15 nt, Human
gccagagacacaagc

SEQ ID NO: 3004921 - RNA, 13 nt, Human
gccaucccagccc

SEQ ID NO: 3004922 - RNA, 14 nt, Human
gccaucccagcccc

SEQ ID NO: 3004923 - RNA, 15 nt, Human
gccaucccagcccca

SEQ ID NO: 3004924 - RNA, 16 nt, Human
gccaucccagccccaa

SEQ ID NO: 3004925 - RNA, 14 nt, Human
gccaucccucccuc

SEQ ID NO: 3004926 - RNA, 13 nt, Human
gccaucccucccu

SEQ ID NO: 3004927 - RNA, 11 nt, Human
gccaucccucc

SEQ ID NO: 3004928 - RNA, 17 nt, Human
gccaucccagccccaau

SEQ ID NO: 3004929 - RNA, 14 nt, Human
gccauccagguuca

SEQ ID NO: 3004930 - RNA, 20 nt, Human
gccauccagguucagcuugu

SEQ ID NO: 3004931 - RNA, 19 nt, Human
gccauccagguucagcuug

SEQ ID NO: 3004932 - RNA, 17 nt, Human
gccaggaagccagcagg

SEQ ID NO: 3004933 - RNA, 18 nt, Human
gccaggaagccagcaggc

SEQ ID NO: 3004934 - RNA, 11 nt, Human
gccaggaagcc

SEQ ID NO: 3004935 - RNA, 19 nt, Human
gccaggaagccagcaggcu

SEQ ID NO: 3004936 - RNA, 21 nt, Human
gccaggggaaaaucagccugc

SEQ ID NO: 3004937 - RNA, 22 nt, Human
gccaggggaaaaucagccugcu

SEQ ID NO: 3004938 - RNA, 17 nt, Human
gccaggggaaaaucagc

SEQ ID NO: 3004939 - RNA, 23 nt, Human
gccaggggaaaaucagccugcuc

SEQ ID NO: 3004940 - RNA, 16 nt, Human
gcccacagcuguauga

SEQ ID NO: 3004941 - RNA, 15 nt, Human
gcccaaagaugcagc

SEQ ID NO: 3004942 - RNA, 16 nt, Human
gcccaaagaugcagcc

SEQ ID NO: 3004943 - RNA, 18 nt, Human
gcccacaggaucagucug

SEQ ID NO: 3004944 - RNA, 13 nt, Human
gcccacaggauca

SEQ ID NO: 3004945 - RNA, 19 nt, Human
gcccacaggaucagucuga

SEQ ID NO: 3004946 - RNA, 15 nt, Human
gcccaccccucaaca

SEQ ID NO: 3004947 - RNA, 19 nt, Human
gccaugggacagggaggac

SEQ ID NO: 3004948 - RNA, 14 nt, Human
gccaugggacaggg

SEQ ID NO: 3004949 - RNA, 15 nt, Human
gccaucccucccucc

SEQ ID NO: 3004950 - RNA, 20 nt, Human
gccauuucuuccacaagagc

SEQ ID NO: 3004951 - RNA, 22 nt, Human
gccauuucuuccacaagagccc

SEQ ID NO: 3004952 - RNA, 20 nt, Human
gccauuugucccaagugcca

SEQ ID NO: 3004953 - RNA, 18 nt, Human
gccauuugucccaagugc

SEQ ID NO: 3004954 - RNA, 16 nt, Human
gccauuugucccaagu

SEQ ID NO: 3004955 - RNA, 14 nt, Human
gccauuugucccaa

SEQ ID NO: 3004956 - RNA, 13 nt, Human
gccauuuguccca

SEQ ID NO: 3004957 - RNA, 17 nt, Human
gccauuucuuccacaag

SEQ ID NO: 3004958 - RNA, 22 nt, Human
gccauuuaaagcuuauuaaaac

SEQ ID NO: 3004959 - RNA, 16 nt, Human
gcagugcuuggcccag

SEQ ID NO: 3004960 - RNA, 17 nt, Human
gcagugcuuggcccagg

SEQ ID NO: 3004961 - RNA, 16 nt, Human
gcagugggagcugccu

SEQ ID NO: 3004962 - RNA, 23 nt, Human
gcagugcuuccaaggauggacca

SEQ ID NO: 3004963 - RNA, 14 nt, Human
gcagugcucaccca

SEQ ID NO: 3004964 - RNA, 15 nt, Human
gcaggcuacugucag

SEQ ID NO: 3004965 - RNA, 20 nt, Human
gcaggauucuuccucccucc

SEQ ID NO: 3004966 - RNA, 12 nt, Human
gcagggcucagc

SEQ ID NO: 3004967 - RNA, 16 nt, Human
gcagggagggcuucug

SEQ ID NO: 3004968 - RNA, 22 nt, Human
gcauauugcauacuauuaaaca

SEQ ID NO: 3004969 - RNA, 21 nt, Human
gcaucaagaugugacauguuu

SEQ ID NO: 3004970 - RNA, 17 nt, Human
gcauauucaggaagcuc

SEQ ID NO: 3004971 - RNA, 18 nt, Human
gcauauucaggaagcuca

SEQ ID NO: 3004972 - RNA, 20 nt, Human
gcauauucaggaagcucagg

SEQ ID NO: 3004973 - RNA, 15 nt, Human
gcauauucaggaagc

SEQ ID NO: 3004974 - RNA, 13 nt, Human
gcaguucugaaga

SEQ ID NO: 3004975 - RNA, 18 nt, Human
gcauagauucccugagca

SEQ ID NO: 3004976 - RNA, 18 nt, Human
gcagugggagcugccugu

SEQ ID NO: 3004977 - RNA, 17 nt, Human
gcagugggagcugccug

SEQ ID NO: 3004978 - RNA, 13 nt, Human
gcaucaggccagg

SEQ ID NO: 3004979 - RNA, 15 nt, Human
gcaucaggccaggcc

SEQ ID NO: 3004980 - RNA, 16 nt, Human
gcaucaggccaggccc

SEQ ID NO: 3004981 - RNA, 17 nt, Human
gcaucaggccaggcccu

SEQ ID NO: 3004982 - RNA, 23 nt, Human
gcaugaaguaauaugcacacauu

SEQ ID NO: 3004983 - RNA, 17 nt, Human
gcaugccuggauggggc

SEQ ID NO: 3004984 - RNA, 22 nt, Human
gcaugccuggauggggcugcac

SEQ ID NO: 3004985 - RNA, 15 nt, Human
gcaugcugucccuua

SEQ ID NO: 3004986 - RNA, 15 nt, Human
gcaugccuggauggg

SEQ ID NO: 3004987 - RNA, 17 nt, Human
gcauguuugugauugac

SEQ ID NO: 3004988 - RNA, 17 nt, Human
gcauuugcugaauacag

SEQ ID NO: 3004989 - RNA, 21 nt, Human
gcauuuggugguuucagaaau

SEQ ID NO: 3004990 - RNA, 23 nt, Human
gcauuugcugaauacagaggcaa

SEQ ID NO: 3004991 - RNA, 23 nt, Human
gcauuuuaaacaaaauagaaagu

SEQ ID NO: 3004992 - RNA, 12 nt, Human
gcauuccccacu

SEQ ID NO: 3004993 - RNA, 22 nt, Human
gcauuuugcuaaaugugaauga

SEQ ID NO: 3004994 - RNA, 16 nt, Human
gccaaaggaagcacau

SEQ ID NO: 3004995 - RNA, 20 nt, Human
gccaaaggaagcacaugccu

SEQ ID NO: 3004996 - RNA, 14 nt, Human
gccaaaggaagcac

SEQ ID NO: 3004997 - RNA, 16 nt, Human
gccaaagaagcagacc

SEQ ID NO: 3004998 - RNA, 21 nt, Human
gccaaacucaccugccccuca

SEQ ID NO: 3004999 - RNA, 19 nt, Human
gccaaacucaccugccccu

SEQ ID NO: 3005000 - RNA, 22 nt, Human
gcagaguggcagucuucaguuu

SEQ ID NO: 3005001 - RNA, 13 nt, Human
gcagaguggcagu

SEQ ID NO: 3005002 - RNA, 15 nt, Human
gcagaguugaagaca

SEQ ID NO: 3005003 - RNA, 14 nt, Human
gcagagaccauccc

SEQ ID NO: 3005004 - RNA, 15 nt, Human
gcagagaccaucccu

SEQ ID NO: 3005005 - RNA, 17 nt, Human
gcagagaccaucccuga

SEQ ID NO: 3005006 - RNA, 23 nt, Human
gcagagaaugaaagggcccagag

SEQ ID NO: 3005007 - RNA, 22 nt, Human
gcagagaaugaaagggcccaga

SEQ ID NO: 3005008 - RNA, 21 nt, Human
gcagagaauucucuuauccaa

SEQ ID NO: 3005009 - RNA, 21 nt, Human
gcagagaaugaaagggcccag

SEQ ID NO: 3005010 - RNA, 20 nt, Human
gcagagaaugaaagggccca

SEQ ID NO: 3005011 - RNA, 19 nt, Human
gcagagaaugaaagggccc

SEQ ID NO: 3005012 - RNA, 16 nt, Human
gcagaguugaagacag

SEQ ID NO: 3005013 - RNA, 17 nt, Human
gcagaguugaagacaga

SEQ ID NO: 3005014 - RNA, 19 nt, Human
gcagaguugaagacagagc

SEQ ID NO: 3005015 - RNA, 12 nt, Human
gcagcaauaaag

SEQ ID NO: 3005016 - RNA, 14 nt, Human
gcagccuggacccu

SEQ ID NO: 3005017 - RNA, 22 nt, Human
gcagccucaaccuccugggcua

SEQ ID NO: 3005018 - RNA, 21 nt, Human
gcagccucaaccuccugggcu

SEQ ID NO: 3005019 - RNA, 20 nt, Human
gcagccucaaccuccugggc

SEQ ID NO: 3005020 - RNA, 19 nt, Human
gcagccucaaccuccuggg

SEQ ID NO: 3005021 - RNA, 20 nt, Human
gcagcagggagggcuucugc

SEQ ID NO: 3005022 - RNA, 14 nt, Human
gcagaagacaguau

SEQ ID NO: 3005023 - RNA, 13 nt, Human
gcagaaggaagac

SEQ ID NO: 3005024 - RNA, 14 nt, Human
gcagaaggaagacu

SEQ ID NO: 3005025 - RNA, 12 nt, Human
gcagaaggaaga

SEQ ID NO: 3005026 - RNA, 15 nt, Human
gcacugucaagauga

SEQ ID NO: 3005027 - RNA, 22 nt, Human
gcacugggcuuggggaccagag

SEQ ID NO: 3005028 - RNA, 23 nt, Human
gcacugggcuuggggaccagagc

SEQ ID NO: 3005029 - RNA, 14 nt, Human
gcacugggcuuggg

SEQ ID NO: 3005030 - RNA, 18 nt, Human
gcacuaaggugugcucug

SEQ ID NO: 3005031 - RNA, 17 nt, Human
gcacuaaggugugcucu

SEQ ID NO: 3005032 - RNA, 13 nt, Human
gcaaugaccuuuc

SEQ ID NO: 3005033 - RNA, 14 nt, Human
gcaaugaccuuuca

SEQ ID NO: 3005034 - RNA, 20 nt, Human
gcacagccucuuagaugcag

SEQ ID NO: 3005035 - RNA, 18 nt, Human
gcacagccucuuagaugc

SEQ ID NO: 3005036 - RNA, 19 nt, Human
gcacagcuaacauggaagu

SEQ ID NO: 3005037 - RNA, 22 nt, Human
gcacaugccucucucaggccaa

SEQ ID NO: 3005038 - RNA, 16 nt, Human
gcacagcuucauuucc

SEQ ID NO: 3005039 - RNA, 19 nt, Human
gcaccacugcacuccagcc

SEQ ID NO: 3005040 - RNA, 15 nt, Human
gcaccuccugccucg

SEQ ID NO: 3005041 - RNA, 14 nt, Human
gcaccuccugccuc

SEQ ID NO: 3005042 - RNA, 17 nt, Human
gcacccggccccugcug

SEQ ID NO: 3005043 - RNA, 15 nt, Human
gcacccggccccugc

SEQ ID NO: 3005044 - RNA, 23 nt, Human
gcacccauuaugcgcuguggcca

SEQ ID NO: 3005045 - RNA, 14 nt, Human
gcacccggccccug

SEQ ID NO: 3005046 - RNA, 15 nt, Human
gcaaacuucagaguu

SEQ ID NO: 3005047 - RNA, 17 nt, Human
gcaaaccaucauugaaa

SEQ ID NO: 3005048 - RNA, 19 nt, Human
gcaaaccaucauugaaauc

SEQ ID NO: 3005049 - RNA, 20 nt, Human
gcaaaccaucauugaaaucu

SEQ ID NO: 3005050 - RNA, 21 nt, Human
gcaaaccaucauugaaaucuu

SEQ ID NO: 3005051 - RNA, 16 nt, Human
gcaaaccaucauugaa

SEQ ID NO: 3005052 - RNA, 18 nt, Human
gcaacugcauuggcuuug

SEQ ID NO: 3005053 - RNA, 21 nt, Human
gcaaauaaguguauuuugaaa

SEQ ID NO: 3005054 - RNA, 23 nt, Human
gcaaauaaguguauuuugaaauu

SEQ ID NO: 3005055 - RNA, 17 nt, Human
gcaaauaaguguauuuu

SEQ ID NO: 3005056 - RNA, 12 nt, Human
gcaagauguggg

SEQ ID NO: 3005057 - RNA, 16 nt, Human
gcaagaugugggcagu

SEQ ID NO: 3005058 - RNA, 16 nt, Human
gcaagcaccuccugcc

SEQ ID NO: 3005059 - RNA, 15 nt, Human
gcaagcaccuccugc

SEQ ID NO: 3005060 - RNA, 20 nt, Human
gcaagcaccuccugccucga

SEQ ID NO: 3005061 - RNA, 18 nt, Human
gcaagcaccuccugccuc

SEQ ID NO: 3005062 - RNA, 14 nt, Human
gcaaggcugucaau

SEQ ID NO: 3005063 - RNA, 18 nt, Human
gcaaggcugucaauuaca

SEQ ID NO: 3005064 - RNA, 14 nt, Human
gcaaggucauuuuu

SEQ ID NO: 3005065 - RNA, 13 nt, Human
gcaaggcugucaa

SEQ ID NO: 3005066 - RNA, 17 nt, Human
gcaauccugcaagaaca

SEQ ID NO: 3005067 - RNA, 19 nt, Human
gcaagguuuaaguuauuaa

SEQ ID NO: 3005068 - RNA, 17 nt, Human
gcaagguuuaaguuauu

SEQ ID NO: 3005069 - RNA, 14 nt, Human
gcaagguuuaaguu

SEQ ID NO: 3005070 - RNA, 22 nt, Human
gcaagguuuaaguuauuaagag

SEQ ID NO: 3005071 - RNA, 20 nt, Human
gauugggcacaucauuucaa

SEQ ID NO: 3005072 - RNA, 20 nt, Human
gauuuaaacacauuaaaggu

SEQ ID NO: 3005073 - RNA, 21 nt, Human
gauuucuguuuagauaauaca

SEQ ID NO: 3005074 - RNA, 22 nt, Human
gauuucuguuuagauaauacac

SEQ ID NO: 3005075 - RNA, 19 nt, Human
gauuuguuaaugauagcua

SEQ ID NO: 3005076 - RNA, 19 nt, Human
gauucuuuccugaggcugg

SEQ ID NO: 3005077 - RNA, 17 nt, Human
gauucccaagcucugcu

SEQ ID NO: 3005078 - RNA, 16 nt, Human
gauucccaagcucugc

SEQ ID NO: 3005079 - RNA, 20 nt, Human
gauucuuuccugaggcuggg

SEQ ID NO: 3005080 - RNA, 22 nt, Human
gauucuuuccugaggcugggcu

SEQ ID NO: 3005081 - RNA, 16 nt, Human
gauugcaacaggcugg

SEQ ID NO: 3005082 - RNA, 18 nt, Human
gauugcaacaggcugggc

SEQ ID NO: 3005083 - RNA, 17 nt, Human
gauugcaacaggcuggg

SEQ ID NO: 3005084 - RNA, 15 nt, Human
gauugcaacaggcug

SEQ ID NO: 3005085 - RNA, 16 nt, Human
gaugcuagaacucccu

SEQ ID NO: 3005086 - RNA, 18 nt, Human
gauguucuagcauggcug

SEQ ID NO: 3005087 - RNA, 22 nt, Human
gauuaaguaaugauaacuggaa

SEQ ID NO: 3005088 - RNA, 14 nt, Human
gauuaaguaaugau

SEQ ID NO: 3005089 - RNA, 13 nt, Human
gauucagacagcu

SEQ ID NO: 3005090 - RNA, 14 nt, Human
gauucagacagcug

SEQ ID NO: 3005091 - RNA, 17 nt, Human
gauucagacagcugccu

SEQ ID NO: 3005092 - RNA, 18 nt, Human
gauucagacagcugccug

SEQ ID NO: 3005093 - RNA, 21 nt, Human
gauuacaagcgugagccacug

SEQ ID NO: 3005094 - RNA, 13 nt, Human
gauuacaagcgug

SEQ ID NO: 3005095 - RNA, 15 nt, Human
gauucccaagcucug

SEQ ID NO: 3005096 - RNA, 22 nt, Human
gaugaaugucaguuguuauuua

SEQ ID NO: 3005097 - RNA, 21 nt, Human
gaugaaaugaggucagagccu

SEQ ID NO: 3005098 - RNA, 15 nt, Human
gaugaaaugagguca

SEQ ID NO: 3005099 - RNA, 19 nt, Human
gaucuucuuuauaauucua

SEQ ID NO: 3005100 - RNA, 22 nt, Human
gaucuucuguggguuucuaaag

SEQ ID NO: 3005101 - RNA, 23 nt, Human
gaugcaccagcccuuagcaggga

SEQ ID NO: 3005102 - RNA, 15 nt, Human
gaugcaccagcccuu

SEQ ID NO: 3005103 - RNA, 14 nt, Human
gaugagaggaaauc

SEQ ID NO: 3005104 - RNA, 14 nt, Human
gaugcaccagcccu

SEQ ID NO: 3005105 - RNA, 23 nt, Human
gaugagaaauaaaguuucuguug

SEQ ID NO: 3005106 - RNA, 18 nt, Human
gaugaccuugaaugaugc

SEQ ID NO: 3005107 - RNA, 20 nt, Human
gaugaccuugaaugaugcca

SEQ ID NO: 3005108 - RNA, 16 nt, Human
gaugccugguggcagc

SEQ ID NO: 3005109 - RNA, 15 nt, Human
gaugccugguggcag

SEQ ID NO: 3005110 - RNA, 14 nt, Human
gaugcagugcuucc

SEQ ID NO: 3005111 - RNA, 14 nt, Human
gaugccugguggca

SEQ ID NO: 3005112 - RNA, 19 nt, Human
gaugcagccucacaguccu

SEQ ID NO: 3005113 - RNA, 12 nt, Human
gauccugagcca

SEQ ID NO: 3005114 - RNA, 13 nt, Human
gauccuggaaauc

SEQ ID NO: 3005115 - RNA, 14 nt, Human
gauccuggaaauca

SEQ ID NO: 3005116 - RNA, 20 nt, Human
gaucuaggaagacuuuggaa

SEQ ID NO: 3005117 - RNA, 14 nt, Human
gaucuaggaagacu

SEQ ID NO: 3005118 - RNA, 18 nt, Human
gaucuaggaagacuuugg

SEQ ID NO: 3005119 - RNA, 13 nt, Human
gaucuaggaagac

SEQ ID NO: 3005120 - RNA, 17 nt, Human
gauccucccaccucagc

SEQ ID NO: 3005121 - RNA, 21 nt, Human
gauccucccaccucagccucc

SEQ ID NO: 3005122 - RNA, 14 nt, Human
gauccuccaggugc

SEQ ID NO: 3005123 - RNA, 16 nt, Human
gauccucccaccucag

SEQ ID NO: 3005124 - RNA, 13 nt, Human
gaucauccacugu

SEQ ID NO: 3005125 - RNA, 20 nt, Human
gaguuauugaagcagagugg

SEQ ID NO: 3005126 - RNA, 19 nt, Human
gaguuauugaagcagagug

SEQ ID NO: 3005127 - RNA, 18 nt, Human
gaguuauugaagcagagu

SEQ ID NO: 3005128 - RNA, 24 nt, Human
gauaauacaccacuacauucuguu

SEQ ID NO: 3005129 - RNA, 23 nt, Human
gauaauacaccacuacauucugu

SEQ ID NO: 3005130 - RNA, 12 nt, Human
gauaauacacca

SEQ ID NO: 3005131 - RNA, 13 nt, Human
gauaaacaguagu

SEQ ID NO: 3005132 - RNA, 23 nt, Human
gaucagcuuauugucuagugaaa

SEQ ID NO: 3005133 - RNA, 20 nt, Human
gaucacggcucacugcagcc

SEQ ID NO: 3005134 - RNA, 23 nt, Human
gaucacggcucacugcagccuca

SEQ ID NO: 3005135 - RNA, 14 nt, Human
gaucacagccucug

SEQ ID NO: 3005136 - RNA, 21 nt, Human
gauauagcuaggugacauaua

SEQ ID NO: 3005137 - RNA, 18 nt, Human
gauauaugcucugcaugu

SEQ ID NO: 3005138 - RNA, 20 nt, Human
gauagugucccacggugccu

SEQ ID NO: 3005139 - RNA, 16 nt, Human
gauacaaaagcaugug

SEQ ID NO: 3005140 - RNA, 14 nt, Human
gaacaucacagcuu

SEQ ID NO: 3005141 - RNA, 15 nt, Human
gaacauaaaauacaa

SEQ ID NO: 3005142 - RNA, 20 nt, Human
gaacagugauuaccagggac

SEQ ID NO: 3005143 - RNA, 16 nt, Human
gaacagugauuaccag

SEQ ID NO: 3005144 - RNA, 15 nt, Human
gaacacucugagacu

SEQ ID NO: 3005145 - RNA, 16 nt, Human
gaaauuguauuacaaa

SEQ ID NO: 3005146 - RNA, 17 nt, Human
gaaaauagaauugacau

SEQ ID NO: 3005147 - RNA, 13 nt, Human
gaacacucugaga

SEQ ID NO: 3005148 - RNA, 14 nt, Human
gaacacucugagac

SEQ ID NO: 3005149 - RNA, 19 nt, Human
gaaccuuuugagugccuua

SEQ ID NO: 3005150 - RNA, 21 nt, Human
gaaccuuuugagugccuuaca

SEQ ID NO: 3005151 - RNA, 18 nt, Human
gaaccuuuugagugccuu

SEQ ID NO: 3005152 - RNA, 21 nt, Human
gaacauuuggguuacuauuuc

SEQ ID NO: 3005153 - RNA, 16 nt, Human
gaacauuucauggugu

SEQ ID NO: 3005154 - RNA, 22 nt, Human
gaaccuuuugagugccuuacac

SEQ ID NO: 3005155 - RNA, 20 nt, Human
gaagauucuauguuaauauu

SEQ ID NO: 3005156 - RNA, 23 nt, Human
gaagauucuauguuaauauuuua

SEQ ID NO: 3005157 - RNA, 17 nt, Human
gaagauucuauguuaau

SEQ ID NO: 3005158 - RNA, 17 nt, Human
gaagcauuuacuuugug

SEQ ID NO: 3005159 - RNA, 18 nt, Human
gaagauguagaggagaaa

SEQ ID NO: 3005160 - RNA, 17 nt, Human
gaagauguagaggagaa

SEQ ID NO: 3005161 - RNA, 15 nt, Human
gaagauacugaaaua

SEQ ID NO: 3005162 - RNA, 20 nt, Human
gaagauaauauuaaggaaga

SEQ ID NO: 3005163 - RNA, 20 nt, Human
gaagagguuuuaaagcuucc

SEQ ID NO: 3005164 - RNA, 20 nt, Human
gaagccagcaggcucucagg

SEQ ID NO: 3005165 - RNA, 19 nt, Human
gaagccagcaggcucucag

SEQ ID NO: 3005166 - RNA, 21 nt, Human
gaagccagcaggcucucaggc

SEQ ID NO: 3005167 - RNA, 22 nt, Human
gaagccagcaggcucucaggcc

SEQ ID NO: 3005168 - RNA, 13 nt, Human
gaagcccaggaaa

SEQ ID NO: 3005169 - RNA, 15 nt, Human
gaagcccaggaaagg

SEQ ID NO: 3005170 - RNA, 16 nt, Human
gaagcccaggaaaggc

SEQ ID NO: 3005171 - RNA, 19 nt, Human
gaagcccaggaaaggcucc

SEQ ID NO: 3005172 - RNA, 23 nt, Human
gaagcccuucuaccuuccugcaa

SEQ ID NO: 3005173 - RNA, 23 nt, Human
gaagcccaggaaaggcuccagga

SEQ ID NO: 3005174 - RNA, 14 nt, Human
gaagacuuuggaaa

SEQ ID NO: 3005175 - RNA, 17 nt, Human
gaagacuuuggaaagag

SEQ ID NO: 3005176 - RNA, 20 nt, Human
gaagacuuuucuuucagcca

SEQ ID NO: 3005177 - RNA, 19 nt, Human
gaagagaaugcacaaacag

SEQ ID NO: 3005178 - RNA, 19 nt, Human
gaagacugcauuauauuua

SEQ ID NO: 3005179 - RNA, 12 nt, Human
gaagaacugaaa

SEQ ID NO: 3005180 - RNA, 11 nt, Human
gaagacuuugg

SEQ ID NO: 3005181 - RNA, 13 nt, Human
gaagacuuuggaa

SEQ ID NO: 3005182 - RNA, 17 nt, Human
gaagacugcauuauauu

SEQ ID NO: 3005183 - RNA, 23 nt, Human
gaacuuugaccucugcagcaaua

SEQ ID NO: 3005184 - RNA, 23 nt, Human
gaaggugccucuggaugcuguga

SEQ ID NO: 3005185 - RNA, 16 nt, Human
gaagggggcugggaca

SEQ ID NO: 3005186 - RNA, 19 nt, Human
gaagggggcugggacaugg

SEQ ID NO: 3005187 - RNA, 14 nt, Human
gaagcggcuggcag

SEQ ID NO: 3005188 - RNA, 15 nt, Human
gaagggggcugggac

SEQ ID NO: 3005189 - RNA, 22 nt, Human
gaaguaauaugcacacauuuuu

SEQ ID NO: 3005190 - RNA, 21 nt, Human
gaaguaauaugcacacauuuu

SEQ ID NO: 3005191 - RNA, 15 nt, Human
gaaguacuggagaaa

SEQ ID NO: 3005192 - RNA, 18 nt, Human
gaaguacuauaauuuacc

SEQ ID NO: 3005193 - RNA, 16 nt, Human
gaaguauccuucagcc

SEQ ID NO: 3005194 - RNA, 14 nt, Human
gaaguauccuucag

SEQ ID NO: 3005195 - RNA, 21 nt, Human
gaaguuucugccgcagcccug

SEQ ID NO: 3005196 - RNA, 15 nt, Human
gaagucuuagaugua

SEQ ID NO: 3005197 - RNA, 20 nt, Human
gaaguuucugccgcagcccu

SEQ ID NO: 3005198 - RNA, 22 nt, Human
gaaguccaagcauuuagaugua

SEQ ID NO: 3005199 - RNA, 12 nt, Human
gaaguccaagca

SEQ ID NO: 3005200 - RNA, 16 nt, Human
gaauauuuuaacuucc

SEQ ID NO: 3005201 - RNA, 20 nt, Human
gaauacucuuauaucuauau

SEQ ID NO: 3005202 - RNA, 22 nt, Human
gaauagcugggacuacaggugu

SEQ ID NO: 3005203 - RNA, 16 nt, Human
gaauaggcacuuuaaa

SEQ ID NO: 3005204 - RNA, 23 nt, Human
gaauagcugggacuacaggugug

SEQ ID NO: 3005205 - RNA, 15 nt, Human
gaauaccuguccccc

SEQ ID NO: 3005206 - RNA, 13 nt, Human
gaauaccuguccc

SEQ ID NO: 3005207 - RNA, 21 nt, Human
gaauaccccaagacucccaug

SEQ ID NO: 3005208 - RNA, 17 nt, Human
gaauaauacaguaucuc

SEQ ID NO: 3005209 - RNA, 21 nt, Human
gaauacagaggcaacugcauu

SEQ ID NO: 3005210 - RNA, 19 nt, Human
gaauaacauguaauuaagu

SEQ ID NO: 3005211 - RNA, 18 nt, Human
gaauaacauguaauuaag

SEQ ID NO: 3005212 - RNA, 20 nt, Human
gaaguuugagaucagccugg

SEQ ID NO: 3005213 - RNA, 13 nt, Human
gaaguuugaacau

SEQ ID NO: 3005214 - RNA, 17 nt, Human
gaaugucaguuguuauu

SEQ ID NO: 3005215 - RNA, 21 nt, Human
gaaugucaguuguuauuuauu

SEQ ID NO: 3005216 - RNA, 22 nt, Human
gaauucacaaaguaauuuggaa

SEQ ID NO: 3005217 - RNA, 20 nt, Human
gaaugucagugugacugauc

SEQ ID NO: 3005218 - RNA, 21 nt, Human
gaaugucagugugacugaucu

SEQ ID NO: 3005219 - RNA, 17 nt, Human
gaauucucagaaucuca

SEQ ID NO: 3005220 - RNA, 17 nt, Human
gaauucucuaguuugau

SEQ ID NO: 3005221 - RNA, 20 nt, Human
gaauuccuaaaauuauggaa

SEQ ID NO: 3005222 - RNA, 16 nt, Human
gaauuccuaaaauuau

SEQ ID NO: 3005223 - RNA, 14 nt, Human
gaauugaaaaacca

SEQ ID NO: 3005224 - RNA, 19 nt, Human
gaauucucuaguuugauua

SEQ ID NO: 3005225 - RNA, 22 nt, Human
gaauugauugggcacaucauuu

SEQ ID NO: 3005226 - RNA, 22 nt, Human
gaauuguaaggaaugauuaauu

SEQ ID NO: 3005227 - RNA, 22 nt, Human
gaauuuaaauagcuuuuuucuc

SEQ ID NO: 3005228 - RNA, 15 nt, Human
gaauuucccaaagca

SEQ ID NO: 3005229 - RNA, 18 nt, Human
gaaugaaccacaucuugc

SEQ ID NO: 3005230 - RNA, 22 nt, Human
gaaugaaccacaucuugcucug

SEQ ID NO: 3005231 - RNA, 23 nt, Human
gaaugaaccacaucuugcucugc

SEQ ID NO: 3005232 - RNA, 21 nt, Human
gaaugaagauacugaaauaaa

SEQ ID NO: 3005233 - RNA, 18 nt, Human
gaaugaagauacugaaau

SEQ ID NO: 3005234 - RNA, 17 nt, Human
gaaugaagauacugaaa

SEQ ID NO: 3005235 - RNA, 11 nt, Human
gaaugcagugg

SEQ ID NO: 3005236 - RNA, 19 nt, Human
gaaugaagauacugaaaua

SEQ ID NO: 3005237 - RNA, 22 nt, Human
gaaugguuuucaaaauaaaaau

SEQ ID NO: 3005238 - RNA, 14 nt, Human
gaaugucaguguga

SEQ ID NO: 3005239 - RNA, 17 nt, Human
gacuggauaguccgucu

SEQ ID NO: 3005240 - RNA, 16 nt, Human
gacuggauaguccguc

SEQ ID NO: 3005241 - RNA, 14 nt, Human
gacuggcacaguuu

SEQ ID NO: 3005242 - RNA, 18 nt, Human
gacuggcacaguuuucug

SEQ ID NO: 3005243 - RNA, 22 nt, Human
gacuggcacaguuuucugagaa

SEQ ID NO: 3005244 - RNA, 22 nt, Human
gacuggauaguccgucucugcu

SEQ ID NO: 3005245 - RNA, 23 nt, Human
gacuggccaagguuuggggaaga

SEQ ID NO: 3005246 - RNA, 23 nt, Human
gacuuaaugagacuuuaaaagca

SEQ ID NO: 3005247 - RNA, 12 nt, Human
gacuucaucccu

SEQ ID NO: 3005248 - RNA, 20 nt, Human
gacuucaucccucuggggcu

SEQ ID NO: 3005249 - RNA, 12 nt, Human
gacuuacuguac

SEQ ID NO: 3005250 - RNA, 16 nt, Human
gacuuacuguacauga

SEQ ID NO: 3005251 - RNA, 15 nt, Human
gacuuacuguacaug

SEQ ID NO: 3005252 - RNA, 23 nt, Human
gacuuacuguacaugaaaacaca

SEQ ID NO: 3005253 - RNA, 18 nt, Human
gacuuacuguacaugaaa

SEQ ID NO: 3005254 - RNA, 24 nt, Human
gacugcauuauauuuauuacugua

SEQ ID NO: 3005255 - RNA, 16 nt, Human
gacugaggggagggga

SEQ ID NO: 3005256 - RNA, 16 nt, Human
gacugagggggccugg

SEQ ID NO: 3005257 - RNA, 15 nt, Human
gacugagggggccug

SEQ ID NO: 3005258 - RNA, 18 nt, Human
gacugaguacguugugca

SEQ ID NO: 3005259 - RNA, 18 nt, Human
gacugagggggccuggau

SEQ ID NO: 3005260 - RNA, 17 nt, Human
gacugagggggccugga

SEQ ID NO: 3005261 - RNA, 19 nt, Human
gacugagggggccuggaug

SEQ ID NO: 3005262 - RNA, 18 nt, Human
gacuccugcaggcagcca

SEQ ID NO: 3005263 - RNA, 19 nt, Human
gacuccugcaggcagccag

SEQ ID NO: 3005264 - RNA, 20 nt, Human
gacuccugcaggcagccagg

SEQ ID NO: 3005265 - RNA, 21 nt, Human
gacuccugcaggcagccaggc

SEQ ID NO: 3005266 - RNA, 15 nt, Human
gacuacaggcaccca

SEQ ID NO: 3005267 - RNA, 13 nt, Human
gacuacaggcacc

SEQ ID NO: 3005268 - RNA, 18 nt, Human
gacuacaggcacccacca

SEQ ID NO: 3005269 - RNA, 16 nt, Human
gacugaauuucuuuug

SEQ ID NO: 3005270 - RNA, 21 nt, Human
gacucuacagaggccaugggc

SEQ ID NO: 3005271 - RNA, 15 nt, Human
gacucuacagaggcc

SEQ ID NO: 3005272 - RNA, 16 nt, Human
gacuaacuugucuuug

SEQ ID NO: 3005273 - RNA, 23 nt, Human
gacuaacuugucuuuggacccug

SEQ ID NO: 3005274 - RNA, 11 nt, Human
gacguguuaug

SEQ ID NO: 3005275 - RNA, 14 nt, Human
gacguguuaugacu

SEQ ID NO: 3005276 - RNA, 15 nt, Human
gacguguuaugacuc

SEQ ID NO: 3005277 - RNA, 22 nt, Human
gaccuuuaagagaaaugagcug

SEQ ID NO: 3005278 - RNA, 11 nt, Human
gaccuuucaau

SEQ ID NO: 3005279 - RNA, 19 nt, Human
gaccuuucaauaggaaaaa

SEQ ID NO: 3005280 - RNA, 20 nt, Human
gaccuuucaauaggaaaaac

SEQ ID NO: 3005281 - RNA, 22 nt, Human
gacgcugugcugcccugcccac

SEQ ID NO: 3005282 - RNA, 21 nt, Human
gacgcugugcugcccugccca

SEQ ID NO: 3005283 - RNA, 13 nt, Human
gacggagucccac

SEQ ID NO: 3005284 - RNA, 23 nt, Human
gacggagucccaccuuggcugca

SEQ ID NO: 3005285 - RNA, 20 nt, Human
gaccuucuccuucaccuuug

SEQ ID NO: 3005286 - RNA, 21 nt, Human
gaccuucuccuucaccuuugu

SEQ ID NO: 3005287 - RNA, 14 nt, Human
gaccuugaacuggg

SEQ ID NO: 3005288 - RNA, 15 nt, Human
gaccuucuccuucac

SEQ ID NO: 3005289 - RNA, 16 nt, Human
gaccuucuccuucacc

SEQ ID NO: 3005290 - RNA, 14 nt, Human
gaccuucuccuuca
